United States Patent Application Publication US 2012/0157512 A1 - sequence listing, part 6

SEQ ID NO: 163344 - DNA, 23 bp, Artificial sequence
  SiRNA target sequence
gatttactaagtttatcaagtca

SEQ ID NO: 163345 - DNA, 23 bp, Artificial sequence
  SiRNA target sequence
atttactaagtttatcaagtcat

SEQ ID NO: 163346 - DNA, 23 bp, Artificial sequence
  SiRNA target sequence
tttactaagtttatcaagtcata

SEQ ID NO: 163347 - DNA, 23 bp, Artificial sequence
  SiRNA target sequence
ttactaagtttatcaagtcataa

SEQ ID NO: 163348 - DNA, 23 bp, Artificial sequence
  SiRNA target sequence
tactaagtttatcaagtcataaa

SEQ ID NO: 163349 - DNA, 23 bp, Artificial sequence
  SiRNA target sequence
actaagtttatcaagtcataaaa

SEQ ID NO: 163350 - DNA, 23 bp, Artificial sequence
  SiRNA target sequence
ctaagtttatcaagtcataaaat

SEQ ID NO: 163351 - DNA, 23 bp, Artificial sequence
  SiRNA target sequence
taagtttatcaagtcataaaatt

SEQ ID NO: 163352 - DNA, 23 bp, Artificial sequence
  SiRNA target sequence
aagtttatcaagtcataaaattt

SEQ ID NO: 163353 - DNA, 23 bp, Artificial sequence
  SiRNA target sequence
agtttatcaagtcataaaattta

SEQ ID NO: 163354 - DNA, 23 bp, Artificial sequence
  SiRNA target sequence
gtttatcaagtcataaaatttat

SEQ ID NO: 163355 - DNA, 23 bp, Artificial sequence
  SiRNA target sequence
tttatcaagtcataaaatttatg

SEQ ID NO: 163356 - DNA, 23 bp, Artificial sequence
  SiRNA target sequence
ttatcaagtcataaaatttatgg

SEQ ID NO: 163357 - DNA, 23 bp, Artificial sequence
  SiRNA target sequence
tatcaagtcataaaatttatggt

SEQ ID NO: 163358 - DNA, 23 bp, Artificial sequence
  SiRNA target sequence
atcaagtcataaaatttatggtc

SEQ ID NO: 163359 - DNA, 23 bp, Artificial sequence
  SiRNA target sequence
tcaagtcataaaatttatggtcc

SEQ ID NO: 163360 - DNA, 23 bp, Artificial sequence
  SiRNA target sequence
caagtcataaaatttatggtcca

SEQ ID NO: 163361 - DNA, 23 bp, Artificial sequence
  SiRNA target sequence
aagtcataaaatttatggtccaa

SEQ ID NO: 163362 - DNA, 23 bp, Artificial sequence
  SiRNA target sequence
agtcataaaatttatggtccaaa

SEQ ID NO: 163363 - DNA, 23 bp, Artificial sequence
  SiRNA target sequence
gtcataaaatttatggtccaaaa

SEQ ID NO: 163364 - DNA, 23 bp, Artificial sequence
  SiRNA target sequence
tcataaaatttatggtccaaaag

SEQ ID NO: 163365 - DNA, 23 bp, Artificial sequence
  SiRNA target sequence
cataaaatttatggtccaaaagg

SEQ ID NO: 163366 - DNA, 23 bp, Artificial sequence
  SiRNA target sequence
ataaaatttatggtccaaaaggt

SEQ ID NO: 163367 - DNA, 23 bp, Artificial sequence
  SiRNA target sequence
taaaatttatggtccaaaaggtg

SEQ ID NO: 163368 - DNA, 23 bp, Artificial sequence
  SiRNA target sequence
aaaatttatggtccaaaaggtgt

SEQ ID NO: 163369 - DNA, 23 bp, Artificial sequence
  SiRNA target sequence
aaatttatggtccaaaaggtgtt

SEQ ID NO: 163370 - DNA, 23 bp, Artificial sequence
  SiRNA target sequence
aatttatggtccaaaaggtgttg

SEQ ID NO: 163371 - DNA, 23 bp, Artificial sequence
  SiRNA target sequence
atttatggtccaaaaggtgttgg

SEQ ID NO: 163372 - DNA, 23 bp, Artificial sequence
  SiRNA target sequence
tttatggtccaaaaggtgttggt

SEQ ID NO: 163373 - DNA, 23 bp, Artificial sequence
  SiRNA target sequence
ttatggtccaaaaggtgttggtg

SEQ ID NO: 163374 - DNA, 23 bp, Artificial sequence
  SiRNA target sequence
tatggtccaaaaggtgttggtgc

SEQ ID NO: 163375 - DNA, 23 bp, Artificial sequence
  SiRNA target sequence
atggtccaaaaggtgttggtgcc

SEQ ID NO: 163376 - DNA, 23 bp, Artificial sequence
  SiRNA target sequence
tggtccaaaaggtgttggtgcct

SEQ ID NO: 163377 - DNA, 23 bp, Artificial sequence
  SiRNA target sequence
ggtccaaaaggtgttggtgcctt

SEQ ID NO: 163378 - DNA, 23 bp, Artificial sequence
  SiRNA target sequence
gtccaaaaggtgttggtgcctta

SEQ ID NO: 163379 - DNA, 23 bp, Artificial sequence
  SiRNA target sequence
tccaaaaggtgttggtgccttat

SEQ ID NO: 163380 - DNA, 23 bp, Artificial sequence
  SiRNA target sequence
ccaaaaggtgttggtgccttata

SEQ ID NO: 163381 - DNA, 23 bp, Artificial sequence
  SiRNA target sequence
caaaaggtgttggtgccttatac

SEQ ID NO: 163382 - DNA, 23 bp, Artificial sequence
  SiRNA target sequence
aaaaggtgttggtgccttatacg

SEQ ID NO: 163383 - DNA, 23 bp, Artificial sequence
  SiRNA target sequence
aaaggtgttggtgccttatacgt

SEQ ID NO: 163384 - DNA, 23 bp, Artificial sequence
  SiRNA target sequence
aaggtgttggtgccttatacgtc

SEQ ID NO: 163385 - DNA, 23 bp, Artificial sequence
  SiRNA target sequence
aggtgttggtgccttatacgtca

SEQ ID NO: 163386 - DNA, 23 bp, Artificial sequence
  SiRNA target sequence
ggtgttggtgccttatacgtcag

SEQ ID NO: 163387 - DNA, 23 bp, Artificial sequence
  SiRNA target sequence
gtgttggtgccttatacgtcaga

SEQ ID NO: 163388 - DNA, 23 bp, Artificial sequence
  SiRNA target sequence
tgttggtgccttatacgtcagaa

SEQ ID NO: 163389 - DNA, 23 bp, Artificial sequence
  SiRNA target sequence
gttggtgccttatacgtcagaag

SEQ ID NO: 163390 - DNA, 23 bp, Artificial sequence
  SiRNA target sequence
ttggtgccttatacgtcagaaga

SEQ ID NO: 163391 - DNA, 23 bp, Artificial sequence
  SiRNA target sequence
tggtgccttatacgtcagaagaa

SEQ ID NO: 163392 - DNA, 23 bp, Artificial sequence
  SiRNA target sequence
ggtgccttatacgtcagaagaag

SEQ ID NO: 163393 - DNA, 23 bp, Artificial sequence
  SiRNA target sequence
gtgccttatacgtcagaagaagg

SEQ ID NO: 163394 - DNA, 23 bp, Artificial sequence
  SiRNA target sequence
tgccttatacgtcagaagaaggc

SEQ ID NO: 163395 - DNA, 23 bp, Artificial sequence
  SiRNA target sequence
gccttatacgtcagaagaaggcc

SEQ ID NO: 163396 - DNA, 23 bp, Artificial sequence
  SiRNA target sequence
ccttatacgtcagaagaaggcct

SEQ ID NO: 163397 - DNA, 23 bp, Artificial sequence
  SiRNA target sequence
cttatacgtcagaagaaggccta

SEQ ID NO: 163398 - DNA, 23 bp, Artificial sequence
  SiRNA target sequence
ttatacgtcagaagaaggcctag

SEQ ID NO: 163399 - DNA, 23 bp, Artificial sequence
  SiRNA target sequence
tatacgtcagaagaaggcctagg

SEQ ID NO: 163400 - DNA, 23 bp, Artificial sequence
  SiRNA target sequence
atacgtcagaagaaggcctaggg

SEQ ID NO: 163401 - DNA, 23 bp, Artificial sequence
  SiRNA target sequence
tacgtcagaagaaggcctagggt

SEQ ID NO: 163402 - DNA, 23 bp, Artificial sequence
  SiRNA target sequence
acgtcagaagaaggcctagggtg

SEQ ID NO: 163403 - DNA, 23 bp, Artificial sequence
  SiRNA target sequence
cgtcagaagaaggcctagggtga

SEQ ID NO: 163404 - DNA, 23 bp, Artificial sequence
  SiRNA target sequence
gtcagaagaaggcctagggtgag

SEQ ID NO: 163405 - DNA, 23 bp, Artificial sequence
  SiRNA target sequence
tcagaagaaggcctagggtgaga

SEQ ID NO: 163406 - DNA, 23 bp, Artificial sequence
  SiRNA target sequence
cagaagaaggcctagggtgagaa

SEQ ID NO: 163407 - DNA, 23 bp, Artificial sequence
  SiRNA target sequence
agaagaaggcctagggtgagaat

SEQ ID NO: 163408 - DNA, 23 bp, Artificial sequence
  SiRNA target sequence
gaagaaggcctagggtgagaatg

SEQ ID NO: 163409 - DNA, 23 bp, Artificial sequence
  SiRNA target sequence
aagaaggcctagggtgagaatgt

SEQ ID NO: 163410 - DNA, 23 bp, Artificial sequence
  SiRNA target sequence
agaaggcctagggtgagaatgtt

SEQ ID NO: 163411 - DNA, 23 bp, Artificial sequence
  SiRNA target sequence
gaaggcctagggtgagaatgtta

SEQ ID NO: 163412 - DNA, 23 bp, Artificial sequence
  SiRNA target sequence
aaggcctagggtgagaatgttac

SEQ ID NO: 163413 - DNA, 23 bp, Artificial sequence
  SiRNA target sequence
aggcctagggtgagaatgttacc

SEQ ID NO: 163414 - DNA, 23 bp, Artificial sequence
  SiRNA target sequence
ggcctagggtgagaatgttacca

SEQ ID NO: 163415 - DNA, 23 bp, Artificial sequence
  SiRNA target sequence
gcctagggtgagaatgttaccac

SEQ ID NO: 163416 - DNA, 23 bp, Artificial sequence
  SiRNA target sequence
cctagggtgagaatgttaccact

SEQ ID NO: 163417 - DNA, 23 bp, Artificial sequence
  SiRNA target sequence
ctagggtgagaatgttaccactt

SEQ ID NO: 163418 - DNA, 23 bp, Artificial sequence
  SiRNA target sequence
tagggtgagaatgttaccacttt

SEQ ID NO: 163419 - DNA, 23 bp, Artificial sequence
  SiRNA target sequence
agggtgagaatgttaccactttt

SEQ ID NO: 163420 - DNA, 23 bp, Artificial sequence
  SiRNA target sequence
gggtgagaatgttaccacttttt

SEQ ID NO: 163421 - DNA, 23 bp, Artificial sequence
  SiRNA target sequence
ggtgagaatgttaccacttttta

SEQ ID NO: 163422 - DNA, 23 bp, Artificial sequence
  SiRNA target sequence
gtgagaatgttaccactttttaa

SEQ ID NO: 163423 - DNA, 23 bp, Artificial sequence
  SiRNA target sequence
tgagaatgttaccactttttaat

SEQ ID NO: 163424 - DNA, 23 bp, Artificial sequence
  SiRNA target sequence
gagaatgttaccactttttaatg

SEQ ID NO: 163425 - DNA, 23 bp, Artificial sequence
  SiRNA target sequence
agaatgttaccactttttaatgg

SEQ ID NO: 163426 - DNA, 23 bp, Artificial sequence
  SiRNA target sequence
gaatgttaccactttttaatggt

SEQ ID NO: 163427 - DNA, 23 bp, Artificial sequence
  SiRNA target sequence
aatgttaccactttttaatggtg

SEQ ID NO: 163428 - DNA, 23 bp, Artificial sequence
  SiRNA target sequence
atgttaccactttttaatggtgg

SEQ ID NO: 163429 - DNA, 23 bp, Artificial sequence
  SiRNA target sequence
tgttaccactttttaatggtggt

SEQ ID NO: 163430 - DNA, 23 bp, Artificial sequence
  SiRNA target sequence
gttaccactttttaatggtggtg

SEQ ID NO: 163431 - DNA, 23 bp, Artificial sequence
  SiRNA target sequence
ttaccactttttaatggtggtgg

SEQ ID NO: 163432 - DNA, 23 bp, Artificial sequence
  SiRNA target sequence
taccactttttaatggtggtgga

SEQ ID NO: 163433 - DNA, 23 bp, Artificial sequence
  SiRNA target sequence
accactttttaatggtggtggac

SEQ ID NO: 163434 - DNA, 23 bp, Artificial sequence
  SiRNA target sequence
ccactttttaatggtggtggaca

SEQ ID NO: 163435 - DNA, 23 bp, Artificial sequence
  SiRNA target sequence
cactttttaatggtggtggacaa

SEQ ID NO: 163436 - DNA, 23 bp, Artificial sequence
  SiRNA target sequence
actttttaatggtggtggacaag

SEQ ID NO: 163437 - DNA, 23 bp, Artificial sequence
  SiRNA target sequence
ctttttaatggtggtggacaaga

SEQ ID NO: 163438 - DNA, 23 bp, Artificial sequence
  SiRNA target sequence
tttttaatggtggtggacaagaa

SEQ ID NO: 163439 - DNA, 23 bp, Artificial sequence
  SiRNA target sequence
ttttaatggtggtggacaagaaa

SEQ ID NO: 163440 - DNA, 23 bp, Artificial sequence
  SiRNA target sequence
tttaatggtggtggacaagaaag

SEQ ID NO: 163441 - DNA, 23 bp, Artificial sequence
  SiRNA target sequence
ttaatggtggtggacaagaaaga

SEQ ID NO: 163442 - DNA, 23 bp, Artificial sequence
  SiRNA target sequence
taatggtggtggacaagaaagag

SEQ ID NO: 163443 - DNA, 23 bp, Artificial sequence
  SiRNA target sequence
aatggtggtggacaagaaagagg

SEQ ID NO: 163444 - DNA, 23 bp, Artificial sequence
  SiRNA target sequence
atggtggtggacaagaaagagga

SEQ ID NO: 163445 - DNA, 23 bp, Artificial sequence
  SiRNA target sequence
tggtggtggacaagaaagaggat

SEQ ID NO: 163446 - DNA, 23 bp, Artificial sequence
  SiRNA target sequence
ggtggtggacaagaaagaggatt

SEQ ID NO: 163447 - DNA, 23 bp, Artificial sequence
  SiRNA target sequence
gtggtggacaagaaagaggatta

SEQ ID NO: 163448 - DNA, 23 bp, Artificial sequence
  SiRNA target sequence
tggtggacaagaaagaggattaa

SEQ ID NO: 163449 - DNA, 23 bp, Artificial sequence
  SiRNA target sequence
ggtggacaagaaagaggattaag

SEQ ID NO: 163450 - DNA, 23 bp, Artificial sequence
  SiRNA target sequence
gtggacaagaaagaggattaaga

SEQ ID NO: 163451 - DNA, 23 bp, Artificial sequence
  SiRNA target sequence
tggacaagaaagaggattaagaa

SEQ ID NO: 163452 - DNA, 23 bp, Artificial sequence
  SiRNA target sequence
ggacaagaaagaggattaagaag

SEQ ID NO: 163453 - DNA, 23 bp, Artificial sequence
  SiRNA target sequence
gacaagaaagaggattaagaagt

SEQ ID NO: 163454 - DNA, 23 bp, Artificial sequence
  SiRNA target sequence
acaagaaagaggattaagaagtg

SEQ ID NO: 163455 - DNA, 23 bp, Artificial sequence
  SiRNA target sequence
caagaaagaggattaagaagtgg

SEQ ID NO: 163456 - DNA, 23 bp, Artificial sequence
  SiRNA target sequence
aagaaagaggattaagaagtggg

SEQ ID NO: 163457 - DNA, 23 bp, Artificial sequence
  SiRNA target sequence
agaaagaggattaagaagtggga

SEQ ID NO: 163458 - DNA, 23 bp, Artificial sequence
  SiRNA target sequence
gaaagaggattaagaagtgggac

SEQ ID NO: 163459 - DNA, 23 bp, Artificial sequence
  SiRNA target sequence
aaagaggattaagaagtgggaca

SEQ ID NO: 163460 - DNA, 23 bp, Artificial sequence
  SiRNA target sequence
aagaggattaagaagtgggacaa

SEQ ID NO: 163461 - DNA, 23 bp, Artificial sequence
  SiRNA target sequence
agaggattaagaagtgggacaac

SEQ ID NO: 163462 - DNA, 23 bp, Artificial sequence
  SiRNA target sequence
gaggattaagaagtgggacaact

SEQ ID NO: 163463 - DNA, 23 bp, Artificial sequence
  SiRNA target sequence
aggattaagaagtgggacaactt

SEQ ID NO: 163464 - DNA, 23 bp, Artificial sequence
  SiRNA target sequence
ggattaagaagtgggacaacttc

SEQ ID NO: 163465 - DNA, 23 bp, Artificial sequence
  SiRNA target sequence
gattaagaagtgggacaacttct

SEQ ID NO: 163466 - DNA, 23 bp, Artificial sequence
  SiRNA target sequence
attaagaagtgggacaacttctc

SEQ ID NO: 163467 - DNA, 23 bp, Artificial sequence
  SiRNA target sequence
ttaagaagtgggacaacttctcc

SEQ ID NO: 163468 - DNA, 23 bp, Artificial sequence
  SiRNA target sequence
taagaagtgggacaacttctcca

SEQ ID NO: 163469 - DNA, 23 bp, Artificial sequence
  SiRNA target sequence
aagaagtgggacaacttctccac

SEQ ID NO: 163470 - DNA, 23 bp, Artificial sequence
  SiRNA target sequence
agaagtgggacaacttctccacc

SEQ ID NO: 163471 - DNA, 23 bp, Artificial sequence
  SiRNA target sequence
gaagtgggacaacttctccacct

SEQ ID NO: 163472 - DNA, 23 bp, Artificial sequence
  SiRNA target sequence
aagtgggacaacttctccacctt

SEQ ID NO: 163473 - DNA, 23 bp, Artificial sequence
  SiRNA target sequence
agtgggacaacttctccaccttt

SEQ ID NO: 163474 - DNA, 23 bp, Artificial sequence
  SiRNA target sequence
gtgggacaacttctccaccttta

SEQ ID NO: 163475 - DNA, 23 bp, Artificial sequence
  SiRNA target sequence
tgggacaacttctccacctttag

SEQ ID NO: 163476 - DNA, 23 bp, Artificial sequence
  SiRNA target sequence
gggacaacttctccacctttagt

SEQ ID NO: 163477 - DNA, 23 bp, Artificial sequence
  SiRNA target sequence
ggacaacttctccacctttagtt

SEQ ID NO: 163478 - DNA, 23 bp, Artificial sequence
  SiRNA target sequence
gacaacttctccacctttagttg

SEQ ID NO: 163479 - DNA, 23 bp, Artificial sequence
  SiRNA target sequence
acaacttctccacctttagttgt

SEQ ID NO: 163480 - DNA, 23 bp, Artificial sequence
  SiRNA target sequence
caacttctccacctttagttgtt

SEQ ID NO: 163481 - DNA, 23 bp, Artificial sequence
  SiRNA target sequence
aacttctccacctttagttgttg

SEQ ID NO: 163482 - DNA, 23 bp, Artificial sequence
  SiRNA target sequence
acttctccacctttagttgttgg

SEQ ID NO: 163483 - DNA, 23 bp, Artificial sequence
  SiRNA target sequence
cttctccacctttagttgttgga

SEQ ID NO: 163484 - DNA, 23 bp, Artificial sequence
  SiRNA target sequence
ttctccacctttagttgttggat

SEQ ID NO: 163485 - DNA, 23 bp, Artificial sequence
  SiRNA target sequence
tctccacctttagttgttggatt

SEQ ID NO: 163486 - DNA, 23 bp, Artificial sequence
  SiRNA target sequence
ctccacctttagttgttggatta

SEQ ID NO: 163487 - DNA, 23 bp, Artificial sequence
  SiRNA target sequence
tccacctttagttgttggattag

SEQ ID NO: 163488 - DNA, 23 bp, Artificial sequence
  SiRNA target sequence
ccacctttagttgttggattagg

SEQ ID NO: 163489 - DNA, 23 bp, Artificial sequence
  SiRNA target sequence
cacctttagttgttggattaggc

SEQ ID NO: 163490 - DNA, 23 bp, Artificial sequence
  SiRNA target sequence
acctttagttgttggattaggca

SEQ ID NO: 163491 - DNA, 23 bp, Artificial sequence
  SiRNA target sequence
cctttagttgttggattaggcaa

SEQ ID NO: 163492 - DNA, 23 bp, Artificial sequence
  SiRNA target sequence
ctttagttgttggattaggcaaa

SEQ ID NO: 163493 - DNA, 23 bp, Artificial sequence
  SiRNA target sequence
tttagttgttggattaggcaaag

SEQ ID NO: 163494 - DNA, 23 bp, Artificial sequence
  SiRNA target sequence
ttagttgttggattaggcaaagc

SEQ ID NO: 163495 - DNA, 23 bp, Artificial sequence
  SiRNA target sequence
tagttgttggattaggcaaagct

SEQ ID NO: 163496 - DNA, 23 bp, Artificial sequence
  SiRNA target sequence
agttgttggattaggcaaagctg

SEQ ID NO: 163497 - DNA, 23 bp, Artificial sequence
  SiRNA target sequence
gttgttggattaggcaaagctgc

SEQ ID NO: 163498 - DNA, 23 bp, Artificial sequence
  SiRNA target sequence
ttgttggattaggcaaagctgct

SEQ ID NO: 163499 - DNA, 23 bp, Artificial sequence
  SiRNA target sequence
tgttggattaggcaaagctgctg

SEQ ID NO: 163500 - DNA, 23 bp, Artificial sequence
  SiRNA target sequence
gttggattaggcaaagctgctga

SEQ ID NO: 163501 - DNA, 23 bp, Artificial sequence
  SiRNA target sequence
ttggattaggcaaagctgctgag

SEQ ID NO: 163502 - DNA, 23 bp, Artificial sequence
  SiRNA target sequence
tggattaggcaaagctgctgaga

SEQ ID NO: 163503 - DNA, 23 bp, Artificial sequence
  SiRNA target sequence
ggattaggcaaagctgctgagat

SEQ ID NO: 163504 - DNA, 23 bp, Artificial sequence
  SiRNA target sequence
gattaggcaaagctgctgagata

SEQ ID NO: 163505 - DNA, 23 bp, Artificial sequence
  SiRNA target sequence
attaggcaaagctgctgagatat

SEQ ID NO: 163506 - DNA, 23 bp, Artificial sequence
  SiRNA target sequence
ttaggcaaagctgctgagatatg

SEQ ID NO: 163507 - DNA, 23 bp, Artificial sequence
  SiRNA target sequence
taggcaaagctgctgagatatgc

SEQ ID NO: 163508 - DNA, 23 bp, Artificial sequence
  SiRNA target sequence
aggcaaagctgctgagatatgct

SEQ ID NO: 163509 - DNA, 23 bp, Artificial sequence
  SiRNA target sequence
ggcaaagctgctgagatatgctc

SEQ ID NO: 163510 - DNA, 23 bp, Artificial sequence
  SiRNA target sequence
gcaaagctgctgagatatgctct

SEQ ID NO: 163511 - DNA, 23 bp, Artificial sequence
  SiRNA target sequence
caaagctgctgagatatgctctc

SEQ ID NO: 163512 - DNA, 23 bp, Artificial sequence
  SiRNA target sequence
aaagctgctgagatatgctctca

SEQ ID NO: 163513 - DNA, 23 bp, Artificial sequence
  SiRNA target sequence
aagctgctgagatatgctctcag

SEQ ID NO: 163514 - DNA, 23 bp, Artificial sequence
  SiRNA target sequence
agctgctgagatatgctctcagg

SEQ ID NO: 163515 - DNA, 23 bp, Artificial sequence
  SiRNA target sequence
gctgctgagatatgctctcagga

SEQ ID NO: 163516 - DNA, 23 bp, Artificial sequence
  SiRNA target sequence
ctgctgagatatgctctcaggag

SEQ ID NO: 163517 - DNA, 23 bp, Artificial sequence
  SiRNA target sequence
tgctgagatatgctctcaggaga

SEQ ID NO: 163518 - DNA, 23 bp, Artificial sequence
  SiRNA target sequence
gctgagatatgctctcaggagat

SEQ ID NO: 163519 - DNA, 23 bp, Artificial sequence
  SiRNA target sequence
ctgagatatgctctcaggagatg

SEQ ID NO: 163520 - DNA, 23 bp, Artificial sequence
  SiRNA target sequence
tgagatatgctctcaggagatgc

SEQ ID NO: 163521 - DNA, 23 bp, Artificial sequence
  SiRNA target sequence
gagatatgctctcaggagatgcg

SEQ ID NO: 163522 - DNA, 23 bp, Artificial sequence
  SiRNA target sequence
agatatgctctcaggagatgcgt

SEQ ID NO: 163523 - DNA, 23 bp, Artificial sequence
  SiRNA target sequence
gatatgctctcaggagatgcgta

SEQ ID NO: 163524 - DNA, 23 bp, Artificial sequence
  SiRNA target sequence
atatgctctcaggagatgcgtaa

SEQ ID NO: 163525 - DNA, 23 bp, Artificial sequence
  SiRNA target sequence
tatgctctcaggagatgcgtaag

SEQ ID NO: 163526 - DNA, 23 bp, Artificial sequence
  SiRNA target sequence
atgctctcaggagatgcgtaagg

SEQ ID NO: 163527 - DNA, 23 bp, Artificial sequence
  SiRNA target sequence
tgctctcaggagatgcgtaagga

SEQ ID NO: 163528 - DNA, 23 bp, Artificial sequence
  SiRNA target sequence
gctctcaggagatgcgtaaggac

SEQ ID NO: 163529 - DNA, 23 bp, Artificial sequence
  SiRNA target sequence
ctctcaggagatgcgtaaggact

SEQ ID NO: 163530 - DNA, 23 bp, Artificial sequence
  SiRNA target sequence
tctcaggagatgcgtaaggacta

SEQ ID NO: 163531 - DNA, 23 bp, Artificial sequence
  SiRNA target sequence
ctcaggagatgcgtaaggactat

SEQ ID NO: 163532 - DNA, 23 bp, Artificial sequence
  SiRNA target sequence
tcaggagatgcgtaaggactatg

SEQ ID NO: 163533 - DNA, 23 bp, Artificial sequence
  SiRNA target sequence
caggagatgcgtaaggactatga

SEQ ID NO: 163534 - DNA, 23 bp, Artificial sequence
  SiRNA target sequence
aggagatgcgtaaggactatgaa

SEQ ID NO: 163535 - DNA, 23 bp, Artificial sequence
  SiRNA target sequence
ggagatgcgtaaggactatgaat

SEQ ID NO: 163536 - DNA, 23 bp, Artificial sequence
  SiRNA target sequence
gagatgcgtaaggactatgaata

SEQ ID NO: 163537 - DNA, 23 bp, Artificial sequence
  SiRNA target sequence
agatgcgtaaggactatgaatat

SEQ ID NO: 163538 - DNA, 23 bp, Artificial sequence
  SiRNA target sequence
gatgcgtaaggactatgaatata

SEQ ID NO: 163539 - DNA, 23 bp, Artificial sequence
  SiRNA target sequence
atgcgtaaggactatgaatatat

SEQ ID NO: 163540 - DNA, 23 bp, Artificial sequence
  SiRNA target sequence
tgcgtaaggactatgaatatata

SEQ ID NO: 163541 - DNA, 23 bp, Artificial sequence
  SiRNA target sequence
gcgtaaggactatgaatatatac

SEQ ID NO: 163542 - DNA, 23 bp, Artificial sequence
  SiRNA target sequence
cgtaaggactatgaatatataca

SEQ ID NO: 163543 - DNA, 23 bp, Artificial sequence
  SiRNA target sequence
gtaaggactatgaatatatacaa

SEQ ID NO: 163544 - DNA, 23 bp, Artificial sequence
  SiRNA target sequence
taaggactatgaatatatacaaa

SEQ ID NO: 163545 - DNA, 23 bp, Artificial sequence
  SiRNA target sequence
aaggactatgaatatatacaaaa

SEQ ID NO: 163546 - DNA, 23 bp, Artificial sequence
  SiRNA target sequence
aggactatgaatatatacaaaaa

SEQ ID NO: 163547 - DNA, 23 bp, Artificial sequence
  SiRNA target sequence
ggactatgaatatatacaaaaat

SEQ ID NO: 163548 - DNA, 23 bp, Artificial sequence
  SiRNA target sequence
gactatgaatatatacaaaaatt

SEQ ID NO: 163549 - DNA, 23 bp, Artificial sequence
  SiRNA target sequence
actatgaatatatacaaaaatta

SEQ ID NO: 163550 - DNA, 23 bp, Artificial sequence
  SiRNA target sequence
ctatgaatatatacaaaaattat

SEQ ID NO: 163551 - DNA, 23 bp, Artificial sequence
  SiRNA target sequence
tatgaatatatacaaaaattatc

SEQ ID NO: 163552 - DNA, 23 bp, Artificial sequence
  SiRNA target sequence
atgaatatatacaaaaattatcg

SEQ ID NO: 163553 - DNA, 23 bp, Artificial sequence
  SiRNA target sequence
tgaatatatacaaaaattatcgg

SEQ ID NO: 163554 - DNA, 23 bp, Artificial sequence
  SiRNA target sequence
gaatatatacaaaaattatcgga

SEQ ID NO: 163555 - DNA, 23 bp, Artificial sequence
  SiRNA target sequence
aatatatacaaaaattatcggat

SEQ ID NO: 163556 - DNA, 23 bp, Artificial sequence
  SiRNA target sequence
atatatacaaaaattatcggata

SEQ ID NO: 163557 - DNA, 23 bp, Artificial sequence
  SiRNA target sequence
tatatacaaaaattatcggataa

SEQ ID NO: 163558 - DNA, 23 bp, Artificial sequence
  SiRNA target sequence
atatacaaaaattatcggataaa

SEQ ID NO: 163559 - DNA, 23 bp, Artificial sequence
  SiRNA target sequence
tatacaaaaattatcggataaac

SEQ ID NO: 163560 - DNA, 23 bp, Artificial sequence
  SiRNA target sequence
atacaaaaattatcggataaact

SEQ ID NO: 163561 - DNA, 23 bp, Artificial sequence
  SiRNA target sequence
tacaaaaattatcggataaacta

SEQ ID NO: 163562 - DNA, 23 bp, Artificial sequence
  SiRNA target sequence
acaaaaattatcggataaactaa

SEQ ID NO: 163563 - DNA, 23 bp, Artificial sequence
  SiRNA target sequence
caaaaattatcggataaactaaa

SEQ ID NO: 163564 - DNA, 23 bp, Artificial sequence
  SiRNA target sequence
aaaaattatcggataaactaaaa

SEQ ID NO: 163565 - DNA, 23 bp, Artificial sequence
  SiRNA target sequence
aaaattatcggataaactaaaaa

SEQ ID NO: 163566 - DNA, 23 bp, Artificial sequence
  SiRNA target sequence
aaattatcggataaactaaaaaa

SEQ ID NO: 163567 - DNA, 23 bp, Artificial sequence
  SiRNA target sequence
aattatcggataaactaaaaaat

SEQ ID NO: 163568 - DNA, 23 bp, Artificial sequence
  SiRNA target sequence
attatcggataaactaaaaaatc

SEQ ID NO: 163569 - DNA, 23 bp, Artificial sequence
  SiRNA target sequence
ttatcggataaactaaaaaatcg

SEQ ID NO: 163570 - DNA, 23 bp, Artificial sequence
  SiRNA target sequence
tatcggataaactaaaaaatcgc

SEQ ID NO: 163571 - DNA, 23 bp, Artificial sequence
  SiRNA target sequence
atcggataaactaaaaaatcgca

SEQ ID NO: 163572 - DNA, 23 bp, Artificial sequence
  SiRNA target sequence
tcggataaactaaaaaatcgcat

SEQ ID NO: 163573 - DNA, 23 bp, Artificial sequence
  SiRNA target sequence
cggataaactaaaaaatcgcatc

SEQ ID NO: 163574 - DNA, 23 bp, Artificial sequence
  SiRNA target sequence
ggataaactaaaaaatcgcatca

SEQ ID NO: 163575 - DNA, 23 bp, Artificial sequence
  SiRNA target sequence
gataaactaaaaaatcgcatcaa

SEQ ID NO: 163576 - DNA, 23 bp, Artificial sequence
  SiRNA target sequence
ataaactaaaaaatcgcatcaaa

SEQ ID NO: 163577 - DNA, 23 bp, Artificial sequence
  SiRNA target sequence
taaactaaaaaatcgcatcaaaa

SEQ ID NO: 163578 - DNA, 23 bp, Artificial sequence
  SiRNA target sequence
aaactaaaaaatcgcatcaaaac

SEQ ID NO: 163579 - DNA, 23 bp, Artificial sequence
  SiRNA target sequence
aactaaaaaatcgcatcaaaacg

SEQ ID NO: 163580 - DNA, 23 bp, Artificial sequence
  SiRNA target sequence
actaaaaaatcgcatcaaaacga

SEQ ID NO: 163581 - DNA, 23 bp, Artificial sequence
  SiRNA target sequence
ctaaaaaatcgcatcaaaacgaa

SEQ ID NO: 163582 - DNA, 23 bp, Artificial sequence
  SiRNA target sequence
taaaaaatcgcatcaaaacgaat

SEQ ID NO: 163583 - DNA, 23 bp, Artificial sequence
  SiRNA target sequence
aaaaaatcgcatcaaaacgaatg

SEQ ID NO: 163584 - DNA, 23 bp, Artificial sequence
  SiRNA target sequence
aaaaatcgcatcaaaacgaatgt

SEQ ID NO: 163585 - DNA, 23 bp, Artificial sequence
  SiRNA target sequence
aaaatcgcatcaaaacgaatgta

SEQ ID NO: 163586 - DNA, 23 bp, Artificial sequence
  SiRNA target sequence
aaatcgcatcaaaacgaatgtag

SEQ ID NO: 163587 - DNA, 23 bp, Artificial sequence
  SiRNA target sequence
aatcgcatcaaaacgaatgtaga

SEQ ID NO: 163588 - DNA, 23 bp, Artificial sequence
  SiRNA target sequence
atcgcatcaaaacgaatgtagaa

SEQ ID NO: 163589 - DNA, 23 bp, Artificial sequence
  SiRNA target sequence
tcgcatcaaaacgaatgtagaaa

SEQ ID NO: 163590 - DNA, 23 bp, Artificial sequence
  SiRNA target sequence
cgcatcaaaacgaatgtagaaaa

SEQ ID NO: 163591 - DNA, 23 bp, Artificial sequence
  SiRNA target sequence
gcatcaaaacgaatgtagaaaat

SEQ ID NO: 163592 - DNA, 23 bp, Artificial sequence
  SiRNA target sequence
catcaaaacgaatgtagaaaatg

SEQ ID NO: 163593 - DNA, 23 bp, Artificial sequence
  SiRNA target sequence
atcaaaacgaatgtagaaaatgt

SEQ ID NO: 163594 - DNA, 23 bp, Artificial sequence
  SiRNA target sequence
tcaaaacgaatgtagaaaatgtt

SEQ ID NO: 163595 - DNA, 23 bp, Artificial sequence
  SiRNA target sequence
caaaacgaatgtagaaaatgttg

SEQ ID NO: 163596 - DNA, 23 bp, Artificial sequence
  SiRNA target sequence
aaaacgaatgtagaaaatgttgt

SEQ ID NO: 163597 - DNA, 23 bp, Artificial sequence
  SiRNA target sequence
aaacgaatgtagaaaatgttgtt

SEQ ID NO: 163598 - DNA, 23 bp, Artificial sequence
  SiRNA target sequence
aacgaatgtagaaaatgttgtta

SEQ ID NO: 163599 - DNA, 23 bp, Artificial sequence
  SiRNA target sequence
acgaatgtagaaaatgttgttat

SEQ ID NO: 163600 - DNA, 23 bp, Artificial sequence
  SiRNA target sequence
cgaatgtagaaaatgttgttatt

SEQ ID NO: 163601 - DNA, 23 bp, Artificial sequence
  SiRNA target sequence
gaatgtagaaaatgttgttatta

SEQ ID NO: 163602 - DNA, 23 bp, Artificial sequence
  SiRNA target sequence
aatgtagaaaatgttgttattaa

SEQ ID NO: 163603 - DNA, 23 bp, Artificial sequence
  SiRNA target sequence
atgtagaaaatgttgttattaac

SEQ ID NO: 163604 - DNA, 23 bp, Artificial sequence
  SiRNA target sequence
tgtagaaaatgttgttattaacg

SEQ ID NO: 163605 - DNA, 23 bp, Artificial sequence
  SiRNA target sequence
gtagaaaatgttgttattaacgg

SEQ ID NO: 163606 - DNA, 23 bp, Artificial sequence
  SiRNA target sequence
tagaaaatgttgttattaacggc

SEQ ID NO: 163607 - DNA, 23 bp, Artificial sequence
  SiRNA target sequence
agaaaatgttgttattaacggcg

SEQ ID NO: 163608 - DNA, 23 bp, Artificial sequence
  SiRNA target sequence
gaaaatgttgttattaacggcga

SEQ ID NO: 163609 - DNA, 23 bp, Artificial sequence
  SiRNA target sequence
aaaatgttgttattaacggcgat

SEQ ID NO: 163610 - DNA, 23 bp, Artificial sequence
  SiRNA target sequence
aaatgttgttattaacggcgatg

SEQ ID NO: 163611 - DNA, 23 bp, Artificial sequence
  SiRNA target sequence
aatgttgttattaacggcgatga

SEQ ID NO: 163612 - DNA, 23 bp, Artificial sequence
  SiRNA target sequence
atgttgttattaacggcgatgat

SEQ ID NO: 163613 - DNA, 23 bp, Artificial sequence
  SiRNA target sequence
tgttgttattaacggcgatgatt

SEQ ID NO: 163614 - DNA, 23 bp, Artificial sequence
  SiRNA target sequence
gttgttattaacggcgatgattc

SEQ ID NO: 163615 - DNA, 23 bp, Artificial sequence
  SiRNA target sequence
ttgttattaacggcgatgattct

SEQ ID NO: 163616 - DNA, 23 bp, Artificial sequence
  SiRNA target sequence
tgttattaacggcgatgattcta

SEQ ID NO: 163617 - DNA, 23 bp, Artificial sequence
  SiRNA target sequence
gttattaacggcgatgattctaa

SEQ ID NO: 163618 - DNA, 23 bp, Artificial sequence
  SiRNA target sequence
ttattaacggcgatgattctaag

SEQ ID NO: 163619 - DNA, 23 bp, Artificial sequence
  SiRNA target sequence
tattaacggcgatgattctaaga

SEQ ID NO: 163620 - DNA, 23 bp, Artificial sequence
  SiRNA target sequence
attaacggcgatgattctaagac

SEQ ID NO: 163621 - DNA, 23 bp, Artificial sequence
  SiRNA target sequence
ttaacggcgatgattctaagact

SEQ ID NO: 163622 - DNA, 23 bp, Artificial sequence
  SiRNA target sequence
taacggcgatgattctaagactt

SEQ ID NO: 163623 - DNA, 23 bp, Artificial sequence
  SiRNA target sequence
aacggcgatgattctaagacttt

SEQ ID NO: 163624 - DNA, 23 bp, Artificial sequence
  SiRNA target sequence
acggcgatgattctaagactttt

SEQ ID NO: 163625 - DNA, 23 bp, Artificial sequence
  SiRNA target sequence
cggcgatgattctaagacttttc

SEQ ID NO: 163626 - DNA, 23 bp, Artificial sequence
  SiRNA target sequence
ggcgatgattctaagacttttcc

SEQ ID NO: 163627 - DNA, 23 bp, Artificial sequence
  SiRNA target sequence
gcgatgattctaagacttttcct

SEQ ID NO: 163628 - DNA, 23 bp, Artificial sequence
  SiRNA target sequence
cgatgattctaagacttttcctg

SEQ ID NO: 163629 - DNA, 23 bp, Artificial sequence
  SiRNA target sequence
gatgattctaagacttttcctgg

SEQ ID NO: 163630 - DNA, 23 bp, Artificial sequence
  SiRNA target sequence
atgattctaagacttttcctggc

SEQ ID NO: 163631 - DNA, 23 bp, Artificial sequence
  SiRNA target sequence
tgattctaagacttttcctggct

SEQ ID NO: 163632 - DNA, 23 bp, Artificial sequence
  SiRNA target sequence
gattctaagacttttcctggctg

SEQ ID NO: 163633 - DNA, 23 bp, Artificial sequence
  SiRNA target sequence
attctaagacttttcctggctgt

SEQ ID NO: 163634 - DNA, 23 bp, Artificial sequence
  SiRNA target sequence
ttctaagacttttcctggctgtc

SEQ ID NO: 163635 - DNA, 23 bp, Artificial sequence
  SiRNA target sequence
tctaagacttttcctggctgtct

SEQ ID NO: 163636 - DNA, 23 bp, Artificial sequence
  SiRNA target sequence
ctaagacttttcctggctgtctc

SEQ ID NO: 163637 - DNA, 23 bp, Artificial sequence
  SiRNA target sequence
taagacttttcctggctgtctca

SEQ ID NO: 163638 - DNA, 23 bp, Artificial sequence
  SiRNA target sequence
aagacttttcctggctgtctcaa

SEQ ID NO: 163639 - DNA, 23 bp, Artificial sequence
  SiRNA target sequence
agacttttcctggctgtctcaat

SEQ ID NO: 163640 - DNA, 23 bp, Artificial sequence
  SiRNA target sequence
gacttttcctggctgtctcaata

SEQ ID NO: 163641 - DNA, 23 bp, Artificial sequence
  SiRNA target sequence
acttttcctggctgtctcaatat

SEQ ID NO: 163642 - DNA, 23 bp, Artificial sequence
  SiRNA target sequence
cttttcctggctgtctcaatatt

SEQ ID NO: 163643 - DNA, 23 bp, Artificial sequence
  SiRNA target sequence
ttttcctggctgtctcaatattt

SEQ ID NO: 163644 - DNA, 23 bp, Artificial sequence
  SiRNA target sequence
tttcctggctgtctcaatatttc

SEQ ID NO: 163645 - DNA, 23 bp, Artificial sequence
  SiRNA target sequence
ttcctggctgtctcaatatttct

SEQ ID NO: 163646 - DNA, 23 bp, Artificial sequence
  SiRNA target sequence
tcctggctgtctcaatatttctt

SEQ ID NO: 163647 - DNA, 23 bp, Artificial sequence
  SiRNA target sequence
cctggctgtctcaatatttcttt

SEQ ID NO: 163648 - DNA, 23 bp, Artificial sequence
  SiRNA target sequence
ctggctgtctcaatatttctttt

SEQ ID NO: 163649 - DNA, 23 bp, Artificial sequence
  SiRNA target sequence
tggctgtctcaatatttcttttc

SEQ ID NO: 163650 - DNA, 23 bp, Artificial sequence
  SiRNA target sequence
ggctgtctcaatatttcttttcc

SEQ ID NO: 163651 - DNA, 23 bp, Artificial sequence
  SiRNA target sequence
gctgtctcaatatttcttttcca

SEQ ID NO: 163652 - DNA, 23 bp, Artificial sequence
  SiRNA target sequence
ctgtctcaatatttcttttccat

SEQ ID NO: 163653 - DNA, 23 bp, Artificial sequence
  SiRNA target sequence
tgtctcaatatttcttttccata

SEQ ID NO: 163654 - DNA, 23 bp, Artificial sequence
  SiRNA target sequence
gtctcaatatttcttttccatat

SEQ ID NO: 163655 - DNA, 23 bp, Artificial sequence
  SiRNA target sequence
tctcaatatttcttttccatatg

SEQ ID NO: 163656 - DNA, 23 bp, Artificial sequence
  SiRNA target sequence
ctcaatatttcttttccatatgt

SEQ ID NO: 163657 - DNA, 23 bp, Artificial sequence
  SiRNA target sequence
tcaatatttcttttccatatgta

SEQ ID NO: 163658 - DNA, 23 bp, Artificial sequence
  SiRNA target sequence
caatatttcttttccatatgtag

SEQ ID NO: 163659 - DNA, 23 bp, Artificial sequence
  SiRNA target sequence
aatatttcttttccatatgtaga

SEQ ID NO: 163660 - DNA, 23 bp, Artificial sequence
  SiRNA target sequence
atatttcttttccatatgtagaa

SEQ ID NO: 163661 - DNA, 23 bp, Artificial sequence
  SiRNA target sequence
tatttcttttccatatgtagaag

SEQ ID NO: 163662 - DNA, 23 bp, Artificial sequence
  SiRNA target sequence
atttcttttccatatgtagaagg

SEQ ID NO: 163663 - DNA, 23 bp, Artificial sequence
  SiRNA target sequence
tttcttttccatatgtagaaggt

SEQ ID NO: 163664 - DNA, 23 bp, Artificial sequence
  SiRNA target sequence
ttcttttccatatgtagaaggtg

SEQ ID NO: 163665 - DNA, 23 bp, Artificial sequence
  SiRNA target sequence
tcttttccatatgtagaaggtga

SEQ ID NO: 163666 - DNA, 23 bp, Artificial sequence
  SiRNA target sequence
cttttccatatgtagaaggtgaa

SEQ ID NO: 163667 - DNA, 23 bp, Artificial sequence
  SiRNA target sequence
ttttccatatgtagaaggtgaag

SEQ ID NO: 163668 - DNA, 23 bp, Artificial sequence
  SiRNA target sequence
tttccatatgtagaaggtgaagg

SEQ ID NO: 163669 - DNA, 23 bp, Artificial sequence
  SiRNA target sequence
ttccatatgtagaaggtgaaggg

SEQ ID NO: 163670 - DNA, 23 bp, Artificial sequence
  SiRNA target sequence
tccatatgtagaaggtgaagggc

SEQ ID NO: 163671 - DNA, 23 bp, Artificial sequence
  SiRNA target sequence
ccatatgtagaaggtgaagggct

SEQ ID NO: 163672 - DNA, 23 bp, Artificial sequence
  SiRNA target sequence
catatgtagaaggtgaagggctt

SEQ ID NO: 163673 - DNA, 23 bp, Artificial sequence
  SiRNA target sequence
atatgtagaaggtgaagggctta

SEQ ID NO: 163674 - DNA, 23 bp, Artificial sequence
  SiRNA target sequence
tatgtagaaggtgaagggcttat

SEQ ID NO: 163675 - DNA, 23 bp, Artificial sequence
  SiRNA target sequence
atgtagaaggtgaagggcttatg

SEQ ID NO: 163676 - DNA, 23 bp, Artificial sequence
  SiRNA target sequence
tgtagaaggtgaagggcttatga

SEQ ID NO: 163677 - DNA, 23 bp, Artificial sequence
  SiRNA target sequence
gtagaaggtgaagggcttatgat

SEQ ID NO: 163678 - DNA, 23 bp, Artificial sequence
  SiRNA target sequence
tagaaggtgaagggcttatgatg

SEQ ID NO: 163679 - DNA, 23 bp, Artificial sequence
  SiRNA target sequence
agaaggtgaagggcttatgatga

SEQ ID NO: 163680 - DNA, 23 bp, Artificial sequence
  SiRNA target sequence
gaaggtgaagggcttatgatgaa

SEQ ID NO: 163681 - DNA, 23 bp, Artificial sequence
  SiRNA target sequence
aaggtgaagggcttatgatgaat

SEQ ID NO: 163682 - DNA, 23 bp, Artificial sequence
  SiRNA target sequence
aggtgaagggcttatgatgaata

SEQ ID NO: 163683 - DNA, 23 bp, Artificial sequence
  SiRNA target sequence
ggtgaagggcttatgatgaatat

SEQ ID NO: 163684 - DNA, 23 bp, Artificial sequence
  SiRNA target sequence
gtgaagggcttatgatgaatatt

SEQ ID NO: 163685 - DNA, 23 bp, Artificial sequence
  SiRNA target sequence
tgaagggcttatgatgaatatta

SEQ ID NO: 163686 - DNA, 23 bp, Artificial sequence
  SiRNA target sequence
gaagggcttatgatgaatattaa

SEQ ID NO: 163687 - DNA, 23 bp, Artificial sequence
  SiRNA target sequence
aagggcttatgatgaatattaag

SEQ ID NO: 163688 - DNA, 23 bp, Artificial sequence
  SiRNA target sequence
agggcttatgatgaatattaagg

SEQ ID NO: 163689 - DNA, 23 bp, Artificial sequence
  SiRNA target sequence
gggcttatgatgaatattaagga

SEQ ID NO: 163690 - DNA, 23 bp, Artificial sequence
  SiRNA target sequence
ggcttatgatgaatattaaggat

SEQ ID NO: 163691 - DNA, 23 bp, Artificial sequence
  SiRNA target sequence
gcttatgatgaatattaaggata

SEQ ID NO: 163692 - DNA, 23 bp, Artificial sequence
  SiRNA target sequence
cttatgatgaatattaaggatat

SEQ ID NO: 163693 - DNA, 23 bp, Artificial sequence
  SiRNA target sequence
ttatgatgaatattaaggatatt

SEQ ID NO: 163694 - DNA, 23 bp, Artificial sequence
  SiRNA target sequence
tatgatgaatattaaggatattg

SEQ ID NO: 163695 - DNA, 23 bp, Artificial sequence
  SiRNA target sequence
atgatgaatattaaggatattgc

SEQ ID NO: 163696 - DNA, 23 bp, Artificial sequence
  SiRNA target sequence
tgatgaatattaaggatattgct

SEQ ID NO: 163697 - DNA, 23 bp, Artificial sequence
  SiRNA target sequence
gatgaatattaaggatattgctg

SEQ ID NO: 163698 - DNA, 23 bp, Artificial sequence
  SiRNA target sequence
atgaatattaaggatattgctgt

SEQ ID NO: 163699 - DNA, 23 bp, Artificial sequence
  SiRNA target sequence
tgaatattaaggatattgctgtt

SEQ ID NO: 163700 - DNA, 23 bp, Artificial sequence
  SiRNA target sequence
gaatattaaggatattgctgtta

SEQ ID NO: 163701 - DNA, 23 bp, Artificial sequence
  SiRNA target sequence
aatattaaggatattgctgttag

SEQ ID NO: 163702 - DNA, 23 bp, Artificial sequence
  SiRNA target sequence
atattaaggatattgctgttagt

SEQ ID NO: 163703 - DNA, 23 bp, Artificial sequence
  SiRNA target sequence
tattaaggatattgctgttagta

SEQ ID NO: 163704 - DNA, 23 bp, Artificial sequence
  SiRNA target sequence
attaaggatattgctgttagtag

SEQ ID NO: 163705 - DNA, 23 bp, Artificial sequence
  SiRNA target sequence
ttaaggatattgctgttagtagt

SEQ ID NO: 163706 - DNA, 23 bp, Artificial sequence
  SiRNA target sequence
taaggatattgctgttagtagtg

SEQ ID NO: 163707 - DNA, 23 bp, Artificial sequence
  SiRNA target sequence
aaggatattgctgttagtagtgg

SEQ ID NO: 163708 - DNA, 23 bp, Artificial sequence
  SiRNA target sequence
aggatattgctgttagtagtgga

SEQ ID NO: 163709 - DNA, 23 bp, Artificial sequence
  SiRNA target sequence
ggatattgctgttagtagtggaa

SEQ ID NO: 163710 - DNA, 23 bp, Artificial sequence
  SiRNA target sequence
gatattgctgttagtagtggaag

SEQ ID NO: 163711 - DNA, 23 bp, Artificial sequence
  SiRNA target sequence
atattgctgttagtagtggaagt

SEQ ID NO: 163712 - DNA, 23 bp, Artificial sequence
  SiRNA target sequence
tattgctgttagtagtggaagtg

SEQ ID NO: 163713 - DNA, 23 bp, Artificial sequence
  SiRNA target sequence
attgctgttagtagtggaagtgc

SEQ ID NO: 163714 - DNA, 23 bp, Artificial sequence
  SiRNA target sequence
ttgctgttagtagtggaagtgct

SEQ ID NO: 163715 - DNA, 23 bp, Artificial sequence
  SiRNA target sequence
tgctgttagtagtggaagtgctt

SEQ ID NO: 163716 - DNA, 23 bp, Artificial sequence
  SiRNA target sequence
gctgttagtagtggaagtgcttg

SEQ ID NO: 163717 - DNA, 23 bp, Artificial sequence
  SiRNA target sequence
ctgttagtagtggaagtgcttgc

SEQ ID NO: 163718 - DNA, 23 bp, Artificial sequence
  SiRNA target sequence
tgttagtagtggaagtgcttgca

SEQ ID NO: 163719 - DNA, 23 bp, Artificial sequence
  SiRNA target sequence
gttagtagtggaagtgcttgcac

SEQ ID NO: 163720 - DNA, 23 bp, Artificial sequence
  SiRNA target sequence
ttagtagtggaagtgcttgcact

SEQ ID NO: 163721 - DNA, 23 bp, Artificial sequence
  SiRNA target sequence
tagtagtggaagtgcttgcactt

SEQ ID NO: 163722 - DNA, 23 bp, Artificial sequence
  SiRNA target sequence
agtagtggaagtgcttgcacttc

SEQ ID NO: 163723 - DNA, 23 bp, Artificial sequence
  SiRNA target sequence
gtagtggaagtgcttgcacttca

SEQ ID NO: 163724 - DNA, 23 bp, Artificial sequence
  SiRNA target sequence
tagtggaagtgcttgcacttcat

SEQ ID NO: 163725 - DNA, 23 bp, Artificial sequence
  SiRNA target sequence
agtggaagtgcttgcacttcatc

SEQ ID NO: 163726 - DNA, 23 bp, Artificial sequence
  SiRNA target sequence
gtggaagtgcttgcacttcatca

SEQ ID NO: 163727 - DNA, 23 bp, Artificial sequence
  SiRNA target sequence
tggaagtgcttgcacttcatcat

SEQ ID NO: 163728 - DNA, 23 bp, Artificial sequence
  SiRNA target sequence
ggaagtgcttgcacttcatcatc

SEQ ID NO: 163729 - DNA, 23 bp, Artificial sequence
  SiRNA target sequence
gaagtgcttgcacttcatcatct

SEQ ID NO: 163730 - DNA, 23 bp, Artificial sequence
  SiRNA target sequence
aagtgcttgcacttcatcatctt

SEQ ID NO: 163731 - DNA, 23 bp, Artificial sequence
  SiRNA target sequence
agtgcttgcacttcatcatcttt

SEQ ID NO: 163732 - DNA, 23 bp, Artificial sequence
  SiRNA target sequence
gtgcttgcacttcatcatcttta

SEQ ID NO: 163733 - DNA, 23 bp, Artificial sequence
  SiRNA target sequence
tgcttgcacttcatcatctttag

SEQ ID NO: 163734 - DNA, 23 bp, Artificial sequence
  SiRNA target sequence
gcttgcacttcatcatctttaga

SEQ ID NO: 163735 - DNA, 23 bp, Artificial sequence
  SiRNA target sequence
cttgcacttcatcatctttagaa

SEQ ID NO: 163736 - DNA, 23 bp, Artificial sequence
  SiRNA target sequence
ttgcacttcatcatctttagaac

SEQ ID NO: 163737 - DNA, 23 bp, Artificial sequence
  SiRNA target sequence
tgcacttcatcatctttagaacc

SEQ ID NO: 163738 - DNA, 23 bp, Artificial sequence
  SiRNA target sequence
gcacttcatcatctttagaaccc

SEQ ID NO: 163739 - DNA, 23 bp, Artificial sequence
  SiRNA target sequence
cacttcatcatctttagaaccct

SEQ ID NO: 163740 - DNA, 23 bp, Artificial sequence
  SiRNA target sequence
acttcatcatctttagaaccctc

SEQ ID NO: 163741 - DNA, 23 bp, Artificial sequence
  SiRNA target sequence
cttcatcatctttagaaccctct

SEQ ID NO: 163742 - DNA, 23 bp, Artificial sequence
  SiRNA target sequence
ttcatcatctttagaaccctctt

SEQ ID NO: 163743 - DNA, 23 bp, Artificial sequence
  SiRNA target sequence
tcatcatctttagaaccctctta

SEQ ID NO: 163744 - DNA, 23 bp, Artificial sequence
  SiRNA target sequence
catcatctttagaaccctcttat

SEQ ID NO: 163745 - DNA, 23 bp, Artificial sequence
  SiRNA target sequence
atcatctttagaaccctcttatg

SEQ ID NO: 163746 - DNA, 23 bp, Artificial sequence
  SiRNA target sequence
tcatctttagaaccctcttatgt

SEQ ID NO: 163747 - DNA, 23 bp, Artificial sequence
  SiRNA target sequence
catctttagaaccctcttatgtt

SEQ ID NO: 163748 - DNA, 23 bp, Artificial sequence
  SiRNA target sequence
atctttagaaccctcttatgttt

SEQ ID NO: 163749 - DNA, 23 bp, Artificial sequence
  SiRNA target sequence
tctttagaaccctcttatgtttt

SEQ ID NO: 163750 - DNA, 23 bp, Artificial sequence
  SiRNA target sequence
ctttagaaccctcttatgttttg

SEQ ID NO: 163751 - DNA, 23 bp, Artificial sequence
  SiRNA target sequence
tttagaaccctcttatgttttgc

SEQ ID NO: 163752 - DNA, 23 bp, Artificial sequence
  SiRNA target sequence
ttagaaccctcttatgttttgcg

SEQ ID NO: 163753 - DNA, 23 bp, Artificial sequence
  SiRNA target sequence
tagaaccctcttatgttttgcga

SEQ ID NO: 163754 - DNA, 23 bp, Artificial sequence
  SiRNA target sequence
agaaccctcttatgttttgcgag

SEQ ID NO: 163755 - DNA, 23 bp, Artificial sequence
  SiRNA target sequence
gaaccctcttatgttttgcgagc

SEQ ID NO: 163756 - DNA, 23 bp, Artificial sequence
  SiRNA target sequence
aaccctcttatgttttgcgagct

SEQ ID NO: 163757 - DNA, 23 bp, Artificial sequence
  SiRNA target sequence
accctcttatgttttgcgagctt

SEQ ID NO: 163758 - DNA, 23 bp, Artificial sequence
  SiRNA target sequence
ccctcttatgttttgcgagcttt

SEQ ID NO: 163759 - DNA, 23 bp, Artificial sequence
  SiRNA target sequence
cctcttatgttttgcgagcttta

SEQ ID NO: 163760 - DNA, 23 bp, Artificial sequence
  SiRNA target sequence
ctcttatgttttgcgagctttag

SEQ ID NO: 163761 - DNA, 23 bp, Artificial sequence
  SiRNA target sequence
tcttatgttttgcgagctttagg

SEQ ID NO: 163762 - DNA, 23 bp, Artificial sequence
  SiRNA target sequence
cttatgttttgcgagctttaggc

SEQ ID NO: 163763 - DNA, 23 bp, Artificial sequence
  SiRNA target sequence
ttatgttttgcgagctttaggca

SEQ ID NO: 163764 - DNA, 23 bp, Artificial sequence
  SiRNA target sequence
tatgttttgcgagctttaggcaa

SEQ ID NO: 163765 - DNA, 23 bp, Artificial sequence
  SiRNA target sequence
atgttttgcgagctttaggcaaa

SEQ ID NO: 163766 - DNA, 23 bp, Artificial sequence
  SiRNA target sequence
tgttttgcgagctttaggcaaaa

SEQ ID NO: 163767 - DNA, 23 bp, Artificial sequence
  SiRNA target sequence
gttttgcgagctttaggcaaaaa

SEQ ID NO: 163768 - DNA, 23 bp, Artificial sequence
  SiRNA target sequence
ttttgcgagctttaggcaaaaat

SEQ ID NO: 163769 - DNA, 23 bp, Artificial sequence
  SiRNA target sequence
tttgcgagctttaggcaaaaatg

SEQ ID NO: 163770 - DNA, 23 bp, Artificial sequence
  SiRNA target sequence
ttgcgagctttaggcaaaaatga

SEQ ID NO: 163771 - DNA, 23 bp, Artificial sequence
  SiRNA target sequence
tgcgagctttaggcaaaaatgat

SEQ ID NO: 163772 - DNA, 23 bp, Artificial sequence
  SiRNA target sequence
gcgagctttaggcaaaaatgatg

SEQ ID NO: 163773 - DNA, 23 bp, Artificial sequence
  SiRNA target sequence
cgagctttaggcaaaaatgatga

SEQ ID NO: 163774 - DNA, 23 bp, Artificial sequence
  SiRNA target sequence
gagctttaggcaaaaatgatgat

SEQ ID NO: 163775 - DNA, 23 bp, Artificial sequence
  SiRNA target sequence
agctttaggcaaaaatgatgatc

SEQ ID NO: 163776 - DNA, 23 bp, Artificial sequence
  SiRNA target sequence
gctttaggcaaaaatgatgatct

SEQ ID NO: 163777 - DNA, 23 bp, Artificial sequence
  SiRNA target sequence
ctttaggcaaaaatgatgatctt

SEQ ID NO: 163778 - DNA, 23 bp, Artificial sequence
  SiRNA target sequence
tttaggcaaaaatgatgatcttg

SEQ ID NO: 163779 - DNA, 23 bp, Artificial sequence
  SiRNA target sequence
ttaggcaaaaatgatgatcttgc

SEQ ID NO: 163780 - DNA, 23 bp, Artificial sequence
  SiRNA target sequence
taggcaaaaatgatgatcttgcg

SEQ ID NO: 163781 - DNA, 23 bp, Artificial sequence
  SiRNA target sequence
aggcaaaaatgatgatcttgcgc

SEQ ID NO: 163782 - DNA, 23 bp, Artificial sequence
  SiRNA target sequence
ggcaaaaatgatgatcttgcgca

SEQ ID NO: 163783 - DNA, 23 bp, Artificial sequence
  SiRNA target sequence
gcaaaaatgatgatcttgcgcat

SEQ ID NO: 163784 - DNA, 23 bp, Artificial sequence
  SiRNA target sequence
caaaaatgatgatcttgcgcatt

SEQ ID NO: 163785 - DNA, 23 bp, Artificial sequence
  SiRNA target sequence
aaaaatgatgatcttgcgcattc

SEQ ID NO: 163786 - DNA, 23 bp, Artificial sequence
  SiRNA target sequence
aaaatgatgatcttgcgcattct

SEQ ID NO: 163787 - DNA, 23 bp, Artificial sequence
  SiRNA target sequence
aaatgatgatcttgcgcattctt

SEQ ID NO: 163788 - DNA, 23 bp, Artificial sequence
  SiRNA target sequence
aatgatgatcttgcgcattcttc

SEQ ID NO: 163789 - DNA, 23 bp, Artificial sequence
  SiRNA target sequence
atgatgatcttgcgcattcttct

SEQ ID NO: 163790 - DNA, 23 bp, Artificial sequence
  SiRNA target sequence
tgatgatcttgcgcattcttcta

SEQ ID NO: 163791 - DNA, 23 bp, Artificial sequence
  SiRNA target sequence
gatgatcttgcgcattcttctat

SEQ ID NO: 163792 - DNA, 23 bp, Artificial sequence
  SiRNA target sequence
atgatcttgcgcattcttctata

SEQ ID NO: 163793 - DNA, 23 bp, Artificial sequence
  SiRNA target sequence
tgatcttgcgcattcttctataa

SEQ ID NO: 163794 - DNA, 23 bp, Artificial sequence
  SiRNA target sequence
gatcttgcgcattcttctataag

SEQ ID NO: 163795 - DNA, 23 bp, Artificial sequence
  SiRNA target sequence
atcttgcgcattcttctataaga

SEQ ID NO: 163796 - DNA, 23 bp, Artificial sequence
  SiRNA target sequence
tcttgcgcattcttctataagat

SEQ ID NO: 163797 - DNA, 23 bp, Artificial sequence
  SiRNA target sequence
cttgcgcattcttctataagatt

SEQ ID NO: 163798 - DNA, 23 bp, Artificial sequence
  SiRNA target sequence
ttgcgcattcttctataagattt

SEQ ID NO: 163799 - DNA, 23 bp, Artificial sequence
  SiRNA target sequence
tgcgcattcttctataagatttg

SEQ ID NO: 163800 - DNA, 23 bp, Artificial sequence
  SiRNA target sequence
gcgcattcttctataagatttgg

SEQ ID NO: 163801 - DNA, 23 bp, Artificial sequence
  SiRNA target sequence
cgcattcttctataagatttgga

SEQ ID NO: 163802 - DNA, 23 bp, Artificial sequence
  SiRNA target sequence
gcattcttctataagatttggaa

SEQ ID NO: 163803 - DNA, 23 bp, Artificial sequence
  SiRNA target sequence
cattcttctataagatttggaat

SEQ ID NO: 163804 - DNA, 23 bp, Artificial sequence
  SiRNA target sequence
attcttctataagatttggaata

SEQ ID NO: 163805 - DNA, 23 bp, Artificial sequence
  SiRNA target sequence
ttcttctataagatttggaataa

SEQ ID NO: 163806 - DNA, 23 bp, Artificial sequence
  SiRNA target sequence
tcttctataagatttggaataaa

SEQ ID NO: 163807 - DNA, 23 bp, Artificial sequence
  SiRNA target sequence
cttctataagatttggaataaat

SEQ ID NO: 163808 - DNA, 23 bp, Artificial sequence
  SiRNA target sequence
ttctataagatttggaataaata

SEQ ID NO: 163809 - DNA, 23 bp, Artificial sequence
  SiRNA target sequence
tctataagatttggaataaataa

SEQ ID NO: 163810 - DNA, 23 bp, Artificial sequence
  SiRNA target sequence
ctataagatttggaataaataag

SEQ ID NO: 163811 - DNA, 23 bp, Artificial sequence
  SiRNA target sequence
tataagatttggaataaataagt

SEQ ID NO: 163812 - DNA, 23 bp, Artificial sequence
  SiRNA target sequence
ataagatttggaataaataagtt

SEQ ID NO: 163813 - DNA, 23 bp, Artificial sequence
  SiRNA target sequence
taagatttggaataaataagttt

SEQ ID NO: 163814 - DNA, 23 bp, Artificial sequence
  SiRNA target sequence
aagatttggaataaataagttta

SEQ ID NO: 163815 - DNA, 23 bp, Artificial sequence
  SiRNA target sequence
agatttggaataaataagtttac

SEQ ID NO: 163816 - DNA, 23 bp, Artificial sequence
  SiRNA target sequence
gatttggaataaataagtttaca

SEQ ID NO: 163817 - DNA, 23 bp, Artificial sequence
  SiRNA target sequence
atttggaataaataagtttacaa

SEQ ID NO: 163818 - DNA, 23 bp, Artificial sequence
  SiRNA target sequence
tttggaataaataagtttacaac

SEQ ID NO: 163819 - DNA, 23 bp, Artificial sequence
  SiRNA target sequence
ttggaataaataagtttacaact

SEQ ID NO: 163820 - DNA, 23 bp, Artificial sequence
  SiRNA target sequence
tggaataaataagtttacaactg

SEQ ID NO: 163821 - DNA, 23 bp, Artificial sequence
  SiRNA target sequence
ggaataaataagtttacaactga

SEQ ID NO: 163822 - DNA, 23 bp, Artificial sequence
  SiRNA target sequence
gaataaataagtttacaactgaa

SEQ ID NO: 163823 - DNA, 23 bp, Artificial sequence
  SiRNA target sequence
aataaataagtttacaactgaag

SEQ ID NO: 163824 - DNA, 23 bp, Artificial sequence
  SiRNA target sequence
ataaataagtttacaactgaaga

SEQ ID NO: 163825 - DNA, 23 bp, Artificial sequence
  SiRNA target sequence
taaataagtttacaactgaagaa

SEQ ID NO: 163826 - DNA, 23 bp, Artificial sequence
  SiRNA target sequence
aaataagtttacaactgaagaag

SEQ ID NO: 163827 - DNA, 23 bp, Artificial sequence
  SiRNA target sequence
aataagtttacaactgaagaaga

SEQ ID NO: 163828 - DNA, 23 bp, Artificial sequence
  SiRNA target sequence
ataagtttacaactgaagaagaa

SEQ ID NO: 163829 - DNA, 23 bp, Artificial sequence
  SiRNA target sequence
taagtttacaactgaagaagaaa

SEQ ID NO: 163830 - DNA, 23 bp, Artificial sequence
  SiRNA target sequence
aagtttacaactgaagaagaaat

SEQ ID NO: 163831 - DNA, 23 bp, Artificial sequence
  SiRNA target sequence
agtttacaactgaagaagaaatc

SEQ ID NO: 163832 - DNA, 23 bp, Artificial sequence
  SiRNA target sequence
gtttacaactgaagaagaaatca

SEQ ID NO: 163833 - DNA, 23 bp, Artificial sequence
  SiRNA target sequence
tttacaactgaagaagaaatcaa

SEQ ID NO: 163834 - DNA, 23 bp, Artificial sequence
  SiRNA target sequence
ttacaactgaagaagaaatcaat

SEQ ID NO: 163835 - DNA, 23 bp, Artificial sequence
  SiRNA target sequence
tacaactgaagaagaaatcaata

SEQ ID NO: 163836 - DNA, 23 bp, Artificial sequence
  SiRNA target sequence
acaactgaagaagaaatcaataa

SEQ ID NO: 163837 - DNA, 23 bp, Artificial sequence
  SiRNA target sequence
caactgaagaagaaatcaataaa

SEQ ID NO: 163838 - DNA, 23 bp, Artificial sequence
  SiRNA target sequence
aactgaagaagaaatcaataaag

SEQ ID NO: 163839 - DNA, 23 bp, Artificial sequence
  SiRNA target sequence
actgaagaagaaatcaataaagt

SEQ ID NO: 163840 - DNA, 23 bp, Artificial sequence
  SiRNA target sequence
ctgaagaagaaatcaataaagta

SEQ ID NO: 163841 - DNA, 23 bp, Artificial sequence
  SiRNA target sequence
tgaagaagaaatcaataaagtat

SEQ ID NO: 163842 - DNA, 23 bp, Artificial sequence
  SiRNA target sequence
gaagaagaaatcaataaagtatc

SEQ ID NO: 163843 - DNA, 23 bp, Artificial sequence
  SiRNA target sequence
aagaagaaatcaataaagtatct

SEQ ID NO: 163844 - DNA, 23 bp, Artificial sequence
  SiRNA target sequence
agaagaaatcaataaagtatcta

SEQ ID NO: 163845 - DNA, 23 bp, Artificial sequence
  SiRNA target sequence
gaagaaatcaataaagtatctag

SEQ ID NO: 163846 - DNA, 23 bp, Artificial sequence
  SiRNA target sequence
aagaaatcaataaagtatctagt

SEQ ID NO: 163847 - DNA, 23 bp, Artificial sequence
  SiRNA target sequence
agaaatcaataaagtatctagtg

SEQ ID NO: 163848 - DNA, 23 bp, Artificial sequence
  SiRNA target sequence
gaaatcaataaagtatctagtga

SEQ ID NO: 163849 - DNA, 23 bp, Artificial sequence
  SiRNA target sequence
aaatcaataaagtatctagtgat

SEQ ID NO: 163850 - DNA, 23 bp, Artificial sequence
  SiRNA target sequence
aatcaataaagtatctagtgata

SEQ ID NO: 163851 - DNA, 23 bp, Artificial sequence
  SiRNA target sequence
atcaataaagtatctagtgatac

SEQ ID NO: 163852 - DNA, 23 bp, Artificial sequence
  SiRNA target sequence
tcaataaagtatctagtgataca

SEQ ID NO: 163853 - DNA, 23 bp, Artificial sequence
  SiRNA target sequence
caataaagtatctagtgatacaa

SEQ ID NO: 163854 - DNA, 23 bp, Artificial sequence
  SiRNA target sequence
aataaagtatctagtgatacaat

SEQ ID NO: 163855 - DNA, 23 bp, Artificial sequence
  SiRNA target sequence
ataaagtatctagtgatacaatt

SEQ ID NO: 163856 - DNA, 23 bp, Artificial sequence
  SiRNA target sequence
taaagtatctagtgatacaatta

SEQ ID NO: 163857 - DNA, 23 bp, Artificial sequence
  SiRNA target sequence
aaagtatctagtgatacaattaa

SEQ ID NO: 163858 - DNA, 23 bp, Artificial sequence
  SiRNA target sequence
aagtatctagtgatacaattaaa

SEQ ID NO: 163859 - DNA, 23 bp, Artificial sequence
  SiRNA target sequence
agtatctagtgatacaattaaag

SEQ ID NO: 163860 - DNA, 23 bp, Artificial sequence
  SiRNA target sequence
gtatctagtgatacaattaaagc

SEQ ID NO: 163861 - DNA, 23 bp, Artificial sequence
  SiRNA target sequence
tatctagtgatacaattaaagct

SEQ ID NO: 163862 - DNA, 23 bp, Artificial sequence
  SiRNA target sequence
atctagtgatacaattaaagctg

SEQ ID NO: 163863 - DNA, 23 bp, Artificial sequence
  SiRNA target sequence
tctagtgatacaattaaagctgt

SEQ ID NO: 163864 - DNA, 23 bp, Artificial sequence
  SiRNA target sequence
ctagtgatacaattaaagctgtt

SEQ ID NO: 163865 - DNA, 23 bp, Artificial sequence
  SiRNA target sequence
tagtgatacaattaaagctgtta

SEQ ID NO: 163866 - DNA, 23 bp, Artificial sequence
  SiRNA target sequence
agtgatacaattaaagctgttaa

SEQ ID NO: 163867 - DNA, 23 bp, Artificial sequence
  SiRNA target sequence
gtgatacaattaaagctgttaat

SEQ ID NO: 163868 - DNA, 23 bp, Artificial sequence
  SiRNA target sequence
tgatacaattaaagctgttaata

SEQ ID NO: 163869 - DNA, 23 bp, Artificial sequence
  SiRNA target sequence
gatacaattaaagctgttaataa

SEQ ID NO: 163870 - DNA, 23 bp, Artificial sequence
  SiRNA target sequence
atacaattaaagctgttaataag

SEQ ID NO: 163871 - DNA, 23 bp, Artificial sequence
  SiRNA target sequence
tacaattaaagctgttaataagt

SEQ ID NO: 163872 - DNA, 23 bp, Artificial sequence
  SiRNA target sequence
acaattaaagctgttaataagtt

SEQ ID NO: 163873 - DNA, 23 bp, Artificial sequence
  SiRNA target sequence
caattaaagctgttaataagtta

SEQ ID NO: 163874 - DNA, 23 bp, Artificial sequence
  SiRNA target sequence
aattaaagctgttaataagttaa

SEQ ID NO: 163875 - DNA, 23 bp, Artificial sequence
  SiRNA target sequence
attaaagctgttaataagttaag

SEQ ID NO: 163876 - DNA, 23 bp, Artificial sequence
  SiRNA target sequence
ttaaagctgttaataagttaaga

SEQ ID NO: 163877 - DNA, 23 bp, Artificial sequence
  SiRNA target sequence
taaagctgttaataagttaagag

SEQ ID NO: 163878 - DNA, 23 bp, Artificial sequence
  SiRNA target sequence
aaagctgttaataagttaagaga

SEQ ID NO: 163879 - DNA, 23 bp, Artificial sequence
  SiRNA target sequence
aagctgttaataagttaagagat

SEQ ID NO: 163880 - DNA, 23 bp, Artificial sequence
  SiRNA target sequence
agctgttaataagttaagagata

SEQ ID NO: 163881 - DNA, 23 bp, Artificial sequence
  SiRNA target sequence
gctgttaataagttaagagatat

SEQ ID NO: 163882 - DNA, 23 bp, Artificial sequence
  SiRNA target sequence
ctgttaataagttaagagatatg

SEQ ID NO: 163883 - DNA, 23 bp, Artificial sequence
  SiRNA target sequence
tgttaataagttaagagatatgt

SEQ ID NO: 163884 - DNA, 23 bp, Artificial sequence
  SiRNA target sequence
gttaataagttaagagatatgtc

SEQ ID NO: 163885 - DNA, 23 bp, Artificial sequence
  SiRNA target sequence
ttaataagttaagagatatgtct

SEQ ID NO: 163886 - DNA, 23 bp, Artificial sequence
  SiRNA target sequence
taataagttaagagatatgtctc

SEQ ID NO: 163887 - DNA, 23 bp, Artificial sequence
  SiRNA target sequence
aataagttaagagatatgtctcc

SEQ ID NO: 163888 - DNA, 23 bp, Artificial sequence
  SiRNA target sequence
ataagttaagagatatgtctcct

SEQ ID NO: 163889 - DNA, 23 bp, Artificial sequence
  SiRNA target sequence
taagttaagagatatgtctcctt

SEQ ID NO: 163890 - DNA, 23 bp, Artificial sequence
  SiRNA target sequence
aagttaagagatatgtctccttt

SEQ ID NO: 163891 - DNA, 23 bp, Artificial sequence
  SiRNA target sequence
agttaagagatatgtctccttta

SEQ ID NO: 163892 - DNA, 23 bp, Artificial sequence
  SiRNA target sequence
gttaagagatatgtctcctttat

SEQ ID NO: 163893 - DNA, 23 bp, Artificial sequence
  SiRNA target sequence
ttaagagatatgtctcctttata

SEQ ID NO: 163894 - DNA, 23 bp, Artificial sequence
  SiRNA target sequence
taagagatatgtctcctttatat

SEQ ID NO: 163895 - DNA, 23 bp, Artificial sequence
  SiRNA target sequence
aagagatatgtctcctttatatg

SEQ ID NO: 163896 - DNA, 23 bp, Artificial sequence
  SiRNA target sequence
agagatatgtctcctttatatga

SEQ ID NO: 163897 - DNA, 23 bp, Artificial sequence
  SiRNA target sequence
gagatatgtctcctttatatgaa

SEQ ID NO: 163898 - DNA, 23 bp, Artificial sequence
  SiRNA target sequence
agatatgtctcctttatatgaaa

SEQ ID NO: 163899 - DNA, 23 bp, Artificial sequence
  SiRNA target sequence
gatatgtctcctttatatgaaat

SEQ ID NO: 163900 - DNA, 23 bp, Artificial sequence
  SiRNA target sequence
atatgtctcctttatatgaaatg

SEQ ID NO: 163901 - DNA, 23 bp, Artificial sequence
  SiRNA target sequence
tatgtctcctttatatgaaatgg

SEQ ID NO: 163902 - DNA, 23 bp, Artificial sequence
  SiRNA target sequence
atgtctcctttatatgaaatggt

SEQ ID NO: 163903 - DNA, 23 bp, Artificial sequence
  SiRNA target sequence
tgtctcctttatatgaaatggtc

SEQ ID NO: 163904 - DNA, 23 bp, Artificial sequence
  SiRNA target sequence
gtctcctttatatgaaatggtca

SEQ ID NO: 163905 - DNA, 23 bp, Artificial sequence
  SiRNA target sequence
tctcctttatatgaaatggtcaa

SEQ ID NO: 163906 - DNA, 23 bp, Artificial sequence
  SiRNA target sequence
ctcctttatatgaaatggtcaaa

SEQ ID NO: 163907 - DNA, 23 bp, Artificial sequence
  SiRNA target sequence
tcctttatatgaaatggtcaaag

SEQ ID NO: 163908 - DNA, 23 bp, Artificial sequence
  SiRNA target sequence
cctttatatgaaatggtcaaaga

SEQ ID NO: 163909 - DNA, 23 bp, Artificial sequence
  SiRNA target sequence
ctttatatgaaatggtcaaagaa

SEQ ID NO: 163910 - DNA, 23 bp, Artificial sequence
  SiRNA target sequence
tttatatgaaatggtcaaagaag

SEQ ID NO: 163911 - DNA, 23 bp, Artificial sequence
  SiRNA target sequence
ttatatgaaatggtcaaagaagg

SEQ ID NO: 163912 - DNA, 23 bp, Artificial sequence
  SiRNA target sequence
tatatgaaatggtcaaagaaggg

SEQ ID NO: 163913 - DNA, 23 bp, Artificial sequence
  SiRNA target sequence
atatgaaatggtcaaagaaggga

SEQ ID NO: 163914 - DNA, 23 bp, Artificial sequence
  SiRNA target sequence
tatgaaatggtcaaagaagggat

SEQ ID NO: 163915 - DNA, 23 bp, Artificial sequence
  SiRNA target sequence
atgaaatggtcaaagaagggata

SEQ ID NO: 163916 - DNA, 23 bp, Artificial sequence
  SiRNA target sequence
tgaaatggtcaaagaagggatag

SEQ ID NO: 163917 - DNA, 23 bp, Artificial sequence
  SiRNA target sequence
gaaatggtcaaagaagggataga

SEQ ID NO: 163918 - DNA, 23 bp, Artificial sequence
  SiRNA target sequence
aaatggtcaaagaagggatagat

SEQ ID NO: 163919 - DNA, 23 bp, Artificial sequence
  SiRNA target sequence
aatggtcaaagaagggatagatt

SEQ ID NO: 163920 - DNA, 23 bp, Artificial sequence
  SiRNA target sequence
atggtcaaagaagggatagattt

SEQ ID NO: 163921 - DNA, 23 bp, Artificial sequence
  SiRNA target sequence
tggtcaaagaagggatagattta

SEQ ID NO: 163922 - DNA, 23 bp, Artificial sequence
  SiRNA target sequence
ggtcaaagaagggatagatttag

SEQ ID NO: 163923 - DNA, 23 bp, Artificial sequence
  SiRNA target sequence
gtcaaagaagggatagatttaga

SEQ ID NO: 163924 - DNA, 23 bp, Artificial sequence
  SiRNA target sequence
tcaaagaagggatagatttagat

SEQ ID NO: 163925 - DNA, 23 bp, Artificial sequence
  SiRNA target sequence
caaagaagggatagatttagata

SEQ ID NO: 163926 - DNA, 23 bp, Artificial sequence
  SiRNA target sequence
aaagaagggatagatttagataa

SEQ ID NO: 163927 - DNA, 23 bp, Artificial sequence
  SiRNA target sequence
aagaagggatagatttagataaa

SEQ ID NO: 163928 - DNA, 23 bp, Artificial sequence
  SiRNA target sequence
agaagggatagatttagataaaa

SEQ ID NO: 163929 - DNA, 23 bp, Artificial sequence
  SiRNA target sequence
gaagggatagatttagataaaat

SEQ ID NO: 163930 - DNA, 23 bp, Artificial sequence
  SiRNA target sequence
aagggatagatttagataaaatt

SEQ ID NO: 163931 - DNA, 23 bp, Artificial sequence
  SiRNA target sequence
agggatagatttagataaaatta

SEQ ID NO: 163932 - DNA, 23 bp, Artificial sequence
  SiRNA target sequence
gggatagatttagataaaattaa

SEQ ID NO: 163933 - DNA, 23 bp, Artificial sequence
  SiRNA target sequence
ggatagatttagataaaattaat

SEQ ID NO: 163934 - DNA, 23 bp, Artificial sequence
  SiRNA target sequence
gatagatttagataaaattaatt

SEQ ID NO: 163935 - DNA, 23 bp, Artificial sequence
  SiRNA target sequence
atagatttagataaaattaattg

SEQ ID NO: 163936 - DNA, 23 bp, Artificial sequence
  SiRNA target sequence
tagatttagataaaattaattgg

SEQ ID NO: 163937 - DNA, 23 bp, Artificial sequence
  SiRNA target sequence
agatttagataaaattaattggt

SEQ ID NO: 163938 - DNA, 23 bp, Artificial sequence
  SiRNA target sequence
gatttagataaaattaattggtc

SEQ ID NO: 163939 - DNA, 23 bp, Artificial sequence
  SiRNA target sequence
atttagataaaattaattggtct

SEQ ID NO: 163940 - DNA, 23 bp, Artificial sequence
  SiRNA target sequence
tttagataaaattaattggtctg

SEQ ID NO: 163941 - DNA, 23 bp, Artificial sequence
  SiRNA target sequence
ttagataaaattaattggtctgc

SEQ ID NO: 163942 - DNA, 23 bp, Artificial sequence
  SiRNA target sequence
tagataaaattaattggtctgct

SEQ ID NO: 163943 - DNA, 23 bp, Artificial sequence
  SiRNA target sequence
agataaaattaattggtctgctt

SEQ ID NO: 163944 - DNA, 23 bp, Artificial sequence
  SiRNA target sequence
gataaaattaattggtctgctta

SEQ ID NO: 163945 - DNA, 23 bp, Artificial sequence
  SiRNA target sequence
ataaaattaattggtctgcttaa

SEQ ID NO: 163946 - DNA, 24 bp, Artificial sequence
  SiRNA target sequence
atgttatttttttatagccccatt

SEQ ID NO: 163947 - DNA, 24 bp, Artificial sequence
  SiRNA target sequence
tgttatttttttatagccccattt

SEQ ID NO: 163948 - DNA, 24 bp, Artificial sequence
  SiRNA target sequence
gttatttttttatagccccatttt

SEQ ID NO: 163949 - DNA, 24 bp, Artificial sequence
  SiRNA target sequence
ttatttttttatagccccattttt

SEQ ID NO: 163950 - DNA, 24 bp, Artificial sequence
  SiRNA target sequence
tatttttttatagccccattttta

SEQ ID NO: 163951 - DNA, 24 bp, Artificial sequence
  SiRNA target sequence
atttttttatagccccatttttat

SEQ ID NO: 163952 - DNA, 24 bp, Artificial sequence
  SiRNA target sequence
tttttttatagccccatttttatg

SEQ ID NO: 163953 - DNA, 24 bp, Artificial sequence
  SiRNA target sequence
ttttttatagccccatttttatga

SEQ ID NO: 163954 - DNA, 24 bp, Artificial sequence
  SiRNA target sequence
tttttatagccccatttttatgac

SEQ ID NO: 163955 - DNA, 24 bp, Artificial sequence
  SiRNA target sequence
ttttatagccccatttttatgact

SEQ ID NO: 163956 - DNA, 24 bp, Artificial sequence
  SiRNA target sequence
tttatagccccatttttatgacta

SEQ ID NO: 163957 - DNA, 24 bp, Artificial sequence
  SiRNA target sequence
ttatagccccatttttatgactaa

SEQ ID NO: 163958 - DNA, 24 bp, Artificial sequence
  SiRNA target sequence
tatagccccatttttatgactaaa

SEQ ID NO: 163959 - DNA, 24 bp, Artificial sequence
  SiRNA target sequence
atagccccatttttatgactaaaa

SEQ ID NO: 163960 - DNA, 24 bp, Artificial sequence
  SiRNA target sequence
tagccccatttttatgactaaaag

SEQ ID NO: 163961 - DNA, 24 bp, Artificial sequence
  SiRNA target sequence
agccccatttttatgactaaaagt

SEQ ID NO: 163962 - DNA, 24 bp, Artificial sequence
  SiRNA target sequence
gccccatttttatgactaaaagtt

SEQ ID NO: 163963 - DNA, 24 bp, Artificial sequence
  SiRNA target sequence
ccccatttttatgactaaaagttt

SEQ ID NO: 163964 - DNA, 24 bp, Artificial sequence
  SiRNA target sequence
cccatttttatgactaaaagttta

SEQ ID NO: 163965 - DNA, 24 bp, Artificial sequence
  SiRNA target sequence
ccatttttatgactaaaagtttaa

SEQ ID NO: 163966 - DNA, 24 bp, Artificial sequence
  SiRNA target sequence
catttttatgactaaaagtttaac

SEQ ID NO: 163967 - DNA, 24 bp, Artificial sequence
  SiRNA target sequence
atttttatgactaaaagtttaacg

SEQ ID NO: 163968 - DNA, 24 bp, Artificial sequence
  SiRNA target sequence
tttttatgactaaaagtttaacga

SEQ ID NO: 163969 - DNA, 24 bp, Artificial sequence
  SiRNA target sequence
ttttatgactaaaagtttaacgaa

SEQ ID NO: 163970 - DNA, 24 bp, Artificial sequence
  SiRNA target sequence
tttatgactaaaagtttaacgaat

SEQ ID NO: 163971 - DNA, 24 bp, Artificial sequence
  SiRNA target sequence
ttatgactaaaagtttaacgaatt

SEQ ID NO: 163972 - DNA, 24 bp, Artificial sequence
  SiRNA target sequence
tatgactaaaagtttaacgaattc

SEQ ID NO: 163973 - DNA, 24 bp, Artificial sequence
  SiRNA target sequence
atgactaaaagtttaacgaattct

SEQ ID NO: 163974 - DNA, 24 bp, Artificial sequence
  SiRNA target sequence
tgactaaaagtttaacgaattcta

SEQ ID NO: 163975 - DNA, 24 bp, Artificial sequence
  SiRNA target sequence
gactaaaagtttaacgaattctaa

SEQ ID NO: 163976 - DNA, 24 bp, Artificial sequence
  SiRNA target sequence
actaaaagtttaacgaattctaaa

SEQ ID NO: 163977 - DNA, 24 bp, Artificial sequence
  SiRNA target sequence
ctaaaagtttaacgaattctaaaa

SEQ ID NO: 163978 - DNA, 24 bp, Artificial sequence
  SiRNA target sequence
taaaagtttaacgaattctaaaac

SEQ ID NO: 163979 - DNA, 24 bp, Artificial sequence
  SiRNA target sequence
aaaagtttaacgaattctaaaact

SEQ ID NO: 163980 - DNA, 24 bp, Artificial sequence
  SiRNA target sequence
aaagtttaacgaattctaaaactt

SEQ ID NO: 163981 - DNA, 24 bp, Artificial sequence
  SiRNA target sequence
aagtttaacgaattctaaaacttt

SEQ ID NO: 163982 - DNA, 24 bp, Artificial sequence
  SiRNA target sequence
agtttaacgaattctaaaacttta

SEQ ID NO: 163983 - DNA, 24 bp, Artificial sequence
  SiRNA target sequence
gtttaacgaattctaaaactttaa

SEQ ID NO: 163984 - DNA, 24 bp, Artificial sequence
  SiRNA target sequence
tttaacgaattctaaaactttaaa

SEQ ID NO: 163985 - DNA, 24 bp, Artificial sequence
  SiRNA target sequence
ttaacgaattctaaaactttaaat

SEQ ID NO: 163986 - DNA, 24 bp, Artificial sequence
  SiRNA target sequence
taacgaattctaaaactttaaatt

SEQ ID NO: 163987 - DNA, 24 bp, Artificial sequence
  SiRNA target sequence
aacgaattctaaaactttaaattt

SEQ ID NO: 163988 - DNA, 24 bp, Artificial sequence
  SiRNA target sequence
acgaattctaaaactttaaattta

SEQ ID NO: 163989 - DNA, 24 bp, Artificial sequence
  SiRNA target sequence
cgaattctaaaactttaaatttaa

SEQ ID NO: 163990 - DNA, 24 bp, Artificial sequence
  SiRNA target sequence
gaattctaaaactttaaatttaat

SEQ ID NO: 163991 - DNA, 24 bp, Artificial sequence
  SiRNA target sequence
aattctaaaactttaaatttaatg

SEQ ID NO: 163992 - DNA, 24 bp, Artificial sequence
  SiRNA target sequence
attctaaaactttaaatttaatgt

SEQ ID NO: 163993 - DNA, 24 bp, Artificial sequence
  SiRNA target sequence
ttctaaaactttaaatttaatgtc

SEQ ID NO: 163994 - DNA, 24 bp, Artificial sequence
  SiRNA target sequence
tctaaaactttaaatttaatgtca

SEQ ID NO: 163995 - DNA, 24 bp, Artificial sequence
  SiRNA target sequence
ctaaaactttaaatttaatgtcaa

SEQ ID NO: 163996 - DNA, 24 bp, Artificial sequence
  SiRNA target sequence
taaaactttaaatttaatgtcaag

SEQ ID NO: 163997 - DNA, 24 bp, Artificial sequence
  SiRNA target sequence
aaaactttaaatttaatgtcaagt

SEQ ID NO: 163998 - DNA, 24 bp, Artificial sequence
  SiRNA target sequence
aaactttaaatttaatgtcaagtg

SEQ ID NO: 163999 - DNA, 24 bp, Artificial sequence
  SiRNA target sequence
aactttaaatttaatgtcaagtgt

SEQ ID NO: 164000 - DNA, 24 bp, Artificial sequence
  SiRNA target sequence
actttaaatttaatgtcaagtgta

SEQ ID NO: 164001 - DNA, 24 bp, Artificial sequence
  SiRNA target sequence
ctttaaatttaatgtcaagtgtac

SEQ ID NO: 164002 - DNA, 24 bp, Artificial sequence
  SiRNA target sequence
tttaaatttaatgtcaagtgtaca

SEQ ID NO: 164003 - DNA, 24 bp, Artificial sequence
  SiRNA target sequence
ttaaatttaatgtcaagtgtacaa

SEQ ID NO: 164004 - DNA, 24 bp, Artificial sequence
  SiRNA target sequence
taaatttaatgtcaagtgtacaat

SEQ ID NO: 164005 - DNA, 24 bp, Artificial sequence
  SiRNA target sequence
aaatttaatgtcaagtgtacaatc

SEQ ID NO: 164006 - DNA, 24 bp, Artificial sequence
  SiRNA target sequence
aatttaatgtcaagtgtacaatca

SEQ ID NO: 164007 - DNA, 24 bp, Artificial sequence
  SiRNA target sequence
atttaatgtcaagtgtacaatcac

SEQ ID NO: 164008 - DNA, 24 bp, Artificial sequence
  SiRNA target sequence
tttaatgtcaagtgtacaatcacc

SEQ ID NO: 164009 - DNA, 24 bp, Artificial sequence
  SiRNA target sequence
ttaatgtcaagtgtacaatcacca

SEQ ID NO: 164010 - DNA, 24 bp, Artificial sequence
  SiRNA target sequence
taatgtcaagtgtacaatcaccag

SEQ ID NO: 164011 - DNA, 24 bp, Artificial sequence
  SiRNA target sequence
aatgtcaagtgtacaatcaccagt

SEQ ID NO: 164012 - DNA, 24 bp, Artificial sequence
  SiRNA target sequence
atgtcaagtgtacaatcaccagtt

SEQ ID NO: 164013 - DNA, 24 bp, Artificial sequence
  SiRNA target sequence
tgtcaagtgtacaatcaccagtta

SEQ ID NO: 164014 - DNA, 24 bp, Artificial sequence
  SiRNA target sequence
gtcaagtgtacaatcaccagttat

SEQ ID NO: 164015 - DNA, 24 bp, Artificial sequence
  SiRNA target sequence
tcaagtgtacaatcaccagttata

SEQ ID NO: 164016 - DNA, 24 bp, Artificial sequence
  SiRNA target sequence
caagtgtacaatcaccagttataa

SEQ ID NO: 164017 - DNA, 24 bp, Artificial sequence
  SiRNA target sequence
aagtgtacaatcaccagttataaa

SEQ ID NO: 164018 - DNA, 24 bp, Artificial sequence
  SiRNA target sequence
agtgtacaatcaccagttataaat

SEQ ID NO: 164019 - DNA, 24 bp, Artificial sequence
  SiRNA target sequence
gtgtacaatcaccagttataaata

SEQ ID NO: 164020 - DNA, 24 bp, Artificial sequence
  SiRNA target sequence
tgtacaatcaccagttataaatac

SEQ ID NO: 164021 - DNA, 24 bp, Artificial sequence
  SiRNA target sequence
gtacaatcaccagttataaataca

SEQ ID NO: 164022 - DNA, 24 bp, Artificial sequence
  SiRNA target sequence
tacaatcaccagttataaatacaa

SEQ ID NO: 164023 - DNA, 24 bp, Artificial sequence
  SiRNA target sequence
acaatcaccagttataaatacaaa

SEQ ID NO: 164024 - DNA, 24 bp, Artificial sequence
  SiRNA target sequence
caatcaccagttataaatacaaaa

SEQ ID NO: 164025 - DNA, 24 bp, Artificial sequence
  SiRNA target sequence
aatcaccagttataaatacaaaaa

SEQ ID NO: 164026 - DNA, 24 bp, Artificial sequence
  SiRNA target sequence
atcaccagttataaatacaaaaaa

SEQ ID NO: 164027 - DNA, 24 bp, Artificial sequence
  SiRNA target sequence
tcaccagttataaatacaaaaaaa

SEQ ID NO: 164028 - DNA, 24 bp, Artificial sequence
  SiRNA target sequence
caccagttataaatacaaaaaaaa

SEQ ID NO: 164029 - DNA, 24 bp, Artificial sequence
  SiRNA target sequence
accagttataaatacaaaaaaaat

SEQ ID NO: 164030 - DNA, 24 bp, Artificial sequence
  SiRNA target sequence
ccagttataaatacaaaaaaaata

SEQ ID NO: 164031 - DNA, 24 bp, Artificial sequence
  SiRNA target sequence
cagttataaatacaaaaaaaatat

SEQ ID NO: 164032 - DNA, 24 bp, Artificial sequence
  SiRNA target sequence
agttataaatacaaaaaaaatata

SEQ ID NO: 164033 - DNA, 24 bp, Artificial sequence
  SiRNA target sequence
gttataaatacaaaaaaaatatat

SEQ ID NO: 164034 - DNA, 24 bp, Artificial sequence
  SiRNA target sequence
ttataaatacaaaaaaaatatatc

SEQ ID NO: 164035 - DNA, 24 bp, Artificial sequence
  SiRNA target sequence
tataaatacaaaaaaaatatatct

SEQ ID NO: 164036 - DNA, 24 bp, Artificial sequence
  SiRNA target sequence
ataaatacaaaaaaaatatatctt

SEQ ID NO: 164037 - DNA, 24 bp, Artificial sequence
  SiRNA target sequence
taaatacaaaaaaaatatatcttg

SEQ ID NO: 164038 - DNA, 24 bp, Artificial sequence
  SiRNA target sequence
aaatacaaaaaaaatatatcttga

SEQ ID NO: 164039 - DNA, 24 bp, Artificial sequence
  SiRNA target sequence
aatacaaaaaaaatatatcttgat

SEQ ID NO: 164040 - DNA, 24 bp, Artificial sequence
  SiRNA target sequence
atacaaaaaaaatatatcttgatg

SEQ ID NO: 164041 - DNA, 24 bp, Artificial sequence
  SiRNA target sequence
tacaaaaaaaatatatcttgatgc

SEQ ID NO: 164042 - DNA, 24 bp, Artificial sequence
  SiRNA target sequence
acaaaaaaaatatatcttgatgca

SEQ ID NO: 164043 - DNA, 24 bp, Artificial sequence
  SiRNA target sequence
caaaaaaaatatatcttgatgcac

SEQ ID NO: 164044 - DNA, 24 bp, Artificial sequence
  SiRNA target sequence
aaaaaaaatatatcttgatgcaca

SEQ ID NO: 164045 - DNA, 24 bp, Artificial sequence
  SiRNA target sequence
aaaaaaatatatcttgatgcacaa

SEQ ID NO: 164046 - DNA, 24 bp, Artificial sequence
  SiRNA target sequence
aaaaaatatatcttgatgcacaag

SEQ ID NO: 164047 - DNA, 24 bp, Artificial sequence
  SiRNA target sequence
aaaaatatatcttgatgcacaagc

SEQ ID NO: 164048 - DNA, 24 bp, Artificial sequence
  SiRNA target sequence
aaaatatatcttgatgcacaagcg

SEQ ID NO: 164049 - DNA, 24 bp, Artificial sequence
  SiRNA target sequence
aaatatatcttgatgcacaagcga

SEQ ID NO: 164050 - DNA, 24 bp, Artificial sequence
  SiRNA target sequence
aatatatcttgatgcacaagcgac

SEQ ID NO: 164051 - DNA, 24 bp, Artificial sequence
  SiRNA target sequence
atatatcttgatgcacaagcgacc

SEQ ID NO: 164052 - DNA, 24 bp, Artificial sequence
  SiRNA target sequence
tatatcttgatgcacaagcgacca

SEQ ID NO: 164053 - DNA, 24 bp, Artificial sequence
  SiRNA target sequence
atatcttgatgcacaagcgaccaa

SEQ ID NO: 164054 - DNA, 24 bp, Artificial sequence
  SiRNA target sequence
tatcttgatgcacaagcgaccaag

SEQ ID NO: 164055 - DNA, 24 bp, Artificial sequence
  SiRNA target sequence
atcttgatgcacaagcgaccaagc

SEQ ID NO: 164056 - DNA, 24 bp, Artificial sequence
  SiRNA target sequence
tcttgatgcacaagcgaccaagcc

SEQ ID NO: 164057 - DNA, 24 bp, Artificial sequence
  SiRNA target sequence
cttgatgcacaagcgaccaagcct

SEQ ID NO: 164058 - DNA, 24 bp, Artificial sequence
  SiRNA target sequence
ttgatgcacaagcgaccaagcctt

SEQ ID NO: 164059 - DNA, 24 bp, Artificial sequence
  SiRNA target sequence
tgatgcacaagcgaccaagccttt

SEQ ID NO: 164060 - DNA, 24 bp, Artificial sequence
  SiRNA target sequence
gatgcacaagcgaccaagccttta

SEQ ID NO: 164061 - DNA, 24 bp, Artificial sequence
  SiRNA target sequence
atgcacaagcgaccaagcctttag

SEQ ID NO: 164062 - DNA, 24 bp, Artificial sequence
  SiRNA target sequence
tgcacaagcgaccaagcctttaga

SEQ ID NO: 164063 - DNA, 24 bp, Artificial sequence
  SiRNA target sequence
gcacaagcgaccaagcctttagac

SEQ ID NO: 164064 - DNA, 24 bp, Artificial sequence
  SiRNA target sequence
cacaagcgaccaagcctttagacc

SEQ ID NO: 164065 - DNA, 24 bp, Artificial sequence
  SiRNA target sequence
acaagcgaccaagcctttagaccc

SEQ ID NO: 164066 - DNA, 24 bp, Artificial sequence
  SiRNA target sequence
caagcgaccaagcctttagacccg

SEQ ID NO: 164067 - DNA, 24 bp, Artificial sequence
  SiRNA target sequence
aagcgaccaagcctttagacccgc

SEQ ID NO: 164068 - DNA, 24 bp, Artificial sequence
  SiRNA target sequence
agcgaccaagcctttagacccgcg

SEQ ID NO: 164069 - DNA, 24 bp, Artificial sequence
  SiRNA target sequence
gcgaccaagcctttagacccgcgt

SEQ ID NO: 164070 - DNA, 24 bp, Artificial sequence
  SiRNA target sequence
cgaccaagcctttagacccgcgtg

SEQ ID NO: 164071 - DNA, 24 bp, Artificial sequence
  SiRNA target sequence
gaccaagcctttagacccgcgtgt

SEQ ID NO: 164072 - DNA, 24 bp, Artificial sequence
  SiRNA target sequence
accaagcctttagacccgcgtgtg

SEQ ID NO: 164073 - DNA, 24 bp, Artificial sequence
  SiRNA target sequence
ccaagcctttagacccgcgtgtgc

SEQ ID NO: 164074 - DNA, 24 bp, Artificial sequence
  SiRNA target sequence
caagcctttagacccgcgtgtgct

SEQ ID NO: 164075 - DNA, 24 bp, Artificial sequence
  SiRNA target sequence
aagcctttagacccgcgtgtgctt

SEQ ID NO: 164076 - DNA, 24 bp, Artificial sequence
  SiRNA target sequence
agcctttagacccgcgtgtgcttg

SEQ ID NO: 164077 - DNA, 24 bp, Artificial sequence
  SiRNA target sequence
gcctttagacccgcgtgtgcttga

SEQ ID NO: 164078 - DNA, 24 bp, Artificial sequence
  SiRNA target sequence
cctttagacccgcgtgtgcttgat

SEQ ID NO: 164079 - DNA, 24 bp, Artificial sequence
  SiRNA target sequence
ctttagacccgcgtgtgcttgatg

SEQ ID NO: 164080 - DNA, 24 bp, Artificial sequence
  SiRNA target sequence
tttagacccgcgtgtgcttgatgc

SEQ ID NO: 164081 - DNA, 24 bp, Artificial sequence
  SiRNA target sequence
ttagacccgcgtgtgcttgatgca

SEQ ID NO: 164082 - DNA, 24 bp, Artificial sequence
  SiRNA target sequence
tagacccgcgtgtgcttgatgcaa

SEQ ID NO: 164083 - DNA, 24 bp, Artificial sequence
  SiRNA target sequence
agacccgcgtgtgcttgatgcaat

SEQ ID NO: 164084 - DNA, 24 bp, Artificial sequence
  SiRNA target sequence
gacccgcgtgtgcttgatgcaatg

SEQ ID NO: 164085 - DNA, 24 bp, Artificial sequence
  SiRNA target sequence
acccgcgtgtgcttgatgcaatgc

SEQ ID NO: 164086 - DNA, 24 bp, Artificial sequence
  SiRNA target sequence
cccgcgtgtgcttgatgcaatgct

SEQ ID NO: 164087 - DNA, 24 bp, Artificial sequence
  SiRNA target sequence
ccgcgtgtgcttgatgcaatgctt

SEQ ID NO: 164088 - DNA, 24 bp, Artificial sequence
  SiRNA target sequence
cgcgtgtgcttgatgcaatgcttc

SEQ ID NO: 164089 - DNA, 24 bp, Artificial sequence
  SiRNA target sequence
gcgtgtgcttgatgcaatgcttcc

SEQ ID NO: 164090 - DNA, 24 bp, Artificial sequence
  SiRNA target sequence
cgtgtgcttgatgcaatgcttcca

SEQ ID NO: 164091 - DNA, 24 bp, Artificial sequence
  SiRNA target sequence
gtgtgcttgatgcaatgcttccat

SEQ ID NO: 164092 - DNA, 24 bp, Artificial sequence
  SiRNA target sequence
tgtgcttgatgcaatgcttccata

SEQ ID NO: 164093 - DNA, 24 bp, Artificial sequence
  SiRNA target sequence
gtgcttgatgcaatgcttccatac

SEQ ID NO: 164094 - DNA, 24 bp, Artificial sequence
  SiRNA target sequence
tgcttgatgcaatgcttccatact

SEQ ID NO: 164095 - DNA, 24 bp, Artificial sequence
  SiRNA target sequence
gcttgatgcaatgcttccatacta

SEQ ID NO: 164096 - DNA, 24 bp, Artificial sequence
  SiRNA target sequence
cttgatgcaatgcttccatactat

SEQ ID NO: 164097 - DNA, 24 bp, Artificial sequence
  SiRNA target sequence
ttgatgcaatgcttccatactata

SEQ ID NO: 164098 - DNA, 24 bp, Artificial sequence
  SiRNA target sequence
tgatgcaatgcttccatactatac

SEQ ID NO: 164099 - DNA, 24 bp, Artificial sequence
  SiRNA target sequence
gatgcaatgcttccatactataca

SEQ ID NO: 164100 - DNA, 24 bp, Artificial sequence
  SiRNA target sequence
atgcaatgcttccatactatacat

SEQ ID NO: 164101 - DNA, 24 bp, Artificial sequence
  SiRNA target sequence
tgcaatgcttccatactatacatc

SEQ ID NO: 164102 - DNA, 24 bp, Artificial sequence
  SiRNA target sequence
gcaatgcttccatactatacatcc

SEQ ID NO: 164103 - DNA, 24 bp, Artificial sequence
  SiRNA target sequence
caatgcttccatactatacatcca

SEQ ID NO: 164104 - DNA, 24 bp, Artificial sequence
  SiRNA target sequence
aatgcttccatactatacatccat

SEQ ID NO: 164105 - DNA, 24 bp, Artificial sequence
  SiRNA target sequence
atgcttccatactatacatccatt

SEQ ID NO: 164106 - DNA, 24 bp, Artificial sequence
  SiRNA target sequence
tgcttccatactatacatccattt

SEQ ID NO: 164107 - DNA, 24 bp, Artificial sequence
  SiRNA target sequence
gcttccatactatacatccatttt

SEQ ID NO: 164108 - DNA, 24 bp, Artificial sequence
  SiRNA target sequence
cttccatactatacatccattttt

SEQ ID NO: 164109 - DNA, 24 bp, Artificial sequence
  SiRNA target sequence
ttccatactatacatccatttttg

SEQ ID NO: 164110 - DNA, 24 bp, Artificial sequence
  SiRNA target sequence
tccatactatacatccatttttgg

SEQ ID NO: 164111 - DNA, 24 bp, Artificial sequence
  SiRNA target sequence
ccatactatacatccatttttgga

SEQ ID NO: 164112 - DNA, 24 bp, Artificial sequence
  SiRNA target sequence
catactatacatccatttttggaa

SEQ ID NO: 164113 - DNA, 24 bp, Artificial sequence
  SiRNA target sequence
atactatacatccatttttggaaa

SEQ ID NO: 164114 - DNA, 24 bp, Artificial sequence
  SiRNA target sequence
tactatacatccatttttggaaat

SEQ ID NO: 164115 - DNA, 24 bp, Artificial sequence
  SiRNA target sequence
actatacatccatttttggaaatc

SEQ ID NO: 164116 - DNA, 24 bp, Artificial sequence
  SiRNA target sequence
ctatacatccatttttggaaatcc

SEQ ID NO: 164117 - DNA, 24 bp, Artificial sequence
  SiRNA target sequence
tatacatccatttttggaaatcca

SEQ ID NO: 164118 - DNA, 24 bp, Artificial sequence
  SiRNA target sequence
atacatccatttttggaaatccac

SEQ ID NO: 164119 - DNA, 24 bp, Artificial sequence
  SiRNA target sequence
tacatccatttttggaaatccaca

SEQ ID NO: 164120 - DNA, 24 bp, Artificial sequence
  SiRNA target sequence
acatccatttttggaaatccacat

SEQ ID NO: 164121 - DNA, 24 bp, Artificial sequence
  SiRNA target sequence
catccatttttggaaatccacatt

SEQ ID NO: 164122 - DNA, 24 bp, Artificial sequence
  SiRNA target sequence
atccatttttggaaatccacattc

SEQ ID NO: 164123 - DNA, 24 bp, Artificial sequence
  SiRNA target sequence
tccatttttggaaatccacattct

SEQ ID NO: 164124 - DNA, 24 bp, Artificial sequence
  SiRNA target sequence
ccatttttggaaatccacattctc

SEQ ID NO: 164125 - DNA, 24 bp, Artificial sequence
  SiRNA target sequence
catttttggaaatccacattctcg

SEQ ID NO: 164126 - DNA, 24 bp, Artificial sequence
  SiRNA target sequence
atttttggaaatccacattctcgc

SEQ ID NO: 164127 - DNA, 24 bp, Artificial sequence
  SiRNA target sequence
tttttggaaatccacattctcgca

SEQ ID NO: 164128 - DNA, 24 bp, Artificial sequence
  SiRNA target sequence
ttttggaaatccacattctcgcac

SEQ ID NO: 164129 - DNA, 24 bp, Artificial sequence
  SiRNA target sequence
tttggaaatccacattctcgcacg

SEQ ID NO: 164130 - DNA, 24 bp, Artificial sequence
  SiRNA target sequence
ttggaaatccacattctcgcacgc

SEQ ID NO: 164131 - DNA, 24 bp, Artificial sequence
  SiRNA target sequence
tggaaatccacattctcgcacgca

SEQ ID NO: 164132 - DNA, 24 bp, Artificial sequence
  SiRNA target sequence
ggaaatccacattctcgcacgcat

SEQ ID NO: 164133 - DNA, 24 bp, Artificial sequence
  SiRNA target sequence
gaaatccacattctcgcacgcata

SEQ ID NO: 164134 - DNA, 24 bp, Artificial sequence
  SiRNA target sequence
aaatccacattctcgcacgcatac

SEQ ID NO: 164135 - DNA, 24 bp, Artificial sequence
  SiRNA target sequence
aatccacattctcgcacgcatacg

SEQ ID NO: 164136 - DNA, 24 bp, Artificial sequence
  SiRNA target sequence
atccacattctcgcacgcatacgt

SEQ ID NO: 164137 - DNA, 24 bp, Artificial sequence
  SiRNA target sequence
tccacattctcgcacgcatacgtt

SEQ ID NO: 164138 - DNA, 24 bp, Artificial sequence
  SiRNA target sequence
ccacattctcgcacgcatacgttt

SEQ ID NO: 164139 - DNA, 24 bp, Artificial sequence
  SiRNA target sequence
cacattctcgcacgcatacgtttg

SEQ ID NO: 164140 - DNA, 24 bp, Artificial sequence
  SiRNA target sequence
acattctcgcacgcatacgtttgg

SEQ ID NO: 164141 - DNA, 24 bp, Artificial sequence
  SiRNA target sequence
cattctcgcacgcatacgtttgga

SEQ ID NO: 164142 - DNA, 24 bp, Artificial sequence
  SiRNA target sequence
attctcgcacgcatacgtttggat

SEQ ID NO: 164143 - DNA, 24 bp, Artificial sequence
  SiRNA target sequence
ttctcgcacgcatacgtttggatg

SEQ ID NO: 164144 - DNA, 24 bp, Artificial sequence
  SiRNA target sequence
tctcgcacgcatacgtttggatgg

SEQ ID NO: 164145 - DNA, 24 bp, Artificial sequence
  SiRNA target sequence
ctcgcacgcatacgtttggatgga

SEQ ID NO: 164146 - DNA, 24 bp, Artificial sequence
  SiRNA target sequence
tcgcacgcatacgtttggatggaa

SEQ ID NO: 164147 - DNA, 24 bp, Artificial sequence
  SiRNA target sequence
cgcacgcatacgtttggatggaat

SEQ ID NO: 164148 - DNA, 24 bp, Artificial sequence
  SiRNA target sequence
gcacgcatacgtttggatggaatg

SEQ ID NO: 164149 - DNA, 24 bp, Artificial sequence
  SiRNA target sequence
cacgcatacgtttggatggaatgc

SEQ ID NO: 164150 - DNA, 24 bp, Artificial sequence
  SiRNA target sequence
acgcatacgtttggatggaatgca

SEQ ID NO: 164151 - DNA, 24 bp, Artificial sequence
  SiRNA target sequence
cgcatacgtttggatggaatgcag

SEQ ID NO: 164152 - DNA, 24 bp, Artificial sequence
  SiRNA target sequence
gcatacgtttggatggaatgcaga

SEQ ID NO: 164153 - DNA, 24 bp, Artificial sequence
  SiRNA target sequence
catacgtttggatggaatgcagaa

SEQ ID NO: 164154 - DNA, 24 bp, Artificial sequence
  SiRNA target sequence
atacgtttggatggaatgcagaaa

SEQ ID NO: 164155 - DNA, 24 bp, Artificial sequence
  SiRNA target sequence
tacgtttggatggaatgcagaaaa

SEQ ID NO: 164156 - DNA, 24 bp, Artificial sequence
  SiRNA target sequence
acgtttggatggaatgcagaaaaa

SEQ ID NO: 164157 - DNA, 24 bp, Artificial sequence
  SiRNA target sequence
cgtttggatggaatgcagaaaaag

SEQ ID NO: 164158 - DNA, 24 bp, Artificial sequence
  SiRNA target sequence
gtttggatggaatgcagaaaaagg

SEQ ID NO: 164159 - DNA, 24 bp, Artificial sequence
  SiRNA target sequence
tttggatggaatgcagaaaaaggc

SEQ ID NO: 164160 - DNA, 24 bp, Artificial sequence
  SiRNA target sequence
ttggatggaatgcagaaaaaggcg

SEQ ID NO: 164161 - DNA, 24 bp, Artificial sequence
  SiRNA target sequence
tggatggaatgcagaaaaaggcgt

SEQ ID NO: 164162 - DNA, 24 bp, Artificial sequence
  SiRNA target sequence
ggatggaatgcagaaaaaggcgta

SEQ ID NO: 164163 - DNA, 24 bp, Artificial sequence
  SiRNA target sequence
gatggaatgcagaaaaaggcgtag

SEQ ID NO: 164164 - DNA, 24 bp, Artificial sequence
  SiRNA target sequence
atggaatgcagaaaaaggcgtaga

SEQ ID NO: 164165 - DNA, 24 bp, Artificial sequence
  SiRNA target sequence
tggaatgcagaaaaaggcgtagaa

SEQ ID NO: 164166 - DNA, 24 bp, Artificial sequence
  SiRNA target sequence
ggaatgcagaaaaaggcgtagaaa

SEQ ID NO: 164167 - DNA, 24 bp, Artificial sequence
  SiRNA target sequence
gaatgcagaaaaaggcgtagaaat

SEQ ID NO: 164168 - DNA, 24 bp, Artificial sequence
  SiRNA target sequence
aatgcagaaaaaggcgtagaaatg

SEQ ID NO: 164169 - DNA, 24 bp, Artificial sequence
  SiRNA target sequence
atgcagaaaaaggcgtagaaatgg

SEQ ID NO: 164170 - DNA, 24 bp, Artificial sequence
  SiRNA target sequence
tgcagaaaaaggcgtagaaatggc

SEQ ID NO: 164171 - DNA, 24 bp, Artificial sequence
  SiRNA target sequence
gcagaaaaaggcgtagaaatggct

SEQ ID NO: 164172 - DNA, 24 bp, Artificial sequence
  SiRNA target sequence
cagaaaaaggcgtagaaatggctc

SEQ ID NO: 164173 - DNA, 24 bp, Artificial sequence
  SiRNA target sequence
agaaaaaggcgtagaaatggctcg

SEQ ID NO: 164174 - DNA, 24 bp, Artificial sequence
  SiRNA target sequence
gaaaaaggcgtagaaatggctcga

SEQ ID NO: 164175 - DNA, 24 bp, Artificial sequence
  SiRNA target sequence
aaaaaggcgtagaaatggctcgaa

SEQ ID NO: 164176 - DNA, 24 bp, Artificial sequence
  SiRNA target sequence
aaaaggcgtagaaatggctcgaaa

SEQ ID NO: 164177 - DNA, 24 bp, Artificial sequence
  SiRNA target sequence
aaaggcgtagaaatggctcgaaag

SEQ ID NO: 164178 - DNA, 24 bp, Artificial sequence
  SiRNA target sequence
aaggcgtagaaatggctcgaaagc

SEQ ID NO: 164179 - DNA, 24 bp, Artificial sequence
  SiRNA target sequence
aggcgtagaaatggctcgaaagca

SEQ ID NO: 164180 - DNA, 24 bp, Artificial sequence
  SiRNA target sequence
ggcgtagaaatggctcgaaagcaa

SEQ ID NO: 164181 - DNA, 24 bp, Artificial sequence
  SiRNA target sequence
gcgtagaaatggctcgaaagcaag

SEQ ID NO: 164182 - DNA, 24 bp, Artificial sequence
  SiRNA target sequence
cgtagaaatggctcgaaagcaagt

SEQ ID NO: 164183 - DNA, 24 bp, Artificial sequence
  SiRNA target sequence
gtagaaatggctcgaaagcaagta

SEQ ID NO: 164184 - DNA, 24 bp, Artificial sequence
  SiRNA target sequence
tagaaatggctcgaaagcaagtag

SEQ ID NO: 164185 - DNA, 24 bp, Artificial sequence
  SiRNA target sequence
agaaatggctcgaaagcaagtagc

SEQ ID NO: 164186 - DNA, 24 bp, Artificial sequence
  SiRNA target sequence
gaaatggctcgaaagcaagtagca

SEQ ID NO: 164187 - DNA, 24 bp, Artificial sequence
  SiRNA target sequence
aaatggctcgaaagcaagtagcag

SEQ ID NO: 164188 - DNA, 24 bp, Artificial sequence
  SiRNA target sequence
aatggctcgaaagcaagtagcaga

SEQ ID NO: 164189 - DNA, 24 bp, Artificial sequence
  SiRNA target sequence
atggctcgaaagcaagtagcagat

SEQ ID NO: 164190 - DNA, 24 bp, Artificial sequence
  SiRNA target sequence
tggctcgaaagcaagtagcagatt

SEQ ID NO: 164191 - DNA, 24 bp, Artificial sequence
  SiRNA target sequence
ggctcgaaagcaagtagcagattt

SEQ ID NO: 164192 - DNA, 24 bp, Artificial sequence
  SiRNA target sequence
gctcgaaagcaagtagcagattta

SEQ ID NO: 164193 - DNA, 24 bp, Artificial sequence
  SiRNA target sequence
ctcgaaagcaagtagcagatttac

SEQ ID NO: 164194 - DNA, 24 bp, Artificial sequence
  SiRNA target sequence
tcgaaagcaagtagcagatttact

SEQ ID NO: 164195 - DNA, 24 bp, Artificial sequence
  SiRNA target sequence
cgaaagcaagtagcagatttactg

SEQ ID NO: 164196 - DNA, 24 bp, Artificial sequence
  SiRNA target sequence
gaaagcaagtagcagatttactga

SEQ ID NO: 164197 - DNA, 24 bp, Artificial sequence
  SiRNA target sequence
aaagcaagtagcagatttactgaa

SEQ ID NO: 164198 - DNA, 24 bp, Artificial sequence
  SiRNA target sequence
aagcaagtagcagatttactgaat

SEQ ID NO: 164199 - DNA, 24 bp, Artificial sequence
  SiRNA target sequence
agcaagtagcagatttactgaatg

SEQ ID NO: 164200 - DNA, 24 bp, Artificial sequence
  SiRNA target sequence
gcaagtagcagatttactgaatgc

SEQ ID NO: 164201 - DNA, 24 bp, Artificial sequence
  SiRNA target sequence
caagtagcagatttactgaatgcc

SEQ ID NO: 164202 - DNA, 24 bp, Artificial sequence
  SiRNA target sequence
aagtagcagatttactgaatgcca

SEQ ID NO: 164203 - DNA, 24 bp, Artificial sequence
  SiRNA target sequence
agtagcagatttactgaatgccaa

SEQ ID NO: 164204 - DNA, 24 bp, Artificial sequence
  SiRNA target sequence
gtagcagatttactgaatgccaat

SEQ ID NO: 164205 - DNA, 24 bp, Artificial sequence
  SiRNA target sequence
tagcagatttactgaatgccaatg

SEQ ID NO: 164206 - DNA, 24 bp, Artificial sequence
  SiRNA target sequence
agcagatttactgaatgccaatga

SEQ ID NO: 164207 - DNA, 24 bp, Artificial sequence
  SiRNA target sequence
gcagatttactgaatgccaatgaa

SEQ ID NO: 164208 - DNA, 24 bp, Artificial sequence
  SiRNA target sequence
cagatttactgaatgccaatgaaa

SEQ ID NO: 164209 - DNA, 24 bp, Artificial sequence
  SiRNA target sequence
agatttactgaatgccaatgaaaa

SEQ ID NO: 164210 - DNA, 24 bp, Artificial sequence
  SiRNA target sequence
gatttactgaatgccaatgaaaaa

SEQ ID NO: 164211 - DNA, 24 bp, Artificial sequence
  SiRNA target sequence
atttactgaatgccaatgaaaaag

SEQ ID NO: 164212 - DNA, 24 bp, Artificial sequence
  SiRNA target sequence
tttactgaatgccaatgaaaaaga

SEQ ID NO: 164213 - DNA, 24 bp, Artificial sequence
  SiRNA target sequence
ttactgaatgccaatgaaaaagaa

SEQ ID NO: 164214 - DNA, 24 bp, Artificial sequence
  SiRNA target sequence
tactgaatgccaatgaaaaagaaa

SEQ ID NO: 164215 - DNA, 24 bp, Artificial sequence
  SiRNA target sequence
actgaatgccaatgaaaaagaaat

SEQ ID NO: 164216 - DNA, 24 bp, Artificial sequence
  SiRNA target sequence
ctgaatgccaatgaaaaagaaatt

SEQ ID NO: 164217 - DNA, 24 bp, Artificial sequence
  SiRNA target sequence
tgaatgccaatgaaaaagaaatta

SEQ ID NO: 164218 - DNA, 24 bp, Artificial sequence
  SiRNA target sequence
gaatgccaatgaaaaagaaattat

SEQ ID NO: 164219 - DNA, 24 bp, Artificial sequence
  SiRNA target sequence
aatgccaatgaaaaagaaattatt

SEQ ID NO: 164220 - DNA, 24 bp, Artificial sequence
  SiRNA target sequence
atgccaatgaaaaagaaattattt

SEQ ID NO: 164221 - DNA, 24 bp, Artificial sequence
  SiRNA target sequence
tgccaatgaaaaagaaattatttt

SEQ ID NO: 164222 - DNA, 24 bp, Artificial sequence
  SiRNA target sequence
gccaatgaaaaagaaattattttt

SEQ ID NO: 164223 - DNA, 24 bp, Artificial sequence
  SiRNA target sequence
ccaatgaaaaagaaattattttta

SEQ ID NO: 164224 - DNA, 24 bp, Artificial sequence
  SiRNA target sequence
caatgaaaaagaaattatttttac

SEQ ID NO: 164225 - DNA, 24 bp, Artificial sequence
  SiRNA target sequence
aatgaaaaagaaattatttttact

SEQ ID NO: 164226 - DNA, 24 bp, Artificial sequence
  SiRNA target sequence
atgaaaaagaaattatttttacta

SEQ ID NO: 164227 - DNA, 24 bp, Artificial sequence
  SiRNA target sequence
tgaaaaagaaattatttttactag

SEQ ID NO: 164228 - DNA, 24 bp, Artificial sequence
  SiRNA target sequence
gaaaaagaaattatttttactagc

SEQ ID NO: 164229 - DNA, 24 bp, Artificial sequence
  SiRNA target sequence
aaaaagaaattatttttactagcg

SEQ ID NO: 164230 - DNA, 24 bp, Artificial sequence
  SiRNA target sequence
aaaagaaattatttttactagcgg

SEQ ID NO: 164231 - DNA, 24 bp, Artificial sequence
  SiRNA target sequence
aaagaaattatttttactagcggt

SEQ ID NO: 164232 - DNA, 24 bp, Artificial sequence
  SiRNA target sequence
aagaaattatttttactagcggtg

SEQ ID NO: 164233 - DNA, 24 bp, Artificial sequence
  SiRNA target sequence
agaaattatttttactagcggtgc

SEQ ID NO: 164234 - DNA, 24 bp, Artificial sequence
  SiRNA target sequence
gaaattatttttactagcggtgct

SEQ ID NO: 164235 - DNA, 24 bp, Artificial sequence
  SiRNA target sequence
aaattatttttactagcggtgcta

SEQ ID NO: 164236 - DNA, 24 bp, Artificial sequence
  SiRNA target sequence
aattatttttactagcggtgctac

SEQ ID NO: 164237 - DNA, 24 bp, Artificial sequence
  SiRNA target sequence
attatttttactagcggtgctact

SEQ ID NO: 164238 - DNA, 24 bp, Artificial sequence
  SiRNA target sequence
ttatttttactagcggtgctactg

SEQ ID NO: 164239 - DNA, 24 bp, Artificial sequence
  SiRNA target sequence
tatttttactagcggtgctactga

SEQ ID NO: 164240 - DNA, 24 bp, Artificial sequence
  SiRNA target sequence
atttttactagcggtgctactgag

SEQ ID NO: 164241 - DNA, 24 bp, Artificial sequence
  SiRNA target sequence
tttttactagcggtgctactgaga

SEQ ID NO: 164242 - DNA, 24 bp, Artificial sequence
  SiRNA target sequence
ttttactagcggtgctactgagag

SEQ ID NO: 164243 - DNA, 24 bp, Artificial sequence
  SiRNA target sequence
tttactagcggtgctactgagagt

SEQ ID NO: 164244 - DNA, 24 bp, Artificial sequence
  SiRNA target sequence
ttactagcggtgctactgagagta

SEQ ID NO: 164245 - DNA, 24 bp, Artificial sequence
  SiRNA target sequence
tactagcggtgctactgagagtaa

SEQ ID NO: 164246 - DNA, 24 bp, Artificial sequence
  SiRNA target sequence
actagcggtgctactgagagtaac

SEQ ID NO: 164247 - DNA, 24 bp, Artificial sequence
  SiRNA target sequence
ctagcggtgctactgagagtaaca

SEQ ID NO: 164248 - DNA, 24 bp, Artificial sequence
  SiRNA target sequence
tagcggtgctactgagagtaacaa

SEQ ID NO: 164249 - DNA, 24 bp, Artificial sequence
  SiRNA target sequence
agcggtgctactgagagtaacaac

SEQ ID NO: 164250 - DNA, 24 bp, Artificial sequence
  SiRNA target sequence
gcggtgctactgagagtaacaacc

SEQ ID NO: 164251 - DNA, 24 bp, Artificial sequence
  SiRNA target sequence
cggtgctactgagagtaacaacct

SEQ ID NO: 164252 - DNA, 24 bp, Artificial sequence
  SiRNA target sequence
ggtgctactgagagtaacaacctt

SEQ ID NO: 164253 - DNA, 24 bp, Artificial sequence
  SiRNA target sequence
gtgctactgagagtaacaaccttg

SEQ ID NO: 164254 - DNA, 24 bp, Artificial sequence
  SiRNA target sequence
tgctactgagagtaacaaccttgc

SEQ ID NO: 164255 - DNA, 24 bp, Artificial sequence
  SiRNA target sequence
gctactgagagtaacaaccttgca

SEQ ID NO: 164256 - DNA, 24 bp, Artificial sequence
  SiRNA target sequence
ctactgagagtaacaaccttgcac

SEQ ID NO: 164257 - DNA, 24 bp, Artificial sequence
  SiRNA target sequence
tactgagagtaacaaccttgcact

SEQ ID NO: 164258 - DNA, 24 bp, Artificial sequence
  SiRNA target sequence
actgagagtaacaaccttgcacta

SEQ ID NO: 164259 - DNA, 24 bp, Artificial sequence
  SiRNA target sequence
ctgagagtaacaaccttgcactaa

SEQ ID NO: 164260 - DNA, 24 bp, Artificial sequence
  SiRNA target sequence
tgagagtaacaaccttgcactaaa

SEQ ID NO: 164261 - DNA, 24 bp, Artificial sequence
  SiRNA target sequence
gagagtaacaaccttgcactaaag

SEQ ID NO: 164262 - DNA, 24 bp, Artificial sequence
  SiRNA target sequence
agagtaacaaccttgcactaaagg

SEQ ID NO: 164263 - DNA, 24 bp, Artificial sequence
  SiRNA target sequence
gagtaacaaccttgcactaaaggg

SEQ ID NO: 164264 - DNA, 24 bp, Artificial sequence
  SiRNA target sequence
agtaacaaccttgcactaaagggt

SEQ ID NO: 164265 - DNA, 24 bp, Artificial sequence
  SiRNA target sequence
gtaacaaccttgcactaaagggtg

SEQ ID NO: 164266 - DNA, 24 bp, Artificial sequence
  SiRNA target sequence
taacaaccttgcactaaagggtgt

SEQ ID NO: 164267 - DNA, 24 bp, Artificial sequence
  SiRNA target sequence
aacaaccttgcactaaagggtgtc

SEQ ID NO: 164268 - DNA, 24 bp, Artificial sequence
  SiRNA target sequence
acaaccttgcactaaagggtgtct

SEQ ID NO: 164269 - DNA, 24 bp, Artificial sequence
  SiRNA target sequence
caaccttgcactaaagggtgtctt

SEQ ID NO: 164270 - DNA, 24 bp, Artificial sequence
  SiRNA target sequence
aaccttgcactaaagggtgtcttt

SEQ ID NO: 164271 - DNA, 24 bp, Artificial sequence
  SiRNA target sequence
accttgcactaaagggtgtctttg

SEQ ID NO: 164272 - DNA, 24 bp, Artificial sequence
  SiRNA target sequence
ccttgcactaaagggtgtctttgc

SEQ ID NO: 164273 - DNA, 24 bp, Artificial sequence
  SiRNA target sequence
cttgcactaaagggtgtctttgca

SEQ ID NO: 164274 - DNA, 24 bp, Artificial sequence
  SiRNA target sequence
ttgcactaaagggtgtctttgcat

SEQ ID NO: 164275 - DNA, 24 bp, Artificial sequence
  SiRNA target sequence
tgcactaaagggtgtctttgcatt

SEQ ID NO: 164276 - DNA, 24 bp, Artificial sequence
  SiRNA target sequence
gcactaaagggtgtctttgcattt

SEQ ID NO: 164277 - DNA, 24 bp, Artificial sequence
  SiRNA target sequence
cactaaagggtgtctttgcatttt

SEQ ID NO: 164278 - DNA, 24 bp, Artificial sequence
  SiRNA target sequence
actaaagggtgtctttgcattttt

SEQ ID NO: 164279 - DNA, 24 bp, Artificial sequence
  SiRNA target sequence
ctaaagggtgtctttgcattttta

SEQ ID NO: 164280 - DNA, 24 bp, Artificial sequence
  SiRNA target sequence
taaagggtgtctttgcatttttaa

SEQ ID NO: 164281 - DNA, 24 bp, Artificial sequence
  SiRNA target sequence
aaagggtgtctttgcatttttaaa

SEQ ID NO: 164282 - DNA, 24 bp, Artificial sequence
  SiRNA target sequence
aagggtgtctttgcatttttaaaa

SEQ ID NO: 164283 - DNA, 24 bp, Artificial sequence
  SiRNA target sequence
agggtgtctttgcatttttaaaaa

SEQ ID NO: 164284 - DNA, 24 bp, Artificial sequence
  SiRNA target sequence
gggtgtctttgcatttttaaaaaa

SEQ ID NO: 164285 - DNA, 24 bp, Artificial sequence
  SiRNA target sequence
ggtgtctttgcatttttaaaaaaa

SEQ ID NO: 164286 - DNA, 24 bp, Artificial sequence
  SiRNA target sequence
gtgtctttgcatttttaaaaaaag

SEQ ID NO: 164287 - DNA, 24 bp, Artificial sequence
  SiRNA target sequence
tgtctttgcatttttaaaaaaaga

SEQ ID NO: 164288 - DNA, 24 bp, Artificial sequence
  SiRNA target sequence
gtctttgcatttttaaaaaaagac

SEQ ID NO: 164289 - DNA, 24 bp, Artificial sequence
  SiRNA target sequence
tctttgcatttttaaaaaaagaca

SEQ ID NO: 164290 - DNA, 24 bp, Artificial sequence
  SiRNA target sequence
ctttgcatttttaaaaaaagacaa

SEQ ID NO: 164291 - DNA, 24 bp, Artificial sequence
  SiRNA target sequence
tttgcatttttaaaaaaagacaat

SEQ ID NO: 164292 - DNA, 24 bp, Artificial sequence
  SiRNA target sequence
ttgcatttttaaaaaaagacaata

SEQ ID NO: 164293 - DNA, 24 bp, Artificial sequence
  SiRNA target sequence
tgcatttttaaaaaaagacaatag

SEQ ID NO: 164294 - DNA, 24 bp, Artificial sequence
  SiRNA target sequence
gcatttttaaaaaaagacaatagg

SEQ ID NO: 164295 - DNA, 24 bp, Artificial sequence
  SiRNA target sequence
catttttaaaaaaagacaataggc

SEQ ID NO: 164296 - DNA, 24 bp, Artificial sequence
  SiRNA target sequence
atttttaaaaaaagacaataggcc

SEQ ID NO: 164297 - DNA, 24 bp, Artificial sequence
  SiRNA target sequence
tttttaaaaaaagacaataggcct

SEQ ID NO: 164298 - DNA, 24 bp, Artificial sequence
  SiRNA target sequence
ttttaaaaaaagacaataggcctg

SEQ ID NO: 164299 - DNA, 24 bp, Artificial sequence
  SiRNA target sequence
tttaaaaaaagacaataggcctgt

SEQ ID NO: 164300 - DNA, 24 bp, Artificial sequence
  SiRNA target sequence
ttaaaaaaagacaataggcctgtt

SEQ ID NO: 164301 - DNA, 24 bp, Artificial sequence
  SiRNA target sequence
taaaaaaagacaataggcctgttc

SEQ ID NO: 164302 - DNA, 24 bp, Artificial sequence
  SiRNA target sequence
aaaaaaagacaataggcctgttca

SEQ ID NO: 164303 - DNA, 24 bp, Artificial sequence
  SiRNA target sequence
aaaaaagacaataggcctgttcat

SEQ ID NO: 164304 - DNA, 24 bp, Artificial sequence
  SiRNA target sequence
aaaaagacaataggcctgttcata

SEQ ID NO: 164305 - DNA, 24 bp, Artificial sequence
  SiRNA target sequence
aaaagacaataggcctgttcatat

SEQ ID NO: 164306 - DNA, 24 bp, Artificial sequence
  SiRNA target sequence
aaagacaataggcctgttcatatc

SEQ ID NO: 164307 - DNA, 24 bp, Artificial sequence
  SiRNA target sequence
aagacaataggcctgttcatatca

SEQ ID NO: 164308 - DNA, 24 bp, Artificial sequence
  SiRNA target sequence
agacaataggcctgttcatatcat

SEQ ID NO: 164309 - DNA, 24 bp, Artificial sequence
  SiRNA target sequence
gacaataggcctgttcatatcatt

SEQ ID NO: 164310 - DNA, 24 bp, Artificial sequence
  SiRNA target sequence
acaataggcctgttcatatcatta

SEQ ID NO: 164311 - DNA, 24 bp, Artificial sequence
  SiRNA target sequence
caataggcctgttcatatcattac

SEQ ID NO: 164312 - DNA, 24 bp, Artificial sequence
  SiRNA target sequence
aataggcctgttcatatcattacc

SEQ ID NO: 164313 - DNA, 24 bp, Artificial sequence
  SiRNA target sequence
ataggcctgttcatatcattacca

SEQ ID NO: 164314 - DNA, 24 bp, Artificial sequence
  SiRNA target sequence
taggcctgttcatatcattaccac

SEQ ID NO: 164315 - DNA, 24 bp, Artificial sequence
  SiRNA target sequence
aggcctgttcatatcattaccaca

SEQ ID NO: 164316 - DNA, 24 bp, Artificial sequence
  SiRNA target sequence
ggcctgttcatatcattaccacac

SEQ ID NO: 164317 - DNA, 24 bp, Artificial sequence
  SiRNA target sequence
gcctgttcatatcattaccacaca

SEQ ID NO: 164318 - DNA, 24 bp, Artificial sequence
  SiRNA target sequence
cctgttcatatcattaccacacaa

SEQ ID NO: 164319 - DNA, 24 bp, Artificial sequence
  SiRNA target sequence
ctgttcatatcattaccacacaaa

SEQ ID NO: 164320 - DNA, 24 bp, Artificial sequence
  SiRNA target sequence
tgttcatatcattaccacacaaat

SEQ ID NO: 164321 - DNA, 24 bp, Artificial sequence
  SiRNA target sequence
gttcatatcattaccacacaaatt

SEQ ID NO: 164322 - DNA, 24 bp, Artificial sequence
  SiRNA target sequence
ttcatatcattaccacacaaattg

SEQ ID NO: 164323 - DNA, 24 bp, Artificial sequence
  SiRNA target sequence
tcatatcattaccacacaaattga

SEQ ID NO: 164324 - DNA, 24 bp, Artificial sequence
  SiRNA target sequence
catatcattaccacacaaattgaa

SEQ ID NO: 164325 - DNA, 24 bp, Artificial sequence
  SiRNA target sequence
atatcattaccacacaaattgaac

SEQ ID NO: 164326 - DNA, 24 bp, Artificial sequence
  SiRNA target sequence
tatcattaccacacaaattgaaca

SEQ ID NO: 164327 - DNA, 24 bp, Artificial sequence
  SiRNA target sequence
atcattaccacacaaattgaacat

SEQ ID NO: 164328 - DNA, 24 bp, Artificial sequence
  SiRNA target sequence
tcattaccacacaaattgaacata

SEQ ID NO: 164329 - DNA, 24 bp, Artificial sequence
  SiRNA target sequence
cattaccacacaaattgaacataa

SEQ ID NO: 164330 - DNA, 24 bp, Artificial sequence
  SiRNA target sequence
attaccacacaaattgaacataaa

SEQ ID NO: 164331 - DNA, 24 bp, Artificial sequence
  SiRNA target sequence
ttaccacacaaattgaacataaat

SEQ ID NO: 164332 - DNA, 24 bp, Artificial sequence
  SiRNA target sequence
taccacacaaattgaacataaatg

SEQ ID NO: 164333 - DNA, 24 bp, Artificial sequence
  SiRNA target sequence
accacacaaattgaacataaatgt

SEQ ID NO: 164334 - DNA, 24 bp, Artificial sequence
  SiRNA target sequence
ccacacaaattgaacataaatgtg

SEQ ID NO: 164335 - DNA, 24 bp, Artificial sequence
  SiRNA target sequence
cacacaaattgaacataaatgtgt

SEQ ID NO: 164336 - DNA, 24 bp, Artificial sequence
  SiRNA target sequence
acacaaattgaacataaatgtgta

SEQ ID NO: 164337 - DNA, 24 bp, Artificial sequence
  SiRNA target sequence
cacaaattgaacataaatgtgtat

SEQ ID NO: 164338 - DNA, 24 bp, Artificial sequence
  SiRNA target sequence
acaaattgaacataaatgtgtatt

SEQ ID NO: 164339 - DNA, 24 bp, Artificial sequence
  SiRNA target sequence
caaattgaacataaatgtgtattg

SEQ ID NO: 164340 - DNA, 24 bp, Artificial sequence
  SiRNA target sequence
aaattgaacataaatgtgtattgg

SEQ ID NO: 164341 - DNA, 24 bp, Artificial sequence
  SiRNA target sequence
aattgaacataaatgtgtattgga

SEQ ID NO: 164342 - DNA, 24 bp, Artificial sequence
  SiRNA target sequence
attgaacataaatgtgtattggac

SEQ ID NO: 164343 - DNA, 24 bp, Artificial sequence
  SiRNA target sequence
ttgaacataaatgtgtattggaca

SEQ ID NO: 164344 - DNA, 24 bp, Artificial sequence
  SiRNA target sequence
tgaacataaatgtgtattggacac

SEQ ID NO: 164345 - DNA, 24 bp, Artificial sequence
  SiRNA target sequence
gaacataaatgtgtattggacaca

SEQ ID NO: 164346 - DNA, 24 bp, Artificial sequence
  SiRNA target sequence
aacataaatgtgtattggacacat

SEQ ID NO: 164347 - DNA, 24 bp, Artificial sequence
  SiRNA target sequence
acataaatgtgtattggacacatg

SEQ ID NO: 164348 - DNA, 24 bp, Artificial sequence
  SiRNA target sequence
cataaatgtgtattggacacatgt

SEQ ID NO: 164349 - DNA, 24 bp, Artificial sequence
  SiRNA target sequence
ataaatgtgtattggacacatgta

SEQ ID NO: 164350 - DNA, 24 bp, Artificial sequence
  SiRNA target sequence
taaatgtgtattggacacatgtag

SEQ ID NO: 164351 - DNA, 24 bp, Artificial sequence
  SiRNA target sequence
aaatgtgtattggacacatgtaga

SEQ ID NO: 164352 - DNA, 24 bp, Artificial sequence
  SiRNA target sequence
aatgtgtattggacacatgtagaa

SEQ ID NO: 164353 - DNA, 24 bp, Artificial sequence
  SiRNA target sequence
atgtgtattggacacatgtagaag

SEQ ID NO: 164354 - DNA, 24 bp, Artificial sequence
  SiRNA target sequence
tgtgtattggacacatgtagaaga

SEQ ID NO: 164355 - DNA, 24 bp, Artificial sequence
  SiRNA target sequence
gtgtattggacacatgtagaagat

SEQ ID NO: 164356 - DNA, 24 bp, Artificial sequence
  SiRNA target sequence
tgtattggacacatgtagaagatt

SEQ ID NO: 164357 - DNA, 24 bp, Artificial sequence
  SiRNA target sequence
gtattggacacatgtagaagatta

SEQ ID NO: 164358 - DNA, 24 bp, Artificial sequence
  SiRNA target sequence
tattggacacatgtagaagattag

SEQ ID NO: 164359 - DNA, 24 bp, Artificial sequence
  SiRNA target sequence
attggacacatgtagaagattaga

SEQ ID NO: 164360 - DNA, 24 bp, Artificial sequence
  SiRNA target sequence
ttggacacatgtagaagattagaa

SEQ ID NO: 164361 - DNA, 24 bp, Artificial sequence
  SiRNA target sequence
tggacacatgtagaagattagaag

SEQ ID NO: 164362 - DNA, 24 bp, Artificial sequence
  SiRNA target sequence
ggacacatgtagaagattagaaga

SEQ ID NO: 164363 - DNA, 24 bp, Artificial sequence
  SiRNA target sequence
gacacatgtagaagattagaagaa

SEQ ID NO: 164364 - DNA, 24 bp, Artificial sequence
  SiRNA target sequence
acacatgtagaagattagaagaag

SEQ ID NO: 164365 - DNA, 24 bp, Artificial sequence
  SiRNA target sequence
cacatgtagaagattagaagaaga

SEQ ID NO: 164366 - DNA, 24 bp, Artificial sequence
  SiRNA target sequence
acatgtagaagattagaagaagaa

SEQ ID NO: 164367 - DNA, 24 bp, Artificial sequence
  SiRNA target sequence
catgtagaagattagaagaagaag

SEQ ID NO: 164368 - DNA, 24 bp, Artificial sequence
  SiRNA target sequence
atgtagaagattagaagaagaagg

SEQ ID NO: 164369 - DNA, 24 bp, Artificial sequence
  SiRNA target sequence
tgtagaagattagaagaagaagga

SEQ ID NO: 164370 - DNA, 24 bp, Artificial sequence
  SiRNA target sequence
gtagaagattagaagaagaaggag

SEQ ID NO: 164371 - DNA, 24 bp, Artificial sequence
  SiRNA target sequence
tagaagattagaagaagaaggagc

SEQ ID NO: 164372 - DNA, 24 bp, Artificial sequence
  SiRNA target sequence
agaagattagaagaagaaggagct

SEQ ID NO: 164373 - DNA, 24 bp, Artificial sequence
  SiRNA target sequence
gaagattagaagaagaaggagcta

SEQ ID NO: 164374 - DNA, 24 bp, Artificial sequence
  SiRNA target sequence
aagattagaagaagaaggagctac

SEQ ID NO: 164375 - DNA, 24 bp, Artificial sequence
  SiRNA target sequence
agattagaagaagaaggagctaca

SEQ ID NO: 164376 - DNA, 24 bp, Artificial sequence
  SiRNA target sequence
gattagaagaagaaggagctacag

SEQ ID NO: 164377 - DNA, 24 bp, Artificial sequence
  SiRNA target sequence
attagaagaagaaggagctacagt

SEQ ID NO: 164378 - DNA, 24 bp, Artificial sequence
  SiRNA target sequence
ttagaagaagaaggagctacagtg

SEQ ID NO: 164379 - DNA, 24 bp, Artificial sequence
  SiRNA target sequence
tagaagaagaaggagctacagtga

SEQ ID NO: 164380 - DNA, 24 bp, Artificial sequence
  SiRNA target sequence
agaagaagaaggagctacagtgac

SEQ ID NO: 164381 - DNA, 24 bp, Artificial sequence
  SiRNA target sequence
gaagaagaaggagctacagtgact

SEQ ID NO: 164382 - DNA, 24 bp, Artificial sequence
  SiRNA target sequence
aagaagaaggagctacagtgactt

SEQ ID NO: 164383 - DNA, 24 bp, Artificial sequence
  SiRNA target sequence
agaagaaggagctacagtgactta

SEQ ID NO: 164384 - DNA, 24 bp, Artificial sequence
  SiRNA target sequence
gaagaaggagctacagtgacttat

SEQ ID NO: 164385 - DNA, 24 bp, Artificial sequence
  SiRNA target sequence
aagaaggagctacagtgacttatt

SEQ ID NO: 164386 - DNA, 24 bp, Artificial sequence
  SiRNA target sequence
agaaggagctacagtgacttattt

SEQ ID NO: 164387 - DNA, 24 bp, Artificial sequence
  SiRNA target sequence
gaaggagctacagtgacttatttg

SEQ ID NO: 164388 - DNA, 24 bp, Artificial sequence
  SiRNA target sequence
aaggagctacagtgacttatttgc

SEQ ID NO: 164389 - DNA, 24 bp, Artificial sequence
  SiRNA target sequence
aggagctacagtgacttatttgcc

SEQ ID NO: 164390 - DNA, 24 bp, Artificial sequence
  SiRNA target sequence
ggagctacagtgacttatttgcct

SEQ ID NO: 164391 - DNA, 24 bp, Artificial sequence
  SiRNA target sequence
gagctacagtgacttatttgcctg

SEQ ID NO: 164392 - DNA, 24 bp, Artificial sequence
  SiRNA target sequence
agctacagtgacttatttgcctgt

SEQ ID NO: 164393 - DNA, 24 bp, Artificial sequence
  SiRNA target sequence
gctacagtgacttatttgcctgta

SEQ ID NO: 164394 - DNA, 24 bp, Artificial sequence
  SiRNA target sequence
ctacagtgacttatttgcctgtag

SEQ ID NO: 164395 - DNA, 24 bp, Artificial sequence
  SiRNA target sequence
tacagtgacttatttgcctgtaga

SEQ ID NO: 164396 - DNA, 24 bp, Artificial sequence
  SiRNA target sequence
acagtgacttatttgcctgtagat

SEQ ID NO: 164397 - DNA, 24 bp, Artificial sequence
  SiRNA target sequence
cagtgacttatttgcctgtagata

SEQ ID NO: 164398 - DNA, 24 bp, Artificial sequence
  SiRNA target sequence
agtgacttatttgcctgtagataa

SEQ ID NO: 164399 - DNA, 24 bp, Artificial sequence
  SiRNA target sequence
gtgacttatttgcctgtagataaa

SEQ ID NO: 164400 - DNA, 24 bp, Artificial sequence
  SiRNA target sequence
tgacttatttgcctgtagataaaa

SEQ ID NO: 164401 - DNA, 24 bp, Artificial sequence
  SiRNA target sequence
gacttatttgcctgtagataaaaa

SEQ ID NO: 164402 - DNA, 24 bp, Artificial sequence
  SiRNA target sequence
acttatttgcctgtagataaaaat

SEQ ID NO: 164403 - DNA, 24 bp, Artificial sequence
  SiRNA target sequence
cttatttgcctgtagataaaaatg

SEQ ID NO: 164404 - DNA, 24 bp, Artificial sequence
  SiRNA target sequence
ttatttgcctgtagataaaaatgg

SEQ ID NO: 164405 - DNA, 24 bp, Artificial sequence
  SiRNA target sequence
tatttgcctgtagataaaaatgga

SEQ ID NO: 164406 - DNA, 24 bp, Artificial sequence
  SiRNA target sequence
atttgcctgtagataaaaatggaa

SEQ ID NO: 164407 - DNA, 24 bp, Artificial sequence
  SiRNA target sequence
tttgcctgtagataaaaatggaat

SEQ ID NO: 164408 - DNA, 24 bp, Artificial sequence
  SiRNA target sequence
ttgcctgtagataaaaatggaata

SEQ ID NO: 164409 - DNA, 24 bp, Artificial sequence
  SiRNA target sequence
tgcctgtagataaaaatggaatag

SEQ ID NO: 164410 - DNA, 24 bp, Artificial sequence
  SiRNA target sequence
gcctgtagataaaaatggaatagt

SEQ ID NO: 164411 - DNA, 24 bp, Artificial sequence
  SiRNA target sequence
cctgtagataaaaatggaatagta

SEQ ID NO: 164412 - DNA, 24 bp, Artificial sequence
  SiRNA target sequence
ctgtagataaaaatggaatagtag

SEQ ID NO: 164413 - DNA, 24 bp, Artificial sequence
  SiRNA target sequence
tgtagataaaaatggaatagtaga

SEQ ID NO: 164414 - DNA, 24 bp, Artificial sequence
  SiRNA target sequence
gtagataaaaatggaatagtagat

SEQ ID NO: 164415 - DNA, 24 bp, Artificial sequence
  SiRNA target sequence
tagataaaaatggaatagtagatc

SEQ ID NO: 164416 - DNA, 24 bp, Artificial sequence
  SiRNA target sequence
agataaaaatggaatagtagatcc

SEQ ID NO: 164417 - DNA, 24 bp, Artificial sequence
  SiRNA target sequence
gataaaaatggaatagtagatccg

SEQ ID NO: 164418 - DNA, 24 bp, Artificial sequence
  SiRNA target sequence
ataaaaatggaatagtagatccgc

SEQ ID NO: 164419 - DNA, 24 bp, Artificial sequence
  SiRNA target sequence
taaaaatggaatagtagatccgca

SEQ ID NO: 164420 - DNA, 24 bp, Artificial sequence
  SiRNA target sequence
aaaaatggaatagtagatccgcaa

SEQ ID NO: 164421 - DNA, 24 bp, Artificial sequence
  SiRNA target sequence
aaaatggaatagtagatccgcaat

SEQ ID NO: 164422 - DNA, 24 bp, Artificial sequence
  SiRNA target sequence
aaatggaatagtagatccgcaatt

SEQ ID NO: 164423 - DNA, 24 bp, Artificial sequence
  SiRNA target sequence
aatggaatagtagatccgcaatta

SEQ ID NO: 164424 - DNA, 24 bp, Artificial sequence
  SiRNA target sequence
atggaatagtagatccgcaattaa

SEQ ID NO: 164425 - DNA, 24 bp, Artificial sequence
  SiRNA target sequence
tggaatagtagatccgcaattaat

SEQ ID NO: 164426 - DNA, 24 bp, Artificial sequence
  SiRNA target sequence
ggaatagtagatccgcaattaata

SEQ ID NO: 164427 - DNA, 24 bp, Artificial sequence
  SiRNA target sequence
gaatagtagatccgcaattaataa

SEQ ID NO: 164428 - DNA, 24 bp, Artificial sequence
  SiRNA target sequence
aatagtagatccgcaattaataaa

SEQ ID NO: 164429 - DNA, 24 bp, Artificial sequence
  SiRNA target sequence
atagtagatccgcaattaataaaa

SEQ ID NO: 164430 - DNA, 24 bp, Artificial sequence
  SiRNA target sequence
tagtagatccgcaattaataaaaa

SEQ ID NO: 164431 - DNA, 24 bp, Artificial sequence
  SiRNA target sequence
agtagatccgcaattaataaaaaa

SEQ ID NO: 164432 - DNA, 24 bp, Artificial sequence
  SiRNA target sequence
gtagatccgcaattaataaaaaac

SEQ ID NO: 164433 - DNA, 24 bp, Artificial sequence
  SiRNA target sequence
tagatccgcaattaataaaaaaca

SEQ ID NO: 164434 - DNA, 24 bp, Artificial sequence
  SiRNA target sequence
agatccgcaattaataaaaaacag

SEQ ID NO: 164435 - DNA, 24 bp, Artificial sequence
  SiRNA target sequence
gatccgcaattaataaaaaacagt

SEQ ID NO: 164436 - DNA, 24 bp, Artificial sequence
  SiRNA target sequence
atccgcaattaataaaaaacagta

SEQ ID NO: 164437 - DNA, 24 bp, Artificial sequence
  SiRNA target sequence
tccgcaattaataaaaaacagtat

SEQ ID NO: 164438 - DNA, 24 bp, Artificial sequence
  SiRNA target sequence
ccgcaattaataaaaaacagtatt

SEQ ID NO: 164439 - DNA, 24 bp, Artificial sequence
  SiRNA target sequence
cgcaattaataaaaaacagtatta

SEQ ID NO: 164440 - DNA, 24 bp, Artificial sequence
  SiRNA target sequence
gcaattaataaaaaacagtattac

SEQ ID NO: 164441 - DNA, 24 bp, Artificial sequence
  SiRNA target sequence
caattaataaaaaacagtattact

SEQ ID NO: 164442 - DNA, 24 bp, Artificial sequence
  SiRNA target sequence
aattaataaaaaacagtattacta

SEQ ID NO: 164443 - DNA, 24 bp, Artificial sequence
  SiRNA target sequence
attaataaaaaacagtattactaa

SEQ ID NO: 164444 - DNA, 24 bp, Artificial sequence
  SiRNA target sequence
ttaataaaaaacagtattactaaa

SEQ ID NO: 164445 - DNA, 24 bp, Artificial sequence
  SiRNA target sequence
taataaaaaacagtattactaaag

SEQ ID NO: 164446 - DNA, 24 bp, Artificial sequence
  SiRNA target sequence
aataaaaaacagtattactaaaga

SEQ ID NO: 164447 - DNA, 24 bp, Artificial sequence
  SiRNA target sequence
ataaaaaacagtattactaaagat

SEQ ID NO: 164448 - DNA, 24 bp, Artificial sequence
  SiRNA target sequence
taaaaaacagtattactaaagata

SEQ ID NO: 164449 - DNA, 24 bp, Artificial sequence
  SiRNA target sequence
aaaaaacagtattactaaagatac

SEQ ID NO: 164450 - DNA, 24 bp, Artificial sequence
  SiRNA target sequence
aaaaacagtattactaaagatacc

SEQ ID NO: 164451 - DNA, 24 bp, Artificial sequence
  SiRNA target sequence
aaaacagtattactaaagataccg

SEQ ID NO: 164452 - DNA, 24 bp, Artificial sequence
  SiRNA target sequence
aaacagtattactaaagataccgc

SEQ ID NO: 164453 - DNA, 24 bp, Artificial sequence
  SiRNA target sequence
aacagtattactaaagataccgct

SEQ ID NO: 164454 - DNA, 24 bp, Artificial sequence
  SiRNA target sequence
acagtattactaaagataccgctt

SEQ ID NO: 164455 - DNA, 24 bp, Artificial sequence
  SiRNA target sequence
cagtattactaaagataccgcttt

SEQ ID NO: 164456 - DNA, 24 bp, Artificial sequence
  SiRNA target sequence
agtattactaaagataccgctttg

SEQ ID NO: 164457 - DNA, 24 bp, Artificial sequence
  SiRNA target sequence
gtattactaaagataccgctttgg

SEQ ID NO: 164458 - DNA, 24 bp, Artificial sequence
  SiRNA target sequence
tattactaaagataccgctttggt

SEQ ID NO: 164459 - DNA, 24 bp, Artificial sequence
  SiRNA target sequence
attactaaagataccgctttggtg

SEQ ID NO: 164460 - DNA, 24 bp, Artificial sequence
  SiRNA target sequence
ttactaaagataccgctttggtgt

SEQ ID NO: 164461 - DNA, 24 bp, Artificial sequence
  SiRNA target sequence
tactaaagataccgctttggtgtc

SEQ ID NO: 164462 - DNA, 24 bp, Artificial sequence
  SiRNA target sequence
actaaagataccgctttggtgtct

SEQ ID NO: 164463 - DNA, 24 bp, Artificial sequence
  SiRNA target sequence
ctaaagataccgctttggtgtctg

SEQ ID NO: 164464 - DNA, 24 bp, Artificial sequence
  SiRNA target sequence
taaagataccgctttggtgtctgt

SEQ ID NO: 164465 - DNA, 24 bp, Artificial sequence
  SiRNA target sequence
aaagataccgctttggtgtctgtt

SEQ ID NO: 164466 - DNA, 24 bp, Artificial sequence
  SiRNA target sequence
aagataccgctttggtgtctgtta

SEQ ID NO: 164467 - DNA, 24 bp, Artificial sequence
  SiRNA target sequence
agataccgctttggtgtctgttat

SEQ ID NO: 164468 - DNA, 24 bp, Artificial sequence
  SiRNA target sequence
gataccgctttggtgtctgttatg

SEQ ID NO: 164469 - DNA, 24 bp, Artificial sequence
  SiRNA target sequence
ataccgctttggtgtctgttatgg

SEQ ID NO: 164470 - DNA, 24 bp, Artificial sequence
  SiRNA target sequence
taccgctttggtgtctgttatggc

SEQ ID NO: 164471 - DNA, 24 bp, Artificial sequence
  SiRNA target sequence
accgctttggtgtctgttatggct

SEQ ID NO: 164472 - DNA, 24 bp, Artificial sequence
  SiRNA target sequence
ccgctttggtgtctgttatggctg

SEQ ID NO: 164473 - DNA, 24 bp, Artificial sequence
  SiRNA target sequence
cgctttggtgtctgttatggctgt

SEQ ID NO: 164474 - DNA, 24 bp, Artificial sequence
  SiRNA target sequence
gctttggtgtctgttatggctgtt

SEQ ID NO: 164475 - DNA, 24 bp, Artificial sequence
  SiRNA target sequence
ctttggtgtctgttatggctgtta

SEQ ID NO: 164476 - DNA, 24 bp, Artificial sequence
  SiRNA target sequence
tttggtgtctgttatggctgttaa

SEQ ID NO: 164477 - DNA, 24 bp, Artificial sequence
  SiRNA target sequence
ttggtgtctgttatggctgttaac

SEQ ID NO: 164478 - DNA, 24 bp, Artificial sequence
  SiRNA target sequence
tggtgtctgttatggctgttaaca

SEQ ID NO: 164479 - DNA, 24 bp, Artificial sequence
  SiRNA target sequence
ggtgtctgttatggctgttaacaa

SEQ ID NO: 164480 - DNA, 24 bp, Artificial sequence
  SiRNA target sequence
gtgtctgttatggctgttaacaac

SEQ ID NO: 164481 - DNA, 24 bp, Artificial sequence
  SiRNA target sequence
tgtctgttatggctgttaacaacg

SEQ ID NO: 164482 - DNA, 24 bp, Artificial sequence
  SiRNA target sequence
gtctgttatggctgttaacaacga

SEQ ID NO: 164483 - DNA, 24 bp, Artificial sequence
  SiRNA target sequence
tctgttatggctgttaacaacgaa

SEQ ID NO: 164484 - DNA, 24 bp, Artificial sequence
  SiRNA target sequence
ctgttatggctgttaacaacgaaa

SEQ ID NO: 164485 - DNA, 24 bp, Artificial sequence
  SiRNA target sequence
tgttatggctgttaacaacgaaat

SEQ ID NO: 164486 - DNA, 24 bp, Artificial sequence
  SiRNA target sequence
gttatggctgttaacaacgaaatg

SEQ ID NO: 164487 - DNA, 24 bp, Artificial sequence
  SiRNA target sequence
ttatggctgttaacaacgaaatgg

SEQ ID NO: 164488 - DNA, 24 bp, Artificial sequence
  SiRNA target sequence
tatggctgttaacaacgaaatggg

SEQ ID NO: 164489 - DNA, 24 bp, Artificial sequence
  SiRNA target sequence
atggctgttaacaacgaaatggga

SEQ ID NO: 164490 - DNA, 24 bp, Artificial sequence
  SiRNA target sequence
tggctgttaacaacgaaatgggag

SEQ ID NO: 164491 - DNA, 24 bp, Artificial sequence
  SiRNA target sequence
ggctgttaacaacgaaatgggagc

SEQ ID NO: 164492 - DNA, 24 bp, Artificial sequence
  SiRNA target sequence
gctgttaacaacgaaatgggagca

SEQ ID NO: 164493 - DNA, 24 bp, Artificial sequence
  SiRNA target sequence
ctgttaacaacgaaatgggagcaa

SEQ ID NO: 164494 - DNA, 24 bp, Artificial sequence
  SiRNA target sequence
tgttaacaacgaaatgggagcaat

SEQ ID NO: 164495 - DNA, 24 bp, Artificial sequence
  SiRNA target sequence
gttaacaacgaaatgggagcaata

SEQ ID NO: 164496 - DNA, 24 bp, Artificial sequence
  SiRNA target sequence
ttaacaacgaaatgggagcaatac

SEQ ID NO: 164497 - DNA, 24 bp, Artificial sequence
  SiRNA target sequence
taacaacgaaatgggagcaataca

SEQ ID NO: 164498 - DNA, 24 bp, Artificial sequence
  SiRNA target sequence
aacaacgaaatgggagcaatacaa

SEQ ID NO: 164499 - DNA, 24 bp, Artificial sequence
  SiRNA target sequence
acaacgaaatgggagcaatacaac

SEQ ID NO: 164500 - DNA, 24 bp, Artificial sequence
  SiRNA target sequence
caacgaaatgggagcaatacaacc

SEQ ID NO: 164501 - DNA, 24 bp, Artificial sequence
  SiRNA target sequence
aacgaaatgggagcaatacaaccg

SEQ ID NO: 164502 - DNA, 24 bp, Artificial sequence
  SiRNA target sequence
acgaaatgggagcaatacaaccgc

SEQ ID NO: 164503 - DNA, 24 bp, Artificial sequence
  SiRNA target sequence
cgaaatgggagcaatacaaccgct

SEQ ID NO: 164504 - DNA, 24 bp, Artificial sequence
  SiRNA target sequence
gaaatgggagcaatacaaccgctt

SEQ ID NO: 164505 - DNA, 24 bp, Artificial sequence
  SiRNA target sequence
aaatgggagcaatacaaccgctta

SEQ ID NO: 164506 - DNA, 24 bp, Artificial sequence
  SiRNA target sequence
aatgggagcaatacaaccgcttaa

SEQ ID NO: 164507 - DNA, 24 bp, Artificial sequence
  SiRNA target sequence
atgggagcaatacaaccgcttaaa

SEQ ID NO: 164508 - DNA, 24 bp, Artificial sequence
  SiRNA target sequence
tgggagcaatacaaccgcttaaag

SEQ ID NO: 164509 - DNA, 24 bp, Artificial sequence
  SiRNA target sequence
gggagcaatacaaccgcttaaaga

SEQ ID NO: 164510 - DNA, 24 bp, Artificial sequence
  SiRNA target sequence
ggagcaatacaaccgcttaaagaa

SEQ ID NO: 164511 - DNA, 24 bp, Artificial sequence
  SiRNA target sequence
gagcaatacaaccgcttaaagaaa

SEQ ID NO: 164512 - DNA, 24 bp, Artificial sequence
  SiRNA target sequence
agcaatacaaccgcttaaagaaat

SEQ ID NO: 164513 - DNA, 24 bp, Artificial sequence
  SiRNA target sequence
gcaatacaaccgcttaaagaaata

SEQ ID NO: 164514 - DNA, 24 bp, Artificial sequence
  SiRNA target sequence
caatacaaccgcttaaagaaatag

SEQ ID NO: 164515 - DNA, 24 bp, Artificial sequence
  SiRNA target sequence
aatacaaccgcttaaagaaatagg

SEQ ID NO: 164516 - DNA, 24 bp, Artificial sequence
  SiRNA target sequence
atacaaccgcttaaagaaatagga

SEQ ID NO: 164517 - DNA, 24 bp, Artificial sequence
  SiRNA target sequence
tacaaccgcttaaagaaataggaa

SEQ ID NO: 164518 - DNA, 24 bp, Artificial sequence
  SiRNA target sequence
acaaccgcttaaagaaataggaag

SEQ ID NO: 164519 - DNA, 24 bp, Artificial sequence
  SiRNA target sequence
caaccgcttaaagaaataggaaga

SEQ ID NO: 164520 - DNA, 24 bp, Artificial sequence
  SiRNA target sequence
aaccgcttaaagaaataggaagaa

SEQ ID NO: 164521 - DNA, 24 bp, Artificial sequence
  SiRNA target sequence
accgcttaaagaaataggaagaat

SEQ ID NO: 164522 - DNA, 24 bp, Artificial sequence
  SiRNA target sequence
ccgcttaaagaaataggaagaata

SEQ ID NO: 164523 - DNA, 24 bp, Artificial sequence
  SiRNA target sequence
cgcttaaagaaataggaagaatat

SEQ ID NO: 164524 - DNA, 24 bp, Artificial sequence
  SiRNA target sequence
gcttaaagaaataggaagaatatg

SEQ ID NO: 164525 - DNA, 24 bp, Artificial sequence
  SiRNA target sequence
cttaaagaaataggaagaatatgt

SEQ ID NO: 164526 - DNA, 24 bp, Artificial sequence
  SiRNA target sequence
ttaaagaaataggaagaatatgta

SEQ ID NO: 164527 - DNA, 24 bp, Artificial sequence
  SiRNA target sequence
taaagaaataggaagaatatgtaa

SEQ ID NO: 164528 - DNA, 24 bp, Artificial sequence
  SiRNA target sequence
aaagaaataggaagaatatgtaaa

SEQ ID NO: 164529 - DNA, 24 bp, Artificial sequence
  SiRNA target sequence
aagaaataggaagaatatgtaaag

SEQ ID NO: 164530 - DNA, 24 bp, Artificial sequence
  SiRNA target sequence
agaaataggaagaatatgtaaaga

SEQ ID NO: 164531 - DNA, 24 bp, Artificial sequence
  SiRNA target sequence
gaaataggaagaatatgtaaagaa

SEQ ID NO: 164532 - DNA, 24 bp, Artificial sequence
  SiRNA target sequence
aaataggaagaatatgtaaagaaa

SEQ ID NO: 164533 - DNA, 24 bp, Artificial sequence
  SiRNA target sequence
aataggaagaatatgtaaagaaaa

SEQ ID NO: 164534 - DNA, 24 bp, Artificial sequence
  SiRNA target sequence
ataggaagaatatgtaaagaaaat

SEQ ID NO: 164535 - DNA, 24 bp, Artificial sequence
  SiRNA target sequence
taggaagaatatgtaaagaaaata

SEQ ID NO: 164536 - DNA, 24 bp, Artificial sequence
  SiRNA target sequence
aggaagaatatgtaaagaaaataa

SEQ ID NO: 164537 - DNA, 24 bp, Artificial sequence
  SiRNA target sequence
ggaagaatatgtaaagaaaataat

SEQ ID NO: 164538 - DNA, 24 bp, Artificial sequence
  SiRNA target sequence
gaagaatatgtaaagaaaataata

SEQ ID NO: 164539 - DNA, 24 bp, Artificial sequence
  SiRNA target sequence
aagaatatgtaaagaaaataatat

SEQ ID NO: 164540 - DNA, 24 bp, Artificial sequence
  SiRNA target sequence
agaatatgtaaagaaaataatatt

SEQ ID NO: 164541 - DNA, 24 bp, Artificial sequence
  SiRNA target sequence
gaatatgtaaagaaaataatattt

SEQ ID NO: 164542 - DNA, 24 bp, Artificial sequence
  SiRNA target sequence
aatatgtaaagaaaataatatttt

SEQ ID NO: 164543 - DNA, 24 bp, Artificial sequence
  SiRNA target sequence
atatgtaaagaaaataatatttta

SEQ ID NO: 164544 - DNA, 24 bp, Artificial sequence
  SiRNA target sequence
tatgtaaagaaaataatattttat

SEQ ID NO: 164545 - DNA, 24 bp, Artificial sequence
  SiRNA target sequence
atgtaaagaaaataatattttatt

SEQ ID NO: 164546 - DNA, 24 bp, Artificial sequence
  SiRNA target sequence
tgtaaagaaaataatattttattt

SEQ ID NO: 164547 - DNA, 24 bp, Artificial sequence
  SiRNA target sequence
gtaaagaaaataatattttatttc

SEQ ID NO: 164548 - DNA, 24 bp, Artificial sequence
  SiRNA target sequence
taaagaaaataatattttatttca

SEQ ID NO: 164549 - DNA, 24 bp, Artificial sequence
  SiRNA target sequence
aaagaaaataatattttatttcac

SEQ ID NO: 164550 - DNA, 24 bp, Artificial sequence
  SiRNA target sequence
aagaaaataatattttatttcaca

SEQ ID NO: 164551 - DNA, 24 bp, Artificial sequence
  SiRNA target sequence
agaaaataatattttatttcacac

SEQ ID NO: 164552 - DNA, 24 bp, Artificial sequence
  SiRNA target sequence
gaaaataatattttatttcacact

SEQ ID NO: 164553 - DNA, 24 bp, Artificial sequence
  SiRNA target sequence
aaaataatattttatttcacactg

SEQ ID NO: 164554 - DNA, 24 bp, Artificial sequence
  SiRNA target sequence
aaataatattttatttcacactga

SEQ ID NO: 164555 - DNA, 24 bp, Artificial sequence
  SiRNA target sequence
aataatattttatttcacactgat

SEQ ID NO: 164556 - DNA, 24 bp, Artificial sequence
  SiRNA target sequence
ataatattttatttcacactgatg

SEQ ID NO: 164557 - DNA, 24 bp, Artificial sequence
  SiRNA target sequence
taatattttatttcacactgatgc

SEQ ID NO: 164558 - DNA, 24 bp, Artificial sequence
  SiRNA target sequence
aatattttatttcacactgatgca

SEQ ID NO: 164559 - DNA, 24 bp, Artificial sequence
  SiRNA target sequence
atattttatttcacactgatgcag

SEQ ID NO: 164560 - DNA, 24 bp, Artificial sequence
  SiRNA target sequence
tattttatttcacactgatgcagc

SEQ ID NO: 164561 - DNA, 24 bp, Artificial sequence
  SiRNA target sequence
attttatttcacactgatgcagca

SEQ ID NO: 164562 - DNA, 24 bp, Artificial sequence
  SiRNA target sequence
ttttatttcacactgatgcagcac

SEQ ID NO: 164563 - DNA, 24 bp, Artificial sequence
  SiRNA target sequence
tttatttcacactgatgcagcaca

SEQ ID NO: 164564 - DNA, 24 bp, Artificial sequence
  SiRNA target sequence
ttatttcacactgatgcagcacaa

SEQ ID NO: 164565 - DNA, 24 bp, Artificial sequence
  SiRNA target sequence
tatttcacactgatgcagcacaag

SEQ ID NO: 164566 - DNA, 24 bp, Artificial sequence
  SiRNA target sequence
atttcacactgatgcagcacaagc

SEQ ID NO: 164567 - DNA, 24 bp, Artificial sequence
  SiRNA target sequence
tttcacactgatgcagcacaagca

SEQ ID NO: 164568 - DNA, 24 bp, Artificial sequence
  SiRNA target sequence
ttcacactgatgcagcacaagcag

SEQ ID NO: 164569 - DNA, 24 bp, Artificial sequence
  SiRNA target sequence
tcacactgatgcagcacaagcagt

SEQ ID NO: 164570 - DNA, 24 bp, Artificial sequence
  SiRNA target sequence
cacactgatgcagcacaagcagtt

SEQ ID NO: 164571 - DNA, 24 bp, Artificial sequence
  SiRNA target sequence
acactgatgcagcacaagcagttg

SEQ ID NO: 164572 - DNA, 24 bp, Artificial sequence
  SiRNA target sequence
cactgatgcagcacaagcagttgg

SEQ ID NO: 164573 - DNA, 24 bp, Artificial sequence
  SiRNA target sequence
actgatgcagcacaagcagttggt

SEQ ID NO: 164574 - DNA, 24 bp, Artificial sequence
  SiRNA target sequence
ctgatgcagcacaagcagttggta

SEQ ID NO: 164575 - DNA, 24 bp, Artificial sequence
  SiRNA target sequence
tgatgcagcacaagcagttggtaa

SEQ ID NO: 164576 - DNA, 24 bp, Artificial sequence
  SiRNA target sequence
gatgcagcacaagcagttggtaat

SEQ ID NO: 164577 - DNA, 24 bp, Artificial sequence
  SiRNA target sequence
atgcagcacaagcagttggtaata

SEQ ID NO: 164578 - DNA, 24 bp, Artificial sequence
  SiRNA target sequence
tgcagcacaagcagttggtaatat

SEQ ID NO: 164579 - DNA, 24 bp, Artificial sequence
  SiRNA target sequence
gcagcacaagcagttggtaatata

SEQ ID NO: 164580 - DNA, 24 bp, Artificial sequence
  SiRNA target sequence
cagcacaagcagttggtaatatag

SEQ ID NO: 164581 - DNA, 24 bp, Artificial sequence
  SiRNA target sequence
agcacaagcagttggtaatataga

SEQ ID NO: 164582 - DNA, 24 bp, Artificial sequence
  SiRNA target sequence
gcacaagcagttggtaatatagat

SEQ ID NO: 164583 - DNA, 24 bp, Artificial sequence
  SiRNA target sequence
cacaagcagttggtaatatagata

SEQ ID NO: 164584 - DNA, 24 bp, Artificial sequence
  SiRNA target sequence
acaagcagttggtaatatagatat

SEQ ID NO: 164585 - DNA, 24 bp, Artificial sequence
  SiRNA target sequence
caagcagttggtaatatagatatt

SEQ ID NO: 164586 - DNA, 24 bp, Artificial sequence
  SiRNA target sequence
aagcagttggtaatatagatattg

SEQ ID NO: 164587 - DNA, 24 bp, Artificial sequence
  SiRNA target sequence
agcagttggtaatatagatattga

SEQ ID NO: 164588 - DNA, 24 bp, Artificial sequence
  SiRNA target sequence
gcagttggtaatatagatattgat

SEQ ID NO: 164589 - DNA, 24 bp, Artificial sequence
  SiRNA target sequence
cagttggtaatatagatattgatg

SEQ ID NO: 164590 - DNA, 24 bp, Artificial sequence
  SiRNA target sequence
agttggtaatatagatattgatgt

SEQ ID NO: 164591 - DNA, 24 bp, Artificial sequence
  SiRNA target sequence
gttggtaatatagatattgatgtc

SEQ ID NO: 164592 - DNA, 24 bp, Artificial sequence
  SiRNA target sequence
ttggtaatatagatattgatgtca

SEQ ID NO: 164593 - DNA, 24 bp, Artificial sequence
  SiRNA target sequence
tggtaatatagatattgatgtcaa

SEQ ID NO: 164594 - DNA, 24 bp, Artificial sequence
  SiRNA target sequence
ggtaatatagatattgatgtcaat

SEQ ID NO: 164595 - DNA, 24 bp, Artificial sequence
  SiRNA target sequence
gtaatatagatattgatgtcaatg

SEQ ID NO: 164596 - DNA, 24 bp, Artificial sequence
  SiRNA target sequence
taatatagatattgatgtcaatga

SEQ ID NO: 164597 - DNA, 24 bp, Artificial sequence
  SiRNA target sequence
aatatagatattgatgtcaatgat

SEQ ID NO: 164598 - DNA, 24 bp, Artificial sequence
  SiRNA target sequence
atatagatattgatgtcaatgata

SEQ ID NO: 164599 - DNA, 24 bp, Artificial sequence
  SiRNA target sequence
tatagatattgatgtcaatgatat

SEQ ID NO: 164600 - DNA, 24 bp, Artificial sequence
  SiRNA target sequence
atagatattgatgtcaatgatatg

SEQ ID NO: 164601 - DNA, 24 bp, Artificial sequence
  SiRNA target sequence
tagatattgatgtcaatgatatga

SEQ ID NO: 164602 - DNA, 24 bp, Artificial sequence
  SiRNA target sequence
agatattgatgtcaatgatatgaa

SEQ ID NO: 164603 - DNA, 24 bp, Artificial sequence
  SiRNA target sequence
gatattgatgtcaatgatatgaat

SEQ ID NO: 164604 - DNA, 24 bp, Artificial sequence
  SiRNA target sequence
atattgatgtcaatgatatgaata

SEQ ID NO: 164605 - DNA, 24 bp, Artificial sequence
  SiRNA target sequence
tattgatgtcaatgatatgaatat

SEQ ID NO: 164606 - DNA, 24 bp, Artificial sequence
  SiRNA target sequence
attgatgtcaatgatatgaatatt

SEQ ID NO: 164607 - DNA, 24 bp, Artificial sequence
  SiRNA target sequence
ttgatgtcaatgatatgaatattg

SEQ ID NO: 164608 - DNA, 24 bp, Artificial sequence
  SiRNA target sequence
tgatgtcaatgatatgaatattga

SEQ ID NO: 164609 - DNA, 24 bp, Artificial sequence
  SiRNA target sequence
gatgtcaatgatatgaatattgat

SEQ ID NO: 164610 - DNA, 24 bp, Artificial sequence
  SiRNA target sequence
atgtcaatgatatgaatattgatt

SEQ ID NO: 164611 - DNA, 24 bp, Artificial sequence
  SiRNA target sequence
tgtcaatgatatgaatattgattt

SEQ ID NO: 164612 - DNA, 24 bp, Artificial sequence
  SiRNA target sequence
gtcaatgatatgaatattgattta

SEQ ID NO: 164613 - DNA, 24 bp, Artificial sequence
  SiRNA target sequence
tcaatgatatgaatattgatttac

SEQ ID NO: 164614 - DNA, 24 bp, Artificial sequence
  SiRNA target sequence
caatgatatgaatattgatttact

SEQ ID NO: 164615 - DNA, 24 bp, Artificial sequence
  SiRNA target sequence
aatgatatgaatattgatttacta

SEQ ID NO: 164616 - DNA, 24 bp, Artificial sequence
  SiRNA target sequence
atgatatgaatattgatttactaa

SEQ ID NO: 164617 - DNA, 24 bp, Artificial sequence
  SiRNA target sequence
tgatatgaatattgatttactaag

SEQ ID NO: 164618 - DNA, 24 bp, Artificial sequence
  SiRNA target sequence
gatatgaatattgatttactaagt

SEQ ID NO: 164619 - DNA, 24 bp, Artificial sequence
  SiRNA target sequence
atatgaatattgatttactaagtt

SEQ ID NO: 164620 - DNA, 24 bp, Artificial sequence
  SiRNA target sequence
tatgaatattgatttactaagttt

SEQ ID NO: 164621 - DNA, 24 bp, Artificial sequence
  SiRNA target sequence
atgaatattgatttactaagttta

SEQ ID NO: 164622 - DNA, 24 bp, Artificial sequence
  SiRNA target sequence
tgaatattgatttactaagtttat

SEQ ID NO: 164623 - DNA, 24 bp, Artificial sequence
  SiRNA target sequence
gaatattgatttactaagtttatc

SEQ ID NO: 164624 - DNA, 24 bp, Artificial sequence
  SiRNA target sequence
aatattgatttactaagtttatca

SEQ ID NO: 164625 - DNA, 24 bp, Artificial sequence
  SiRNA target sequence
atattgatttactaagtttatcaa

SEQ ID NO: 164626 - DNA, 24 bp, Artificial sequence
  SiRNA target sequence
tattgatttactaagtttatcaag

SEQ ID NO: 164627 - DNA, 24 bp, Artificial sequence
  SiRNA target sequence
attgatttactaagtttatcaagt

SEQ ID NO: 164628 - DNA, 24 bp, Artificial sequence
  SiRNA target sequence
ttgatttactaagtttatcaagtc

SEQ ID NO: 164629 - DNA, 24 bp, Artificial sequence
  SiRNA target sequence
tgatttactaagtttatcaagtca

SEQ ID NO: 164630 - DNA, 24 bp, Artificial sequence
  SiRNA target sequence
gatttactaagtttatcaagtcat

SEQ ID NO: 164631 - DNA, 24 bp, Artificial sequence
  SiRNA target sequence
atttactaagtttatcaagtcata

SEQ ID NO: 164632 - DNA, 24 bp, Artificial sequence
  SiRNA target sequence
tttactaagtttatcaagtcataa

SEQ ID NO: 164633 - DNA, 24 bp, Artificial sequence
  SiRNA target sequence
ttactaagtttatcaagtcataaa

SEQ ID NO: 164634 - DNA, 24 bp, Artificial sequence
  SiRNA target sequence
tactaagtttatcaagtcataaaa

SEQ ID NO: 164635 - DNA, 24 bp, Artificial sequence
  SiRNA target sequence
actaagtttatcaagtcataaaat

SEQ ID NO: 164636 - DNA, 24 bp, Artificial sequence
  SiRNA target sequence
ctaagtttatcaagtcataaaatt

SEQ ID NO: 164637 - DNA, 24 bp, Artificial sequence
  SiRNA target sequence
taagtttatcaagtcataaaattt

SEQ ID NO: 164638 - DNA, 24 bp, Artificial sequence
  SiRNA target sequence
aagtttatcaagtcataaaattta

SEQ ID NO: 164639 - DNA, 24 bp, Artificial sequence
  SiRNA target sequence
agtttatcaagtcataaaatttat

SEQ ID NO: 164640 - DNA, 24 bp, Artificial sequence
  SiRNA target sequence
gtttatcaagtcataaaatttatg

SEQ ID NO: 164641 - DNA, 24 bp, Artificial sequence
  SiRNA target sequence
tttatcaagtcataaaatttatgg

SEQ ID NO: 164642 - DNA, 24 bp, Artificial sequence
  SiRNA target sequence
ttatcaagtcataaaatttatggt

SEQ ID NO: 164643 - DNA, 24 bp, Artificial sequence
  SiRNA target sequence
tatcaagtcataaaatttatggtc

SEQ ID NO: 164644 - DNA, 24 bp, Artificial sequence
  SiRNA target sequence
atcaagtcataaaatttatggtcc

SEQ ID NO: 164645 - DNA, 24 bp, Artificial sequence
  SiRNA target sequence
tcaagtcataaaatttatggtcca

SEQ ID NO: 164646 - DNA, 24 bp, Artificial sequence
  SiRNA target sequence
caagtcataaaatttatggtccaa

SEQ ID NO: 164647 - DNA, 24 bp, Artificial sequence
  SiRNA target sequence
aagtcataaaatttatggtccaaa

SEQ ID NO: 164648 - DNA, 24 bp, Artificial sequence
  SiRNA target sequence
agtcataaaatttatggtccaaaa

SEQ ID NO: 164649 - DNA, 24 bp, Artificial sequence
  SiRNA target sequence
gtcataaaatttatggtccaaaag

SEQ ID NO: 164650 - DNA, 24 bp, Artificial sequence
  SiRNA target sequence
tcataaaatttatggtccaaaagg

SEQ ID NO: 164651 - DNA, 24 bp, Artificial sequence
  SiRNA target sequence
cataaaatttatggtccaaaaggt

SEQ ID NO: 164652 - DNA, 24 bp, Artificial sequence
  SiRNA target sequence
ataaaatttatggtccaaaaggtg

SEQ ID NO: 164653 - DNA, 24 bp, Artificial sequence
  SiRNA target sequence
taaaatttatggtccaaaaggtgt

SEQ ID NO: 164654 - DNA, 24 bp, Artificial sequence
  SiRNA target sequence
aaaatttatggtccaaaaggtgtt

SEQ ID NO: 164655 - DNA, 24 bp, Artificial sequence
  SiRNA target sequence
aaatttatggtccaaaaggtgttg

SEQ ID NO: 164656 - DNA, 24 bp, Artificial sequence
  SiRNA target sequence
aatttatggtccaaaaggtgttgg

SEQ ID NO: 164657 - DNA, 24 bp, Artificial sequence
  SiRNA target sequence
atttatggtccaaaaggtgttggt

SEQ ID NO: 164658 - DNA, 24 bp, Artificial sequence
  SiRNA target sequence
tttatggtccaaaaggtgttggtg

SEQ ID NO: 164659 - DNA, 24 bp, Artificial sequence
  SiRNA target sequence
ttatggtccaaaaggtgttggtgc

SEQ ID NO: 164660 - DNA, 24 bp, Artificial sequence
  SiRNA target sequence
tatggtccaaaaggtgttggtgcc

SEQ ID NO: 164661 - DNA, 24 bp, Artificial sequence
  SiRNA target sequence
atggtccaaaaggtgttggtgcct

SEQ ID NO: 164662 - DNA, 24 bp, Artificial sequence
  SiRNA target sequence
tggtccaaaaggtgttggtgcctt

SEQ ID NO: 164663 - DNA, 24 bp, Artificial sequence
  SiRNA target sequence
ggtccaaaaggtgttggtgcctta

SEQ ID NO: 164664 - DNA, 24 bp, Artificial sequence
  SiRNA target sequence
gtccaaaaggtgttggtgccttat

SEQ ID NO: 164665 - DNA, 24 bp, Artificial sequence
  SiRNA target sequence
tccaaaaggtgttggtgccttata

SEQ ID NO: 164666 - DNA, 24 bp, Artificial sequence
  SiRNA target sequence
ccaaaaggtgttggtgccttatac

SEQ ID NO: 164667 - DNA, 24 bp, Artificial sequence
  SiRNA target sequence
caaaaggtgttggtgccttatacg

SEQ ID NO: 164668 - DNA, 24 bp, Artificial sequence
  SiRNA target sequence
aaaaggtgttggtgccttatacgt

SEQ ID NO: 164669 - DNA, 24 bp, Artificial sequence
  SiRNA target sequence
aaaggtgttggtgccttatacgtc

SEQ ID NO: 164670 - DNA, 24 bp, Artificial sequence
  SiRNA target sequence
aaggtgttggtgccttatacgtca

SEQ ID NO: 164671 - DNA, 24 bp, Artificial sequence
  SiRNA target sequence
aggtgttggtgccttatacgtcag

SEQ ID NO: 164672 - DNA, 24 bp, Artificial sequence
  SiRNA target sequence
ggtgttggtgccttatacgtcaga

SEQ ID NO: 164673 - DNA, 24 bp, Artificial sequence
  SiRNA target sequence
gtgttggtgccttatacgtcagaa

SEQ ID NO: 164674 - DNA, 24 bp, Artificial sequence
  SiRNA target sequence
tgttggtgccttatacgtcagaag

SEQ ID NO: 164675 - DNA, 24 bp, Artificial sequence
  SiRNA target sequence
gttggtgccttatacgtcagaaga

SEQ ID NO: 164676 - DNA, 24 bp, Artificial sequence
  SiRNA target sequence
ttggtgccttatacgtcagaagaa

SEQ ID NO: 164677 - DNA, 24 bp, Artificial sequence
  SiRNA target sequence
tggtgccttatacgtcagaagaag

SEQ ID NO: 164678 - DNA, 24 bp, Artificial sequence
  SiRNA target sequence
ggtgccttatacgtcagaagaagg

SEQ ID NO: 164679 - DNA, 24 bp, Artificial sequence
  SiRNA target sequence
gtgccttatacgtcagaagaaggc

SEQ ID NO: 164680 - DNA, 24 bp, Artificial sequence
  SiRNA target sequence
tgccttatacgtcagaagaaggcc

SEQ ID NO: 164681 - DNA, 24 bp, Artificial sequence
  SiRNA target sequence
gccttatacgtcagaagaaggcct

SEQ ID NO: 164682 - DNA, 24 bp, Artificial sequence
  SiRNA target sequence
ccttatacgtcagaagaaggccta

SEQ ID NO: 164683 - DNA, 24 bp, Artificial sequence
  SiRNA target sequence
cttatacgtcagaagaaggcctag

SEQ ID NO: 164684 - DNA, 24 bp, Artificial sequence
  SiRNA target sequence
ttatacgtcagaagaaggcctagg

SEQ ID NO: 164685 - DNA, 24 bp, Artificial sequence
  SiRNA target sequence
tatacgtcagaagaaggcctaggg

SEQ ID NO: 164686 - DNA, 24 bp, Artificial sequence
  SiRNA target sequence
atacgtcagaagaaggcctagggt

SEQ ID NO: 164687 - DNA, 24 bp, Artificial sequence
  SiRNA target sequence
tacgtcagaagaaggcctagggtg

SEQ ID NO: 164688 - DNA, 24 bp, Artificial sequence
  SiRNA target sequence
acgtcagaagaaggcctagggtga

SEQ ID NO: 164689 - DNA, 24 bp, Artificial sequence
  SiRNA target sequence
cgtcagaagaaggcctagggtgag

SEQ ID NO: 164690 - DNA, 24 bp, Artificial sequence
  SiRNA target sequence
gtcagaagaaggcctagggtgaga

SEQ ID NO: 164691 - DNA, 24 bp, Artificial sequence
  SiRNA target sequence
tcagaagaaggcctagggtgagaa

SEQ ID NO: 164692 - DNA, 24 bp, Artificial sequence
  SiRNA target sequence
cagaagaaggcctagggtgagaat

SEQ ID NO: 164693 - DNA, 24 bp, Artificial sequence
  SiRNA target sequence
agaagaaggcctagggtgagaatg

SEQ ID NO: 164694 - DNA, 24 bp, Artificial sequence
  SiRNA target sequence
gaagaaggcctagggtgagaatgt

SEQ ID NO: 164695 - DNA, 24 bp, Artificial sequence
  SiRNA target sequence
aagaaggcctagggtgagaatgtt

SEQ ID NO: 164696 - DNA, 24 bp, Artificial sequence
  SiRNA target sequence
agaaggcctagggtgagaatgtta

SEQ ID NO: 164697 - DNA, 24 bp, Artificial sequence
  SiRNA target sequence
gaaggcctagggtgagaatgttac

SEQ ID NO: 164698 - DNA, 24 bp, Artificial sequence
  SiRNA target sequence
aaggcctagggtgagaatgttacc

SEQ ID NO: 164699 - DNA, 24 bp, Artificial sequence
  SiRNA target sequence
aggcctagggtgagaatgttacca

SEQ ID NO: 164700 - DNA, 24 bp, Artificial sequence
  SiRNA target sequence
ggcctagggtgagaatgttaccac

SEQ ID NO: 164701 - DNA, 24 bp, Artificial sequence
  SiRNA target sequence
gcctagggtgagaatgttaccact

SEQ ID NO: 164702 - DNA, 24 bp, Artificial sequence
  SiRNA target sequence
cctagggtgagaatgttaccactt

SEQ ID NO: 164703 - DNA, 24 bp, Artificial sequence
  SiRNA target sequence
ctagggtgagaatgttaccacttt

SEQ ID NO: 164704 - DNA, 24 bp, Artificial sequence
  SiRNA target sequence
tagggtgagaatgttaccactttt

SEQ ID NO: 164705 - DNA, 24 bp, Artificial sequence
  SiRNA target sequence
agggtgagaatgttaccacttttt

SEQ ID NO: 164706 - DNA, 24 bp, Artificial sequence
  SiRNA target sequence
gggtgagaatgttaccacttttta

SEQ ID NO: 164707 - DNA, 24 bp, Artificial sequence
  SiRNA target sequence
ggtgagaatgttaccactttttaa

SEQ ID NO: 164708 - DNA, 24 bp, Artificial sequence
  SiRNA target sequence
gtgagaatgttaccactttttaat

SEQ ID NO: 164709 - DNA, 24 bp, Artificial sequence
  SiRNA target sequence
tgagaatgttaccactttttaatg

SEQ ID NO: 164710 - DNA, 24 bp, Artificial sequence
  SiRNA target sequence
gagaatgttaccactttttaatgg

SEQ ID NO: 164711 - DNA, 24 bp, Artificial sequence
  SiRNA target sequence
agaatgttaccactttttaatggt

SEQ ID NO: 164712 - DNA, 24 bp, Artificial sequence
  SiRNA target sequence
gaatgttaccactttttaatggtg

SEQ ID NO: 164713 - DNA, 24 bp, Artificial sequence
  SiRNA target sequence
aatgttaccactttttaatggtgg

SEQ ID NO: 164714 - DNA, 24 bp, Artificial sequence
  SiRNA target sequence
atgttaccactttttaatggtggt

SEQ ID NO: 164715 - DNA, 24 bp, Artificial sequence
  SiRNA target sequence
tgttaccactttttaatggtggtg

SEQ ID NO: 164716 - DNA, 24 bp, Artificial sequence
  SiRNA target sequence
gttaccactttttaatggtggtgg

SEQ ID NO: 164717 - DNA, 24 bp, Artificial sequence
  SiRNA target sequence
ttaccactttttaatggtggtgga

SEQ ID NO: 164718 - DNA, 24 bp, Artificial sequence
  SiRNA target sequence
taccactttttaatggtggtggac

SEQ ID NO: 164719 - DNA, 24 bp, Artificial sequence
  SiRNA target sequence
accactttttaatggtggtggaca

SEQ ID NO: 164720 - DNA, 24 bp, Artificial sequence
  SiRNA target sequence
ccactttttaatggtggtggacaa

SEQ ID NO: 164721 - DNA, 24 bp, Artificial sequence
  SiRNA target sequence
cactttttaatggtggtggacaag

SEQ ID NO: 164722 - DNA, 24 bp, Artificial sequence
  SiRNA target sequence
actttttaatggtggtggacaaga

SEQ ID NO: 164723 - DNA, 24 bp, Artificial sequence
  SiRNA target sequence
ctttttaatggtggtggacaagaa

SEQ ID NO: 164724 - DNA, 24 bp, Artificial sequence
  SiRNA target sequence
tttttaatggtggtggacaagaaa

SEQ ID NO: 164725 - DNA, 24 bp, Artificial sequence
  SiRNA target sequence
ttttaatggtggtggacaagaaag

SEQ ID NO: 164726 - DNA, 24 bp, Artificial sequence
  SiRNA target sequence
tttaatggtggtggacaagaaaga

SEQ ID NO: 164727 - DNA, 24 bp, Artificial sequence
  SiRNA target sequence
ttaatggtggtggacaagaaagag

SEQ ID NO: 164728 - DNA, 24 bp, Artificial sequence
  SiRNA target sequence
taatggtggtggacaagaaagagg

SEQ ID NO: 164729 - DNA, 24 bp, Artificial sequence
  SiRNA target sequence
aatggtggtggacaagaaagagga

SEQ ID NO: 164730 - DNA, 24 bp, Artificial sequence
  SiRNA target sequence
atggtggtggacaagaaagaggat

SEQ ID NO: 164731 - DNA, 24 bp, Artificial sequence
  SiRNA target sequence
tggtggtggacaagaaagaggatt

SEQ ID NO: 164732 - DNA, 24 bp, Artificial sequence
  SiRNA target sequence
ggtggtggacaagaaagaggatta

SEQ ID NO: 164733 - DNA, 24 bp, Artificial sequence
  SiRNA target sequence
gtggtggacaagaaagaggattaa

SEQ ID NO: 164734 - DNA, 24 bp, Artificial sequence
  SiRNA target sequence
tggtggacaagaaagaggattaag

SEQ ID NO: 164735 - DNA, 24 bp, Artificial sequence
  SiRNA target sequence
ggtggacaagaaagaggattaaga

SEQ ID NO: 164736 - DNA, 24 bp, Artificial sequence
  SiRNA target sequence
gtggacaagaaagaggattaagaa

SEQ ID NO: 164737 - DNA, 24 bp, Artificial sequence
  SiRNA target sequence
tggacaagaaagaggattaagaag

SEQ ID NO: 164738 - DNA, 24 bp, Artificial sequence
  SiRNA target sequence
ggacaagaaagaggattaagaagt

SEQ ID NO: 164739 - DNA, 24 bp, Artificial sequence
  SiRNA target sequence
gacaagaaagaggattaagaagtg

SEQ ID NO: 164740 - DNA, 24 bp, Artificial sequence
  SiRNA target sequence
acaagaaagaggattaagaagtgg

SEQ ID NO: 164741 - DNA, 24 bp, Artificial sequence
  SiRNA target sequence
caagaaagaggattaagaagtggg

SEQ ID NO: 164742 - DNA, 24 bp, Artificial sequence
  SiRNA target sequence
aagaaagaggattaagaagtggga

SEQ ID NO: 164743 - DNA, 24 bp, Artificial sequence
  SiRNA target sequence
agaaagaggattaagaagtgggac

SEQ ID NO: 164744 - DNA, 24 bp, Artificial sequence
  SiRNA target sequence
gaaagaggattaagaagtgggaca

SEQ ID NO: 164745 - DNA, 24 bp, Artificial sequence
  SiRNA target sequence
aaagaggattaagaagtgggacaa

SEQ ID NO: 164746 - DNA, 24 bp, Artificial sequence
  SiRNA target sequence
aagaggattaagaagtgggacaac

SEQ ID NO: 164747 - DNA, 24 bp, Artificial sequence
  SiRNA target sequence
agaggattaagaagtgggacaact

SEQ ID NO: 164748 - DNA, 24 bp, Artificial sequence
  SiRNA target sequence
gaggattaagaagtgggacaactt

SEQ ID NO: 164749 - DNA, 24 bp, Artificial sequence
  SiRNA target sequence
aggattaagaagtgggacaacttc

SEQ ID NO: 164750 - DNA, 24 bp, Artificial sequence
  SiRNA target sequence
ggattaagaagtgggacaacttct

SEQ ID NO: 164751 - DNA, 24 bp, Artificial sequence
  SiRNA target sequence
gattaagaagtgggacaacttctc

SEQ ID NO: 164752 - DNA, 24 bp, Artificial sequence
  SiRNA target sequence
attaagaagtgggacaacttctcc

SEQ ID NO: 164753 - DNA, 24 bp, Artificial sequence
  SiRNA target sequence
ttaagaagtgggacaacttctcca

SEQ ID NO: 164754 - DNA, 24 bp, Artificial sequence
  SiRNA target sequence
taagaagtgggacaacttctccac

SEQ ID NO: 164755 - DNA, 24 bp, Artificial sequence
  SiRNA target sequence
aagaagtgggacaacttctccacc

SEQ ID NO: 164756 - DNA, 24 bp, Artificial sequence
  SiRNA target sequence
agaagtgggacaacttctccacct

SEQ ID NO: 164757 - DNA, 24 bp, Artificial sequence
  SiRNA target sequence
gaagtgggacaacttctccacctt

SEQ ID NO: 164758 - DNA, 24 bp, Artificial sequence
  SiRNA target sequence
aagtgggacaacttctccaccttt

SEQ ID NO: 164759 - DNA, 24 bp, Artificial sequence
  SiRNA target sequence
agtgggacaacttctccaccttta

SEQ ID NO: 164760 - DNA, 24 bp, Artificial sequence
  SiRNA target sequence
gtgggacaacttctccacctttag

SEQ ID NO: 164761 - DNA, 24 bp, Artificial sequence
  SiRNA target sequence
tgggacaacttctccacctttagt

SEQ ID NO: 164762 - DNA, 24 bp, Artificial sequence
  SiRNA target sequence
gggacaacttctccacctttagtt

SEQ ID NO: 164763 - DNA, 24 bp, Artificial sequence
  SiRNA target sequence
ggacaacttctccacctttagttg

SEQ ID NO: 164764 - DNA, 24 bp, Artificial sequence
  SiRNA target sequence
gacaacttctccacctttagttgt

SEQ ID NO: 164765 - DNA, 24 bp, Artificial sequence
  SiRNA target sequence
acaacttctccacctttagttgtt

SEQ ID NO: 164766 - DNA, 24 bp, Artificial sequence
  SiRNA target sequence
caacttctccacctttagttgttg

SEQ ID NO: 164767 - DNA, 24 bp, Artificial sequence
  SiRNA target sequence
aacttctccacctttagttgttgg

SEQ ID NO: 164768 - DNA, 24 bp, Artificial sequence
  SiRNA target sequence
acttctccacctttagttgttgga

SEQ ID NO: 164769 - DNA, 24 bp, Artificial sequence
  SiRNA target sequence
cttctccacctttagttgttggat

SEQ ID NO: 164770 - DNA, 24 bp, Artificial sequence
  SiRNA target sequence
ttctccacctttagttgttggatt

SEQ ID NO: 164771 - DNA, 24 bp, Artificial sequence
  SiRNA target sequence
tctccacctttagttgttggatta

SEQ ID NO: 164772 - DNA, 24 bp, Artificial sequence
  SiRNA target sequence
ctccacctttagttgttggattag

SEQ ID NO: 164773 - DNA, 24 bp, Artificial sequence
  SiRNA target sequence
tccacctttagttgttggattagg

SEQ ID NO: 164774 - DNA, 24 bp, Artificial sequence
  SiRNA target sequence
ccacctttagttgttggattaggc

SEQ ID NO: 164775 - DNA, 24 bp, Artificial sequence
  SiRNA target sequence
cacctttagttgttggattaggca

SEQ ID NO: 164776 - DNA, 24 bp, Artificial sequence
  SiRNA target sequence
acctttagttgttggattaggcaa

SEQ ID NO: 164777 - DNA, 24 bp, Artificial sequence
  SiRNA target sequence
cctttagttgttggattaggcaaa

SEQ ID NO: 164778 - DNA, 24 bp, Artificial sequence
  SiRNA target sequence
ctttagttgttggattaggcaaag

SEQ ID NO: 164779 - DNA, 24 bp, Artificial sequence
  SiRNA target sequence
tttagttgttggattaggcaaagc

SEQ ID NO: 164780 - DNA, 24 bp, Artificial sequence
  SiRNA target sequence
ttagttgttggattaggcaaagct

SEQ ID NO: 164781 - DNA, 24 bp, Artificial sequence
  SiRNA target sequence
tagttgttggattaggcaaagctg

SEQ ID NO: 164782 - DNA, 24 bp, Artificial sequence
  SiRNA target sequence
agttgttggattaggcaaagctgc

SEQ ID NO: 164783 - DNA, 24 bp, Artificial sequence
  SiRNA target sequence
gttgttggattaggcaaagctgct

SEQ ID NO: 164784 - DNA, 24 bp, Artificial sequence
  SiRNA target sequence
ttgttggattaggcaaagctgctg

SEQ ID NO: 164785 - DNA, 24 bp, Artificial sequence
  SiRNA target sequence
tgttggattaggcaaagctgctga

SEQ ID NO: 164786 - DNA, 24 bp, Artificial sequence
  SiRNA target sequence
gttggattaggcaaagctgctgag

SEQ ID NO: 164787 - DNA, 24 bp, Artificial sequence
  SiRNA target sequence
ttggattaggcaaagctgctgaga

SEQ ID NO: 164788 - DNA, 24 bp, Artificial sequence
  SiRNA target sequence
tggattaggcaaagctgctgagat

SEQ ID NO: 164789 - DNA, 24 bp, Artificial sequence
  SiRNA target sequence
ggattaggcaaagctgctgagata

SEQ ID NO: 164790 - DNA, 24 bp, Artificial sequence
  SiRNA target sequence
gattaggcaaagctgctgagatat

SEQ ID NO: 164791 - DNA, 24 bp, Artificial sequence
  SiRNA target sequence
attaggcaaagctgctgagatatg

SEQ ID NO: 164792 - DNA, 24 bp, Artificial sequence
  SiRNA target sequence
ttaggcaaagctgctgagatatgc

SEQ ID NO: 164793 - DNA, 24 bp, Artificial sequence
  SiRNA target sequence
taggcaaagctgctgagatatgct

SEQ ID NO: 164794 - DNA, 24 bp, Artificial sequence
  SiRNA target sequence
aggcaaagctgctgagatatgctc

SEQ ID NO: 164795 - DNA, 24 bp, Artificial sequence
  SiRNA target sequence
ggcaaagctgctgagatatgctct

SEQ ID NO: 164796 - DNA, 24 bp, Artificial sequence
  SiRNA target sequence
gcaaagctgctgagatatgctctc

SEQ ID NO: 164797 - DNA, 24 bp, Artificial sequence
  SiRNA target sequence
caaagctgctgagatatgctctca

SEQ ID NO: 164798 - DNA, 24 bp, Artificial sequence
  SiRNA target sequence
aaagctgctgagatatgctctcag

SEQ ID NO: 164799 - DNA, 24 bp, Artificial sequence
  SiRNA target sequence
aagctgctgagatatgctctcagg

SEQ ID NO: 164800 - DNA, 24 bp, Artificial sequence
  SiRNA target sequence
agctgctgagatatgctctcagga

SEQ ID NO: 164801 - DNA, 24 bp, Artificial sequence
  SiRNA target sequence
gctgctgagatatgctctcaggag

SEQ ID NO: 164802 - DNA, 24 bp, Artificial sequence
  SiRNA target sequence
ctgctgagatatgctctcaggaga

SEQ ID NO: 164803 - DNA, 24 bp, Artificial sequence
  SiRNA target sequence
tgctgagatatgctctcaggagat

SEQ ID NO: 164804 - DNA, 24 bp, Artificial sequence
  SiRNA target sequence
gctgagatatgctctcaggagatg

SEQ ID NO: 164805 - DNA, 24 bp, Artificial sequence
  SiRNA target sequence
ctgagatatgctctcaggagatgc

SEQ ID NO: 164806 - DNA, 24 bp, Artificial sequence
  SiRNA target sequence
tgagatatgctctcaggagatgcg

SEQ ID NO: 164807 - DNA, 24 bp, Artificial sequence
  SiRNA target sequence
gagatatgctctcaggagatgcgt

SEQ ID NO: 164808 - DNA, 24 bp, Artificial sequence
  SiRNA target sequence
agatatgctctcaggagatgcgta

SEQ ID NO: 164809 - DNA, 24 bp, Artificial sequence
  SiRNA target sequence
gatatgctctcaggagatgcgtaa

SEQ ID NO: 164810 - DNA, 24 bp, Artificial sequence
  SiRNA target sequence
atatgctctcaggagatgcgtaag

SEQ ID NO: 164811 - DNA, 24 bp, Artificial sequence
  SiRNA target sequence
tatgctctcaggagatgcgtaagg

SEQ ID NO: 164812 - DNA, 24 bp, Artificial sequence
  SiRNA target sequence
atgctctcaggagatgcgtaagga

SEQ ID NO: 164813 - DNA, 24 bp, Artificial sequence
  SiRNA target sequence
tgctctcaggagatgcgtaaggac

SEQ ID NO: 164814 - DNA, 24 bp, Artificial sequence
  SiRNA target sequence
gctctcaggagatgcgtaaggact

SEQ ID NO: 164815 - DNA, 24 bp, Artificial sequence
  SiRNA target sequence
ctctcaggagatgcgtaaggacta

SEQ ID NO: 164816 - DNA, 24 bp, Artificial sequence
  SiRNA target sequence
tctcaggagatgcgtaaggactat

SEQ ID NO: 164817 - DNA, 24 bp, Artificial sequence
  SiRNA target sequence
ctcaggagatgcgtaaggactatg

SEQ ID NO: 164818 - DNA, 24 bp, Artificial sequence
  SiRNA target sequence
tcaggagatgcgtaaggactatga

SEQ ID NO: 164819 - DNA, 24 bp, Artificial sequence
  SiRNA target sequence
caggagatgcgtaaggactatgaa

SEQ ID NO: 164820 - DNA, 24 bp, Artificial sequence
  SiRNA target sequence
aggagatgcgtaaggactatgaat

SEQ ID NO: 164821 - DNA, 24 bp, Artificial sequence
  SiRNA target sequence
ggagatgcgtaaggactatgaata

SEQ ID NO: 164822 - DNA, 24 bp, Artificial sequence
  SiRNA target sequence
gagatgcgtaaggactatgaatat

SEQ ID NO: 164823 - DNA, 24 bp, Artificial sequence
  SiRNA target sequence
agatgcgtaaggactatgaatata

SEQ ID NO: 164824 - DNA, 24 bp, Artificial sequence
  SiRNA target sequence
gatgcgtaaggactatgaatatat

SEQ ID NO: 164825 - DNA, 24 bp, Artificial sequence
  SiRNA target sequence
atgcgtaaggactatgaatatata

SEQ ID NO: 164826 - DNA, 24 bp, Artificial sequence
  SiRNA target sequence
tgcgtaaggactatgaatatatac

SEQ ID NO: 164827 - DNA, 24 bp, Artificial sequence
  SiRNA target sequence
gcgtaaggactatgaatatataca

SEQ ID NO: 164828 - DNA, 24 bp, Artificial sequence
  SiRNA target sequence
cgtaaggactatgaatatatacaa

SEQ ID NO: 164829 - DNA, 24 bp, Artificial sequence
  SiRNA target sequence
gtaaggactatgaatatatacaaa

SEQ ID NO: 164830 - DNA, 24 bp, Artificial sequence
  SiRNA target sequence
taaggactatgaatatatacaaaa

SEQ ID NO: 164831 - DNA, 24 bp, Artificial sequence
  SiRNA target sequence
aaggactatgaatatatacaaaaa

SEQ ID NO: 164832 - DNA, 24 bp, Artificial sequence
  SiRNA target sequence
aggactatgaatatatacaaaaat

SEQ ID NO: 164833 - DNA, 24 bp, Artificial sequence
  SiRNA target sequence
ggactatgaatatatacaaaaatt

SEQ ID NO: 164834 - DNA, 24 bp, Artificial sequence
  SiRNA target sequence
gactatgaatatatacaaaaatta

SEQ ID NO: 164835 - DNA, 24 bp, Artificial sequence
  SiRNA target sequence
actatgaatatatacaaaaattat

SEQ ID NO: 164836 - DNA, 24 bp, Artificial sequence
  SiRNA target sequence
ctatgaatatatacaaaaattatc

SEQ ID NO: 164837 - DNA, 24 bp, Artificial sequence
  SiRNA target sequence
tatgaatatatacaaaaattatcg

SEQ ID NO: 164838 - DNA, 24 bp, Artificial sequence
  SiRNA target sequence
atgaatatatacaaaaattatcgg

SEQ ID NO: 164839 - DNA, 24 bp, Artificial sequence
  SiRNA target sequence
tgaatatatacaaaaattatcgga

SEQ ID NO: 164840 - DNA, 24 bp, Artificial sequence
  SiRNA target sequence
gaatatatacaaaaattatcggat

SEQ ID NO: 164841 - DNA, 24 bp, Artificial sequence
  SiRNA target sequence
aatatatacaaaaattatcggata

SEQ ID NO: 164842 - DNA, 24 bp, Artificial sequence
  SiRNA target sequence
atatatacaaaaattatcggataa

SEQ ID NO: 164843 - DNA, 24 bp, Artificial sequence
  SiRNA target sequence
tatatacaaaaattatcggataaa

SEQ ID NO: 164844 - DNA, 24 bp, Artificial sequence
  SiRNA target sequence
atatacaaaaattatcggataaac

SEQ ID NO: 164845 - DNA, 24 bp, Artificial sequence
  SiRNA target sequence
tatacaaaaattatcggataaact

SEQ ID NO: 164846 - DNA, 24 bp, Artificial sequence
  SiRNA target sequence
atacaaaaattatcggataaacta

SEQ ID NO: 164847 - DNA, 24 bp, Artificial sequence
  SiRNA target sequence
tacaaaaattatcggataaactaa

SEQ ID NO: 164848 - DNA, 24 bp, Artificial sequence
  SiRNA target sequence
acaaaaattatcggataaactaaa

SEQ ID NO: 164849 - DNA, 24 bp, Artificial sequence
  SiRNA target sequence
caaaaattatcggataaactaaaa

SEQ ID NO: 164850 - DNA, 24 bp, Artificial sequence
  SiRNA target sequence
aaaaattatcggataaactaaaaa

SEQ ID NO: 164851 - DNA, 24 bp, Artificial sequence
  SiRNA target sequence
aaaattatcggataaactaaaaaa

SEQ ID NO: 164852 - DNA, 24 bp, Artificial sequence
  SiRNA target sequence
aaattatcggataaactaaaaaat

SEQ ID NO: 164853 - DNA, 24 bp, Artificial sequence
  SiRNA target sequence
aattatcggataaactaaaaaatc

SEQ ID NO: 164854 - DNA, 24 bp, Artificial sequence
  SiRNA target sequence
attatcggataaactaaaaaatcg

SEQ ID NO: 164855 - DNA, 24 bp, Artificial sequence
  SiRNA target sequence
ttatcggataaactaaaaaatcgc

SEQ ID NO: 164856 - DNA, 24 bp, Artificial sequence
  SiRNA target sequence
tatcggataaactaaaaaatcgca

SEQ ID NO: 164857 - DNA, 24 bp, Artificial sequence
  SiRNA target sequence
atcggataaactaaaaaatcgcat

SEQ ID NO: 164858 - DNA, 24 bp, Artificial sequence
  SiRNA target sequence
tcggataaactaaaaaatcgcatc

SEQ ID NO: 164859 - DNA, 24 bp, Artificial sequence
  SiRNA target sequence
cggataaactaaaaaatcgcatca

SEQ ID NO: 164860 - DNA, 24 bp, Artificial sequence
  SiRNA target sequence
ggataaactaaaaaatcgcatcaa

SEQ ID NO: 164861 - DNA, 24 bp, Artificial sequence
  SiRNA target sequence
gataaactaaaaaatcgcatcaaa

SEQ ID NO: 164862 - DNA, 24 bp, Artificial sequence
  SiRNA target sequence
ataaactaaaaaatcgcatcaaaa

SEQ ID NO: 164863 - DNA, 24 bp, Artificial sequence
  SiRNA target sequence
taaactaaaaaatcgcatcaaaac

SEQ ID NO: 164864 - DNA, 24 bp, Artificial sequence
  SiRNA target sequence
aaactaaaaaatcgcatcaaaacg

SEQ ID NO: 164865 - DNA, 24 bp, Artificial sequence
  SiRNA target sequence
aactaaaaaatcgcatcaaaacga

SEQ ID NO: 164866 - DNA, 24 bp, Artificial sequence
  SiRNA target sequence
actaaaaaatcgcatcaaaacgaa

SEQ ID NO: 164867 - DNA, 24 bp, Artificial sequence
  SiRNA target sequence
ctaaaaaatcgcatcaaaacgaat

SEQ ID NO: 164868 - DNA, 24 bp, Artificial sequence
  SiRNA target sequence
taaaaaatcgcatcaaaacgaatg

SEQ ID NO: 164869 - DNA, 24 bp, Artificial sequence
  SiRNA target sequence
aaaaaatcgcatcaaaacgaatgt

SEQ ID NO: 164870 - DNA, 24 bp, Artificial sequence
  SiRNA target sequence
aaaaatcgcatcaaaacgaatgta

SEQ ID NO: 164871 - DNA, 24 bp, Artificial sequence
  SiRNA target sequence
aaaatcgcatcaaaacgaatgtag

SEQ ID NO: 164872 - DNA, 24 bp, Artificial sequence
  SiRNA target sequence
aaatcgcatcaaaacgaatgtaga

SEQ ID NO: 164873 - DNA, 24 bp, Artificial sequence
  SiRNA target sequence
aatcgcatcaaaacgaatgtagaa

SEQ ID NO: 164874 - DNA, 24 bp, Artificial sequence
  SiRNA target sequence
atcgcatcaaaacgaatgtagaaa

SEQ ID NO: 164875 - DNA, 24 bp, Artificial sequence
  SiRNA target sequence
tcgcatcaaaacgaatgtagaaaa

SEQ ID NO: 164876 - DNA, 24 bp, Artificial sequence
  SiRNA target sequence
cgcatcaaaacgaatgtagaaaat

SEQ ID NO: 164877 - DNA, 24 bp, Artificial sequence
  SiRNA target sequence
gcatcaaaacgaatgtagaaaatg

SEQ ID NO: 164878 - DNA, 24 bp, Artificial sequence
  SiRNA target sequence
catcaaaacgaatgtagaaaatgt

SEQ ID NO: 164879 - DNA, 24 bp, Artificial sequence
  SiRNA target sequence
atcaaaacgaatgtagaaaatgtt

SEQ ID NO: 164880 - DNA, 24 bp, Artificial sequence
  SiRNA target sequence
tcaaaacgaatgtagaaaatgttg

SEQ ID NO: 164881 - DNA, 24 bp, Artificial sequence
  SiRNA target sequence
caaaacgaatgtagaaaatgttgt

SEQ ID NO: 164882 - DNA, 24 bp, Artificial sequence
  SiRNA target sequence
aaaacgaatgtagaaaatgttgtt

SEQ ID NO: 164883 - DNA, 24 bp, Artificial sequence
  SiRNA target sequence
aaacgaatgtagaaaatgttgtta

SEQ ID NO: 164884 - DNA, 24 bp, Artificial sequence
  SiRNA target sequence
aacgaatgtagaaaatgttgttat

SEQ ID NO: 164885 - DNA, 24 bp, Artificial sequence
  SiRNA target sequence
acgaatgtagaaaatgttgttatt

SEQ ID NO: 164886 - DNA, 24 bp, Artificial sequence
  SiRNA target sequence
cgaatgtagaaaatgttgttatta

SEQ ID NO: 164887 - DNA, 24 bp, Artificial sequence
  SiRNA target sequence
gaatgtagaaaatgttgttattaa

SEQ ID NO: 164888 - DNA, 24 bp, Artificial sequence
  SiRNA target sequence
aatgtagaaaatgttgttattaac

SEQ ID NO: 164889 - DNA, 24 bp, Artificial sequence
  SiRNA target sequence
atgtagaaaatgttgttattaacg

SEQ ID NO: 164890 - DNA, 24 bp, Artificial sequence
  SiRNA target sequence
tgtagaaaatgttgttattaacgg

SEQ ID NO: 164891 - DNA, 24 bp, Artificial sequence
  SiRNA target sequence
gtagaaaatgttgttattaacggc

SEQ ID NO: 164892 - DNA, 24 bp, Artificial sequence
  SiRNA target sequence
tagaaaatgttgttattaacggcg

SEQ ID NO: 164893 - DNA, 24 bp, Artificial sequence
  SiRNA target sequence
agaaaatgttgttattaacggcga

SEQ ID NO: 164894 - DNA, 24 bp, Artificial sequence
  SiRNA target sequence
gaaaatgttgttattaacggcgat

SEQ ID NO: 164895 - DNA, 24 bp, Artificial sequence
  SiRNA target sequence
aaaatgttgttattaacggcgatg

SEQ ID NO: 164896 - DNA, 24 bp, Artificial sequence
  SiRNA target sequence
aaatgttgttattaacggcgatga

SEQ ID NO: 164897 - DNA, 24 bp, Artificial sequence
  SiRNA target sequence
aatgttgttattaacggcgatgat

SEQ ID NO: 164898 - DNA, 24 bp, Artificial sequence
  SiRNA target sequence
atgttgttattaacggcgatgatt

SEQ ID NO: 164899 - DNA, 24 bp, Artificial sequence
  SiRNA target sequence
tgttgttattaacggcgatgattc

SEQ ID NO: 164900 - DNA, 24 bp, Artificial sequence
  SiRNA target sequence
gttgttattaacggcgatgattct

SEQ ID NO: 164901 - DNA, 24 bp, Artificial sequence
  SiRNA target sequence
ttgttattaacggcgatgattcta

SEQ ID NO: 164902 - DNA, 24 bp, Artificial sequence
  SiRNA target sequence
tgttattaacggcgatgattctaa

SEQ ID NO: 164903 - DNA, 24 bp, Artificial sequence
  SiRNA target sequence
gttattaacggcgatgattctaag

SEQ ID NO: 164904 - DNA, 24 bp, Artificial sequence
  SiRNA target sequence
ttattaacggcgatgattctaaga

SEQ ID NO: 164905 - DNA, 24 bp, Artificial sequence
  SiRNA target sequence
tattaacggcgatgattctaagac

SEQ ID NO: 164906 - DNA, 24 bp, Artificial sequence
  SiRNA target sequence
attaacggcgatgattctaagact

SEQ ID NO: 164907 - DNA, 24 bp, Artificial sequence
  SiRNA target sequence
ttaacggcgatgattctaagactt

SEQ ID NO: 164908 - DNA, 24 bp, Artificial sequence
  SiRNA target sequence
taacggcgatgattctaagacttt

SEQ ID NO: 164909 - DNA, 24 bp, Artificial sequence
  SiRNA target sequence
aacggcgatgattctaagactttt

SEQ ID NO: 164910 - DNA, 24 bp, Artificial sequence
  SiRNA target sequence
acggcgatgattctaagacttttc

SEQ ID NO: 164911 - DNA, 24 bp, Artificial sequence
  SiRNA target sequence
cggcgatgattctaagacttttcc

SEQ ID NO: 164912 - DNA, 24 bp, Artificial sequence
  SiRNA target sequence
ggcgatgattctaagacttttcct

SEQ ID NO: 164913 - DNA, 24 bp, Artificial sequence
  SiRNA target sequence
gcgatgattctaagacttttcctg

SEQ ID NO: 164914 - DNA, 24 bp, Artificial sequence
  SiRNA target sequence
cgatgattctaagacttttcctgg

SEQ ID NO: 164915 - DNA, 24 bp, Artificial sequence
  SiRNA target sequence
gatgattctaagacttttcctggc

SEQ ID NO: 164916 - DNA, 24 bp, Artificial sequence
  SiRNA target sequence
atgattctaagacttttcctggct

SEQ ID NO: 164917 - DNA, 24 bp, Artificial sequence
  SiRNA target sequence
tgattctaagacttttcctggctg

SEQ ID NO: 164918 - DNA, 24 bp, Artificial sequence
  SiRNA target sequence
gattctaagacttttcctggctgt

SEQ ID NO: 164919 - DNA, 24 bp, Artificial sequence
  SiRNA target sequence
attctaagacttttcctggctgtc

SEQ ID NO: 164920 - DNA, 24 bp, Artificial sequence
  SiRNA target sequence
ttctaagacttttcctggctgtct

SEQ ID NO: 164921 - DNA, 24 bp, Artificial sequence
  SiRNA target sequence
tctaagacttttcctggctgtctc

SEQ ID NO: 164922 - DNA, 24 bp, Artificial sequence
  SiRNA target sequence
ctaagacttttcctggctgtctca

SEQ ID NO: 164923 - DNA, 24 bp, Artificial sequence
  SiRNA target sequence
taagacttttcctggctgtctcaa

SEQ ID NO: 164924 - DNA, 24 bp, Artificial sequence
  SiRNA target sequence
aagacttttcctggctgtctcaat

SEQ ID NO: 164925 - DNA, 24 bp, Artificial sequence
  SiRNA target sequence
agacttttcctggctgtctcaata

SEQ ID NO: 164926 - DNA, 24 bp, Artificial sequence
  SiRNA target sequence
gacttttcctggctgtctcaatat

SEQ ID NO: 164927 - DNA, 24 bp, Artificial sequence
  SiRNA target sequence
acttttcctggctgtctcaatatt

SEQ ID NO: 164928 - DNA, 24 bp, Artificial sequence
  SiRNA target sequence
cttttcctggctgtctcaatattt

SEQ ID NO: 164929 - DNA, 24 bp, Artificial sequence
  SiRNA target sequence
ttttcctggctgtctcaatatttc

SEQ ID NO: 164930 - DNA, 24 bp, Artificial sequence
  SiRNA target sequence
tttcctggctgtctcaatatttct

SEQ ID NO: 164931 - DNA, 24 bp, Artificial sequence
  SiRNA target sequence
ttcctggctgtctcaatatttctt

SEQ ID NO: 164932 - DNA, 24 bp, Artificial sequence
  SiRNA target sequence
tcctggctgtctcaatatttcttt

SEQ ID NO: 164933 - DNA, 24 bp, Artificial sequence
  SiRNA target sequence
cctggctgtctcaatatttctttt

SEQ ID NO: 164934 - DNA, 24 bp, Artificial sequence
  SiRNA target sequence
ctggctgtctcaatatttcttttc

SEQ ID NO: 164935 - DNA, 24 bp, Artificial sequence
  SiRNA target sequence
tggctgtctcaatatttcttttcc

SEQ ID NO: 164936 - DNA, 24 bp, Artificial sequence
  SiRNA target sequence
ggctgtctcaatatttcttttcca

SEQ ID NO: 164937 - DNA, 24 bp, Artificial sequence
  SiRNA target sequence
gctgtctcaatatttcttttccat

SEQ ID NO: 164938 - DNA, 24 bp, Artificial sequence
  SiRNA target sequence
ctgtctcaatatttcttttccata

SEQ ID NO: 164939 - DNA, 24 bp, Artificial sequence
  SiRNA target sequence
tgtctcaatatttcttttccatat

SEQ ID NO: 164940 - DNA, 24 bp, Artificial sequence
  SiRNA target sequence
gtctcaatatttcttttccatatg

SEQ ID NO: 164941 - DNA, 24 bp, Artificial sequence
  SiRNA target sequence
tctcaatatttcttttccatatgt

SEQ ID NO: 164942 - DNA, 24 bp, Artificial sequence
  SiRNA target sequence
ctcaatatttcttttccatatgta

SEQ ID NO: 164943 - DNA, 24 bp, Artificial sequence
  SiRNA target sequence
tcaatatttcttttccatatgtag

SEQ ID NO: 164944 - DNA, 24 bp, Artificial sequence
  SiRNA target sequence
caatatttcttttccatatgtaga

SEQ ID NO: 164945 - DNA, 24 bp, Artificial sequence
  SiRNA target sequence
aatatttcttttccatatgtagaa

SEQ ID NO: 164946 - DNA, 24 bp, Artificial sequence
  SiRNA target sequence
atatttcttttccatatgtagaag

SEQ ID NO: 164947 - DNA, 24 bp, Artificial sequence
  SiRNA target sequence
tatttcttttccatatgtagaagg

SEQ ID NO: 164948 - DNA, 24 bp, Artificial sequence
  SiRNA target sequence
atttcttttccatatgtagaaggt

SEQ ID NO: 164949 - DNA, 24 bp, Artificial sequence
  SiRNA target sequence
tttcttttccatatgtagaaggtg

SEQ ID NO: 164950 - DNA, 24 bp, Artificial sequence
  SiRNA target sequence
ttcttttccatatgtagaaggtga

SEQ ID NO: 164951 - DNA, 24 bp, Artificial sequence
  SiRNA target sequence
tcttttccatatgtagaaggtgaa

SEQ ID NO: 164952 - DNA, 24 bp, Artificial sequence
  SiRNA target sequence
cttttccatatgtagaaggtgaag

SEQ ID NO: 164953 - DNA, 24 bp, Artificial sequence
  SiRNA target sequence
ttttccatatgtagaaggtgaagg

SEQ ID NO: 164954 - DNA, 24 bp, Artificial sequence
  SiRNA target sequence
tttccatatgtagaaggtgaaggg

SEQ ID NO: 164955 - DNA, 24 bp, Artificial sequence
  SiRNA target sequence
ttccatatgtagaaggtgaagggc

SEQ ID NO: 164956 - DNA, 24 bp, Artificial sequence
  SiRNA target sequence
tccatatgtagaaggtgaagggct

SEQ ID NO: 164957 - DNA, 24 bp, Artificial sequence
  SiRNA target sequence
ccatatgtagaaggtgaagggctt

SEQ ID NO: 164958 - DNA, 24 bp, Artificial sequence
  SiRNA target sequence
catatgtagaaggtgaagggctta

SEQ ID NO: 164959 - DNA, 24 bp, Artificial sequence
  SiRNA target sequence
atatgtagaaggtgaagggcttat

SEQ ID NO: 164960 - DNA, 24 bp, Artificial sequence
  SiRNA target sequence
tatgtagaaggtgaagggcttatg

SEQ ID NO: 164961 - DNA, 24 bp, Artificial sequence
  SiRNA target sequence
atgtagaaggtgaagggcttatga

SEQ ID NO: 164962 - DNA, 24 bp, Artificial sequence
  SiRNA target sequence
tgtagaaggtgaagggcttatgat

SEQ ID NO: 164963 - DNA, 24 bp, Artificial sequence
  SiRNA target sequence
gtagaaggtgaagggcttatgatg

SEQ ID NO: 164964 - DNA, 24 bp, Artificial sequence
  SiRNA target sequence
tagaaggtgaagggcttatgatga

SEQ ID NO: 164965 - DNA, 24 bp, Artificial sequence
  SiRNA target sequence
agaaggtgaagggcttatgatgaa

SEQ ID NO: 164966 - DNA, 24 bp, Artificial sequence
  SiRNA target sequence
gaaggtgaagggcttatgatgaat

SEQ ID NO: 164967 - DNA, 24 bp, Artificial sequence
  SiRNA target sequence
aaggtgaagggcttatgatgaata

SEQ ID NO: 164968 - DNA, 24 bp, Artificial sequence
  SiRNA target sequence
aggtgaagggcttatgatgaatat

SEQ ID NO: 164969 - DNA, 24 bp, Artificial sequence
  SiRNA target sequence
ggtgaagggcttatgatgaatatt

SEQ ID NO: 164970 - DNA, 24 bp, Artificial sequence
  SiRNA target sequence
gtgaagggcttatgatgaatatta

SEQ ID NO: 164971 - DNA, 24 bp, Artificial sequence
  SiRNA target sequence
tgaagggcttatgatgaatattaa

SEQ ID NO: 164972 - DNA, 24 bp, Artificial sequence
  SiRNA target sequence
gaagggcttatgatgaatattaag

SEQ ID NO: 164973 - DNA, 24 bp, Artificial sequence
  SiRNA target sequence
aagggcttatgatgaatattaagg

SEQ ID NO: 164974 - DNA, 24 bp, Artificial sequence
  SiRNA target sequence
agggcttatgatgaatattaagga

SEQ ID NO: 164975 - DNA, 24 bp, Artificial sequence
  SiRNA target sequence
gggcttatgatgaatattaaggat

SEQ ID NO: 164976 - DNA, 24 bp, Artificial sequence
  SiRNA target sequence
ggcttatgatgaatattaaggata

SEQ ID NO: 164977 - DNA, 24 bp, Artificial sequence
  SiRNA target sequence
gcttatgatgaatattaaggatat

SEQ ID NO: 164978 - DNA, 24 bp, Artificial sequence
  SiRNA target sequence
cttatgatgaatattaaggatatt

SEQ ID NO: 164979 - DNA, 24 bp, Artificial sequence
  SiRNA target sequence
ttatgatgaatattaaggatattg

SEQ ID NO: 164980 - DNA, 24 bp, Artificial sequence
  SiRNA target sequence
tatgatgaatattaaggatattgc

SEQ ID NO: 164981 - DNA, 24 bp, Artificial sequence
  SiRNA target sequence
atgatgaatattaaggatattgct

SEQ ID NO: 164982 - DNA, 24 bp, Artificial sequence
  SiRNA target sequence
tgatgaatattaaggatattgctg

SEQ ID NO: 164983 - DNA, 24 bp, Artificial sequence
  SiRNA target sequence
gatgaatattaaggatattgctgt

SEQ ID NO: 164984 - DNA, 24 bp, Artificial sequence
  SiRNA target sequence
atgaatattaaggatattgctgtt

SEQ ID NO: 164985 - DNA, 24 bp, Artificial sequence
  SiRNA target sequence
tgaatattaaggatattgctgtta

SEQ ID NO: 164986 - DNA, 24 bp, Artificial sequence
  SiRNA target sequence
gaatattaaggatattgctgttag

SEQ ID NO: 164987 - DNA, 24 bp, Artificial sequence
  SiRNA target sequence
aatattaaggatattgctgttagt

SEQ ID NO: 164988 - DNA, 24 bp, Artificial sequence
  SiRNA target sequence
atattaaggatattgctgttagta

SEQ ID NO: 164989 - DNA, 24 bp, Artificial sequence
  SiRNA target sequence
tattaaggatattgctgttagtag

SEQ ID NO: 164990 - DNA, 24 bp, Artificial sequence
  SiRNA target sequence
attaaggatattgctgttagtagt

SEQ ID NO: 164991 - DNA, 24 bp, Artificial sequence
  SiRNA target sequence
ttaaggatattgctgttagtagtg

SEQ ID NO: 164992 - DNA, 24 bp, Artificial sequence
  SiRNA target sequence
taaggatattgctgttagtagtgg

SEQ ID NO: 164993 - DNA, 24 bp, Artificial sequence
  SiRNA target sequence
aaggatattgctgttagtagtgga

SEQ ID NO: 164994 - DNA, 24 bp, Artificial sequence
  SiRNA target sequence
aggatattgctgttagtagtggaa

SEQ ID NO: 164995 - DNA, 24 bp, Artificial sequence
  SiRNA target sequence
ggatattgctgttagtagtggaag

SEQ ID NO: 164996 - DNA, 24 bp, Artificial sequence
  SiRNA target sequence
gatattgctgttagtagtggaagt

SEQ ID NO: 164997 - DNA, 24 bp, Artificial sequence
  SiRNA target sequence
atattgctgttagtagtggaagtg

SEQ ID NO: 164998 - DNA, 24 bp, Artificial sequence
  SiRNA target sequence
tattgctgttagtagtggaagtgc

SEQ ID NO: 164999 - DNA, 24 bp, Artificial sequence
  SiRNA target sequence
attgctgttagtagtggaagtgct

SEQ ID NO: 165000 - DNA, 24 bp, Artificial sequence
  SiRNA target sequence
ttgctgttagtagtggaagtgctt

SEQ ID NO: 165001 - DNA, 24 bp, Artificial sequence
  SiRNA target sequence
tgctgttagtagtggaagtgcttg

SEQ ID NO: 165002 - DNA, 24 bp, Artificial sequence
  SiRNA target sequence
gctgttagtagtggaagtgcttgc

SEQ ID NO: 165003 - DNA, 24 bp, Artificial sequence
  SiRNA target sequence
ctgttagtagtggaagtgcttgca

SEQ ID NO: 165004 - DNA, 24 bp, Artificial sequence
  SiRNA target sequence
tgttagtagtggaagtgcttgcac

SEQ ID NO: 165005 - DNA, 24 bp, Artificial sequence
  SiRNA target sequence
gttagtagtggaagtgcttgcact

SEQ ID NO: 165006 - DNA, 24 bp, Artificial sequence
  SiRNA target sequence
ttagtagtggaagtgcttgcactt

SEQ ID NO: 165007 - DNA, 24 bp, Artificial sequence
  SiRNA target sequence
tagtagtggaagtgcttgcacttc

SEQ ID NO: 165008 - DNA, 24 bp, Artificial sequence
  SiRNA target sequence
agtagtggaagtgcttgcacttca

SEQ ID NO: 165009 - DNA, 24 bp, Artificial sequence
  SiRNA target sequence
gtagtggaagtgcttgcacttcat

SEQ ID NO: 165010 - DNA, 24 bp, Artificial sequence
  SiRNA target sequence
tagtggaagtgcttgcacttcatc

SEQ ID NO: 165011 - DNA, 24 bp, Artificial sequence
  SiRNA target sequence
agtggaagtgcttgcacttcatca

SEQ ID NO: 165012 - DNA, 24 bp, Artificial sequence
  SiRNA target sequence
gtggaagtgcttgcacttcatcat

SEQ ID NO: 165013 - DNA, 24 bp, Artificial sequence
  SiRNA target sequence
tggaagtgcttgcacttcatcatc

SEQ ID NO: 165014 - DNA, 24 bp, Artificial sequence
  SiRNA target sequence
ggaagtgcttgcacttcatcatct

SEQ ID NO: 165015 - DNA, 24 bp, Artificial sequence
  SiRNA target sequence
gaagtgcttgcacttcatcatctt

SEQ ID NO: 165016 - DNA, 24 bp, Artificial sequence
  SiRNA target sequence
aagtgcttgcacttcatcatcttt

SEQ ID NO: 165017 - DNA, 24 bp, Artificial sequence
  SiRNA target sequence
agtgcttgcacttcatcatcttta

SEQ ID NO: 165018 - DNA, 24 bp, Artificial sequence
  SiRNA target sequence
gtgcttgcacttcatcatctttag

SEQ ID NO: 165019 - DNA, 24 bp, Artificial sequence
  SiRNA target sequence
tgcttgcacttcatcatctttaga

SEQ ID NO: 165020 - DNA, 24 bp, Artificial sequence
  SiRNA target sequence
gcttgcacttcatcatctttagaa

SEQ ID NO: 165021 - DNA, 24 bp, Artificial sequence
  SiRNA target sequence
cttgcacttcatcatctttagaac

SEQ ID NO: 165022 - DNA, 24 bp, Artificial sequence
  SiRNA target sequence
ttgcacttcatcatctttagaacc

SEQ ID NO: 165023 - DNA, 24 bp, Artificial sequence
  SiRNA target sequence
tgcacttcatcatctttagaaccc

SEQ ID NO: 165024 - DNA, 24 bp, Artificial sequence
  SiRNA target sequence
gcacttcatcatctttagaaccct

SEQ ID NO: 165025 - DNA, 24 bp, Artificial sequence
  SiRNA target sequence
cacttcatcatctttagaaccctc

SEQ ID NO: 165026 - DNA, 24 bp, Artificial sequence
  SiRNA target sequence
acttcatcatctttagaaccctct

SEQ ID NO: 165027 - DNA, 24 bp, Artificial sequence
  SiRNA target sequence
cttcatcatctttagaaccctctt

SEQ ID NO: 165028 - DNA, 24 bp, Artificial sequence
  SiRNA target sequence
ttcatcatctttagaaccctctta

SEQ ID NO: 165029 - DNA, 24 bp, Artificial sequence
  SiRNA target sequence
tcatcatctttagaaccctcttat

SEQ ID NO: 165030 - DNA, 24 bp, Artificial sequence
  SiRNA target sequence
catcatctttagaaccctcttatg

SEQ ID NO: 165031 - DNA, 24 bp, Artificial sequence
  SiRNA target sequence
atcatctttagaaccctcttatgt

SEQ ID NO: 165032 - DNA, 24 bp, Artificial sequence
  SiRNA target sequence
tcatctttagaaccctcttatgtt

SEQ ID NO: 165033 - DNA, 24 bp, Artificial sequence
  SiRNA target sequence
catctttagaaccctcttatgttt

SEQ ID NO: 165034 - DNA, 24 bp, Artificial sequence
  SiRNA target sequence
atctttagaaccctcttatgtttt

SEQ ID NO: 165035 - DNA, 24 bp, Artificial sequence
  SiRNA target sequence
tctttagaaccctcttatgttttg

SEQ ID NO: 165036 - DNA, 24 bp, Artificial sequence
  SiRNA target sequence
ctttagaaccctcttatgttttgc

SEQ ID NO: 165037 - DNA, 24 bp, Artificial sequence
  SiRNA target sequence
tttagaaccctcttatgttttgcg

SEQ ID NO: 165038 - DNA, 24 bp, Artificial sequence
  SiRNA target sequence
ttagaaccctcttatgttttgcga

SEQ ID NO: 165039 - DNA, 24 bp, Artificial sequence
  SiRNA target sequence
tagaaccctcttatgttttgcgag

SEQ ID NO: 165040 - DNA, 24 bp, Artificial sequence
  SiRNA target sequence
agaaccctcttatgttttgcgagc

SEQ ID NO: 165041 - DNA, 24 bp, Artificial sequence
  SiRNA target sequence
gaaccctcttatgttttgcgagct

SEQ ID NO: 165042 - DNA, 24 bp, Artificial sequence
  SiRNA target sequence
aaccctcttatgttttgcgagctt

SEQ ID NO: 165043 - DNA, 24 bp, Artificial sequence
  SiRNA target sequence
accctcttatgttttgcgagcttt

SEQ ID NO: 165044 - DNA, 24 bp, Artificial sequence
  SiRNA target sequence
ccctcttatgttttgcgagcttta

SEQ ID NO: 165045 - DNA, 24 bp, Artificial sequence
  SiRNA target sequence
cctcttatgttttgcgagctttag

SEQ ID NO: 165046 - DNA, 24 bp, Artificial sequence
  SiRNA target sequence
ctcttatgttttgcgagctttagg

SEQ ID NO: 165047 - DNA, 24 bp, Artificial sequence
  SiRNA target sequence
tcttatgttttgcgagctttaggc

SEQ ID NO: 165048 - DNA, 24 bp, Artificial sequence
  SiRNA target sequence
cttatgttttgcgagctttaggca

SEQ ID NO: 165049 - DNA, 24 bp, Artificial sequence
  SiRNA target sequence
ttatgttttgcgagctttaggcaa

SEQ ID NO: 165050 - DNA, 24 bp, Artificial sequence
  SiRNA target sequence
tatgttttgcgagctttaggcaaa

SEQ ID NO: 165051 - DNA, 24 bp, Artificial sequence
  SiRNA target sequence
atgttttgcgagctttaggcaaaa

SEQ ID NO: 165052 - DNA, 24 bp, Artificial sequence
  SiRNA target sequence
tgttttgcgagctttaggcaaaaa

SEQ ID NO: 165053 - DNA, 24 bp, Artificial sequence
  SiRNA target sequence
gttttgcgagctttaggcaaaaat

SEQ ID NO: 165054 - DNA, 24 bp, Artificial sequence
  SiRNA target sequence
ttttgcgagctttaggcaaaaatg

SEQ ID NO: 165055 - DNA, 24 bp, Artificial sequence
  SiRNA target sequence
tttgcgagctttaggcaaaaatga

SEQ ID NO: 165056 - DNA, 24 bp, Artificial sequence
  SiRNA target sequence
ttgcgagctttaggcaaaaatgat

SEQ ID NO: 165057 - DNA, 24 bp, Artificial sequence
  SiRNA target sequence
tgcgagctttaggcaaaaatgatg

SEQ ID NO: 165058 - DNA, 24 bp, Artificial sequence
  SiRNA target sequence
gcgagctttaggcaaaaatgatga

SEQ ID NO: 165059 - DNA, 24 bp, Artificial sequence
  SiRNA target sequence
cgagctttaggcaaaaatgatgat

SEQ ID NO: 165060 - DNA, 24 bp, Artificial sequence
  SiRNA target sequence
gagctttaggcaaaaatgatgatc

SEQ ID NO: 165061 - DNA, 24 bp, Artificial sequence
  SiRNA target sequence
agctttaggcaaaaatgatgatct

SEQ ID NO: 165062 - DNA, 24 bp, Artificial sequence
  SiRNA target sequence
gctttaggcaaaaatgatgatctt

SEQ ID NO: 165063 - DNA, 24 bp, Artificial sequence
  SiRNA target sequence
ctttaggcaaaaatgatgatcttg

SEQ ID NO: 165064 - DNA, 24 bp, Artificial sequence
  SiRNA target sequence
tttaggcaaaaatgatgatcttgc

SEQ ID NO: 165065 - DNA, 24 bp, Artificial sequence
  SiRNA target sequence
ttaggcaaaaatgatgatcttgcg

SEQ ID NO: 165066 - DNA, 24 bp, Artificial sequence
  SiRNA target sequence
taggcaaaaatgatgatcttgcgc

SEQ ID NO: 165067 - DNA, 24 bp, Artificial sequence
  SiRNA target sequence
aggcaaaaatgatgatcttgcgca

SEQ ID NO: 165068 - DNA, 24 bp, Artificial sequence
  SiRNA target sequence
ggcaaaaatgatgatcttgcgcat

SEQ ID NO: 165069 - DNA, 24 bp, Artificial sequence
  SiRNA target sequence
gcaaaaatgatgatcttgcgcatt

SEQ ID NO: 165070 - DNA, 24 bp, Artificial sequence
  SiRNA target sequence
caaaaatgatgatcttgcgcattc

SEQ ID NO: 165071 - DNA, 24 bp, Artificial sequence
  SiRNA target sequence
aaaaatgatgatcttgcgcattct

SEQ ID NO: 165072 - DNA, 24 bp, Artificial sequence
  SiRNA target sequence
aaaatgatgatcttgcgcattctt

SEQ ID NO: 165073 - DNA, 24 bp, Artificial sequence
  SiRNA target sequence
aaatgatgatcttgcgcattcttc

SEQ ID NO: 165074 - DNA, 24 bp, Artificial sequence
  SiRNA target sequence
aatgatgatcttgcgcattcttct

SEQ ID NO: 165075 - DNA, 24 bp, Artificial sequence
  SiRNA target sequence
atgatgatcttgcgcattcttcta

SEQ ID NO: 165076 - DNA, 24 bp, Artificial sequence
  SiRNA target sequence
tgatgatcttgcgcattcttctat

SEQ ID NO: 165077 - DNA, 24 bp, Artificial sequence
  SiRNA target sequence
gatgatcttgcgcattcttctata

SEQ ID NO: 165078 - DNA, 24 bp, Artificial sequence
  SiRNA target sequence
atgatcttgcgcattcttctataa

SEQ ID NO: 165079 - DNA, 24 bp, Artificial sequence
  SiRNA target sequence
tgatcttgcgcattcttctataag

SEQ ID NO: 165080 - DNA, 24 bp, Artificial sequence
  SiRNA target sequence
gatcttgcgcattcttctataaga

SEQ ID NO: 165081 - DNA, 24 bp, Artificial sequence
  SiRNA target sequence
atcttgcgcattcttctataagat

SEQ ID NO: 165082 - DNA, 24 bp, Artificial sequence
  SiRNA target sequence
tcttgcgcattcttctataagatt

SEQ ID NO: 165083 - DNA, 24 bp, Artificial sequence
  SiRNA target sequence
cttgcgcattcttctataagattt

SEQ ID NO: 165084 - DNA, 24 bp, Artificial sequence
  SiRNA target sequence
ttgcgcattcttctataagatttg

SEQ ID NO: 165085 - DNA, 24 bp, Artificial sequence
  SiRNA target sequence
tgcgcattcttctataagatttgg

SEQ ID NO: 165086 - DNA, 24 bp, Artificial sequence
  SiRNA target sequence
gcgcattcttctataagatttgga

SEQ ID NO: 165087 - DNA, 24 bp, Artificial sequence
  SiRNA target sequence
cgcattcttctataagatttggaa

SEQ ID NO: 165088 - DNA, 24 bp, Artificial sequence
  SiRNA target sequence
gcattcttctataagatttggaat

SEQ ID NO: 165089 - DNA, 24 bp, Artificial sequence
  SiRNA target sequence
cattcttctataagatttggaata

SEQ ID NO: 165090 - DNA, 24 bp, Artificial sequence
  SiRNA target sequence
attcttctataagatttggaataa

SEQ ID NO: 165091 - DNA, 24 bp, Artificial sequence
  SiRNA target sequence
ttcttctataagatttggaataaa

SEQ ID NO: 165092 - DNA, 24 bp, Artificial sequence
  SiRNA target sequence
tcttctataagatttggaataaat

SEQ ID NO: 165093 - DNA, 24 bp, Artificial sequence
  SiRNA target sequence
cttctataagatttggaataaata

SEQ ID NO: 165094 - DNA, 24 bp, Artificial sequence
  SiRNA target sequence
ttctataagatttggaataaataa

SEQ ID NO: 165095 - DNA, 24 bp, Artificial sequence
  SiRNA target sequence
tctataagatttggaataaataag

SEQ ID NO: 165096 - DNA, 24 bp, Artificial sequence
  SiRNA target sequence
ctataagatttggaataaataagt

SEQ ID NO: 165097 - DNA, 24 bp, Artificial sequence
  SiRNA target sequence
tataagatttggaataaataagtt

SEQ ID NO: 165098 - DNA, 24 bp, Artificial sequence
  SiRNA target sequence
ataagatttggaataaataagttt

SEQ ID NO: 165099 - DNA, 24 bp, Artificial sequence
  SiRNA target sequence
taagatttggaataaataagttta

SEQ ID NO: 165100 - DNA, 24 bp, Artificial sequence
  SiRNA target sequence
aagatttggaataaataagtttac

SEQ ID NO: 165101 - DNA, 24 bp, Artificial sequence
  SiRNA target sequence
agatttggaataaataagtttaca

SEQ ID NO: 165102 - DNA, 24 bp, Artificial sequence
  SiRNA target sequence
gatttggaataaataagtttacaa

SEQ ID NO: 165103 - DNA, 24 bp, Artificial sequence
  SiRNA target sequence
atttggaataaataagtttacaac

SEQ ID NO: 165104 - DNA, 24 bp, Artificial sequence
  SiRNA target sequence
tttggaataaataagtttacaact

SEQ ID NO: 165105 - DNA, 24 bp, Artificial sequence
  SiRNA target sequence
ttggaataaataagtttacaactg

SEQ ID NO: 165106 - DNA, 24 bp, Artificial sequence
  SiRNA target sequence
tggaataaataagtttacaactga

SEQ ID NO: 165107 - DNA, 24 bp, Artificial sequence
  SiRNA target sequence
ggaataaataagtttacaactgaa

SEQ ID NO: 165108 - DNA, 24 bp, Artificial sequence
  SiRNA target sequence
gaataaataagtttacaactgaag

SEQ ID NO: 165109 - DNA, 24 bp, Artificial sequence
  SiRNA target sequence
aataaataagtttacaactgaaga

SEQ ID NO: 165110 - DNA, 24 bp, Artificial sequence
  SiRNA target sequence
ataaataagtttacaactgaagaa

SEQ ID NO: 165111 - DNA, 24 bp, Artificial sequence
  SiRNA target sequence
taaataagtttacaactgaagaag

SEQ ID NO: 165112 - DNA, 24 bp, Artificial sequence
  SiRNA target sequence
aaataagtttacaactgaagaaga

SEQ ID NO: 165113 - DNA, 24 bp, Artificial sequence
  SiRNA target sequence
aataagtttacaactgaagaagaa

SEQ ID NO: 165114 - DNA, 24 bp, Artificial sequence
  SiRNA target sequence
ataagtttacaactgaagaagaaa

SEQ ID NO: 165115 - DNA, 24 bp, Artificial sequence
  SiRNA target sequence
taagtttacaactgaagaagaaat

SEQ ID NO: 165116 - DNA, 24 bp, Artificial sequence
  SiRNA target sequence
aagtttacaactgaagaagaaatc

SEQ ID NO: 165117 - DNA, 24 bp, Artificial sequence
  SiRNA target sequence
agtttacaactgaagaagaaatca

SEQ ID NO: 165118 - DNA, 24 bp, Artificial sequence
  SiRNA target sequence
gtttacaactgaagaagaaatcaa

SEQ ID NO: 165119 - DNA, 24 bp, Artificial sequence
  SiRNA target sequence
tttacaactgaagaagaaatcaat

SEQ ID NO: 165120 - DNA, 24 bp, Artificial sequence
  SiRNA target sequence
ttacaactgaagaagaaatcaata

SEQ ID NO: 165121 - DNA, 24 bp, Artificial sequence
  SiRNA target sequence
tacaactgaagaagaaatcaataa

SEQ ID NO: 165122 - DNA, 24 bp, Artificial sequence
  SiRNA target sequence
acaactgaagaagaaatcaataaa

SEQ ID NO: 165123 - DNA, 24 bp, Artificial sequence
  SiRNA target sequence
caactgaagaagaaatcaataaag

SEQ ID NO: 165124 - DNA, 24 bp, Artificial sequence
  SiRNA target sequence
aactgaagaagaaatcaataaagt

SEQ ID NO: 165125 - DNA, 24 bp, Artificial sequence
  SiRNA target sequence
actgaagaagaaatcaataaagta

SEQ ID NO: 165126 - DNA, 24 bp, Artificial sequence
  SiRNA target sequence
ctgaagaagaaatcaataaagtat

SEQ ID NO: 165127 - DNA, 24 bp, Artificial sequence
  SiRNA target sequence
tgaagaagaaatcaataaagtatc

SEQ ID NO: 165128 - DNA, 24 bp, Artificial sequence
  SiRNA target sequence
gaagaagaaatcaataaagtatct

SEQ ID NO: 165129 - DNA, 24 bp, Artificial sequence
  SiRNA target sequence
aagaagaaatcaataaagtatcta

SEQ ID NO: 165130 - DNA, 24 bp, Artificial sequence
  SiRNA target sequence
agaagaaatcaataaagtatctag

SEQ ID NO: 165131 - DNA, 24 bp, Artificial sequence
  SiRNA target sequence
gaagaaatcaataaagtatctagt

SEQ ID NO: 165132 - DNA, 24 bp, Artificial sequence
  SiRNA target sequence
aagaaatcaataaagtatctagtg

SEQ ID NO: 165133 - DNA, 24 bp, Artificial sequence
  SiRNA target sequence
agaaatcaataaagtatctagtga

SEQ ID NO: 165134 - DNA, 24 bp, Artificial sequence
  SiRNA target sequence
gaaatcaataaagtatctagtgat

SEQ ID NO: 165135 - DNA, 24 bp, Artificial sequence
  SiRNA target sequence
aaatcaataaagtatctagtgata

SEQ ID NO: 165136 - DNA, 24 bp, Artificial sequence
  SiRNA target sequence
aatcaataaagtatctagtgatac

SEQ ID NO: 165137 - DNA, 24 bp, Artificial sequence
  SiRNA target sequence
atcaataaagtatctagtgataca

SEQ ID NO: 165138 - DNA, 24 bp, Artificial sequence
  SiRNA target sequence
tcaataaagtatctagtgatacaa

SEQ ID NO: 165139 - DNA, 24 bp, Artificial sequence
  SiRNA target sequence
caataaagtatctagtgatacaat

SEQ ID NO: 165140 - DNA, 24 bp, Artificial sequence
  SiRNA target sequence
aataaagtatctagtgatacaatt

SEQ ID NO: 165141 - DNA, 24 bp, Artificial sequence
  SiRNA target sequence
ataaagtatctagtgatacaatta

SEQ ID NO: 165142 - DNA, 24 bp, Artificial sequence
  SiRNA target sequence
taaagtatctagtgatacaattaa

SEQ ID NO: 165143 - DNA, 24 bp, Artificial sequence
  SiRNA target sequence
aaagtatctagtgatacaattaaa

SEQ ID NO: 165144 - DNA, 24 bp, Artificial sequence
  SiRNA target sequence
aagtatctagtgatacaattaaag

SEQ ID NO: 165145 - DNA, 24 bp, Artificial sequence
  SiRNA target sequence
agtatctagtgatacaattaaagc

SEQ ID NO: 165146 - DNA, 24 bp, Artificial sequence
  SiRNA target sequence
gtatctagtgatacaattaaagct

SEQ ID NO: 165147 - DNA, 24 bp, Artificial sequence
  SiRNA target sequence
tatctagtgatacaattaaagctg

SEQ ID NO: 165148 - DNA, 24 bp, Artificial sequence
  SiRNA target sequence
atctagtgatacaattaaagctgt

SEQ ID NO: 165149 - DNA, 24 bp, Artificial sequence
  SiRNA target sequence
tctagtgatacaattaaagctgtt

SEQ ID NO: 165150 - DNA, 24 bp, Artificial sequence
  SiRNA target sequence
ctagtgatacaattaaagctgtta

SEQ ID NO: 165151 - DNA, 24 bp, Artificial sequence
  SiRNA target sequence
tagtgatacaattaaagctgttaa

SEQ ID NO: 165152 - DNA, 24 bp, Artificial sequence
  SiRNA target sequence
agtgatacaattaaagctgttaat

SEQ ID NO: 165153 - DNA, 24 bp, Artificial sequence
  SiRNA target sequence
gtgatacaattaaagctgttaata

SEQ ID NO: 165154 - DNA, 24 bp, Artificial sequence
  SiRNA target sequence
tgatacaattaaagctgttaataa

SEQ ID NO: 165155 - DNA, 24 bp, Artificial sequence
  SiRNA target sequence
gatacaattaaagctgttaataag

SEQ ID NO: 165156 - DNA, 24 bp, Artificial sequence
  SiRNA target sequence
atacaattaaagctgttaataagt

SEQ ID NO: 165157 - DNA, 24 bp, Artificial sequence
  SiRNA target sequence
tacaattaaagctgttaataagtt

SEQ ID NO: 165158 - DNA, 24 bp, Artificial sequence
  SiRNA target sequence
acaattaaagctgttaataagtta

SEQ ID NO: 165159 - DNA, 24 bp, Artificial sequence
  SiRNA target sequence
caattaaagctgttaataagttaa

SEQ ID NO: 165160 - DNA, 24 bp, Artificial sequence
  SiRNA target sequence
aattaaagctgttaataagttaag

SEQ ID NO: 165161 - DNA, 24 bp, Artificial sequence
  SiRNA target sequence
attaaagctgttaataagttaaga

SEQ ID NO: 165162 - DNA, 24 bp, Artificial sequence
  SiRNA target sequence
ttaaagctgttaataagttaagag

SEQ ID NO: 165163 - DNA, 24 bp, Artificial sequence
  SiRNA target sequence
taaagctgttaataagttaagaga

SEQ ID NO: 165164 - DNA, 24 bp, Artificial sequence
  SiRNA target sequence
aaagctgttaataagttaagagat

SEQ ID NO: 165165 - DNA, 24 bp, Artificial sequence
  SiRNA target sequence
aagctgttaataagttaagagata

SEQ ID NO: 165166 - DNA, 24 bp, Artificial sequence
  SiRNA target sequence
agctgttaataagttaagagatat

SEQ ID NO: 165167 - DNA, 24 bp, Artificial sequence
  SiRNA target sequence
gctgttaataagttaagagatatg

SEQ ID NO: 165168 - DNA, 24 bp, Artificial sequence
  SiRNA target sequence
ctgttaataagttaagagatatgt

SEQ ID NO: 165169 - DNA, 24 bp, Artificial sequence
  SiRNA target sequence
tgttaataagttaagagatatgtc

SEQ ID NO: 165170 - DNA, 24 bp, Artificial sequence
  SiRNA target sequence
gttaataagttaagagatatgtct

SEQ ID NO: 165171 - DNA, 24 bp, Artificial sequence
  SiRNA target sequence
ttaataagttaagagatatgtctc

SEQ ID NO: 165172 - DNA, 24 bp, Artificial sequence
  SiRNA target sequence
taataagttaagagatatgtctcc

SEQ ID NO: 165173 - DNA, 24 bp, Artificial sequence
  SiRNA target sequence
aataagttaagagatatgtctcct

SEQ ID NO: 165174 - DNA, 24 bp, Artificial sequence
  SiRNA target sequence
ataagttaagagatatgtctcctt

SEQ ID NO: 165175 - DNA, 24 bp, Artificial sequence
  SiRNA target sequence
taagttaagagatatgtctccttt

SEQ ID NO: 165176 - DNA, 24 bp, Artificial sequence
  SiRNA target sequence
aagttaagagatatgtctccttta

SEQ ID NO: 165177 - DNA, 24 bp, Artificial sequence
  SiRNA target sequence
agttaagagatatgtctcctttat

SEQ ID NO: 165178 - DNA, 24 bp, Artificial sequence
  SiRNA target sequence
gttaagagatatgtctcctttata

SEQ ID NO: 165179 - DNA, 24 bp, Artificial sequence
  SiRNA target sequence
ttaagagatatgtctcctttatat

SEQ ID NO: 165180 - DNA, 24 bp, Artificial sequence
  SiRNA target sequence
taagagatatgtctcctttatatg

SEQ ID NO: 165181 - DNA, 24 bp, Artificial sequence
  SiRNA target sequence
aagagatatgtctcctttatatga

SEQ ID NO: 165182 - DNA, 24 bp, Artificial sequence
  SiRNA target sequence
agagatatgtctcctttatatgaa

SEQ ID NO: 165183 - DNA, 24 bp, Artificial sequence
  SiRNA target sequence
gagatatgtctcctttatatgaaa

SEQ ID NO: 165184 - DNA, 24 bp, Artificial sequence
  SiRNA target sequence
agatatgtctcctttatatgaaat

SEQ ID NO: 165185 - DNA, 24 bp, Artificial sequence
  SiRNA target sequence
gatatgtctcctttatatgaaatg

SEQ ID NO: 165186 - DNA, 24 bp, Artificial sequence
  SiRNA target sequence
atatgtctcctttatatgaaatgg

SEQ ID NO: 165187 - DNA, 24 bp, Artificial sequence
  SiRNA target sequence
tatgtctcctttatatgaaatggt

SEQ ID NO: 165188 - DNA, 24 bp, Artificial sequence
  SiRNA target sequence
atgtctcctttatatgaaatggtc

SEQ ID NO: 165189 - DNA, 24 bp, Artificial sequence
  SiRNA target sequence
tgtctcctttatatgaaatggtca

SEQ ID NO: 165190 - DNA, 24 bp, Artificial sequence
  SiRNA target sequence
gtctcctttatatgaaatggtcaa

SEQ ID NO: 165191 - DNA, 24 bp, Artificial sequence
  SiRNA target sequence
tctcctttatatgaaatggtcaaa

SEQ ID NO: 165192 - DNA, 24 bp, Artificial sequence
  SiRNA target sequence
ctcctttatatgaaatggtcaaag

SEQ ID NO: 165193 - DNA, 24 bp, Artificial sequence
  SiRNA target sequence
tcctttatatgaaatggtcaaaga

SEQ ID NO: 165194 - DNA, 24 bp, Artificial sequence
  SiRNA target sequence
cctttatatgaaatggtcaaagaa

SEQ ID NO: 165195 - DNA, 24 bp, Artificial sequence
  SiRNA target sequence
ctttatatgaaatggtcaaagaag

SEQ ID NO: 165196 - DNA, 24 bp, Artificial sequence
  SiRNA target sequence
tttatatgaaatggtcaaagaagg

SEQ ID NO: 165197 - DNA, 24 bp, Artificial sequence
  SiRNA target sequence
ttatatgaaatggtcaaagaaggg

SEQ ID NO: 165198 - DNA, 24 bp, Artificial sequence
  SiRNA target sequence
tatatgaaatggtcaaagaaggga

SEQ ID NO: 165199 - DNA, 24 bp, Artificial sequence
  SiRNA target sequence
atatgaaatggtcaaagaagggat

SEQ ID NO: 165200 - DNA, 24 bp, Artificial sequence
  SiRNA target sequence
tatgaaatggtcaaagaagggata

SEQ ID NO: 165201 - DNA, 24 bp, Artificial sequence
  SiRNA target sequence
atgaaatggtcaaagaagggatag

SEQ ID NO: 165202 - DNA, 24 bp, Artificial sequence
  SiRNA target sequence
tgaaatggtcaaagaagggataga

SEQ ID NO: 165203 - DNA, 24 bp, Artificial sequence
  SiRNA target sequence
gaaatggtcaaagaagggatagat

SEQ ID NO: 165204 - DNA, 24 bp, Artificial sequence
  SiRNA target sequence
aaatggtcaaagaagggatagatt

SEQ ID NO: 165205 - DNA, 24 bp, Artificial sequence
  SiRNA target sequence
aatggtcaaagaagggatagattt

SEQ ID NO: 165206 - DNA, 24 bp, Artificial sequence
  SiRNA target sequence
atggtcaaagaagggatagattta

SEQ ID NO: 165207 - DNA, 24 bp, Artificial sequence
  SiRNA target sequence
tggtcaaagaagggatagatttag

SEQ ID NO: 165208 - DNA, 24 bp, Artificial sequence
  SiRNA target sequence
ggtcaaagaagggatagatttaga

SEQ ID NO: 165209 - DNA, 24 bp, Artificial sequence
  SiRNA target sequence
gtcaaagaagggatagatttagat

SEQ ID NO: 165210 - DNA, 24 bp, Artificial sequence
  SiRNA target sequence
tcaaagaagggatagatttagata

SEQ ID NO: 165211 - DNA, 24 bp, Artificial sequence
  SiRNA target sequence
caaagaagggatagatttagataa

SEQ ID NO: 165212 - DNA, 24 bp, Artificial sequence
  SiRNA target sequence
aaagaagggatagatttagataaa

SEQ ID NO: 165213 - DNA, 24 bp, Artificial sequence
  SiRNA target sequence
aagaagggatagatttagataaaa

SEQ ID NO: 165214 - DNA, 24 bp, Artificial sequence
  SiRNA target sequence
agaagggatagatttagataaaat

SEQ ID NO: 165215 - DNA, 24 bp, Artificial sequence
  SiRNA target sequence
gaagggatagatttagataaaatt

SEQ ID NO: 165216 - DNA, 24 bp, Artificial sequence
  SiRNA target sequence
aagggatagatttagataaaatta

SEQ ID NO: 165217 - DNA, 24 bp, Artificial sequence
  SiRNA target sequence
agggatagatttagataaaattaa

SEQ ID NO: 165218 - DNA, 24 bp, Artificial sequence
  SiRNA target sequence
gggatagatttagataaaattaat

SEQ ID NO: 165219 - DNA, 24 bp, Artificial sequence
  SiRNA target sequence
ggatagatttagataaaattaatt

SEQ ID NO: 165220 - DNA, 24 bp, Artificial sequence
  SiRNA target sequence
gatagatttagataaaattaattg

SEQ ID NO: 165221 - DNA, 24 bp, Artificial sequence
  SiRNA target sequence
atagatttagataaaattaattgg

SEQ ID NO: 165222 - DNA, 24 bp, Artificial sequence
  SiRNA target sequence
tagatttagataaaattaattggt

SEQ ID NO: 165223 - DNA, 24 bp, Artificial sequence
  SiRNA target sequence
agatttagataaaattaattggtc

SEQ ID NO: 165224 - DNA, 24 bp, Artificial sequence
  SiRNA target sequence
gatttagataaaattaattggtct

SEQ ID NO: 165225 - DNA, 24 bp, Artificial sequence
  SiRNA target sequence
atttagataaaattaattggtctg

SEQ ID NO: 165226 - DNA, 24 bp, Artificial sequence
  SiRNA target sequence
tttagataaaattaattggtctgc

SEQ ID NO: 165227 - DNA, 24 bp, Artificial sequence
  SiRNA target sequence
ttagataaaattaattggtctgct

SEQ ID NO: 165228 - DNA, 24 bp, Artificial sequence
  SiRNA target sequence
tagataaaattaattggtctgctt

SEQ ID NO: 165229 - DNA, 24 bp, Artificial sequence
  SiRNA target sequence
agataaaattaattggtctgctta

SEQ ID NO: 165230 - DNA, 24 bp, Artificial sequence
  SiRNA target sequence
gataaaattaattggtctgcttaa

SEQ ID NO: 165231 - DNA, 25 bp, Artificial sequence
  SiRNA target sequence
atgttatttttttatagccccattt

SEQ ID NO: 165232 - DNA, 25 bp, Artificial sequence
  SiRNA target sequence
tgttatttttttatagccccatttt

SEQ ID NO: 165233 - DNA, 25 bp, Artificial sequence
  SiRNA target sequence
gttatttttttatagccccattttt

SEQ ID NO: 165234 - DNA, 25 bp, Artificial sequence
  SiRNA target sequence
ttatttttttatagccccattttta

SEQ ID NO: 165235 - DNA, 25 bp, Artificial sequence
  SiRNA target sequence
tatttttttatagccccatttttat

SEQ ID NO: 165236 - DNA, 25 bp, Artificial sequence
  SiRNA target sequence
atttttttatagccccatttttatg

SEQ ID NO: 165237 - DNA, 25 bp, Artificial sequence
  SiRNA target sequence
tttttttatagccccatttttatga

SEQ ID NO: 165238 - DNA, 25 bp, Artificial sequence
  SiRNA target sequence
ttttttatagccccatttttatgac

SEQ ID NO: 165239 - DNA, 25 bp, Artificial sequence
  SiRNA target sequence
tttttatagccccatttttatgact

SEQ ID NO: 165240 - DNA, 25 bp, Artificial sequence
  SiRNA target sequence
ttttatagccccatttttatgacta

SEQ ID NO: 165241 - DNA, 25 bp, Artificial sequence
  SiRNA target sequence
tttatagccccatttttatgactaa

SEQ ID NO: 165242 - DNA, 25 bp, Artificial sequence
  SiRNA target sequence
ttatagccccatttttatgactaaa

SEQ ID NO: 165243 - DNA, 25 bp, Artificial sequence
  SiRNA target sequence
tatagccccatttttatgactaaaa

SEQ ID NO: 165244 - DNA, 25 bp, Artificial sequence
  SiRNA target sequence
atagccccatttttatgactaaaag

SEQ ID NO: 165245 - DNA, 25 bp, Artificial sequence
  SiRNA target sequence
tagccccatttttatgactaaaagt

SEQ ID NO: 165246 - DNA, 25 bp, Artificial sequence
  SiRNA target sequence
agccccatttttatgactaaaagtt

SEQ ID NO: 165247 - DNA, 25 bp, Artificial sequence
  SiRNA target sequence
gccccatttttatgactaaaagttt

SEQ ID NO: 165248 - DNA, 25 bp, Artificial sequence
  SiRNA target sequence
ccccatttttatgactaaaagttta

SEQ ID NO: 165249 - DNA, 25 bp, Artificial sequence
  SiRNA target sequence
cccatttttatgactaaaagtttaa

SEQ ID NO: 165250 - DNA, 25 bp, Artificial sequence
  SiRNA target sequence
ccatttttatgactaaaagtttaac

SEQ ID NO: 165251 - DNA, 25 bp, Artificial sequence
  SiRNA target sequence
catttttatgactaaaagtttaacg

SEQ ID NO: 165252 - DNA, 25 bp, Artificial sequence
  SiRNA target sequence
atttttatgactaaaagtttaacga

SEQ ID NO: 165253 - DNA, 25 bp, Artificial sequence
  SiRNA target sequence
tttttatgactaaaagtttaacgaa

SEQ ID NO: 165254 - DNA, 25 bp, Artificial sequence
  SiRNA target sequence
ttttatgactaaaagtttaacgaat

SEQ ID NO: 165255 - DNA, 25 bp, Artificial sequence
  SiRNA target sequence
tttatgactaaaagtttaacgaatt

SEQ ID NO: 165256 - DNA, 25 bp, Artificial sequence
  SiRNA target sequence
ttatgactaaaagtttaacgaattc

SEQ ID NO: 165257 - DNA, 25 bp, Artificial sequence
  SiRNA target sequence
tatgactaaaagtttaacgaattct

SEQ ID NO: 165258 - DNA, 25 bp, Artificial sequence
  SiRNA target sequence
atgactaaaagtttaacgaattcta

SEQ ID NO: 165259 - DNA, 25 bp, Artificial sequence
  SiRNA target sequence
tgactaaaagtttaacgaattctaa

SEQ ID NO: 165260 - DNA, 25 bp, Artificial sequence
  SiRNA target sequence
gactaaaagtttaacgaattctaaa

SEQ ID NO: 165261 - DNA, 25 bp, Artificial sequence
  SiRNA target sequence
actaaaagtttaacgaattctaaaa

SEQ ID NO: 165262 - DNA, 25 bp, Artificial sequence
  SiRNA target sequence
ctaaaagtttaacgaattctaaaac

SEQ ID NO: 165263 - DNA, 25 bp, Artificial sequence
  SiRNA target sequence
taaaagtttaacgaattctaaaact

SEQ ID NO: 165264 - DNA, 25 bp, Artificial sequence
  SiRNA target sequence
aaaagtttaacgaattctaaaactt

SEQ ID NO: 165265 - DNA, 25 bp, Artificial sequence
  SiRNA target sequence
aaagtttaacgaattctaaaacttt

SEQ ID NO: 165266 - DNA, 25 bp, Artificial sequence
  SiRNA target sequence
aagtttaacgaattctaaaacttta

SEQ ID NO: 165267 - DNA, 25 bp, Artificial sequence
  SiRNA target sequence
agtttaacgaattctaaaactttaa

SEQ ID NO: 165268 - DNA, 25 bp, Artificial sequence
  SiRNA target sequence
gtttaacgaattctaaaactttaaa

SEQ ID NO: 165269 - DNA, 25 bp, Artificial sequence
  SiRNA target sequence
tttaacgaattctaaaactttaaat

SEQ ID NO: 165270 - DNA, 25 bp, Artificial sequence
  SiRNA target sequence
ttaacgaattctaaaactttaaatt

SEQ ID NO: 165271 - DNA, 25 bp, Artificial sequence
  SiRNA target sequence
taacgaattctaaaactttaaattt

SEQ ID NO: 165272 - DNA, 25 bp, Artificial sequence
  SiRNA target sequence
aacgaattctaaaactttaaattta

SEQ ID NO: 165273 - DNA, 25 bp, Artificial sequence
  SiRNA target sequence
acgaattctaaaactttaaatttaa

SEQ ID NO: 165274 - DNA, 25 bp, Artificial sequence
  SiRNA target sequence
cgaattctaaaactttaaatttaat

SEQ ID NO: 165275 - DNA, 25 bp, Artificial sequence
  SiRNA target sequence
gaattctaaaactttaaatttaatg

SEQ ID NO: 165276 - DNA, 25 bp, Artificial sequence
  SiRNA target sequence
aattctaaaactttaaatttaatgt

SEQ ID NO: 165277 - DNA, 25 bp, Artificial sequence
  SiRNA target sequence
attctaaaactttaaatttaatgtc

SEQ ID NO: 165278 - DNA, 25 bp, Artificial sequence
  SiRNA target sequence
ttctaaaactttaaatttaatgtca

SEQ ID NO: 165279 - DNA, 25 bp, Artificial sequence
  SiRNA target sequence
tctaaaactttaaatttaatgtcaa

SEQ ID NO: 165280 - DNA, 25 bp, Artificial sequence
  SiRNA target sequence
ctaaaactttaaatttaatgtcaag

SEQ ID NO: 165281 - DNA, 25 bp, Artificial sequence
  SiRNA target sequence
taaaactttaaatttaatgtcaagt

SEQ ID NO: 165282 - DNA, 25 bp, Artificial sequence
  SiRNA target sequence
aaaactttaaatttaatgtcaagtg

SEQ ID NO: 165283 - DNA, 25 bp, Artificial sequence
  SiRNA target sequence
aaactttaaatttaatgtcaagtgt

SEQ ID NO: 165284 - DNA, 25 bp, Artificial sequence
  SiRNA target sequence
aactttaaatttaatgtcaagtgta

SEQ ID NO: 165285 - DNA, 25 bp, Artificial sequence
  SiRNA target sequence
actttaaatttaatgtcaagtgtac

SEQ ID NO: 165286 - DNA, 25 bp, Artificial sequence
  SiRNA target sequence
ctttaaatttaatgtcaagtgtaca

SEQ ID NO: 165287 - DNA, 25 bp, Artificial sequence
  SiRNA target sequence
tttaaatttaatgtcaagtgtacaa

SEQ ID NO: 165288 - DNA, 25 bp, Artificial sequence
  SiRNA target sequence
ttaaatttaatgtcaagtgtacaat

SEQ ID NO: 165289 - DNA, 25 bp, Artificial sequence
  SiRNA target sequence
taaatttaatgtcaagtgtacaatc

SEQ ID NO: 165290 - DNA, 25 bp, Artificial sequence
  SiRNA target sequence
aaatttaatgtcaagtgtacaatca

SEQ ID NO: 165291 - DNA, 25 bp, Artificial sequence
  SiRNA target sequence
aatttaatgtcaagtgtacaatcac

SEQ ID NO: 165292 - DNA, 25 bp, Artificial sequence
  SiRNA target sequence
atttaatgtcaagtgtacaatcacc

SEQ ID NO: 165293 - DNA, 25 bp, Artificial sequence
  SiRNA target sequence
tttaatgtcaagtgtacaatcacca

SEQ ID NO: 165294 - DNA, 25 bp, Artificial sequence
  SiRNA target sequence
ttaatgtcaagtgtacaatcaccag

SEQ ID NO: 165295 - DNA, 25 bp, Artificial sequence
  SiRNA target sequence
taatgtcaagtgtacaatcaccagt

SEQ ID NO: 165296 - DNA, 25 bp, Artificial sequence
  SiRNA target sequence
aatgtcaagtgtacaatcaccagtt

SEQ ID NO: 165297 - DNA, 25 bp, Artificial sequence
  SiRNA target sequence
atgtcaagtgtacaatcaccagtta

SEQ ID NO: 165298 - DNA, 25 bp, Artificial sequence
  SiRNA target sequence
tgtcaagtgtacaatcaccagttat

SEQ ID NO: 165299 - DNA, 25 bp, Artificial sequence
  SiRNA target sequence
gtcaagtgtacaatcaccagttata

SEQ ID NO: 165300 - DNA, 25 bp, Artificial sequence
  SiRNA target sequence
tcaagtgtacaatcaccagttataa

SEQ ID NO: 165301 - DNA, 25 bp, Artificial sequence
  SiRNA target sequence
caagtgtacaatcaccagttataaa

SEQ ID NO: 165302 - DNA, 25 bp, Artificial sequence
  SiRNA target sequence
aagtgtacaatcaccagttataaat

SEQ ID NO: 165303 - DNA, 25 bp, Artificial sequence
  SiRNA target sequence
agtgtacaatcaccagttataaata

SEQ ID NO: 165304 - DNA, 25 bp, Artificial sequence
  SiRNA target sequence
gtgtacaatcaccagttataaatac

SEQ ID NO: 165305 - DNA, 25 bp, Artificial sequence
  SiRNA target sequence
tgtacaatcaccagttataaataca

SEQ ID NO: 165306 - DNA, 25 bp, Artificial sequence
  SiRNA target sequence
gtacaatcaccagttataaatacaa

SEQ ID NO: 165307 - DNA, 25 bp, Artificial sequence
  SiRNA target sequence
tacaatcaccagttataaatacaaa

SEQ ID NO: 165308 - DNA, 25 bp, Artificial sequence
  SiRNA target sequence
acaatcaccagttataaatacaaaa

SEQ ID NO: 165309 - DNA, 25 bp, Artificial sequence
  SiRNA target sequence
caatcaccagttataaatacaaaaa

SEQ ID NO: 165310 - DNA, 25 bp, Artificial sequence
  SiRNA target sequence
aatcaccagttataaatacaaaaaa

SEQ ID NO: 165311 - DNA, 25 bp, Artificial sequence
  SiRNA target sequence
atcaccagttataaatacaaaaaaa

SEQ ID NO: 165312 - DNA, 25 bp, Artificial sequence
  SiRNA target sequence
tcaccagttataaatacaaaaaaaa

SEQ ID NO: 165313 - DNA, 25 bp, Artificial sequence
  SiRNA target sequence
caccagttataaatacaaaaaaaat

SEQ ID NO: 165314 - DNA, 25 bp, Artificial sequence
  SiRNA target sequence
accagttataaatacaaaaaaaata

SEQ ID NO: 165315 - DNA, 25 bp, Artificial sequence
  SiRNA target sequence
ccagttataaatacaaaaaaaatat

SEQ ID NO: 165316 - DNA, 25 bp, Artificial sequence
  SiRNA target sequence
cagttataaatacaaaaaaaatata

SEQ ID NO: 165317 - DNA, 25 bp, Artificial sequence
  SiRNA target sequence
agttataaatacaaaaaaaatatat

SEQ ID NO: 165318 - DNA, 25 bp, Artificial sequence
  SiRNA target sequence
gttataaatacaaaaaaaatatatc

SEQ ID NO: 165319 - DNA, 25 bp, Artificial sequence
  SiRNA target sequence
ttataaatacaaaaaaaatatatct

SEQ ID NO: 165320 - DNA, 25 bp, Artificial sequence
  SiRNA target sequence
tataaatacaaaaaaaatatatctt

SEQ ID NO: 165321 - DNA, 25 bp, Artificial sequence
  SiRNA target sequence
ataaatacaaaaaaaatatatcttg

SEQ ID NO: 165322 - DNA, 25 bp, Artificial sequence
  SiRNA target sequence
taaatacaaaaaaaatatatcttga

SEQ ID NO: 165323 - DNA, 25 bp, Artificial sequence
  SiRNA target sequence
aaatacaaaaaaaatatatcttgat

SEQ ID NO: 165324 - DNA, 25 bp, Artificial sequence
  SiRNA target sequence
aatacaaaaaaaatatatcttgatg

SEQ ID NO: 165325 - DNA, 25 bp, Artificial sequence
  SiRNA target sequence
atacaaaaaaaatatatcttgatgc

SEQ ID NO: 165326 - DNA, 25 bp, Artificial sequence
  SiRNA target sequence
tacaaaaaaaatatatcttgatgca

SEQ ID NO: 165327 - DNA, 25 bp, Artificial sequence
  SiRNA target sequence
acaaaaaaaatatatcttgatgcac

SEQ ID NO: 165328 - DNA, 25 bp, Artificial sequence
  SiRNA target sequence
caaaaaaaatatatcttgatgcaca

SEQ ID NO: 165329 - DNA, 25 bp, Artificial sequence
  SiRNA target sequence
aaaaaaaatatatcttgatgcacaa

SEQ ID NO: 165330 - DNA, 25 bp, Artificial sequence
  SiRNA target sequence
aaaaaaatatatcttgatgcacaag

SEQ ID NO: 165331 - DNA, 25 bp, Artificial sequence
  SiRNA target sequence
aaaaaatatatcttgatgcacaagc

SEQ ID NO: 165332 - DNA, 25 bp, Artificial sequence
  SiRNA target sequence
aaaaatatatcttgatgcacaagcg

SEQ ID NO: 165333 - DNA, 25 bp, Artificial sequence
  SiRNA target sequence
aaaatatatcttgatgcacaagcga

SEQ ID NO: 165334 - DNA, 25 bp, Artificial sequence
  SiRNA target sequence
aaatatatcttgatgcacaagcgac

SEQ ID NO: 165335 - DNA, 25 bp, Artificial sequence
  SiRNA target sequence
aatatatcttgatgcacaagcgacc

SEQ ID NO: 165336 - DNA, 25 bp, Artificial sequence
  SiRNA target sequence
atatatcttgatgcacaagcgacca

SEQ ID NO: 165337 - DNA, 25 bp, Artificial sequence
  SiRNA target sequence
tatatcttgatgcacaagcgaccaa

SEQ ID NO: 165338 - DNA, 25 bp, Artificial sequence
  SiRNA target sequence
atatcttgatgcacaagcgaccaag

SEQ ID NO: 165339 - DNA, 25 bp, Artificial sequence
  SiRNA target sequence
tatcttgatgcacaagcgaccaagc

SEQ ID NO: 165340 - DNA, 25 bp, Artificial sequence
  SiRNA target sequence
atcttgatgcacaagcgaccaagcc

SEQ ID NO: 165341 - DNA, 25 bp, Artificial sequence
  SiRNA target sequence
tcttgatgcacaagcgaccaagcct

SEQ ID NO: 165342 - DNA, 25 bp, Artificial sequence
  SiRNA target sequence
cttgatgcacaagcgaccaagcctt

SEQ ID NO: 165343 - DNA, 25 bp, Artificial sequence
  SiRNA target sequence
ttgatgcacaagcgaccaagccttt

SEQ ID NO: 165344 - DNA, 25 bp, Artificial sequence
  SiRNA target sequence
tgatgcacaagcgaccaagccttta

SEQ ID NO: 165345 - DNA, 25 bp, Artificial sequence
  SiRNA target sequence
gatgcacaagcgaccaagcctttag

SEQ ID NO: 165346 - DNA, 25 bp, Artificial sequence
  SiRNA target sequence
atgcacaagcgaccaagcctttaga

SEQ ID NO: 165347 - DNA, 25 bp, Artificial sequence
  SiRNA target sequence
tgcacaagcgaccaagcctttagac

SEQ ID NO: 165348 - DNA, 25 bp, Artificial sequence
  SiRNA target sequence
gcacaagcgaccaagcctttagacc

SEQ ID NO: 165349 - DNA, 25 bp, Artificial sequence
  SiRNA target sequence
cacaagcgaccaagcctttagaccc

SEQ ID NO: 165350 - DNA, 25 bp, Artificial sequence
  SiRNA target sequence
acaagcgaccaagcctttagacccg

SEQ ID NO: 165351 - DNA, 25 bp, Artificial sequence
  SiRNA target sequence
caagcgaccaagcctttagacccgc

SEQ ID NO: 165352 - DNA, 25 bp, Artificial sequence
  SiRNA target sequence
aagcgaccaagcctttagacccgcg

SEQ ID NO: 165353 - DNA, 25 bp, Artificial sequence
  SiRNA target sequence
agcgaccaagcctttagacccgcgt

SEQ ID NO: 165354 - DNA, 25 bp, Artificial sequence
  SiRNA target sequence
gcgaccaagcctttagacccgcgtg

SEQ ID NO: 165355 - DNA, 25 bp, Artificial sequence
  SiRNA target sequence
cgaccaagcctttagacccgcgtgt

SEQ ID NO: 165356 - DNA, 25 bp, Artificial sequence
  SiRNA target sequence
gaccaagcctttagacccgcgtgtg

SEQ ID NO: 165357 - DNA, 25 bp, Artificial sequence
  SiRNA target sequence
accaagcctttagacccgcgtgtgc

SEQ ID NO: 165358 - DNA, 25 bp, Artificial sequence
  SiRNA target sequence
ccaagcctttagacccgcgtgtgct

SEQ ID NO: 165359 - DNA, 25 bp, Artificial sequence
  SiRNA target sequence
caagcctttagacccgcgtgtgctt

SEQ ID NO: 165360 - DNA, 25 bp, Artificial sequence
  SiRNA target sequence
aagcctttagacccgcgtgtgcttg

SEQ ID NO: 165361 - DNA, 25 bp, Artificial sequence
  SiRNA target sequence
agcctttagacccgcgtgtgcttga

SEQ ID NO: 165362 - DNA, 25 bp, Artificial sequence
  SiRNA target sequence
gcctttagacccgcgtgtgcttgat

SEQ ID NO: 165363 - DNA, 25 bp, Artificial sequence
  SiRNA target sequence
cctttagacccgcgtgtgcttgatg

SEQ ID NO: 165364 - DNA, 25 bp, Artificial sequence
  SiRNA target sequence
ctttagacccgcgtgtgcttgatgc

SEQ ID NO: 165365 - DNA, 25 bp, Artificial sequence
  SiRNA target sequence
tttagacccgcgtgtgcttgatgca

SEQ ID NO: 165366 - DNA, 25 bp, Artificial sequence
  SiRNA target sequence
ttagacccgcgtgtgcttgatgcaa

SEQ ID NO: 165367 - DNA, 25 bp, Artificial sequence
  SiRNA target sequence
tagacccgcgtgtgcttgatgcaat

SEQ ID NO: 165368 - DNA, 25 bp, Artificial sequence
  SiRNA target sequence
agacccgcgtgtgcttgatgcaatg

SEQ ID NO: 165369 - DNA, 25 bp, Artificial sequence
  SiRNA target sequence
gacccgcgtgtgcttgatgcaatgc

SEQ ID NO: 165370 - DNA, 25 bp, Artificial sequence
  SiRNA target sequence
acccgcgtgtgcttgatgcaatgct

SEQ ID NO: 165371 - DNA, 25 bp, Artificial sequence
  SiRNA target sequence
cccgcgtgtgcttgatgcaatgctt

SEQ ID NO: 165372 - DNA, 25 bp, Artificial sequence
  SiRNA target sequence
ccgcgtgtgcttgatgcaatgcttc

SEQ ID NO: 165373 - DNA, 25 bp, Artificial sequence
  SiRNA target sequence
cgcgtgtgcttgatgcaatgcttcc

SEQ ID NO: 165374 - DNA, 25 bp, Artificial sequence
  SiRNA target sequence
gcgtgtgcttgatgcaatgcttcca

SEQ ID NO: 165375 - DNA, 25 bp, Artificial sequence
  SiRNA target sequence
cgtgtgcttgatgcaatgcttccat

SEQ ID NO: 165376 - DNA, 25 bp, Artificial sequence
  SiRNA target sequence
gtgtgcttgatgcaatgcttccata

SEQ ID NO: 165377 - DNA, 25 bp, Artificial sequence
  SiRNA target sequence
tgtgcttgatgcaatgcttccatac

SEQ ID NO: 165378 - DNA, 25 bp, Artificial sequence
  SiRNA target sequence
gtgcttgatgcaatgcttccatact

SEQ ID NO: 165379 - DNA, 25 bp, Artificial sequence
  SiRNA target sequence
tgcttgatgcaatgcttccatacta

SEQ ID NO: 165380 - DNA, 25 bp, Artificial sequence
  SiRNA target sequence
gcttgatgcaatgcttccatactat

SEQ ID NO: 165381 - DNA, 25 bp, Artificial sequence
  SiRNA target sequence
cttgatgcaatgcttccatactata

SEQ ID NO: 165382 - DNA, 25 bp, Artificial sequence
  SiRNA target sequence
ttgatgcaatgcttccatactatac

SEQ ID NO: 165383 - DNA, 25 bp, Artificial sequence
  SiRNA target sequence
tgatgcaatgcttccatactataca

SEQ ID NO: 165384 - DNA, 25 bp, Artificial sequence
  SiRNA target sequence
gatgcaatgcttccatactatacat

SEQ ID NO: 165385 - DNA, 25 bp, Artificial sequence
  SiRNA target sequence
atgcaatgcttccatactatacatc

SEQ ID NO: 165386 - DNA, 25 bp, Artificial sequence
  SiRNA target sequence
tgcaatgcttccatactatacatcc

SEQ ID NO: 165387 - DNA, 25 bp, Artificial sequence
  SiRNA target sequence
gcaatgcttccatactatacatcca

SEQ ID NO: 165388 - DNA, 25 bp, Artificial sequence
  SiRNA target sequence
caatgcttccatactatacatccat

SEQ ID NO: 165389 - DNA, 25 bp, Artificial sequence
  SiRNA target sequence
aatgcttccatactatacatccatt

SEQ ID NO: 165390 - DNA, 25 bp, Artificial sequence
  SiRNA target sequence
atgcttccatactatacatccattt

SEQ ID NO: 165391 - DNA, 25 bp, Artificial sequence
  SiRNA target sequence
tgcttccatactatacatccatttt

SEQ ID NO: 165392 - DNA, 25 bp, Artificial sequence
  SiRNA target sequence
gcttccatactatacatccattttt

SEQ ID NO: 165393 - DNA, 25 bp, Artificial sequence
  SiRNA target sequence
cttccatactatacatccatttttg

SEQ ID NO: 165394 - DNA, 25 bp, Artificial sequence
  SiRNA target sequence
ttccatactatacatccatttttgg

SEQ ID NO: 165395 - DNA, 25 bp, Artificial sequence
  SiRNA target sequence
tccatactatacatccatttttgga

SEQ ID NO: 165396 - DNA, 25 bp, Artificial sequence
  SiRNA target sequence
ccatactatacatccatttttggaa

SEQ ID NO: 165397 - DNA, 25 bp, Artificial sequence
  SiRNA target sequence
catactatacatccatttttggaaa

SEQ ID NO: 165398 - DNA, 25 bp, Artificial sequence
  SiRNA target sequence
atactatacatccatttttggaaat

SEQ ID NO: 165399 - DNA, 25 bp, Artificial sequence
  SiRNA target sequence
tactatacatccatttttggaaatc

SEQ ID NO: 165400 - DNA, 25 bp, Artificial sequence
  SiRNA target sequence
actatacatccatttttggaaatcc

SEQ ID NO: 165401 - DNA, 25 bp, Artificial sequence
  SiRNA target sequence
ctatacatccatttttggaaatcca

SEQ ID NO: 165402 - DNA, 25 bp, Artificial sequence
  SiRNA target sequence
tatacatccatttttggaaatccac

SEQ ID NO: 165403 - DNA, 25 bp, Artificial sequence
  SiRNA target sequence
atacatccatttttggaaatccaca

SEQ ID NO: 165404 - DNA, 25 bp, Artificial sequence
  SiRNA target sequence
tacatccatttttggaaatccacat

SEQ ID NO: 165405 - DNA, 25 bp, Artificial sequence
  SiRNA target sequence
acatccatttttggaaatccacatt

SEQ ID NO: 165406 - DNA, 25 bp, Artificial sequence
  SiRNA target sequence
catccatttttggaaatccacattc

SEQ ID NO: 165407 - DNA, 25 bp, Artificial sequence
  SiRNA target sequence
atccatttttggaaatccacattct

SEQ ID NO: 165408 - DNA, 25 bp, Artificial sequence
  SiRNA target sequence
tccatttttggaaatccacattctc

SEQ ID NO: 165409 - DNA, 25 bp, Artificial sequence
  SiRNA target sequence
ccatttttggaaatccacattctcg

SEQ ID NO: 165410 - DNA, 25 bp, Artificial sequence
  SiRNA target sequence
catttttggaaatccacattctcgc

SEQ ID NO: 165411 - DNA, 25 bp, Artificial sequence
  SiRNA target sequence
atttttggaaatccacattctcgca

SEQ ID NO: 165412 - DNA, 25 bp, Artificial sequence
  SiRNA target sequence
tttttggaaatccacattctcgcac

SEQ ID NO: 165413 - DNA, 25 bp, Artificial sequence
  SiRNA target sequence
ttttggaaatccacattctcgcacg

SEQ ID NO: 165414 - DNA, 25 bp, Artificial sequence
  SiRNA target sequence
tttggaaatccacattctcgcacgc

SEQ ID NO: 165415 - DNA, 25 bp, Artificial sequence
  SiRNA target sequence
ttggaaatccacattctcgcacgca

SEQ ID NO: 165416 - DNA, 25 bp, Artificial sequence
  SiRNA target sequence
tggaaatccacattctcgcacgcat

SEQ ID NO: 165417 - DNA, 25 bp, Artificial sequence
  SiRNA target sequence
ggaaatccacattctcgcacgcata

SEQ ID NO: 165418 - DNA, 25 bp, Artificial sequence
  SiRNA target sequence
gaaatccacattctcgcacgcatac

SEQ ID NO: 165419 - DNA, 25 bp, Artificial sequence
  SiRNA target sequence
aaatccacattctcgcacgcatacg

SEQ ID NO: 165420 - DNA, 25 bp, Artificial sequence
  SiRNA target sequence
aatccacattctcgcacgcatacgt

SEQ ID NO: 165421 - DNA, 25 bp, Artificial sequence
  SiRNA target sequence
atccacattctcgcacgcatacgtt

SEQ ID NO: 165422 - DNA, 25 bp, Artificial sequence
  SiRNA target sequence
tccacattctcgcacgcatacgttt

SEQ ID NO: 165423 - DNA, 25 bp, Artificial sequence
  SiRNA target sequence
ccacattctcgcacgcatacgtttg

SEQ ID NO: 165424 - DNA, 25 bp, Artificial sequence
  SiRNA target sequence
cacattctcgcacgcatacgtttgg

SEQ ID NO: 165425 - DNA, 25 bp, Artificial sequence
  SiRNA target sequence
acattctcgcacgcatacgtttgga

SEQ ID NO: 165426 - DNA, 25 bp, Artificial sequence
  SiRNA target sequence
cattctcgcacgcatacgtttggat

SEQ ID NO: 165427 - DNA, 25 bp, Artificial sequence
  SiRNA target sequence
attctcgcacgcatacgtttggatg

SEQ ID NO: 165428 - DNA, 25 bp, Artificial sequence
  SiRNA target sequence
ttctcgcacgcatacgtttggatgg

SEQ ID NO: 165429 - DNA, 25 bp, Artificial sequence
  SiRNA target sequence
tctcgcacgcatacgtttggatgga

SEQ ID NO: 165430 - DNA, 25 bp, Artificial sequence
  SiRNA target sequence
ctcgcacgcatacgtttggatggaa

SEQ ID NO: 165431 - DNA, 25 bp, Artificial sequence
  SiRNA target sequence
tcgcacgcatacgtttggatggaat

SEQ ID NO: 165432 - DNA, 25 bp, Artificial sequence
  SiRNA target sequence
cgcacgcatacgtttggatggaatg

SEQ ID NO: 165433 - DNA, 25 bp, Artificial sequence
  SiRNA target sequence
gcacgcatacgtttggatggaatgc

SEQ ID NO: 165434 - DNA, 25 bp, Artificial sequence
  SiRNA target sequence
cacgcatacgtttggatggaatgca

SEQ ID NO: 165435 - DNA, 25 bp, Artificial sequence
  SiRNA target sequence
acgcatacgtttggatggaatgcag

SEQ ID NO: 165436 - DNA, 25 bp, Artificial sequence
  SiRNA target sequence
cgcatacgtttggatggaatgcaga

SEQ ID NO: 165437 - DNA, 25 bp, Artificial sequence
  SiRNA target sequence
gcatacgtttggatggaatgcagaa

SEQ ID NO: 165438 - DNA, 25 bp, Artificial sequence
  SiRNA target sequence
catacgtttggatggaatgcagaaa

SEQ ID NO: 165439 - DNA, 25 bp, Artificial sequence
  SiRNA target sequence
atacgtttggatggaatgcagaaaa

SEQ ID NO: 165440 - DNA, 25 bp, Artificial sequence
  SiRNA target sequence
tacgtttggatggaatgcagaaaaa

SEQ ID NO: 165441 - DNA, 25 bp, Artificial sequence
  SiRNA target sequence
acgtttggatggaatgcagaaaaag

SEQ ID NO: 165442 - DNA, 25 bp, Artificial sequence
  SiRNA target sequence
cgtttggatggaatgcagaaaaagg

SEQ ID NO: 165443 - DNA, 25 bp, Artificial sequence
  SiRNA target sequence
gtttggatggaatgcagaaaaaggc

SEQ ID NO: 165444 - DNA, 25 bp, Artificial sequence
  SiRNA target sequence
tttggatggaatgcagaaaaaggcg

SEQ ID NO: 165445 - DNA, 25 bp, Artificial sequence
  SiRNA target sequence
ttggatggaatgcagaaaaaggcgt

SEQ ID NO: 165446 - DNA, 25 bp, Artificial sequence
  SiRNA target sequence
tggatggaatgcagaaaaaggcgta

SEQ ID NO: 165447 - DNA, 25 bp, Artificial sequence
  SiRNA target sequence
ggatggaatgcagaaaaaggcgtag

SEQ ID NO: 165448 - DNA, 25 bp, Artificial sequence
  SiRNA target sequence
gatggaatgcagaaaaaggcgtaga

SEQ ID NO: 165449 - DNA, 25 bp, Artificial sequence
  SiRNA target sequence
atggaatgcagaaaaaggcgtagaa

SEQ ID NO: 165450 - DNA, 25 bp, Artificial sequence
  SiRNA target sequence
tggaatgcagaaaaaggcgtagaaa

SEQ ID NO: 165451 - DNA, 25 bp, Artificial sequence
  SiRNA target sequence
ggaatgcagaaaaaggcgtagaaat

SEQ ID NO: 165452 - DNA, 25 bp, Artificial sequence
  SiRNA target sequence
gaatgcagaaaaaggcgtagaaatg

SEQ ID NO: 165453 - DNA, 25 bp, Artificial sequence
  SiRNA target sequence
aatgcagaaaaaggcgtagaaatgg

SEQ ID NO: 165454 - DNA, 25 bp, Artificial sequence
  SiRNA target sequence
atgcagaaaaaggcgtagaaatggc

SEQ ID NO: 165455 - DNA, 25 bp, Artificial sequence
  SiRNA target sequence
tgcagaaaaaggcgtagaaatggct

SEQ ID NO: 165456 - DNA, 25 bp, Artificial sequence
  SiRNA target sequence
gcagaaaaaggcgtagaaatggctc

SEQ ID NO: 165457 - DNA, 25 bp, Artificial sequence
  SiRNA target sequence
cagaaaaaggcgtagaaatggctcg

SEQ ID NO: 165458 - DNA, 25 bp, Artificial sequence
  SiRNA target sequence
agaaaaaggcgtagaaatggctcga

SEQ ID NO: 165459 - DNA, 25 bp, Artificial sequence
  SiRNA target sequence
gaaaaaggcgtagaaatggctcgaa

SEQ ID NO: 165460 - DNA, 25 bp, Artificial sequence
  SiRNA target sequence
aaaaaggcgtagaaatggctcgaaa

SEQ ID NO: 165461 - DNA, 25 bp, Artificial sequence
  SiRNA target sequence
aaaaggcgtagaaatggctcgaaag

SEQ ID NO: 165462 - DNA, 25 bp, Artificial sequence
  SiRNA target sequence
aaaggcgtagaaatggctcgaaagc

SEQ ID NO: 165463 - DNA, 25 bp, Artificial sequence
  SiRNA target sequence
aaggcgtagaaatggctcgaaagca

SEQ ID NO: 165464 - DNA, 25 bp, Artificial sequence
  SiRNA target sequence
aggcgtagaaatggctcgaaagcaa

SEQ ID NO: 165465 - DNA, 25 bp, Artificial sequence
  SiRNA target sequence
ggcgtagaaatggctcgaaagcaag

SEQ ID NO: 165466 - DNA, 25 bp, Artificial sequence
  SiRNA target sequence
gcgtagaaatggctcgaaagcaagt

SEQ ID NO: 165467 - DNA, 25 bp, Artificial sequence
  SiRNA target sequence
cgtagaaatggctcgaaagcaagta

SEQ ID NO: 165468 - DNA, 25 bp, Artificial sequence
  SiRNA target sequence
gtagaaatggctcgaaagcaagtag

SEQ ID NO: 165469 - DNA, 25 bp, Artificial sequence
  SiRNA target sequence
tagaaatggctcgaaagcaagtagc

SEQ ID NO: 165470 - DNA, 25 bp, Artificial sequence
  SiRNA target sequence
agaaatggctcgaaagcaagtagca

SEQ ID NO: 165471 - DNA, 25 bp, Artificial sequence
  SiRNA target sequence
gaaatggctcgaaagcaagtagcag

SEQ ID NO: 165472 - DNA, 25 bp, Artificial sequence
  SiRNA target sequence
aaatggctcgaaagcaagtagcaga

SEQ ID NO: 165473 - DNA, 25 bp, Artificial sequence
  SiRNA target sequence
aatggctcgaaagcaagtagcagat

SEQ ID NO: 165474 - DNA, 25 bp, Artificial sequence
  SiRNA target sequence
atggctcgaaagcaagtagcagatt

SEQ ID NO: 165475 - DNA, 25 bp, Artificial sequence
  SiRNA target sequence
tggctcgaaagcaagtagcagattt

SEQ ID NO: 165476 - DNA, 25 bp, Artificial sequence
  SiRNA target sequence
ggctcgaaagcaagtagcagattta

SEQ ID NO: 165477 - DNA, 25 bp, Artificial sequence
  SiRNA target sequence
gctcgaaagcaagtagcagatttac

SEQ ID NO: 165478 - DNA, 25 bp, Artificial sequence
  SiRNA target sequence
ctcgaaagcaagtagcagatttact

SEQ ID NO: 165479 - DNA, 25 bp, Artificial sequence
  SiRNA target sequence
tcgaaagcaagtagcagatttactg

SEQ ID NO: 165480 - DNA, 25 bp, Artificial sequence
  SiRNA target sequence
cgaaagcaagtagcagatttactga

SEQ ID NO: 165481 - DNA, 25 bp, Artificial sequence
  SiRNA target sequence
gaaagcaagtagcagatttactgaa

SEQ ID NO: 165482 - DNA, 25 bp, Artificial sequence
  SiRNA target sequence
aaagcaagtagcagatttactgaat

SEQ ID NO: 165483 - DNA, 25 bp, Artificial sequence
  SiRNA target sequence
aagcaagtagcagatttactgaatg

SEQ ID NO: 165484 - DNA, 25 bp, Artificial sequence
  SiRNA target sequence
agcaagtagcagatttactgaatgc

SEQ ID NO: 165485 - DNA, 25 bp, Artificial sequence
  SiRNA target sequence
gcaagtagcagatttactgaatgcc

SEQ ID NO: 165486 - DNA, 25 bp, Artificial sequence
  SiRNA target sequence
caagtagcagatttactgaatgcca

SEQ ID NO: 165487 - DNA, 25 bp, Artificial sequence
  SiRNA target sequence
aagtagcagatttactgaatgccaa

SEQ ID NO: 165488 - DNA, 25 bp, Artificial sequence
  SiRNA target sequence
agtagcagatttactgaatgccaat

SEQ ID NO: 165489 - DNA, 25 bp, Artificial sequence
  SiRNA target sequence
gtagcagatttactgaatgccaatg

SEQ ID NO: 165490 - DNA, 25 bp, Artificial sequence
  SiRNA target sequence
tagcagatttactgaatgccaatga

SEQ ID NO: 165491 - DNA, 25 bp, Artificial sequence
  SiRNA target sequence
agcagatttactgaatgccaatgaa

SEQ ID NO: 165492 - DNA, 25 bp, Artificial sequence
  SiRNA target sequence
gcagatttactgaatgccaatgaaa

SEQ ID NO: 165493 - DNA, 25 bp, Artificial sequence
  SiRNA target sequence
cagatttactgaatgccaatgaaaa

SEQ ID NO: 165494 - DNA, 25 bp, Artificial sequence
  SiRNA target sequence
agatttactgaatgccaatgaaaaa

SEQ ID NO: 165495 - DNA, 25 bp, Artificial sequence
  SiRNA target sequence
gatttactgaatgccaatgaaaaag

SEQ ID NO: 165496 - DNA, 25 bp, Artificial sequence
  SiRNA target sequence
atttactgaatgccaatgaaaaaga

SEQ ID NO: 165497 - DNA, 25 bp, Artificial sequence
  SiRNA target sequence
tttactgaatgccaatgaaaaagaa

SEQ ID NO: 165498 - DNA, 25 bp, Artificial sequence
  SiRNA target sequence
ttactgaatgccaatgaaaaagaaa

SEQ ID NO: 165499 - DNA, 25 bp, Artificial sequence
  SiRNA target sequence
tactgaatgccaatgaaaaagaaat

SEQ ID NO: 165500 - DNA, 25 bp, Artificial sequence
  SiRNA target sequence
actgaatgccaatgaaaaagaaatt

SEQ ID NO: 165501 - DNA, 25 bp, Artificial sequence
  SiRNA target sequence
ctgaatgccaatgaaaaagaaatta

SEQ ID NO: 165502 - DNA, 25 bp, Artificial sequence
  SiRNA target sequence
tgaatgccaatgaaaaagaaattat

SEQ ID NO: 165503 - DNA, 25 bp, Artificial sequence
  SiRNA target sequence
gaatgccaatgaaaaagaaattatt

SEQ ID NO: 165504 - DNA, 25 bp, Artificial sequence
  SiRNA target sequence
aatgccaatgaaaaagaaattattt

SEQ ID NO: 165505 - DNA, 25 bp, Artificial sequence
  SiRNA target sequence
atgccaatgaaaaagaaattatttt

SEQ ID NO: 165506 - DNA, 25 bp, Artificial sequence
  SiRNA target sequence
tgccaatgaaaaagaaattattttt

SEQ ID NO: 165507 - DNA, 25 bp, Artificial sequence
  SiRNA target sequence
gccaatgaaaaagaaattattttta

SEQ ID NO: 165508 - DNA, 25 bp, Artificial sequence
  SiRNA target sequence
ccaatgaaaaagaaattatttttac

SEQ ID NO: 165509 - DNA, 25 bp, Artificial sequence
  SiRNA target sequence
caatgaaaaagaaattatttttact

SEQ ID NO: 165510 - DNA, 25 bp, Artificial sequence
  SiRNA target sequence
aatgaaaaagaaattatttttacta

SEQ ID NO: 165511 - DNA, 25 bp, Artificial sequence
  SiRNA target sequence
atgaaaaagaaattatttttactag

SEQ ID NO: 165512 - DNA, 25 bp, Artificial sequence
  SiRNA target sequence
tgaaaaagaaattatttttactagc

SEQ ID NO: 165513 - DNA, 25 bp, Artificial sequence
  SiRNA target sequence
gaaaaagaaattatttttactagcg

SEQ ID NO: 165514 - DNA, 25 bp, Artificial sequence
  SiRNA target sequence
aaaaagaaattatttttactagcgg

SEQ ID NO: 165515 - DNA, 25 bp, Artificial sequence
  SiRNA target sequence
aaaagaaattatttttactagcggt

SEQ ID NO: 165516 - DNA, 25 bp, Artificial sequence
  SiRNA target sequence
aaagaaattatttttactagcggtg

SEQ ID NO: 165517 - DNA, 25 bp, Artificial sequence
  SiRNA target sequence
aagaaattatttttactagcggtgc

SEQ ID NO: 165518 - DNA, 25 bp, Artificial sequence
  SiRNA target sequence
agaaattatttttactagcggtgct

SEQ ID NO: 165519 - DNA, 25 bp, Artificial sequence
  SiRNA target sequence
gaaattatttttactagcggtgcta

SEQ ID NO: 165520 - DNA, 25 bp, Artificial sequence
  SiRNA target sequence
aaattatttttactagcggtgctac

SEQ ID NO: 165521 - DNA, 25 bp, Artificial sequence
  SiRNA target sequence
aattatttttactagcggtgctact

SEQ ID NO: 165522 - DNA, 25 bp, Artificial sequence
  SiRNA target sequence
attatttttactagcggtgctactg

SEQ ID NO: 165523 - DNA, 25 bp, Artificial sequence
  SiRNA target sequence
ttatttttactagcggtgctactga

SEQ ID NO: 165524 - DNA, 25 bp, Artificial sequence
  SiRNA target sequence
tatttttactagcggtgctactgag

SEQ ID NO: 165525 - DNA, 25 bp, Artificial sequence
  SiRNA target sequence
atttttactagcggtgctactgaga

SEQ ID NO: 165526 - DNA, 25 bp, Artificial sequence
  SiRNA target sequence
tttttactagcggtgctactgagag

SEQ ID NO: 165527 - DNA, 25 bp, Artificial sequence
  SiRNA target sequence
ttttactagcggtgctactgagagt

SEQ ID NO: 165528 - DNA, 25 bp, Artificial sequence
  SiRNA target sequence
tttactagcggtgctactgagagta

SEQ ID NO: 165529 - DNA, 25 bp, Artificial sequence
  SiRNA target sequence
ttactagcggtgctactgagagtaa

SEQ ID NO: 165530 - DNA, 25 bp, Artificial sequence
  SiRNA target sequence
tactagcggtgctactgagagtaac

SEQ ID NO: 165531 - DNA, 25 bp, Artificial sequence
  SiRNA target sequence
actagcggtgctactgagagtaaca

SEQ ID NO: 165532 - DNA, 25 bp, Artificial sequence
  SiRNA target sequence
ctagcggtgctactgagagtaacaa

SEQ ID NO: 165533 - DNA, 25 bp, Artificial sequence
  SiRNA target sequence
tagcggtgctactgagagtaacaac

SEQ ID NO: 165534 - DNA, 25 bp, Artificial sequence
  SiRNA target sequence
agcggtgctactgagagtaacaacc

SEQ ID NO: 165535 - DNA, 25 bp, Artificial sequence
  SiRNA target sequence
gcggtgctactgagagtaacaacct

SEQ ID NO: 165536 - DNA, 25 bp, Artificial sequence
  SiRNA target sequence
cggtgctactgagagtaacaacctt

SEQ ID NO: 165537 - DNA, 25 bp, Artificial sequence
  SiRNA target sequence
ggtgctactgagagtaacaaccttg

SEQ ID NO: 165538 - DNA, 25 bp, Artificial sequence
  SiRNA target sequence
gtgctactgagagtaacaaccttgc

SEQ ID NO: 165539 - DNA, 25 bp, Artificial sequence
  SiRNA target sequence
tgctactgagagtaacaaccttgca

SEQ ID NO: 165540 - DNA, 25 bp, Artificial sequence
  SiRNA target sequence
gctactgagagtaacaaccttgcac

SEQ ID NO: 165541 - DNA, 25 bp, Artificial sequence
  SiRNA target sequence
ctactgagagtaacaaccttgcact

SEQ ID NO: 165542 - DNA, 25 bp, Artificial sequence
  SiRNA target sequence
tactgagagtaacaaccttgcacta

SEQ ID NO: 165543 - DNA, 25 bp, Artificial sequence
  SiRNA target sequence
actgagagtaacaaccttgcactaa

SEQ ID NO: 165544 - DNA, 25 bp, Artificial sequence
  SiRNA target sequence
ctgagagtaacaaccttgcactaaa

SEQ ID NO: 165545 - DNA, 25 bp, Artificial sequence
  SiRNA target sequence
tgagagtaacaaccttgcactaaag

SEQ ID NO: 165546 - DNA, 25 bp, Artificial sequence
  SiRNA target sequence
gagagtaacaaccttgcactaaagg

SEQ ID NO: 165547 - DNA, 25 bp, Artificial sequence
  SiRNA target sequence
agagtaacaaccttgcactaaaggg

SEQ ID NO: 165548 - DNA, 25 bp, Artificial sequence
  SiRNA target sequence
gagtaacaaccttgcactaaagggt

SEQ ID NO: 165549 - DNA, 25 bp, Artificial sequence
  SiRNA target sequence
agtaacaaccttgcactaaagggtg

SEQ ID NO: 165550 - DNA, 25 bp, Artificial sequence
  SiRNA target sequence
gtaacaaccttgcactaaagggtgt

SEQ ID NO: 165551 - DNA, 25 bp, Artificial sequence
  SiRNA target sequence
taacaaccttgcactaaagggtgtc

SEQ ID NO: 165552 - DNA, 25 bp, Artificial sequence
  SiRNA target sequence
aacaaccttgcactaaagggtgtct

SEQ ID NO: 165553 - DNA, 25 bp, Artificial sequence
  SiRNA target sequence
acaaccttgcactaaagggtgtctt

SEQ ID NO: 165554 - DNA, 25 bp, Artificial sequence
  SiRNA target sequence
caaccttgcactaaagggtgtcttt

SEQ ID NO: 165555 - DNA, 25 bp, Artificial sequence
  SiRNA target sequence
aaccttgcactaaagggtgtctttg

SEQ ID NO: 165556 - DNA, 25 bp, Artificial sequence
  SiRNA target sequence
accttgcactaaagggtgtctttgc

SEQ ID NO: 165557 - DNA, 25 bp, Artificial sequence
  SiRNA target sequence
ccttgcactaaagggtgtctttgca

SEQ ID NO: 165558 - DNA, 25 bp, Artificial sequence
  SiRNA target sequence
cttgcactaaagggtgtctttgcat

SEQ ID NO: 165559 - DNA, 25 bp, Artificial sequence
  SiRNA target sequence
ttgcactaaagggtgtctttgcatt

SEQ ID NO: 165560 - DNA, 25 bp, Artificial sequence
  SiRNA target sequence
tgcactaaagggtgtctttgcattt

SEQ ID NO: 165561 - DNA, 25 bp, Artificial sequence
  SiRNA target sequence
gcactaaagggtgtctttgcatttt

SEQ ID NO: 165562 - DNA, 25 bp, Artificial sequence
  SiRNA target sequence
cactaaagggtgtctttgcattttt

SEQ ID NO: 165563 - DNA, 25 bp, Artificial sequence
  SiRNA target sequence
actaaagggtgtctttgcattttta

SEQ ID NO: 165564 - DNA, 25 bp, Artificial sequence
  SiRNA target sequence
ctaaagggtgtctttgcatttttaa

SEQ ID NO: 165565 - DNA, 25 bp, Artificial sequence
  SiRNA target sequence
taaagggtgtctttgcatttttaaa

SEQ ID NO: 165566 - DNA, 25 bp, Artificial sequence
  SiRNA target sequence
aaagggtgtctttgcatttttaaaa

SEQ ID NO: 165567 - DNA, 25 bp, Artificial sequence
  SiRNA target sequence
aagggtgtctttgcatttttaaaaa

SEQ ID NO: 165568 - DNA, 25 bp, Artificial sequence
  SiRNA target sequence
agggtgtctttgcatttttaaaaaa

SEQ ID NO: 165569 - DNA, 25 bp, Artificial sequence
  SiRNA target sequence
gggtgtctttgcatttttaaaaaaa

SEQ ID NO: 165570 - DNA, 25 bp, Artificial sequence
  SiRNA target sequence
ggtgtctttgcatttttaaaaaaag

SEQ ID NO: 165571 - DNA, 25 bp, Artificial sequence
  SiRNA target sequence
gtgtctttgcatttttaaaaaaaga

SEQ ID NO: 165572 - DNA, 25 bp, Artificial sequence
  SiRNA target sequence
tgtctttgcatttttaaaaaaagac

SEQ ID NO: 165573 - DNA, 25 bp, Artificial sequence
  SiRNA target sequence
gtctttgcatttttaaaaaaagaca

SEQ ID NO: 165574 - DNA, 25 bp, Artificial sequence
  SiRNA target sequence
tctttgcatttttaaaaaaagacaa

SEQ ID NO: 165575 - DNA, 25 bp, Artificial sequence
  SiRNA target sequence
ctttgcatttttaaaaaaagacaat

SEQ ID NO: 165576 - DNA, 25 bp, Artificial sequence
  SiRNA target sequence
tttgcatttttaaaaaaagacaata

SEQ ID NO: 165577 - DNA, 25 bp, Artificial sequence
  SiRNA target sequence
ttgcatttttaaaaaaagacaatag

SEQ ID NO: 165578 - DNA, 25 bp, Artificial sequence
  SiRNA target sequence
tgcatttttaaaaaaagacaatagg

SEQ ID NO: 165579 - DNA, 25 bp, Artificial sequence
  SiRNA target sequence
gcatttttaaaaaaagacaataggc

SEQ ID NO: 165580 - DNA, 25 bp, Artificial sequence
  SiRNA target sequence
catttttaaaaaaagacaataggcc

SEQ ID NO: 165581 - DNA, 25 bp, Artificial sequence
  SiRNA target sequence
atttttaaaaaaagacaataggcct

SEQ ID NO: 165582 - DNA, 25 bp, Artificial sequence
  SiRNA target sequence
tttttaaaaaaagacaataggcctg

SEQ ID NO: 165583 - DNA, 25 bp, Artificial sequence
  SiRNA target sequence
ttttaaaaaaagacaataggcctgt

SEQ ID NO: 165584 - DNA, 25 bp, Artificial sequence
  SiRNA target sequence
tttaaaaaaagacaataggcctgtt

SEQ ID NO: 165585 - DNA, 25 bp, Artificial sequence
  SiRNA target sequence
ttaaaaaaagacaataggcctgttc

SEQ ID NO: 165586 - DNA, 25 bp, Artificial sequence
  SiRNA target sequence
taaaaaaagacaataggcctgttca

SEQ ID NO: 165587 - DNA, 25 bp, Artificial sequence
  SiRNA target sequence
aaaaaaagacaataggcctgttcat

SEQ ID NO: 165588 - DNA, 25 bp, Artificial sequence
  SiRNA target sequence
aaaaaagacaataggcctgttcata

SEQ ID NO: 165589 - DNA, 25 bp, Artificial sequence
  SiRNA target sequence
aaaaagacaataggcctgttcatat

SEQ ID NO: 165590 - DNA, 25 bp, Artificial sequence
  SiRNA target sequence
aaaagacaataggcctgttcatatc

SEQ ID NO: 165591 - DNA, 25 bp, Artificial sequence
  SiRNA target sequence
aaagacaataggcctgttcatatca

SEQ ID NO: 165592 - DNA, 25 bp, Artificial sequence
  SiRNA target sequence
aagacaataggcctgttcatatcat

SEQ ID NO: 165593 - DNA, 25 bp, Artificial sequence
  SiRNA target sequence
agacaataggcctgttcatatcatt

SEQ ID NO: 165594 - DNA, 25 bp, Artificial sequence
  SiRNA target sequence
gacaataggcctgttcatatcatta

SEQ ID NO: 165595 - DNA, 25 bp, Artificial sequence
  SiRNA target sequence
acaataggcctgttcatatcattac

SEQ ID NO: 165596 - DNA, 25 bp, Artificial sequence
  SiRNA target sequence
caataggcctgttcatatcattacc

SEQ ID NO: 165597 - DNA, 25 bp, Artificial sequence
  SiRNA target sequence
aataggcctgttcatatcattacca

SEQ ID NO: 165598 - DNA, 25 bp, Artificial sequence
  SiRNA target sequence
ataggcctgttcatatcattaccac

SEQ ID NO: 165599 - DNA, 25 bp, Artificial sequence
  SiRNA target sequence
taggcctgttcatatcattaccaca

SEQ ID NO: 165600 - DNA, 25 bp, Artificial sequence
  SiRNA target sequence
aggcctgttcatatcattaccacac

SEQ ID NO: 165601 - DNA, 25 bp, Artificial sequence
  SiRNA target sequence
ggcctgttcatatcattaccacaca

SEQ ID NO: 165602 - DNA, 25 bp, Artificial sequence
  SiRNA target sequence
gcctgttcatatcattaccacacaa

SEQ ID NO: 165603 - DNA, 25 bp, Artificial sequence
  SiRNA target sequence
cctgttcatatcattaccacacaaa

SEQ ID NO: 165604 - DNA, 25 bp, Artificial sequence
  SiRNA target sequence
ctgttcatatcattaccacacaaat

SEQ ID NO: 165605 - DNA, 25 bp, Artificial sequence
  SiRNA target sequence
tgttcatatcattaccacacaaatt

SEQ ID NO: 165606 - DNA, 25 bp, Artificial sequence
  SiRNA target sequence
gttcatatcattaccacacaaattg

SEQ ID NO: 165607 - DNA, 25 bp, Artificial sequence
  SiRNA target sequence
ttcatatcattaccacacaaattga

SEQ ID NO: 165608 - DNA, 25 bp, Artificial sequence
  SiRNA target sequence
tcatatcattaccacacaaattgaa

SEQ ID NO: 165609 - DNA, 25 bp, Artificial sequence
  SiRNA target sequence
catatcattaccacacaaattgaac

SEQ ID NO: 165610 - DNA, 25 bp, Artificial sequence
  SiRNA target sequence
atatcattaccacacaaattgaaca

SEQ ID NO: 165611 - DNA, 25 bp, Artificial sequence
  SiRNA target sequence
tatcattaccacacaaattgaacat

SEQ ID NO: 165612 - DNA, 25 bp, Artificial sequence
  SiRNA target sequence
atcattaccacacaaattgaacata

SEQ ID NO: 165613 - DNA, 25 bp, Artificial sequence
  SiRNA target sequence
tcattaccacacaaattgaacataa

SEQ ID NO: 165614 - DNA, 25 bp, Artificial sequence
  SiRNA target sequence
cattaccacacaaattgaacataaa

SEQ ID NO: 165615 - DNA, 25 bp, Artificial sequence
  SiRNA target sequence
attaccacacaaattgaacataaat

SEQ ID NO: 165616 - DNA, 25 bp, Artificial sequence
  SiRNA target sequence
ttaccacacaaattgaacataaatg

SEQ ID NO: 165617 - DNA, 25 bp, Artificial sequence
  SiRNA target sequence
taccacacaaattgaacataaatgt

SEQ ID NO: 165618 - DNA, 25 bp, Artificial sequence
  SiRNA target sequence
accacacaaattgaacataaatgtg

SEQ ID NO: 165619 - DNA, 25 bp, Artificial sequence
  SiRNA target sequence
ccacacaaattgaacataaatgtgt

SEQ ID NO: 165620 - DNA, 25 bp, Artificial sequence
  SiRNA target sequence
cacacaaattgaacataaatgtgta

SEQ ID NO: 165621 - DNA, 25 bp, Artificial sequence
  SiRNA target sequence
acacaaattgaacataaatgtgtat

SEQ ID NO: 165622 - DNA, 25 bp, Artificial sequence
  SiRNA target sequence
cacaaattgaacataaatgtgtatt

SEQ ID NO: 165623 - DNA, 25 bp, Artificial sequence
  SiRNA target sequence
acaaattgaacataaatgtgtattg

SEQ ID NO: 165624 - DNA, 25 bp, Artificial sequence
  SiRNA target sequence
caaattgaacataaatgtgtattgg

SEQ ID NO: 165625 - DNA, 25 bp, Artificial sequence
  SiRNA target sequence
aaattgaacataaatgtgtattgga

SEQ ID NO: 165626 - DNA, 25 bp, Artificial sequence
  SiRNA target sequence
aattgaacataaatgtgtattggac

SEQ ID NO: 165627 - DNA, 25 bp, Artificial sequence
  SiRNA target sequence
attgaacataaatgtgtattggaca

SEQ ID NO: 165628 - DNA, 25 bp, Artificial sequence
  SiRNA target sequence
ttgaacataaatgtgtattggacac

SEQ ID NO: 165629 - DNA, 25 bp, Artificial sequence
  SiRNA target sequence
tgaacataaatgtgtattggacaca

SEQ ID NO: 165630 - DNA, 25 bp, Artificial sequence
  SiRNA target sequence
gaacataaatgtgtattggacacat

SEQ ID NO: 165631 - DNA, 25 bp, Artificial sequence
  SiRNA target sequence
aacataaatgtgtattggacacatg

SEQ ID NO: 165632 - DNA, 25 bp, Artificial sequence
  SiRNA target sequence
acataaatgtgtattggacacatgt

SEQ ID NO: 165633 - DNA, 25 bp, Artificial sequence
  SiRNA target sequence
cataaatgtgtattggacacatgta

SEQ ID NO: 165634 - DNA, 25 bp, Artificial sequence
  SiRNA target sequence
ataaatgtgtattggacacatgtag

SEQ ID NO: 165635 - DNA, 25 bp, Artificial sequence
  SiRNA target sequence
taaatgtgtattggacacatgtaga

SEQ ID NO: 165636 - DNA, 25 bp, Artificial sequence
  SiRNA target sequence
aaatgtgtattggacacatgtagaa

SEQ ID NO: 165637 - DNA, 25 bp, Artificial sequence
  SiRNA target sequence
aatgtgtattggacacatgtagaag

SEQ ID NO: 165638 - DNA, 25 bp, Artificial sequence
  SiRNA target sequence
atgtgtattggacacatgtagaaga

SEQ ID NO: 165639 - DNA, 25 bp, Artificial sequence
  SiRNA target sequence
tgtgtattggacacatgtagaagat

SEQ ID NO: 165640 - DNA, 25 bp, Artificial sequence
  SiRNA target sequence
gtgtattggacacatgtagaagatt

SEQ ID NO: 165641 - DNA, 25 bp, Artificial sequence
  SiRNA target sequence
tgtattggacacatgtagaagatta

SEQ ID NO: 165642 - DNA, 25 bp, Artificial sequence
  SiRNA target sequence
gtattggacacatgtagaagattag

SEQ ID NO: 165643 - DNA, 25 bp, Artificial sequence
  SiRNA target sequence
tattggacacatgtagaagattaga

SEQ ID NO: 165644 - DNA, 25 bp, Artificial sequence
  SiRNA target sequence
attggacacatgtagaagattagaa

SEQ ID NO: 165645 - DNA, 25 bp, Artificial sequence
  SiRNA target sequence
ttggacacatgtagaagattagaag

SEQ ID NO: 165646 - DNA, 25 bp, Artificial sequence
  SiRNA target sequence
tggacacatgtagaagattagaaga

SEQ ID NO: 165647 - DNA, 25 bp, Artificial sequence
  SiRNA target sequence
ggacacatgtagaagattagaagaa

SEQ ID NO: 165648 - DNA, 25 bp, Artificial sequence
  SiRNA target sequence
gacacatgtagaagattagaagaag

SEQ ID NO: 165649 - DNA, 25 bp, Artificial sequence
  SiRNA target sequence
acacatgtagaagattagaagaaga

SEQ ID NO: 165650 - DNA, 25 bp, Artificial sequence
  SiRNA target sequence
cacatgtagaagattagaagaagaa

SEQ ID NO: 165651 - DNA, 25 bp, Artificial sequence
  SiRNA target sequence
acatgtagaagattagaagaagaag

SEQ ID NO: 165652 - DNA, 25 bp, Artificial sequence
  SiRNA target sequence
catgtagaagattagaagaagaagg

SEQ ID NO: 165653 - DNA, 25 bp, Artificial sequence
  SiRNA target sequence
atgtagaagattagaagaagaagga

SEQ ID NO: 165654 - DNA, 25 bp, Artificial sequence
  SiRNA target sequence
tgtagaagattagaagaagaaggag

SEQ ID NO: 165655 - DNA, 25 bp, Artificial sequence
  SiRNA target sequence
gtagaagattagaagaagaaggagc

SEQ ID NO: 165656 - DNA, 25 bp, Artificial sequence
  SiRNA target sequence
tagaagattagaagaagaaggagct

SEQ ID NO: 165657 - DNA, 25 bp, Artificial sequence
  SiRNA target sequence
agaagattagaagaagaaggagcta

SEQ ID NO: 165658 - DNA, 25 bp, Artificial sequence
  SiRNA target sequence
gaagattagaagaagaaggagctac

SEQ ID NO: 165659 - DNA, 25 bp, Artificial sequence
  SiRNA target sequence
aagattagaagaagaaggagctaca

SEQ ID NO: 165660 - DNA, 25 bp, Artificial sequence
  SiRNA target sequence
agattagaagaagaaggagctacag

SEQ ID NO: 165661 - DNA, 25 bp, Artificial sequence
  SiRNA target sequence
gattagaagaagaaggagctacagt

SEQ ID NO: 165662 - DNA, 25 bp, Artificial sequence
  SiRNA target sequence
attagaagaagaaggagctacagtg

SEQ ID NO: 165663 - DNA, 25 bp, Artificial sequence
  SiRNA target sequence
ttagaagaagaaggagctacagtga

SEQ ID NO: 165664 - DNA, 25 bp, Artificial sequence
  SiRNA target sequence
tagaagaagaaggagctacagtgac

SEQ ID NO: 165665 - DNA, 25 bp, Artificial sequence
  SiRNA target sequence
agaagaagaaggagctacagtgact

SEQ ID NO: 165666 - DNA, 25 bp, Artificial sequence
  SiRNA target sequence
gaagaagaaggagctacagtgactt

SEQ ID NO: 165667 - DNA, 25 bp, Artificial sequence
  SiRNA target sequence
aagaagaaggagctacagtgactta

SEQ ID NO: 165668 - DNA, 25 bp, Artificial sequence
  SiRNA target sequence
agaagaaggagctacagtgacttat

SEQ ID NO: 165669 - DNA, 25 bp, Artificial sequence
  SiRNA target sequence
gaagaaggagctacagtgacttatt

SEQ ID NO: 165670 - DNA, 25 bp, Artificial sequence
  SiRNA target sequence
aagaaggagctacagtgacttattt

SEQ ID NO: 165671 - DNA, 25 bp, Artificial sequence
  SiRNA target sequence
agaaggagctacagtgacttatttg

SEQ ID NO: 165672 - DNA, 25 bp, Artificial sequence
  SiRNA target sequence
gaaggagctacagtgacttatttgc

SEQ ID NO: 165673 - DNA, 25 bp, Artificial sequence
  SiRNA target sequence
aaggagctacagtgacttatttgcc

SEQ ID NO: 165674 - DNA, 25 bp, Artificial sequence
  SiRNA target sequence
aggagctacagtgacttatttgcct

SEQ ID NO: 165675 - DNA, 25 bp, Artificial sequence
  SiRNA target sequence
ggagctacagtgacttatttgcctg

SEQ ID NO: 165676 - DNA, 25 bp, Artificial sequence
  SiRNA target sequence
gagctacagtgacttatttgcctgt

SEQ ID NO: 165677 - DNA, 25 bp, Artificial sequence
  SiRNA target sequence
agctacagtgacttatttgcctgta

SEQ ID NO: 165678 - DNA, 25 bp, Artificial sequence
  SiRNA target sequence
gctacagtgacttatttgcctgtag

SEQ ID NO: 165679 - DNA, 25 bp, Artificial sequence
  SiRNA target sequence
ctacagtgacttatttgcctgtaga

SEQ ID NO: 165680 - DNA, 25 bp, Artificial sequence
  SiRNA target sequence
tacagtgacttatttgcctgtagat

SEQ ID NO: 165681 - DNA, 25 bp, Artificial sequence
  SiRNA target sequence
acagtgacttatttgcctgtagata

SEQ ID NO: 165682 - DNA, 25 bp, Artificial sequence
  SiRNA target sequence
cagtgacttatttgcctgtagataa

SEQ ID NO: 165683 - DNA, 25 bp, Artificial sequence
  SiRNA target sequence
agtgacttatttgcctgtagataaa

SEQ ID NO: 165684 - DNA, 25 bp, Artificial sequence
  SiRNA target sequence
gtgacttatttgcctgtagataaaa

SEQ ID NO: 165685 - DNA, 25 bp, Artificial sequence
  SiRNA target sequence
tgacttatttgcctgtagataaaaa

SEQ ID NO: 165686 - DNA, 25 bp, Artificial sequence
  SiRNA target sequence
gacttatttgcctgtagataaaaat

SEQ ID NO: 165687 - DNA, 25 bp, Artificial sequence
  SiRNA target sequence
acttatttgcctgtagataaaaatg

SEQ ID NO: 165688 - DNA, 25 bp, Artificial sequence
  SiRNA target sequence
cttatttgcctgtagataaaaatgg

SEQ ID NO: 165689 - DNA, 25 bp, Artificial sequence
  SiRNA target sequence
ttatttgcctgtagataaaaatgga

SEQ ID NO: 165690 - DNA, 25 bp, Artificial sequence
  SiRNA target sequence
tatttgcctgtagataaaaatggaa

SEQ ID NO: 165691 - DNA, 25 bp, Artificial sequence
  SiRNA target sequence
atttgcctgtagataaaaatggaat

SEQ ID NO: 165692 - DNA, 25 bp, Artificial sequence
  SiRNA target sequence
tttgcctgtagataaaaatggaata

SEQ ID NO: 165693 - DNA, 25 bp, Artificial sequence
  SiRNA target sequence
ttgcctgtagataaaaatggaatag

SEQ ID NO: 165694 - DNA, 25 bp, Artificial sequence
  SiRNA target sequence
tgcctgtagataaaaatggaatagt

SEQ ID NO: 165695 - DNA, 25 bp, Artificial sequence
  SiRNA target sequence
gcctgtagataaaaatggaatagta

SEQ ID NO: 165696 - DNA, 25 bp, Artificial sequence
  SiRNA target sequence
cctgtagataaaaatggaatagtag

SEQ ID NO: 165697 - DNA, 25 bp, Artificial sequence
  SiRNA target sequence
ctgtagataaaaatggaatagtaga

SEQ ID NO: 165698 - DNA, 25 bp, Artificial sequence
  SiRNA target sequence
tgtagataaaaatggaatagtagat

SEQ ID NO: 165699 - DNA, 25 bp, Artificial sequence
  SiRNA target sequence
gtagataaaaatggaatagtagatc

SEQ ID NO: 165700 - DNA, 25 bp, Artificial sequence
  SiRNA target sequence
tagataaaaatggaatagtagatcc

SEQ ID NO: 165701 - DNA, 25 bp, Artificial sequence
  SiRNA target sequence
agataaaaatggaatagtagatccg

SEQ ID NO: 165702 - DNA, 25 bp, Artificial sequence
  SiRNA target sequence
gataaaaatggaatagtagatccgc

SEQ ID NO: 165703 - DNA, 25 bp, Artificial sequence
  SiRNA target sequence
ataaaaatggaatagtagatccgca

SEQ ID NO: 165704 - DNA, 25 bp, Artificial sequence
  SiRNA target sequence
taaaaatggaatagtagatccgcaa

SEQ ID NO: 165705 - DNA, 25 bp, Artificial sequence
  SiRNA target sequence
aaaaatggaatagtagatccgcaat

SEQ ID NO: 165706 - DNA, 25 bp, Artificial sequence
  SiRNA target sequence
aaaatggaatagtagatccgcaatt

SEQ ID NO: 165707 - DNA, 25 bp, Artificial sequence
  SiRNA target sequence
aaatggaatagtagatccgcaatta

SEQ ID NO: 165708 - DNA, 25 bp, Artificial sequence
  SiRNA target sequence
aatggaatagtagatccgcaattaa

SEQ ID NO: 165709 - DNA, 25 bp, Artificial sequence
  SiRNA target sequence
atggaatagtagatccgcaattaat

SEQ ID NO: 165710 - DNA, 25 bp, Artificial sequence
  SiRNA target sequence
tggaatagtagatccgcaattaata

SEQ ID NO: 165711 - DNA, 25 bp, Artificial sequence
  SiRNA target sequence
ggaatagtagatccgcaattaataa

SEQ ID NO: 165712 - DNA, 25 bp, Artificial sequence
  SiRNA target sequence
gaatagtagatccgcaattaataaa

SEQ ID NO: 165713 - DNA, 25 bp, Artificial sequence
  SiRNA target sequence
aatagtagatccgcaattaataaaa

SEQ ID NO: 165714 - DNA, 25 bp, Artificial sequence
  SiRNA target sequence
atagtagatccgcaattaataaaaa

SEQ ID NO: 165715 - DNA, 25 bp, Artificial sequence
  SiRNA target sequence
tagtagatccgcaattaataaaaaa

SEQ ID NO: 165716 - DNA, 25 bp, Artificial sequence
  SiRNA target sequence
agtagatccgcaattaataaaaaac

SEQ ID NO: 165717 - DNA, 25 bp, Artificial sequence
  SiRNA target sequence
gtagatccgcaattaataaaaaaca

SEQ ID NO: 165718 - DNA, 25 bp, Artificial sequence
  SiRNA target sequence
tagatccgcaattaataaaaaacag

SEQ ID NO: 165719 - DNA, 25 bp, Artificial sequence
  SiRNA target sequence
agatccgcaattaataaaaaacagt

SEQ ID NO: 165720 - DNA, 25 bp, Artificial sequence
  SiRNA target sequence
gatccgcaattaataaaaaacagta

SEQ ID NO: 165721 - DNA, 25 bp, Artificial sequence
  SiRNA target sequence
atccgcaattaataaaaaacagtat

SEQ ID NO: 165722 - DNA, 25 bp, Artificial sequence
  SiRNA target sequence
tccgcaattaataaaaaacagtatt

SEQ ID NO: 165723 - DNA, 25 bp, Artificial sequence
  SiRNA target sequence
ccgcaattaataaaaaacagtatta

SEQ ID NO: 165724 - DNA, 25 bp, Artificial sequence
  SiRNA target sequence
cgcaattaataaaaaacagtattac

SEQ ID NO: 165725 - DNA, 25 bp, Artificial sequence
  SiRNA target sequence
gcaattaataaaaaacagtattact

SEQ ID NO: 165726 - DNA, 25 bp, Artificial sequence
  SiRNA target sequence
caattaataaaaaacagtattacta

SEQ ID NO: 165727 - DNA, 25 bp, Artificial sequence
  SiRNA target sequence
aattaataaaaaacagtattactaa

SEQ ID NO: 165728 - DNA, 25 bp, Artificial sequence
  SiRNA target sequence
attaataaaaaacagtattactaaa

SEQ ID NO: 165729 - DNA, 25 bp, Artificial sequence
  SiRNA target sequence
ttaataaaaaacagtattactaaag

SEQ ID NO: 165730 - DNA, 25 bp, Artificial sequence
  SiRNA target sequence
taataaaaaacagtattactaaaga

SEQ ID NO: 165731 - DNA, 25 bp, Artificial sequence
  SiRNA target sequence
aataaaaaacagtattactaaagat

SEQ ID NO: 165732 - DNA, 25 bp, Artificial sequence
  SiRNA target sequence
ataaaaaacagtattactaaagata

SEQ ID NO: 165733 - DNA, 25 bp, Artificial sequence
  SiRNA target sequence
taaaaaacagtattactaaagatac

SEQ ID NO: 165734 - DNA, 25 bp, Artificial sequence
  SiRNA target sequence
aaaaaacagtattactaaagatacc

SEQ ID NO: 165735 - DNA, 25 bp, Artificial sequence
  SiRNA target sequence
aaaaacagtattactaaagataccg

SEQ ID NO: 165736 - DNA, 25 bp, Artificial sequence
  SiRNA target sequence
aaaacagtattactaaagataccgc

SEQ ID NO: 165737 - DNA, 25 bp, Artificial sequence
  SiRNA target sequence
aaacagtattactaaagataccgct

SEQ ID NO: 165738 - DNA, 25 bp, Artificial sequence
  SiRNA target sequence
aacagtattactaaagataccgctt

SEQ ID NO: 165739 - DNA, 25 bp, Artificial sequence
  SiRNA target sequence
acagtattactaaagataccgcttt

SEQ ID NO: 165740 - DNA, 25 bp, Artificial sequence
  SiRNA target sequence
cagtattactaaagataccgctttg

SEQ ID NO: 165741 - DNA, 25 bp, Artificial sequence
  SiRNA target sequence
agtattactaaagataccgctttgg

SEQ ID NO: 165742 - DNA, 25 bp, Artificial sequence
  SiRNA target sequence
gtattactaaagataccgctttggt

SEQ ID NO: 165743 - DNA, 25 bp, Artificial sequence
  SiRNA target sequence
tattactaaagataccgctttggtg

SEQ ID NO: 165744 - DNA, 25 bp, Artificial sequence
  SiRNA target sequence
attactaaagataccgctttggtgt

SEQ ID NO: 165745 - DNA, 25 bp, Artificial sequence
  SiRNA target sequence
ttactaaagataccgctttggtgtc

SEQ ID NO: 165746 - DNA, 25 bp, Artificial sequence
  SiRNA target sequence
tactaaagataccgctttggtgtct

SEQ ID NO: 165747 - DNA, 25 bp, Artificial sequence
  SiRNA target sequence
actaaagataccgctttggtgtctg

SEQ ID NO: 165748 - DNA, 25 bp, Artificial sequence
  SiRNA target sequence
ctaaagataccgctttggtgtctgt

SEQ ID NO: 165749 - DNA, 25 bp, Artificial sequence
  SiRNA target sequence
taaagataccgctttggtgtctgtt

SEQ ID NO: 165750 - DNA, 25 bp, Artificial sequence
  SiRNA target sequence
aaagataccgctttggtgtctgtta

SEQ ID NO: 165751 - DNA, 25 bp, Artificial sequence
  SiRNA target sequence
aagataccgctttggtgtctgttat

SEQ ID NO: 165752 - DNA, 25 bp, Artificial sequence
  SiRNA target sequence
agataccgctttggtgtctgttatg

SEQ ID NO: 165753 - DNA, 25 bp, Artificial sequence
  SiRNA target sequence
gataccgctttggtgtctgttatgg

SEQ ID NO: 165754 - DNA, 25 bp, Artificial sequence
  SiRNA target sequence
ataccgctttggtgtctgttatggc

SEQ ID NO: 165755 - DNA, 25 bp, Artificial sequence
  SiRNA target sequence
taccgctttggtgtctgttatggct

SEQ ID NO: 165756 - DNA, 25 bp, Artificial sequence
  SiRNA target sequence
accgctttggtgtctgttatggctg

SEQ ID NO: 165757 - DNA, 25 bp, Artificial sequence
  SiRNA target sequence
ccgctttggtgtctgttatggctgt

SEQ ID NO: 165758 - DNA, 25 bp, Artificial sequence
  SiRNA target sequence
cgctttggtgtctgttatggctgtt

SEQ ID NO: 165759 - DNA, 25 bp, Artificial sequence
  SiRNA target sequence
gctttggtgtctgttatggctgtta

SEQ ID NO: 165760 - DNA, 25 bp, Artificial sequence
  SiRNA target sequence
ctttggtgtctgttatggctgttaa

SEQ ID NO: 165761 - DNA, 25 bp, Artificial sequence
  SiRNA target sequence
tttggtgtctgttatggctgttaac

SEQ ID NO: 165762 - DNA, 25 bp, Artificial sequence
  SiRNA target sequence
ttggtgtctgttatggctgttaaca

SEQ ID NO: 165763 - DNA, 25 bp, Artificial sequence
  SiRNA target sequence
tggtgtctgttatggctgttaacaa

SEQ ID NO: 165764 - DNA, 25 bp, Artificial sequence
  SiRNA target sequence
ggtgtctgttatggctgttaacaac

SEQ ID NO: 165765 - DNA, 25 bp, Artificial sequence
  SiRNA target sequence
gtgtctgttatggctgttaacaacg

SEQ ID NO: 165766 - DNA, 25 bp, Artificial sequence
  SiRNA target sequence
tgtctgttatggctgttaacaacga

SEQ ID NO: 165767 - DNA, 25 bp, Artificial sequence
  SiRNA target sequence
gtctgttatggctgttaacaacgaa

SEQ ID NO: 165768 - DNA, 25 bp, Artificial sequence
  SiRNA target sequence
tctgttatggctgttaacaacgaaa

SEQ ID NO: 165769 - DNA, 25 bp, Artificial sequence
  SiRNA target sequence
ctgttatggctgttaacaacgaaat

SEQ ID NO: 165770 - DNA, 25 bp, Artificial sequence
  SiRNA target sequence
tgttatggctgttaacaacgaaatg

SEQ ID NO: 165771 - DNA, 25 bp, Artificial sequence
  SiRNA target sequence
gttatggctgttaacaacgaaatgg

SEQ ID NO: 165772 - DNA, 25 bp, Artificial sequence
  SiRNA target sequence
ttatggctgttaacaacgaaatggg

SEQ ID NO: 165773 - DNA, 25 bp, Artificial sequence
  SiRNA target sequence
tatggctgttaacaacgaaatggga

SEQ ID NO: 165774 - DNA, 25 bp, Artificial sequence
  SiRNA target sequence
atggctgttaacaacgaaatgggag

SEQ ID NO: 165775 - DNA, 25 bp, Artificial sequence
  SiRNA target sequence
tggctgttaacaacgaaatgggagc

SEQ ID NO: 165776 - DNA, 25 bp, Artificial sequence
  SiRNA target sequence
ggctgttaacaacgaaatgggagca

SEQ ID NO: 165777 - DNA, 25 bp, Artificial sequence
  SiRNA target sequence
gctgttaacaacgaaatgggagcaa

SEQ ID NO: 165778 - DNA, 25 bp, Artificial sequence
  SiRNA target sequence
ctgttaacaacgaaatgggagcaat

SEQ ID NO: 165779 - DNA, 25 bp, Artificial sequence
  SiRNA target sequence
tgttaacaacgaaatgggagcaata

SEQ ID NO: 165780 - DNA, 25 bp, Artificial sequence
  SiRNA target sequence
gttaacaacgaaatgggagcaatac

SEQ ID NO: 165781 - DNA, 25 bp, Artificial sequence
  SiRNA target sequence
ttaacaacgaaatgggagcaataca

SEQ ID NO: 165782 - DNA, 25 bp, Artificial sequence
  SiRNA target sequence
taacaacgaaatgggagcaatacaa

SEQ ID NO: 165783 - DNA, 25 bp, Artificial sequence
  SiRNA target sequence
aacaacgaaatgggagcaatacaac

SEQ ID NO: 165784 - DNA, 25 bp, Artificial sequence
  SiRNA target sequence
acaacgaaatgggagcaatacaacc

SEQ ID NO: 165785 - DNA, 25 bp, Artificial sequence
  SiRNA target sequence
caacgaaatgggagcaatacaaccg

SEQ ID NO: 165786 - DNA, 25 bp, Artificial sequence
  SiRNA target sequence
aacgaaatgggagcaatacaaccgc

SEQ ID NO: 165787 - DNA, 25 bp, Artificial sequence
  SiRNA target sequence
acgaaatgggagcaatacaaccgct

SEQ ID NO: 165788 - DNA, 25 bp, Artificial sequence
  SiRNA target sequence
cgaaatgggagcaatacaaccgctt

SEQ ID NO: 165789 - DNA, 25 bp, Artificial sequence
  SiRNA target sequence
gaaatgggagcaatacaaccgctta

SEQ ID NO: 165790 - DNA, 25 bp, Artificial sequence
  SiRNA target sequence
aaatgggagcaatacaaccgcttaa

SEQ ID NO: 165791 - DNA, 25 bp, Artificial sequence
  SiRNA target sequence
aatgggagcaatacaaccgcttaaa

SEQ ID NO: 165792 - DNA, 25 bp, Artificial sequence
  SiRNA target sequence
atgggagcaatacaaccgcttaaag

SEQ ID NO: 165793 - DNA, 25 bp, Artificial sequence
  SiRNA target sequence
tgggagcaatacaaccgcttaaaga

SEQ ID NO: 165794 - DNA, 25 bp, Artificial sequence
  SiRNA target sequence
gggagcaatacaaccgcttaaagaa

SEQ ID NO: 165795 - DNA, 25 bp, Artificial sequence
  SiRNA target sequence
ggagcaatacaaccgcttaaagaaa

SEQ ID NO: 165796 - DNA, 25 bp, Artificial sequence
  SiRNA target sequence
gagcaatacaaccgcttaaagaaat

SEQ ID NO: 165797 - DNA, 25 bp, Artificial sequence
  SiRNA target sequence
agcaatacaaccgcttaaagaaata

SEQ ID NO: 165798 - DNA, 25 bp, Artificial sequence
  SiRNA target sequence
gcaatacaaccgcttaaagaaatag

SEQ ID NO: 165799 - DNA, 25 bp, Artificial sequence
  SiRNA target sequence
caatacaaccgcttaaagaaatagg

SEQ ID NO: 165800 - DNA, 25 bp, Artificial sequence
  SiRNA target sequence
aatacaaccgcttaaagaaatagga

SEQ ID NO: 165801 - DNA, 25 bp, Artificial sequence
  SiRNA target sequence
atacaaccgcttaaagaaataggaa

SEQ ID NO: 165802 - DNA, 25 bp, Artificial sequence
  SiRNA target sequence
tacaaccgcttaaagaaataggaag

SEQ ID NO: 165803 - DNA, 25 bp, Artificial sequence
  SiRNA target sequence
acaaccgcttaaagaaataggaaga

SEQ ID NO: 165804 - DNA, 25 bp, Artificial sequence
  SiRNA target sequence
caaccgcttaaagaaataggaagaa

SEQ ID NO: 165805 - DNA, 25 bp, Artificial sequence
  SiRNA target sequence
aaccgcttaaagaaataggaagaat

SEQ ID NO: 165806 - DNA, 25 bp, Artificial sequence
  SiRNA target sequence
accgcttaaagaaataggaagaata

SEQ ID NO: 165807 - DNA, 25 bp, Artificial sequence
  SiRNA target sequence
ccgcttaaagaaataggaagaatat

SEQ ID NO: 165808 - DNA, 25 bp, Artificial sequence
  SiRNA target sequence
cgcttaaagaaataggaagaatatg

SEQ ID NO: 165809 - DNA, 25 bp, Artificial sequence
  SiRNA target sequence
gcttaaagaaataggaagaatatgt

SEQ ID NO: 165810 - DNA, 25 bp, Artificial sequence
  SiRNA target sequence
cttaaagaaataggaagaatatgta

SEQ ID NO: 165811 - DNA, 25 bp, Artificial sequence
  SiRNA target sequence
ttaaagaaataggaagaatatgtaa

SEQ ID NO: 165812 - DNA, 25 bp, Artificial sequence
  SiRNA target sequence
taaagaaataggaagaatatgtaaa

SEQ ID NO: 165813 - DNA, 25 bp, Artificial sequence
  SiRNA target sequence
aaagaaataggaagaatatgtaaag

SEQ ID NO: 165814 - DNA, 25 bp, Artificial sequence
  SiRNA target sequence
aagaaataggaagaatatgtaaaga

SEQ ID NO: 165815 - DNA, 25 bp, Artificial sequence
  SiRNA target sequence
agaaataggaagaatatgtaaagaa

SEQ ID NO: 165816 - DNA, 25 bp, Artificial sequence
  SiRNA target sequence
gaaataggaagaatatgtaaagaaa

SEQ ID NO: 165817 - DNA, 25 bp, Artificial sequence
  SiRNA target sequence
aaataggaagaatatgtaaagaaaa

SEQ ID NO: 165818 - DNA, 25 bp, Artificial sequence
  SiRNA target sequence
aataggaagaatatgtaaagaaaat

SEQ ID NO: 165819 - DNA, 25 bp, Artificial sequence
  SiRNA target sequence
ataggaagaatatgtaaagaaaata

SEQ ID NO: 165820 - DNA, 25 bp, Artificial sequence
  SiRNA target sequence
taggaagaatatgtaaagaaaataa

SEQ ID NO: 165821 - DNA, 25 bp, Artificial sequence
  SiRNA target sequence
aggaagaatatgtaaagaaaataat

SEQ ID NO: 165822 - DNA, 25 bp, Artificial sequence
  SiRNA target sequence
ggaagaatatgtaaagaaaataata

SEQ ID NO: 165823 - DNA, 25 bp, Artificial sequence
  SiRNA target sequence
gaagaatatgtaaagaaaataatat

SEQ ID NO: 165824 - DNA, 25 bp, Artificial sequence
  SiRNA target sequence
aagaatatgtaaagaaaataatatt

SEQ ID NO: 165825 - DNA, 25 bp, Artificial sequence
  SiRNA target sequence
agaatatgtaaagaaaataatattt

SEQ ID NO: 165826 - DNA, 25 bp, Artificial sequence
  SiRNA target sequence
gaatatgtaaagaaaataatatttt

SEQ ID NO: 165827 - DNA, 25 bp, Artificial sequence
  SiRNA target sequence
aatatgtaaagaaaataatatttta

SEQ ID NO: 165828 - DNA, 25 bp, Artificial sequence
  SiRNA target sequence
atatgtaaagaaaataatattttat

SEQ ID NO: 165829 - DNA, 25 bp, Artificial sequence
  SiRNA target sequence
tatgtaaagaaaataatattttatt

SEQ ID NO: 165830 - DNA, 25 bp, Artificial sequence
  SiRNA target sequence
atgtaaagaaaataatattttattt

SEQ ID NO: 165831 - DNA, 25 bp, Artificial sequence
  SiRNA target sequence
tgtaaagaaaataatattttatttc

SEQ ID NO: 165832 - DNA, 25 bp, Artificial sequence
  SiRNA target sequence
gtaaagaaaataatattttatttca

SEQ ID NO: 165833 - DNA, 25 bp, Artificial sequence
  SiRNA target sequence
taaagaaaataatattttatttcac

SEQ ID NO: 165834 - DNA, 25 bp, Artificial sequence
  SiRNA target sequence
aaagaaaataatattttatttcaca

SEQ ID NO: 165835 - DNA, 25 bp, Artificial sequence
  SiRNA target sequence
aagaaaataatattttatttcacac

SEQ ID NO: 165836 - DNA, 25 bp, Artificial sequence
  SiRNA target sequence
agaaaataatattttatttcacact

SEQ ID NO: 165837 - DNA, 25 bp, Artificial sequence
  SiRNA target sequence
gaaaataatattttatttcacactg

SEQ ID NO: 165838 - DNA, 25 bp, Artificial sequence
  SiRNA target sequence
aaaataatattttatttcacactga

SEQ ID NO: 165839 - DNA, 25 bp, Artificial sequence
  SiRNA target sequence
aaataatattttatttcacactgat

SEQ ID NO: 165840 - DNA, 25 bp, Artificial sequence
  SiRNA target sequence
aataatattttatttcacactgatg

SEQ ID NO: 165841 - DNA, 25 bp, Artificial sequence
  SiRNA target sequence
ataatattttatttcacactgatgc

SEQ ID NO: 165842 - DNA, 25 bp, Artificial sequence
  SiRNA target sequence
taatattttatttcacactgatgca

SEQ ID NO: 165843 - DNA, 25 bp, Artificial sequence
  SiRNA target sequence
aatattttatttcacactgatgcag

SEQ ID NO: 165844 - DNA, 25 bp, Artificial sequence
  SiRNA target sequence
atattttatttcacactgatgcagc

SEQ ID NO: 165845 - DNA, 25 bp, Artificial sequence
  SiRNA target sequence
tattttatttcacactgatgcagca

SEQ ID NO: 165846 - DNA, 25 bp, Artificial sequence
  SiRNA target sequence
attttatttcacactgatgcagcac

SEQ ID NO: 165847 - DNA, 25 bp, Artificial sequence
  SiRNA target sequence
ttttatttcacactgatgcagcaca

SEQ ID NO: 165848 - DNA, 25 bp, Artificial sequence
  SiRNA target sequence
tttatttcacactgatgcagcacaa

SEQ ID NO: 165849 - DNA, 25 bp, Artificial sequence
  SiRNA target sequence
ttatttcacactgatgcagcacaag

SEQ ID NO: 165850 - DNA, 25 bp, Artificial sequence
  SiRNA target sequence
tatttcacactgatgcagcacaagc

SEQ ID NO: 165851 - DNA, 25 bp, Artificial sequence
  SiRNA target sequence
atttcacactgatgcagcacaagca

SEQ ID NO: 165852 - DNA, 25 bp, Artificial sequence
  SiRNA target sequence
tttcacactgatgcagcacaagcag

SEQ ID NO: 165853 - DNA, 25 bp, Artificial sequence
  SiRNA target sequence
ttcacactgatgcagcacaagcagt

SEQ ID NO: 165854 - DNA, 25 bp, Artificial sequence
  SiRNA target sequence
tcacactgatgcagcacaagcagtt

SEQ ID NO: 165855 - DNA, 25 bp, Artificial sequence
  SiRNA target sequence
cacactgatgcagcacaagcagttg

SEQ ID NO: 165856 - DNA, 25 bp, Artificial sequence
  SiRNA target sequence
acactgatgcagcacaagcagttgg

SEQ ID NO: 165857 - DNA, 25 bp, Artificial sequence
  SiRNA target sequence
cactgatgcagcacaagcagttggt

SEQ ID NO: 165858 - DNA, 25 bp, Artificial sequence
  SiRNA target sequence
actgatgcagcacaagcagttggta

SEQ ID NO: 165859 - DNA, 25 bp, Artificial sequence
  SiRNA target sequence
ctgatgcagcacaagcagttggtaa

SEQ ID NO: 165860 - DNA, 25 bp, Artificial sequence
  SiRNA target sequence
tgatgcagcacaagcagttggtaat

SEQ ID NO: 165861 - DNA, 25 bp, Artificial sequence
  SiRNA target sequence
gatgcagcacaagcagttggtaata

SEQ ID NO: 165862 - DNA, 25 bp, Artificial sequence
  SiRNA target sequence
atgcagcacaagcagttggtaatat

SEQ ID NO: 165863 - DNA, 25 bp, Artificial sequence
  SiRNA target sequence
tgcagcacaagcagttggtaatata

SEQ ID NO: 165864 - DNA, 25 bp, Artificial sequence
  SiRNA target sequence
gcagcacaagcagttggtaatatag

SEQ ID NO: 165865 - DNA, 25 bp, Artificial sequence
  SiRNA target sequence
cagcacaagcagttggtaatataga

SEQ ID NO: 165866 - DNA, 25 bp, Artificial sequence
  SiRNA target sequence
agcacaagcagttggtaatatagat

SEQ ID NO: 165867 - DNA, 25 bp, Artificial sequence
  SiRNA target sequence
gcacaagcagttggtaatatagata

SEQ ID NO: 165868 - DNA, 25 bp, Artificial sequence
  SiRNA target sequence
cacaagcagttggtaatatagatat

SEQ ID NO: 165869 - DNA, 25 bp, Artificial sequence
  SiRNA target sequence
acaagcagttggtaatatagatatt

SEQ ID NO: 165870 - DNA, 25 bp, Artificial sequence
  SiRNA target sequence
caagcagttggtaatatagatattg

SEQ ID NO: 165871 - DNA, 25 bp, Artificial sequence
  SiRNA target sequence
aagcagttggtaatatagatattga

SEQ ID NO: 165872 - DNA, 25 bp, Artificial sequence
  SiRNA target sequence
agcagttggtaatatagatattgat

SEQ ID NO: 165873 - DNA, 25 bp, Artificial sequence
  SiRNA target sequence
gcagttggtaatatagatattgatg

SEQ ID NO: 165874 - DNA, 25 bp, Artificial sequence
  SiRNA target sequence
cagttggtaatatagatattgatgt

SEQ ID NO: 165875 - DNA, 25 bp, Artificial sequence
  SiRNA target sequence
agttggtaatatagatattgatgtc

SEQ ID NO: 165876 - DNA, 25 bp, Artificial sequence
  SiRNA target sequence
gttggtaatatagatattgatgtca

SEQ ID NO: 165877 - DNA, 25 bp, Artificial sequence
  SiRNA target sequence
ttggtaatatagatattgatgtcaa

SEQ ID NO: 165878 - DNA, 25 bp, Artificial sequence
  SiRNA target sequence
tggtaatatagatattgatgtcaat

SEQ ID NO: 165879 - DNA, 25 bp, Artificial sequence
  SiRNA target sequence
ggtaatatagatattgatgtcaatg

SEQ ID NO: 165880 - DNA, 25 bp, Artificial sequence
  SiRNA target sequence
gtaatatagatattgatgtcaatga

SEQ ID NO: 165881 - DNA, 25 bp, Artificial sequence
  SiRNA target sequence
taatatagatattgatgtcaatgat

SEQ ID NO: 165882 - DNA, 25 bp, Artificial sequence
  SiRNA target sequence
aatatagatattgatgtcaatgata

SEQ ID NO: 165883 - DNA, 25 bp, Artificial sequence
  SiRNA target sequence
atatagatattgatgtcaatgatat

SEQ ID NO: 165884 - DNA, 25 bp, Artificial sequence
  SiRNA target sequence
tatagatattgatgtcaatgatatg

SEQ ID NO: 165885 - DNA, 25 bp, Artificial sequence
  SiRNA target sequence
atagatattgatgtcaatgatatga

SEQ ID NO: 165886 - DNA, 25 bp, Artificial sequence
  SiRNA target sequence
tagatattgatgtcaatgatatgaa

SEQ ID NO: 165887 - DNA, 25 bp, Artificial sequence
  SiRNA target sequence
agatattgatgtcaatgatatgaat

SEQ ID NO: 165888 - DNA, 25 bp, Artificial sequence
  SiRNA target sequence
gatattgatgtcaatgatatgaata

SEQ ID NO: 165889 - DNA, 25 bp, Artificial sequence
  SiRNA target sequence
atattgatgtcaatgatatgaatat

SEQ ID NO: 165890 - DNA, 25 bp, Artificial sequence
  SiRNA target sequence
tattgatgtcaatgatatgaatatt

SEQ ID NO: 165891 - DNA, 25 bp, Artificial sequence
  SiRNA target sequence
attgatgtcaatgatatgaatattg

SEQ ID NO: 165892 - DNA, 25 bp, Artificial sequence
  SiRNA target sequence
ttgatgtcaatgatatgaatattga

SEQ ID NO: 165893 - DNA, 25 bp, Artificial sequence
  SiRNA target sequence
tgatgtcaatgatatgaatattgat

SEQ ID NO: 165894 - DNA, 25 bp, Artificial sequence
  SiRNA target sequence
gatgtcaatgatatgaatattgatt

SEQ ID NO: 165895 - DNA, 25 bp, Artificial sequence
  SiRNA target sequence
atgtcaatgatatgaatattgattt

SEQ ID NO: 165896 - DNA, 25 bp, Artificial sequence
  SiRNA target sequence
tgtcaatgatatgaatattgattta

SEQ ID NO: 165897 - DNA, 25 bp, Artificial sequence
  SiRNA target sequence
gtcaatgatatgaatattgatttac

SEQ ID NO: 165898 - DNA, 25 bp, Artificial sequence
  SiRNA target sequence
tcaatgatatgaatattgatttact

SEQ ID NO: 165899 - DNA, 25 bp, Artificial sequence
  SiRNA target sequence
caatgatatgaatattgatttacta

SEQ ID NO: 165900 - DNA, 25 bp, Artificial sequence
  SiRNA target sequence
aatgatatgaatattgatttactaa

SEQ ID NO: 165901 - DNA, 25 bp, Artificial sequence
  SiRNA target sequence
atgatatgaatattgatttactaag

SEQ ID NO: 165902 - DNA, 25 bp, Artificial sequence
  SiRNA target sequence
tgatatgaatattgatttactaagt

SEQ ID NO: 165903 - DNA, 25 bp, Artificial sequence
  SiRNA target sequence
gatatgaatattgatttactaagtt

SEQ ID NO: 165904 - DNA, 25 bp, Artificial sequence
  SiRNA target sequence
atatgaatattgatttactaagttt

SEQ ID NO: 165905 - DNA, 25 bp, Artificial sequence
  SiRNA target sequence
tatgaatattgatttactaagttta

SEQ ID NO: 165906 - DNA, 25 bp, Artificial sequence
  SiRNA target sequence
atgaatattgatttactaagtttat

SEQ ID NO: 165907 - DNA, 25 bp, Artificial sequence
  SiRNA target sequence
tgaatattgatttactaagtttatc

SEQ ID NO: 165908 - DNA, 25 bp, Artificial sequence
  SiRNA target sequence
gaatattgatttactaagtttatca

SEQ ID NO: 165909 - DNA, 25 bp, Artificial sequence
  SiRNA target sequence
aatattgatttactaagtttatcaa

SEQ ID NO: 165910 - DNA, 25 bp, Artificial sequence
  SiRNA target sequence
atattgatttactaagtttatcaag

SEQ ID NO: 165911 - DNA, 25 bp, Artificial sequence
  SiRNA target sequence
tattgatttactaagtttatcaagt

SEQ ID NO: 165912 - DNA, 25 bp, Artificial sequence
  SiRNA target sequence
attgatttactaagtttatcaagtc

SEQ ID NO: 165913 - DNA, 25 bp, Artificial sequence
  SiRNA target sequence
ttgatttactaagtttatcaagtca

SEQ ID NO: 165914 - DNA, 25 bp, Artificial sequence
  SiRNA target sequence
tgatttactaagtttatcaagtcat

SEQ ID NO: 165915 - DNA, 25 bp, Artificial sequence
  SiRNA target sequence
gatttactaagtttatcaagtcata

SEQ ID NO: 165916 - DNA, 25 bp, Artificial sequence
  SiRNA target sequence
atttactaagtttatcaagtcataa

SEQ ID NO: 165917 - DNA, 25 bp, Artificial sequence
  SiRNA target sequence
tttactaagtttatcaagtcataaa

SEQ ID NO: 165918 - DNA, 25 bp, Artificial sequence
  SiRNA target sequence
ttactaagtttatcaagtcataaaa

SEQ ID NO: 165919 - DNA, 25 bp, Artificial sequence
  SiRNA target sequence
tactaagtttatcaagtcataaaat

SEQ ID NO: 165920 - DNA, 25 bp, Artificial sequence
  SiRNA target sequence
actaagtttatcaagtcataaaatt

SEQ ID NO: 165921 - DNA, 25 bp, Artificial sequence
  SiRNA target sequence
ctaagtttatcaagtcataaaattt

SEQ ID NO: 165922 - DNA, 25 bp, Artificial sequence
  SiRNA target sequence
taagtttatcaagtcataaaattta

SEQ ID NO: 165923 - DNA, 25 bp, Artificial sequence
  SiRNA target sequence
aagtttatcaagtcataaaatttat

SEQ ID NO: 165924 - DNA, 25 bp, Artificial sequence
  SiRNA target sequence
agtttatcaagtcataaaatttatg

SEQ ID NO: 165925 - DNA, 25 bp, Artificial sequence
  SiRNA target sequence
gtttatcaagtcataaaatttatgg

SEQ ID NO: 165926 - DNA, 25 bp, Artificial sequence
  SiRNA target sequence
tttatcaagtcataaaatttatggt

SEQ ID NO: 165927 - DNA, 25 bp, Artificial sequence
  SiRNA target sequence
ttatcaagtcataaaatttatggtc

SEQ ID NO: 165928 - DNA, 25 bp, Artificial sequence
  SiRNA target sequence
tatcaagtcataaaatttatggtcc

SEQ ID NO: 165929 - DNA, 25 bp, Artificial sequence
  SiRNA target sequence
atcaagtcataaaatttatggtcca

SEQ ID NO: 165930 - DNA, 25 bp, Artificial sequence
  SiRNA target sequence
tcaagtcataaaatttatggtccaa

SEQ ID NO: 165931 - DNA, 25 bp, Artificial sequence
  SiRNA target sequence
caagtcataaaatttatggtccaaa

SEQ ID NO: 165932 - DNA, 25 bp, Artificial sequence
  SiRNA target sequence
aagtcataaaatttatggtccaaaa

SEQ ID NO: 165933 - DNA, 25 bp, Artificial sequence
  SiRNA target sequence
agtcataaaatttatggtccaaaag

SEQ ID NO: 165934 - DNA, 25 bp, Artificial sequence
  SiRNA target sequence
gtcataaaatttatggtccaaaagg

SEQ ID NO: 165935 - DNA, 25 bp, Artificial sequence
  SiRNA target sequence
tcataaaatttatggtccaaaaggt

SEQ ID NO: 165936 - DNA, 25 bp, Artificial sequence
  SiRNA target sequence
cataaaatttatggtccaaaaggtg

SEQ ID NO: 165937 - DNA, 25 bp, Artificial sequence
  SiRNA target sequence
ataaaatttatggtccaaaaggtgt

SEQ ID NO: 165938 - DNA, 25 bp, Artificial sequence
  SiRNA target sequence
taaaatttatggtccaaaaggtgtt

SEQ ID NO: 165939 - DNA, 25 bp, Artificial sequence
  SiRNA target sequence
aaaatttatggtccaaaaggtgttg

SEQ ID NO: 165940 - DNA, 25 bp, Artificial sequence
  SiRNA target sequence
aaatttatggtccaaaaggtgttgg

SEQ ID NO: 165941 - DNA, 25 bp, Artificial sequence
  SiRNA target sequence
aatttatggtccaaaaggtgttggt

SEQ ID NO: 165942 - DNA, 25 bp, Artificial sequence
  SiRNA target sequence
atttatggtccaaaaggtgttggtg

SEQ ID NO: 165943 - DNA, 25 bp, Artificial sequence
  SiRNA target sequence
tttatggtccaaaaggtgttggtgc

SEQ ID NO: 165944 - DNA, 25 bp, Artificial sequence
  SiRNA target sequence
ttatggtccaaaaggtgttggtgcc

SEQ ID NO: 165945 - DNA, 25 bp, Artificial sequence
  SiRNA target sequence
tatggtccaaaaggtgttggtgcct

SEQ ID NO: 165946 - DNA, 25 bp, Artificial sequence
  SiRNA target sequence
atggtccaaaaggtgttggtgcctt

SEQ ID NO: 165947 - DNA, 25 bp, Artificial sequence
  SiRNA target sequence
tggtccaaaaggtgttggtgcctta

SEQ ID NO: 165948 - DNA, 25 bp, Artificial sequence
  SiRNA target sequence
ggtccaaaaggtgttggtgccttat

SEQ ID NO: 165949 - DNA, 25 bp, Artificial sequence
  SiRNA target sequence
gtccaaaaggtgttggtgccttata

SEQ ID NO: 165950 - DNA, 25 bp, Artificial sequence
  SiRNA target sequence
tccaaaaggtgttggtgccttatac

SEQ ID NO: 165951 - DNA, 25 bp, Artificial sequence
  SiRNA target sequence
ccaaaaggtgttggtgccttatacg

SEQ ID NO: 165952 - DNA, 25 bp, Artificial sequence
  SiRNA target sequence
caaaaggtgttggtgccttatacgt

SEQ ID NO: 165953 - DNA, 25 bp, Artificial sequence
  SiRNA target sequence
aaaaggtgttggtgccttatacgtc

SEQ ID NO: 165954 - DNA, 25 bp, Artificial sequence
  SiRNA target sequence
aaaggtgttggtgccttatacgtca

SEQ ID NO: 165955 - DNA, 25 bp, Artificial sequence
  SiRNA target sequence
aaggtgttggtgccttatacgtcag

SEQ ID NO: 165956 - DNA, 25 bp, Artificial sequence
  SiRNA target sequence
aggtgttggtgccttatacgtcaga

SEQ ID NO: 165957 - DNA, 25 bp, Artificial sequence
  SiRNA target sequence
ggtgttggtgccttatacgtcagaa

SEQ ID NO: 165958 - DNA, 25 bp, Artificial sequence
  SiRNA target sequence
gtgttggtgccttatacgtcagaag

SEQ ID NO: 165959 - DNA, 25 bp, Artificial sequence
  SiRNA target sequence
tgttggtgccttatacgtcagaaga

SEQ ID NO: 165960 - DNA, 25 bp, Artificial sequence
  SiRNA target sequence
gttggtgccttatacgtcagaagaa

SEQ ID NO: 165961 - DNA, 25 bp, Artificial sequence
  SiRNA target sequence
ttggtgccttatacgtcagaagaag

SEQ ID NO: 165962 - DNA, 25 bp, Artificial sequence
  SiRNA target sequence
tggtgccttatacgtcagaagaagg

SEQ ID NO: 165963 - DNA, 25 bp, Artificial sequence
  SiRNA target sequence
ggtgccttatacgtcagaagaaggc

SEQ ID NO: 165964 - DNA, 25 bp, Artificial sequence
  SiRNA target sequence
gtgccttatacgtcagaagaaggcc

SEQ ID NO: 165965 - DNA, 25 bp, Artificial sequence
  SiRNA target sequence
tgccttatacgtcagaagaaggcct

SEQ ID NO: 165966 - DNA, 25 bp, Artificial sequence
  SiRNA target sequence
gccttatacgtcagaagaaggccta

SEQ ID NO: 165967 - DNA, 25 bp, Artificial sequence
  SiRNA target sequence
ccttatacgtcagaagaaggcctag

SEQ ID NO: 165968 - DNA, 25 bp, Artificial sequence
  SiRNA target sequence
cttatacgtcagaagaaggcctagg

SEQ ID NO: 165969 - DNA, 25 bp, Artificial sequence
  SiRNA target sequence
ttatacgtcagaagaaggcctaggg

SEQ ID NO: 165970 - DNA, 25 bp, Artificial sequence
  SiRNA target sequence
tatacgtcagaagaaggcctagggt

SEQ ID NO: 165971 - DNA, 25 bp, Artificial sequence
  SiRNA target sequence
atacgtcagaagaaggcctagggtg

SEQ ID NO: 165972 - DNA, 25 bp, Artificial sequence
  SiRNA target sequence
tacgtcagaagaaggcctagggtga

SEQ ID NO: 165973 - DNA, 25 bp, Artificial sequence
  SiRNA target sequence
acgtcagaagaaggcctagggtgag

SEQ ID NO: 165974 - DNA, 25 bp, Artificial sequence
  SiRNA target sequence
cgtcagaagaaggcctagggtgaga

SEQ ID NO: 165975 - DNA, 25 bp, Artificial sequence
  SiRNA target sequence
gtcagaagaaggcctagggtgagaa

SEQ ID NO: 165976 - DNA, 25 bp, Artificial sequence
  SiRNA target sequence
tcagaagaaggcctagggtgagaat

SEQ ID NO: 165977 - DNA, 25 bp, Artificial sequence
  SiRNA target sequence
cagaagaaggcctagggtgagaatg

SEQ ID NO: 165978 - DNA, 25 bp, Artificial sequence
  SiRNA target sequence
agaagaaggcctagggtgagaatgt

SEQ ID NO: 165979 - DNA, 25 bp, Artificial sequence
  SiRNA target sequence
gaagaaggcctagggtgagaatgtt

SEQ ID NO: 165980 - DNA, 25 bp, Artificial sequence
  SiRNA target sequence
aagaaggcctagggtgagaatgtta

SEQ ID NO: 165981 - DNA, 25 bp, Artificial sequence
  SiRNA target sequence
agaaggcctagggtgagaatgttac

SEQ ID NO: 165982 - DNA, 25 bp, Artificial sequence
  SiRNA target sequence
gaaggcctagggtgagaatgttacc

SEQ ID NO: 165983 - DNA, 25 bp, Artificial sequence
  SiRNA target sequence
aaggcctagggtgagaatgttacca

SEQ ID NO: 165984 - DNA, 25 bp, Artificial sequence
  SiRNA target sequence
aggcctagggtgagaatgttaccac

SEQ ID NO: 165985 - DNA, 25 bp, Artificial sequence
  SiRNA target sequence
ggcctagggtgagaatgttaccact

SEQ ID NO: 165986 - DNA, 25 bp, Artificial sequence
  SiRNA target sequence
gcctagggtgagaatgttaccactt

SEQ ID NO: 165987 - DNA, 25 bp, Artificial sequence
  SiRNA target sequence
cctagggtgagaatgttaccacttt

SEQ ID NO: 165988 - DNA, 25 bp, Artificial sequence
  SiRNA target sequence
ctagggtgagaatgttaccactttt

SEQ ID NO: 165989 - DNA, 25 bp, Artificial sequence
  SiRNA target sequence
tagggtgagaatgttaccacttttt

SEQ ID NO: 165990 - DNA, 25 bp, Artificial sequence
  SiRNA target sequence
agggtgagaatgttaccacttttta

SEQ ID NO: 165991 - DNA, 25 bp, Artificial sequence
  SiRNA target sequence
gggtgagaatgttaccactttttaa

SEQ ID NO: 165992 - DNA, 25 bp, Artificial sequence
  SiRNA target sequence
ggtgagaatgttaccactttttaat

SEQ ID NO: 165993 - DNA, 25 bp, Artificial sequence
  SiRNA target sequence
gtgagaatgttaccactttttaatg

SEQ ID NO: 165994 - DNA, 25 bp, Artificial sequence
  SiRNA target sequence
tgagaatgttaccactttttaatgg

SEQ ID NO: 165995 - DNA, 25 bp, Artificial sequence
  SiRNA target sequence
gagaatgttaccactttttaatggt

SEQ ID NO: 165996 - DNA, 25 bp, Artificial sequence
  SiRNA target sequence
agaatgttaccactttttaatggtg

SEQ ID NO: 165997 - DNA, 25 bp, Artificial sequence
  SiRNA target sequence
gaatgttaccactttttaatggtgg

SEQ ID NO: 165998 - DNA, 25 bp, Artificial sequence
  SiRNA target sequence
aatgttaccactttttaatggtggt

SEQ ID NO: 165999 - DNA, 25 bp, Artificial sequence
  SiRNA target sequence
atgttaccactttttaatggtggtg

SEQ ID NO: 166000 - DNA, 25 bp, Artificial sequence
  SiRNA target sequence
tgttaccactttttaatggtggtgg

SEQ ID NO: 166001 - DNA, 25 bp, Artificial sequence
  SiRNA target sequence
gttaccactttttaatggtggtgga

SEQ ID NO: 166002 - DNA, 25 bp, Artificial sequence
  SiRNA target sequence
ttaccactttttaatggtggtggac

SEQ ID NO: 166003 - DNA, 25 bp, Artificial sequence
  SiRNA target sequence
taccactttttaatggtggtggaca

SEQ ID NO: 166004 - DNA, 25 bp, Artificial sequence
  SiRNA target sequence
accactttttaatggtggtggacaa

SEQ ID NO: 166005 - DNA, 25 bp, Artificial sequence
  SiRNA target sequence
ccactttttaatggtggtggacaag

SEQ ID NO: 166006 - DNA, 25 bp, Artificial sequence
  SiRNA target sequence
cactttttaatggtggtggacaaga

SEQ ID NO: 166007 - DNA, 25 bp, Artificial sequence
  SiRNA target sequence
actttttaatggtggtggacaagaa

SEQ ID NO: 166008 - DNA, 25 bp, Artificial sequence
  SiRNA target sequence
ctttttaatggtggtggacaagaaa

SEQ ID NO: 166009 - DNA, 25 bp, Artificial sequence
  SiRNA target sequence
tttttaatggtggtggacaagaaag

SEQ ID NO: 166010 - DNA, 25 bp, Artificial sequence
  SiRNA target sequence
ttttaatggtggtggacaagaaaga

SEQ ID NO: 166011 - DNA, 25 bp, Artificial sequence
  SiRNA target sequence
tttaatggtggtggacaagaaagag

SEQ ID NO: 166012 - DNA, 25 bp, Artificial sequence
  SiRNA target sequence
ttaatggtggtggacaagaaagagg

SEQ ID NO: 166013 - DNA, 25 bp, Artificial sequence
  SiRNA target sequence
taatggtggtggacaagaaagagga

SEQ ID NO: 166014 - DNA, 25 bp, Artificial sequence
  SiRNA target sequence
aatggtggtggacaagaaagaggat

SEQ ID NO: 166015 - DNA, 25 bp, Artificial sequence
  SiRNA target sequence
atggtggtggacaagaaagaggatt

SEQ ID NO: 166016 - DNA, 25 bp, Artificial sequence
  SiRNA target sequence
tggtggtggacaagaaagaggatta

SEQ ID NO: 166017 - DNA, 25 bp, Artificial sequence
  SiRNA target sequence
ggtggtggacaagaaagaggattaa

SEQ ID NO: 166018 - DNA, 25 bp, Artificial sequence
  SiRNA target sequence
gtggtggacaagaaagaggattaag

SEQ ID NO: 166019 - DNA, 25 bp, Artificial sequence
  SiRNA target sequence
tggtggacaagaaagaggattaaga

SEQ ID NO: 166020 - DNA, 25 bp, Artificial sequence
  SiRNA target sequence
ggtggacaagaaagaggattaagaa

SEQ ID NO: 166021 - DNA, 25 bp, Artificial sequence
  SiRNA target sequence
gtggacaagaaagaggattaagaag

SEQ ID NO: 166022 - DNA, 25 bp, Artificial sequence
  SiRNA target sequence
tggacaagaaagaggattaagaagt

SEQ ID NO: 166023 - DNA, 25 bp, Artificial sequence
  SiRNA target sequence
ggacaagaaagaggattaagaagtg

SEQ ID NO: 166024 - DNA, 25 bp, Artificial sequence
  SiRNA target sequence
gacaagaaagaggattaagaagtgg

SEQ ID NO: 166025 - DNA, 25 bp, Artificial sequence
  SiRNA target sequence
acaagaaagaggattaagaagtggg

SEQ ID NO: 166026 - DNA, 25 bp, Artificial sequence
  SiRNA target sequence
caagaaagaggattaagaagtggga

SEQ ID NO: 166027 - DNA, 25 bp, Artificial sequence
  SiRNA target sequence
aagaaagaggattaagaagtgggac

SEQ ID NO: 166028 - DNA, 25 bp, Artificial sequence
  SiRNA target sequence
agaaagaggattaagaagtgggaca

SEQ ID NO: 166029 - DNA, 25 bp, Artificial sequence
  SiRNA target sequence
gaaagaggattaagaagtgggacaa

SEQ ID NO: 166030 - DNA, 25 bp, Artificial sequence
  SiRNA target sequence
aaagaggattaagaagtgggacaac

SEQ ID NO: 166031 - DNA, 25 bp, Artificial sequence
  SiRNA target sequence
aagaggattaagaagtgggacaact

SEQ ID NO: 166032 - DNA, 25 bp, Artificial sequence
  SiRNA target sequence
agaggattaagaagtgggacaactt

SEQ ID NO: 166033 - DNA, 25 bp, Artificial sequence
  SiRNA target sequence
gaggattaagaagtgggacaacttc

SEQ ID NO: 166034 - DNA, 25 bp, Artificial sequence
  SiRNA target sequence
aggattaagaagtgggacaacttct

SEQ ID NO: 166035 - DNA, 25 bp, Artificial sequence
  SiRNA target sequence
ggattaagaagtgggacaacttctc

SEQ ID NO: 166036 - DNA, 25 bp, Artificial sequence
  SiRNA target sequence
gattaagaagtgggacaacttctcc

SEQ ID NO: 166037 - DNA, 25 bp, Artificial sequence
  SiRNA target sequence
attaagaagtgggacaacttctcca

SEQ ID NO: 166038 - DNA, 25 bp, Artificial sequence
  SiRNA target sequence
ttaagaagtgggacaacttctccac

SEQ ID NO: 166039 - DNA, 25 bp, Artificial sequence
  SiRNA target sequence
taagaagtgggacaacttctccacc

SEQ ID NO: 166040 - DNA, 25 bp, Artificial sequence
  SiRNA target sequence
aagaagtgggacaacttctccacct

SEQ ID NO: 166041 - DNA, 25 bp, Artificial sequence
  SiRNA target sequence
agaagtgggacaacttctccacctt

SEQ ID NO: 166042 - DNA, 25 bp, Artificial sequence
  SiRNA target sequence
gaagtgggacaacttctccaccttt

SEQ ID NO: 166043 - DNA, 25 bp, Artificial sequence
  SiRNA target sequence
aagtgggacaacttctccaccttta

SEQ ID NO: 166044 - DNA, 25 bp, Artificial sequence
  SiRNA target sequence
agtgggacaacttctccacctttag

SEQ ID NO: 166045 - DNA, 25 bp, Artificial sequence
  SiRNA target sequence
gtgggacaacttctccacctttagt

SEQ ID NO: 166046 - DNA, 25 bp, Artificial sequence
  SiRNA target sequence
tgggacaacttctccacctttagtt

SEQ ID NO: 166047 - DNA, 25 bp, Artificial sequence
  SiRNA target sequence
gggacaacttctccacctttagttg

SEQ ID NO: 166048 - DNA, 25 bp, Artificial sequence
  SiRNA target sequence
ggacaacttctccacctttagttgt

SEQ ID NO: 166049 - DNA, 25 bp, Artificial sequence
  SiRNA target sequence
gacaacttctccacctttagttgtt

SEQ ID NO: 166050 - DNA, 25 bp, Artificial sequence
  SiRNA target sequence
acaacttctccacctttagttgttg

SEQ ID NO: 166051 - DNA, 25 bp, Artificial sequence
  SiRNA target sequence
caacttctccacctttagttgttgg

SEQ ID NO: 166052 - DNA, 25 bp, Artificial sequence
  SiRNA target sequence
aacttctccacctttagttgttgga

SEQ ID NO: 166053 - DNA, 25 bp, Artificial sequence
  SiRNA target sequence
acttctccacctttagttgttggat

SEQ ID NO: 166054 - DNA, 25 bp, Artificial sequence
  SiRNA target sequence
cttctccacctttagttgttggatt

SEQ ID NO: 166055 - DNA, 25 bp, Artificial sequence
  SiRNA target sequence
ttctccacctttagttgttggatta

SEQ ID NO: 166056 - DNA, 25 bp, Artificial sequence
  SiRNA target sequence
tctccacctttagttgttggattag

SEQ ID NO: 166057 - DNA, 25 bp, Artificial sequence
  SiRNA target sequence
ctccacctttagttgttggattagg

SEQ ID NO: 166058 - DNA, 25 bp, Artificial sequence
  SiRNA target sequence
tccacctttagttgttggattaggc

SEQ ID NO: 166059 - DNA, 25 bp, Artificial sequence
  SiRNA target sequence
ccacctttagttgttggattaggca

SEQ ID NO: 166060 - DNA, 25 bp, Artificial sequence
  SiRNA target sequence
cacctttagttgttggattaggcaa

SEQ ID NO: 166061 - DNA, 25 bp, Artificial sequence
  SiRNA target sequence
acctttagttgttggattaggcaaa

SEQ ID NO: 166062 - DNA, 25 bp, Artificial sequence
  SiRNA target sequence
cctttagttgttggattaggcaaag

SEQ ID NO: 166063 - DNA, 25 bp, Artificial sequence
  SiRNA target sequence
ctttagttgttggattaggcaaagc

SEQ ID NO: 166064 - DNA, 25 bp, Artificial sequence
  SiRNA target sequence
tttagttgttggattaggcaaagct

SEQ ID NO: 166065 - DNA, 25 bp, Artificial sequence
  SiRNA target sequence
ttagttgttggattaggcaaagctg

SEQ ID NO: 166066 - DNA, 25 bp, Artificial sequence
  SiRNA target sequence
tagttgttggattaggcaaagctgc

SEQ ID NO: 166067 - DNA, 25 bp, Artificial sequence
  SiRNA target sequence
agttgttggattaggcaaagctgct

SEQ ID NO: 166068 - DNA, 25 bp, Artificial sequence
  SiRNA target sequence
gttgttggattaggcaaagctgctg

SEQ ID NO: 166069 - DNA, 25 bp, Artificial sequence
  SiRNA target sequence
ttgttggattaggcaaagctgctga

SEQ ID NO: 166070 - DNA, 25 bp, Artificial sequence
  SiRNA target sequence
tgttggattaggcaaagctgctgag

SEQ ID NO: 166071 - DNA, 25 bp, Artificial sequence
  SiRNA target sequence
gttggattaggcaaagctgctgaga

SEQ ID NO: 166072 - DNA, 25 bp, Artificial sequence
  SiRNA target sequence
ttggattaggcaaagctgctgagat

SEQ ID NO: 166073 - DNA, 25 bp, Artificial sequence
  SiRNA target sequence
tggattaggcaaagctgctgagata

SEQ ID NO: 166074 - DNA, 25 bp, Artificial sequence
  SiRNA target sequence
ggattaggcaaagctgctgagatat

SEQ ID NO: 166075 - DNA, 25 bp, Artificial sequence
  SiRNA target sequence
gattaggcaaagctgctgagatatg

SEQ ID NO: 166076 - DNA, 25 bp, Artificial sequence
  SiRNA target sequence
attaggcaaagctgctgagatatgc

SEQ ID NO: 166077 - DNA, 25 bp, Artificial sequence
  SiRNA target sequence
ttaggcaaagctgctgagatatgct

SEQ ID NO: 166078 - DNA, 25 bp, Artificial sequence
  SiRNA target sequence
taggcaaagctgctgagatatgctc

SEQ ID NO: 166079 - DNA, 25 bp, Artificial sequence
  SiRNA target sequence
aggcaaagctgctgagatatgctct

SEQ ID NO: 166080 - DNA, 25 bp, Artificial sequence
  SiRNA target sequence
ggcaaagctgctgagatatgctctc

SEQ ID NO: 166081 - DNA, 25 bp, Artificial sequence
  SiRNA target sequence
gcaaagctgctgagatatgctctca

SEQ ID NO: 166082 - DNA, 25 bp, Artificial sequence
  SiRNA target sequence
caaagctgctgagatatgctctcag

SEQ ID NO: 166083 - DNA, 25 bp, Artificial sequence
  SiRNA target sequence
aaagctgctgagatatgctctcagg

SEQ ID NO: 166084 - DNA, 25 bp, Artificial sequence
  SiRNA target sequence
aagctgctgagatatgctctcagga

SEQ ID NO: 166085 - DNA, 25 bp, Artificial sequence
  SiRNA target sequence
agctgctgagatatgctctcaggag

SEQ ID NO: 166086 - DNA, 25 bp, Artificial sequence
  SiRNA target sequence
gctgctgagatatgctctcaggaga

SEQ ID NO: 166087 - DNA, 25 bp, Artificial sequence
  SiRNA target sequence
ctgctgagatatgctctcaggagat

SEQ ID NO: 166088 - DNA, 25 bp, Artificial sequence
  SiRNA target sequence
tgctgagatatgctctcaggagatg

SEQ ID NO: 166089 - DNA, 25 bp, Artificial sequence
  SiRNA target sequence
gctgagatatgctctcaggagatgc

SEQ ID NO: 166090 - DNA, 25 bp, Artificial sequence
  SiRNA target sequence
ctgagatatgctctcaggagatgcg

SEQ ID NO: 166091 - DNA, 25 bp, Artificial sequence
  SiRNA target sequence
tgagatatgctctcaggagatgcgt

SEQ ID NO: 166092 - DNA, 25 bp, Artificial sequence
  SiRNA target sequence
gagatatgctctcaggagatgcgta

SEQ ID NO: 166093 - DNA, 25 bp, Artificial sequence
  SiRNA target sequence
agatatgctctcaggagatgcgtaa

SEQ ID NO: 166094 - DNA, 25 bp, Artificial sequence
  SiRNA target sequence
gatatgctctcaggagatgcgtaag

SEQ ID NO: 166095 - DNA, 25 bp, Artificial sequence
  SiRNA target sequence
atatgctctcaggagatgcgtaagg

SEQ ID NO: 166096 - DNA, 25 bp, Artificial sequence
  SiRNA target sequence
tatgctctcaggagatgcgtaagga

SEQ ID NO: 166097 - DNA, 25 bp, Artificial sequence
  SiRNA target sequence
atgctctcaggagatgcgtaaggac

SEQ ID NO: 166098 - DNA, 25 bp, Artificial sequence
  SiRNA target sequence
tgctctcaggagatgcgtaaggact

SEQ ID NO: 166099 - DNA, 25 bp, Artificial sequence
  SiRNA target sequence
gctctcaggagatgcgtaaggacta

SEQ ID NO: 166100 - DNA, 25 bp, Artificial sequence
  SiRNA target sequence
ctctcaggagatgcgtaaggactat

SEQ ID NO: 166101 - DNA, 25 bp, Artificial sequence
  SiRNA target sequence
tctcaggagatgcgtaaggactatg

SEQ ID NO: 166102 - DNA, 25 bp, Artificial sequence
  SiRNA target sequence
ctcaggagatgcgtaaggactatga

SEQ ID NO: 166103 - DNA, 25 bp, Artificial sequence
  SiRNA target sequence
tcaggagatgcgtaaggactatgaa

SEQ ID NO: 166104 - DNA, 25 bp, Artificial sequence
  SiRNA target sequence
caggagatgcgtaaggactatgaat

SEQ ID NO: 166105 - DNA, 25 bp, Artificial sequence
  SiRNA target sequence
aggagatgcgtaaggactatgaata

SEQ ID NO: 166106 - DNA, 25 bp, Artificial sequence
  SiRNA target sequence
ggagatgcgtaaggactatgaatat

SEQ ID NO: 166107 - DNA, 25 bp, Artificial sequence
  SiRNA target sequence
gagatgcgtaaggactatgaatata

SEQ ID NO: 166108 - DNA, 25 bp, Artificial sequence
  SiRNA target sequence
agatgcgtaaggactatgaatatat

SEQ ID NO: 166109 - DNA, 25 bp, Artificial sequence
  SiRNA target sequence
gatgcgtaaggactatgaatatata

SEQ ID NO: 166110 - DNA, 25 bp, Artificial sequence
  SiRNA target sequence
atgcgtaaggactatgaatatatac

SEQ ID NO: 166111 - DNA, 25 bp, Artificial sequence
  SiRNA target sequence
tgcgtaaggactatgaatatataca

SEQ ID NO: 166112 - DNA, 25 bp, Artificial sequence
  SiRNA target sequence
gcgtaaggactatgaatatatacaa

SEQ ID NO: 166113 - DNA, 25 bp, Artificial sequence
  SiRNA target sequence
cgtaaggactatgaatatatacaaa

SEQ ID NO: 166114 - DNA, 25 bp, Artificial sequence
  SiRNA target sequence
gtaaggactatgaatatatacaaaa

SEQ ID NO: 166115 - DNA, 25 bp, Artificial sequence
  SiRNA target sequence
taaggactatgaatatatacaaaaa

SEQ ID NO: 166116 - DNA, 25 bp, Artificial sequence
  SiRNA target sequence
aaggactatgaatatatacaaaaat

SEQ ID NO: 166117 - DNA, 25 bp, Artificial sequence
  SiRNA target sequence
aggactatgaatatatacaaaaatt

SEQ ID NO: 166118 - DNA, 25 bp, Artificial sequence
  SiRNA target sequence
ggactatgaatatatacaaaaatta

SEQ ID NO: 166119 - DNA, 25 bp, Artificial sequence
  SiRNA target sequence
gactatgaatatatacaaaaattat

SEQ ID NO: 166120 - DNA, 25 bp, Artificial sequence
  SiRNA target sequence
actatgaatatatacaaaaattatc

SEQ ID NO: 166121 - DNA, 25 bp, Artificial sequence
  SiRNA target sequence
ctatgaatatatacaaaaattatcg

SEQ ID NO: 166122 - DNA, 25 bp, Artificial sequence
  SiRNA target sequence
tatgaatatatacaaaaattatcgg

SEQ ID NO: 166123 - DNA, 25 bp, Artificial sequence
  SiRNA target sequence
atgaatatatacaaaaattatcgga

SEQ ID NO: 166124 - DNA, 25 bp, Artificial sequence
  SiRNA target sequence
tgaatatatacaaaaattatcggat

SEQ ID NO: 166125 - DNA, 25 bp, Artificial sequence
  SiRNA target sequence
gaatatatacaaaaattatcggata

SEQ ID NO: 166126 - DNA, 25 bp, Artificial sequence
  SiRNA target sequence
aatatatacaaaaattatcggataa

SEQ ID NO: 166127 - DNA, 25 bp, Artificial sequence
  SiRNA target sequence
atatatacaaaaattatcggataaa

SEQ ID NO: 166128 - DNA, 25 bp, Artificial sequence
  SiRNA target sequence
tatatacaaaaattatcggataaac

SEQ ID NO: 166129 - DNA, 25 bp, Artificial sequence
  SiRNA target sequence
atatacaaaaattatcggataaact

SEQ ID NO: 166130 - DNA, 25 bp, Artificial sequence
  SiRNA target sequence
tatacaaaaattatcggataaacta

SEQ ID NO: 166131 - DNA, 25 bp, Artificial sequence
  SiRNA target sequence
atacaaaaattatcggataaactaa

SEQ ID NO: 166132 - DNA, 25 bp, Artificial sequence
  SiRNA target sequence
tacaaaaattatcggataaactaaa

SEQ ID NO: 166133 - DNA, 25 bp, Artificial sequence
  SiRNA target sequence
acaaaaattatcggataaactaaaa

SEQ ID NO: 166134 - DNA, 25 bp, Artificial sequence
  SiRNA target sequence
caaaaattatcggataaactaaaaa

SEQ ID NO: 166135 - DNA, 25 bp, Artificial sequence
  SiRNA target sequence
aaaaattatcggataaactaaaaaa

SEQ ID NO: 166136 - DNA, 25 bp, Artificial sequence
  SiRNA target sequence
aaaattatcggataaactaaaaaat

SEQ ID NO: 166137 - DNA, 25 bp, Artificial sequence
  SiRNA target sequence
aaattatcggataaactaaaaaatc

SEQ ID NO: 166138 - DNA, 25 bp, Artificial sequence
  SiRNA target sequence
aattatcggataaactaaaaaatcg

SEQ ID NO: 166139 - DNA, 25 bp, Artificial sequence
  SiRNA target sequence
attatcggataaactaaaaaatcgc

SEQ ID NO: 166140 - DNA, 25 bp, Artificial sequence
  SiRNA target sequence
ttatcggataaactaaaaaatcgca

SEQ ID NO: 166141 - DNA, 25 bp, Artificial sequence
  SiRNA target sequence
tatcggataaactaaaaaatcgcat

SEQ ID NO: 166142 - DNA, 25 bp, Artificial sequence
  SiRNA target sequence
atcggataaactaaaaaatcgcatc

SEQ ID NO: 166143 - DNA, 25 bp, Artificial sequence
  SiRNA target sequence
tcggataaactaaaaaatcgcatca

SEQ ID NO: 166144 - DNA, 25 bp, Artificial sequence
  SiRNA target sequence
cggataaactaaaaaatcgcatcaa

SEQ ID NO: 166145 - DNA, 25 bp, Artificial sequence
  SiRNA target sequence
ggataaactaaaaaatcgcatcaaa

SEQ ID NO: 166146 - DNA, 25 bp, Artificial sequence
  SiRNA target sequence
gataaactaaaaaatcgcatcaaaa

SEQ ID NO: 166147 - DNA, 25 bp, Artificial sequence
  SiRNA target sequence
ataaactaaaaaatcgcatcaaaac

SEQ ID NO: 166148 - DNA, 25 bp, Artificial sequence
  SiRNA target sequence
taaactaaaaaatcgcatcaaaacg

SEQ ID NO: 166149 - DNA, 25 bp, Artificial sequence
  SiRNA target sequence
aaactaaaaaatcgcatcaaaacga

SEQ ID NO: 166150 - DNA, 25 bp, Artificial sequence
  SiRNA target sequence
aactaaaaaatcgcatcaaaacgaa

SEQ ID NO: 166151 - DNA, 25 bp, Artificial sequence
  SiRNA target sequence
actaaaaaatcgcatcaaaacgaat

SEQ ID NO: 166152 - DNA, 25 bp, Artificial sequence
  SiRNA target sequence
ctaaaaaatcgcatcaaaacgaatg

SEQ ID NO: 166153 - DNA, 25 bp, Artificial sequence
  SiRNA target sequence
taaaaaatcgcatcaaaacgaatgt

SEQ ID NO: 166154 - DNA, 25 bp, Artificial sequence
  SiRNA target sequence
aaaaaatcgcatcaaaacgaatgta

SEQ ID NO: 166155 - DNA, 25 bp, Artificial sequence
  SiRNA target sequence
aaaaatcgcatcaaaacgaatgtag

SEQ ID NO: 166156 - DNA, 25 bp, Artificial sequence
  SiRNA target sequence
aaaatcgcatcaaaacgaatgtaga

SEQ ID NO: 166157 - DNA, 25 bp, Artificial sequence
  SiRNA target sequence
aaatcgcatcaaaacgaatgtagaa

SEQ ID NO: 166158 - DNA, 25 bp, Artificial sequence
  SiRNA target sequence
aatcgcatcaaaacgaatgtagaaa

SEQ ID NO: 166159 - DNA, 25 bp, Artificial sequence
  SiRNA target sequence
atcgcatcaaaacgaatgtagaaaa

SEQ ID NO: 166160 - DNA, 25 bp, Artificial sequence
  SiRNA target sequence
tcgcatcaaaacgaatgtagaaaat

SEQ ID NO: 166161 - DNA, 25 bp, Artificial sequence
  SiRNA target sequence
cgcatcaaaacgaatgtagaaaatg

SEQ ID NO: 166162 - DNA, 25 bp, Artificial sequence
  SiRNA target sequence
gcatcaaaacgaatgtagaaaatgt

SEQ ID NO: 166163 - DNA, 25 bp, Artificial sequence
  SiRNA target sequence
catcaaaacgaatgtagaaaatgtt

SEQ ID NO: 166164 - DNA, 25 bp, Artificial sequence
  SiRNA target sequence
atcaaaacgaatgtagaaaatgttg

SEQ ID NO: 166165 - DNA, 25 bp, Artificial sequence
  SiRNA target sequence
tcaaaacgaatgtagaaaatgttgt

SEQ ID NO: 166166 - DNA, 25 bp, Artificial sequence
  SiRNA target sequence
caaaacgaatgtagaaaatgttgtt

SEQ ID NO: 166167 - DNA, 25 bp, Artificial sequence
  SiRNA target sequence
aaaacgaatgtagaaaatgttgtta

SEQ ID NO: 166168 - DNA, 25 bp, Artificial sequence
  SiRNA target sequence
aaacgaatgtagaaaatgttgttat

SEQ ID NO: 166169 - DNA, 25 bp, Artificial sequence
  SiRNA target sequence
aacgaatgtagaaaatgttgttatt

SEQ ID NO: 166170 - DNA, 25 bp, Artificial sequence
  SiRNA target sequence
acgaatgtagaaaatgttgttatta

SEQ ID NO: 166171 - DNA, 25 bp, Artificial sequence
  SiRNA target sequence
cgaatgtagaaaatgttgttattaa

SEQ ID NO: 166172 - DNA, 25 bp, Artificial sequence
  SiRNA target sequence
gaatgtagaaaatgttgttattaac

SEQ ID NO: 166173 - DNA, 25 bp, Artificial sequence
  SiRNA target sequence
aatgtagaaaatgttgttattaacg

SEQ ID NO: 166174 - DNA, 25 bp, Artificial sequence
  SiRNA target sequence
atgtagaaaatgttgttattaacgg

SEQ ID NO: 166175 - DNA, 25 bp, Artificial sequence
  SiRNA target sequence
tgtagaaaatgttgttattaacggc

SEQ ID NO: 166176 - DNA, 25 bp, Artificial sequence
  SiRNA target sequence
gtagaaaatgttgttattaacggcg

SEQ ID NO: 166177 - DNA, 25 bp, Artificial sequence
  SiRNA target sequence
tagaaaatgttgttattaacggcga

SEQ ID NO: 166178 - DNA, 25 bp, Artificial sequence
  SiRNA target sequence
agaaaatgttgttattaacggcgat

SEQ ID NO: 166179 - DNA, 25 bp, Artificial sequence
  SiRNA target sequence
gaaaatgttgttattaacggcgatg

SEQ ID NO: 166180 - DNA, 25 bp, Artificial sequence
  SiRNA target sequence
aaaatgttgttattaacggcgatga

SEQ ID NO: 166181 - DNA, 25 bp, Artificial sequence
  SiRNA target sequence
aaatgttgttattaacggcgatgat

SEQ ID NO: 166182 - DNA, 25 bp, Artificial sequence
  SiRNA target sequence
aatgttgttattaacggcgatgatt

SEQ ID NO: 166183 - DNA, 25 bp, Artificial sequence
  SiRNA target sequence
atgttgttattaacggcgatgattc

SEQ ID NO: 166184 - DNA, 25 bp, Artificial sequence
  SiRNA target sequence
tgttgttattaacggcgatgattct

SEQ ID NO: 166185 - DNA, 25 bp, Artificial sequence
  SiRNA target sequence
gttgttattaacggcgatgattcta

SEQ ID NO: 166186 - DNA, 25 bp, Artificial sequence
  SiRNA target sequence
ttgttattaacggcgatgattctaa

SEQ ID NO: 166187 - DNA, 25 bp, Artificial sequence
  SiRNA target sequence
tgttattaacggcgatgattctaag

SEQ ID NO: 166188 - DNA, 25 bp, Artificial sequence
  SiRNA target sequence
gttattaacggcgatgattctaaga

SEQ ID NO: 166189 - DNA, 25 bp, Artificial sequence
  SiRNA target sequence
ttattaacggcgatgattctaagac

SEQ ID NO: 166190 - DNA, 25 bp, Artificial sequence
  SiRNA target sequence
tattaacggcgatgattctaagact

SEQ ID NO: 166191 - DNA, 25 bp, Artificial sequence
  SiRNA target sequence
attaacggcgatgattctaagactt

SEQ ID NO: 166192 - DNA, 25 bp, Artificial sequence
  SiRNA target sequence
ttaacggcgatgattctaagacttt

SEQ ID NO: 166193 - DNA, 25 bp, Artificial sequence
  SiRNA target sequence
taacggcgatgattctaagactttt

SEQ ID NO: 166194 - DNA, 25 bp, Artificial sequence
  SiRNA target sequence
aacggcgatgattctaagacttttc

SEQ ID NO: 166195 - DNA, 25 bp, Artificial sequence
  SiRNA target sequence
acggcgatgattctaagacttttcc

SEQ ID NO: 166196 - DNA, 25 bp, Artificial sequence
  SiRNA target sequence
cggcgatgattctaagacttttcct

SEQ ID NO: 166197 - DNA, 25 bp, Artificial sequence
  SiRNA target sequence
ggcgatgattctaagacttttcctg

SEQ ID NO: 166198 - DNA, 25 bp, Artificial sequence
  SiRNA target sequence
gcgatgattctaagacttttcctgg

SEQ ID NO: 166199 - DNA, 25 bp, Artificial sequence
  SiRNA target sequence
cgatgattctaagacttttcctggc

SEQ ID NO: 166200 - DNA, 25 bp, Artificial sequence
  SiRNA target sequence
gatgattctaagacttttcctggct

SEQ ID NO: 166201 - DNA, 25 bp, Artificial sequence
  SiRNA target sequence
atgattctaagacttttcctggctg

SEQ ID NO: 166202 - DNA, 25 bp, Artificial sequence
  SiRNA target sequence
tgattctaagacttttcctggctgt

SEQ ID NO: 166203 - DNA, 25 bp, Artificial sequence
  SiRNA target sequence
gattctaagacttttcctggctgtc

SEQ ID NO: 166204 - DNA, 25 bp, Artificial sequence
  SiRNA target sequence
attctaagacttttcctggctgtct

SEQ ID NO: 166205 - DNA, 25 bp, Artificial sequence
  SiRNA target sequence
ttctaagacttttcctggctgtctc

SEQ ID NO: 166206 - DNA, 25 bp, Artificial sequence
  SiRNA target sequence
tctaagacttttcctggctgtctca

SEQ ID NO: 166207 - DNA, 25 bp, Artificial sequence
  SiRNA target sequence
ctaagacttttcctggctgtctcaa

SEQ ID NO: 166208 - DNA, 25 bp, Artificial sequence
  SiRNA target sequence
taagacttttcctggctgtctcaat

SEQ ID NO: 166209 - DNA, 25 bp, Artificial sequence
  SiRNA target sequence
aagacttttcctggctgtctcaata

SEQ ID NO: 166210 - DNA, 25 bp, Artificial sequence
  SiRNA target sequence
agacttttcctggctgtctcaatat

SEQ ID NO: 166211 - DNA, 25 bp, Artificial sequence
  SiRNA target sequence
gacttttcctggctgtctcaatatt

SEQ ID NO: 166212 - DNA, 25 bp, Artificial sequence
  SiRNA target sequence
acttttcctggctgtctcaatattt

SEQ ID NO: 166213 - DNA, 25 bp, Artificial sequence
  SiRNA target sequence
cttttcctggctgtctcaatatttc

SEQ ID NO: 166214 - DNA, 25 bp, Artificial sequence
  SiRNA target sequence
ttttcctggctgtctcaatatttct

SEQ ID NO: 166215 - DNA, 25 bp, Artificial sequence
  SiRNA target sequence
tttcctggctgtctcaatatttctt

SEQ ID NO: 166216 - DNA, 25 bp, Artificial sequence
  SiRNA target sequence
ttcctggctgtctcaatatttcttt

SEQ ID NO: 166217 - DNA, 25 bp, Artificial sequence
  SiRNA target sequence
tcctggctgtctcaatatttctttt

SEQ ID NO: 166218 - DNA, 25 bp, Artificial sequence
  SiRNA target sequence
cctggctgtctcaatatttcttttc

SEQ ID NO: 166219 - DNA, 25 bp, Artificial sequence
  SiRNA target sequence
ctggctgtctcaatatttcttttcc

SEQ ID NO: 166220 - DNA, 25 bp, Artificial sequence
  SiRNA target sequence
tggctgtctcaatatttcttttcca

SEQ ID NO: 166221 - DNA, 25 bp, Artificial sequence
  SiRNA target sequence
ggctgtctcaatatttcttttccat

SEQ ID NO: 166222 - DNA, 25 bp, Artificial sequence
  SiRNA target sequence
gctgtctcaatatttcttttccata

SEQ ID NO: 166223 - DNA, 25 bp, Artificial sequence
  SiRNA target sequence
ctgtctcaatatttcttttccatat

SEQ ID NO: 166224 - DNA, 25 bp, Artificial sequence
  SiRNA target sequence
tgtctcaatatttcttttccatatg

SEQ ID NO: 166225 - DNA, 25 bp, Artificial sequence
  SiRNA target sequence
gtctcaatatttcttttccatatgt

SEQ ID NO: 166226 - DNA, 25 bp, Artificial sequence
  SiRNA target sequence
tctcaatatttcttttccatatgta

SEQ ID NO: 166227 - DNA, 25 bp, Artificial sequence
  SiRNA target sequence
ctcaatatttcttttccatatgtag

SEQ ID NO: 166228 - DNA, 25 bp, Artificial sequence
  SiRNA target sequence
tcaatatttcttttccatatgtaga

SEQ ID NO: 166229 - DNA, 25 bp, Artificial sequence
  SiRNA target sequence
caatatttcttttccatatgtagaa

SEQ ID NO: 166230 - DNA, 25 bp, Artificial sequence
  SiRNA target sequence
aatatttcttttccatatgtagaag

SEQ ID NO: 166231 - DNA, 25 bp, Artificial sequence
  SiRNA target sequence
atatttcttttccatatgtagaagg

SEQ ID NO: 166232 - DNA, 25 bp, Artificial sequence
  SiRNA target sequence
tatttcttttccatatgtagaaggt

SEQ ID NO: 166233 - DNA, 25 bp, Artificial sequence
  SiRNA target sequence
atttcttttccatatgtagaaggtg

SEQ ID NO: 166234 - DNA, 25 bp, Artificial sequence
  SiRNA target sequence
tttcttttccatatgtagaaggtga

SEQ ID NO: 166235 - DNA, 25 bp, Artificial sequence
  SiRNA target sequence
ttcttttccatatgtagaaggtgaa

SEQ ID NO: 166236 - DNA, 25 bp, Artificial sequence
  SiRNA target sequence
tcttttccatatgtagaaggtgaag

SEQ ID NO: 166237 - DNA, 25 bp, Artificial sequence
  SiRNA target sequence
cttttccatatgtagaaggtgaagg

SEQ ID NO: 166238 - DNA, 25 bp, Artificial sequence
  SiRNA target sequence
ttttccatatgtagaaggtgaaggg

SEQ ID NO: 166239 - DNA, 25 bp, Artificial sequence
  SiRNA target sequence
tttccatatgtagaaggtgaagggc

SEQ ID NO: 166240 - DNA, 25 bp, Artificial sequence
  SiRNA target sequence
ttccatatgtagaaggtgaagggct

SEQ ID NO: 166241 - DNA, 25 bp, Artificial sequence
  SiRNA target sequence
tccatatgtagaaggtgaagggctt

SEQ ID NO: 166242 - DNA, 25 bp, Artificial sequence
  SiRNA target sequence
ccatatgtagaaggtgaagggctta

SEQ ID NO: 166243 - DNA, 25 bp, Artificial sequence
  SiRNA target sequence
catatgtagaaggtgaagggcttat

SEQ ID NO: 166244 - DNA, 25 bp, Artificial sequence
  SiRNA target sequence
atatgtagaaggtgaagggcttatg

SEQ ID NO: 166245 - DNA, 25 bp, Artificial sequence
  SiRNA target sequence
tatgtagaaggtgaagggcttatga

SEQ ID NO: 166246 - DNA, 25 bp, Artificial sequence
  SiRNA target sequence
atgtagaaggtgaagggcttatgat

SEQ ID NO: 166247 - DNA, 25 bp, Artificial sequence
  SiRNA target sequence
tgtagaaggtgaagggcttatgatg

SEQ ID NO: 166248 - DNA, 25 bp, Artificial sequence
  SiRNA target sequence
gtagaaggtgaagggcttatgatga

SEQ ID NO: 166249 - DNA, 25 bp, Artificial sequence
  SiRNA target sequence
tagaaggtgaagggcttatgatgaa

SEQ ID NO: 166250 - DNA, 25 bp, Artificial sequence
  SiRNA target sequence
agaaggtgaagggcttatgatgaat

SEQ ID NO: 166251 - DNA, 25 bp, Artificial sequence
  SiRNA target sequence
gaaggtgaagggcttatgatgaata

SEQ ID NO: 166252 - DNA, 25 bp, Artificial sequence
  SiRNA target sequence
aaggtgaagggcttatgatgaatat

SEQ ID NO: 166253 - DNA, 25 bp, Artificial sequence
  SiRNA target sequence
aggtgaagggcttatgatgaatatt

SEQ ID NO: 166254 - DNA, 25 bp, Artificial sequence
  SiRNA target sequence
ggtgaagggcttatgatgaatatta

SEQ ID NO: 166255 - DNA, 25 bp, Artificial sequence
  SiRNA target sequence
gtgaagggcttatgatgaatattaa

SEQ ID NO: 166256 - DNA, 25 bp, Artificial sequence
  SiRNA target sequence
tgaagggcttatgatgaatattaag

SEQ ID NO: 166257 - DNA, 25 bp, Artificial sequence
  SiRNA target sequence
gaagggcttatgatgaatattaagg

SEQ ID NO: 166258 - DNA, 25 bp, Artificial sequence
  SiRNA target sequence
aagggcttatgatgaatattaagga

SEQ ID NO: 166259 - DNA, 25 bp, Artificial sequence
  SiRNA target sequence
agggcttatgatgaatattaaggat

SEQ ID NO: 166260 - DNA, 25 bp, Artificial sequence
  SiRNA target sequence
gggcttatgatgaatattaaggata

SEQ ID NO: 166261 - DNA, 25 bp, Artificial sequence
  SiRNA target sequence
ggcttatgatgaatattaaggatat

SEQ ID NO: 166262 - DNA, 25 bp, Artificial sequence
  SiRNA target sequence
gcttatgatgaatattaaggatatt

SEQ ID NO: 166263 - DNA, 25 bp, Artificial sequence
  SiRNA target sequence
cttatgatgaatattaaggatattg

SEQ ID NO: 166264 - DNA, 25 bp, Artificial sequence
  SiRNA target sequence
ttatgatgaatattaaggatattgc

SEQ ID NO: 166265 - DNA, 25 bp, Artificial sequence
  SiRNA target sequence
tatgatgaatattaaggatattgct

SEQ ID NO: 166266 - DNA, 25 bp, Artificial sequence
  SiRNA target sequence
atgatgaatattaaggatattgctg

SEQ ID NO: 166267 - DNA, 25 bp, Artificial sequence
  SiRNA target sequence
tgatgaatattaaggatattgctgt

SEQ ID NO: 166268 - DNA, 25 bp, Artificial sequence
  SiRNA target sequence
gatgaatattaaggatattgctgtt

SEQ ID NO: 166269 - DNA, 25 bp, Artificial sequence
  SiRNA target sequence
atgaatattaaggatattgctgtta

SEQ ID NO: 166270 - DNA, 25 bp, Artificial sequence
  SiRNA target sequence
tgaatattaaggatattgctgttag

SEQ ID NO: 166271 - DNA, 25 bp, Artificial sequence
  SiRNA target sequence
gaatattaaggatattgctgttagt

SEQ ID NO: 166272 - DNA, 25 bp, Artificial sequence
  SiRNA target sequence
aatattaaggatattgctgttagta

SEQ ID NO: 166273 - DNA, 25 bp, Artificial sequence
  SiRNA target sequence
atattaaggatattgctgttagtag

SEQ ID NO: 166274 - DNA, 25 bp, Artificial sequence
  SiRNA target sequence
tattaaggatattgctgttagtagt

SEQ ID NO: 166275 - DNA, 25 bp, Artificial sequence
  SiRNA target sequence
attaaggatattgctgttagtagtg

SEQ ID NO: 166276 - DNA, 25 bp, Artificial sequence
  SiRNA target sequence
ttaaggatattgctgttagtagtgg

SEQ ID NO: 166277 - DNA, 25 bp, Artificial sequence
  SiRNA target sequence
taaggatattgctgttagtagtgga

SEQ ID NO: 166278 - DNA, 25 bp, Artificial sequence
  SiRNA target sequence
aaggatattgctgttagtagtggaa

SEQ ID NO: 166279 - DNA, 25 bp, Artificial sequence
  SiRNA target sequence
aggatattgctgttagtagtggaag

SEQ ID NO: 166280 - DNA, 25 bp, Artificial sequence
  SiRNA target sequence
ggatattgctgttagtagtggaagt

SEQ ID NO: 166281 - DNA, 25 bp, Artificial sequence
  SiRNA target sequence
gatattgctgttagtagtggaagtg

SEQ ID NO: 166282 - DNA, 25 bp, Artificial sequence
  SiRNA target sequence
atattgctgttagtagtggaagtgc

SEQ ID NO: 166283 - DNA, 25 bp, Artificial sequence
  SiRNA target sequence
tattgctgttagtagtggaagtgct

SEQ ID NO: 166284 - DNA, 25 bp, Artificial sequence
  SiRNA target sequence
attgctgttagtagtggaagtgctt

SEQ ID NO: 166285 - DNA, 25 bp, Artificial sequence
  SiRNA target sequence
ttgctgttagtagtggaagtgcttg

SEQ ID NO: 166286 - DNA, 25 bp, Artificial sequence
  SiRNA target sequence
tgctgttagtagtggaagtgcttgc

SEQ ID NO: 166287 - DNA, 25 bp, Artificial sequence
  SiRNA target sequence
gctgttagtagtggaagtgcttgca

SEQ ID NO: 166288 - DNA, 25 bp, Artificial sequence
  SiRNA target sequence
ctgttagtagtggaagtgcttgcac

SEQ ID NO: 166289 - DNA, 25 bp, Artificial sequence
  SiRNA target sequence
tgttagtagtggaagtgcttgcact

SEQ ID NO: 166290 - DNA, 25 bp, Artificial sequence
  SiRNA target sequence
gttagtagtggaagtgcttgcactt

SEQ ID NO: 166291 - DNA, 25 bp, Artificial sequence
  SiRNA target sequence
ttagtagtggaagtgcttgcacttc

SEQ ID NO: 166292 - DNA, 25 bp, Artificial sequence
  SiRNA target sequence
tagtagtggaagtgcttgcacttca

SEQ ID NO: 166293 - DNA, 25 bp, Artificial sequence
  SiRNA target sequence
agtagtggaagtgcttgcacttcat

SEQ ID NO: 166294 - DNA, 25 bp, Artificial sequence
  SiRNA target sequence
gtagtggaagtgcttgcacttcatc

SEQ ID NO: 166295 - DNA, 25 bp, Artificial sequence
  SiRNA target sequence
tagtggaagtgcttgcacttcatca

SEQ ID NO: 166296 - DNA, 25 bp, Artificial sequence
  SiRNA target sequence
agtggaagtgcttgcacttcatcat

SEQ ID NO: 166297 - DNA, 25 bp, Artificial sequence
  SiRNA target sequence
gtggaagtgcttgcacttcatcatc

SEQ ID NO: 166298 - DNA, 25 bp, Artificial sequence
  SiRNA target sequence
tggaagtgcttgcacttcatcatct

SEQ ID NO: 166299 - DNA, 25 bp, Artificial sequence
  SiRNA target sequence
ggaagtgcttgcacttcatcatctt

SEQ ID NO: 166300 - DNA, 25 bp, Artificial sequence
  SiRNA target sequence
gaagtgcttgcacttcatcatcttt

SEQ ID NO: 166301 - DNA, 25 bp, Artificial sequence
  SiRNA target sequence
aagtgcttgcacttcatcatcttta

SEQ ID NO: 166302 - DNA, 25 bp, Artificial sequence
  SiRNA target sequence
agtgcttgcacttcatcatctttag

SEQ ID NO: 166303 - DNA, 25 bp, Artificial sequence
  SiRNA target sequence
gtgcttgcacttcatcatctttaga

SEQ ID NO: 166304 - DNA, 25 bp, Artificial sequence
  SiRNA target sequence
tgcttgcacttcatcatctttagaa

SEQ ID NO: 166305 - DNA, 25 bp, Artificial sequence
  SiRNA target sequence
gcttgcacttcatcatctttagaac

SEQ ID NO: 166306 - DNA, 25 bp, Artificial sequence
  SiRNA target sequence
cttgcacttcatcatctttagaacc

SEQ ID NO: 166307 - DNA, 25 bp, Artificial sequence
  SiRNA target sequence
ttgcacttcatcatctttagaaccc

SEQ ID NO: 166308 - DNA, 25 bp, Artificial sequence
  SiRNA target sequence
tgcacttcatcatctttagaaccct

SEQ ID NO: 166309 - DNA, 25 bp, Artificial sequence
  SiRNA target sequence
gcacttcatcatctttagaaccctc

SEQ ID NO: 166310 - DNA, 25 bp, Artificial sequence
  SiRNA target sequence
cacttcatcatctttagaaccctct

SEQ ID NO: 166311 - DNA, 25 bp, Artificial sequence
  SiRNA target sequence
acttcatcatctttagaaccctctt

SEQ ID NO: 166312 - DNA, 25 bp, Artificial sequence
  SiRNA target sequence
cttcatcatctttagaaccctctta

SEQ ID NO: 166313 - DNA, 25 bp, Artificial sequence
  SiRNA target sequence
ttcatcatctttagaaccctcttat

SEQ ID NO: 166314 - DNA, 25 bp, Artificial sequence
  SiRNA target sequence
tcatcatctttagaaccctcttatg

SEQ ID NO: 166315 - DNA, 25 bp, Artificial sequence
  SiRNA target sequence
catcatctttagaaccctcttatgt

SEQ ID NO: 166316 - DNA, 25 bp, Artificial sequence
  SiRNA target sequence
atcatctttagaaccctcttatgtt

SEQ ID NO: 166317 - DNA, 25 bp, Artificial sequence
  SiRNA target sequence
tcatctttagaaccctcttatgttt

SEQ ID NO: 166318 - DNA, 25 bp, Artificial sequence
  SiRNA target sequence
catctttagaaccctcttatgtttt

SEQ ID NO: 166319 - DNA, 25 bp, Artificial sequence
  SiRNA target sequence
atctttagaaccctcttatgttttg

SEQ ID NO: 166320 - DNA, 25 bp, Artificial sequence
  SiRNA target sequence
tctttagaaccctcttatgttttgc

SEQ ID NO: 166321 - DNA, 25 bp, Artificial sequence
  SiRNA target sequence
ctttagaaccctcttatgttttgcg

SEQ ID NO: 166322 - DNA, 25 bp, Artificial sequence
  SiRNA target sequence
tttagaaccctcttatgttttgcga

SEQ ID NO: 166323 - DNA, 25 bp, Artificial sequence
  SiRNA target sequence
ttagaaccctcttatgttttgcgag

SEQ ID NO: 166324 - DNA, 25 bp, Artificial sequence
  SiRNA target sequence
tagaaccctcttatgttttgcgagc

SEQ ID NO: 166325 - DNA, 25 bp, Artificial sequence
  SiRNA target sequence
agaaccctcttatgttttgcgagct

SEQ ID NO: 166326 - DNA, 25 bp, Artificial sequence
  SiRNA target sequence
gaaccctcttatgttttgcgagctt

SEQ ID NO: 166327 - DNA, 25 bp, Artificial sequence
  SiRNA target sequence
aaccctcttatgttttgcgagcttt

SEQ ID NO: 166328 - DNA, 25 bp, Artificial sequence
  SiRNA target sequence
accctcttatgttttgcgagcttta

SEQ ID NO: 166329 - DNA, 25 bp, Artificial sequence
  SiRNA target sequence
ccctcttatgttttgcgagctttag

SEQ ID NO: 166330 - DNA, 25 bp, Artificial sequence
  SiRNA target sequence
cctcttatgttttgcgagctttagg

SEQ ID NO: 166331 - DNA, 25 bp, Artificial sequence
  SiRNA target sequence
ctcttatgttttgcgagctttaggc

SEQ ID NO: 166332 - DNA, 25 bp, Artificial sequence
  SiRNA target sequence
tcttatgttttgcgagctttaggca

SEQ ID NO: 166333 - DNA, 25 bp, Artificial sequence
  SiRNA target sequence
cttatgttttgcgagctttaggcaa

SEQ ID NO: 166334 - DNA, 25 bp, Artificial sequence
  SiRNA target sequence
ttatgttttgcgagctttaggcaaa

SEQ ID NO: 166335 - DNA, 25 bp, Artificial sequence
  SiRNA target sequence
tatgttttgcgagctttaggcaaaa

SEQ ID NO: 166336 - DNA, 25 bp, Artificial sequence
  SiRNA target sequence
atgttttgcgagctttaggcaaaaa

SEQ ID NO: 166337 - DNA, 25 bp, Artificial sequence
  SiRNA target sequence
tgttttgcgagctttaggcaaaaat

SEQ ID NO: 166338 - DNA, 25 bp, Artificial sequence
  SiRNA target sequence
gttttgcgagctttaggcaaaaatg

SEQ ID NO: 166339 - DNA, 25 bp, Artificial sequence
  SiRNA target sequence
ttttgcgagctttaggcaaaaatga

SEQ ID NO: 166340 - DNA, 25 bp, Artificial sequence
  SiRNA target sequence
tttgcgagctttaggcaaaaatgat

SEQ ID NO: 166341 - DNA, 25 bp, Artificial sequence
  SiRNA target sequence
ttgcgagctttaggcaaaaatgatg

SEQ ID NO: 166342 - DNA, 25 bp, Artificial sequence
  SiRNA target sequence
tgcgagctttaggcaaaaatgatga

SEQ ID NO: 166343 - DNA, 25 bp, Artificial sequence
  SiRNA target sequence
gcgagctttaggcaaaaatgatgat

SEQ ID NO: 166344 - DNA, 25 bp, Artificial sequence
  SiRNA target sequence
cgagctttaggcaaaaatgatgatc

SEQ ID NO: 166345 - DNA, 25 bp, Artificial sequence
  SiRNA target sequence
gagctttaggcaaaaatgatgatct

SEQ ID NO: 166346 - DNA, 25 bp, Artificial sequence
  SiRNA target sequence
agctttaggcaaaaatgatgatctt

SEQ ID NO: 166347 - DNA, 25 bp, Artificial sequence
  SiRNA target sequence
gctttaggcaaaaatgatgatcttg

SEQ ID NO: 166348 - DNA, 25 bp, Artificial sequence
  SiRNA target sequence
ctttaggcaaaaatgatgatcttgc

SEQ ID NO: 166349 - DNA, 25 bp, Artificial sequence
  SiRNA target sequence
tttaggcaaaaatgatgatcttgcg

SEQ ID NO: 166350 - DNA, 25 bp, Artificial sequence
  SiRNA target sequence
ttaggcaaaaatgatgatcttgcgc

SEQ ID NO: 166351 - DNA, 25 bp, Artificial sequence
  SiRNA target sequence
taggcaaaaatgatgatcttgcgca

SEQ ID NO: 166352 - DNA, 25 bp, Artificial sequence
  SiRNA target sequence
aggcaaaaatgatgatcttgcgcat

SEQ ID NO: 166353 - DNA, 25 bp, Artificial sequence
  SiRNA target sequence
ggcaaaaatgatgatcttgcgcatt

SEQ ID NO: 166354 - DNA, 25 bp, Artificial sequence
  SiRNA target sequence
gcaaaaatgatgatcttgcgcattc

SEQ ID NO: 166355 - DNA, 25 bp, Artificial sequence
  SiRNA target sequence
caaaaatgatgatcttgcgcattct

SEQ ID NO: 166356 - DNA, 25 bp, Artificial sequence
  SiRNA target sequence
aaaaatgatgatcttgcgcattctt

SEQ ID NO: 166357 - DNA, 25 bp, Artificial sequence
  SiRNA target sequence
aaaatgatgatcttgcgcattcttc

SEQ ID NO: 166358 - DNA, 25 bp, Artificial sequence
  SiRNA target sequence
aaatgatgatcttgcgcattcttct

SEQ ID NO: 166359 - DNA, 25 bp, Artificial sequence
  SiRNA target sequence
aatgatgatcttgcgcattcttcta

SEQ ID NO: 166360 - DNA, 25 bp, Artificial sequence
  SiRNA target sequence
atgatgatcttgcgcattcttctat

SEQ ID NO: 166361 - DNA, 25 bp, Artificial sequence
  SiRNA target sequence
tgatgatcttgcgcattcttctata

SEQ ID NO: 166362 - DNA, 25 bp, Artificial sequence
  SiRNA target sequence
gatgatcttgcgcattcttctataa

SEQ ID NO: 166363 - DNA, 25 bp, Artificial sequence
  SiRNA target sequence
atgatcttgcgcattcttctataag

SEQ ID NO: 166364 - DNA, 25 bp, Artificial sequence
  SiRNA target sequence
tgatcttgcgcattcttctataaga

SEQ ID NO: 166365 - DNA, 25 bp, Artificial sequence
  SiRNA target sequence
gatcttgcgcattcttctataagat

SEQ ID NO: 166366 - DNA, 25 bp, Artificial sequence
  SiRNA target sequence
atcttgcgcattcttctataagatt

SEQ ID NO: 166367 - DNA, 25 bp, Artificial sequence
  SiRNA target sequence
tcttgcgcattcttctataagattt

SEQ ID NO: 166368 - DNA, 25 bp, Artificial sequence
  SiRNA target sequence
cttgcgcattcttctataagatttg

SEQ ID NO: 166369 - DNA, 25 bp, Artificial sequence
  SiRNA target sequence
ttgcgcattcttctataagatttgg

SEQ ID NO: 166370 - DNA, 25 bp, Artificial sequence
  SiRNA target sequence
tgcgcattcttctataagatttgga

SEQ ID NO: 166371 - DNA, 25 bp, Artificial sequence
  SiRNA target sequence
gcgcattcttctataagatttggaa

SEQ ID NO: 166372 - DNA, 25 bp, Artificial sequence
  SiRNA target sequence
cgcattcttctataagatttggaat

SEQ ID NO: 166373 - DNA, 25 bp, Artificial sequence
  SiRNA target sequence
gcattcttctataagatttggaata

SEQ ID NO: 166374 - DNA, 25 bp, Artificial sequence
  SiRNA target sequence
cattcttctataagatttggaataa

SEQ ID NO: 166375 - DNA, 25 bp, Artificial sequence
  SiRNA target sequence
attcttctataagatttggaataaa

SEQ ID NO: 166376 - DNA, 25 bp, Artificial sequence
  SiRNA target sequence
ttcttctataagatttggaataaat

SEQ ID NO: 166377 - DNA, 25 bp, Artificial sequence
  SiRNA target sequence
tcttctataagatttggaataaata

SEQ ID NO: 166378 - DNA, 25 bp, Artificial sequence
  SiRNA target sequence
cttctataagatttggaataaataa

SEQ ID NO: 166379 - DNA, 25 bp, Artificial sequence
  SiRNA target sequence
ttctataagatttggaataaataag

SEQ ID NO: 166380 - DNA, 25 bp, Artificial sequence
  SiRNA target sequence
tctataagatttggaataaataagt

SEQ ID NO: 166381 - DNA, 25 bp, Artificial sequence
  SiRNA target sequence
ctataagatttggaataaataagtt

SEQ ID NO: 166382 - DNA, 25 bp, Artificial sequence
  SiRNA target sequence
tataagatttggaataaataagttt

SEQ ID NO: 166383 - DNA, 25 bp, Artificial sequence
  SiRNA target sequence
ataagatttggaataaataagttta

SEQ ID NO: 166384 - DNA, 25 bp, Artificial sequence
  SiRNA target sequence
taagatttggaataaataagtttac

SEQ ID NO: 166385 - DNA, 25 bp, Artificial sequence
  SiRNA target sequence
aagatttggaataaataagtttaca

SEQ ID NO: 166386 - DNA, 25 bp, Artificial sequence
  SiRNA target sequence
agatttggaataaataagtttacaa

SEQ ID NO: 166387 - DNA, 25 bp, Artificial sequence
  SiRNA target sequence
gatttggaataaataagtttacaac

SEQ ID NO: 166388 - DNA, 25 bp, Artificial sequence
  SiRNA target sequence
atttggaataaataagtttacaact

SEQ ID NO: 166389 - DNA, 25 bp, Artificial sequence
  SiRNA target sequence
tttggaataaataagtttacaactg

SEQ ID NO: 166390 - DNA, 25 bp, Artificial sequence
  SiRNA target sequence
ttggaataaataagtttacaactga

SEQ ID NO: 166391 - DNA, 25 bp, Artificial sequence
  SiRNA target sequence
tggaataaataagtttacaactgaa

SEQ ID NO: 166392 - DNA, 25 bp, Artificial sequence
  SiRNA target sequence
ggaataaataagtttacaactgaag

SEQ ID NO: 166393 - DNA, 25 bp, Artificial sequence
  SiRNA target sequence
gaataaataagtttacaactgaaga

SEQ ID NO: 166394 - DNA, 25 bp, Artificial sequence
  SiRNA target sequence
aataaataagtttacaactgaagaa

SEQ ID NO: 166395 - DNA, 25 bp, Artificial sequence
  SiRNA target sequence
ataaataagtttacaactgaagaag

SEQ ID NO: 166396 - DNA, 25 bp, Artificial sequence
  SiRNA target sequence
taaataagtttacaactgaagaaga

SEQ ID NO: 166397 - DNA, 25 bp, Artificial sequence
  SiRNA target sequence
aaataagtttacaactgaagaagaa

SEQ ID NO: 166398 - DNA, 25 bp, Artificial sequence
  SiRNA target sequence
aataagtttacaactgaagaagaaa

SEQ ID NO: 166399 - DNA, 25 bp, Artificial sequence
  SiRNA target sequence
ataagtttacaactgaagaagaaat

SEQ ID NO: 166400 - DNA, 25 bp, Artificial sequence
  SiRNA target sequence
taagtttacaactgaagaagaaatc

SEQ ID NO: 166401 - DNA, 25 bp, Artificial sequence
  SiRNA target sequence
aagtttacaactgaagaagaaatca

SEQ ID NO: 166402 - DNA, 25 bp, Artificial sequence
  SiRNA target sequence
agtttacaactgaagaagaaatcaa

SEQ ID NO: 166403 - DNA, 25 bp, Artificial sequence
  SiRNA target sequence
gtttacaactgaagaagaaatcaat

SEQ ID NO: 166404 - DNA, 25 bp, Artificial sequence
  SiRNA target sequence
tttacaactgaagaagaaatcaata

SEQ ID NO: 166405 - DNA, 25 bp, Artificial sequence
  SiRNA target sequence
ttacaactgaagaagaaatcaataa

SEQ ID NO: 166406 - DNA, 25 bp, Artificial sequence
  SiRNA target sequence
tacaactgaagaagaaatcaataaa

SEQ ID NO: 166407 - DNA, 25 bp, Artificial sequence
  SiRNA target sequence
acaactgaagaagaaatcaataaag

SEQ ID NO: 166408 - DNA, 25 bp, Artificial sequence
  SiRNA target sequence
caactgaagaagaaatcaataaagt

SEQ ID NO: 166409 - DNA, 25 bp, Artificial sequence
  SiRNA target sequence
aactgaagaagaaatcaataaagta

SEQ ID NO: 166410 - DNA, 25 bp, Artificial sequence
  SiRNA target sequence
actgaagaagaaatcaataaagtat

SEQ ID NO: 166411 - DNA, 25 bp, Artificial sequence
  SiRNA target sequence
ctgaagaagaaatcaataaagtatc

SEQ ID NO: 166412 - DNA, 25 bp, Artificial sequence
  SiRNA target sequence
tgaagaagaaatcaataaagtatct

SEQ ID NO: 166413 - DNA, 25 bp, Artificial sequence
  SiRNA target sequence
gaagaagaaatcaataaagtatcta

SEQ ID NO: 166414 - DNA, 25 bp, Artificial sequence
  SiRNA target sequence
aagaagaaatcaataaagtatctag

SEQ ID NO: 166415 - DNA, 25 bp, Artificial sequence
  SiRNA target sequence
agaagaaatcaataaagtatctagt

SEQ ID NO: 166416 - DNA, 25 bp, Artificial sequence
  SiRNA target sequence
gaagaaatcaataaagtatctagtg

SEQ ID NO: 166417 - DNA, 25 bp, Artificial sequence
  SiRNA target sequence
aagaaatcaataaagtatctagtga

SEQ ID NO: 166418 - DNA, 25 bp, Artificial sequence
  SiRNA target sequence
agaaatcaataaagtatctagtgat

SEQ ID NO: 166419 - DNA, 25 bp, Artificial sequence
  SiRNA target sequence
gaaatcaataaagtatctagtgata

SEQ ID NO: 166420 - DNA, 25 bp, Artificial sequence
  SiRNA target sequence
aaatcaataaagtatctagtgatac

SEQ ID NO: 166421 - DNA, 25 bp, Artificial sequence
  SiRNA target sequence
aatcaataaagtatctagtgataca

SEQ ID NO: 166422 - DNA, 25 bp, Artificial sequence
  SiRNA target sequence
atcaataaagtatctagtgatacaa

SEQ ID NO: 166423 - DNA, 25 bp, Artificial sequence
  SiRNA target sequence
tcaataaagtatctagtgatacaat

SEQ ID NO: 166424 - DNA, 25 bp, Artificial sequence
  SiRNA target sequence
caataaagtatctagtgatacaatt

SEQ ID NO: 166425 - DNA, 25 bp, Artificial sequence
  SiRNA target sequence
aataaagtatctagtgatacaatta

SEQ ID NO: 166426 - DNA, 25 bp, Artificial sequence
  SiRNA target sequence
ataaagtatctagtgatacaattaa

SEQ ID NO: 166427 - DNA, 25 bp, Artificial sequence
  SiRNA target sequence
taaagtatctagtgatacaattaaa

SEQ ID NO: 166428 - DNA, 25 bp, Artificial sequence
  SiRNA target sequence
aaagtatctagtgatacaattaaag

SEQ ID NO: 166429 - DNA, 25 bp, Artificial sequence
  SiRNA target sequence
aagtatctagtgatacaattaaagc

SEQ ID NO: 166430 - DNA, 25 bp, Artificial sequence
  SiRNA target sequence
agtatctagtgatacaattaaagct

SEQ ID NO: 166431 - DNA, 25 bp, Artificial sequence
  SiRNA target sequence
gtatctagtgatacaattaaagctg

SEQ ID NO: 166432 - DNA, 25 bp, Artificial sequence
  SiRNA target sequence
tatctagtgatacaattaaagctgt

SEQ ID NO: 166433 - DNA, 25 bp, Artificial sequence
  SiRNA target sequence
atctagtgatacaattaaagctgtt

SEQ ID NO: 166434 - DNA, 25 bp, Artificial sequence
  SiRNA target sequence
tctagtgatacaattaaagctgtta

SEQ ID NO: 166435 - DNA, 25 bp, Artificial sequence
  SiRNA target sequence
ctagtgatacaattaaagctgttaa

SEQ ID NO: 166436 - DNA, 25 bp, Artificial sequence
  SiRNA target sequence
tagtgatacaattaaagctgttaat

SEQ ID NO: 166437 - DNA, 25 bp, Artificial sequence
  SiRNA target sequence
agtgatacaattaaagctgttaata

SEQ ID NO: 166438 - DNA, 25 bp, Artificial sequence
  SiRNA target sequence
gtgatacaattaaagctgttaataa

SEQ ID NO: 166439 - DNA, 25 bp, Artificial sequence
  SiRNA target sequence
tgatacaattaaagctgttaataag

SEQ ID NO: 166440 - DNA, 25 bp, Artificial sequence
  SiRNA target sequence
gatacaattaaagctgttaataagt

SEQ ID NO: 166441 - DNA, 25 bp, Artificial sequence
  SiRNA target sequence
atacaattaaagctgttaataagtt

SEQ ID NO: 166442 - DNA, 25 bp, Artificial sequence
  SiRNA target sequence
tacaattaaagctgttaataagtta

SEQ ID NO: 166443 - DNA, 25 bp, Artificial sequence
  SiRNA target sequence
acaattaaagctgttaataagttaa

SEQ ID NO: 166444 - DNA, 25 bp, Artificial sequence
  SiRNA target sequence
caattaaagctgttaataagttaag

SEQ ID NO: 166445 - DNA, 25 bp, Artificial sequence
  SiRNA target sequence
aattaaagctgttaataagttaaga

SEQ ID NO: 166446 - DNA, 25 bp, Artificial sequence
  SiRNA target sequence
attaaagctgttaataagttaagag

SEQ ID NO: 166447 - DNA, 25 bp, Artificial sequence
  SiRNA target sequence
ttaaagctgttaataagttaagaga

SEQ ID NO: 166448 - DNA, 25 bp, Artificial sequence
  SiRNA target sequence
taaagctgttaataagttaagagat

SEQ ID NO: 166449 - DNA, 25 bp, Artificial sequence
  SiRNA target sequence
aaagctgttaataagttaagagata

SEQ ID NO: 166450 - DNA, 25 bp, Artificial sequence
  SiRNA target sequence
aagctgttaataagttaagagatat

SEQ ID NO: 166451 - DNA, 25 bp, Artificial sequence
  SiRNA target sequence
agctgttaataagttaagagatatg

SEQ ID NO: 166452 - DNA, 25 bp, Artificial sequence
  SiRNA target sequence
gctgttaataagttaagagatatgt

SEQ ID NO: 166453 - DNA, 25 bp, Artificial sequence
  SiRNA target sequence
ctgttaataagttaagagatatgtc

SEQ ID NO: 166454 - DNA, 25 bp, Artificial sequence
  SiRNA target sequence
tgttaataagttaagagatatgtct

SEQ ID NO: 166455 - DNA, 25 bp, Artificial sequence
  SiRNA target sequence
gttaataagttaagagatatgtctc

SEQ ID NO: 166456 - DNA, 25 bp, Artificial sequence
  SiRNA target sequence
ttaataagttaagagatatgtctcc

SEQ ID NO: 166457 - DNA, 25 bp, Artificial sequence
  SiRNA target sequence
taataagttaagagatatgtctcct

SEQ ID NO: 166458 - DNA, 25 bp, Artificial sequence
  SiRNA target sequence
aataagttaagagatatgtctcctt

SEQ ID NO: 166459 - DNA, 25 bp, Artificial sequence
  SiRNA target sequence
ataagttaagagatatgtctccttt

SEQ ID NO: 166460 - DNA, 25 bp, Artificial sequence
  SiRNA target sequence
taagttaagagatatgtctccttta

SEQ ID NO: 166461 - DNA, 25 bp, Artificial sequence
  SiRNA target sequence
aagttaagagatatgtctcctttat

SEQ ID NO: 166462 - DNA, 25 bp, Artificial sequence
  SiRNA target sequence
agttaagagatatgtctcctttata

SEQ ID NO: 166463 - DNA, 25 bp, Artificial sequence
  SiRNA target sequence
gttaagagatatgtctcctttatat

SEQ ID NO: 166464 - DNA, 25 bp, Artificial sequence
  SiRNA target sequence
ttaagagatatgtctcctttatatg

SEQ ID NO: 166465 - DNA, 25 bp, Artificial sequence
  SiRNA target sequence
taagagatatgtctcctttatatga

SEQ ID NO: 166466 - DNA, 25 bp, Artificial sequence
  SiRNA target sequence
aagagatatgtctcctttatatgaa

SEQ ID NO: 166467 - DNA, 25 bp, Artificial sequence
  SiRNA target sequence
agagatatgtctcctttatatgaaa

SEQ ID NO: 166468 - DNA, 25 bp, Artificial sequence
  SiRNA target sequence
gagatatgtctcctttatatgaaat

SEQ ID NO: 166469 - DNA, 25 bp, Artificial sequence
  SiRNA target sequence
agatatgtctcctttatatgaaatg

SEQ ID NO: 166470 - DNA, 25 bp, Artificial sequence
  SiRNA target sequence
gatatgtctcctttatatgaaatgg

SEQ ID NO: 166471 - DNA, 25 bp, Artificial sequence
  SiRNA target sequence
atatgtctcctttatatgaaatggt

SEQ ID NO: 166472 - DNA, 25 bp, Artificial sequence
  SiRNA target sequence
tatgtctcctttatatgaaatggtc

SEQ ID NO: 166473 - DNA, 25 bp, Artificial sequence
  SiRNA target sequence
atgtctcctttatatgaaatggtca

SEQ ID NO: 166474 - DNA, 25 bp, Artificial sequence
  SiRNA target sequence
tgtctcctttatatgaaatggtcaa

SEQ ID NO: 166475 - DNA, 25 bp, Artificial sequence
  SiRNA target sequence
gtctcctttatatgaaatggtcaaa

SEQ ID NO: 166476 - DNA, 25 bp, Artificial sequence
  SiRNA target sequence
tctcctttatatgaaatggtcaaag

SEQ ID NO: 166477 - DNA, 25 bp, Artificial sequence
  SiRNA target sequence
ctcctttatatgaaatggtcaaaga

SEQ ID NO: 166478 - DNA, 25 bp, Artificial sequence
  SiRNA target sequence
tcctttatatgaaatggtcaaagaa

SEQ ID NO: 166479 - DNA, 25 bp, Artificial sequence
  SiRNA target sequence
cctttatatgaaatggtcaaagaag

SEQ ID NO: 166480 - DNA, 25 bp, Artificial sequence
  SiRNA target sequence
ctttatatgaaatggtcaaagaagg

SEQ ID NO: 166481 - DNA, 25 bp, Artificial sequence
  SiRNA target sequence
tttatatgaaatggtcaaagaaggg

SEQ ID NO: 166482 - DNA, 25 bp, Artificial sequence
  SiRNA target sequence
ttatatgaaatggtcaaagaaggga

SEQ ID NO: 166483 - DNA, 25 bp, Artificial sequence
  SiRNA target sequence
tatatgaaatggtcaaagaagggat

SEQ ID NO: 166484 - DNA, 25 bp, Artificial sequence
  SiRNA target sequence
atatgaaatggtcaaagaagggata

SEQ ID NO: 166485 - DNA, 25 bp, Artificial sequence
  SiRNA target sequence
tatgaaatggtcaaagaagggatag

SEQ ID NO: 166486 - DNA, 25 bp, Artificial sequence
  SiRNA target sequence
atgaaatggtcaaagaagggataga

SEQ ID NO: 166487 - DNA, 25 bp, Artificial sequence
  SiRNA target sequence
tgaaatggtcaaagaagggatagat

SEQ ID NO: 166488 - DNA, 25 bp, Artificial sequence
  SiRNA target sequence
gaaatggtcaaagaagggatagatt

SEQ ID NO: 166489 - DNA, 25 bp, Artificial sequence
  SiRNA target sequence
aaatggtcaaagaagggatagattt

SEQ ID NO: 166490 - DNA, 25 bp, Artificial sequence
  SiRNA target sequence
aatggtcaaagaagggatagattta

SEQ ID NO: 166491 - DNA, 25 bp, Artificial sequence
  SiRNA target sequence
atggtcaaagaagggatagatttag

SEQ ID NO: 166492 - DNA, 25 bp, Artificial sequence
  SiRNA target sequence
tggtcaaagaagggatagatttaga

SEQ ID NO: 166493 - DNA, 25 bp, Artificial sequence
  SiRNA target sequence
ggtcaaagaagggatagatttagat

SEQ ID NO: 166494 - DNA, 25 bp, Artificial sequence
  SiRNA target sequence
gtcaaagaagggatagatttagata

SEQ ID NO: 166495 - DNA, 25 bp, Artificial sequence
  SiRNA target sequence
tcaaagaagggatagatttagataa

SEQ ID NO: 166496 - DNA, 25 bp, Artificial sequence
  SiRNA target sequence
caaagaagggatagatttagataaa

SEQ ID NO: 166497 - DNA, 25 bp, Artificial sequence
  SiRNA target sequence
aaagaagggatagatttagataaaa

SEQ ID NO: 166498 - DNA, 25 bp, Artificial sequence
  SiRNA target sequence
aagaagggatagatttagataaaat

SEQ ID NO: 166499 - DNA, 25 bp, Artificial sequence
  SiRNA target sequence
agaagggatagatttagataaaatt

SEQ ID NO: 166500 - DNA, 25 bp, Artificial sequence
  SiRNA target sequence
gaagggatagatttagataaaatta

SEQ ID NO: 166501 - DNA, 25 bp, Artificial sequence
  SiRNA target sequence
aagggatagatttagataaaattaa

SEQ ID NO: 166502 - DNA, 25 bp, Artificial sequence
  SiRNA target sequence
agggatagatttagataaaattaat

SEQ ID NO: 166503 - DNA, 25 bp, Artificial sequence
  SiRNA target sequence
gggatagatttagataaaattaatt

SEQ ID NO: 166504 - DNA, 25 bp, Artificial sequence
  SiRNA target sequence
ggatagatttagataaaattaattg

SEQ ID NO: 166505 - DNA, 25 bp, Artificial sequence
  SiRNA target sequence
gatagatttagataaaattaattgg

SEQ ID NO: 166506 - DNA, 25 bp, Artificial sequence
  SiRNA target sequence
atagatttagataaaattaattggt

SEQ ID NO: 166507 - DNA, 25 bp, Artificial sequence
  SiRNA target sequence
tagatttagataaaattaattggtc

SEQ ID NO: 166508 - DNA, 25 bp, Artificial sequence
  SiRNA target sequence
agatttagataaaattaattggtct

SEQ ID NO: 166509 - DNA, 25 bp, Artificial sequence
  SiRNA target sequence
gatttagataaaattaattggtctg

SEQ ID NO: 166510 - DNA, 25 bp, Artificial sequence
  SiRNA target sequence
atttagataaaattaattggtctgc

SEQ ID NO: 166511 - DNA, 25 bp, Artificial sequence
  SiRNA target sequence
tttagataaaattaattggtctgct

SEQ ID NO: 166512 - DNA, 25 bp, Artificial sequence
  SiRNA target sequence
ttagataaaattaattggtctgctt

SEQ ID NO: 166513 - DNA, 25 bp, Artificial sequence
  SiRNA target sequence
tagataaaattaattggtctgctta

SEQ ID NO: 166514 - DNA, 25 bp, Artificial sequence
  SiRNA target sequence
agataaaattaattggtctgcttaa

SEQ ID NO: 166515 - DNA, 26 bp, Artificial sequence
  SiRNA target sequence
atgttatttttttatagccccatttt

SEQ ID NO: 166516 - DNA, 26 bp, Artificial sequence
  SiRNA target sequence
tgttatttttttatagccccattttt

SEQ ID NO: 166517 - DNA, 26 bp, Artificial sequence
  SiRNA target sequence
gttatttttttatagccccattttta

SEQ ID NO: 166518 - DNA, 26 bp, Artificial sequence
  SiRNA target sequence
ttatttttttatagccccatttttat

SEQ ID NO: 166519 - DNA, 26 bp, Artificial sequence
  SiRNA target sequence
tatttttttatagccccatttttatg

SEQ ID NO: 166520 - DNA, 26 bp, Artificial sequence
  SiRNA target sequence
atttttttatagccccatttttatga

SEQ ID NO: 166521 - DNA, 26 bp, Artificial sequence
  SiRNA target sequence
tttttttatagccccatttttatgac

SEQ ID NO: 166522 - DNA, 26 bp, Artificial sequence
  SiRNA target sequence
ttttttatagccccatttttatgact

SEQ ID NO: 166523 - DNA, 26 bp, Artificial sequence
  SiRNA target sequence
tttttatagccccatttttatgacta

SEQ ID NO: 166524 - DNA, 26 bp, Artificial sequence
  SiRNA target sequence
ttttatagccccatttttatgactaa

SEQ ID NO: 166525 - DNA, 26 bp, Artificial sequence
  SiRNA target sequence
tttatagccccatttttatgactaaa

SEQ ID NO: 166526 - DNA, 26 bp, Artificial sequence
  SiRNA target sequence
ttatagccccatttttatgactaaaa

SEQ ID NO: 166527 - DNA, 26 bp, Artificial sequence
  SiRNA target sequence
tatagccccatttttatgactaaaag

SEQ ID NO: 166528 - DNA, 26 bp, Artificial sequence
  SiRNA target sequence
atagccccatttttatgactaaaagt

SEQ ID NO: 166529 - DNA, 26 bp, Artificial sequence
  SiRNA target sequence
tagccccatttttatgactaaaagtt

SEQ ID NO: 166530 - DNA, 26 bp, Artificial sequence
  SiRNA target sequence
agccccatttttatgactaaaagttt

SEQ ID NO: 166531 - DNA, 26 bp, Artificial sequence
  SiRNA target sequence
gccccatttttatgactaaaagttta

SEQ ID NO: 166532 - DNA, 26 bp, Artificial sequence
  SiRNA target sequence
ccccatttttatgactaaaagtttaa

SEQ ID NO: 166533 - DNA, 26 bp, Artificial sequence
  SiRNA target sequence
cccatttttatgactaaaagtttaac

SEQ ID NO: 166534 - DNA, 26 bp, Artificial sequence
  SiRNA target sequence
ccatttttatgactaaaagtttaacg

SEQ ID NO: 166535 - DNA, 26 bp, Artificial sequence
  SiRNA target sequence
catttttatgactaaaagtttaacga

SEQ ID NO: 166536 - DNA, 26 bp, Artificial sequence
  SiRNA target sequence
atttttatgactaaaagtttaacgaa

SEQ ID NO: 166537 - DNA, 26 bp, Artificial sequence
  SiRNA target sequence
tttttatgactaaaagtttaacgaat

SEQ ID NO: 166538 - DNA, 26 bp, Artificial sequence
  SiRNA target sequence
ttttatgactaaaagtttaacgaatt

SEQ ID NO: 166539 - DNA, 26 bp, Artificial sequence
  SiRNA target sequence
tttatgactaaaagtttaacgaattc

SEQ ID NO: 166540 - DNA, 26 bp, Artificial sequence
  SiRNA target sequence
ttatgactaaaagtttaacgaattct

SEQ ID NO: 166541 - DNA, 26 bp, Artificial sequence
  SiRNA target sequence
tatgactaaaagtttaacgaattcta

SEQ ID NO: 166542 - DNA, 26 bp, Artificial sequence
  SiRNA target sequence
atgactaaaagtttaacgaattctaa

SEQ ID NO: 166543 - DNA, 26 bp, Artificial sequence
  SiRNA target sequence
tgactaaaagtttaacgaattctaaa

SEQ ID NO: 166544 - DNA, 26 bp, Artificial sequence
  SiRNA target sequence
gactaaaagtttaacgaattctaaaa

SEQ ID NO: 166545 - DNA, 26 bp, Artificial sequence
  SiRNA target sequence
actaaaagtttaacgaattctaaaac

SEQ ID NO: 166546 - DNA, 26 bp, Artificial sequence
  SiRNA target sequence
ctaaaagtttaacgaattctaaaact

SEQ ID NO: 166547 - DNA, 26 bp, Artificial sequence
  SiRNA target sequence
taaaagtttaacgaattctaaaactt

SEQ ID NO: 166548 - DNA, 26 bp, Artificial sequence
  SiRNA target sequence
aaaagtttaacgaattctaaaacttt

SEQ ID NO: 166549 - DNA, 26 bp, Artificial sequence
  SiRNA target sequence
aaagtttaacgaattctaaaacttta

SEQ ID NO: 166550 - DNA, 26 bp, Artificial sequence
  SiRNA target sequence
aagtttaacgaattctaaaactttaa

SEQ ID NO: 166551 - DNA, 26 bp, Artificial sequence
  SiRNA target sequence
agtttaacgaattctaaaactttaaa

SEQ ID NO: 166552 - DNA, 26 bp, Artificial sequence
  SiRNA target sequence
gtttaacgaattctaaaactttaaat

SEQ ID NO: 166553 - DNA, 26 bp, Artificial sequence
  SiRNA target sequence
tttaacgaattctaaaactttaaatt

SEQ ID NO: 166554 - DNA, 26 bp, Artificial sequence
  SiRNA target sequence
ttaacgaattctaaaactttaaattt

SEQ ID NO: 166555 - DNA, 26 bp, Artificial sequence
  SiRNA target sequence
taacgaattctaaaactttaaattta

SEQ ID NO: 166556 - DNA, 26 bp, Artificial sequence
  SiRNA target sequence
aacgaattctaaaactttaaatttaa

SEQ ID NO: 166557 - DNA, 26 bp, Artificial sequence
  SiRNA target sequence
acgaattctaaaactttaaatttaat

SEQ ID NO: 166558 - DNA, 26 bp, Artificial sequence
  SiRNA target sequence
cgaattctaaaactttaaatttaatg

SEQ ID NO: 166559 - DNA, 26 bp, Artificial sequence
  SiRNA target sequence
gaattctaaaactttaaatttaatgt

SEQ ID NO: 166560 - DNA, 26 bp, Artificial sequence
  SiRNA target sequence
aattctaaaactttaaatttaatgtc

SEQ ID NO: 166561 - DNA, 26 bp, Artificial sequence
  SiRNA target sequence
attctaaaactttaaatttaatgtca

SEQ ID NO: 166562 - DNA, 26 bp, Artificial sequence
  SiRNA target sequence
ttctaaaactttaaatttaatgtcaa

SEQ ID NO: 166563 - DNA, 26 bp, Artificial sequence
  SiRNA target sequence
tctaaaactttaaatttaatgtcaag

SEQ ID NO: 166564 - DNA, 26 bp, Artificial sequence
  SiRNA target sequence
ctaaaactttaaatttaatgtcaagt

SEQ ID NO: 166565 - DNA, 26 bp, Artificial sequence
  SiRNA target sequence
taaaactttaaatttaatgtcaagtg

SEQ ID NO: 166566 - DNA, 26 bp, Artificial sequence
  SiRNA target sequence
aaaactttaaatttaatgtcaagtgt

SEQ ID NO: 166567 - DNA, 26 bp, Artificial sequence
  SiRNA target sequence
aaactttaaatttaatgtcaagtgta

SEQ ID NO: 166568 - DNA, 26 bp, Artificial sequence
  SiRNA target sequence
aactttaaatttaatgtcaagtgtac

SEQ ID NO: 166569 - DNA, 26 bp, Artificial sequence
  SiRNA target sequence
actttaaatttaatgtcaagtgtaca

SEQ ID NO: 166570 - DNA, 26 bp, Artificial sequence
  SiRNA target sequence
ctttaaatttaatgtcaagtgtacaa

SEQ ID NO: 166571 - DNA, 26 bp, Artificial sequence
  SiRNA target sequence
tttaaatttaatgtcaagtgtacaat

SEQ ID NO: 166572 - DNA, 26 bp, Artificial sequence
  SiRNA target sequence
ttaaatttaatgtcaagtgtacaatc

SEQ ID NO: 166573 - DNA, 26 bp, Artificial sequence
  SiRNA target sequence
taaatttaatgtcaagtgtacaatca

SEQ ID NO: 166574 - DNA, 26 bp, Artificial sequence
  SiRNA target sequence
aaatttaatgtcaagtgtacaatcac

SEQ ID NO: 166575 - DNA, 26 bp, Artificial sequence
  SiRNA target sequence
aatttaatgtcaagtgtacaatcacc

SEQ ID NO: 166576 - DNA, 26 bp, Artificial sequence
  SiRNA target sequence
atttaatgtcaagtgtacaatcacca

SEQ ID NO: 166577 - DNA, 26 bp, Artificial sequence
  SiRNA target sequence
tttaatgtcaagtgtacaatcaccag

SEQ ID NO: 166578 - DNA, 26 bp, Artificial sequence
  SiRNA target sequence
ttaatgtcaagtgtacaatcaccagt

SEQ ID NO: 166579 - DNA, 26 bp, Artificial sequence
  SiRNA target sequence
taatgtcaagtgtacaatcaccagtt

SEQ ID NO: 166580 - DNA, 26 bp, Artificial sequence
  SiRNA target sequence
aatgtcaagtgtacaatcaccagtta

SEQ ID NO: 166581 - DNA, 26 bp, Artificial sequence
  SiRNA target sequence
atgtcaagtgtacaatcaccagttat

SEQ ID NO: 166582 - DNA, 26 bp, Artificial sequence
  SiRNA target sequence
tgtcaagtgtacaatcaccagttata

SEQ ID NO: 166583 - DNA, 26 bp, Artificial sequence
  SiRNA target sequence
gtcaagtgtacaatcaccagttataa

SEQ ID NO: 166584 - DNA, 26 bp, Artificial sequence
  SiRNA target sequence
tcaagtgtacaatcaccagttataaa

SEQ ID NO: 166585 - DNA, 26 bp, Artificial sequence
  SiRNA target sequence
caagtgtacaatcaccagttataaat

SEQ ID NO: 166586 - DNA, 26 bp, Artificial sequence
  SiRNA target sequence
aagtgtacaatcaccagttataaata

SEQ ID NO: 166587 - DNA, 26 bp, Artificial sequence
  SiRNA target sequence
agtgtacaatcaccagttataaatac

SEQ ID NO: 166588 - DNA, 26 bp, Artificial sequence
  SiRNA target sequence
gtgtacaatcaccagttataaataca

SEQ ID NO: 166589 - DNA, 26 bp, Artificial sequence
  SiRNA target sequence
tgtacaatcaccagttataaatacaa

SEQ ID NO: 166590 - DNA, 26 bp, Artificial sequence
  SiRNA target sequence
gtacaatcaccagttataaatacaaa

SEQ ID NO: 166591 - DNA, 26 bp, Artificial sequence
  SiRNA target sequence
tacaatcaccagttataaatacaaaa

SEQ ID NO: 166592 - DNA, 26 bp, Artificial sequence
  SiRNA target sequence
acaatcaccagttataaatacaaaaa

SEQ ID NO: 166593 - DNA, 26 bp, Artificial sequence
  SiRNA target sequence
caatcaccagttataaatacaaaaaa

SEQ ID NO: 166594 - DNA, 26 bp, Artificial sequence
  SiRNA target sequence
aatcaccagttataaatacaaaaaaa

SEQ ID NO: 166595 - DNA, 26 bp, Artificial sequence
  SiRNA target sequence
atcaccagttataaatacaaaaaaaa

SEQ ID NO: 166596 - DNA, 26 bp, Artificial sequence
  SiRNA target sequence
tcaccagttataaatacaaaaaaaat

SEQ ID NO: 166597 - DNA, 26 bp, Artificial sequence
  SiRNA target sequence
caccagttataaatacaaaaaaaata

SEQ ID NO: 166598 - DNA, 26 bp, Artificial sequence
  SiRNA target sequence
accagttataaatacaaaaaaaatat

SEQ ID NO: 166599 - DNA, 26 bp, Artificial sequence
  SiRNA target sequence
ccagttataaatacaaaaaaaatata

SEQ ID NO: 166600 - DNA, 26 bp, Artificial sequence
  SiRNA target sequence
cagttataaatacaaaaaaaatatat

SEQ ID NO: 166601 - DNA, 26 bp, Artificial sequence
  SiRNA target sequence
agttataaatacaaaaaaaatatatc

SEQ ID NO: 166602 - DNA, 26 bp, Artificial sequence
  SiRNA target sequence
gttataaatacaaaaaaaatatatct

SEQ ID NO: 166603 - DNA, 26 bp, Artificial sequence
  SiRNA target sequence
ttataaatacaaaaaaaatatatctt

SEQ ID NO: 166604 - DNA, 26 bp, Artificial sequence
  SiRNA target sequence
tataaatacaaaaaaaatatatcttg

SEQ ID NO: 166605 - DNA, 26 bp, Artificial sequence
  SiRNA target sequence
ataaatacaaaaaaaatatatcttga

SEQ ID NO: 166606 - DNA, 26 bp, Artificial sequence
  SiRNA target sequence
taaatacaaaaaaaatatatcttgat

SEQ ID NO: 166607 - DNA, 26 bp, Artificial sequence
  SiRNA target sequence
aaatacaaaaaaaatatatcttgatg

SEQ ID NO: 166608 - DNA, 26 bp, Artificial sequence
  SiRNA target sequence
aatacaaaaaaaatatatcttgatgc

SEQ ID NO: 166609 - DNA, 26 bp, Artificial sequence
  SiRNA target sequence
atacaaaaaaaatatatcttgatgca

SEQ ID NO: 166610 - DNA, 26 bp, Artificial sequence
  SiRNA target sequence
tacaaaaaaaatatatcttgatgcac

SEQ ID NO: 166611 - DNA, 26 bp, Artificial sequence
  SiRNA target sequence
acaaaaaaaatatatcttgatgcaca

SEQ ID NO: 166612 - DNA, 26 bp, Artificial sequence
  SiRNA target sequence
caaaaaaaatatatcttgatgcacaa

SEQ ID NO: 166613 - DNA, 26 bp, Artificial sequence
  SiRNA target sequence
aaaaaaaatatatcttgatgcacaag

SEQ ID NO: 166614 - DNA, 26 bp, Artificial sequence
  SiRNA target sequence
aaaaaaatatatcttgatgcacaagc

SEQ ID NO: 166615 - DNA, 26 bp, Artificial sequence
  SiRNA target sequence
aaaaaatatatcttgatgcacaagcg

SEQ ID NO: 166616 - DNA, 26 bp, Artificial sequence
  SiRNA target sequence
aaaaatatatcttgatgcacaagcga

SEQ ID NO: 166617 - DNA, 26 bp, Artificial sequence
  SiRNA target sequence
aaaatatatcttgatgcacaagcgac

SEQ ID NO: 166618 - DNA, 26 bp, Artificial sequence
  SiRNA target sequence
aaatatatcttgatgcacaagcgacc

SEQ ID NO: 166619 - DNA, 26 bp, Artificial sequence
  SiRNA target sequence
aatatatcttgatgcacaagcgacca

SEQ ID NO: 166620 - DNA, 26 bp, Artificial sequence
  SiRNA target sequence
atatatcttgatgcacaagcgaccaa

SEQ ID NO: 166621 - DNA, 26 bp, Artificial sequence
  SiRNA target sequence
tatatcttgatgcacaagcgaccaag

SEQ ID NO: 166622 - DNA, 26 bp, Artificial sequence
  SiRNA target sequence
atatcttgatgcacaagcgaccaagc

SEQ ID NO: 166623 - DNA, 26 bp, Artificial sequence
  SiRNA target sequence
tatcttgatgcacaagcgaccaagcc

SEQ ID NO: 166624 - DNA, 26 bp, Artificial sequence
  SiRNA target sequence
atcttgatgcacaagcgaccaagcct

SEQ ID NO: 166625 - DNA, 26 bp, Artificial sequence
  SiRNA target sequence
tcttgatgcacaagcgaccaagcctt

SEQ ID NO: 166626 - DNA, 26 bp, Artificial sequence
  SiRNA target sequence
cttgatgcacaagcgaccaagccttt

SEQ ID NO: 166627 - DNA, 26 bp, Artificial sequence
  SiRNA target sequence
ttgatgcacaagcgaccaagccttta

SEQ ID NO: 166628 - DNA, 26 bp, Artificial sequence
  SiRNA target sequence
tgatgcacaagcgaccaagcctttag

SEQ ID NO: 166629 - DNA, 26 bp, Artificial sequence
  SiRNA target sequence
gatgcacaagcgaccaagcctttaga

SEQ ID NO: 166630 - DNA, 26 bp, Artificial sequence
  SiRNA target sequence
atgcacaagcgaccaagcctttagac

SEQ ID NO: 166631 - DNA, 26 bp, Artificial sequence
  SiRNA target sequence
tgcacaagcgaccaagcctttagacc

SEQ ID NO: 166632 - DNA, 26 bp, Artificial sequence
  SiRNA target sequence
gcacaagcgaccaagcctttagaccc

SEQ ID NO: 166633 - DNA, 26 bp, Artificial sequence
  SiRNA target sequence
cacaagcgaccaagcctttagacccg

SEQ ID NO: 166634 - DNA, 26 bp, Artificial sequence
  SiRNA target sequence
acaagcgaccaagcctttagacccgc

SEQ ID NO: 166635 - DNA, 26 bp, Artificial sequence
  SiRNA target sequence
caagcgaccaagcctttagacccgcg

SEQ ID NO: 166636 - DNA, 26 bp, Artificial sequence
  SiRNA target sequence
aagcgaccaagcctttagacccgcgt

SEQ ID NO: 166637 - DNA, 26 bp, Artificial sequence
  SiRNA target sequence
agcgaccaagcctttagacccgcgtg

SEQ ID NO: 166638 - DNA, 26 bp, Artificial sequence
  SiRNA target sequence
gcgaccaagcctttagacccgcgtgt

SEQ ID NO: 166639 - DNA, 26 bp, Artificial sequence
  SiRNA target sequence
cgaccaagcctttagacccgcgtgtg

SEQ ID NO: 166640 - DNA, 26 bp, Artificial sequence
  SiRNA target sequence
gaccaagcctttagacccgcgtgtgc

SEQ ID NO: 166641 - DNA, 26 bp, Artificial sequence
  SiRNA target sequence
accaagcctttagacccgcgtgtgct

SEQ ID NO: 166642 - DNA, 26 bp, Artificial sequence
  SiRNA target sequence
ccaagcctttagacccgcgtgtgctt

SEQ ID NO: 166643 - DNA, 26 bp, Artificial sequence
  SiRNA target sequence
caagcctttagacccgcgtgtgcttg

SEQ ID NO: 166644 - DNA, 26 bp, Artificial sequence
  SiRNA target sequence
aagcctttagacccgcgtgtgcttga

SEQ ID NO: 166645 - DNA, 26 bp, Artificial sequence
  SiRNA target sequence
agcctttagacccgcgtgtgcttgat

SEQ ID NO: 166646 - DNA, 26 bp, Artificial sequence
  SiRNA target sequence
gcctttagacccgcgtgtgcttgatg

SEQ ID NO: 166647 - DNA, 26 bp, Artificial sequence
  SiRNA target sequence
cctttagacccgcgtgtgcttgatgc

SEQ ID NO: 166648 - DNA, 26 bp, Artificial sequence
  SiRNA target sequence
ctttagacccgcgtgtgcttgatgca

SEQ ID NO: 166649 - DNA, 26 bp, Artificial sequence
  SiRNA target sequence
tttagacccgcgtgtgcttgatgcaa

SEQ ID NO: 166650 - DNA, 26 bp, Artificial sequence
  SiRNA target sequence
ttagacccgcgtgtgcttgatgcaat

SEQ ID NO: 166651 - DNA, 26 bp, Artificial sequence
  SiRNA target sequence
tagacccgcgtgtgcttgatgcaatg

SEQ ID NO: 166652 - DNA, 26 bp, Artificial sequence
  SiRNA target sequence
agacccgcgtgtgcttgatgcaatgc

SEQ ID NO: 166653 - DNA, 26 bp, Artificial sequence
  SiRNA target sequence
gacccgcgtgtgcttgatgcaatgct

SEQ ID NO: 166654 - DNA, 26 bp, Artificial sequence
  SiRNA target sequence
acccgcgtgtgcttgatgcaatgctt

SEQ ID NO: 166655 - DNA, 26 bp, Artificial sequence
  SiRNA target sequence
cccgcgtgtgcttgatgcaatgcttc

SEQ ID NO: 166656 - DNA, 26 bp, Artificial sequence
  SiRNA target sequence
ccgcgtgtgcttgatgcaatgcttcc

SEQ ID NO: 166657 - DNA, 26 bp, Artificial sequence
  SiRNA target sequence
cgcgtgtgcttgatgcaatgcttcca

SEQ ID NO: 166658 - DNA, 26 bp, Artificial sequence
  SiRNA target sequence
gcgtgtgcttgatgcaatgcttccat

SEQ ID NO: 166659 - DNA, 26 bp, Artificial sequence
  SiRNA target sequence
cgtgtgcttgatgcaatgcttccata

SEQ ID NO: 166660 - DNA, 26 bp, Artificial sequence
  SiRNA target sequence
gtgtgcttgatgcaatgcttccatac

SEQ ID NO: 166661 - DNA, 26 bp, Artificial sequence
  SiRNA target sequence
tgtgcttgatgcaatgcttccatact

SEQ ID NO: 166662 - DNA, 26 bp, Artificial sequence
  SiRNA target sequence
gtgcttgatgcaatgcttccatacta

SEQ ID NO: 166663 - DNA, 26 bp, Artificial sequence
  SiRNA target sequence
tgcttgatgcaatgcttccatactat

SEQ ID NO: 166664 - DNA, 26 bp, Artificial sequence
  SiRNA target sequence
gcttgatgcaatgcttccatactata

SEQ ID NO: 166665 - DNA, 26 bp, Artificial sequence
  SiRNA target sequence
cttgatgcaatgcttccatactatac

SEQ ID NO: 166666 - DNA, 26 bp, Artificial sequence
  SiRNA target sequence
ttgatgcaatgcttccatactataca

SEQ ID NO: 166667 - DNA, 26 bp, Artificial sequence
  SiRNA target sequence
tgatgcaatgcttccatactatacat

SEQ ID NO: 166668 - DNA, 26 bp, Artificial sequence
  SiRNA target sequence
gatgcaatgcttccatactatacatc

SEQ ID NO: 166669 - DNA, 26 bp, Artificial sequence
  SiRNA target sequence
atgcaatgcttccatactatacatcc

SEQ ID NO: 166670 - DNA, 26 bp, Artificial sequence
  SiRNA target sequence
tgcaatgcttccatactatacatcca

SEQ ID NO: 166671 - DNA, 26 bp, Artificial sequence
  SiRNA target sequence
gcaatgcttccatactatacatccat

SEQ ID NO: 166672 - DNA, 26 bp, Artificial sequence
  SiRNA target sequence
caatgcttccatactatacatccatt

SEQ ID NO: 166673 - DNA, 26 bp, Artificial sequence
  SiRNA target sequence
aatgcttccatactatacatccattt

SEQ ID NO: 166674 - DNA, 26 bp, Artificial sequence
  SiRNA target sequence
atgcttccatactatacatccatttt

SEQ ID NO: 166675 - DNA, 26 bp, Artificial sequence
  SiRNA target sequence
tgcttccatactatacatccattttt

SEQ ID NO: 166676 - DNA, 26 bp, Artificial sequence
  SiRNA target sequence
gcttccatactatacatccatttttg

SEQ ID NO: 166677 - DNA, 26 bp, Artificial sequence
  SiRNA target sequence
cttccatactatacatccatttttgg

SEQ ID NO: 166678 - DNA, 26 bp, Artificial sequence
  SiRNA target sequence
ttccatactatacatccatttttgga

SEQ ID NO: 166679 - DNA, 26 bp, Artificial sequence
  SiRNA target sequence
tccatactatacatccatttttggaa

SEQ ID NO: 166680 - DNA, 26 bp, Artificial sequence
  SiRNA target sequence
ccatactatacatccatttttggaaa

SEQ ID NO: 166681 - DNA, 26 bp, Artificial sequence
  SiRNA target sequence
catactatacatccatttttggaaat

SEQ ID NO: 166682 - DNA, 26 bp, Artificial sequence
  SiRNA target sequence
atactatacatccatttttggaaatc

SEQ ID NO: 166683 - DNA, 26 bp, Artificial sequence
  SiRNA target sequence
tactatacatccatttttggaaatcc

SEQ ID NO: 166684 - DNA, 26 bp, Artificial sequence
  SiRNA target sequence
actatacatccatttttggaaatcca

SEQ ID NO: 166685 - DNA, 26 bp, Artificial sequence
  SiRNA target sequence
ctatacatccatttttggaaatccac

SEQ ID NO: 166686 - DNA, 26 bp, Artificial sequence
  SiRNA target sequence
tatacatccatttttggaaatccaca

SEQ ID NO: 166687 - DNA, 26 bp, Artificial sequence
  SiRNA target sequence
atacatccatttttggaaatccacat

SEQ ID NO: 166688 - DNA, 26 bp, Artificial sequence
  SiRNA target sequence
tacatccatttttggaaatccacatt

SEQ ID NO: 166689 - DNA, 26 bp, Artificial sequence
  SiRNA target sequence
acatccatttttggaaatccacattc

SEQ ID NO: 166690 - DNA, 26 bp, Artificial sequence
  SiRNA target sequence
catccatttttggaaatccacattct

SEQ ID NO: 166691 - DNA, 26 bp, Artificial sequence
  SiRNA target sequence
atccatttttggaaatccacattctc

SEQ ID NO: 166692 - DNA, 26 bp, Artificial sequence
  SiRNA target sequence
tccatttttggaaatccacattctcg

SEQ ID NO: 166693 - DNA, 26 bp, Artificial sequence
  SiRNA target sequence
ccatttttggaaatccacattctcgc

SEQ ID NO: 166694 - DNA, 26 bp, Artificial sequence
  SiRNA target sequence
catttttggaaatccacattctcgca

SEQ ID NO: 166695 - DNA, 26 bp, Artificial sequence
  SiRNA target sequence
atttttggaaatccacattctcgcac

SEQ ID NO: 166696 - DNA, 26 bp, Artificial sequence
  SiRNA target sequence
tttttggaaatccacattctcgcacg

SEQ ID NO: 166697 - DNA, 26 bp, Artificial sequence
  SiRNA target sequence
ttttggaaatccacattctcgcacgc

SEQ ID NO: 166698 - DNA, 26 bp, Artificial sequence
  SiRNA target sequence
tttggaaatccacattctcgcacgca

SEQ ID NO: 166699 - DNA, 26 bp, Artificial sequence
  SiRNA target sequence
ttggaaatccacattctcgcacgcat

SEQ ID NO: 166700 - DNA, 26 bp, Artificial sequence
  SiRNA target sequence
tggaaatccacattctcgcacgcata

SEQ ID NO: 166701 - DNA, 26 bp, Artificial sequence
  SiRNA target sequence
ggaaatccacattctcgcacgcatac

SEQ ID NO: 166702 - DNA, 26 bp, Artificial sequence
  SiRNA target sequence
gaaatccacattctcgcacgcatacg

SEQ ID NO: 166703 - DNA, 26 bp, Artificial sequence
  SiRNA target sequence
aaatccacattctcgcacgcatacgt

SEQ ID NO: 166704 - DNA, 26 bp, Artificial sequence
  SiRNA target sequence
aatccacattctcgcacgcatacgtt

SEQ ID NO: 166705 - DNA, 26 bp, Artificial sequence
  SiRNA target sequence
atccacattctcgcacgcatacgttt

SEQ ID NO: 166706 - DNA, 26 bp, Artificial sequence
  SiRNA target sequence
tccacattctcgcacgcatacgtttg

SEQ ID NO: 166707 - DNA, 26 bp, Artificial sequence
  SiRNA target sequence
ccacattctcgcacgcatacgtttgg

SEQ ID NO: 166708 - DNA, 26 bp, Artificial sequence
  SiRNA target sequence
cacattctcgcacgcatacgtttgga

SEQ ID NO: 166709 - DNA, 26 bp, Artificial sequence
  SiRNA target sequence
acattctcgcacgcatacgtttggat

SEQ ID NO: 166710 - DNA, 26 bp, Artificial sequence
  SiRNA target sequence
cattctcgcacgcatacgtttggatg

SEQ ID NO: 166711 - DNA, 26 bp, Artificial sequence
  SiRNA target sequence
attctcgcacgcatacgtttggatgg

SEQ ID NO: 166712 - DNA, 26 bp, Artificial sequence
  SiRNA target sequence
ttctcgcacgcatacgtttggatgga

SEQ ID NO: 166713 - DNA, 26 bp, Artificial sequence
  SiRNA target sequence
tctcgcacgcatacgtttggatggaa

SEQ ID NO: 166714 - DNA, 26 bp, Artificial sequence
  SiRNA target sequence
ctcgcacgcatacgtttggatggaat

SEQ ID NO: 166715 - DNA, 26 bp, Artificial sequence
  SiRNA target sequence
tcgcacgcatacgtttggatggaatg

SEQ ID NO: 166716 - DNA, 26 bp, Artificial sequence
  SiRNA target sequence
cgcacgcatacgtttggatggaatgc

SEQ ID NO: 166717 - DNA, 26 bp, Artificial sequence
  SiRNA target sequence
gcacgcatacgtttggatggaatgca

SEQ ID NO: 166718 - DNA, 26 bp, Artificial sequence
  SiRNA target sequence
cacgcatacgtttggatggaatgcag

SEQ ID NO: 166719 - DNA, 26 bp, Artificial sequence
  SiRNA target sequence
acgcatacgtttggatggaatgcaga

SEQ ID NO: 166720 - DNA, 26 bp, Artificial sequence
  SiRNA target sequence
cgcatacgtttggatggaatgcagaa

SEQ ID NO: 166721 - DNA, 26 bp, Artificial sequence
  SiRNA target sequence
gcatacgtttggatggaatgcagaaa

SEQ ID NO: 166722 - DNA, 26 bp, Artificial sequence
  SiRNA target sequence
catacgtttggatggaatgcagaaaa

SEQ ID NO: 166723 - DNA, 26 bp, Artificial sequence
  SiRNA target sequence
atacgtttggatggaatgcagaaaaa

SEQ ID NO: 166724 - DNA, 26 bp, Artificial sequence
  SiRNA target sequence
tacgtttggatggaatgcagaaaaag

SEQ ID NO: 166725 - DNA, 26 bp, Artificial sequence
  SiRNA target sequence
acgtttggatggaatgcagaaaaagg

SEQ ID NO: 166726 - DNA, 26 bp, Artificial sequence
  SiRNA target sequence
cgtttggatggaatgcagaaaaaggc

SEQ ID NO: 166727 - DNA, 26 bp, Artificial sequence
  SiRNA target sequence
gtttggatggaatgcagaaaaaggcg

SEQ ID NO: 166728 - DNA, 26 bp, Artificial sequence
  SiRNA target sequence
tttggatggaatgcagaaaaaggcgt

SEQ ID NO: 166729 - DNA, 26 bp, Artificial sequence
  SiRNA target sequence
ttggatggaatgcagaaaaaggcgta

SEQ ID NO: 166730 - DNA, 26 bp, Artificial sequence
  SiRNA target sequence
tggatggaatgcagaaaaaggcgtag

SEQ ID NO: 166731 - DNA, 26 bp, Artificial sequence
  SiRNA target sequence
ggatggaatgcagaaaaaggcgtaga

SEQ ID NO: 166732 - DNA, 26 bp, Artificial sequence
  SiRNA target sequence
gatggaatgcagaaaaaggcgtagaa

SEQ ID NO: 166733 - DNA, 26 bp, Artificial sequence
  SiRNA target sequence
atggaatgcagaaaaaggcgtagaaa

SEQ ID NO: 166734 - DNA, 26 bp, Artificial sequence
  SiRNA target sequence
tggaatgcagaaaaaggcgtagaaat

SEQ ID NO: 166735 - DNA, 26 bp, Artificial sequence
  SiRNA target sequence
ggaatgcagaaaaaggcgtagaaatg

SEQ ID NO: 166736 - DNA, 26 bp, Artificial sequence
  SiRNA target sequence
gaatgcagaaaaaggcgtagaaatgg

SEQ ID NO: 166737 - DNA, 26 bp, Artificial sequence
  SiRNA target sequence
aatgcagaaaaaggcgtagaaatggc

SEQ ID NO: 166738 - DNA, 26 bp, Artificial sequence
  SiRNA target sequence
atgcagaaaaaggcgtagaaatggct

SEQ ID NO: 166739 - DNA, 26 bp, Artificial sequence
  SiRNA target sequence
tgcagaaaaaggcgtagaaatggctc

SEQ ID NO: 166740 - DNA, 26 bp, Artificial sequence
  SiRNA target sequence
gcagaaaaaggcgtagaaatggctcg

SEQ ID NO: 166741 - DNA, 26 bp, Artificial sequence
  SiRNA target sequence
cagaaaaaggcgtagaaatggctcga

SEQ ID NO: 166742 - DNA, 26 bp, Artificial sequence
  SiRNA target sequence
agaaaaaggcgtagaaatggctcgaa

SEQ ID NO: 166743 - DNA, 26 bp, Artificial sequence
  SiRNA target sequence
gaaaaaggcgtagaaatggctcgaaa

SEQ ID NO: 166744 - DNA, 26 bp, Artificial sequence
  SiRNA target sequence
aaaaaggcgtagaaatggctcgaaag

SEQ ID NO: 166745 - DNA, 26 bp, Artificial sequence
  SiRNA target sequence
aaaaggcgtagaaatggctcgaaagc

SEQ ID NO: 166746 - DNA, 26 bp, Artificial sequence
  SiRNA target sequence
aaaggcgtagaaatggctcgaaagca

SEQ ID NO: 166747 - DNA, 26 bp, Artificial sequence
  SiRNA target sequence
aaggcgtagaaatggctcgaaagcaa

SEQ ID NO: 166748 - DNA, 26 bp, Artificial sequence
  SiRNA target sequence
aggcgtagaaatggctcgaaagcaag

SEQ ID NO: 166749 - DNA, 26 bp, Artificial sequence
  SiRNA target sequence
ggcgtagaaatggctcgaaagcaagt

SEQ ID NO: 166750 - DNA, 26 bp, Artificial sequence
  SiRNA target sequence
gcgtagaaatggctcgaaagcaagta

SEQ ID NO: 166751 - DNA, 26 bp, Artificial sequence
  SiRNA target sequence
cgtagaaatggctcgaaagcaagtag

SEQ ID NO: 166752 - DNA, 26 bp, Artificial sequence
  SiRNA target sequence
gtagaaatggctcgaaagcaagtagc

SEQ ID NO: 166753 - DNA, 26 bp, Artificial sequence
  SiRNA target sequence
tagaaatggctcgaaagcaagtagca

SEQ ID NO: 166754 - DNA, 26 bp, Artificial sequence
  SiRNA target sequence
agaaatggctcgaaagcaagtagcag

SEQ ID NO: 166755 - DNA, 26 bp, Artificial sequence
  SiRNA target sequence
gaaatggctcgaaagcaagtagcaga

SEQ ID NO: 166756 - DNA, 26 bp, Artificial sequence
  SiRNA target sequence
aaatggctcgaaagcaagtagcagat

SEQ ID NO: 166757 - DNA, 26 bp, Artificial sequence
  SiRNA target sequence
aatggctcgaaagcaagtagcagatt

SEQ ID NO: 166758 - DNA, 26 bp, Artificial sequence
  SiRNA target sequence
atggctcgaaagcaagtagcagattt

SEQ ID NO: 166759 - DNA, 26 bp, Artificial sequence
  SiRNA target sequence
tggctcgaaagcaagtagcagattta

SEQ ID NO: 166760 - DNA, 26 bp, Artificial sequence
  SiRNA target sequence
ggctcgaaagcaagtagcagatttac

SEQ ID NO: 166761 - DNA, 26 bp, Artificial sequence
  SiRNA target sequence
gctcgaaagcaagtagcagatttact

SEQ ID NO: 166762 - DNA, 26 bp, Artificial sequence
  SiRNA target sequence
ctcgaaagcaagtagcagatttactg

SEQ ID NO: 166763 - DNA, 26 bp, Artificial sequence
  SiRNA target sequence
tcgaaagcaagtagcagatttactga

SEQ ID NO: 166764 - DNA, 26 bp, Artificial sequence
  SiRNA target sequence
cgaaagcaagtagcagatttactgaa

SEQ ID NO: 166765 - DNA, 26 bp, Artificial sequence
  SiRNA target sequence
gaaagcaagtagcagatttactgaat

SEQ ID NO: 166766 - DNA, 26 bp, Artificial sequence
  SiRNA target sequence
aaagcaagtagcagatttactgaatg

SEQ ID NO: 166767 - DNA, 26 bp, Artificial sequence
  SiRNA target sequence
aagcaagtagcagatttactgaatgc

SEQ ID NO: 166768 - DNA, 26 bp, Artificial sequence
  SiRNA target sequence
agcaagtagcagatttactgaatgcc

SEQ ID NO: 166769 - DNA, 26 bp, Artificial sequence
  SiRNA target sequence
gcaagtagcagatttactgaatgcca

SEQ ID NO: 166770 - DNA, 26 bp, Artificial sequence
  SiRNA target sequence
caagtagcagatttactgaatgccaa

SEQ ID NO: 166771 - DNA, 26 bp, Artificial sequence
  SiRNA target sequence
aagtagcagatttactgaatgccaat

SEQ ID NO: 166772 - DNA, 26 bp, Artificial sequence
  SiRNA target sequence
agtagcagatttactgaatgccaatg

SEQ ID NO: 166773 - DNA, 26 bp, Artificial sequence
  SiRNA target sequence
gtagcagatttactgaatgccaatga

SEQ ID NO: 166774 - DNA, 26 bp, Artificial sequence
  SiRNA target sequence
tagcagatttactgaatgccaatgaa

SEQ ID NO: 166775 - DNA, 26 bp, Artificial sequence
  SiRNA target sequence
agcagatttactgaatgccaatgaaa

SEQ ID NO: 166776 - DNA, 26 bp, Artificial sequence
  SiRNA target sequence
gcagatttactgaatgccaatgaaaa

SEQ ID NO: 166777 - DNA, 26 bp, Artificial sequence
  SiRNA target sequence
cagatttactgaatgccaatgaaaaa

SEQ ID NO: 166778 - DNA, 26 bp, Artificial sequence
  SiRNA target sequence
agatttactgaatgccaatgaaaaag

SEQ ID NO: 166779 - DNA, 26 bp, Artificial sequence
  SiRNA target sequence
gatttactgaatgccaatgaaaaaga

SEQ ID NO: 166780 - DNA, 26 bp, Artificial sequence
  SiRNA target sequence
atttactgaatgccaatgaaaaagaa

SEQ ID NO: 166781 - DNA, 26 bp, Artificial sequence
  SiRNA target sequence
tttactgaatgccaatgaaaaagaaa

SEQ ID NO: 166782 - DNA, 26 bp, Artificial sequence
  SiRNA target sequence
ttactgaatgccaatgaaaaagaaat

SEQ ID NO: 166783 - DNA, 26 bp, Artificial sequence
  SiRNA target sequence
tactgaatgccaatgaaaaagaaatt

SEQ ID NO: 166784 - DNA, 26 bp, Artificial sequence
  SiRNA target sequence
actgaatgccaatgaaaaagaaatta

SEQ ID NO: 166785 - DNA, 26 bp, Artificial sequence
  SiRNA target sequence
ctgaatgccaatgaaaaagaaattat

SEQ ID NO: 166786 - DNA, 26 bp, Artificial sequence
  SiRNA target sequence
tgaatgccaatgaaaaagaaattatt

SEQ ID NO: 166787 - DNA, 26 bp, Artificial sequence
  SiRNA target sequence
gaatgccaatgaaaaagaaattattt

SEQ ID NO: 166788 - DNA, 26 bp, Artificial sequence
  SiRNA target sequence
aatgccaatgaaaaagaaattatttt

SEQ ID NO: 166789 - DNA, 26 bp, Artificial sequence
  SiRNA target sequence
atgccaatgaaaaagaaattattttt

SEQ ID NO: 166790 - DNA, 26 bp, Artificial sequence
  SiRNA target sequence
tgccaatgaaaaagaaattattttta

SEQ ID NO: 166791 - DNA, 26 bp, Artificial sequence
  SiRNA target sequence
gccaatgaaaaagaaattatttttac

SEQ ID NO: 166792 - DNA, 26 bp, Artificial sequence
  SiRNA target sequence
ccaatgaaaaagaaattatttttact

SEQ ID NO: 166793 - DNA, 26 bp, Artificial sequence
  SiRNA target sequence
caatgaaaaagaaattatttttacta

SEQ ID NO: 166794 - DNA, 26 bp, Artificial sequence
  SiRNA target sequence
aatgaaaaagaaattatttttactag

SEQ ID NO: 166795 - DNA, 26 bp, Artificial sequence
  SiRNA target sequence
atgaaaaagaaattatttttactagc

SEQ ID NO: 166796 - DNA, 26 bp, Artificial sequence
  SiRNA target sequence
tgaaaaagaaattatttttactagcg

SEQ ID NO: 166797 - DNA, 26 bp, Artificial sequence
  SiRNA target sequence
gaaaaagaaattatttttactagcgg

SEQ ID NO: 166798 - DNA, 26 bp, Artificial sequence
  SiRNA target sequence
aaaaagaaattatttttactagcggt

SEQ ID NO: 166799 - DNA, 26 bp, Artificial sequence
  SiRNA target sequence
aaaagaaattatttttactagcggtg

SEQ ID NO: 166800 - DNA, 26 bp, Artificial sequence
  SiRNA target sequence
aaagaaattatttttactagcggtgc

SEQ ID NO: 166801 - DNA, 26 bp, Artificial sequence
  SiRNA target sequence
aagaaattatttttactagcggtgct

SEQ ID NO: 166802 - DNA, 26 bp, Artificial sequence
  SiRNA target sequence
agaaattatttttactagcggtgcta

SEQ ID NO: 166803 - DNA, 26 bp, Artificial sequence
  SiRNA target sequence
gaaattatttttactagcggtgctac

SEQ ID NO: 166804 - DNA, 26 bp, Artificial sequence
  SiRNA target sequence
aaattatttttactagcggtgctact

SEQ ID NO: 166805 - DNA, 26 bp, Artificial sequence
  SiRNA target sequence
aattatttttactagcggtgctactg

SEQ ID NO: 166806 - DNA, 26 bp, Artificial sequence
  SiRNA target sequence
attatttttactagcggtgctactga

SEQ ID NO: 166807 - DNA, 26 bp, Artificial sequence
  SiRNA target sequence
ttatttttactagcggtgctactgag

SEQ ID NO: 166808 - DNA, 26 bp, Artificial sequence
  SiRNA target sequence
tatttttactagcggtgctactgaga

SEQ ID NO: 166809 - DNA, 26 bp, Artificial sequence
  SiRNA target sequence
atttttactagcggtgctactgagag

SEQ ID NO: 166810 - DNA, 26 bp, Artificial sequence
  SiRNA target sequence
tttttactagcggtgctactgagagt

SEQ ID NO: 166811 - DNA, 26 bp, Artificial sequence
  SiRNA target sequence
ttttactagcggtgctactgagagta

SEQ ID NO: 166812 - DNA, 26 bp, Artificial sequence
  SiRNA target sequence
tttactagcggtgctactgagagtaa

SEQ ID NO: 166813 - DNA, 26 bp, Artificial sequence
  SiRNA target sequence
ttactagcggtgctactgagagtaac

SEQ ID NO: 166814 - DNA, 26 bp, Artificial sequence
  SiRNA target sequence
tactagcggtgctactgagagtaaca

SEQ ID NO: 166815 - DNA, 26 bp, Artificial sequence
  SiRNA target sequence
actagcggtgctactgagagtaacaa

SEQ ID NO: 166816 - DNA, 26 bp, Artificial sequence
  SiRNA target sequence
ctagcggtgctactgagagtaacaac

SEQ ID NO: 166817 - DNA, 26 bp, Artificial sequence
  SiRNA target sequence
tagcggtgctactgagagtaacaacc

SEQ ID NO: 166818 - DNA, 26 bp, Artificial sequence
  SiRNA target sequence
agcggtgctactgagagtaacaacct

SEQ ID NO: 166819 - DNA, 26 bp, Artificial sequence
  SiRNA target sequence
gcggtgctactgagagtaacaacctt

SEQ ID NO: 166820 - DNA, 26 bp, Artificial sequence
  SiRNA target sequence
cggtgctactgagagtaacaaccttg

SEQ ID NO: 166821 - DNA, 26 bp, Artificial sequence
  SiRNA target sequence
ggtgctactgagagtaacaaccttgc

SEQ ID NO: 166822 - DNA, 26 bp, Artificial sequence
  SiRNA target sequence
gtgctactgagagtaacaaccttgca

SEQ ID NO: 166823 - DNA, 26 bp, Artificial sequence
  SiRNA target sequence
tgctactgagagtaacaaccttgcac

SEQ ID NO: 166824 - DNA, 26 bp, Artificial sequence
  SiRNA target sequence
gctactgagagtaacaaccttgcact

SEQ ID NO: 166825 - DNA, 26 bp, Artificial sequence
  SiRNA target sequence
ctactgagagtaacaaccttgcacta

SEQ ID NO: 166826 - DNA, 26 bp, Artificial sequence
  SiRNA target sequence
tactgagagtaacaaccttgcactaa

SEQ ID NO: 166827 - DNA, 26 bp, Artificial sequence
  SiRNA target sequence
actgagagtaacaaccttgcactaaa

SEQ ID NO: 166828 - DNA, 26 bp, Artificial sequence
  SiRNA target sequence
ctgagagtaacaaccttgcactaaag

SEQ ID NO: 166829 - DNA, 26 bp, Artificial sequence
  SiRNA target sequence
tgagagtaacaaccttgcactaaagg

SEQ ID NO: 166830 - DNA, 26 bp, Artificial sequence
  SiRNA target sequence
gagagtaacaaccttgcactaaaggg

SEQ ID NO: 166831 - DNA, 26 bp, Artificial sequence
  SiRNA target sequence
agagtaacaaccttgcactaaagggt

SEQ ID NO: 166832 - DNA, 26 bp, Artificial sequence
  SiRNA target sequence
gagtaacaaccttgcactaaagggtg

SEQ ID NO: 166833 - DNA, 26 bp, Artificial sequence
  SiRNA target sequence
agtaacaaccttgcactaaagggtgt

SEQ ID NO: 166834 - DNA, 26 bp, Artificial sequence
  SiRNA target sequence
gtaacaaccttgcactaaagggtgtc

SEQ ID NO: 166835 - DNA, 26 bp, Artificial sequence
  SiRNA target sequence
taacaaccttgcactaaagggtgtct

SEQ ID NO: 166836 - DNA, 26 bp, Artificial sequence
  SiRNA target sequence
aacaaccttgcactaaagggtgtctt

SEQ ID NO: 166837 - DNA, 26 bp, Artificial sequence
  SiRNA target sequence
acaaccttgcactaaagggtgtcttt

SEQ ID NO: 166838 - DNA, 26 bp, Artificial sequence
  SiRNA target sequence
caaccttgcactaaagggtgtctttg

SEQ ID NO: 166839 - DNA, 26 bp, Artificial sequence
  SiRNA target sequence
aaccttgcactaaagggtgtctttgc

SEQ ID NO: 166840 - DNA, 26 bp, Artificial sequence
  SiRNA target sequence
accttgcactaaagggtgtctttgca

SEQ ID NO: 166841 - DNA, 26 bp, Artificial sequence
  SiRNA target sequence
ccttgcactaaagggtgtctttgcat

SEQ ID NO: 166842 - DNA, 26 bp, Artificial sequence
  SiRNA target sequence
cttgcactaaagggtgtctttgcatt

SEQ ID NO: 166843 - DNA, 26 bp, Artificial sequence
  SiRNA target sequence
ttgcactaaagggtgtctttgcattt

SEQ ID NO: 166844 - DNA, 26 bp, Artificial sequence
  SiRNA target sequence
tgcactaaagggtgtctttgcatttt

SEQ ID NO: 166845 - DNA, 26 bp, Artificial sequence
  SiRNA target sequence
gcactaaagggtgtctttgcattttt

SEQ ID NO: 166846 - DNA, 26 bp, Artificial sequence
  SiRNA target sequence
cactaaagggtgtctttgcattttta

SEQ ID NO: 166847 - DNA, 26 bp, Artificial sequence
  SiRNA target sequence
actaaagggtgtctttgcatttttaa

SEQ ID NO: 166848 - DNA, 26 bp, Artificial sequence
  SiRNA target sequence
ctaaagggtgtctttgcatttttaaa

SEQ ID NO: 166849 - DNA, 26 bp, Artificial sequence
  SiRNA target sequence
taaagggtgtctttgcatttttaaaa

SEQ ID NO: 166850 - DNA, 26 bp, Artificial sequence
  SiRNA target sequence
aaagggtgtctttgcatttttaaaaa

SEQ ID NO: 166851 - DNA, 26 bp, Artificial sequence
  SiRNA target sequence
aagggtgtctttgcatttttaaaaaa

SEQ ID NO: 166852 - DNA, 26 bp, Artificial sequence
  SiRNA target sequence
agggtgtctttgcatttttaaaaaaa

SEQ ID NO: 166853 - DNA, 26 bp, Artificial sequence
  SiRNA target sequence
gggtgtctttgcatttttaaaaaaag

SEQ ID NO: 166854 - DNA, 26 bp, Artificial sequence
  SiRNA target sequence
ggtgtctttgcatttttaaaaaaaga

SEQ ID NO: 166855 - DNA, 26 bp, Artificial sequence
  SiRNA target sequence
gtgtctttgcatttttaaaaaaagac

SEQ ID NO: 166856 - DNA, 26 bp, Artificial sequence
  SiRNA target sequence
tgtctttgcatttttaaaaaaagaca

SEQ ID NO: 166857 - DNA, 26 bp, Artificial sequence
  SiRNA target sequence
gtctttgcatttttaaaaaaagacaa

SEQ ID NO: 166858 - DNA, 26 bp, Artificial sequence
  SiRNA target sequence
tctttgcatttttaaaaaaagacaat

SEQ ID NO: 166859 - DNA, 26 bp, Artificial sequence
  SiRNA target sequence
ctttgcatttttaaaaaaagacaata

SEQ ID NO: 166860 - DNA, 26 bp, Artificial sequence
  SiRNA target sequence
tttgcatttttaaaaaaagacaatag

SEQ ID NO: 166861 - DNA, 26 bp, Artificial sequence
  SiRNA target sequence
ttgcatttttaaaaaaagacaatagg

SEQ ID NO: 166862 - DNA, 26 bp, Artificial sequence
  SiRNA target sequence
tgcatttttaaaaaaagacaataggc

SEQ ID NO: 166863 - DNA, 26 bp, Artificial sequence
  SiRNA target sequence
gcatttttaaaaaaagacaataggcc

SEQ ID NO: 166864 - DNA, 26 bp, Artificial sequence
  SiRNA target sequence
catttttaaaaaaagacaataggcct

SEQ ID NO: 166865 - DNA, 26 bp, Artificial sequence
  SiRNA target sequence
atttttaaaaaaagacaataggcctg

SEQ ID NO: 166866 - DNA, 26 bp, Artificial sequence
  SiRNA target sequence
tttttaaaaaaagacaataggcctgt

SEQ ID NO: 166867 - DNA, 26 bp, Artificial sequence
  SiRNA target sequence
ttttaaaaaaagacaataggcctgtt

SEQ ID NO: 166868 - DNA, 26 bp, Artificial sequence
  SiRNA target sequence
tttaaaaaaagacaataggcctgttc

SEQ ID NO: 166869 - DNA, 26 bp, Artificial sequence
  SiRNA target sequence
ttaaaaaaagacaataggcctgttca

SEQ ID NO: 166870 - DNA, 26 bp, Artificial sequence
  SiRNA target sequence
taaaaaaagacaataggcctgttcat

SEQ ID NO: 166871 - DNA, 26 bp, Artificial sequence
  SiRNA target sequence
aaaaaaagacaataggcctgttcata

SEQ ID NO: 166872 - DNA, 26 bp, Artificial sequence
  SiRNA target sequence
aaaaaagacaataggcctgttcatat

SEQ ID NO: 166873 - DNA, 26 bp, Artificial sequence
  SiRNA target sequence
aaaaagacaataggcctgttcatatc

SEQ ID NO: 166874 - DNA, 26 bp, Artificial sequence
  SiRNA target sequence
aaaagacaataggcctgttcatatca

SEQ ID NO: 166875 - DNA, 26 bp, Artificial sequence
  SiRNA target sequence
aaagacaataggcctgttcatatcat

SEQ ID NO: 166876 - DNA, 26 bp, Artificial sequence
  SiRNA target sequence
aagacaataggcctgttcatatcatt

SEQ ID NO: 166877 - DNA, 26 bp, Artificial sequence
  SiRNA target sequence
agacaataggcctgttcatatcatta

SEQ ID NO: 166878 - DNA, 26 bp, Artificial sequence
  SiRNA target sequence
gacaataggcctgttcatatcattac

SEQ ID NO: 166879 - DNA, 26 bp, Artificial sequence
  SiRNA target sequence
acaataggcctgttcatatcattacc

SEQ ID NO: 166880 - DNA, 26 bp, Artificial sequence
  SiRNA target sequence
caataggcctgttcatatcattacca

SEQ ID NO: 166881 - DNA, 26 bp, Artificial sequence
  SiRNA target sequence
aataggcctgttcatatcattaccac

SEQ ID NO: 166882 - DNA, 26 bp, Artificial sequence
  SiRNA target sequence
ataggcctgttcatatcattaccaca

SEQ ID NO: 166883 - DNA, 26 bp, Artificial sequence
  SiRNA target sequence
taggcctgttcatatcattaccacac

SEQ ID NO: 166884 - DNA, 26 bp, Artificial sequence
  SiRNA target sequence
aggcctgttcatatcattaccacaca

SEQ ID NO: 166885 - DNA, 26 bp, Artificial sequence
  SiRNA target sequence
ggcctgttcatatcattaccacacaa

SEQ ID NO: 166886 - DNA, 26 bp, Artificial sequence
  SiRNA target sequence
gcctgttcatatcattaccacacaaa

SEQ ID NO: 166887 - DNA, 26 bp, Artificial sequence
  SiRNA target sequence
cctgttcatatcattaccacacaaat

SEQ ID NO: 166888 - DNA, 26 bp, Artificial sequence
  SiRNA target sequence
ctgttcatatcattaccacacaaatt

SEQ ID NO: 166889 - DNA, 26 bp, Artificial sequence
  SiRNA target sequence
tgttcatatcattaccacacaaattg

SEQ ID NO: 166890 - DNA, 26 bp, Artificial sequence
  SiRNA target sequence
gttcatatcattaccacacaaattga

SEQ ID NO: 166891 - DNA, 26 bp, Artificial sequence
  SiRNA target sequence
ttcatatcattaccacacaaattgaa

SEQ ID NO: 166892 - DNA, 26 bp, Artificial sequence
  SiRNA target sequence
tcatatcattaccacacaaattgaac

SEQ ID NO: 166893 - DNA, 26 bp, Artificial sequence
  SiRNA target sequence
catatcattaccacacaaattgaaca

SEQ ID NO: 166894 - DNA, 26 bp, Artificial sequence
  SiRNA target sequence
atatcattaccacacaaattgaacat

SEQ ID NO: 166895 - DNA, 26 bp, Artificial sequence
  SiRNA target sequence
tatcattaccacacaaattgaacata

SEQ ID NO: 166896 - DNA, 26 bp, Artificial sequence
  SiRNA target sequence
atcattaccacacaaattgaacataa

SEQ ID NO: 166897 - DNA, 26 bp, Artificial sequence
  SiRNA target sequence
tcattaccacacaaattgaacataaa

SEQ ID NO: 166898 - DNA, 26 bp, Artificial sequence
  SiRNA target sequence
cattaccacacaaattgaacataaat

SEQ ID NO: 166899 - DNA, 26 bp, Artificial sequence
  SiRNA target sequence
attaccacacaaattgaacataaatg

SEQ ID NO: 166900 - DNA, 26 bp, Artificial sequence
  SiRNA target sequence
ttaccacacaaattgaacataaatgt

SEQ ID NO: 166901 - DNA, 26 bp, Artificial sequence
  SiRNA target sequence
taccacacaaattgaacataaatgtg

SEQ ID NO: 166902 - DNA, 26 bp, Artificial sequence
  SiRNA target sequence
accacacaaattgaacataaatgtgt

SEQ ID NO: 166903 - DNA, 26 bp, Artificial sequence
  SiRNA target sequence
ccacacaaattgaacataaatgtgta

SEQ ID NO: 166904 - DNA, 26 bp, Artificial sequence
  SiRNA target sequence
cacacaaattgaacataaatgtgtat

SEQ ID NO: 166905 - DNA, 26 bp, Artificial sequence
  SiRNA target sequence
acacaaattgaacataaatgtgtatt

SEQ ID NO: 166906 - DNA, 26 bp, Artificial sequence
  SiRNA target sequence
cacaaattgaacataaatgtgtattg

SEQ ID NO: 166907 - DNA, 26 bp, Artificial sequence
  SiRNA target sequence
acaaattgaacataaatgtgtattgg

SEQ ID NO: 166908 - DNA, 26 bp, Artificial sequence
  SiRNA target sequence
caaattgaacataaatgtgtattgga

SEQ ID NO: 166909 - DNA, 26 bp, Artificial sequence
  SiRNA target sequence
aaattgaacataaatgtgtattggac

SEQ ID NO: 166910 - DNA, 26 bp, Artificial sequence
  SiRNA target sequence
aattgaacataaatgtgtattggaca

SEQ ID NO: 166911 - DNA, 26 bp, Artificial sequence
  SiRNA target sequence
attgaacataaatgtgtattggacac

SEQ ID NO: 166912 - DNA, 26 bp, Artificial sequence
  SiRNA target sequence
ttgaacataaatgtgtattggacaca

SEQ ID NO: 166913 - DNA, 26 bp, Artificial sequence
  SiRNA target sequence
tgaacataaatgtgtattggacacat

SEQ ID NO: 166914 - DNA, 26 bp, Artificial sequence
  SiRNA target sequence
gaacataaatgtgtattggacacatg

SEQ ID NO: 166915 - DNA, 26 bp, Artificial sequence
  SiRNA target sequence
aacataaatgtgtattggacacatgt

SEQ ID NO: 166916 - DNA, 26 bp, Artificial sequence
  SiRNA target sequence
acataaatgtgtattggacacatgta

SEQ ID NO: 166917 - DNA, 26 bp, Artificial sequence
  SiRNA target sequence
cataaatgtgtattggacacatgtag

SEQ ID NO: 166918 - DNA, 26 bp, Artificial sequence
  SiRNA target sequence
ataaatgtgtattggacacatgtaga

SEQ ID NO: 166919 - DNA, 26 bp, Artificial sequence
  SiRNA target sequence
taaatgtgtattggacacatgtagaa

SEQ ID NO: 166920 - DNA, 26 bp, Artificial sequence
  SiRNA target sequence
aaatgtgtattggacacatgtagaag

SEQ ID NO: 166921 - DNA, 26 bp, Artificial sequence
  SiRNA target sequence
aatgtgtattggacacatgtagaaga

SEQ ID NO: 166922 - DNA, 26 bp, Artificial sequence
  SiRNA target sequence
atgtgtattggacacatgtagaagat

SEQ ID NO: 166923 - DNA, 26 bp, Artificial sequence
  SiRNA target sequence
tgtgtattggacacatgtagaagatt

SEQ ID NO: 166924 - DNA, 26 bp, Artificial sequence
  SiRNA target sequence
gtgtattggacacatgtagaagatta

SEQ ID NO: 166925 - DNA, 26 bp, Artificial sequence
  SiRNA target sequence
tgtattggacacatgtagaagattag

SEQ ID NO: 166926 - DNA, 26 bp, Artificial sequence
  SiRNA target sequence
gtattggacacatgtagaagattaga

SEQ ID NO: 166927 - DNA, 26 bp, Artificial sequence
  SiRNA target sequence
tattggacacatgtagaagattagaa

SEQ ID NO: 166928 - DNA, 26 bp, Artificial sequence
  SiRNA target sequence
attggacacatgtagaagattagaag

SEQ ID NO: 166929 - DNA, 26 bp, Artificial sequence
  SiRNA target sequence
ttggacacatgtagaagattagaaga

SEQ ID NO: 166930 - DNA, 26 bp, Artificial sequence
  SiRNA target sequence
tggacacatgtagaagattagaagaa

SEQ ID NO: 166931 - DNA, 26 bp, Artificial sequence
  SiRNA target sequence
ggacacatgtagaagattagaagaag

SEQ ID NO: 166932 - DNA, 26 bp, Artificial sequence
  SiRNA target sequence
gacacatgtagaagattagaagaaga

SEQ ID NO: 166933 - DNA, 26 bp, Artificial sequence
  SiRNA target sequence
acacatgtagaagattagaagaagaa

SEQ ID NO: 166934 - DNA, 26 bp, Artificial sequence
  SiRNA target sequence
cacatgtagaagattagaagaagaag

SEQ ID NO: 166935 - DNA, 26 bp, Artificial sequence
  SiRNA target sequence
acatgtagaagattagaagaagaagg

SEQ ID NO: 166936 - DNA, 26 bp, Artificial sequence
  SiRNA target sequence
catgtagaagattagaagaagaagga

SEQ ID NO: 166937 - DNA, 26 bp, Artificial sequence
  SiRNA target sequence
atgtagaagattagaagaagaaggag

SEQ ID NO: 166938 - DNA, 26 bp, Artificial sequence
  SiRNA target sequence
tgtagaagattagaagaagaaggagc

SEQ ID NO: 166939 - DNA, 26 bp, Artificial sequence
  SiRNA target sequence
gtagaagattagaagaagaaggagct

SEQ ID NO: 166940 - DNA, 26 bp, Artificial sequence
  SiRNA target sequence
tagaagattagaagaagaaggagcta

SEQ ID NO: 166941 - DNA, 26 bp, Artificial sequence
  SiRNA target sequence
agaagattagaagaagaaggagctac

SEQ ID NO: 166942 - DNA, 26 bp, Artificial sequence
  SiRNA target sequence
gaagattagaagaagaaggagctaca

SEQ ID NO: 166943 - DNA, 26 bp, Artificial sequence
  SiRNA target sequence
aagattagaagaagaaggagctacag

SEQ ID NO: 166944 - DNA, 26 bp, Artificial sequence
  SiRNA target sequence
agattagaagaagaaggagctacagt

SEQ ID NO: 166945 - DNA, 26 bp, Artificial sequence
  SiRNA target sequence
gattagaagaagaaggagctacagtg

SEQ ID NO: 166946 - DNA, 26 bp, Artificial sequence
  SiRNA target sequence
attagaagaagaaggagctacagtga

SEQ ID NO: 166947 - DNA, 26 bp, Artificial sequence
  SiRNA target sequence
ttagaagaagaaggagctacagtgac

SEQ ID NO: 166948 - DNA, 26 bp, Artificial sequence
  SiRNA target sequence
tagaagaagaaggagctacagtgact

SEQ ID NO: 166949 - DNA, 26 bp, Artificial sequence
  SiRNA target sequence
agaagaagaaggagctacagtgactt

SEQ ID NO: 166950 - DNA, 26 bp, Artificial sequence
  SiRNA target sequence
gaagaagaaggagctacagtgactta

SEQ ID NO: 166951 - DNA, 26 bp, Artificial sequence
  SiRNA target sequence
aagaagaaggagctacagtgacttat

SEQ ID NO: 166952 - DNA, 26 bp, Artificial sequence
  SiRNA target sequence
agaagaaggagctacagtgacttatt

SEQ ID NO: 166953 - DNA, 26 bp, Artificial sequence
  SiRNA target sequence
gaagaaggagctacagtgacttattt

SEQ ID NO: 166954 - DNA, 26 bp, Artificial sequence
  SiRNA target sequence
aagaaggagctacagtgacttatttg

SEQ ID NO: 166955 - DNA, 26 bp, Artificial sequence
  SiRNA target sequence
agaaggagctacagtgacttatttgc

SEQ ID NO: 166956 - DNA, 26 bp, Artificial sequence
  SiRNA target sequence
gaaggagctacagtgacttatttgcc

SEQ ID NO: 166957 - DNA, 26 bp, Artificial sequence
  SiRNA target sequence
aaggagctacagtgacttatttgcct

SEQ ID NO: 166958 - DNA, 26 bp, Artificial sequence
  SiRNA target sequence
aggagctacagtgacttatttgcctg

SEQ ID NO: 166959 - DNA, 26 bp, Artificial sequence
  SiRNA target sequence
ggagctacagtgacttatttgcctgt

SEQ ID NO: 166960 - DNA, 26 bp, Artificial sequence
  SiRNA target sequence
gagctacagtgacttatttgcctgta

SEQ ID NO: 166961 - DNA, 26 bp, Artificial sequence
  SiRNA target sequence
agctacagtgacttatttgcctgtag

SEQ ID NO: 166962 - DNA, 26 bp, Artificial sequence
  SiRNA target sequence
gctacagtgacttatttgcctgtaga

SEQ ID NO: 166963 - DNA, 26 bp, Artificial sequence
  SiRNA target sequence
ctacagtgacttatttgcctgtagat

SEQ ID NO: 166964 - DNA, 26 bp, Artificial sequence
  SiRNA target sequence
tacagtgacttatttgcctgtagata

SEQ ID NO: 166965 - DNA, 26 bp, Artificial sequence
  SiRNA target sequence
acagtgacttatttgcctgtagataa

SEQ ID NO: 166966 - DNA, 26 bp, Artificial sequence
  SiRNA target sequence
cagtgacttatttgcctgtagataaa

SEQ ID NO: 166967 - DNA, 26 bp, Artificial sequence
  SiRNA target sequence
agtgacttatttgcctgtagataaaa

SEQ ID NO: 166968 - DNA, 26 bp, Artificial sequence
  SiRNA target sequence
gtgacttatttgcctgtagataaaaa

SEQ ID NO: 166969 - DNA, 26 bp, Artificial sequence
  SiRNA target sequence
tgacttatttgcctgtagataaaaat

SEQ ID NO: 166970 - DNA, 26 bp, Artificial sequence
  SiRNA target sequence
gacttatttgcctgtagataaaaatg

SEQ ID NO: 166971 - DNA, 26 bp, Artificial sequence
  SiRNA target sequence
acttatttgcctgtagataaaaatgg

SEQ ID NO: 166972 - DNA, 26 bp, Artificial sequence
  SiRNA target sequence
cttatttgcctgtagataaaaatgga

SEQ ID NO: 166973 - DNA, 26 bp, Artificial sequence
  SiRNA target sequence
ttatttgcctgtagataaaaatggaa

SEQ ID NO: 166974 - DNA, 26 bp, Artificial sequence
  SiRNA target sequence
tatttgcctgtagataaaaatggaat

SEQ ID NO: 166975 - DNA, 26 bp, Artificial sequence
  SiRNA target sequence
atttgcctgtagataaaaatggaata

SEQ ID NO: 166976 - DNA, 26 bp, Artificial sequence
  SiRNA target sequence
tttgcctgtagataaaaatggaatag

SEQ ID NO: 166977 - DNA, 26 bp, Artificial sequence
  SiRNA target sequence
ttgcctgtagataaaaatggaatagt

SEQ ID NO: 166978 - DNA, 26 bp, Artificial sequence
  SiRNA target sequence
tgcctgtagataaaaatggaatagta

SEQ ID NO: 166979 - DNA, 26 bp, Artificial sequence
  SiRNA target sequence
gcctgtagataaaaatggaatagtag

SEQ ID NO: 166980 - DNA, 26 bp, Artificial sequence
  SiRNA target sequence
cctgtagataaaaatggaatagtaga

SEQ ID NO: 166981 - DNA, 26 bp, Artificial sequence
  SiRNA target sequence
ctgtagataaaaatggaatagtagat

SEQ ID NO: 166982 - DNA, 26 bp, Artificial sequence
  SiRNA target sequence
tgtagataaaaatggaatagtagatc

SEQ ID NO: 166983 - DNA, 26 bp, Artificial sequence
  SiRNA target sequence
gtagataaaaatggaatagtagatcc

SEQ ID NO: 166984 - DNA, 26 bp, Artificial sequence
  SiRNA target sequence
tagataaaaatggaatagtagatccg

SEQ ID NO: 166985 - DNA, 26 bp, Artificial sequence
  SiRNA target sequence
agataaaaatggaatagtagatccgc

SEQ ID NO: 166986 - DNA, 26 bp, Artificial sequence
  SiRNA target sequence
gataaaaatggaatagtagatccgca

SEQ ID NO: 166987 - DNA, 26 bp, Artificial sequence
  SiRNA target sequence
ataaaaatggaatagtagatccgcaa

SEQ ID NO: 166988 - DNA, 26 bp, Artificial sequence
  SiRNA target sequence
taaaaatggaatagtagatccgcaat

SEQ ID NO: 166989 - DNA, 26 bp, Artificial sequence
  SiRNA target sequence
aaaaatggaatagtagatccgcaatt

SEQ ID NO: 166990 - DNA, 26 bp, Artificial sequence
  SiRNA target sequence
aaaatggaatagtagatccgcaatta

SEQ ID NO: 166991 - DNA, 26 bp, Artificial sequence
  SiRNA target sequence
aaatggaatagtagatccgcaattaa

SEQ ID NO: 166992 - DNA, 26 bp, Artificial sequence
  SiRNA target sequence
aatggaatagtagatccgcaattaat

SEQ ID NO: 166993 - DNA, 26 bp, Artificial sequence
  SiRNA target sequence
atggaatagtagatccgcaattaata

SEQ ID NO: 166994 - DNA, 26 bp, Artificial sequence
  SiRNA target sequence
tggaatagtagatccgcaattaataa

SEQ ID NO: 166995 - DNA, 26 bp, Artificial sequence
  SiRNA target sequence
ggaatagtagatccgcaattaataaa

SEQ ID NO: 166996 - DNA, 26 bp, Artificial sequence
  SiRNA target sequence
gaatagtagatccgcaattaataaaa

SEQ ID NO: 166997 - DNA, 26 bp, Artificial sequence
  SiRNA target sequence
aatagtagatccgcaattaataaaaa

SEQ ID NO: 166998 - DNA, 26 bp, Artificial sequence
  SiRNA target sequence
atagtagatccgcaattaataaaaaa

SEQ ID NO: 166999 - DNA, 26 bp, Artificial sequence
  SiRNA target sequence
tagtagatccgcaattaataaaaaac

SEQ ID NO: 167000 - DNA, 26 bp, Artificial sequence
  SiRNA target sequence
agtagatccgcaattaataaaaaaca

SEQ ID NO: 167001 - DNA, 26 bp, Artificial sequence
  SiRNA target sequence
gtagatccgcaattaataaaaaacag

SEQ ID NO: 167002 - DNA, 26 bp, Artificial sequence
  SiRNA target sequence
tagatccgcaattaataaaaaacagt

SEQ ID NO: 167003 - DNA, 26 bp, Artificial sequence
  SiRNA target sequence
agatccgcaattaataaaaaacagta

SEQ ID NO: 167004 - DNA, 26 bp, Artificial sequence
  SiRNA target sequence
gatccgcaattaataaaaaacagtat

SEQ ID NO: 167005 - DNA, 26 bp, Artificial sequence
  SiRNA target sequence
atccgcaattaataaaaaacagtatt

SEQ ID NO: 167006 - DNA, 26 bp, Artificial sequence
  SiRNA target sequence
tccgcaattaataaaaaacagtatta

SEQ ID NO: 167007 - DNA, 26 bp, Artificial sequence
  SiRNA target sequence
ccgcaattaataaaaaacagtattac

SEQ ID NO: 167008 - DNA, 26 bp, Artificial sequence
  SiRNA target sequence
cgcaattaataaaaaacagtattact

SEQ ID NO: 167009 - DNA, 26 bp, Artificial sequence
  SiRNA target sequence
gcaattaataaaaaacagtattacta

SEQ ID NO: 167010 - DNA, 26 bp, Artificial sequence
  SiRNA target sequence
caattaataaaaaacagtattactaa

SEQ ID NO: 167011 - DNA, 26 bp, Artificial sequence
  SiRNA target sequence
aattaataaaaaacagtattactaaa

SEQ ID NO: 167012 - DNA, 26 bp, Artificial sequence
  SiRNA target sequence
attaataaaaaacagtattactaaag

SEQ ID NO: 167013 - DNA, 26 bp, Artificial sequence
  SiRNA target sequence
ttaataaaaaacagtattactaaaga

SEQ ID NO: 167014 - DNA, 26 bp, Artificial sequence
  SiRNA target sequence
taataaaaaacagtattactaaagat

SEQ ID NO: 167015 - DNA, 26 bp, Artificial sequence
  SiRNA target sequence
aataaaaaacagtattactaaagata

SEQ ID NO: 167016 - DNA, 26 bp, Artificial sequence
  SiRNA target sequence
ataaaaaacagtattactaaagatac

SEQ ID NO: 167017 - DNA, 26 bp, Artificial sequence
  SiRNA target sequence
taaaaaacagtattactaaagatacc

SEQ ID NO: 167018 - DNA, 26 bp, Artificial sequence
  SiRNA target sequence
aaaaaacagtattactaaagataccg

SEQ ID NO: 167019 - DNA, 26 bp, Artificial sequence
  SiRNA target sequence
aaaaacagtattactaaagataccgc

SEQ ID NO: 167020 - DNA, 26 bp, Artificial sequence
  SiRNA target sequence
aaaacagtattactaaagataccgct

SEQ ID NO: 167021 - DNA, 26 bp, Artificial sequence
  SiRNA target sequence
aaacagtattactaaagataccgctt

SEQ ID NO: 167022 - DNA, 26 bp, Artificial sequence
  SiRNA target sequence
aacagtattactaaagataccgcttt

SEQ ID NO: 167023 - DNA, 26 bp, Artificial sequence
  SiRNA target sequence
acagtattactaaagataccgctttg

SEQ ID NO: 167024 - DNA, 26 bp, Artificial sequence
  SiRNA target sequence
cagtattactaaagataccgctttgg

SEQ ID NO: 167025 - DNA, 26 bp, Artificial sequence
  SiRNA target sequence
agtattactaaagataccgctttggt

SEQ ID NO: 167026 - DNA, 26 bp, Artificial sequence
  SiRNA target sequence
gtattactaaagataccgctttggtg

SEQ ID NO: 167027 - DNA, 26 bp, Artificial sequence
  SiRNA target sequence
tattactaaagataccgctttggtgt

SEQ ID NO: 167028 - DNA, 26 bp, Artificial sequence
  SiRNA target sequence
attactaaagataccgctttggtgtc

SEQ ID NO: 167029 - DNA, 26 bp, Artificial sequence
  SiRNA target sequence
ttactaaagataccgctttggtgtct

SEQ ID NO: 167030 - DNA, 26 bp, Artificial sequence
  SiRNA target sequence
tactaaagataccgctttggtgtctg

SEQ ID NO: 167031 - DNA, 26 bp, Artificial sequence
  SiRNA target sequence
actaaagataccgctttggtgtctgt

SEQ ID NO: 167032 - DNA, 26 bp, Artificial sequence
  SiRNA target sequence
ctaaagataccgctttggtgtctgtt

SEQ ID NO: 167033 - DNA, 26 bp, Artificial sequence
  SiRNA target sequence
taaagataccgctttggtgtctgtta

SEQ ID NO: 167034 - DNA, 26 bp, Artificial sequence
  SiRNA target sequence
aaagataccgctttggtgtctgttat

SEQ ID NO: 167035 - DNA, 26 bp, Artificial sequence
  SiRNA target sequence
aagataccgctttggtgtctgttatg

SEQ ID NO: 167036 - DNA, 26 bp, Artificial sequence
  SiRNA target sequence
agataccgctttggtgtctgttatgg

SEQ ID NO: 167037 - DNA, 26 bp, Artificial sequence
  SiRNA target sequence
gataccgctttggtgtctgttatggc

SEQ ID NO: 167038 - DNA, 26 bp, Artificial sequence
  SiRNA target sequence
ataccgctttggtgtctgttatggct

SEQ ID NO: 167039 - DNA, 26 bp, Artificial sequence
  SiRNA target sequence
taccgctttggtgtctgttatggctg

SEQ ID NO: 167040 - DNA, 26 bp, Artificial sequence
  SiRNA target sequence
accgctttggtgtctgttatggctgt

SEQ ID NO: 167041 - DNA, 26 bp, Artificial sequence
  SiRNA target sequence
ccgctttggtgtctgttatggctgtt

SEQ ID NO: 167042 - DNA, 26 bp, Artificial sequence
  SiRNA target sequence
cgctttggtgtctgttatggctgtta

SEQ ID NO: 167043 - DNA, 26 bp, Artificial sequence
  SiRNA target sequence
gctttggtgtctgttatggctgttaa

SEQ ID NO: 167044 - DNA, 26 bp, Artificial sequence
  SiRNA target sequence
ctttggtgtctgttatggctgttaac

SEQ ID NO: 167045 - DNA, 26 bp, Artificial sequence
  SiRNA target sequence
tttggtgtctgttatggctgttaaca

SEQ ID NO: 167046 - DNA, 26 bp, Artificial sequence
  SiRNA target sequence
ttggtgtctgttatggctgttaacaa

SEQ ID NO: 167047 - DNA, 26 bp, Artificial sequence
  SiRNA target sequence
tggtgtctgttatggctgttaacaac

SEQ ID NO: 167048 - DNA, 26 bp, Artificial sequence
  SiRNA target sequence
ggtgtctgttatggctgttaacaacg

SEQ ID NO: 167049 - DNA, 26 bp, Artificial sequence
  SiRNA target sequence
gtgtctgttatggctgttaacaacga

SEQ ID NO: 167050 - DNA, 26 bp, Artificial sequence
  SiRNA target sequence
tgtctgttatggctgttaacaacgaa

SEQ ID NO: 167051 - DNA, 26 bp, Artificial sequence
  SiRNA target sequence
gtctgttatggctgttaacaacgaaa

SEQ ID NO: 167052 - DNA, 26 bp, Artificial sequence
  SiRNA target sequence
tctgttatggctgttaacaacgaaat

SEQ ID NO: 167053 - DNA, 26 bp, Artificial sequence
  SiRNA target sequence
ctgttatggctgttaacaacgaaatg

SEQ ID NO: 167054 - DNA, 26 bp, Artificial sequence
  SiRNA target sequence
tgttatggctgttaacaacgaaatgg

SEQ ID NO: 167055 - DNA, 26 bp, Artificial sequence
  SiRNA target sequence
gttatggctgttaacaacgaaatggg

SEQ ID NO: 167056 - DNA, 26 bp, Artificial sequence
  SiRNA target sequence
ttatggctgttaacaacgaaatggga

SEQ ID NO: 167057 - DNA, 26 bp, Artificial sequence
  SiRNA target sequence
tatggctgttaacaacgaaatgggag

SEQ ID NO: 167058 - DNA, 26 bp, Artificial sequence
  SiRNA target sequence
atggctgttaacaacgaaatgggagc

SEQ ID NO: 167059 - DNA, 26 bp, Artificial sequence
  SiRNA target sequence
tggctgttaacaacgaaatgggagca

SEQ ID NO: 167060 - DNA, 26 bp, Artificial sequence
  SiRNA target sequence
ggctgttaacaacgaaatgggagcaa

SEQ ID NO: 167061 - DNA, 26 bp, Artificial sequence
  SiRNA target sequence
gctgttaacaacgaaatgggagcaat

SEQ ID NO: 167062 - DNA, 26 bp, Artificial sequence
  SiRNA target sequence
ctgttaacaacgaaatgggagcaata

SEQ ID NO: 167063 - DNA, 26 bp, Artificial sequence
  SiRNA target sequence
tgttaacaacgaaatgggagcaatac

SEQ ID NO: 167064 - DNA, 26 bp, Artificial sequence
  SiRNA target sequence
gttaacaacgaaatgggagcaataca

SEQ ID NO: 167065 - DNA, 26 bp, Artificial sequence
  SiRNA target sequence
ttaacaacgaaatgggagcaatacaa

SEQ ID NO: 167066 - DNA, 26 bp, Artificial sequence
  SiRNA target sequence
taacaacgaaatgggagcaatacaac

SEQ ID NO: 167067 - DNA, 26 bp, Artificial sequence
  SiRNA target sequence
aacaacgaaatgggagcaatacaacc

SEQ ID NO: 167068 - DNA, 26 bp, Artificial sequence
  SiRNA target sequence
acaacgaaatgggagcaatacaaccg

SEQ ID NO: 167069 - DNA, 26 bp, Artificial sequence
  SiRNA target sequence
caacgaaatgggagcaatacaaccgc

SEQ ID NO: 167070 - DNA, 26 bp, Artificial sequence
  SiRNA target sequence
aacgaaatgggagcaatacaaccgct

SEQ ID NO: 167071 - DNA, 26 bp, Artificial sequence
  SiRNA target sequence
acgaaatgggagcaatacaaccgctt

SEQ ID NO: 167072 - DNA, 26 bp, Artificial sequence
  SiRNA target sequence
cgaaatgggagcaatacaaccgctta

SEQ ID NO: 167073 - DNA, 26 bp, Artificial sequence
  SiRNA target sequence
gaaatgggagcaatacaaccgcttaa

SEQ ID NO: 167074 - DNA, 26 bp, Artificial sequence
  SiRNA target sequence
aaatgggagcaatacaaccgcttaaa

SEQ ID NO: 167075 - DNA, 26 bp, Artificial sequence
  SiRNA target sequence
aatgggagcaatacaaccgcttaaag

SEQ ID NO: 167076 - DNA, 26 bp, Artificial sequence
  SiRNA target sequence
atgggagcaatacaaccgcttaaaga

SEQ ID NO: 167077 - DNA, 26 bp, Artificial sequence
  SiRNA target sequence
tgggagcaatacaaccgcttaaagaa

SEQ ID NO: 167078 - DNA, 26 bp, Artificial sequence
  SiRNA target sequence
gggagcaatacaaccgcttaaagaaa

SEQ ID NO: 167079 - DNA, 26 bp, Artificial sequence
  SiRNA target sequence
ggagcaatacaaccgcttaaagaaat

SEQ ID NO: 167080 - DNA, 26 bp, Artificial sequence
  SiRNA target sequence
gagcaatacaaccgcttaaagaaata

SEQ ID NO: 167081 - DNA, 26 bp, Artificial sequence
  SiRNA target sequence
agcaatacaaccgcttaaagaaatag

SEQ ID NO: 167082 - DNA, 26 bp, Artificial sequence
  SiRNA target sequence
gcaatacaaccgcttaaagaaatagg

SEQ ID NO: 167083 - DNA, 26 bp, Artificial sequence
  SiRNA target sequence
caatacaaccgcttaaagaaatagga

SEQ ID NO: 167084 - DNA, 26 bp, Artificial sequence
  SiRNA target sequence
aatacaaccgcttaaagaaataggaa

SEQ ID NO: 167085 - DNA, 26 bp, Artificial sequence
  SiRNA target sequence
atacaaccgcttaaagaaataggaag

SEQ ID NO: 167086 - DNA, 26 bp, Artificial sequence
  SiRNA target sequence
tacaaccgcttaaagaaataggaaga

SEQ ID NO: 167087 - DNA, 26 bp, Artificial sequence
  SiRNA target sequence
acaaccgcttaaagaaataggaagaa

SEQ ID NO: 167088 - DNA, 26 bp, Artificial sequence
  SiRNA target sequence
caaccgcttaaagaaataggaagaat

SEQ ID NO: 167089 - DNA, 26 bp, Artificial sequence
  SiRNA target sequence
aaccgcttaaagaaataggaagaata

SEQ ID NO: 167090 - DNA, 26 bp, Artificial sequence
  SiRNA target sequence
accgcttaaagaaataggaagaatat

SEQ ID NO: 167091 - DNA, 26 bp, Artificial sequence
  SiRNA target sequence
ccgcttaaagaaataggaagaatatg

SEQ ID NO: 167092 - DNA, 26 bp, Artificial sequence
  SiRNA target sequence
cgcttaaagaaataggaagaatatgt

SEQ ID NO: 167093 - DNA, 26 bp, Artificial sequence
  SiRNA target sequence
gcttaaagaaataggaagaatatgta

SEQ ID NO: 167094 - DNA, 26 bp, Artificial sequence
  SiRNA target sequence
cttaaagaaataggaagaatatgtaa

SEQ ID NO: 167095 - DNA, 26 bp, Artificial sequence
  SiRNA target sequence
ttaaagaaataggaagaatatgtaaa

SEQ ID NO: 167096 - DNA, 26 bp, Artificial sequence
  SiRNA target sequence
taaagaaataggaagaatatgtaaag

SEQ ID NO: 167097 - DNA, 26 bp, Artificial sequence
  SiRNA target sequence
aaagaaataggaagaatatgtaaaga

SEQ ID NO: 167098 - DNA, 26 bp, Artificial sequence
  SiRNA target sequence
aagaaataggaagaatatgtaaagaa

SEQ ID NO: 167099 - DNA, 26 bp, Artificial sequence
  SiRNA target sequence
agaaataggaagaatatgtaaagaaa

SEQ ID NO: 167100 - DNA, 26 bp, Artificial sequence
  SiRNA target sequence
gaaataggaagaatatgtaaagaaaa

SEQ ID NO: 167101 - DNA, 26 bp, Artificial sequence
  SiRNA target sequence
aaataggaagaatatgtaaagaaaat

SEQ ID NO: 167102 - DNA, 26 bp, Artificial sequence
  SiRNA target sequence
aataggaagaatatgtaaagaaaata

SEQ ID NO: 167103 - DNA, 26 bp, Artificial sequence
  SiRNA target sequence
ataggaagaatatgtaaagaaaataa

SEQ ID NO: 167104 - DNA, 26 bp, Artificial sequence
  SiRNA target sequence
taggaagaatatgtaaagaaaataat

SEQ ID NO: 167105 - DNA, 26 bp, Artificial sequence
  SiRNA target sequence
aggaagaatatgtaaagaaaataata

SEQ ID NO: 167106 - DNA, 26 bp, Artificial sequence
  SiRNA target sequence
ggaagaatatgtaaagaaaataatat

SEQ ID NO: 167107 - DNA, 26 bp, Artificial sequence
  SiRNA target sequence
gaagaatatgtaaagaaaataatatt

SEQ ID NO: 167108 - DNA, 26 bp, Artificial sequence
  SiRNA target sequence
aagaatatgtaaagaaaataatattt

SEQ ID NO: 167109 - DNA, 26 bp, Artificial sequence
  SiRNA target sequence
agaatatgtaaagaaaataatatttt

SEQ ID NO: 167110 - DNA, 26 bp, Artificial sequence
  SiRNA target sequence
gaatatgtaaagaaaataatatttta

SEQ ID NO: 167111 - DNA, 26 bp, Artificial sequence
  SiRNA target sequence
aatatgtaaagaaaataatattttat

SEQ ID NO: 167112 - DNA, 26 bp, Artificial sequence
  SiRNA target sequence
atatgtaaagaaaataatattttatt

SEQ ID NO: 167113 - DNA, 26 bp, Artificial sequence
  SiRNA target sequence
tatgtaaagaaaataatattttattt

SEQ ID NO: 167114 - DNA, 26 bp, Artificial sequence
  SiRNA target sequence
atgtaaagaaaataatattttatttc

SEQ ID NO: 167115 - DNA, 26 bp, Artificial sequence
  SiRNA target sequence
tgtaaagaaaataatattttatttca

SEQ ID NO: 167116 - DNA, 26 bp, Artificial sequence
  SiRNA target sequence
gtaaagaaaataatattttatttcac

SEQ ID NO: 167117 - DNA, 26 bp, Artificial sequence
  SiRNA target sequence
taaagaaaataatattttatttcaca

SEQ ID NO: 167118 - DNA, 26 bp, Artificial sequence
  SiRNA target sequence
aaagaaaataatattttatttcacac

SEQ ID NO: 167119 - DNA, 26 bp, Artificial sequence
  SiRNA target sequence
aagaaaataatattttatttcacact

SEQ ID NO: 167120 - DNA, 26 bp, Artificial sequence
  SiRNA target sequence
agaaaataatattttatttcacactg

SEQ ID NO: 167121 - DNA, 26 bp, Artificial sequence
  SiRNA target sequence
gaaaataatattttatttcacactga

SEQ ID NO: 167122 - DNA, 26 bp, Artificial sequence
  SiRNA target sequence
aaaataatattttatttcacactgat

SEQ ID NO: 167123 - DNA, 26 bp, Artificial sequence
  SiRNA target sequence
aaataatattttatttcacactgatg

SEQ ID NO: 167124 - DNA, 26 bp, Artificial sequence
  SiRNA target sequence
aataatattttatttcacactgatgc

SEQ ID NO: 167125 - DNA, 26 bp, Artificial sequence
  SiRNA target sequence
ataatattttatttcacactgatgca

SEQ ID NO: 167126 - DNA, 26 bp, Artificial sequence
  SiRNA target sequence
taatattttatttcacactgatgcag

SEQ ID NO: 167127 - DNA, 26 bp, Artificial sequence
  SiRNA target sequence
aatattttatttcacactgatgcagc

SEQ ID NO: 167128 - DNA, 26 bp, Artificial sequence
  SiRNA target sequence
atattttatttcacactgatgcagca

SEQ ID NO: 167129 - DNA, 26 bp, Artificial sequence
  SiRNA target sequence
tattttatttcacactgatgcagcac

SEQ ID NO: 167130 - DNA, 26 bp, Artificial sequence
  SiRNA target sequence
attttatttcacactgatgcagcaca

SEQ ID NO: 167131 - DNA, 26 bp, Artificial sequence
  SiRNA target sequence
ttttatttcacactgatgcagcacaa

SEQ ID NO: 167132 - DNA, 26 bp, Artificial sequence
  SiRNA target sequence
tttatttcacactgatgcagcacaag

SEQ ID NO: 167133 - DNA, 26 bp, Artificial sequence
  SiRNA target sequence
ttatttcacactgatgcagcacaagc

SEQ ID NO: 167134 - DNA, 26 bp, Artificial sequence
  SiRNA target sequence
tatttcacactgatgcagcacaagca

SEQ ID NO: 167135 - DNA, 26 bp, Artificial sequence
  SiRNA target sequence
atttcacactgatgcagcacaagcag

SEQ ID NO: 167136 - DNA, 26 bp, Artificial sequence
  SiRNA target sequence
tttcacactgatgcagcacaagcagt

SEQ ID NO: 167137 - DNA, 26 bp, Artificial sequence
  SiRNA target sequence
ttcacactgatgcagcacaagcagtt

SEQ ID NO: 167138 - DNA, 26 bp, Artificial sequence
  SiRNA target sequence
tcacactgatgcagcacaagcagttg

SEQ ID NO: 167139 - DNA, 26 bp, Artificial sequence
  SiRNA target sequence
cacactgatgcagcacaagcagttgg

SEQ ID NO: 167140 - DNA, 26 bp, Artificial sequence
  SiRNA target sequence
acactgatgcagcacaagcagttggt

SEQ ID NO: 167141 - DNA, 26 bp, Artificial sequence
  SiRNA target sequence
cactgatgcagcacaagcagttggta

SEQ ID NO: 167142 - DNA, 26 bp, Artificial sequence
  SiRNA target sequence
actgatgcagcacaagcagttggtaa

SEQ ID NO: 167143 - DNA, 26 bp, Artificial sequence
  SiRNA target sequence
ctgatgcagcacaagcagttggtaat

SEQ ID NO: 167144 - DNA, 26 bp, Artificial sequence
  SiRNA target sequence
tgatgcagcacaagcagttggtaata

SEQ ID NO: 167145 - DNA, 26 bp, Artificial sequence
  SiRNA target sequence
gatgcagcacaagcagttggtaatat

SEQ ID NO: 167146 - DNA, 26 bp, Artificial sequence
  SiRNA target sequence
atgcagcacaagcagttggtaatata

SEQ ID NO: 167147 - DNA, 26 bp, Artificial sequence
  SiRNA target sequence
tgcagcacaagcagttggtaatatag

SEQ ID NO: 167148 - DNA, 26 bp, Artificial sequence
  SiRNA target sequence
gcagcacaagcagttggtaatataga

SEQ ID NO: 167149 - DNA, 26 bp, Artificial sequence
  SiRNA target sequence
cagcacaagcagttggtaatatagat

SEQ ID NO: 167150 - DNA, 26 bp, Artificial sequence
  SiRNA target sequence
agcacaagcagttggtaatatagata

SEQ ID NO: 167151 - DNA, 26 bp, Artificial sequence
  SiRNA target sequence
gcacaagcagttggtaatatagatat

SEQ ID NO: 167152 - DNA, 26 bp, Artificial sequence
  SiRNA target sequence
cacaagcagttggtaatatagatatt

SEQ ID NO: 167153 - DNA, 26 bp, Artificial sequence
  SiRNA target sequence
acaagcagttggtaatatagatattg

SEQ ID NO: 167154 - DNA, 26 bp, Artificial sequence
  SiRNA target sequence
caagcagttggtaatatagatattga

SEQ ID NO: 167155 - DNA, 26 bp, Artificial sequence
  SiRNA target sequence
aagcagttggtaatatagatattgat

SEQ ID NO: 167156 - DNA, 26 bp, Artificial sequence
  SiRNA target sequence
agcagttggtaatatagatattgatg

SEQ ID NO: 167157 - DNA, 26 bp, Artificial sequence
  SiRNA target sequence
gcagttggtaatatagatattgatgt

SEQ ID NO: 167158 - DNA, 26 bp, Artificial sequence
  SiRNA target sequence
cagttggtaatatagatattgatgtc

SEQ ID NO: 167159 - DNA, 26 bp, Artificial sequence
  SiRNA target sequence
agttggtaatatagatattgatgtca

SEQ ID NO: 167160 - DNA, 26 bp, Artificial sequence
  SiRNA target sequence
gttggtaatatagatattgatgtcaa

SEQ ID NO: 167161 - DNA, 26 bp, Artificial sequence
  SiRNA target sequence
ttggtaatatagatattgatgtcaat

SEQ ID NO: 167162 - DNA, 26 bp, Artificial sequence
  SiRNA target sequence
tggtaatatagatattgatgtcaatg

SEQ ID NO: 167163 - DNA, 26 bp, Artificial sequence
  SiRNA target sequence
ggtaatatagatattgatgtcaatga

SEQ ID NO: 167164 - DNA, 26 bp, Artificial sequence
  SiRNA target sequence
gtaatatagatattgatgtcaatgat

SEQ ID NO: 167165 - DNA, 26 bp, Artificial sequence
  SiRNA target sequence
taatatagatattgatgtcaatgata

SEQ ID NO: 167166 - DNA, 26 bp, Artificial sequence
  SiRNA target sequence
aatatagatattgatgtcaatgatat

SEQ ID NO: 167167 - DNA, 26 bp, Artificial sequence
  SiRNA target sequence
atatagatattgatgtcaatgatatg

SEQ ID NO: 167168 - DNA, 26 bp, Artificial sequence
  SiRNA target sequence
tatagatattgatgtcaatgatatga

SEQ ID NO: 167169 - DNA, 26 bp, Artificial sequence
  SiRNA target sequence
atagatattgatgtcaatgatatgaa

SEQ ID NO: 167170 - DNA, 26 bp, Artificial sequence
  SiRNA target sequence
tagatattgatgtcaatgatatgaat

SEQ ID NO: 167171 - DNA, 26 bp, Artificial sequence
  SiRNA target sequence
agatattgatgtcaatgatatgaata

SEQ ID NO: 167172 - DNA, 26 bp, Artificial sequence
  SiRNA target sequence
gatattgatgtcaatgatatgaatat

SEQ ID NO: 167173 - DNA, 26 bp, Artificial sequence
  SiRNA target sequence
atattgatgtcaatgatatgaatatt

SEQ ID NO: 167174 - DNA, 26 bp, Artificial sequence
  SiRNA target sequence
tattgatgtcaatgatatgaatattg

SEQ ID NO: 167175 - DNA, 26 bp, Artificial sequence
  SiRNA target sequence
attgatgtcaatgatatgaatattga

SEQ ID NO: 167176 - DNA, 26 bp, Artificial sequence
  SiRNA target sequence
ttgatgtcaatgatatgaatattgat

SEQ ID NO: 167177 - DNA, 26 bp, Artificial sequence
  SiRNA target sequence
tgatgtcaatgatatgaatattgatt

SEQ ID NO: 167178 - DNA, 26 bp, Artificial sequence
  SiRNA target sequence
gatgtcaatgatatgaatattgattt

SEQ ID NO: 167179 - DNA, 26 bp, Artificial sequence
  SiRNA target sequence
atgtcaatgatatgaatattgattta

SEQ ID NO: 167180 - DNA, 26 bp, Artificial sequence
  SiRNA target sequence
tgtcaatgatatgaatattgatttac

SEQ ID NO: 167181 - DNA, 26 bp, Artificial sequence
  SiRNA target sequence
gtcaatgatatgaatattgatttact

SEQ ID NO: 167182 - DNA, 26 bp, Artificial sequence
  SiRNA target sequence
tcaatgatatgaatattgatttacta

SEQ ID NO: 167183 - DNA, 26 bp, Artificial sequence
  SiRNA target sequence
caatgatatgaatattgatttactaa

SEQ ID NO: 167184 - DNA, 26 bp, Artificial sequence
  SiRNA target sequence
aatgatatgaatattgatttactaag

SEQ ID NO: 167185 - DNA, 26 bp, Artificial sequence
  SiRNA target sequence
atgatatgaatattgatttactaagt

SEQ ID NO: 167186 - DNA, 26 bp, Artificial sequence
  SiRNA target sequence
tgatatgaatattgatttactaagtt

SEQ ID NO: 167187 - DNA, 26 bp, Artificial sequence
  SiRNA target sequence
gatatgaatattgatttactaagttt

SEQ ID NO: 167188 - DNA, 26 bp, Artificial sequence
  SiRNA target sequence
atatgaatattgatttactaagttta

SEQ ID NO: 167189 - DNA, 26 bp, Artificial sequence
  SiRNA target sequence
tatgaatattgatttactaagtttat

SEQ ID NO: 167190 - DNA, 26 bp, Artificial sequence
  SiRNA target sequence
atgaatattgatttactaagtttatc

SEQ ID NO: 167191 - DNA, 26 bp, Artificial sequence
  SiRNA target sequence
tgaatattgatttactaagtttatca

SEQ ID NO: 167192 - DNA, 26 bp, Artificial sequence
  SiRNA target sequence
gaatattgatttactaagtttatcaa

SEQ ID NO: 167193 - DNA, 26 bp, Artificial sequence
  SiRNA target sequence
aatattgatttactaagtttatcaag

SEQ ID NO: 167194 - DNA, 26 bp, Artificial sequence
  SiRNA target sequence
atattgatttactaagtttatcaagt

SEQ ID NO: 167195 - DNA, 26 bp, Artificial sequence
  SiRNA target sequence
tattgatttactaagtttatcaagtc

SEQ ID NO: 167196 - DNA, 26 bp, Artificial sequence
  SiRNA target sequence
attgatttactaagtttatcaagtca

SEQ ID NO: 167197 - DNA, 26 bp, Artificial sequence
  SiRNA target sequence
ttgatttactaagtttatcaagtcat

SEQ ID NO: 167198 - DNA, 26 bp, Artificial sequence
  SiRNA target sequence
tgatttactaagtttatcaagtcata

SEQ ID NO: 167199 - DNA, 26 bp, Artificial sequence
  SiRNA target sequence
gatttactaagtttatcaagtcataa

SEQ ID NO: 167200 - DNA, 26 bp, Artificial sequence
  SiRNA target sequence
atttactaagtttatcaagtcataaa

SEQ ID NO: 167201 - DNA, 26 bp, Artificial sequence
  SiRNA target sequence
tttactaagtttatcaagtcataaaa

SEQ ID NO: 167202 - DNA, 26 bp, Artificial sequence
  SiRNA target sequence
ttactaagtttatcaagtcataaaat

SEQ ID NO: 167203 - DNA, 26 bp, Artificial sequence
  SiRNA target sequence
tactaagtttatcaagtcataaaatt

SEQ ID NO: 167204 - DNA, 26 bp, Artificial sequence
  SiRNA target sequence
actaagtttatcaagtcataaaattt

SEQ ID NO: 167205 - DNA, 26 bp, Artificial sequence
  SiRNA target sequence
ctaagtttatcaagtcataaaattta

SEQ ID NO: 167206 - DNA, 26 bp, Artificial sequence
  SiRNA target sequence
taagtttatcaagtcataaaatttat

SEQ ID NO: 167207 - DNA, 26 bp, Artificial sequence
  SiRNA target sequence
aagtttatcaagtcataaaatttatg

SEQ ID NO: 167208 - DNA, 26 bp, Artificial sequence
  SiRNA target sequence
agtttatcaagtcataaaatttatgg

SEQ ID NO: 167209 - DNA, 26 bp, Artificial sequence
  SiRNA target sequence
gtttatcaagtcataaaatttatggt

SEQ ID NO: 167210 - DNA, 26 bp, Artificial sequence
  SiRNA target sequence
tttatcaagtcataaaatttatggtc

SEQ ID NO: 167211 - DNA, 26 bp, Artificial sequence
  SiRNA target sequence
ttatcaagtcataaaatttatggtcc

SEQ ID NO: 167212 - DNA, 26 bp, Artificial sequence
  SiRNA target sequence
tatcaagtcataaaatttatggtcca

SEQ ID NO: 167213 - DNA, 26 bp, Artificial sequence
  SiRNA target sequence
atcaagtcataaaatttatggtccaa

SEQ ID NO: 167214 - DNA, 26 bp, Artificial sequence
  SiRNA target sequence
tcaagtcataaaatttatggtccaaa

SEQ ID NO: 167215 - DNA, 26 bp, Artificial sequence
  SiRNA target sequence
caagtcataaaatttatggtccaaaa

SEQ ID NO: 167216 - DNA, 26 bp, Artificial sequence
  SiRNA target sequence
aagtcataaaatttatggtccaaaag

SEQ ID NO: 167217 - DNA, 26 bp, Artificial sequence
  SiRNA target sequence
agtcataaaatttatggtccaaaagg

SEQ ID NO: 167218 - DNA, 26 bp, Artificial sequence
  SiRNA target sequence
gtcataaaatttatggtccaaaaggt

SEQ ID NO: 167219 - DNA, 26 bp, Artificial sequence
  SiRNA target sequence
tcataaaatttatggtccaaaaggtg

SEQ ID NO: 167220 - DNA, 26 bp, Artificial sequence
  SiRNA target sequence
cataaaatttatggtccaaaaggtgt

SEQ ID NO: 167221 - DNA, 26 bp, Artificial sequence
  SiRNA target sequence
ataaaatttatggtccaaaaggtgtt

SEQ ID NO: 167222 - DNA, 26 bp, Artificial sequence
  SiRNA target sequence
taaaatttatggtccaaaaggtgttg

SEQ ID NO: 167223 - DNA, 26 bp, Artificial sequence
  SiRNA target sequence
aaaatttatggtccaaaaggtgttgg

SEQ ID NO: 167224 - DNA, 26 bp, Artificial sequence
  SiRNA target sequence
aaatttatggtccaaaaggtgttggt

SEQ ID NO: 167225 - DNA, 26 bp, Artificial sequence
  SiRNA target sequence
aatttatggtccaaaaggtgttggtg

SEQ ID NO: 167226 - DNA, 26 bp, Artificial sequence
  SiRNA target sequence
atttatggtccaaaaggtgttggtgc

SEQ ID NO: 167227 - DNA, 26 bp, Artificial sequence
  SiRNA target sequence
tttatggtccaaaaggtgttggtgcc

SEQ ID NO: 167228 - DNA, 26 bp, Artificial sequence
  SiRNA target sequence
ttatggtccaaaaggtgttggtgcct

SEQ ID NO: 167229 - DNA, 26 bp, Artificial sequence
  SiRNA target sequence
tatggtccaaaaggtgttggtgcctt

SEQ ID NO: 167230 - DNA, 26 bp, Artificial sequence
  SiRNA target sequence
atggtccaaaaggtgttggtgcctta

SEQ ID NO: 167231 - DNA, 26 bp, Artificial sequence
  SiRNA target sequence
tggtccaaaaggtgttggtgccttat

SEQ ID NO: 167232 - DNA, 26 bp, Artificial sequence
  SiRNA target sequence
ggtccaaaaggtgttggtgccttata

SEQ ID NO: 167233 - DNA, 26 bp, Artificial sequence
  SiRNA target sequence
gtccaaaaggtgttggtgccttatac

SEQ ID NO: 167234 - DNA, 26 bp, Artificial sequence
  SiRNA target sequence
tccaaaaggtgttggtgccttatacg

SEQ ID NO: 167235 - DNA, 26 bp, Artificial sequence
  SiRNA target sequence
ccaaaaggtgttggtgccttatacgt

SEQ ID NO: 167236 - DNA, 26 bp, Artificial sequence
  SiRNA target sequence
caaaaggtgttggtgccttatacgtc

SEQ ID NO: 167237 - DNA, 26 bp, Artificial sequence
  SiRNA target sequence
aaaaggtgttggtgccttatacgtca

SEQ ID NO: 167238 - DNA, 26 bp, Artificial sequence
  SiRNA target sequence
aaaggtgttggtgccttatacgtcag

SEQ ID NO: 167239 - DNA, 26 bp, Artificial sequence
  SiRNA target sequence
aaggtgttggtgccttatacgtcaga

SEQ ID NO: 167240 - DNA, 26 bp, Artificial sequence
  SiRNA target sequence
aggtgttggtgccttatacgtcagaa

SEQ ID NO: 167241 - DNA, 26 bp, Artificial sequence
  SiRNA target sequence
ggtgttggtgccttatacgtcagaag

SEQ ID NO: 167242 - DNA, 26 bp, Artificial sequence
  SiRNA target sequence
gtgttggtgccttatacgtcagaaga

SEQ ID NO: 167243 - DNA, 26 bp, Artificial sequence
  SiRNA target sequence
tgttggtgccttatacgtcagaagaa

SEQ ID NO: 167244 - DNA, 26 bp, Artificial sequence
  SiRNA target sequence
gttggtgccttatacgtcagaagaag

SEQ ID NO: 167245 - DNA, 26 bp, Artificial sequence
  SiRNA target sequence
ttggtgccttatacgtcagaagaagg

SEQ ID NO: 167246 - DNA, 26 bp, Artificial sequence
  SiRNA target sequence
tggtgccttatacgtcagaagaaggc

SEQ ID NO: 167247 - DNA, 26 bp, Artificial sequence
  SiRNA target sequence
ggtgccttatacgtcagaagaaggcc

SEQ ID NO: 167248 - DNA, 26 bp, Artificial sequence
  SiRNA target sequence
gtgccttatacgtcagaagaaggcct

SEQ ID NO: 167249 - DNA, 26 bp, Artificial sequence
  SiRNA target sequence
tgccttatacgtcagaagaaggccta

SEQ ID NO: 167250 - DNA, 26 bp, Artificial sequence
  SiRNA target sequence
gccttatacgtcagaagaaggcctag

SEQ ID NO: 167251 - DNA, 26 bp, Artificial sequence
  SiRNA target sequence
ccttatacgtcagaagaaggcctagg

SEQ ID NO: 167252 - DNA, 26 bp, Artificial sequence
  SiRNA target sequence
cttatacgtcagaagaaggcctaggg

SEQ ID NO: 167253 - DNA, 26 bp, Artificial sequence
  SiRNA target sequence
ttatacgtcagaagaaggcctagggt

SEQ ID NO: 167254 - DNA, 26 bp, Artificial sequence
  SiRNA target sequence
tatacgtcagaagaaggcctagggtg

SEQ ID NO: 167255 - DNA, 26 bp, Artificial sequence
  SiRNA target sequence
atacgtcagaagaaggcctagggtga

SEQ ID NO: 167256 - DNA, 26 bp, Artificial sequence
  SiRNA target sequence
tacgtcagaagaaggcctagggtgag

SEQ ID NO: 167257 - DNA, 26 bp, Artificial sequence
  SiRNA target sequence
acgtcagaagaaggcctagggtgaga

SEQ ID NO: 167258 - DNA, 26 bp, Artificial sequence
  SiRNA target sequence
cgtcagaagaaggcctagggtgagaa

SEQ ID NO: 167259 - DNA, 26 bp, Artificial sequence
  SiRNA target sequence
gtcagaagaaggcctagggtgagaat

SEQ ID NO: 167260 - DNA, 26 bp, Artificial sequence
  SiRNA target sequence
tcagaagaaggcctagggtgagaatg

SEQ ID NO: 167261 - DNA, 26 bp, Artificial sequence
  SiRNA target sequence
cagaagaaggcctagggtgagaatgt

SEQ ID NO: 167262 - DNA, 26 bp, Artificial sequence
  SiRNA target sequence
agaagaaggcctagggtgagaatgtt

SEQ ID NO: 167263 - DNA, 26 bp, Artificial sequence
  SiRNA target sequence
gaagaaggcctagggtgagaatgtta

SEQ ID NO: 167264 - DNA, 26 bp, Artificial sequence
  SiRNA target sequence
aagaaggcctagggtgagaatgttac

SEQ ID NO: 167265 - DNA, 26 bp, Artificial sequence
  SiRNA target sequence
agaaggcctagggtgagaatgttacc

SEQ ID NO: 167266 - DNA, 26 bp, Artificial sequence
  SiRNA target sequence
gaaggcctagggtgagaatgttacca

SEQ ID NO: 167267 - DNA, 26 bp, Artificial sequence
  SiRNA target sequence
aaggcctagggtgagaatgttaccac

SEQ ID NO: 167268 - DNA, 26 bp, Artificial sequence
  SiRNA target sequence
aggcctagggtgagaatgttaccact

SEQ ID NO: 167269 - DNA, 26 bp, Artificial sequence
  SiRNA target sequence
ggcctagggtgagaatgttaccactt

SEQ ID NO: 167270 - DNA, 26 bp, Artificial sequence
  SiRNA target sequence
gcctagggtgagaatgttaccacttt

SEQ ID NO: 167271 - DNA, 26 bp, Artificial sequence
  SiRNA target sequence
cctagggtgagaatgttaccactttt

SEQ ID NO: 167272 - DNA, 26 bp, Artificial sequence
  SiRNA target sequence
ctagggtgagaatgttaccacttttt

SEQ ID NO: 167273 - DNA, 26 bp, Artificial sequence
  SiRNA target sequence
tagggtgagaatgttaccacttttta

SEQ ID NO: 167274 - DNA, 26 bp, Artificial sequence
  SiRNA target sequence
agggtgagaatgttaccactttttaa

SEQ ID NO: 167275 - DNA, 26 bp, Artificial sequence
  SiRNA target sequence
gggtgagaatgttaccactttttaat

SEQ ID NO: 167276 - DNA, 26 bp, Artificial sequence
  SiRNA target sequence
ggtgagaatgttaccactttttaatg

SEQ ID NO: 167277 - DNA, 26 bp, Artificial sequence
  SiRNA target sequence
gtgagaatgttaccactttttaatgg

SEQ ID NO: 167278 - DNA, 26 bp, Artificial sequence
  SiRNA target sequence
tgagaatgttaccactttttaatggt

SEQ ID NO: 167279 - DNA, 26 bp, Artificial sequence
  SiRNA target sequence
gagaatgttaccactttttaatggtg

SEQ ID NO: 167280 - DNA, 26 bp, Artificial sequence
  SiRNA target sequence
agaatgttaccactttttaatggtgg

SEQ ID NO: 167281 - DNA, 26 bp, Artificial sequence
  SiRNA target sequence
gaatgttaccactttttaatggtggt

SEQ ID NO: 167282 - DNA, 26 bp, Artificial sequence
  SiRNA target sequence
aatgttaccactttttaatggtggtg

SEQ ID NO: 167283 - DNA, 26 bp, Artificial sequence
  SiRNA target sequence
atgttaccactttttaatggtggtgg

SEQ ID NO: 167284 - DNA, 26 bp, Artificial sequence
  SiRNA target sequence
tgttaccactttttaatggtggtgga

SEQ ID NO: 167285 - DNA, 26 bp, Artificial sequence
  SiRNA target sequence
gttaccactttttaatggtggtggac

SEQ ID NO: 167286 - DNA, 26 bp, Artificial sequence
  SiRNA target sequence
ttaccactttttaatggtggtggaca

SEQ ID NO: 167287 - DNA, 26 bp, Artificial sequence
  SiRNA target sequence
taccactttttaatggtggtggacaa

SEQ ID NO: 167288 - DNA, 26 bp, Artificial sequence
  SiRNA target sequence
accactttttaatggtggtggacaag

SEQ ID NO: 167289 - DNA, 26 bp, Artificial sequence
  SiRNA target sequence
ccactttttaatggtggtggacaaga

SEQ ID NO: 167290 - DNA, 26 bp, Artificial sequence
  SiRNA target sequence
cactttttaatggtggtggacaagaa

SEQ ID NO: 167291 - DNA, 26 bp, Artificial sequence
  SiRNA target sequence
actttttaatggtggtggacaagaaa

SEQ ID NO: 167292 - DNA, 26 bp, Artificial sequence
  SiRNA target sequence
ctttttaatggtggtggacaagaaag

SEQ ID NO: 167293 - DNA, 26 bp, Artificial sequence
  SiRNA target sequence
tttttaatggtggtggacaagaaaga

SEQ ID NO: 167294 - DNA, 26 bp, Artificial sequence
  SiRNA target sequence
ttttaatggtggtggacaagaaagag

SEQ ID NO: 167295 - DNA, 26 bp, Artificial sequence
  SiRNA target sequence
tttaatggtggtggacaagaaagagg

SEQ ID NO: 167296 - DNA, 26 bp, Artificial sequence
  SiRNA target sequence
ttaatggtggtggacaagaaagagga

SEQ ID NO: 167297 - DNA, 26 bp, Artificial sequence
  SiRNA target sequence
taatggtggtggacaagaaagaggat

SEQ ID NO: 167298 - DNA, 26 bp, Artificial sequence
  SiRNA target sequence
aatggtggtggacaagaaagaggatt

SEQ ID NO: 167299 - DNA, 26 bp, Artificial sequence
  SiRNA target sequence
atggtggtggacaagaaagaggatta

SEQ ID NO: 167300 - DNA, 26 bp, Artificial sequence
  SiRNA target sequence
tggtggtggacaagaaagaggattaa

SEQ ID NO: 167301 - DNA, 26 bp, Artificial sequence
  SiRNA target sequence
ggtggtggacaagaaagaggattaag

SEQ ID NO: 167302 - DNA, 26 bp, Artificial sequence
  SiRNA target sequence
gtggtggacaagaaagaggattaaga

SEQ ID NO: 167303 - DNA, 26 bp, Artificial sequence
  SiRNA target sequence
tggtggacaagaaagaggattaagaa

SEQ ID NO: 167304 - DNA, 26 bp, Artificial sequence
  SiRNA target sequence
ggtggacaagaaagaggattaagaag

SEQ ID NO: 167305 - DNA, 26 bp, Artificial sequence
  SiRNA target sequence
gtggacaagaaagaggattaagaagt

SEQ ID NO: 167306 - DNA, 26 bp, Artificial sequence
  SiRNA target sequence
tggacaagaaagaggattaagaagtg

SEQ ID NO: 167307 - DNA, 26 bp, Artificial sequence
  SiRNA target sequence
ggacaagaaagaggattaagaagtgg

SEQ ID NO: 167308 - DNA, 26 bp, Artificial sequence
  SiRNA target sequence
gacaagaaagaggattaagaagtggg

SEQ ID NO: 167309 - DNA, 26 bp, Artificial sequence
  SiRNA target sequence
acaagaaagaggattaagaagtggga

SEQ ID NO: 167310 - DNA, 26 bp, Artificial sequence
  SiRNA target sequence
caagaaagaggattaagaagtgggac

SEQ ID NO: 167311 - DNA, 26 bp, Artificial sequence
  SiRNA target sequence
aagaaagaggattaagaagtgggaca

SEQ ID NO: 167312 - DNA, 26 bp, Artificial sequence
  SiRNA target sequence
agaaagaggattaagaagtgggacaa

SEQ ID NO: 167313 - DNA, 26 bp, Artificial sequence
  SiRNA target sequence
gaaagaggattaagaagtgggacaac

SEQ ID NO: 167314 - DNA, 26 bp, Artificial sequence
  SiRNA target sequence
aaagaggattaagaagtgggacaact

SEQ ID NO: 167315 - DNA, 26 bp, Artificial sequence
  SiRNA target sequence
aagaggattaagaagtgggacaactt

SEQ ID NO: 167316 - DNA, 26 bp, Artificial sequence
  SiRNA target sequence
agaggattaagaagtgggacaacttc

SEQ ID NO: 167317 - DNA, 26 bp, Artificial sequence
  SiRNA target sequence
gaggattaagaagtgggacaacttct

SEQ ID NO: 167318 - DNA, 26 bp, Artificial sequence
  SiRNA target sequence
aggattaagaagtgggacaacttctc

SEQ ID NO: 167319 - DNA, 26 bp, Artificial sequence
  SiRNA target sequence
ggattaagaagtgggacaacttctcc

SEQ ID NO: 167320 - DNA, 26 bp, Artificial sequence
  SiRNA target sequence
gattaagaagtgggacaacttctcca

SEQ ID NO: 167321 - DNA, 26 bp, Artificial sequence
  SiRNA target sequence
attaagaagtgggacaacttctccac

SEQ ID NO: 167322 - DNA, 26 bp, Artificial sequence
  SiRNA target sequence
ttaagaagtgggacaacttctccacc

SEQ ID NO: 167323 - DNA, 26 bp, Artificial sequence
  SiRNA target sequence
taagaagtgggacaacttctccacct

SEQ ID NO: 167324 - DNA, 26 bp, Artificial sequence
  SiRNA target sequence
aagaagtgggacaacttctccacctt

SEQ ID NO: 167325 - DNA, 26 bp, Artificial sequence
  SiRNA target sequence
agaagtgggacaacttctccaccttt

SEQ ID NO: 167326 - DNA, 26 bp, Artificial sequence
  SiRNA target sequence
gaagtgggacaacttctccaccttta

SEQ ID NO: 167327 - DNA, 26 bp, Artificial sequence
  SiRNA target sequence
aagtgggacaacttctccacctttag

SEQ ID NO: 167328 - DNA, 26 bp, Artificial sequence
  SiRNA target sequence
agtgggacaacttctccacctttagt

SEQ ID NO: 167329 - DNA, 26 bp, Artificial sequence
  SiRNA target sequence
gtgggacaacttctccacctttagtt

SEQ ID NO: 167330 - DNA, 26 bp, Artificial sequence
  SiRNA target sequence
tgggacaacttctccacctttagttg

SEQ ID NO: 167331 - DNA, 26 bp, Artificial sequence
  SiRNA target sequence
gggacaacttctccacctttagttgt

SEQ ID NO: 167332 - DNA, 26 bp, Artificial sequence
  SiRNA target sequence
ggacaacttctccacctttagttgtt

SEQ ID NO: 167333 - DNA, 26 bp, Artificial sequence
  SiRNA target sequence
gacaacttctccacctttagttgttg

SEQ ID NO: 167334 - DNA, 26 bp, Artificial sequence
  SiRNA target sequence
acaacttctccacctttagttgttgg

SEQ ID NO: 167335 - DNA, 26 bp, Artificial sequence
  SiRNA target sequence
caacttctccacctttagttgttgga

SEQ ID NO: 167336 - DNA, 26 bp, Artificial sequence
  SiRNA target sequence
aacttctccacctttagttgttggat

SEQ ID NO: 167337 - DNA, 26 bp, Artificial sequence
  SiRNA target sequence
acttctccacctttagttgttggatt

SEQ ID NO: 167338 - DNA, 26 bp, Artificial sequence
  SiRNA target sequence
cttctccacctttagttgttggatta

SEQ ID NO: 167339 - DNA, 26 bp, Artificial sequence
  SiRNA target sequence
ttctccacctttagttgttggattag

SEQ ID NO: 167340 - DNA, 26 bp, Artificial sequence
  SiRNA target sequence
tctccacctttagttgttggattagg

SEQ ID NO: 167341 - DNA, 26 bp, Artificial sequence
  SiRNA target sequence
ctccacctttagttgttggattaggc

SEQ ID NO: 167342 - DNA, 26 bp, Artificial sequence
  SiRNA target sequence
tccacctttagttgttggattaggca

SEQ ID NO: 167343 - DNA, 26 bp, Artificial sequence
  SiRNA target sequence
ccacctttagttgttggattaggcaa

SEQ ID NO: 167344 - DNA, 26 bp, Artificial sequence
  SiRNA target sequence
cacctttagttgttggattaggcaaa

SEQ ID NO: 167345 - DNA, 26 bp, Artificial sequence
  SiRNA target sequence
acctttagttgttggattaggcaaag

SEQ ID NO: 167346 - DNA, 26 bp, Artificial sequence
  SiRNA target sequence
cctttagttgttggattaggcaaagc

SEQ ID NO: 167347 - DNA, 26 bp, Artificial sequence
  SiRNA target sequence
ctttagttgttggattaggcaaagct

SEQ ID NO: 167348 - DNA, 26 bp, Artificial sequence
  SiRNA target sequence
tttagttgttggattaggcaaagctg

SEQ ID NO: 167349 - DNA, 26 bp, Artificial sequence
  SiRNA target sequence
ttagttgttggattaggcaaagctgc

SEQ ID NO: 167350 - DNA, 26 bp, Artificial sequence
  SiRNA target sequence
tagttgttggattaggcaaagctgct

SEQ ID NO: 167351 - DNA, 26 bp, Artificial sequence
  SiRNA target sequence
agttgttggattaggcaaagctgctg

SEQ ID NO: 167352 - DNA, 26 bp, Artificial sequence
  SiRNA target sequence
gttgttggattaggcaaagctgctga

SEQ ID NO: 167353 - DNA, 26 bp, Artificial sequence
  SiRNA target sequence
ttgttggattaggcaaagctgctgag

SEQ ID NO: 167354 - DNA, 26 bp, Artificial sequence
  SiRNA target sequence
tgttggattaggcaaagctgctgaga

SEQ ID NO: 167355 - DNA, 26 bp, Artificial sequence
  SiRNA target sequence
gttggattaggcaaagctgctgagat

SEQ ID NO: 167356 - DNA, 26 bp, Artificial sequence
  SiRNA target sequence
ttggattaggcaaagctgctgagata

SEQ ID NO: 167357 - DNA, 26 bp, Artificial sequence
  SiRNA target sequence
tggattaggcaaagctgctgagatat

SEQ ID NO: 167358 - DNA, 26 bp, Artificial sequence
  SiRNA target sequence
ggattaggcaaagctgctgagatatg

SEQ ID NO: 167359 - DNA, 26 bp, Artificial sequence
  SiRNA target sequence
gattaggcaaagctgctgagatatgc

SEQ ID NO: 167360 - DNA, 26 bp, Artificial sequence
  SiRNA target sequence
attaggcaaagctgctgagatatgct

SEQ ID NO: 167361 - DNA, 26 bp, Artificial sequence
  SiRNA target sequence
ttaggcaaagctgctgagatatgctc

SEQ ID NO: 167362 - DNA, 26 bp, Artificial sequence
  SiRNA target sequence
taggcaaagctgctgagatatgctct

SEQ ID NO: 167363 - DNA, 26 bp, Artificial sequence
  SiRNA target sequence
aggcaaagctgctgagatatgctctc

SEQ ID NO: 167364 - DNA, 26 bp, Artificial sequence
  SiRNA target sequence
ggcaaagctgctgagatatgctctca

SEQ ID NO: 167365 - DNA, 26 bp, Artificial sequence
  SiRNA target sequence
gcaaagctgctgagatatgctctcag

SEQ ID NO: 167366 - DNA, 26 bp, Artificial sequence
  SiRNA target sequence
caaagctgctgagatatgctctcagg

SEQ ID NO: 167367 - DNA, 26 bp, Artificial sequence
  SiRNA target sequence
aaagctgctgagatatgctctcagga

SEQ ID NO: 167368 - DNA, 26 bp, Artificial sequence
  SiRNA target sequence
aagctgctgagatatgctctcaggag

SEQ ID NO: 167369 - DNA, 26 bp, Artificial sequence
  SiRNA target sequence
agctgctgagatatgctctcaggaga

SEQ ID NO: 167370 - DNA, 26 bp, Artificial sequence
  SiRNA target sequence
gctgctgagatatgctctcaggagat

SEQ ID NO: 167371 - DNA, 26 bp, Artificial sequence
  SiRNA target sequence
ctgctgagatatgctctcaggagatg

SEQ ID NO: 167372 - DNA, 26 bp, Artificial sequence
  SiRNA target sequence
tgctgagatatgctctcaggagatgc

SEQ ID NO: 167373 - DNA, 26 bp, Artificial sequence
  SiRNA target sequence
gctgagatatgctctcaggagatgcg

SEQ ID NO: 167374 - DNA, 26 bp, Artificial sequence
  SiRNA target sequence
ctgagatatgctctcaggagatgcgt

SEQ ID NO: 167375 - DNA, 26 bp, Artificial sequence
  SiRNA target sequence
tgagatatgctctcaggagatgcgta

SEQ ID NO: 167376 - DNA, 26 bp, Artificial sequence
  SiRNA target sequence
gagatatgctctcaggagatgcgtaa

SEQ ID NO: 167377 - DNA, 26 bp, Artificial sequence
  SiRNA target sequence
agatatgctctcaggagatgcgtaag

SEQ ID NO: 167378 - DNA, 26 bp, Artificial sequence
  SiRNA target sequence
gatatgctctcaggagatgcgtaagg

SEQ ID NO: 167379 - DNA, 26 bp, Artificial sequence
  SiRNA target sequence
atatgctctcaggagatgcgtaagga

SEQ ID NO: 167380 - DNA, 26 bp, Artificial sequence
  SiRNA target sequence
tatgctctcaggagatgcgtaaggac

SEQ ID NO: 167381 - DNA, 26 bp, Artificial sequence
  SiRNA target sequence
atgctctcaggagatgcgtaaggact

SEQ ID NO: 167382 - DNA, 26 bp, Artificial sequence
  SiRNA target sequence
tgctctcaggagatgcgtaaggacta

SEQ ID NO: 167383 - DNA, 26 bp, Artificial sequence
  SiRNA target sequence
gctctcaggagatgcgtaaggactat

SEQ ID NO: 167384 - DNA, 26 bp, Artificial sequence
  SiRNA target sequence
ctctcaggagatgcgtaaggactatg

SEQ ID NO: 167385 - DNA, 26 bp, Artificial sequence
  SiRNA target sequence
tctcaggagatgcgtaaggactatga

SEQ ID NO: 167386 - DNA, 26 bp, Artificial sequence
  SiRNA target sequence
ctcaggagatgcgtaaggactatgaa

SEQ ID NO: 167387 - DNA, 26 bp, Artificial sequence
  SiRNA target sequence
tcaggagatgcgtaaggactatgaat

SEQ ID NO: 167388 - DNA, 26 bp, Artificial sequence
  SiRNA target sequence
caggagatgcgtaaggactatgaata

SEQ ID NO: 167389 - DNA, 26 bp, Artificial sequence
  SiRNA target sequence
aggagatgcgtaaggactatgaatat

SEQ ID NO: 167390 - DNA, 26 bp, Artificial sequence
  SiRNA target sequence
ggagatgcgtaaggactatgaatata

SEQ ID NO: 167391 - DNA, 26 bp, Artificial sequence
  SiRNA target sequence
gagatgcgtaaggactatgaatatat

SEQ ID NO: 167392 - DNA, 26 bp, Artificial sequence
  SiRNA target sequence
agatgcgtaaggactatgaatatata

SEQ ID NO: 167393 - DNA, 26 bp, Artificial sequence
  SiRNA target sequence
gatgcgtaaggactatgaatatatac

SEQ ID NO: 167394 - DNA, 26 bp, Artificial sequence
  SiRNA target sequence
atgcgtaaggactatgaatatataca

SEQ ID NO: 167395 - DNA, 26 bp, Artificial sequence
  SiRNA target sequence
tgcgtaaggactatgaatatatacaa

SEQ ID NO: 167396 - DNA, 26 bp, Artificial sequence
  SiRNA target sequence
gcgtaaggactatgaatatatacaaa

SEQ ID NO: 167397 - DNA, 26 bp, Artificial sequence
  SiRNA target sequence
cgtaaggactatgaatatatacaaaa

SEQ ID NO: 167398 - DNA, 26 bp, Artificial sequence
  SiRNA target sequence
gtaaggactatgaatatatacaaaaa

SEQ ID NO: 167399 - DNA, 26 bp, Artificial sequence
  SiRNA target sequence
taaggactatgaatatatacaaaaat

SEQ ID NO: 167400 - DNA, 26 bp, Artificial sequence
  SiRNA target sequence
aaggactatgaatatatacaaaaatt

SEQ ID NO: 167401 - DNA, 26 bp, Artificial sequence
  SiRNA target sequence
aggactatgaatatatacaaaaatta

SEQ ID NO: 167402 - DNA, 26 bp, Artificial sequence
  SiRNA target sequence
ggactatgaatatatacaaaaattat

SEQ ID NO: 167403 - DNA, 26 bp, Artificial sequence
  SiRNA target sequence
gactatgaatatatacaaaaattatc

SEQ ID NO: 167404 - DNA, 26 bp, Artificial sequence
  SiRNA target sequence
actatgaatatatacaaaaattatcg

SEQ ID NO: 167405 - DNA, 26 bp, Artificial sequence
  SiRNA target sequence
ctatgaatatatacaaaaattatcgg

SEQ ID NO: 167406 - DNA, 26 bp, Artificial sequence
  SiRNA target sequence
tatgaatatatacaaaaattatcgga

SEQ ID NO: 167407 - DNA, 26 bp, Artificial sequence
  SiRNA target sequence
atgaatatatacaaaaattatcggat

SEQ ID NO: 167408 - DNA, 26 bp, Artificial sequence
  SiRNA target sequence
tgaatatatacaaaaattatcggata

SEQ ID NO: 167409 - DNA, 26 bp, Artificial sequence
  SiRNA target sequence
gaatatatacaaaaattatcggataa

SEQ ID NO: 167410 - DNA, 26 bp, Artificial sequence
  SiRNA target sequence
aatatatacaaaaattatcggataaa

SEQ ID NO: 167411 - DNA, 26 bp, Artificial sequence
  SiRNA target sequence
atatatacaaaaattatcggataaac

SEQ ID NO: 167412 - DNA, 26 bp, Artificial sequence
  SiRNA target sequence
tatatacaaaaattatcggataaact

SEQ ID NO: 167413 - DNA, 26 bp, Artificial sequence
  SiRNA target sequence
atatacaaaaattatcggataaacta

SEQ ID NO: 167414 - DNA, 26 bp, Artificial sequence
  SiRNA target sequence
tatacaaaaattatcggataaactaa

SEQ ID NO: 167415 - DNA, 26 bp, Artificial sequence
  SiRNA target sequence
atacaaaaattatcggataaactaaa

SEQ ID NO: 167416 - DNA, 26 bp, Artificial sequence
  SiRNA target sequence
tacaaaaattatcggataaactaaaa

SEQ ID NO: 167417 - DNA, 26 bp, Artificial sequence
  SiRNA target sequence
acaaaaattatcggataaactaaaaa

SEQ ID NO: 167418 - DNA, 26 bp, Artificial sequence
  SiRNA target sequence
caaaaattatcggataaactaaaaaa

SEQ ID NO: 167419 - DNA, 26 bp, Artificial sequence
  SiRNA target sequence
aaaaattatcggataaactaaaaaat

SEQ ID NO: 167420 - DNA, 26 bp, Artificial sequence
  SiRNA target sequence
aaaattatcggataaactaaaaaatc

SEQ ID NO: 167421 - DNA, 26 bp, Artificial sequence
  SiRNA target sequence
aaattatcggataaactaaaaaatcg

SEQ ID NO: 167422 - DNA, 26 bp, Artificial sequence
  SiRNA target sequence
aattatcggataaactaaaaaatcgc

SEQ ID NO: 167423 - DNA, 26 bp, Artificial sequence
  SiRNA target sequence
attatcggataaactaaaaaatcgca

SEQ ID NO: 167424 - DNA, 26 bp, Artificial sequence
  SiRNA target sequence
ttatcggataaactaaaaaatcgcat

SEQ ID NO: 167425 - DNA, 26 bp, Artificial sequence
  SiRNA target sequence
tatcggataaactaaaaaatcgcatc

SEQ ID NO: 167426 - DNA, 26 bp, Artificial sequence
  SiRNA target sequence
atcggataaactaaaaaatcgcatca

SEQ ID NO: 167427 - DNA, 26 bp, Artificial sequence
  SiRNA target sequence
tcggataaactaaaaaatcgcatcaa

SEQ ID NO: 167428 - DNA, 26 bp, Artificial sequence
  SiRNA target sequence
cggataaactaaaaaatcgcatcaaa

SEQ ID NO: 167429 - DNA, 26 bp, Artificial sequence
  SiRNA target sequence
ggataaactaaaaaatcgcatcaaaa

SEQ ID NO: 167430 - DNA, 26 bp, Artificial sequence
  SiRNA target sequence
gataaactaaaaaatcgcatcaaaac

SEQ ID NO: 167431 - DNA, 26 bp, Artificial sequence
  SiRNA target sequence
ataaactaaaaaatcgcatcaaaacg

SEQ ID NO: 167432 - DNA, 26 bp, Artificial sequence
  SiRNA target sequence
taaactaaaaaatcgcatcaaaacga

SEQ ID NO: 167433 - DNA, 26 bp, Artificial sequence
  SiRNA target sequence
aaactaaaaaatcgcatcaaaacgaa

SEQ ID NO: 167434 - DNA, 26 bp, Artificial sequence
  SiRNA target sequence
aactaaaaaatcgcatcaaaacgaat

SEQ ID NO: 167435 - DNA, 26 bp, Artificial sequence
  SiRNA target sequence
actaaaaaatcgcatcaaaacgaatg

SEQ ID NO: 167436 - DNA, 26 bp, Artificial sequence
  SiRNA target sequence
ctaaaaaatcgcatcaaaacgaatgt

SEQ ID NO: 167437 - DNA, 26 bp, Artificial sequence
  SiRNA target sequence
taaaaaatcgcatcaaaacgaatgta

SEQ ID NO: 167438 - DNA, 26 bp, Artificial sequence
  SiRNA target sequence
aaaaaatcgcatcaaaacgaatgtag

SEQ ID NO: 167439 - DNA, 26 bp, Artificial sequence
  SiRNA target sequence
aaaaatcgcatcaaaacgaatgtaga

SEQ ID NO: 167440 - DNA, 26 bp, Artificial sequence
  SiRNA target sequence
aaaatcgcatcaaaacgaatgtagaa

SEQ ID NO: 167441 - DNA, 26 bp, Artificial sequence
  SiRNA target sequence
aaatcgcatcaaaacgaatgtagaaa

SEQ ID NO: 167442 - DNA, 26 bp, Artificial sequence
  SiRNA target sequence
aatcgcatcaaaacgaatgtagaaaa

SEQ ID NO: 167443 - DNA, 26 bp, Artificial sequence
  SiRNA target sequence
atcgcatcaaaacgaatgtagaaaat

SEQ ID NO: 167444 - DNA, 26 bp, Artificial sequence
  SiRNA target sequence
tcgcatcaaaacgaatgtagaaaatg

SEQ ID NO: 167445 - DNA, 26 bp, Artificial sequence
  SiRNA target sequence
cgcatcaaaacgaatgtagaaaatgt

SEQ ID NO: 167446 - DNA, 26 bp, Artificial sequence
  SiRNA target sequence
gcatcaaaacgaatgtagaaaatgtt

SEQ ID NO: 167447 - DNA, 26 bp, Artificial sequence
  SiRNA target sequence
catcaaaacgaatgtagaaaatgttg

SEQ ID NO: 167448 - DNA, 26 bp, Artificial sequence
  SiRNA target sequence
atcaaaacgaatgtagaaaatgttgt

SEQ ID NO: 167449 - DNA, 26 bp, Artificial sequence
  SiRNA target sequence
tcaaaacgaatgtagaaaatgttgtt

SEQ ID NO: 167450 - DNA, 26 bp, Artificial sequence
  SiRNA target sequence
caaaacgaatgtagaaaatgttgtta

SEQ ID NO: 167451 - DNA, 26 bp, Artificial sequence
  SiRNA target sequence
aaaacgaatgtagaaaatgttgttat

SEQ ID NO: 167452 - DNA, 26 bp, Artificial sequence
  SiRNA target sequence
aaacgaatgtagaaaatgttgttatt

SEQ ID NO: 167453 - DNA, 26 bp, Artificial sequence
  SiRNA target sequence
aacgaatgtagaaaatgttgttatta

SEQ ID NO: 167454 - DNA, 26 bp, Artificial sequence
  SiRNA target sequence
acgaatgtagaaaatgttgttattaa

SEQ ID NO: 167455 - DNA, 26 bp, Artificial sequence
  SiRNA target sequence
cgaatgtagaaaatgttgttattaac

SEQ ID NO: 167456 - DNA, 26 bp, Artificial sequence
  SiRNA target sequence
gaatgtagaaaatgttgttattaacg

SEQ ID NO: 167457 - DNA, 26 bp, Artificial sequence
  SiRNA target sequence
aatgtagaaaatgttgttattaacgg

SEQ ID NO: 167458 - DNA, 26 bp, Artificial sequence
  SiRNA target sequence
atgtagaaaatgttgttattaacggc

SEQ ID NO: 167459 - DNA, 26 bp, Artificial sequence
  SiRNA target sequence
tgtagaaaatgttgttattaacggcg

SEQ ID NO: 167460 - DNA, 26 bp, Artificial sequence
  SiRNA target sequence
gtagaaaatgttgttattaacggcga

SEQ ID NO: 167461 - DNA, 26 bp, Artificial sequence
  SiRNA target sequence
tagaaaatgttgttattaacggcgat

SEQ ID NO: 167462 - DNA, 26 bp, Artificial sequence
  SiRNA target sequence
agaaaatgttgttattaacggcgatg

SEQ ID NO: 167463 - DNA, 26 bp, Artificial sequence
  SiRNA target sequence
gaaaatgttgttattaacggcgatga

SEQ ID NO: 167464 - DNA, 26 bp, Artificial sequence
  SiRNA target sequence
aaaatgttgttattaacggcgatgat

SEQ ID NO: 167465 - DNA, 26 bp, Artificial sequence
  SiRNA target sequence
aaatgttgttattaacggcgatgatt

SEQ ID NO: 167466 - DNA, 26 bp, Artificial sequence
  SiRNA target sequence
aatgttgttattaacggcgatgattc

SEQ ID NO: 167467 - DNA, 26 bp, Artificial sequence
  SiRNA target sequence
atgttgttattaacggcgatgattct

SEQ ID NO: 167468 - DNA, 26 bp, Artificial sequence
  SiRNA target sequence
tgttgttattaacggcgatgattcta

SEQ ID NO: 167469 - DNA, 26 bp, Artificial sequence
  SiRNA target sequence
gttgttattaacggcgatgattctaa

SEQ ID NO: 167470 - DNA, 26 bp, Artificial sequence
  SiRNA target sequence
ttgttattaacggcgatgattctaag

SEQ ID NO: 167471 - DNA, 26 bp, Artificial sequence
  SiRNA target sequence
tgttattaacggcgatgattctaaga

SEQ ID NO: 167472 - DNA, 26 bp, Artificial sequence
  SiRNA target sequence
gttattaacggcgatgattctaagac

SEQ ID NO: 167473 - DNA, 26 bp, Artificial sequence
  SiRNA target sequence
ttattaacggcgatgattctaagact

SEQ ID NO: 167474 - DNA, 26 bp, Artificial sequence
  SiRNA target sequence
tattaacggcgatgattctaagactt

SEQ ID NO: 167475 - DNA, 26 bp, Artificial sequence
  SiRNA target sequence
attaacggcgatgattctaagacttt

SEQ ID NO: 167476 - DNA, 26 bp, Artificial sequence
  SiRNA target sequence
ttaacggcgatgattctaagactttt

SEQ ID NO: 167477 - DNA, 26 bp, Artificial sequence
  SiRNA target sequence
taacggcgatgattctaagacttttc

SEQ ID NO: 167478 - DNA, 26 bp, Artificial sequence
  SiRNA target sequence
aacggcgatgattctaagacttttcc

SEQ ID NO: 167479 - DNA, 26 bp, Artificial sequence
  SiRNA target sequence
acggcgatgattctaagacttttcct

SEQ ID NO: 167480 - DNA, 26 bp, Artificial sequence
  SiRNA target sequence
cggcgatgattctaagacttttcctg

SEQ ID NO: 167481 - DNA, 26 bp, Artificial sequence
  SiRNA target sequence
ggcgatgattctaagacttttcctgg

SEQ ID NO: 167482 - DNA, 26 bp, Artificial sequence
  SiRNA target sequence
gcgatgattctaagacttttcctggc

SEQ ID NO: 167483 - DNA, 26 bp, Artificial sequence
  SiRNA target sequence
cgatgattctaagacttttcctggct

SEQ ID NO: 167484 - DNA, 26 bp, Artificial sequence
  SiRNA target sequence
gatgattctaagacttttcctggctg

SEQ ID NO: 167485 - DNA, 26 bp, Artificial sequence
  SiRNA target sequence
atgattctaagacttttcctggctgt

SEQ ID NO: 167486 - DNA, 26 bp, Artificial sequence
  SiRNA target sequence
tgattctaagacttttcctggctgtc

SEQ ID NO: 167487 - DNA, 26 bp, Artificial sequence
  SiRNA target sequence
gattctaagacttttcctggctgtct

SEQ ID NO: 167488 - DNA, 26 bp, Artificial sequence
  SiRNA target sequence
attctaagacttttcctggctgtctc

SEQ ID NO: 167489 - DNA, 26 bp, Artificial sequence
  SiRNA target sequence
ttctaagacttttcctggctgtctca

SEQ ID NO: 167490 - DNA, 26 bp, Artificial sequence
  SiRNA target sequence
tctaagacttttcctggctgtctcaa

SEQ ID NO: 167491 - DNA, 26 bp, Artificial sequence
  SiRNA target sequence
ctaagacttttcctggctgtctcaat

SEQ ID NO: 167492 - DNA, 26 bp, Artificial sequence
  SiRNA target sequence
taagacttttcctggctgtctcaata

SEQ ID NO: 167493 - DNA, 26 bp, Artificial sequence
  SiRNA target sequence
aagacttttcctggctgtctcaatat

SEQ ID NO: 167494 - DNA, 26 bp, Artificial sequence
  SiRNA target sequence
agacttttcctggctgtctcaatatt

SEQ ID NO: 167495 - DNA, 26 bp, Artificial sequence
  SiRNA target sequence
gacttttcctggctgtctcaatattt

SEQ ID NO: 167496 - DNA, 26 bp, Artificial sequence
  SiRNA target sequence
acttttcctggctgtctcaatatttc

SEQ ID NO: 167497 - DNA, 26 bp, Artificial sequence
  SiRNA target sequence
cttttcctggctgtctcaatatttct

SEQ ID NO: 167498 - DNA, 26 bp, Artificial sequence
  SiRNA target sequence
ttttcctggctgtctcaatatttctt

SEQ ID NO: 167499 - DNA, 26 bp, Artificial sequence
  SiRNA target sequence
tttcctggctgtctcaatatttcttt

SEQ ID NO: 167500 - DNA, 26 bp, Artificial sequence
  SiRNA target sequence
ttcctggctgtctcaatatttctttt

SEQ ID NO: 167501 - DNA, 26 bp, Artificial sequence
  SiRNA target sequence
tcctggctgtctcaatatttcttttc

SEQ ID NO: 167502 - DNA, 26 bp, Artificial sequence
  SiRNA target sequence
cctggctgtctcaatatttcttttcc

SEQ ID NO: 167503 - DNA, 26 bp, Artificial sequence
  SiRNA target sequence
ctggctgtctcaatatttcttttcca

SEQ ID NO: 167504 - DNA, 26 bp, Artificial sequence
  SiRNA target sequence
tggctgtctcaatatttcttttccat

SEQ ID NO: 167505 - DNA, 26 bp, Artificial sequence
  SiRNA target sequence
ggctgtctcaatatttcttttccata

SEQ ID NO: 167506 - DNA, 26 bp, Artificial sequence
  SiRNA target sequence
gctgtctcaatatttcttttccatat

SEQ ID NO: 167507 - DNA, 26 bp, Artificial sequence
  SiRNA target sequence
ctgtctcaatatttcttttccatatg

SEQ ID NO: 167508 - DNA, 26 bp, Artificial sequence
  SiRNA target sequence
tgtctcaatatttcttttccatatgt

SEQ ID NO: 167509 - DNA, 26 bp, Artificial sequence
  SiRNA target sequence
gtctcaatatttcttttccatatgta

SEQ ID NO: 167510 - DNA, 26 bp, Artificial sequence
  SiRNA target sequence
tctcaatatttcttttccatatgtag

SEQ ID NO: 167511 - DNA, 26 bp, Artificial sequence
  SiRNA target sequence
ctcaatatttcttttccatatgtaga

SEQ ID NO: 167512 - DNA, 26 bp, Artificial sequence
  SiRNA target sequence
tcaatatttcttttccatatgtagaa

SEQ ID NO: 167513 - DNA, 26 bp, Artificial sequence
  SiRNA target sequence
caatatttcttttccatatgtagaag

SEQ ID NO: 167514 - DNA, 26 bp, Artificial sequence
  SiRNA target sequence
aatatttcttttccatatgtagaagg

SEQ ID NO: 167515 - DNA, 26 bp, Artificial sequence
  SiRNA target sequence
atatttcttttccatatgtagaaggt

SEQ ID NO: 167516 - DNA, 26 bp, Artificial sequence
  SiRNA target sequence
tatttcttttccatatgtagaaggtg

SEQ ID NO: 167517 - DNA, 26 bp, Artificial sequence
  SiRNA target sequence
atttcttttccatatgtagaaggtga

SEQ ID NO: 167518 - DNA, 26 bp, Artificial sequence
  SiRNA target sequence
tttcttttccatatgtagaaggtgaa

SEQ ID NO: 167519 - DNA, 26 bp, Artificial sequence
  SiRNA target sequence
ttcttttccatatgtagaaggtgaag

SEQ ID NO: 167520 - DNA, 26 bp, Artificial sequence
  SiRNA target sequence
tcttttccatatgtagaaggtgaagg

SEQ ID NO: 167521 - DNA, 26 bp, Artificial sequence
  SiRNA target sequence
cttttccatatgtagaaggtgaaggg

SEQ ID NO: 167522 - DNA, 26 bp, Artificial sequence
  SiRNA target sequence
ttttccatatgtagaaggtgaagggc

SEQ ID NO: 167523 - DNA, 26 bp, Artificial sequence
  SiRNA target sequence
tttccatatgtagaaggtgaagggct

SEQ ID NO: 167524 - DNA, 26 bp, Artificial sequence
  SiRNA target sequence
ttccatatgtagaaggtgaagggctt

SEQ ID NO: 167525 - DNA, 26 bp, Artificial sequence
  SiRNA target sequence
tccatatgtagaaggtgaagggctta

SEQ ID NO: 167526 - DNA, 26 bp, Artificial sequence
  SiRNA target sequence
ccatatgtagaaggtgaagggcttat

SEQ ID NO: 167527 - DNA, 26 bp, Artificial sequence
  SiRNA target sequence
catatgtagaaggtgaagggcttatg

SEQ ID NO: 167528 - DNA, 26 bp, Artificial sequence
  SiRNA target sequence
atatgtagaaggtgaagggcttatga

SEQ ID NO: 167529 - DNA, 26 bp, Artificial sequence
  SiRNA target sequence
tatgtagaaggtgaagggcttatgat

SEQ ID NO: 167530 - DNA, 26 bp, Artificial sequence
  SiRNA target sequence
atgtagaaggtgaagggcttatgatg

SEQ ID NO: 167531 - DNA, 26 bp, Artificial sequence
  SiRNA target sequence
tgtagaaggtgaagggcttatgatga

SEQ ID NO: 167532 - DNA, 26 bp, Artificial sequence
  SiRNA target sequence
gtagaaggtgaagggcttatgatgaa

SEQ ID NO: 167533 - DNA, 26 bp, Artificial sequence
  SiRNA target sequence
tagaaggtgaagggcttatgatgaat

SEQ ID NO: 167534 - DNA, 26 bp, Artificial sequence
  SiRNA target sequence
agaaggtgaagggcttatgatgaata

SEQ ID NO: 167535 - DNA, 26 bp, Artificial sequence
  SiRNA target sequence
gaaggtgaagggcttatgatgaatat

SEQ ID NO: 167536 - DNA, 26 bp, Artificial sequence
  SiRNA target sequence
aaggtgaagggcttatgatgaatatt

SEQ ID NO: 167537 - DNA, 26 bp, Artificial sequence
  SiRNA target sequence
aggtgaagggcttatgatgaatatta

SEQ ID NO: 167538 - DNA, 26 bp, Artificial sequence
  SiRNA target sequence
ggtgaagggcttatgatgaatattaa

SEQ ID NO: 167539 - DNA, 26 bp, Artificial sequence
  SiRNA target sequence
gtgaagggcttatgatgaatattaag

SEQ ID NO: 167540 - DNA, 26 bp, Artificial sequence
  SiRNA target sequence
tgaagggcttatgatgaatattaagg

SEQ ID NO: 167541 - DNA, 26 bp, Artificial sequence
  SiRNA target sequence
gaagggcttatgatgaatattaagga

SEQ ID NO: 167542 - DNA, 26 bp, Artificial sequence
  SiRNA target sequence
aagggcttatgatgaatattaaggat

SEQ ID NO: 167543 - DNA, 26 bp, Artificial sequence
  SiRNA target sequence
agggcttatgatgaatattaaggata

SEQ ID NO: 167544 - DNA, 26 bp, Artificial sequence
  SiRNA target sequence
gggcttatgatgaatattaaggatat

SEQ ID NO: 167545 - DNA, 26 bp, Artificial sequence
  SiRNA target sequence
ggcttatgatgaatattaaggatatt

SEQ ID NO: 167546 - DNA, 26 bp, Artificial sequence
  SiRNA target sequence
gcttatgatgaatattaaggatattg

SEQ ID NO: 167547 - DNA, 26 bp, Artificial sequence
  SiRNA target sequence
cttatgatgaatattaaggatattgc

SEQ ID NO: 167548 - DNA, 26 bp, Artificial sequence
  SiRNA target sequence
ttatgatgaatattaaggatattgct

SEQ ID NO: 167549 - DNA, 26 bp, Artificial sequence
  SiRNA target sequence
tatgatgaatattaaggatattgctg

SEQ ID NO: 167550 - DNA, 26 bp, Artificial sequence
  SiRNA target sequence
atgatgaatattaaggatattgctgt

SEQ ID NO: 167551 - DNA, 26 bp, Artificial sequence
  SiRNA target sequence
tgatgaatattaaggatattgctgtt

SEQ ID NO: 167552 - DNA, 26 bp, Artificial sequence
  SiRNA target sequence
gatgaatattaaggatattgctgtta

SEQ ID NO: 167553 - DNA, 26 bp, Artificial sequence
  SiRNA target sequence
atgaatattaaggatattgctgttag

SEQ ID NO: 167554 - DNA, 26 bp, Artificial sequence
  SiRNA target sequence
tgaatattaaggatattgctgttagt

SEQ ID NO: 167555 - DNA, 26 bp, Artificial sequence
  SiRNA target sequence
gaatattaaggatattgctgttagta

SEQ ID NO: 167556 - DNA, 26 bp, Artificial sequence
  SiRNA target sequence
aatattaaggatattgctgttagtag

SEQ ID NO: 167557 - DNA, 26 bp, Artificial sequence
  SiRNA target sequence
atattaaggatattgctgttagtagt

SEQ ID NO: 167558 - DNA, 26 bp, Artificial sequence
  SiRNA target sequence
tattaaggatattgctgttagtagtg

SEQ ID NO: 167559 - DNA, 26 bp, Artificial sequence
  SiRNA target sequence
attaaggatattgctgttagtagtgg

SEQ ID NO: 167560 - DNA, 26 bp, Artificial sequence
  SiRNA target sequence
ttaaggatattgctgttagtagtgga

SEQ ID NO: 167561 - DNA, 26 bp, Artificial sequence
  SiRNA target sequence
taaggatattgctgttagtagtggaa

SEQ ID NO: 167562 - DNA, 26 bp, Artificial sequence
  SiRNA target sequence
aaggatattgctgttagtagtggaag

SEQ ID NO: 167563 - DNA, 26 bp, Artificial sequence
  SiRNA target sequence
aggatattgctgttagtagtggaagt

SEQ ID NO: 167564 - DNA, 26 bp, Artificial sequence
  SiRNA target sequence
ggatattgctgttagtagtggaagtg

SEQ ID NO: 167565 - DNA, 26 bp, Artificial sequence
  SiRNA target sequence
gatattgctgttagtagtggaagtgc

SEQ ID NO: 167566 - DNA, 26 bp, Artificial sequence
  SiRNA target sequence
atattgctgttagtagtggaagtgct

SEQ ID NO: 167567 - DNA, 26 bp, Artificial sequence
  SiRNA target sequence
tattgctgttagtagtggaagtgctt

SEQ ID NO: 167568 - DNA, 26 bp, Artificial sequence
  SiRNA target sequence
attgctgttagtagtggaagtgcttg

SEQ ID NO: 167569 - DNA, 26 bp, Artificial sequence
  SiRNA target sequence
ttgctgttagtagtggaagtgcttgc

SEQ ID NO: 167570 - DNA, 26 bp, Artificial sequence
  SiRNA target sequence
tgctgttagtagtggaagtgcttgca

SEQ ID NO: 167571 - DNA, 26 bp, Artificial sequence
  SiRNA target sequence
gctgttagtagtggaagtgcttgcac

SEQ ID NO: 167572 - DNA, 26 bp, Artificial sequence
  SiRNA target sequence
ctgttagtagtggaagtgcttgcact

SEQ ID NO: 167573 - DNA, 26 bp, Artificial sequence
  SiRNA target sequence
tgttagtagtggaagtgcttgcactt

SEQ ID NO: 167574 - DNA, 26 bp, Artificial sequence
  SiRNA target sequence
gttagtagtggaagtgcttgcacttc

SEQ ID NO: 167575 - DNA, 26 bp, Artificial sequence
  SiRNA target sequence
ttagtagtggaagtgcttgcacttca

SEQ ID NO: 167576 - DNA, 26 bp, Artificial sequence
  SiRNA target sequence
tagtagtggaagtgcttgcacttcat

SEQ ID NO: 167577 - DNA, 26 bp, Artificial sequence
  SiRNA target sequence
agtagtggaagtgcttgcacttcatc

SEQ ID NO: 167578 - DNA, 26 bp, Artificial sequence
  SiRNA target sequence
gtagtggaagtgcttgcacttcatca

SEQ ID NO: 167579 - DNA, 26 bp, Artificial sequence
  SiRNA target sequence
tagtggaagtgcttgcacttcatcat

SEQ ID NO: 167580 - DNA, 26 bp, Artificial sequence
  SiRNA target sequence
agtggaagtgcttgcacttcatcatc

SEQ ID NO: 167581 - DNA, 26 bp, Artificial sequence
  SiRNA target sequence
gtggaagtgcttgcacttcatcatct

SEQ ID NO: 167582 - DNA, 26 bp, Artificial sequence
  SiRNA target sequence
tggaagtgcttgcacttcatcatctt

SEQ ID NO: 167583 - DNA, 26 bp, Artificial sequence
  SiRNA target sequence
ggaagtgcttgcacttcatcatcttt

SEQ ID NO: 167584 - DNA, 26 bp, Artificial sequence
  SiRNA target sequence
gaagtgcttgcacttcatcatcttta

SEQ ID NO: 167585 - DNA, 26 bp, Artificial sequence
  SiRNA target sequence
aagtgcttgcacttcatcatctttag

SEQ ID NO: 167586 - DNA, 26 bp, Artificial sequence
  SiRNA target sequence
agtgcttgcacttcatcatctttaga

SEQ ID NO: 167587 - DNA, 26 bp, Artificial sequence
  SiRNA target sequence
gtgcttgcacttcatcatctttagaa

SEQ ID NO: 167588 - DNA, 26 bp, Artificial sequence
  SiRNA target sequence
tgcttgcacttcatcatctttagaac

SEQ ID NO: 167589 - DNA, 26 bp, Artificial sequence
  SiRNA target sequence
gcttgcacttcatcatctttagaacc

SEQ ID NO: 167590 - DNA, 26 bp, Artificial sequence
  SiRNA target sequence
cttgcacttcatcatctttagaaccc

SEQ ID NO: 167591 - DNA, 26 bp, Artificial sequence
  SiRNA target sequence
ttgcacttcatcatctttagaaccct

SEQ ID NO: 167592 - DNA, 26 bp, Artificial sequence
  SiRNA target sequence
tgcacttcatcatctttagaaccctc

SEQ ID NO: 167593 - DNA, 26 bp, Artificial sequence
  SiRNA target sequence
gcacttcatcatctttagaaccctct

SEQ ID NO: 167594 - DNA, 26 bp, Artificial sequence
  SiRNA target sequence
cacttcatcatctttagaaccctctt

SEQ ID NO: 167595 - DNA, 26 bp, Artificial sequence
  SiRNA target sequence
acttcatcatctttagaaccctctta

SEQ ID NO: 167596 - DNA, 26 bp, Artificial sequence
  SiRNA target sequence
cttcatcatctttagaaccctcttat

SEQ ID NO: 167597 - DNA, 26 bp, Artificial sequence
  SiRNA target sequence
ttcatcatctttagaaccctcttatg

SEQ ID NO: 167598 - DNA, 26 bp, Artificial sequence
  SiRNA target sequence
tcatcatctttagaaccctcttatgt

SEQ ID NO: 167599 - DNA, 26 bp, Artificial sequence
  SiRNA target sequence
catcatctttagaaccctcttatgtt

SEQ ID NO: 167600 - DNA, 26 bp, Artificial sequence
  SiRNA target sequence
atcatctttagaaccctcttatgttt

SEQ ID NO: 167601 - DNA, 26 bp, Artificial sequence
  SiRNA target sequence
tcatctttagaaccctcttatgtttt

SEQ ID NO: 167602 - DNA, 26 bp, Artificial sequence
  SiRNA target sequence
catctttagaaccctcttatgttttg

SEQ ID NO: 167603 - DNA, 26 bp, Artificial sequence
  SiRNA target sequence
atctttagaaccctcttatgttttgc

SEQ ID NO: 167604 - DNA, 26 bp, Artificial sequence
  SiRNA target sequence
tctttagaaccctcttatgttttgcg

SEQ ID NO: 167605 - DNA, 26 bp, Artificial sequence
  SiRNA target sequence
ctttagaaccctcttatgttttgcga

SEQ ID NO: 167606 - DNA, 26 bp, Artificial sequence
  SiRNA target sequence
tttagaaccctcttatgttttgcgag

SEQ ID NO: 167607 - DNA, 26 bp, Artificial sequence
  SiRNA target sequence
ttagaaccctcttatgttttgcgagc

SEQ ID NO: 167608 - DNA, 26 bp, Artificial sequence
  SiRNA target sequence
tagaaccctcttatgttttgcgagct

SEQ ID NO: 167609 - DNA, 26 bp, Artificial sequence
  SiRNA target sequence
agaaccctcttatgttttgcgagctt

SEQ ID NO: 167610 - DNA, 26 bp, Artificial sequence
  SiRNA target sequence
gaaccctcttatgttttgcgagcttt

SEQ ID NO: 167611 - DNA, 26 bp, Artificial sequence
  SiRNA target sequence
aaccctcttatgttttgcgagcttta

SEQ ID NO: 167612 - DNA, 26 bp, Artificial sequence
  SiRNA target sequence
accctcttatgttttgcgagctttag

SEQ ID NO: 167613 - DNA, 26 bp, Artificial sequence
  SiRNA target sequence
ccctcttatgttttgcgagctttagg

SEQ ID NO: 167614 - DNA, 26 bp, Artificial sequence
  SiRNA target sequence
cctcttatgttttgcgagctttaggc

SEQ ID NO: 167615 - DNA, 26 bp, Artificial sequence
  SiRNA target sequence
ctcttatgttttgcgagctttaggca

SEQ ID NO: 167616 - DNA, 26 bp, Artificial sequence
  SiRNA target sequence
tcttatgttttgcgagctttaggcaa

SEQ ID NO: 167617 - DNA, 26 bp, Artificial sequence
  SiRNA target sequence
cttatgttttgcgagctttaggcaaa

SEQ ID NO: 167618 - DNA, 26 bp, Artificial sequence
  SiRNA target sequence
ttatgttttgcgagctttaggcaaaa

SEQ ID NO: 167619 - DNA, 26 bp, Artificial sequence
  SiRNA target sequence
tatgttttgcgagctttaggcaaaaa

SEQ ID NO: 167620 - DNA, 26 bp, Artificial sequence
  SiRNA target sequence
atgttttgcgagctttaggcaaaaat

SEQ ID NO: 167621 - DNA, 26 bp, Artificial sequence
  SiRNA target sequence
tgttttgcgagctttaggcaaaaatg

SEQ ID NO: 167622 - DNA, 26 bp, Artificial sequence
  SiRNA target sequence
gttttgcgagctttaggcaaaaatga

SEQ ID NO: 167623 - DNA, 26 bp, Artificial sequence
  SiRNA target sequence
ttttgcgagctttaggcaaaaatgat

SEQ ID NO: 167624 - DNA, 26 bp, Artificial sequence
  SiRNA target sequence
tttgcgagctttaggcaaaaatgatg

SEQ ID NO: 167625 - DNA, 26 bp, Artificial sequence
  SiRNA target sequence
ttgcgagctttaggcaaaaatgatga

SEQ ID NO: 167626 - DNA, 26 bp, Artificial sequence
  SiRNA target sequence
tgcgagctttaggcaaaaatgatgat

SEQ ID NO: 167627 - DNA, 26 bp, Artificial sequence
  SiRNA target sequence
gcgagctttaggcaaaaatgatgatc

SEQ ID NO: 167628 - DNA, 26 bp, Artificial sequence
  SiRNA target sequence
cgagctttaggcaaaaatgatgatct

SEQ ID NO: 167629 - DNA, 26 bp, Artificial sequence
  SiRNA target sequence
gagctttaggcaaaaatgatgatctt

SEQ ID NO: 167630 - DNA, 26 bp, Artificial sequence
  SiRNA target sequence
agctttaggcaaaaatgatgatcttg

SEQ ID NO: 167631 - DNA, 26 bp, Artificial sequence
  SiRNA target sequence
gctttaggcaaaaatgatgatcttgc

SEQ ID NO: 167632 - DNA, 26 bp, Artificial sequence
  SiRNA target sequence
ctttaggcaaaaatgatgatcttgcg

SEQ ID NO: 167633 - DNA, 26 bp, Artificial sequence
  SiRNA target sequence
tttaggcaaaaatgatgatcttgcgc

SEQ ID NO: 167634 - DNA, 26 bp, Artificial sequence
  SiRNA target sequence
ttaggcaaaaatgatgatcttgcgca

SEQ ID NO: 167635 - DNA, 26 bp, Artificial sequence
  SiRNA target sequence
taggcaaaaatgatgatcttgcgcat

SEQ ID NO: 167636 - DNA, 26 bp, Artificial sequence
  SiRNA target sequence
aggcaaaaatgatgatcttgcgcatt

SEQ ID NO: 167637 - DNA, 26 bp, Artificial sequence
  SiRNA target sequence
ggcaaaaatgatgatcttgcgcattc

SEQ ID NO: 167638 - DNA, 26 bp, Artificial sequence
  SiRNA target sequence
gcaaaaatgatgatcttgcgcattct

SEQ ID NO: 167639 - DNA, 26 bp, Artificial sequence
  SiRNA target sequence
caaaaatgatgatcttgcgcattctt

SEQ ID NO: 167640 - DNA, 26 bp, Artificial sequence
  SiRNA target sequence
aaaaatgatgatcttgcgcattcttc

SEQ ID NO: 167641 - DNA, 26 bp, Artificial sequence
  SiRNA target sequence
aaaatgatgatcttgcgcattcttct

SEQ ID NO: 167642 - DNA, 26 bp, Artificial sequence
  SiRNA target sequence
aaatgatgatcttgcgcattcttcta

SEQ ID NO: 167643 - DNA, 26 bp, Artificial sequence
  SiRNA target sequence
aatgatgatcttgcgcattcttctat

SEQ ID NO: 167644 - DNA, 26 bp, Artificial sequence
  SiRNA target sequence
atgatgatcttgcgcattcttctata

SEQ ID NO: 167645 - DNA, 26 bp, Artificial sequence
  SiRNA target sequence
tgatgatcttgcgcattcttctataa

SEQ ID NO: 167646 - DNA, 26 bp, Artificial sequence
  SiRNA target sequence
gatgatcttgcgcattcttctataag

SEQ ID NO: 167647 - DNA, 26 bp, Artificial sequence
  SiRNA target sequence
atgatcttgcgcattcttctataaga

SEQ ID NO: 167648 - DNA, 26 bp, Artificial sequence
  SiRNA target sequence
tgatcttgcgcattcttctataagat

SEQ ID NO: 167649 - DNA, 26 bp, Artificial sequence
  SiRNA target sequence
gatcttgcgcattcttctataagatt

SEQ ID NO: 167650 - DNA, 26 bp, Artificial sequence
  SiRNA target sequence
atcttgcgcattcttctataagattt

SEQ ID NO: 167651 - DNA, 26 bp, Artificial sequence
  SiRNA target sequence
tcttgcgcattcttctataagatttg

SEQ ID NO: 167652 - DNA, 26 bp, Artificial sequence
  SiRNA target sequence
cttgcgcattcttctataagatttgg

SEQ ID NO: 167653 - DNA, 26 bp, Artificial sequence
  SiRNA target sequence
ttgcgcattcttctataagatttgga

SEQ ID NO: 167654 - DNA, 26 bp, Artificial sequence
  SiRNA target sequence
tgcgcattcttctataagatttggaa

SEQ ID NO: 167655 - DNA, 26 bp, Artificial sequence
  SiRNA target sequence
gcgcattcttctataagatttggaat

SEQ ID NO: 167656 - DNA, 26 bp, Artificial sequence
  SiRNA target sequence
cgcattcttctataagatttggaata

SEQ ID NO: 167657 - DNA, 26 bp, Artificial sequence
  SiRNA target sequence
gcattcttctataagatttggaataa

SEQ ID NO: 167658 - DNA, 26 bp, Artificial sequence
  SiRNA target sequence
cattcttctataagatttggaataaa

SEQ ID NO: 167659 - DNA, 26 bp, Artificial sequence
  SiRNA target sequence
attcttctataagatttggaataaat

SEQ ID NO: 167660 - DNA, 26 bp, Artificial sequence
  SiRNA target sequence
ttcttctataagatttggaataaata

SEQ ID NO: 167661 - DNA, 26 bp, Artificial sequence
  SiRNA target sequence
tcttctataagatttggaataaataa

SEQ ID NO: 167662 - DNA, 26 bp, Artificial sequence
  SiRNA target sequence
cttctataagatttggaataaataag

SEQ ID NO: 167663 - DNA, 26 bp, Artificial sequence
  SiRNA target sequence
ttctataagatttggaataaataagt

SEQ ID NO: 167664 - DNA, 26 bp, Artificial sequence
  SiRNA target sequence
tctataagatttggaataaataagtt

SEQ ID NO: 167665 - DNA, 26 bp, Artificial sequence
  SiRNA target sequence
ctataagatttggaataaataagttt

SEQ ID NO: 167666 - DNA, 26 bp, Artificial sequence
  SiRNA target sequence
tataagatttggaataaataagttta

SEQ ID NO: 167667 - DNA, 26 bp, Artificial sequence
  SiRNA target sequence
ataagatttggaataaataagtttac

SEQ ID NO: 167668 - DNA, 26 bp, Artificial sequence
  SiRNA target sequence
taagatttggaataaataagtttaca

SEQ ID NO: 167669 - DNA, 26 bp, Artificial sequence
  SiRNA target sequence
aagatttggaataaataagtttacaa

SEQ ID NO: 167670 - DNA, 26 bp, Artificial sequence
  SiRNA target sequence
agatttggaataaataagtttacaac

SEQ ID NO: 167671 - DNA, 26 bp, Artificial sequence
  SiRNA target sequence
gatttggaataaataagtttacaact

SEQ ID NO: 167672 - DNA, 26 bp, Artificial sequence
  SiRNA target sequence
atttggaataaataagtttacaactg

SEQ ID NO: 167673 - DNA, 26 bp, Artificial sequence
  SiRNA target sequence
tttggaataaataagtttacaactga

SEQ ID NO: 167674 - DNA, 26 bp, Artificial sequence
  SiRNA target sequence
ttggaataaataagtttacaactgaa

SEQ ID NO: 167675 - DNA, 26 bp, Artificial sequence
  SiRNA target sequence
tggaataaataagtttacaactgaag

SEQ ID NO: 167676 - DNA, 26 bp, Artificial sequence
  SiRNA target sequence
ggaataaataagtttacaactgaaga

SEQ ID NO: 167677 - DNA, 26 bp, Artificial sequence
  SiRNA target sequence
gaataaataagtttacaactgaagaa

SEQ ID NO: 167678 - DNA, 26 bp, Artificial sequence
  SiRNA target sequence
aataaataagtttacaactgaagaag

SEQ ID NO: 167679 - DNA, 26 bp, Artificial sequence
  SiRNA target sequence
ataaataagtttacaactgaagaaga

SEQ ID NO: 167680 - DNA, 26 bp, Artificial sequence
  SiRNA target sequence
taaataagtttacaactgaagaagaa

SEQ ID NO: 167681 - DNA, 26 bp, Artificial sequence
  SiRNA target sequence
aaataagtttacaactgaagaagaaa

SEQ ID NO: 167682 - DNA, 26 bp, Artificial sequence
  SiRNA target sequence
aataagtttacaactgaagaagaaat

SEQ ID NO: 167683 - DNA, 26 bp, Artificial sequence
  SiRNA target sequence
ataagtttacaactgaagaagaaatc

SEQ ID NO: 167684 - DNA, 26 bp, Artificial sequence
  SiRNA target sequence
taagtttacaactgaagaagaaatca

SEQ ID NO: 167685 - DNA, 26 bp, Artificial sequence
  SiRNA target sequence
aagtttacaactgaagaagaaatcaa

SEQ ID NO: 167686 - DNA, 26 bp, Artificial sequence
  SiRNA target sequence
agtttacaactgaagaagaaatcaat

SEQ ID NO: 167687 - DNA, 26 bp, Artificial sequence
  SiRNA target sequence
gtttacaactgaagaagaaatcaata

SEQ ID NO: 167688 - DNA, 26 bp, Artificial sequence
  SiRNA target sequence
tttacaactgaagaagaaatcaataa

SEQ ID NO: 167689 - DNA, 26 bp, Artificial sequence
  SiRNA target sequence
ttacaactgaagaagaaatcaataaa

SEQ ID NO: 167690 - DNA, 26 bp, Artificial sequence
  SiRNA target sequence
tacaactgaagaagaaatcaataaag

SEQ ID NO: 167691 - DNA, 26 bp, Artificial sequence
  SiRNA target sequence
acaactgaagaagaaatcaataaagt

SEQ ID NO: 167692 - DNA, 26 bp, Artificial sequence
  SiRNA target sequence
caactgaagaagaaatcaataaagta

SEQ ID NO: 167693 - DNA, 26 bp, Artificial sequence
  SiRNA target sequence
aactgaagaagaaatcaataaagtat

SEQ ID NO: 167694 - DNA, 26 bp, Artificial sequence
  SiRNA target sequence
actgaagaagaaatcaataaagtatc

SEQ ID NO: 167695 - DNA, 26 bp, Artificial sequence
  SiRNA target sequence
ctgaagaagaaatcaataaagtatct

SEQ ID NO: 167696 - DNA, 26 bp, Artificial sequence
  SiRNA target sequence
tgaagaagaaatcaataaagtatcta

SEQ ID NO: 167697 - DNA, 26 bp, Artificial sequence
  SiRNA target sequence
gaagaagaaatcaataaagtatctag

SEQ ID NO: 167698 - DNA, 26 bp, Artificial sequence
  SiRNA target sequence
aagaagaaatcaataaagtatctagt

SEQ ID NO: 167699 - DNA, 26 bp, Artificial sequence
  SiRNA target sequence
agaagaaatcaataaagtatctagtg

SEQ ID NO: 167700 - DNA, 26 bp, Artificial sequence
  SiRNA target sequence
gaagaaatcaataaagtatctagtga

SEQ ID NO: 167701 - DNA, 26 bp, Artificial sequence
  SiRNA target sequence
aagaaatcaataaagtatctagtgat

SEQ ID NO: 167702 - DNA, 26 bp, Artificial sequence
  SiRNA target sequence
agaaatcaataaagtatctagtgata

SEQ ID NO: 167703 - DNA, 26 bp, Artificial sequence
  SiRNA target sequence
gaaatcaataaagtatctagtgatac

SEQ ID NO: 167704 - DNA, 26 bp, Artificial sequence
  SiRNA target sequence
aaatcaataaagtatctagtgataca

SEQ ID NO: 167705 - DNA, 26 bp, Artificial sequence
  SiRNA target sequence
aatcaataaagtatctagtgatacaa

SEQ ID NO: 167706 - DNA, 26 bp, Artificial sequence
  SiRNA target sequence
atcaataaagtatctagtgatacaat

SEQ ID NO: 167707 - DNA, 26 bp, Artificial sequence
  SiRNA target sequence
tcaataaagtatctagtgatacaatt

SEQ ID NO: 167708 - DNA, 26 bp, Artificial sequence
  SiRNA target sequence
caataaagtatctagtgatacaatta

SEQ ID NO: 167709 - DNA, 26 bp, Artificial sequence
  SiRNA target sequence
aataaagtatctagtgatacaattaa

SEQ ID NO: 167710 - DNA, 26 bp, Artificial sequence
  SiRNA target sequence
ataaagtatctagtgatacaattaaa

SEQ ID NO: 167711 - DNA, 26 bp, Artificial sequence
  SiRNA target sequence
taaagtatctagtgatacaattaaag

SEQ ID NO: 167712 - DNA, 26 bp, Artificial sequence
  SiRNA target sequence
aaagtatctagtgatacaattaaagc

SEQ ID NO: 167713 - DNA, 26 bp, Artificial sequence
  SiRNA target sequence
aagtatctagtgatacaattaaagct

SEQ ID NO: 167714 - DNA, 26 bp, Artificial sequence
  SiRNA target sequence
agtatctagtgatacaattaaagctg

SEQ ID NO: 167715 - DNA, 26 bp, Artificial sequence
  SiRNA target sequence
gtatctagtgatacaattaaagctgt

SEQ ID NO: 167716 - DNA, 26 bp, Artificial sequence
  SiRNA target sequence
tatctagtgatacaattaaagctgtt

SEQ ID NO: 167717 - DNA, 26 bp, Artificial sequence
  SiRNA target sequence
atctagtgatacaattaaagctgtta

SEQ ID NO: 167718 - DNA, 26 bp, Artificial sequence
  SiRNA target sequence
tctagtgatacaattaaagctgttaa

SEQ ID NO: 167719 - DNA, 26 bp, Artificial sequence
  SiRNA target sequence
ctagtgatacaattaaagctgttaat

SEQ ID NO: 167720 - DNA, 26 bp, Artificial sequence
  SiRNA target sequence
tagtgatacaattaaagctgttaata

SEQ ID NO: 167721 - DNA, 26 bp, Artificial sequence
  SiRNA target sequence
agtgatacaattaaagctgttaataa

SEQ ID NO: 167722 - DNA, 26 bp, Artificial sequence
  SiRNA target sequence
gtgatacaattaaagctgttaataag

SEQ ID NO: 167723 - DNA, 26 bp, Artificial sequence
  SiRNA target sequence
tgatacaattaaagctgttaataagt

SEQ ID NO: 167724 - DNA, 26 bp, Artificial sequence
  SiRNA target sequence
gatacaattaaagctgttaataagtt

SEQ ID NO: 167725 - DNA, 26 bp, Artificial sequence
  SiRNA target sequence
atacaattaaagctgttaataagtta

SEQ ID NO: 167726 - DNA, 26 bp, Artificial sequence
  SiRNA target sequence
tacaattaaagctgttaataagttaa

SEQ ID NO: 167727 - DNA, 26 bp, Artificial sequence
  SiRNA target sequence
acaattaaagctgttaataagttaag

SEQ ID NO: 167728 - DNA, 26 bp, Artificial sequence
  SiRNA target sequence
caattaaagctgttaataagttaaga

SEQ ID NO: 167729 - DNA, 26 bp, Artificial sequence
  SiRNA target sequence
aattaaagctgttaataagttaagag

SEQ ID NO: 167730 - DNA, 26 bp, Artificial sequence
  SiRNA target sequence
attaaagctgttaataagttaagaga

SEQ ID NO: 167731 - DNA, 26 bp, Artificial sequence
  SiRNA target sequence
ttaaagctgttaataagttaagagat

SEQ ID NO: 167732 - DNA, 26 bp, Artificial sequence
  SiRNA target sequence
taaagctgttaataagttaagagata

SEQ ID NO: 167733 - DNA, 26 bp, Artificial sequence
  SiRNA target sequence
aaagctgttaataagttaagagatat

SEQ ID NO: 167734 - DNA, 26 bp, Artificial sequence
  SiRNA target sequence
aagctgttaataagttaagagatatg

SEQ ID NO: 167735 - DNA, 26 bp, Artificial sequence
  SiRNA target sequence
agctgttaataagttaagagatatgt

SEQ ID NO: 167736 - DNA, 26 bp, Artificial sequence
  SiRNA target sequence
gctgttaataagttaagagatatgtc

SEQ ID NO: 167737 - DNA, 26 bp, Artificial sequence
  SiRNA target sequence
ctgttaataagttaagagatatgtct

SEQ ID NO: 167738 - DNA, 26 bp, Artificial sequence
  SiRNA target sequence
tgttaataagttaagagatatgtctc

SEQ ID NO: 167739 - DNA, 26 bp, Artificial sequence
  SiRNA target sequence
gttaataagttaagagatatgtctcc

SEQ ID NO: 167740 - DNA, 26 bp, Artificial sequence
  SiRNA target sequence
ttaataagttaagagatatgtctcct

SEQ ID NO: 167741 - DNA, 26 bp, Artificial sequence
  SiRNA target sequence
taataagttaagagatatgtctcctt

SEQ ID NO: 167742 - DNA, 26 bp, Artificial sequence
  SiRNA target sequence
aataagttaagagatatgtctccttt

SEQ ID NO: 167743 - DNA, 26 bp, Artificial sequence
  SiRNA target sequence
ataagttaagagatatgtctccttta

SEQ ID NO: 167744 - DNA, 26 bp, Artificial sequence
  SiRNA target sequence
taagttaagagatatgtctcctttat

SEQ ID NO: 167745 - DNA, 26 bp, Artificial sequence
  SiRNA target sequence
aagttaagagatatgtctcctttata

SEQ ID NO: 167746 - DNA, 26 bp, Artificial sequence
  SiRNA target sequence
agttaagagatatgtctcctttatat

SEQ ID NO: 167747 - DNA, 26 bp, Artificial sequence
  SiRNA target sequence
gttaagagatatgtctcctttatatg

SEQ ID NO: 167748 - DNA, 26 bp, Artificial sequence
  SiRNA target sequence
ttaagagatatgtctcctttatatga

SEQ ID NO: 167749 - DNA, 26 bp, Artificial sequence
  SiRNA target sequence
taagagatatgtctcctttatatgaa

SEQ ID NO: 167750 - DNA, 26 bp, Artificial sequence
  SiRNA target sequence
aagagatatgtctcctttatatgaaa

SEQ ID NO: 167751 - DNA, 26 bp, Artificial sequence
  SiRNA target sequence
agagatatgtctcctttatatgaaat

SEQ ID NO: 167752 - DNA, 26 bp, Artificial sequence
  SiRNA target sequence
gagatatgtctcctttatatgaaatg

SEQ ID NO: 167753 - DNA, 26 bp, Artificial sequence
  SiRNA target sequence
agatatgtctcctttatatgaaatgg

SEQ ID NO: 167754 - DNA, 26 bp, Artificial sequence
  SiRNA target sequence
gatatgtctcctttatatgaaatggt

SEQ ID NO: 167755 - DNA, 26 bp, Artificial sequence
  SiRNA target sequence
atatgtctcctttatatgaaatggtc

SEQ ID NO: 167756 - DNA, 26 bp, Artificial sequence
  SiRNA target sequence
tatgtctcctttatatgaaatggtca

SEQ ID NO: 167757 - DNA, 26 bp, Artificial sequence
  SiRNA target sequence
atgtctcctttatatgaaatggtcaa

SEQ ID NO: 167758 - DNA, 26 bp, Artificial sequence
  SiRNA target sequence
tgtctcctttatatgaaatggtcaaa

SEQ ID NO: 167759 - DNA, 26 bp, Artificial sequence
  SiRNA target sequence
gtctcctttatatgaaatggtcaaag

SEQ ID NO: 167760 - DNA, 26 bp, Artificial sequence
  SiRNA target sequence
tctcctttatatgaaatggtcaaaga

SEQ ID NO: 167761 - DNA, 26 bp, Artificial sequence
  SiRNA target sequence
ctcctttatatgaaatggtcaaagaa

SEQ ID NO: 167762 - DNA, 26 bp, Artificial sequence
  SiRNA target sequence
tcctttatatgaaatggtcaaagaag

SEQ ID NO: 167763 - DNA, 26 bp, Artificial sequence
  SiRNA target sequence
cctttatatgaaatggtcaaagaagg

SEQ ID NO: 167764 - DNA, 26 bp, Artificial sequence
  SiRNA target sequence
ctttatatgaaatggtcaaagaaggg

SEQ ID NO: 167765 - DNA, 26 bp, Artificial sequence
  SiRNA target sequence
tttatatgaaatggtcaaagaaggga

SEQ ID NO: 167766 - DNA, 26 bp, Artificial sequence
  SiRNA target sequence
ttatatgaaatggtcaaagaagggat

SEQ ID NO: 167767 - DNA, 26 bp, Artificial sequence
  SiRNA target sequence
tatatgaaatggtcaaagaagggata

SEQ ID NO: 167768 - DNA, 26 bp, Artificial sequence
  SiRNA target sequence
atatgaaatggtcaaagaagggatag

SEQ ID NO: 167769 - DNA, 26 bp, Artificial sequence
  SiRNA target sequence
tatgaaatggtcaaagaagggataga

SEQ ID NO: 167770 - DNA, 26 bp, Artificial sequence
  SiRNA target sequence
atgaaatggtcaaagaagggatagat

SEQ ID NO: 167771 - DNA, 26 bp, Artificial sequence
  SiRNA target sequence
tgaaatggtcaaagaagggatagatt

SEQ ID NO: 167772 - DNA, 26 bp, Artificial sequence
  SiRNA target sequence
gaaatggtcaaagaagggatagattt

SEQ ID NO: 167773 - DNA, 26 bp, Artificial sequence
  SiRNA target sequence
aaatggtcaaagaagggatagattta

SEQ ID NO: 167774 - DNA, 26 bp, Artificial sequence
  SiRNA target sequence
aatggtcaaagaagggatagatttag

SEQ ID NO: 167775 - DNA, 26 bp, Artificial sequence
  SiRNA target sequence
atggtcaaagaagggatagatttaga

SEQ ID NO: 167776 - DNA, 26 bp, Artificial sequence
  SiRNA target sequence
tggtcaaagaagggatagatttagat

SEQ ID NO: 167777 - DNA, 26 bp, Artificial sequence
  SiRNA target sequence
ggtcaaagaagggatagatttagata

SEQ ID NO: 167778 - DNA, 26 bp, Artificial sequence
  SiRNA target sequence
gtcaaagaagggatagatttagataa

SEQ ID NO: 167779 - DNA, 26 bp, Artificial sequence
  SiRNA target sequence
tcaaagaagggatagatttagataaa

SEQ ID NO: 167780 - DNA, 26 bp, Artificial sequence
  SiRNA target sequence
caaagaagggatagatttagataaaa

SEQ ID NO: 167781 - DNA, 26 bp, Artificial sequence
  SiRNA target sequence
aaagaagggatagatttagataaaat

SEQ ID NO: 167782 - DNA, 26 bp, Artificial sequence
  SiRNA target sequence
aagaagggatagatttagataaaatt

SEQ ID NO: 167783 - DNA, 26 bp, Artificial sequence
  SiRNA target sequence
agaagggatagatttagataaaatta

SEQ ID NO: 167784 - DNA, 26 bp, Artificial sequence
  SiRNA target sequence
gaagggatagatttagataaaattaa

SEQ ID NO: 167785 - DNA, 26 bp, Artificial sequence
  SiRNA target sequence
aagggatagatttagataaaattaat

SEQ ID NO: 167786 - DNA, 26 bp, Artificial sequence
  SiRNA target sequence
agggatagatttagataaaattaatt

SEQ ID NO: 167787 - DNA, 26 bp, Artificial sequence
  SiRNA target sequence
gggatagatttagataaaattaattg

SEQ ID NO: 167788 - DNA, 26 bp, Artificial sequence
  SiRNA target sequence
ggatagatttagataaaattaattgg

SEQ ID NO: 167789 - DNA, 26 bp, Artificial sequence
  SiRNA target sequence
gatagatttagataaaattaattggt

SEQ ID NO: 167790 - DNA, 26 bp, Artificial sequence
  SiRNA target sequence
atagatttagataaaattaattggtc

SEQ ID NO: 167791 - DNA, 26 bp, Artificial sequence
  SiRNA target sequence
tagatttagataaaattaattggtct

SEQ ID NO: 167792 - DNA, 26 bp, Artificial sequence
  SiRNA target sequence
agatttagataaaattaattggtctg

SEQ ID NO: 167793 - DNA, 26 bp, Artificial sequence
  SiRNA target sequence
gatttagataaaattaattggtctgc

SEQ ID NO: 167794 - DNA, 26 bp, Artificial sequence
  SiRNA target sequence
atttagataaaattaattggtctgct

SEQ ID NO: 167795 - DNA, 26 bp, Artificial sequence
  SiRNA target sequence
tttagataaaattaattggtctgctt

SEQ ID NO: 167796 - DNA, 26 bp, Artificial sequence
  SiRNA target sequence
ttagataaaattaattggtctgctta

SEQ ID NO: 167797 - DNA, 26 bp, Artificial sequence
  SiRNA target sequence
tagataaaattaattggtctgcttaa

SEQ ID NO: 167798 - DNA, 27 bp, Artificial sequence
  SiRNA target sequence
atgttatttttttatagccccattttt

SEQ ID NO: 167799 - DNA, 27 bp, Artificial sequence
  SiRNA target sequence
tgttatttttttatagccccattttta

SEQ ID NO: 167800 - DNA, 27 bp, Artificial sequence
  SiRNA target sequence
gttatttttttatagccccatttttat

SEQ ID NO: 167801 - DNA, 27 bp, Artificial sequence
  SiRNA target sequence
ttatttttttatagccccatttttatg

SEQ ID NO: 167802 - DNA, 27 bp, Artificial sequence
  SiRNA target sequence
tatttttttatagccccatttttatga

SEQ ID NO: 167803 - DNA, 27 bp, Artificial sequence
  SiRNA target sequence
atttttttatagccccatttttatgac

SEQ ID NO: 167804 - DNA, 27 bp, Artificial sequence
  SiRNA target sequence
tttttttatagccccatttttatgact

SEQ ID NO: 167805 - DNA, 27 bp, Artificial sequence
  SiRNA target sequence
ttttttatagccccatttttatgacta

SEQ ID NO: 167806 - DNA, 27 bp, Artificial sequence
  SiRNA target sequence
tttttatagccccatttttatgactaa

SEQ ID NO: 167807 - DNA, 27 bp, Artificial sequence
  SiRNA target sequence
ttttatagccccatttttatgactaaa

SEQ ID NO: 167808 - DNA, 27 bp, Artificial sequence
  SiRNA target sequence
tttatagccccatttttatgactaaaa

SEQ ID NO: 167809 - DNA, 27 bp, Artificial sequence
  SiRNA target sequence
ttatagccccatttttatgactaaaag

SEQ ID NO: 167810 - DNA, 27 bp, Artificial sequence
  SiRNA target sequence
tatagccccatttttatgactaaaagt

SEQ ID NO: 167811 - DNA, 27 bp, Artificial sequence
  SiRNA target sequence
atagccccatttttatgactaaaagtt

SEQ ID NO: 167812 - DNA, 27 bp, Artificial sequence
  SiRNA target sequence
tagccccatttttatgactaaaagttt

SEQ ID NO: 167813 - DNA, 27 bp, Artificial sequence
  SiRNA target sequence
agccccatttttatgactaaaagttta

SEQ ID NO: 167814 - DNA, 27 bp, Artificial sequence
  SiRNA target sequence
gccccatttttatgactaaaagtttaa

SEQ ID NO: 167815 - DNA, 27 bp, Artificial sequence
  SiRNA target sequence
ccccatttttatgactaaaagtttaac

SEQ ID NO: 167816 - DNA, 27 bp, Artificial sequence
  SiRNA target sequence
cccatttttatgactaaaagtttaacg

SEQ ID NO: 167817 - DNA, 27 bp, Artificial sequence
  SiRNA target sequence
ccatttttatgactaaaagtttaacga

SEQ ID NO: 167818 - DNA, 27 bp, Artificial sequence
  SiRNA target sequence
catttttatgactaaaagtttaacgaa

SEQ ID NO: 167819 - DNA, 27 bp, Artificial sequence
  SiRNA target sequence
atttttatgactaaaagtttaacgaat

SEQ ID NO: 167820 - DNA, 27 bp, Artificial sequence
  SiRNA target sequence
tttttatgactaaaagtttaacgaatt

SEQ ID NO: 167821 - DNA, 27 bp, Artificial sequence
  SiRNA target sequence
ttttatgactaaaagtttaacgaattc

SEQ ID NO: 167822 - DNA, 27 bp, Artificial sequence
  SiRNA target sequence
tttatgactaaaagtttaacgaattct

SEQ ID NO: 167823 - DNA, 27 bp, Artificial sequence
  SiRNA target sequence
ttatgactaaaagtttaacgaattcta

SEQ ID NO: 167824 - DNA, 27 bp, Artificial sequence
  SiRNA target sequence
tatgactaaaagtttaacgaattctaa

SEQ ID NO: 167825 - DNA, 27 bp, Artificial sequence
  SiRNA target sequence
atgactaaaagtttaacgaattctaaa

SEQ ID NO: 167826 - DNA, 27 bp, Artificial sequence
  SiRNA target sequence
tgactaaaagtttaacgaattctaaaa

SEQ ID NO: 167827 - DNA, 27 bp, Artificial sequence
  SiRNA target sequence
gactaaaagtttaacgaattctaaaac

SEQ ID NO: 167828 - DNA, 27 bp, Artificial sequence
  SiRNA target sequence
actaaaagtttaacgaattctaaaact

SEQ ID NO: 167829 - DNA, 27 bp, Artificial sequence
  SiRNA target sequence
ctaaaagtttaacgaattctaaaactt

SEQ ID NO: 167830 - DNA, 27 bp, Artificial sequence
  SiRNA target sequence
taaaagtttaacgaattctaaaacttt

SEQ ID NO: 167831 - DNA, 27 bp, Artificial sequence
  SiRNA target sequence
aaaagtttaacgaattctaaaacttta

SEQ ID NO: 167832 - DNA, 27 bp, Artificial sequence
  SiRNA target sequence
aaagtttaacgaattctaaaactttaa

SEQ ID NO: 167833 - DNA, 27 bp, Artificial sequence
  SiRNA target sequence
aagtttaacgaattctaaaactttaaa

SEQ ID NO: 167834 - DNA, 27 bp, Artificial sequence
  SiRNA target sequence
agtttaacgaattctaaaactttaaat

SEQ ID NO: 167835 - DNA, 27 bp, Artificial sequence
  SiRNA target sequence
gtttaacgaattctaaaactttaaatt

SEQ ID NO: 167836 - DNA, 27 bp, Artificial sequence
  SiRNA target sequence
tttaacgaattctaaaactttaaattt

SEQ ID NO: 167837 - DNA, 27 bp, Artificial sequence
  SiRNA target sequence
ttaacgaattctaaaactttaaattta

SEQ ID NO: 167838 - DNA, 27 bp, Artificial sequence
  SiRNA target sequence
taacgaattctaaaactttaaatttaa

SEQ ID NO: 167839 - DNA, 27 bp, Artificial sequence
  SiRNA target sequence
aacgaattctaaaactttaaatttaat

SEQ ID NO: 167840 - DNA, 27 bp, Artificial sequence
  SiRNA target sequence
acgaattctaaaactttaaatttaatg

SEQ ID NO: 167841 - DNA, 27 bp, Artificial sequence
  SiRNA target sequence
cgaattctaaaactttaaatttaatgt

SEQ ID NO: 167842 - DNA, 27 bp, Artificial sequence
  SiRNA target sequence
gaattctaaaactttaaatttaatgtc

SEQ ID NO: 167843 - DNA, 27 bp, Artificial sequence
  SiRNA target sequence
aattctaaaactttaaatttaatgtca

SEQ ID NO: 167844 - DNA, 27 bp, Artificial sequence
  SiRNA target sequence
attctaaaactttaaatttaatgtcaa

SEQ ID NO: 167845 - DNA, 27 bp, Artificial sequence
  SiRNA target sequence
ttctaaaactttaaatttaatgtcaag

SEQ ID NO: 167846 - DNA, 27 bp, Artificial sequence
  SiRNA target sequence
tctaaaactttaaatttaatgtcaagt

SEQ ID NO: 167847 - DNA, 27 bp, Artificial sequence
  SiRNA target sequence
ctaaaactttaaatttaatgtcaagtg

SEQ ID NO: 167848 - DNA, 27 bp, Artificial sequence
  SiRNA target sequence
taaaactttaaatttaatgtcaagtgt

SEQ ID NO: 167849 - DNA, 27 bp, Artificial sequence
  SiRNA target sequence
aaaactttaaatttaatgtcaagtgta

SEQ ID NO: 167850 - DNA, 27 bp, Artificial sequence
  SiRNA target sequence
aaactttaaatttaatgtcaagtgtac

SEQ ID NO: 167851 - DNA, 27 bp, Artificial sequence
  SiRNA target sequence
aactttaaatttaatgtcaagtgtaca

SEQ ID NO: 167852 - DNA, 27 bp, Artificial sequence
  SiRNA target sequence
actttaaatttaatgtcaagtgtacaa

SEQ ID NO: 167853 - DNA, 27 bp, Artificial sequence
  SiRNA target sequence
ctttaaatttaatgtcaagtgtacaat

SEQ ID NO: 167854 - DNA, 27 bp, Artificial sequence
  SiRNA target sequence
tttaaatttaatgtcaagtgtacaatc

SEQ ID NO: 167855 - DNA, 27 bp, Artificial sequence
  SiRNA target sequence
ttaaatttaatgtcaagtgtacaatca

SEQ ID NO: 167856 - DNA, 27 bp, Artificial sequence
  SiRNA target sequence
taaatttaatgtcaagtgtacaatcac

SEQ ID NO: 167857 - DNA, 27 bp, Artificial sequence
  SiRNA target sequence
aaatttaatgtcaagtgtacaatcacc

SEQ ID NO: 167858 - DNA, 27 bp, Artificial sequence
  SiRNA target sequence
aatttaatgtcaagtgtacaatcacca

SEQ ID NO: 167859 - DNA, 27 bp, Artificial sequence
  SiRNA target sequence
atttaatgtcaagtgtacaatcaccag

SEQ ID NO: 167860 - DNA, 27 bp, Artificial sequence
  SiRNA target sequence
tttaatgtcaagtgtacaatcaccagt

SEQ ID NO: 167861 - DNA, 27 bp, Artificial sequence
  SiRNA target sequence
ttaatgtcaagtgtacaatcaccagtt

SEQ ID NO: 167862 - DNA, 27 bp, Artificial sequence
  SiRNA target sequence
taatgtcaagtgtacaatcaccagtta

SEQ ID NO: 167863 - DNA, 27 bp, Artificial sequence
  SiRNA target sequence
aatgtcaagtgtacaatcaccagttat

SEQ ID NO: 167864 - DNA, 27 bp, Artificial sequence
  SiRNA target sequence
atgtcaagtgtacaatcaccagttata

SEQ ID NO: 167865 - DNA, 27 bp, Artificial sequence
  SiRNA target sequence
tgtcaagtgtacaatcaccagttataa

SEQ ID NO: 167866 - DNA, 27 bp, Artificial sequence
  SiRNA target sequence
gtcaagtgtacaatcaccagttataaa

SEQ ID NO: 167867 - DNA, 27 bp, Artificial sequence
  SiRNA target sequence
tcaagtgtacaatcaccagttataaat

SEQ ID NO: 167868 - DNA, 27 bp, Artificial sequence
  SiRNA target sequence
caagtgtacaatcaccagttataaata

SEQ ID NO: 167869 - DNA, 27 bp, Artificial sequence
  SiRNA target sequence
aagtgtacaatcaccagttataaatac

SEQ ID NO: 167870 - DNA, 27 bp, Artificial sequence
  SiRNA target sequence
agtgtacaatcaccagttataaataca

SEQ ID NO: 167871 - DNA, 27 bp, Artificial sequence
  SiRNA target sequence
gtgtacaatcaccagttataaatacaa

SEQ ID NO: 167872 - DNA, 27 bp, Artificial sequence
  SiRNA target sequence
tgtacaatcaccagttataaatacaaa

SEQ ID NO: 167873 - DNA, 27 bp, Artificial sequence
  SiRNA target sequence
gtacaatcaccagttataaatacaaaa

SEQ ID NO: 167874 - DNA, 27 bp, Artificial sequence
  SiRNA target sequence
tacaatcaccagttataaatacaaaaa

SEQ ID NO: 167875 - DNA, 27 bp, Artificial sequence
  SiRNA target sequence
acaatcaccagttataaatacaaaaaa

SEQ ID NO: 167876 - DNA, 27 bp, Artificial sequence
  SiRNA target sequence
caatcaccagttataaatacaaaaaaa

SEQ ID NO: 167877 - DNA, 27 bp, Artificial sequence
  SiRNA target sequence
aatcaccagttataaatacaaaaaaaa

SEQ ID NO: 167878 - DNA, 27 bp, Artificial sequence
  SiRNA target sequence
atcaccagttataaatacaaaaaaaat

SEQ ID NO: 167879 - DNA, 27 bp, Artificial sequence
  SiRNA target sequence
tcaccagttataaatacaaaaaaaata

SEQ ID NO: 167880 - DNA, 27 bp, Artificial sequence
  SiRNA target sequence
caccagttataaatacaaaaaaaatat

SEQ ID NO: 167881 - DNA, 27 bp, Artificial sequence
  SiRNA target sequence
accagttataaatacaaaaaaaatata

SEQ ID NO: 167882 - DNA, 27 bp, Artificial sequence
  SiRNA target sequence
ccagttataaatacaaaaaaaatatat

SEQ ID NO: 167883 - DNA, 27 bp, Artificial sequence
  SiRNA target sequence
cagttataaatacaaaaaaaatatatc

SEQ ID NO: 167884 - DNA, 27 bp, Artificial sequence
  SiRNA target sequence
agttataaatacaaaaaaaatatatct

SEQ ID NO: 167885 - DNA, 27 bp, Artificial sequence
  SiRNA target sequence
gttataaatacaaaaaaaatatatctt

SEQ ID NO: 167886 - DNA, 27 bp, Artificial sequence
  SiRNA target sequence
ttataaatacaaaaaaaatatatcttg

SEQ ID NO: 167887 - DNA, 27 bp, Artificial sequence
  SiRNA target sequence
tataaatacaaaaaaaatatatcttga

SEQ ID NO: 167888 - DNA, 27 bp, Artificial sequence
  SiRNA target sequence
ataaatacaaaaaaaatatatcttgat

SEQ ID NO: 167889 - DNA, 27 bp, Artificial sequence
  SiRNA target sequence
taaatacaaaaaaaatatatcttgatg

SEQ ID NO: 167890 - DNA, 27 bp, Artificial sequence
  SiRNA target sequence
aaatacaaaaaaaatatatcttgatgc

SEQ ID NO: 167891 - DNA, 27 bp, Artificial sequence
  SiRNA target sequence
aatacaaaaaaaatatatcttgatgca

SEQ ID NO: 167892 - DNA, 27 bp, Artificial sequence
  SiRNA target sequence
atacaaaaaaaatatatcttgatgcac

SEQ ID NO: 167893 - DNA, 27 bp, Artificial sequence
  SiRNA target sequence
tacaaaaaaaatatatcttgatgcaca

SEQ ID NO: 167894 - DNA, 27 bp, Artificial sequence
  SiRNA target sequence
acaaaaaaaatatatcttgatgcacaa

SEQ ID NO: 167895 - DNA, 27 bp, Artificial sequence
  SiRNA target sequence
caaaaaaaatatatcttgatgcacaag

SEQ ID NO: 167896 - DNA, 27 bp, Artificial sequence
  SiRNA target sequence
aaaaaaaatatatcttgatgcacaagc

SEQ ID NO: 167897 - DNA, 27 bp, Artificial sequence
  SiRNA target sequence
aaaaaaatatatcttgatgcacaagcg

SEQ ID NO: 167898 - DNA, 27 bp, Artificial sequence
  SiRNA target sequence
aaaaaatatatcttgatgcacaagcga

SEQ ID NO: 167899 - DNA, 27 bp, Artificial sequence
  SiRNA target sequence
aaaaatatatcttgatgcacaagcgac

SEQ ID NO: 167900 - DNA, 27 bp, Artificial sequence
  SiRNA target sequence
aaaatatatcttgatgcacaagcgacc

SEQ ID NO: 167901 - DNA, 27 bp, Artificial sequence
  SiRNA target sequence
aaatatatcttgatgcacaagcgacca

SEQ ID NO: 167902 - DNA, 27 bp, Artificial sequence
  SiRNA target sequence
aatatatcttgatgcacaagcgaccaa

SEQ ID NO: 167903 - DNA, 27 bp, Artificial sequence
  SiRNA target sequence
atatatcttgatgcacaagcgaccaag

SEQ ID NO: 167904 - DNA, 27 bp, Artificial sequence
  SiRNA target sequence
tatatcttgatgcacaagcgaccaagc

SEQ ID NO: 167905 - DNA, 27 bp, Artificial sequence
  SiRNA target sequence
atatcttgatgcacaagcgaccaagcc

SEQ ID NO: 167906 - DNA, 27 bp, Artificial sequence
  SiRNA target sequence
tatcttgatgcacaagcgaccaagcct

SEQ ID NO: 167907 - DNA, 27 bp, Artificial sequence
  SiRNA target sequence
atcttgatgcacaagcgaccaagcctt

SEQ ID NO: 167908 - DNA, 27 bp, Artificial sequence
  SiRNA target sequence
tcttgatgcacaagcgaccaagccttt

SEQ ID NO: 167909 - DNA, 27 bp, Artificial sequence
  SiRNA target sequence
cttgatgcacaagcgaccaagccttta

SEQ ID NO: 167910 - DNA, 27 bp, Artificial sequence
  SiRNA target sequence
ttgatgcacaagcgaccaagcctttag

SEQ ID NO: 167911 - DNA, 27 bp, Artificial sequence
  SiRNA target sequence
tgatgcacaagcgaccaagcctttaga

SEQ ID NO: 167912 - DNA, 27 bp, Artificial sequence
  SiRNA target sequence
gatgcacaagcgaccaagcctttagac

SEQ ID NO: 167913 - DNA, 27 bp, Artificial sequence
  SiRNA target sequence
atgcacaagcgaccaagcctttagacc

SEQ ID NO: 167914 - DNA, 27 bp, Artificial sequence
  SiRNA target sequence
tgcacaagcgaccaagcctttagaccc

SEQ ID NO: 167915 - DNA, 27 bp, Artificial sequence
  SiRNA target sequence
gcacaagcgaccaagcctttagacccg

SEQ ID NO: 167916 - DNA, 27 bp, Artificial sequence
  SiRNA target sequence
cacaagcgaccaagcctttagacccgc

SEQ ID NO: 167917 - DNA, 27 bp, Artificial sequence
  SiRNA target sequence
acaagcgaccaagcctttagacccgcg

SEQ ID NO: 167918 - DNA, 27 bp, Artificial sequence
  SiRNA target sequence
caagcgaccaagcctttagacccgcgt

SEQ ID NO: 167919 - DNA, 27 bp, Artificial sequence
  SiRNA target sequence
aagcgaccaagcctttagacccgcgtg

SEQ ID NO: 167920 - DNA, 27 bp, Artificial sequence
  SiRNA target sequence
agcgaccaagcctttagacccgcgtgt

SEQ ID NO: 167921 - DNA, 27 bp, Artificial sequence
  SiRNA target sequence
gcgaccaagcctttagacccgcgtgtg

SEQ ID NO: 167922 - DNA, 27 bp, Artificial sequence
  SiRNA target sequence
cgaccaagcctttagacccgcgtgtgc

SEQ ID NO: 167923 - DNA, 27 bp, Artificial sequence
  SiRNA target sequence
gaccaagcctttagacccgcgtgtgct

SEQ ID NO: 167924 - DNA, 27 bp, Artificial sequence
  SiRNA target sequence
accaagcctttagacccgcgtgtgctt

SEQ ID NO: 167925 - DNA, 27 bp, Artificial sequence
  SiRNA target sequence
ccaagcctttagacccgcgtgtgcttg

SEQ ID NO: 167926 - DNA, 27 bp, Artificial sequence
  SiRNA target sequence
caagcctttagacccgcgtgtgcttga

SEQ ID NO: 167927 - DNA, 27 bp, Artificial sequence
  SiRNA target sequence
aagcctttagacccgcgtgtgcttgat

SEQ ID NO: 167928 - DNA, 27 bp, Artificial sequence
  SiRNA target sequence
agcctttagacccgcgtgtgcttgatg

SEQ ID NO: 167929 - DNA, 27 bp, Artificial sequence
  SiRNA target sequence
gcctttagacccgcgtgtgcttgatgc

SEQ ID NO: 167930 - DNA, 27 bp, Artificial sequence
  SiRNA target sequence
cctttagacccgcgtgtgcttgatgca

SEQ ID NO: 167931 - DNA, 27 bp, Artificial sequence
  SiRNA target sequence
ctttagacccgcgtgtgcttgatgcaa

SEQ ID NO: 167932 - DNA, 27 bp, Artificial sequence
  SiRNA target sequence
tttagacccgcgtgtgcttgatgcaat

SEQ ID NO: 167933 - DNA, 27 bp, Artificial sequence
  SiRNA target sequence
ttagacccgcgtgtgcttgatgcaatg

SEQ ID NO: 167934 - DNA, 27 bp, Artificial sequence
  SiRNA target sequence
tagacccgcgtgtgcttgatgcaatgc

SEQ ID NO: 167935 - DNA, 27 bp, Artificial sequence
  SiRNA target sequence
agacccgcgtgtgcttgatgcaatgct

SEQ ID NO: 167936 - DNA, 27 bp, Artificial sequence
  SiRNA target sequence
gacccgcgtgtgcttgatgcaatgctt

SEQ ID NO: 167937 - DNA, 27 bp, Artificial sequence
  SiRNA target sequence
acccgcgtgtgcttgatgcaatgcttc

SEQ ID NO: 167938 - DNA, 27 bp, Artificial sequence
  SiRNA target sequence
cccgcgtgtgcttgatgcaatgcttcc

SEQ ID NO: 167939 - DNA, 27 bp, Artificial sequence
  SiRNA target sequence
ccgcgtgtgcttgatgcaatgcttcca

SEQ ID NO: 167940 - DNA, 27 bp, Artificial sequence
  SiRNA target sequence
cgcgtgtgcttgatgcaatgcttccat

SEQ ID NO: 167941 - DNA, 27 bp, Artificial sequence
  SiRNA target sequence
gcgtgtgcttgatgcaatgcttccata

SEQ ID NO: 167942 - DNA, 27 bp, Artificial sequence
  SiRNA target sequence
cgtgtgcttgatgcaatgcttccatac

SEQ ID NO: 167943 - DNA, 27 bp, Artificial sequence
  SiRNA target sequence
gtgtgcttgatgcaatgcttccatact

SEQ ID NO: 167944 - DNA, 27 bp, Artificial sequence
  SiRNA target sequence
tgtgcttgatgcaatgcttccatacta

SEQ ID NO: 167945 - DNA, 27 bp, Artificial sequence
  SiRNA target sequence
gtgcttgatgcaatgcttccatactat

SEQ ID NO: 167946 - DNA, 27 bp, Artificial sequence
  SiRNA target sequence
tgcttgatgcaatgcttccatactata

SEQ ID NO: 167947 - DNA, 27 bp, Artificial sequence
  SiRNA target sequence
gcttgatgcaatgcttccatactatac

SEQ ID NO: 167948 - DNA, 27 bp, Artificial sequence
  SiRNA target sequence
cttgatgcaatgcttccatactataca

SEQ ID NO: 167949 - DNA, 27 bp, Artificial sequence
  SiRNA target sequence
ttgatgcaatgcttccatactatacat

SEQ ID NO: 167950 - DNA, 27 bp, Artificial sequence
  SiRNA target sequence
tgatgcaatgcttccatactatacatc

SEQ ID NO: 167951 - DNA, 27 bp, Artificial sequence
  SiRNA target sequence
gatgcaatgcttccatactatacatcc

SEQ ID NO: 167952 - DNA, 27 bp, Artificial sequence
  SiRNA target sequence
atgcaatgcttccatactatacatcca

SEQ ID NO: 167953 - DNA, 27 bp, Artificial sequence
  SiRNA target sequence
tgcaatgcttccatactatacatccat

SEQ ID NO: 167954 - DNA, 27 bp, Artificial sequence
  SiRNA target sequence
gcaatgcttccatactatacatccatt

SEQ ID NO: 167955 - DNA, 27 bp, Artificial sequence
  SiRNA target sequence
caatgcttccatactatacatccattt

SEQ ID NO: 167956 - DNA, 27 bp, Artificial sequence
  SiRNA target sequence
aatgcttccatactatacatccatttt

SEQ ID NO: 167957 - DNA, 27 bp, Artificial sequence
  SiRNA target sequence
atgcttccatactatacatccattttt

SEQ ID NO: 167958 - DNA, 27 bp, Artificial sequence
  SiRNA target sequence
tgcttccatactatacatccatttttg

SEQ ID NO: 167959 - DNA, 27 bp, Artificial sequence
  SiRNA target sequence
gcttccatactatacatccatttttgg

SEQ ID NO: 167960 - DNA, 27 bp, Artificial sequence
  SiRNA target sequence
cttccatactatacatccatttttgga

SEQ ID NO: 167961 - DNA, 27 bp, Artificial sequence
  SiRNA target sequence
ttccatactatacatccatttttggaa

SEQ ID NO: 167962 - DNA, 27 bp, Artificial sequence
  SiRNA target sequence
tccatactatacatccatttttggaaa

SEQ ID NO: 167963 - DNA, 27 bp, Artificial sequence
  SiRNA target sequence
ccatactatacatccatttttggaaat

SEQ ID NO: 167964 - DNA, 27 bp, Artificial sequence
  SiRNA target sequence
catactatacatccatttttggaaatc

SEQ ID NO: 167965 - DNA, 27 bp, Artificial sequence
  SiRNA target sequence
atactatacatccatttttggaaatcc

SEQ ID NO: 167966 - DNA, 27 bp, Artificial sequence
  SiRNA target sequence
tactatacatccatttttggaaatcca

SEQ ID NO: 167967 - DNA, 27 bp, Artificial sequence
  SiRNA target sequence
actatacatccatttttggaaatccac

SEQ ID NO: 167968 - DNA, 27 bp, Artificial sequence
  SiRNA target sequence
ctatacatccatttttggaaatccaca

SEQ ID NO: 167969 - DNA, 27 bp, Artificial sequence
  SiRNA target sequence
tatacatccatttttggaaatccacat

SEQ ID NO: 167970 - DNA, 27 bp, Artificial sequence
  SiRNA target sequence
atacatccatttttggaaatccacatt

SEQ ID NO: 167971 - DNA, 27 bp, Artificial sequence
  SiRNA target sequence
tacatccatttttggaaatccacattc

SEQ ID NO: 167972 - DNA, 27 bp, Artificial sequence
  SiRNA target sequence
acatccatttttggaaatccacattct

SEQ ID NO: 167973 - DNA, 27 bp, Artificial sequence
  SiRNA target sequence
catccatttttggaaatccacattctc

SEQ ID NO: 167974 - DNA, 27 bp, Artificial sequence
  SiRNA target sequence
atccatttttggaaatccacattctcg

SEQ ID NO: 167975 - DNA, 27 bp, Artificial sequence
  SiRNA target sequence
tccatttttggaaatccacattctcgc

SEQ ID NO: 167976 - DNA, 27 bp, Artificial sequence
  SiRNA target sequence
ccatttttggaaatccacattctcgca

SEQ ID NO: 167977 - DNA, 27 bp, Artificial sequence
  SiRNA target sequence
catttttggaaatccacattctcgcac

SEQ ID NO: 167978 - DNA, 27 bp, Artificial sequence
  SiRNA target sequence
atttttggaaatccacattctcgcacg

SEQ ID NO: 167979 - DNA, 27 bp, Artificial sequence
  SiRNA target sequence
tttttggaaatccacattctcgcacgc

SEQ ID NO: 167980 - DNA, 27 bp, Artificial sequence
  SiRNA target sequence
ttttggaaatccacattctcgcacgca

SEQ ID NO: 167981 - DNA, 27 bp, Artificial sequence
  SiRNA target sequence
tttggaaatccacattctcgcacgcat

SEQ ID NO: 167982 - DNA, 27 bp, Artificial sequence
  SiRNA target sequence
ttggaaatccacattctcgcacgcata

SEQ ID NO: 167983 - DNA, 27 bp, Artificial sequence
  SiRNA target sequence
tggaaatccacattctcgcacgcatac

SEQ ID NO: 167984 - DNA, 27 bp, Artificial sequence
  SiRNA target sequence
ggaaatccacattctcgcacgcatacg

SEQ ID NO: 167985 - DNA, 27 bp, Artificial sequence
  SiRNA target sequence
gaaatccacattctcgcacgcatacgt

SEQ ID NO: 167986 - DNA, 27 bp, Artificial sequence
  SiRNA target sequence
aaatccacattctcgcacgcatacgtt

SEQ ID NO: 167987 - DNA, 27 bp, Artificial sequence
  SiRNA target sequence
aatccacattctcgcacgcatacgttt

SEQ ID NO: 167988 - DNA, 27 bp, Artificial sequence
  SiRNA target sequence
atccacattctcgcacgcatacgtttg

SEQ ID NO: 167989 - DNA, 27 bp, Artificial sequence
  SiRNA target sequence
tccacattctcgcacgcatacgtttgg

SEQ ID NO: 167990 - DNA, 27 bp, Artificial sequence
  SiRNA target sequence
ccacattctcgcacgcatacgtttgga

SEQ ID NO: 167991 - DNA, 27 bp, Artificial sequence
  SiRNA target sequence
cacattctcgcacgcatacgtttggat

SEQ ID NO: 167992 - DNA, 27 bp, Artificial sequence
  SiRNA target sequence
acattctcgcacgcatacgtttggatg

SEQ ID NO: 167993 - DNA, 27 bp, Artificial sequence
  SiRNA target sequence
cattctcgcacgcatacgtttggatgg

SEQ ID NO: 167994 - DNA, 27 bp, Artificial sequence
  SiRNA target sequence
attctcgcacgcatacgtttggatgga

SEQ ID NO: 167995 - DNA, 27 bp, Artificial sequence
  SiRNA target sequence
ttctcgcacgcatacgtttggatggaa

SEQ ID NO: 167996 - DNA, 27 bp, Artificial sequence
  SiRNA target sequence
tctcgcacgcatacgtttggatggaat

SEQ ID NO: 167997 - DNA, 27 bp, Artificial sequence
  SiRNA target sequence
ctcgcacgcatacgtttggatggaatg

SEQ ID NO: 167998 - DNA, 27 bp, Artificial sequence
  SiRNA target sequence
tcgcacgcatacgtttggatggaatgc

SEQ ID NO: 167999 - DNA, 27 bp, Artificial sequence
  SiRNA target sequence
cgcacgcatacgtttggatggaatgca

SEQ ID NO: 168000 - DNA, 27 bp, Artificial sequence
  SiRNA target sequence
gcacgcatacgtttggatggaatgcag

SEQ ID NO: 168001 - DNA, 27 bp, Artificial sequence
  SiRNA target sequence
cacgcatacgtttggatggaatgcaga

SEQ ID NO: 168002 - DNA, 27 bp, Artificial sequence
  SiRNA target sequence
acgcatacgtttggatggaatgcagaa

SEQ ID NO: 168003 - DNA, 27 bp, Artificial sequence
  SiRNA target sequence
cgcatacgtttggatggaatgcagaaa

SEQ ID NO: 168004 - DNA, 27 bp, Artificial sequence
  SiRNA target sequence
gcatacgtttggatggaatgcagaaaa

SEQ ID NO: 168005 - DNA, 27 bp, Artificial sequence
  SiRNA target sequence
catacgtttggatggaatgcagaaaaa

SEQ ID NO: 168006 - DNA, 27 bp, Artificial sequence
  SiRNA target sequence
atacgtttggatggaatgcagaaaaag

SEQ ID NO: 168007 - DNA, 27 bp, Artificial sequence
  SiRNA target sequence
tacgtttggatggaatgcagaaaaagg

SEQ ID NO: 168008 - DNA, 27 bp, Artificial sequence
  SiRNA target sequence
acgtttggatggaatgcagaaaaaggc

SEQ ID NO: 168009 - DNA, 27 bp, Artificial sequence
  SiRNA target sequence
cgtttggatggaatgcagaaaaaggcg

SEQ ID NO: 168010 - DNA, 27 bp, Artificial sequence
  SiRNA target sequence
gtttggatggaatgcagaaaaaggcgt

SEQ ID NO: 168011 - DNA, 27 bp, Artificial sequence
  SiRNA target sequence
tttggatggaatgcagaaaaaggcgta

SEQ ID NO: 168012 - DNA, 27 bp, Artificial sequence
  SiRNA target sequence
ttggatggaatgcagaaaaaggcgtag

SEQ ID NO: 168013 - DNA, 27 bp, Artificial sequence
  SiRNA target sequence
tggatggaatgcagaaaaaggcgtaga

SEQ ID NO: 168014 - DNA, 27 bp, Artificial sequence
  SiRNA target sequence
ggatggaatgcagaaaaaggcgtagaa

SEQ ID NO: 168015 - DNA, 27 bp, Artificial sequence
  SiRNA target sequence
gatggaatgcagaaaaaggcgtagaaa

SEQ ID NO: 168016 - DNA, 27 bp, Artificial sequence
  SiRNA target sequence
atggaatgcagaaaaaggcgtagaaat

SEQ ID NO: 168017 - DNA, 27 bp, Artificial sequence
  SiRNA target sequence
tggaatgcagaaaaaggcgtagaaatg

SEQ ID NO: 168018 - DNA, 27 bp, Artificial sequence
  SiRNA target sequence
ggaatgcagaaaaaggcgtagaaatgg

SEQ ID NO: 168019 - DNA, 27 bp, Artificial sequence
  SiRNA target sequence
gaatgcagaaaaaggcgtagaaatggc

SEQ ID NO: 168020 - DNA, 27 bp, Artificial sequence
  SiRNA target sequence
aatgcagaaaaaggcgtagaaatggct

SEQ ID NO: 168021 - DNA, 27 bp, Artificial sequence
  SiRNA target sequence
atgcagaaaaaggcgtagaaatggctc

SEQ ID NO: 168022 - DNA, 27 bp, Artificial sequence
  SiRNA target sequence
tgcagaaaaaggcgtagaaatggctcg

SEQ ID NO: 168023 - DNA, 27 bp, Artificial sequence
  SiRNA target sequence
gcagaaaaaggcgtagaaatggctcga

SEQ ID NO: 168024 - DNA, 27 bp, Artificial sequence
  SiRNA target sequence
cagaaaaaggcgtagaaatggctcgaa

SEQ ID NO: 168025 - DNA, 27 bp, Artificial sequence
  SiRNA target sequence
agaaaaaggcgtagaaatggctcgaaa

SEQ ID NO: 168026 - DNA, 27 bp, Artificial sequence
  SiRNA target sequence
gaaaaaggcgtagaaatggctcgaaag

SEQ ID NO: 168027 - DNA, 27 bp, Artificial sequence
  SiRNA target sequence
aaaaaggcgtagaaatggctcgaaagc

SEQ ID NO: 168028 - DNA, 27 bp, Artificial sequence
  SiRNA target sequence
aaaaggcgtagaaatggctcgaaagca

SEQ ID NO: 168029 - DNA, 27 bp, Artificial sequence
  SiRNA target sequence
aaaggcgtagaaatggctcgaaagcaa

SEQ ID NO: 168030 - DNA, 27 bp, Artificial sequence
  SiRNA target sequence
aaggcgtagaaatggctcgaaagcaag

SEQ ID NO: 168031 - DNA, 27 bp, Artificial sequence
  SiRNA target sequence
aggcgtagaaatggctcgaaagcaagt

SEQ ID NO: 168032 - DNA, 27 bp, Artificial sequence
  SiRNA target sequence
ggcgtagaaatggctcgaaagcaagta

SEQ ID NO: 168033 - DNA, 27 bp, Artificial sequence
  SiRNA target sequence
gcgtagaaatggctcgaaagcaagtag

SEQ ID NO: 168034 - DNA, 27 bp, Artificial sequence
  SiRNA target sequence
cgtagaaatggctcgaaagcaagtagc

SEQ ID NO: 168035 - DNA, 27 bp, Artificial sequence
  SiRNA target sequence
gtagaaatggctcgaaagcaagtagca

SEQ ID NO: 168036 - DNA, 27 bp, Artificial sequence
  SiRNA target sequence
tagaaatggctcgaaagcaagtagcag

SEQ ID NO: 168037 - DNA, 27 bp, Artificial sequence
  SiRNA target sequence
agaaatggctcgaaagcaagtagcaga

SEQ ID NO: 168038 - DNA, 27 bp, Artificial sequence
  SiRNA target sequence
gaaatggctcgaaagcaagtagcagat

SEQ ID NO: 168039 - DNA, 27 bp, Artificial sequence
  SiRNA target sequence
aaatggctcgaaagcaagtagcagatt

SEQ ID NO: 168040 - DNA, 27 bp, Artificial sequence
  SiRNA target sequence
aatggctcgaaagcaagtagcagattt

SEQ ID NO: 168041 - DNA, 27 bp, Artificial sequence
  SiRNA target sequence
atggctcgaaagcaagtagcagattta

SEQ ID NO: 168042 - DNA, 27 bp, Artificial sequence
  SiRNA target sequence
tggctcgaaagcaagtagcagatttac

SEQ ID NO: 168043 - DNA, 27 bp, Artificial sequence
  SiRNA target sequence
ggctcgaaagcaagtagcagatttact

SEQ ID NO: 168044 - DNA, 27 bp, Artificial sequence
  SiRNA target sequence
gctcgaaagcaagtagcagatttactg

SEQ ID NO: 168045 - DNA, 27 bp, Artificial sequence
  SiRNA target sequence
ctcgaaagcaagtagcagatttactga

SEQ ID NO: 168046 - DNA, 27 bp, Artificial sequence
  SiRNA target sequence
tcgaaagcaagtagcagatttactgaa

SEQ ID NO: 168047 - DNA, 27 bp, Artificial sequence
  SiRNA target sequence
cgaaagcaagtagcagatttactgaat

SEQ ID NO: 168048 - DNA, 27 bp, Artificial sequence
  SiRNA target sequence
gaaagcaagtagcagatttactgaatg

SEQ ID NO: 168049 - DNA, 27 bp, Artificial sequence
  SiRNA target sequence
aaagcaagtagcagatttactgaatgc

SEQ ID NO: 168050 - DNA, 27 bp, Artificial sequence
  SiRNA target sequence
aagcaagtagcagatttactgaatgcc

SEQ ID NO: 168051 - DNA, 27 bp, Artificial sequence
  SiRNA target sequence
agcaagtagcagatttactgaatgcca

SEQ ID NO: 168052 - DNA, 27 bp, Artificial sequence
  SiRNA target sequence
gcaagtagcagatttactgaatgccaa

SEQ ID NO: 168053 - DNA, 27 bp, Artificial sequence
  SiRNA target sequence
caagtagcagatttactgaatgccaat

SEQ ID NO: 168054 - DNA, 27 bp, Artificial sequence
  SiRNA target sequence
aagtagcagatttactgaatgccaatg

SEQ ID NO: 168055 - DNA, 27 bp, Artificial sequence
  SiRNA target sequence
agtagcagatttactgaatgccaatga

SEQ ID NO: 168056 - DNA, 27 bp, Artificial sequence
  SiRNA target sequence
gtagcagatttactgaatgccaatgaa

SEQ ID NO: 168057 - DNA, 27 bp, Artificial sequence
  SiRNA target sequence
tagcagatttactgaatgccaatgaaa

SEQ ID NO: 168058 - DNA, 27 bp, Artificial sequence
  SiRNA target sequence
agcagatttactgaatgccaatgaaaa

SEQ ID NO: 168059 - DNA, 27 bp, Artificial sequence
  SiRNA target sequence
gcagatttactgaatgccaatgaaaaa

SEQ ID NO: 168060 - DNA, 27 bp, Artificial sequence
  SiRNA target sequence
cagatttactgaatgccaatgaaaaag

SEQ ID NO: 168061 - DNA, 27 bp, Artificial sequence
  SiRNA target sequence
agatttactgaatgccaatgaaaaaga

SEQ ID NO: 168062 - DNA, 27 bp, Artificial sequence
  SiRNA target sequence
gatttactgaatgccaatgaaaaagaa

SEQ ID NO: 168063 - DNA, 27 bp, Artificial sequence
  SiRNA target sequence
atttactgaatgccaatgaaaaagaaa

SEQ ID NO: 168064 - DNA, 27 bp, Artificial sequence
  SiRNA target sequence
tttactgaatgccaatgaaaaagaaat

SEQ ID NO: 168065 - DNA, 27 bp, Artificial sequence
  SiRNA target sequence
ttactgaatgccaatgaaaaagaaatt

SEQ ID NO: 168066 - DNA, 27 bp, Artificial sequence
  SiRNA target sequence
tactgaatgccaatgaaaaagaaatta

SEQ ID NO: 168067 - DNA, 27 bp, Artificial sequence
  SiRNA target sequence
actgaatgccaatgaaaaagaaattat

SEQ ID NO: 168068 - DNA, 27 bp, Artificial sequence
  SiRNA target sequence
ctgaatgccaatgaaaaagaaattatt

SEQ ID NO: 168069 - DNA, 27 bp, Artificial sequence
  SiRNA target sequence
tgaatgccaatgaaaaagaaattattt

SEQ ID NO: 168070 - DNA, 27 bp, Artificial sequence
  SiRNA target sequence
gaatgccaatgaaaaagaaattatttt

SEQ ID NO: 168071 - DNA, 27 bp, Artificial sequence
  SiRNA target sequence
aatgccaatgaaaaagaaattattttt

SEQ ID NO: 168072 - DNA, 27 bp, Artificial sequence
  SiRNA target sequence
atgccaatgaaaaagaaattattttta

SEQ ID NO: 168073 - DNA, 27 bp, Artificial sequence
  SiRNA target sequence
tgccaatgaaaaagaaattatttttac

SEQ ID NO: 168074 - DNA, 27 bp, Artificial sequence
  SiRNA target sequence
gccaatgaaaaagaaattatttttact

SEQ ID NO: 168075 - DNA, 27 bp, Artificial sequence
  SiRNA target sequence
ccaatgaaaaagaaattatttttacta

SEQ ID NO: 168076 - DNA, 27 bp, Artificial sequence
  SiRNA target sequence
caatgaaaaagaaattatttttactag

SEQ ID NO: 168077 - DNA, 27 bp, Artificial sequence
  SiRNA target sequence
aatgaaaaagaaattatttttactagc

SEQ ID NO: 168078 - DNA, 27 bp, Artificial sequence
  SiRNA target sequence
atgaaaaagaaattatttttactagcg

SEQ ID NO: 168079 - DNA, 27 bp, Artificial sequence
  SiRNA target sequence
tgaaaaagaaattatttttactagcgg

SEQ ID NO: 168080 - DNA, 27 bp, Artificial sequence
  SiRNA target sequence
gaaaaagaaattatttttactagcggt

SEQ ID NO: 168081 - DNA, 27 bp, Artificial sequence
  SiRNA target sequence
aaaaagaaattatttttactagcggtg

SEQ ID NO: 168082 - DNA, 27 bp, Artificial sequence
  SiRNA target sequence
aaaagaaattatttttactagcggtgc

SEQ ID NO: 168083 - DNA, 27 bp, Artificial sequence
  SiRNA target sequence
aaagaaattatttttactagcggtgct

SEQ ID NO: 168084 - DNA, 27 bp, Artificial sequence
  SiRNA target sequence
aagaaattatttttactagcggtgcta

SEQ ID NO: 168085 - DNA, 27 bp, Artificial sequence
  SiRNA target sequence
agaaattatttttactagcggtgctac

SEQ ID NO: 168086 - DNA, 27 bp, Artificial sequence
  SiRNA target sequence
gaaattatttttactagcggtgctact

SEQ ID NO: 168087 - DNA, 27 bp, Artificial sequence
  SiRNA target sequence
aaattatttttactagcggtgctactg

SEQ ID NO: 168088 - DNA, 27 bp, Artificial sequence
  SiRNA target sequence
aattatttttactagcggtgctactga

SEQ ID NO: 168089 - DNA, 27 bp, Artificial sequence
  SiRNA target sequence
attatttttactagcggtgctactgag

SEQ ID NO: 168090 - DNA, 27 bp, Artificial sequence
  SiRNA target sequence
ttatttttactagcggtgctactgaga

SEQ ID NO: 168091 - DNA, 27 bp, Artificial sequence
  SiRNA target sequence
tatttttactagcggtgctactgagag

SEQ ID NO: 168092 - DNA, 27 bp, Artificial sequence
  SiRNA target sequence
atttttactagcggtgctactgagagt

SEQ ID NO: 168093 - DNA, 27 bp, Artificial sequence
  SiRNA target sequence
tttttactagcggtgctactgagagta

SEQ ID NO: 168094 - DNA, 27 bp, Artificial sequence
  SiRNA target sequence
ttttactagcggtgctactgagagtaa

SEQ ID NO: 168095 - DNA, 27 bp, Artificial sequence
  SiRNA target sequence
tttactagcggtgctactgagagtaac

SEQ ID NO: 168096 - DNA, 27 bp, Artificial sequence
  SiRNA target sequence
ttactagcggtgctactgagagtaaca

SEQ ID NO: 168097 - DNA, 27 bp, Artificial sequence
  SiRNA target sequence
tactagcggtgctactgagagtaacaa

SEQ ID NO: 168098 - DNA, 27 bp, Artificial sequence
  SiRNA target sequence
actagcggtgctactgagagtaacaac

SEQ ID NO: 168099 - DNA, 27 bp, Artificial sequence
  SiRNA target sequence
ctagcggtgctactgagagtaacaacc

SEQ ID NO: 168100 - DNA, 27 bp, Artificial sequence
  SiRNA target sequence
tagcggtgctactgagagtaacaacct

SEQ ID NO: 168101 - DNA, 27 bp, Artificial sequence
  SiRNA target sequence
agcggtgctactgagagtaacaacctt

SEQ ID NO: 168102 - DNA, 27 bp, Artificial sequence
  SiRNA target sequence
gcggtgctactgagagtaacaaccttg

SEQ ID NO: 168103 - DNA, 27 bp, Artificial sequence
  SiRNA target sequence
cggtgctactgagagtaacaaccttgc

SEQ ID NO: 168104 - DNA, 27 bp, Artificial sequence
  SiRNA target sequence
ggtgctactgagagtaacaaccttgca

SEQ ID NO: 168105 - DNA, 27 bp, Artificial sequence
  SiRNA target sequence
gtgctactgagagtaacaaccttgcac

SEQ ID NO: 168106 - DNA, 27 bp, Artificial sequence
  SiRNA target sequence
tgctactgagagtaacaaccttgcact

SEQ ID NO: 168107 - DNA, 27 bp, Artificial sequence
  SiRNA target sequence
gctactgagagtaacaaccttgcacta

SEQ ID NO: 168108 - DNA, 27 bp, Artificial sequence
  SiRNA target sequence
ctactgagagtaacaaccttgcactaa

SEQ ID NO: 168109 - DNA, 27 bp, Artificial sequence
  SiRNA target sequence
tactgagagtaacaaccttgcactaaa

SEQ ID NO: 168110 - DNA, 27 bp, Artificial sequence
  SiRNA target sequence
actgagagtaacaaccttgcactaaag

SEQ ID NO: 168111 - DNA, 27 bp, Artificial sequence
  SiRNA target sequence
ctgagagtaacaaccttgcactaaagg

SEQ ID NO: 168112 - DNA, 27 bp, Artificial sequence
  SiRNA target sequence
tgagagtaacaaccttgcactaaaggg

SEQ ID NO: 168113 - DNA, 27 bp, Artificial sequence
  SiRNA target sequence
gagagtaacaaccttgcactaaagggt

SEQ ID NO: 168114 - DNA, 27 bp, Artificial sequence
  SiRNA target sequence
agagtaacaaccttgcactaaagggtg

SEQ ID NO: 168115 - DNA, 27 bp, Artificial sequence
  SiRNA target sequence
gagtaacaaccttgcactaaagggtgt

SEQ ID NO: 168116 - DNA, 27 bp, Artificial sequence
  SiRNA target sequence
agtaacaaccttgcactaaagggtgtc

SEQ ID NO: 168117 - DNA, 27 bp, Artificial sequence
  SiRNA target sequence
gtaacaaccttgcactaaagggtgtct

SEQ ID NO: 168118 - DNA, 27 bp, Artificial sequence
  SiRNA target sequence
taacaaccttgcactaaagggtgtctt

SEQ ID NO: 168119 - DNA, 27 bp, Artificial sequence
  SiRNA target sequence
aacaaccttgcactaaagggtgtcttt

SEQ ID NO: 168120 - DNA, 27 bp, Artificial sequence
  SiRNA target sequence
acaaccttgcactaaagggtgtctttg

SEQ ID NO: 168121 - DNA, 27 bp, Artificial sequence
  SiRNA target sequence
caaccttgcactaaagggtgtctttgc

SEQ ID NO: 168122 - DNA, 27 bp, Artificial sequence
  SiRNA target sequence
aaccttgcactaaagggtgtctttgca

SEQ ID NO: 168123 - DNA, 27 bp, Artificial sequence
  SiRNA target sequence
accttgcactaaagggtgtctttgcat

SEQ ID NO: 168124 - DNA, 27 bp, Artificial sequence
  SiRNA target sequence
ccttgcactaaagggtgtctttgcatt

SEQ ID NO: 168125 - DNA, 27 bp, Artificial sequence
  SiRNA target sequence
cttgcactaaagggtgtctttgcattt

SEQ ID NO: 168126 - DNA, 27 bp, Artificial sequence
  SiRNA target sequence
ttgcactaaagggtgtctttgcatttt

SEQ ID NO: 168127 - DNA, 27 bp, Artificial sequence
  SiRNA target sequence
tgcactaaagggtgtctttgcattttt

SEQ ID NO: 168128 - DNA, 27 bp, Artificial sequence
  SiRNA target sequence
gcactaaagggtgtctttgcattttta

SEQ ID NO: 168129 - DNA, 27 bp, Artificial sequence
  SiRNA target sequence
cactaaagggtgtctttgcatttttaa

SEQ ID NO: 168130 - DNA, 27 bp, Artificial sequence
  SiRNA target sequence
actaaagggtgtctttgcatttttaaa

SEQ ID NO: 168131 - DNA, 27 bp, Artificial sequence
  SiRNA target sequence
ctaaagggtgtctttgcatttttaaaa

SEQ ID NO: 168132 - DNA, 27 bp, Artificial sequence
  SiRNA target sequence
taaagggtgtctttgcatttttaaaaa

SEQ ID NO: 168133 - DNA, 27 bp, Artificial sequence
  SiRNA target sequence
aaagggtgtctttgcatttttaaaaaa

SEQ ID NO: 168134 - DNA, 27 bp, Artificial sequence
  SiRNA target sequence
aagggtgtctttgcatttttaaaaaaa

SEQ ID NO: 168135 - DNA, 27 bp, Artificial sequence
  SiRNA target sequence
agggtgtctttgcatttttaaaaaaag

SEQ ID NO: 168136 - DNA, 27 bp, Artificial sequence
  SiRNA target sequence
gggtgtctttgcatttttaaaaaaaga

SEQ ID NO: 168137 - DNA, 27 bp, Artificial sequence
  SiRNA target sequence
ggtgtctttgcatttttaaaaaaagac

SEQ ID NO: 168138 - DNA, 27 bp, Artificial sequence
  SiRNA target sequence
gtgtctttgcatttttaaaaaaagaca

SEQ ID NO: 168139 - DNA, 27 bp, Artificial sequence
  SiRNA target sequence
tgtctttgcatttttaaaaaaagacaa

SEQ ID NO: 168140 - DNA, 27 bp, Artificial sequence
  SiRNA target sequence
gtctttgcatttttaaaaaaagacaat

SEQ ID NO: 168141 - DNA, 27 bp, Artificial sequence
  SiRNA target sequence
tctttgcatttttaaaaaaagacaata

SEQ ID NO: 168142 - DNA, 27 bp, Artificial sequence
  SiRNA target sequence
ctttgcatttttaaaaaaagacaatag

SEQ ID NO: 168143 - DNA, 27 bp, Artificial sequence
  SiRNA target sequence
tttgcatttttaaaaaaagacaatagg

SEQ ID NO: 168144 - DNA, 27 bp, Artificial sequence
  SiRNA target sequence
ttgcatttttaaaaaaagacaataggc

SEQ ID NO: 168145 - DNA, 27 bp, Artificial sequence
  SiRNA target sequence
tgcatttttaaaaaaagacaataggcc

SEQ ID NO: 168146 - DNA, 27 bp, Artificial sequence
  SiRNA target sequence
gcatttttaaaaaaagacaataggcct

SEQ ID NO: 168147 - DNA, 27 bp, Artificial sequence
  SiRNA target sequence
catttttaaaaaaagacaataggcctg

SEQ ID NO: 168148 - DNA, 27 bp, Artificial sequence
  SiRNA target sequence
atttttaaaaaaagacaataggcctgt

SEQ ID NO: 168149 - DNA, 27 bp, Artificial sequence
  SiRNA target sequence
tttttaaaaaaagacaataggcctgtt

SEQ ID NO: 168150 - DNA, 27 bp, Artificial sequence
  SiRNA target sequence
ttttaaaaaaagacaataggcctgttc

SEQ ID NO: 168151 - DNA, 27 bp, Artificial sequence
  SiRNA target sequence
tttaaaaaaagacaataggcctgttca

SEQ ID NO: 168152 - DNA, 27 bp, Artificial sequence
  SiRNA target sequence
ttaaaaaaagacaataggcctgttcat

SEQ ID NO: 168153 - DNA, 27 bp, Artificial sequence
  SiRNA target sequence
taaaaaaagacaataggcctgttcata

SEQ ID NO: 168154 - DNA, 27 bp, Artificial sequence
  SiRNA target sequence
aaaaaaagacaataggcctgttcatat

SEQ ID NO: 168155 - DNA, 27 bp, Artificial sequence
  SiRNA target sequence
aaaaaagacaataggcctgttcatatc

SEQ ID NO: 168156 - DNA, 27 bp, Artificial sequence
  SiRNA target sequence
aaaaagacaataggcctgttcatatca

SEQ ID NO: 168157 - DNA, 27 bp, Artificial sequence
  SiRNA target sequence
aaaagacaataggcctgttcatatcat

SEQ ID NO: 168158 - DNA, 27 bp, Artificial sequence
  SiRNA target sequence
aaagacaataggcctgttcatatcatt

SEQ ID NO: 168159 - DNA, 27 bp, Artificial sequence
  SiRNA target sequence
aagacaataggcctgttcatatcatta

SEQ ID NO: 168160 - DNA, 27 bp, Artificial sequence
  SiRNA target sequence
agacaataggcctgttcatatcattac

SEQ ID NO: 168161 - DNA, 27 bp, Artificial sequence
  SiRNA target sequence
gacaataggcctgttcatatcattacc

SEQ ID NO: 168162 - DNA, 27 bp, Artificial sequence
  SiRNA target sequence
acaataggcctgttcatatcattacca

SEQ ID NO: 168163 - DNA, 27 bp, Artificial sequence
  SiRNA target sequence
caataggcctgttcatatcattaccac

SEQ ID NO: 168164 - DNA, 27 bp, Artificial sequence
  SiRNA target sequence
aataggcctgttcatatcattaccaca

SEQ ID NO: 168165 - DNA, 27 bp, Artificial sequence
  SiRNA target sequence
ataggcctgttcatatcattaccacac

SEQ ID NO: 168166 - DNA, 27 bp, Artificial sequence
  SiRNA target sequence
taggcctgttcatatcattaccacaca

SEQ ID NO: 168167 - DNA, 27 bp, Artificial sequence
  SiRNA target sequence
aggcctgttcatatcattaccacacaa

SEQ ID NO: 168168 - DNA, 27 bp, Artificial sequence
  SiRNA target sequence
ggcctgttcatatcattaccacacaaa

SEQ ID NO: 168169 - DNA, 27 bp, Artificial sequence
  SiRNA target sequence
gcctgttcatatcattaccacacaaat

SEQ ID NO: 168170 - DNA, 27 bp, Artificial sequence
  SiRNA target sequence
cctgttcatatcattaccacacaaatt

SEQ ID NO: 168171 - DNA, 27 bp, Artificial sequence
  SiRNA target sequence
ctgttcatatcattaccacacaaattg

SEQ ID NO: 168172 - DNA, 27 bp, Artificial sequence
  SiRNA target sequence
tgttcatatcattaccacacaaattga

SEQ ID NO: 168173 - DNA, 27 bp, Artificial sequence
  SiRNA target sequence
gttcatatcattaccacacaaattgaa

SEQ ID NO: 168174 - DNA, 27 bp, Artificial sequence
  SiRNA target sequence
ttcatatcattaccacacaaattgaac

SEQ ID NO: 168175 - DNA, 27 bp, Artificial sequence
  SiRNA target sequence
tcatatcattaccacacaaattgaaca

SEQ ID NO: 168176 - DNA, 27 bp, Artificial sequence
  SiRNA target sequence
catatcattaccacacaaattgaacat

SEQ ID NO: 168177 - DNA, 27 bp, Artificial sequence
  SiRNA target sequence
atatcattaccacacaaattgaacata

SEQ ID NO: 168178 - DNA, 27 bp, Artificial sequence
  SiRNA target sequence
tatcattaccacacaaattgaacataa

SEQ ID NO: 168179 - DNA, 27 bp, Artificial sequence
  SiRNA target sequence
atcattaccacacaaattgaacataaa

SEQ ID NO: 168180 - DNA, 27 bp, Artificial sequence
  SiRNA target sequence
tcattaccacacaaattgaacataaat

SEQ ID NO: 168181 - DNA, 27 bp, Artificial sequence
  SiRNA target sequence
cattaccacacaaattgaacataaatg

SEQ ID NO: 168182 - DNA, 27 bp, Artificial sequence
  SiRNA target sequence
attaccacacaaattgaacataaatgt

SEQ ID NO: 168183 - DNA, 27 bp, Artificial sequence
  SiRNA target sequence
ttaccacacaaattgaacataaatgtg

SEQ ID NO: 168184 - DNA, 27 bp, Artificial sequence
  SiRNA target sequence
taccacacaaattgaacataaatgtgt

SEQ ID NO: 168185 - DNA, 27 bp, Artificial sequence
  SiRNA target sequence
accacacaaattgaacataaatgtgta

SEQ ID NO: 168186 - DNA, 27 bp, Artificial sequence
  SiRNA target sequence
ccacacaaattgaacataaatgtgtat

SEQ ID NO: 168187 - DNA, 27 bp, Artificial sequence
  SiRNA target sequence
cacacaaattgaacataaatgtgtatt

SEQ ID NO: 168188 - DNA, 27 bp, Artificial sequence
  SiRNA target sequence
acacaaattgaacataaatgtgtattg

SEQ ID NO: 168189 - DNA, 27 bp, Artificial sequence
  SiRNA target sequence
cacaaattgaacataaatgtgtattgg

SEQ ID NO: 168190 - DNA, 27 bp, Artificial sequence
  SiRNA target sequence
acaaattgaacataaatgtgtattgga

SEQ ID NO: 168191 - DNA, 27 bp, Artificial sequence
  SiRNA target sequence
caaattgaacataaatgtgtattggac

SEQ ID NO: 168192 - DNA, 27 bp, Artificial sequence
  SiRNA target sequence
aaattgaacataaatgtgtattggaca

SEQ ID NO: 168193 - DNA, 27 bp, Artificial sequence
  SiRNA target sequence
aattgaacataaatgtgtattggacac

SEQ ID NO: 168194 - DNA, 27 bp, Artificial sequence
  SiRNA target sequence
attgaacataaatgtgtattggacaca

SEQ ID NO: 168195 - DNA, 27 bp, Artificial sequence
  SiRNA target sequence
ttgaacataaatgtgtattggacacat

SEQ ID NO: 168196 - DNA, 27 bp, Artificial sequence
  SiRNA target sequence
tgaacataaatgtgtattggacacatg

SEQ ID NO: 168197 - DNA, 27 bp, Artificial sequence
  SiRNA target sequence
gaacataaatgtgtattggacacatgt

SEQ ID NO: 168198 - DNA, 27 bp, Artificial sequence
  SiRNA target sequence
aacataaatgtgtattggacacatgta

SEQ ID NO: 168199 - DNA, 27 bp, Artificial sequence
  SiRNA target sequence
acataaatgtgtattggacacatgtag

SEQ ID NO: 168200 - DNA, 27 bp, Artificial sequence
  SiRNA target sequence
cataaatgtgtattggacacatgtaga

SEQ ID NO: 168201 - DNA, 27 bp, Artificial sequence
  SiRNA target sequence
ataaatgtgtattggacacatgtagaa

SEQ ID NO: 168202 - DNA, 27 bp, Artificial sequence
  SiRNA target sequence
taaatgtgtattggacacatgtagaag

SEQ ID NO: 168203 - DNA, 27 bp, Artificial sequence
  SiRNA target sequence
aaatgtgtattggacacatgtagaaga

SEQ ID NO: 168204 - DNA, 27 bp, Artificial sequence
  SiRNA target sequence
aatgtgtattggacacatgtagaagat

SEQ ID NO: 168205 - DNA, 27 bp, Artificial sequence
  SiRNA target sequence
atgtgtattggacacatgtagaagatt

SEQ ID NO: 168206 - DNA, 27 bp, Artificial sequence
  SiRNA target sequence
tgtgtattggacacatgtagaagatta

SEQ ID NO: 168207 - DNA, 27 bp, Artificial sequence
  SiRNA target sequence
gtgtattggacacatgtagaagattag

SEQ ID NO: 168208 - DNA, 27 bp, Artificial sequence
  SiRNA target sequence
tgtattggacacatgtagaagattaga

SEQ ID NO: 168209 - DNA, 27 bp, Artificial sequence
  SiRNA target sequence
gtattggacacatgtagaagattagaa

SEQ ID NO: 168210 - DNA, 27 bp, Artificial sequence
  SiRNA target sequence
tattggacacatgtagaagattagaag

SEQ ID NO: 168211 - DNA, 27 bp, Artificial sequence
  SiRNA target sequence
attggacacatgtagaagattagaaga

SEQ ID NO: 168212 - DNA, 27 bp, Artificial sequence
  SiRNA target sequence
ttggacacatgtagaagattagaagaa

SEQ ID NO: 168213 - DNA, 27 bp, Artificial sequence
  SiRNA target sequence
tggacacatgtagaagattagaagaag

SEQ ID NO: 168214 - DNA, 27 bp, Artificial sequence
  SiRNA target sequence
ggacacatgtagaagattagaagaaga

SEQ ID NO: 168215 - DNA, 27 bp, Artificial sequence
  SiRNA target sequence
gacacatgtagaagattagaagaagaa

SEQ ID NO: 168216 - DNA, 27 bp, Artificial sequence
  SiRNA target sequence
acacatgtagaagattagaagaagaag

SEQ ID NO: 168217 - DNA, 27 bp, Artificial sequence
  SiRNA target sequence
cacatgtagaagattagaagaagaagg

SEQ ID NO: 168218 - DNA, 27 bp, Artificial sequence
  SiRNA target sequence
acatgtagaagattagaagaagaagga

SEQ ID NO: 168219 - DNA, 27 bp, Artificial sequence
  SiRNA target sequence
catgtagaagattagaagaagaaggag

SEQ ID NO: 168220 - DNA, 27 bp, Artificial sequence
  SiRNA target sequence
atgtagaagattagaagaagaaggagc

SEQ ID NO: 168221 - DNA, 27 bp, Artificial sequence
  SiRNA target sequence
tgtagaagattagaagaagaaggagct

SEQ ID NO: 168222 - DNA, 27 bp, Artificial sequence
  SiRNA target sequence
gtagaagattagaagaagaaggagcta

SEQ ID NO: 168223 - DNA, 27 bp, Artificial sequence
  SiRNA target sequence
tagaagattagaagaagaaggagctac

SEQ ID NO: 168224 - DNA, 27 bp, Artificial sequence
  SiRNA target sequence
agaagattagaagaagaaggagctaca

SEQ ID NO: 168225 - DNA, 27 bp, Artificial sequence
  SiRNA target sequence
gaagattagaagaagaaggagctacag

SEQ ID NO: 168226 - DNA, 27 bp, Artificial sequence
  SiRNA target sequence
aagattagaagaagaaggagctacagt

SEQ ID NO: 168227 - DNA, 27 bp, Artificial sequence
  SiRNA target sequence
agattagaagaagaaggagctacagtg

SEQ ID NO: 168228 - DNA, 27 bp, Artificial sequence
  SiRNA target sequence
gattagaagaagaaggagctacagtga

SEQ ID NO: 168229 - DNA, 27 bp, Artificial sequence
  SiRNA target sequence
attagaagaagaaggagctacagtgac

SEQ ID NO: 168230 - DNA, 27 bp, Artificial sequence
  SiRNA target sequence
ttagaagaagaaggagctacagtgact

SEQ ID NO: 168231 - DNA, 27 bp, Artificial sequence
  SiRNA target sequence
tagaagaagaaggagctacagtgactt

SEQ ID NO: 168232 - DNA, 27 bp, Artificial sequence
  SiRNA target sequence
agaagaagaaggagctacagtgactta

SEQ ID NO: 168233 - DNA, 27 bp, Artificial sequence
  SiRNA target sequence
gaagaagaaggagctacagtgacttat

SEQ ID NO: 168234 - DNA, 27 bp, Artificial sequence
  SiRNA target sequence
aagaagaaggagctacagtgacttatt

SEQ ID NO: 168235 - DNA, 27 bp, Artificial sequence
  SiRNA target sequence
agaagaaggagctacagtgacttattt

SEQ ID NO: 168236 - DNA, 27 bp, Artificial sequence
  SiRNA target sequence
gaagaaggagctacagtgacttatttg

SEQ ID NO: 168237 - DNA, 27 bp, Artificial sequence
  SiRNA target sequence
aagaaggagctacagtgacttatttgc

SEQ ID NO: 168238 - DNA, 27 bp, Artificial sequence
  SiRNA target sequence
agaaggagctacagtgacttatttgcc

SEQ ID NO: 168239 - DNA, 27 bp, Artificial sequence
  SiRNA target sequence
gaaggagctacagtgacttatttgcct

SEQ ID NO: 168240 - DNA, 27 bp, Artificial sequence
  SiRNA target sequence
aaggagctacagtgacttatttgcctg

SEQ ID NO: 168241 - DNA, 27 bp, Artificial sequence
  SiRNA target sequence
aggagctacagtgacttatttgcctgt

SEQ ID NO: 168242 - DNA, 27 bp, Artificial sequence
  SiRNA target sequence
ggagctacagtgacttatttgcctgta

SEQ ID NO: 168243 - DNA, 27 bp, Artificial sequence
  SiRNA target sequence
gagctacagtgacttatttgcctgtag

SEQ ID NO: 168244 - DNA, 27 bp, Artificial sequence
  SiRNA target sequence
agctacagtgacttatttgcctgtaga

SEQ ID NO: 168245 - DNA, 27 bp, Artificial sequence
  SiRNA target sequence
gctacagtgacttatttgcctgtagat

SEQ ID NO: 168246 - DNA, 27 bp, Artificial sequence
  SiRNA target sequence
ctacagtgacttatttgcctgtagata

SEQ ID NO: 168247 - DNA, 27 bp, Artificial sequence
  SiRNA target sequence
tacagtgacttatttgcctgtagataa

SEQ ID NO: 168248 - DNA, 27 bp, Artificial sequence
  SiRNA target sequence
acagtgacttatttgcctgtagataaa

SEQ ID NO: 168249 - DNA, 27 bp, Artificial sequence
  SiRNA target sequence
cagtgacttatttgcctgtagataaaa

SEQ ID NO: 168250 - DNA, 27 bp, Artificial sequence
  SiRNA target sequence
agtgacttatttgcctgtagataaaaa

SEQ ID NO: 168251 - DNA, 27 bp, Artificial sequence
  SiRNA target sequence
gtgacttatttgcctgtagataaaaat

SEQ ID NO: 168252 - DNA, 27 bp, Artificial sequence
  SiRNA target sequence
tgacttatttgcctgtagataaaaatg

SEQ ID NO: 168253 - DNA, 27 bp, Artificial sequence
  SiRNA target sequence
gacttatttgcctgtagataaaaatgg

SEQ ID NO: 168254 - DNA, 27 bp, Artificial sequence
  SiRNA target sequence
acttatttgcctgtagataaaaatgga

SEQ ID NO: 168255 - DNA, 27 bp, Artificial sequence
  SiRNA target sequence
cttatttgcctgtagataaaaatggaa

SEQ ID NO: 168256 - DNA, 27 bp, Artificial sequence
  SiRNA target sequence
ttatttgcctgtagataaaaatggaat

SEQ ID NO: 168257 - DNA, 27 bp, Artificial sequence
  SiRNA target sequence
tatttgcctgtagataaaaatggaata

SEQ ID NO: 168258 - DNA, 27 bp, Artificial sequence
  SiRNA target sequence
atttgcctgtagataaaaatggaatag

SEQ ID NO: 168259 - DNA, 27 bp, Artificial sequence
  SiRNA target sequence
tttgcctgtagataaaaatggaatagt

SEQ ID NO: 168260 - DNA, 27 bp, Artificial sequence
  SiRNA target sequence
ttgcctgtagataaaaatggaatagta

SEQ ID NO: 168261 - DNA, 27 bp, Artificial sequence
  SiRNA target sequence
tgcctgtagataaaaatggaatagtag

SEQ ID NO: 168262 - DNA, 27 bp, Artificial sequence
  SiRNA target sequence
gcctgtagataaaaatggaatagtaga

SEQ ID NO: 168263 - DNA, 27 bp, Artificial sequence
  SiRNA target sequence
cctgtagataaaaatggaatagtagat

SEQ ID NO: 168264 - DNA, 27 bp, Artificial sequence
  SiRNA target sequence
ctgtagataaaaatggaatagtagatc

SEQ ID NO: 168265 - DNA, 27 bp, Artificial sequence
  SiRNA target sequence
tgtagataaaaatggaatagtagatcc

SEQ ID NO: 168266 - DNA, 27 bp, Artificial sequence
  SiRNA target sequence
gtagataaaaatggaatagtagatccg

SEQ ID NO: 168267 - DNA, 27 bp, Artificial sequence
  SiRNA target sequence
tagataaaaatggaatagtagatccgc

SEQ ID NO: 168268 - DNA, 27 bp, Artificial sequence
  SiRNA target sequence
agataaaaatggaatagtagatccgca

SEQ ID NO: 168269 - DNA, 27 bp, Artificial sequence
  SiRNA target sequence
gataaaaatggaatagtagatccgcaa

SEQ ID NO: 168270 - DNA, 27 bp, Artificial sequence
  SiRNA target sequence
ataaaaatggaatagtagatccgcaat

SEQ ID NO: 168271 - DNA, 27 bp, Artificial sequence
  SiRNA target sequence
taaaaatggaatagtagatccgcaatt

SEQ ID NO: 168272 - DNA, 27 bp, Artificial sequence
  SiRNA target sequence
aaaaatggaatagtagatccgcaatta

SEQ ID NO: 168273 - DNA, 27 bp, Artificial sequence
  SiRNA target sequence
aaaatggaatagtagatccgcaattaa

SEQ ID NO: 168274 - DNA, 27 bp, Artificial sequence
  SiRNA target sequence
aaatggaatagtagatccgcaattaat

SEQ ID NO: 168275 - DNA, 27 bp, Artificial sequence
  SiRNA target sequence
aatggaatagtagatccgcaattaata

SEQ ID NO: 168276 - DNA, 27 bp, Artificial sequence
  SiRNA target sequence
atggaatagtagatccgcaattaataa

SEQ ID NO: 168277 - DNA, 27 bp, Artificial sequence
  SiRNA target sequence
tggaatagtagatccgcaattaataaa

SEQ ID NO: 168278 - DNA, 27 bp, Artificial sequence
  SiRNA target sequence
ggaatagtagatccgcaattaataaaa

SEQ ID NO: 168279 - DNA, 27 bp, Artificial sequence
  SiRNA target sequence
gaatagtagatccgcaattaataaaaa

SEQ ID NO: 168280 - DNA, 27 bp, Artificial sequence
  SiRNA target sequence
aatagtagatccgcaattaataaaaaa

SEQ ID NO: 168281 - DNA, 27 bp, Artificial sequence
  SiRNA target sequence
atagtagatccgcaattaataaaaaac

SEQ ID NO: 168282 - DNA, 27 bp, Artificial sequence
  SiRNA target sequence
tagtagatccgcaattaataaaaaaca

SEQ ID NO: 168283 - DNA, 27 bp, Artificial sequence
  SiRNA target sequence
agtagatccgcaattaataaaaaacag

SEQ ID NO: 168284 - DNA, 27 bp, Artificial sequence
  SiRNA target sequence
gtagatccgcaattaataaaaaacagt

SEQ ID NO: 168285 - DNA, 27 bp, Artificial sequence
  SiRNA target sequence
tagatccgcaattaataaaaaacagta

SEQ ID NO: 168286 - DNA, 27 bp, Artificial sequence
  SiRNA target sequence
agatccgcaattaataaaaaacagtat

SEQ ID NO: 168287 - DNA, 27 bp, Artificial sequence
  SiRNA target sequence
gatccgcaattaataaaaaacagtatt

SEQ ID NO: 168288 - DNA, 27 bp, Artificial sequence
  SiRNA target sequence
atccgcaattaataaaaaacagtatta

SEQ ID NO: 168289 - DNA, 27 bp, Artificial sequence
  SiRNA target sequence
tccgcaattaataaaaaacagtattac

SEQ ID NO: 168290 - DNA, 27 bp, Artificial sequence
  SiRNA target sequence
ccgcaattaataaaaaacagtattact

SEQ ID NO: 168291 - DNA, 27 bp, Artificial sequence
  SiRNA target sequence
cgcaattaataaaaaacagtattacta

SEQ ID NO: 168292 - DNA, 27 bp, Artificial sequence
  SiRNA target sequence
gcaattaataaaaaacagtattactaa

SEQ ID NO: 168293 - DNA, 27 bp, Artificial sequence
  SiRNA target sequence
caattaataaaaaacagtattactaaa

SEQ ID NO: 168294 - DNA, 27 bp, Artificial sequence
  SiRNA target sequence
aattaataaaaaacagtattactaaag

SEQ ID NO: 168295 - DNA, 27 bp, Artificial sequence
  SiRNA target sequence
attaataaaaaacagtattactaaaga

SEQ ID NO: 168296 - DNA, 27 bp, Artificial sequence
  SiRNA target sequence
ttaataaaaaacagtattactaaagat

SEQ ID NO: 168297 - DNA, 27 bp, Artificial sequence
  SiRNA target sequence
taataaaaaacagtattactaaagata

SEQ ID NO: 168298 - DNA, 27 bp, Artificial sequence
  SiRNA target sequence
aataaaaaacagtattactaaagatac

SEQ ID NO: 168299 - DNA, 27 bp, Artificial sequence
  SiRNA target sequence
ataaaaaacagtattactaaagatacc

SEQ ID NO: 168300 - DNA, 27 bp, Artificial sequence
  SiRNA target sequence
taaaaaacagtattactaaagataccg

SEQ ID NO: 168301 - DNA, 27 bp, Artificial sequence
  SiRNA target sequence
aaaaaacagtattactaaagataccgc

SEQ ID NO: 168302 - DNA, 27 bp, Artificial sequence
  SiRNA target sequence
aaaaacagtattactaaagataccgct

SEQ ID NO: 168303 - DNA, 27 bp, Artificial sequence
  SiRNA target sequence
aaaacagtattactaaagataccgctt

SEQ ID NO: 168304 - DNA, 27 bp, Artificial sequence
  SiRNA target sequence
aaacagtattactaaagataccgcttt

SEQ ID NO: 168305 - DNA, 27 bp, Artificial sequence
  SiRNA target sequence
aacagtattactaaagataccgctttg

SEQ ID NO: 168306 - DNA, 27 bp, Artificial sequence
  SiRNA target sequence
acagtattactaaagataccgctttgg

SEQ ID NO: 168307 - DNA, 27 bp, Artificial sequence
  SiRNA target sequence
cagtattactaaagataccgctttggt

SEQ ID NO: 168308 - DNA, 27 bp, Artificial sequence
  SiRNA target sequence
agtattactaaagataccgctttggtg

SEQ ID NO: 168309 - DNA, 27 bp, Artificial sequence
  SiRNA target sequence
gtattactaaagataccgctttggtgt

SEQ ID NO: 168310 - DNA, 27 bp, Artificial sequence
  SiRNA target sequence
tattactaaagataccgctttggtgtc

SEQ ID NO: 168311 - DNA, 27 bp, Artificial sequence
  SiRNA target sequence
attactaaagataccgctttggtgtct

SEQ ID NO: 168312 - DNA, 27 bp, Artificial sequence
  SiRNA target sequence
ttactaaagataccgctttggtgtctg

SEQ ID NO: 168313 - DNA, 27 bp, Artificial sequence
  SiRNA target sequence
tactaaagataccgctttggtgtctgt

SEQ ID NO: 168314 - DNA, 27 bp, Artificial sequence
  SiRNA target sequence
actaaagataccgctttggtgtctgtt

SEQ ID NO: 168315 - DNA, 27 bp, Artificial sequence
  SiRNA target sequence
ctaaagataccgctttggtgtctgtta

SEQ ID NO: 168316 - DNA, 27 bp, Artificial sequence
  SiRNA target sequence
taaagataccgctttggtgtctgttat

SEQ ID NO: 168317 - DNA, 27 bp, Artificial sequence
  SiRNA target sequence
aaagataccgctttggtgtctgttatg

SEQ ID NO: 168318 - DNA, 27 bp, Artificial sequence
  SiRNA target sequence
aagataccgctttggtgtctgttatgg

SEQ ID NO: 168319 - DNA, 27 bp, Artificial sequence
  SiRNA target sequence
agataccgctttggtgtctgttatggc

SEQ ID NO: 168320 - DNA, 27 bp, Artificial sequence
  SiRNA target sequence
gataccgctttggtgtctgttatggct

SEQ ID NO: 168321 - DNA, 27 bp, Artificial sequence
  SiRNA target sequence
ataccgctttggtgtctgttatggctg

SEQ ID NO: 168322 - DNA, 27 bp, Artificial sequence
  SiRNA target sequence
taccgctttggtgtctgttatggctgt

SEQ ID NO: 168323 - DNA, 27 bp, Artificial sequence
  SiRNA target sequence
accgctttggtgtctgttatggctgtt

SEQ ID NO: 168324 - DNA, 27 bp, Artificial sequence
  SiRNA target sequence
ccgctttggtgtctgttatggctgtta

SEQ ID NO: 168325 - DNA, 27 bp, Artificial sequence
  SiRNA target sequence
cgctttggtgtctgttatggctgttaa

SEQ ID NO: 168326 - DNA, 27 bp, Artificial sequence
  SiRNA target sequence
gctttggtgtctgttatggctgttaac

SEQ ID NO: 168327 - DNA, 27 bp, Artificial sequence
  SiRNA target sequence
ctttggtgtctgttatggctgttaaca

SEQ ID NO: 168328 - DNA, 27 bp, Artificial sequence
  SiRNA target sequence
tttggtgtctgttatggctgttaacaa

SEQ ID NO: 168329 - DNA, 27 bp, Artificial sequence
  SiRNA target sequence
ttggtgtctgttatggctgttaacaac

SEQ ID NO: 168330 - DNA, 27 bp, Artificial sequence
  SiRNA target sequence
tggtgtctgttatggctgttaacaacg

SEQ ID NO: 168331 - DNA, 27 bp, Artificial sequence
  SiRNA target sequence
ggtgtctgttatggctgttaacaacga

SEQ ID NO: 168332 - DNA, 27 bp, Artificial sequence
  SiRNA target sequence
gtgtctgttatggctgttaacaacgaa

SEQ ID NO: 168333 - DNA, 27 bp, Artificial sequence
  SiRNA target sequence
tgtctgttatggctgttaacaacgaaa

SEQ ID NO: 168334 - DNA, 27 bp, Artificial sequence
  SiRNA target sequence
gtctgttatggctgttaacaacgaaat

SEQ ID NO: 168335 - DNA, 27 bp, Artificial sequence
  SiRNA target sequence
tctgttatggctgttaacaacgaaatg

SEQ ID NO: 168336 - DNA, 27 bp, Artificial sequence
  SiRNA target sequence
ctgttatggctgttaacaacgaaatgg

SEQ ID NO: 168337 - DNA, 27 bp, Artificial sequence
  SiRNA target sequence
tgttatggctgttaacaacgaaatggg

SEQ ID NO: 168338 - DNA, 27 bp, Artificial sequence
  SiRNA target sequence
gttatggctgttaacaacgaaatggga

SEQ ID NO: 168339 - DNA, 27 bp, Artificial sequence
  SiRNA target sequence
ttatggctgttaacaacgaaatgggag

SEQ ID NO: 168340 - DNA, 27 bp, Artificial sequence
  SiRNA target sequence
tatggctgttaacaacgaaatgggagc

SEQ ID NO: 168341 - DNA, 27 bp, Artificial sequence
  SiRNA target sequence
atggctgttaacaacgaaatgggagca

SEQ ID NO: 168342 - DNA, 27 bp, Artificial sequence
  SiRNA target sequence
tggctgttaacaacgaaatgggagcaa

SEQ ID NO: 168343 - DNA, 27 bp, Artificial sequence
  SiRNA target sequence
ggctgttaacaacgaaatgggagcaat

SEQ ID NO: 168344 - DNA, 27 bp, Artificial sequence
  SiRNA target sequence
gctgttaacaacgaaatgggagcaata

SEQ ID NO: 168345 - DNA, 27 bp, Artificial sequence
  SiRNA target sequence
ctgttaacaacgaaatgggagcaatac

SEQ ID NO: 168346 - DNA, 27 bp, Artificial sequence
  SiRNA target sequence
tgttaacaacgaaatgggagcaataca

SEQ ID NO: 168347 - DNA, 27 bp, Artificial sequence
  SiRNA target sequence
gttaacaacgaaatgggagcaatacaa

SEQ ID NO: 168348 - DNA, 27 bp, Artificial sequence
  SiRNA target sequence
ttaacaacgaaatgggagcaatacaac

SEQ ID NO: 168349 - DNA, 27 bp, Artificial sequence
  SiRNA target sequence
taacaacgaaatgggagcaatacaacc

SEQ ID NO: 168350 - DNA, 27 bp, Artificial sequence
  SiRNA target sequence
aacaacgaaatgggagcaatacaaccg

SEQ ID NO: 168351 - DNA, 27 bp, Artificial sequence
  SiRNA target sequence
acaacgaaatgggagcaatacaaccgc

SEQ ID NO: 168352 - DNA, 27 bp, Artificial sequence
  SiRNA target sequence
caacgaaatgggagcaatacaaccgct

SEQ ID NO: 168353 - DNA, 27 bp, Artificial sequence
  SiRNA target sequence
aacgaaatgggagcaatacaaccgctt

SEQ ID NO: 168354 - DNA, 27 bp, Artificial sequence
  SiRNA target sequence
acgaaatgggagcaatacaaccgctta

SEQ ID NO: 168355 - DNA, 27 bp, Artificial sequence
  SiRNA target sequence
cgaaatgggagcaatacaaccgcttaa

SEQ ID NO: 168356 - DNA, 27 bp, Artificial sequence
  SiRNA target sequence
gaaatgggagcaatacaaccgcttaaa

SEQ ID NO: 168357 - DNA, 27 bp, Artificial sequence
  SiRNA target sequence
aaatgggagcaatacaaccgcttaaag

SEQ ID NO: 168358 - DNA, 27 bp, Artificial sequence
  SiRNA target sequence
aatgggagcaatacaaccgcttaaaga

SEQ ID NO: 168359 - DNA, 27 bp, Artificial sequence
  SiRNA target sequence
atgggagcaatacaaccgcttaaagaa

SEQ ID NO: 168360 - DNA, 27 bp, Artificial sequence
  SiRNA target sequence
tgggagcaatacaaccgcttaaagaaa

SEQ ID NO: 168361 - DNA, 27 bp, Artificial sequence
  SiRNA target sequence
gggagcaatacaaccgcttaaagaaat

SEQ ID NO: 168362 - DNA, 27 bp, Artificial sequence
  SiRNA target sequence
ggagcaatacaaccgcttaaagaaata

SEQ ID NO: 168363 - DNA, 27 bp, Artificial sequence
  SiRNA target sequence
gagcaatacaaccgcttaaagaaatag

SEQ ID NO: 168364 - DNA, 27 bp, Artificial sequence
  SiRNA target sequence
agcaatacaaccgcttaaagaaatagg

SEQ ID NO: 168365 - DNA, 27 bp, Artificial sequence
  SiRNA target sequence
gcaatacaaccgcttaaagaaatagga

SEQ ID NO: 168366 - DNA, 27 bp, Artificial sequence
  SiRNA target sequence
caatacaaccgcttaaagaaataggaa

SEQ ID NO: 168367 - DNA, 27 bp, Artificial sequence
  SiRNA target sequence
aatacaaccgcttaaagaaataggaag

SEQ ID NO: 168368 - DNA, 27 bp, Artificial sequence
  SiRNA target sequence
atacaaccgcttaaagaaataggaaga

SEQ ID NO: 168369 - DNA, 27 bp, Artificial sequence
  SiRNA target sequence
tacaaccgcttaaagaaataggaagaa

SEQ ID NO: 168370 - DNA, 27 bp, Artificial sequence
  SiRNA target sequence
acaaccgcttaaagaaataggaagaat

SEQ ID NO: 168371 - DNA, 27 bp, Artificial sequence
  SiRNA target sequence
caaccgcttaaagaaataggaagaata

SEQ ID NO: 168372 - DNA, 27 bp, Artificial sequence
  SiRNA target sequence
aaccgcttaaagaaataggaagaatat

SEQ ID NO: 168373 - DNA, 27 bp, Artificial sequence
  SiRNA target sequence
accgcttaaagaaataggaagaatatg

SEQ ID NO: 168374 - DNA, 27 bp, Artificial sequence
  SiRNA target sequence
ccgcttaaagaaataggaagaatatgt

SEQ ID NO: 168375 - DNA, 27 bp, Artificial sequence
  SiRNA target sequence
cgcttaaagaaataggaagaatatgta

SEQ ID NO: 168376 - DNA, 27 bp, Artificial sequence
  SiRNA target sequence
gcttaaagaaataggaagaatatgtaa

SEQ ID NO: 168377 - DNA, 27 bp, Artificial sequence
  SiRNA target sequence
cttaaagaaataggaagaatatgtaaa

SEQ ID NO: 168378 - DNA, 27 bp, Artificial sequence
  SiRNA target sequence
ttaaagaaataggaagaatatgtaaag

SEQ ID NO: 168379 - DNA, 27 bp, Artificial sequence
  SiRNA target sequence
taaagaaataggaagaatatgtaaaga

SEQ ID NO: 168380 - DNA, 27 bp, Artificial sequence
  SiRNA target sequence
aaagaaataggaagaatatgtaaagaa

SEQ ID NO: 168381 - DNA, 27 bp, Artificial sequence
  SiRNA target sequence
aagaaataggaagaatatgtaaagaaa

SEQ ID NO: 168382 - DNA, 27 bp, Artificial sequence
  SiRNA target sequence
agaaataggaagaatatgtaaagaaaa

SEQ ID NO: 168383 - DNA, 27 bp, Artificial sequence
  SiRNA target sequence
gaaataggaagaatatgtaaagaaaat

SEQ ID NO: 168384 - DNA, 27 bp, Artificial sequence
  SiRNA target sequence
aaataggaagaatatgtaaagaaaata

SEQ ID NO: 168385 - DNA, 27 bp, Artificial sequence
  SiRNA target sequence
aataggaagaatatgtaaagaaaataa

SEQ ID NO: 168386 - DNA, 27 bp, Artificial sequence
  SiRNA target sequence
ataggaagaatatgtaaagaaaataat

SEQ ID NO: 168387 - DNA, 27 bp, Artificial sequence
  SiRNA target sequence
taggaagaatatgtaaagaaaataata

SEQ ID NO: 168388 - DNA, 27 bp, Artificial sequence
  SiRNA target sequence
aggaagaatatgtaaagaaaataatat

SEQ ID NO: 168389 - DNA, 27 bp, Artificial sequence
  SiRNA target sequence
ggaagaatatgtaaagaaaataatatt

SEQ ID NO: 168390 - DNA, 27 bp, Artificial sequence
  SiRNA target sequence
gaagaatatgtaaagaaaataatattt

SEQ ID NO: 168391 - DNA, 27 bp, Artificial sequence
  SiRNA target sequence
aagaatatgtaaagaaaataatatttt

SEQ ID NO: 168392 - DNA, 27 bp, Artificial sequence
  SiRNA target sequence
agaatatgtaaagaaaataatatttta

SEQ ID NO: 168393 - DNA, 27 bp, Artificial sequence
  SiRNA target sequence
gaatatgtaaagaaaataatattttat

SEQ ID NO: 168394 - DNA, 27 bp, Artificial sequence
  SiRNA target sequence
aatatgtaaagaaaataatattttatt

SEQ ID NO: 168395 - DNA, 27 bp, Artificial sequence
  SiRNA target sequence
atatgtaaagaaaataatattttattt

SEQ ID NO: 168396 - DNA, 27 bp, Artificial sequence
  SiRNA target sequence
tatgtaaagaaaataatattttatttc

SEQ ID NO: 168397 - DNA, 27 bp, Artificial sequence
  SiRNA target sequence
atgtaaagaaaataatattttatttca

SEQ ID NO: 168398 - DNA, 27 bp, Artificial sequence
  SiRNA target sequence
tgtaaagaaaataatattttatttcac

SEQ ID NO: 168399 - DNA, 27 bp, Artificial sequence
  SiRNA target sequence
gtaaagaaaataatattttatttcaca

SEQ ID NO: 168400 - DNA, 27 bp, Artificial sequence
  SiRNA target sequence
taaagaaaataatattttatttcacac

SEQ ID NO: 168401 - DNA, 27 bp, Artificial sequence
  SiRNA target sequence
aaagaaaataatattttatttcacact

SEQ ID NO: 168402 - DNA, 27 bp, Artificial sequence
  SiRNA target sequence
aagaaaataatattttatttcacactg

SEQ ID NO: 168403 - DNA, 27 bp, Artificial sequence
  SiRNA target sequence
agaaaataatattttatttcacactga

SEQ ID NO: 168404 - DNA, 27 bp, Artificial sequence
  SiRNA target sequence
gaaaataatattttatttcacactgat

SEQ ID NO: 168405 - DNA, 27 bp, Artificial sequence
  SiRNA target sequence
aaaataatattttatttcacactgatg

SEQ ID NO: 168406 - DNA, 27 bp, Artificial sequence
  SiRNA target sequence
aaataatattttatttcacactgatgc

SEQ ID NO: 168407 - DNA, 27 bp, Artificial sequence
  SiRNA target sequence
aataatattttatttcacactgatgca

SEQ ID NO: 168408 - DNA, 27 bp, Artificial sequence
  SiRNA target sequence
ataatattttatttcacactgatgcag

SEQ ID NO: 168409 - DNA, 27 bp, Artificial sequence
  SiRNA target sequence
taatattttatttcacactgatgcagc

SEQ ID NO: 168410 - DNA, 27 bp, Artificial sequence
  SiRNA target sequence
aatattttatttcacactgatgcagca

SEQ ID NO: 168411 - DNA, 27 bp, Artificial sequence
  SiRNA target sequence
atattttatttcacactgatgcagcac

SEQ ID NO: 168412 - DNA, 27 bp, Artificial sequence
  SiRNA target sequence
tattttatttcacactgatgcagcaca

SEQ ID NO: 168413 - DNA, 27 bp, Artificial sequence
  SiRNA target sequence
attttatttcacactgatgcagcacaa

SEQ ID NO: 168414 - DNA, 27 bp, Artificial sequence
  SiRNA target sequence
ttttatttcacactgatgcagcacaag

SEQ ID NO: 168415 - DNA, 27 bp, Artificial sequence
  SiRNA target sequence
tttatttcacactgatgcagcacaagc

SEQ ID NO: 168416 - DNA, 27 bp, Artificial sequence
  SiRNA target sequence
ttatttcacactgatgcagcacaagca

SEQ ID NO: 168417 - DNA, 27 bp, Artificial sequence
  SiRNA target sequence
tatttcacactgatgcagcacaagcag

SEQ ID NO: 168418 - DNA, 27 bp, Artificial sequence
  SiRNA target sequence
atttcacactgatgcagcacaagcagt

SEQ ID NO: 168419 - DNA, 27 bp, Artificial sequence
  SiRNA target sequence
tttcacactgatgcagcacaagcagtt

SEQ ID NO: 168420 - DNA, 27 bp, Artificial sequence
  SiRNA target sequence
ttcacactgatgcagcacaagcagttg

SEQ ID NO: 168421 - DNA, 27 bp, Artificial sequence
  SiRNA target sequence
tcacactgatgcagcacaagcagttgg

SEQ ID NO: 168422 - DNA, 27 bp, Artificial sequence
  SiRNA target sequence
cacactgatgcagcacaagcagttggt

SEQ ID NO: 168423 - DNA, 27 bp, Artificial sequence
  SiRNA target sequence
acactgatgcagcacaagcagttggta

SEQ ID NO: 168424 - DNA, 27 bp, Artificial sequence
  SiRNA target sequence
cactgatgcagcacaagcagttggtaa

SEQ ID NO: 168425 - DNA, 27 bp, Artificial sequence
  SiRNA target sequence
actgatgcagcacaagcagttggtaat

SEQ ID NO: 168426 - DNA, 27 bp, Artificial sequence
  SiRNA target sequence
ctgatgcagcacaagcagttggtaata

SEQ ID NO: 168427 - DNA, 27 bp, Artificial sequence
  SiRNA target sequence
tgatgcagcacaagcagttggtaatat

SEQ ID NO: 168428 - DNA, 27 bp, Artificial sequence
  SiRNA target sequence
gatgcagcacaagcagttggtaatata

SEQ ID NO: 168429 - DNA, 27 bp, Artificial sequence
  SiRNA target sequence
atgcagcacaagcagttggtaatatag

SEQ ID NO: 168430 - DNA, 27 bp, Artificial sequence
  SiRNA target sequence
tgcagcacaagcagttggtaatataga

SEQ ID NO: 168431 - DNA, 27 bp, Artificial sequence
  SiRNA target sequence
gcagcacaagcagttggtaatatagat

SEQ ID NO: 168432 - DNA, 27 bp, Artificial sequence
  SiRNA target sequence
cagcacaagcagttggtaatatagata

SEQ ID NO: 168433 - DNA, 27 bp, Artificial sequence
  SiRNA target sequence
agcacaagcagttggtaatatagatat

SEQ ID NO: 168434 - DNA, 27 bp, Artificial sequence
  SiRNA target sequence
gcacaagcagttggtaatatagatatt

SEQ ID NO: 168435 - DNA, 27 bp, Artificial sequence
  SiRNA target sequence
cacaagcagttggtaatatagatattg

SEQ ID NO: 168436 - DNA, 27 bp, Artificial sequence
  SiRNA target sequence
acaagcagttggtaatatagatattga

SEQ ID NO: 168437 - DNA, 27 bp, Artificial sequence
  SiRNA target sequence
caagcagttggtaatatagatattgat

SEQ ID NO: 168438 - DNA, 27 bp, Artificial sequence
  SiRNA target sequence
aagcagttggtaatatagatattgatg

SEQ ID NO: 168439 - DNA, 27 bp, Artificial sequence
  SiRNA target sequence
agcagttggtaatatagatattgatgt

SEQ ID NO: 168440 - DNA, 27 bp, Artificial sequence
  SiRNA target sequence
gcagttggtaatatagatattgatgtc

SEQ ID NO: 168441 - DNA, 27 bp, Artificial sequence
  SiRNA target sequence
cagttggtaatatagatattgatgtca

SEQ ID NO: 168442 - DNA, 27 bp, Artificial sequence
  SiRNA target sequence
agttggtaatatagatattgatgtcaa

SEQ ID NO: 168443 - DNA, 27 bp, Artificial sequence
  SiRNA target sequence
gttggtaatatagatattgatgtcaat

SEQ ID NO: 168444 - DNA, 27 bp, Artificial sequence
  SiRNA target sequence
ttggtaatatagatattgatgtcaatg

SEQ ID NO: 168445 - DNA, 27 bp, Artificial sequence
  SiRNA target sequence
tggtaatatagatattgatgtcaatga

SEQ ID NO: 168446 - DNA, 27 bp, Artificial sequence
  SiRNA target sequence
ggtaatatagatattgatgtcaatgat

SEQ ID NO: 168447 - DNA, 27 bp, Artificial sequence
  SiRNA target sequence
gtaatatagatattgatgtcaatgata

SEQ ID NO: 168448 - DNA, 27 bp, Artificial sequence
  SiRNA target sequence
taatatagatattgatgtcaatgatat

SEQ ID NO: 168449 - DNA, 27 bp, Artificial sequence
  SiRNA target sequence
aatatagatattgatgtcaatgatatg

SEQ ID NO: 168450 - DNA, 27 bp, Artificial sequence
  SiRNA target sequence
atatagatattgatgtcaatgatatga

SEQ ID NO: 168451 - DNA, 27 bp, Artificial sequence
  SiRNA target sequence
tatagatattgatgtcaatgatatgaa

SEQ ID NO: 168452 - DNA, 27 bp, Artificial sequence
  SiRNA target sequence
atagatattgatgtcaatgatatgaat

SEQ ID NO: 168453 - DNA, 27 bp, Artificial sequence
  SiRNA target sequence
tagatattgatgtcaatgatatgaata

SEQ ID NO: 168454 - DNA, 27 bp, Artificial sequence
  SiRNA target sequence
agatattgatgtcaatgatatgaatat

SEQ ID NO: 168455 - DNA, 27 bp, Artificial sequence
  SiRNA target sequence
gatattgatgtcaatgatatgaatatt

SEQ ID NO: 168456 - DNA, 27 bp, Artificial sequence
  SiRNA target sequence
atattgatgtcaatgatatgaatattg

SEQ ID NO: 168457 - DNA, 27 bp, Artificial sequence
  SiRNA target sequence
tattgatgtcaatgatatgaatattga

SEQ ID NO: 168458 - DNA, 27 bp, Artificial sequence
  SiRNA target sequence
attgatgtcaatgatatgaatattgat

SEQ ID NO: 168459 - DNA, 27 bp, Artificial sequence
  SiRNA target sequence
ttgatgtcaatgatatgaatattgatt

SEQ ID NO: 168460 - DNA, 27 bp, Artificial sequence
  SiRNA target sequence
tgatgtcaatgatatgaatattgattt

SEQ ID NO: 168461 - DNA, 27 bp, Artificial sequence
  SiRNA target sequence
gatgtcaatgatatgaatattgattta

SEQ ID NO: 168462 - DNA, 27 bp, Artificial sequence
  SiRNA target sequence
atgtcaatgatatgaatattgatttac

SEQ ID NO: 168463 - DNA, 27 bp, Artificial sequence
  SiRNA target sequence
tgtcaatgatatgaatattgatttact

SEQ ID NO: 168464 - DNA, 27 bp, Artificial sequence
  SiRNA target sequence
gtcaatgatatgaatattgatttacta

SEQ ID NO: 168465 - DNA, 27 bp, Artificial sequence
  SiRNA target sequence
tcaatgatatgaatattgatttactaa

SEQ ID NO: 168466 - DNA, 27 bp, Artificial sequence
  SiRNA target sequence
caatgatatgaatattgatttactaag

SEQ ID NO: 168467 - DNA, 27 bp, Artificial sequence
  SiRNA target sequence
aatgatatgaatattgatttactaagt

SEQ ID NO: 168468 - DNA, 27 bp, Artificial sequence
  SiRNA target sequence
atgatatgaatattgatttactaagtt

SEQ ID NO: 168469 - DNA, 27 bp, Artificial sequence
  SiRNA target sequence
tgatatgaatattgatttactaagttt

SEQ ID NO: 168470 - DNA, 27 bp, Artificial sequence
  SiRNA target sequence
gatatgaatattgatttactaagttta

SEQ ID NO: 168471 - DNA, 27 bp, Artificial sequence
  SiRNA target sequence
atatgaatattgatttactaagtttat

SEQ ID NO: 168472 - DNA, 27 bp, Artificial sequence
  SiRNA target sequence
tatgaatattgatttactaagtttatc

SEQ ID NO: 168473 - DNA, 27 bp, Artificial sequence
  SiRNA target sequence
atgaatattgatttactaagtttatca

SEQ ID NO: 168474 - DNA, 27 bp, Artificial sequence
  SiRNA target sequence
tgaatattgatttactaagtttatcaa

SEQ ID NO: 168475 - DNA, 27 bp, Artificial sequence
  SiRNA target sequence
gaatattgatttactaagtttatcaag

SEQ ID NO: 168476 - DNA, 27 bp, Artificial sequence
  SiRNA target sequence
aatattgatttactaagtttatcaagt

SEQ ID NO: 168477 - DNA, 27 bp, Artificial sequence
  SiRNA target sequence
atattgatttactaagtttatcaagtc

SEQ ID NO: 168478 - DNA, 27 bp, Artificial sequence
  SiRNA target sequence
tattgatttactaagtttatcaagtca

SEQ ID NO: 168479 - DNA, 27 bp, Artificial sequence
  SiRNA target sequence
attgatttactaagtttatcaagtcat

SEQ ID NO: 168480 - DNA, 27 bp, Artificial sequence
  SiRNA target sequence
ttgatttactaagtttatcaagtcata

SEQ ID NO: 168481 - DNA, 27 bp, Artificial sequence
  SiRNA target sequence
tgatttactaagtttatcaagtcataa

SEQ ID NO: 168482 - DNA, 27 bp, Artificial sequence
  SiRNA target sequence
gatttactaagtttatcaagtcataaa

SEQ ID NO: 168483 - DNA, 27 bp, Artificial sequence
  SiRNA target sequence
atttactaagtttatcaagtcataaaa

SEQ ID NO: 168484 - DNA, 27 bp, Artificial sequence
  SiRNA target sequence
tttactaagtttatcaagtcataaaat

SEQ ID NO: 168485 - DNA, 27 bp, Artificial sequence
  SiRNA target sequence
ttactaagtttatcaagtcataaaatt

SEQ ID NO: 168486 - DNA, 27 bp, Artificial sequence
  SiRNA target sequence
tactaagtttatcaagtcataaaattt

SEQ ID NO: 168487 - DNA, 27 bp, Artificial sequence
  SiRNA target sequence
actaagtttatcaagtcataaaattta

SEQ ID NO: 168488 - DNA, 27 bp, Artificial sequence
  SiRNA target sequence
ctaagtttatcaagtcataaaatttat

SEQ ID NO: 168489 - DNA, 27 bp, Artificial sequence
  SiRNA target sequence
taagtttatcaagtcataaaatttatg

SEQ ID NO: 168490 - DNA, 27 bp, Artificial sequence
  SiRNA target sequence
aagtttatcaagtcataaaatttatgg

SEQ ID NO: 168491 - DNA, 27 bp, Artificial sequence
  SiRNA target sequence
agtttatcaagtcataaaatttatggt

SEQ ID NO: 168492 - DNA, 27 bp, Artificial sequence
  SiRNA target sequence
gtttatcaagtcataaaatttatggtc

SEQ ID NO: 168493 - DNA, 27 bp, Artificial sequence
  SiRNA target sequence
tttatcaagtcataaaatttatggtcc

SEQ ID NO: 168494 - DNA, 27 bp, Artificial sequence
  SiRNA target sequence
ttatcaagtcataaaatttatggtcca

SEQ ID NO: 168495 - DNA, 27 bp, Artificial sequence
  SiRNA target sequence
tatcaagtcataaaatttatggtccaa

SEQ ID NO: 168496 - DNA, 27 bp, Artificial sequence
  SiRNA target sequence
atcaagtcataaaatttatggtccaaa

SEQ ID NO: 168497 - DNA, 27 bp, Artificial sequence
  SiRNA target sequence
tcaagtcataaaatttatggtccaaaa

SEQ ID NO: 168498 - DNA, 27 bp, Artificial sequence
  SiRNA target sequence
caagtcataaaatttatggtccaaaag

SEQ ID NO: 168499 - DNA, 27 bp, Artificial sequence
  SiRNA target sequence
aagtcataaaatttatggtccaaaagg

SEQ ID NO: 168500 - DNA, 27 bp, Artificial sequence
  SiRNA target sequence
agtcataaaatttatggtccaaaaggt

SEQ ID NO: 168501 - DNA, 27 bp, Artificial sequence
  SiRNA target sequence
gtcataaaatttatggtccaaaaggtg

SEQ ID NO: 168502 - DNA, 27 bp, Artificial sequence
  SiRNA target sequence
tcataaaatttatggtccaaaaggtgt

SEQ ID NO: 168503 - DNA, 27 bp, Artificial sequence
  SiRNA target sequence
cataaaatttatggtccaaaaggtgtt

SEQ ID NO: 168504 - DNA, 27 bp, Artificial sequence
  SiRNA target sequence
ataaaatttatggtccaaaaggtgttg

SEQ ID NO: 168505 - DNA, 27 bp, Artificial sequence
  SiRNA target sequence
taaaatttatggtccaaaaggtgttgg

SEQ ID NO: 168506 - DNA, 27 bp, Artificial sequence
  SiRNA target sequence
aaaatttatggtccaaaaggtgttggt

SEQ ID NO: 168507 - DNA, 27 bp, Artificial sequence
  SiRNA target sequence
aaatttatggtccaaaaggtgttggtg

SEQ ID NO: 168508 - DNA, 27 bp, Artificial sequence
  SiRNA target sequence
aatttatggtccaaaaggtgttggtgc

SEQ ID NO: 168509 - DNA, 27 bp, Artificial sequence
  SiRNA target sequence
atttatggtccaaaaggtgttggtgcc

SEQ ID NO: 168510 - DNA, 27 bp, Artificial sequence
  SiRNA target sequence
tttatggtccaaaaggtgttggtgcct

SEQ ID NO: 168511 - DNA, 27 bp, Artificial sequence
  SiRNA target sequence
ttatggtccaaaaggtgttggtgcctt

SEQ ID NO: 168512 - DNA, 27 bp, Artificial sequence
  SiRNA target sequence
tatggtccaaaaggtgttggtgcctta

SEQ ID NO: 168513 - DNA, 27 bp, Artificial sequence
  SiRNA target sequence
atggtccaaaaggtgttggtgccttat

SEQ ID NO: 168514 - DNA, 27 bp, Artificial sequence
  SiRNA target sequence
tggtccaaaaggtgttggtgccttata

SEQ ID NO: 168515 - DNA, 27 bp, Artificial sequence
  SiRNA target sequence
ggtccaaaaggtgttggtgccttatac

SEQ ID NO: 168516 - DNA, 27 bp, Artificial sequence
  SiRNA target sequence
gtccaaaaggtgttggtgccttatacg

SEQ ID NO: 168517 - DNA, 27 bp, Artificial sequence
  SiRNA target sequence
tccaaaaggtgttggtgccttatacgt

SEQ ID NO: 168518 - DNA, 27 bp, Artificial sequence
  SiRNA target sequence
ccaaaaggtgttggtgccttatacgtc

SEQ ID NO: 168519 - DNA, 27 bp, Artificial sequence
  SiRNA target sequence
caaaaggtgttggtgccttatacgtca

SEQ ID NO: 168520 - DNA, 27 bp, Artificial sequence
  SiRNA target sequence
aaaaggtgttggtgccttatacgtcag

SEQ ID NO: 168521 - DNA, 27 bp, Artificial sequence
  SiRNA target sequence
aaaggtgttggtgccttatacgtcaga

SEQ ID NO: 168522 - DNA, 27 bp, Artificial sequence
  SiRNA target sequence
aaggtgttggtgccttatacgtcagaa

SEQ ID NO: 168523 - DNA, 27 bp, Artificial sequence
  SiRNA target sequence
aggtgttggtgccttatacgtcagaag

SEQ ID NO: 168524 - DNA, 27 bp, Artificial sequence
  SiRNA target sequence
ggtgttggtgccttatacgtcagaaga

SEQ ID NO: 168525 - DNA, 27 bp, Artificial sequence
  SiRNA target sequence
gtgttggtgccttatacgtcagaagaa

SEQ ID NO: 168526 - DNA, 27 bp, Artificial sequence
  SiRNA target sequence
tgttggtgccttatacgtcagaagaag

SEQ ID NO: 168527 - DNA, 27 bp, Artificial sequence
  SiRNA target sequence
gttggtgccttatacgtcagaagaagg

SEQ ID NO: 168528 - DNA, 27 bp, Artificial sequence
  SiRNA target sequence
ttggtgccttatacgtcagaagaaggc

SEQ ID NO: 168529 - DNA, 27 bp, Artificial sequence
  SiRNA target sequence
tggtgccttatacgtcagaagaaggcc

SEQ ID NO: 168530 - DNA, 27 bp, Artificial sequence
  SiRNA target sequence
ggtgccttatacgtcagaagaaggcct

SEQ ID NO: 168531 - DNA, 27 bp, Artificial sequence
  SiRNA target sequence
gtgccttatacgtcagaagaaggccta

SEQ ID NO: 168532 - DNA, 27 bp, Artificial sequence
  SiRNA target sequence
tgccttatacgtcagaagaaggcctag

SEQ ID NO: 168533 - DNA, 27 bp, Artificial sequence
  SiRNA target sequence
gccttatacgtcagaagaaggcctagg

SEQ ID NO: 168534 - DNA, 27 bp, Artificial sequence
  SiRNA target sequence
ccttatacgtcagaagaaggcctaggg

SEQ ID NO: 168535 - DNA, 27 bp, Artificial sequence
  SiRNA target sequence
cttatacgtcagaagaaggcctagggt

SEQ ID NO: 168536 - DNA, 27 bp, Artificial sequence
  SiRNA target sequence
ttatacgtcagaagaaggcctagggtg

SEQ ID NO: 168537 - DNA, 27 bp, Artificial sequence
  SiRNA target sequence
tatacgtcagaagaaggcctagggtga

SEQ ID NO: 168538 - DNA, 27 bp, Artificial sequence
  SiRNA target sequence
atacgtcagaagaaggcctagggtgag

SEQ ID NO: 168539 - DNA, 27 bp, Artificial sequence
  SiRNA target sequence
tacgtcagaagaaggcctagggtgaga

SEQ ID NO: 168540 - DNA, 27 bp, Artificial sequence
  SiRNA target sequence
acgtcagaagaaggcctagggtgagaa

SEQ ID NO: 168541 - DNA, 27 bp, Artificial sequence
  SiRNA target sequence
cgtcagaagaaggcctagggtgagaat

SEQ ID NO: 168542 - DNA, 27 bp, Artificial sequence
  SiRNA target sequence
gtcagaagaaggcctagggtgagaatg

SEQ ID NO: 168543 - DNA, 27 bp, Artificial sequence
  SiRNA target sequence
tcagaagaaggcctagggtgagaatgt

SEQ ID NO: 168544 - DNA, 27 bp, Artificial sequence
  SiRNA target sequence
cagaagaaggcctagggtgagaatgtt

SEQ ID NO: 168545 - DNA, 27 bp, Artificial sequence
  SiRNA target sequence
agaagaaggcctagggtgagaatgtta

SEQ ID NO: 168546 - DNA, 27 bp, Artificial sequence
  SiRNA target sequence
gaagaaggcctagggtgagaatgttac

SEQ ID NO: 168547 - DNA, 27 bp, Artificial sequence
  SiRNA target sequence
aagaaggcctagggtgagaatgttacc

SEQ ID NO: 168548 - DNA, 27 bp, Artificial sequence
  SiRNA target sequence
agaaggcctagggtgagaatgttacca

SEQ ID NO: 168549 - DNA, 27 bp, Artificial sequence
  SiRNA target sequence
gaaggcctagggtgagaatgttaccac

SEQ ID NO: 168550 - DNA, 27 bp, Artificial sequence
  SiRNA target sequence
aaggcctagggtgagaatgttaccact

SEQ ID NO: 168551 - DNA, 27 bp, Artificial sequence
  SiRNA target sequence
aggcctagggtgagaatgttaccactt

SEQ ID NO: 168552 - DNA, 27 bp, Artificial sequence
  SiRNA target sequence
ggcctagggtgagaatgttaccacttt

SEQ ID NO: 168553 - DNA, 27 bp, Artificial sequence
  SiRNA target sequence
gcctagggtgagaatgttaccactttt

SEQ ID NO: 168554 - DNA, 27 bp, Artificial sequence
  SiRNA target sequence
cctagggtgagaatgttaccacttttt

SEQ ID NO: 168555 - DNA, 27 bp, Artificial sequence
  SiRNA target sequence
ctagggtgagaatgttaccacttttta

SEQ ID NO: 168556 - DNA, 27 bp, Artificial sequence
  SiRNA target sequence
tagggtgagaatgttaccactttttaa

SEQ ID NO: 168557 - DNA, 27 bp, Artificial sequence
  SiRNA target sequence
agggtgagaatgttaccactttttaat

SEQ ID NO: 168558 - DNA, 27 bp, Artificial sequence
  SiRNA target sequence
gggtgagaatgttaccactttttaatg

SEQ ID NO: 168559 - DNA, 27 bp, Artificial sequence
  SiRNA target sequence
ggtgagaatgttaccactttttaatgg

SEQ ID NO: 168560 - DNA, 27 bp, Artificial sequence
  SiRNA target sequence
gtgagaatgttaccactttttaatggt

SEQ ID NO: 168561 - DNA, 27 bp, Artificial sequence
  SiRNA target sequence
tgagaatgttaccactttttaatggtg

SEQ ID NO: 168562 - DNA, 27 bp, Artificial sequence
  SiRNA target sequence
gagaatgttaccactttttaatggtgg

SEQ ID NO: 168563 - DNA, 27 bp, Artificial sequence
  SiRNA target sequence
agaatgttaccactttttaatggtggt

SEQ ID NO: 168564 - DNA, 27 bp, Artificial sequence
  SiRNA target sequence
gaatgttaccactttttaatggtggtg

SEQ ID NO: 168565 - DNA, 27 bp, Artificial sequence
  SiRNA target sequence
aatgttaccactttttaatggtggtgg

SEQ ID NO: 168566 - DNA, 27 bp, Artificial sequence
  SiRNA target sequence
atgttaccactttttaatggtggtgga

SEQ ID NO: 168567 - DNA, 27 bp, Artificial sequence
  SiRNA target sequence
tgttaccactttttaatggtggtggac

SEQ ID NO: 168568 - DNA, 27 bp, Artificial sequence
  SiRNA target sequence
gttaccactttttaatggtggtggaca

SEQ ID NO: 168569 - DNA, 27 bp, Artificial sequence
  SiRNA target sequence
ttaccactttttaatggtggtggacaa

SEQ ID NO: 168570 - DNA, 27 bp, Artificial sequence
  SiRNA target sequence
taccactttttaatggtggtggacaag

SEQ ID NO: 168571 - DNA, 27 bp, Artificial sequence
  SiRNA target sequence
accactttttaatggtggtggacaaga

SEQ ID NO: 168572 - DNA, 27 bp, Artificial sequence
  SiRNA target sequence
ccactttttaatggtggtggacaagaa

SEQ ID NO: 168573 - DNA, 27 bp, Artificial sequence
  SiRNA target sequence
cactttttaatggtggtggacaagaaa

SEQ ID NO: 168574 - DNA, 27 bp, Artificial sequence
  SiRNA target sequence
actttttaatggtggtggacaagaaag

SEQ ID NO: 168575 - DNA, 27 bp, Artificial sequence
  SiRNA target sequence
ctttttaatggtggtggacaagaaaga

SEQ ID NO: 168576 - DNA, 27 bp, Artificial sequence
  SiRNA target sequence
tttttaatggtggtggacaagaaagag

SEQ ID NO: 168577 - DNA, 27 bp, Artificial sequence
  SiRNA target sequence
ttttaatggtggtggacaagaaagagg

SEQ ID NO: 168578 - DNA, 27 bp, Artificial sequence
  SiRNA target sequence
tttaatggtggtggacaagaaagagga

SEQ ID NO: 168579 - DNA, 27 bp, Artificial sequence
  SiRNA target sequence
ttaatggtggtggacaagaaagaggat

SEQ ID NO: 168580 - DNA, 27 bp, Artificial sequence
  SiRNA target sequence
taatggtggtggacaagaaagaggatt

SEQ ID NO: 168581 - DNA, 27 bp, Artificial sequence
  SiRNA target sequence
aatggtggtggacaagaaagaggatta

SEQ ID NO: 168582 - DNA, 27 bp, Artificial sequence
  SiRNA target sequence
atggtggtggacaagaaagaggattaa

SEQ ID NO: 168583 - DNA, 27 bp, Artificial sequence
  SiRNA target sequence
tggtggtggacaagaaagaggattaag

SEQ ID NO: 168584 - DNA, 27 bp, Artificial sequence
  SiRNA target sequence
ggtggtggacaagaaagaggattaaga

SEQ ID NO: 168585 - DNA, 27 bp, Artificial sequence
  SiRNA target sequence
gtggtggacaagaaagaggattaagaa

SEQ ID NO: 168586 - DNA, 27 bp, Artificial sequence
  SiRNA target sequence
tggtggacaagaaagaggattaagaag

SEQ ID NO: 168587 - DNA, 27 bp, Artificial sequence
  SiRNA target sequence
ggtggacaagaaagaggattaagaagt

SEQ ID NO: 168588 - DNA, 27 bp, Artificial sequence
  SiRNA target sequence
gtggacaagaaagaggattaagaagtg

SEQ ID NO: 168589 - DNA, 27 bp, Artificial sequence
  SiRNA target sequence
tggacaagaaagaggattaagaagtgg

SEQ ID NO: 168590 - DNA, 27 bp, Artificial sequence
  SiRNA target sequence
ggacaagaaagaggattaagaagtggg

SEQ ID NO: 168591 - DNA, 27 bp, Artificial sequence
  SiRNA target sequence
gacaagaaagaggattaagaagtggga

SEQ ID NO: 168592 - DNA, 27 bp, Artificial sequence
  SiRNA target sequence
acaagaaagaggattaagaagtgggac

SEQ ID NO: 168593 - DNA, 27 bp, Artificial sequence
  SiRNA target sequence
caagaaagaggattaagaagtgggaca

SEQ ID NO: 168594 - DNA, 27 bp, Artificial sequence
  SiRNA target sequence
aagaaagaggattaagaagtgggacaa

SEQ ID NO: 168595 - DNA, 27 bp, Artificial sequence
  SiRNA target sequence
agaaagaggattaagaagtgggacaac

SEQ ID NO: 168596 - DNA, 27 bp, Artificial sequence
  SiRNA target sequence
gaaagaggattaagaagtgggacaact

SEQ ID NO: 168597 - DNA, 27 bp, Artificial sequence
  SiRNA target sequence
aaagaggattaagaagtgggacaactt

SEQ ID NO: 168598 - DNA, 27 bp, Artificial sequence
  SiRNA target sequence
aagaggattaagaagtgggacaacttc

SEQ ID NO: 168599 - DNA, 27 bp, Artificial sequence
  SiRNA target sequence
agaggattaagaagtgggacaacttct

SEQ ID NO: 168600 - DNA, 27 bp, Artificial sequence
  SiRNA target sequence
gaggattaagaagtgggacaacttctc

SEQ ID NO: 168601 - DNA, 27 bp, Artificial sequence
  SiRNA target sequence
aggattaagaagtgggacaacttctcc

SEQ ID NO: 168602 - DNA, 27 bp, Artificial sequence
  SiRNA target sequence
ggattaagaagtgggacaacttctcca

SEQ ID NO: 168603 - DNA, 27 bp, Artificial sequence
  SiRNA target sequence
gattaagaagtgggacaacttctccac

SEQ ID NO: 168604 - DNA, 27 bp, Artificial sequence
  SiRNA target sequence
attaagaagtgggacaacttctccacc

SEQ ID NO: 168605 - DNA, 27 bp, Artificial sequence
  SiRNA target sequence
ttaagaagtgggacaacttctccacct

SEQ ID NO: 168606 - DNA, 27 bp, Artificial sequence
  SiRNA target sequence
taagaagtgggacaacttctccacctt

SEQ ID NO: 168607 - DNA, 27 bp, Artificial sequence
  SiRNA target sequence
aagaagtgggacaacttctccaccttt

SEQ ID NO: 168608 - DNA, 27 bp, Artificial sequence
  SiRNA target sequence
agaagtgggacaacttctccaccttta

SEQ ID NO: 168609 - DNA, 27 bp, Artificial sequence
  SiRNA target sequence
gaagtgggacaacttctccacctttag

SEQ ID NO: 168610 - DNA, 27 bp, Artificial sequence
  SiRNA target sequence
aagtgggacaacttctccacctttagt

SEQ ID NO: 168611 - DNA, 27 bp, Artificial sequence
  SiRNA target sequence
agtgggacaacttctccacctttagtt

SEQ ID NO: 168612 - DNA, 27 bp, Artificial sequence
  SiRNA target sequence
gtgggacaacttctccacctttagttg

SEQ ID NO: 168613 - DNA, 27 bp, Artificial sequence
  SiRNA target sequence
tgggacaacttctccacctttagttgt

SEQ ID NO: 168614 - DNA, 27 bp, Artificial sequence
  SiRNA target sequence
gggacaacttctccacctttagttgtt

SEQ ID NO: 168615 - DNA, 27 bp, Artificial sequence
  SiRNA target sequence
ggacaacttctccacctttagttgttg

SEQ ID NO: 168616 - DNA, 27 bp, Artificial sequence
  SiRNA target sequence
gacaacttctccacctttagttgttgg

SEQ ID NO: 168617 - DNA, 27 bp, Artificial sequence
  SiRNA target sequence
acaacttctccacctttagttgttgga

SEQ ID NO: 168618 - DNA, 27 bp, Artificial sequence
  SiRNA target sequence
caacttctccacctttagttgttggat

SEQ ID NO: 168619 - DNA, 27 bp, Artificial sequence
  SiRNA target sequence
aacttctccacctttagttgttggatt

SEQ ID NO: 168620 - DNA, 27 bp, Artificial sequence
  SiRNA target sequence
acttctccacctttagttgttggatta

SEQ ID NO: 168621 - DNA, 27 bp, Artificial sequence
  SiRNA target sequence
cttctccacctttagttgttggattag

SEQ ID NO: 168622 - DNA, 27 bp, Artificial sequence
  SiRNA target sequence
ttctccacctttagttgttggattagg

SEQ ID NO: 168623 - DNA, 27 bp, Artificial sequence
  SiRNA target sequence
tctccacctttagttgttggattaggc

SEQ ID NO: 168624 - DNA, 27 bp, Artificial sequence
  SiRNA target sequence
ctccacctttagttgttggattaggca

SEQ ID NO: 168625 - DNA, 27 bp, Artificial sequence
  SiRNA target sequence
tccacctttagttgttggattaggcaa

SEQ ID NO: 168626 - DNA, 27 bp, Artificial sequence
  SiRNA target sequence
ccacctttagttgttggattaggcaaa

SEQ ID NO: 168627 - DNA, 27 bp, Artificial sequence
  SiRNA target sequence
cacctttagttgttggattaggcaaag

SEQ ID NO: 168628 - DNA, 27 bp, Artificial sequence
  SiRNA target sequence
acctttagttgttggattaggcaaagc

SEQ ID NO: 168629 - DNA, 27 bp, Artificial sequence
  SiRNA target sequence
cctttagttgttggattaggcaaagct

SEQ ID NO: 168630 - DNA, 27 bp, Artificial sequence
  SiRNA target sequence
ctttagttgttggattaggcaaagctg

SEQ ID NO: 168631 - DNA, 27 bp, Artificial sequence
  SiRNA target sequence
tttagttgttggattaggcaaagctgc

SEQ ID NO: 168632 - DNA, 27 bp, Artificial sequence
  SiRNA target sequence
ttagttgttggattaggcaaagctgct

SEQ ID NO: 168633 - DNA, 27 bp, Artificial sequence
  SiRNA target sequence
tagttgttggattaggcaaagctgctg

SEQ ID NO: 168634 - DNA, 27 bp, Artificial sequence
  SiRNA target sequence
agttgttggattaggcaaagctgctga

SEQ ID NO: 168635 - DNA, 27 bp, Artificial sequence
  SiRNA target sequence
gttgttggattaggcaaagctgctgag

SEQ ID NO: 168636 - DNA, 27 bp, Artificial sequence
  SiRNA target sequence
ttgttggattaggcaaagctgctgaga

SEQ ID NO: 168637 - DNA, 27 bp, Artificial sequence
  SiRNA target sequence
tgttggattaggcaaagctgctgagat

SEQ ID NO: 168638 - DNA, 27 bp, Artificial sequence
  SiRNA target sequence
gttggattaggcaaagctgctgagata

SEQ ID NO: 168639 - DNA, 27 bp, Artificial sequence
  SiRNA target sequence
ttggattaggcaaagctgctgagatat

SEQ ID NO: 168640 - DNA, 27 bp, Artificial sequence
  SiRNA target sequence
tggattaggcaaagctgctgagatatg

SEQ ID NO: 168641 - DNA, 27 bp, Artificial sequence
  SiRNA target sequence
ggattaggcaaagctgctgagatatgc

SEQ ID NO: 168642 - DNA, 27 bp, Artificial sequence
  SiRNA target sequence
gattaggcaaagctgctgagatatgct

SEQ ID NO: 168643 - DNA, 27 bp, Artificial sequence
  SiRNA target sequence
attaggcaaagctgctgagatatgctc

SEQ ID NO: 168644 - DNA, 27 bp, Artificial sequence
  SiRNA target sequence
ttaggcaaagctgctgagatatgctct

SEQ ID NO: 168645 - DNA, 27 bp, Artificial sequence
  SiRNA target sequence
taggcaaagctgctgagatatgctctc

SEQ ID NO: 168646 - DNA, 27 bp, Artificial sequence
  SiRNA target sequence
aggcaaagctgctgagatatgctctca

SEQ ID NO: 168647 - DNA, 27 bp, Artificial sequence
  SiRNA target sequence
ggcaaagctgctgagatatgctctcag

SEQ ID NO: 168648 - DNA, 27 bp, Artificial sequence
  SiRNA target sequence
gcaaagctgctgagatatgctctcagg

SEQ ID NO: 168649 - DNA, 27 bp, Artificial sequence
  SiRNA target sequence
caaagctgctgagatatgctctcagga

SEQ ID NO: 168650 - DNA, 27 bp, Artificial sequence
  SiRNA target sequence
aaagctgctgagatatgctctcaggag

SEQ ID NO: 168651 - DNA, 27 bp, Artificial sequence
  SiRNA target sequence
aagctgctgagatatgctctcaggaga

SEQ ID NO: 168652 - DNA, 27 bp, Artificial sequence
  SiRNA target sequence
agctgctgagatatgctctcaggagat

SEQ ID NO: 168653 - DNA, 27 bp, Artificial sequence
  SiRNA target sequence
gctgctgagatatgctctcaggagatg

SEQ ID NO: 168654 - DNA, 27 bp, Artificial sequence
  SiRNA target sequence
ctgctgagatatgctctcaggagatgc

SEQ ID NO: 168655 - DNA, 27 bp, Artificial sequence
  SiRNA target sequence
tgctgagatatgctctcaggagatgcg

SEQ ID NO: 168656 - DNA, 27 bp, Artificial sequence
  SiRNA target sequence
gctgagatatgctctcaggagatgcgt

SEQ ID NO: 168657 - DNA, 27 bp, Artificial sequence
  SiRNA target sequence
ctgagatatgctctcaggagatgcgta

SEQ ID NO: 168658 - DNA, 27 bp, Artificial sequence
  SiRNA target sequence
tgagatatgctctcaggagatgcgtaa

SEQ ID NO: 168659 - DNA, 27 bp, Artificial sequence
  SiRNA target sequence
gagatatgctctcaggagatgcgtaag

SEQ ID NO: 168660 - DNA, 27 bp, Artificial sequence
  SiRNA target sequence
agatatgctctcaggagatgcgtaagg

SEQ ID NO: 168661 - DNA, 27 bp, Artificial sequence
  SiRNA target sequence
gatatgctctcaggagatgcgtaagga

SEQ ID NO: 168662 - DNA, 27 bp, Artificial sequence
  SiRNA target sequence
atatgctctcaggagatgcgtaaggac

SEQ ID NO: 168663 - DNA, 27 bp, Artificial sequence
  SiRNA target sequence
tatgctctcaggagatgcgtaaggact

SEQ ID NO: 168664 - DNA, 27 bp, Artificial sequence
  SiRNA target sequence
atgctctcaggagatgcgtaaggacta

SEQ ID NO: 168665 - DNA, 27 bp, Artificial sequence
  SiRNA target sequence
tgctctcaggagatgcgtaaggactat

SEQ ID NO: 168666 - DNA, 27 bp, Artificial sequence
  SiRNA target sequence
gctctcaggagatgcgtaaggactatg

SEQ ID NO: 168667 - DNA, 27 bp, Artificial sequence
  SiRNA target sequence
ctctcaggagatgcgtaaggactatga

SEQ ID NO: 168668 - DNA, 27 bp, Artificial sequence
  SiRNA target sequence
tctcaggagatgcgtaaggactatgaa

SEQ ID NO: 168669 - DNA, 27 bp, Artificial sequence
  SiRNA target sequence
ctcaggagatgcgtaaggactatgaat

SEQ ID NO: 168670 - DNA, 27 bp, Artificial sequence
  SiRNA target sequence
tcaggagatgcgtaaggactatgaata

SEQ ID NO: 168671 - DNA, 27 bp, Artificial sequence
  SiRNA target sequence
caggagatgcgtaaggactatgaatat

SEQ ID NO: 168672 - DNA, 27 bp, Artificial sequence
  SiRNA target sequence
aggagatgcgtaaggactatgaatata

SEQ ID NO: 168673 - DNA, 27 bp, Artificial sequence
  SiRNA target sequence
ggagatgcgtaaggactatgaatatat

SEQ ID NO: 168674 - DNA, 27 bp, Artificial sequence
  SiRNA target sequence
gagatgcgtaaggactatgaatatata

SEQ ID NO: 168675 - DNA, 27 bp, Artificial sequence
  SiRNA target sequence
agatgcgtaaggactatgaatatatac

SEQ ID NO: 168676 - DNA, 27 bp, Artificial sequence
  SiRNA target sequence
gatgcgtaaggactatgaatatataca

SEQ ID NO: 168677 - DNA, 27 bp, Artificial sequence
  SiRNA target sequence
atgcgtaaggactatgaatatatacaa

SEQ ID NO: 168678 - DNA, 27 bp, Artificial sequence
  SiRNA target sequence
tgcgtaaggactatgaatatatacaaa

SEQ ID NO: 168679 - DNA, 27 bp, Artificial sequence
  SiRNA target sequence
gcgtaaggactatgaatatatacaaaa

SEQ ID NO: 168680 - DNA, 27 bp, Artificial sequence
  SiRNA target sequence
cgtaaggactatgaatatatacaaaaa

SEQ ID NO: 168681 - DNA, 27 bp, Artificial sequence
  SiRNA target sequence
gtaaggactatgaatatatacaaaaat

SEQ ID NO: 168682 - DNA, 27 bp, Artificial sequence
  SiRNA target sequence
taaggactatgaatatatacaaaaatt

SEQ ID NO: 168683 - DNA, 27 bp, Artificial sequence
  SiRNA target sequence
aaggactatgaatatatacaaaaatta

SEQ ID NO: 168684 - DNA, 27 bp, Artificial sequence
  SiRNA target sequence
aggactatgaatatatacaaaaattat

SEQ ID NO: 168685 - DNA, 27 bp, Artificial sequence
  SiRNA target sequence
ggactatgaatatatacaaaaattatc

SEQ ID NO: 168686 - DNA, 27 bp, Artificial sequence
  SiRNA target sequence
gactatgaatatatacaaaaattatcg

SEQ ID NO: 168687 - DNA, 27 bp, Artificial sequence
  SiRNA target sequence
actatgaatatatacaaaaattatcgg

SEQ ID NO: 168688 - DNA, 27 bp, Artificial sequence
  SiRNA target sequence
ctatgaatatatacaaaaattatcgga

SEQ ID NO: 168689 - DNA, 27 bp, Artificial sequence
  SiRNA target sequence
tatgaatatatacaaaaattatcggat

SEQ ID NO: 168690 - DNA, 27 bp, Artificial sequence
  SiRNA target sequence
atgaatatatacaaaaattatcggata

SEQ ID NO: 168691 - DNA, 27 bp, Artificial sequence
  SiRNA target sequence
tgaatatatacaaaaattatcggataa

SEQ ID NO: 168692 - DNA, 27 bp, Artificial sequence
  SiRNA target sequence
gaatatatacaaaaattatcggataaa

SEQ ID NO: 168693 - DNA, 27 bp, Artificial sequence
  SiRNA target sequence
aatatatacaaaaattatcggataaac

SEQ ID NO: 168694 - DNA, 27 bp, Artificial sequence
  SiRNA target sequence
atatatacaaaaattatcggataaact

SEQ ID NO: 168695 - DNA, 27 bp, Artificial sequence
  SiRNA target sequence
tatatacaaaaattatcggataaacta

SEQ ID NO: 168696 - DNA, 27 bp, Artificial sequence
  SiRNA target sequence
atatacaaaaattatcggataaactaa

SEQ ID NO: 168697 - DNA, 27 bp, Artificial sequence
  SiRNA target sequence
tatacaaaaattatcggataaactaaa

SEQ ID NO: 168698 - DNA, 27 bp, Artificial sequence
  SiRNA target sequence
atacaaaaattatcggataaactaaaa

SEQ ID NO: 168699 - DNA, 27 bp, Artificial sequence
  SiRNA target sequence
tacaaaaattatcggataaactaaaaa

SEQ ID NO: 168700 - DNA, 27 bp, Artificial sequence
  SiRNA target sequence
acaaaaattatcggataaactaaaaaa

SEQ ID NO: 168701 - DNA, 27 bp, Artificial sequence
  SiRNA target sequence
caaaaattatcggataaactaaaaaat

SEQ ID NO: 168702 - DNA, 27 bp, Artificial sequence
  SiRNA target sequence
aaaaattatcggataaactaaaaaatc

SEQ ID NO: 168703 - DNA, 27 bp, Artificial sequence
  SiRNA target sequence
aaaattatcggataaactaaaaaatcg

SEQ ID NO: 168704 - DNA, 27 bp, Artificial sequence
  SiRNA target sequence
aaattatcggataaactaaaaaatcgc

SEQ ID NO: 168705 - DNA, 27 bp, Artificial sequence
  SiRNA target sequence
aattatcggataaactaaaaaatcgca

SEQ ID NO: 168706 - DNA, 27 bp, Artificial sequence
  SiRNA target sequence
attatcggataaactaaaaaatcgcat

SEQ ID NO: 168707 - DNA, 27 bp, Artificial sequence
  SiRNA target sequence
ttatcggataaactaaaaaatcgcatc

SEQ ID NO: 168708 - DNA, 27 bp, Artificial sequence
  SiRNA target sequence
tatcggataaactaaaaaatcgcatca

SEQ ID NO: 168709 - DNA, 27 bp, Artificial sequence
  SiRNA target sequence
atcggataaactaaaaaatcgcatcaa

SEQ ID NO: 168710 - DNA, 27 bp, Artificial sequence
  SiRNA target sequence
tcggataaactaaaaaatcgcatcaaa

SEQ ID NO: 168711 - DNA, 27 bp, Artificial sequence
  SiRNA target sequence
cggataaactaaaaaatcgcatcaaaa

SEQ ID NO: 168712 - DNA, 27 bp, Artificial sequence
  SiRNA target sequence
ggataaactaaaaaatcgcatcaaaac

SEQ ID NO: 168713 - DNA, 27 bp, Artificial sequence
  SiRNA target sequence
gataaactaaaaaatcgcatcaaaacg

SEQ ID NO: 168714 - DNA, 27 bp, Artificial sequence
  SiRNA target sequence
ataaactaaaaaatcgcatcaaaacga

SEQ ID NO: 168715 - DNA, 27 bp, Artificial sequence
  SiRNA target sequence
taaactaaaaaatcgcatcaaaacgaa

SEQ ID NO: 168716 - DNA, 27 bp, Artificial sequence
  SiRNA target sequence
aaactaaaaaatcgcatcaaaacgaat

SEQ ID NO: 168717 - DNA, 27 bp, Artificial sequence
  SiRNA target sequence
aactaaaaaatcgcatcaaaacgaatg

SEQ ID NO: 168718 - DNA, 27 bp, Artificial sequence
  SiRNA target sequence
actaaaaaatcgcatcaaaacgaatgt

SEQ ID NO: 168719 - DNA, 27 bp, Artificial sequence
  SiRNA target sequence
ctaaaaaatcgcatcaaaacgaatgta

SEQ ID NO: 168720 - DNA, 27 bp, Artificial sequence
  SiRNA target sequence
taaaaaatcgcatcaaaacgaatgtag

SEQ ID NO: 168721 - DNA, 27 bp, Artificial sequence
  SiRNA target sequence
aaaaaatcgcatcaaaacgaatgtaga

SEQ ID NO: 168722 - DNA, 27 bp, Artificial sequence
  SiRNA target sequence
aaaaatcgcatcaaaacgaatgtagaa

SEQ ID NO: 168723 - DNA, 27 bp, Artificial sequence
  SiRNA target sequence
aaaatcgcatcaaaacgaatgtagaaa

SEQ ID NO: 168724 - DNA, 27 bp, Artificial sequence
  SiRNA target sequence
aaatcgcatcaaaacgaatgtagaaaa

SEQ ID NO: 168725 - DNA, 27 bp, Artificial sequence
  SiRNA target sequence
aatcgcatcaaaacgaatgtagaaaat

SEQ ID NO: 168726 - DNA, 27 bp, Artificial sequence
  SiRNA target sequence
atcgcatcaaaacgaatgtagaaaatg

SEQ ID NO: 168727 - DNA, 27 bp, Artificial sequence
  SiRNA target sequence
tcgcatcaaaacgaatgtagaaaatgt

SEQ ID NO: 168728 - DNA, 27 bp, Artificial sequence
  SiRNA target sequence
cgcatcaaaacgaatgtagaaaatgtt

SEQ ID NO: 168729 - DNA, 27 bp, Artificial sequence
  SiRNA target sequence
gcatcaaaacgaatgtagaaaatgttg

SEQ ID NO: 168730 - DNA, 27 bp, Artificial sequence
  SiRNA target sequence
catcaaaacgaatgtagaaaatgttgt

SEQ ID NO: 168731 - DNA, 27 bp, Artificial sequence
  SiRNA target sequence
atcaaaacgaatgtagaaaatgttgtt

SEQ ID NO: 168732 - DNA, 27 bp, Artificial sequence
  SiRNA target sequence
tcaaaacgaatgtagaaaatgttgtta

SEQ ID NO: 168733 - DNA, 27 bp, Artificial sequence
  SiRNA target sequence
caaaacgaatgtagaaaatgttgttat

SEQ ID NO: 168734 - DNA, 27 bp, Artificial sequence
  SiRNA target sequence
aaaacgaatgtagaaaatgttgttatt

SEQ ID NO: 168735 - DNA, 27 bp, Artificial sequence
  SiRNA target sequence
aaacgaatgtagaaaatgttgttatta

SEQ ID NO: 168736 - DNA, 27 bp, Artificial sequence
  SiRNA target sequence
aacgaatgtagaaaatgttgttattaa

SEQ ID NO: 168737 - DNA, 27 bp, Artificial sequence
  SiRNA target sequence
acgaatgtagaaaatgttgttattaac

SEQ ID NO: 168738 - DNA, 27 bp, Artificial sequence
  SiRNA target sequence
cgaatgtagaaaatgttgttattaacg

SEQ ID NO: 168739 - DNA, 27 bp, Artificial sequence
  SiRNA target sequence
gaatgtagaaaatgttgttattaacgg

SEQ ID NO: 168740 - DNA, 27 bp, Artificial sequence
  SiRNA target sequence
aatgtagaaaatgttgttattaacggc

SEQ ID NO: 168741 - DNA, 27 bp, Artificial sequence
  SiRNA target sequence
atgtagaaaatgttgttattaacggcg

SEQ ID NO: 168742 - DNA, 27 bp, Artificial sequence
  SiRNA target sequence
tgtagaaaatgttgttattaacggcga

SEQ ID NO: 168743 - DNA, 27 bp, Artificial sequence
  SiRNA target sequence
gtagaaaatgttgttattaacggcgat

SEQ ID NO: 168744 - DNA, 27 bp, Artificial sequence
  SiRNA target sequence
tagaaaatgttgttattaacggcgatg

SEQ ID NO: 168745 - DNA, 27 bp, Artificial sequence
  SiRNA target sequence
agaaaatgttgttattaacggcgatga

SEQ ID NO: 168746 - DNA, 27 bp, Artificial sequence
  SiRNA target sequence
gaaaatgttgttattaacggcgatgat

SEQ ID NO: 168747 - DNA, 27 bp, Artificial sequence
  SiRNA target sequence
aaaatgttgttattaacggcgatgatt

SEQ ID NO: 168748 - DNA, 27 bp, Artificial sequence
  SiRNA target sequence
aaatgttgttattaacggcgatgattc

SEQ ID NO: 168749 - DNA, 27 bp, Artificial sequence
  SiRNA target sequence
aatgttgttattaacggcgatgattct

SEQ ID NO: 168750 - DNA, 27 bp, Artificial sequence
  SiRNA target sequence
atgttgttattaacggcgatgattcta

SEQ ID NO: 168751 - DNA, 27 bp, Artificial sequence
  SiRNA target sequence
tgttgttattaacggcgatgattctaa

SEQ ID NO: 168752 - DNA, 27 bp, Artificial sequence
  SiRNA target sequence
gttgttattaacggcgatgattctaag

SEQ ID NO: 168753 - DNA, 27 bp, Artificial sequence
  SiRNA target sequence
ttgttattaacggcgatgattctaaga

SEQ ID NO: 168754 - DNA, 27 bp, Artificial sequence
  SiRNA target sequence
tgttattaacggcgatgattctaagac

SEQ ID NO: 168755 - DNA, 27 bp, Artificial sequence
  SiRNA target sequence
gttattaacggcgatgattctaagact

SEQ ID NO: 168756 - DNA, 27 bp, Artificial sequence
  SiRNA target sequence
ttattaacggcgatgattctaagactt

SEQ ID NO: 168757 - DNA, 27 bp, Artificial sequence
  SiRNA target sequence
tattaacggcgatgattctaagacttt

SEQ ID NO: 168758 - DNA, 27 bp, Artificial sequence
  SiRNA target sequence
attaacggcgatgattctaagactttt

SEQ ID NO: 168759 - DNA, 27 bp, Artificial sequence
  SiRNA target sequence
ttaacggcgatgattctaagacttttc

SEQ ID NO: 168760 - DNA, 27 bp, Artificial sequence
  SiRNA target sequence
taacggcgatgattctaagacttttcc

SEQ ID NO: 168761 - DNA, 27 bp, Artificial sequence
  SiRNA target sequence
aacggcgatgattctaagacttttcct

SEQ ID NO: 168762 - DNA, 27 bp, Artificial sequence
  SiRNA target sequence
acggcgatgattctaagacttttcctg

SEQ ID NO: 168763 - DNA, 27 bp, Artificial sequence
  SiRNA target sequence
cggcgatgattctaagacttttcctgg

SEQ ID NO: 168764 - DNA, 27 bp, Artificial sequence
  SiRNA target sequence
ggcgatgattctaagacttttcctggc

SEQ ID NO: 168765 - DNA, 27 bp, Artificial sequence
  SiRNA target sequence
gcgatgattctaagacttttcctggct

SEQ ID NO: 168766 - DNA, 27 bp, Artificial sequence
  SiRNA target sequence
cgatgattctaagacttttcctggctg

SEQ ID NO: 168767 - DNA, 27 bp, Artificial sequence
  SiRNA target sequence
gatgattctaagacttttcctggctgt

SEQ ID NO: 168768 - DNA, 27 bp, Artificial sequence
  SiRNA target sequence
atgattctaagacttttcctggctgtc

SEQ ID NO: 168769 - DNA, 27 bp, Artificial sequence
  SiRNA target sequence
tgattctaagacttttcctggctgtct

SEQ ID NO: 168770 - DNA, 27 bp, Artificial sequence
  SiRNA target sequence
gattctaagacttttcctggctgtctc

SEQ ID NO: 168771 - DNA, 27 bp, Artificial sequence
  SiRNA target sequence
attctaagacttttcctggctgtctca

SEQ ID NO: 168772 - DNA, 27 bp, Artificial sequence
  SiRNA target sequence
ttctaagacttttcctggctgtctcaa

SEQ ID NO: 168773 - DNA, 27 bp, Artificial sequence
  SiRNA target sequence
tctaagacttttcctggctgtctcaat

SEQ ID NO: 168774 - DNA, 27 bp, Artificial sequence
  SiRNA target sequence
ctaagacttttcctggctgtctcaata

SEQ ID NO: 168775 - DNA, 27 bp, Artificial sequence
  SiRNA target sequence
taagacttttcctggctgtctcaatat

SEQ ID NO: 168776 - DNA, 27 bp, Artificial sequence
  SiRNA target sequence
aagacttttcctggctgtctcaatatt

SEQ ID NO: 168777 - DNA, 27 bp, Artificial sequence
  SiRNA target sequence
agacttttcctggctgtctcaatattt

SEQ ID NO: 168778 - DNA, 27 bp, Artificial sequence
  SiRNA target sequence
gacttttcctggctgtctcaatatttc

SEQ ID NO: 168779 - DNA, 27 bp, Artificial sequence
  SiRNA target sequence
acttttcctggctgtctcaatatttct

SEQ ID NO: 168780 - DNA, 27 bp, Artificial sequence
  SiRNA target sequence
cttttcctggctgtctcaatatttctt

SEQ ID NO: 168781 - DNA, 27 bp, Artificial sequence
  SiRNA target sequence
ttttcctggctgtctcaatatttcttt

SEQ ID NO: 168782 - DNA, 27 bp, Artificial sequence
  SiRNA target sequence
tttcctggctgtctcaatatttctttt

SEQ ID NO: 168783 - DNA, 27 bp, Artificial sequence
  SiRNA target sequence
ttcctggctgtctcaatatttcttttc

SEQ ID NO: 168784 - DNA, 27 bp, Artificial sequence
  SiRNA target sequence
tcctggctgtctcaatatttcttttcc

SEQ ID NO: 168785 - DNA, 27 bp, Artificial sequence
  SiRNA target sequence
cctggctgtctcaatatttcttttcca

SEQ ID NO: 168786 - DNA, 27 bp, Artificial sequence
  SiRNA target sequence
ctggctgtctcaatatttcttttccat

SEQ ID NO: 168787 - DNA, 27 bp, Artificial sequence
  SiRNA target sequence
tggctgtctcaatatttcttttccata

SEQ ID NO: 168788 - DNA, 27 bp, Artificial sequence
  SiRNA target sequence
ggctgtctcaatatttcttttccatat

SEQ ID NO: 168789 - DNA, 27 bp, Artificial sequence
  SiRNA target sequence
gctgtctcaatatttcttttccatatg

SEQ ID NO: 168790 - DNA, 27 bp, Artificial sequence
  SiRNA target sequence
ctgtctcaatatttcttttccatatgt

SEQ ID NO: 168791 - DNA, 27 bp, Artificial sequence
  SiRNA target sequence
tgtctcaatatttcttttccatatgta

SEQ ID NO: 168792 - DNA, 27 bp, Artificial sequence
  SiRNA target sequence
gtctcaatatttcttttccatatgtag

SEQ ID NO: 168793 - DNA, 27 bp, Artificial sequence
  SiRNA target sequence
tctcaatatttcttttccatatgtaga

SEQ ID NO: 168794 - DNA, 27 bp, Artificial sequence
  SiRNA target sequence
ctcaatatttcttttccatatgtagaa

SEQ ID NO: 168795 - DNA, 27 bp, Artificial sequence
  SiRNA target sequence
tcaatatttcttttccatatgtagaag

SEQ ID NO: 168796 - DNA, 27 bp, Artificial sequence
  SiRNA target sequence
caatatttcttttccatatgtagaagg

SEQ ID NO: 168797 - DNA, 27 bp, Artificial sequence
  SiRNA target sequence
aatatttcttttccatatgtagaaggt

SEQ ID NO: 168798 - DNA, 27 bp, Artificial sequence
  SiRNA target sequence
atatttcttttccatatgtagaaggtg

SEQ ID NO: 168799 - DNA, 27 bp, Artificial sequence
  SiRNA target sequence
tatttcttttccatatgtagaaggtga

SEQ ID NO: 168800 - DNA, 27 bp, Artificial sequence
  SiRNA target sequence
atttcttttccatatgtagaaggtgaa

SEQ ID NO: 168801 - DNA, 27 bp, Artificial sequence
  SiRNA target sequence
tttcttttccatatgtagaaggtgaag

SEQ ID NO: 168802 - DNA, 27 bp, Artificial sequence
  SiRNA target sequence
ttcttttccatatgtagaaggtgaagg

SEQ ID NO: 168803 - DNA, 27 bp, Artificial sequence
  SiRNA target sequence
tcttttccatatgtagaaggtgaaggg

SEQ ID NO: 168804 - DNA, 27 bp, Artificial sequence
  SiRNA target sequence
cttttccatatgtagaaggtgaagggc

SEQ ID NO: 168805 - DNA, 27 bp, Artificial sequence
  SiRNA target sequence
ttttccatatgtagaaggtgaagggct

SEQ ID NO: 168806 - DNA, 27 bp, Artificial sequence
  SiRNA target sequence
tttccatatgtagaaggtgaagggctt

SEQ ID NO: 168807 - DNA, 27 bp, Artificial sequence
  SiRNA target sequence
ttccatatgtagaaggtgaagggctta

SEQ ID NO: 168808 - DNA, 27 bp, Artificial sequence
  SiRNA target sequence
tccatatgtagaaggtgaagggcttat

SEQ ID NO: 168809 - DNA, 27 bp, Artificial sequence
  SiRNA target sequence
ccatatgtagaaggtgaagggcttatg

SEQ ID NO: 168810 - DNA, 27 bp, Artificial sequence
  SiRNA target sequence
catatgtagaaggtgaagggcttatga

SEQ ID NO: 168811 - DNA, 27 bp, Artificial sequence
  SiRNA target sequence
atatgtagaaggtgaagggcttatgat

SEQ ID NO: 168812 - DNA, 27 bp, Artificial sequence
  SiRNA target sequence
tatgtagaaggtgaagggcttatgatg

SEQ ID NO: 168813 - DNA, 27 bp, Artificial sequence
  SiRNA target sequence
atgtagaaggtgaagggcttatgatga

SEQ ID NO: 168814 - DNA, 27 bp, Artificial sequence
  SiRNA target sequence
tgtagaaggtgaagggcttatgatgaa

SEQ ID NO: 168815 - DNA, 27 bp, Artificial sequence
  SiRNA target sequence
gtagaaggtgaagggcttatgatgaat

SEQ ID NO: 168816 - DNA, 27 bp, Artificial sequence
  SiRNA target sequence
tagaaggtgaagggcttatgatgaata

SEQ ID NO: 168817 - DNA, 27 bp, Artificial sequence
  SiRNA target sequence
agaaggtgaagggcttatgatgaatat

SEQ ID NO: 168818 - DNA, 27 bp, Artificial sequence
  SiRNA target sequence
gaaggtgaagggcttatgatgaatatt

SEQ ID NO: 168819 - DNA, 27 bp, Artificial sequence
  SiRNA target sequence
aaggtgaagggcttatgatgaatatta

SEQ ID NO: 168820 - DNA, 27 bp, Artificial sequence
  SiRNA target sequence
aggtgaagggcttatgatgaatattaa

SEQ ID NO: 168821 - DNA, 27 bp, Artificial sequence
  SiRNA target sequence
ggtgaagggcttatgatgaatattaag

SEQ ID NO: 168822 - DNA, 27 bp, Artificial sequence
  SiRNA target sequence
gtgaagggcttatgatgaatattaagg

SEQ ID NO: 168823 - DNA, 27 bp, Artificial sequence
  SiRNA target sequence
tgaagggcttatgatgaatattaagga

SEQ ID NO: 168824 - DNA, 27 bp, Artificial sequence
  SiRNA target sequence
gaagggcttatgatgaatattaaggat

SEQ ID NO: 168825 - DNA, 27 bp, Artificial sequence
  SiRNA target sequence
aagggcttatgatgaatattaaggata

SEQ ID NO: 168826 - DNA, 27 bp, Artificial sequence
  SiRNA target sequence
agggcttatgatgaatattaaggatat

SEQ ID NO: 168827 - DNA, 27 bp, Artificial sequence
  SiRNA target sequence
gggcttatgatgaatattaaggatatt

SEQ ID NO: 168828 - DNA, 27 bp, Artificial sequence
  SiRNA target sequence
ggcttatgatgaatattaaggatattg

SEQ ID NO: 168829 - DNA, 27 bp, Artificial sequence
  SiRNA target sequence
gcttatgatgaatattaaggatattgc

SEQ ID NO: 168830 - DNA, 27 bp, Artificial sequence
  SiRNA target sequence
cttatgatgaatattaaggatattgct

SEQ ID NO: 168831 - DNA, 27 bp, Artificial sequence
  SiRNA target sequence
ttatgatgaatattaaggatattgctg

SEQ ID NO: 168832 - DNA, 27 bp, Artificial sequence
  SiRNA target sequence
tatgatgaatattaaggatattgctgt

SEQ ID NO: 168833 - DNA, 27 bp, Artificial sequence
  SiRNA target sequence
atgatgaatattaaggatattgctgtt

SEQ ID NO: 168834 - DNA, 27 bp, Artificial sequence
  SiRNA target sequence
tgatgaatattaaggatattgctgtta

SEQ ID NO: 168835 - DNA, 27 bp, Artificial sequence
  SiRNA target sequence
gatgaatattaaggatattgctgttag

SEQ ID NO: 168836 - DNA, 27 bp, Artificial sequence
  SiRNA target sequence
atgaatattaaggatattgctgttagt

SEQ ID NO: 168837 - DNA, 27 bp, Artificial sequence
  SiRNA target sequence
tgaatattaaggatattgctgttagta

SEQ ID NO: 168838 - DNA, 27 bp, Artificial sequence
  SiRNA target sequence
gaatattaaggatattgctgttagtag

SEQ ID NO: 168839 - DNA, 27 bp, Artificial sequence
  SiRNA target sequence
aatattaaggatattgctgttagtagt

SEQ ID NO: 168840 - DNA, 27 bp, Artificial sequence
  SiRNA target sequence
atattaaggatattgctgttagtagtg

SEQ ID NO: 168841 - DNA, 27 bp, Artificial sequence
  SiRNA target sequence
tattaaggatattgctgttagtagtgg

SEQ ID NO: 168842 - DNA, 27 bp, Artificial sequence
  SiRNA target sequence
attaaggatattgctgttagtagtgga

SEQ ID NO: 168843 - DNA, 27 bp, Artificial sequence
  SiRNA target sequence
ttaaggatattgctgttagtagtggaa

SEQ ID NO: 168844 - DNA, 27 bp, Artificial sequence
  SiRNA target sequence
taaggatattgctgttagtagtggaag

SEQ ID NO: 168845 - DNA, 27 bp, Artificial sequence
  SiRNA target sequence
aaggatattgctgttagtagtggaagt

SEQ ID NO: 168846 - DNA, 27 bp, Artificial sequence
  SiRNA target sequence
aggatattgctgttagtagtggaagtg

SEQ ID NO: 168847 - DNA, 27 bp, Artificial sequence
  SiRNA target sequence
ggatattgctgttagtagtggaagtgc

SEQ ID NO: 168848 - DNA, 27 bp, Artificial sequence
  SiRNA target sequence
gatattgctgttagtagtggaagtgct

SEQ ID NO: 168849 - DNA, 27 bp, Artificial sequence
  SiRNA target sequence
atattgctgttagtagtggaagtgctt

SEQ ID NO: 168850 - DNA, 27 bp, Artificial sequence
  SiRNA target sequence
tattgctgttagtagtggaagtgcttg

SEQ ID NO: 168851 - DNA, 27 bp, Artificial sequence
  SiRNA target sequence
attgctgttagtagtggaagtgcttgc

SEQ ID NO: 168852 - DNA, 27 bp, Artificial sequence
  SiRNA target sequence
ttgctgttagtagtggaagtgcttgca

SEQ ID NO: 168853 - DNA, 27 bp, Artificial sequence
  SiRNA target sequence
tgctgttagtagtggaagtgcttgcac

SEQ ID NO: 168854 - DNA, 27 bp, Artificial sequence
  SiRNA target sequence
gctgttagtagtggaagtgcttgcact

SEQ ID NO: 168855 - DNA, 27 bp, Artificial sequence
  SiRNA target sequence
ctgttagtagtggaagtgcttgcactt

SEQ ID NO: 168856 - DNA, 27 bp, Artificial sequence
  SiRNA target sequence
tgttagtagtggaagtgcttgcacttc

SEQ ID NO: 168857 - DNA, 27 bp, Artificial sequence
  SiRNA target sequence
gttagtagtggaagtgcttgcacttca

SEQ ID NO: 168858 - DNA, 27 bp, Artificial sequence
  SiRNA target sequence
ttagtagtggaagtgcttgcacttcat

SEQ ID NO: 168859 - DNA, 27 bp, Artificial sequence
  SiRNA target sequence
tagtagtggaagtgcttgcacttcatc

SEQ ID NO: 168860 - DNA, 27 bp, Artificial sequence
  SiRNA target sequence
agtagtggaagtgcttgcacttcatca

SEQ ID NO: 168861 - DNA, 27 bp, Artificial sequence
  SiRNA target sequence
gtagtggaagtgcttgcacttcatcat

SEQ ID NO: 168862 - DNA, 27 bp, Artificial sequence
  SiRNA target sequence
tagtggaagtgcttgcacttcatcatc

SEQ ID NO: 168863 - DNA, 27 bp, Artificial sequence
  SiRNA target sequence
agtggaagtgcttgcacttcatcatct

SEQ ID NO: 168864 - DNA, 27 bp, Artificial sequence
  SiRNA target sequence
gtggaagtgcttgcacttcatcatctt

SEQ ID NO: 168865 - DNA, 27 bp, Artificial sequence
  SiRNA target sequence
tggaagtgcttgcacttcatcatcttt

SEQ ID NO: 168866 - DNA, 27 bp, Artificial sequence
  SiRNA target sequence
ggaagtgcttgcacttcatcatcttta

SEQ ID NO: 168867 - DNA, 27 bp, Artificial sequence
  SiRNA target sequence
gaagtgcttgcacttcatcatctttag

SEQ ID NO: 168868 - DNA, 27 bp, Artificial sequence
  SiRNA target sequence
aagtgcttgcacttcatcatctttaga

SEQ ID NO: 168869 - DNA, 27 bp, Artificial sequence
  SiRNA target sequence
agtgcttgcacttcatcatctttagaa

SEQ ID NO: 168870 - DNA, 27 bp, Artificial sequence
  SiRNA target sequence
gtgcttgcacttcatcatctttagaac

SEQ ID NO: 168871 - DNA, 27 bp, Artificial sequence
  SiRNA target sequence
tgcttgcacttcatcatctttagaacc

SEQ ID NO: 168872 - DNA, 27 bp, Artificial sequence
  SiRNA target sequence
gcttgcacttcatcatctttagaaccc

SEQ ID NO: 168873 - DNA, 27 bp, Artificial sequence
  SiRNA target sequence
cttgcacttcatcatctttagaaccct

SEQ ID NO: 168874 - DNA, 27 bp, Artificial sequence
  SiRNA target sequence
ttgcacttcatcatctttagaaccctc

SEQ ID NO: 168875 - DNA, 27 bp, Artificial sequence
  SiRNA target sequence
tgcacttcatcatctttagaaccctct

SEQ ID NO: 168876 - DNA, 27 bp, Artificial sequence
  SiRNA target sequence
gcacttcatcatctttagaaccctctt

SEQ ID NO: 168877 - DNA, 27 bp, Artificial sequence
  SiRNA target sequence
cacttcatcatctttagaaccctctta

SEQ ID NO: 168878 - DNA, 27 bp, Artificial sequence
  SiRNA target sequence
acttcatcatctttagaaccctcttat

SEQ ID NO: 168879 - DNA, 27 bp, Artificial sequence
  SiRNA target sequence
cttcatcatctttagaaccctcttatg

SEQ ID NO: 168880 - DNA, 27 bp, Artificial sequence
  SiRNA target sequence
ttcatcatctttagaaccctcttatgt

SEQ ID NO: 168881 - DNA, 27 bp, Artificial sequence
  SiRNA target sequence
tcatcatctttagaaccctcttatgtt

SEQ ID NO: 168882 - DNA, 27 bp, Artificial sequence
  SiRNA target sequence
catcatctttagaaccctcttatgttt

SEQ ID NO: 168883 - DNA, 27 bp, Artificial sequence
  SiRNA target sequence
atcatctttagaaccctcttatgtttt

SEQ ID NO: 168884 - DNA, 27 bp, Artificial sequence
  SiRNA target sequence
tcatctttagaaccctcttatgttttg

SEQ ID NO: 168885 - DNA, 27 bp, Artificial sequence
  SiRNA target sequence
catctttagaaccctcttatgttttgc

SEQ ID NO: 168886 - DNA, 27 bp, Artificial sequence
  SiRNA target sequence
atctttagaaccctcttatgttttgcg

SEQ ID NO: 168887 - DNA, 27 bp, Artificial sequence
  SiRNA target sequence
tctttagaaccctcttatgttttgcga

SEQ ID NO: 168888 - DNA, 27 bp, Artificial sequence
  SiRNA target sequence
ctttagaaccctcttatgttttgcgag

SEQ ID NO: 168889 - DNA, 27 bp, Artificial sequence
  SiRNA target sequence
tttagaaccctcttatgttttgcgagc

SEQ ID NO: 168890 - DNA, 27 bp, Artificial sequence
  SiRNA target sequence
ttagaaccctcttatgttttgcgagct

SEQ ID NO: 168891 - DNA, 27 bp, Artificial sequence
  SiRNA target sequence
tagaaccctcttatgttttgcgagctt

SEQ ID NO: 168892 - DNA, 27 bp, Artificial sequence
  SiRNA target sequence
agaaccctcttatgttttgcgagcttt

SEQ ID NO: 168893 - DNA, 27 bp, Artificial sequence
  SiRNA target sequence
gaaccctcttatgttttgcgagcttta

SEQ ID NO: 168894 - DNA, 27 bp, Artificial sequence
  SiRNA target sequence
aaccctcttatgttttgcgagctttag

SEQ ID NO: 168895 - DNA, 27 bp, Artificial sequence
  SiRNA target sequence
accctcttatgttttgcgagctttagg

SEQ ID NO: 168896 - DNA, 27 bp, Artificial sequence
  SiRNA target sequence
ccctcttatgttttgcgagctttaggc

SEQ ID NO: 168897 - DNA, 27 bp, Artificial sequence
  SiRNA target sequence
cctcttatgttttgcgagctttaggca

SEQ ID NO: 168898 - DNA, 27 bp, Artificial sequence
  SiRNA target sequence
ctcttatgttttgcgagctttaggcaa

SEQ ID NO: 168899 - DNA, 27 bp, Artificial sequence
  SiRNA target sequence
tcttatgttttgcgagctttaggcaaa

SEQ ID NO: 168900 - DNA, 27 bp, Artificial sequence
  SiRNA target sequence
cttatgttttgcgagctttaggcaaaa

SEQ ID NO: 168901 - DNA, 27 bp, Artificial sequence
  SiRNA target sequence
ttatgttttgcgagctttaggcaaaaa

SEQ ID NO: 168902 - DNA, 27 bp, Artificial sequence
  SiRNA target sequence
tatgttttgcgagctttaggcaaaaat

SEQ ID NO: 168903 - DNA, 27 bp, Artificial sequence
  SiRNA target sequence
atgttttgcgagctttaggcaaaaatg

SEQ ID NO: 168904 - DNA, 27 bp, Artificial sequence
  SiRNA target sequence
tgttttgcgagctttaggcaaaaatga

SEQ ID NO: 168905 - DNA, 27 bp, Artificial sequence
  SiRNA target sequence
gttttgcgagctttaggcaaaaatgat

SEQ ID NO: 168906 - DNA, 27 bp, Artificial sequence
  SiRNA target sequence
ttttgcgagctttaggcaaaaatgatg

SEQ ID NO: 168907 - DNA, 27 bp, Artificial sequence
  SiRNA target sequence
tttgcgagctttaggcaaaaatgatga

SEQ ID NO: 168908 - DNA, 27 bp, Artificial sequence
  SiRNA target sequence
ttgcgagctttaggcaaaaatgatgat

SEQ ID NO: 168909 - DNA, 27 bp, Artificial sequence
  SiRNA target sequence
tgcgagctttaggcaaaaatgatgatc

SEQ ID NO: 168910 - DNA, 27 bp, Artificial sequence
  SiRNA target sequence
gcgagctttaggcaaaaatgatgatct

SEQ ID NO: 168911 - DNA, 27 bp, Artificial sequence
  SiRNA target sequence
cgagctttaggcaaaaatgatgatctt

SEQ ID NO: 168912 - DNA, 27 bp, Artificial sequence
  SiRNA target sequence
gagctttaggcaaaaatgatgatcttg

SEQ ID NO: 168913 - DNA, 27 bp, Artificial sequence
  SiRNA target sequence
agctttaggcaaaaatgatgatcttgc

SEQ ID NO: 168914 - DNA, 27 bp, Artificial sequence
  SiRNA target sequence
gctttaggcaaaaatgatgatcttgcg

SEQ ID NO: 168915 - DNA, 27 bp, Artificial sequence
  SiRNA target sequence
ctttaggcaaaaatgatgatcttgcgc

SEQ ID NO: 168916 - DNA, 27 bp, Artificial sequence
  SiRNA target sequence
tttaggcaaaaatgatgatcttgcgca

SEQ ID NO: 168917 - DNA, 27 bp, Artificial sequence
  SiRNA target sequence
ttaggcaaaaatgatgatcttgcgcat

SEQ ID NO: 168918 - DNA, 27 bp, Artificial sequence
  SiRNA target sequence
taggcaaaaatgatgatcttgcgcatt

SEQ ID NO: 168919 - DNA, 27 bp, Artificial sequence
  SiRNA target sequence
aggcaaaaatgatgatcttgcgcattc

SEQ ID NO: 168920 - DNA, 27 bp, Artificial sequence
  SiRNA target sequence
ggcaaaaatgatgatcttgcgcattct

SEQ ID NO: 168921 - DNA, 27 bp, Artificial sequence
  SiRNA target sequence
gcaaaaatgatgatcttgcgcattctt

SEQ ID NO: 168922 - DNA, 27 bp, Artificial sequence
  SiRNA target sequence
caaaaatgatgatcttgcgcattcttc

SEQ ID NO: 168923 - DNA, 27 bp, Artificial sequence
  SiRNA target sequence
aaaaatgatgatcttgcgcattcttct

SEQ ID NO: 168924 - DNA, 27 bp, Artificial sequence
  SiRNA target sequence
aaaatgatgatcttgcgcattcttcta

SEQ ID NO: 168925 - DNA, 27 bp, Artificial sequence
  SiRNA target sequence
aaatgatgatcttgcgcattcttctat

SEQ ID NO: 168926 - DNA, 27 bp, Artificial sequence
  SiRNA target sequence
aatgatgatcttgcgcattcttctata

SEQ ID NO: 168927 - DNA, 27 bp, Artificial sequence
  SiRNA target sequence
atgatgatcttgcgcattcttctataa

SEQ ID NO: 168928 - DNA, 27 bp, Artificial sequence
  SiRNA target sequence
tgatgatcttgcgcattcttctataag

SEQ ID NO: 168929 - DNA, 27 bp, Artificial sequence
  SiRNA target sequence
gatgatcttgcgcattcttctataaga

SEQ ID NO: 168930 - DNA, 27 bp, Artificial sequence
  SiRNA target sequence
atgatcttgcgcattcttctataagat

SEQ ID NO: 168931 - DNA, 27 bp, Artificial sequence
  SiRNA target sequence
tgatcttgcgcattcttctataagatt

SEQ ID NO: 168932 - DNA, 27 bp, Artificial sequence
  SiRNA target sequence
gatcttgcgcattcttctataagattt

SEQ ID NO: 168933 - DNA, 27 bp, Artificial sequence
  SiRNA target sequence
atcttgcgcattcttctataagatttg

SEQ ID NO: 168934 - DNA, 27 bp, Artificial sequence
  SiRNA target sequence
tcttgcgcattcttctataagatttgg

SEQ ID NO: 168935 - DNA, 27 bp, Artificial sequence
  SiRNA target sequence
cttgcgcattcttctataagatttgga

SEQ ID NO: 168936 - DNA, 27 bp, Artificial sequence
  SiRNA target sequence
ttgcgcattcttctataagatttggaa

SEQ ID NO: 168937 - DNA, 27 bp, Artificial sequence
  SiRNA target sequence
tgcgcattcttctataagatttggaat

SEQ ID NO: 168938 - DNA, 27 bp, Artificial sequence
  SiRNA target sequence
gcgcattcttctataagatttggaata

SEQ ID NO: 168939 - DNA, 27 bp, Artificial sequence
  SiRNA target sequence
cgcattcttctataagatttggaataa

SEQ ID NO: 168940 - DNA, 27 bp, Artificial sequence
  SiRNA target sequence
gcattcttctataagatttggaataaa

SEQ ID NO: 168941 - DNA, 27 bp, Artificial sequence
  SiRNA target sequence
cattcttctataagatttggaataaat

SEQ ID NO: 168942 - DNA, 27 bp, Artificial sequence
  SiRNA target sequence
attcttctataagatttggaataaata

SEQ ID NO: 168943 - DNA, 27 bp, Artificial sequence
  SiRNA target sequence
ttcttctataagatttggaataaataa

SEQ ID NO: 168944 - DNA, 27 bp, Artificial sequence
  SiRNA target sequence
tcttctataagatttggaataaataag

SEQ ID NO: 168945 - DNA, 27 bp, Artificial sequence
  SiRNA target sequence
cttctataagatttggaataaataagt

SEQ ID NO: 168946 - DNA, 27 bp, Artificial sequence
  SiRNA target sequence
ttctataagatttggaataaataagtt

SEQ ID NO: 168947 - DNA, 27 bp, Artificial sequence
  SiRNA target sequence
tctataagatttggaataaataagttt

SEQ ID NO: 168948 - DNA, 27 bp, Artificial sequence
  SiRNA target sequence
ctataagatttggaataaataagttta

SEQ ID NO: 168949 - DNA, 27 bp, Artificial sequence
  SiRNA target sequence
tataagatttggaataaataagtttac

SEQ ID NO: 168950 - DNA, 27 bp, Artificial sequence
  SiRNA target sequence
ataagatttggaataaataagtttaca

SEQ ID NO: 168951 - DNA, 27 bp, Artificial sequence
  SiRNA target sequence
taagatttggaataaataagtttacaa

SEQ ID NO: 168952 - DNA, 27 bp, Artificial sequence
  SiRNA target sequence
aagatttggaataaataagtttacaac

SEQ ID NO: 168953 - DNA, 27 bp, Artificial sequence
  SiRNA target sequence
agatttggaataaataagtttacaact

SEQ ID NO: 168954 - DNA, 27 bp, Artificial sequence
  SiRNA target sequence
gatttggaataaataagtttacaactg

SEQ ID NO: 168955 - DNA, 27 bp, Artificial sequence
  SiRNA target sequence
atttggaataaataagtttacaactga

SEQ ID NO: 168956 - DNA, 27 bp, Artificial sequence
  SiRNA target sequence
tttggaataaataagtttacaactgaa

SEQ ID NO: 168957 - DNA, 27 bp, Artificial sequence
  SiRNA target sequence
ttggaataaataagtttacaactgaag

SEQ ID NO: 168958 - DNA, 27 bp, Artificial sequence
  SiRNA target sequence
tggaataaataagtttacaactgaaga

SEQ ID NO: 168959 - DNA, 27 bp, Artificial sequence
  SiRNA target sequence
ggaataaataagtttacaactgaagaa

SEQ ID NO: 168960 - DNA, 27 bp, Artificial sequence
  SiRNA target sequence
gaataaataagtttacaactgaagaag

SEQ ID NO: 168961 - DNA, 27 bp, Artificial sequence
  SiRNA target sequence
aataaataagtttacaactgaagaaga

SEQ ID NO: 168962 - DNA, 27 bp, Artificial sequence
  SiRNA target sequence
ataaataagtttacaactgaagaagaa

SEQ ID NO: 168963 - DNA, 27 bp, Artificial sequence
  SiRNA target sequence
taaataagtttacaactgaagaagaaa

SEQ ID NO: 168964 - DNA, 27 bp, Artificial sequence
  SiRNA target sequence
aaataagtttacaactgaagaagaaat

SEQ ID NO: 168965 - DNA, 27 bp, Artificial sequence
  SiRNA target sequence
aataagtttacaactgaagaagaaatc

SEQ ID NO: 168966 - DNA, 27 bp, Artificial sequence
  SiRNA target sequence
ataagtttacaactgaagaagaaatca

SEQ ID NO: 168967 - DNA, 27 bp, Artificial sequence
  SiRNA target sequence
taagtttacaactgaagaagaaatcaa

SEQ ID NO: 168968 - DNA, 27 bp, Artificial sequence
  SiRNA target sequence
aagtttacaactgaagaagaaatcaat

SEQ ID NO: 168969 - DNA, 27 bp, Artificial sequence
  SiRNA target sequence
agtttacaactgaagaagaaatcaata

SEQ ID NO: 168970 - DNA, 27 bp, Artificial sequence
  SiRNA target sequence
gtttacaactgaagaagaaatcaataa

SEQ ID NO: 168971 - DNA, 27 bp, Artificial sequence
  SiRNA target sequence
tttacaactgaagaagaaatcaataaa

SEQ ID NO: 168972 - DNA, 27 bp, Artificial sequence
  SiRNA target sequence
ttacaactgaagaagaaatcaataaag

SEQ ID NO: 168973 - DNA, 27 bp, Artificial sequence
  SiRNA target sequence
tacaactgaagaagaaatcaataaagt

SEQ ID NO: 168974 - DNA, 27 bp, Artificial sequence
  SiRNA target sequence
acaactgaagaagaaatcaataaagta

SEQ ID NO: 168975 - DNA, 27 bp, Artificial sequence
  SiRNA target sequence
caactgaagaagaaatcaataaagtat

SEQ ID NO: 168976 - DNA, 27 bp, Artificial sequence
  SiRNA target sequence
aactgaagaagaaatcaataaagtatc

SEQ ID NO: 168977 - DNA, 27 bp, Artificial sequence
  SiRNA target sequence
actgaagaagaaatcaataaagtatct

SEQ ID NO: 168978 - DNA, 27 bp, Artificial sequence
  SiRNA target sequence
ctgaagaagaaatcaataaagtatcta

SEQ ID NO: 168979 - DNA, 27 bp, Artificial sequence
  SiRNA target sequence
tgaagaagaaatcaataaagtatctag

SEQ ID NO: 168980 - DNA, 27 bp, Artificial sequence
  SiRNA target sequence
gaagaagaaatcaataaagtatctagt

SEQ ID NO: 168981 - DNA, 27 bp, Artificial sequence
  SiRNA target sequence
aagaagaaatcaataaagtatctagtg

SEQ ID NO: 168982 - DNA, 27 bp, Artificial sequence
  SiRNA target sequence
agaagaaatcaataaagtatctagtga

SEQ ID NO: 168983 - DNA, 27 bp, Artificial sequence
  SiRNA target sequence
gaagaaatcaataaagtatctagtgat

SEQ ID NO: 168984 - DNA, 27 bp, Artificial sequence
  SiRNA target sequence
aagaaatcaataaagtatctagtgata

SEQ ID NO: 168985 - DNA, 27 bp, Artificial sequence
  SiRNA target sequence
agaaatcaataaagtatctagtgatac

SEQ ID NO: 168986 - DNA, 27 bp, Artificial sequence
  SiRNA target sequence
gaaatcaataaagtatctagtgataca

SEQ ID NO: 168987 - DNA, 27 bp, Artificial sequence
  SiRNA target sequence
aaatcaataaagtatctagtgatacaa

SEQ ID NO: 168988 - DNA, 27 bp, Artificial sequence
  SiRNA target sequence
aatcaataaagtatctagtgatacaat

SEQ ID NO: 168989 - DNA, 27 bp, Artificial sequence
  SiRNA target sequence
atcaataaagtatctagtgatacaatt

SEQ ID NO: 168990 - DNA, 27 bp, Artificial sequence
  SiRNA target sequence
tcaataaagtatctagtgatacaatta

SEQ ID NO: 168991 - DNA, 27 bp, Artificial sequence
  SiRNA target sequence
caataaagtatctagtgatacaattaa

SEQ ID NO: 168992 - DNA, 27 bp, Artificial sequence
  SiRNA target sequence
aataaagtatctagtgatacaattaaa

SEQ ID NO: 168993 - DNA, 27 bp, Artificial sequence
  SiRNA target sequence
ataaagtatctagtgatacaattaaag

SEQ ID NO: 168994 - DNA, 27 bp, Artificial sequence
  SiRNA target sequence
taaagtatctagtgatacaattaaagc

SEQ ID NO: 168995 - DNA, 27 bp, Artificial sequence
  SiRNA target sequence
aaagtatctagtgatacaattaaagct

SEQ ID NO: 168996 - DNA, 27 bp, Artificial sequence
  SiRNA target sequence
aagtatctagtgatacaattaaagctg

SEQ ID NO: 168997 - DNA, 27 bp, Artificial sequence
  SiRNA target sequence
agtatctagtgatacaattaaagctgt

SEQ ID NO: 168998 - DNA, 27 bp, Artificial sequence
  SiRNA target sequence
gtatctagtgatacaattaaagctgtt

SEQ ID NO: 168999 - DNA, 27 bp, Artificial sequence
  SiRNA target sequence
tatctagtgatacaattaaagctgtta

SEQ ID NO: 169000 - DNA, 27 bp, Artificial sequence
  SiRNA target sequence
atctagtgatacaattaaagctgttaa

SEQ ID NO: 169001 - DNA, 27 bp, Artificial sequence
  SiRNA target sequence
tctagtgatacaattaaagctgttaat

SEQ ID NO: 169002 - DNA, 27 bp, Artificial sequence
  SiRNA target sequence
ctagtgatacaattaaagctgttaata

SEQ ID NO: 169003 - DNA, 27 bp, Artificial sequence
  SiRNA target sequence
tagtgatacaattaaagctgttaataa

SEQ ID NO: 169004 - DNA, 27 bp, Artificial sequence
  SiRNA target sequence
agtgatacaattaaagctgttaataag

SEQ ID NO: 169005 - DNA, 27 bp, Artificial sequence
  SiRNA target sequence
gtgatacaattaaagctgttaataagt

SEQ ID NO: 169006 - DNA, 27 bp, Artificial sequence
  SiRNA target sequence
tgatacaattaaagctgttaataagtt

SEQ ID NO: 169007 - DNA, 27 bp, Artificial sequence
  SiRNA target sequence
gatacaattaaagctgttaataagtta

SEQ ID NO: 169008 - DNA, 27 bp, Artificial sequence
  SiRNA target sequence
atacaattaaagctgttaataagttaa

SEQ ID NO: 169009 - DNA, 27 bp, Artificial sequence
  SiRNA target sequence
tacaattaaagctgttaataagttaag

SEQ ID NO: 169010 - DNA, 27 bp, Artificial sequence
  SiRNA target sequence
acaattaaagctgttaataagttaaga

SEQ ID NO: 169011 - DNA, 27 bp, Artificial sequence
  SiRNA target sequence
caattaaagctgttaataagttaagag

SEQ ID NO: 169012 - DNA, 27 bp, Artificial sequence
  SiRNA target sequence
aattaaagctgttaataagttaagaga

SEQ ID NO: 169013 - DNA, 27 bp, Artificial sequence
  SiRNA target sequence
attaaagctgttaataagttaagagat

SEQ ID NO: 169014 - DNA, 27 bp, Artificial sequence
  SiRNA target sequence
ttaaagctgttaataagttaagagata

SEQ ID NO: 169015 - DNA, 27 bp, Artificial sequence
  SiRNA target sequence
taaagctgttaataagttaagagatat

SEQ ID NO: 169016 - DNA, 27 bp, Artificial sequence
  SiRNA target sequence
aaagctgttaataagttaagagatatg

SEQ ID NO: 169017 - DNA, 27 bp, Artificial sequence
  SiRNA target sequence
aagctgttaataagttaagagatatgt

SEQ ID NO: 169018 - DNA, 27 bp, Artificial sequence
  SiRNA target sequence
agctgttaataagttaagagatatgtc

SEQ ID NO: 169019 - DNA, 27 bp, Artificial sequence
  SiRNA target sequence
gctgttaataagttaagagatatgtct

SEQ ID NO: 169020 - DNA, 27 bp, Artificial sequence
  SiRNA target sequence
ctgttaataagttaagagatatgtctc

SEQ ID NO: 169021 - DNA, 27 bp, Artificial sequence
  SiRNA target sequence
tgttaataagttaagagatatgtctcc

SEQ ID NO: 169022 - DNA, 27 bp, Artificial sequence
  SiRNA target sequence
gttaataagttaagagatatgtctcct

SEQ ID NO: 169023 - DNA, 27 bp, Artificial sequence
  SiRNA target sequence
ttaataagttaagagatatgtctcctt

SEQ ID NO: 169024 - DNA, 27 bp, Artificial sequence
  SiRNA target sequence
taataagttaagagatatgtctccttt

SEQ ID NO: 169025 - DNA, 27 bp, Artificial sequence
  SiRNA target sequence
aataagttaagagatatgtctccttta

SEQ ID NO: 169026 - DNA, 27 bp, Artificial sequence
  SiRNA target sequence
ataagttaagagatatgtctcctttat

SEQ ID NO: 169027 - DNA, 27 bp, Artificial sequence
  SiRNA target sequence
taagttaagagatatgtctcctttata

SEQ ID NO: 169028 - DNA, 27 bp, Artificial sequence
  SiRNA target sequence
aagttaagagatatgtctcctttatat

SEQ ID NO: 169029 - DNA, 27 bp, Artificial sequence
  SiRNA target sequence
agttaagagatatgtctcctttatatg

SEQ ID NO: 169030 - DNA, 27 bp, Artificial sequence
  SiRNA target sequence
gttaagagatatgtctcctttatatga

SEQ ID NO: 169031 - DNA, 27 bp, Artificial sequence
  SiRNA target sequence
ttaagagatatgtctcctttatatgaa

SEQ ID NO: 169032 - DNA, 27 bp, Artificial sequence
  SiRNA target sequence
taagagatatgtctcctttatatgaaa

SEQ ID NO: 169033 - DNA, 27 bp, Artificial sequence
  SiRNA target sequence
aagagatatgtctcctttatatgaaat

SEQ ID NO: 169034 - DNA, 27 bp, Artificial sequence
  SiRNA target sequence
agagatatgtctcctttatatgaaatg

SEQ ID NO: 169035 - DNA, 27 bp, Artificial sequence
  SiRNA target sequence
gagatatgtctcctttatatgaaatgg

SEQ ID NO: 169036 - DNA, 27 bp, Artificial sequence
  SiRNA target sequence
agatatgtctcctttatatgaaatggt

SEQ ID NO: 169037 - DNA, 27 bp, Artificial sequence
  SiRNA target sequence
gatatgtctcctttatatgaaatggtc

SEQ ID NO: 169038 - DNA, 27 bp, Artificial sequence
  SiRNA target sequence
atatgtctcctttatatgaaatggtca

SEQ ID NO: 169039 - DNA, 27 bp, Artificial sequence
  SiRNA target sequence
tatgtctcctttatatgaaatggtcaa

SEQ ID NO: 169040 - DNA, 27 bp, Artificial sequence
  SiRNA target sequence
atgtctcctttatatgaaatggtcaaa

SEQ ID NO: 169041 - DNA, 27 bp, Artificial sequence
  SiRNA target sequence
tgtctcctttatatgaaatggtcaaag

SEQ ID NO: 169042 - DNA, 27 bp, Artificial sequence
  SiRNA target sequence
gtctcctttatatgaaatggtcaaaga

SEQ ID NO: 169043 - DNA, 27 bp, Artificial sequence
  SiRNA target sequence
tctcctttatatgaaatggtcaaagaa

SEQ ID NO: 169044 - DNA, 27 bp, Artificial sequence
  SiRNA target sequence
ctcctttatatgaaatggtcaaagaag

SEQ ID NO: 169045 - DNA, 27 bp, Artificial sequence
  SiRNA target sequence
tcctttatatgaaatggtcaaagaagg

SEQ ID NO: 169046 - DNA, 27 bp, Artificial sequence
  SiRNA target sequence
cctttatatgaaatggtcaaagaaggg

SEQ ID NO: 169047 - DNA, 27 bp, Artificial sequence
  SiRNA target sequence
ctttatatgaaatggtcaaagaaggga

SEQ ID NO: 169048 - DNA, 27 bp, Artificial sequence
  SiRNA target sequence
tttatatgaaatggtcaaagaagggat

SEQ ID NO: 169049 - DNA, 27 bp, Artificial sequence
  SiRNA target sequence
ttatatgaaatggtcaaagaagggata

SEQ ID NO: 169050 - DNA, 27 bp, Artificial sequence
  SiRNA target sequence
tatatgaaatggtcaaagaagggatag

SEQ ID NO: 169051 - DNA, 27 bp, Artificial sequence
  SiRNA target sequence
atatgaaatggtcaaagaagggataga

SEQ ID NO: 169052 - DNA, 27 bp, Artificial sequence
  SiRNA target sequence
tatgaaatggtcaaagaagggatagat

SEQ ID NO: 169053 - DNA, 27 bp, Artificial sequence
  SiRNA target sequence
atgaaatggtcaaagaagggatagatt

SEQ ID NO: 169054 - DNA, 27 bp, Artificial sequence
  SiRNA target sequence
tgaaatggtcaaagaagggatagattt

SEQ ID NO: 169055 - DNA, 27 bp, Artificial sequence
  SiRNA target sequence
gaaatggtcaaagaagggatagattta

SEQ ID NO: 169056 - DNA, 27 bp, Artificial sequence
  SiRNA target sequence
aaatggtcaaagaagggatagatttag

SEQ ID NO: 169057 - DNA, 27 bp, Artificial sequence
  SiRNA target sequence
aatggtcaaagaagggatagatttaga

SEQ ID NO: 169058 - DNA, 27 bp, Artificial sequence
  SiRNA target sequence
atggtcaaagaagggatagatttagat

SEQ ID NO: 169059 - DNA, 27 bp, Artificial sequence
  SiRNA target sequence
tggtcaaagaagggatagatttagata

SEQ ID NO: 169060 - DNA, 27 bp, Artificial sequence
  SiRNA target sequence
ggtcaaagaagggatagatttagataa

SEQ ID NO: 169061 - DNA, 27 bp, Artificial sequence
  SiRNA target sequence
gtcaaagaagggatagatttagataaa

SEQ ID NO: 169062 - DNA, 27 bp, Artificial sequence
  SiRNA target sequence
tcaaagaagggatagatttagataaaa

SEQ ID NO: 169063 - DNA, 27 bp, Artificial sequence
  SiRNA target sequence
caaagaagggatagatttagataaaat

SEQ ID NO: 169064 - DNA, 27 bp, Artificial sequence
  SiRNA target sequence
aaagaagggatagatttagataaaatt

SEQ ID NO: 169065 - DNA, 27 bp, Artificial sequence
  SiRNA target sequence
aagaagggatagatttagataaaatta

SEQ ID NO: 169066 - DNA, 27 bp, Artificial sequence
  SiRNA target sequence
agaagggatagatttagataaaattaa

SEQ ID NO: 169067 - DNA, 27 bp, Artificial sequence
  SiRNA target sequence
gaagggatagatttagataaaattaat

SEQ ID NO: 169068 - DNA, 27 bp, Artificial sequence
  SiRNA target sequence
aagggatagatttagataaaattaatt

SEQ ID NO: 169069 - DNA, 27 bp, Artificial sequence
  SiRNA target sequence
agggatagatttagataaaattaattg

SEQ ID NO: 169070 - DNA, 27 bp, Artificial sequence
  SiRNA target sequence
gggatagatttagataaaattaattgg

SEQ ID NO: 169071 - DNA, 27 bp, Artificial sequence
  SiRNA target sequence
ggatagatttagataaaattaattggt

SEQ ID NO: 169072 - DNA, 27 bp, Artificial sequence
  SiRNA target sequence
gatagatttagataaaattaattggtc

SEQ ID NO: 169073 - DNA, 27 bp, Artificial sequence
  SiRNA target sequence
atagatttagataaaattaattggtct

SEQ ID NO: 169074 - DNA, 27 bp, Artificial sequence
  SiRNA target sequence
tagatttagataaaattaattggtctg

SEQ ID NO: 169075 - DNA, 27 bp, Artificial sequence
  SiRNA target sequence
agatttagataaaattaattggtctgc

SEQ ID NO: 169076 - DNA, 27 bp, Artificial sequence
  SiRNA target sequence
gatttagataaaattaattggtctgct

SEQ ID NO: 169077 - DNA, 27 bp, Artificial sequence
  SiRNA target sequence
atttagataaaattaattggtctgctt

SEQ ID NO: 169078 - DNA, 27 bp, Artificial sequence
  SiRNA target sequence
tttagataaaattaattggtctgctta

SEQ ID NO: 169079 - DNA, 27 bp, Artificial sequence
  SiRNA target sequence
ttagataaaattaattggtctgcttaa

SEQ ID NO: 169080 - DNA, 19 bp, Artificial sequence
  SiRNA target sequence
atgaatactgaaaataaac

SEQ ID NO: 169081 - DNA, 19 bp, Artificial sequence
  SiRNA target sequence
tgaatactgaaaataaacc

SEQ ID NO: 169082 - DNA, 19 bp, Artificial sequence
  SiRNA target sequence
gaatactgaaaataaacca

SEQ ID NO: 169083 - DNA, 19 bp, Artificial sequence
  SiRNA target sequence
aatactgaaaataaaccat

SEQ ID NO: 169084 - DNA, 19 bp, Artificial sequence
  SiRNA target sequence
atactgaaaataaaccatg

SEQ ID NO: 169085 - DNA, 19 bp, Artificial sequence
  SiRNA target sequence
tactgaaaataaaccatgt

SEQ ID NO: 169086 - DNA, 19 bp, Artificial sequence
  SiRNA target sequence
actgaaaataaaccatgta

SEQ ID NO: 169087 - DNA, 19 bp, Artificial sequence
  SiRNA target sequence
ctgaaaataaaccatgtat

SEQ ID NO: 169088 - DNA, 19 bp, Artificial sequence
  SiRNA target sequence
tgaaaataaaccatgtatt

SEQ ID NO: 169089 - DNA, 19 bp, Artificial sequence
  SiRNA target sequence
gaaaataaaccatgtattt

SEQ ID NO: 169090 - DNA, 19 bp, Artificial sequence
  SiRNA target sequence
aaaataaaccatgtatttc

SEQ ID NO: 169091 - DNA, 19 bp, Artificial sequence
  SiRNA target sequence
aaataaaccatgtatttca

SEQ ID NO: 169092 - DNA, 19 bp, Artificial sequence
  SiRNA target sequence
aataaaccatgtatttcac

SEQ ID NO: 169093 - DNA, 19 bp, Artificial sequence
  SiRNA target sequence
ataaaccatgtatttcacc

SEQ ID NO: 169094 - DNA, 19 bp, Artificial sequence
  SiRNA target sequence
taaaccatgtatttcacca

SEQ ID NO: 169095 - DNA, 19 bp, Artificial sequence
  SiRNA target sequence
aaaccatgtatttcaccat

SEQ ID NO: 169096 - DNA, 19 bp, Artificial sequence
  SiRNA target sequence
aaccatgtatttcaccatt

SEQ ID NO: 169097 - DNA, 19 bp, Artificial sequence
  SiRNA target sequence
accatgtatttcaccattt

SEQ ID NO: 169098 - DNA, 19 bp, Artificial sequence
  SiRNA target sequence
ccatgtatttcaccattta

SEQ ID NO: 169099 - DNA, 19 bp, Artificial sequence
  SiRNA target sequence
catgtatttcaccatttac

SEQ ID NO: 169100 - DNA, 19 bp, Artificial sequence
  SiRNA target sequence
atgtatttcaccatttacc

SEQ ID NO: 169101 - DNA, 19 bp, Artificial sequence
  SiRNA target sequence
tgtatttcaccatttacct

SEQ ID NO: 169102 - DNA, 19 bp, Artificial sequence
  SiRNA target sequence
gtatttcaccatttacctt

SEQ ID NO: 169103 - DNA, 19 bp, Artificial sequence
  SiRNA target sequence
tatttcaccatttaccttt

SEQ ID NO: 169104 - DNA, 19 bp, Artificial sequence
  SiRNA target sequence
atttcaccatttaccttta

SEQ ID NO: 169105 - DNA, 19 bp, Artificial sequence
  SiRNA target sequence
tttcaccatttacctttaa

SEQ ID NO: 169106 - DNA, 19 bp, Artificial sequence
  SiRNA target sequence
ttcaccatttacctttaaa

SEQ ID NO: 169107 - DNA, 19 bp, Artificial sequence
  SiRNA target sequence
tcaccatttacctttaaac

SEQ ID NO: 169108 - DNA, 19 bp, Artificial sequence
  SiRNA target sequence
caccatttacctttaaact

SEQ ID NO: 169109 - DNA, 19 bp, Artificial sequence
  SiRNA target sequence
accatttacctttaaacta

SEQ ID NO: 169110 - DNA, 19 bp, Artificial sequence
  SiRNA target sequence
ccatttacctttaaactag

SEQ ID NO: 169111 - DNA, 19 bp, Artificial sequence
  SiRNA target sequence
catttacctttaaactaga

SEQ ID NO: 169112 - DNA, 19 bp, Artificial sequence
  SiRNA target sequence
atttacctttaaactagaa

SEQ ID NO: 169113 - DNA, 19 bp, Artificial sequence
  SiRNA target sequence
tttacctttaaactagaag

SEQ ID NO: 169114 - DNA, 19 bp, Artificial sequence
  SiRNA target sequence
ttacctttaaactagaaga

SEQ ID NO: 169115 - DNA, 19 bp, Artificial sequence
  SiRNA target sequence
tacctttaaactagaagat

SEQ ID NO: 169116 - DNA, 19 bp, Artificial sequence
  SiRNA target sequence
acctttaaactagaagatt

SEQ ID NO: 169117 - DNA, 19 bp, Artificial sequence
  SiRNA target sequence
cctttaaactagaagattg

SEQ ID NO: 169118 - DNA, 19 bp, Artificial sequence
  SiRNA target sequence
ctttaaactagaagattgc

SEQ ID NO: 169119 - DNA, 19 bp, Artificial sequence
  SiRNA target sequence
tttaaactagaagattgcc

SEQ ID NO: 169120 - DNA, 19 bp, Artificial sequence
  SiRNA target sequence
ttaaactagaagattgcct

SEQ ID NO: 169121 - DNA, 19 bp, Artificial sequence
  SiRNA target sequence
taaactagaagattgcctg

SEQ ID NO: 169122 - DNA, 19 bp, Artificial sequence
  SiRNA target sequence
aaactagaagattgcctgg

SEQ ID NO: 169123 - DNA, 19 bp, Artificial sequence
  SiRNA target sequence
aactagaagattgcctggc

SEQ ID NO: 169124 - DNA, 19 bp, Artificial sequence
  SiRNA target sequence
actagaagattgcctggca

SEQ ID NO: 169125 - DNA, 19 bp, Artificial sequence
  SiRNA target sequence
ctagaagattgcctggcat

SEQ ID NO: 169126 - DNA, 19 bp, Artificial sequence
  SiRNA target sequence
tagaagattgcctggcatg

SEQ ID NO: 169127 - DNA, 19 bp, Artificial sequence
  SiRNA target sequence
agaagattgcctggcatgt

SEQ ID NO: 169128 - DNA, 19 bp, Artificial sequence
  SiRNA target sequence
gaagattgcctggcatgtt

SEQ ID NO: 169129 - DNA, 19 bp, Artificial sequence
  SiRNA target sequence
aagattgcctggcatgttc

SEQ ID NO: 169130 - DNA, 19 bp, Artificial sequence
  SiRNA target sequence
agattgcctggcatgttcg

SEQ ID NO: 169131 - DNA, 19 bp, Artificial sequence
  SiRNA target sequence
gattgcctggcatgttcgg

SEQ ID NO: 169132 - DNA, 19 bp, Artificial sequence
  SiRNA target sequence
attgcctggcatgttcggc

SEQ ID NO: 169133 - DNA, 19 bp, Artificial sequence
  SiRNA target sequence
ttgcctggcatgttcggct

SEQ ID NO: 169134 - DNA, 19 bp, Artificial sequence
  SiRNA target sequence
tgcctggcatgttcggctt

SEQ ID NO: 169135 - DNA, 19 bp, Artificial sequence
  SiRNA target sequence
gcctggcatgttcggcttg

SEQ ID NO: 169136 - DNA, 19 bp, Artificial sequence
  SiRNA target sequence
cctggcatgttcggcttgt

SEQ ID NO: 169137 - DNA, 19 bp, Artificial sequence
  SiRNA target sequence
ctggcatgttcggcttgta

SEQ ID NO: 169138 - DNA, 19 bp, Artificial sequence
  SiRNA target sequence
tggcatgttcggcttgtat

SEQ ID NO: 169139 - DNA, 19 bp, Artificial sequence
  SiRNA target sequence
ggcatgttcggcttgtatt

SEQ ID NO: 169140 - DNA, 19 bp, Artificial sequence
  SiRNA target sequence
gcatgttcggcttgtattg

SEQ ID NO: 169141 - DNA, 19 bp, Artificial sequence
  SiRNA target sequence
catgttcggcttgtattgc

SEQ ID NO: 169142 - DNA, 19 bp, Artificial sequence
  SiRNA target sequence
atgttcggcttgtattgct

SEQ ID NO: 169143 - DNA, 19 bp, Artificial sequence
  SiRNA target sequence
tgttcggcttgtattgctg

SEQ ID NO: 169144 - DNA, 19 bp, Artificial sequence
  SiRNA target sequence
gttcggcttgtattgctga

SEQ ID NO: 169145 - DNA, 19 bp, Artificial sequence
  SiRNA target sequence
ttcggcttgtattgctgat

SEQ ID NO: 169146 - DNA, 19 bp, Artificial sequence
  SiRNA target sequence
tcggcttgtattgctgatt

SEQ ID NO: 169147 - DNA, 19 bp, Artificial sequence
  SiRNA target sequence
cggcttgtattgctgattt

SEQ ID NO: 169148 - DNA, 19 bp, Artificial sequence
  SiRNA target sequence
ggcttgtattgctgatttt

SEQ ID NO: 169149 - DNA, 19 bp, Artificial sequence
  SiRNA target sequence
gcttgtattgctgattttt

SEQ ID NO: 169150 - DNA, 19 bp, Artificial sequence
  SiRNA target sequence
cttgtattgctgatttttc

SEQ ID NO: 169151 - DNA, 19 bp, Artificial sequence
  SiRNA target sequence
ttgtattgctgatttttct

SEQ ID NO: 169152 - DNA, 19 bp, Artificial sequence
  SiRNA target sequence
tgtattgctgatttttctg

SEQ ID NO: 169153 - DNA, 19 bp, Artificial sequence
  SiRNA target sequence
gtattgctgatttttctgt

SEQ ID NO: 169154 - DNA, 19 bp, Artificial sequence
  SiRNA target sequence
tattgctgatttttctgtt

SEQ ID NO: 169155 - DNA, 19 bp, Artificial sequence
  SiRNA target sequence
attgctgatttttctgttc

SEQ ID NO: 169156 - DNA, 19 bp, Artificial sequence
  SiRNA target sequence
ttgctgatttttctgttcc

SEQ ID NO: 169157 - DNA, 19 bp, Artificial sequence
  SiRNA target sequence
tgctgatttttctgttcca

SEQ ID NO: 169158 - DNA, 19 bp, Artificial sequence
  SiRNA target sequence
gctgatttttctgttccaa

SEQ ID NO: 169159 - DNA, 19 bp, Artificial sequence
  SiRNA target sequence
ctgatttttctgttccaaa

SEQ ID NO: 169160 - DNA, 19 bp, Artificial sequence
  SiRNA target sequence
tgatttttctgttccaaaa

SEQ ID NO: 169161 - DNA, 19 bp, Artificial sequence
  SiRNA target sequence
gatttttctgttccaaaaa

SEQ ID NO: 169162 - DNA, 19 bp, Artificial sequence
  SiRNA target sequence
atttttctgttccaaaaat

SEQ ID NO: 169163 - DNA, 19 bp, Artificial sequence
  SiRNA target sequence
tttttctgttccaaaaatt

SEQ ID NO: 169164 - DNA, 19 bp, Artificial sequence
  SiRNA target sequence
ttttctgttccaaaaattc

SEQ ID NO: 169165 - DNA, 19 bp, Artificial sequence
  SiRNA target sequence
tttctgttccaaaaattcc

SEQ ID NO: 169166 - DNA, 19 bp, Artificial sequence
  SiRNA target sequence
ttctgttccaaaaattcct

SEQ ID NO: 169167 - DNA, 19 bp, Artificial sequence
  SiRNA target sequence
tctgttccaaaaattccta

SEQ ID NO: 169168 - DNA, 19 bp, Artificial sequence
  SiRNA target sequence
ctgttccaaaaattcctac

SEQ ID NO: 169169 - DNA, 19 bp, Artificial sequence
  SiRNA target sequence
tgttccaaaaattcctact

SEQ ID NO: 169170 - DNA, 19 bp, Artificial sequence
  SiRNA target sequence
gttccaaaaattcctactt

SEQ ID NO: 169171 - DNA, 19 bp, Artificial sequence
  SiRNA target sequence
ttccaaaaattcctactta

SEQ ID NO: 169172 - DNA, 19 bp, Artificial sequence
  SiRNA target sequence
tccaaaaattcctacttac

SEQ ID NO: 169173 - DNA, 19 bp, Artificial sequence
  SiRNA target sequence
ccaaaaattcctacttaca

SEQ ID NO: 169174 - DNA, 19 bp, Artificial sequence
  SiRNA target sequence
caaaaattcctacttacac

SEQ ID NO: 169175 - DNA, 19 bp, Artificial sequence
  SiRNA target sequence
aaaaattcctacttacaca

SEQ ID NO: 169176 - DNA, 19 bp, Artificial sequence
  SiRNA target sequence
aaaattcctacttacacag

SEQ ID NO: 169177 - DNA, 19 bp, Artificial sequence
  SiRNA target sequence
aaattcctacttacacaga

SEQ ID NO: 169178 - DNA, 19 bp, Artificial sequence
  SiRNA target sequence
aattcctacttacacagaa

SEQ ID NO: 169179 - DNA, 19 bp, Artificial sequence
  SiRNA target sequence
attcctacttacacagaac

SEQ ID NO: 169180 - DNA, 19 bp, Artificial sequence
  SiRNA target sequence
ttcctacttacacagaact

SEQ ID NO: 169181 - DNA, 19 bp, Artificial sequence
  SiRNA target sequence
tcctacttacacagaactg

SEQ ID NO: 169182 - DNA, 19 bp, Artificial sequence
  SiRNA target sequence
cctacttacacagaactga

SEQ ID NO: 169183 - DNA, 19 bp, Artificial sequence
  SiRNA target sequence
ctacttacacagaactgaa

SEQ ID NO: 169184 - DNA, 19 bp, Artificial sequence
  SiRNA target sequence
tacttacacagaactgaaa

SEQ ID NO: 169185 - DNA, 19 bp, Artificial sequence
  SiRNA target sequence
acttacacagaactgaaag

SEQ ID NO: 169186 - DNA, 19 bp, Artificial sequence
  SiRNA target sequence
cttacacagaactgaaaga

SEQ ID NO: 169187 - DNA, 19 bp, Artificial sequence
  SiRNA target sequence
ttacacagaactgaaagat

SEQ ID NO: 169188 - DNA, 19 bp, Artificial sequence
  SiRNA target sequence
tacacagaactgaaagatg

SEQ ID NO: 169189 - DNA, 19 bp, Artificial sequence
  SiRNA target sequence
acacagaactgaaagatgt

SEQ ID NO: 169190 - DNA, 19 bp, Artificial sequence
  SiRNA target sequence
cacagaactgaaagatgtc

SEQ ID NO: 169191 - DNA, 19 bp, Artificial sequence
  SiRNA target sequence
acagaactgaaagatgtcc

SEQ ID NO: 169192 - DNA, 19 bp, Artificial sequence
  SiRNA target sequence
cagaactgaaagatgtccc

SEQ ID NO: 169193 - DNA, 19 bp, Artificial sequence
  SiRNA target sequence
agaactgaaagatgtccct

SEQ ID NO: 169194 - DNA, 19 bp, Artificial sequence
  SiRNA target sequence
gaactgaaagatgtccctt

SEQ ID NO: 169195 - DNA, 19 bp, Artificial sequence
  SiRNA target sequence
aactgaaagatgtcccttt

SEQ ID NO: 169196 - DNA, 19 bp, Artificial sequence
  SiRNA target sequence
actgaaagatgtcccttta

SEQ ID NO: 169197 - DNA, 19 bp, Artificial sequence
  SiRNA target sequence
ctgaaagatgtccctttaa

SEQ ID NO: 169198 - DNA, 19 bp, Artificial sequence
  SiRNA target sequence
tgaaagatgtccctttaac

SEQ ID NO: 169199 - DNA, 19 bp, Artificial sequence
  SiRNA target sequence
gaaagatgtccctttaaca

SEQ ID NO: 169200 - DNA, 19 bp, Artificial sequence
  SiRNA target sequence
aaagatgtccctttaacat

SEQ ID NO: 169201 - DNA, 19 bp, Artificial sequence
  SiRNA target sequence
aagatgtccctttaacatt

SEQ ID NO: 169202 - DNA, 19 bp, Artificial sequence
  SiRNA target sequence
agatgtccctttaacattt

SEQ ID NO: 169203 - DNA, 19 bp, Artificial sequence
  SiRNA target sequence
gatgtccctttaacatttt

SEQ ID NO: 169204 - DNA, 19 bp, Artificial sequence
  SiRNA target sequence
atgtccctttaacattttt

SEQ ID NO: 169205 - DNA, 19 bp, Artificial sequence
  SiRNA target sequence
tgtccctttaacattttta

SEQ ID NO: 169206 - DNA, 19 bp, Artificial sequence
  SiRNA target sequence
gtccctttaacatttttat

SEQ ID NO: 169207 - DNA, 19 bp, Artificial sequence
  SiRNA target sequence
tccctttaacatttttatt

SEQ ID NO: 169208 - DNA, 19 bp, Artificial sequence
  SiRNA target sequence
ccctttaacatttttatta

SEQ ID NO: 169209 - DNA, 19 bp, Artificial sequence
  SiRNA target sequence
cctttaacatttttattat

SEQ ID NO: 169210 - DNA, 19 bp, Artificial sequence
  SiRNA target sequence
ctttaacatttttattatc

SEQ ID NO: 169211 - DNA, 19 bp, Artificial sequence
  SiRNA target sequence
tttaacatttttattatca

SEQ ID NO: 169212 - DNA, 19 bp, Artificial sequence
  SiRNA target sequence
ttaacatttttattatcac

SEQ ID NO: 169213 - DNA, 19 bp, Artificial sequence
  SiRNA target sequence
taacatttttattatcacc

SEQ ID NO: 169214 - DNA, 19 bp, Artificial sequence
  SiRNA target sequence
aacatttttattatcacca

SEQ ID NO: 169215 - DNA, 19 bp, Artificial sequence
  SiRNA target sequence
acatttttattatcaccac

SEQ ID NO: 169216 - DNA, 19 bp, Artificial sequence
  SiRNA target sequence
catttttattatcaccaca

SEQ ID NO: 169217 - DNA, 19 bp, Artificial sequence
  SiRNA target sequence
atttttattatcaccacat

SEQ ID NO: 169218 - DNA, 19 bp, Artificial sequence
  SiRNA target sequence
tttttattatcaccacatt

SEQ ID NO: 169219 - DNA, 19 bp, Artificial sequence
  SiRNA target sequence
ttttattatcaccacattc

SEQ ID NO: 169220 - DNA, 19 bp, Artificial sequence
  SiRNA target sequence
tttattatcaccacattcg

SEQ ID NO: 169221 - DNA, 19 bp, Artificial sequence
  SiRNA target sequence
ttattatcaccacattcga

SEQ ID NO: 169222 - DNA, 19 bp, Artificial sequence
  SiRNA target sequence
tattatcaccacattcgaa

SEQ ID NO: 169223 - DNA, 19 bp, Artificial sequence
  SiRNA target sequence
attatcaccacattcgaaa

SEQ ID NO: 169224 - DNA, 19 bp, Artificial sequence
  SiRNA target sequence
ttatcaccacattcgaaaa

SEQ ID NO: 169225 - DNA, 19 bp, Artificial sequence
  SiRNA target sequence
tatcaccacattcgaaaat

SEQ ID NO: 169226 - DNA, 19 bp, Artificial sequence
  SiRNA target sequence
atcaccacattcgaaaatg

SEQ ID NO: 169227 - DNA, 19 bp, Artificial sequence
  SiRNA target sequence
tcaccacattcgaaaatga

SEQ ID NO: 169228 - DNA, 19 bp, Artificial sequence
  SiRNA target sequence
caccacattcgaaaatgaa

SEQ ID NO: 169229 - DNA, 19 bp, Artificial sequence
  SiRNA target sequence
accacattcgaaaatgaat

SEQ ID NO: 169230 - DNA, 19 bp, Artificial sequence
  SiRNA target sequence
ccacattcgaaaatgaata

SEQ ID NO: 169231 - DNA, 19 bp, Artificial sequence
  SiRNA target sequence
cacattcgaaaatgaatat

SEQ ID NO: 169232 - DNA, 19 bp, Artificial sequence
  SiRNA target sequence
acattcgaaaatgaatatg

SEQ ID NO: 169233 - DNA, 19 bp, Artificial sequence
  SiRNA target sequence
cattcgaaaatgaatatgt

SEQ ID NO: 169234 - DNA, 19 bp, Artificial sequence
  SiRNA target sequence
attcgaaaatgaatatgta

SEQ ID NO: 169235 - DNA, 19 bp, Artificial sequence
  SiRNA target sequence
ttcgaaaatgaatatgtat

SEQ ID NO: 169236 - DNA, 19 bp, Artificial sequence
  SiRNA target sequence
tcgaaaatgaatatgtatg

SEQ ID NO: 169237 - DNA, 19 bp, Artificial sequence
  SiRNA target sequence
cgaaaatgaatatgtatgc

SEQ ID NO: 169238 - DNA, 19 bp, Artificial sequence
  SiRNA target sequence
gaaaatgaatatgtatgca

SEQ ID NO: 169239 - DNA, 19 bp, Artificial sequence
  SiRNA target sequence
aaaatgaatatgtatgcac

SEQ ID NO: 169240 - DNA, 19 bp, Artificial sequence
  SiRNA target sequence
aaatgaatatgtatgcaca

SEQ ID NO: 169241 - DNA, 19 bp, Artificial sequence
  SiRNA target sequence
aatgaatatgtatgcacac

SEQ ID NO: 169242 - DNA, 19 bp, Artificial sequence
  SiRNA target sequence
atgaatatgtatgcacact

SEQ ID NO: 169243 - DNA, 19 bp, Artificial sequence
  SiRNA target sequence
tgaatatgtatgcacacta

SEQ ID NO: 169244 - DNA, 19 bp, Artificial sequence
  SiRNA target sequence
gaatatgtatgcacactat

SEQ ID NO: 169245 - DNA, 19 bp, Artificial sequence
  SiRNA target sequence
aatatgtatgcacactata

SEQ ID NO: 169246 - DNA, 19 bp, Artificial sequence
  SiRNA target sequence
atatgtatgcacactataa

SEQ ID NO: 169247 - DNA, 19 bp, Artificial sequence
  SiRNA target sequence
tatgtatgcacactataac

SEQ ID NO: 169248 - DNA, 19 bp, Artificial sequence
  SiRNA target sequence
atgtatgcacactataaca

SEQ ID NO: 169249 - DNA, 19 bp, Artificial sequence
  SiRNA target sequence
tgtatgcacactataacaa

SEQ ID NO: 169250 - DNA, 19 bp, Artificial sequence
  SiRNA target sequence
gtatgcacactataacaat

SEQ ID NO: 169251 - DNA, 19 bp, Artificial sequence
  SiRNA target sequence
tatgcacactataacaatc

SEQ ID NO: 169252 - DNA, 19 bp, Artificial sequence
  SiRNA target sequence
atgcacactataacaatca

SEQ ID NO: 169253 - DNA, 19 bp, Artificial sequence
  SiRNA target sequence
tgcacactataacaatcat

SEQ ID NO: 169254 - DNA, 19 bp, Artificial sequence
  SiRNA target sequence
gcacactataacaatcata

SEQ ID NO: 169255 - DNA, 19 bp, Artificial sequence
  SiRNA target sequence
cacactataacaatcatat

SEQ ID NO: 169256 - DNA, 19 bp, Artificial sequence
  SiRNA target sequence
acactataacaatcatata

SEQ ID NO: 169257 - DNA, 19 bp, Artificial sequence
  SiRNA target sequence
cactataacaatcatataa

SEQ ID NO: 169258 - DNA, 19 bp, Artificial sequence
  SiRNA target sequence
actataacaatcatataat

SEQ ID NO: 169259 - DNA, 19 bp, Artificial sequence
  SiRNA target sequence
ctataacaatcatataatg

SEQ ID NO: 169260 - DNA, 19 bp, Artificial sequence
  SiRNA target sequence
tataacaatcatataatgt

SEQ ID NO: 169261 - DNA, 19 bp, Artificial sequence
  SiRNA target sequence
ataacaatcatataatgtc

SEQ ID NO: 169262 - DNA, 19 bp, Artificial sequence
  SiRNA target sequence
taacaatcatataatgtcc

SEQ ID NO: 169263 - DNA, 19 bp, Artificial sequence
  SiRNA target sequence
aacaatcatataatgtcct

SEQ ID NO: 169264 - DNA, 19 bp, Artificial sequence
  SiRNA target sequence
acaatcatataatgtcctt

SEQ ID NO: 169265 - DNA, 19 bp, Artificial sequence
  SiRNA target sequence
caatcatataatgtccttt

SEQ ID NO: 169266 - DNA, 19 bp, Artificial sequence
  SiRNA target sequence
aatcatataatgtccttta

SEQ ID NO: 169267 - DNA, 19 bp, Artificial sequence
  SiRNA target sequence
atcatataatgtcctttag

SEQ ID NO: 169268 - DNA, 19 bp, Artificial sequence
  SiRNA target sequence
tcatataatgtcctttagt

SEQ ID NO: 169269 - DNA, 19 bp, Artificial sequence
  SiRNA target sequence
catataatgtcctttagtg

SEQ ID NO: 169270 - DNA, 19 bp, Artificial sequence
  SiRNA target sequence
atataatgtcctttagtga

SEQ ID NO: 169271 - DNA, 19 bp, Artificial sequence
  SiRNA target sequence
tataatgtcctttagtgat

SEQ ID NO: 169272 - DNA, 19 bp, Artificial sequence
  SiRNA target sequence
ataatgtcctttagtgatt

SEQ ID NO: 169273 - DNA, 19 bp, Artificial sequence
  SiRNA target sequence
taatgtcctttagtgattt

SEQ ID NO: 169274 - DNA, 19 bp, Artificial sequence
  SiRNA target sequence
aatgtcctttagtgatttt

SEQ ID NO: 169275 - DNA, 19 bp, Artificial sequence
  SiRNA target sequence
atgtcctttagtgattttg

SEQ ID NO: 169276 - DNA, 19 bp, Artificial sequence
  SiRNA target sequence
tgtcctttagtgattttga

SEQ ID NO: 169277 - DNA, 19 bp, Artificial sequence
  SiRNA target sequence
gtcctttagtgattttgaa

SEQ ID NO: 169278 - DNA, 19 bp, Artificial sequence
  SiRNA target sequence
tcctttagtgattttgaat

SEQ ID NO: 169279 - DNA, 19 bp, Artificial sequence
  SiRNA target sequence
cctttagtgattttgaata

SEQ ID NO: 169280 - DNA, 19 bp, Artificial sequence
  SiRNA target sequence
ctttagtgattttgaatat

SEQ ID NO: 169281 - DNA, 19 bp, Artificial sequence
  SiRNA target sequence
tttagtgattttgaatatc

SEQ ID NO: 169282 - DNA, 19 bp, Artificial sequence
  SiRNA target sequence
ttagtgattttgaatatca

SEQ ID NO: 169283 - DNA, 19 bp, Artificial sequence
  SiRNA target sequence
tagtgattttgaatatcac

SEQ ID NO: 169284 - DNA, 19 bp, Artificial sequence
  SiRNA target sequence
agtgattttgaatatcact

SEQ ID NO: 169285 - DNA, 19 bp, Artificial sequence
  SiRNA target sequence
gtgattttgaatatcactt

SEQ ID NO: 169286 - DNA, 19 bp, Artificial sequence
  SiRNA target sequence
tgattttgaatatcactta

SEQ ID NO: 169287 - DNA, 19 bp, Artificial sequence
  SiRNA target sequence
gattttgaatatcacttaa

SEQ ID NO: 169288 - DNA, 19 bp, Artificial sequence
  SiRNA target sequence
attttgaatatcacttaat

SEQ ID NO: 169289 - DNA, 19 bp, Artificial sequence
  SiRNA target sequence
ttttgaatatcacttaatt

SEQ ID NO: 169290 - DNA, 19 bp, Artificial sequence
  SiRNA target sequence
tttgaatatcacttaattt

SEQ ID NO: 169291 - DNA, 19 bp, Artificial sequence
  SiRNA target sequence
ttgaatatcacttaatttc

SEQ ID NO: 169292 - DNA, 19 bp, Artificial sequence
  SiRNA target sequence
tgaatatcacttaatttca

SEQ ID NO: 169293 - DNA, 19 bp, Artificial sequence
  SiRNA target sequence
gaatatcacttaatttcat

SEQ ID NO: 169294 - DNA, 19 bp, Artificial sequence
  SiRNA target sequence
aatatcacttaatttcatt

SEQ ID NO: 169295 - DNA, 19 bp, Artificial sequence
  SiRNA target sequence
atatcacttaatttcattt

SEQ ID NO: 169296 - DNA, 19 bp, Artificial sequence
  SiRNA target sequence
tatcacttaatttcattta

SEQ ID NO: 169297 - DNA, 19 bp, Artificial sequence
  SiRNA target sequence
atcacttaatttcatttat

SEQ ID NO: 169298 - DNA, 19 bp, Artificial sequence
  SiRNA target sequence
tcacttaatttcatttata

SEQ ID NO: 169299 - DNA, 19 bp, Artificial sequence
  SiRNA target sequence
cacttaatttcatttataa

SEQ ID NO: 169300 - DNA, 19 bp, Artificial sequence
  SiRNA target sequence
acttaatttcatttataaa

SEQ ID NO: 169301 - DNA, 19 bp, Artificial sequence
  SiRNA target sequence
cttaatttcatttataaaa

SEQ ID NO: 169302 - DNA, 19 bp, Artificial sequence
  SiRNA target sequence
ttaatttcatttataaaac

SEQ ID NO: 169303 - DNA, 19 bp, Artificial sequence
  SiRNA target sequence
taatttcatttataaaact

SEQ ID NO: 169304 - DNA, 19 bp, Artificial sequence
  SiRNA target sequence
aatttcatttataaaacta

SEQ ID NO: 169305 - DNA, 19 bp, Artificial sequence
  SiRNA target sequence
atttcatttataaaactaa

SEQ ID NO: 169306 - DNA, 19 bp, Artificial sequence
  SiRNA target sequence
tttcatttataaaactaaa

SEQ ID NO: 169307 - DNA, 19 bp, Artificial sequence
  SiRNA target sequence
ttcatttataaaactaaaa

SEQ ID NO: 169308 - DNA, 19 bp, Artificial sequence
  SiRNA target sequence
tcatttataaaactaaaat

SEQ ID NO: 169309 - DNA, 19 bp, Artificial sequence
  SiRNA target sequence
catttataaaactaaaatt

SEQ ID NO: 169310 - DNA, 19 bp, Artificial sequence
  SiRNA target sequence
atttataaaactaaaattt

SEQ ID NO: 169311 - DNA, 19 bp, Artificial sequence
  SiRNA target sequence
tttataaaactaaaattta

SEQ ID NO: 169312 - DNA, 19 bp, Artificial sequence
  SiRNA target sequence
ttataaaactaaaatttaa

SEQ ID NO: 169313 - DNA, 19 bp, Artificial sequence
  SiRNA target sequence
tataaaactaaaatttaat

SEQ ID NO: 169314 - DNA, 19 bp, Artificial sequence
  SiRNA target sequence
ataaaactaaaatttaatg

SEQ ID NO: 169315 - DNA, 19 bp, Artificial sequence
  SiRNA target sequence
taaaactaaaatttaatgt

SEQ ID NO: 169316 - DNA, 19 bp, Artificial sequence
  SiRNA target sequence
aaaactaaaatttaatgta

SEQ ID NO: 169317 - DNA, 19 bp, Artificial sequence
  SiRNA target sequence
aaactaaaatttaatgtaa

SEQ ID NO: 169318 - DNA, 19 bp, Artificial sequence
  SiRNA target sequence
aactaaaatttaatgtaat

SEQ ID NO: 169319 - DNA, 19 bp, Artificial sequence
  SiRNA target sequence
actaaaatttaatgtaata

SEQ ID NO: 169320 - DNA, 19 bp, Artificial sequence
  SiRNA target sequence
ctaaaatttaatgtaataa

SEQ ID NO: 169321 - DNA, 19 bp, Artificial sequence
  SiRNA target sequence
taaaatttaatgtaataaa

SEQ ID NO: 169322 - DNA, 19 bp, Artificial sequence
  SiRNA target sequence
aaaatttaatgtaataaaa

SEQ ID NO: 169323 - DNA, 19 bp, Artificial sequence
  SiRNA target sequence
aaatttaatgtaataaaag

SEQ ID NO: 169324 - DNA, 19 bp, Artificial sequence
  SiRNA target sequence
aatttaatgtaataaaagt

SEQ ID NO: 169325 - DNA, 19 bp, Artificial sequence
  SiRNA target sequence
atttaatgtaataaaagta

SEQ ID NO: 169326 - DNA, 19 bp, Artificial sequence
  SiRNA target sequence
tttaatgtaataaaagtat

SEQ ID NO: 169327 - DNA, 19 bp, Artificial sequence
  SiRNA target sequence
ttaatgtaataaaagtata

SEQ ID NO: 169328 - DNA, 19 bp, Artificial sequence
  SiRNA target sequence
taatgtaataaaagtatat

SEQ ID NO: 169329 - DNA, 19 bp, Artificial sequence
  SiRNA target sequence
aatgtaataaaagtatatg

SEQ ID NO: 169330 - DNA, 19 bp, Artificial sequence
  SiRNA target sequence
atgtaataaaagtatatga

SEQ ID NO: 169331 - DNA, 19 bp, Artificial sequence
  SiRNA target sequence
tgtaataaaagtatatgat

SEQ ID NO: 169332 - DNA, 19 bp, Artificial sequence
  SiRNA target sequence
gtaataaaagtatatgata

SEQ ID NO: 169333 - DNA, 19 bp, Artificial sequence
  SiRNA target sequence
taataaaagtatatgatac

SEQ ID NO: 169334 - DNA, 19 bp, Artificial sequence
  SiRNA target sequence
aataaaagtatatgataca

SEQ ID NO: 169335 - DNA, 19 bp, Artificial sequence
  SiRNA target sequence
ataaaagtatatgatacat

SEQ ID NO: 169336 - DNA, 19 bp, Artificial sequence
  SiRNA target sequence
taaaagtatatgatacatc

SEQ ID NO: 169337 - DNA, 19 bp, Artificial sequence
  SiRNA target sequence
aaaagtatatgatacatct

SEQ ID NO: 169338 - DNA, 19 bp, Artificial sequence
  SiRNA target sequence
aaagtatatgatacatctt

SEQ ID NO: 169339 - DNA, 19 bp, Artificial sequence
  SiRNA target sequence
aagtatatgatacatctta

SEQ ID NO: 169340 - DNA, 19 bp, Artificial sequence
  SiRNA target sequence
agtatatgatacatcttat

SEQ ID NO: 169341 - DNA, 19 bp, Artificial sequence
  SiRNA target sequence
gtatatgatacatcttatg

SEQ ID NO: 169342 - DNA, 19 bp, Artificial sequence
  SiRNA target sequence
tatatgatacatcttatgt

SEQ ID NO: 169343 - DNA, 19 bp, Artificial sequence
  SiRNA target sequence
atatgatacatcttatgtc

SEQ ID NO: 169344 - DNA, 19 bp, Artificial sequence
  SiRNA target sequence
tatgatacatcttatgtca

SEQ ID NO: 169345 - DNA, 19 bp, Artificial sequence
  SiRNA target sequence
atgatacatcttatgtcaa

SEQ ID NO: 169346 - DNA, 19 bp, Artificial sequence
  SiRNA target sequence
tgatacatcttatgtcaaa

SEQ ID NO: 169347 - DNA, 19 bp, Artificial sequence
  SiRNA target sequence
gatacatcttatgtcaaaa

SEQ ID NO: 169348 - DNA, 19 bp, Artificial sequence
  SiRNA target sequence
atacatcttatgtcaaaaa

SEQ ID NO: 169349 - DNA, 19 bp, Artificial sequence
  SiRNA target sequence
tacatcttatgtcaaaaat

SEQ ID NO: 169350 - DNA, 19 bp, Artificial sequence
  SiRNA target sequence
acatcttatgtcaaaaata

SEQ ID NO: 169351 - DNA, 19 bp, Artificial sequence
  SiRNA target sequence
catcttatgtcaaaaatat

SEQ ID NO: 169352 - DNA, 19 bp, Artificial sequence
  SiRNA target sequence
atcttatgtcaaaaatatt

SEQ ID NO: 169353 - DNA, 19 bp, Artificial sequence
  SiRNA target sequence
tcttatgtcaaaaatattc

SEQ ID NO: 169354 - DNA, 19 bp, Artificial sequence
  SiRNA target sequence
cttatgtcaaaaatattct

SEQ ID NO: 169355 - DNA, 19 bp, Artificial sequence
  SiRNA target sequence
ttatgtcaaaaatattctg

SEQ ID NO: 169356 - DNA, 19 bp, Artificial sequence
  SiRNA target sequence
tatgtcaaaaatattctgt

SEQ ID NO: 169357 - DNA, 19 bp, Artificial sequence
  SiRNA target sequence
atgtcaaaaatattctgta

SEQ ID NO: 169358 - DNA, 19 bp, Artificial sequence
  SiRNA target sequence
tgtcaaaaatattctgtat

SEQ ID NO: 169359 - DNA, 19 bp, Artificial sequence
  SiRNA target sequence
gtcaaaaatattctgtatg

SEQ ID NO: 169360 - DNA, 19 bp, Artificial sequence
  SiRNA target sequence
tcaaaaatattctgtatga

SEQ ID NO: 169361 - DNA, 19 bp, Artificial sequence
  SiRNA target sequence
caaaaatattctgtatgat

SEQ ID NO: 169362 - DNA, 19 bp, Artificial sequence
  SiRNA target sequence
aaaaatattctgtatgata

SEQ ID NO: 169363 - DNA, 19 bp, Artificial sequence
  SiRNA target sequence
aaaatattctgtatgatag

SEQ ID NO: 169364 - DNA, 19 bp, Artificial sequence
  SiRNA target sequence
aaatattctgtatgatagt

SEQ ID NO: 169365 - DNA, 19 bp, Artificial sequence
  SiRNA target sequence
aatattctgtatgatagtg

SEQ ID NO: 169366 - DNA, 19 bp, Artificial sequence
  SiRNA target sequence
atattctgtatgatagtgt

SEQ ID NO: 169367 - DNA, 19 bp, Artificial sequence
  SiRNA target sequence
tattctgtatgatagtgtt

SEQ ID NO: 169368 - DNA, 19 bp, Artificial sequence
  SiRNA target sequence
attctgtatgatagtgttt

SEQ ID NO: 169369 - DNA, 19 bp, Artificial sequence
  SiRNA target sequence
ttctgtatgatagtgttta

SEQ ID NO: 169370 - DNA, 19 bp, Artificial sequence
  SiRNA target sequence
tctgtatgatagtgtttat

SEQ ID NO: 169371 - DNA, 19 bp, Artificial sequence
  SiRNA target sequence
ctgtatgatagtgtttatg

SEQ ID NO: 169372 - DNA, 19 bp, Artificial sequence
  SiRNA target sequence
tgtatgatagtgtttatga

SEQ ID NO: 169373 - DNA, 19 bp, Artificial sequence
  SiRNA target sequence
gtatgatagtgtttatgag

SEQ ID NO: 169374 - DNA, 19 bp, Artificial sequence
  SiRNA target sequence
tatgatagtgtttatgagg

SEQ ID NO: 169375 - DNA, 19 bp, Artificial sequence
  SiRNA target sequence
atgatagtgtttatgagga

SEQ ID NO: 169376 - DNA, 19 bp, Artificial sequence
  SiRNA target sequence
tgatagtgtttatgaggaa

SEQ ID NO: 169377 - DNA, 19 bp, Artificial sequence
  SiRNA target sequence
gatagtgtttatgaggaaa

SEQ ID NO: 169378 - DNA, 19 bp, Artificial sequence
  SiRNA target sequence
atagtgtttatgaggaaag

SEQ ID NO: 169379 - DNA, 19 bp, Artificial sequence
  SiRNA target sequence
tagtgtttatgaggaaagc

SEQ ID NO: 169380 - DNA, 19 bp, Artificial sequence
  SiRNA target sequence
agtgtttatgaggaaagca

SEQ ID NO: 169381 - DNA, 19 bp, Artificial sequence
  SiRNA target sequence
gtgtttatgaggaaagcac

SEQ ID NO: 169382 - DNA, 19 bp, Artificial sequence
  SiRNA target sequence
tgtttatgaggaaagcacg

SEQ ID NO: 169383 - DNA, 19 bp, Artificial sequence
  SiRNA target sequence
gtttatgaggaaagcacga

SEQ ID NO: 169384 - DNA, 19 bp, Artificial sequence
  SiRNA target sequence
tttatgaggaaagcacgag

SEQ ID NO: 169385 - DNA, 19 bp, Artificial sequence
  SiRNA target sequence
ttatgaggaaagcacgaga

SEQ ID NO: 169386 - DNA, 19 bp, Artificial sequence
  SiRNA target sequence
tatgaggaaagcacgagag

SEQ ID NO: 169387 - DNA, 19 bp, Artificial sequence
  SiRNA target sequence
atgaggaaagcacgagaga

SEQ ID NO: 169388 - DNA, 19 bp, Artificial sequence
  SiRNA target sequence
tgaggaaagcacgagagac

SEQ ID NO: 169389 - DNA, 19 bp, Artificial sequence
  SiRNA target sequence
gaggaaagcacgagagaca

SEQ ID NO: 169390 - DNA, 19 bp, Artificial sequence
  SiRNA target sequence
aggaaagcacgagagacaa

SEQ ID NO: 169391 - DNA, 19 bp, Artificial sequence
  SiRNA target sequence
ggaaagcacgagagacaaa

SEQ ID NO: 169392 - DNA, 19 bp, Artificial sequence
  SiRNA target sequence
gaaagcacgagagacaaaa

SEQ ID NO: 169393 - DNA, 19 bp, Artificial sequence
  SiRNA target sequence
aaagcacgagagacaaaat

SEQ ID NO: 169394 - DNA, 19 bp, Artificial sequence
  SiRNA target sequence
aagcacgagagacaaaata

SEQ ID NO: 169395 - DNA, 19 bp, Artificial sequence
  SiRNA target sequence
agcacgagagacaaaataa

SEQ ID NO: 169396 - DNA, 19 bp, Artificial sequence
  SiRNA target sequence
gcacgagagacaaaataat

SEQ ID NO: 169397 - DNA, 19 bp, Artificial sequence
  SiRNA target sequence
cacgagagacaaaataata

SEQ ID NO: 169398 - DNA, 19 bp, Artificial sequence
  SiRNA target sequence
acgagagacaaaataataa

SEQ ID NO: 169399 - DNA, 19 bp, Artificial sequence
  SiRNA target sequence
cgagagacaaaataataat

SEQ ID NO: 169400 - DNA, 19 bp, Artificial sequence
  SiRNA target sequence
gagagacaaaataataata

SEQ ID NO: 169401 - DNA, 19 bp, Artificial sequence
  SiRNA target sequence
agagacaaaataataataa

SEQ ID NO: 169402 - DNA, 19 bp, Artificial sequence
  SiRNA target sequence
gagacaaaataataataag

SEQ ID NO: 169403 - DNA, 19 bp, Artificial sequence
  SiRNA target sequence
agacaaaataataataagt

SEQ ID NO: 169404 - DNA, 19 bp, Artificial sequence
  SiRNA target sequence
gacaaaataataataagtg

SEQ ID NO: 169405 - DNA, 19 bp, Artificial sequence
  SiRNA target sequence
acaaaataataataagtga

SEQ ID NO: 169406 - DNA, 19 bp, Artificial sequence
  SiRNA target sequence
caaaataataataagtgac

SEQ ID NO: 169407 - DNA, 19 bp, Artificial sequence
  SiRNA target sequence
aaaataataataagtgact

SEQ ID NO: 169408 - DNA, 19 bp, Artificial sequence
  SiRNA target sequence
aaataataataagtgactg

SEQ ID NO: 169409 - DNA, 19 bp, Artificial sequence
  SiRNA target sequence
aataataataagtgactgt

SEQ ID NO: 169410 - DNA, 19 bp, Artificial sequence
  SiRNA target sequence
ataataataagtgactgtc

SEQ ID NO: 169411 - DNA, 19 bp, Artificial sequence
  SiRNA target sequence
taataataagtgactgtcc

SEQ ID NO: 169412 - DNA, 19 bp, Artificial sequence
  SiRNA target sequence
aataataagtgactgtcct

SEQ ID NO: 169413 - DNA, 19 bp, Artificial sequence
  SiRNA target sequence
ataataagtgactgtcctg

SEQ ID NO: 169414 - DNA, 19 bp, Artificial sequence
  SiRNA target sequence
taataagtgactgtcctgg

SEQ ID NO: 169415 - DNA, 19 bp, Artificial sequence
  SiRNA target sequence
aataagtgactgtcctggg

SEQ ID NO: 169416 - DNA, 19 bp, Artificial sequence
  SiRNA target sequence
ataagtgactgtcctggga

SEQ ID NO: 169417 - DNA, 19 bp, Artificial sequence
  SiRNA target sequence
taagtgactgtcctgggac

SEQ ID NO: 169418 - DNA, 19 bp, Artificial sequence
  SiRNA target sequence
aagtgactgtcctgggact

SEQ ID NO: 169419 - DNA, 19 bp, Artificial sequence
  SiRNA target sequence
agtgactgtcctgggactg

SEQ ID NO: 169420 - DNA, 19 bp, Artificial sequence
  SiRNA target sequence
gtgactgtcctgggactgt

SEQ ID NO: 169421 - DNA, 19 bp, Artificial sequence
  SiRNA target sequence
tgactgtcctgggactgtt

SEQ ID NO: 169422 - DNA, 19 bp, Artificial sequence
  SiRNA target sequence
gactgtcctgggactgttt

SEQ ID NO: 169423 - DNA, 19 bp, Artificial sequence
  SiRNA target sequence
actgtcctgggactgtttc

SEQ ID NO: 169424 - DNA, 19 bp, Artificial sequence
  SiRNA target sequence
ctgtcctgggactgtttca

SEQ ID NO: 169425 - DNA, 19 bp, Artificial sequence
  SiRNA target sequence
tgtcctgggactgtttcat

SEQ ID NO: 169426 - DNA, 19 bp, Artificial sequence
  SiRNA target sequence
gtcctgggactgtttcata

SEQ ID NO: 169427 - DNA, 19 bp, Artificial sequence
  SiRNA target sequence
tcctgggactgtttcatat

SEQ ID NO: 169428 - DNA, 19 bp, Artificial sequence
  SiRNA target sequence
cctgggactgtttcatata

SEQ ID NO: 169429 - DNA, 19 bp, Artificial sequence
  SiRNA target sequence
ctgggactgtttcatatat

SEQ ID NO: 169430 - DNA, 19 bp, Artificial sequence
  SiRNA target sequence
tgggactgtttcatatatt

SEQ ID NO: 169431 - DNA, 19 bp, Artificial sequence
  SiRNA target sequence
gggactgtttcatatattg

SEQ ID NO: 169432 - DNA, 19 bp, Artificial sequence
  SiRNA target sequence
ggactgtttcatatattga

SEQ ID NO: 169433 - DNA, 19 bp, Artificial sequence
  SiRNA target sequence
gactgtttcatatattgaa

SEQ ID NO: 169434 - DNA, 19 bp, Artificial sequence
  SiRNA target sequence
actgtttcatatattgaaa

SEQ ID NO: 169435 - DNA, 19 bp, Artificial sequence
  SiRNA target sequence
ctgtttcatatattgaaag

SEQ ID NO: 169436 - DNA, 19 bp, Artificial sequence
  SiRNA target sequence
tgtttcatatattgaaagg

SEQ ID NO: 169437 - DNA, 19 bp, Artificial sequence
  SiRNA target sequence
gtttcatatattgaaaggc

SEQ ID NO: 169438 - DNA, 19 bp, Artificial sequence
  SiRNA target sequence
tttcatatattgaaaggca

SEQ ID NO: 169439 - DNA, 19 bp, Artificial sequence
  SiRNA target sequence
ttcatatattgaaaggcaa

SEQ ID NO: 169440 - DNA, 19 bp, Artificial sequence
  SiRNA target sequence
tcatatattgaaaggcaag

SEQ ID NO: 169441 - DNA, 19 bp, Artificial sequence
  SiRNA target sequence
catatattgaaaggcaagc

SEQ ID NO: 169442 - DNA, 19 bp, Artificial sequence
  SiRNA target sequence
atatattgaaaggcaagca

SEQ ID NO: 169443 - DNA, 19 bp, Artificial sequence
  SiRNA target sequence
tatattgaaaggcaagcac

SEQ ID NO: 169444 - DNA, 19 bp, Artificial sequence
  SiRNA target sequence
atattgaaaggcaagcaca

SEQ ID NO: 169445 - DNA, 19 bp, Artificial sequence
  SiRNA target sequence
tattgaaaggcaagcacac

SEQ ID NO: 169446 - DNA, 19 bp, Artificial sequence
  SiRNA target sequence
attgaaaggcaagcacacc

SEQ ID NO: 169447 - DNA, 19 bp, Artificial sequence
  SiRNA target sequence
ttgaaaggcaagcacacca

SEQ ID NO: 169448 - DNA, 19 bp, Artificial sequence
  SiRNA target sequence
tgaaaggcaagcacaccat

SEQ ID NO: 169449 - DNA, 19 bp, Artificial sequence
  SiRNA target sequence
gaaaggcaagcacaccatt

SEQ ID NO: 169450 - DNA, 19 bp, Artificial sequence
  SiRNA target sequence
aaaggcaagcacaccattt

SEQ ID NO: 169451 - DNA, 19 bp, Artificial sequence
  SiRNA target sequence
aaggcaagcacaccattta

SEQ ID NO: 169452 - DNA, 19 bp, Artificial sequence
  SiRNA target sequence
aggcaagcacaccatttaa

SEQ ID NO: 169453 - DNA, 19 bp, Artificial sequence
  SiRNA target sequence
ggcaagcacaccatttaat

SEQ ID NO: 169454 - DNA, 19 bp, Artificial sequence
  SiRNA target sequence
gcaagcacaccatttaatt

SEQ ID NO: 169455 - DNA, 19 bp, Artificial sequence
  SiRNA target sequence
caagcacaccatttaattg

SEQ ID NO: 169456 - DNA, 19 bp, Artificial sequence
  SiRNA target sequence
aagcacaccatttaattga

SEQ ID NO: 169457 - DNA, 19 bp, Artificial sequence
  SiRNA target sequence
agcacaccatttaattgaa

SEQ ID NO: 169458 - DNA, 19 bp, Artificial sequence
  SiRNA target sequence
gcacaccatttaattgaat

SEQ ID NO: 169459 - DNA, 19 bp, Artificial sequence
  SiRNA target sequence
cacaccatttaattgaata

SEQ ID NO: 169460 - DNA, 19 bp, Artificial sequence
  SiRNA target sequence
acaccatttaattgaatat

SEQ ID NO: 169461 - DNA, 19 bp, Artificial sequence
  SiRNA target sequence
caccatttaattgaatatt

SEQ ID NO: 169462 - DNA, 19 bp, Artificial sequence
  SiRNA target sequence
accatttaattgaatattt

SEQ ID NO: 169463 - DNA, 19 bp, Artificial sequence
  SiRNA target sequence
ccatttaattgaatattta

SEQ ID NO: 169464 - DNA, 19 bp, Artificial sequence
  SiRNA target sequence
catttaattgaatatttat

SEQ ID NO: 169465 - DNA, 19 bp, Artificial sequence
  SiRNA target sequence
atttaattgaatatttatc

SEQ ID NO: 169466 - DNA, 19 bp, Artificial sequence
  SiRNA target sequence
tttaattgaatatttatct

SEQ ID NO: 169467 - DNA, 19 bp, Artificial sequence
  SiRNA target sequence
ttaattgaatatttatctg

SEQ ID NO: 169468 - DNA, 19 bp, Artificial sequence
  SiRNA target sequence
taattgaatatttatctgt

SEQ ID NO: 169469 - DNA, 19 bp, Artificial sequence
  SiRNA target sequence
aattgaatatttatctgtt

SEQ ID NO: 169470 - DNA, 19 bp, Artificial sequence
  SiRNA target sequence
attgaatatttatctgtta

SEQ ID NO: 169471 - DNA, 19 bp, Artificial sequence
  SiRNA target sequence
ttgaatatttatctgttac

SEQ ID NO: 169472 - DNA, 19 bp, Artificial sequence
  SiRNA target sequence
tgaatatttatctgttact

SEQ ID NO: 169473 - DNA, 19 bp, Artificial sequence
  SiRNA target sequence
gaatatttatctgttactt

SEQ ID NO: 169474 - DNA, 19 bp, Artificial sequence
  SiRNA target sequence
aatatttatctgttacttc

SEQ ID NO: 169475 - DNA, 19 bp, Artificial sequence
  SiRNA target sequence
atatttatctgttacttct

SEQ ID NO: 169476 - DNA, 19 bp, Artificial sequence
  SiRNA target sequence
tatttatctgttacttcta

SEQ ID NO: 169477 - DNA, 19 bp, Artificial sequence
  SiRNA target sequence
atttatctgttacttctac

SEQ ID NO: 169478 - DNA, 19 bp, Artificial sequence
  SiRNA target sequence
tttatctgttacttctaca

SEQ ID NO: 169479 - DNA, 19 bp, Artificial sequence
  SiRNA target sequence
ttatctgttacttctacac

SEQ ID NO: 169480 - DNA, 19 bp, Artificial sequence
  SiRNA target sequence
tatctgttacttctacaca

SEQ ID NO: 169481 - DNA, 19 bp, Artificial sequence
  SiRNA target sequence
atctgttacttctacacaa

SEQ ID NO: 169482 - DNA, 19 bp, Artificial sequence
  SiRNA target sequence
tctgttacttctacacaac

SEQ ID NO: 169483 - DNA, 19 bp, Artificial sequence
  SiRNA target sequence
ctgttacttctacacaaca

SEQ ID NO: 169484 - DNA, 19 bp, Artificial sequence
  SiRNA target sequence
tgttacttctacacaacaa

SEQ ID NO: 169485 - DNA, 19 bp, Artificial sequence
  SiRNA target sequence
gttacttctacacaacaac

SEQ ID NO: 169486 - DNA, 19 bp, Artificial sequence
  SiRNA target sequence
ttacttctacacaacaaca

SEQ ID NO: 169487 - DNA, 19 bp, Artificial sequence
  SiRNA target sequence
tacttctacacaacaacaa

SEQ ID NO: 169488 - DNA, 19 bp, Artificial sequence
  SiRNA target sequence
acttctacacaacaacaag

SEQ ID NO: 169489 - DNA, 19 bp, Artificial sequence
  SiRNA target sequence
cttctacacaacaacaagc

SEQ ID NO: 169490 - DNA, 19 bp, Artificial sequence
  SiRNA target sequence
ttctacacaacaacaagcc

SEQ ID NO: 169491 - DNA, 19 bp, Artificial sequence
  SiRNA target sequence
tctacacaacaacaagcca

SEQ ID NO: 169492 - DNA, 19 bp, Artificial sequence
  SiRNA target sequence
ctacacaacaacaagccat

SEQ ID NO: 169493 - DNA, 19 bp, Artificial sequence
  SiRNA target sequence
tacacaacaacaagccata

SEQ ID NO: 169494 - DNA, 19 bp, Artificial sequence
  SiRNA target sequence
acacaacaacaagccataa

SEQ ID NO: 169495 - DNA, 19 bp, Artificial sequence
  SiRNA target sequence
cacaacaacaagccataaa

SEQ ID NO: 169496 - DNA, 19 bp, Artificial sequence
  SiRNA target sequence
acaacaacaagccataaag

SEQ ID NO: 169497 - DNA, 19 bp, Artificial sequence
  SiRNA target sequence
caacaacaagccataaagc

SEQ ID NO: 169498 - DNA, 19 bp, Artificial sequence
  SiRNA target sequence
aacaacaagccataaagct

SEQ ID NO: 169499 - DNA, 19 bp, Artificial sequence
  SiRNA target sequence
acaacaagccataaagcta

SEQ ID NO: 169500 - DNA, 19 bp, Artificial sequence
  SiRNA target sequence
caacaagccataaagctac

SEQ ID NO: 169501 - DNA, 19 bp, Artificial sequence
  SiRNA target sequence
aacaagccataaagctact

SEQ ID NO: 169502 - DNA, 19 bp, Artificial sequence
  SiRNA target sequence
acaagccataaagctactt

SEQ ID NO: 169503 - DNA, 19 bp, Artificial sequence
  SiRNA target sequence
caagccataaagctacttg

SEQ ID NO: 169504 - DNA, 19 bp, Artificial sequence
  SiRNA target sequence
aagccataaagctacttgc

SEQ ID NO: 169505 - DNA, 19 bp, Artificial sequence
  SiRNA target sequence
agccataaagctacttgct

SEQ ID NO: 169506 - DNA, 19 bp, Artificial sequence
  SiRNA target sequence
gccataaagctacttgctc

SEQ ID NO: 169507 - DNA, 19 bp, Artificial sequence
  SiRNA target sequence
ccataaagctacttgctca

SEQ ID NO: 169508 - DNA, 19 bp, Artificial sequence
  SiRNA target sequence
cataaagctacttgctcag

SEQ ID NO: 169509 - DNA, 19 bp, Artificial sequence
  SiRNA target sequence
ataaagctacttgctcagg

SEQ ID NO: 169510 - DNA, 19 bp, Artificial sequence
  SiRNA target sequence
taaagctacttgctcaggg

SEQ ID NO: 169511 - DNA, 19 bp, Artificial sequence
  SiRNA target sequence
aaagctacttgctcagggg

SEQ ID NO: 169512 - DNA, 19 bp, Artificial sequence
  SiRNA target sequence
aagctacttgctcaggggc

SEQ ID NO: 169513 - DNA, 19 bp, Artificial sequence
  SiRNA target sequence
agctacttgctcaggggcg

SEQ ID NO: 169514 - DNA, 19 bp, Artificial sequence
  SiRNA target sequence
gctacttgctcaggggcga

SEQ ID NO: 169515 - DNA, 19 bp, Artificial sequence
  SiRNA target sequence
ctacttgctcaggggcgaa

SEQ ID NO: 169516 - DNA, 19 bp, Artificial sequence
  SiRNA target sequence
tacttgctcaggggcgaag

SEQ ID NO: 169517 - DNA, 19 bp, Artificial sequence
  SiRNA target sequence
acttgctcaggggcgaagt

SEQ ID NO: 169518 - DNA, 19 bp, Artificial sequence
  SiRNA target sequence
cttgctcaggggcgaagta

SEQ ID NO: 169519 - DNA, 19 bp, Artificial sequence
  SiRNA target sequence
ttgctcaggggcgaagtat

SEQ ID NO: 169520 - DNA, 19 bp, Artificial sequence
  SiRNA target sequence
tgctcaggggcgaagtata

SEQ ID NO: 169521 - DNA, 19 bp, Artificial sequence
  SiRNA target sequence
gctcaggggcgaagtataa

SEQ ID NO: 169522 - DNA, 19 bp, Artificial sequence
  SiRNA target sequence
ctcaggggcgaagtataag

SEQ ID NO: 169523 - DNA, 19 bp, Artificial sequence
  SiRNA target sequence
tcaggggcgaagtataagt

SEQ ID NO: 169524 - DNA, 19 bp, Artificial sequence
  SiRNA target sequence
caggggcgaagtataagtg

SEQ ID NO: 169525 - DNA, 19 bp, Artificial sequence
  SiRNA target sequence
aggggcgaagtataagtgt

SEQ ID NO: 169526 - DNA, 19 bp, Artificial sequence
  SiRNA target sequence
ggggcgaagtataagtgtc

SEQ ID NO: 169527 - DNA, 19 bp, Artificial sequence
  SiRNA target sequence
gggcgaagtataagtgtca

SEQ ID NO: 169528 - DNA, 19 bp, Artificial sequence
  SiRNA target sequence
ggcgaagtataagtgtcat

SEQ ID NO: 169529 - DNA, 19 bp, Artificial sequence
  SiRNA target sequence
gcgaagtataagtgtcata

SEQ ID NO: 169530 - DNA, 19 bp, Artificial sequence
  SiRNA target sequence
cgaagtataagtgtcatac

SEQ ID NO: 169531 - DNA, 19 bp, Artificial sequence
  SiRNA target sequence
gaagtataagtgtcataca

SEQ ID NO: 169532 - DNA, 19 bp, Artificial sequence
  SiRNA target sequence
aagtataagtgtcatacag

SEQ ID NO: 169533 - DNA, 19 bp, Artificial sequence
  SiRNA target sequence
agtataagtgtcatacagt

SEQ ID NO: 169534 - DNA, 19 bp, Artificial sequence
  SiRNA target sequence
gtataagtgtcatacagtg

SEQ ID NO: 169535 - DNA, 19 bp, Artificial sequence
  SiRNA target sequence
tataagtgtcatacagtgc

SEQ ID NO: 169536 - DNA, 19 bp, Artificial sequence
  SiRNA target sequence
ataagtgtcatacagtgct

SEQ ID NO: 169537 - DNA, 19 bp, Artificial sequence
  SiRNA target sequence
taagtgtcatacagtgcta

SEQ ID NO: 169538 - DNA, 19 bp, Artificial sequence
  SiRNA target sequence
aagtgtcatacagtgctat

SEQ ID NO: 169539 - DNA, 19 bp, Artificial sequence
  SiRNA target sequence
agtgtcatacagtgctatg

SEQ ID NO: 169540 - DNA, 19 bp, Artificial sequence
  SiRNA target sequence
gtgtcatacagtgctatga

SEQ ID NO: 169541 - DNA, 19 bp, Artificial sequence
  SiRNA target sequence
tgtcatacagtgctatgat

SEQ ID NO: 169542 - DNA, 19 bp, Artificial sequence
  SiRNA target sequence
gtcatacagtgctatgata

SEQ ID NO: 169543 - DNA, 19 bp, Artificial sequence
  SiRNA target sequence
tcatacagtgctatgataa

SEQ ID NO: 169544 - DNA, 19 bp, Artificial sequence
  SiRNA target sequence
catacagtgctatgataaa

SEQ ID NO: 169545 - DNA, 19 bp, Artificial sequence
  SiRNA target sequence
atacagtgctatgataaat

SEQ ID NO: 169546 - DNA, 19 bp, Artificial sequence
  SiRNA target sequence
tacagtgctatgataaatt

SEQ ID NO: 169547 - DNA, 19 bp, Artificial sequence
  SiRNA target sequence
acagtgctatgataaattt

SEQ ID NO: 169548 - DNA, 19 bp, Artificial sequence
  SiRNA target sequence
cagtgctatgataaatttt

SEQ ID NO: 169549 - DNA, 19 bp, Artificial sequence
  SiRNA target sequence
agtgctatgataaattttt

SEQ ID NO: 169550 - DNA, 19 bp, Artificial sequence
  SiRNA target sequence
gtgctatgataaattttta

SEQ ID NO: 169551 - DNA, 19 bp, Artificial sequence
  SiRNA target sequence
tgctatgataaatttttag

SEQ ID NO: 169552 - DNA, 19 bp, Artificial sequence
  SiRNA target sequence
gctatgataaatttttaga

SEQ ID NO: 169553 - DNA, 19 bp, Artificial sequence
  SiRNA target sequence
ctatgataaatttttagag

SEQ ID NO: 169554 - DNA, 19 bp, Artificial sequence
  SiRNA target sequence
tatgataaatttttagaga

SEQ ID NO: 169555 - DNA, 19 bp, Artificial sequence
  SiRNA target sequence
atgataaatttttagagaa

SEQ ID NO: 169556 - DNA, 19 bp, Artificial sequence
  SiRNA target sequence
tgataaatttttagagaat

SEQ ID NO: 169557 - DNA, 19 bp, Artificial sequence
  SiRNA target sequence
gataaatttttagagaata

SEQ ID NO: 169558 - DNA, 19 bp, Artificial sequence
  SiRNA target sequence
ataaatttttagagaatag

SEQ ID NO: 169559 - DNA, 19 bp, Artificial sequence
  SiRNA target sequence
taaatttttagagaatagc

SEQ ID NO: 169560 - DNA, 19 bp, Artificial sequence
  SiRNA target sequence
aaatttttagagaatagcg

SEQ ID NO: 169561 - DNA, 19 bp, Artificial sequence
  SiRNA target sequence
aatttttagagaatagcga

SEQ ID NO: 169562 - DNA, 19 bp, Artificial sequence
  SiRNA target sequence
atttttagagaatagcgat

SEQ ID NO: 169563 - DNA, 19 bp, Artificial sequence
  SiRNA target sequence
tttttagagaatagcgatg

SEQ ID NO: 169564 - DNA, 19 bp, Artificial sequence
  SiRNA target sequence
ttttagagaatagcgatga

SEQ ID NO: 169565 - DNA, 19 bp, Artificial sequence
  SiRNA target sequence
tttagagaatagcgatgat

SEQ ID NO: 169566 - DNA, 19 bp, Artificial sequence
  SiRNA target sequence
ttagagaatagcgatgatg

SEQ ID NO: 169567 - DNA, 19 bp, Artificial sequence
  SiRNA target sequence
tagagaatagcgatgatgt

SEQ ID NO: 169568 - DNA, 19 bp, Artificial sequence
  SiRNA target sequence
agagaatagcgatgatgtt

SEQ ID NO: 169569 - DNA, 19 bp, Artificial sequence
  SiRNA target sequence
gagaatagcgatgatgttt

SEQ ID NO: 169570 - DNA, 19 bp, Artificial sequence
  SiRNA target sequence
agaatagcgatgatgtttt

SEQ ID NO: 169571 - DNA, 19 bp, Artificial sequence
  SiRNA target sequence
gaatagcgatgatgtttta

SEQ ID NO: 169572 - DNA, 19 bp, Artificial sequence
  SiRNA target sequence
aatagcgatgatgttttaa

SEQ ID NO: 169573 - DNA, 19 bp, Artificial sequence
  SiRNA target sequence
atagcgatgatgttttaac

SEQ ID NO: 169574 - DNA, 19 bp, Artificial sequence
  SiRNA target sequence
tagcgatgatgttttaact

SEQ ID NO: 169575 - DNA, 19 bp, Artificial sequence
  SiRNA target sequence
agcgatgatgttttaacta

SEQ ID NO: 169576 - DNA, 19 bp, Artificial sequence
  SiRNA target sequence
gcgatgatgttttaactac

SEQ ID NO: 169577 - DNA, 19 bp, Artificial sequence
  SiRNA target sequence
cgatgatgttttaactacc

SEQ ID NO: 169578 - DNA, 19 bp, Artificial sequence
  SiRNA target sequence
gatgatgttttaactacct

SEQ ID NO: 169579 - DNA, 19 bp, Artificial sequence
  SiRNA target sequence
atgatgttttaactaccta

SEQ ID NO: 169580 - DNA, 19 bp, Artificial sequence
  SiRNA target sequence
tgatgttttaactacctat

SEQ ID NO: 169581 - DNA, 19 bp, Artificial sequence
  SiRNA target sequence
gatgttttaactacctatg

SEQ ID NO: 169582 - DNA, 19 bp, Artificial sequence
  SiRNA target sequence
atgttttaactacctatga

SEQ ID NO: 169583 - DNA, 19 bp, Artificial sequence
  SiRNA target sequence
tgttttaactacctatgat

SEQ ID NO: 169584 - DNA, 19 bp, Artificial sequence
  SiRNA target sequence
gttttaactacctatgatt

SEQ ID NO: 169585 - DNA, 19 bp, Artificial sequence
  SiRNA target sequence
ttttaactacctatgattt

SEQ ID NO: 169586 - DNA, 19 bp, Artificial sequence
  SiRNA target sequence
tttaactacctatgatttt

SEQ ID NO: 169587 - DNA, 19 bp, Artificial sequence
  SiRNA target sequence
ttaactacctatgattttt

SEQ ID NO: 169588 - DNA, 19 bp, Artificial sequence
  SiRNA target sequence
taactacctatgattttta

SEQ ID NO: 169589 - DNA, 19 bp, Artificial sequence
  SiRNA target sequence
aactacctatgatttttat

SEQ ID NO: 169590 - DNA, 19 bp, Artificial sequence
  SiRNA target sequence
actacctatgatttttata

SEQ ID NO: 169591 - DNA, 19 bp, Artificial sequence
  SiRNA target sequence
ctacctatgatttttataa

SEQ ID NO: 169592 - DNA, 19 bp, Artificial sequence
  SiRNA target sequence
tacctatgatttttataaa

SEQ ID NO: 169593 - DNA, 19 bp, Artificial sequence
  SiRNA target sequence
acctatgatttttataaaa

SEQ ID NO: 169594 - DNA, 19 bp, Artificial sequence
  SiRNA target sequence
cctatgatttttataaaat

SEQ ID NO: 169595 - DNA, 19 bp, Artificial sequence
  SiRNA target sequence
ctatgatttttataaaatg

SEQ ID NO: 169596 - DNA, 19 bp, Artificial sequence
  SiRNA target sequence
tatgatttttataaaatga

SEQ ID NO: 169597 - DNA, 19 bp, Artificial sequence
  SiRNA target sequence
atgatttttataaaatgat

SEQ ID NO: 169598 - DNA, 19 bp, Artificial sequence
  SiRNA target sequence
tgatttttataaaatgatt

SEQ ID NO: 169599 - DNA, 19 bp, Artificial sequence
  SiRNA target sequence
gatttttataaaatgattt

SEQ ID NO: 169600 - DNA, 19 bp, Artificial sequence
  SiRNA target sequence
atttttataaaatgatttt

SEQ ID NO: 169601 - DNA, 19 bp, Artificial sequence
  SiRNA target sequence
tttttataaaatgattttg

SEQ ID NO: 169602 - DNA, 19 bp, Artificial sequence
  SiRNA target sequence
ttttataaaatgattttgg

SEQ ID NO: 169603 - DNA, 19 bp, Artificial sequence
  SiRNA target sequence
tttataaaatgattttgga

SEQ ID NO: 169604 - DNA, 19 bp, Artificial sequence
  SiRNA target sequence
ttataaaatgattttggat

SEQ ID NO: 169605 - DNA, 19 bp, Artificial sequence
  SiRNA target sequence
tataaaatgattttggatc

SEQ ID NO: 169606 - DNA, 19 bp, Artificial sequence
  SiRNA target sequence
ataaaatgattttggatct

SEQ ID NO: 169607 - DNA, 19 bp, Artificial sequence
  SiRNA target sequence
taaaatgattttggatcta

SEQ ID NO: 169608 - DNA, 19 bp, Artificial sequence
  SiRNA target sequence
aaaatgattttggatctag

SEQ ID NO: 169609 - DNA, 19 bp, Artificial sequence
  SiRNA target sequence
aaatgattttggatctagg

SEQ ID NO: 169610 - DNA, 19 bp, Artificial sequence
  SiRNA target sequence
aatgattttggatctagga

SEQ ID NO: 169611 - DNA, 19 bp, Artificial sequence
  SiRNA target sequence
atgattttggatctaggat

SEQ ID NO: 169612 - DNA, 19 bp, Artificial sequence
  SiRNA target sequence
tgattttggatctaggatt

SEQ ID NO: 169613 - DNA, 19 bp, Artificial sequence
  SiRNA target sequence
gattttggatctaggattt

SEQ ID NO: 169614 - DNA, 19 bp, Artificial sequence
  SiRNA target sequence
attttggatctaggatttt

SEQ ID NO: 169615 - DNA, 19 bp, Artificial sequence
  SiRNA target sequence
ttttggatctaggattttt

SEQ ID NO: 169616 - DNA, 19 bp, Artificial sequence
  SiRNA target sequence
tttggatctaggattttta

SEQ ID NO: 169617 - DNA, 19 bp, Artificial sequence
  SiRNA target sequence
ttggatctaggatttttac

SEQ ID NO: 169618 - DNA, 19 bp, Artificial sequence
  SiRNA target sequence
tggatctaggatttttaca

SEQ ID NO: 169619 - DNA, 19 bp, Artificial sequence
  SiRNA target sequence
ggatctaggatttttacag

SEQ ID NO: 169620 - DNA, 19 bp, Artificial sequence
  SiRNA target sequence
gatctaggatttttacagc

SEQ ID NO: 169621 - DNA, 19 bp, Artificial sequence
  SiRNA target sequence
atctaggatttttacagca

SEQ ID NO: 169622 - DNA, 19 bp, Artificial sequence
  SiRNA target sequence
tctaggatttttacagcat

SEQ ID NO: 169623 - DNA, 19 bp, Artificial sequence
  SiRNA target sequence
ctaggatttttacagcata

SEQ ID NO: 169624 - DNA, 19 bp, Artificial sequence
  SiRNA target sequence
taggatttttacagcataa

SEQ ID NO: 169625 - DNA, 19 bp, Artificial sequence
  SiRNA target sequence
aggatttttacagcataat

SEQ ID NO: 169626 - DNA, 19 bp, Artificial sequence
  SiRNA target sequence
ggatttttacagcataatt

SEQ ID NO: 169627 - DNA, 19 bp, Artificial sequence
  SiRNA target sequence
gatttttacagcataattt

SEQ ID NO: 169628 - DNA, 19 bp, Artificial sequence
  SiRNA target sequence
atttttacagcataatttt

SEQ ID NO: 169629 - DNA, 19 bp, Artificial sequence
  SiRNA target sequence
tttttacagcataatttta

SEQ ID NO: 169630 - DNA, 19 bp, Artificial sequence
  SiRNA target sequence
ttttacagcataattttat

SEQ ID NO: 169631 - DNA, 19 bp, Artificial sequence
  SiRNA target sequence
tttacagcataattttatt

SEQ ID NO: 169632 - DNA, 19 bp, Artificial sequence
  SiRNA target sequence
ttacagcataattttatta

SEQ ID NO: 169633 - DNA, 19 bp, Artificial sequence
  SiRNA target sequence
tacagcataattttattaa

SEQ ID NO: 169634 - DNA, 19 bp, Artificial sequence
  SiRNA target sequence
acagcataattttattaaa

SEQ ID NO: 169635 - DNA, 19 bp, Artificial sequence
  SiRNA target sequence
cagcataattttattaaag

SEQ ID NO: 169636 - DNA, 19 bp, Artificial sequence
  SiRNA target sequence
agcataattttattaaagg

SEQ ID NO: 169637 - DNA, 19 bp, Artificial sequence
  SiRNA target sequence
gcataattttattaaagga

SEQ ID NO: 169638 - DNA, 19 bp, Artificial sequence
  SiRNA target sequence
cataattttattaaaggaa

SEQ ID NO: 169639 - DNA, 19 bp, Artificial sequence
  SiRNA target sequence
ataattttattaaaggaac

SEQ ID NO: 169640 - DNA, 19 bp, Artificial sequence
  SiRNA target sequence
taattttattaaaggaacc

SEQ ID NO: 169641 - DNA, 19 bp, Artificial sequence
  SiRNA target sequence
aattttattaaaggaacct

SEQ ID NO: 169642 - DNA, 19 bp, Artificial sequence
  SiRNA target sequence
attttattaaaggaacctg

SEQ ID NO: 169643 - DNA, 19 bp, Artificial sequence
  SiRNA target sequence
ttttattaaaggaacctgt

SEQ ID NO: 169644 - DNA, 19 bp, Artificial sequence
  SiRNA target sequence
tttattaaaggaacctgtg

SEQ ID NO: 169645 - DNA, 19 bp, Artificial sequence
  SiRNA target sequence
ttattaaaggaacctgtga

SEQ ID NO: 169646 - DNA, 19 bp, Artificial sequence
  SiRNA target sequence
tattaaaggaacctgtgag

SEQ ID NO: 169647 - DNA, 19 bp, Artificial sequence
  SiRNA target sequence
attaaaggaacctgtgaga

SEQ ID NO: 169648 - DNA, 19 bp, Artificial sequence
  SiRNA target sequence
ttaaaggaacctgtgagaa

SEQ ID NO: 169649 - DNA, 19 bp, Artificial sequence
  SiRNA target sequence
taaaggaacctgtgagaaa

SEQ ID NO: 169650 - DNA, 19 bp, Artificial sequence
  SiRNA target sequence
aaaggaacctgtgagaaat

SEQ ID NO: 169651 - DNA, 19 bp, Artificial sequence
  SiRNA target sequence
aaggaacctgtgagaaatg

SEQ ID NO: 169652 - DNA, 19 bp, Artificial sequence
  SiRNA target sequence
aggaacctgtgagaaatgg

SEQ ID NO: 169653 - DNA, 19 bp, Artificial sequence
  SiRNA target sequence
ggaacctgtgagaaatggg

SEQ ID NO: 169654 - DNA, 19 bp, Artificial sequence
  SiRNA target sequence
gaacctgtgagaaatggga

SEQ ID NO: 169655 - DNA, 19 bp, Artificial sequence
  SiRNA target sequence
aacctgtgagaaatgggag

SEQ ID NO: 169656 - DNA, 19 bp, Artificial sequence
  SiRNA target sequence
acctgtgagaaatgggaga

SEQ ID NO: 169657 - DNA, 19 bp, Artificial sequence
  SiRNA target sequence
cctgtgagaaatgggagaa

SEQ ID NO: 169658 - DNA, 19 bp, Artificial sequence
  SiRNA target sequence
ctgtgagaaatgggagaag

SEQ ID NO: 169659 - DNA, 19 bp, Artificial sequence
  SiRNA target sequence
tgtgagaaatgggagaagt

SEQ ID NO: 169660 - DNA, 19 bp, Artificial sequence
  SiRNA target sequence
gtgagaaatgggagaagtg

SEQ ID NO: 169661 - DNA, 19 bp, Artificial sequence
  SiRNA target sequence
tgagaaatgggagaagtgt

SEQ ID NO: 169662 - DNA, 19 bp, Artificial sequence
  SiRNA target sequence
gagaaatgggagaagtgta

SEQ ID NO: 169663 - DNA, 19 bp, Artificial sequence
  SiRNA target sequence
agaaatgggagaagtgtac

SEQ ID NO: 169664 - DNA, 19 bp, Artificial sequence
  SiRNA target sequence
gaaatgggagaagtgtact

SEQ ID NO: 169665 - DNA, 19 bp, Artificial sequence
  SiRNA target sequence
aaatgggagaagtgtacta

SEQ ID NO: 169666 - DNA, 19 bp, Artificial sequence
  SiRNA target sequence
aatgggagaagtgtactat

SEQ ID NO: 169667 - DNA, 19 bp, Artificial sequence
  SiRNA target sequence
atgggagaagtgtactatt

SEQ ID NO: 169668 - DNA, 19 bp, Artificial sequence
  SiRNA target sequence
tgggagaagtgtactattg

SEQ ID NO: 169669 - DNA, 19 bp, Artificial sequence
  SiRNA target sequence
gggagaagtgtactattgg

SEQ ID NO: 169670 - DNA, 19 bp, Artificial sequence
  SiRNA target sequence
ggagaagtgtactattgga

SEQ ID NO: 169671 - DNA, 19 bp, Artificial sequence
  SiRNA target sequence
gagaagtgtactattggat

SEQ ID NO: 169672 - DNA, 19 bp, Artificial sequence
  SiRNA target sequence
agaagtgtactattggata

SEQ ID NO: 169673 - DNA, 19 bp, Artificial sequence
  SiRNA target sequence
gaagtgtactattggatat

SEQ ID NO: 169674 - DNA, 19 bp, Artificial sequence
  SiRNA target sequence
aagtgtactattggatatc

SEQ ID NO: 169675 - DNA, 19 bp, Artificial sequence
  SiRNA target sequence
agtgtactattggatatca

SEQ ID NO: 169676 - DNA, 19 bp, Artificial sequence
  SiRNA target sequence
gtgtactattggatatcat

SEQ ID NO: 169677 - DNA, 19 bp, Artificial sequence
  SiRNA target sequence
tgtactattggatatcatt

SEQ ID NO: 169678 - DNA, 19 bp, Artificial sequence
  SiRNA target sequence
gtactattggatatcatta

SEQ ID NO: 169679 - DNA, 19 bp, Artificial sequence
  SiRNA target sequence
tactattggatatcattat

SEQ ID NO: 169680 - DNA, 19 bp, Artificial sequence
  SiRNA target sequence
actattggatatcattatg

SEQ ID NO: 169681 - DNA, 19 bp, Artificial sequence
  SiRNA target sequence
ctattggatatcattatgg

SEQ ID NO: 169682 - DNA, 19 bp, Artificial sequence
  SiRNA target sequence
tattggatatcattatgga

SEQ ID NO: 169683 - DNA, 19 bp, Artificial sequence
  SiRNA target sequence
attggatatcattatggat

SEQ ID NO: 169684 - DNA, 19 bp, Artificial sequence
  SiRNA target sequence
ttggatatcattatggata

SEQ ID NO: 169685 - DNA, 19 bp, Artificial sequence
  SiRNA target sequence
tggatatcattatggatat

SEQ ID NO: 169686 - DNA, 19 bp, Artificial sequence
  SiRNA target sequence
ggatatcattatggatatt

SEQ ID NO: 169687 - DNA, 19 bp, Artificial sequence
  SiRNA target sequence
gatatcattatggatattt

SEQ ID NO: 169688 - DNA, 19 bp, Artificial sequence
  SiRNA target sequence
atatcattatggatattta

SEQ ID NO: 169689 - DNA, 19 bp, Artificial sequence
  SiRNA target sequence
tatcattatggatatttag

SEQ ID NO: 169690 - DNA, 19 bp, Artificial sequence
  SiRNA target sequence
atcattatggatatttaga

SEQ ID NO: 169691 - DNA, 19 bp, Artificial sequence
  SiRNA target sequence
tcattatggatatttagaa

SEQ ID NO: 169692 - DNA, 19 bp, Artificial sequence
  SiRNA target sequence
cattatggatatttagaac

SEQ ID NO: 169693 - DNA, 19 bp, Artificial sequence
  SiRNA target sequence
attatggatatttagaaca

SEQ ID NO: 169694 - DNA, 19 bp, Artificial sequence
  SiRNA target sequence
ttatggatatttagaacac

SEQ ID NO: 169695 - DNA, 19 bp, Artificial sequence
  SiRNA target sequence
tatggatatttagaacaca

SEQ ID NO: 169696 - DNA, 19 bp, Artificial sequence
  SiRNA target sequence
atggatatttagaacacat

SEQ ID NO: 169697 - DNA, 19 bp, Artificial sequence
  SiRNA target sequence
tggatatttagaacacata

SEQ ID NO: 169698 - DNA, 19 bp, Artificial sequence
  SiRNA target sequence
ggatatttagaacacatat

SEQ ID NO: 169699 - DNA, 19 bp, Artificial sequence
  SiRNA target sequence
gatatttagaacacatatt

SEQ ID NO: 169700 - DNA, 19 bp, Artificial sequence
  SiRNA target sequence
atatttagaacacatatta

SEQ ID NO: 169701 - DNA, 19 bp, Artificial sequence
  SiRNA target sequence
tatttagaacacatattaa

SEQ ID NO: 169702 - DNA, 19 bp, Artificial sequence
  SiRNA target sequence
atttagaacacatattaaa

SEQ ID NO: 169703 - DNA, 19 bp, Artificial sequence
  SiRNA target sequence
tttagaacacatattaaat

SEQ ID NO: 169704 - DNA, 19 bp, Artificial sequence
  SiRNA target sequence
ttagaacacatattaaata

SEQ ID NO: 169705 - DNA, 19 bp, Artificial sequence
  SiRNA target sequence
tagaacacatattaaataa

SEQ ID NO: 169706 - DNA, 19 bp, Artificial sequence
  SiRNA target sequence
agaacacatattaaataag

SEQ ID NO: 169707 - DNA, 19 bp, Artificial sequence
  SiRNA target sequence
gaacacatattaaataaga

SEQ ID NO: 169708 - DNA, 19 bp, Artificial sequence
  SiRNA target sequence
aacacatattaaataagaa

SEQ ID NO: 169709 - DNA, 19 bp, Artificial sequence
  SiRNA target sequence
acacatattaaataagaag

SEQ ID NO: 169710 - DNA, 19 bp, Artificial sequence
  SiRNA target sequence
cacatattaaataagaaga

SEQ ID NO: 169711 - DNA, 19 bp, Artificial sequence
  SiRNA target sequence
acatattaaataagaagaa

SEQ ID NO: 169712 - DNA, 19 bp, Artificial sequence
  SiRNA target sequence
catattaaataagaagaac

SEQ ID NO: 169713 - DNA, 19 bp, Artificial sequence
  SiRNA target sequence
atattaaataagaagaaca

SEQ ID NO: 169714 - DNA, 19 bp, Artificial sequence
  SiRNA target sequence
tattaaataagaagaacaa

SEQ ID NO: 169715 - DNA, 19 bp, Artificial sequence
  SiRNA target sequence
attaaataagaagaacaat

SEQ ID NO: 169716 - DNA, 19 bp, Artificial sequence
  SiRNA target sequence
ttaaataagaagaacaatt

SEQ ID NO: 169717 - DNA, 19 bp, Artificial sequence
  SiRNA target sequence
taaataagaagaacaatta

SEQ ID NO: 169718 - DNA, 19 bp, Artificial sequence
  SiRNA target sequence
aaataagaagaacaattat

SEQ ID NO: 169719 - DNA, 19 bp, Artificial sequence
  SiRNA target sequence
aataagaagaacaattatt

SEQ ID NO: 169720 - DNA, 19 bp, Artificial sequence
  SiRNA target sequence
ataagaagaacaattattt

SEQ ID NO: 169721 - DNA, 19 bp, Artificial sequence
  SiRNA target sequence
taagaagaacaattattta

SEQ ID NO: 169722 - DNA, 19 bp, Artificial sequence
  SiRNA target sequence
aagaagaacaattatttaa

SEQ ID NO: 169723 - DNA, 19 bp, Artificial sequence
  SiRNA target sequence
agaagaacaattatttaac

SEQ ID NO: 169724 - DNA, 19 bp, Artificial sequence
  SiRNA target sequence
gaagaacaattatttaaca

SEQ ID NO: 169725 - DNA, 19 bp, Artificial sequence
  SiRNA target sequence
aagaacaattatttaacaa

SEQ ID NO: 169726 - DNA, 19 bp, Artificial sequence
  SiRNA target sequence
agaacaattatttaacaaa

SEQ ID NO: 169727 - DNA, 19 bp, Artificial sequence
  SiRNA target sequence
gaacaattatttaacaaaa

SEQ ID NO: 169728 - DNA, 19 bp, Artificial sequence
  SiRNA target sequence
aacaattatttaacaaaaa

SEQ ID NO: 169729 - DNA, 19 bp, Artificial sequence
  SiRNA target sequence
acaattatttaacaaaaaa

SEQ ID NO: 169730 - DNA, 19 bp, Artificial sequence
  SiRNA target sequence
caattatttaacaaaaaat

SEQ ID NO: 169731 - DNA, 19 bp, Artificial sequence
  SiRNA target sequence
aattatttaacaaaaaatg

SEQ ID NO: 169732 - DNA, 19 bp, Artificial sequence
  SiRNA target sequence
attatttaacaaaaaatga

SEQ ID NO: 169733 - DNA, 19 bp, Artificial sequence
  SiRNA target sequence
ttatttaacaaaaaatgat

SEQ ID NO: 169734 - DNA, 19 bp, Artificial sequence
  SiRNA target sequence
tatttaacaaaaaatgata

SEQ ID NO: 169735 - DNA, 19 bp, Artificial sequence
  SiRNA target sequence
atttaacaaaaaatgatag

SEQ ID NO: 169736 - DNA, 19 bp, Artificial sequence
  SiRNA target sequence
tttaacaaaaaatgatagt

SEQ ID NO: 169737 - DNA, 19 bp, Artificial sequence
  SiRNA target sequence
ttaacaaaaaatgatagta

SEQ ID NO: 169738 - DNA, 19 bp, Artificial sequence
  SiRNA target sequence
taacaaaaaatgatagtat

SEQ ID NO: 169739 - DNA, 19 bp, Artificial sequence
  SiRNA target sequence
aacaaaaaatgatagtata

SEQ ID NO: 169740 - DNA, 19 bp, Artificial sequence
  SiRNA target sequence
acaaaaaatgatagtataa

SEQ ID NO: 169741 - DNA, 19 bp, Artificial sequence
  SiRNA target sequence
caaaaaatgatagtataaa

SEQ ID NO: 169742 - DNA, 19 bp, Artificial sequence
  SiRNA target sequence
aaaaaatgatagtataaaa

SEQ ID NO: 169743 - DNA, 19 bp, Artificial sequence
  SiRNA target sequence
aaaaatgatagtataaaaa

SEQ ID NO: 169744 - DNA, 19 bp, Artificial sequence
  SiRNA target sequence
aaaatgatagtataaaaat

SEQ ID NO: 169745 - DNA, 19 bp, Artificial sequence
  SiRNA target sequence
aaatgatagtataaaaata

SEQ ID NO: 169746 - DNA, 19 bp, Artificial sequence
  SiRNA target sequence
aatgatagtataaaaatat

SEQ ID NO: 169747 - DNA, 19 bp, Artificial sequence
  SiRNA target sequence
atgatagtataaaaatatt

SEQ ID NO: 169748 - DNA, 19 bp, Artificial sequence
  SiRNA target sequence
tgatagtataaaaatattt

SEQ ID NO: 169749 - DNA, 19 bp, Artificial sequence
  SiRNA target sequence
gatagtataaaaatattta

SEQ ID NO: 169750 - DNA, 19 bp, Artificial sequence
  SiRNA target sequence
atagtataaaaatatttaa

SEQ ID NO: 169751 - DNA, 19 bp, Artificial sequence
  SiRNA target sequence
tagtataaaaatatttaac

SEQ ID NO: 169752 - DNA, 19 bp, Artificial sequence
  SiRNA target sequence
agtataaaaatatttaaca

SEQ ID NO: 169753 - DNA, 19 bp, Artificial sequence
  SiRNA target sequence
gtataaaaatatttaacag

SEQ ID NO: 169754 - DNA, 19 bp, Artificial sequence
  SiRNA target sequence
tataaaaatatttaacagt

SEQ ID NO: 169755 - DNA, 19 bp, Artificial sequence
  SiRNA target sequence
ataaaaatatttaacagta

SEQ ID NO: 169756 - DNA, 19 bp, Artificial sequence
  SiRNA target sequence
taaaaatatttaacagtaa

SEQ ID NO: 169757 - DNA, 19 bp, Artificial sequence
  SiRNA target sequence
aaaaatatttaacagtaaa

SEQ ID NO: 169758 - DNA, 19 bp, Artificial sequence
  SiRNA target sequence
aaaatatttaacagtaaaa

SEQ ID NO: 169759 - DNA, 19 bp, Artificial sequence
  SiRNA target sequence
aaatatttaacagtaaaaa

SEQ ID NO: 169760 - DNA, 19 bp, Artificial sequence
  SiRNA target sequence
aatatttaacagtaaaaat

SEQ ID NO: 169761 - DNA, 19 bp, Artificial sequence
  SiRNA target sequence
atatttaacagtaaaaatg

SEQ ID NO: 169762 - DNA, 19 bp, Artificial sequence
  SiRNA target sequence
tatttaacagtaaaaatga

SEQ ID NO: 169763 - DNA, 19 bp, Artificial sequence
  SiRNA target sequence
atttaacagtaaaaatgag

SEQ ID NO: 169764 - DNA, 19 bp, Artificial sequence
  SiRNA target sequence
tttaacagtaaaaatgagg

SEQ ID NO: 169765 - DNA, 19 bp, Artificial sequence
  SiRNA target sequence
ttaacagtaaaaatgagga

SEQ ID NO: 169766 - DNA, 19 bp, Artificial sequence
  SiRNA target sequence
taacagtaaaaatgaggag

SEQ ID NO: 169767 - DNA, 19 bp, Artificial sequence
  SiRNA target sequence
aacagtaaaaatgaggagg

SEQ ID NO: 169768 - DNA, 19 bp, Artificial sequence
  SiRNA target sequence
acagtaaaaatgaggaggt

SEQ ID NO: 169769 - DNA, 19 bp, Artificial sequence
  SiRNA target sequence
cagtaaaaatgaggaggta

SEQ ID NO: 169770 - DNA, 19 bp, Artificial sequence
  SiRNA target sequence
agtaaaaatgaggaggtaa

SEQ ID NO: 169771 - DNA, 19 bp, Artificial sequence
  SiRNA target sequence
gtaaaaatgaggaggtaag

SEQ ID NO: 169772 - DNA, 19 bp, Artificial sequence
  SiRNA target sequence
taaaaatgaggaggtaagg

SEQ ID NO: 169773 - DNA, 19 bp, Artificial sequence
  SiRNA target sequence
aaaaatgaggaggtaaggt

SEQ ID NO: 169774 - DNA, 19 bp, Artificial sequence
  SiRNA target sequence
aaaatgaggaggtaaggtt

SEQ ID NO: 169775 - DNA, 19 bp, Artificial sequence
  SiRNA target sequence
aaatgaggaggtaaggtta

SEQ ID NO: 169776 - DNA, 19 bp, Artificial sequence
  SiRNA target sequence
aatgaggaggtaaggttaa

SEQ ID NO: 169777 - DNA, 19 bp, Artificial sequence
  SiRNA target sequence
atgaggaggtaaggttaaa

SEQ ID NO: 169778 - DNA, 19 bp, Artificial sequence
  SiRNA target sequence
tgaggaggtaaggttaaat

SEQ ID NO: 169779 - DNA, 19 bp, Artificial sequence
  SiRNA target sequence
gaggaggtaaggttaaatg

SEQ ID NO: 169780 - DNA, 19 bp, Artificial sequence
  SiRNA target sequence
aggaggtaaggttaaatgg

SEQ ID NO: 169781 - DNA, 19 bp, Artificial sequence
  SiRNA target sequence
ggaggtaaggttaaatgga

SEQ ID NO: 169782 - DNA, 19 bp, Artificial sequence
  SiRNA target sequence
gaggtaaggttaaatggaa

SEQ ID NO: 169783 - DNA, 19 bp, Artificial sequence
  SiRNA target sequence
aggtaaggttaaatggaaa

SEQ ID NO: 169784 - DNA, 19 bp, Artificial sequence
  SiRNA target sequence
ggtaaggttaaatggaaaa

SEQ ID NO: 169785 - DNA, 19 bp, Artificial sequence
  SiRNA target sequence
gtaaggttaaatggaaaaa

SEQ ID NO: 169786 - DNA, 19 bp, Artificial sequence
  SiRNA target sequence
taaggttaaatggaaaaag

SEQ ID NO: 169787 - DNA, 19 bp, Artificial sequence
  SiRNA target sequence
aaggttaaatggaaaaaga

SEQ ID NO: 169788 - DNA, 19 bp, Artificial sequence
  SiRNA target sequence
aggttaaatggaaaaagaa

SEQ ID NO: 169789 - DNA, 19 bp, Artificial sequence
  SiRNA target sequence
ggttaaatggaaaaagaaa

SEQ ID NO: 169790 - DNA, 19 bp, Artificial sequence
  SiRNA target sequence
gttaaatggaaaaagaaaa

SEQ ID NO: 169791 - DNA, 19 bp, Artificial sequence
  SiRNA target sequence
ttaaatggaaaaagaaaat

SEQ ID NO: 169792 - DNA, 19 bp, Artificial sequence
  SiRNA target sequence
taaatggaaaaagaaaatt

SEQ ID NO: 169793 - DNA, 19 bp, Artificial sequence
  SiRNA target sequence
aaatggaaaaagaaaatta

SEQ ID NO: 169794 - DNA, 19 bp, Artificial sequence
  SiRNA target sequence
aatggaaaaagaaaattaa

SEQ ID NO: 169795 - DNA, 19 bp, Artificial sequence
  SiRNA target sequence
atggaaaaagaaaattaaa

SEQ ID NO: 169796 - DNA, 19 bp, Artificial sequence
  SiRNA target sequence
tggaaaaagaaaattaaat

SEQ ID NO: 169797 - DNA, 19 bp, Artificial sequence
  SiRNA target sequence
ggaaaaagaaaattaaata

SEQ ID NO: 169798 - DNA, 19 bp, Artificial sequence
  SiRNA target sequence
gaaaaagaaaattaaatat

SEQ ID NO: 169799 - DNA, 19 bp, Artificial sequence
  SiRNA target sequence
aaaaagaaaattaaatatt

SEQ ID NO: 169800 - DNA, 19 bp, Artificial sequence
  SiRNA target sequence
aaaagaaaattaaatatta

SEQ ID NO: 169801 - DNA, 19 bp, Artificial sequence
  SiRNA target sequence
aaagaaaattaaatattaa

SEQ ID NO: 169802 - DNA, 19 bp, Artificial sequence
  SiRNA target sequence
aagaaaattaaatattaac

SEQ ID NO: 169803 - DNA, 19 bp, Artificial sequence
  SiRNA target sequence
agaaaattaaatattaaca

SEQ ID NO: 169804 - DNA, 19 bp, Artificial sequence
  SiRNA target sequence
gaaaattaaatattaacac

SEQ ID NO: 169805 - DNA, 19 bp, Artificial sequence
  SiRNA target sequence
aaaattaaatattaacaca

SEQ ID NO: 169806 - DNA, 19 bp, Artificial sequence
  SiRNA target sequence
aaattaaatattaacacag

SEQ ID NO: 169807 - DNA, 19 bp, Artificial sequence
  SiRNA target sequence
aattaaatattaacacagt

SEQ ID NO: 169808 - DNA, 19 bp, Artificial sequence
  SiRNA target sequence
attaaatattaacacagtt

SEQ ID NO: 169809 - DNA, 19 bp, Artificial sequence
  SiRNA target sequence
ttaaatattaacacagtta

SEQ ID NO: 169810 - DNA, 19 bp, Artificial sequence
  SiRNA target sequence
taaatattaacacagttac

SEQ ID NO: 169811 - DNA, 19 bp, Artificial sequence
  SiRNA target sequence
aaatattaacacagttaca

SEQ ID NO: 169812 - DNA, 19 bp, Artificial sequence
  SiRNA target sequence
aatattaacacagttacat

SEQ ID NO: 169813 - DNA, 19 bp, Artificial sequence
  SiRNA target sequence
atattaacacagttacatt

SEQ ID NO: 169814 - DNA, 19 bp, Artificial sequence
  SiRNA target sequence
tattaacacagttacatta

SEQ ID NO: 169815 - DNA, 19 bp, Artificial sequence
  SiRNA target sequence
attaacacagttacattaa

SEQ ID NO: 169816 - DNA, 19 bp, Artificial sequence
  SiRNA target sequence
ttaacacagttacattaaa

SEQ ID NO: 169817 - DNA, 19 bp, Artificial sequence
  SiRNA target sequence
taacacagttacattaaat

SEQ ID NO: 169818 - DNA, 19 bp, Artificial sequence
  SiRNA target sequence
aacacagttacattaaata

SEQ ID NO: 169819 - DNA, 19 bp, Artificial sequence
  SiRNA target sequence
acacagttacattaaataa

SEQ ID NO: 169820 - DNA, 19 bp, Artificial sequence
  SiRNA target sequence
cacagttacattaaataaa

SEQ ID NO: 169821 - DNA, 19 bp, Artificial sequence
  SiRNA target sequence
acagttacattaaataaaa

SEQ ID NO: 169822 - DNA, 19 bp, Artificial sequence
  SiRNA target sequence
cagttacattaaataaaat

SEQ ID NO: 169823 - DNA, 19 bp, Artificial sequence
  SiRNA target sequence
agttacattaaataaaatt

SEQ ID NO: 169824 - DNA, 19 bp, Artificial sequence
  SiRNA target sequence
gttacattaaataaaatta

SEQ ID NO: 169825 - DNA, 19 bp, Artificial sequence
  SiRNA target sequence
ttacattaaataaaattaa

SEQ ID NO: 169826 - DNA, 19 bp, Artificial sequence
  SiRNA target sequence
tacattaaataaaattaat

SEQ ID NO: 169827 - DNA, 19 bp, Artificial sequence
  SiRNA target sequence
acattaaataaaattaata

SEQ ID NO: 169828 - DNA, 19 bp, Artificial sequence
  SiRNA target sequence
cattaaataaaattaatat

SEQ ID NO: 169829 - DNA, 19 bp, Artificial sequence
  SiRNA target sequence
attaaataaaattaatata

SEQ ID NO: 169830 - DNA, 19 bp, Artificial sequence
  SiRNA target sequence
ttaaataaaattaatatac

SEQ ID NO: 169831 - DNA, 19 bp, Artificial sequence
  SiRNA target sequence
taaataaaattaatatacc

SEQ ID NO: 169832 - DNA, 19 bp, Artificial sequence
  SiRNA target sequence
aaataaaattaatatacct

SEQ ID NO: 169833 - DNA, 19 bp, Artificial sequence
  SiRNA target sequence
aataaaattaatatacctg

SEQ ID NO: 169834 - DNA, 19 bp, Artificial sequence
  SiRNA target sequence
ataaaattaatatacctga

SEQ ID NO: 169835 - DNA, 19 bp, Artificial sequence
  SiRNA target sequence
taaaattaatatacctgag

SEQ ID NO: 169836 - DNA, 19 bp, Artificial sequence
  SiRNA target sequence
aaaattaatatacctgaga

SEQ ID NO: 169837 - DNA, 19 bp, Artificial sequence
  SiRNA target sequence
aaattaatatacctgagat

SEQ ID NO: 169838 - DNA, 19 bp, Artificial sequence
  SiRNA target sequence
aattaatatacctgagata

SEQ ID NO: 169839 - DNA, 19 bp, Artificial sequence
  SiRNA target sequence
attaatatacctgagatag

SEQ ID NO: 169840 - DNA, 19 bp, Artificial sequence
  SiRNA target sequence
ttaatatacctgagataga

SEQ ID NO: 169841 - DNA, 19 bp, Artificial sequence
  SiRNA target sequence
taatatacctgagatagat

SEQ ID NO: 169842 - DNA, 19 bp, Artificial sequence
  SiRNA target sequence
aatatacctgagatagatt

SEQ ID NO: 169843 - DNA, 19 bp, Artificial sequence
  SiRNA target sequence
atatacctgagatagatta

SEQ ID NO: 169844 - DNA, 19 bp, Artificial sequence
  SiRNA target sequence
tatacctgagatagattat

SEQ ID NO: 169845 - DNA, 19 bp, Artificial sequence
  SiRNA target sequence
atacctgagatagattata

SEQ ID NO: 169846 - DNA, 19 bp, Artificial sequence
  SiRNA target sequence
tacctgagatagattataa

SEQ ID NO: 169847 - DNA, 19 bp, Artificial sequence
  SiRNA target sequence
acctgagatagattataaa

SEQ ID NO: 169848 - DNA, 19 bp, Artificial sequence
  SiRNA target sequence
cctgagatagattataaat

SEQ ID NO: 169849 - DNA, 19 bp, Artificial sequence
  SiRNA target sequence
ctgagatagattataaata

SEQ ID NO: 169850 - DNA, 19 bp, Artificial sequence
  SiRNA target sequence
tgagatagattataaatat

SEQ ID NO: 169851 - DNA, 19 bp, Artificial sequence
  SiRNA target sequence
gagatagattataaatata

SEQ ID NO: 169852 - DNA, 19 bp, Artificial sequence
  SiRNA target sequence
agatagattataaatataa

SEQ ID NO: 169853 - DNA, 19 bp, Artificial sequence
  SiRNA target sequence
gatagattataaatataaa

SEQ ID NO: 169854 - DNA, 19 bp, Artificial sequence
  SiRNA target sequence
atagattataaatataaaa

SEQ ID NO: 169855 - DNA, 19 bp, Artificial sequence
  SiRNA target sequence
tagattataaatataaaaa

SEQ ID NO: 169856 - DNA, 19 bp, Artificial sequence
  SiRNA target sequence
agattataaatataaaaat

SEQ ID NO: 169857 - DNA, 19 bp, Artificial sequence
  SiRNA target sequence
gattataaatataaaaatg

SEQ ID NO: 169858 - DNA, 19 bp, Artificial sequence
  SiRNA target sequence
attataaatataaaaatgg

SEQ ID NO: 169859 - DNA, 19 bp, Artificial sequence
  SiRNA target sequence
ttataaatataaaaatgga

SEQ ID NO: 169860 - DNA, 19 bp, Artificial sequence
  SiRNA target sequence
tataaatataaaaatggag

SEQ ID NO: 169861 - DNA, 19 bp, Artificial sequence
  SiRNA target sequence
ataaatataaaaatggagt

SEQ ID NO: 169862 - DNA, 19 bp, Artificial sequence
  SiRNA target sequence
taaatataaaaatggagtg

SEQ ID NO: 169863 - DNA, 19 bp, Artificial sequence
  SiRNA target sequence
aaatataaaaatggagtgt

SEQ ID NO: 169864 - DNA, 19 bp, Artificial sequence
  SiRNA target sequence
aatataaaaatggagtgtt

SEQ ID NO: 169865 - DNA, 19 bp, Artificial sequence
  SiRNA target sequence
atataaaaatggagtgttt

SEQ ID NO: 169866 - DNA, 19 bp, Artificial sequence
  SiRNA target sequence
tataaaaatggagtgttta

SEQ ID NO: 169867 - DNA, 19 bp, Artificial sequence
  SiRNA target sequence
ataaaaatggagtgtttac

SEQ ID NO: 169868 - DNA, 19 bp, Artificial sequence
  SiRNA target sequence
taaaaatggagtgtttaca

SEQ ID NO: 169869 - DNA, 19 bp, Artificial sequence
  SiRNA target sequence
aaaaatggagtgtttacat

SEQ ID NO: 169870 - DNA, 19 bp, Artificial sequence
  SiRNA target sequence
aaaatggagtgtttacata

SEQ ID NO: 169871 - DNA, 19 bp, Artificial sequence
  SiRNA target sequence
aaatggagtgtttacatat

SEQ ID NO: 169872 - DNA, 19 bp, Artificial sequence
  SiRNA target sequence
aatggagtgtttacatata

SEQ ID NO: 169873 - DNA, 19 bp, Artificial sequence
  SiRNA target sequence
atggagtgtttacatatac

SEQ ID NO: 169874 - DNA, 19 bp, Artificial sequence
  SiRNA target sequence
tggagtgtttacatataca

SEQ ID NO: 169875 - DNA, 19 bp, Artificial sequence
  SiRNA target sequence
ggagtgtttacatatacac

SEQ ID NO: 169876 - DNA, 19 bp, Artificial sequence
  SiRNA target sequence
gagtgtttacatatacaca

SEQ ID NO: 169877 - DNA, 19 bp, Artificial sequence
  SiRNA target sequence
agtgtttacatatacacag

SEQ ID NO: 169878 - DNA, 19 bp, Artificial sequence
  SiRNA target sequence
gtgtttacatatacacaga

SEQ ID NO: 169879 - DNA, 19 bp, Artificial sequence
  SiRNA target sequence
tgtttacatatacacagat

SEQ ID NO: 169880 - DNA, 19 bp, Artificial sequence
  SiRNA target sequence
gtttacatatacacagatc

SEQ ID NO: 169881 - DNA, 19 bp, Artificial sequence
  SiRNA target sequence
tttacatatacacagatca

SEQ ID NO: 169882 - DNA, 19 bp, Artificial sequence
  SiRNA target sequence
ttacatatacacagatcaa

SEQ ID NO: 169883 - DNA, 19 bp, Artificial sequence
  SiRNA target sequence
tacatatacacagatcaaa

SEQ ID NO: 169884 - DNA, 19 bp, Artificial sequence
  SiRNA target sequence
acatatacacagatcaaaa

SEQ ID NO: 169885 - DNA, 19 bp, Artificial sequence
  SiRNA target sequence
catatacacagatcaaaaa

SEQ ID NO: 169886 - DNA, 19 bp, Artificial sequence
  SiRNA target sequence
atatacacagatcaaaaat

SEQ ID NO: 169887 - DNA, 19 bp, Artificial sequence
  SiRNA target sequence
tatacacagatcaaaaata

SEQ ID NO: 169888 - DNA, 19 bp, Artificial sequence
  SiRNA target sequence
atacacagatcaaaaataa

SEQ ID NO: 169889 - DNA, 19 bp, Artificial sequence
  SiRNA target sequence
tacacagatcaaaaataat

SEQ ID NO: 169890 - DNA, 19 bp, Artificial sequence
  SiRNA target sequence
acacagatcaaaaataata

SEQ ID NO: 169891 - DNA, 19 bp, Artificial sequence
  SiRNA target sequence
cacagatcaaaaataataa

SEQ ID NO: 169892 - DNA, 19 bp, Artificial sequence
  SiRNA target sequence
acagatcaaaaataataag

SEQ ID NO: 169893 - DNA, 19 bp, Artificial sequence
  SiRNA target sequence
cagatcaaaaataataaga

SEQ ID NO: 169894 - DNA, 19 bp, Artificial sequence
  SiRNA target sequence
agatcaaaaataataagaa

SEQ ID NO: 169895 - DNA, 19 bp, Artificial sequence
  SiRNA target sequence
gatcaaaaataataagaaa

SEQ ID NO: 169896 - DNA, 19 bp, Artificial sequence
  SiRNA target sequence
atcaaaaataataagaaaa

SEQ ID NO: 169897 - DNA, 19 bp, Artificial sequence
  SiRNA target sequence
tcaaaaataataagaaaaa

SEQ ID NO: 169898 - DNA, 19 bp, Artificial sequence
  SiRNA target sequence
caaaaataataagaaaaaa

SEQ ID NO: 169899 - DNA, 19 bp, Artificial sequence
  SiRNA target sequence
aaaaataataagaaaaaaa

SEQ ID NO: 169900 - DNA, 19 bp, Artificial sequence
  SiRNA target sequence
aaaataataagaaaaaaaa

SEQ ID NO: 169901 - DNA, 19 bp, Artificial sequence
  SiRNA target sequence
aaataataagaaaaaaaaa

SEQ ID NO: 169902 - DNA, 19 bp, Artificial sequence
  SiRNA target sequence
aataataagaaaaaaaaat

SEQ ID NO: 169903 - DNA, 19 bp, Artificial sequence
  SiRNA target sequence
ataataagaaaaaaaaata

SEQ ID NO: 169904 - DNA, 19 bp, Artificial sequence
  SiRNA target sequence
taataagaaaaaaaaatat

SEQ ID NO: 169905 - DNA, 19 bp, Artificial sequence
  SiRNA target sequence
aataagaaaaaaaaatatt

SEQ ID NO: 169906 - DNA, 19 bp, Artificial sequence
  SiRNA target sequence
ataagaaaaaaaaatattt

SEQ ID NO: 169907 - DNA, 19 bp, Artificial sequence
  SiRNA target sequence
taagaaaaaaaaatattta

SEQ ID NO: 169908 - DNA, 19 bp, Artificial sequence
  SiRNA target sequence
aagaaaaaaaaatatttaa

SEQ ID NO: 169909 - DNA, 19 bp, Artificial sequence
  SiRNA target sequence
agaaaaaaaaatatttaag

SEQ ID NO: 169910 - DNA, 19 bp, Artificial sequence
  SiRNA target sequence
gaaaaaaaaatatttaaga

SEQ ID NO: 169911 - DNA, 19 bp, Artificial sequence
  SiRNA target sequence
aaaaaaaaatatttaagaa

SEQ ID NO: 169912 - DNA, 19 bp, Artificial sequence
  SiRNA target sequence
aaaaaaaatatttaagaat

SEQ ID NO: 169913 - DNA, 19 bp, Artificial sequence
  SiRNA target sequence
aaaaaaatatttaagaata

SEQ ID NO: 169914 - DNA, 19 bp, Artificial sequence
  SiRNA target sequence
aaaaaatatttaagaatat

SEQ ID NO: 169915 - DNA, 19 bp, Artificial sequence
  SiRNA target sequence
aaaaatatttaagaatatt

SEQ ID NO: 169916 - DNA, 19 bp, Artificial sequence
  SiRNA target sequence
aaaatatttaagaatattg

SEQ ID NO: 169917 - DNA, 19 bp, Artificial sequence
  SiRNA target sequence
aaatatttaagaatattgg

SEQ ID NO: 169918 - DNA, 19 bp, Artificial sequence
  SiRNA target sequence
aatatttaagaatattggg

SEQ ID NO: 169919 - DNA, 19 bp, Artificial sequence
  SiRNA target sequence
atatttaagaatattgggt

SEQ ID NO: 169920 - DNA, 19 bp, Artificial sequence
  SiRNA target sequence
tatttaagaatattgggtc

SEQ ID NO: 169921 - DNA, 19 bp, Artificial sequence
  SiRNA target sequence
atttaagaatattgggtct

SEQ ID NO: 169922 - DNA, 19 bp, Artificial sequence
  SiRNA target sequence
tttaagaatattgggtcta

SEQ ID NO: 169923 - DNA, 19 bp, Artificial sequence
  SiRNA target sequence
ttaagaatattgggtctag

SEQ ID NO: 169924 - DNA, 19 bp, Artificial sequence
  SiRNA target sequence
taagaatattgggtctaga

SEQ ID NO: 169925 - DNA, 19 bp, Artificial sequence
  SiRNA target sequence
aagaatattgggtctagaa

SEQ ID NO: 169926 - DNA, 19 bp, Artificial sequence
  SiRNA target sequence
agaatattgggtctagaac

SEQ ID NO: 169927 - DNA, 19 bp, Artificial sequence
  SiRNA target sequence
gaatattgggtctagaacc

SEQ ID NO: 169928 - DNA, 19 bp, Artificial sequence
  SiRNA target sequence
aatattgggtctagaacct

SEQ ID NO: 169929 - DNA, 19 bp, Artificial sequence
  SiRNA target sequence
atattgggtctagaacctt

SEQ ID NO: 169930 - DNA, 19 bp, Artificial sequence
  SiRNA target sequence
tattgggtctagaaccttt

SEQ ID NO: 169931 - DNA, 19 bp, Artificial sequence
  SiRNA target sequence
attgggtctagaacctttt

SEQ ID NO: 169932 - DNA, 19 bp, Artificial sequence
  SiRNA target sequence
ttgggtctagaaccttttc

SEQ ID NO: 169933 - DNA, 19 bp, Artificial sequence
  SiRNA target sequence
tgggtctagaaccttttct

SEQ ID NO: 169934 - DNA, 19 bp, Artificial sequence
  SiRNA target sequence
gggtctagaaccttttctt

SEQ ID NO: 169935 - DNA, 19 bp, Artificial sequence
  SiRNA target sequence
ggtctagaaccttttctta

SEQ ID NO: 169936 - DNA, 19 bp, Artificial sequence
  SiRNA target sequence
gtctagaaccttttcttaa

SEQ ID NO: 169937 - DNA, 19 bp, Artificial sequence
  SiRNA target sequence
tctagaaccttttcttaat

SEQ ID NO: 169938 - DNA, 19 bp, Artificial sequence
  SiRNA target sequence
ctagaaccttttcttaatt

SEQ ID NO: 169939 - DNA, 19 bp, Artificial sequence
  SiRNA target sequence
tagaaccttttcttaattt

SEQ ID NO: 169940 - DNA, 19 bp, Artificial sequence
  SiRNA target sequence
agaaccttttcttaatttt

SEQ ID NO: 169941 - DNA, 19 bp, Artificial sequence
  SiRNA target sequence
gaaccttttcttaatttta

SEQ ID NO: 169942 - DNA, 19 bp, Artificial sequence
  SiRNA target sequence
aaccttttcttaattttat

SEQ ID NO: 169943 - DNA, 19 bp, Artificial sequence
  SiRNA target sequence
accttttcttaattttatt

SEQ ID NO: 169944 - DNA, 19 bp, Artificial sequence
  SiRNA target sequence
ccttttcttaattttatta

SEQ ID NO: 169945 - DNA, 19 bp, Artificial sequence
  SiRNA target sequence
cttttcttaattttattaa

SEQ ID NO: 169946 - DNA, 19 bp, Artificial sequence
  SiRNA target sequence
ttttcttaattttattaag

SEQ ID NO: 169947 - DNA, 19 bp, Artificial sequence
  SiRNA target sequence
tttcttaattttattaagg

SEQ ID NO: 169948 - DNA, 19 bp, Artificial sequence
  SiRNA target sequence
ttcttaattttattaagga

SEQ ID NO: 169949 - DNA, 19 bp, Artificial sequence
  SiRNA target sequence
tcttaattttattaaggaa

SEQ ID NO: 169950 - DNA, 19 bp, Artificial sequence
  SiRNA target sequence
cttaattttattaaggaaa

SEQ ID NO: 169951 - DNA, 19 bp, Artificial sequence
  SiRNA target sequence
ttaattttattaaggaaag

SEQ ID NO: 169952 - DNA, 19 bp, Artificial sequence
  SiRNA target sequence
taattttattaaggaaagt

SEQ ID NO: 169953 - DNA, 19 bp, Artificial sequence
  SiRNA target sequence
aattttattaaggaaagta

SEQ ID NO: 169954 - DNA, 19 bp, Artificial sequence
  SiRNA target sequence
attttattaaggaaagtaa

SEQ ID NO: 169955 - DNA, 19 bp, Artificial sequence
  SiRNA target sequence
ttttattaaggaaagtaaa

SEQ ID NO: 169956 - DNA, 19 bp, Artificial sequence
  SiRNA target sequence
tttattaaggaaagtaaac

SEQ ID NO: 169957 - DNA, 19 bp, Artificial sequence
  SiRNA target sequence
ttattaaggaaagtaaaca

SEQ ID NO: 169958 - DNA, 19 bp, Artificial sequence
  SiRNA target sequence
tattaaggaaagtaaacat

SEQ ID NO: 169959 - DNA, 19 bp, Artificial sequence
  SiRNA target sequence
attaaggaaagtaaacata

SEQ ID NO: 169960 - DNA, 19 bp, Artificial sequence
  SiRNA target sequence
ttaaggaaagtaaacataa

SEQ ID NO: 169961 - DNA, 19 bp, Artificial sequence
  SiRNA target sequence
taaggaaagtaaacataaa

SEQ ID NO: 169962 - DNA, 19 bp, Artificial sequence
  SiRNA target sequence
aaggaaagtaaacataaag

SEQ ID NO: 169963 - DNA, 19 bp, Artificial sequence
  SiRNA target sequence
aggaaagtaaacataaaga

SEQ ID NO: 169964 - DNA, 19 bp, Artificial sequence
  SiRNA target sequence
ggaaagtaaacataaagaa

SEQ ID NO: 169965 - DNA, 19 bp, Artificial sequence
  SiRNA target sequence
gaaagtaaacataaagaat

SEQ ID NO: 169966 - DNA, 19 bp, Artificial sequence
  SiRNA target sequence
aaagtaaacataaagaatt

SEQ ID NO: 169967 - DNA, 19 bp, Artificial sequence
  SiRNA target sequence
aagtaaacataaagaatta

SEQ ID NO: 169968 - DNA, 19 bp, Artificial sequence
  SiRNA target sequence
agtaaacataaagaattag

SEQ ID NO: 169969 - DNA, 19 bp, Artificial sequence
  SiRNA target sequence
gtaaacataaagaattaga

SEQ ID NO: 169970 - DNA, 19 bp, Artificial sequence
  SiRNA target sequence
taaacataaagaattagaa

SEQ ID NO: 169971 - DNA, 19 bp, Artificial sequence
  SiRNA target sequence
aaacataaagaattagaat

SEQ ID NO: 169972 - DNA, 19 bp, Artificial sequence
  SiRNA target sequence
aacataaagaattagaata

SEQ ID NO: 169973 - DNA, 19 bp, Artificial sequence
  SiRNA target sequence
acataaagaattagaatat

SEQ ID NO: 169974 - DNA, 19 bp, Artificial sequence
  SiRNA target sequence
cataaagaattagaatatg

SEQ ID NO: 169975 - DNA, 19 bp, Artificial sequence
  SiRNA target sequence
ataaagaattagaatatga

SEQ ID NO: 169976 - DNA, 19 bp, Artificial sequence
  SiRNA target sequence
taaagaattagaatatgat

SEQ ID NO: 169977 - DNA, 19 bp, Artificial sequence
  SiRNA target sequence
aaagaattagaatatgatg

SEQ ID NO: 169978 - DNA, 19 bp, Artificial sequence
  SiRNA target sequence
aagaattagaatatgatgt

SEQ ID NO: 169979 - DNA, 19 bp, Artificial sequence
  SiRNA target sequence
agaattagaatatgatgta

SEQ ID NO: 169980 - DNA, 19 bp, Artificial sequence
  SiRNA target sequence
gaattagaatatgatgtat

SEQ ID NO: 169981 - DNA, 19 bp, Artificial sequence
  SiRNA target sequence
aattagaatatgatgtatg

SEQ ID NO: 169982 - DNA, 19 bp, Artificial sequence
  SiRNA target sequence
attagaatatgatgtatgc

SEQ ID NO: 169983 - DNA, 19 bp, Artificial sequence
  SiRNA target sequence
ttagaatatgatgtatgcg

SEQ ID NO: 169984 - DNA, 19 bp, Artificial sequence
  SiRNA target sequence
tagaatatgatgtatgcga

SEQ ID NO: 169985 - DNA, 19 bp, Artificial sequence
  SiRNA target sequence
agaatatgatgtatgcgaa

SEQ ID NO: 169986 - DNA, 19 bp, Artificial sequence
  SiRNA target sequence
gaatatgatgtatgcgaaa

SEQ ID NO: 169987 - DNA, 19 bp, Artificial sequence
  SiRNA target sequence
aatatgatgtatgcgaaat

SEQ ID NO: 169988 - DNA, 19 bp, Artificial sequence
  SiRNA target sequence
atatgatgtatgcgaaata

SEQ ID NO: 169989 - DNA, 19 bp, Artificial sequence
  SiRNA target sequence
tatgatgtatgcgaaatat

SEQ ID NO: 169990 - DNA, 19 bp, Artificial sequence
  SiRNA target sequence
atgatgtatgcgaaatata

SEQ ID NO: 169991 - DNA, 19 bp, Artificial sequence
  SiRNA target sequence
tgatgtatgcgaaatatac

SEQ ID NO: 169992 - DNA, 19 bp, Artificial sequence
  SiRNA target sequence
gatgtatgcgaaatataca

SEQ ID NO: 169993 - DNA, 19 bp, Artificial sequence
  SiRNA target sequence
atgtatgcgaaatatacat

SEQ ID NO: 169994 - DNA, 19 bp, Artificial sequence
  SiRNA target sequence
tgtatgcgaaatatacatt

SEQ ID NO: 169995 - DNA, 19 bp, Artificial sequence
  SiRNA target sequence
gtatgcgaaatatacattt

SEQ ID NO: 169996 - DNA, 19 bp, Artificial sequence
  SiRNA target sequence
tatgcgaaatatacatttg

SEQ ID NO: 169997 - DNA, 19 bp, Artificial sequence
  SiRNA target sequence
atgcgaaatatacatttgt

SEQ ID NO: 169998 - DNA, 19 bp, Artificial sequence
  SiRNA target sequence
tgcgaaatatacatttgta

SEQ ID NO: 169999 - DNA, 19 bp, Artificial sequence
  SiRNA target sequence
gcgaaatatacatttgtaa

SEQ ID NO: 170000 - DNA, 19 bp, Artificial sequence
  SiRNA target sequence
cgaaatatacatttgtaat

SEQ ID NO: 170001 - DNA, 19 bp, Artificial sequence
  SiRNA target sequence
gaaatatacatttgtaatc

SEQ ID NO: 170002 - DNA, 19 bp, Artificial sequence
  SiRNA target sequence
aaatatacatttgtaatca

SEQ ID NO: 170003 - DNA, 19 bp, Artificial sequence
  SiRNA target sequence
aatatacatttgtaatcag

SEQ ID NO: 170004 - DNA, 19 bp, Artificial sequence
  SiRNA target sequence
atatacatttgtaatcagg

SEQ ID NO: 170005 - DNA, 19 bp, Artificial sequence
  SiRNA target sequence
tatacatttgtaatcaggg

SEQ ID NO: 170006 - DNA, 19 bp, Artificial sequence
  SiRNA target sequence
atacatttgtaatcaggga

SEQ ID NO: 170007 - DNA, 19 bp, Artificial sequence
  SiRNA target sequence
tacatttgtaatcagggat

SEQ ID NO: 170008 - DNA, 19 bp, Artificial sequence
  SiRNA target sequence
acatttgtaatcagggatg

SEQ ID NO: 170009 - DNA, 19 bp, Artificial sequence
  SiRNA target sequence
catttgtaatcagggatgc

SEQ ID NO: 170010 - DNA, 19 bp, Artificial sequence
  SiRNA target sequence
atttgtaatcagggatgca

SEQ ID NO: 170011 - DNA, 19 bp, Artificial sequence
  SiRNA target sequence
tttgtaatcagggatgcat

SEQ ID NO: 170012 - DNA, 19 bp, Artificial sequence
  SiRNA target sequence
ttgtaatcagggatgcatt

SEQ ID NO: 170013 - DNA, 19 bp, Artificial sequence
  SiRNA target sequence
tgtaatcagggatgcatta

SEQ ID NO: 170014 - DNA, 19 bp, Artificial sequence
  SiRNA target sequence
gtaatcagggatgcattaa

SEQ ID NO: 170015 - DNA, 19 bp, Artificial sequence
  SiRNA target sequence
taatcagggatgcattaat

SEQ ID NO: 170016 - DNA, 19 bp, Artificial sequence
  SiRNA target sequence
aatcagggatgcattaatg

SEQ ID NO: 170017 - DNA, 19 bp, Artificial sequence
  SiRNA target sequence
atcagggatgcattaatgg

SEQ ID NO: 170018 - DNA, 19 bp, Artificial sequence
  SiRNA target sequence
tcagggatgcattaatgga

SEQ ID NO: 170019 - DNA, 19 bp, Artificial sequence
  SiRNA target sequence
cagggatgcattaatggac

SEQ ID NO: 170020 - DNA, 19 bp, Artificial sequence
  SiRNA target sequence
agggatgcattaatggacc

SEQ ID NO: 170021 - DNA, 19 bp, Artificial sequence
  SiRNA target sequence
gggatgcattaatggacca

SEQ ID NO: 170022 - DNA, 19 bp, Artificial sequence
  SiRNA target sequence
ggatgcattaatggaccag

SEQ ID NO: 170023 - DNA, 19 bp, Artificial sequence
  SiRNA target sequence
gatgcattaatggaccagg

SEQ ID NO: 170024 - DNA, 19 bp, Artificial sequence
  SiRNA target sequence
atgcattaatggaccagga

SEQ ID NO: 170025 - DNA, 19 bp, Artificial sequence
  SiRNA target sequence
tgcattaatggaccaggac

SEQ ID NO: 170026 - DNA, 19 bp, Artificial sequence
  SiRNA target sequence
gcattaatggaccaggaca

SEQ ID NO: 170027 - DNA, 19 bp, Artificial sequence
  SiRNA target sequence
cattaatggaccaggacaa

SEQ ID NO: 170028 - DNA, 19 bp, Artificial sequence
  SiRNA target sequence
attaatggaccaggacaat

SEQ ID NO: 170029 - DNA, 19 bp, Artificial sequence
  SiRNA target sequence
ttaatggaccaggacaatt

SEQ ID NO: 170030 - DNA, 19 bp, Artificial sequence
  SiRNA target sequence
taatggaccaggacaattg

SEQ ID NO: 170031 - DNA, 19 bp, Artificial sequence
  SiRNA target sequence
aatggaccaggacaattgt

SEQ ID NO: 170032 - DNA, 19 bp, Artificial sequence
  SiRNA target sequence
atggaccaggacaattgta

SEQ ID NO: 170033 - DNA, 19 bp, Artificial sequence
  SiRNA target sequence
tggaccaggacaattgtat

SEQ ID NO: 170034 - DNA, 19 bp, Artificial sequence
  SiRNA target sequence
ggaccaggacaattgtata

SEQ ID NO: 170035 - DNA, 19 bp, Artificial sequence
  SiRNA target sequence
gaccaggacaattgtatac

SEQ ID NO: 170036 - DNA, 19 bp, Artificial sequence
  SiRNA target sequence
accaggacaattgtataca

SEQ ID NO: 170037 - DNA, 19 bp, Artificial sequence
  SiRNA target sequence
ccaggacaattgtatacag

SEQ ID NO: 170038 - DNA, 19 bp, Artificial sequence
  SiRNA target sequence
caggacaattgtatacaga

SEQ ID NO: 170039 - DNA, 19 bp, Artificial sequence
  SiRNA target sequence
aggacaattgtatacagat

SEQ ID NO: 170040 - DNA, 19 bp, Artificial sequence
  SiRNA target sequence
ggacaattgtatacagata

SEQ ID NO: 170041 - DNA, 19 bp, Artificial sequence
  SiRNA target sequence
gacaattgtatacagataa

SEQ ID NO: 170042 - DNA, 19 bp, Artificial sequence
  SiRNA target sequence
acaattgtatacagataat

SEQ ID NO: 170043 - DNA, 19 bp, Artificial sequence
  SiRNA target sequence
caattgtatacagataatt

SEQ ID NO: 170044 - DNA, 19 bp, Artificial sequence
  SiRNA target sequence
aattgtatacagataattt

SEQ ID NO: 170045 - DNA, 19 bp, Artificial sequence
  SiRNA target sequence
attgtatacagataattta

SEQ ID NO: 170046 - DNA, 19 bp, Artificial sequence
  SiRNA target sequence
ttgtatacagataatttat

SEQ ID NO: 170047 - DNA, 19 bp, Artificial sequence
  SiRNA target sequence
tgtatacagataatttata

SEQ ID NO: 170048 - DNA, 19 bp, Artificial sequence
  SiRNA target sequence
gtatacagataatttatat

SEQ ID NO: 170049 - DNA, 19 bp, Artificial sequence
  SiRNA target sequence
tatacagataatttatatg

SEQ ID NO: 170050 - DNA, 19 bp, Artificial sequence
  SiRNA target sequence
atacagataatttatatgt

SEQ ID NO: 170051 - DNA, 19 bp, Artificial sequence
  SiRNA target sequence
tacagataatttatatgta

SEQ ID NO: 170052 - DNA, 19 bp, Artificial sequence
  SiRNA target sequence
acagataatttatatgtaa

SEQ ID NO: 170053 - DNA, 19 bp, Artificial sequence
  SiRNA target sequence
cagataatttatatgtaaa

SEQ ID NO: 170054 - DNA, 19 bp, Artificial sequence
  SiRNA target sequence
agataatttatatgtaaat

SEQ ID NO: 170055 - DNA, 19 bp, Artificial sequence
  SiRNA target sequence
gataatttatatgtaaata

SEQ ID NO: 170056 - DNA, 19 bp, Artificial sequence
  SiRNA target sequence
ataatttatatgtaaataa

SEQ ID NO: 170057 - DNA, 19 bp, Artificial sequence
  SiRNA target sequence
taatttatatgtaaataat

SEQ ID NO: 170058 - DNA, 19 bp, Artificial sequence
  SiRNA target sequence
aatttatatgtaaataatt

SEQ ID NO: 170059 - DNA, 19 bp, Artificial sequence
  SiRNA target sequence
atttatatgtaaataattc

SEQ ID NO: 170060 - DNA, 19 bp, Artificial sequence
  SiRNA target sequence
tttatatgtaaataattca

SEQ ID NO: 170061 - DNA, 19 bp, Artificial sequence
  SiRNA target sequence
ttatatgtaaataattcag

SEQ ID NO: 170062 - DNA, 19 bp, Artificial sequence
  SiRNA target sequence
tatatgtaaataattcaga

SEQ ID NO: 170063 - DNA, 19 bp, Artificial sequence
  SiRNA target sequence
atatgtaaataattcagaa

SEQ ID NO: 170064 - DNA, 19 bp, Artificial sequence
  SiRNA target sequence
tatgtaaataattcagaat

SEQ ID NO: 170065 - DNA, 19 bp, Artificial sequence
  SiRNA target sequence
atgtaaataattcagaata

SEQ ID NO: 170066 - DNA, 19 bp, Artificial sequence
  SiRNA target sequence
tgtaaataattcagaatac

SEQ ID NO: 170067 - DNA, 19 bp, Artificial sequence
  SiRNA target sequence
gtaaataattcagaataca

SEQ ID NO: 170068 - DNA, 19 bp, Artificial sequence
  SiRNA target sequence
taaataattcagaatacat

SEQ ID NO: 170069 - DNA, 19 bp, Artificial sequence
  SiRNA target sequence
aaataattcagaatacata

SEQ ID NO: 170070 - DNA, 19 bp, Artificial sequence
  SiRNA target sequence
aataattcagaatacatag

SEQ ID NO: 170071 - DNA, 19 bp, Artificial sequence
  SiRNA target sequence
ataattcagaatacataga

SEQ ID NO: 170072 - DNA, 19 bp, Artificial sequence
  SiRNA target sequence
taattcagaatacatagat

SEQ ID NO: 170073 - DNA, 19 bp, Artificial sequence
  SiRNA target sequence
aattcagaatacatagata

SEQ ID NO: 170074 - DNA, 19 bp, Artificial sequence
  SiRNA target sequence
attcagaatacatagatat

SEQ ID NO: 170075 - DNA, 19 bp, Artificial sequence
  SiRNA target sequence
ttcagaatacatagatatt

SEQ ID NO: 170076 - DNA, 19 bp, Artificial sequence
  SiRNA target sequence
tcagaatacatagatattg

SEQ ID NO: 170077 - DNA, 19 bp, Artificial sequence
  SiRNA target sequence
cagaatacatagatattga

SEQ ID NO: 170078 - DNA, 19 bp, Artificial sequence
  SiRNA target sequence
agaatacatagatattgat

SEQ ID NO: 170079 - DNA, 19 bp, Artificial sequence
  SiRNA target sequence
gaatacatagatattgatc

SEQ ID NO: 170080 - DNA, 19 bp, Artificial sequence
  SiRNA target sequence
aatacatagatattgatct

SEQ ID NO: 170081 - DNA, 19 bp, Artificial sequence
  SiRNA target sequence
atacatagatattgatctt

SEQ ID NO: 170082 - DNA, 19 bp, Artificial sequence
  SiRNA target sequence
tacatagatattgatcttg

SEQ ID NO: 170083 - DNA, 19 bp, Artificial sequence
  SiRNA target sequence
acatagatattgatcttgg

SEQ ID NO: 170084 - DNA, 19 bp, Artificial sequence
  SiRNA target sequence
catagatattgatcttggt

SEQ ID NO: 170085 - DNA, 19 bp, Artificial sequence
  SiRNA target sequence
atagatattgatcttggta

SEQ ID NO: 170086 - DNA, 19 bp, Artificial sequence
  SiRNA target sequence
tagatattgatcttggtat

SEQ ID NO: 170087 - DNA, 19 bp, Artificial sequence
  SiRNA target sequence
agatattgatcttggtatt

SEQ ID NO: 170088 - DNA, 19 bp, Artificial sequence
  SiRNA target sequence
gatattgatcttggtattg

SEQ ID NO: 170089 - DNA, 19 bp, Artificial sequence
  SiRNA target sequence
atattgatcttggtattga

SEQ ID NO: 170090 - DNA, 19 bp, Artificial sequence
  SiRNA target sequence
tattgatcttggtattgat

SEQ ID NO: 170091 - DNA, 19 bp, Artificial sequence
  SiRNA target sequence
attgatcttggtattgatt

SEQ ID NO: 170092 - DNA, 19 bp, Artificial sequence
  SiRNA target sequence
ttgatcttggtattgattg

SEQ ID NO: 170093 - DNA, 19 bp, Artificial sequence
  SiRNA target sequence
tgatcttggtattgattgt

SEQ ID NO: 170094 - DNA, 19 bp, Artificial sequence
  SiRNA target sequence
gatcttggtattgattgta

SEQ ID NO: 170095 - DNA, 19 bp, Artificial sequence
  SiRNA target sequence
atcttggtattgattgtaa

SEQ ID NO: 170096 - DNA, 19 bp, Artificial sequence
  SiRNA target sequence
tcttggtattgattgtaaa

SEQ ID NO: 170097 - DNA, 19 bp, Artificial sequence
  SiRNA target sequence
cttggtattgattgtaaac

SEQ ID NO: 170098 - DNA, 19 bp, Artificial sequence
  SiRNA target sequence
ttggtattgattgtaaaca

SEQ ID NO: 170099 - DNA, 19 bp, Artificial sequence
  SiRNA target sequence
tggtattgattgtaaacag

SEQ ID NO: 170100 - DNA, 19 bp, Artificial sequence
  SiRNA target sequence
ggtattgattgtaaacagt

SEQ ID NO: 170101 - DNA, 19 bp, Artificial sequence
  SiRNA target sequence
gtattgattgtaaacagtt

SEQ ID NO: 170102 - DNA, 19 bp, Artificial sequence
  SiRNA target sequence
tattgattgtaaacagtta

SEQ ID NO: 170103 - DNA, 19 bp, Artificial sequence
  SiRNA target sequence
attgattgtaaacagttac

SEQ ID NO: 170104 - DNA, 19 bp, Artificial sequence
  SiRNA target sequence
ttgattgtaaacagttaca

SEQ ID NO: 170105 - DNA, 19 bp, Artificial sequence
  SiRNA target sequence
tgattgtaaacagttacaa

SEQ ID NO: 170106 - DNA, 19 bp, Artificial sequence
  SiRNA target sequence
gattgtaaacagttacaaa

SEQ ID NO: 170107 - DNA, 19 bp, Artificial sequence
  SiRNA target sequence
attgtaaacagttacaaaa

SEQ ID NO: 170108 - DNA, 19 bp, Artificial sequence
  SiRNA target sequence
ttgtaaacagttacaaaaa

SEQ ID NO: 170109 - DNA, 19 bp, Artificial sequence
  SiRNA target sequence
tgtaaacagttacaaaaaa

SEQ ID NO: 170110 - DNA, 19 bp, Artificial sequence
  SiRNA target sequence
gtaaacagttacaaaaaag

SEQ ID NO: 170111 - DNA, 19 bp, Artificial sequence
  SiRNA target sequence
taaacagttacaaaaaagg

SEQ ID NO: 170112 - DNA, 19 bp, Artificial sequence
  SiRNA target sequence
aaacagttacaaaaaagga

SEQ ID NO: 170113 - DNA, 19 bp, Artificial sequence
  SiRNA target sequence
aacagttacaaaaaaggac

SEQ ID NO: 170114 - DNA, 19 bp, Artificial sequence
  SiRNA target sequence
acagttacaaaaaaggaca

SEQ ID NO: 170115 - DNA, 19 bp, Artificial sequence
  SiRNA target sequence
cagttacaaaaaaggacat

SEQ ID NO: 170116 - DNA, 19 bp, Artificial sequence
  SiRNA target sequence
agttacaaaaaaggacata

SEQ ID NO: 170117 - DNA, 19 bp, Artificial sequence
  SiRNA target sequence
gttacaaaaaaggacatat

SEQ ID NO: 170118 - DNA, 19 bp, Artificial sequence
  SiRNA target sequence
ttacaaaaaaggacatata

SEQ ID NO: 170119 - DNA, 19 bp, Artificial sequence
  SiRNA target sequence
tacaaaaaaggacatatag

SEQ ID NO: 170120 - DNA, 19 bp, Artificial sequence
  SiRNA target sequence
acaaaaaaggacatataga

SEQ ID NO: 170121 - DNA, 19 bp, Artificial sequence
  SiRNA target sequence
caaaaaaggacatatagaa

SEQ ID NO: 170122 - DNA, 19 bp, Artificial sequence
  SiRNA target sequence
aaaaaaggacatatagaaa

SEQ ID NO: 170123 - DNA, 19 bp, Artificial sequence
  SiRNA target sequence
aaaaaggacatatagaaaa

SEQ ID NO: 170124 - DNA, 19 bp, Artificial sequence
  SiRNA target sequence
aaaaggacatatagaaaaa

SEQ ID NO: 170125 - DNA, 19 bp, Artificial sequence
  SiRNA target sequence
aaaggacatatagaaaaat

SEQ ID NO: 170126 - DNA, 19 bp, Artificial sequence
  SiRNA target sequence
aaggacatatagaaaaata

SEQ ID NO: 170127 - DNA, 19 bp, Artificial sequence
  SiRNA target sequence
aggacatatagaaaaatag

SEQ ID NO: 170128 - DNA, 19 bp, Artificial sequence
  SiRNA target sequence
ggacatatagaaaaataga

SEQ ID NO: 170129 - DNA, 19 bp, Artificial sequence
  SiRNA target sequence
gacatatagaaaaatagaa

SEQ ID NO: 170130 - DNA, 19 bp, Artificial sequence
  SiRNA target sequence
acatatagaaaaatagaaa

SEQ ID NO: 170131 - DNA, 19 bp, Artificial sequence
  SiRNA target sequence
catatagaaaaatagaaac

SEQ ID NO: 170132 - DNA, 19 bp, Artificial sequence
  SiRNA target sequence
atatagaaaaatagaaaca

SEQ ID NO: 170133 - DNA, 19 bp, Artificial sequence
  SiRNA target sequence
tatagaaaaatagaaacaa

SEQ ID NO: 170134 - DNA, 19 bp, Artificial sequence
  SiRNA target sequence
atagaaaaatagaaacaaa

SEQ ID NO: 170135 - DNA, 19 bp, Artificial sequence
  SiRNA target sequence
tagaaaaatagaaacaaag

SEQ ID NO: 170136 - DNA, 19 bp, Artificial sequence
  SiRNA target sequence
agaaaaatagaaacaaaga

SEQ ID NO: 170137 - DNA, 19 bp, Artificial sequence
  SiRNA target sequence
gaaaaatagaaacaaagaa

SEQ ID NO: 170138 - DNA, 19 bp, Artificial sequence
  SiRNA target sequence
aaaaatagaaacaaagaaa

SEQ ID NO: 170139 - DNA, 19 bp, Artificial sequence
  SiRNA target sequence
aaaatagaaacaaagaaag

SEQ ID NO: 170140 - DNA, 19 bp, Artificial sequence
  SiRNA target sequence
aaatagaaacaaagaaagt

SEQ ID NO: 170141 - DNA, 19 bp, Artificial sequence
  SiRNA target sequence
aatagaaacaaagaaagtt

SEQ ID NO: 170142 - DNA, 19 bp, Artificial sequence
  SiRNA target sequence
atagaaacaaagaaagtta

SEQ ID NO: 170143 - DNA, 19 bp, Artificial sequence
  SiRNA target sequence
tagaaacaaagaaagttaa

SEQ ID NO: 170144 - DNA, 19 bp, Artificial sequence
  SiRNA target sequence
agaaacaaagaaagttaat

SEQ ID NO: 170145 - DNA, 19 bp, Artificial sequence
  SiRNA target sequence
gaaacaaagaaagttaatt

SEQ ID NO: 170146 - DNA, 19 bp, Artificial sequence
  SiRNA target sequence
aaacaaagaaagttaattt

SEQ ID NO: 170147 - DNA, 19 bp, Artificial sequence
  SiRNA target sequence
aacaaagaaagttaatttt

SEQ ID NO: 170148 - DNA, 19 bp, Artificial sequence
  SiRNA target sequence
acaaagaaagttaatttta

SEQ ID NO: 170149 - DNA, 19 bp, Artificial sequence
  SiRNA target sequence
caaagaaagttaattttaa

SEQ ID NO: 170150 - DNA, 19 bp, Artificial sequence
  SiRNA target sequence
aaagaaagttaattttaaa

SEQ ID NO: 170151 - DNA, 19 bp, Artificial sequence
  SiRNA target sequence
aagaaagttaattttaaaa

SEQ ID NO: 170152 - DNA, 19 bp, Artificial sequence
  SiRNA target sequence
agaaagttaattttaaaat

SEQ ID NO: 170153 - DNA, 19 bp, Artificial sequence
  SiRNA target sequence
gaaagttaattttaaaata

SEQ ID NO: 170154 - DNA, 19 bp, Artificial sequence
  SiRNA target sequence
aaagttaattttaaaatag

SEQ ID NO: 170155 - DNA, 19 bp, Artificial sequence
  SiRNA target sequence
aagttaattttaaaataga

SEQ ID NO: 170156 - DNA, 19 bp, Artificial sequence
  SiRNA target sequence
agttaattttaaaatagaa

SEQ ID NO: 170157 - DNA, 19 bp, Artificial sequence
  SiRNA target sequence
gttaattttaaaatagaat

SEQ ID NO: 170158 - DNA, 19 bp, Artificial sequence
  SiRNA target sequence
ttaattttaaaatagaatg

SEQ ID NO: 170159 - DNA, 19 bp, Artificial sequence
  SiRNA target sequence
taattttaaaatagaatgg

SEQ ID NO: 170160 - DNA, 19 bp, Artificial sequence
  SiRNA target sequence
aattttaaaatagaatggt

SEQ ID NO: 170161 - DNA, 19 bp, Artificial sequence
  SiRNA target sequence
attttaaaatagaatggta

SEQ ID NO: 170162 - DNA, 19 bp, Artificial sequence
  SiRNA target sequence
ttttaaaatagaatggtaa

SEQ ID NO: 170163 - DNA, 20 bp, Artificial sequence
  SiRNA target sequence
atgaatactgaaaataaacc

SEQ ID NO: 170164 - DNA, 20 bp, Artificial sequence
  SiRNA target sequence
tgaatactgaaaataaacca

SEQ ID NO: 170165 - DNA, 20 bp, Artificial sequence
  SiRNA target sequence
gaatactgaaaataaaccat

SEQ ID NO: 170166 - DNA, 20 bp, Artificial sequence
  SiRNA target sequence
aatactgaaaataaaccatg

SEQ ID NO: 170167 - DNA, 20 bp, Artificial sequence
  SiRNA target sequence
atactgaaaataaaccatgt

SEQ ID NO: 170168 - DNA, 20 bp, Artificial sequence
  SiRNA target sequence
tactgaaaataaaccatgta

SEQ ID NO: 170169 - DNA, 20 bp, Artificial sequence
  SiRNA target sequence
actgaaaataaaccatgtat

SEQ ID NO: 170170 - DNA, 20 bp, Artificial sequence
  SiRNA target sequence
ctgaaaataaaccatgtatt

SEQ ID NO: 170171 - DNA, 20 bp, Artificial sequence
  SiRNA target sequence
tgaaaataaaccatgtattt

SEQ ID NO: 170172 - DNA, 20 bp, Artificial sequence
  SiRNA target sequence
gaaaataaaccatgtatttc

SEQ ID NO: 170173 - DNA, 20 bp, Artificial sequence
  SiRNA target sequence
aaaataaaccatgtatttca

SEQ ID NO: 170174 - DNA, 20 bp, Artificial sequence
  SiRNA target sequence
aaataaaccatgtatttcac

SEQ ID NO: 170175 - DNA, 20 bp, Artificial sequence
  SiRNA target sequence
aataaaccatgtatttcacc

SEQ ID NO: 170176 - DNA, 20 bp, Artificial sequence
  SiRNA target sequence
ataaaccatgtatttcacca

SEQ ID NO: 170177 - DNA, 20 bp, Artificial sequence
  SiRNA target sequence
taaaccatgtatttcaccat

SEQ ID NO: 170178 - DNA, 20 bp, Artificial sequence
  SiRNA target sequence
aaaccatgtatttcaccatt

SEQ ID NO: 170179 - DNA, 20 bp, Artificial sequence
  SiRNA target sequence
aaccatgtatttcaccattt

SEQ ID NO: 170180 - DNA, 20 bp, Artificial sequence
  SiRNA target sequence
accatgtatttcaccattta

SEQ ID NO: 170181 - DNA, 20 bp, Artificial sequence
  SiRNA target sequence
ccatgtatttcaccatttac

SEQ ID NO: 170182 - DNA, 20 bp, Artificial sequence
  SiRNA target sequence
catgtatttcaccatttacc

SEQ ID NO: 170183 - DNA, 20 bp, Artificial sequence
  SiRNA target sequence
atgtatttcaccatttacct

SEQ ID NO: 170184 - DNA, 20 bp, Artificial sequence
  SiRNA target sequence
tgtatttcaccatttacctt

SEQ ID NO: 170185 - DNA, 20 bp, Artificial sequence
  SiRNA target sequence
gtatttcaccatttaccttt

SEQ ID NO: 170186 - DNA, 20 bp, Artificial sequence
  SiRNA target sequence
tatttcaccatttaccttta

SEQ ID NO: 170187 - DNA, 20 bp, Artificial sequence
  SiRNA target sequence
atttcaccatttacctttaa

SEQ ID NO: 170188 - DNA, 20 bp, Artificial sequence
  SiRNA target sequence
tttcaccatttacctttaaa

SEQ ID NO: 170189 - DNA, 20 bp, Artificial sequence
  SiRNA target sequence
ttcaccatttacctttaaac

SEQ ID NO: 170190 - DNA, 20 bp, Artificial sequence
  SiRNA target sequence
tcaccatttacctttaaact

SEQ ID NO: 170191 - DNA, 20 bp, Artificial sequence
  SiRNA target sequence
caccatttacctttaaacta

SEQ ID NO: 170192 - DNA, 20 bp, Artificial sequence
  SiRNA target sequence
accatttacctttaaactag

SEQ ID NO: 170193 - DNA, 20 bp, Artificial sequence
  SiRNA target sequence
ccatttacctttaaactaga

SEQ ID NO: 170194 - DNA, 20 bp, Artificial sequence
  SiRNA target sequence
catttacctttaaactagaa

SEQ ID NO: 170195 - DNA, 20 bp, Artificial sequence
  SiRNA target sequence
atttacctttaaactagaag

SEQ ID NO: 170196 - DNA, 20 bp, Artificial sequence
  SiRNA target sequence
tttacctttaaactagaaga

SEQ ID NO: 170197 - DNA, 20 bp, Artificial sequence
  SiRNA target sequence
ttacctttaaactagaagat

SEQ ID NO: 170198 - DNA, 20 bp, Artificial sequence
  SiRNA target sequence
tacctttaaactagaagatt

SEQ ID NO: 170199 - DNA, 20 bp, Artificial sequence
  SiRNA target sequence
acctttaaactagaagattg

SEQ ID NO: 170200 - DNA, 20 bp, Artificial sequence
  SiRNA target sequence
cctttaaactagaagattgc

SEQ ID NO: 170201 - DNA, 20 bp, Artificial sequence
  SiRNA target sequence
ctttaaactagaagattgcc

SEQ ID NO: 170202 - DNA, 20 bp, Artificial sequence
  SiRNA target sequence
tttaaactagaagattgcct

SEQ ID NO: 170203 - DNA, 20 bp, Artificial sequence
  SiRNA target sequence
ttaaactagaagattgcctg

SEQ ID NO: 170204 - DNA, 20 bp, Artificial sequence
  SiRNA target sequence
taaactagaagattgcctgg

SEQ ID NO: 170205 - DNA, 20 bp, Artificial sequence
  SiRNA target sequence
aaactagaagattgcctggc

SEQ ID NO: 170206 - DNA, 20 bp, Artificial sequence
  SiRNA target sequence
aactagaagattgcctggca

SEQ ID NO: 170207 - DNA, 20 bp, Artificial sequence
  SiRNA target sequence
actagaagattgcctggcat

SEQ ID NO: 170208 - DNA, 20 bp, Artificial sequence
  SiRNA target sequence
ctagaagattgcctggcatg

SEQ ID NO: 170209 - DNA, 20 bp, Artificial sequence
  SiRNA target sequence
tagaagattgcctggcatgt

SEQ ID NO: 170210 - DNA, 20 bp, Artificial sequence
  SiRNA target sequence
agaagattgcctggcatgtt

SEQ ID NO: 170211 - DNA, 20 bp, Artificial sequence
  SiRNA target sequence
gaagattgcctggcatgttc

SEQ ID NO: 170212 - DNA, 20 bp, Artificial sequence
  SiRNA target sequence
aagattgcctggcatgttcg

SEQ ID NO: 170213 - DNA, 20 bp, Artificial sequence
  SiRNA target sequence
agattgcctggcatgttcgg

SEQ ID NO: 170214 - DNA, 20 bp, Artificial sequence
  SiRNA target sequence
gattgcctggcatgttcggc

SEQ ID NO: 170215 - DNA, 20 bp, Artificial sequence
  SiRNA target sequence
attgcctggcatgttcggct

SEQ ID NO: 170216 - DNA, 20 bp, Artificial sequence
  SiRNA target sequence
ttgcctggcatgttcggctt

SEQ ID NO: 170217 - DNA, 20 bp, Artificial sequence
  SiRNA target sequence
tgcctggcatgttcggcttg

SEQ ID NO: 170218 - DNA, 20 bp, Artificial sequence
  SiRNA target sequence
gcctggcatgttcggcttgt

SEQ ID NO: 170219 - DNA, 20 bp, Artificial sequence
  SiRNA target sequence
cctggcatgttcggcttgta

SEQ ID NO: 170220 - DNA, 20 bp, Artificial sequence
  SiRNA target sequence
ctggcatgttcggcttgtat

SEQ ID NO: 170221 - DNA, 20 bp, Artificial sequence
  SiRNA target sequence
tggcatgttcggcttgtatt

SEQ ID NO: 170222 - DNA, 20 bp, Artificial sequence
  SiRNA target sequence
ggcatgttcggcttgtattg

SEQ ID NO: 170223 - DNA, 20 bp, Artificial sequence
  SiRNA target sequence
gcatgttcggcttgtattgc

SEQ ID NO: 170224 - DNA, 20 bp, Artificial sequence
  SiRNA target sequence
catgttcggcttgtattgct

SEQ ID NO: 170225 - DNA, 20 bp, Artificial sequence
  SiRNA target sequence
atgttcggcttgtattgctg

SEQ ID NO: 170226 - DNA, 20 bp, Artificial sequence
  SiRNA target sequence
tgttcggcttgtattgctga

SEQ ID NO: 170227 - DNA, 20 bp, Artificial sequence
  SiRNA target sequence
gttcggcttgtattgctgat

SEQ ID NO: 170228 - DNA, 20 bp, Artificial sequence
  SiRNA target sequence
ttcggcttgtattgctgatt

SEQ ID NO: 170229 - DNA, 20 bp, Artificial sequence
  SiRNA target sequence
tcggcttgtattgctgattt

SEQ ID NO: 170230 - DNA, 20 bp, Artificial sequence
  SiRNA target sequence
cggcttgtattgctgatttt

SEQ ID NO: 170231 - DNA, 20 bp, Artificial sequence
  SiRNA target sequence
ggcttgtattgctgattttt

SEQ ID NO: 170232 - DNA, 20 bp, Artificial sequence
  SiRNA target sequence
gcttgtattgctgatttttc

SEQ ID NO: 170233 - DNA, 20 bp, Artificial sequence
  SiRNA target sequence
cttgtattgctgatttttct

SEQ ID NO: 170234 - DNA, 20 bp, Artificial sequence
  SiRNA target sequence
ttgtattgctgatttttctg

SEQ ID NO: 170235 - DNA, 20 bp, Artificial sequence
  SiRNA target sequence
tgtattgctgatttttctgt

SEQ ID NO: 170236 - DNA, 20 bp, Artificial sequence
  SiRNA target sequence
gtattgctgatttttctgtt

SEQ ID NO: 170237 - DNA, 20 bp, Artificial sequence
  SiRNA target sequence
tattgctgatttttctgttc

SEQ ID NO: 170238 - DNA, 20 bp, Artificial sequence
  SiRNA target sequence
attgctgatttttctgttcc

SEQ ID NO: 170239 - DNA, 20 bp, Artificial sequence
  SiRNA target sequence
ttgctgatttttctgttcca

SEQ ID NO: 170240 - DNA, 20 bp, Artificial sequence
  SiRNA target sequence
tgctgatttttctgttccaa

SEQ ID NO: 170241 - DNA, 20 bp, Artificial sequence
  SiRNA target sequence
gctgatttttctgttccaaa

SEQ ID NO: 170242 - DNA, 20 bp, Artificial sequence
  SiRNA target sequence
ctgatttttctgttccaaaa

SEQ ID NO: 170243 - DNA, 20 bp, Artificial sequence
  SiRNA target sequence
tgatttttctgttccaaaaa

SEQ ID NO: 170244 - DNA, 20 bp, Artificial sequence
  SiRNA target sequence
gatttttctgttccaaaaat

SEQ ID NO: 170245 - DNA, 20 bp, Artificial sequence
  SiRNA target sequence
atttttctgttccaaaaatt

SEQ ID NO: 170246 - DNA, 20 bp, Artificial sequence
  SiRNA target sequence
tttttctgttccaaaaattc

SEQ ID NO: 170247 - DNA, 20 bp, Artificial sequence
  SiRNA target sequence
ttttctgttccaaaaattcc

SEQ ID NO: 170248 - DNA, 20 bp, Artificial sequence
  SiRNA target sequence
tttctgttccaaaaattcct

SEQ ID NO: 170249 - DNA, 20 bp, Artificial sequence
  SiRNA target sequence
ttctgttccaaaaattccta

SEQ ID NO: 170250 - DNA, 20 bp, Artificial sequence
  SiRNA target sequence
tctgttccaaaaattcctac

SEQ ID NO: 170251 - DNA, 20 bp, Artificial sequence
  SiRNA target sequence
ctgttccaaaaattcctact

SEQ ID NO: 170252 - DNA, 20 bp, Artificial sequence
  SiRNA target sequence
tgttccaaaaattcctactt

SEQ ID NO: 170253 - DNA, 20 bp, Artificial sequence
  SiRNA target sequence
gttccaaaaattcctactta

SEQ ID NO: 170254 - DNA, 20 bp, Artificial sequence
  SiRNA target sequence
ttccaaaaattcctacttac

SEQ ID NO: 170255 - DNA, 20 bp, Artificial sequence
  SiRNA target sequence
tccaaaaattcctacttaca

SEQ ID NO: 170256 - DNA, 20 bp, Artificial sequence
  SiRNA target sequence
ccaaaaattcctacttacac

SEQ ID NO: 170257 - DNA, 20 bp, Artificial sequence
  SiRNA target sequence
caaaaattcctacttacaca

SEQ ID NO: 170258 - DNA, 20 bp, Artificial sequence
  SiRNA target sequence
aaaaattcctacttacacag

SEQ ID NO: 170259 - DNA, 20 bp, Artificial sequence
  SiRNA target sequence
aaaattcctacttacacaga

SEQ ID NO: 170260 - DNA, 20 bp, Artificial sequence
  SiRNA target sequence
aaattcctacttacacagaa

SEQ ID NO: 170261 - DNA, 20 bp, Artificial sequence
  SiRNA target sequence
aattcctacttacacagaac

SEQ ID NO: 170262 - DNA, 20 bp, Artificial sequence
  SiRNA target sequence
attcctacttacacagaact

SEQ ID NO: 170263 - DNA, 20 bp, Artificial sequence
  SiRNA target sequence
ttcctacttacacagaactg

SEQ ID NO: 170264 - DNA, 20 bp, Artificial sequence
  SiRNA target sequence
tcctacttacacagaactga

SEQ ID NO: 170265 - DNA, 20 bp, Artificial sequence
  SiRNA target sequence
cctacttacacagaactgaa

SEQ ID NO: 170266 - DNA, 20 bp, Artificial sequence
  SiRNA target sequence
ctacttacacagaactgaaa

SEQ ID NO: 170267 - DNA, 20 bp, Artificial sequence
  SiRNA target sequence
tacttacacagaactgaaag

SEQ ID NO: 170268 - DNA, 20 bp, Artificial sequence
  SiRNA target sequence
acttacacagaactgaaaga

SEQ ID NO: 170269 - DNA, 20 bp, Artificial sequence
  SiRNA target sequence
cttacacagaactgaaagat

SEQ ID NO: 170270 - DNA, 20 bp, Artificial sequence
  SiRNA target sequence
ttacacagaactgaaagatg

SEQ ID NO: 170271 - DNA, 20 bp, Artificial sequence
  SiRNA target sequence
tacacagaactgaaagatgt

SEQ ID NO: 170272 - DNA, 20 bp, Artificial sequence
  SiRNA target sequence
acacagaactgaaagatgtc

SEQ ID NO: 170273 - DNA, 20 bp, Artificial sequence
  SiRNA target sequence
cacagaactgaaagatgtcc

SEQ ID NO: 170274 - DNA, 20 bp, Artificial sequence
  SiRNA target sequence
acagaactgaaagatgtccc

SEQ ID NO: 170275 - DNA, 20 bp, Artificial sequence
  SiRNA target sequence
cagaactgaaagatgtccct

SEQ ID NO: 170276 - DNA, 20 bp, Artificial sequence
  SiRNA target sequence
agaactgaaagatgtccctt

SEQ ID NO: 170277 - DNA, 20 bp, Artificial sequence
  SiRNA target sequence
gaactgaaagatgtcccttt

SEQ ID NO: 170278 - DNA, 20 bp, Artificial sequence
  SiRNA target sequence
aactgaaagatgtcccttta

SEQ ID NO: 170279 - DNA, 20 bp, Artificial sequence
  SiRNA target sequence
actgaaagatgtccctttaa

SEQ ID NO: 170280 - DNA, 20 bp, Artificial sequence
  SiRNA target sequence
ctgaaagatgtccctttaac

SEQ ID NO: 170281 - DNA, 20 bp, Artificial sequence
  SiRNA target sequence
tgaaagatgtccctttaaca

SEQ ID NO: 170282 - DNA, 20 bp, Artificial sequence
  SiRNA target sequence
gaaagatgtccctttaacat

SEQ ID NO: 170283 - DNA, 20 bp, Artificial sequence
  SiRNA target sequence
aaagatgtccctttaacatt

SEQ ID NO: 170284 - DNA, 20 bp, Artificial sequence
  SiRNA target sequence
aagatgtccctttaacattt

SEQ ID NO: 170285 - DNA, 20 bp, Artificial sequence
  SiRNA target sequence
agatgtccctttaacatttt

SEQ ID NO: 170286 - DNA, 20 bp, Artificial sequence
  SiRNA target sequence
gatgtccctttaacattttt

SEQ ID NO: 170287 - DNA, 20 bp, Artificial sequence
  SiRNA target sequence
atgtccctttaacattttta

SEQ ID NO: 170288 - DNA, 20 bp, Artificial sequence
  SiRNA target sequence
tgtccctttaacatttttat

SEQ ID NO: 170289 - DNA, 20 bp, Artificial sequence
  SiRNA target sequence
gtccctttaacatttttatt

SEQ ID NO: 170290 - DNA, 20 bp, Artificial sequence
  SiRNA target sequence
tccctttaacatttttatta

SEQ ID NO: 170291 - DNA, 20 bp, Artificial sequence
  SiRNA target sequence
ccctttaacatttttattat

SEQ ID NO: 170292 - DNA, 20 bp, Artificial sequence
  SiRNA target sequence
cctttaacatttttattatc

SEQ ID NO: 170293 - DNA, 20 bp, Artificial sequence
  SiRNA target sequence
ctttaacatttttattatca

SEQ ID NO: 170294 - DNA, 20 bp, Artificial sequence
  SiRNA target sequence
tttaacatttttattatcac

SEQ ID NO: 170295 - DNA, 20 bp, Artificial sequence
  SiRNA target sequence
ttaacatttttattatcacc

SEQ ID NO: 170296 - DNA, 20 bp, Artificial sequence
  SiRNA target sequence
taacatttttattatcacca

SEQ ID NO: 170297 - DNA, 20 bp, Artificial sequence
  SiRNA target sequence
aacatttttattatcaccac

SEQ ID NO: 170298 - DNA, 20 bp, Artificial sequence
  SiRNA target sequence
acatttttattatcaccaca

SEQ ID NO: 170299 - DNA, 20 bp, Artificial sequence
  SiRNA target sequence
catttttattatcaccacat

SEQ ID NO: 170300 - DNA, 20 bp, Artificial sequence
  SiRNA target sequence
atttttattatcaccacatt

SEQ ID NO: 170301 - DNA, 20 bp, Artificial sequence
  SiRNA target sequence
tttttattatcaccacattc

SEQ ID NO: 170302 - DNA, 20 bp, Artificial sequence
  SiRNA target sequence
ttttattatcaccacattcg

SEQ ID NO: 170303 - DNA, 20 bp, Artificial sequence
  SiRNA target sequence
tttattatcaccacattcga

SEQ ID NO: 170304 - DNA, 20 bp, Artificial sequence
  SiRNA target sequence
ttattatcaccacattcgaa

SEQ ID NO: 170305 - DNA, 20 bp, Artificial sequence
  SiRNA target sequence
tattatcaccacattcgaaa

SEQ ID NO: 170306 - DNA, 20 bp, Artificial sequence
  SiRNA target sequence
attatcaccacattcgaaaa

SEQ ID NO: 170307 - DNA, 20 bp, Artificial sequence
  SiRNA target sequence
ttatcaccacattcgaaaat

SEQ ID NO: 170308 - DNA, 20 bp, Artificial sequence
  SiRNA target sequence
tatcaccacattcgaaaatg

SEQ ID NO: 170309 - DNA, 20 bp, Artificial sequence
  SiRNA target sequence
atcaccacattcgaaaatga

SEQ ID NO: 170310 - DNA, 20 bp, Artificial sequence
  SiRNA target sequence
tcaccacattcgaaaatgaa

SEQ ID NO: 170311 - DNA, 20 bp, Artificial sequence
  SiRNA target sequence
caccacattcgaaaatgaat

SEQ ID NO: 170312 - DNA, 20 bp, Artificial sequence
  SiRNA target sequence
accacattcgaaaatgaata

SEQ ID NO: 170313 - DNA, 20 bp, Artificial sequence
  SiRNA target sequence
ccacattcgaaaatgaatat

SEQ ID NO: 170314 - DNA, 20 bp, Artificial sequence
  SiRNA target sequence
cacattcgaaaatgaatatg

SEQ ID NO: 170315 - DNA, 20 bp, Artificial sequence
  SiRNA target sequence
acattcgaaaatgaatatgt

SEQ ID NO: 170316 - DNA, 20 bp, Artificial sequence
  SiRNA target sequence
cattcgaaaatgaatatgta

SEQ ID NO: 170317 - DNA, 20 bp, Artificial sequence
  SiRNA target sequence
attcgaaaatgaatatgtat

SEQ ID NO: 170318 - DNA, 20 bp, Artificial sequence
  SiRNA target sequence
ttcgaaaatgaatatgtatg

SEQ ID NO: 170319 - DNA, 20 bp, Artificial sequence
  SiRNA target sequence
tcgaaaatgaatatgtatgc

SEQ ID NO: 170320 - DNA, 20 bp, Artificial sequence
  SiRNA target sequence
cgaaaatgaatatgtatgca

SEQ ID NO: 170321 - DNA, 20 bp, Artificial sequence
  SiRNA target sequence
gaaaatgaatatgtatgcac

SEQ ID NO: 170322 - DNA, 20 bp, Artificial sequence
  SiRNA target sequence
aaaatgaatatgtatgcaca

SEQ ID NO: 170323 - DNA, 20 bp, Artificial sequence
  SiRNA target sequence
aaatgaatatgtatgcacac

SEQ ID NO: 170324 - DNA, 20 bp, Artificial sequence
  SiRNA target sequence
aatgaatatgtatgcacact

SEQ ID NO: 170325 - DNA, 20 bp, Artificial sequence
  SiRNA target sequence
atgaatatgtatgcacacta

SEQ ID NO: 170326 - DNA, 20 bp, Artificial sequence
  SiRNA target sequence
tgaatatgtatgcacactat

SEQ ID NO: 170327 - DNA, 20 bp, Artificial sequence
  SiRNA target sequence
gaatatgtatgcacactata

SEQ ID NO: 170328 - DNA, 20 bp, Artificial sequence
  SiRNA target sequence
aatatgtatgcacactataa

SEQ ID NO: 170329 - DNA, 20 bp, Artificial sequence
  SiRNA target sequence
atatgtatgcacactataac

SEQ ID NO: 170330 - DNA, 20 bp, Artificial sequence
  SiRNA target sequence
tatgtatgcacactataaca

SEQ ID NO: 170331 - DNA, 20 bp, Artificial sequence
  SiRNA target sequence
atgtatgcacactataacaa

SEQ ID NO: 170332 - DNA, 20 bp, Artificial sequence
  SiRNA target sequence
tgtatgcacactataacaat

SEQ ID NO: 170333 - DNA, 20 bp, Artificial sequence
  SiRNA target sequence
gtatgcacactataacaatc

SEQ ID NO: 170334 - DNA, 20 bp, Artificial sequence
  SiRNA target sequence
tatgcacactataacaatca

SEQ ID NO: 170335 - DNA, 20 bp, Artificial sequence
  SiRNA target sequence
atgcacactataacaatcat

SEQ ID NO: 170336 - DNA, 20 bp, Artificial sequence
  SiRNA target sequence
tgcacactataacaatcata

SEQ ID NO: 170337 - DNA, 20 bp, Artificial sequence
  SiRNA target sequence
gcacactataacaatcatat

SEQ ID NO: 170338 - DNA, 20 bp, Artificial sequence
  SiRNA target sequence
cacactataacaatcatata

SEQ ID NO: 170339 - DNA, 20 bp, Artificial sequence
  SiRNA target sequence
acactataacaatcatataa

SEQ ID NO: 170340 - DNA, 20 bp, Artificial sequence
  SiRNA target sequence
cactataacaatcatataat

SEQ ID NO: 170341 - DNA, 20 bp, Artificial sequence
  SiRNA target sequence
actataacaatcatataatg

SEQ ID NO: 170342 - DNA, 20 bp, Artificial sequence
  SiRNA target sequence
ctataacaatcatataatgt

SEQ ID NO: 170343 - DNA, 20 bp, Artificial sequence
  SiRNA target sequence
tataacaatcatataatgtc

SEQ ID NO: 170344 - DNA, 20 bp, Artificial sequence
  SiRNA target sequence
ataacaatcatataatgtcc

SEQ ID NO: 170345 - DNA, 20 bp, Artificial sequence
  SiRNA target sequence
taacaatcatataatgtcct

SEQ ID NO: 170346 - DNA, 20 bp, Artificial sequence
  SiRNA target sequence
aacaatcatataatgtcctt

SEQ ID NO: 170347 - DNA, 20 bp, Artificial sequence
  SiRNA target sequence
acaatcatataatgtccttt

SEQ ID NO: 170348 - DNA, 20 bp, Artificial sequence
  SiRNA target sequence
caatcatataatgtccttta

SEQ ID NO: 170349 - DNA, 20 bp, Artificial sequence
  SiRNA target sequence
aatcatataatgtcctttag

SEQ ID NO: 170350 - DNA, 20 bp, Artificial sequence
  SiRNA target sequence
atcatataatgtcctttagt

SEQ ID NO: 170351 - DNA, 20 bp, Artificial sequence
  SiRNA target sequence
tcatataatgtcctttagtg

SEQ ID NO: 170352 - DNA, 20 bp, Artificial sequence
  SiRNA target sequence
catataatgtcctttagtga

SEQ ID NO: 170353 - DNA, 20 bp, Artificial sequence
  SiRNA target sequence
atataatgtcctttagtgat

SEQ ID NO: 170354 - DNA, 20 bp, Artificial sequence
  SiRNA target sequence
tataatgtcctttagtgatt

SEQ ID NO: 170355 - DNA, 20 bp, Artificial sequence
  SiRNA target sequence
ataatgtcctttagtgattt

SEQ ID NO: 170356 - DNA, 20 bp, Artificial sequence
  SiRNA target sequence
taatgtcctttagtgatttt

SEQ ID NO: 170357 - DNA, 20 bp, Artificial sequence
  SiRNA target sequence
aatgtcctttagtgattttg

SEQ ID NO: 170358 - DNA, 20 bp, Artificial sequence
  SiRNA target sequence
atgtcctttagtgattttga

SEQ ID NO: 170359 - DNA, 20 bp, Artificial sequence
  SiRNA target sequence
tgtcctttagtgattttgaa

SEQ ID NO: 170360 - DNA, 20 bp, Artificial sequence
  SiRNA target sequence
gtcctttagtgattttgaat

SEQ ID NO: 170361 - DNA, 20 bp, Artificial sequence
  SiRNA target sequence
tcctttagtgattttgaata

SEQ ID NO: 170362 - DNA, 20 bp, Artificial sequence
  SiRNA target sequence
cctttagtgattttgaatat

SEQ ID NO: 170363 - DNA, 20 bp, Artificial sequence
  SiRNA target sequence
ctttagtgattttgaatatc

SEQ ID NO: 170364 - DNA, 20 bp, Artificial sequence
  SiRNA target sequence
tttagtgattttgaatatca

SEQ ID NO: 170365 - DNA, 20 bp, Artificial sequence
  SiRNA target sequence
ttagtgattttgaatatcac

SEQ ID NO: 170366 - DNA, 20 bp, Artificial sequence
  SiRNA target sequence
tagtgattttgaatatcact

SEQ ID NO: 170367 - DNA, 20 bp, Artificial sequence
  SiRNA target sequence
agtgattttgaatatcactt

SEQ ID NO: 170368 - DNA, 20 bp, Artificial sequence
  SiRNA target sequence
gtgattttgaatatcactta

SEQ ID NO: 170369 - DNA, 20 bp, Artificial sequence
  SiRNA target sequence
tgattttgaatatcacttaa

SEQ ID NO: 170370 - DNA, 20 bp, Artificial sequence
  SiRNA target sequence
gattttgaatatcacttaat

SEQ ID NO: 170371 - DNA, 20 bp, Artificial sequence
  SiRNA target sequence
attttgaatatcacttaatt

SEQ ID NO: 170372 - DNA, 20 bp, Artificial sequence
  SiRNA target sequence
ttttgaatatcacttaattt

SEQ ID NO: 170373 - DNA, 20 bp, Artificial sequence
  SiRNA target sequence
tttgaatatcacttaatttc

SEQ ID NO: 170374 - DNA, 20 bp, Artificial sequence
  SiRNA target sequence
ttgaatatcacttaatttca

SEQ ID NO: 170375 - DNA, 20 bp, Artificial sequence
  SiRNA target sequence
tgaatatcacttaatttcat

SEQ ID NO: 170376 - DNA, 20 bp, Artificial sequence
  SiRNA target sequence
gaatatcacttaatttcatt

SEQ ID NO: 170377 - DNA, 20 bp, Artificial sequence
  SiRNA target sequence
aatatcacttaatttcattt

SEQ ID NO: 170378 - DNA, 20 bp, Artificial sequence
  SiRNA target sequence
atatcacttaatttcattta

SEQ ID NO: 170379 - DNA, 20 bp, Artificial sequence
  SiRNA target sequence
tatcacttaatttcatttat

SEQ ID NO: 170380 - DNA, 20 bp, Artificial sequence
  SiRNA target sequence
atcacttaatttcatttata

SEQ ID NO: 170381 - DNA, 20 bp, Artificial sequence
  SiRNA target sequence
tcacttaatttcatttataa

SEQ ID NO: 170382 - DNA, 20 bp, Artificial sequence
  SiRNA target sequence
cacttaatttcatttataaa

SEQ ID NO: 170383 - DNA, 20 bp, Artificial sequence
  SiRNA target sequence
acttaatttcatttataaaa

SEQ ID NO: 170384 - DNA, 20 bp, Artificial sequence
  SiRNA target sequence
cttaatttcatttataaaac

SEQ ID NO: 170385 - DNA, 20 bp, Artificial sequence
  SiRNA target sequence
ttaatttcatttataaaact

SEQ ID NO: 170386 - DNA, 20 bp, Artificial sequence
  SiRNA target sequence
taatttcatttataaaacta

SEQ ID NO: 170387 - DNA, 20 bp, Artificial sequence
  SiRNA target sequence
aatttcatttataaaactaa

SEQ ID NO: 170388 - DNA, 20 bp, Artificial sequence
  SiRNA target sequence
atttcatttataaaactaaa

SEQ ID NO: 170389 - DNA, 20 bp, Artificial sequence
  SiRNA target sequence
tttcatttataaaactaaaa

SEQ ID NO: 170390 - DNA, 20 bp, Artificial sequence
  SiRNA target sequence
ttcatttataaaactaaaat

SEQ ID NO: 170391 - DNA, 20 bp, Artificial sequence
  SiRNA target sequence
tcatttataaaactaaaatt

SEQ ID NO: 170392 - DNA, 20 bp, Artificial sequence
  SiRNA target sequence
catttataaaactaaaattt

SEQ ID NO: 170393 - DNA, 20 bp, Artificial sequence
  SiRNA target sequence
atttataaaactaaaattta

SEQ ID NO: 170394 - DNA, 20 bp, Artificial sequence
  SiRNA target sequence
tttataaaactaaaatttaa

SEQ ID NO: 170395 - DNA, 20 bp, Artificial sequence
  SiRNA target sequence
ttataaaactaaaatttaat

SEQ ID NO: 170396 - DNA, 20 bp, Artificial sequence
  SiRNA target sequence
tataaaactaaaatttaatg

SEQ ID NO: 170397 - DNA, 20 bp, Artificial sequence
  SiRNA target sequence
ataaaactaaaatttaatgt

SEQ ID NO: 170398 - DNA, 20 bp, Artificial sequence
  SiRNA target sequence
taaaactaaaatttaatgta

SEQ ID NO: 170399 - DNA, 20 bp, Artificial sequence
  SiRNA target sequence
aaaactaaaatttaatgtaa

SEQ ID NO: 170400 - DNA, 20 bp, Artificial sequence
  SiRNA target sequence
aaactaaaatttaatgtaat

SEQ ID NO: 170401 - DNA, 20 bp, Artificial sequence
  SiRNA target sequence
aactaaaatttaatgtaata

SEQ ID NO: 170402 - DNA, 20 bp, Artificial sequence
  SiRNA target sequence
actaaaatttaatgtaataa

SEQ ID NO: 170403 - DNA, 20 bp, Artificial sequence
  SiRNA target sequence
ctaaaatttaatgtaataaa

SEQ ID NO: 170404 - DNA, 20 bp, Artificial sequence
  SiRNA target sequence
taaaatttaatgtaataaaa

SEQ ID NO: 170405 - DNA, 20 bp, Artificial sequence
  SiRNA target sequence
aaaatttaatgtaataaaag

SEQ ID NO: 170406 - DNA, 20 bp, Artificial sequence
  SiRNA target sequence
aaatttaatgtaataaaagt

SEQ ID NO: 170407 - DNA, 20 bp, Artificial sequence
  SiRNA target sequence
aatttaatgtaataaaagta

SEQ ID NO: 170408 - DNA, 20 bp, Artificial sequence
  SiRNA target sequence
atttaatgtaataaaagtat

SEQ ID NO: 170409 - DNA, 20 bp, Artificial sequence
  SiRNA target sequence
tttaatgtaataaaagtata

SEQ ID NO: 170410 - DNA, 20 bp, Artificial sequence
  SiRNA target sequence
ttaatgtaataaaagtatat

SEQ ID NO: 170411 - DNA, 20 bp, Artificial sequence
  SiRNA target sequence
taatgtaataaaagtatatg

SEQ ID NO: 170412 - DNA, 20 bp, Artificial sequence
  SiRNA target sequence
aatgtaataaaagtatatga

SEQ ID NO: 170413 - DNA, 20 bp, Artificial sequence
  SiRNA target sequence
atgtaataaaagtatatgat

SEQ ID NO: 170414 - DNA, 20 bp, Artificial sequence
  SiRNA target sequence
tgtaataaaagtatatgata

SEQ ID NO: 170415 - DNA, 20 bp, Artificial sequence
  SiRNA target sequence
gtaataaaagtatatgatac

SEQ ID NO: 170416 - DNA, 20 bp, Artificial sequence
  SiRNA target sequence
taataaaagtatatgataca

SEQ ID NO: 170417 - DNA, 20 bp, Artificial sequence
  SiRNA target sequence
aataaaagtatatgatacat

SEQ ID NO: 170418 - DNA, 20 bp, Artificial sequence
  SiRNA target sequence
ataaaagtatatgatacatc

SEQ ID NO: 170419 - DNA, 20 bp, Artificial sequence
  SiRNA target sequence
taaaagtatatgatacatct

SEQ ID NO: 170420 - DNA, 20 bp, Artificial sequence
  SiRNA target sequence
aaaagtatatgatacatctt

SEQ ID NO: 170421 - DNA, 20 bp, Artificial sequence
  SiRNA target sequence
aaagtatatgatacatctta

SEQ ID NO: 170422 - DNA, 20 bp, Artificial sequence
  SiRNA target sequence
aagtatatgatacatcttat

SEQ ID NO: 170423 - DNA, 20 bp, Artificial sequence
  SiRNA target sequence
agtatatgatacatcttatg

SEQ ID NO: 170424 - DNA, 20 bp, Artificial sequence
  SiRNA target sequence
gtatatgatacatcttatgt

SEQ ID NO: 170425 - DNA, 20 bp, Artificial sequence
  SiRNA target sequence
tatatgatacatcttatgtc

SEQ ID NO: 170426 - DNA, 20 bp, Artificial sequence
  SiRNA target sequence
atatgatacatcttatgtca

SEQ ID NO: 170427 - DNA, 20 bp, Artificial sequence
  SiRNA target sequence
tatgatacatcttatgtcaa

SEQ ID NO: 170428 - DNA, 20 bp, Artificial sequence
  SiRNA target sequence
atgatacatcttatgtcaaa

SEQ ID NO: 170429 - DNA, 20 bp, Artificial sequence
  SiRNA target sequence
tgatacatcttatgtcaaaa

SEQ ID NO: 170430 - DNA, 20 bp, Artificial sequence
  SiRNA target sequence
gatacatcttatgtcaaaaa

SEQ ID NO: 170431 - DNA, 20 bp, Artificial sequence
  SiRNA target sequence
atacatcttatgtcaaaaat

SEQ ID NO: 170432 - DNA, 20 bp, Artificial sequence
  SiRNA target sequence
tacatcttatgtcaaaaata

SEQ ID NO: 170433 - DNA, 20 bp, Artificial sequence
  SiRNA target sequence
acatcttatgtcaaaaatat

SEQ ID NO: 170434 - DNA, 20 bp, Artificial sequence
  SiRNA target sequence
catcttatgtcaaaaatatt

SEQ ID NO: 170435 - DNA, 20 bp, Artificial sequence
  SiRNA target sequence
atcttatgtcaaaaatattc

SEQ ID NO: 170436 - DNA, 20 bp, Artificial sequence
  SiRNA target sequence
tcttatgtcaaaaatattct

SEQ ID NO: 170437 - DNA, 20 bp, Artificial sequence
  SiRNA target sequence
cttatgtcaaaaatattctg

SEQ ID NO: 170438 - DNA, 20 bp, Artificial sequence
  SiRNA target sequence
ttatgtcaaaaatattctgt

SEQ ID NO: 170439 - DNA, 20 bp, Artificial sequence
  SiRNA target sequence
tatgtcaaaaatattctgta

SEQ ID NO: 170440 - DNA, 20 bp, Artificial sequence
  SiRNA target sequence
atgtcaaaaatattctgtat

SEQ ID NO: 170441 - DNA, 20 bp, Artificial sequence
  SiRNA target sequence
tgtcaaaaatattctgtatg

SEQ ID NO: 170442 - DNA, 20 bp, Artificial sequence
  SiRNA target sequence
gtcaaaaatattctgtatga

SEQ ID NO: 170443 - DNA, 20 bp, Artificial sequence
  SiRNA target sequence
tcaaaaatattctgtatgat

SEQ ID NO: 170444 - DNA, 20 bp, Artificial sequence
  SiRNA target sequence
caaaaatattctgtatgata

SEQ ID NO: 170445 - DNA, 20 bp, Artificial sequence
  SiRNA target sequence
aaaaatattctgtatgatag

SEQ ID NO: 170446 - DNA, 20 bp, Artificial sequence
  SiRNA target sequence
aaaatattctgtatgatagt

SEQ ID NO: 170447 - DNA, 20 bp, Artificial sequence
  SiRNA target sequence
aaatattctgtatgatagtg

SEQ ID NO: 170448 - DNA, 20 bp, Artificial sequence
  SiRNA target sequence
aatattctgtatgatagtgt

SEQ ID NO: 170449 - DNA, 20 bp, Artificial sequence
  SiRNA target sequence
atattctgtatgatagtgtt

SEQ ID NO: 170450 - DNA, 20 bp, Artificial sequence
  SiRNA target sequence
tattctgtatgatagtgttt

SEQ ID NO: 170451 - DNA, 20 bp, Artificial sequence
  SiRNA target sequence
attctgtatgatagtgttta

SEQ ID NO: 170452 - DNA, 20 bp, Artificial sequence
  SiRNA target sequence
ttctgtatgatagtgtttat

SEQ ID NO: 170453 - DNA, 20 bp, Artificial sequence
  SiRNA target sequence
tctgtatgatagtgtttatg

SEQ ID NO: 170454 - DNA, 20 bp, Artificial sequence
  SiRNA target sequence
ctgtatgatagtgtttatga

SEQ ID NO: 170455 - DNA, 20 bp, Artificial sequence
  SiRNA target sequence
tgtatgatagtgtttatgag

SEQ ID NO: 170456 - DNA, 20 bp, Artificial sequence
  SiRNA target sequence
gtatgatagtgtttatgagg

SEQ ID NO: 170457 - DNA, 20 bp, Artificial sequence
  SiRNA target sequence
tatgatagtgtttatgagga

SEQ ID NO: 170458 - DNA, 20 bp, Artificial sequence
  SiRNA target sequence
atgatagtgtttatgaggaa

SEQ ID NO: 170459 - DNA, 20 bp, Artificial sequence
  SiRNA target sequence
tgatagtgtttatgaggaaa

SEQ ID NO: 170460 - DNA, 20 bp, Artificial sequence
  SiRNA target sequence
gatagtgtttatgaggaaag

SEQ ID NO: 170461 - DNA, 20 bp, Artificial sequence
  SiRNA target sequence
atagtgtttatgaggaaagc

SEQ ID NO: 170462 - DNA, 20 bp, Artificial sequence
  SiRNA target sequence
tagtgtttatgaggaaagca

SEQ ID NO: 170463 - DNA, 20 bp, Artificial sequence
  SiRNA target sequence
agtgtttatgaggaaagcac

SEQ ID NO: 170464 - DNA, 20 bp, Artificial sequence
  SiRNA target sequence
gtgtttatgaggaaagcacg

SEQ ID NO: 170465 - DNA, 20 bp, Artificial sequence
  SiRNA target sequence
tgtttatgaggaaagcacga

SEQ ID NO: 170466 - DNA, 20 bp, Artificial sequence
  SiRNA target sequence
gtttatgaggaaagcacgag

SEQ ID NO: 170467 - DNA, 20 bp, Artificial sequence
  SiRNA target sequence
tttatgaggaaagcacgaga

SEQ ID NO: 170468 - DNA, 20 bp, Artificial sequence
  SiRNA target sequence
ttatgaggaaagcacgagag

SEQ ID NO: 170469 - DNA, 20 bp, Artificial sequence
  SiRNA target sequence
tatgaggaaagcacgagaga

SEQ ID NO: 170470 - DNA, 20 bp, Artificial sequence
  SiRNA target sequence
atgaggaaagcacgagagac

SEQ ID NO: 170471 - DNA, 20 bp, Artificial sequence
  SiRNA target sequence
tgaggaaagcacgagagaca

SEQ ID NO: 170472 - DNA, 20 bp, Artificial sequence
  SiRNA target sequence
gaggaaagcacgagagacaa

SEQ ID NO: 170473 - DNA, 20 bp, Artificial sequence
  SiRNA target sequence
aggaaagcacgagagacaaa

SEQ ID NO: 170474 - DNA, 20 bp, Artificial sequence
  SiRNA target sequence
ggaaagcacgagagacaaaa

SEQ ID NO: 170475 - DNA, 20 bp, Artificial sequence
  SiRNA target sequence
gaaagcacgagagacaaaat

SEQ ID NO: 170476 - DNA, 20 bp, Artificial sequence
  SiRNA target sequence
aaagcacgagagacaaaata

SEQ ID NO: 170477 - DNA, 20 bp, Artificial sequence
  SiRNA target sequence
aagcacgagagacaaaataa

SEQ ID NO: 170478 - DNA, 20 bp, Artificial sequence
  SiRNA target sequence
agcacgagagacaaaataat

SEQ ID NO: 170479 - DNA, 20 bp, Artificial sequence
  SiRNA target sequence
gcacgagagacaaaataata

SEQ ID NO: 170480 - DNA, 20 bp, Artificial sequence
  SiRNA target sequence
cacgagagacaaaataataa

SEQ ID NO: 170481 - DNA, 20 bp, Artificial sequence
  SiRNA target sequence
acgagagacaaaataataat

SEQ ID NO: 170482 - DNA, 20 bp, Artificial sequence
  SiRNA target sequence
cgagagacaaaataataata

SEQ ID NO: 170483 - DNA, 20 bp, Artificial sequence
  SiRNA target sequence
gagagacaaaataataataa

SEQ ID NO: 170484 - DNA, 20 bp, Artificial sequence
  SiRNA target sequence
agagacaaaataataataag

SEQ ID NO: 170485 - DNA, 20 bp, Artificial sequence
  SiRNA target sequence
gagacaaaataataataagt

SEQ ID NO: 170486 - DNA, 20 bp, Artificial sequence
  SiRNA target sequence
agacaaaataataataagtg

SEQ ID NO: 170487 - DNA, 20 bp, Artificial sequence
  SiRNA target sequence
gacaaaataataataagtga

SEQ ID NO: 170488 - DNA, 20 bp, Artificial sequence
  SiRNA target sequence
acaaaataataataagtgac

SEQ ID NO: 170489 - DNA, 20 bp, Artificial sequence
  SiRNA target sequence
caaaataataataagtgact

SEQ ID NO: 170490 - DNA, 20 bp, Artificial sequence
  SiRNA target sequence
aaaataataataagtgactg

SEQ ID NO: 170491 - DNA, 20 bp, Artificial sequence
  SiRNA target sequence
aaataataataagtgactgt

SEQ ID NO: 170492 - DNA, 20 bp, Artificial sequence
  SiRNA target sequence
aataataataagtgactgtc

SEQ ID NO: 170493 - DNA, 20 bp, Artificial sequence
  SiRNA target sequence
ataataataagtgactgtcc

SEQ ID NO: 170494 - DNA, 20 bp, Artificial sequence
  SiRNA target sequence
taataataagtgactgtcct

SEQ ID NO: 170495 - DNA, 20 bp, Artificial sequence
  SiRNA target sequence
aataataagtgactgtcctg

SEQ ID NO: 170496 - DNA, 20 bp, Artificial sequence
  SiRNA target sequence
ataataagtgactgtcctgg

SEQ ID NO: 170497 - DNA, 20 bp, Artificial sequence
  SiRNA target sequence
taataagtgactgtcctggg

SEQ ID NO: 170498 - DNA, 20 bp, Artificial sequence
  SiRNA target sequence
aataagtgactgtcctggga

SEQ ID NO: 170499 - DNA, 20 bp, Artificial sequence
  SiRNA target sequence
ataagtgactgtcctgggac

SEQ ID NO: 170500 - DNA, 20 bp, Artificial sequence
  SiRNA target sequence
taagtgactgtcctgggact

SEQ ID NO: 170501 - DNA, 20 bp, Artificial sequence
  SiRNA target sequence
aagtgactgtcctgggactg

SEQ ID NO: 170502 - DNA, 20 bp, Artificial sequence
  SiRNA target sequence
agtgactgtcctgggactgt

SEQ ID NO: 170503 - DNA, 20 bp, Artificial sequence
  SiRNA target sequence
gtgactgtcctgggactgtt

SEQ ID NO: 170504 - DNA, 20 bp, Artificial sequence
  SiRNA target sequence
tgactgtcctgggactgttt

SEQ ID NO: 170505 - DNA, 20 bp, Artificial sequence
  SiRNA target sequence
gactgtcctgggactgtttc

SEQ ID NO: 170506 - DNA, 20 bp, Artificial sequence
  SiRNA target sequence
actgtcctgggactgtttca

SEQ ID NO: 170507 - DNA, 20 bp, Artificial sequence
  SiRNA target sequence
ctgtcctgggactgtttcat

SEQ ID NO: 170508 - DNA, 20 bp, Artificial sequence
  SiRNA target sequence
tgtcctgggactgtttcata

SEQ ID NO: 170509 - DNA, 20 bp, Artificial sequence
  SiRNA target sequence
gtcctgggactgtttcatat

SEQ ID NO: 170510 - DNA, 20 bp, Artificial sequence
  SiRNA target sequence
tcctgggactgtttcatata

SEQ ID NO: 170511 - DNA, 20 bp, Artificial sequence
  SiRNA target sequence
cctgggactgtttcatatat

SEQ ID NO: 170512 - DNA, 20 bp, Artificial sequence
  SiRNA target sequence
ctgggactgtttcatatatt

SEQ ID NO: 170513 - DNA, 20 bp, Artificial sequence
  SiRNA target sequence
tgggactgtttcatatattg

SEQ ID NO: 170514 - DNA, 20 bp, Artificial sequence
  SiRNA target sequence
gggactgtttcatatattga

SEQ ID NO: 170515 - DNA, 20 bp, Artificial sequence
  SiRNA target sequence
ggactgtttcatatattgaa

SEQ ID NO: 170516 - DNA, 20 bp, Artificial sequence
  SiRNA target sequence
gactgtttcatatattgaaa

SEQ ID NO: 170517 - DNA, 20 bp, Artificial sequence
  SiRNA target sequence
actgtttcatatattgaaag

SEQ ID NO: 170518 - DNA, 20 bp, Artificial sequence
  SiRNA target sequence
ctgtttcatatattgaaagg

SEQ ID NO: 170519 - DNA, 20 bp, Artificial sequence
  SiRNA target sequence
tgtttcatatattgaaaggc

SEQ ID NO: 170520 - DNA, 20 bp, Artificial sequence
  SiRNA target sequence
gtttcatatattgaaaggca

SEQ ID NO: 170521 - DNA, 20 bp, Artificial sequence
  SiRNA target sequence
tttcatatattgaaaggcaa

SEQ ID NO: 170522 - DNA, 20 bp, Artificial sequence
  SiRNA target sequence
ttcatatattgaaaggcaag

SEQ ID NO: 170523 - DNA, 20 bp, Artificial sequence
  SiRNA target sequence
tcatatattgaaaggcaagc

SEQ ID NO: 170524 - DNA, 20 bp, Artificial sequence
  SiRNA target sequence
catatattgaaaggcaagca

SEQ ID NO: 170525 - DNA, 20 bp, Artificial sequence
  SiRNA target sequence
atatattgaaaggcaagcac

SEQ ID NO: 170526 - DNA, 20 bp, Artificial sequence
  SiRNA target sequence
tatattgaaaggcaagcaca

SEQ ID NO: 170527 - DNA, 20 bp, Artificial sequence
  SiRNA target sequence
atattgaaaggcaagcacac

SEQ ID NO: 170528 - DNA, 20 bp, Artificial sequence
  SiRNA target sequence
tattgaaaggcaagcacacc

SEQ ID NO: 170529 - DNA, 20 bp, Artificial sequence
  SiRNA target sequence
attgaaaggcaagcacacca

SEQ ID NO: 170530 - DNA, 20 bp, Artificial sequence
  SiRNA target sequence
ttgaaaggcaagcacaccat

SEQ ID NO: 170531 - DNA, 20 bp, Artificial sequence
  SiRNA target sequence
tgaaaggcaagcacaccatt

SEQ ID NO: 170532 - DNA, 20 bp, Artificial sequence
  SiRNA target sequence
gaaaggcaagcacaccattt

SEQ ID NO: 170533 - DNA, 20 bp, Artificial sequence
  SiRNA target sequence
aaaggcaagcacaccattta

SEQ ID NO: 170534 - DNA, 20 bp, Artificial sequence
  SiRNA target sequence
aaggcaagcacaccatttaa

SEQ ID NO: 170535 - DNA, 20 bp, Artificial sequence
  SiRNA target sequence
aggcaagcacaccatttaat

SEQ ID NO: 170536 - DNA, 20 bp, Artificial sequence
  SiRNA target sequence
ggcaagcacaccatttaatt

SEQ ID NO: 170537 - DNA, 20 bp, Artificial sequence
  SiRNA target sequence
gcaagcacaccatttaattg

SEQ ID NO: 170538 - DNA, 20 bp, Artificial sequence
  SiRNA target sequence
caagcacaccatttaattga

SEQ ID NO: 170539 - DNA, 20 bp, Artificial sequence
  SiRNA target sequence
aagcacaccatttaattgaa

SEQ ID NO: 170540 - DNA, 20 bp, Artificial sequence
  SiRNA target sequence
agcacaccatttaattgaat

SEQ ID NO: 170541 - DNA, 20 bp, Artificial sequence
  SiRNA target sequence
gcacaccatttaattgaata

SEQ ID NO: 170542 - DNA, 20 bp, Artificial sequence
  SiRNA target sequence
cacaccatttaattgaatat

SEQ ID NO: 170543 - DNA, 20 bp, Artificial sequence
  SiRNA target sequence
acaccatttaattgaatatt

SEQ ID NO: 170544 - DNA, 20 bp, Artificial sequence
  SiRNA target sequence
caccatttaattgaatattt

SEQ ID NO: 170545 - DNA, 20 bp, Artificial sequence
  SiRNA target sequence
accatttaattgaatattta

SEQ ID NO: 170546 - DNA, 20 bp, Artificial sequence
  SiRNA target sequence
ccatttaattgaatatttat

SEQ ID NO: 170547 - DNA, 20 bp, Artificial sequence
  SiRNA target sequence
catttaattgaatatttatc

SEQ ID NO: 170548 - DNA, 20 bp, Artificial sequence
  SiRNA target sequence
atttaattgaatatttatct

SEQ ID NO: 170549 - DNA, 20 bp, Artificial sequence
  SiRNA target sequence
tttaattgaatatttatctg

SEQ ID NO: 170550 - DNA, 20 bp, Artificial sequence
  SiRNA target sequence
ttaattgaatatttatctgt

SEQ ID NO: 170551 - DNA, 20 bp, Artificial sequence
  SiRNA target sequence
taattgaatatttatctgtt

SEQ ID NO: 170552 - DNA, 20 bp, Artificial sequence
  SiRNA target sequence
aattgaatatttatctgtta

SEQ ID NO: 170553 - DNA, 20 bp, Artificial sequence
  SiRNA target sequence
attgaatatttatctgttac

SEQ ID NO: 170554 - DNA, 20 bp, Artificial sequence
  SiRNA target sequence
ttgaatatttatctgttact

SEQ ID NO: 170555 - DNA, 20 bp, Artificial sequence
  SiRNA target sequence
tgaatatttatctgttactt

SEQ ID NO: 170556 - DNA, 20 bp, Artificial sequence
  SiRNA target sequence
gaatatttatctgttacttc

SEQ ID NO: 170557 - DNA, 20 bp, Artificial sequence
  SiRNA target sequence
aatatttatctgttacttct

SEQ ID NO: 170558 - DNA, 20 bp, Artificial sequence
  SiRNA target sequence
atatttatctgttacttcta

SEQ ID NO: 170559 - DNA, 20 bp, Artificial sequence
  SiRNA target sequence
tatttatctgttacttctac

SEQ ID NO: 170560 - DNA, 20 bp, Artificial sequence
  SiRNA target sequence
atttatctgttacttctaca

SEQ ID NO: 170561 - DNA, 20 bp, Artificial sequence
  SiRNA target sequence
tttatctgttacttctacac

SEQ ID NO: 170562 - DNA, 20 bp, Artificial sequence
  SiRNA target sequence
ttatctgttacttctacaca

SEQ ID NO: 170563 - DNA, 20 bp, Artificial sequence
  SiRNA target sequence
tatctgttacttctacacaa

SEQ ID NO: 170564 - DNA, 20 bp, Artificial sequence
  SiRNA target sequence
atctgttacttctacacaac

SEQ ID NO: 170565 - DNA, 20 bp, Artificial sequence
  SiRNA target sequence
tctgttacttctacacaaca

SEQ ID NO: 170566 - DNA, 20 bp, Artificial sequence
  SiRNA target sequence
ctgttacttctacacaacaa

SEQ ID NO: 170567 - DNA, 20 bp, Artificial sequence
  SiRNA target sequence
tgttacttctacacaacaac

SEQ ID NO: 170568 - DNA, 20 bp, Artificial sequence
  SiRNA target sequence
gttacttctacacaacaaca

SEQ ID NO: 170569 - DNA, 20 bp, Artificial sequence
  SiRNA target sequence
ttacttctacacaacaacaa

SEQ ID NO: 170570 - DNA, 20 bp, Artificial sequence
  SiRNA target sequence
tacttctacacaacaacaag

SEQ ID NO: 170571 - DNA, 20 bp, Artificial sequence
  SiRNA target sequence
acttctacacaacaacaagc

SEQ ID NO: 170572 - DNA, 20 bp, Artificial sequence
  SiRNA target sequence
cttctacacaacaacaagcc

SEQ ID NO: 170573 - DNA, 20 bp, Artificial sequence
  SiRNA target sequence
ttctacacaacaacaagcca

SEQ ID NO: 170574 - DNA, 20 bp, Artificial sequence
  SiRNA target sequence
tctacacaacaacaagccat

SEQ ID NO: 170575 - DNA, 20 bp, Artificial sequence
  SiRNA target sequence
ctacacaacaacaagccata

SEQ ID NO: 170576 - DNA, 20 bp, Artificial sequence
  SiRNA target sequence
tacacaacaacaagccataa

SEQ ID NO: 170577 - DNA, 20 bp, Artificial sequence
  SiRNA target sequence
acacaacaacaagccataaa

SEQ ID NO: 170578 - DNA, 20 bp, Artificial sequence
  SiRNA target sequence
cacaacaacaagccataaag

SEQ ID NO: 170579 - DNA, 20 bp, Artificial sequence
  SiRNA target sequence
acaacaacaagccataaagc

SEQ ID NO: 170580 - DNA, 20 bp, Artificial sequence
  SiRNA target sequence
caacaacaagccataaagct

SEQ ID NO: 170581 - DNA, 20 bp, Artificial sequence
  SiRNA target sequence
aacaacaagccataaagcta

SEQ ID NO: 170582 - DNA, 20 bp, Artificial sequence
  SiRNA target sequence
acaacaagccataaagctac

SEQ ID NO: 170583 - DNA, 20 bp, Artificial sequence
  SiRNA target sequence
caacaagccataaagctact

SEQ ID NO: 170584 - DNA, 20 bp, Artificial sequence
  SiRNA target sequence
aacaagccataaagctactt

SEQ ID NO: 170585 - DNA, 20 bp, Artificial sequence
  SiRNA target sequence
acaagccataaagctacttg

SEQ ID NO: 170586 - DNA, 20 bp, Artificial sequence
  SiRNA target sequence
caagccataaagctacttgc

SEQ ID NO: 170587 - DNA, 20 bp, Artificial sequence
  SiRNA target sequence
aagccataaagctacttgct

SEQ ID NO: 170588 - DNA, 20 bp, Artificial sequence
  SiRNA target sequence
agccataaagctacttgctc

SEQ ID NO: 170589 - DNA, 20 bp, Artificial sequence
  SiRNA target sequence
gccataaagctacttgctca

SEQ ID NO: 170590 - DNA, 20 bp, Artificial sequence
  SiRNA target sequence
ccataaagctacttgctcag

SEQ ID NO: 170591 - DNA, 20 bp, Artificial sequence
  SiRNA target sequence
cataaagctacttgctcagg

SEQ ID NO: 170592 - DNA, 20 bp, Artificial sequence
  SiRNA target sequence
ataaagctacttgctcaggg

SEQ ID NO: 170593 - DNA, 20 bp, Artificial sequence
  SiRNA target sequence
taaagctacttgctcagggg

SEQ ID NO: 170594 - DNA, 20 bp, Artificial sequence
  SiRNA target sequence
aaagctacttgctcaggggc

SEQ ID NO: 170595 - DNA, 20 bp, Artificial sequence
  SiRNA target sequence
aagctacttgctcaggggcg

SEQ ID NO: 170596 - DNA, 20 bp, Artificial sequence
  SiRNA target sequence
agctacttgctcaggggcga

SEQ ID NO: 170597 - DNA, 20 bp, Artificial sequence
  SiRNA target sequence
gctacttgctcaggggcgaa

SEQ ID NO: 170598 - DNA, 20 bp, Artificial sequence
  SiRNA target sequence
ctacttgctcaggggcgaag

SEQ ID NO: 170599 - DNA, 20 bp, Artificial sequence
  SiRNA target sequence
tacttgctcaggggcgaagt

SEQ ID NO: 170600 - DNA, 20 bp, Artificial sequence
  SiRNA target sequence
acttgctcaggggcgaagta

SEQ ID NO: 170601 - DNA, 20 bp, Artificial sequence
  SiRNA target sequence
cttgctcaggggcgaagtat

SEQ ID NO: 170602 - DNA, 20 bp, Artificial sequence
  SiRNA target sequence
ttgctcaggggcgaagtata

SEQ ID NO: 170603 - DNA, 20 bp, Artificial sequence
  SiRNA target sequence
tgctcaggggcgaagtataa

SEQ ID NO: 170604 - DNA, 20 bp, Artificial sequence
  SiRNA target sequence
gctcaggggcgaagtataag

SEQ ID NO: 170605 - DNA, 20 bp, Artificial sequence
  SiRNA target sequence
ctcaggggcgaagtataagt

SEQ ID NO: 170606 - DNA, 20 bp, Artificial sequence
  SiRNA target sequence
tcaggggcgaagtataagtg

SEQ ID NO: 170607 - DNA, 20 bp, Artificial sequence
  SiRNA target sequence
caggggcgaagtataagtgt

SEQ ID NO: 170608 - DNA, 20 bp, Artificial sequence
  SiRNA target sequence
aggggcgaagtataagtgtc

SEQ ID NO: 170609 - DNA, 20 bp, Artificial sequence
  SiRNA target sequence
ggggcgaagtataagtgtca

SEQ ID NO: 170610 - DNA, 20 bp, Artificial sequence
  SiRNA target sequence
gggcgaagtataagtgtcat

SEQ ID NO: 170611 - DNA, 20 bp, Artificial sequence
  SiRNA target sequence
ggcgaagtataagtgtcata

SEQ ID NO: 170612 - DNA, 20 bp, Artificial sequence
  SiRNA target sequence
gcgaagtataagtgtcatac

SEQ ID NO: 170613 - DNA, 20 bp, Artificial sequence
  SiRNA target sequence
cgaagtataagtgtcataca

SEQ ID NO: 170614 - DNA, 20 bp, Artificial sequence
  SiRNA target sequence
gaagtataagtgtcatacag

SEQ ID NO: 170615 - DNA, 20 bp, Artificial sequence
  SiRNA target sequence
aagtataagtgtcatacagt

SEQ ID NO: 170616 - DNA, 20 bp, Artificial sequence
  SiRNA target sequence
agtataagtgtcatacagtg

SEQ ID NO: 170617 - DNA, 20 bp, Artificial sequence
  SiRNA target sequence
gtataagtgtcatacagtgc

SEQ ID NO: 170618 - DNA, 20 bp, Artificial sequence
  SiRNA target sequence
tataagtgtcatacagtgct

SEQ ID NO: 170619 - DNA, 20 bp, Artificial sequence
  SiRNA target sequence
ataagtgtcatacagtgcta

SEQ ID NO: 170620 - DNA, 20 bp, Artificial sequence
  SiRNA target sequence
taagtgtcatacagtgctat

SEQ ID NO: 170621 - DNA, 20 bp, Artificial sequence
  SiRNA target sequence
aagtgtcatacagtgctatg

SEQ ID NO: 170622 - DNA, 20 bp, Artificial sequence
  SiRNA target sequence
agtgtcatacagtgctatga

SEQ ID NO: 170623 - DNA, 20 bp, Artificial sequence
  SiRNA target sequence
gtgtcatacagtgctatgat

SEQ ID NO: 170624 - DNA, 20 bp, Artificial sequence
  SiRNA target sequence
tgtcatacagtgctatgata

SEQ ID NO: 170625 - DNA, 20 bp, Artificial sequence
  SiRNA target sequence
gtcatacagtgctatgataa

SEQ ID NO: 170626 - DNA, 20 bp, Artificial sequence
  SiRNA target sequence
tcatacagtgctatgataaa

SEQ ID NO: 170627 - DNA, 20 bp, Artificial sequence
  SiRNA target sequence
catacagtgctatgataaat

SEQ ID NO: 170628 - DNA, 20 bp, Artificial sequence
  SiRNA target sequence
atacagtgctatgataaatt

SEQ ID NO: 170629 - DNA, 20 bp, Artificial sequence
  SiRNA target sequence
tacagtgctatgataaattt

SEQ ID NO: 170630 - DNA, 20 bp, Artificial sequence
  SiRNA target sequence
acagtgctatgataaatttt

SEQ ID NO: 170631 - DNA, 20 bp, Artificial sequence
  SiRNA target sequence
cagtgctatgataaattttt

SEQ ID NO: 170632 - DNA, 20 bp, Artificial sequence
  SiRNA target sequence
agtgctatgataaattttta

SEQ ID NO: 170633 - DNA, 20 bp, Artificial sequence
  SiRNA target sequence
gtgctatgataaatttttag

SEQ ID NO: 170634 - DNA, 20 bp, Artificial sequence
  SiRNA target sequence
tgctatgataaatttttaga

SEQ ID NO: 170635 - DNA, 20 bp, Artificial sequence
  SiRNA target sequence
gctatgataaatttttagag

SEQ ID NO: 170636 - DNA, 20 bp, Artificial sequence
  SiRNA target sequence
ctatgataaatttttagaga

SEQ ID NO: 170637 - DNA, 20 bp, Artificial sequence
  SiRNA target sequence
tatgataaatttttagagaa

SEQ ID NO: 170638 - DNA, 20 bp, Artificial sequence
  SiRNA target sequence
atgataaatttttagagaat

SEQ ID NO: 170639 - DNA, 20 bp, Artificial sequence
  SiRNA target sequence
tgataaatttttagagaata

SEQ ID NO: 170640 - DNA, 20 bp, Artificial sequence
  SiRNA target sequence
gataaatttttagagaatag

SEQ ID NO: 170641 - DNA, 20 bp, Artificial sequence
  SiRNA target sequence
ataaatttttagagaatagc

SEQ ID NO: 170642 - DNA, 20 bp, Artificial sequence
  SiRNA target sequence
taaatttttagagaatagcg

SEQ ID NO: 170643 - DNA, 20 bp, Artificial sequence
  SiRNA target sequence
aaatttttagagaatagcga

SEQ ID NO: 170644 - DNA, 20 bp, Artificial sequence
  SiRNA target sequence
aatttttagagaatagcgat

SEQ ID NO: 170645 - DNA, 20 bp, Artificial sequence
  SiRNA target sequence
atttttagagaatagcgatg

SEQ ID NO: 170646 - DNA, 20 bp, Artificial sequence
  SiRNA target sequence
tttttagagaatagcgatga

SEQ ID NO: 170647 - DNA, 20 bp, Artificial sequence
  SiRNA target sequence
ttttagagaatagcgatgat

SEQ ID NO: 170648 - DNA, 20 bp, Artificial sequence
  SiRNA target sequence
tttagagaatagcgatgatg

SEQ ID NO: 170649 - DNA, 20 bp, Artificial sequence
  SiRNA target sequence
ttagagaatagcgatgatgt

SEQ ID NO: 170650 - DNA, 20 bp, Artificial sequence
  SiRNA target sequence
tagagaatagcgatgatgtt

SEQ ID NO: 170651 - DNA, 20 bp, Artificial sequence
  SiRNA target sequence
agagaatagcgatgatgttt

SEQ ID NO: 170652 - DNA, 20 bp, Artificial sequence
  SiRNA target sequence
gagaatagcgatgatgtttt

SEQ ID NO: 170653 - DNA, 20 bp, Artificial sequence
  SiRNA target sequence
agaatagcgatgatgtttta

SEQ ID NO: 170654 - DNA, 20 bp, Artificial sequence
  SiRNA target sequence
gaatagcgatgatgttttaa

SEQ ID NO: 170655 - DNA, 20 bp, Artificial sequence
  SiRNA target sequence
aatagcgatgatgttttaac

SEQ ID NO: 170656 - DNA, 20 bp, Artificial sequence
  SiRNA target sequence
atagcgatgatgttttaact

SEQ ID NO: 170657 - DNA, 20 bp, Artificial sequence
  SiRNA target sequence
tagcgatgatgttttaacta

SEQ ID NO: 170658 - DNA, 20 bp, Artificial sequence
  SiRNA target sequence
agcgatgatgttttaactac

SEQ ID NO: 170659 - DNA, 20 bp, Artificial sequence
  SiRNA target sequence
gcgatgatgttttaactacc

SEQ ID NO: 170660 - DNA, 20 bp, Artificial sequence
  SiRNA target sequence
cgatgatgttttaactacct

SEQ ID NO: 170661 - DNA, 20 bp, Artificial sequence
  SiRNA target sequence
gatgatgttttaactaccta

SEQ ID NO: 170662 - DNA, 20 bp, Artificial sequence
  SiRNA target sequence
atgatgttttaactacctat

SEQ ID NO: 170663 - DNA, 20 bp, Artificial sequence
  SiRNA target sequence
tgatgttttaactacctatg

SEQ ID NO: 170664 - DNA, 20 bp, Artificial sequence
  SiRNA target sequence
gatgttttaactacctatga

SEQ ID NO: 170665 - DNA, 20 bp, Artificial sequence
  SiRNA target sequence
atgttttaactacctatgat

SEQ ID NO: 170666 - DNA, 20 bp, Artificial sequence
  SiRNA target sequence
tgttttaactacctatgatt

SEQ ID NO: 170667 - DNA, 20 bp, Artificial sequence
  SiRNA target sequence
gttttaactacctatgattt

SEQ ID NO: 170668 - DNA, 20 bp, Artificial sequence
  SiRNA target sequence
ttttaactacctatgatttt

SEQ ID NO: 170669 - DNA, 20 bp, Artificial sequence
  SiRNA target sequence
tttaactacctatgattttt

SEQ ID NO: 170670 - DNA, 20 bp, Artificial sequence
  SiRNA target sequence
ttaactacctatgattttta

SEQ ID NO: 170671 - DNA, 20 bp, Artificial sequence
  SiRNA target sequence
taactacctatgatttttat

SEQ ID NO: 170672 - DNA, 20 bp, Artificial sequence
  SiRNA target sequence
aactacctatgatttttata

SEQ ID NO: 170673 - DNA, 20 bp, Artificial sequence
  SiRNA target sequence
actacctatgatttttataa

SEQ ID NO: 170674 - DNA, 20 bp, Artificial sequence
  SiRNA target sequence
ctacctatgatttttataaa

SEQ ID NO: 170675 - DNA, 20 bp, Artificial sequence
  SiRNA target sequence
tacctatgatttttataaaa

SEQ ID NO: 170676 - DNA, 20 bp, Artificial sequence
  SiRNA target sequence
acctatgatttttataaaat

SEQ ID NO: 170677 - DNA, 20 bp, Artificial sequence
  SiRNA target sequence
cctatgatttttataaaatg

SEQ ID NO: 170678 - DNA, 20 bp, Artificial sequence
  SiRNA target sequence
ctatgatttttataaaatga

SEQ ID NO: 170679 - DNA, 20 bp, Artificial sequence
  SiRNA target sequence
tatgatttttataaaatgat

SEQ ID NO: 170680 - DNA, 20 bp, Artificial sequence
  SiRNA target sequence
atgatttttataaaatgatt

SEQ ID NO: 170681 - DNA, 20 bp, Artificial sequence
  SiRNA target sequence
tgatttttataaaatgattt

SEQ ID NO: 170682 - DNA, 20 bp, Artificial sequence
  SiRNA target sequence
gatttttataaaatgatttt

SEQ ID NO: 170683 - DNA, 20 bp, Artificial sequence
  SiRNA target sequence
atttttataaaatgattttg

SEQ ID NO: 170684 - DNA, 20 bp, Artificial sequence
  SiRNA target sequence
tttttataaaatgattttgg

SEQ ID NO: 170685 - DNA, 20 bp, Artificial sequence
  SiRNA target sequence
ttttataaaatgattttgga

SEQ ID NO: 170686 - DNA, 20 bp, Artificial sequence
  SiRNA target sequence
tttataaaatgattttggat

SEQ ID NO: 170687 - DNA, 20 bp, Artificial sequence
  SiRNA target sequence
ttataaaatgattttggatc

SEQ ID NO: 170688 - DNA, 20 bp, Artificial sequence
  SiRNA target sequence
tataaaatgattttggatct

SEQ ID NO: 170689 - DNA, 20 bp, Artificial sequence
  SiRNA target sequence
ataaaatgattttggatcta

SEQ ID NO: 170690 - DNA, 20 bp, Artificial sequence
  SiRNA target sequence
taaaatgattttggatctag

SEQ ID NO: 170691 - DNA, 20 bp, Artificial sequence
  SiRNA target sequence
aaaatgattttggatctagg

SEQ ID NO: 170692 - DNA, 20 bp, Artificial sequence
  SiRNA target sequence
aaatgattttggatctagga

SEQ ID NO: 170693 - DNA, 20 bp, Artificial sequence
  SiRNA target sequence
aatgattttggatctaggat

SEQ ID NO: 170694 - DNA, 20 bp, Artificial sequence
  SiRNA target sequence
atgattttggatctaggatt

SEQ ID NO: 170695 - DNA, 20 bp, Artificial sequence
  SiRNA target sequence
tgattttggatctaggattt

SEQ ID NO: 170696 - DNA, 20 bp, Artificial sequence
  SiRNA target sequence
gattttggatctaggatttt

SEQ ID NO: 170697 - DNA, 20 bp, Artificial sequence
  SiRNA target sequence
attttggatctaggattttt

SEQ ID NO: 170698 - DNA, 20 bp, Artificial sequence
  SiRNA target sequence
ttttggatctaggattttta

SEQ ID NO: 170699 - DNA, 20 bp, Artificial sequence
  SiRNA target sequence
tttggatctaggatttttac

SEQ ID NO: 170700 - DNA, 20 bp, Artificial sequence
  SiRNA target sequence
ttggatctaggatttttaca

SEQ ID NO: 170701 - DNA, 20 bp, Artificial sequence
  SiRNA target sequence
tggatctaggatttttacag

SEQ ID NO: 170702 - DNA, 20 bp, Artificial sequence
  SiRNA target sequence
ggatctaggatttttacagc

SEQ ID NO: 170703 - DNA, 20 bp, Artificial sequence
  SiRNA target sequence
gatctaggatttttacagca

SEQ ID NO: 170704 - DNA, 20 bp, Artificial sequence
  SiRNA target sequence
atctaggatttttacagcat

SEQ ID NO: 170705 - DNA, 20 bp, Artificial sequence
  SiRNA target sequence
tctaggatttttacagcata

SEQ ID NO: 170706 - DNA, 20 bp, Artificial sequence
  SiRNA target sequence
ctaggatttttacagcataa

SEQ ID NO: 170707 - DNA, 20 bp, Artificial sequence
  SiRNA target sequence
taggatttttacagcataat

SEQ ID NO: 170708 - DNA, 20 bp, Artificial sequence
  SiRNA target sequence
aggatttttacagcataatt

SEQ ID NO: 170709 - DNA, 20 bp, Artificial sequence
  SiRNA target sequence
ggatttttacagcataattt

SEQ ID NO: 170710 - DNA, 20 bp, Artificial sequence
  SiRNA target sequence
gatttttacagcataatttt

SEQ ID NO: 170711 - DNA, 20 bp, Artificial sequence
  SiRNA target sequence
atttttacagcataatttta

SEQ ID NO: 170712 - DNA, 20 bp, Artificial sequence
  SiRNA target sequence
tttttacagcataattttat

SEQ ID NO: 170713 - DNA, 20 bp, Artificial sequence
  SiRNA target sequence
ttttacagcataattttatt

SEQ ID NO: 170714 - DNA, 20 bp, Artificial sequence
  SiRNA target sequence
tttacagcataattttatta

SEQ ID NO: 170715 - DNA, 20 bp, Artificial sequence
  SiRNA target sequence
ttacagcataattttattaa

SEQ ID NO: 170716 - DNA, 20 bp, Artificial sequence
  SiRNA target sequence
tacagcataattttattaaa

SEQ ID NO: 170717 - DNA, 20 bp, Artificial sequence
  SiRNA target sequence
acagcataattttattaaag

SEQ ID NO: 170718 - DNA, 20 bp, Artificial sequence
  SiRNA target sequence
cagcataattttattaaagg

SEQ ID NO: 170719 - DNA, 20 bp, Artificial sequence
  SiRNA target sequence
agcataattttattaaagga

SEQ ID NO: 170720 - DNA, 20 bp, Artificial sequence
  SiRNA target sequence
gcataattttattaaaggaa

SEQ ID NO: 170721 - DNA, 20 bp, Artificial sequence
  SiRNA target sequence
cataattttattaaaggaac

SEQ ID NO: 170722 - DNA, 20 bp, Artificial sequence
  SiRNA target sequence
ataattttattaaaggaacc

SEQ ID NO: 170723 - DNA, 20 bp, Artificial sequence
  SiRNA target sequence
taattttattaaaggaacct

SEQ ID NO: 170724 - DNA, 20 bp, Artificial sequence
  SiRNA target sequence
aattttattaaaggaacctg

SEQ ID NO: 170725 - DNA, 20 bp, Artificial sequence
  SiRNA target sequence
attttattaaaggaacctgt

SEQ ID NO: 170726 - DNA, 20 bp, Artificial sequence
  SiRNA target sequence
ttttattaaaggaacctgtg

SEQ ID NO: 170727 - DNA, 20 bp, Artificial sequence
  SiRNA target sequence
tttattaaaggaacctgtga

SEQ ID NO: 170728 - DNA, 20 bp, Artificial sequence
  SiRNA target sequence
ttattaaaggaacctgtgag

SEQ ID NO: 170729 - DNA, 20 bp, Artificial sequence
  SiRNA target sequence
tattaaaggaacctgtgaga

SEQ ID NO: 170730 - DNA, 20 bp, Artificial sequence
  SiRNA target sequence
attaaaggaacctgtgagaa

SEQ ID NO: 170731 - DNA, 20 bp, Artificial sequence
  SiRNA target sequence
ttaaaggaacctgtgagaaa

SEQ ID NO: 170732 - DNA, 20 bp, Artificial sequence
  SiRNA target sequence
taaaggaacctgtgagaaat

SEQ ID NO: 170733 - DNA, 20 bp, Artificial sequence
  SiRNA target sequence
aaaggaacctgtgagaaatg

SEQ ID NO: 170734 - DNA, 20 bp, Artificial sequence
  SiRNA target sequence
aaggaacctgtgagaaatgg

SEQ ID NO: 170735 - DNA, 20 bp, Artificial sequence
  SiRNA target sequence
aggaacctgtgagaaatggg

SEQ ID NO: 170736 - DNA, 20 bp, Artificial sequence
  SiRNA target sequence
ggaacctgtgagaaatggga

SEQ ID NO: 170737 - DNA, 20 bp, Artificial sequence
  SiRNA target sequence
gaacctgtgagaaatgggag

SEQ ID NO: 170738 - DNA, 20 bp, Artificial sequence
  SiRNA target sequence
aacctgtgagaaatgggaga

SEQ ID NO: 170739 - DNA, 20 bp, Artificial sequence
  SiRNA target sequence
acctgtgagaaatgggagaa

SEQ ID NO: 170740 - DNA, 20 bp, Artificial sequence
  SiRNA target sequence
cctgtgagaaatgggagaag

SEQ ID NO: 170741 - DNA, 20 bp, Artificial sequence
  SiRNA target sequence
ctgtgagaaatgggagaagt

SEQ ID NO: 170742 - DNA, 20 bp, Artificial sequence
  SiRNA target sequence
tgtgagaaatgggagaagtg

SEQ ID NO: 170743 - DNA, 20 bp, Artificial sequence
  SiRNA target sequence
gtgagaaatgggagaagtgt

SEQ ID NO: 170744 - DNA, 20 bp, Artificial sequence
  SiRNA target sequence
tgagaaatgggagaagtgta

SEQ ID NO: 170745 - DNA, 20 bp, Artificial sequence
  SiRNA target sequence
gagaaatgggagaagtgtac

SEQ ID NO: 170746 - DNA, 20 bp, Artificial sequence
  SiRNA target sequence
agaaatgggagaagtgtact

SEQ ID NO: 170747 - DNA, 20 bp, Artificial sequence
  SiRNA target sequence
gaaatgggagaagtgtacta

SEQ ID NO: 170748 - DNA, 20 bp, Artificial sequence
  SiRNA target sequence
aaatgggagaagtgtactat

SEQ ID NO: 170749 - DNA, 20 bp, Artificial sequence
  SiRNA target sequence
aatgggagaagtgtactatt

SEQ ID NO: 170750 - DNA, 20 bp, Artificial sequence
  SiRNA target sequence
atgggagaagtgtactattg

SEQ ID NO: 170751 - DNA, 20 bp, Artificial sequence
  SiRNA target sequence
tgggagaagtgtactattgg

SEQ ID NO: 170752 - DNA, 20 bp, Artificial sequence
  SiRNA target sequence
gggagaagtgtactattgga

SEQ ID NO: 170753 - DNA, 20 bp, Artificial sequence
  SiRNA target sequence
ggagaagtgtactattggat

SEQ ID NO: 170754 - DNA, 20 bp, Artificial sequence
  SiRNA target sequence
gagaagtgtactattggata

SEQ ID NO: 170755 - DNA, 20 bp, Artificial sequence
  SiRNA target sequence
agaagtgtactattggatat

SEQ ID NO: 170756 - DNA, 20 bp, Artificial sequence
  SiRNA target sequence
gaagtgtactattggatatc

SEQ ID NO: 170757 - DNA, 20 bp, Artificial sequence
  SiRNA target sequence
aagtgtactattggatatca

SEQ ID NO: 170758 - DNA, 20 bp, Artificial sequence
  SiRNA target sequence
agtgtactattggatatcat

SEQ ID NO: 170759 - DNA, 20 bp, Artificial sequence
  SiRNA target sequence
gtgtactattggatatcatt

SEQ ID NO: 170760 - DNA, 20 bp, Artificial sequence
  SiRNA target sequence
tgtactattggatatcatta

SEQ ID NO: 170761 - DNA, 20 bp, Artificial sequence
  SiRNA target sequence
gtactattggatatcattat

SEQ ID NO: 170762 - DNA, 20 bp, Artificial sequence
  SiRNA target sequence
tactattggatatcattatg

SEQ ID NO: 170763 - DNA, 20 bp, Artificial sequence
  SiRNA target sequence
actattggatatcattatgg

SEQ ID NO: 170764 - DNA, 20 bp, Artificial sequence
  SiRNA target sequence
ctattggatatcattatgga

SEQ ID NO: 170765 - DNA, 20 bp, Artificial sequence
  SiRNA target sequence
tattggatatcattatggat

SEQ ID NO: 170766 - DNA, 20 bp, Artificial sequence
  SiRNA target sequence
attggatatcattatggata

SEQ ID NO: 170767 - DNA, 20 bp, Artificial sequence
  SiRNA target sequence
ttggatatcattatggatat

SEQ ID NO: 170768 - DNA, 20 bp, Artificial sequence
  SiRNA target sequence
tggatatcattatggatatt

SEQ ID NO: 170769 - DNA, 20 bp, Artificial sequence
  SiRNA target sequence
ggatatcattatggatattt

SEQ ID NO: 170770 - DNA, 20 bp, Artificial sequence
  SiRNA target sequence
gatatcattatggatattta

SEQ ID NO: 170771 - DNA, 20 bp, Artificial sequence
  SiRNA target sequence
atatcattatggatatttag

SEQ ID NO: 170772 - DNA, 20 bp, Artificial sequence
  SiRNA target sequence
tatcattatggatatttaga

SEQ ID NO: 170773 - DNA, 20 bp, Artificial sequence
  SiRNA target sequence
atcattatggatatttagaa

SEQ ID NO: 170774 - DNA, 20 bp, Artificial sequence
  SiRNA target sequence
tcattatggatatttagaac

SEQ ID NO: 170775 - DNA, 20 bp, Artificial sequence
  SiRNA target sequence
cattatggatatttagaaca

SEQ ID NO: 170776 - DNA, 20 bp, Artificial sequence
  SiRNA target sequence
attatggatatttagaacac

SEQ ID NO: 170777 - DNA, 20 bp, Artificial sequence
  SiRNA target sequence
ttatggatatttagaacaca

SEQ ID NO: 170778 - DNA, 20 bp, Artificial sequence
  SiRNA target sequence
tatggatatttagaacacat

SEQ ID NO: 170779 - DNA, 20 bp, Artificial sequence
  SiRNA target sequence
atggatatttagaacacata

SEQ ID NO: 170780 - DNA, 20 bp, Artificial sequence
  SiRNA target sequence
tggatatttagaacacatat

SEQ ID NO: 170781 - DNA, 20 bp, Artificial sequence
  SiRNA target sequence
ggatatttagaacacatatt

SEQ ID NO: 170782 - DNA, 20 bp, Artificial sequence
  SiRNA target sequence
gatatttagaacacatatta

SEQ ID NO: 170783 - DNA, 20 bp, Artificial sequence
  SiRNA target sequence
atatttagaacacatattaa

SEQ ID NO: 170784 - DNA, 20 bp, Artificial sequence
  SiRNA target sequence
tatttagaacacatattaaa

SEQ ID NO: 170785 - DNA, 20 bp, Artificial sequence
  SiRNA target sequence
atttagaacacatattaaat

SEQ ID NO: 170786 - DNA, 20 bp, Artificial sequence
  SiRNA target sequence
tttagaacacatattaaata

SEQ ID NO: 170787 - DNA, 20 bp, Artificial sequence
  SiRNA target sequence
ttagaacacatattaaataa

SEQ ID NO: 170788 - DNA, 20 bp, Artificial sequence
  SiRNA target sequence
tagaacacatattaaataag

SEQ ID NO: 170789 - DNA, 20 bp, Artificial sequence
  SiRNA target sequence
agaacacatattaaataaga

SEQ ID NO: 170790 - DNA, 20 bp, Artificial sequence
  SiRNA target sequence
gaacacatattaaataagaa

SEQ ID NO: 170791 - DNA, 20 bp, Artificial sequence
  SiRNA target sequence
aacacatattaaataagaag

SEQ ID NO: 170792 - DNA, 20 bp, Artificial sequence
  SiRNA target sequence
acacatattaaataagaaga

SEQ ID NO: 170793 - DNA, 20 bp, Artificial sequence
  SiRNA target sequence
cacatattaaataagaagaa

SEQ ID NO: 170794 - DNA, 20 bp, Artificial sequence
  SiRNA target sequence
acatattaaataagaagaac

SEQ ID NO: 170795 - DNA, 20 bp, Artificial sequence
  SiRNA target sequence
catattaaataagaagaaca

SEQ ID NO: 170796 - DNA, 20 bp, Artificial sequence
  SiRNA target sequence
atattaaataagaagaacaa

SEQ ID NO: 170797 - DNA, 20 bp, Artificial sequence
  SiRNA target sequence
tattaaataagaagaacaat

SEQ ID NO: 170798 - DNA, 20 bp, Artificial sequence
  SiRNA target sequence
attaaataagaagaacaatt

SEQ ID NO: 170799 - DNA, 20 bp, Artificial sequence
  SiRNA target sequence
ttaaataagaagaacaatta

SEQ ID NO: 170800 - DNA, 20 bp, Artificial sequence
  SiRNA target sequence
taaataagaagaacaattat

SEQ ID NO: 170801 - DNA, 20 bp, Artificial sequence
  SiRNA target sequence
aaataagaagaacaattatt

SEQ ID NO: 170802 - DNA, 20 bp, Artificial sequence
  SiRNA target sequence
aataagaagaacaattattt

SEQ ID NO: 170803 - DNA, 20 bp, Artificial sequence
  SiRNA target sequence
ataagaagaacaattattta

SEQ ID NO: 170804 - DNA, 20 bp, Artificial sequence
  SiRNA target sequence
taagaagaacaattatttaa

SEQ ID NO: 170805 - DNA, 20 bp, Artificial sequence
  SiRNA target sequence
aagaagaacaattatttaac

SEQ ID NO: 170806 - DNA, 20 bp, Artificial sequence
  SiRNA target sequence
agaagaacaattatttaaca

SEQ ID NO: 170807 - DNA, 20 bp, Artificial sequence
  SiRNA target sequence
gaagaacaattatttaacaa

SEQ ID NO: 170808 - DNA, 20 bp, Artificial sequence
  SiRNA target sequence
aagaacaattatttaacaaa

SEQ ID NO: 170809 - DNA, 20 bp, Artificial sequence
  SiRNA target sequence
agaacaattatttaacaaaa

SEQ ID NO: 170810 - DNA, 20 bp, Artificial sequence
  SiRNA target sequence
gaacaattatttaacaaaaa

SEQ ID NO: 170811 - DNA, 20 bp, Artificial sequence
  SiRNA target sequence
aacaattatttaacaaaaaa

SEQ ID NO: 170812 - DNA, 20 bp, Artificial sequence
  SiRNA target sequence
acaattatttaacaaaaaat

SEQ ID NO: 170813 - DNA, 20 bp, Artificial sequence
  SiRNA target sequence
caattatttaacaaaaaatg

SEQ ID NO: 170814 - DNA, 20 bp, Artificial sequence
  SiRNA target sequence
aattatttaacaaaaaatga

SEQ ID NO: 170815 - DNA, 20 bp, Artificial sequence
  SiRNA target sequence
attatttaacaaaaaatgat

SEQ ID NO: 170816 - DNA, 20 bp, Artificial sequence
  SiRNA target sequence
ttatttaacaaaaaatgata

SEQ ID NO: 170817 - DNA, 20 bp, Artificial sequence
  SiRNA target sequence
tatttaacaaaaaatgatag

SEQ ID NO: 170818 - DNA, 20 bp, Artificial sequence
  SiRNA target sequence
atttaacaaaaaatgatagt

SEQ ID NO: 170819 - DNA, 20 bp, Artificial sequence
  SiRNA target sequence
tttaacaaaaaatgatagta

SEQ ID NO: 170820 - DNA, 20 bp, Artificial sequence
  SiRNA target sequence
ttaacaaaaaatgatagtat

SEQ ID NO: 170821 - DNA, 20 bp, Artificial sequence
  SiRNA target sequence
taacaaaaaatgatagtata

SEQ ID NO: 170822 - DNA, 20 bp, Artificial sequence
  SiRNA target sequence
aacaaaaaatgatagtataa

SEQ ID NO: 170823 - DNA, 20 bp, Artificial sequence
  SiRNA target sequence
acaaaaaatgatagtataaa

SEQ ID NO: 170824 - DNA, 20 bp, Artificial sequence
  SiRNA target sequence
caaaaaatgatagtataaaa

SEQ ID NO: 170825 - DNA, 20 bp, Artificial sequence
  SiRNA target sequence
aaaaaatgatagtataaaaa

SEQ ID NO: 170826 - DNA, 20 bp, Artificial sequence
  SiRNA target sequence
aaaaatgatagtataaaaat

SEQ ID NO: 170827 - DNA, 20 bp, Artificial sequence
  SiRNA target sequence
aaaatgatagtataaaaata

SEQ ID NO: 170828 - DNA, 20 bp, Artificial sequence
  SiRNA target sequence
aaatgatagtataaaaatat

SEQ ID NO: 170829 - DNA, 20 bp, Artificial sequence
  SiRNA target sequence
aatgatagtataaaaatatt

SEQ ID NO: 170830 - DNA, 20 bp, Artificial sequence
  SiRNA target sequence
atgatagtataaaaatattt

SEQ ID NO: 170831 - DNA, 20 bp, Artificial sequence
  SiRNA target sequence
tgatagtataaaaatattta

SEQ ID NO: 170832 - DNA, 20 bp, Artificial sequence
  SiRNA target sequence
gatagtataaaaatatttaa

SEQ ID NO: 170833 - DNA, 20 bp, Artificial sequence
  SiRNA target sequence
atagtataaaaatatttaac

SEQ ID NO: 170834 - DNA, 20 bp, Artificial sequence
  SiRNA target sequence
tagtataaaaatatttaaca

SEQ ID NO: 170835 - DNA, 20 bp, Artificial sequence
  SiRNA target sequence
agtataaaaatatttaacag

SEQ ID NO: 170836 - DNA, 20 bp, Artificial sequence
  SiRNA target sequence
gtataaaaatatttaacagt

SEQ ID NO: 170837 - DNA, 20 bp, Artificial sequence
  SiRNA target sequence
tataaaaatatttaacagta

SEQ ID NO: 170838 - DNA, 20 bp, Artificial sequence
  SiRNA target sequence
ataaaaatatttaacagtaa

SEQ ID NO: 170839 - DNA, 20 bp, Artificial sequence
  SiRNA target sequence
taaaaatatttaacagtaaa

SEQ ID NO: 170840 - DNA, 20 bp, Artificial sequence
  SiRNA target sequence
aaaaatatttaacagtaaaa

SEQ ID NO: 170841 - DNA, 20 bp, Artificial sequence
  SiRNA target sequence
aaaatatttaacagtaaaaa

SEQ ID NO: 170842 - DNA, 20 bp, Artificial sequence
  SiRNA target sequence
aaatatttaacagtaaaaat

SEQ ID NO: 170843 - DNA, 20 bp, Artificial sequence
  SiRNA target sequence
aatatttaacagtaaaaatg

SEQ ID NO: 170844 - DNA, 20 bp, Artificial sequence
  SiRNA target sequence
atatttaacagtaaaaatga

SEQ ID NO: 170845 - DNA, 20 bp, Artificial sequence
  SiRNA target sequence
tatttaacagtaaaaatgag

SEQ ID NO: 170846 - DNA, 20 bp, Artificial sequence
  SiRNA target sequence
atttaacagtaaaaatgagg

SEQ ID NO: 170847 - DNA, 20 bp, Artificial sequence
  SiRNA target sequence
tttaacagtaaaaatgagga

SEQ ID NO: 170848 - DNA, 20 bp, Artificial sequence
  SiRNA target sequence
ttaacagtaaaaatgaggag

SEQ ID NO: 170849 - DNA, 20 bp, Artificial sequence
  SiRNA target sequence
taacagtaaaaatgaggagg

SEQ ID NO: 170850 - DNA, 20 bp, Artificial sequence
  SiRNA target sequence
aacagtaaaaatgaggaggt

SEQ ID NO: 170851 - DNA, 20 bp, Artificial sequence
  SiRNA target sequence
acagtaaaaatgaggaggta

SEQ ID NO: 170852 - DNA, 20 bp, Artificial sequence
  SiRNA target sequence
cagtaaaaatgaggaggtaa

SEQ ID NO: 170853 - DNA, 20 bp, Artificial sequence
  SiRNA target sequence
agtaaaaatgaggaggtaag

SEQ ID NO: 170854 - DNA, 20 bp, Artificial sequence
  SiRNA target sequence
gtaaaaatgaggaggtaagg

SEQ ID NO: 170855 - DNA, 20 bp, Artificial sequence
  SiRNA target sequence
taaaaatgaggaggtaaggt

SEQ ID NO: 170856 - DNA, 20 bp, Artificial sequence
  SiRNA target sequence
aaaaatgaggaggtaaggtt

SEQ ID NO: 170857 - DNA, 20 bp, Artificial sequence
  SiRNA target sequence
aaaatgaggaggtaaggtta

SEQ ID NO: 170858 - DNA, 20 bp, Artificial sequence
  SiRNA target sequence
aaatgaggaggtaaggttaa

SEQ ID NO: 170859 - DNA, 20 bp, Artificial sequence
  SiRNA target sequence
aatgaggaggtaaggttaaa

SEQ ID NO: 170860 - DNA, 20 bp, Artificial sequence
  SiRNA target sequence
atgaggaggtaaggttaaat

SEQ ID NO: 170861 - DNA, 20 bp, Artificial sequence
  SiRNA target sequence
tgaggaggtaaggttaaatg

SEQ ID NO: 170862 - DNA, 20 bp, Artificial sequence
  SiRNA target sequence
gaggaggtaaggttaaatgg

SEQ ID NO: 170863 - DNA, 20 bp, Artificial sequence
  SiRNA target sequence
aggaggtaaggttaaatgga

SEQ ID NO: 170864 - DNA, 20 bp, Artificial sequence
  SiRNA target sequence
ggaggtaaggttaaatggaa

SEQ ID NO: 170865 - DNA, 20 bp, Artificial sequence
  SiRNA target sequence
gaggtaaggttaaatggaaa

SEQ ID NO: 170866 - DNA, 20 bp, Artificial sequence
  SiRNA target sequence
aggtaaggttaaatggaaaa

SEQ ID NO: 170867 - DNA, 20 bp, Artificial sequence
  SiRNA target sequence
ggtaaggttaaatggaaaaa

SEQ ID NO: 170868 - DNA, 20 bp, Artificial sequence
  SiRNA target sequence
gtaaggttaaatggaaaaag

SEQ ID NO: 170869 - DNA, 20 bp, Artificial sequence
  SiRNA target sequence
taaggttaaatggaaaaaga

SEQ ID NO: 170870 - DNA, 20 bp, Artificial sequence
  SiRNA target sequence
aaggttaaatggaaaaagaa

SEQ ID NO: 170871 - DNA, 20 bp, Artificial sequence
  SiRNA target sequence
aggttaaatggaaaaagaaa

SEQ ID NO: 170872 - DNA, 20 bp, Artificial sequence
  SiRNA target sequence
ggttaaatggaaaaagaaaa

SEQ ID NO: 170873 - DNA, 20 bp, Artificial sequence
  SiRNA target sequence
gttaaatggaaaaagaaaat

SEQ ID NO: 170874 - DNA, 20 bp, Artificial sequence
  SiRNA target sequence
ttaaatggaaaaagaaaatt

SEQ ID NO: 170875 - DNA, 20 bp, Artificial sequence
  SiRNA target sequence
taaatggaaaaagaaaatta

SEQ ID NO: 170876 - DNA, 20 bp, Artificial sequence
  SiRNA target sequence
aaatggaaaaagaaaattaa

SEQ ID NO: 170877 - DNA, 20 bp, Artificial sequence
  SiRNA target sequence
aatggaaaaagaaaattaaa

SEQ ID NO: 170878 - DNA, 20 bp, Artificial sequence
  SiRNA target sequence
atggaaaaagaaaattaaat

SEQ ID NO: 170879 - DNA, 20 bp, Artificial sequence
  SiRNA target sequence
tggaaaaagaaaattaaata

SEQ ID NO: 170880 - DNA, 20 bp, Artificial sequence
  SiRNA target sequence
ggaaaaagaaaattaaatat

SEQ ID NO: 170881 - DNA, 20 bp, Artificial sequence
  SiRNA target sequence
gaaaaagaaaattaaatatt

SEQ ID NO: 170882 - DNA, 20 bp, Artificial sequence
  SiRNA target sequence
aaaaagaaaattaaatatta

SEQ ID NO: 170883 - DNA, 20 bp, Artificial sequence
  SiRNA target sequence
aaaagaaaattaaatattaa

SEQ ID NO: 170884 - DNA, 20 bp, Artificial sequence
  SiRNA target sequence
aaagaaaattaaatattaac

SEQ ID NO: 170885 - DNA, 20 bp, Artificial sequence
  SiRNA target sequence
aagaaaattaaatattaaca

SEQ ID NO: 170886 - DNA, 20 bp, Artificial sequence
  SiRNA target sequence
agaaaattaaatattaacac

SEQ ID NO: 170887 - DNA, 20 bp, Artificial sequence
  SiRNA target sequence
gaaaattaaatattaacaca

SEQ ID NO: 170888 - DNA, 20 bp, Artificial sequence
  SiRNA target sequence
aaaattaaatattaacacag

SEQ ID NO: 170889 - DNA, 20 bp, Artificial sequence
  SiRNA target sequence
aaattaaatattaacacagt

SEQ ID NO: 170890 - DNA, 20 bp, Artificial sequence
  SiRNA target sequence
aattaaatattaacacagtt

SEQ ID NO: 170891 - DNA, 20 bp, Artificial sequence
  SiRNA target sequence
attaaatattaacacagtta

SEQ ID NO: 170892 - DNA, 20 bp, Artificial sequence
  SiRNA target sequence
ttaaatattaacacagttac

SEQ ID NO: 170893 - DNA, 20 bp, Artificial sequence
  SiRNA target sequence
taaatattaacacagttaca

SEQ ID NO: 170894 - DNA, 20 bp, Artificial sequence
  SiRNA target sequence
aaatattaacacagttacat

SEQ ID NO: 170895 - DNA, 20 bp, Artificial sequence
  SiRNA target sequence
aatattaacacagttacatt

SEQ ID NO: 170896 - DNA, 20 bp, Artificial sequence
  SiRNA target sequence
atattaacacagttacatta

SEQ ID NO: 170897 - DNA, 20 bp, Artificial sequence
  SiRNA target sequence
tattaacacagttacattaa

SEQ ID NO: 170898 - DNA, 20 bp, Artificial sequence
  SiRNA target sequence
attaacacagttacattaaa

SEQ ID NO: 170899 - DNA, 20 bp, Artificial sequence
  SiRNA target sequence
ttaacacagttacattaaat

SEQ ID NO: 170900 - DNA, 20 bp, Artificial sequence
  SiRNA target sequence
taacacagttacattaaata

SEQ ID NO: 170901 - DNA, 20 bp, Artificial sequence
  SiRNA target sequence
aacacagttacattaaataa

SEQ ID NO: 170902 - DNA, 20 bp, Artificial sequence
  SiRNA target sequence
acacagttacattaaataaa

SEQ ID NO: 170903 - DNA, 20 bp, Artificial sequence
  SiRNA target sequence
cacagttacattaaataaaa

SEQ ID NO: 170904 - DNA, 20 bp, Artificial sequence
  SiRNA target sequence
acagttacattaaataaaat

SEQ ID NO: 170905 - DNA, 20 bp, Artificial sequence
  SiRNA target sequence
cagttacattaaataaaatt

SEQ ID NO: 170906 - DNA, 20 bp, Artificial sequence
  SiRNA target sequence
agttacattaaataaaatta

SEQ ID NO: 170907 - DNA, 20 bp, Artificial sequence
  SiRNA target sequence
gttacattaaataaaattaa

SEQ ID NO: 170908 - DNA, 20 bp, Artificial sequence
  SiRNA target sequence
ttacattaaataaaattaat

SEQ ID NO: 170909 - DNA, 20 bp, Artificial sequence
  SiRNA target sequence
tacattaaataaaattaata

SEQ ID NO: 170910 - DNA, 20 bp, Artificial sequence
  SiRNA target sequence
acattaaataaaattaatat

SEQ ID NO: 170911 - DNA, 20 bp, Artificial sequence
  SiRNA target sequence
cattaaataaaattaatata

SEQ ID NO: 170912 - DNA, 20 bp, Artificial sequence
  SiRNA target sequence
attaaataaaattaatatac

SEQ ID NO: 170913 - DNA, 20 bp, Artificial sequence
  SiRNA target sequence
ttaaataaaattaatatacc

SEQ ID NO: 170914 - DNA, 20 bp, Artificial sequence
  SiRNA target sequence
taaataaaattaatatacct

SEQ ID NO: 170915 - DNA, 20 bp, Artificial sequence
  SiRNA target sequence
aaataaaattaatatacctg

SEQ ID NO: 170916 - DNA, 20 bp, Artificial sequence
  SiRNA target sequence
aataaaattaatatacctga

SEQ ID NO: 170917 - DNA, 20 bp, Artificial sequence
  SiRNA target sequence
ataaaattaatatacctgag

SEQ ID NO: 170918 - DNA, 20 bp, Artificial sequence
  SiRNA target sequence
taaaattaatatacctgaga

SEQ ID NO: 170919 - DNA, 20 bp, Artificial sequence
  SiRNA target sequence
aaaattaatatacctgagat

SEQ ID NO: 170920 - DNA, 20 bp, Artificial sequence
  SiRNA target sequence
aaattaatatacctgagata

SEQ ID NO: 170921 - DNA, 20 bp, Artificial sequence
  SiRNA target sequence
aattaatatacctgagatag

SEQ ID NO: 170922 - DNA, 20 bp, Artificial sequence
  SiRNA target sequence
attaatatacctgagataga

SEQ ID NO: 170923 - DNA, 20 bp, Artificial sequence
  SiRNA target sequence
ttaatatacctgagatagat

SEQ ID NO: 170924 - DNA, 20 bp, Artificial sequence
  SiRNA target sequence
taatatacctgagatagatt

SEQ ID NO: 170925 - DNA, 20 bp, Artificial sequence
  SiRNA target sequence
aatatacctgagatagatta

SEQ ID NO: 170926 - DNA, 20 bp, Artificial sequence
  SiRNA target sequence
atatacctgagatagattat

SEQ ID NO: 170927 - DNA, 20 bp, Artificial sequence
  SiRNA target sequence
tatacctgagatagattata

SEQ ID NO: 170928 - DNA, 20 bp, Artificial sequence
  SiRNA target sequence
atacctgagatagattataa

SEQ ID NO: 170929 - DNA, 20 bp, Artificial sequence
  SiRNA target sequence
tacctgagatagattataaa

SEQ ID NO: 170930 - DNA, 20 bp, Artificial sequence
  SiRNA target sequence
acctgagatagattataaat

SEQ ID NO: 170931 - DNA, 20 bp, Artificial sequence
  SiRNA target sequence
cctgagatagattataaata

SEQ ID NO: 170932 - DNA, 20 bp, Artificial sequence
  SiRNA target sequence
ctgagatagattataaatat

SEQ ID NO: 170933 - DNA, 20 bp, Artificial sequence
  SiRNA target sequence
tgagatagattataaatata

SEQ ID NO: 170934 - DNA, 20 bp, Artificial sequence
  SiRNA target sequence
gagatagattataaatataa

SEQ ID NO: 170935 - DNA, 20 bp, Artificial sequence
  SiRNA target sequence
agatagattataaatataaa

SEQ ID NO: 170936 - DNA, 20 bp, Artificial sequence
  SiRNA target sequence
gatagattataaatataaaa

SEQ ID NO: 170937 - DNA, 20 bp, Artificial sequence
  SiRNA target sequence
atagattataaatataaaaa

SEQ ID NO: 170938 - DNA, 20 bp, Artificial sequence
  SiRNA target sequence
tagattataaatataaaaat

SEQ ID NO: 170939 - DNA, 20 bp, Artificial sequence
  SiRNA target sequence
agattataaatataaaaatg

SEQ ID NO: 170940 - DNA, 20 bp, Artificial sequence
  SiRNA target sequence
gattataaatataaaaatgg

SEQ ID NO: 170941 - DNA, 20 bp, Artificial sequence
  SiRNA target sequence
attataaatataaaaatgga

SEQ ID NO: 170942 - DNA, 20 bp, Artificial sequence
  SiRNA target sequence
ttataaatataaaaatggag

SEQ ID NO: 170943 - DNA, 20 bp, Artificial sequence
  SiRNA target sequence
tataaatataaaaatggagt

SEQ ID NO: 170944 - DNA, 20 bp, Artificial sequence
  SiRNA target sequence
ataaatataaaaatggagtg

SEQ ID NO: 170945 - DNA, 20 bp, Artificial sequence
  SiRNA target sequence
taaatataaaaatggagtgt

SEQ ID NO: 170946 - DNA, 20 bp, Artificial sequence
  SiRNA target sequence
aaatataaaaatggagtgtt

SEQ ID NO: 170947 - DNA, 20 bp, Artificial sequence
  SiRNA target sequence
aatataaaaatggagtgttt

SEQ ID NO: 170948 - DNA, 20 bp, Artificial sequence
  SiRNA target sequence
atataaaaatggagtgttta

SEQ ID NO: 170949 - DNA, 20 bp, Artificial sequence
  SiRNA target sequence
tataaaaatggagtgtttac

SEQ ID NO: 170950 - DNA, 20 bp, Artificial sequence
  SiRNA target sequence
ataaaaatggagtgtttaca

SEQ ID NO: 170951 - DNA, 20 bp, Artificial sequence
  SiRNA target sequence
taaaaatggagtgtttacat

SEQ ID NO: 170952 - DNA, 20 bp, Artificial sequence
  SiRNA target sequence
aaaaatggagtgtttacata

SEQ ID NO: 170953 - DNA, 20 bp, Artificial sequence
  SiRNA target sequence
aaaatggagtgtttacatat

SEQ ID NO: 170954 - DNA, 20 bp, Artificial sequence
  SiRNA target sequence
aaatggagtgtttacatata

SEQ ID NO: 170955 - DNA, 20 bp, Artificial sequence
  SiRNA target sequence
aatggagtgtttacatatac

SEQ ID NO: 170956 - DNA, 20 bp, Artificial sequence
  SiRNA target sequence
atggagtgtttacatataca

SEQ ID NO: 170957 - DNA, 20 bp, Artificial sequence
  SiRNA target sequence
tggagtgtttacatatacac

SEQ ID NO: 170958 - DNA, 20 bp, Artificial sequence
  SiRNA target sequence
ggagtgtttacatatacaca

SEQ ID NO: 170959 - DNA, 20 bp, Artificial sequence
  SiRNA target sequence
gagtgtttacatatacacag

SEQ ID NO: 170960 - DNA, 20 bp, Artificial sequence
  SiRNA target sequence
agtgtttacatatacacaga

SEQ ID NO: 170961 - DNA, 20 bp, Artificial sequence
  SiRNA target sequence
gtgtttacatatacacagat

SEQ ID NO: 170962 - DNA, 20 bp, Artificial sequence
  SiRNA target sequence
tgtttacatatacacagatc

SEQ ID NO: 170963 - DNA, 20 bp, Artificial sequence
  SiRNA target sequence
gtttacatatacacagatca

SEQ ID NO: 170964 - DNA, 20 bp, Artificial sequence
  SiRNA target sequence
tttacatatacacagatcaa

SEQ ID NO: 170965 - DNA, 20 bp, Artificial sequence
  SiRNA target sequence
ttacatatacacagatcaaa

SEQ ID NO: 170966 - DNA, 20 bp, Artificial sequence
  SiRNA target sequence
tacatatacacagatcaaaa

SEQ ID NO: 170967 - DNA, 20 bp, Artificial sequence
  SiRNA target sequence
acatatacacagatcaaaaa

SEQ ID NO: 170968 - DNA, 20 bp, Artificial sequence
  SiRNA target sequence
catatacacagatcaaaaat

SEQ ID NO: 170969 - DNA, 20 bp, Artificial sequence
  SiRNA target sequence
atatacacagatcaaaaata

SEQ ID NO: 170970 - DNA, 20 bp, Artificial sequence
  SiRNA target sequence
tatacacagatcaaaaataa

SEQ ID NO: 170971 - DNA, 20 bp, Artificial sequence
  SiRNA target sequence
atacacagatcaaaaataat

SEQ ID NO: 170972 - DNA, 20 bp, Artificial sequence
  SiRNA target sequence
tacacagatcaaaaataata

SEQ ID NO: 170973 - DNA, 20 bp, Artificial sequence
  SiRNA target sequence
acacagatcaaaaataataa

SEQ ID NO: 170974 - DNA, 20 bp, Artificial sequence
  SiRNA target sequence
cacagatcaaaaataataag

SEQ ID NO: 170975 - DNA, 20 bp, Artificial sequence
  SiRNA target sequence
acagatcaaaaataataaga

SEQ ID NO: 170976 - DNA, 20 bp, Artificial sequence
  SiRNA target sequence
cagatcaaaaataataagaa

SEQ ID NO: 170977 - DNA, 20 bp, Artificial sequence
  SiRNA target sequence
agatcaaaaataataagaaa

SEQ ID NO: 170978 - DNA, 20 bp, Artificial sequence
  SiRNA target sequence
gatcaaaaataataagaaaa

SEQ ID NO: 170979 - DNA, 20 bp, Artificial sequence
  SiRNA target sequence
atcaaaaataataagaaaaa

SEQ ID NO: 170980 - DNA, 20 bp, Artificial sequence
  SiRNA target sequence
tcaaaaataataagaaaaaa

SEQ ID NO: 170981 - DNA, 20 bp, Artificial sequence
  SiRNA target sequence
caaaaataataagaaaaaaa

SEQ ID NO: 170982 - DNA, 20 bp, Artificial sequence
  SiRNA target sequence
aaaaataataagaaaaaaaa

SEQ ID NO: 170983 - DNA, 20 bp, Artificial sequence
  SiRNA target sequence
aaaataataagaaaaaaaaa

SEQ ID NO: 170984 - DNA, 20 bp, Artificial sequence
  SiRNA target sequence
aaataataagaaaaaaaaat

SEQ ID NO: 170985 - DNA, 20 bp, Artificial sequence
  SiRNA target sequence
aataataagaaaaaaaaata

SEQ ID NO: 170986 - DNA, 20 bp, Artificial sequence
  SiRNA target sequence
ataataagaaaaaaaaatat

SEQ ID NO: 170987 - DNA, 20 bp, Artificial sequence
  SiRNA target sequence
taataagaaaaaaaaatatt

SEQ ID NO: 170988 - DNA, 20 bp, Artificial sequence
  SiRNA target sequence
aataagaaaaaaaaatattt

SEQ ID NO: 170989 - DNA, 20 bp, Artificial sequence
  SiRNA target sequence
ataagaaaaaaaaatattta

SEQ ID NO: 170990 - DNA, 20 bp, Artificial sequence
  SiRNA target sequence
taagaaaaaaaaatatttaa

SEQ ID NO: 170991 - DNA, 20 bp, Artificial sequence
  SiRNA target sequence
aagaaaaaaaaatatttaag

SEQ ID NO: 170992 - DNA, 20 bp, Artificial sequence
  SiRNA target sequence
agaaaaaaaaatatttaaga

SEQ ID NO: 170993 - DNA, 20 bp, Artificial sequence
  SiRNA target sequence
gaaaaaaaaatatttaagaa

SEQ ID NO: 170994 - DNA, 20 bp, Artificial sequence
  SiRNA target sequence
aaaaaaaaatatttaagaat

SEQ ID NO: 170995 - DNA, 20 bp, Artificial sequence
  SiRNA target sequence
aaaaaaaatatttaagaata

SEQ ID NO: 170996 - DNA, 20 bp, Artificial sequence
  SiRNA target sequence
aaaaaaatatttaagaatat

SEQ ID NO: 170997 - DNA, 20 bp, Artificial sequence
  SiRNA target sequence
aaaaaatatttaagaatatt

SEQ ID NO: 170998 - DNA, 20 bp, Artificial sequence
  SiRNA target sequence
aaaaatatttaagaatattg

SEQ ID NO: 170999 - DNA, 20 bp, Artificial sequence
  SiRNA target sequence
aaaatatttaagaatattgg

SEQ ID NO: 171000 - DNA, 20 bp, Artificial sequence
  SiRNA target sequence
aaatatttaagaatattggg

SEQ ID NO: 171001 - DNA, 20 bp, Artificial sequence
  SiRNA target sequence
aatatttaagaatattgggt

SEQ ID NO: 171002 - DNA, 20 bp, Artificial sequence
  SiRNA target sequence
atatttaagaatattgggtc

SEQ ID NO: 171003 - DNA, 20 bp, Artificial sequence
  SiRNA target sequence
tatttaagaatattgggtct

SEQ ID NO: 171004 - DNA, 20 bp, Artificial sequence
  SiRNA target sequence
atttaagaatattgggtcta

SEQ ID NO: 171005 - DNA, 20 bp, Artificial sequence
  SiRNA target sequence
tttaagaatattgggtctag

SEQ ID NO: 171006 - DNA, 20 bp, Artificial sequence
  SiRNA target sequence
ttaagaatattgggtctaga

SEQ ID NO: 171007 - DNA, 20 bp, Artificial sequence
  SiRNA target sequence
taagaatattgggtctagaa

SEQ ID NO: 171008 - DNA, 20 bp, Artificial sequence
  SiRNA target sequence
aagaatattgggtctagaac

SEQ ID NO: 171009 - DNA, 20 bp, Artificial sequence
  SiRNA target sequence
agaatattgggtctagaacc

SEQ ID NO: 171010 - DNA, 20 bp, Artificial sequence
  SiRNA target sequence
gaatattgggtctagaacct

SEQ ID NO: 171011 - DNA, 20 bp, Artificial sequence
  SiRNA target sequence
aatattgggtctagaacctt

SEQ ID NO: 171012 - DNA, 20 bp, Artificial sequence
  SiRNA target sequence
atattgggtctagaaccttt

SEQ ID NO: 171013 - DNA, 20 bp, Artificial sequence
  SiRNA target sequence
tattgggtctagaacctttt

SEQ ID NO: 171014 - DNA, 20 bp, Artificial sequence
  SiRNA target sequence
attgggtctagaaccttttc

SEQ ID NO: 171015 - DNA, 20 bp, Artificial sequence
  SiRNA target sequence
ttgggtctagaaccttttct

SEQ ID NO: 171016 - DNA, 20 bp, Artificial sequence
  SiRNA target sequence
tgggtctagaaccttttctt

SEQ ID NO: 171017 - DNA, 20 bp, Artificial sequence
  SiRNA target sequence
gggtctagaaccttttctta

SEQ ID NO: 171018 - DNA, 20 bp, Artificial sequence
  SiRNA target sequence
ggtctagaaccttttcttaa

SEQ ID NO: 171019 - DNA, 20 bp, Artificial sequence
  SiRNA target sequence
gtctagaaccttttcttaat

SEQ ID NO: 171020 - DNA, 20 bp, Artificial sequence
  SiRNA target sequence
tctagaaccttttcttaatt

SEQ ID NO: 171021 - DNA, 20 bp, Artificial sequence
  SiRNA target sequence
ctagaaccttttcttaattt

SEQ ID NO: 171022 - DNA, 20 bp, Artificial sequence
  SiRNA target sequence
tagaaccttttcttaatttt

SEQ ID NO: 171023 - DNA, 20 bp, Artificial sequence
  SiRNA target sequence
agaaccttttcttaatttta

SEQ ID NO: 171024 - DNA, 20 bp, Artificial sequence
  SiRNA target sequence
gaaccttttcttaattttat

SEQ ID NO: 171025 - DNA, 20 bp, Artificial sequence
  SiRNA target sequence
aaccttttcttaattttatt

SEQ ID NO: 171026 - DNA, 20 bp, Artificial sequence
  SiRNA target sequence
accttttcttaattttatta

SEQ ID NO: 171027 - DNA, 20 bp, Artificial sequence
  SiRNA target sequence
ccttttcttaattttattaa

SEQ ID NO: 171028 - DNA, 20 bp, Artificial sequence
  SiRNA target sequence
cttttcttaattttattaag

SEQ ID NO: 171029 - DNA, 20 bp, Artificial sequence
  SiRNA target sequence
ttttcttaattttattaagg

SEQ ID NO: 171030 - DNA, 20 bp, Artificial sequence
  SiRNA target sequence
tttcttaattttattaagga

SEQ ID NO: 171031 - DNA, 20 bp, Artificial sequence
  SiRNA target sequence
ttcttaattttattaaggaa

SEQ ID NO: 171032 - DNA, 20 bp, Artificial sequence
  SiRNA target sequence
tcttaattttattaaggaaa

SEQ ID NO: 171033 - DNA, 20 bp, Artificial sequence
  SiRNA target sequence
cttaattttattaaggaaag

SEQ ID NO: 171034 - DNA, 20 bp, Artificial sequence
  SiRNA target sequence
ttaattttattaaggaaagt

SEQ ID NO: 171035 - DNA, 20 bp, Artificial sequence
  SiRNA target sequence
taattttattaaggaaagta

SEQ ID NO: 171036 - DNA, 20 bp, Artificial sequence
  SiRNA target sequence
aattttattaaggaaagtaa

SEQ ID NO: 171037 - DNA, 20 bp, Artificial sequence
  SiRNA target sequence
attttattaaggaaagtaaa

SEQ ID NO: 171038 - DNA, 20 bp, Artificial sequence
  SiRNA target sequence
ttttattaaggaaagtaaac

SEQ ID NO: 171039 - DNA, 20 bp, Artificial sequence
  SiRNA target sequence
tttattaaggaaagtaaaca

SEQ ID NO: 171040 - DNA, 20 bp, Artificial sequence
  SiRNA target sequence
ttattaaggaaagtaaacat

SEQ ID NO: 171041 - DNA, 20 bp, Artificial sequence
  SiRNA target sequence
tattaaggaaagtaaacata

SEQ ID NO: 171042 - DNA, 20 bp, Artificial sequence
  SiRNA target sequence
attaaggaaagtaaacataa

SEQ ID NO: 171043 - DNA, 20 bp, Artificial sequence
  SiRNA target sequence
ttaaggaaagtaaacataaa

SEQ ID NO: 171044 - DNA, 20 bp, Artificial sequence
  SiRNA target sequence
taaggaaagtaaacataaag

SEQ ID NO: 171045 - DNA, 20 bp, Artificial sequence
  SiRNA target sequence
aaggaaagtaaacataaaga

SEQ ID NO: 171046 - DNA, 20 bp, Artificial sequence
  SiRNA target sequence
aggaaagtaaacataaagaa

SEQ ID NO: 171047 - DNA, 20 bp, Artificial sequence
  SiRNA target sequence
ggaaagtaaacataaagaat

SEQ ID NO: 171048 - DNA, 20 bp, Artificial sequence
  SiRNA target sequence
gaaagtaaacataaagaatt

SEQ ID NO: 171049 - DNA, 20 bp, Artificial sequence
  SiRNA target sequence
aaagtaaacataaagaatta

SEQ ID NO: 171050 - DNA, 20 bp, Artificial sequence
  SiRNA target sequence
aagtaaacataaagaattag

SEQ ID NO: 171051 - DNA, 20 bp, Artificial sequence
  SiRNA target sequence
agtaaacataaagaattaga

SEQ ID NO: 171052 - DNA, 20 bp, Artificial sequence
  SiRNA target sequence
gtaaacataaagaattagaa

SEQ ID NO: 171053 - DNA, 20 bp, Artificial sequence
  SiRNA target sequence
taaacataaagaattagaat

SEQ ID NO: 171054 - DNA, 20 bp, Artificial sequence
  SiRNA target sequence
aaacataaagaattagaata

SEQ ID NO: 171055 - DNA, 20 bp, Artificial sequence
  SiRNA target sequence
aacataaagaattagaatat

SEQ ID NO: 171056 - DNA, 20 bp, Artificial sequence
  SiRNA target sequence
acataaagaattagaatatg

SEQ ID NO: 171057 - DNA, 20 bp, Artificial sequence
  SiRNA target sequence
cataaagaattagaatatga

SEQ ID NO: 171058 - DNA, 20 bp, Artificial sequence
  SiRNA target sequence
ataaagaattagaatatgat

SEQ ID NO: 171059 - DNA, 20 bp, Artificial sequence
  SiRNA target sequence
taaagaattagaatatgatg

SEQ ID NO: 171060 - DNA, 20 bp, Artificial sequence
  SiRNA target sequence
aaagaattagaatatgatgt

SEQ ID NO: 171061 - DNA, 20 bp, Artificial sequence
  SiRNA target sequence
aagaattagaatatgatgta

SEQ ID NO: 171062 - DNA, 20 bp, Artificial sequence
  SiRNA target sequence
agaattagaatatgatgtat

SEQ ID NO: 171063 - DNA, 20 bp, Artificial sequence
  SiRNA target sequence
gaattagaatatgatgtatg

SEQ ID NO: 171064 - DNA, 20 bp, Artificial sequence
  SiRNA target sequence
aattagaatatgatgtatgc

SEQ ID NO: 171065 - DNA, 20 bp, Artificial sequence
  SiRNA target sequence
attagaatatgatgtatgcg

SEQ ID NO: 171066 - DNA, 20 bp, Artificial sequence
  SiRNA target sequence
ttagaatatgatgtatgcga

SEQ ID NO: 171067 - DNA, 20 bp, Artificial sequence
  SiRNA target sequence
tagaatatgatgtatgcgaa

SEQ ID NO: 171068 - DNA, 20 bp, Artificial sequence
  SiRNA target sequence
agaatatgatgtatgcgaaa

SEQ ID NO: 171069 - DNA, 20 bp, Artificial sequence
  SiRNA target sequence
gaatatgatgtatgcgaaat

SEQ ID NO: 171070 - DNA, 20 bp, Artificial sequence
  SiRNA target sequence
aatatgatgtatgcgaaata

SEQ ID NO: 171071 - DNA, 20 bp, Artificial sequence
  SiRNA target sequence
atatgatgtatgcgaaatat

SEQ ID NO: 171072 - DNA, 20 bp, Artificial sequence
  SiRNA target sequence
tatgatgtatgcgaaatata

SEQ ID NO: 171073 - DNA, 20 bp, Artificial sequence
  SiRNA target sequence
atgatgtatgcgaaatatac

SEQ ID NO: 171074 - DNA, 20 bp, Artificial sequence
  SiRNA target sequence
tgatgtatgcgaaatataca

SEQ ID NO: 171075 - DNA, 20 bp, Artificial sequence
  SiRNA target sequence
gatgtatgcgaaatatacat

SEQ ID NO: 171076 - DNA, 20 bp, Artificial sequence
  SiRNA target sequence
atgtatgcgaaatatacatt

SEQ ID NO: 171077 - DNA, 20 bp, Artificial sequence
  SiRNA target sequence
tgtatgcgaaatatacattt

SEQ ID NO: 171078 - DNA, 20 bp, Artificial sequence
  SiRNA target sequence
gtatgcgaaatatacatttg

SEQ ID NO: 171079 - DNA, 20 bp, Artificial sequence
  SiRNA target sequence
tatgcgaaatatacatttgt

SEQ ID NO: 171080 - DNA, 20 bp, Artificial sequence
  SiRNA target sequence
atgcgaaatatacatttgta

SEQ ID NO: 171081 - DNA, 20 bp, Artificial sequence
  SiRNA target sequence
tgcgaaatatacatttgtaa

SEQ ID NO: 171082 - DNA, 20 bp, Artificial sequence
  SiRNA target sequence
gcgaaatatacatttgtaat

SEQ ID NO: 171083 - DNA, 20 bp, Artificial sequence
  SiRNA target sequence
cgaaatatacatttgtaatc

SEQ ID NO: 171084 - DNA, 20 bp, Artificial sequence
  SiRNA target sequence
gaaatatacatttgtaatca

SEQ ID NO: 171085 - DNA, 20 bp, Artificial sequence
  SiRNA target sequence
aaatatacatttgtaatcag

SEQ ID NO: 171086 - DNA, 20 bp, Artificial sequence
  SiRNA target sequence
aatatacatttgtaatcagg

SEQ ID NO: 171087 - DNA, 20 bp, Artificial sequence
  SiRNA target sequence
atatacatttgtaatcaggg

SEQ ID NO: 171088 - DNA, 20 bp, Artificial sequence
  SiRNA target sequence
tatacatttgtaatcaggga

SEQ ID NO: 171089 - DNA, 20 bp, Artificial sequence
  SiRNA target sequence
atacatttgtaatcagggat

SEQ ID NO: 171090 - DNA, 20 bp, Artificial sequence
  SiRNA target sequence
tacatttgtaatcagggatg

SEQ ID NO: 171091 - DNA, 20 bp, Artificial sequence
  SiRNA target sequence
acatttgtaatcagggatgc

SEQ ID NO: 171092 - DNA, 20 bp, Artificial sequence
  SiRNA target sequence
catttgtaatcagggatgca

SEQ ID NO: 171093 - DNA, 20 bp, Artificial sequence
  SiRNA target sequence
atttgtaatcagggatgcat

SEQ ID NO: 171094 - DNA, 20 bp, Artificial sequence
  SiRNA target sequence
tttgtaatcagggatgcatt

SEQ ID NO: 171095 - DNA, 20 bp, Artificial sequence
  SiRNA target sequence
ttgtaatcagggatgcatta

SEQ ID NO: 171096 - DNA, 20 bp, Artificial sequence
  SiRNA target sequence
tgtaatcagggatgcattaa

SEQ ID NO: 171097 - DNA, 20 bp, Artificial sequence
  SiRNA target sequence
gtaatcagggatgcattaat

SEQ ID NO: 171098 - DNA, 20 bp, Artificial sequence
  SiRNA target sequence
taatcagggatgcattaatg

SEQ ID NO: 171099 - DNA, 20 bp, Artificial sequence
  SiRNA target sequence
aatcagggatgcattaatgg

SEQ ID NO: 171100 - DNA, 20 bp, Artificial sequence
  SiRNA target sequence
atcagggatgcattaatgga

SEQ ID NO: 171101 - DNA, 20 bp, Artificial sequence
  SiRNA target sequence
tcagggatgcattaatggac

SEQ ID NO: 171102 - DNA, 20 bp, Artificial sequence
  SiRNA target sequence
cagggatgcattaatggacc

SEQ ID NO: 171103 - DNA, 20 bp, Artificial sequence
  SiRNA target sequence
agggatgcattaatggacca

SEQ ID NO: 171104 - DNA, 20 bp, Artificial sequence
  SiRNA target sequence
gggatgcattaatggaccag

SEQ ID NO: 171105 - DNA, 20 bp, Artificial sequence
  SiRNA target sequence
ggatgcattaatggaccagg

SEQ ID NO: 171106 - DNA, 20 bp, Artificial sequence
  SiRNA target sequence
gatgcattaatggaccagga

SEQ ID NO: 171107 - DNA, 20 bp, Artificial sequence
  SiRNA target sequence
atgcattaatggaccaggac

SEQ ID NO: 171108 - DNA, 20 bp, Artificial sequence
  SiRNA target sequence
tgcattaatggaccaggaca

SEQ ID NO: 171109 - DNA, 20 bp, Artificial sequence
  SiRNA target sequence
gcattaatggaccaggacaa

SEQ ID NO: 171110 - DNA, 20 bp, Artificial sequence
  SiRNA target sequence
cattaatggaccaggacaat

SEQ ID NO: 171111 - DNA, 20 bp, Artificial sequence
  SiRNA target sequence
attaatggaccaggacaatt

SEQ ID NO: 171112 - DNA, 20 bp, Artificial sequence
  SiRNA target sequence
ttaatggaccaggacaattg

SEQ ID NO: 171113 - DNA, 20 bp, Artificial sequence
  SiRNA target sequence
taatggaccaggacaattgt

SEQ ID NO: 171114 - DNA, 20 bp, Artificial sequence
  SiRNA target sequence
aatggaccaggacaattgta

SEQ ID NO: 171115 - DNA, 20 bp, Artificial sequence
  SiRNA target sequence
atggaccaggacaattgtat

SEQ ID NO: 171116 - DNA, 20 bp, Artificial sequence
  SiRNA target sequence
tggaccaggacaattgtata

SEQ ID NO: 171117 - DNA, 20 bp, Artificial sequence
  SiRNA target sequence
ggaccaggacaattgtatac

SEQ ID NO: 171118 - DNA, 20 bp, Artificial sequence
  SiRNA target sequence
gaccaggacaattgtataca

SEQ ID NO: 171119 - DNA, 20 bp, Artificial sequence
  SiRNA target sequence
accaggacaattgtatacag

SEQ ID NO: 171120 - DNA, 20 bp, Artificial sequence
  SiRNA target sequence
ccaggacaattgtatacaga

SEQ ID NO: 171121 - DNA, 20 bp, Artificial sequence
  SiRNA target sequence
caggacaattgtatacagat

SEQ ID NO: 171122 - DNA, 20 bp, Artificial sequence
  SiRNA target sequence
aggacaattgtatacagata

SEQ ID NO: 171123 - DNA, 20 bp, Artificial sequence
  SiRNA target sequence
ggacaattgtatacagataa

SEQ ID NO: 171124 - DNA, 20 bp, Artificial sequence
  SiRNA target sequence
gacaattgtatacagataat

SEQ ID NO: 171125 - DNA, 20 bp, Artificial sequence
  SiRNA target sequence
acaattgtatacagataatt

SEQ ID NO: 171126 - DNA, 20 bp, Artificial sequence
  SiRNA target sequence
caattgtatacagataattt

SEQ ID NO: 171127 - DNA, 20 bp, Artificial sequence
  SiRNA target sequence
aattgtatacagataattta

SEQ ID NO: 171128 - DNA, 20 bp, Artificial sequence
  SiRNA target sequence
attgtatacagataatttat

SEQ ID NO: 171129 - DNA, 20 bp, Artificial sequence
  SiRNA target sequence
ttgtatacagataatttata

SEQ ID NO: 171130 - DNA, 20 bp, Artificial sequence
  SiRNA target sequence
tgtatacagataatttatat

SEQ ID NO: 171131 - DNA, 20 bp, Artificial sequence
  SiRNA target sequence
gtatacagataatttatatg

SEQ ID NO: 171132 - DNA, 20 bp, Artificial sequence
  SiRNA target sequence
tatacagataatttatatgt

SEQ ID NO: 171133 - DNA, 20 bp, Artificial sequence
  SiRNA target sequence
atacagataatttatatgta

SEQ ID NO: 171134 - DNA, 20 bp, Artificial sequence
  SiRNA target sequence
tacagataatttatatgtaa

SEQ ID NO: 171135 - DNA, 20 bp, Artificial sequence
  SiRNA target sequence
acagataatttatatgtaaa

SEQ ID NO: 171136 - DNA, 20 bp, Artificial sequence
  SiRNA target sequence
cagataatttatatgtaaat

SEQ ID NO: 171137 - DNA, 20 bp, Artificial sequence
  SiRNA target sequence
agataatttatatgtaaata

SEQ ID NO: 171138 - DNA, 20 bp, Artificial sequence
  SiRNA target sequence
gataatttatatgtaaataa

SEQ ID NO: 171139 - DNA, 20 bp, Artificial sequence
  SiRNA target sequence
ataatttatatgtaaataat

SEQ ID NO: 171140 - DNA, 20 bp, Artificial sequence
  SiRNA target sequence
taatttatatgtaaataatt

SEQ ID NO: 171141 - DNA, 20 bp, Artificial sequence
  SiRNA target sequence
aatttatatgtaaataattc

SEQ ID NO: 171142 - DNA, 20 bp, Artificial sequence
  SiRNA target sequence
atttatatgtaaataattca

SEQ ID NO: 171143 - DNA, 20 bp, Artificial sequence
  SiRNA target sequence
tttatatgtaaataattcag

SEQ ID NO: 171144 - DNA, 20 bp, Artificial sequence
  SiRNA target sequence
ttatatgtaaataattcaga

SEQ ID NO: 171145 - DNA, 20 bp, Artificial sequence
  SiRNA target sequence
tatatgtaaataattcagaa

SEQ ID NO: 171146 - DNA, 20 bp, Artificial sequence
  SiRNA target sequence
atatgtaaataattcagaat

SEQ ID NO: 171147 - DNA, 20 bp, Artificial sequence
  SiRNA target sequence
tatgtaaataattcagaata

SEQ ID NO: 171148 - DNA, 20 bp, Artificial sequence
  SiRNA target sequence
atgtaaataattcagaatac

SEQ ID NO: 171149 - DNA, 20 bp, Artificial sequence
  SiRNA target sequence
tgtaaataattcagaataca

SEQ ID NO: 171150 - DNA, 20 bp, Artificial sequence
  SiRNA target sequence
gtaaataattcagaatacat

SEQ ID NO: 171151 - DNA, 20 bp, Artificial sequence
  SiRNA target sequence
taaataattcagaatacata

SEQ ID NO: 171152 - DNA, 20 bp, Artificial sequence
  SiRNA target sequence
aaataattcagaatacatag

SEQ ID NO: 171153 - DNA, 20 bp, Artificial sequence
  SiRNA target sequence
aataattcagaatacataga

SEQ ID NO: 171154 - DNA, 20 bp, Artificial sequence
  SiRNA target sequence
ataattcagaatacatagat

SEQ ID NO: 171155 - DNA, 20 bp, Artificial sequence
  SiRNA target sequence
taattcagaatacatagata

SEQ ID NO: 171156 - DNA, 20 bp, Artificial sequence
  SiRNA target sequence
aattcagaatacatagatat

SEQ ID NO: 171157 - DNA, 20 bp, Artificial sequence
  SiRNA target sequence
attcagaatacatagatatt

SEQ ID NO: 171158 - DNA, 20 bp, Artificial sequence
  SiRNA target sequence
ttcagaatacatagatattg

SEQ ID NO: 171159 - DNA, 20 bp, Artificial sequence
  SiRNA target sequence
tcagaatacatagatattga

SEQ ID NO: 171160 - DNA, 20 bp, Artificial sequence
  SiRNA target sequence
cagaatacatagatattgat

SEQ ID NO: 171161 - DNA, 20 bp, Artificial sequence
  SiRNA target sequence
agaatacatagatattgatc

SEQ ID NO: 171162 - DNA, 20 bp, Artificial sequence
  SiRNA target sequence
gaatacatagatattgatct

SEQ ID NO: 171163 - DNA, 20 bp, Artificial sequence
  SiRNA target sequence
aatacatagatattgatctt

SEQ ID NO: 171164 - DNA, 20 bp, Artificial sequence
  SiRNA target sequence
atacatagatattgatcttg

SEQ ID NO: 171165 - DNA, 20 bp, Artificial sequence
  SiRNA target sequence
tacatagatattgatcttgg

SEQ ID NO: 171166 - DNA, 20 bp, Artificial sequence
  SiRNA target sequence
acatagatattgatcttggt

SEQ ID NO: 171167 - DNA, 20 bp, Artificial sequence
  SiRNA target sequence
catagatattgatcttggta

SEQ ID NO: 171168 - DNA, 20 bp, Artificial sequence
  SiRNA target sequence
atagatattgatcttggtat

SEQ ID NO: 171169 - DNA, 20 bp, Artificial sequence
  SiRNA target sequence
tagatattgatcttggtatt

SEQ ID NO: 171170 - DNA, 20 bp, Artificial sequence
  SiRNA target sequence
agatattgatcttggtattg

SEQ ID NO: 171171 - DNA, 20 bp, Artificial sequence
  SiRNA target sequence
gatattgatcttggtattga

SEQ ID NO: 171172 - DNA, 20 bp, Artificial sequence
  SiRNA target sequence
atattgatcttggtattgat

SEQ ID NO: 171173 - DNA, 20 bp, Artificial sequence
  SiRNA target sequence
tattgatcttggtattgatt

SEQ ID NO: 171174 - DNA, 20 bp, Artificial sequence
  SiRNA target sequence
attgatcttggtattgattg

SEQ ID NO: 171175 - DNA, 20 bp, Artificial sequence
  SiRNA target sequence
ttgatcttggtattgattgt

SEQ ID NO: 171176 - DNA, 20 bp, Artificial sequence
  SiRNA target sequence
tgatcttggtattgattgta

SEQ ID NO: 171177 - DNA, 20 bp, Artificial sequence
  SiRNA target sequence
gatcttggtattgattgtaa

SEQ ID NO: 171178 - DNA, 20 bp, Artificial sequence
  SiRNA target sequence
atcttggtattgattgtaaa

SEQ ID NO: 171179 - DNA, 20 bp, Artificial sequence
  SiRNA target sequence
tcttggtattgattgtaaac

SEQ ID NO: 171180 - DNA, 20 bp, Artificial sequence
  SiRNA target sequence
cttggtattgattgtaaaca

SEQ ID NO: 171181 - DNA, 20 bp, Artificial sequence
  SiRNA target sequence
ttggtattgattgtaaacag

SEQ ID NO: 171182 - DNA, 20 bp, Artificial sequence
  SiRNA target sequence
tggtattgattgtaaacagt

SEQ ID NO: 171183 - DNA, 20 bp, Artificial sequence
  SiRNA target sequence
ggtattgattgtaaacagtt

SEQ ID NO: 171184 - DNA, 20 bp, Artificial sequence
  SiRNA target sequence
gtattgattgtaaacagtta

SEQ ID NO: 171185 - DNA, 20 bp, Artificial sequence
  SiRNA target sequence
tattgattgtaaacagttac

SEQ ID NO: 171186 - DNA, 20 bp, Artificial sequence
  SiRNA target sequence
attgattgtaaacagttaca

SEQ ID NO: 171187 - DNA, 20 bp, Artificial sequence
  SiRNA target sequence
ttgattgtaaacagttacaa

SEQ ID NO: 171188 - DNA, 20 bp, Artificial sequence
  SiRNA target sequence
tgattgtaaacagttacaaa

SEQ ID NO: 171189 - DNA, 20 bp, Artificial sequence
  SiRNA target sequence
gattgtaaacagttacaaaa

SEQ ID NO: 171190 - DNA, 20 bp, Artificial sequence
  SiRNA target sequence
attgtaaacagttacaaaaa

SEQ ID NO: 171191 - DNA, 20 bp, Artificial sequence
  SiRNA target sequence
ttgtaaacagttacaaaaaa

SEQ ID NO: 171192 - DNA, 20 bp, Artificial sequence
  SiRNA target sequence
tgtaaacagttacaaaaaag

SEQ ID NO: 171193 - DNA, 20 bp, Artificial sequence
  SiRNA target sequence
gtaaacagttacaaaaaagg

SEQ ID NO: 171194 - DNA, 20 bp, Artificial sequence
  SiRNA target sequence
taaacagttacaaaaaagga

SEQ ID NO: 171195 - DNA, 20 bp, Artificial sequence
  SiRNA target sequence
aaacagttacaaaaaaggac

SEQ ID NO: 171196 - DNA, 20 bp, Artificial sequence
  SiRNA target sequence
aacagttacaaaaaaggaca

SEQ ID NO: 171197 - DNA, 20 bp, Artificial sequence
  SiRNA target sequence
acagttacaaaaaaggacat

SEQ ID NO: 171198 - DNA, 20 bp, Artificial sequence
  SiRNA target sequence
cagttacaaaaaaggacata

SEQ ID NO: 171199 - DNA, 20 bp, Artificial sequence
  SiRNA target sequence
agttacaaaaaaggacatat

SEQ ID NO: 171200 - DNA, 20 bp, Artificial sequence
  SiRNA target sequence
gttacaaaaaaggacatata

SEQ ID NO: 171201 - DNA, 20 bp, Artificial sequence
  SiRNA target sequence
ttacaaaaaaggacatatag

SEQ ID NO: 171202 - DNA, 20 bp, Artificial sequence
  SiRNA target sequence
tacaaaaaaggacatataga

SEQ ID NO: 171203 - DNA, 20 bp, Artificial sequence
  SiRNA target sequence
acaaaaaaggacatatagaa

SEQ ID NO: 171204 - DNA, 20 bp, Artificial sequence
  SiRNA target sequence
caaaaaaggacatatagaaa

SEQ ID NO: 171205 - DNA, 20 bp, Artificial sequence
  SiRNA target sequence
aaaaaaggacatatagaaaa

SEQ ID NO: 171206 - DNA, 20 bp, Artificial sequence
  SiRNA target sequence
aaaaaggacatatagaaaaa

SEQ ID NO: 171207 - DNA, 20 bp, Artificial sequence
  SiRNA target sequence
aaaaggacatatagaaaaat

SEQ ID NO: 171208 - DNA, 20 bp, Artificial sequence
  SiRNA target sequence
aaaggacatatagaaaaata

SEQ ID NO: 171209 - DNA, 20 bp, Artificial sequence
  SiRNA target sequence
aaggacatatagaaaaatag

SEQ ID NO: 171210 - DNA, 20 bp, Artificial sequence
  SiRNA target sequence
aggacatatagaaaaataga

SEQ ID NO: 171211 - DNA, 20 bp, Artificial sequence
  SiRNA target sequence
ggacatatagaaaaatagaa

SEQ ID NO: 171212 - DNA, 20 bp, Artificial sequence
  SiRNA target sequence
gacatatagaaaaatagaaa

SEQ ID NO: 171213 - DNA, 20 bp, Artificial sequence
  SiRNA target sequence
acatatagaaaaatagaaac

SEQ ID NO: 171214 - DNA, 20 bp, Artificial sequence
  SiRNA target sequence
catatagaaaaatagaaaca

SEQ ID NO: 171215 - DNA, 20 bp, Artificial sequence
  SiRNA target sequence
atatagaaaaatagaaacaa

SEQ ID NO: 171216 - DNA, 20 bp, Artificial sequence
  SiRNA target sequence
tatagaaaaatagaaacaaa

SEQ ID NO: 171217 - DNA, 20 bp, Artificial sequence
  SiRNA target sequence
atagaaaaatagaaacaaag

SEQ ID NO: 171218 - DNA, 20 bp, Artificial sequence
  SiRNA target sequence
tagaaaaatagaaacaaaga

SEQ ID NO: 171219 - DNA, 20 bp, Artificial sequence
  SiRNA target sequence
agaaaaatagaaacaaagaa

SEQ ID NO: 171220 - DNA, 20 bp, Artificial sequence
  SiRNA target sequence
gaaaaatagaaacaaagaaa

SEQ ID NO: 171221 - DNA, 20 bp, Artificial sequence
  SiRNA target sequence
aaaaatagaaacaaagaaag

SEQ ID NO: 171222 - DNA, 20 bp, Artificial sequence
  SiRNA target sequence
aaaatagaaacaaagaaagt

SEQ ID NO: 171223 - DNA, 20 bp, Artificial sequence
  SiRNA target sequence
aaatagaaacaaagaaagtt

SEQ ID NO: 171224 - DNA, 20 bp, Artificial sequence
  SiRNA target sequence
aatagaaacaaagaaagtta

SEQ ID NO: 171225 - DNA, 20 bp, Artificial sequence
  SiRNA target sequence
atagaaacaaagaaagttaa

SEQ ID NO: 171226 - DNA, 20 bp, Artificial sequence
  SiRNA target sequence
tagaaacaaagaaagttaat

SEQ ID NO: 171227 - DNA, 20 bp, Artificial sequence
  SiRNA target sequence
agaaacaaagaaagttaatt

SEQ ID NO: 171228 - DNA, 20 bp, Artificial sequence
  SiRNA target sequence
gaaacaaagaaagttaattt

SEQ ID NO: 171229 - DNA, 20 bp, Artificial sequence
  SiRNA target sequence
aaacaaagaaagttaatttt

SEQ ID NO: 171230 - DNA, 20 bp, Artificial sequence
  SiRNA target sequence
aacaaagaaagttaatttta

SEQ ID NO: 171231 - DNA, 20 bp, Artificial sequence
  SiRNA target sequence
acaaagaaagttaattttaa

SEQ ID NO: 171232 - DNA, 20 bp, Artificial sequence
  SiRNA target sequence
caaagaaagttaattttaaa

SEQ ID NO: 171233 - DNA, 20 bp, Artificial sequence
  SiRNA target sequence
aaagaaagttaattttaaaa

SEQ ID NO: 171234 - DNA, 20 bp, Artificial sequence
  SiRNA target sequence
aagaaagttaattttaaaat

SEQ ID NO: 171235 - DNA, 20 bp, Artificial sequence
  SiRNA target sequence
agaaagttaattttaaaata

SEQ ID NO: 171236 - DNA, 20 bp, Artificial sequence
  SiRNA target sequence
gaaagttaattttaaaatag

SEQ ID NO: 171237 - DNA, 20 bp, Artificial sequence
  SiRNA target sequence
aaagttaattttaaaataga

SEQ ID NO: 171238 - DNA, 20 bp, Artificial sequence
  SiRNA target sequence
aagttaattttaaaatagaa

SEQ ID NO: 171239 - DNA, 20 bp, Artificial sequence
  SiRNA target sequence
agttaattttaaaatagaat

SEQ ID NO: 171240 - DNA, 20 bp, Artificial sequence
  SiRNA target sequence
gttaattttaaaatagaatg

SEQ ID NO: 171241 - DNA, 20 bp, Artificial sequence
  SiRNA target sequence
ttaattttaaaatagaatgg

SEQ ID NO: 171242 - DNA, 20 bp, Artificial sequence
  SiRNA target sequence
taattttaaaatagaatggt

SEQ ID NO: 171243 - DNA, 20 bp, Artificial sequence
  SiRNA target sequence
aattttaaaatagaatggta

SEQ ID NO: 171244 - DNA, 20 bp, Artificial sequence
  SiRNA target sequence
attttaaaatagaatggtaa

SEQ ID NO: 171245 - DNA, 21 bp, Artificial sequence
  SiRNA target sequence
atgaatactgaaaataaacca

SEQ ID NO: 171246 - DNA, 21 bp, Artificial sequence
  SiRNA target sequence
tgaatactgaaaataaaccat

SEQ ID NO: 171247 - DNA, 21 bp, Artificial sequence
  SiRNA target sequence
gaatactgaaaataaaccatg

SEQ ID NO: 171248 - DNA, 21 bp, Artificial sequence
  SiRNA target sequence
aatactgaaaataaaccatgt

SEQ ID NO: 171249 - DNA, 21 bp, Artificial sequence
  SiRNA target sequence
atactgaaaataaaccatgta

SEQ ID NO: 171250 - DNA, 21 bp, Artificial sequence
  SiRNA target sequence
tactgaaaataaaccatgtat

SEQ ID NO: 171251 - DNA, 21 bp, Artificial sequence
  SiRNA target sequence
actgaaaataaaccatgtatt

SEQ ID NO: 171252 - DNA, 21 bp, Artificial sequence
  SiRNA target sequence
ctgaaaataaaccatgtattt

SEQ ID NO: 171253 - DNA, 21 bp, Artificial sequence
  SiRNA target sequence
tgaaaataaaccatgtatttc

SEQ ID NO: 171254 - DNA, 21 bp, Artificial sequence
  SiRNA target sequence
gaaaataaaccatgtatttca

SEQ ID NO: 171255 - DNA, 21 bp, Artificial sequence
  SiRNA target sequence
aaaataaaccatgtatttcac

SEQ ID NO: 171256 - DNA, 21 bp, Artificial sequence
  SiRNA target sequence
aaataaaccatgtatttcacc

SEQ ID NO: 171257 - DNA, 21 bp, Artificial sequence
  SiRNA target sequence
aataaaccatgtatttcacca

SEQ ID NO: 171258 - DNA, 21 bp, Artificial sequence
  SiRNA target sequence
ataaaccatgtatttcaccat

SEQ ID NO: 171259 - DNA, 21 bp, Artificial sequence
  SiRNA target sequence
taaaccatgtatttcaccatt

SEQ ID NO: 171260 - DNA, 21 bp, Artificial sequence
  SiRNA target sequence
aaaccatgtatttcaccattt

SEQ ID NO: 171261 - DNA, 21 bp, Artificial sequence
  SiRNA target sequence
aaccatgtatttcaccattta

SEQ ID NO: 171262 - DNA, 21 bp, Artificial sequence
  SiRNA target sequence
accatgtatttcaccatttac

SEQ ID NO: 171263 - DNA, 21 bp, Artificial sequence
  SiRNA target sequence
ccatgtatttcaccatttacc

SEQ ID NO: 171264 - DNA, 21 bp, Artificial sequence
  SiRNA target sequence
catgtatttcaccatttacct

SEQ ID NO: 171265 - DNA, 21 bp, Artificial sequence
  SiRNA target sequence
atgtatttcaccatttacctt

SEQ ID NO: 171266 - DNA, 21 bp, Artificial sequence
  SiRNA target sequence
tgtatttcaccatttaccttt

SEQ ID NO: 171267 - DNA, 21 bp, Artificial sequence
  SiRNA target sequence
gtatttcaccatttaccttta

SEQ ID NO: 171268 - DNA, 21 bp, Artificial sequence
  SiRNA target sequence
tatttcaccatttacctttaa

SEQ ID NO: 171269 - DNA, 21 bp, Artificial sequence
  SiRNA target sequence
atttcaccatttacctttaaa

SEQ ID NO: 171270 - DNA, 21 bp, Artificial sequence
  SiRNA target sequence
tttcaccatttacctttaaac

SEQ ID NO: 171271 - DNA, 21 bp, Artificial sequence
  SiRNA target sequence
ttcaccatttacctttaaact

SEQ ID NO: 171272 - DNA, 21 bp, Artificial sequence
  SiRNA target sequence
tcaccatttacctttaaacta

SEQ ID NO: 171273 - DNA, 21 bp, Artificial sequence
  SiRNA target sequence
caccatttacctttaaactag

SEQ ID NO: 171274 - DNA, 21 bp, Artificial sequence
  SiRNA target sequence
accatttacctttaaactaga

SEQ ID NO: 171275 - DNA, 21 bp, Artificial sequence
  SiRNA target sequence
ccatttacctttaaactagaa

SEQ ID NO: 171276 - DNA, 21 bp, Artificial sequence
  SiRNA target sequence
catttacctttaaactagaag

SEQ ID NO: 171277 - DNA, 21 bp, Artificial sequence
  SiRNA target sequence
atttacctttaaactagaaga

SEQ ID NO: 171278 - DNA, 21 bp, Artificial sequence
  SiRNA target sequence
tttacctttaaactagaagat

SEQ ID NO: 171279 - DNA, 21 bp, Artificial sequence
  SiRNA target sequence
ttacctttaaactagaagatt

SEQ ID NO: 171280 - DNA, 21 bp, Artificial sequence
  SiRNA target sequence
tacctttaaactagaagattg

SEQ ID NO: 171281 - DNA, 21 bp, Artificial sequence
  SiRNA target sequence
acctttaaactagaagattgc

SEQ ID NO: 171282 - DNA, 21 bp, Artificial sequence
  SiRNA target sequence
cctttaaactagaagattgcc

SEQ ID NO: 171283 - DNA, 21 bp, Artificial sequence
  SiRNA target sequence
ctttaaactagaagattgcct

SEQ ID NO: 171284 - DNA, 21 bp, Artificial sequence
  SiRNA target sequence
tttaaactagaagattgcctg

SEQ ID NO: 171285 - DNA, 21 bp, Artificial sequence
  SiRNA target sequence
ttaaactagaagattgcctgg

SEQ ID NO: 171286 - DNA, 21 bp, Artificial sequence
  SiRNA target sequence
taaactagaagattgcctggc

SEQ ID NO: 171287 - DNA, 21 bp, Artificial sequence
  SiRNA target sequence
aaactagaagattgcctggca

SEQ ID NO: 171288 - DNA, 21 bp, Artificial sequence
  SiRNA target sequence
aactagaagattgcctggcat

SEQ ID NO: 171289 - DNA, 21 bp, Artificial sequence
  SiRNA target sequence
actagaagattgcctggcatg

SEQ ID NO: 171290 - DNA, 21 bp, Artificial sequence
  SiRNA target sequence
ctagaagattgcctggcatgt

SEQ ID NO: 171291 - DNA, 21 bp, Artificial sequence
  SiRNA target sequence
tagaagattgcctggcatgtt

SEQ ID NO: 171292 - DNA, 21 bp, Artificial sequence
  SiRNA target sequence
agaagattgcctggcatgttc

SEQ ID NO: 171293 - DNA, 21 bp, Artificial sequence
  SiRNA target sequence
gaagattgcctggcatgttcg

SEQ ID NO: 171294 - DNA, 21 bp, Artificial sequence
  SiRNA target sequence
aagattgcctggcatgttcgg

SEQ ID NO: 171295 - DNA, 21 bp, Artificial sequence
  SiRNA target sequence
agattgcctggcatgttcggc

SEQ ID NO: 171296 - DNA, 21 bp, Artificial sequence
  SiRNA target sequence
gattgcctggcatgttcggct

SEQ ID NO: 171297 - DNA, 21 bp, Artificial sequence
  SiRNA target sequence
attgcctggcatgttcggctt

SEQ ID NO: 171298 - DNA, 21 bp, Artificial sequence
  SiRNA target sequence
ttgcctggcatgttcggcttg

SEQ ID NO: 171299 - DNA, 21 bp, Artificial sequence
  SiRNA target sequence
tgcctggcatgttcggcttgt

SEQ ID NO: 171300 - DNA, 21 bp, Artificial sequence
  SiRNA target sequence
gcctggcatgttcggcttgta

SEQ ID NO: 171301 - DNA, 21 bp, Artificial sequence
  SiRNA target sequence
cctggcatgttcggcttgtat

SEQ ID NO: 171302 - DNA, 21 bp, Artificial sequence
  SiRNA target sequence
ctggcatgttcggcttgtatt

SEQ ID NO: 171303 - DNA, 21 bp, Artificial sequence
  SiRNA target sequence
tggcatgttcggcttgtattg

SEQ ID NO: 171304 - DNA, 21 bp, Artificial sequence
  SiRNA target sequence
ggcatgttcggcttgtattgc

SEQ ID NO: 171305 - DNA, 21 bp, Artificial sequence
  SiRNA target sequence
gcatgttcggcttgtattgct

SEQ ID NO: 171306 - DNA, 21 bp, Artificial sequence
  SiRNA target sequence
catgttcggcttgtattgctg

SEQ ID NO: 171307 - DNA, 21 bp, Artificial sequence
  SiRNA target sequence
atgttcggcttgtattgctga

SEQ ID NO: 171308 - DNA, 21 bp, Artificial sequence
  SiRNA target sequence
tgttcggcttgtattgctgat

SEQ ID NO: 171309 - DNA, 21 bp, Artificial sequence
  SiRNA target sequence
gttcggcttgtattgctgatt

SEQ ID NO: 171310 - DNA, 21 bp, Artificial sequence
  SiRNA target sequence
ttcggcttgtattgctgattt

SEQ ID NO: 171311 - DNA, 21 bp, Artificial sequence
  SiRNA target sequence
tcggcttgtattgctgatttt

SEQ ID NO: 171312 - DNA, 21 bp, Artificial sequence
  SiRNA target sequence
cggcttgtattgctgattttt

SEQ ID NO: 171313 - DNA, 21 bp, Artificial sequence
  SiRNA target sequence
ggcttgtattgctgatttttc

SEQ ID NO: 171314 - DNA, 21 bp, Artificial sequence
  SiRNA target sequence
gcttgtattgctgatttttct

SEQ ID NO: 171315 - DNA, 21 bp, Artificial sequence
  SiRNA target sequence
cttgtattgctgatttttctg

SEQ ID NO: 171316 - DNA, 21 bp, Artificial sequence
  SiRNA target sequence
ttgtattgctgatttttctgt

SEQ ID NO: 171317 - DNA, 21 bp, Artificial sequence
  SiRNA target sequence
tgtattgctgatttttctgtt

SEQ ID NO: 171318 - DNA, 21 bp, Artificial sequence
  SiRNA target sequence
gtattgctgatttttctgttc

SEQ ID NO: 171319 - DNA, 21 bp, Artificial sequence
  SiRNA target sequence
tattgctgatttttctgttcc

SEQ ID NO: 171320 - DNA, 21 bp, Artificial sequence
  SiRNA target sequence
attgctgatttttctgttcca

SEQ ID NO: 171321 - DNA, 21 bp, Artificial sequence
  SiRNA target sequence
ttgctgatttttctgttccaa

SEQ ID NO: 171322 - DNA, 21 bp, Artificial sequence
  SiRNA target sequence
tgctgatttttctgttccaaa

SEQ ID NO: 171323 - DNA, 21 bp, Artificial sequence
  SiRNA target sequence
gctgatttttctgttccaaaa

SEQ ID NO: 171324 - DNA, 21 bp, Artificial sequence
  SiRNA target sequence
ctgatttttctgttccaaaaa

SEQ ID NO: 171325 - DNA, 21 bp, Artificial sequence
  SiRNA target sequence
tgatttttctgttccaaaaat

SEQ ID NO: 171326 - DNA, 21 bp, Artificial sequence
  SiRNA target sequence
gatttttctgttccaaaaatt

SEQ ID NO: 171327 - DNA, 21 bp, Artificial sequence
  SiRNA target sequence
atttttctgttccaaaaattc

SEQ ID NO: 171328 - DNA, 21 bp, Artificial sequence
  SiRNA target sequence
tttttctgttccaaaaattcc

SEQ ID NO: 171329 - DNA, 21 bp, Artificial sequence
  SiRNA target sequence
ttttctgttccaaaaattcct

SEQ ID NO: 171330 - DNA, 21 bp, Artificial sequence
  SiRNA target sequence
tttctgttccaaaaattccta

SEQ ID NO: 171331 - DNA, 21 bp, Artificial sequence
  SiRNA target sequence
ttctgttccaaaaattcctac

SEQ ID NO: 171332 - DNA, 21 bp, Artificial sequence
  SiRNA target sequence
tctgttccaaaaattcctact

SEQ ID NO: 171333 - DNA, 21 bp, Artificial sequence
  SiRNA target sequence
ctgttccaaaaattcctactt

SEQ ID NO: 171334 - DNA, 21 bp, Artificial sequence
  SiRNA target sequence
tgttccaaaaattcctactta

SEQ ID NO: 171335 - DNA, 21 bp, Artificial sequence
  SiRNA target sequence
gttccaaaaattcctacttac

SEQ ID NO: 171336 - DNA, 21 bp, Artificial sequence
  SiRNA target sequence
ttccaaaaattcctacttaca

SEQ ID NO: 171337 - DNA, 21 bp, Artificial sequence
  SiRNA target sequence
tccaaaaattcctacttacac

SEQ ID NO: 171338 - DNA, 21 bp, Artificial sequence
  SiRNA target sequence
ccaaaaattcctacttacaca

SEQ ID NO: 171339 - DNA, 21 bp, Artificial sequence
  SiRNA target sequence
caaaaattcctacttacacag

SEQ ID NO: 171340 - DNA, 21 bp, Artificial sequence
  SiRNA target sequence
aaaaattcctacttacacaga

SEQ ID NO: 171341 - DNA, 21 bp, Artificial sequence
  SiRNA target sequence
aaaattcctacttacacagaa

SEQ ID NO: 171342 - DNA, 21 bp, Artificial sequence
  SiRNA target sequence
aaattcctacttacacagaac

SEQ ID NO: 171343 - DNA, 21 bp, Artificial sequence
  SiRNA target sequence
aattcctacttacacagaact

SEQ ID NO: 171344 - DNA, 21 bp, Artificial sequence
  SiRNA target sequence
attcctacttacacagaactg

SEQ ID NO: 171345 - DNA, 21 bp, Artificial sequence
  SiRNA target sequence
ttcctacttacacagaactga

SEQ ID NO: 171346 - DNA, 21 bp, Artificial sequence
  SiRNA target sequence
tcctacttacacagaactgaa

SEQ ID NO: 171347 - DNA, 21 bp, Artificial sequence
  SiRNA target sequence
cctacttacacagaactgaaa

SEQ ID NO: 171348 - DNA, 21 bp, Artificial sequence
  SiRNA target sequence
ctacttacacagaactgaaag

SEQ ID NO: 171349 - DNA, 21 bp, Artificial sequence
  SiRNA target sequence
tacttacacagaactgaaaga

SEQ ID NO: 171350 - DNA, 21 bp, Artificial sequence
  SiRNA target sequence
acttacacagaactgaaagat

SEQ ID NO: 171351 - DNA, 21 bp, Artificial sequence
  SiRNA target sequence
cttacacagaactgaaagatg

SEQ ID NO: 171352 - DNA, 21 bp, Artificial sequence
  SiRNA target sequence
ttacacagaactgaaagatgt

SEQ ID NO: 171353 - DNA, 21 bp, Artificial sequence
  SiRNA target sequence
tacacagaactgaaagatgtc

SEQ ID NO: 171354 - DNA, 21 bp, Artificial sequence
  SiRNA target sequence
acacagaactgaaagatgtcc

SEQ ID NO: 171355 - DNA, 21 bp, Artificial sequence
  SiRNA target sequence
cacagaactgaaagatgtccc

SEQ ID NO: 171356 - DNA, 21 bp, Artificial sequence
  SiRNA target sequence
acagaactgaaagatgtccct

SEQ ID NO: 171357 - DNA, 21 bp, Artificial sequence
  SiRNA target sequence
cagaactgaaagatgtccctt

SEQ ID NO: 171358 - DNA, 21 bp, Artificial sequence
  SiRNA target sequence
agaactgaaagatgtcccttt

SEQ ID NO: 171359 - DNA, 21 bp, Artificial sequence
  SiRNA target sequence
gaactgaaagatgtcccttta

SEQ ID NO: 171360 - DNA, 21 bp, Artificial sequence
  SiRNA target sequence
aactgaaagatgtccctttaa

SEQ ID NO: 171361 - DNA, 21 bp, Artificial sequence
  SiRNA target sequence
actgaaagatgtccctttaac

SEQ ID NO: 171362 - DNA, 21 bp, Artificial sequence
  SiRNA target sequence
ctgaaagatgtccctttaaca

SEQ ID NO: 171363 - DNA, 21 bp, Artificial sequence
  SiRNA target sequence
tgaaagatgtccctttaacat

SEQ ID NO: 171364 - DNA, 21 bp, Artificial sequence
  SiRNA target sequence
gaaagatgtccctttaacatt

SEQ ID NO: 171365 - DNA, 21 bp, Artificial sequence
  SiRNA target sequence
aaagatgtccctttaacattt

SEQ ID NO: 171366 - DNA, 21 bp, Artificial sequence
  SiRNA target sequence
aagatgtccctttaacatttt

SEQ ID NO: 171367 - DNA, 21 bp, Artificial sequence
  SiRNA target sequence
agatgtccctttaacattttt

SEQ ID NO: 171368 - DNA, 21 bp, Artificial sequence
  SiRNA target sequence
gatgtccctttaacattttta

SEQ ID NO: 171369 - DNA, 21 bp, Artificial sequence
  SiRNA target sequence
atgtccctttaacatttttat

SEQ ID NO: 171370 - DNA, 21 bp, Artificial sequence
  SiRNA target sequence
tgtccctttaacatttttatt

SEQ ID NO: 171371 - DNA, 21 bp, Artificial sequence
  SiRNA target sequence
gtccctttaacatttttatta

SEQ ID NO: 171372 - DNA, 21 bp, Artificial sequence
  SiRNA target sequence
tccctttaacatttttattat

SEQ ID NO: 171373 - DNA, 21 bp, Artificial sequence
  SiRNA target sequence
ccctttaacatttttattatc

SEQ ID NO: 171374 - DNA, 21 bp, Artificial sequence
  SiRNA target sequence
cctttaacatttttattatca

SEQ ID NO: 171375 - DNA, 21 bp, Artificial sequence
  SiRNA target sequence
ctttaacatttttattatcac

SEQ ID NO: 171376 - DNA, 21 bp, Artificial sequence
  SiRNA target sequence
tttaacatttttattatcacc

SEQ ID NO: 171377 - DNA, 21 bp, Artificial sequence
  SiRNA target sequence
ttaacatttttattatcacca

SEQ ID NO: 171378 - DNA, 21 bp, Artificial sequence
  SiRNA target sequence
taacatttttattatcaccac

SEQ ID NO: 171379 - DNA, 21 bp, Artificial sequence
  SiRNA target sequence
aacatttttattatcaccaca

SEQ ID NO: 171380 - DNA, 21 bp, Artificial sequence
  SiRNA target sequence
acatttttattatcaccacat

SEQ ID NO: 171381 - DNA, 21 bp, Artificial sequence
  SiRNA target sequence
catttttattatcaccacatt

SEQ ID NO: 171382 - DNA, 21 bp, Artificial sequence
  SiRNA target sequence
atttttattatcaccacattc

SEQ ID NO: 171383 - DNA, 21 bp, Artificial sequence
  SiRNA target sequence
tttttattatcaccacattcg

SEQ ID NO: 171384 - DNA, 21 bp, Artificial sequence
  SiRNA target sequence
ttttattatcaccacattcga

SEQ ID NO: 171385 - DNA, 21 bp, Artificial sequence
  SiRNA target sequence
tttattatcaccacattcgaa

SEQ ID NO: 171386 - DNA, 21 bp, Artificial sequence
  SiRNA target sequence
ttattatcaccacattcgaaa

SEQ ID NO: 171387 - DNA, 21 bp, Artificial sequence
  SiRNA target sequence
tattatcaccacattcgaaaa

SEQ ID NO: 171388 - DNA, 21 bp, Artificial sequence
  SiRNA target sequence
attatcaccacattcgaaaat

SEQ ID NO: 171389 - DNA, 21 bp, Artificial sequence
  SiRNA target sequence
ttatcaccacattcgaaaatg

SEQ ID NO: 171390 - DNA, 21 bp, Artificial sequence
  SiRNA target sequence
tatcaccacattcgaaaatga

SEQ ID NO: 171391 - DNA, 21 bp, Artificial sequence
  SiRNA target sequence
atcaccacattcgaaaatgaa

SEQ ID NO: 171392 - DNA, 21 bp, Artificial sequence
  SiRNA target sequence
tcaccacattcgaaaatgaat

SEQ ID NO: 171393 - DNA, 21 bp, Artificial sequence
  SiRNA target sequence
caccacattcgaaaatgaata

SEQ ID NO: 171394 - DNA, 21 bp, Artificial sequence
  SiRNA target sequence
accacattcgaaaatgaatat

SEQ ID NO: 171395 - DNA, 21 bp, Artificial sequence
  SiRNA target sequence
ccacattcgaaaatgaatatg

SEQ ID NO: 171396 - DNA, 21 bp, Artificial sequence
  SiRNA target sequence
cacattcgaaaatgaatatgt

SEQ ID NO: 171397 - DNA, 21 bp, Artificial sequence
  SiRNA target sequence
acattcgaaaatgaatatgta

SEQ ID NO: 171398 - DNA, 21 bp, Artificial sequence
  SiRNA target sequence
cattcgaaaatgaatatgtat

SEQ ID NO: 171399 - DNA, 21 bp, Artificial sequence
  SiRNA target sequence
attcgaaaatgaatatgtatg

SEQ ID NO: 171400 - DNA, 21 bp, Artificial sequence
  SiRNA target sequence
ttcgaaaatgaatatgtatgc

SEQ ID NO: 171401 - DNA, 21 bp, Artificial sequence
  SiRNA target sequence
tcgaaaatgaatatgtatgca

SEQ ID NO: 171402 - DNA, 21 bp, Artificial sequence
  SiRNA target sequence
cgaaaatgaatatgtatgcac

SEQ ID NO: 171403 - DNA, 21 bp, Artificial sequence
  SiRNA target sequence
gaaaatgaatatgtatgcaca

SEQ ID NO: 171404 - DNA, 21 bp, Artificial sequence
  SiRNA target sequence
aaaatgaatatgtatgcacac

SEQ ID NO: 171405 - DNA, 21 bp, Artificial sequence
  SiRNA target sequence
aaatgaatatgtatgcacact

SEQ ID NO: 171406 - DNA, 21 bp, Artificial sequence
  SiRNA target sequence
aatgaatatgtatgcacacta

SEQ ID NO: 171407 - DNA, 21 bp, Artificial sequence
  SiRNA target sequence
atgaatatgtatgcacactat

SEQ ID NO: 171408 - DNA, 21 bp, Artificial sequence
  SiRNA target sequence
tgaatatgtatgcacactata

SEQ ID NO: 171409 - DNA, 21 bp, Artificial sequence
  SiRNA target sequence
gaatatgtatgcacactataa

SEQ ID NO: 171410 - DNA, 21 bp, Artificial sequence
  SiRNA target sequence
aatatgtatgcacactataac

SEQ ID NO: 171411 - DNA, 21 bp, Artificial sequence
  SiRNA target sequence
atatgtatgcacactataaca

SEQ ID NO: 171412 - DNA, 21 bp, Artificial sequence
  SiRNA target sequence
tatgtatgcacactataacaa

SEQ ID NO: 171413 - DNA, 21 bp, Artificial sequence
  SiRNA target sequence
atgtatgcacactataacaat

SEQ ID NO: 171414 - DNA, 21 bp, Artificial sequence
  SiRNA target sequence
tgtatgcacactataacaatc

SEQ ID NO: 171415 - DNA, 21 bp, Artificial sequence
  SiRNA target sequence
gtatgcacactataacaatca

SEQ ID NO: 171416 - DNA, 21 bp, Artificial sequence
  SiRNA target sequence
tatgcacactataacaatcat

SEQ ID NO: 171417 - DNA, 21 bp, Artificial sequence
  SiRNA target sequence
atgcacactataacaatcata

SEQ ID NO: 171418 - DNA, 21 bp, Artificial sequence
  SiRNA target sequence
tgcacactataacaatcatat

SEQ ID NO: 171419 - DNA, 21 bp, Artificial sequence
  SiRNA target sequence
gcacactataacaatcatata

SEQ ID NO: 171420 - DNA, 21 bp, Artificial sequence
  SiRNA target sequence
cacactataacaatcatataa

SEQ ID NO: 171421 - DNA, 21 bp, Artificial sequence
  SiRNA target sequence
acactataacaatcatataat

SEQ ID NO: 171422 - DNA, 21 bp, Artificial sequence
  SiRNA target sequence
cactataacaatcatataatg

SEQ ID NO: 171423 - DNA, 21 bp, Artificial sequence
  SiRNA target sequence
actataacaatcatataatgt

SEQ ID NO: 171424 - DNA, 21 bp, Artificial sequence
  SiRNA target sequence
ctataacaatcatataatgtc

SEQ ID NO: 171425 - DNA, 21 bp, Artificial sequence
  SiRNA target sequence
tataacaatcatataatgtcc

SEQ ID NO: 171426 - DNA, 21 bp, Artificial sequence
  SiRNA target sequence
ataacaatcatataatgtcct

SEQ ID NO: 171427 - DNA, 21 bp, Artificial sequence
  SiRNA target sequence
taacaatcatataatgtcctt

SEQ ID NO: 171428 - DNA, 21 bp, Artificial sequence
  SiRNA target sequence
aacaatcatataatgtccttt

SEQ ID NO: 171429 - DNA, 21 bp, Artificial sequence
  SiRNA target sequence
acaatcatataatgtccttta

SEQ ID NO: 171430 - DNA, 21 bp, Artificial sequence
  SiRNA target sequence
caatcatataatgtcctttag

SEQ ID NO: 171431 - DNA, 21 bp, Artificial sequence
  SiRNA target sequence
aatcatataatgtcctttagt

SEQ ID NO: 171432 - DNA, 21 bp, Artificial sequence
  SiRNA target sequence
atcatataatgtcctttagtg

SEQ ID NO: 171433 - DNA, 21 bp, Artificial sequence
  SiRNA target sequence
tcatataatgtcctttagtga

SEQ ID NO: 171434 - DNA, 21 bp, Artificial sequence
  SiRNA target sequence
catataatgtcctttagtgat

SEQ ID NO: 171435 - DNA, 21 bp, Artificial sequence
  SiRNA target sequence
atataatgtcctttagtgatt

SEQ ID NO: 171436 - DNA, 21 bp, Artificial sequence
  SiRNA target sequence
tataatgtcctttagtgattt

SEQ ID NO: 171437 - DNA, 21 bp, Artificial sequence
  SiRNA target sequence
ataatgtcctttagtgatttt

SEQ ID NO: 171438 - DNA, 21 bp, Artificial sequence
  SiRNA target sequence
taatgtcctttagtgattttg

SEQ ID NO: 171439 - DNA, 21 bp, Artificial sequence
  SiRNA target sequence
aatgtcctttagtgattttga

SEQ ID NO: 171440 - DNA, 21 bp, Artificial sequence
  SiRNA target sequence
atgtcctttagtgattttgaa

SEQ ID NO: 171441 - DNA, 21 bp, Artificial sequence
  SiRNA target sequence
tgtcctttagtgattttgaat

SEQ ID NO: 171442 - DNA, 21 bp, Artificial sequence
  SiRNA target sequence
gtcctttagtgattttgaata

SEQ ID NO: 171443 - DNA, 21 bp, Artificial sequence
  SiRNA target sequence
tcctttagtgattttgaatat

SEQ ID NO: 171444 - DNA, 21 bp, Artificial sequence
  SiRNA target sequence
cctttagtgattttgaatatc

SEQ ID NO: 171445 - DNA, 21 bp, Artificial sequence
  SiRNA target sequence
ctttagtgattttgaatatca

SEQ ID NO: 171446 - DNA, 21 bp, Artificial sequence
  SiRNA target sequence
tttagtgattttgaatatcac

SEQ ID NO: 171447 - DNA, 21 bp, Artificial sequence
  SiRNA target sequence
ttagtgattttgaatatcact

SEQ ID NO: 171448 - DNA, 21 bp, Artificial sequence
  SiRNA target sequence
tagtgattttgaatatcactt

SEQ ID NO: 171449 - DNA, 21 bp, Artificial sequence
  SiRNA target sequence
agtgattttgaatatcactta

SEQ ID NO: 171450 - DNA, 21 bp, Artificial sequence
  SiRNA target sequence
gtgattttgaatatcacttaa

SEQ ID NO: 171451 - DNA, 21 bp, Artificial sequence
  SiRNA target sequence
tgattttgaatatcacttaat

SEQ ID NO: 171452 - DNA, 21 bp, Artificial sequence
  SiRNA target sequence
gattttgaatatcacttaatt

SEQ ID NO: 171453 - DNA, 21 bp, Artificial sequence
  SiRNA target sequence
attttgaatatcacttaattt

SEQ ID NO: 171454 - DNA, 21 bp, Artificial sequence
  SiRNA target sequence
ttttgaatatcacttaatttc

SEQ ID NO: 171455 - DNA, 21 bp, Artificial sequence
  SiRNA target sequence
tttgaatatcacttaatttca

SEQ ID NO: 171456 - DNA, 21 bp, Artificial sequence
  SiRNA target sequence
ttgaatatcacttaatttcat

SEQ ID NO: 171457 - DNA, 21 bp, Artificial sequence
  SiRNA target sequence
tgaatatcacttaatttcatt

SEQ ID NO: 171458 - DNA, 21 bp, Artificial sequence
  SiRNA target sequence
gaatatcacttaatttcattt

SEQ ID NO: 171459 - DNA, 21 bp, Artificial sequence
  SiRNA target sequence
aatatcacttaatttcattta

SEQ ID NO: 171460 - DNA, 21 bp, Artificial sequence
  SiRNA target sequence
atatcacttaatttcatttat

SEQ ID NO: 171461 - DNA, 21 bp, Artificial sequence
  SiRNA target sequence
tatcacttaatttcatttata

SEQ ID NO: 171462 - DNA, 21 bp, Artificial sequence
  SiRNA target sequence
atcacttaatttcatttataa

SEQ ID NO: 171463 - DNA, 21 bp, Artificial sequence
  SiRNA target sequence
tcacttaatttcatttataaa

SEQ ID NO: 171464 - DNA, 21 bp, Artificial sequence
  SiRNA target sequence
cacttaatttcatttataaaa

SEQ ID NO: 171465 - DNA, 21 bp, Artificial sequence
  SiRNA target sequence
acttaatttcatttataaaac

SEQ ID NO: 171466 - DNA, 21 bp, Artificial sequence
  SiRNA target sequence
cttaatttcatttataaaact

SEQ ID NO: 171467 - DNA, 21 bp, Artificial sequence
  SiRNA target sequence
ttaatttcatttataaaacta

SEQ ID NO: 171468 - DNA, 21 bp, Artificial sequence
  SiRNA target sequence
taatttcatttataaaactaa

SEQ ID NO: 171469 - DNA, 21 bp, Artificial sequence
  SiRNA target sequence
aatttcatttataaaactaaa

SEQ ID NO: 171470 - DNA, 21 bp, Artificial sequence
  SiRNA target sequence
atttcatttataaaactaaaa

SEQ ID NO: 171471 - DNA, 21 bp, Artificial sequence
  SiRNA target sequence
tttcatttataaaactaaaat

SEQ ID NO: 171472 - DNA, 21 bp, Artificial sequence
  SiRNA target sequence
ttcatttataaaactaaaatt

SEQ ID NO: 171473 - DNA, 21 bp, Artificial sequence
  SiRNA target sequence
tcatttataaaactaaaattt

SEQ ID NO: 171474 - DNA, 21 bp, Artificial sequence
  SiRNA target sequence
catttataaaactaaaattta

SEQ ID NO: 171475 - DNA, 21 bp, Artificial sequence
  SiRNA target sequence
atttataaaactaaaatttaa

SEQ ID NO: 171476 - DNA, 21 bp, Artificial sequence
  SiRNA target sequence
tttataaaactaaaatttaat

SEQ ID NO: 171477 - DNA, 21 bp, Artificial sequence
  SiRNA target sequence
ttataaaactaaaatttaatg

SEQ ID NO: 171478 - DNA, 21 bp, Artificial sequence
  SiRNA target sequence
tataaaactaaaatttaatgt

SEQ ID NO: 171479 - DNA, 21 bp, Artificial sequence
  SiRNA target sequence
ataaaactaaaatttaatgta

SEQ ID NO: 171480 - DNA, 21 bp, Artificial sequence
  SiRNA target sequence
taaaactaaaatttaatgtaa

SEQ ID NO: 171481 - DNA, 21 bp, Artificial sequence
  SiRNA target sequence
aaaactaaaatttaatgtaat

SEQ ID NO: 171482 - DNA, 21 bp, Artificial sequence
  SiRNA target sequence
aaactaaaatttaatgtaata

SEQ ID NO: 171483 - DNA, 21 bp, Artificial sequence
  SiRNA target sequence
aactaaaatttaatgtaataa

SEQ ID NO: 171484 - DNA, 21 bp, Artificial sequence
  SiRNA target sequence
actaaaatttaatgtaataaa

SEQ ID NO: 171485 - DNA, 21 bp, Artificial sequence
  SiRNA target sequence
ctaaaatttaatgtaataaaa

SEQ ID NO: 171486 - DNA, 21 bp, Artificial sequence
  SiRNA target sequence
taaaatttaatgtaataaaag

SEQ ID NO: 171487 - DNA, 21 bp, Artificial sequence
  SiRNA target sequence
aaaatttaatgtaataaaagt

SEQ ID NO: 171488 - DNA, 21 bp, Artificial sequence
  SiRNA target sequence
aaatttaatgtaataaaagta

SEQ ID NO: 171489 - DNA, 21 bp, Artificial sequence
  SiRNA target sequence
aatttaatgtaataaaagtat

SEQ ID NO: 171490 - DNA, 21 bp, Artificial sequence
  SiRNA target sequence
atttaatgtaataaaagtata

SEQ ID NO: 171491 - DNA, 21 bp, Artificial sequence
  SiRNA target sequence
tttaatgtaataaaagtatat

SEQ ID NO: 171492 - DNA, 21 bp, Artificial sequence
  SiRNA target sequence
ttaatgtaataaaagtatatg

SEQ ID NO: 171493 - DNA, 21 bp, Artificial sequence
  SiRNA target sequence
taatgtaataaaagtatatga

SEQ ID NO: 171494 - DNA, 21 bp, Artificial sequence
  SiRNA target sequence
aatgtaataaaagtatatgat

SEQ ID NO: 171495 - DNA, 21 bp, Artificial sequence
  SiRNA target sequence
atgtaataaaagtatatgata

SEQ ID NO: 171496 - DNA, 21 bp, Artificial sequence
  SiRNA target sequence
tgtaataaaagtatatgatac

SEQ ID NO: 171497 - DNA, 21 bp, Artificial sequence
  SiRNA target sequence
gtaataaaagtatatgataca

SEQ ID NO: 171498 - DNA, 21 bp, Artificial sequence
  SiRNA target sequence
taataaaagtatatgatacat

SEQ ID NO: 171499 - DNA, 21 bp, Artificial sequence
  SiRNA target sequence
aataaaagtatatgatacatc

SEQ ID NO: 171500 - DNA, 21 bp, Artificial sequence
  SiRNA target sequence
ataaaagtatatgatacatct

SEQ ID NO: 171501 - DNA, 21 bp, Artificial sequence
  SiRNA target sequence
taaaagtatatgatacatctt

SEQ ID NO: 171502 - DNA, 21 bp, Artificial sequence
  SiRNA target sequence
aaaagtatatgatacatctta

SEQ ID NO: 171503 - DNA, 21 bp, Artificial sequence
  SiRNA target sequence
aaagtatatgatacatcttat

SEQ ID NO: 171504 - DNA, 21 bp, Artificial sequence
  SiRNA target sequence
aagtatatgatacatcttatg

SEQ ID NO: 171505 - DNA, 21 bp, Artificial sequence
  SiRNA target sequence
agtatatgatacatcttatgt

SEQ ID NO: 171506 - DNA, 21 bp, Artificial sequence
  SiRNA target sequence
gtatatgatacatcttatgtc

SEQ ID NO: 171507 - DNA, 21 bp, Artificial sequence
  SiRNA target sequence
tatatgatacatcttatgtca

SEQ ID NO: 171508 - DNA, 21 bp, Artificial sequence
  SiRNA target sequence
atatgatacatcttatgtcaa

SEQ ID NO: 171509 - DNA, 21 bp, Artificial sequence
  SiRNA target sequence
tatgatacatcttatgtcaaa

SEQ ID NO: 171510 - DNA, 21 bp, Artificial sequence
  SiRNA target sequence
atgatacatcttatgtcaaaa

SEQ ID NO: 171511 - DNA, 21 bp, Artificial sequence
  SiRNA target sequence
tgatacatcttatgtcaaaaa

SEQ ID NO: 171512 - DNA, 21 bp, Artificial sequence
  SiRNA target sequence
gatacatcttatgtcaaaaat

SEQ ID NO: 171513 - DNA, 21 bp, Artificial sequence
  SiRNA target sequence
atacatcttatgtcaaaaata

SEQ ID NO: 171514 - DNA, 21 bp, Artificial sequence
  SiRNA target sequence
tacatcttatgtcaaaaatat

SEQ ID NO: 171515 - DNA, 21 bp, Artificial sequence
  SiRNA target sequence
acatcttatgtcaaaaatatt

SEQ ID NO: 171516 - DNA, 21 bp, Artificial sequence
  SiRNA target sequence
catcttatgtcaaaaatattc

SEQ ID NO: 171517 - DNA, 21 bp, Artificial sequence
  SiRNA target sequence
atcttatgtcaaaaatattct

SEQ ID NO: 171518 - DNA, 21 bp, Artificial sequence
  SiRNA target sequence
tcttatgtcaaaaatattctg

SEQ ID NO: 171519 - DNA, 21 bp, Artificial sequence
  SiRNA target sequence
cttatgtcaaaaatattctgt

SEQ ID NO: 171520 - DNA, 21 bp, Artificial sequence
  SiRNA target sequence
ttatgtcaaaaatattctgta

SEQ ID NO: 171521 - DNA, 21 bp, Artificial sequence
  SiRNA target sequence
tatgtcaaaaatattctgtat

SEQ ID NO: 171522 - DNA, 21 bp, Artificial sequence
  SiRNA target sequence
atgtcaaaaatattctgtatg

SEQ ID NO: 171523 - DNA, 21 bp, Artificial sequence
  SiRNA target sequence
tgtcaaaaatattctgtatga

SEQ ID NO: 171524 - DNA, 21 bp, Artificial sequence
  SiRNA target sequence
gtcaaaaatattctgtatgat

SEQ ID NO: 171525 - DNA, 21 bp, Artificial sequence
  SiRNA target sequence
tcaaaaatattctgtatgata

SEQ ID NO: 171526 - DNA, 21 bp, Artificial sequence
  SiRNA target sequence
caaaaatattctgtatgatag

SEQ ID NO: 171527 - DNA, 21 bp, Artificial sequence
  SiRNA target sequence
aaaaatattctgtatgatagt

SEQ ID NO: 171528 - DNA, 21 bp, Artificial sequence
  SiRNA target sequence
aaaatattctgtatgatagtg

SEQ ID NO: 171529 - DNA, 21 bp, Artificial sequence
  SiRNA target sequence
aaatattctgtatgatagtgt

SEQ ID NO: 171530 - DNA, 21 bp, Artificial sequence
  SiRNA target sequence
aatattctgtatgatagtgtt

SEQ ID NO: 171531 - DNA, 21 bp, Artificial sequence
  SiRNA target sequence
atattctgtatgatagtgttt

SEQ ID NO: 171532 - DNA, 21 bp, Artificial sequence
  SiRNA target sequence
tattctgtatgatagtgttta

SEQ ID NO: 171533 - DNA, 21 bp, Artificial sequence
  SiRNA target sequence
attctgtatgatagtgtttat

SEQ ID NO: 171534 - DNA, 21 bp, Artificial sequence
  SiRNA target sequence
ttctgtatgatagtgtttatg

SEQ ID NO: 171535 - DNA, 21 bp, Artificial sequence
  SiRNA target sequence
tctgtatgatagtgtttatga

SEQ ID NO: 171536 - DNA, 21 bp, Artificial sequence
  SiRNA target sequence
ctgtatgatagtgtttatgag

SEQ ID NO: 171537 - DNA, 21 bp, Artificial sequence
  SiRNA target sequence
tgtatgatagtgtttatgagg

SEQ ID NO: 171538 - DNA, 21 bp, Artificial sequence
  SiRNA target sequence
gtatgatagtgtttatgagga

SEQ ID NO: 171539 - DNA, 21 bp, Artificial sequence
  SiRNA target sequence
tatgatagtgtttatgaggaa

SEQ ID NO: 171540 - DNA, 21 bp, Artificial sequence
  SiRNA target sequence
atgatagtgtttatgaggaaa

SEQ ID NO: 171541 - DNA, 21 bp, Artificial sequence
  SiRNA target sequence
tgatagtgtttatgaggaaag

SEQ ID NO: 171542 - DNA, 21 bp, Artificial sequence
  SiRNA target sequence
gatagtgtttatgaggaaagc

SEQ ID NO: 171543 - DNA, 21 bp, Artificial sequence
  SiRNA target sequence
atagtgtttatgaggaaagca

SEQ ID NO: 171544 - DNA, 21 bp, Artificial sequence
  SiRNA target sequence
tagtgtttatgaggaaagcac

SEQ ID NO: 171545 - DNA, 21 bp, Artificial sequence
  SiRNA target sequence
agtgtttatgaggaaagcacg

SEQ ID NO: 171546 - DNA, 21 bp, Artificial sequence
  SiRNA target sequence
gtgtttatgaggaaagcacga

SEQ ID NO: 171547 - DNA, 21 bp, Artificial sequence
  SiRNA target sequence
tgtttatgaggaaagcacgag

SEQ ID NO: 171548 - DNA, 21 bp, Artificial sequence
  SiRNA target sequence
gtttatgaggaaagcacgaga

SEQ ID NO: 171549 - DNA, 21 bp, Artificial sequence
  SiRNA target sequence
tttatgaggaaagcacgagag

SEQ ID NO: 171550 - DNA, 21 bp, Artificial sequence
  SiRNA target sequence
ttatgaggaaagcacgagaga

SEQ ID NO: 171551 - DNA, 21 bp, Artificial sequence
  SiRNA target sequence
tatgaggaaagcacgagagac

SEQ ID NO: 171552 - DNA, 21 bp, Artificial sequence
  SiRNA target sequence
atgaggaaagcacgagagaca

SEQ ID NO: 171553 - DNA, 21 bp, Artificial sequence
  SiRNA target sequence
tgaggaaagcacgagagacaa

SEQ ID NO: 171554 - DNA, 21 bp, Artificial sequence
  SiRNA target sequence
gaggaaagcacgagagacaaa

SEQ ID NO: 171555 - DNA, 21 bp, Artificial sequence
  SiRNA target sequence
aggaaagcacgagagacaaaa

SEQ ID NO: 171556 - DNA, 21 bp, Artificial sequence
  SiRNA target sequence
ggaaagcacgagagacaaaat

SEQ ID NO: 171557 - DNA, 21 bp, Artificial sequence
  SiRNA target sequence
gaaagcacgagagacaaaata

SEQ ID NO: 171558 - DNA, 21 bp, Artificial sequence
  SiRNA target sequence
aaagcacgagagacaaaataa

SEQ ID NO: 171559 - DNA, 21 bp, Artificial sequence
  SiRNA target sequence
aagcacgagagacaaaataat

SEQ ID NO: 171560 - DNA, 21 bp, Artificial sequence
  SiRNA target sequence
agcacgagagacaaaataata

SEQ ID NO: 171561 - DNA, 21 bp, Artificial sequence
  SiRNA target sequence
gcacgagagacaaaataataa

SEQ ID NO: 171562 - DNA, 21 bp, Artificial sequence
  SiRNA target sequence
cacgagagacaaaataataat

SEQ ID NO: 171563 - DNA, 21 bp, Artificial sequence
  SiRNA target sequence
acgagagacaaaataataata

SEQ ID NO: 171564 - DNA, 21 bp, Artificial sequence
  SiRNA target sequence
cgagagacaaaataataataa

SEQ ID NO: 171565 - DNA, 21 bp, Artificial sequence
  SiRNA target sequence
gagagacaaaataataataag

SEQ ID NO: 171566 - DNA, 21 bp, Artificial sequence
  SiRNA target sequence
agagacaaaataataataagt

SEQ ID NO: 171567 - DNA, 21 bp, Artificial sequence
  SiRNA target sequence
gagacaaaataataataagtg

SEQ ID NO: 171568 - DNA, 21 bp, Artificial sequence
  SiRNA target sequence
agacaaaataataataagtga

SEQ ID NO: 171569 - DNA, 21 bp, Artificial sequence
  SiRNA target sequence
gacaaaataataataagtgac

SEQ ID NO: 171570 - DNA, 21 bp, Artificial sequence
  SiRNA target sequence
acaaaataataataagtgact

SEQ ID NO: 171571 - DNA, 21 bp, Artificial sequence
  SiRNA target sequence
caaaataataataagtgactg

SEQ ID NO: 171572 - DNA, 21 bp, Artificial sequence
  SiRNA target sequence
aaaataataataagtgactgt

SEQ ID NO: 171573 - DNA, 21 bp, Artificial sequence
  SiRNA target sequence
aaataataataagtgactgtc

SEQ ID NO: 171574 - DNA, 21 bp, Artificial sequence
  SiRNA target sequence
aataataataagtgactgtcc

SEQ ID NO: 171575 - DNA, 21 bp, Artificial sequence
  SiRNA target sequence
ataataataagtgactgtcct

SEQ ID NO: 171576 - DNA, 21 bp, Artificial sequence
  SiRNA target sequence
taataataagtgactgtcctg

SEQ ID NO: 171577 - DNA, 21 bp, Artificial sequence
  SiRNA target sequence
aataataagtgactgtcctgg

SEQ ID NO: 171578 - DNA, 21 bp, Artificial sequence
  SiRNA target sequence
ataataagtgactgtcctggg

SEQ ID NO: 171579 - DNA, 21 bp, Artificial sequence
  SiRNA target sequence
taataagtgactgtcctggga

SEQ ID NO: 171580 - DNA, 21 bp, Artificial sequence
  SiRNA target sequence
aataagtgactgtcctgggac

SEQ ID NO: 171581 - DNA, 21 bp, Artificial sequence
  SiRNA target sequence
ataagtgactgtcctgggact

SEQ ID NO: 171582 - DNA, 21 bp, Artificial sequence
  SiRNA target sequence
taagtgactgtcctgggactg

SEQ ID NO: 171583 - DNA, 21 bp, Artificial sequence
  SiRNA target sequence
aagtgactgtcctgggactgt

SEQ ID NO: 171584 - DNA, 21 bp, Artificial sequence
  SiRNA target sequence
agtgactgtcctgggactgtt

SEQ ID NO: 171585 - DNA, 21 bp, Artificial sequence
  SiRNA target sequence
gtgactgtcctgggactgttt

SEQ ID NO: 171586 - DNA, 21 bp, Artificial sequence
  SiRNA target sequence
tgactgtcctgggactgtttc

SEQ ID NO: 171587 - DNA, 21 bp, Artificial sequence
  SiRNA target sequence
gactgtcctgggactgtttca

SEQ ID NO: 171588 - DNA, 21 bp, Artificial sequence
  SiRNA target sequence
actgtcctgggactgtttcat

SEQ ID NO: 171589 - DNA, 21 bp, Artificial sequence
  SiRNA target sequence
ctgtcctgggactgtttcata

SEQ ID NO: 171590 - DNA, 21 bp, Artificial sequence
  SiRNA target sequence
tgtcctgggactgtttcatat

SEQ ID NO: 171591 - DNA, 21 bp, Artificial sequence
  SiRNA target sequence
gtcctgggactgtttcatata

SEQ ID NO: 171592 - DNA, 21 bp, Artificial sequence
  SiRNA target sequence
tcctgggactgtttcatatat

SEQ ID NO: 171593 - DNA, 21 bp, Artificial sequence
  SiRNA target sequence
cctgggactgtttcatatatt

SEQ ID NO: 171594 - DNA, 21 bp, Artificial sequence
  SiRNA target sequence
ctgggactgtttcatatattg

SEQ ID NO: 171595 - DNA, 21 bp, Artificial sequence
  SiRNA target sequence
tgggactgtttcatatattga

SEQ ID NO: 171596 - DNA, 21 bp, Artificial sequence
  SiRNA target sequence
gggactgtttcatatattgaa

SEQ ID NO: 171597 - DNA, 21 bp, Artificial sequence
  SiRNA target sequence
ggactgtttcatatattgaaa

SEQ ID NO: 171598 - DNA, 21 bp, Artificial sequence
  SiRNA target sequence
gactgtttcatatattgaaag

SEQ ID NO: 171599 - DNA, 21 bp, Artificial sequence
  SiRNA target sequence
actgtttcatatattgaaagg

SEQ ID NO: 171600 - DNA, 21 bp, Artificial sequence
  SiRNA target sequence
ctgtttcatatattgaaaggc

SEQ ID NO: 171601 - DNA, 21 bp, Artificial sequence
  SiRNA target sequence
tgtttcatatattgaaaggca

SEQ ID NO: 171602 - DNA, 21 bp, Artificial sequence
  SiRNA target sequence
gtttcatatattgaaaggcaa

SEQ ID NO: 171603 - DNA, 21 bp, Artificial sequence
  SiRNA target sequence
tttcatatattgaaaggcaag

SEQ ID NO: 171604 - DNA, 21 bp, Artificial sequence
  SiRNA target sequence
ttcatatattgaaaggcaagc

SEQ ID NO: 171605 - DNA, 21 bp, Artificial sequence
  SiRNA target sequence
tcatatattgaaaggcaagca

SEQ ID NO: 171606 - DNA, 21 bp, Artificial sequence
  SiRNA target sequence
catatattgaaaggcaagcac

SEQ ID NO: 171607 - DNA, 21 bp, Artificial sequence
  SiRNA target sequence
atatattgaaaggcaagcaca

SEQ ID NO: 171608 - DNA, 21 bp, Artificial sequence
  SiRNA target sequence
tatattgaaaggcaagcacac

SEQ ID NO: 171609 - DNA, 21 bp, Artificial sequence
  SiRNA target sequence
atattgaaaggcaagcacacc

SEQ ID NO: 171610 - DNA, 21 bp, Artificial sequence
  SiRNA target sequence
tattgaaaggcaagcacacca

SEQ ID NO: 171611 - DNA, 21 bp, Artificial sequence
  SiRNA target sequence
attgaaaggcaagcacaccat

SEQ ID NO: 171612 - DNA, 21 bp, Artificial sequence
  SiRNA target sequence
ttgaaaggcaagcacaccatt

SEQ ID NO: 171613 - DNA, 21 bp, Artificial sequence
  SiRNA target sequence
tgaaaggcaagcacaccattt

SEQ ID NO: 171614 - DNA, 21 bp, Artificial sequence
  SiRNA target sequence
gaaaggcaagcacaccattta

SEQ ID NO: 171615 - DNA, 21 bp, Artificial sequence
  SiRNA target sequence
aaaggcaagcacaccatttaa

SEQ ID NO: 171616 - DNA, 21 bp, Artificial sequence
  SiRNA target sequence
aaggcaagcacaccatttaat

SEQ ID NO: 171617 - DNA, 21 bp, Artificial sequence
  SiRNA target sequence
aggcaagcacaccatttaatt

SEQ ID NO: 171618 - DNA, 21 bp, Artificial sequence
  SiRNA target sequence
ggcaagcacaccatttaattg

SEQ ID NO: 171619 - DNA, 21 bp, Artificial sequence
  SiRNA target sequence
gcaagcacaccatttaattga

SEQ ID NO: 171620 - DNA, 21 bp, Artificial sequence
  SiRNA target sequence
caagcacaccatttaattgaa

SEQ ID NO: 171621 - DNA, 21 bp, Artificial sequence
  SiRNA target sequence
aagcacaccatttaattgaat

SEQ ID NO: 171622 - DNA, 21 bp, Artificial sequence
  SiRNA target sequence
agcacaccatttaattgaata

SEQ ID NO: 171623 - DNA, 21 bp, Artificial sequence
  SiRNA target sequence
gcacaccatttaattgaatat

SEQ ID NO: 171624 - DNA, 21 bp, Artificial sequence
  SiRNA target sequence
cacaccatttaattgaatatt

SEQ ID NO: 171625 - DNA, 21 bp, Artificial sequence
  SiRNA target sequence
acaccatttaattgaatattt

SEQ ID NO: 171626 - DNA, 21 bp, Artificial sequence
  SiRNA target sequence
caccatttaattgaatattta

SEQ ID NO: 171627 - DNA, 21 bp, Artificial sequence
  SiRNA target sequence
accatttaattgaatatttat

SEQ ID NO: 171628 - DNA, 21 bp, Artificial sequence
  SiRNA target sequence
ccatttaattgaatatttatc

SEQ ID NO: 171629 - DNA, 21 bp, Artificial sequence
  SiRNA target sequence
catttaattgaatatttatct

SEQ ID NO: 171630 - DNA, 21 bp, Artificial sequence
  SiRNA target sequence
atttaattgaatatttatctg

SEQ ID NO: 171631 - DNA, 21 bp, Artificial sequence
  SiRNA target sequence
tttaattgaatatttatctgt

SEQ ID NO: 171632 - DNA, 21 bp, Artificial sequence
  SiRNA target sequence
ttaattgaatatttatctgtt

SEQ ID NO: 171633 - DNA, 21 bp, Artificial sequence
  SiRNA target sequence
taattgaatatttatctgtta

SEQ ID NO: 171634 - DNA, 21 bp, Artificial sequence
  SiRNA target sequence
aattgaatatttatctgttac

SEQ ID NO: 171635 - DNA, 21 bp, Artificial sequence
  SiRNA target sequence
attgaatatttatctgttact

SEQ ID NO: 171636 - DNA, 21 bp, Artificial sequence
  SiRNA target sequence
ttgaatatttatctgttactt

SEQ ID NO: 171637 - DNA, 21 bp, Artificial sequence
  SiRNA target sequence
tgaatatttatctgttacttc

SEQ ID NO: 171638 - DNA, 21 bp, Artificial sequence
  SiRNA target sequence
gaatatttatctgttacttct

SEQ ID NO: 171639 - DNA, 21 bp, Artificial sequence
  SiRNA target sequence
aatatttatctgttacttcta

SEQ ID NO: 171640 - DNA, 21 bp, Artificial sequence
  SiRNA target sequence
atatttatctgttacttctac

SEQ ID NO: 171641 - DNA, 21 bp, Artificial sequence
  SiRNA target sequence
tatttatctgttacttctaca

SEQ ID NO: 171642 - DNA, 21 bp, Artificial sequence
  SiRNA target sequence
atttatctgttacttctacac

SEQ ID NO: 171643 - DNA, 21 bp, Artificial sequence
  SiRNA target sequence
tttatctgttacttctacaca

SEQ ID NO: 171644 - DNA, 21 bp, Artificial sequence
  SiRNA target sequence
ttatctgttacttctacacaa

SEQ ID NO: 171645 - DNA, 21 bp, Artificial sequence
  SiRNA target sequence
tatctgttacttctacacaac

SEQ ID NO: 171646 - DNA, 21 bp, Artificial sequence
  SiRNA target sequence
atctgttacttctacacaaca

SEQ ID NO: 171647 - DNA, 21 bp, Artificial sequence
  SiRNA target sequence
tctgttacttctacacaacaa

SEQ ID NO: 171648 - DNA, 21 bp, Artificial sequence
  SiRNA target sequence
ctgttacttctacacaacaac

SEQ ID NO: 171649 - DNA, 21 bp, Artificial sequence
  SiRNA target sequence
tgttacttctacacaacaaca

SEQ ID NO: 171650 - DNA, 21 bp, Artificial sequence
  SiRNA target sequence
gttacttctacacaacaacaa

SEQ ID NO: 171651 - DNA, 21 bp, Artificial sequence
  SiRNA target sequence
ttacttctacacaacaacaag

SEQ ID NO: 171652 - DNA, 21 bp, Artificial sequence
  SiRNA target sequence
tacttctacacaacaacaagc

SEQ ID NO: 171653 - DNA, 21 bp, Artificial sequence
  SiRNA target sequence
acttctacacaacaacaagcc

SEQ ID NO: 171654 - DNA, 21 bp, Artificial sequence
  SiRNA target sequence
cttctacacaacaacaagcca

SEQ ID NO: 171655 - DNA, 21 bp, Artificial sequence
  SiRNA target sequence
ttctacacaacaacaagccat

SEQ ID NO: 171656 - DNA, 21 bp, Artificial sequence
  SiRNA target sequence
tctacacaacaacaagccata

SEQ ID NO: 171657 - DNA, 21 bp, Artificial sequence
  SiRNA target sequence
ctacacaacaacaagccataa

SEQ ID NO: 171658 - DNA, 21 bp, Artificial sequence
  SiRNA target sequence
tacacaacaacaagccataaa

SEQ ID NO: 171659 - DNA, 21 bp, Artificial sequence
  SiRNA target sequence
acacaacaacaagccataaag

SEQ ID NO: 171660 - DNA, 21 bp, Artificial sequence
  SiRNA target sequence
cacaacaacaagccataaagc

SEQ ID NO: 171661 - DNA, 21 bp, Artificial sequence
  SiRNA target sequence
acaacaacaagccataaagct

SEQ ID NO: 171662 - DNA, 21 bp, Artificial sequence
  SiRNA target sequence
caacaacaagccataaagcta

SEQ ID NO: 171663 - DNA, 21 bp, Artificial sequence
  SiRNA target sequence
aacaacaagccataaagctac

SEQ ID NO: 171664 - DNA, 21 bp, Artificial sequence
  SiRNA target sequence
acaacaagccataaagctact

SEQ ID NO: 171665 - DNA, 21 bp, Artificial sequence
  SiRNA target sequence
caacaagccataaagctactt

SEQ ID NO: 171666 - DNA, 21 bp, Artificial sequence
  SiRNA target sequence
aacaagccataaagctacttg

SEQ ID NO: 171667 - DNA, 21 bp, Artificial sequence
  SiRNA target sequence
acaagccataaagctacttgc

SEQ ID NO: 171668 - DNA, 21 bp, Artificial sequence
  SiRNA target sequence
caagccataaagctacttgct

SEQ ID NO: 171669 - DNA, 21 bp, Artificial sequence
  SiRNA target sequence
aagccataaagctacttgctc

SEQ ID NO: 171670 - DNA, 21 bp, Artificial sequence
  SiRNA target sequence
agccataaagctacttgctca

SEQ ID NO: 171671 - DNA, 21 bp, Artificial sequence
  SiRNA target sequence
gccataaagctacttgctcag

SEQ ID NO: 171672 - DNA, 21 bp, Artificial sequence
  SiRNA target sequence
ccataaagctacttgctcagg

SEQ ID NO: 171673 - DNA, 21 bp, Artificial sequence
  SiRNA target sequence
cataaagctacttgctcaggg

SEQ ID NO: 171674 - DNA, 21 bp, Artificial sequence
  SiRNA target sequence
ataaagctacttgctcagggg

SEQ ID NO: 171675 - DNA, 21 bp, Artificial sequence
  SiRNA target sequence
taaagctacttgctcaggggc

SEQ ID NO: 171676 - DNA, 21 bp, Artificial sequence
  SiRNA target sequence
aaagctacttgctcaggggcg

SEQ ID NO: 171677 - DNA, 21 bp, Artificial sequence
  SiRNA target sequence
aagctacttgctcaggggcga

SEQ ID NO: 171678 - DNA, 21 bp, Artificial sequence
  SiRNA target sequence
agctacttgctcaggggcgaa

SEQ ID NO: 171679 - DNA, 21 bp, Artificial sequence
  SiRNA target sequence
gctacttgctcaggggcgaag

SEQ ID NO: 171680 - DNA, 21 bp, Artificial sequence
  SiRNA target sequence
ctacttgctcaggggcgaagt

SEQ ID NO: 171681 - DNA, 21 bp, Artificial sequence
  SiRNA target sequence
tacttgctcaggggcgaagta

SEQ ID NO: 171682 - DNA, 21 bp, Artificial sequence
  SiRNA target sequence
acttgctcaggggcgaagtat

SEQ ID NO: 171683 - DNA, 21 bp, Artificial sequence
  SiRNA target sequence
cttgctcaggggcgaagtata

SEQ ID NO: 171684 - DNA, 21 bp, Artificial sequence
  SiRNA target sequence
ttgctcaggggcgaagtataa

SEQ ID NO: 171685 - DNA, 21 bp, Artificial sequence
  SiRNA target sequence
tgctcaggggcgaagtataag

SEQ ID NO: 171686 - DNA, 21 bp, Artificial sequence
  SiRNA target sequence
gctcaggggcgaagtataagt

SEQ ID NO: 171687 - DNA, 21 bp, Artificial sequence
  SiRNA target sequence
ctcaggggcgaagtataagtg

SEQ ID NO: 171688 - DNA, 21 bp, Artificial sequence
  SiRNA target sequence
tcaggggcgaagtataagtgt

SEQ ID NO: 171689 - DNA, 21 bp, Artificial sequence
  SiRNA target sequence
caggggcgaagtataagtgtc

SEQ ID NO: 171690 - DNA, 21 bp, Artificial sequence
  SiRNA target sequence
aggggcgaagtataagtgtca

SEQ ID NO: 171691 - DNA, 21 bp, Artificial sequence
  SiRNA target sequence
ggggcgaagtataagtgtcat

SEQ ID NO: 171692 - DNA, 21 bp, Artificial sequence
  SiRNA target sequence
gggcgaagtataagtgtcata

SEQ ID NO: 171693 - DNA, 21 bp, Artificial sequence
  SiRNA target sequence
ggcgaagtataagtgtcatac

SEQ ID NO: 171694 - DNA, 21 bp, Artificial sequence
  SiRNA target sequence
gcgaagtataagtgtcataca

SEQ ID NO: 171695 - DNA, 21 bp, Artificial sequence
  SiRNA target sequence
cgaagtataagtgtcatacag

SEQ ID NO: 171696 - DNA, 21 bp, Artificial sequence
  SiRNA target sequence
gaagtataagtgtcatacagt

SEQ ID NO: 171697 - DNA, 21 bp, Artificial sequence
  SiRNA target sequence
aagtataagtgtcatacagtg

SEQ ID NO: 171698 - DNA, 21 bp, Artificial sequence
  SiRNA target sequence
agtataagtgtcatacagtgc

SEQ ID NO: 171699 - DNA, 21 bp, Artificial sequence
  SiRNA target sequence
gtataagtgtcatacagtgct

SEQ ID NO: 171700 - DNA, 21 bp, Artificial sequence
  SiRNA target sequence
tataagtgtcatacagtgcta

SEQ ID NO: 171701 - DNA, 21 bp, Artificial sequence
  SiRNA target sequence
ataagtgtcatacagtgctat

SEQ ID NO: 171702 - DNA, 21 bp, Artificial sequence
  SiRNA target sequence
taagtgtcatacagtgctatg

SEQ ID NO: 171703 - DNA, 21 bp, Artificial sequence
  SiRNA target sequence
aagtgtcatacagtgctatga

SEQ ID NO: 171704 - DNA, 21 bp, Artificial sequence
  SiRNA target sequence
agtgtcatacagtgctatgat

SEQ ID NO: 171705 - DNA, 21 bp, Artificial sequence
  SiRNA target sequence
gtgtcatacagtgctatgata

SEQ ID NO: 171706 - DNA, 21 bp, Artificial sequence
  SiRNA target sequence
tgtcatacagtgctatgataa

SEQ ID NO: 171707 - DNA, 21 bp, Artificial sequence
  SiRNA target sequence
gtcatacagtgctatgataaa

SEQ ID NO: 171708 - DNA, 21 bp, Artificial sequence
  SiRNA target sequence
tcatacagtgctatgataaat

SEQ ID NO: 171709 - DNA, 21 bp, Artificial sequence
  SiRNA target sequence
catacagtgctatgataaatt

SEQ ID NO: 171710 - DNA, 21 bp, Artificial sequence
  SiRNA target sequence
atacagtgctatgataaattt

SEQ ID NO: 171711 - DNA, 21 bp, Artificial sequence
  SiRNA target sequence
tacagtgctatgataaatttt

SEQ ID NO: 171712 - DNA, 21 bp, Artificial sequence
  SiRNA target sequence
acagtgctatgataaattttt

SEQ ID NO: 171713 - DNA, 21 bp, Artificial sequence
  SiRNA target sequence
cagtgctatgataaattttta

SEQ ID NO: 171714 - DNA, 21 bp, Artificial sequence
  SiRNA target sequence
agtgctatgataaatttttag

SEQ ID NO: 171715 - DNA, 21 bp, Artificial sequence
  SiRNA target sequence
gtgctatgataaatttttaga

SEQ ID NO: 171716 - DNA, 21 bp, Artificial sequence
  SiRNA target sequence
tgctatgataaatttttagag

SEQ ID NO: 171717 - DNA, 21 bp, Artificial sequence
  SiRNA target sequence
gctatgataaatttttagaga

SEQ ID NO: 171718 - DNA, 21 bp, Artificial sequence
  SiRNA target sequence
ctatgataaatttttagagaa

SEQ ID NO: 171719 - DNA, 21 bp, Artificial sequence
  SiRNA target sequence
tatgataaatttttagagaat

SEQ ID NO: 171720 - DNA, 21 bp, Artificial sequence
  SiRNA target sequence
atgataaatttttagagaata

SEQ ID NO: 171721 - DNA, 21 bp, Artificial sequence
  SiRNA target sequence
tgataaatttttagagaatag

SEQ ID NO: 171722 - DNA, 21 bp, Artificial sequence
  SiRNA target sequence
gataaatttttagagaatagc

SEQ ID NO: 171723 - DNA, 21 bp, Artificial sequence
  SiRNA target sequence
ataaatttttagagaatagcg

SEQ ID NO: 171724 - DNA, 21 bp, Artificial sequence
  SiRNA target sequence
taaatttttagagaatagcga

SEQ ID NO: 171725 - DNA, 21 bp, Artificial sequence
  SiRNA target sequence
aaatttttagagaatagcgat

SEQ ID NO: 171726 - DNA, 21 bp, Artificial sequence
  SiRNA target sequence
aatttttagagaatagcgatg

SEQ ID NO: 171727 - DNA, 21 bp, Artificial sequence
  SiRNA target sequence
atttttagagaatagcgatga

SEQ ID NO: 171728 - DNA, 21 bp, Artificial sequence
  SiRNA target sequence
tttttagagaatagcgatgat

SEQ ID NO: 171729 - DNA, 21 bp, Artificial sequence
  SiRNA target sequence
ttttagagaatagcgatgatg

SEQ ID NO: 171730 - DNA, 21 bp, Artificial sequence
  SiRNA target sequence
tttagagaatagcgatgatgt

SEQ ID NO: 171731 - DNA, 21 bp, Artificial sequence
  SiRNA target sequence
ttagagaatagcgatgatgtt

SEQ ID NO: 171732 - DNA, 21 bp, Artificial sequence
  SiRNA target sequence
tagagaatagcgatgatgttt

SEQ ID NO: 171733 - DNA, 21 bp, Artificial sequence
  SiRNA target sequence
agagaatagcgatgatgtttt

SEQ ID NO: 171734 - DNA, 21 bp, Artificial sequence
  SiRNA target sequence
gagaatagcgatgatgtttta

SEQ ID NO: 171735 - DNA, 21 bp, Artificial sequence
  SiRNA target sequence
agaatagcgatgatgttttaa

SEQ ID NO: 171736 - DNA, 21 bp, Artificial sequence
  SiRNA target sequence
gaatagcgatgatgttttaac

SEQ ID NO: 171737 - DNA, 21 bp, Artificial sequence
  SiRNA target sequence
aatagcgatgatgttttaact

SEQ ID NO: 171738 - DNA, 21 bp, Artificial sequence
  SiRNA target sequence
atagcgatgatgttttaacta

SEQ ID NO: 171739 - DNA, 21 bp, Artificial sequence
  SiRNA target sequence
tagcgatgatgttttaactac

SEQ ID NO: 171740 - DNA, 21 bp, Artificial sequence
  SiRNA target sequence
agcgatgatgttttaactacc

SEQ ID NO: 171741 - DNA, 21 bp, Artificial sequence
  SiRNA target sequence
gcgatgatgttttaactacct

SEQ ID NO: 171742 - DNA, 21 bp, Artificial sequence
  SiRNA target sequence
cgatgatgttttaactaccta

SEQ ID NO: 171743 - DNA, 21 bp, Artificial sequence
  SiRNA target sequence
gatgatgttttaactacctat

SEQ ID NO: 171744 - DNA, 21 bp, Artificial sequence
  SiRNA target sequence
atgatgttttaactacctatg

SEQ ID NO: 171745 - DNA, 21 bp, Artificial sequence
  SiRNA target sequence
tgatgttttaactacctatga

SEQ ID NO: 171746 - DNA, 21 bp, Artificial sequence
  SiRNA target sequence
gatgttttaactacctatgat

SEQ ID NO: 171747 - DNA, 21 bp, Artificial sequence
  SiRNA target sequence
atgttttaactacctatgatt

SEQ ID NO: 171748 - DNA, 21 bp, Artificial sequence
  SiRNA target sequence
tgttttaactacctatgattt

SEQ ID NO: 171749 - DNA, 21 bp, Artificial sequence
  SiRNA target sequence
gttttaactacctatgatttt

SEQ ID NO: 171750 - DNA, 21 bp, Artificial sequence
  SiRNA target sequence
ttttaactacctatgattttt

SEQ ID NO: 171751 - DNA, 21 bp, Artificial sequence
  SiRNA target sequence
tttaactacctatgattttta

SEQ ID NO: 171752 - DNA, 21 bp, Artificial sequence
  SiRNA target sequence
ttaactacctatgatttttat

SEQ ID NO: 171753 - DNA, 21 bp, Artificial sequence
  SiRNA target sequence
taactacctatgatttttata

SEQ ID NO: 171754 - DNA, 21 bp, Artificial sequence
  SiRNA target sequence
aactacctatgatttttataa

SEQ ID NO: 171755 - DNA, 21 bp, Artificial sequence
  SiRNA target sequence
actacctatgatttttataaa

SEQ ID NO: 171756 - DNA, 21 bp, Artificial sequence
  SiRNA target sequence
ctacctatgatttttataaaa

SEQ ID NO: 171757 - DNA, 21 bp, Artificial sequence
  SiRNA target sequence
tacctatgatttttataaaat

SEQ ID NO: 171758 - DNA, 21 bp, Artificial sequence
  SiRNA target sequence
acctatgatttttataaaatg

SEQ ID NO: 171759 - DNA, 21 bp, Artificial sequence
  SiRNA target sequence
cctatgatttttataaaatga

SEQ ID NO: 171760 - DNA, 21 bp, Artificial sequence
  SiRNA target sequence
ctatgatttttataaaatgat

SEQ ID NO: 171761 - DNA, 21 bp, Artificial sequence
  SiRNA target sequence
tatgatttttataaaatgatt

SEQ ID NO: 171762 - DNA, 21 bp, Artificial sequence
  SiRNA target sequence
atgatttttataaaatgattt

SEQ ID NO: 171763 - DNA, 21 bp, Artificial sequence
  SiRNA target sequence
tgatttttataaaatgatttt

SEQ ID NO: 171764 - DNA, 21 bp, Artificial sequence
  SiRNA target sequence
gatttttataaaatgattttg

SEQ ID NO: 171765 - DNA, 21 bp, Artificial sequence
  SiRNA target sequence
atttttataaaatgattttgg

SEQ ID NO: 171766 - DNA, 21 bp, Artificial sequence
  SiRNA target sequence
tttttataaaatgattttgga

SEQ ID NO: 171767 - DNA, 21 bp, Artificial sequence
  SiRNA target sequence
ttttataaaatgattttggat

SEQ ID NO: 171768 - DNA, 21 bp, Artificial sequence
  SiRNA target sequence
tttataaaatgattttggatc

SEQ ID NO: 171769 - DNA, 21 bp, Artificial sequence
  SiRNA target sequence
ttataaaatgattttggatct

SEQ ID NO: 171770 - DNA, 21 bp, Artificial sequence
  SiRNA target sequence
tataaaatgattttggatcta

SEQ ID NO: 171771 - DNA, 21 bp, Artificial sequence
  SiRNA target sequence
ataaaatgattttggatctag

SEQ ID NO: 171772 - DNA, 21 bp, Artificial sequence
  SiRNA target sequence
taaaatgattttggatctagg

SEQ ID NO: 171773 - DNA, 21 bp, Artificial sequence
  SiRNA target sequence
aaaatgattttggatctagga

SEQ ID NO: 171774 - DNA, 21 bp, Artificial sequence
  SiRNA target sequence
aaatgattttggatctaggat

SEQ ID NO: 171775 - DNA, 21 bp, Artificial sequence
  SiRNA target sequence
aatgattttggatctaggatt

SEQ ID NO: 171776 - DNA, 21 bp, Artificial sequence
  SiRNA target sequence
atgattttggatctaggattt

SEQ ID NO: 171777 - DNA, 21 bp, Artificial sequence
  SiRNA target sequence
tgattttggatctaggatttt

SEQ ID NO: 171778 - DNA, 21 bp, Artificial sequence
  SiRNA target sequence
gattttggatctaggattttt

SEQ ID NO: 171779 - DNA, 21 bp, Artificial sequence
  SiRNA target sequence
attttggatctaggattttta

SEQ ID NO: 171780 - DNA, 21 bp, Artificial sequence
  SiRNA target sequence
ttttggatctaggatttttac

SEQ ID NO: 171781 - DNA, 21 bp, Artificial sequence
  SiRNA target sequence
tttggatctaggatttttaca

SEQ ID NO: 171782 - DNA, 21 bp, Artificial sequence
  SiRNA target sequence
ttggatctaggatttttacag

SEQ ID NO: 171783 - DNA, 21 bp, Artificial sequence
  SiRNA target sequence
tggatctaggatttttacagc

SEQ ID NO: 171784 - DNA, 21 bp, Artificial sequence
  SiRNA target sequence
ggatctaggatttttacagca

SEQ ID NO: 171785 - DNA, 21 bp, Artificial sequence
  SiRNA target sequence
gatctaggatttttacagcat

SEQ ID NO: 171786 - DNA, 21 bp, Artificial sequence
  SiRNA target sequence
atctaggatttttacagcata

SEQ ID NO: 171787 - DNA, 21 bp, Artificial sequence
  SiRNA target sequence
tctaggatttttacagcataa

SEQ ID NO: 171788 - DNA, 21 bp, Artificial sequence
  SiRNA target sequence
ctaggatttttacagcataat

SEQ ID NO: 171789 - DNA, 21 bp, Artificial sequence
  SiRNA target sequence
taggatttttacagcataatt

SEQ ID NO: 171790 - DNA, 21 bp, Artificial sequence
  SiRNA target sequence
aggatttttacagcataattt

SEQ ID NO: 171791 - DNA, 21 bp, Artificial sequence
  SiRNA target sequence
ggatttttacagcataatttt

SEQ ID NO: 171792 - DNA, 21 bp, Artificial sequence
  SiRNA target sequence
gatttttacagcataatttta

SEQ ID NO: 171793 - DNA, 21 bp, Artificial sequence
  SiRNA target sequence
atttttacagcataattttat

SEQ ID NO: 171794 - DNA, 21 bp, Artificial sequence
  SiRNA target sequence
tttttacagcataattttatt

SEQ ID NO: 171795 - DNA, 21 bp, Artificial sequence
  SiRNA target sequence
ttttacagcataattttatta

SEQ ID NO: 171796 - DNA, 21 bp, Artificial sequence
  SiRNA target sequence
tttacagcataattttattaa

SEQ ID NO: 171797 - DNA, 21 bp, Artificial sequence
  SiRNA target sequence
ttacagcataattttattaaa

SEQ ID NO: 171798 - DNA, 21 bp, Artificial sequence
  SiRNA target sequence
tacagcataattttattaaag

SEQ ID NO: 171799 - DNA, 21 bp, Artificial sequence
  SiRNA target sequence
acagcataattttattaaagg

SEQ ID NO: 171800 - DNA, 21 bp, Artificial sequence
  SiRNA target sequence
cagcataattttattaaagga

SEQ ID NO: 171801 - DNA, 21 bp, Artificial sequence
  SiRNA target sequence
agcataattttattaaaggaa

SEQ ID NO: 171802 - DNA, 21 bp, Artificial sequence
  SiRNA target sequence
gcataattttattaaaggaac

SEQ ID NO: 171803 - DNA, 21 bp, Artificial sequence
  SiRNA target sequence
cataattttattaaaggaacc

SEQ ID NO: 171804 - DNA, 21 bp, Artificial sequence
  SiRNA target sequence
ataattttattaaaggaacct

SEQ ID NO: 171805 - DNA, 21 bp, Artificial sequence
  SiRNA target sequence
taattttattaaaggaacctg

SEQ ID NO: 171806 - DNA, 21 bp, Artificial sequence
  SiRNA target sequence
aattttattaaaggaacctgt

SEQ ID NO: 171807 - DNA, 21 bp, Artificial sequence
  SiRNA target sequence
attttattaaaggaacctgtg

SEQ ID NO: 171808 - DNA, 21 bp, Artificial sequence
  SiRNA target sequence
ttttattaaaggaacctgtga

SEQ ID NO: 171809 - DNA, 21 bp, Artificial sequence
  SiRNA target sequence
tttattaaaggaacctgtgag

SEQ ID NO: 171810 - DNA, 21 bp, Artificial sequence
  SiRNA target sequence
ttattaaaggaacctgtgaga

SEQ ID NO: 171811 - DNA, 21 bp, Artificial sequence
  SiRNA target sequence
tattaaaggaacctgtgagaa

SEQ ID NO: 171812 - DNA, 21 bp, Artificial sequence
  SiRNA target sequence
attaaaggaacctgtgagaaa

SEQ ID NO: 171813 - DNA, 21 bp, Artificial sequence
  SiRNA target sequence
ttaaaggaacctgtgagaaat

SEQ ID NO: 171814 - DNA, 21 bp, Artificial sequence
  SiRNA target sequence
taaaggaacctgtgagaaatg

SEQ ID NO: 171815 - DNA, 21 bp, Artificial sequence
  SiRNA target sequence
aaaggaacctgtgagaaatgg

SEQ ID NO: 171816 - DNA, 21 bp, Artificial sequence
  SiRNA target sequence
aaggaacctgtgagaaatggg

SEQ ID NO: 171817 - DNA, 21 bp, Artificial sequence
  SiRNA target sequence
aggaacctgtgagaaatggga

SEQ ID NO: 171818 - DNA, 21 bp, Artificial sequence
  SiRNA target sequence
ggaacctgtgagaaatgggag

SEQ ID NO: 171819 - DNA, 21 bp, Artificial sequence
  SiRNA target sequence
gaacctgtgagaaatgggaga

SEQ ID NO: 171820 - DNA, 21 bp, Artificial sequence
  SiRNA target sequence
aacctgtgagaaatgggagaa

SEQ ID NO: 171821 - DNA, 21 bp, Artificial sequence
  SiRNA target sequence
acctgtgagaaatgggagaag

SEQ ID NO: 171822 - DNA, 21 bp, Artificial sequence
  SiRNA target sequence
cctgtgagaaatgggagaagt

SEQ ID NO: 171823 - DNA, 21 bp, Artificial sequence
  SiRNA target sequence
ctgtgagaaatgggagaagtg

SEQ ID NO: 171824 - DNA, 21 bp, Artificial sequence
  SiRNA target sequence
tgtgagaaatgggagaagtgt

SEQ ID NO: 171825 - DNA, 21 bp, Artificial sequence
  SiRNA target sequence
gtgagaaatgggagaagtgta

SEQ ID NO: 171826 - DNA, 21 bp, Artificial sequence
  SiRNA target sequence
tgagaaatgggagaagtgtac

SEQ ID NO: 171827 - DNA, 21 bp, Artificial sequence
  SiRNA target sequence
gagaaatgggagaagtgtact

SEQ ID NO: 171828 - DNA, 21 bp, Artificial sequence
  SiRNA target sequence
agaaatgggagaagtgtacta

SEQ ID NO: 171829 - DNA, 21 bp, Artificial sequence
  SiRNA target sequence
gaaatgggagaagtgtactat

SEQ ID NO: 171830 - DNA, 21 bp, Artificial sequence
  SiRNA target sequence
aaatgggagaagtgtactatt

SEQ ID NO: 171831 - DNA, 21 bp, Artificial sequence
  SiRNA target sequence
aatgggagaagtgtactattg

SEQ ID NO: 171832 - DNA, 21 bp, Artificial sequence
  SiRNA target sequence
atgggagaagtgtactattgg

SEQ ID NO: 171833 - DNA, 21 bp, Artificial sequence
  SiRNA target sequence
tgggagaagtgtactattgga

SEQ ID NO: 171834 - DNA, 21 bp, Artificial sequence
  SiRNA target sequence
gggagaagtgtactattggat

SEQ ID NO: 171835 - DNA, 21 bp, Artificial sequence
  SiRNA target sequence
ggagaagtgtactattggata

SEQ ID NO: 171836 - DNA, 21 bp, Artificial sequence
  SiRNA target sequence
gagaagtgtactattggatat

SEQ ID NO: 171837 - DNA, 21 bp, Artificial sequence
  SiRNA target sequence
agaagtgtactattggatatc

SEQ ID NO: 171838 - DNA, 21 bp, Artificial sequence
  SiRNA target sequence
gaagtgtactattggatatca

SEQ ID NO: 171839 - DNA, 21 bp, Artificial sequence
  SiRNA target sequence
aagtgtactattggatatcat

SEQ ID NO: 171840 - DNA, 21 bp, Artificial sequence
  SiRNA target sequence
agtgtactattggatatcatt

SEQ ID NO: 171841 - DNA, 21 bp, Artificial sequence
  SiRNA target sequence
gtgtactattggatatcatta

SEQ ID NO: 171842 - DNA, 21 bp, Artificial sequence
  SiRNA target sequence
tgtactattggatatcattat

SEQ ID NO: 171843 - DNA, 21 bp, Artificial sequence
  SiRNA target sequence
gtactattggatatcattatg

SEQ ID NO: 171844 - DNA, 21 bp, Artificial sequence
  SiRNA target sequence
tactattggatatcattatgg

SEQ ID NO: 171845 - DNA, 21 bp, Artificial sequence
  SiRNA target sequence
actattggatatcattatgga

SEQ ID NO: 171846 - DNA, 21 bp, Artificial sequence
  SiRNA target sequence
ctattggatatcattatggat

SEQ ID NO: 171847 - DNA, 21 bp, Artificial sequence
  SiRNA target sequence
tattggatatcattatggata

SEQ ID NO: 171848 - DNA, 21 bp, Artificial sequence
  SiRNA target sequence
attggatatcattatggatat

SEQ ID NO: 171849 - DNA, 21 bp, Artificial sequence
  SiRNA target sequence
ttggatatcattatggatatt

SEQ ID NO: 171850 - DNA, 21 bp, Artificial sequence
  SiRNA target sequence
tggatatcattatggatattt

SEQ ID NO: 171851 - DNA, 21 bp, Artificial sequence
  SiRNA target sequence
ggatatcattatggatattta

SEQ ID NO: 171852 - DNA, 21 bp, Artificial sequence
  SiRNA target sequence
gatatcattatggatatttag

SEQ ID NO: 171853 - DNA, 21 bp, Artificial sequence
  SiRNA target sequence
atatcattatggatatttaga

SEQ ID NO: 171854 - DNA, 21 bp, Artificial sequence
  SiRNA target sequence
tatcattatggatatttagaa

SEQ ID NO: 171855 - DNA, 21 bp, Artificial sequence
  SiRNA target sequence
atcattatggatatttagaac

SEQ ID NO: 171856 - DNA, 21 bp, Artificial sequence
  SiRNA target sequence
tcattatggatatttagaaca

SEQ ID NO: 171857 - DNA, 21 bp, Artificial sequence
  SiRNA target sequence
cattatggatatttagaacac

SEQ ID NO: 171858 - DNA, 21 bp, Artificial sequence
  SiRNA target sequence
attatggatatttagaacaca

SEQ ID NO: 171859 - DNA, 21 bp, Artificial sequence
  SiRNA target sequence
ttatggatatttagaacacat

SEQ ID NO: 171860 - DNA, 21 bp, Artificial sequence
  SiRNA target sequence
tatggatatttagaacacata

SEQ ID NO: 171861 - DNA, 21 bp, Artificial sequence
  SiRNA target sequence
atggatatttagaacacatat

SEQ ID NO: 171862 - DNA, 21 bp, Artificial sequence
  SiRNA target sequence
tggatatttagaacacatatt

SEQ ID NO: 171863 - DNA, 21 bp, Artificial sequence
  SiRNA target sequence
ggatatttagaacacatatta

SEQ ID NO: 171864 - DNA, 21 bp, Artificial sequence
  SiRNA target sequence
gatatttagaacacatattaa

SEQ ID NO: 171865 - DNA, 21 bp, Artificial sequence
  SiRNA target sequence
atatttagaacacatattaaa

SEQ ID NO: 171866 - DNA, 21 bp, Artificial sequence
  SiRNA target sequence
tatttagaacacatattaaat

SEQ ID NO: 171867 - DNA, 21 bp, Artificial sequence
  SiRNA target sequence
atttagaacacatattaaata

SEQ ID NO: 171868 - DNA, 21 bp, Artificial sequence
  SiRNA target sequence
tttagaacacatattaaataa

SEQ ID NO: 171869 - DNA, 21 bp, Artificial sequence
  SiRNA target sequence
ttagaacacatattaaataag

SEQ ID NO: 171870 - DNA, 21 bp, Artificial sequence
  SiRNA target sequence
tagaacacatattaaataaga

SEQ ID NO: 171871 - DNA, 21 bp, Artificial sequence
  SiRNA target sequence
agaacacatattaaataagaa

SEQ ID NO: 171872 - DNA, 21 bp, Artificial sequence
  SiRNA target sequence
gaacacatattaaataagaag

SEQ ID NO: 171873 - DNA, 21 bp, Artificial sequence
  SiRNA target sequence
aacacatattaaataagaaga

SEQ ID NO: 171874 - DNA, 21 bp, Artificial sequence
  SiRNA target sequence
acacatattaaataagaagaa

SEQ ID NO: 171875 - DNA, 21 bp, Artificial sequence
  SiRNA target sequence
cacatattaaataagaagaac

SEQ ID NO: 171876 - DNA, 21 bp, Artificial sequence
  SiRNA target sequence
acatattaaataagaagaaca

SEQ ID NO: 171877 - DNA, 21 bp, Artificial sequence
  SiRNA target sequence
catattaaataagaagaacaa

SEQ ID NO: 171878 - DNA, 21 bp, Artificial sequence
  SiRNA target sequence
atattaaataagaagaacaat

SEQ ID NO: 171879 - DNA, 21 bp, Artificial sequence
  SiRNA target sequence
tattaaataagaagaacaatt

SEQ ID NO: 171880 - DNA, 21 bp, Artificial sequence
  SiRNA target sequence
attaaataagaagaacaatta

SEQ ID NO: 171881 - DNA, 21 bp, Artificial sequence
  SiRNA target sequence
ttaaataagaagaacaattat

SEQ ID NO: 171882 - DNA, 21 bp, Artificial sequence
  SiRNA target sequence
taaataagaagaacaattatt

SEQ ID NO: 171883 - DNA, 21 bp, Artificial sequence
  SiRNA target sequence
aaataagaagaacaattattt

SEQ ID NO: 171884 - DNA, 21 bp, Artificial sequence
  SiRNA target sequence
aataagaagaacaattattta

SEQ ID NO: 171885 - DNA, 21 bp, Artificial sequence
  SiRNA target sequence
ataagaagaacaattatttaa

SEQ ID NO: 171886 - DNA, 21 bp, Artificial sequence
  SiRNA target sequence
taagaagaacaattatttaac

SEQ ID NO: 171887 - DNA, 21 bp, Artificial sequence
  SiRNA target sequence
aagaagaacaattatttaaca

SEQ ID NO: 171888 - DNA, 21 bp, Artificial sequence
  SiRNA target sequence
agaagaacaattatttaacaa

SEQ ID NO: 171889 - DNA, 21 bp, Artificial sequence
  SiRNA target sequence
gaagaacaattatttaacaaa

SEQ ID NO: 171890 - DNA, 21 bp, Artificial sequence
  SiRNA target sequence
aagaacaattatttaacaaaa

SEQ ID NO: 171891 - DNA, 21 bp, Artificial sequence
  SiRNA target sequence
agaacaattatttaacaaaaa

SEQ ID NO: 171892 - DNA, 21 bp, Artificial sequence
  SiRNA target sequence
gaacaattatttaacaaaaaa

SEQ ID NO: 171893 - DNA, 21 bp, Artificial sequence
  SiRNA target sequence
aacaattatttaacaaaaaat

SEQ ID NO: 171894 - DNA, 21 bp, Artificial sequence
  SiRNA target sequence
acaattatttaacaaaaaatg

SEQ ID NO: 171895 - DNA, 21 bp, Artificial sequence
  SiRNA target sequence
caattatttaacaaaaaatga

SEQ ID NO: 171896 - DNA, 21 bp, Artificial sequence
  SiRNA target sequence
aattatttaacaaaaaatgat

SEQ ID NO: 171897 - DNA, 21 bp, Artificial sequence
  SiRNA target sequence
attatttaacaaaaaatgata

SEQ ID NO: 171898 - DNA, 21 bp, Artificial sequence
  SiRNA target sequence
ttatttaacaaaaaatgatag

SEQ ID NO: 171899 - DNA, 21 bp, Artificial sequence
  SiRNA target sequence
tatttaacaaaaaatgatagt

SEQ ID NO: 171900 - DNA, 21 bp, Artificial sequence
  SiRNA target sequence
atttaacaaaaaatgatagta

SEQ ID NO: 171901 - DNA, 21 bp, Artificial sequence
  SiRNA target sequence
tttaacaaaaaatgatagtat

SEQ ID NO: 171902 - DNA, 21 bp, Artificial sequence
  SiRNA target sequence
ttaacaaaaaatgatagtata

SEQ ID NO: 171903 - DNA, 21 bp, Artificial sequence
  SiRNA target sequence
taacaaaaaatgatagtataa

SEQ ID NO: 171904 - DNA, 21 bp, Artificial sequence
  SiRNA target sequence
aacaaaaaatgatagtataaa

SEQ ID NO: 171905 - DNA, 21 bp, Artificial sequence
  SiRNA target sequence
acaaaaaatgatagtataaaa

SEQ ID NO: 171906 - DNA, 21 bp, Artificial sequence
  SiRNA target sequence
caaaaaatgatagtataaaaa

SEQ ID NO: 171907 - DNA, 21 bp, Artificial sequence
  SiRNA target sequence
aaaaaatgatagtataaaaat

SEQ ID NO: 171908 - DNA, 21 bp, Artificial sequence
  SiRNA target sequence
aaaaatgatagtataaaaata

SEQ ID NO: 171909 - DNA, 21 bp, Artificial sequence
  SiRNA target sequence
aaaatgatagtataaaaatat

SEQ ID NO: 171910 - DNA, 21 bp, Artificial sequence
  SiRNA target sequence
aaatgatagtataaaaatatt

SEQ ID NO: 171911 - DNA, 21 bp, Artificial sequence
  SiRNA target sequence
aatgatagtataaaaatattt

SEQ ID NO: 171912 - DNA, 21 bp, Artificial sequence
  SiRNA target sequence
atgatagtataaaaatattta

SEQ ID NO: 171913 - DNA, 21 bp, Artificial sequence
  SiRNA target sequence
tgatagtataaaaatatttaa

SEQ ID NO: 171914 - DNA, 21 bp, Artificial sequence
  SiRNA target sequence
gatagtataaaaatatttaac

SEQ ID NO: 171915 - DNA, 21 bp, Artificial sequence
  SiRNA target sequence
atagtataaaaatatttaaca

SEQ ID NO: 171916 - DNA, 21 bp, Artificial sequence
  SiRNA target sequence
tagtataaaaatatttaacag

SEQ ID NO: 171917 - DNA, 21 bp, Artificial sequence
  SiRNA target sequence
agtataaaaatatttaacagt

SEQ ID NO: 171918 - DNA, 21 bp, Artificial sequence
  SiRNA target sequence
gtataaaaatatttaacagta

SEQ ID NO: 171919 - DNA, 21 bp, Artificial sequence
  SiRNA target sequence
tataaaaatatttaacagtaa

SEQ ID NO: 171920 - DNA, 21 bp, Artificial sequence
  SiRNA target sequence
ataaaaatatttaacagtaaa

SEQ ID NO: 171921 - DNA, 21 bp, Artificial sequence
  SiRNA target sequence
taaaaatatttaacagtaaaa

SEQ ID NO: 171922 - DNA, 21 bp, Artificial sequence
  SiRNA target sequence
aaaaatatttaacagtaaaaa

SEQ ID NO: 171923 - DNA, 21 bp, Artificial sequence
  SiRNA target sequence
aaaatatttaacagtaaaaat

SEQ ID NO: 171924 - DNA, 21 bp, Artificial sequence
  SiRNA target sequence
aaatatttaacagtaaaaatg

SEQ ID NO: 171925 - DNA, 21 bp, Artificial sequence
  SiRNA target sequence
aatatttaacagtaaaaatga

SEQ ID NO: 171926 - DNA, 21 bp, Artificial sequence
  SiRNA target sequence
atatttaacagtaaaaatgag

SEQ ID NO: 171927 - DNA, 21 bp, Artificial sequence
  SiRNA target sequence
tatttaacagtaaaaatgagg

SEQ ID NO: 171928 - DNA, 21 bp, Artificial sequence
  SiRNA target sequence
atttaacagtaaaaatgagga

SEQ ID NO: 171929 - DNA, 21 bp, Artificial sequence
  SiRNA target sequence
tttaacagtaaaaatgaggag

SEQ ID NO: 171930 - DNA, 21 bp, Artificial sequence
  SiRNA target sequence
ttaacagtaaaaatgaggagg

SEQ ID NO: 171931 - DNA, 21 bp, Artificial sequence
  SiRNA target sequence
taacagtaaaaatgaggaggt

SEQ ID NO: 171932 - DNA, 21 bp, Artificial sequence
  SiRNA target sequence
aacagtaaaaatgaggaggta

SEQ ID NO: 171933 - DNA, 21 bp, Artificial sequence
  SiRNA target sequence
acagtaaaaatgaggaggtaa

SEQ ID NO: 171934 - DNA, 21 bp, Artificial sequence
  SiRNA target sequence
cagtaaaaatgaggaggtaag

SEQ ID NO: 171935 - DNA, 21 bp, Artificial sequence
  SiRNA target sequence
agtaaaaatgaggaggtaagg

SEQ ID NO: 171936 - DNA, 21 bp, Artificial sequence
  SiRNA target sequence
gtaaaaatgaggaggtaaggt

SEQ ID NO: 171937 - DNA, 21 bp, Artificial sequence
  SiRNA target sequence
taaaaatgaggaggtaaggtt

SEQ ID NO: 171938 - DNA, 21 bp, Artificial sequence
  SiRNA target sequence
aaaaatgaggaggtaaggtta

SEQ ID NO: 171939 - DNA, 21 bp, Artificial sequence
  SiRNA target sequence
aaaatgaggaggtaaggttaa

SEQ ID NO: 171940 - DNA, 21 bp, Artificial sequence
  SiRNA target sequence
aaatgaggaggtaaggttaaa

SEQ ID NO: 171941 - DNA, 21 bp, Artificial sequence
  SiRNA target sequence
aatgaggaggtaaggttaaat

SEQ ID NO: 171942 - DNA, 21 bp, Artificial sequence
  SiRNA target sequence
atgaggaggtaaggttaaatg

SEQ ID NO: 171943 - DNA, 21 bp, Artificial sequence
  SiRNA target sequence
tgaggaggtaaggttaaatgg

SEQ ID NO: 171944 - DNA, 21 bp, Artificial sequence
  SiRNA target sequence
gaggaggtaaggttaaatgga

SEQ ID NO: 171945 - DNA, 21 bp, Artificial sequence
  SiRNA target sequence
aggaggtaaggttaaatggaa

SEQ ID NO: 171946 - DNA, 21 bp, Artificial sequence
  SiRNA target sequence
ggaggtaaggttaaatggaaa

SEQ ID NO: 171947 - DNA, 21 bp, Artificial sequence
  SiRNA target sequence
gaggtaaggttaaatggaaaa

SEQ ID NO: 171948 - DNA, 21 bp, Artificial sequence
  SiRNA target sequence
aggtaaggttaaatggaaaaa

SEQ ID NO: 171949 - DNA, 21 bp, Artificial sequence
  SiRNA target sequence
ggtaaggttaaatggaaaaag

SEQ ID NO: 171950 - DNA, 21 bp, Artificial sequence
  SiRNA target sequence
gtaaggttaaatggaaaaaga

SEQ ID NO: 171951 - DNA, 21 bp, Artificial sequence
  SiRNA target sequence
taaggttaaatggaaaaagaa

SEQ ID NO: 171952 - DNA, 21 bp, Artificial sequence
  SiRNA target sequence
aaggttaaatggaaaaagaaa

SEQ ID NO: 171953 - DNA, 21 bp, Artificial sequence
  SiRNA target sequence
aggttaaatggaaaaagaaaa

SEQ ID NO: 171954 - DNA, 21 bp, Artificial sequence
  SiRNA target sequence
ggttaaatggaaaaagaaaat

SEQ ID NO: 171955 - DNA, 21 bp, Artificial sequence
  SiRNA target sequence
gttaaatggaaaaagaaaatt

SEQ ID NO: 171956 - DNA, 21 bp, Artificial sequence
  SiRNA target sequence
ttaaatggaaaaagaaaatta

SEQ ID NO: 171957 - DNA, 21 bp, Artificial sequence
  SiRNA target sequence
taaatggaaaaagaaaattaa

SEQ ID NO: 171958 - DNA, 21 bp, Artificial sequence
  SiRNA target sequence
aaatggaaaaagaaaattaaa

SEQ ID NO: 171959 - DNA, 21 bp, Artificial sequence
  SiRNA target sequence
aatggaaaaagaaaattaaat

SEQ ID NO: 171960 - DNA, 21 bp, Artificial sequence
  SiRNA target sequence
atggaaaaagaaaattaaata

SEQ ID NO: 171961 - DNA, 21 bp, Artificial sequence
  SiRNA target sequence
tggaaaaagaaaattaaatat

SEQ ID NO: 171962 - DNA, 21 bp, Artificial sequence
  SiRNA target sequence
ggaaaaagaaaattaaatatt

SEQ ID NO: 171963 - DNA, 21 bp, Artificial sequence
  SiRNA target sequence
gaaaaagaaaattaaatatta

SEQ ID NO: 171964 - DNA, 21 bp, Artificial sequence
  SiRNA target sequence
aaaaagaaaattaaatattaa

SEQ ID NO: 171965 - DNA, 21 bp, Artificial sequence
  SiRNA target sequence
aaaagaaaattaaatattaac

SEQ ID NO: 171966 - DNA, 21 bp, Artificial sequence
  SiRNA target sequence
aaagaaaattaaatattaaca

SEQ ID NO: 171967 - DNA, 21 bp, Artificial sequence
  SiRNA target sequence
aagaaaattaaatattaacac

SEQ ID NO: 171968 - DNA, 21 bp, Artificial sequence
  SiRNA target sequence
agaaaattaaatattaacaca

SEQ ID NO: 171969 - DNA, 21 bp, Artificial sequence
  SiRNA target sequence
gaaaattaaatattaacacag

SEQ ID NO: 171970 - DNA, 21 bp, Artificial sequence
  SiRNA target sequence
aaaattaaatattaacacagt

SEQ ID NO: 171971 - DNA, 21 bp, Artificial sequence
  SiRNA target sequence
aaattaaatattaacacagtt

SEQ ID NO: 171972 - DNA, 21 bp, Artificial sequence
  SiRNA target sequence
aattaaatattaacacagtta

SEQ ID NO: 171973 - DNA, 21 bp, Artificial sequence
  SiRNA target sequence
attaaatattaacacagttac

SEQ ID NO: 171974 - DNA, 21 bp, Artificial sequence
  SiRNA target sequence
ttaaatattaacacagttaca

SEQ ID NO: 171975 - DNA, 21 bp, Artificial sequence
  SiRNA target sequence
taaatattaacacagttacat

SEQ ID NO: 171976 - DNA, 21 bp, Artificial sequence
  SiRNA target sequence
aaatattaacacagttacatt

SEQ ID NO: 171977 - DNA, 21 bp, Artificial sequence
  SiRNA target sequence
aatattaacacagttacatta

SEQ ID NO: 171978 - DNA, 21 bp, Artificial sequence
  SiRNA target sequence
atattaacacagttacattaa

SEQ ID NO: 171979 - DNA, 21 bp, Artificial sequence
  SiRNA target sequence
tattaacacagttacattaaa

SEQ ID NO: 171980 - DNA, 21 bp, Artificial sequence
  SiRNA target sequence
attaacacagttacattaaat

SEQ ID NO: 171981 - DNA, 21 bp, Artificial sequence
  SiRNA target sequence
ttaacacagttacattaaata

SEQ ID NO: 171982 - DNA, 21 bp, Artificial sequence
  SiRNA target sequence
taacacagttacattaaataa

SEQ ID NO: 171983 - DNA, 21 bp, Artificial sequence
  SiRNA target sequence
aacacagttacattaaataaa

SEQ ID NO: 171984 - DNA, 21 bp, Artificial sequence
  SiRNA target sequence
acacagttacattaaataaaa

SEQ ID NO: 171985 - DNA, 21 bp, Artificial sequence
  SiRNA target sequence
cacagttacattaaataaaat

SEQ ID NO: 171986 - DNA, 21 bp, Artificial sequence
  SiRNA target sequence
acagttacattaaataaaatt

SEQ ID NO: 171987 - DNA, 21 bp, Artificial sequence
  SiRNA target sequence
cagttacattaaataaaatta

SEQ ID NO: 171988 - DNA, 21 bp, Artificial sequence
  SiRNA target sequence
agttacattaaataaaattaa

SEQ ID NO: 171989 - DNA, 21 bp, Artificial sequence
  SiRNA target sequence
gttacattaaataaaattaat

SEQ ID NO: 171990 - DNA, 21 bp, Artificial sequence
  SiRNA target sequence
ttacattaaataaaattaata

SEQ ID NO: 171991 - DNA, 21 bp, Artificial sequence
  SiRNA target sequence
tacattaaataaaattaatat

SEQ ID NO: 171992 - DNA, 21 bp, Artificial sequence
  SiRNA target sequence
acattaaataaaattaatata

SEQ ID NO: 171993 - DNA, 21 bp, Artificial sequence
  SiRNA target sequence
cattaaataaaattaatatac

SEQ ID NO: 171994 - DNA, 21 bp, Artificial sequence
  SiRNA target sequence
attaaataaaattaatatacc

SEQ ID NO: 171995 - DNA, 21 bp, Artificial sequence
  SiRNA target sequence
ttaaataaaattaatatacct

SEQ ID NO: 171996 - DNA, 21 bp, Artificial sequence
  SiRNA target sequence
taaataaaattaatatacctg

SEQ ID NO: 171997 - DNA, 21 bp, Artificial sequence
  SiRNA target sequence
aaataaaattaatatacctga

SEQ ID NO: 171998 - DNA, 21 bp, Artificial sequence
  SiRNA target sequence
aataaaattaatatacctgag

SEQ ID NO: 171999 - DNA, 21 bp, Artificial sequence
  SiRNA target sequence
ataaaattaatatacctgaga

SEQ ID NO: 172000 - DNA, 21 bp, Artificial sequence
  SiRNA target sequence
taaaattaatatacctgagat

SEQ ID NO: 172001 - DNA, 21 bp, Artificial sequence
  SiRNA target sequence
aaaattaatatacctgagata

SEQ ID NO: 172002 - DNA, 21 bp, Artificial sequence
  SiRNA target sequence
aaattaatatacctgagatag

SEQ ID NO: 172003 - DNA, 21 bp, Artificial sequence
  SiRNA target sequence
aattaatatacctgagataga

SEQ ID NO: 172004 - DNA, 21 bp, Artificial sequence
  SiRNA target sequence
attaatatacctgagatagat

SEQ ID NO: 172005 - DNA, 21 bp, Artificial sequence
  SiRNA target sequence
ttaatatacctgagatagatt

SEQ ID NO: 172006 - DNA, 21 bp, Artificial sequence
  SiRNA target sequence
taatatacctgagatagatta

SEQ ID NO: 172007 - DNA, 21 bp, Artificial sequence
  SiRNA target sequence
aatatacctgagatagattat

SEQ ID NO: 172008 - DNA, 21 bp, Artificial sequence
  SiRNA target sequence
atatacctgagatagattata

SEQ ID NO: 172009 - DNA, 21 bp, Artificial sequence
  SiRNA target sequence
tatacctgagatagattataa

SEQ ID NO: 172010 - DNA, 21 bp, Artificial sequence
  SiRNA target sequence
atacctgagatagattataaa

SEQ ID NO: 172011 - DNA, 21 bp, Artificial sequence
  SiRNA target sequence
tacctgagatagattataaat

SEQ ID NO: 172012 - DNA, 21 bp, Artificial sequence
  SiRNA target sequence
acctgagatagattataaata

SEQ ID NO: 172013 - DNA, 21 bp, Artificial sequence
  SiRNA target sequence
cctgagatagattataaatat

SEQ ID NO: 172014 - DNA, 21 bp, Artificial sequence
  SiRNA target sequence
ctgagatagattataaatata

SEQ ID NO: 172015 - DNA, 21 bp, Artificial sequence
  SiRNA target sequence
tgagatagattataaatataa

SEQ ID NO: 172016 - DNA, 21 bp, Artificial sequence
  SiRNA target sequence
gagatagattataaatataaa

SEQ ID NO: 172017 - DNA, 21 bp, Artificial sequence
  SiRNA target sequence
agatagattataaatataaaa

SEQ ID NO: 172018 - DNA, 21 bp, Artificial sequence
  SiRNA target sequence
gatagattataaatataaaaa

SEQ ID NO: 172019 - DNA, 21 bp, Artificial sequence
  SiRNA target sequence
atagattataaatataaaaat

SEQ ID NO: 172020 - DNA, 21 bp, Artificial sequence
  SiRNA target sequence
tagattataaatataaaaatg

SEQ ID NO: 172021 - DNA, 21 bp, Artificial sequence
  SiRNA target sequence
agattataaatataaaaatgg

SEQ ID NO: 172022 - DNA, 21 bp, Artificial sequence
  SiRNA target sequence
gattataaatataaaaatgga

SEQ ID NO: 172023 - DNA, 21 bp, Artificial sequence
  SiRNA target sequence
attataaatataaaaatggag

SEQ ID NO: 172024 - DNA, 21 bp, Artificial sequence
  SiRNA target sequence
ttataaatataaaaatggagt

SEQ ID NO: 172025 - DNA, 21 bp, Artificial sequence
  SiRNA target sequence
tataaatataaaaatggagtg

SEQ ID NO: 172026 - DNA, 21 bp, Artificial sequence
  SiRNA target sequence
ataaatataaaaatggagtgt

SEQ ID NO: 172027 - DNA, 21 bp, Artificial sequence
  SiRNA target sequence
taaatataaaaatggagtgtt

SEQ ID NO: 172028 - DNA, 21 bp, Artificial sequence
  SiRNA target sequence
aaatataaaaatggagtgttt

SEQ ID NO: 172029 - DNA, 21 bp, Artificial sequence
  SiRNA target sequence
aatataaaaatggagtgttta

SEQ ID NO: 172030 - DNA, 21 bp, Artificial sequence
  SiRNA target sequence
atataaaaatggagtgtttac

SEQ ID NO: 172031 - DNA, 21 bp, Artificial sequence
  SiRNA target sequence
tataaaaatggagtgtttaca

SEQ ID NO: 172032 - DNA, 21 bp, Artificial sequence
  SiRNA target sequence
ataaaaatggagtgtttacat

SEQ ID NO: 172033 - DNA, 21 bp, Artificial sequence
  SiRNA target sequence
taaaaatggagtgtttacata

SEQ ID NO: 172034 - DNA, 21 bp, Artificial sequence
  SiRNA target sequence
aaaaatggagtgtttacatat

SEQ ID NO: 172035 - DNA, 21 bp, Artificial sequence
  SiRNA target sequence
aaaatggagtgtttacatata

SEQ ID NO: 172036 - DNA, 21 bp, Artificial sequence
  SiRNA target sequence
aaatggagtgtttacatatac

SEQ ID NO: 172037 - DNA, 21 bp, Artificial sequence
  SiRNA target sequence
aatggagtgtttacatataca

SEQ ID NO: 172038 - DNA, 21 bp, Artificial sequence
  SiRNA target sequence
atggagtgtttacatatacac

SEQ ID NO: 172039 - DNA, 21 bp, Artificial sequence
  SiRNA target sequence
tggagtgtttacatatacaca

SEQ ID NO: 172040 - DNA, 21 bp, Artificial sequence
  SiRNA target sequence
ggagtgtttacatatacacag

SEQ ID NO: 172041 - DNA, 21 bp, Artificial sequence
  SiRNA target sequence
gagtgtttacatatacacaga

SEQ ID NO: 172042 - DNA, 21 bp, Artificial sequence
  SiRNA target sequence
agtgtttacatatacacagat

SEQ ID NO: 172043 - DNA, 21 bp, Artificial sequence
  SiRNA target sequence
gtgtttacatatacacagatc

SEQ ID NO: 172044 - DNA, 21 bp, Artificial sequence
  SiRNA target sequence
tgtttacatatacacagatca

SEQ ID NO: 172045 - DNA, 21 bp, Artificial sequence
  SiRNA target sequence
gtttacatatacacagatcaa

SEQ ID NO: 172046 - DNA, 21 bp, Artificial sequence
  SiRNA target sequence
tttacatatacacagatcaaa

SEQ ID NO: 172047 - DNA, 21 bp, Artificial sequence
  SiRNA target sequence
ttacatatacacagatcaaaa

SEQ ID NO: 172048 - DNA, 21 bp, Artificial sequence
  SiRNA target sequence
tacatatacacagatcaaaaa

SEQ ID NO: 172049 - DNA, 21 bp, Artificial sequence
  SiRNA target sequence
acatatacacagatcaaaaat

SEQ ID NO: 172050 - DNA, 21 bp, Artificial sequence
  SiRNA target sequence
catatacacagatcaaaaata

SEQ ID NO: 172051 - DNA, 21 bp, Artificial sequence
  SiRNA target sequence
atatacacagatcaaaaataa

SEQ ID NO: 172052 - DNA, 21 bp, Artificial sequence
  SiRNA target sequence
tatacacagatcaaaaataat

SEQ ID NO: 172053 - DNA, 21 bp, Artificial sequence
  SiRNA target sequence
atacacagatcaaaaataata

SEQ ID NO: 172054 - DNA, 21 bp, Artificial sequence
  SiRNA target sequence
tacacagatcaaaaataataa

SEQ ID NO: 172055 - DNA, 21 bp, Artificial sequence
  SiRNA target sequence
acacagatcaaaaataataag

SEQ ID NO: 172056 - DNA, 21 bp, Artificial sequence
  SiRNA target sequence
cacagatcaaaaataataaga

SEQ ID NO: 172057 - DNA, 21 bp, Artificial sequence
  SiRNA target sequence
acagatcaaaaataataagaa

SEQ ID NO: 172058 - DNA, 21 bp, Artificial sequence
  SiRNA target sequence
cagatcaaaaataataagaaa

SEQ ID NO: 172059 - DNA, 21 bp, Artificial sequence
  SiRNA target sequence
agatcaaaaataataagaaaa

SEQ ID NO: 172060 - DNA, 21 bp, Artificial sequence
  SiRNA target sequence
gatcaaaaataataagaaaaa

SEQ ID NO: 172061 - DNA, 21 bp, Artificial sequence
  SiRNA target sequence
atcaaaaataataagaaaaaa

SEQ ID NO: 172062 - DNA, 21 bp, Artificial sequence
  SiRNA target sequence
tcaaaaataataagaaaaaaa

SEQ ID NO: 172063 - DNA, 21 bp, Artificial sequence
  SiRNA target sequence
caaaaataataagaaaaaaaa

SEQ ID NO: 172064 - DNA, 21 bp, Artificial sequence
  SiRNA target sequence
aaaaataataagaaaaaaaaa

SEQ ID NO: 172065 - DNA, 21 bp, Artificial sequence
  SiRNA target sequence
aaaataataagaaaaaaaaat

SEQ ID NO: 172066 - DNA, 21 bp, Artificial sequence
  SiRNA target sequence
aaataataagaaaaaaaaata

SEQ ID NO: 172067 - DNA, 21 bp, Artificial sequence
  SiRNA target sequence
aataataagaaaaaaaaatat

SEQ ID NO: 172068 - DNA, 21 bp, Artificial sequence
  SiRNA target sequence
ataataagaaaaaaaaatatt

SEQ ID NO: 172069 - DNA, 21 bp, Artificial sequence
  SiRNA target sequence
taataagaaaaaaaaatattt

SEQ ID NO: 172070 - DNA, 21 bp, Artificial sequence
  SiRNA target sequence
aataagaaaaaaaaatattta

SEQ ID NO: 172071 - DNA, 21 bp, Artificial sequence
  SiRNA target sequence
ataagaaaaaaaaatatttaa

SEQ ID NO: 172072 - DNA, 21 bp, Artificial sequence
  SiRNA target sequence
taagaaaaaaaaatatttaag

SEQ ID NO: 172073 - DNA, 21 bp, Artificial sequence
  SiRNA target sequence
aagaaaaaaaaatatttaaga

SEQ ID NO: 172074 - DNA, 21 bp, Artificial sequence
  SiRNA target sequence
agaaaaaaaaatatttaagaa

SEQ ID NO: 172075 - DNA, 21 bp, Artificial sequence
  SiRNA target sequence
gaaaaaaaaatatttaagaat

SEQ ID NO: 172076 - DNA, 21 bp, Artificial sequence
  SiRNA target sequence
aaaaaaaaatatttaagaata

SEQ ID NO: 172077 - DNA, 21 bp, Artificial sequence
  SiRNA target sequence
aaaaaaaatatttaagaatat

SEQ ID NO: 172078 - DNA, 21 bp, Artificial sequence
  SiRNA target sequence
aaaaaaatatttaagaatatt

SEQ ID NO: 172079 - DNA, 21 bp, Artificial sequence
  SiRNA target sequence
aaaaaatatttaagaatattg

SEQ ID NO: 172080 - DNA, 21 bp, Artificial sequence
  SiRNA target sequence
aaaaatatttaagaatattgg

SEQ ID NO: 172081 - DNA, 21 bp, Artificial sequence
  SiRNA target sequence
aaaatatttaagaatattggg

SEQ ID NO: 172082 - DNA, 21 bp, Artificial sequence
  SiRNA target sequence
aaatatttaagaatattgggt

SEQ ID NO: 172083 - DNA, 21 bp, Artificial sequence
  SiRNA target sequence
aatatttaagaatattgggtc

SEQ ID NO: 172084 - DNA, 21 bp, Artificial sequence
  SiRNA target sequence
atatttaagaatattgggtct

SEQ ID NO: 172085 - DNA, 21 bp, Artificial sequence
  SiRNA target sequence
tatttaagaatattgggtcta

SEQ ID NO: 172086 - DNA, 21 bp, Artificial sequence
  SiRNA target sequence
atttaagaatattgggtctag

SEQ ID NO: 172087 - DNA, 21 bp, Artificial sequence
  SiRNA target sequence
tttaagaatattgggtctaga

SEQ ID NO: 172088 - DNA, 21 bp, Artificial sequence
  SiRNA target sequence
ttaagaatattgggtctagaa

SEQ ID NO: 172089 - DNA, 21 bp, Artificial sequence
  SiRNA target sequence
taagaatattgggtctagaac

SEQ ID NO: 172090 - DNA, 21 bp, Artificial sequence
  SiRNA target sequence
aagaatattgggtctagaacc

SEQ ID NO: 172091 - DNA, 21 bp, Artificial sequence
  SiRNA target sequence
agaatattgggtctagaacct

SEQ ID NO: 172092 - DNA, 21 bp, Artificial sequence
  SiRNA target sequence
gaatattgggtctagaacctt

SEQ ID NO: 172093 - DNA, 21 bp, Artificial sequence
  SiRNA target sequence
aatattgggtctagaaccttt

SEQ ID NO: 172094 - DNA, 21 bp, Artificial sequence
  SiRNA target sequence
atattgggtctagaacctttt

SEQ ID NO: 172095 - DNA, 21 bp, Artificial sequence
  SiRNA target sequence
tattgggtctagaaccttttc

SEQ ID NO: 172096 - DNA, 21 bp, Artificial sequence
  SiRNA target sequence
attgggtctagaaccttttct

SEQ ID NO: 172097 - DNA, 21 bp, Artificial sequence
  SiRNA target sequence
ttgggtctagaaccttttctt

SEQ ID NO: 172098 - DNA, 21 bp, Artificial sequence
  SiRNA target sequence
tgggtctagaaccttttctta

SEQ ID NO: 172099 - DNA, 21 bp, Artificial sequence
  SiRNA target sequence
gggtctagaaccttttcttaa

SEQ ID NO: 172100 - DNA, 21 bp, Artificial sequence
  SiRNA target sequence
ggtctagaaccttttcttaat

SEQ ID NO: 172101 - DNA, 21 bp, Artificial sequence
  SiRNA target sequence
gtctagaaccttttcttaatt

SEQ ID NO: 172102 - DNA, 21 bp, Artificial sequence
  SiRNA target sequence
tctagaaccttttcttaattt

SEQ ID NO: 172103 - DNA, 21 bp, Artificial sequence
  SiRNA target sequence
ctagaaccttttcttaatttt

SEQ ID NO: 172104 - DNA, 21 bp, Artificial sequence
  SiRNA target sequence
tagaaccttttcttaatttta

SEQ ID NO: 172105 - DNA, 21 bp, Artificial sequence
  SiRNA target sequence
agaaccttttcttaattttat

SEQ ID NO: 172106 - DNA, 21 bp, Artificial sequence
  SiRNA target sequence
gaaccttttcttaattttatt

SEQ ID NO: 172107 - DNA, 21 bp, Artificial sequence
  SiRNA target sequence
aaccttttcttaattttatta

SEQ ID NO: 172108 - DNA, 21 bp, Artificial sequence
  SiRNA target sequence
accttttcttaattttattaa

SEQ ID NO: 172109 - DNA, 21 bp, Artificial sequence
  SiRNA target sequence
ccttttcttaattttattaag

SEQ ID NO: 172110 - DNA, 21 bp, Artificial sequence
  SiRNA target sequence
cttttcttaattttattaagg

SEQ ID NO: 172111 - DNA, 21 bp, Artificial sequence
  SiRNA target sequence
ttttcttaattttattaagga

SEQ ID NO: 172112 - DNA, 21 bp, Artificial sequence
  SiRNA target sequence
tttcttaattttattaaggaa

SEQ ID NO: 172113 - DNA, 21 bp, Artificial sequence
  SiRNA target sequence
ttcttaattttattaaggaaa

SEQ ID NO: 172114 - DNA, 21 bp, Artificial sequence
  SiRNA target sequence
tcttaattttattaaggaaag

SEQ ID NO: 172115 - DNA, 21 bp, Artificial sequence
  SiRNA target sequence
cttaattttattaaggaaagt

SEQ ID NO: 172116 - DNA, 21 bp, Artificial sequence
  SiRNA target sequence
ttaattttattaaggaaagta

SEQ ID NO: 172117 - DNA, 21 bp, Artificial sequence
  SiRNA target sequence
taattttattaaggaaagtaa

SEQ ID NO: 172118 - DNA, 21 bp, Artificial sequence
  SiRNA target sequence
aattttattaaggaaagtaaa

SEQ ID NO: 172119 - DNA, 21 bp, Artificial sequence
  SiRNA target sequence
attttattaaggaaagtaaac

SEQ ID NO: 172120 - DNA, 21 bp, Artificial sequence
  SiRNA target sequence
ttttattaaggaaagtaaaca

SEQ ID NO: 172121 - DNA, 21 bp, Artificial sequence
  SiRNA target sequence
tttattaaggaaagtaaacat

SEQ ID NO: 172122 - DNA, 21 bp, Artificial sequence
  SiRNA target sequence
ttattaaggaaagtaaacata

SEQ ID NO: 172123 - DNA, 21 bp, Artificial sequence
  SiRNA target sequence
tattaaggaaagtaaacataa

SEQ ID NO: 172124 - DNA, 21 bp, Artificial sequence
  SiRNA target sequence
attaaggaaagtaaacataaa

SEQ ID NO: 172125 - DNA, 21 bp, Artificial sequence
  SiRNA target sequence
ttaaggaaagtaaacataaag

SEQ ID NO: 172126 - DNA, 21 bp, Artificial sequence
  SiRNA target sequence
taaggaaagtaaacataaaga

SEQ ID NO: 172127 - DNA, 21 bp, Artificial sequence
  SiRNA target sequence
aaggaaagtaaacataaagaa

SEQ ID NO: 172128 - DNA, 21 bp, Artificial sequence
  SiRNA target sequence
aggaaagtaaacataaagaat

SEQ ID NO: 172129 - DNA, 21 bp, Artificial sequence
  SiRNA target sequence
ggaaagtaaacataaagaatt

SEQ ID NO: 172130 - DNA, 21 bp, Artificial sequence
  SiRNA target sequence
gaaagtaaacataaagaatta

SEQ ID NO: 172131 - DNA, 21 bp, Artificial sequence
  SiRNA target sequence
aaagtaaacataaagaattag

SEQ ID NO: 172132 - DNA, 21 bp, Artificial sequence
  SiRNA target sequence
aagtaaacataaagaattaga

SEQ ID NO: 172133 - DNA, 21 bp, Artificial sequence
  SiRNA target sequence
agtaaacataaagaattagaa

SEQ ID NO: 172134 - DNA, 21 bp, Artificial sequence
  SiRNA target sequence
gtaaacataaagaattagaat

SEQ ID NO: 172135 - DNA, 21 bp, Artificial sequence
  SiRNA target sequence
taaacataaagaattagaata

SEQ ID NO: 172136 - DNA, 21 bp, Artificial sequence
  SiRNA target sequence
aaacataaagaattagaatat

SEQ ID NO: 172137 - DNA, 21 bp, Artificial sequence
  SiRNA target sequence
aacataaagaattagaatatg

SEQ ID NO: 172138 - DNA, 21 bp, Artificial sequence
  SiRNA target sequence
acataaagaattagaatatga

SEQ ID NO: 172139 - DNA, 21 bp, Artificial sequence
  SiRNA target sequence
cataaagaattagaatatgat

SEQ ID NO: 172140 - DNA, 21 bp, Artificial sequence
  SiRNA target sequence
ataaagaattagaatatgatg

SEQ ID NO: 172141 - DNA, 21 bp, Artificial sequence
  SiRNA target sequence
taaagaattagaatatgatgt

SEQ ID NO: 172142 - DNA, 21 bp, Artificial sequence
  SiRNA target sequence
aaagaattagaatatgatgta

SEQ ID NO: 172143 - DNA, 21 bp, Artificial sequence
  SiRNA target sequence
aagaattagaatatgatgtat

SEQ ID NO: 172144 - DNA, 21 bp, Artificial sequence
  SiRNA target sequence
agaattagaatatgatgtatg

SEQ ID NO: 172145 - DNA, 21 bp, Artificial sequence
  SiRNA target sequence
gaattagaatatgatgtatgc

SEQ ID NO: 172146 - DNA, 21 bp, Artificial sequence
  SiRNA target sequence
aattagaatatgatgtatgcg

SEQ ID NO: 172147 - DNA, 21 bp, Artificial sequence
  SiRNA target sequence
attagaatatgatgtatgcga

SEQ ID NO: 172148 - DNA, 21 bp, Artificial sequence
  SiRNA target sequence
ttagaatatgatgtatgcgaa

SEQ ID NO: 172149 - DNA, 21 bp, Artificial sequence
  SiRNA target sequence
tagaatatgatgtatgcgaaa

SEQ ID NO: 172150 - DNA, 21 bp, Artificial sequence
  SiRNA target sequence
agaatatgatgtatgcgaaat

SEQ ID NO: 172151 - DNA, 21 bp, Artificial sequence
  SiRNA target sequence
gaatatgatgtatgcgaaata

SEQ ID NO: 172152 - DNA, 21 bp, Artificial sequence
  SiRNA target sequence
aatatgatgtatgcgaaatat

SEQ ID NO: 172153 - DNA, 21 bp, Artificial sequence
  SiRNA target sequence
atatgatgtatgcgaaatata

SEQ ID NO: 172154 - DNA, 21 bp, Artificial sequence
  SiRNA target sequence
tatgatgtatgcgaaatatac

SEQ ID NO: 172155 - DNA, 21 bp, Artificial sequence
  SiRNA target sequence
atgatgtatgcgaaatataca

SEQ ID NO: 172156 - DNA, 21 bp, Artificial sequence
  SiRNA target sequence
tgatgtatgcgaaatatacat

SEQ ID NO: 172157 - DNA, 21 bp, Artificial sequence
  SiRNA target sequence
gatgtatgcgaaatatacatt

SEQ ID NO: 172158 - DNA, 21 bp, Artificial sequence
  SiRNA target sequence
atgtatgcgaaatatacattt

SEQ ID NO: 172159 - DNA, 21 bp, Artificial sequence
  SiRNA target sequence
tgtatgcgaaatatacatttg

SEQ ID NO: 172160 - DNA, 21 bp, Artificial sequence
  SiRNA target sequence
gtatgcgaaatatacatttgt

SEQ ID NO: 172161 - DNA, 21 bp, Artificial sequence
  SiRNA target sequence
tatgcgaaatatacatttgta

SEQ ID NO: 172162 - DNA, 21 bp, Artificial sequence
  SiRNA target sequence
atgcgaaatatacatttgtaa

SEQ ID NO: 172163 - DNA, 21 bp, Artificial sequence
  SiRNA target sequence
tgcgaaatatacatttgtaat

SEQ ID NO: 172164 - DNA, 21 bp, Artificial sequence
  SiRNA target sequence
gcgaaatatacatttgtaatc

SEQ ID NO: 172165 - DNA, 21 bp, Artificial sequence
  SiRNA target sequence
cgaaatatacatttgtaatca

SEQ ID NO: 172166 - DNA, 21 bp, Artificial sequence
  SiRNA target sequence
gaaatatacatttgtaatcag

SEQ ID NO: 172167 - DNA, 21 bp, Artificial sequence
  SiRNA target sequence
aaatatacatttgtaatcagg

SEQ ID NO: 172168 - DNA, 21 bp, Artificial sequence
  SiRNA target sequence
aatatacatttgtaatcaggg

SEQ ID NO: 172169 - DNA, 21 bp, Artificial sequence
  SiRNA target sequence
atatacatttgtaatcaggga

SEQ ID NO: 172170 - DNA, 21 bp, Artificial sequence
  SiRNA target sequence
tatacatttgtaatcagggat

SEQ ID NO: 172171 - DNA, 21 bp, Artificial sequence
  SiRNA target sequence
atacatttgtaatcagggatg

SEQ ID NO: 172172 - DNA, 21 bp, Artificial sequence
  SiRNA target sequence
tacatttgtaatcagggatgc

SEQ ID NO: 172173 - DNA, 21 bp, Artificial sequence
  SiRNA target sequence
acatttgtaatcagggatgca

SEQ ID NO: 172174 - DNA, 21 bp, Artificial sequence
  SiRNA target sequence
catttgtaatcagggatgcat

SEQ ID NO: 172175 - DNA, 21 bp, Artificial sequence
  SiRNA target sequence
atttgtaatcagggatgcatt

SEQ ID NO: 172176 - DNA, 21 bp, Artificial sequence
  SiRNA target sequence
tttgtaatcagggatgcatta

SEQ ID NO: 172177 - DNA, 21 bp, Artificial sequence
  SiRNA target sequence
ttgtaatcagggatgcattaa

SEQ ID NO: 172178 - DNA, 21 bp, Artificial sequence
  SiRNA target sequence
tgtaatcagggatgcattaat

SEQ ID NO: 172179 - DNA, 21 bp, Artificial sequence
  SiRNA target sequence
gtaatcagggatgcattaatg

SEQ ID NO: 172180 - DNA, 21 bp, Artificial sequence
  SiRNA target sequence
taatcagggatgcattaatgg

SEQ ID NO: 172181 - DNA, 21 bp, Artificial sequence
  SiRNA target sequence
aatcagggatgcattaatgga

SEQ ID NO: 172182 - DNA, 21 bp, Artificial sequence
  SiRNA target sequence
atcagggatgcattaatggac

SEQ ID NO: 172183 - DNA, 21 bp, Artificial sequence
  SiRNA target sequence
tcagggatgcattaatggacc

SEQ ID NO: 172184 - DNA, 21 bp, Artificial sequence
  SiRNA target sequence
cagggatgcattaatggacca

SEQ ID NO: 172185 - DNA, 21 bp, Artificial sequence
  SiRNA target sequence
agggatgcattaatggaccag

SEQ ID NO: 172186 - DNA, 21 bp, Artificial sequence
  SiRNA target sequence
gggatgcattaatggaccagg

SEQ ID NO: 172187 - DNA, 21 bp, Artificial sequence
  SiRNA target sequence
ggatgcattaatggaccagga

SEQ ID NO: 172188 - DNA, 21 bp, Artificial sequence
  SiRNA target sequence
gatgcattaatggaccaggac

SEQ ID NO: 172189 - DNA, 21 bp, Artificial sequence
  SiRNA target sequence
atgcattaatggaccaggaca

SEQ ID NO: 172190 - DNA, 21 bp, Artificial sequence
  SiRNA target sequence
tgcattaatggaccaggacaa

SEQ ID NO: 172191 - DNA, 21 bp, Artificial sequence
  SiRNA target sequence
gcattaatggaccaggacaat

SEQ ID NO: 172192 - DNA, 21 bp, Artificial sequence
  SiRNA target sequence
cattaatggaccaggacaatt

SEQ ID NO: 172193 - DNA, 21 bp, Artificial sequence
  SiRNA target sequence
attaatggaccaggacaattg

SEQ ID NO: 172194 - DNA, 21 bp, Artificial sequence
  SiRNA target sequence
ttaatggaccaggacaattgt

SEQ ID NO: 172195 - DNA, 21 bp, Artificial sequence
  SiRNA target sequence
taatggaccaggacaattgta

SEQ ID NO: 172196 - DNA, 21 bp, Artificial sequence
  SiRNA target sequence
aatggaccaggacaattgtat

SEQ ID NO: 172197 - DNA, 21 bp, Artificial sequence
  SiRNA target sequence
atggaccaggacaattgtata

SEQ ID NO: 172198 - DNA, 21 bp, Artificial sequence
  SiRNA target sequence
tggaccaggacaattgtatac

SEQ ID NO: 172199 - DNA, 21 bp, Artificial sequence
  SiRNA target sequence
ggaccaggacaattgtataca

SEQ ID NO: 172200 - DNA, 21 bp, Artificial sequence
  SiRNA target sequence
gaccaggacaattgtatacag

SEQ ID NO: 172201 - DNA, 21 bp, Artificial sequence
  SiRNA target sequence
accaggacaattgtatacaga

SEQ ID NO: 172202 - DNA, 21 bp, Artificial sequence
  SiRNA target sequence
ccaggacaattgtatacagat

SEQ ID NO: 172203 - DNA, 21 bp, Artificial sequence
  SiRNA target sequence
caggacaattgtatacagata

SEQ ID NO: 172204 - DNA, 21 bp, Artificial sequence
  SiRNA target sequence
aggacaattgtatacagataa

SEQ ID NO: 172205 - DNA, 21 bp, Artificial sequence
  SiRNA target sequence
ggacaattgtatacagataat

SEQ ID NO: 172206 - DNA, 21 bp, Artificial sequence
  SiRNA target sequence
gacaattgtatacagataatt

SEQ ID NO: 172207 - DNA, 21 bp, Artificial sequence
  SiRNA target sequence
acaattgtatacagataattt

SEQ ID NO: 172208 - DNA, 21 bp, Artificial sequence
  SiRNA target sequence
caattgtatacagataattta

SEQ ID NO: 172209 - DNA, 21 bp, Artificial sequence
  SiRNA target sequence
aattgtatacagataatttat

SEQ ID NO: 172210 - DNA, 21 bp, Artificial sequence
  SiRNA target sequence
attgtatacagataatttata

SEQ ID NO: 172211 - DNA, 21 bp, Artificial sequence
  SiRNA target sequence
ttgtatacagataatttatat

SEQ ID NO: 172212 - DNA, 21 bp, Artificial sequence
  SiRNA target sequence
tgtatacagataatttatatg

SEQ ID NO: 172213 - DNA, 21 bp, Artificial sequence
  SiRNA target sequence
gtatacagataatttatatgt

SEQ ID NO: 172214 - DNA, 21 bp, Artificial sequence
  SiRNA target sequence
tatacagataatttatatgta

SEQ ID NO: 172215 - DNA, 21 bp, Artificial sequence
  SiRNA target sequence
atacagataatttatatgtaa

SEQ ID NO: 172216 - DNA, 21 bp, Artificial sequence
  SiRNA target sequence
tacagataatttatatgtaaa

SEQ ID NO: 172217 - DNA, 21 bp, Artificial sequence
  SiRNA target sequence
acagataatttatatgtaaat

SEQ ID NO: 172218 - DNA, 21 bp, Artificial sequence
  SiRNA target sequence
cagataatttatatgtaaata

SEQ ID NO: 172219 - DNA, 21 bp, Artificial sequence
  SiRNA target sequence
agataatttatatgtaaataa

SEQ ID NO: 172220 - DNA, 21 bp, Artificial sequence
  SiRNA target sequence
gataatttatatgtaaataat

SEQ ID NO: 172221 - DNA, 21 bp, Artificial sequence
  SiRNA target sequence
ataatttatatgtaaataatt

SEQ ID NO: 172222 - DNA, 21 bp, Artificial sequence
  SiRNA target sequence
taatttatatgtaaataattc

SEQ ID NO: 172223 - DNA, 21 bp, Artificial sequence
  SiRNA target sequence
aatttatatgtaaataattca

SEQ ID NO: 172224 - DNA, 21 bp, Artificial sequence
  SiRNA target sequence
atttatatgtaaataattcag

SEQ ID NO: 172225 - DNA, 21 bp, Artificial sequence
  SiRNA target sequence
tttatatgtaaataattcaga

SEQ ID NO: 172226 - DNA, 21 bp, Artificial sequence
  SiRNA target sequence
ttatatgtaaataattcagaa

SEQ ID NO: 172227 - DNA, 21 bp, Artificial sequence
  SiRNA target sequence
tatatgtaaataattcagaat

SEQ ID NO: 172228 - DNA, 21 bp, Artificial sequence
  SiRNA target sequence
atatgtaaataattcagaata

SEQ ID NO: 172229 - DNA, 21 bp, Artificial sequence
  SiRNA target sequence
tatgtaaataattcagaatac

SEQ ID NO: 172230 - DNA, 21 bp, Artificial sequence
  SiRNA target sequence
atgtaaataattcagaataca

SEQ ID NO: 172231 - DNA, 21 bp, Artificial sequence
  SiRNA target sequence
tgtaaataattcagaatacat

SEQ ID NO: 172232 - DNA, 21 bp, Artificial sequence
  SiRNA target sequence
gtaaataattcagaatacata

SEQ ID NO: 172233 - DNA, 21 bp, Artificial sequence
  SiRNA target sequence
taaataattcagaatacatag

SEQ ID NO: 172234 - DNA, 21 bp, Artificial sequence
  SiRNA target sequence
aaataattcagaatacataga

SEQ ID NO: 172235 - DNA, 21 bp, Artificial sequence
  SiRNA target sequence
aataattcagaatacatagat

SEQ ID NO: 172236 - DNA, 21 bp, Artificial sequence
  SiRNA target sequence
ataattcagaatacatagata

SEQ ID NO: 172237 - DNA, 21 bp, Artificial sequence
  SiRNA target sequence
taattcagaatacatagatat

SEQ ID NO: 172238 - DNA, 21 bp, Artificial sequence
  SiRNA target sequence
aattcagaatacatagatatt

SEQ ID NO: 172239 - DNA, 21 bp, Artificial sequence
  SiRNA target sequence
attcagaatacatagatattg

SEQ ID NO: 172240 - DNA, 21 bp, Artificial sequence
  SiRNA target sequence
ttcagaatacatagatattga

SEQ ID NO: 172241 - DNA, 21 bp, Artificial sequence
  SiRNA target sequence
tcagaatacatagatattgat

SEQ ID NO: 172242 - DNA, 21 bp, Artificial sequence
  SiRNA target sequence
cagaatacatagatattgatc

SEQ ID NO: 172243 - DNA, 21 bp, Artificial sequence
  SiRNA target sequence
agaatacatagatattgatct

SEQ ID NO: 172244 - DNA, 21 bp, Artificial sequence
  SiRNA target sequence
gaatacatagatattgatctt

SEQ ID NO: 172245 - DNA, 21 bp, Artificial sequence
  SiRNA target sequence
aatacatagatattgatcttg

SEQ ID NO: 172246 - DNA, 21 bp, Artificial sequence
  SiRNA target sequence
atacatagatattgatcttgg

SEQ ID NO: 172247 - DNA, 21 bp, Artificial sequence
  SiRNA target sequence
tacatagatattgatcttggt

SEQ ID NO: 172248 - DNA, 21 bp, Artificial sequence
  SiRNA target sequence
acatagatattgatcttggta

SEQ ID NO: 172249 - DNA, 21 bp, Artificial sequence
  SiRNA target sequence
catagatattgatcttggtat

SEQ ID NO: 172250 - DNA, 21 bp, Artificial sequence
  SiRNA target sequence
atagatattgatcttggtatt

SEQ ID NO: 172251 - DNA, 21 bp, Artificial sequence
  SiRNA target sequence
tagatattgatcttggtattg

SEQ ID NO: 172252 - DNA, 21 bp, Artificial sequence
  SiRNA target sequence
agatattgatcttggtattga

SEQ ID NO: 172253 - DNA, 21 bp, Artificial sequence
  SiRNA target sequence
gatattgatcttggtattgat

SEQ ID NO: 172254 - DNA, 21 bp, Artificial sequence
  SiRNA target sequence
atattgatcttggtattgatt

SEQ ID NO: 172255 - DNA, 21 bp, Artificial sequence
  SiRNA target sequence
tattgatcttggtattgattg

SEQ ID NO: 172256 - DNA, 21 bp, Artificial sequence
  SiRNA target sequence
attgatcttggtattgattgt

SEQ ID NO: 172257 - DNA, 21 bp, Artificial sequence
  SiRNA target sequence
ttgatcttggtattgattgta

SEQ ID NO: 172258 - DNA, 21 bp, Artificial sequence
  SiRNA target sequence
tgatcttggtattgattgtaa

SEQ ID NO: 172259 - DNA, 21 bp, Artificial sequence
  SiRNA target sequence
gatcttggtattgattgtaaa

SEQ ID NO: 172260 - DNA, 21 bp, Artificial sequence
  SiRNA target sequence
atcttggtattgattgtaaac

SEQ ID NO: 172261 - DNA, 21 bp, Artificial sequence
  SiRNA target sequence
tcttggtattgattgtaaaca

SEQ ID NO: 172262 - DNA, 21 bp, Artificial sequence
  SiRNA target sequence
cttggtattgattgtaaacag

SEQ ID NO: 172263 - DNA, 21 bp, Artificial sequence
  SiRNA target sequence
ttggtattgattgtaaacagt

SEQ ID NO: 172264 - DNA, 21 bp, Artificial sequence
  SiRNA target sequence
tggtattgattgtaaacagtt

SEQ ID NO: 172265 - DNA, 21 bp, Artificial sequence
  SiRNA target sequence
ggtattgattgtaaacagtta

SEQ ID NO: 172266 - DNA, 21 bp, Artificial sequence
  SiRNA target sequence
gtattgattgtaaacagttac

SEQ ID NO: 172267 - DNA, 21 bp, Artificial sequence
  SiRNA target sequence
tattgattgtaaacagttaca

SEQ ID NO: 172268 - DNA, 21 bp, Artificial sequence
  SiRNA target sequence
attgattgtaaacagttacaa

SEQ ID NO: 172269 - DNA, 21 bp, Artificial sequence
  SiRNA target sequence
ttgattgtaaacagttacaaa

SEQ ID NO: 172270 - DNA, 21 bp, Artificial sequence
  SiRNA target sequence
tgattgtaaacagttacaaaa

SEQ ID NO: 172271 - DNA, 21 bp, Artificial sequence
  SiRNA target sequence
gattgtaaacagttacaaaaa

SEQ ID NO: 172272 - DNA, 21 bp, Artificial sequence
  SiRNA target sequence
attgtaaacagttacaaaaaa

SEQ ID NO: 172273 - DNA, 21 bp, Artificial sequence
  SiRNA target sequence
ttgtaaacagttacaaaaaag

SEQ ID NO: 172274 - DNA, 21 bp, Artificial sequence
  SiRNA target sequence
tgtaaacagttacaaaaaagg

SEQ ID NO: 172275 - DNA, 21 bp, Artificial sequence
  SiRNA target sequence
gtaaacagttacaaaaaagga

SEQ ID NO: 172276 - DNA, 21 bp, Artificial sequence
  SiRNA target sequence
taaacagttacaaaaaaggac

SEQ ID NO: 172277 - DNA, 21 bp, Artificial sequence
  SiRNA target sequence
aaacagttacaaaaaaggaca

SEQ ID NO: 172278 - DNA, 21 bp, Artificial sequence
  SiRNA target sequence
aacagttacaaaaaaggacat

SEQ ID NO: 172279 - DNA, 21 bp, Artificial sequence
  SiRNA target sequence
acagttacaaaaaaggacata

SEQ ID NO: 172280 - DNA, 21 bp, Artificial sequence
  SiRNA target sequence
cagttacaaaaaaggacatat

SEQ ID NO: 172281 - DNA, 21 bp, Artificial sequence
  SiRNA target sequence
agttacaaaaaaggacatata

SEQ ID NO: 172282 - DNA, 21 bp, Artificial sequence
  SiRNA target sequence
gttacaaaaaaggacatatag

SEQ ID NO: 172283 - DNA, 21 bp, Artificial sequence
  SiRNA target sequence
ttacaaaaaaggacatataga

SEQ ID NO: 172284 - DNA, 21 bp, Artificial sequence
  SiRNA target sequence
tacaaaaaaggacatatagaa

SEQ ID NO: 172285 - DNA, 21 bp, Artificial sequence
  SiRNA target sequence
acaaaaaaggacatatagaaa

SEQ ID NO: 172286 - DNA, 21 bp, Artificial sequence
  SiRNA target sequence
caaaaaaggacatatagaaaa

SEQ ID NO: 172287 - DNA, 21 bp, Artificial sequence
  SiRNA target sequence
aaaaaaggacatatagaaaaa

SEQ ID NO: 172288 - DNA, 21 bp, Artificial sequence
  SiRNA target sequence
aaaaaggacatatagaaaaat

SEQ ID NO: 172289 - DNA, 21 bp, Artificial sequence
  SiRNA target sequence
aaaaggacatatagaaaaata

SEQ ID NO: 172290 - DNA, 21 bp, Artificial sequence
  SiRNA target sequence
aaaggacatatagaaaaatag

SEQ ID NO: 172291 - DNA, 21 bp, Artificial sequence
  SiRNA target sequence
aaggacatatagaaaaataga

SEQ ID NO: 172292 - DNA, 21 bp, Artificial sequence
  SiRNA target sequence
aggacatatagaaaaatagaa

SEQ ID NO: 172293 - DNA, 21 bp, Artificial sequence
  SiRNA target sequence
ggacatatagaaaaatagaaa

SEQ ID NO: 172294 - DNA, 21 bp, Artificial sequence
  SiRNA target sequence
gacatatagaaaaatagaaac

SEQ ID NO: 172295 - DNA, 21 bp, Artificial sequence
  SiRNA target sequence
acatatagaaaaatagaaaca

SEQ ID NO: 172296 - DNA, 21 bp, Artificial sequence
  SiRNA target sequence
catatagaaaaatagaaacaa

SEQ ID NO: 172297 - DNA, 21 bp, Artificial sequence
  SiRNA target sequence
atatagaaaaatagaaacaaa

SEQ ID NO: 172298 - DNA, 21 bp, Artificial sequence
  SiRNA target sequence
tatagaaaaatagaaacaaag

SEQ ID NO: 172299 - DNA, 21 bp, Artificial sequence
  SiRNA target sequence
atagaaaaatagaaacaaaga

SEQ ID NO: 172300 - DNA, 21 bp, Artificial sequence
  SiRNA target sequence
tagaaaaatagaaacaaagaa

SEQ ID NO: 172301 - DNA, 21 bp, Artificial sequence
  SiRNA target sequence
agaaaaatagaaacaaagaaa

SEQ ID NO: 172302 - DNA, 21 bp, Artificial sequence
  SiRNA target sequence
gaaaaatagaaacaaagaaag

SEQ ID NO: 172303 - DNA, 21 bp, Artificial sequence
  SiRNA target sequence
aaaaatagaaacaaagaaagt

SEQ ID NO: 172304 - DNA, 21 bp, Artificial sequence
  SiRNA target sequence
aaaatagaaacaaagaaagtt

SEQ ID NO: 172305 - DNA, 21 bp, Artificial sequence
  SiRNA target sequence
aaatagaaacaaagaaagtta

SEQ ID NO: 172306 - DNA, 21 bp, Artificial sequence
  SiRNA target sequence
aatagaaacaaagaaagttaa

SEQ ID NO: 172307 - DNA, 21 bp, Artificial sequence
  SiRNA target sequence
atagaaacaaagaaagttaat

SEQ ID NO: 172308 - DNA, 21 bp, Artificial sequence
  SiRNA target sequence
tagaaacaaagaaagttaatt

SEQ ID NO: 172309 - DNA, 21 bp, Artificial sequence
  SiRNA target sequence
agaaacaaagaaagttaattt

SEQ ID NO: 172310 - DNA, 21 bp, Artificial sequence
  SiRNA target sequence
gaaacaaagaaagttaatttt

SEQ ID NO: 172311 - DNA, 21 bp, Artificial sequence
  SiRNA target sequence
aaacaaagaaagttaatttta

SEQ ID NO: 172312 - DNA, 21 bp, Artificial sequence
  SiRNA target sequence
aacaaagaaagttaattttaa

SEQ ID NO: 172313 - DNA, 21 bp, Artificial sequence
  SiRNA target sequence
acaaagaaagttaattttaaa

SEQ ID NO: 172314 - DNA, 21 bp, Artificial sequence
  SiRNA target sequence
caaagaaagttaattttaaaa

SEQ ID NO: 172315 - DNA, 21 bp, Artificial sequence
  SiRNA target sequence
aaagaaagttaattttaaaat

SEQ ID NO: 172316 - DNA, 21 bp, Artificial sequence
  SiRNA target sequence
aagaaagttaattttaaaata

SEQ ID NO: 172317 - DNA, 21 bp, Artificial sequence
  SiRNA target sequence
agaaagttaattttaaaatag

SEQ ID NO: 172318 - DNA, 21 bp, Artificial sequence
  SiRNA target sequence
gaaagttaattttaaaataga

SEQ ID NO: 172319 - DNA, 21 bp, Artificial sequence
  SiRNA target sequence
aaagttaattttaaaatagaa

SEQ ID NO: 172320 - DNA, 21 bp, Artificial sequence
  SiRNA target sequence
aagttaattttaaaatagaat

SEQ ID NO: 172321 - DNA, 21 bp, Artificial sequence
  SiRNA target sequence
agttaattttaaaatagaatg

SEQ ID NO: 172322 - DNA, 21 bp, Artificial sequence
  SiRNA target sequence
gttaattttaaaatagaatgg

SEQ ID NO: 172323 - DNA, 21 bp, Artificial sequence
  SiRNA target sequence
ttaattttaaaatagaatggt

SEQ ID NO: 172324 - DNA, 21 bp, Artificial sequence
  SiRNA target sequence
taattttaaaatagaatggta

SEQ ID NO: 172325 - DNA, 21 bp, Artificial sequence
  SiRNA target sequence
aattttaaaatagaatggtaa

SEQ ID NO: 172326 - DNA, 22 bp, Artificial sequence
  SiRNA target sequence
atgaatactgaaaataaaccat

SEQ ID NO: 172327 - DNA, 22 bp, Artificial sequence
  SiRNA target sequence
tgaatactgaaaataaaccatg

SEQ ID NO: 172328 - DNA, 22 bp, Artificial sequence
  SiRNA target sequence
gaatactgaaaataaaccatgt

SEQ ID NO: 172329 - DNA, 22 bp, Artificial sequence
  SiRNA target sequence
aatactgaaaataaaccatgta

SEQ ID NO: 172330 - DNA, 22 bp, Artificial sequence
  SiRNA target sequence
atactgaaaataaaccatgtat

SEQ ID NO: 172331 - DNA, 22 bp, Artificial sequence
  SiRNA target sequence
tactgaaaataaaccatgtatt

SEQ ID NO: 172332 - DNA, 22 bp, Artificial sequence
  SiRNA target sequence
actgaaaataaaccatgtattt

SEQ ID NO: 172333 - DNA, 22 bp, Artificial sequence
  SiRNA target sequence
ctgaaaataaaccatgtatttc

SEQ ID NO: 172334 - DNA, 22 bp, Artificial sequence
  SiRNA target sequence
tgaaaataaaccatgtatttca

SEQ ID NO: 172335 - DNA, 22 bp, Artificial sequence
  SiRNA target sequence
gaaaataaaccatgtatttcac

SEQ ID NO: 172336 - DNA, 22 bp, Artificial sequence
  SiRNA target sequence
aaaataaaccatgtatttcacc

SEQ ID NO: 172337 - DNA, 22 bp, Artificial sequence
  SiRNA target sequence
aaataaaccatgtatttcacca

SEQ ID NO: 172338 - DNA, 22 bp, Artificial sequence
  SiRNA target sequence
aataaaccatgtatttcaccat

SEQ ID NO: 172339 - DNA, 22 bp, Artificial sequence
  SiRNA target sequence
ataaaccatgtatttcaccatt

SEQ ID NO: 172340 - DNA, 22 bp, Artificial sequence
  SiRNA target sequence
taaaccatgtatttcaccattt

SEQ ID NO: 172341 - DNA, 22 bp, Artificial sequence
  SiRNA target sequence
aaaccatgtatttcaccattta

SEQ ID NO: 172342 - DNA, 22 bp, Artificial sequence
  SiRNA target sequence
aaccatgtatttcaccatttac

SEQ ID NO: 172343 - DNA, 22 bp, Artificial sequence
  SiRNA target sequence
accatgtatttcaccatttacc

SEQ ID NO: 172344 - DNA, 22 bp, Artificial sequence
  SiRNA target sequence
ccatgtatttcaccatttacct

SEQ ID NO: 172345 - DNA, 22 bp, Artificial sequence
  SiRNA target sequence
catgtatttcaccatttacctt

SEQ ID NO: 172346 - DNA, 22 bp, Artificial sequence
  SiRNA target sequence
atgtatttcaccatttaccttt

SEQ ID NO: 172347 - DNA, 22 bp, Artificial sequence
  SiRNA target sequence
tgtatttcaccatttaccttta

SEQ ID NO: 172348 - DNA, 22 bp, Artificial sequence
  SiRNA target sequence
gtatttcaccatttacctttaa

SEQ ID NO: 172349 - DNA, 22 bp, Artificial sequence
  SiRNA target sequence
tatttcaccatttacctttaaa

SEQ ID NO: 172350 - DNA, 22 bp, Artificial sequence
  SiRNA target sequence
atttcaccatttacctttaaac

SEQ ID NO: 172351 - DNA, 22 bp, Artificial sequence
  SiRNA target sequence
tttcaccatttacctttaaact

SEQ ID NO: 172352 - DNA, 22 bp, Artificial sequence
  SiRNA target sequence
ttcaccatttacctttaaacta

SEQ ID NO: 172353 - DNA, 22 bp, Artificial sequence
  SiRNA target sequence
tcaccatttacctttaaactag

SEQ ID NO: 172354 - DNA, 22 bp, Artificial sequence
  SiRNA target sequence
caccatttacctttaaactaga

SEQ ID NO: 172355 - DNA, 22 bp, Artificial sequence
  SiRNA target sequence
accatttacctttaaactagaa

SEQ ID NO: 172356 - DNA, 22 bp, Artificial sequence
  SiRNA target sequence
ccatttacctttaaactagaag

SEQ ID NO: 172357 - DNA, 22 bp, Artificial sequence
  SiRNA target sequence
catttacctttaaactagaaga

SEQ ID NO: 172358 - DNA, 22 bp, Artificial sequence
  SiRNA target sequence
atttacctttaaactagaagat

SEQ ID NO: 172359 - DNA, 22 bp, Artificial sequence
  SiRNA target sequence
tttacctttaaactagaagatt

SEQ ID NO: 172360 - DNA, 22 bp, Artificial sequence
  SiRNA target sequence
ttacctttaaactagaagattg

SEQ ID NO: 172361 - DNA, 22 bp, Artificial sequence
  SiRNA target sequence
tacctttaaactagaagattgc

SEQ ID NO: 172362 - DNA, 22 bp, Artificial sequence
  SiRNA target sequence
acctttaaactagaagattgcc

SEQ ID NO: 172363 - DNA, 22 bp, Artificial sequence
  SiRNA target sequence
cctttaaactagaagattgcct

SEQ ID NO: 172364 - DNA, 22 bp, Artificial sequence
  SiRNA target sequence
ctttaaactagaagattgcctg

SEQ ID NO: 172365 - DNA, 22 bp, Artificial sequence
  SiRNA target sequence
tttaaactagaagattgcctgg

SEQ ID NO: 172366 - DNA, 22 bp, Artificial sequence
  SiRNA target sequence
ttaaactagaagattgcctggc

SEQ ID NO: 172367 - DNA, 22 bp, Artificial sequence
  SiRNA target sequence
taaactagaagattgcctggca

SEQ ID NO: 172368 - DNA, 22 bp, Artificial sequence
  SiRNA target sequence
aaactagaagattgcctggcat

SEQ ID NO: 172369 - DNA, 22 bp, Artificial sequence
  SiRNA target sequence
aactagaagattgcctggcatg

SEQ ID NO: 172370 - DNA, 22 bp, Artificial sequence
  SiRNA target sequence
actagaagattgcctggcatgt

SEQ ID NO: 172371 - DNA, 22 bp, Artificial sequence
  SiRNA target sequence
ctagaagattgcctggcatgtt

SEQ ID NO: 172372 - DNA, 22 bp, Artificial sequence
  SiRNA target sequence
tagaagattgcctggcatgttc

SEQ ID NO: 172373 - DNA, 22 bp, Artificial sequence
  SiRNA target sequence
agaagattgcctggcatgttcg

SEQ ID NO: 172374 - DNA, 22 bp, Artificial sequence
  SiRNA target sequence
gaagattgcctggcatgttcgg

SEQ ID NO: 172375 - DNA, 22 bp, Artificial sequence
  SiRNA target sequence
aagattgcctggcatgttcggc

SEQ ID NO: 172376 - DNA, 22 bp, Artificial sequence
  SiRNA target sequence
agattgcctggcatgttcggct

SEQ ID NO: 172377 - DNA, 22 bp, Artificial sequence
  SiRNA target sequence
gattgcctggcatgttcggctt

SEQ ID NO: 172378 - DNA, 22 bp, Artificial sequence
  SiRNA target sequence
attgcctggcatgttcggcttg

SEQ ID NO: 172379 - DNA, 22 bp, Artificial sequence
  SiRNA target sequence
ttgcctggcatgttcggcttgt

SEQ ID NO: 172380 - DNA, 22 bp, Artificial sequence
  SiRNA target sequence
tgcctggcatgttcggcttgta

SEQ ID NO: 172381 - DNA, 22 bp, Artificial sequence
  SiRNA target sequence
gcctggcatgttcggcttgtat

SEQ ID NO: 172382 - DNA, 22 bp, Artificial sequence
  SiRNA target sequence
cctggcatgttcggcttgtatt

SEQ ID NO: 172383 - DNA, 22 bp, Artificial sequence
  SiRNA target sequence
ctggcatgttcggcttgtattg

SEQ ID NO: 172384 - DNA, 22 bp, Artificial sequence
  SiRNA target sequence
tggcatgttcggcttgtattgc

SEQ ID NO: 172385 - DNA, 22 bp, Artificial sequence
  SiRNA target sequence
ggcatgttcggcttgtattgct

SEQ ID NO: 172386 - DNA, 22 bp, Artificial sequence
  SiRNA target sequence
gcatgttcggcttgtattgctg

SEQ ID NO: 172387 - DNA, 22 bp, Artificial sequence
  SiRNA target sequence
catgttcggcttgtattgctga

SEQ ID NO: 172388 - DNA, 22 bp, Artificial sequence
  SiRNA target sequence
atgttcggcttgtattgctgat

SEQ ID NO: 172389 - DNA, 22 bp, Artificial sequence
  SiRNA target sequence
tgttcggcttgtattgctgatt

SEQ ID NO: 172390 - DNA, 22 bp, Artificial sequence
  SiRNA target sequence
gttcggcttgtattgctgattt

SEQ ID NO: 172391 - DNA, 22 bp, Artificial sequence
  SiRNA target sequence
ttcggcttgtattgctgatttt

SEQ ID NO: 172392 - DNA, 22 bp, Artificial sequence
  SiRNA target sequence
tcggcttgtattgctgattttt

SEQ ID NO: 172393 - DNA, 22 bp, Artificial sequence
  SiRNA target sequence
cggcttgtattgctgatttttc

SEQ ID NO: 172394 - DNA, 22 bp, Artificial sequence
  SiRNA target sequence
ggcttgtattgctgatttttct

SEQ ID NO: 172395 - DNA, 22 bp, Artificial sequence
  SiRNA target sequence
gcttgtattgctgatttttctg

SEQ ID NO: 172396 - DNA, 22 bp, Artificial sequence
  SiRNA target sequence
cttgtattgctgatttttctgt

SEQ ID NO: 172397 - DNA, 22 bp, Artificial sequence
  SiRNA target sequence
ttgtattgctgatttttctgtt

SEQ ID NO: 172398 - DNA, 22 bp, Artificial sequence
  SiRNA target sequence
tgtattgctgatttttctgttc

SEQ ID NO: 172399 - DNA, 22 bp, Artificial sequence
  SiRNA target sequence
gtattgctgatttttctgttcc

SEQ ID NO: 172400 - DNA, 22 bp, Artificial sequence
  SiRNA target sequence
tattgctgatttttctgttcca

SEQ ID NO: 172401 - DNA, 22 bp, Artificial sequence
  SiRNA target sequence
attgctgatttttctgttccaa

SEQ ID NO: 172402 - DNA, 22 bp, Artificial sequence
  SiRNA target sequence
ttgctgatttttctgttccaaa

SEQ ID NO: 172403 - DNA, 22 bp, Artificial sequence
  SiRNA target sequence
tgctgatttttctgttccaaaa

SEQ ID NO: 172404 - DNA, 22 bp, Artificial sequence
  SiRNA target sequence
gctgatttttctgttccaaaaa

SEQ ID NO: 172405 - DNA, 22 bp, Artificial sequence
  SiRNA target sequence
ctgatttttctgttccaaaaat

SEQ ID NO: 172406 - DNA, 22 bp, Artificial sequence
  SiRNA target sequence
tgatttttctgttccaaaaatt

SEQ ID NO: 172407 - DNA, 22 bp, Artificial sequence
  SiRNA target sequence
gatttttctgttccaaaaattc

SEQ ID NO: 172408 - DNA, 22 bp, Artificial sequence
  SiRNA target sequence
atttttctgttccaaaaattcc

SEQ ID NO: 172409 - DNA, 22 bp, Artificial sequence
  SiRNA target sequence
tttttctgttccaaaaattcct

SEQ ID NO: 172410 - DNA, 22 bp, Artificial sequence
  SiRNA target sequence
ttttctgttccaaaaattccta

SEQ ID NO: 172411 - DNA, 22 bp, Artificial sequence
  SiRNA target sequence
tttctgttccaaaaattcctac

SEQ ID NO: 172412 - DNA, 22 bp, Artificial sequence
  SiRNA target sequence
ttctgttccaaaaattcctact

SEQ ID NO: 172413 - DNA, 22 bp, Artificial sequence
  SiRNA target sequence
tctgttccaaaaattcctactt

SEQ ID NO: 172414 - DNA, 22 bp, Artificial sequence
  SiRNA target sequence
ctgttccaaaaattcctactta

SEQ ID NO: 172415 - DNA, 22 bp, Artificial sequence
  SiRNA target sequence
tgttccaaaaattcctacttac

SEQ ID NO: 172416 - DNA, 22 bp, Artificial sequence
  SiRNA target sequence
gttccaaaaattcctacttaca

SEQ ID NO: 172417 - DNA, 22 bp, Artificial sequence
  SiRNA target sequence
ttccaaaaattcctacttacac

SEQ ID NO: 172418 - DNA, 22 bp, Artificial sequence
  SiRNA target sequence
tccaaaaattcctacttacaca

SEQ ID NO: 172419 - DNA, 22 bp, Artificial sequence
  SiRNA target sequence
ccaaaaattcctacttacacag

SEQ ID NO: 172420 - DNA, 22 bp, Artificial sequence
  SiRNA target sequence
caaaaattcctacttacacaga

SEQ ID NO: 172421 - DNA, 22 bp, Artificial sequence
  SiRNA target sequence
aaaaattcctacttacacagaa

SEQ ID NO: 172422 - DNA, 22 bp, Artificial sequence
  SiRNA target sequence
aaaattcctacttacacagaac

SEQ ID NO: 172423 - DNA, 22 bp, Artificial sequence
  SiRNA target sequence
aaattcctacttacacagaact

SEQ ID NO: 172424 - DNA, 22 bp, Artificial sequence
  SiRNA target sequence
aattcctacttacacagaactg

SEQ ID NO: 172425 - DNA, 22 bp, Artificial sequence
  SiRNA target sequence
attcctacttacacagaactga

SEQ ID NO: 172426 - DNA, 22 bp, Artificial sequence
  SiRNA target sequence
ttcctacttacacagaactgaa

SEQ ID NO: 172427 - DNA, 22 bp, Artificial sequence
  SiRNA target sequence
tcctacttacacagaactgaaa

SEQ ID NO: 172428 - DNA, 22 bp, Artificial sequence
  SiRNA target sequence
cctacttacacagaactgaaag

SEQ ID NO: 172429 - DNA, 22 bp, Artificial sequence
  SiRNA target sequence
ctacttacacagaactgaaaga

SEQ ID NO: 172430 - DNA, 22 bp, Artificial sequence
  SiRNA target sequence
tacttacacagaactgaaagat

SEQ ID NO: 172431 - DNA, 22 bp, Artificial sequence
  SiRNA target sequence
acttacacagaactgaaagatg

SEQ ID NO: 172432 - DNA, 22 bp, Artificial sequence
  SiRNA target sequence
cttacacagaactgaaagatgt

SEQ ID NO: 172433 - DNA, 22 bp, Artificial sequence
  SiRNA target sequence
ttacacagaactgaaagatgtc

SEQ ID NO: 172434 - DNA, 22 bp, Artificial sequence
  SiRNA target sequence
tacacagaactgaaagatgtcc

SEQ ID NO: 172435 - DNA, 22 bp, Artificial sequence
  SiRNA target sequence
acacagaactgaaagatgtccc

SEQ ID NO: 172436 - DNA, 22 bp, Artificial sequence
  SiRNA target sequence
cacagaactgaaagatgtccct

SEQ ID NO: 172437 - DNA, 22 bp, Artificial sequence
  SiRNA target sequence
acagaactgaaagatgtccctt

SEQ ID NO: 172438 - DNA, 22 bp, Artificial sequence
  SiRNA target sequence
cagaactgaaagatgtcccttt

SEQ ID NO: 172439 - DNA, 22 bp, Artificial sequence
  SiRNA target sequence
agaactgaaagatgtcccttta

SEQ ID NO: 172440 - DNA, 22 bp, Artificial sequence
  SiRNA target sequence
gaactgaaagatgtccctttaa

SEQ ID NO: 172441 - DNA, 22 bp, Artificial sequence
  SiRNA target sequence
aactgaaagatgtccctttaac

SEQ ID NO: 172442 - DNA, 22 bp, Artificial sequence
  SiRNA target sequence
actgaaagatgtccctttaaca

SEQ ID NO: 172443 - DNA, 22 bp, Artificial sequence
  SiRNA target sequence
ctgaaagatgtccctttaacat

SEQ ID NO: 172444 - DNA, 22 bp, Artificial sequence
  SiRNA target sequence
tgaaagatgtccctttaacatt

SEQ ID NO: 172445 - DNA, 22 bp, Artificial sequence
  SiRNA target sequence
gaaagatgtccctttaacattt

SEQ ID NO: 172446 - DNA, 22 bp, Artificial sequence
  SiRNA target sequence
aaagatgtccctttaacatttt

SEQ ID NO: 172447 - DNA, 22 bp, Artificial sequence
  SiRNA target sequence
aagatgtccctttaacattttt

SEQ ID NO: 172448 - DNA, 22 bp, Artificial sequence
  SiRNA target sequence
agatgtccctttaacattttta

SEQ ID NO: 172449 - DNA, 22 bp, Artificial sequence
  SiRNA target sequence
gatgtccctttaacatttttat

SEQ ID NO: 172450 - DNA, 22 bp, Artificial sequence
  SiRNA target sequence
atgtccctttaacatttttatt

SEQ ID NO: 172451 - DNA, 22 bp, Artificial sequence
  SiRNA target sequence
tgtccctttaacatttttatta

SEQ ID NO: 172452 - DNA, 22 bp, Artificial sequence
  SiRNA target sequence
gtccctttaacatttttattat

SEQ ID NO: 172453 - DNA, 22 bp, Artificial sequence
  SiRNA target sequence
tccctttaacatttttattatc

SEQ ID NO: 172454 - DNA, 22 bp, Artificial sequence
  SiRNA target sequence
ccctttaacatttttattatca

SEQ ID NO: 172455 - DNA, 22 bp, Artificial sequence
  SiRNA target sequence
cctttaacatttttattatcac

SEQ ID NO: 172456 - DNA, 22 bp, Artificial sequence
  SiRNA target sequence
ctttaacatttttattatcacc

SEQ ID NO: 172457 - DNA, 22 bp, Artificial sequence
  SiRNA target sequence
tttaacatttttattatcacca

SEQ ID NO: 172458 - DNA, 22 bp, Artificial sequence
  SiRNA target sequence
ttaacatttttattatcaccac

SEQ ID NO: 172459 - DNA, 22 bp, Artificial sequence
  SiRNA target sequence
taacatttttattatcaccaca

SEQ ID NO: 172460 - DNA, 22 bp, Artificial sequence
  SiRNA target sequence
aacatttttattatcaccacat

SEQ ID NO: 172461 - DNA, 22 bp, Artificial sequence
  SiRNA target sequence
acatttttattatcaccacatt

SEQ ID NO: 172462 - DNA, 22 bp, Artificial sequence
  SiRNA target sequence
catttttattatcaccacattc

SEQ ID NO: 172463 - DNA, 22 bp, Artificial sequence
  SiRNA target sequence
atttttattatcaccacattcg

SEQ ID NO: 172464 - DNA, 22 bp, Artificial sequence
  SiRNA target sequence
tttttattatcaccacattcga

SEQ ID NO: 172465 - DNA, 22 bp, Artificial sequence
  SiRNA target sequence
ttttattatcaccacattcgaa

SEQ ID NO: 172466 - DNA, 22 bp, Artificial sequence
  SiRNA target sequence
tttattatcaccacattcgaaa

SEQ ID NO: 172467 - DNA, 22 bp, Artificial sequence
  SiRNA target sequence
ttattatcaccacattcgaaaa

SEQ ID NO: 172468 - DNA, 22 bp, Artificial sequence
  SiRNA target sequence
tattatcaccacattcgaaaat

SEQ ID NO: 172469 - DNA, 22 bp, Artificial sequence
  SiRNA target sequence
attatcaccacattcgaaaatg

SEQ ID NO: 172470 - DNA, 22 bp, Artificial sequence
  SiRNA target sequence
ttatcaccacattcgaaaatga

SEQ ID NO: 172471 - DNA, 22 bp, Artificial sequence
  SiRNA target sequence
tatcaccacattcgaaaatgaa

SEQ ID NO: 172472 - DNA, 22 bp, Artificial sequence
  SiRNA target sequence
atcaccacattcgaaaatgaat

SEQ ID NO: 172473 - DNA, 22 bp, Artificial sequence
  SiRNA target sequence
tcaccacattcgaaaatgaata

SEQ ID NO: 172474 - DNA, 22 bp, Artificial sequence
  SiRNA target sequence
caccacattcgaaaatgaatat

SEQ ID NO: 172475 - DNA, 22 bp, Artificial sequence
  SiRNA target sequence
accacattcgaaaatgaatatg

SEQ ID NO: 172476 - DNA, 22 bp, Artificial sequence
  SiRNA target sequence
ccacattcgaaaatgaatatgt

SEQ ID NO: 172477 - DNA, 22 bp, Artificial sequence
  SiRNA target sequence
cacattcgaaaatgaatatgta

SEQ ID NO: 172478 - DNA, 22 bp, Artificial sequence
  SiRNA target sequence
acattcgaaaatgaatatgtat

SEQ ID NO: 172479 - DNA, 22 bp, Artificial sequence
  SiRNA target sequence
cattcgaaaatgaatatgtatg

SEQ ID NO: 172480 - DNA, 22 bp, Artificial sequence
  SiRNA target sequence
attcgaaaatgaatatgtatgc

SEQ ID NO: 172481 - DNA, 22 bp, Artificial sequence
  SiRNA target sequence
ttcgaaaatgaatatgtatgca

SEQ ID NO: 172482 - DNA, 22 bp, Artificial sequence
  SiRNA target sequence
tcgaaaatgaatatgtatgcac

SEQ ID NO: 172483 - DNA, 22 bp, Artificial sequence
  SiRNA target sequence
cgaaaatgaatatgtatgcaca

SEQ ID NO: 172484 - DNA, 22 bp, Artificial sequence
  SiRNA target sequence
gaaaatgaatatgtatgcacac

SEQ ID NO: 172485 - DNA, 22 bp, Artificial sequence
  SiRNA target sequence
aaaatgaatatgtatgcacact

SEQ ID NO: 172486 - DNA, 22 bp, Artificial sequence
  SiRNA target sequence
aaatgaatatgtatgcacacta

SEQ ID NO: 172487 - DNA, 22 bp, Artificial sequence
  SiRNA target sequence
aatgaatatgtatgcacactat

SEQ ID NO: 172488 - DNA, 22 bp, Artificial sequence
  SiRNA target sequence
atgaatatgtatgcacactata

SEQ ID NO: 172489 - DNA, 22 bp, Artificial sequence
  SiRNA target sequence
tgaatatgtatgcacactataa

SEQ ID NO: 172490 - DNA, 22 bp, Artificial sequence
  SiRNA target sequence
gaatatgtatgcacactataac

SEQ ID NO: 172491 - DNA, 22 bp, Artificial sequence
  SiRNA target sequence
aatatgtatgcacactataaca

SEQ ID NO: 172492 - DNA, 22 bp, Artificial sequence
  SiRNA target sequence
atatgtatgcacactataacaa

SEQ ID NO: 172493 - DNA, 22 bp, Artificial sequence
  SiRNA target sequence
tatgtatgcacactataacaat

SEQ ID NO: 172494 - DNA, 22 bp, Artificial sequence
  SiRNA target sequence
atgtatgcacactataacaatc

SEQ ID NO: 172495 - DNA, 22 bp, Artificial sequence
  SiRNA target sequence
tgtatgcacactataacaatca

SEQ ID NO: 172496 - DNA, 22 bp, Artificial sequence
  SiRNA target sequence
gtatgcacactataacaatcat

SEQ ID NO: 172497 - DNA, 22 bp, Artificial sequence
  SiRNA target sequence
tatgcacactataacaatcata

SEQ ID NO: 172498 - DNA, 22 bp, Artificial sequence
  SiRNA target sequence
atgcacactataacaatcatat

SEQ ID NO: 172499 - DNA, 22 bp, Artificial sequence
  SiRNA target sequence
tgcacactataacaatcatata

SEQ ID NO: 172500 - DNA, 22 bp, Artificial sequence
  SiRNA target sequence
gcacactataacaatcatataa

SEQ ID NO: 172501 - DNA, 22 bp, Artificial sequence
  SiRNA target sequence
cacactataacaatcatataat

SEQ ID NO: 172502 - DNA, 22 bp, Artificial sequence
  SiRNA target sequence
acactataacaatcatataatg

SEQ ID NO: 172503 - DNA, 22 bp, Artificial sequence
  SiRNA target sequence
cactataacaatcatataatgt

SEQ ID NO: 172504 - DNA, 22 bp, Artificial sequence
  SiRNA target sequence
actataacaatcatataatgtc

SEQ ID NO: 172505 - DNA, 22 bp, Artificial sequence
  SiRNA target sequence
ctataacaatcatataatgtcc

SEQ ID NO: 172506 - DNA, 22 bp, Artificial sequence
  SiRNA target sequence
tataacaatcatataatgtcct

SEQ ID NO: 172507 - DNA, 22 bp, Artificial sequence
  SiRNA target sequence
ataacaatcatataatgtcctt

SEQ ID NO: 172508 - DNA, 22 bp, Artificial sequence
  SiRNA target sequence
taacaatcatataatgtccttt

SEQ ID NO: 172509 - DNA, 22 bp, Artificial sequence
  SiRNA target sequence
aacaatcatataatgtccttta

SEQ ID NO: 172510 - DNA, 22 bp, Artificial sequence
  SiRNA target sequence
acaatcatataatgtcctttag

SEQ ID NO: 172511 - DNA, 22 bp, Artificial sequence
  SiRNA target sequence
caatcatataatgtcctttagt

SEQ ID NO: 172512 - DNA, 22 bp, Artificial sequence
  SiRNA target sequence
aatcatataatgtcctttagtg

SEQ ID NO: 172513 - DNA, 22 bp, Artificial sequence
  SiRNA target sequence
atcatataatgtcctttagtga

SEQ ID NO: 172514 - DNA, 22 bp, Artificial sequence
  SiRNA target sequence
tcatataatgtcctttagtgat

SEQ ID NO: 172515 - DNA, 22 bp, Artificial sequence
  SiRNA target sequence
catataatgtcctttagtgatt

SEQ ID NO: 172516 - DNA, 22 bp, Artificial sequence
  SiRNA target sequence
atataatgtcctttagtgattt

SEQ ID NO: 172517 - DNA, 22 bp, Artificial sequence
  SiRNA target sequence
tataatgtcctttagtgatttt

SEQ ID NO: 172518 - DNA, 22 bp, Artificial sequence
  SiRNA target sequence
ataatgtcctttagtgattttg

SEQ ID NO: 172519 - DNA, 22 bp, Artificial sequence
  SiRNA target sequence
taatgtcctttagtgattttga

SEQ ID NO: 172520 - DNA, 22 bp, Artificial sequence
  SiRNA target sequence
aatgtcctttagtgattttgaa

SEQ ID NO: 172521 - DNA, 22 bp, Artificial sequence
  SiRNA target sequence
atgtcctttagtgattttgaat

SEQ ID NO: 172522 - DNA, 22 bp, Artificial sequence
  SiRNA target sequence
tgtcctttagtgattttgaata

SEQ ID NO: 172523 - DNA, 22 bp, Artificial sequence
  SiRNA target sequence
gtcctttagtgattttgaatat

SEQ ID NO: 172524 - DNA, 22 bp, Artificial sequence
  SiRNA target sequence
tcctttagtgattttgaatatc

SEQ ID NO: 172525 - DNA, 22 bp, Artificial sequence
  SiRNA target sequence
cctttagtgattttgaatatca

SEQ ID NO: 172526 - DNA, 22 bp, Artificial sequence
  SiRNA target sequence
ctttagtgattttgaatatcac

SEQ ID NO: 172527 - DNA, 22 bp, Artificial sequence
  SiRNA target sequence
tttagtgattttgaatatcact

SEQ ID NO: 172528 - DNA, 22 bp, Artificial sequence
  SiRNA target sequence
ttagtgattttgaatatcactt

SEQ ID NO: 172529 - DNA, 22 bp, Artificial sequence
  SiRNA target sequence
tagtgattttgaatatcactta

SEQ ID NO: 172530 - DNA, 22 bp, Artificial sequence
  SiRNA target sequence
agtgattttgaatatcacttaa

SEQ ID NO: 172531 - DNA, 22 bp, Artificial sequence
  SiRNA target sequence
gtgattttgaatatcacttaat

SEQ ID NO: 172532 - DNA, 22 bp, Artificial sequence
  SiRNA target sequence
tgattttgaatatcacttaatt

SEQ ID NO: 172533 - DNA, 22 bp, Artificial sequence
  SiRNA target sequence
gattttgaatatcacttaattt

SEQ ID NO: 172534 - DNA, 22 bp, Artificial sequence
  SiRNA target sequence
attttgaatatcacttaatttc

SEQ ID NO: 172535 - DNA, 22 bp, Artificial sequence
  SiRNA target sequence
ttttgaatatcacttaatttca

SEQ ID NO: 172536 - DNA, 22 bp, Artificial sequence
  SiRNA target sequence
tttgaatatcacttaatttcat

SEQ ID NO: 172537 - DNA, 22 bp, Artificial sequence
  SiRNA target sequence
ttgaatatcacttaatttcatt

SEQ ID NO: 172538 - DNA, 22 bp, Artificial sequence
  SiRNA target sequence
tgaatatcacttaatttcattt

SEQ ID NO: 172539 - DNA, 22 bp, Artificial sequence
  SiRNA target sequence
gaatatcacttaatttcattta

SEQ ID NO: 172540 - DNA, 22 bp, Artificial sequence
  SiRNA target sequence
aatatcacttaatttcatttat

SEQ ID NO: 172541 - DNA, 22 bp, Artificial sequence
  SiRNA target sequence
atatcacttaatttcatttata

SEQ ID NO: 172542 - DNA, 22 bp, Artificial sequence
  SiRNA target sequence
tatcacttaatttcatttataa

SEQ ID NO: 172543 - DNA, 22 bp, Artificial sequence
  SiRNA target sequence
atcacttaatttcatttataaa

SEQ ID NO: 172544 - DNA, 22 bp, Artificial sequence
  SiRNA target sequence
tcacttaatttcatttataaaa

SEQ ID NO: 172545 - DNA, 22 bp, Artificial sequence
  SiRNA target sequence
cacttaatttcatttataaaac

SEQ ID NO: 172546 - DNA, 22 bp, Artificial sequence
  SiRNA target sequence
acttaatttcatttataaaact

SEQ ID NO: 172547 - DNA, 22 bp, Artificial sequence
  SiRNA target sequence
cttaatttcatttataaaacta

SEQ ID NO: 172548 - DNA, 22 bp, Artificial sequence
  SiRNA target sequence
ttaatttcatttataaaactaa

SEQ ID NO: 172549 - DNA, 22 bp, Artificial sequence
  SiRNA target sequence
taatttcatttataaaactaaa

SEQ ID NO: 172550 - DNA, 22 bp, Artificial sequence
  SiRNA target sequence
aatttcatttataaaactaaaa

SEQ ID NO: 172551 - DNA, 22 bp, Artificial sequence
  SiRNA target sequence
atttcatttataaaactaaaat

SEQ ID NO: 172552 - DNA, 22 bp, Artificial sequence
  SiRNA target sequence
tttcatttataaaactaaaatt

SEQ ID NO: 172553 - DNA, 22 bp, Artificial sequence
  SiRNA target sequence
ttcatttataaaactaaaattt

SEQ ID NO: 172554 - DNA, 22 bp, Artificial sequence
  SiRNA target sequence
tcatttataaaactaaaattta

SEQ ID NO: 172555 - DNA, 22 bp, Artificial sequence
  SiRNA target sequence
catttataaaactaaaatttaa

SEQ ID NO: 172556 - DNA, 22 bp, Artificial sequence
  SiRNA target sequence
atttataaaactaaaatttaat

SEQ ID NO: 172557 - DNA, 22 bp, Artificial sequence
  SiRNA target sequence
tttataaaactaaaatttaatg

SEQ ID NO: 172558 - DNA, 22 bp, Artificial sequence
  SiRNA target sequence
ttataaaactaaaatttaatgt

SEQ ID NO: 172559 - DNA, 22 bp, Artificial sequence
  SiRNA target sequence
tataaaactaaaatttaatgta

SEQ ID NO: 172560 - DNA, 22 bp, Artificial sequence
  SiRNA target sequence
ataaaactaaaatttaatgtaa

SEQ ID NO: 172561 - DNA, 22 bp, Artificial sequence
  SiRNA target sequence
taaaactaaaatttaatgtaat

SEQ ID NO: 172562 - DNA, 22 bp, Artificial sequence
  SiRNA target sequence
aaaactaaaatttaatgtaata

SEQ ID NO: 172563 - DNA, 22 bp, Artificial sequence
  SiRNA target sequence
aaactaaaatttaatgtaataa

SEQ ID NO: 172564 - DNA, 22 bp, Artificial sequence
  SiRNA target sequence
aactaaaatttaatgtaataaa

SEQ ID NO: 172565 - DNA, 22 bp, Artificial sequence
  SiRNA target sequence
actaaaatttaatgtaataaaa

SEQ ID NO: 172566 - DNA, 22 bp, Artificial sequence
  SiRNA target sequence
ctaaaatttaatgtaataaaag

SEQ ID NO: 172567 - DNA, 22 bp, Artificial sequence
  SiRNA target sequence
taaaatttaatgtaataaaagt

SEQ ID NO: 172568 - DNA, 22 bp, Artificial sequence
  SiRNA target sequence
aaaatttaatgtaataaaagta

SEQ ID NO: 172569 - DNA, 22 bp, Artificial sequence
  SiRNA target sequence
aaatttaatgtaataaaagtat

SEQ ID NO: 172570 - DNA, 22 bp, Artificial sequence
  SiRNA target sequence
aatttaatgtaataaaagtata

SEQ ID NO: 172571 - DNA, 22 bp, Artificial sequence
  SiRNA target sequence
atttaatgtaataaaagtatat

SEQ ID NO: 172572 - DNA, 22 bp, Artificial sequence
  SiRNA target sequence
tttaatgtaataaaagtatatg

SEQ ID NO: 172573 - DNA, 22 bp, Artificial sequence
  SiRNA target sequence
ttaatgtaataaaagtatatga

SEQ ID NO: 172574 - DNA, 22 bp, Artificial sequence
  SiRNA target sequence
taatgtaataaaagtatatgat

SEQ ID NO: 172575 - DNA, 22 bp, Artificial sequence
  SiRNA target sequence
aatgtaataaaagtatatgata

SEQ ID NO: 172576 - DNA, 22 bp, Artificial sequence
  SiRNA target sequence
atgtaataaaagtatatgatac

SEQ ID NO: 172577 - DNA, 22 bp, Artificial sequence
  SiRNA target sequence
tgtaataaaagtatatgataca

SEQ ID NO: 172578 - DNA, 22 bp, Artificial sequence
  SiRNA target sequence
gtaataaaagtatatgatacat

SEQ ID NO: 172579 - DNA, 22 bp, Artificial sequence
  SiRNA target sequence
taataaaagtatatgatacatc

SEQ ID NO: 172580 - DNA, 22 bp, Artificial sequence
  SiRNA target sequence
aataaaagtatatgatacatct

SEQ ID NO: 172581 - DNA, 22 bp, Artificial sequence
  SiRNA target sequence
ataaaagtatatgatacatctt

SEQ ID NO: 172582 - DNA, 22 bp, Artificial sequence
  SiRNA target sequence
taaaagtatatgatacatctta

SEQ ID NO: 172583 - DNA, 22 bp, Artificial sequence
  SiRNA target sequence
aaaagtatatgatacatcttat

SEQ ID NO: 172584 - DNA, 22 bp, Artificial sequence
  SiRNA target sequence
aaagtatatgatacatcttatg

SEQ ID NO: 172585 - DNA, 22 bp, Artificial sequence
  SiRNA target sequence
aagtatatgatacatcttatgt

SEQ ID NO: 172586 - DNA, 22 bp, Artificial sequence
  SiRNA target sequence
agtatatgatacatcttatgtc

SEQ ID NO: 172587 - DNA, 22 bp, Artificial sequence
  SiRNA target sequence
gtatatgatacatcttatgtca

SEQ ID NO: 172588 - DNA, 22 bp, Artificial sequence
  SiRNA target sequence
tatatgatacatcttatgtcaa

SEQ ID NO: 172589 - DNA, 22 bp, Artificial sequence
  SiRNA target sequence
atatgatacatcttatgtcaaa

SEQ ID NO: 172590 - DNA, 22 bp, Artificial sequence
  SiRNA target sequence
tatgatacatcttatgtcaaaa

SEQ ID NO: 172591 - DNA, 22 bp, Artificial sequence
  SiRNA target sequence
atgatacatcttatgtcaaaaa

SEQ ID NO: 172592 - DNA, 22 bp, Artificial sequence
  SiRNA target sequence
tgatacatcttatgtcaaaaat

SEQ ID NO: 172593 - DNA, 22 bp, Artificial sequence
  SiRNA target sequence
gatacatcttatgtcaaaaata

SEQ ID NO: 172594 - DNA, 22 bp, Artificial sequence
  SiRNA target sequence
atacatcttatgtcaaaaatat

SEQ ID NO: 172595 - DNA, 22 bp, Artificial sequence
  SiRNA target sequence
tacatcttatgtcaaaaatatt

SEQ ID NO: 172596 - DNA, 22 bp, Artificial sequence
  SiRNA target sequence
acatcttatgtcaaaaatattc

SEQ ID NO: 172597 - DNA, 22 bp, Artificial sequence
  SiRNA target sequence
catcttatgtcaaaaatattct

SEQ ID NO: 172598 - DNA, 22 bp, Artificial sequence
  SiRNA target sequence
atcttatgtcaaaaatattctg

SEQ ID NO: 172599 - DNA, 22 bp, Artificial sequence
  SiRNA target sequence
tcttatgtcaaaaatattctgt

SEQ ID NO: 172600 - DNA, 22 bp, Artificial sequence
  SiRNA target sequence
cttatgtcaaaaatattctgta

SEQ ID NO: 172601 - DNA, 22 bp, Artificial sequence
  SiRNA target sequence
ttatgtcaaaaatattctgtat

SEQ ID NO: 172602 - DNA, 22 bp, Artificial sequence
  SiRNA target sequence
tatgtcaaaaatattctgtatg

SEQ ID NO: 172603 - DNA, 22 bp, Artificial sequence
  SiRNA target sequence
atgtcaaaaatattctgtatga

SEQ ID NO: 172604 - DNA, 22 bp, Artificial sequence
  SiRNA target sequence
tgtcaaaaatattctgtatgat

SEQ ID NO: 172605 - DNA, 22 bp, Artificial sequence
  SiRNA target sequence
gtcaaaaatattctgtatgata

SEQ ID NO: 172606 - DNA, 22 bp, Artificial sequence
  SiRNA target sequence
tcaaaaatattctgtatgatag

SEQ ID NO: 172607 - DNA, 22 bp, Artificial sequence
  SiRNA target sequence
caaaaatattctgtatgatagt

SEQ ID NO: 172608 - DNA, 22 bp, Artificial sequence
  SiRNA target sequence
aaaaatattctgtatgatagtg

SEQ ID NO: 172609 - DNA, 22 bp, Artificial sequence
  SiRNA target sequence
aaaatattctgtatgatagtgt

SEQ ID NO: 172610 - DNA, 22 bp, Artificial sequence
  SiRNA target sequence
aaatattctgtatgatagtgtt

SEQ ID NO: 172611 - DNA, 22 bp, Artificial sequence
  SiRNA target sequence
aatattctgtatgatagtgttt

SEQ ID NO: 172612 - DNA, 22 bp, Artificial sequence
  SiRNA target sequence
atattctgtatgatagtgttta

SEQ ID NO: 172613 - DNA, 22 bp, Artificial sequence
  SiRNA target sequence
tattctgtatgatagtgtttat

SEQ ID NO: 172614 - DNA, 22 bp, Artificial sequence
  SiRNA target sequence
attctgtatgatagtgtttatg

SEQ ID NO: 172615 - DNA, 22 bp, Artificial sequence
  SiRNA target sequence
ttctgtatgatagtgtttatga

SEQ ID NO: 172616 - DNA, 22 bp, Artificial sequence
  SiRNA target sequence
tctgtatgatagtgtttatgag

SEQ ID NO: 172617 - DNA, 22 bp, Artificial sequence
  SiRNA target sequence
ctgtatgatagtgtttatgagg

SEQ ID NO: 172618 - DNA, 22 bp, Artificial sequence
  SiRNA target sequence
tgtatgatagtgtttatgagga

SEQ ID NO: 172619 - DNA, 22 bp, Artificial sequence
  SiRNA target sequence
gtatgatagtgtttatgaggaa

SEQ ID NO: 172620 - DNA, 22 bp, Artificial sequence
  SiRNA target sequence
tatgatagtgtttatgaggaaa

SEQ ID NO: 172621 - DNA, 22 bp, Artificial sequence
  SiRNA target sequence
atgatagtgtttatgaggaaag

SEQ ID NO: 172622 - DNA, 22 bp, Artificial sequence
  SiRNA target sequence
tgatagtgtttatgaggaaagc

SEQ ID NO: 172623 - DNA, 22 bp, Artificial sequence
  SiRNA target sequence
gatagtgtttatgaggaaagca

SEQ ID NO: 172624 - DNA, 22 bp, Artificial sequence
  SiRNA target sequence
atagtgtttatgaggaaagcac

SEQ ID NO: 172625 - DNA, 22 bp, Artificial sequence
  SiRNA target sequence
tagtgtttatgaggaaagcacg

SEQ ID NO: 172626 - DNA, 22 bp, Artificial sequence
  SiRNA target sequence
agtgtttatgaggaaagcacga

SEQ ID NO: 172627 - DNA, 22 bp, Artificial sequence
  SiRNA target sequence
gtgtttatgaggaaagcacgag

SEQ ID NO: 172628 - DNA, 22 bp, Artificial sequence
  SiRNA target sequence
tgtttatgaggaaagcacgaga

SEQ ID NO: 172629 - DNA, 22 bp, Artificial sequence
  SiRNA target sequence
gtttatgaggaaagcacgagag

SEQ ID NO: 172630 - DNA, 22 bp, Artificial sequence
  SiRNA target sequence
tttatgaggaaagcacgagaga

SEQ ID NO: 172631 - DNA, 22 bp, Artificial sequence
  SiRNA target sequence
ttatgaggaaagcacgagagac

SEQ ID NO: 172632 - DNA, 22 bp, Artificial sequence
  SiRNA target sequence
tatgaggaaagcacgagagaca

SEQ ID NO: 172633 - DNA, 22 bp, Artificial sequence
  SiRNA target sequence
atgaggaaagcacgagagacaa

SEQ ID NO: 172634 - DNA, 22 bp, Artificial sequence
  SiRNA target sequence
tgaggaaagcacgagagacaaa

SEQ ID NO: 172635 - DNA, 22 bp, Artificial sequence
  SiRNA target sequence
gaggaaagcacgagagacaaaa

SEQ ID NO: 172636 - DNA, 22 bp, Artificial sequence
  SiRNA target sequence
aggaaagcacgagagacaaaat

SEQ ID NO: 172637 - DNA, 22 bp, Artificial sequence
  SiRNA target sequence
ggaaagcacgagagacaaaata

SEQ ID NO: 172638 - DNA, 22 bp, Artificial sequence
  SiRNA target sequence
gaaagcacgagagacaaaataa

SEQ ID NO: 172639 - DNA, 22 bp, Artificial sequence
  SiRNA target sequence
aaagcacgagagacaaaataat

SEQ ID NO: 172640 - DNA, 22 bp, Artificial sequence
  SiRNA target sequence
aagcacgagagacaaaataata

SEQ ID NO: 172641 - DNA, 22 bp, Artificial sequence
  SiRNA target sequence
agcacgagagacaaaataataa

SEQ ID NO: 172642 - DNA, 22 bp, Artificial sequence
  SiRNA target sequence
gcacgagagacaaaataataat

SEQ ID NO: 172643 - DNA, 22 bp, Artificial sequence
  SiRNA target sequence
cacgagagacaaaataataata

SEQ ID NO: 172644 - DNA, 22 bp, Artificial sequence
  SiRNA target sequence
acgagagacaaaataataataa

SEQ ID NO: 172645 - DNA, 22 bp, Artificial sequence
  SiRNA target sequence
cgagagacaaaataataataag

SEQ ID NO: 172646 - DNA, 22 bp, Artificial sequence
  SiRNA target sequence
gagagacaaaataataataagt

SEQ ID NO: 172647 - DNA, 22 bp, Artificial sequence
  SiRNA target sequence
agagacaaaataataataagtg

SEQ ID NO: 172648 - DNA, 22 bp, Artificial sequence
  SiRNA target sequence
gagacaaaataataataagtga

SEQ ID NO: 172649 - DNA, 22 bp, Artificial sequence
  SiRNA target sequence
agacaaaataataataagtgac

SEQ ID NO: 172650 - DNA, 22 bp, Artificial sequence
  SiRNA target sequence
gacaaaataataataagtgact

SEQ ID NO: 172651 - DNA, 22 bp, Artificial sequence
  SiRNA target sequence
acaaaataataataagtgactg

SEQ ID NO: 172652 - DNA, 22 bp, Artificial sequence
  SiRNA target sequence
caaaataataataagtgactgt

SEQ ID NO: 172653 - DNA, 22 bp, Artificial sequence
  SiRNA target sequence
aaaataataataagtgactgtc

SEQ ID NO: 172654 - DNA, 22 bp, Artificial sequence
  SiRNA target sequence
aaataataataagtgactgtcc

SEQ ID NO: 172655 - DNA, 22 bp, Artificial sequence
  SiRNA target sequence
aataataataagtgactgtcct

SEQ ID NO: 172656 - DNA, 22 bp, Artificial sequence
  SiRNA target sequence
ataataataagtgactgtcctg

SEQ ID NO: 172657 - DNA, 22 bp, Artificial sequence
  SiRNA target sequence
taataataagtgactgtcctgg

SEQ ID NO: 172658 - DNA, 22 bp, Artificial sequence
  SiRNA target sequence
aataataagtgactgtcctggg

SEQ ID NO: 172659 - DNA, 22 bp, Artificial sequence
  SiRNA target sequence
ataataagtgactgtcctggga

SEQ ID NO: 172660 - DNA, 22 bp, Artificial sequence
  SiRNA target sequence
taataagtgactgtcctgggac

SEQ ID NO: 172661 - DNA, 22 bp, Artificial sequence
  SiRNA target sequence
aataagtgactgtcctgggact

SEQ ID NO: 172662 - DNA, 22 bp, Artificial sequence
  SiRNA target sequence
ataagtgactgtcctgggactg

SEQ ID NO: 172663 - DNA, 22 bp, Artificial sequence
  SiRNA target sequence
taagtgactgtcctgggactgt

SEQ ID NO: 172664 - DNA, 22 bp, Artificial sequence
  SiRNA target sequence
aagtgactgtcctgggactgtt

SEQ ID NO: 172665 - DNA, 22 bp, Artificial sequence
  SiRNA target sequence
agtgactgtcctgggactgttt

SEQ ID NO: 172666 - DNA, 22 bp, Artificial sequence
  SiRNA target sequence
gtgactgtcctgggactgtttc

SEQ ID NO: 172667 - DNA, 22 bp, Artificial sequence
  SiRNA target sequence
tgactgtcctgggactgtttca

SEQ ID NO: 172668 - DNA, 22 bp, Artificial sequence
  SiRNA target sequence
gactgtcctgggactgtttcat

SEQ ID NO: 172669 - DNA, 22 bp, Artificial sequence
  SiRNA target sequence
actgtcctgggactgtttcata

SEQ ID NO: 172670 - DNA, 22 bp, Artificial sequence
  SiRNA target sequence
ctgtcctgggactgtttcatat

SEQ ID NO: 172671 - DNA, 22 bp, Artificial sequence
  SiRNA target sequence
tgtcctgggactgtttcatata

SEQ ID NO: 172672 - DNA, 22 bp, Artificial sequence
  SiRNA target sequence
gtcctgggactgtttcatatat

SEQ ID NO: 172673 - DNA, 22 bp, Artificial sequence
  SiRNA target sequence
tcctgggactgtttcatatatt

SEQ ID NO: 172674 - DNA, 22 bp, Artificial sequence
  SiRNA target sequence
cctgggactgtttcatatattg

SEQ ID NO: 172675 - DNA, 22 bp, Artificial sequence
  SiRNA target sequence
ctgggactgtttcatatattga

SEQ ID NO: 172676 - DNA, 22 bp, Artificial sequence
  SiRNA target sequence
tgggactgtttcatatattgaa

SEQ ID NO: 172677 - DNA, 22 bp, Artificial sequence
  SiRNA target sequence
gggactgtttcatatattgaaa

SEQ ID NO: 172678 - DNA, 22 bp, Artificial sequence
  SiRNA target sequence
ggactgtttcatatattgaaag

SEQ ID NO: 172679 - DNA, 22 bp, Artificial sequence
  SiRNA target sequence
gactgtttcatatattgaaagg

SEQ ID NO: 172680 - DNA, 22 bp, Artificial sequence
  SiRNA target sequence
actgtttcatatattgaaaggc

SEQ ID NO: 172681 - DNA, 22 bp, Artificial sequence
  SiRNA target sequence
ctgtttcatatattgaaaggca

SEQ ID NO: 172682 - DNA, 22 bp, Artificial sequence
  SiRNA target sequence
tgtttcatatattgaaaggcaa

SEQ ID NO: 172683 - DNA, 22 bp, Artificial sequence
  SiRNA target sequence
gtttcatatattgaaaggcaag

SEQ ID NO: 172684 - DNA, 22 bp, Artificial sequence
  SiRNA target sequence
tttcatatattgaaaggcaagc

SEQ ID NO: 172685 - DNA, 22 bp, Artificial sequence
  SiRNA target sequence
ttcatatattgaaaggcaagca

SEQ ID NO: 172686 - DNA, 22 bp, Artificial sequence
  SiRNA target sequence
tcatatattgaaaggcaagcac

SEQ ID NO: 172687 - DNA, 22 bp, Artificial sequence
  SiRNA target sequence
catatattgaaaggcaagcaca

SEQ ID NO: 172688 - DNA, 22 bp, Artificial sequence
  SiRNA target sequence
atatattgaaaggcaagcacac

SEQ ID NO: 172689 - DNA, 22 bp, Artificial sequence
  SiRNA target sequence
tatattgaaaggcaagcacacc

SEQ ID NO: 172690 - DNA, 22 bp, Artificial sequence
  SiRNA target sequence
atattgaaaggcaagcacacca

SEQ ID NO: 172691 - DNA, 22 bp, Artificial sequence
  SiRNA target sequence
tattgaaaggcaagcacaccat

SEQ ID NO: 172692 - DNA, 22 bp, Artificial sequence
  SiRNA target sequence
attgaaaggcaagcacaccatt

SEQ ID NO: 172693 - DNA, 22 bp, Artificial sequence
  SiRNA target sequence
ttgaaaggcaagcacaccattt

SEQ ID NO: 172694 - DNA, 22 bp, Artificial sequence
  SiRNA target sequence
tgaaaggcaagcacaccattta

SEQ ID NO: 172695 - DNA, 22 bp, Artificial sequence
  SiRNA target sequence
gaaaggcaagcacaccatttaa

SEQ ID NO: 172696 - DNA, 22 bp, Artificial sequence
  SiRNA target sequence
aaaggcaagcacaccatttaat

SEQ ID NO: 172697 - DNA, 22 bp, Artificial sequence
  SiRNA target sequence
aaggcaagcacaccatttaatt

SEQ ID NO: 172698 - DNA, 22 bp, Artificial sequence
  SiRNA target sequence
aggcaagcacaccatttaattg

SEQ ID NO: 172699 - DNA, 22 bp, Artificial sequence
  SiRNA target sequence
ggcaagcacaccatttaattga

SEQ ID NO: 172700 - DNA, 22 bp, Artificial sequence
  SiRNA target sequence
gcaagcacaccatttaattgaa

SEQ ID NO: 172701 - DNA, 22 bp, Artificial sequence
  SiRNA target sequence
caagcacaccatttaattgaat

SEQ ID NO: 172702 - DNA, 22 bp, Artificial sequence
  SiRNA target sequence
aagcacaccatttaattgaata

SEQ ID NO: 172703 - DNA, 22 bp, Artificial sequence
  SiRNA target sequence
agcacaccatttaattgaatat

SEQ ID NO: 172704 - DNA, 22 bp, Artificial sequence
  SiRNA target sequence
gcacaccatttaattgaatatt

SEQ ID NO: 172705 - DNA, 22 bp, Artificial sequence
  SiRNA target sequence
cacaccatttaattgaatattt

SEQ ID NO: 172706 - DNA, 22 bp, Artificial sequence
  SiRNA target sequence
acaccatttaattgaatattta

SEQ ID NO: 172707 - DNA, 22 bp, Artificial sequence
  SiRNA target sequence
caccatttaattgaatatttat

SEQ ID NO: 172708 - DNA, 22 bp, Artificial sequence
  SiRNA target sequence
accatttaattgaatatttatc

SEQ ID NO: 172709 - DNA, 22 bp, Artificial sequence
  SiRNA target sequence
ccatttaattgaatatttatct

SEQ ID NO: 172710 - DNA, 22 bp, Artificial sequence
  SiRNA target sequence
catttaattgaatatttatctg

SEQ ID NO: 172711 - DNA, 22 bp, Artificial sequence
  SiRNA target sequence
atttaattgaatatttatctgt

SEQ ID NO: 172712 - DNA, 22 bp, Artificial sequence
  SiRNA target sequence
tttaattgaatatttatctgtt

SEQ ID NO: 172713 - DNA, 22 bp, Artificial sequence
  SiRNA target sequence
ttaattgaatatttatctgtta

SEQ ID NO: 172714 - DNA, 22 bp, Artificial sequence
  SiRNA target sequence
taattgaatatttatctgttac

SEQ ID NO: 172715 - DNA, 22 bp, Artificial sequence
  SiRNA target sequence
aattgaatatttatctgttact

SEQ ID NO: 172716 - DNA, 22 bp, Artificial sequence
  SiRNA target sequence
attgaatatttatctgttactt

SEQ ID NO: 172717 - DNA, 22 bp, Artificial sequence
  SiRNA target sequence
ttgaatatttatctgttacttc

SEQ ID NO: 172718 - DNA, 22 bp, Artificial sequence
  SiRNA target sequence
tgaatatttatctgttacttct

SEQ ID NO: 172719 - DNA, 22 bp, Artificial sequence
  SiRNA target sequence
gaatatttatctgttacttcta

SEQ ID NO: 172720 - DNA, 22 bp, Artificial sequence
  SiRNA target sequence
aatatttatctgttacttctac

SEQ ID NO: 172721 - DNA, 22 bp, Artificial sequence
  SiRNA target sequence
atatttatctgttacttctaca

SEQ ID NO: 172722 - DNA, 22 bp, Artificial sequence
  SiRNA target sequence
tatttatctgttacttctacac

SEQ ID NO: 172723 - DNA, 22 bp, Artificial sequence
  SiRNA target sequence
atttatctgttacttctacaca

SEQ ID NO: 172724 - DNA, 22 bp, Artificial sequence
  SiRNA target sequence
tttatctgttacttctacacaa

SEQ ID NO: 172725 - DNA, 22 bp, Artificial sequence
  SiRNA target sequence
ttatctgttacttctacacaac

SEQ ID NO: 172726 - DNA, 22 bp, Artificial sequence
  SiRNA target sequence
tatctgttacttctacacaaca

SEQ ID NO: 172727 - DNA, 22 bp, Artificial sequence
  SiRNA target sequence
atctgttacttctacacaacaa

SEQ ID NO: 172728 - DNA, 22 bp, Artificial sequence
  SiRNA target sequence
tctgttacttctacacaacaac

SEQ ID NO: 172729 - DNA, 22 bp, Artificial sequence
  SiRNA target sequence
ctgttacttctacacaacaaca

SEQ ID NO: 172730 - DNA, 22 bp, Artificial sequence
  SiRNA target sequence
tgttacttctacacaacaacaa

SEQ ID NO: 172731 - DNA, 22 bp, Artificial sequence
  SiRNA target sequence
gttacttctacacaacaacaag

SEQ ID NO: 172732 - DNA, 22 bp, Artificial sequence
  SiRNA target sequence
ttacttctacacaacaacaagc

SEQ ID NO: 172733 - DNA, 22 bp, Artificial sequence
  SiRNA target sequence
tacttctacacaacaacaagcc

SEQ ID NO: 172734 - DNA, 22 bp, Artificial sequence
  SiRNA target sequence
acttctacacaacaacaagcca

SEQ ID NO: 172735 - DNA, 22 bp, Artificial sequence
  SiRNA target sequence
cttctacacaacaacaagccat

SEQ ID NO: 172736 - DNA, 22 bp, Artificial sequence
  SiRNA target sequence
ttctacacaacaacaagccata

SEQ ID NO: 172737 - DNA, 22 bp, Artificial sequence
  SiRNA target sequence
tctacacaacaacaagccataa

SEQ ID NO: 172738 - DNA, 22 bp, Artificial sequence
  SiRNA target sequence
ctacacaacaacaagccataaa

SEQ ID NO: 172739 - DNA, 22 bp, Artificial sequence
  SiRNA target sequence
tacacaacaacaagccataaag

SEQ ID NO: 172740 - DNA, 22 bp, Artificial sequence
  SiRNA target sequence
acacaacaacaagccataaagc

SEQ ID NO: 172741 - DNA, 22 bp, Artificial sequence
  SiRNA target sequence
cacaacaacaagccataaagct

SEQ ID NO: 172742 - DNA, 22 bp, Artificial sequence
  SiRNA target sequence
acaacaacaagccataaagcta

SEQ ID NO: 172743 - DNA, 22 bp, Artificial sequence
  SiRNA target sequence
caacaacaagccataaagctac

SEQ ID NO: 172744 - DNA, 22 bp, Artificial sequence
  SiRNA target sequence
aacaacaagccataaagctact

SEQ ID NO: 172745 - DNA, 22 bp, Artificial sequence
  SiRNA target sequence
acaacaagccataaagctactt

SEQ ID NO: 172746 - DNA, 22 bp, Artificial sequence
  SiRNA target sequence
caacaagccataaagctacttg

SEQ ID NO: 172747 - DNA, 22 bp, Artificial sequence
  SiRNA target sequence
aacaagccataaagctacttgc

SEQ ID NO: 172748 - DNA, 22 bp, Artificial sequence
  SiRNA target sequence
acaagccataaagctacttgct

SEQ ID NO: 172749 - DNA, 22 bp, Artificial sequence
  SiRNA target sequence
caagccataaagctacttgctc

SEQ ID NO: 172750 - DNA, 22 bp, Artificial sequence
  SiRNA target sequence
aagccataaagctacttgctca

SEQ ID NO: 172751 - DNA, 22 bp, Artificial sequence
  SiRNA target sequence
agccataaagctacttgctcag

SEQ ID NO: 172752 - DNA, 22 bp, Artificial sequence
  SiRNA target sequence
gccataaagctacttgctcagg

SEQ ID NO: 172753 - DNA, 22 bp, Artificial sequence
  SiRNA target sequence
ccataaagctacttgctcaggg

SEQ ID NO: 172754 - DNA, 22 bp, Artificial sequence
  SiRNA target sequence
cataaagctacttgctcagggg

SEQ ID NO: 172755 - DNA, 22 bp, Artificial sequence
  SiRNA target sequence
ataaagctacttgctcaggggc

SEQ ID NO: 172756 - DNA, 22 bp, Artificial sequence
  SiRNA target sequence
taaagctacttgctcaggggcg

SEQ ID NO: 172757 - DNA, 22 bp, Artificial sequence
  SiRNA target sequence
aaagctacttgctcaggggcga

SEQ ID NO: 172758 - DNA, 22 bp, Artificial sequence
  SiRNA target sequence
aagctacttgctcaggggcgaa

SEQ ID NO: 172759 - DNA, 22 bp, Artificial sequence
  SiRNA target sequence
agctacttgctcaggggcgaag

SEQ ID NO: 172760 - DNA, 22 bp, Artificial sequence
  SiRNA target sequence
gctacttgctcaggggcgaagt

SEQ ID NO: 172761 - DNA, 22 bp, Artificial sequence
  SiRNA target sequence
ctacttgctcaggggcgaagta

SEQ ID NO: 172762 - DNA, 22 bp, Artificial sequence
  SiRNA target sequence
tacttgctcaggggcgaagtat

SEQ ID NO: 172763 - DNA, 22 bp, Artificial sequence
  SiRNA target sequence
acttgctcaggggcgaagtata

SEQ ID NO: 172764 - DNA, 22 bp, Artificial sequence
  SiRNA target sequence
cttgctcaggggcgaagtataa

SEQ ID NO: 172765 - DNA, 22 bp, Artificial sequence
  SiRNA target sequence
ttgctcaggggcgaagtataag

SEQ ID NO: 172766 - DNA, 22 bp, Artificial sequence
  SiRNA target sequence
tgctcaggggcgaagtataagt

SEQ ID NO: 172767 - DNA, 22 bp, Artificial sequence
  SiRNA target sequence
gctcaggggcgaagtataagtg

SEQ ID NO: 172768 - DNA, 22 bp, Artificial sequence
  SiRNA target sequence
ctcaggggcgaagtataagtgt

SEQ ID NO: 172769 - DNA, 22 bp, Artificial sequence
  SiRNA target sequence
tcaggggcgaagtataagtgtc

SEQ ID NO: 172770 - DNA, 22 bp, Artificial sequence
  SiRNA target sequence
caggggcgaagtataagtgtca

SEQ ID NO: 172771 - DNA, 22 bp, Artificial sequence
  SiRNA target sequence
aggggcgaagtataagtgtcat

SEQ ID NO: 172772 - DNA, 22 bp, Artificial sequence
  SiRNA target sequence
ggggcgaagtataagtgtcata

SEQ ID NO: 172773 - DNA, 22 bp, Artificial sequence
  SiRNA target sequence
gggcgaagtataagtgtcatac

SEQ ID NO: 172774 - DNA, 22 bp, Artificial sequence
  SiRNA target sequence
ggcgaagtataagtgtcataca

SEQ ID NO: 172775 - DNA, 22 bp, Artificial sequence
  SiRNA target sequence
gcgaagtataagtgtcatacag

SEQ ID NO: 172776 - DNA, 22 bp, Artificial sequence
  SiRNA target sequence
cgaagtataagtgtcatacagt

SEQ ID NO: 172777 - DNA, 22 bp, Artificial sequence
  SiRNA target sequence
gaagtataagtgtcatacagtg

SEQ ID NO: 172778 - DNA, 22 bp, Artificial sequence
  SiRNA target sequence
aagtataagtgtcatacagtgc

SEQ ID NO: 172779 - DNA, 22 bp, Artificial sequence
  SiRNA target sequence
agtataagtgtcatacagtgct

SEQ ID NO: 172780 - DNA, 22 bp, Artificial sequence
  SiRNA target sequence
gtataagtgtcatacagtgcta

SEQ ID NO: 172781 - DNA, 22 bp, Artificial sequence
  SiRNA target sequence
tataagtgtcatacagtgctat

SEQ ID NO: 172782 - DNA, 22 bp, Artificial sequence
  SiRNA target sequence
ataagtgtcatacagtgctatg

SEQ ID NO: 172783 - DNA, 22 bp, Artificial sequence
  SiRNA target sequence
taagtgtcatacagtgctatga

SEQ ID NO: 172784 - DNA, 22 bp, Artificial sequence
  SiRNA target sequence
aagtgtcatacagtgctatgat

SEQ ID NO: 172785 - DNA, 22 bp, Artificial sequence
  SiRNA target sequence
agtgtcatacagtgctatgata

SEQ ID NO: 172786 - DNA, 22 bp, Artificial sequence
  SiRNA target sequence
gtgtcatacagtgctatgataa

SEQ ID NO: 172787 - DNA, 22 bp, Artificial sequence
  SiRNA target sequence
tgtcatacagtgctatgataaa

SEQ ID NO: 172788 - DNA, 22 bp, Artificial sequence
  SiRNA target sequence
gtcatacagtgctatgataaat

SEQ ID NO: 172789 - DNA, 22 bp, Artificial sequence
  SiRNA target sequence
tcatacagtgctatgataaatt

SEQ ID NO: 172790 - DNA, 22 bp, Artificial sequence
  SiRNA target sequence
catacagtgctatgataaattt

SEQ ID NO: 172791 - DNA, 22 bp, Artificial sequence
  SiRNA target sequence
atacagtgctatgataaatttt

SEQ ID NO: 172792 - DNA, 22 bp, Artificial sequence
  SiRNA target sequence
tacagtgctatgataaattttt

SEQ ID NO: 172793 - DNA, 22 bp, Artificial sequence
  SiRNA target sequence
acagtgctatgataaattttta

SEQ ID NO: 172794 - DNA, 22 bp, Artificial sequence
  SiRNA target sequence
cagtgctatgataaatttttag

SEQ ID NO: 172795 - DNA, 22 bp, Artificial sequence
  SiRNA target sequence
agtgctatgataaatttttaga

SEQ ID NO: 172796 - DNA, 22 bp, Artificial sequence
  SiRNA target sequence
gtgctatgataaatttttagag

SEQ ID NO: 172797 - DNA, 22 bp, Artificial sequence
  SiRNA target sequence
tgctatgataaatttttagaga

SEQ ID NO: 172798 - DNA, 22 bp, Artificial sequence
  SiRNA target sequence
gctatgataaatttttagagaa

SEQ ID NO: 172799 - DNA, 22 bp, Artificial sequence
  SiRNA target sequence
ctatgataaatttttagagaat

SEQ ID NO: 172800 - DNA, 22 bp, Artificial sequence
  SiRNA target sequence
tatgataaatttttagagaata

SEQ ID NO: 172801 - DNA, 22 bp, Artificial sequence
  SiRNA target sequence
atgataaatttttagagaatag

SEQ ID NO: 172802 - DNA, 22 bp, Artificial sequence
  SiRNA target sequence
tgataaatttttagagaatagc

SEQ ID NO: 172803 - DNA, 22 bp, Artificial sequence
  SiRNA target sequence
gataaatttttagagaatagcg

SEQ ID NO: 172804 - DNA, 22 bp, Artificial sequence
  SiRNA target sequence
ataaatttttagagaatagcga

SEQ ID NO: 172805 - DNA, 22 bp, Artificial sequence
  SiRNA target sequence
taaatttttagagaatagcgat

SEQ ID NO: 172806 - DNA, 22 bp, Artificial sequence
  SiRNA target sequence
aaatttttagagaatagcgatg

SEQ ID NO: 172807 - DNA, 22 bp, Artificial sequence
  SiRNA target sequence
aatttttagagaatagcgatga

SEQ ID NO: 172808 - DNA, 22 bp, Artificial sequence
  SiRNA target sequence
atttttagagaatagcgatgat

SEQ ID NO: 172809 - DNA, 22 bp, Artificial sequence
  SiRNA target sequence
tttttagagaatagcgatgatg

SEQ ID NO: 172810 - DNA, 22 bp, Artificial sequence
  SiRNA target sequence
ttttagagaatagcgatgatgt

SEQ ID NO: 172811 - DNA, 22 bp, Artificial sequence
  SiRNA target sequence
tttagagaatagcgatgatgtt

SEQ ID NO: 172812 - DNA, 22 bp, Artificial sequence
  SiRNA target sequence
ttagagaatagcgatgatgttt

SEQ ID NO: 172813 - DNA, 22 bp, Artificial sequence
  SiRNA target sequence
tagagaatagcgatgatgtttt

SEQ ID NO: 172814 - DNA, 22 bp, Artificial sequence
  SiRNA target sequence
agagaatagcgatgatgtttta

SEQ ID NO: 172815 - DNA, 22 bp, Artificial sequence
  SiRNA target sequence
gagaatagcgatgatgttttaa

SEQ ID NO: 172816 - DNA, 22 bp, Artificial sequence
  SiRNA target sequence
agaatagcgatgatgttttaac

SEQ ID NO: 172817 - DNA, 22 bp, Artificial sequence
  SiRNA target sequence
gaatagcgatgatgttttaact

SEQ ID NO: 172818 - DNA, 22 bp, Artificial sequence
  SiRNA target sequence
aatagcgatgatgttttaacta

SEQ ID NO: 172819 - DNA, 22 bp, Artificial sequence
  SiRNA target sequence
atagcgatgatgttttaactac

SEQ ID NO: 172820 - DNA, 22 bp, Artificial sequence
  SiRNA target sequence
tagcgatgatgttttaactacc

SEQ ID NO: 172821 - DNA, 22 bp, Artificial sequence
  SiRNA target sequence
agcgatgatgttttaactacct

SEQ ID NO: 172822 - DNA, 22 bp, Artificial sequence
  SiRNA target sequence
gcgatgatgttttaactaccta

SEQ ID NO: 172823 - DNA, 22 bp, Artificial sequence
  SiRNA target sequence
cgatgatgttttaactacctat

SEQ ID NO: 172824 - DNA, 22 bp, Artificial sequence
  SiRNA target sequence
gatgatgttttaactacctatg

SEQ ID NO: 172825 - DNA, 22 bp, Artificial sequence
  SiRNA target sequence
atgatgttttaactacctatga

SEQ ID NO: 172826 - DNA, 22 bp, Artificial sequence
  SiRNA target sequence
tgatgttttaactacctatgat

SEQ ID NO: 172827 - DNA, 22 bp, Artificial sequence
  SiRNA target sequence
gatgttttaactacctatgatt

SEQ ID NO: 172828 - DNA, 22 bp, Artificial sequence
  SiRNA target sequence
atgttttaactacctatgattt

SEQ ID NO: 172829 - DNA, 22 bp, Artificial sequence
  SiRNA target sequence
tgttttaactacctatgatttt

SEQ ID NO: 172830 - DNA, 22 bp, Artificial sequence
  SiRNA target sequence
gttttaactacctatgattttt

SEQ ID NO: 172831 - DNA, 22 bp, Artificial sequence
  SiRNA target sequence
ttttaactacctatgattttta

SEQ ID NO: 172832 - DNA, 22 bp, Artificial sequence
  SiRNA target sequence
tttaactacctatgatttttat

SEQ ID NO: 172833 - DNA, 22 bp, Artificial sequence
  SiRNA target sequence
ttaactacctatgatttttata

SEQ ID NO: 172834 - DNA, 22 bp, Artificial sequence
  SiRNA target sequence
taactacctatgatttttataa

SEQ ID NO: 172835 - DNA, 22 bp, Artificial sequence
  SiRNA target sequence
aactacctatgatttttataaa

SEQ ID NO: 172836 - DNA, 22 bp, Artificial sequence
  SiRNA target sequence
actacctatgatttttataaaa

SEQ ID NO: 172837 - DNA, 22 bp, Artificial sequence
  SiRNA target sequence
ctacctatgatttttataaaat

SEQ ID NO: 172838 - DNA, 22 bp, Artificial sequence
  SiRNA target sequence
tacctatgatttttataaaatg

SEQ ID NO: 172839 - DNA, 22 bp, Artificial sequence
  SiRNA target sequence
acctatgatttttataaaatga

SEQ ID NO: 172840 - DNA, 22 bp, Artificial sequence
  SiRNA target sequence
cctatgatttttataaaatgat

SEQ ID NO: 172841 - DNA, 22 bp, Artificial sequence
  SiRNA target sequence
ctatgatttttataaaatgatt

SEQ ID NO: 172842 - DNA, 22 bp, Artificial sequence
  SiRNA target sequence
tatgatttttataaaatgattt

SEQ ID NO: 172843 - DNA, 22 bp, Artificial sequence
  SiRNA target sequence
atgatttttataaaatgatttt

SEQ ID NO: 172844 - DNA, 22 bp, Artificial sequence
  SiRNA target sequence
tgatttttataaaatgattttg

SEQ ID NO: 172845 - DNA, 22 bp, Artificial sequence
  SiRNA target sequence
gatttttataaaatgattttgg

SEQ ID NO: 172846 - DNA, 22 bp, Artificial sequence
  SiRNA target sequence
atttttataaaatgattttgga

SEQ ID NO: 172847 - DNA, 22 bp, Artificial sequence
  SiRNA target sequence
tttttataaaatgattttggat

SEQ ID NO: 172848 - DNA, 22 bp, Artificial sequence
  SiRNA target sequence
ttttataaaatgattttggatc

SEQ ID NO: 172849 - DNA, 22 bp, Artificial sequence
  SiRNA target sequence
tttataaaatgattttggatct

SEQ ID NO: 172850 - DNA, 22 bp, Artificial sequence
  SiRNA target sequence
ttataaaatgattttggatcta

SEQ ID NO: 172851 - DNA, 22 bp, Artificial sequence
  SiRNA target sequence
tataaaatgattttggatctag

SEQ ID NO: 172852 - DNA, 22 bp, Artificial sequence
  SiRNA target sequence
ataaaatgattttggatctagg

SEQ ID NO: 172853 - DNA, 22 bp, Artificial sequence
  SiRNA target sequence
taaaatgattttggatctagga

SEQ ID NO: 172854 - DNA, 22 bp, Artificial sequence
  SiRNA target sequence
aaaatgattttggatctaggat

SEQ ID NO: 172855 - DNA, 22 bp, Artificial sequence
  SiRNA target sequence
aaatgattttggatctaggatt

SEQ ID NO: 172856 - DNA, 22 bp, Artificial sequence
  SiRNA target sequence
aatgattttggatctaggattt

SEQ ID NO: 172857 - DNA, 22 bp, Artificial sequence
  SiRNA target sequence
atgattttggatctaggatttt

SEQ ID NO: 172858 - DNA, 22 bp, Artificial sequence
  SiRNA target sequence
tgattttggatctaggattttt

SEQ ID NO: 172859 - DNA, 22 bp, Artificial sequence
  SiRNA target sequence
gattttggatctaggattttta

SEQ ID NO: 172860 - DNA, 22 bp, Artificial sequence
  SiRNA target sequence
attttggatctaggatttttac

SEQ ID NO: 172861 - DNA, 22 bp, Artificial sequence
  SiRNA target sequence
ttttggatctaggatttttaca

SEQ ID NO: 172862 - DNA, 22 bp, Artificial sequence
  SiRNA target sequence
tttggatctaggatttttacag

SEQ ID NO: 172863 - DNA, 22 bp, Artificial sequence
  SiRNA target sequence
ttggatctaggatttttacagc

SEQ ID NO: 172864 - DNA, 22 bp, Artificial sequence
  SiRNA target sequence
tggatctaggatttttacagca

SEQ ID NO: 172865 - DNA, 22 bp, Artificial sequence
  SiRNA target sequence
ggatctaggatttttacagcat

SEQ ID NO: 172866 - DNA, 22 bp, Artificial sequence
  SiRNA target sequence
gatctaggatttttacagcata

SEQ ID NO: 172867 - DNA, 22 bp, Artificial sequence
  SiRNA target sequence
atctaggatttttacagcataa

SEQ ID NO: 172868 - DNA, 22 bp, Artificial sequence
  SiRNA target sequence
tctaggatttttacagcataat

SEQ ID NO: 172869 - DNA, 22 bp, Artificial sequence
  SiRNA target sequence
ctaggatttttacagcataatt

SEQ ID NO: 172870 - DNA, 22 bp, Artificial sequence
  SiRNA target sequence
taggatttttacagcataattt

SEQ ID NO: 172871 - DNA, 22 bp, Artificial sequence
  SiRNA target sequence
aggatttttacagcataatttt

SEQ ID NO: 172872 - DNA, 22 bp, Artificial sequence
  SiRNA target sequence
ggatttttacagcataatttta

SEQ ID NO: 172873 - DNA, 22 bp, Artificial sequence
  SiRNA target sequence
gatttttacagcataattttat

SEQ ID NO: 172874 - DNA, 22 bp, Artificial sequence
  SiRNA target sequence
atttttacagcataattttatt

SEQ ID NO: 172875 - DNA, 22 bp, Artificial sequence
  SiRNA target sequence
tttttacagcataattttatta

SEQ ID NO: 172876 - DNA, 22 bp, Artificial sequence
  SiRNA target sequence
ttttacagcataattttattaa

SEQ ID NO: 172877 - DNA, 22 bp, Artificial sequence
  SiRNA target sequence
tttacagcataattttattaaa

SEQ ID NO: 172878 - DNA, 22 bp, Artificial sequence
  SiRNA target sequence
ttacagcataattttattaaag

SEQ ID NO: 172879 - DNA, 22 bp, Artificial sequence
  SiRNA target sequence
tacagcataattttattaaagg

SEQ ID NO: 172880 - DNA, 22 bp, Artificial sequence
  SiRNA target sequence
acagcataattttattaaagga

SEQ ID NO: 172881 - DNA, 22 bp, Artificial sequence
  SiRNA target sequence
cagcataattttattaaaggaa

SEQ ID NO: 172882 - DNA, 22 bp, Artificial sequence
  SiRNA target sequence
agcataattttattaaaggaac

SEQ ID NO: 172883 - DNA, 22 bp, Artificial sequence
  SiRNA target sequence
gcataattttattaaaggaacc

SEQ ID NO: 172884 - DNA, 22 bp, Artificial sequence
  SiRNA target sequence
cataattttattaaaggaacct

SEQ ID NO: 172885 - DNA, 22 bp, Artificial sequence
  SiRNA target sequence
ataattttattaaaggaacctg

SEQ ID NO: 172886 - DNA, 22 bp, Artificial sequence
  SiRNA target sequence
taattttattaaaggaacctgt

SEQ ID NO: 172887 - DNA, 22 bp, Artificial sequence
  SiRNA target sequence
aattttattaaaggaacctgtg

SEQ ID NO: 172888 - DNA, 22 bp, Artificial sequence
  SiRNA target sequence
attttattaaaggaacctgtga

SEQ ID NO: 172889 - DNA, 22 bp, Artificial sequence
  SiRNA target sequence
ttttattaaaggaacctgtgag

SEQ ID NO: 172890 - DNA, 22 bp, Artificial sequence
  SiRNA target sequence
tttattaaaggaacctgtgaga

SEQ ID NO: 172891 - DNA, 22 bp, Artificial sequence
  SiRNA target sequence
ttattaaaggaacctgtgagaa

SEQ ID NO: 172892 - DNA, 22 bp, Artificial sequence
  SiRNA target sequence
tattaaaggaacctgtgagaaa

SEQ ID NO: 172893 - DNA, 22 bp, Artificial sequence
  SiRNA target sequence
attaaaggaacctgtgagaaat

SEQ ID NO: 172894 - DNA, 22 bp, Artificial sequence
  SiRNA target sequence
ttaaaggaacctgtgagaaatg

SEQ ID NO: 172895 - DNA, 22 bp, Artificial sequence
  SiRNA target sequence
taaaggaacctgtgagaaatgg

SEQ ID NO: 172896 - DNA, 22 bp, Artificial sequence
  SiRNA target sequence
aaaggaacctgtgagaaatggg

SEQ ID NO: 172897 - DNA, 22 bp, Artificial sequence
  SiRNA target sequence
aaggaacctgtgagaaatggga

SEQ ID NO: 172898 - DNA, 22 bp, Artificial sequence
  SiRNA target sequence
aggaacctgtgagaaatgggag

SEQ ID NO: 172899 - DNA, 22 bp, Artificial sequence
  SiRNA target sequence
ggaacctgtgagaaatgggaga

SEQ ID NO: 172900 - DNA, 22 bp, Artificial sequence
  SiRNA target sequence
gaacctgtgagaaatgggagaa

SEQ ID NO: 172901 - DNA, 22 bp, Artificial sequence
  SiRNA target sequence
aacctgtgagaaatgggagaag

SEQ ID NO: 172902 - DNA, 22 bp, Artificial sequence
  SiRNA target sequence
acctgtgagaaatgggagaagt

SEQ ID NO: 172903 - DNA, 22 bp, Artificial sequence
  SiRNA target sequence
cctgtgagaaatgggagaagtg

SEQ ID NO: 172904 - DNA, 22 bp, Artificial sequence
  SiRNA target sequence
ctgtgagaaatgggagaagtgt

SEQ ID NO: 172905 - DNA, 22 bp, Artificial sequence
  SiRNA target sequence
tgtgagaaatgggagaagtgta

SEQ ID NO: 172906 - DNA, 22 bp, Artificial sequence
  SiRNA target sequence
gtgagaaatgggagaagtgtac

SEQ ID NO: 172907 - DNA, 22 bp, Artificial sequence
  SiRNA target sequence
tgagaaatgggagaagtgtact

SEQ ID NO: 172908 - DNA, 22 bp, Artificial sequence
  SiRNA target sequence
gagaaatgggagaagtgtacta

SEQ ID NO: 172909 - DNA, 22 bp, Artificial sequence
  SiRNA target sequence
agaaatgggagaagtgtactat

SEQ ID NO: 172910 - DNA, 22 bp, Artificial sequence
  SiRNA target sequence
gaaatgggagaagtgtactatt

SEQ ID NO: 172911 - DNA, 22 bp, Artificial sequence
  SiRNA target sequence
aaatgggagaagtgtactattg

SEQ ID NO: 172912 - DNA, 22 bp, Artificial sequence
  SiRNA target sequence
aatgggagaagtgtactattgg

SEQ ID NO: 172913 - DNA, 22 bp, Artificial sequence
  SiRNA target sequence
atgggagaagtgtactattgga

SEQ ID NO: 172914 - DNA, 22 bp, Artificial sequence
  SiRNA target sequence
tgggagaagtgtactattggat

SEQ ID NO: 172915 - DNA, 22 bp, Artificial sequence
  SiRNA target sequence
gggagaagtgtactattggata

SEQ ID NO: 172916 - DNA, 22 bp, Artificial sequence
  SiRNA target sequence
ggagaagtgtactattggatat

SEQ ID NO: 172917 - DNA, 22 bp, Artificial sequence
  SiRNA target sequence
gagaagtgtactattggatatc

SEQ ID NO: 172918 - DNA, 22 bp, Artificial sequence
  SiRNA target sequence
agaagtgtactattggatatca

SEQ ID NO: 172919 - DNA, 22 bp, Artificial sequence
  SiRNA target sequence
gaagtgtactattggatatcat

SEQ ID NO: 172920 - DNA, 22 bp, Artificial sequence
  SiRNA target sequence
aagtgtactattggatatcatt

SEQ ID NO: 172921 - DNA, 22 bp, Artificial sequence
  SiRNA target sequence
agtgtactattggatatcatta

SEQ ID NO: 172922 - DNA, 22 bp, Artificial sequence
  SiRNA target sequence
gtgtactattggatatcattat

SEQ ID NO: 172923 - DNA, 22 bp, Artificial sequence
  SiRNA target sequence
tgtactattggatatcattatg

SEQ ID NO: 172924 - DNA, 22 bp, Artificial sequence
  SiRNA target sequence
gtactattggatatcattatgg

SEQ ID NO: 172925 - DNA, 22 bp, Artificial sequence
  SiRNA target sequence
tactattggatatcattatgga

SEQ ID NO: 172926 - DNA, 22 bp, Artificial sequence
  SiRNA target sequence
actattggatatcattatggat

SEQ ID NO: 172927 - DNA, 22 bp, Artificial sequence
  SiRNA target sequence
ctattggatatcattatggata

SEQ ID NO: 172928 - DNA, 22 bp, Artificial sequence
  SiRNA target sequence
tattggatatcattatggatat

SEQ ID NO: 172929 - DNA, 22 bp, Artificial sequence
  SiRNA target sequence
attggatatcattatggatatt

SEQ ID NO: 172930 - DNA, 22 bp, Artificial sequence
  SiRNA target sequence
ttggatatcattatggatattt

SEQ ID NO: 172931 - DNA, 22 bp, Artificial sequence
  SiRNA target sequence
tggatatcattatggatattta

SEQ ID NO: 172932 - DNA, 22 bp, Artificial sequence
  SiRNA target sequence
ggatatcattatggatatttag

SEQ ID NO: 172933 - DNA, 22 bp, Artificial sequence
  SiRNA target sequence
gatatcattatggatatttaga

SEQ ID NO: 172934 - DNA, 22 bp, Artificial sequence
  SiRNA target sequence
atatcattatggatatttagaa

SEQ ID NO: 172935 - DNA, 22 bp, Artificial sequence
  SiRNA target sequence
tatcattatggatatttagaac

SEQ ID NO: 172936 - DNA, 22 bp, Artificial sequence
  SiRNA target sequence
atcattatggatatttagaaca

SEQ ID NO: 172937 - DNA, 22 bp, Artificial sequence
  SiRNA target sequence
tcattatggatatttagaacac

SEQ ID NO: 172938 - DNA, 22 bp, Artificial sequence
  SiRNA target sequence
cattatggatatttagaacaca

SEQ ID NO: 172939 - DNA, 22 bp, Artificial sequence
  SiRNA target sequence
attatggatatttagaacacat

SEQ ID NO: 172940 - DNA, 22 bp, Artificial sequence
  SiRNA target sequence
ttatggatatttagaacacata

SEQ ID NO: 172941 - DNA, 22 bp, Artificial sequence
  SiRNA target sequence
tatggatatttagaacacatat

SEQ ID NO: 172942 - DNA, 22 bp, Artificial sequence
  SiRNA target sequence
atggatatttagaacacatatt

SEQ ID NO: 172943 - DNA, 22 bp, Artificial sequence
  SiRNA target sequence
tggatatttagaacacatatta

SEQ ID NO: 172944 - DNA, 22 bp, Artificial sequence
  SiRNA target sequence
ggatatttagaacacatattaa

SEQ ID NO: 172945 - DNA, 22 bp, Artificial sequence
  SiRNA target sequence
gatatttagaacacatattaaa

SEQ ID NO: 172946 - DNA, 22 bp, Artificial sequence
  SiRNA target sequence
atatttagaacacatattaaat

SEQ ID NO: 172947 - DNA, 22 bp, Artificial sequence
  SiRNA target sequence
tatttagaacacatattaaata

SEQ ID NO: 172948 - DNA, 22 bp, Artificial sequence
  SiRNA target sequence
atttagaacacatattaaataa

SEQ ID NO: 172949 - DNA, 22 bp, Artificial sequence
  SiRNA target sequence
tttagaacacatattaaataag

SEQ ID NO: 172950 - DNA, 22 bp, Artificial sequence
  SiRNA target sequence
ttagaacacatattaaataaga

SEQ ID NO: 172951 - DNA, 22 bp, Artificial sequence
  SiRNA target sequence
tagaacacatattaaataagaa

SEQ ID NO: 172952 - DNA, 22 bp, Artificial sequence
  SiRNA target sequence
agaacacatattaaataagaag

SEQ ID NO: 172953 - DNA, 22 bp, Artificial sequence
  SiRNA target sequence
gaacacatattaaataagaaga

SEQ ID NO: 172954 - DNA, 22 bp, Artificial sequence
  SiRNA target sequence
aacacatattaaataagaagaa

SEQ ID NO: 172955 - DNA, 22 bp, Artificial sequence
  SiRNA target sequence
acacatattaaataagaagaac

SEQ ID NO: 172956 - DNA, 22 bp, Artificial sequence
  SiRNA target sequence
cacatattaaataagaagaaca

SEQ ID NO: 172957 - DNA, 22 bp, Artificial sequence
  SiRNA target sequence
acatattaaataagaagaacaa

SEQ ID NO: 172958 - DNA, 22 bp, Artificial sequence
  SiRNA target sequence
catattaaataagaagaacaat

SEQ ID NO: 172959 - DNA, 22 bp, Artificial sequence
  SiRNA target sequence
atattaaataagaagaacaatt

SEQ ID NO: 172960 - DNA, 22 bp, Artificial sequence
  SiRNA target sequence
tattaaataagaagaacaatta

SEQ ID NO: 172961 - DNA, 22 bp, Artificial sequence
  SiRNA target sequence
attaaataagaagaacaattat

SEQ ID NO: 172962 - DNA, 22 bp, Artificial sequence
  SiRNA target sequence
ttaaataagaagaacaattatt

SEQ ID NO: 172963 - DNA, 22 bp, Artificial sequence
  SiRNA target sequence
taaataagaagaacaattattt

SEQ ID NO: 172964 - DNA, 22 bp, Artificial sequence
  SiRNA target sequence
aaataagaagaacaattattta

SEQ ID NO: 172965 - DNA, 22 bp, Artificial sequence
  SiRNA target sequence
aataagaagaacaattatttaa

SEQ ID NO: 172966 - DNA, 22 bp, Artificial sequence
  SiRNA target sequence
ataagaagaacaattatttaac

SEQ ID NO: 172967 - DNA, 22 bp, Artificial sequence
  SiRNA target sequence
taagaagaacaattatttaaca

SEQ ID NO: 172968 - DNA, 22 bp, Artificial sequence
  SiRNA target sequence
aagaagaacaattatttaacaa

SEQ ID NO: 172969 - DNA, 22 bp, Artificial sequence
  SiRNA target sequence
agaagaacaattatttaacaaa

SEQ ID NO: 172970 - DNA, 22 bp, Artificial sequence
  SiRNA target sequence
gaagaacaattatttaacaaaa

SEQ ID NO: 172971 - DNA, 22 bp, Artificial sequence
  SiRNA target sequence
aagaacaattatttaacaaaaa

SEQ ID NO: 172972 - DNA, 22 bp, Artificial sequence
  SiRNA target sequence
agaacaattatttaacaaaaaa

SEQ ID NO: 172973 - DNA, 22 bp, Artificial sequence
  SiRNA target sequence
gaacaattatttaacaaaaaat

SEQ ID NO: 172974 - DNA, 22 bp, Artificial sequence
  SiRNA target sequence
aacaattatttaacaaaaaatg

SEQ ID NO: 172975 - DNA, 22 bp, Artificial sequence
  SiRNA target sequence
acaattatttaacaaaaaatga

SEQ ID NO: 172976 - DNA, 22 bp, Artificial sequence
  SiRNA target sequence
caattatttaacaaaaaatgat

SEQ ID NO: 172977 - DNA, 22 bp, Artificial sequence
  SiRNA target sequence
aattatttaacaaaaaatgata

SEQ ID NO: 172978 - DNA, 22 bp, Artificial sequence
  SiRNA target sequence
attatttaacaaaaaatgatag

SEQ ID NO: 172979 - DNA, 22 bp, Artificial sequence
  SiRNA target sequence
ttatttaacaaaaaatgatagt

SEQ ID NO: 172980 - DNA, 22 bp, Artificial sequence
  SiRNA target sequence
tatttaacaaaaaatgatagta

SEQ ID NO: 172981 - DNA, 22 bp, Artificial sequence
  SiRNA target sequence
atttaacaaaaaatgatagtat

SEQ ID NO: 172982 - DNA, 22 bp, Artificial sequence
  SiRNA target sequence
tttaacaaaaaatgatagtata

SEQ ID NO: 172983 - DNA, 22 bp, Artificial sequence
  SiRNA target sequence
ttaacaaaaaatgatagtataa

SEQ ID NO: 172984 - DNA, 22 bp, Artificial sequence
  SiRNA target sequence
taacaaaaaatgatagtataaa

SEQ ID NO: 172985 - DNA, 22 bp, Artificial sequence
  SiRNA target sequence
aacaaaaaatgatagtataaaa

SEQ ID NO: 172986 - DNA, 22 bp, Artificial sequence
  SiRNA target sequence
acaaaaaatgatagtataaaaa

SEQ ID NO: 172987 - DNA, 22 bp, Artificial sequence
  SiRNA target sequence
caaaaaatgatagtataaaaat

SEQ ID NO: 172988 - DNA, 22 bp, Artificial sequence
  SiRNA target sequence
aaaaaatgatagtataaaaata

SEQ ID NO: 172989 - DNA, 22 bp, Artificial sequence
  SiRNA target sequence
aaaaatgatagtataaaaatat

SEQ ID NO: 172990 - DNA, 22 bp, Artificial sequence
  SiRNA target sequence
aaaatgatagtataaaaatatt

SEQ ID NO: 172991 - DNA, 22 bp, Artificial sequence
  SiRNA target sequence
aaatgatagtataaaaatattt

SEQ ID NO: 172992 - DNA, 22 bp, Artificial sequence
  SiRNA target sequence
aatgatagtataaaaatattta

SEQ ID NO: 172993 - DNA, 22 bp, Artificial sequence
  SiRNA target sequence
atgatagtataaaaatatttaa

SEQ ID NO: 172994 - DNA, 22 bp, Artificial sequence
  SiRNA target sequence
tgatagtataaaaatatttaac

SEQ ID NO: 172995 - DNA, 22 bp, Artificial sequence
  SiRNA target sequence
gatagtataaaaatatttaaca

SEQ ID NO: 172996 - DNA, 22 bp, Artificial sequence
  SiRNA target sequence
atagtataaaaatatttaacag

SEQ ID NO: 172997 - DNA, 22 bp, Artificial sequence
  SiRNA target sequence
tagtataaaaatatttaacagt

SEQ ID NO: 172998 - DNA, 22 bp, Artificial sequence
  SiRNA target sequence
agtataaaaatatttaacagta

SEQ ID NO: 172999 - DNA, 22 bp, Artificial sequence
  SiRNA target sequence
gtataaaaatatttaacagtaa

SEQ ID NO: 173000 - DNA, 22 bp, Artificial sequence
  SiRNA target sequence
tataaaaatatttaacagtaaa

SEQ ID NO: 173001 - DNA, 22 bp, Artificial sequence
  SiRNA target sequence
ataaaaatatttaacagtaaaa

SEQ ID NO: 173002 - DNA, 22 bp, Artificial sequence
  SiRNA target sequence
taaaaatatttaacagtaaaaa

SEQ ID NO: 173003 - DNA, 22 bp, Artificial sequence
  SiRNA target sequence
aaaaatatttaacagtaaaaat

SEQ ID NO: 173004 - DNA, 22 bp, Artificial sequence
  SiRNA target sequence
aaaatatttaacagtaaaaatg

SEQ ID NO: 173005 - DNA, 22 bp, Artificial sequence
  SiRNA target sequence
aaatatttaacagtaaaaatga

SEQ ID NO: 173006 - DNA, 22 bp, Artificial sequence
  SiRNA target sequence
aatatttaacagtaaaaatgag

SEQ ID NO: 173007 - DNA, 22 bp, Artificial sequence
  SiRNA target sequence
atatttaacagtaaaaatgagg

SEQ ID NO: 173008 - DNA, 22 bp, Artificial sequence
  SiRNA target sequence
tatttaacagtaaaaatgagga

SEQ ID NO: 173009 - DNA, 22 bp, Artificial sequence
  SiRNA target sequence
atttaacagtaaaaatgaggag

SEQ ID NO: 173010 - DNA, 22 bp, Artificial sequence
  SiRNA target sequence
tttaacagtaaaaatgaggagg

SEQ ID NO: 173011 - DNA, 22 bp, Artificial sequence
  SiRNA target sequence
ttaacagtaaaaatgaggaggt

SEQ ID NO: 173012 - DNA, 22 bp, Artificial sequence
  SiRNA target sequence
taacagtaaaaatgaggaggta

SEQ ID NO: 173013 - DNA, 22 bp, Artificial sequence
  SiRNA target sequence
aacagtaaaaatgaggaggtaa

SEQ ID NO: 173014 - DNA, 22 bp, Artificial sequence
  SiRNA target sequence
acagtaaaaatgaggaggtaag

SEQ ID NO: 173015 - DNA, 22 bp, Artificial sequence
  SiRNA target sequence
cagtaaaaatgaggaggtaagg

SEQ ID NO: 173016 - DNA, 22 bp, Artificial sequence
  SiRNA target sequence
agtaaaaatgaggaggtaaggt

SEQ ID NO: 173017 - DNA, 22 bp, Artificial sequence
  SiRNA target sequence
gtaaaaatgaggaggtaaggtt

SEQ ID NO: 173018 - DNA, 22 bp, Artificial sequence
  SiRNA target sequence
taaaaatgaggaggtaaggtta

SEQ ID NO: 173019 - DNA, 22 bp, Artificial sequence
  SiRNA target sequence
aaaaatgaggaggtaaggttaa

SEQ ID NO: 173020 - DNA, 22 bp, Artificial sequence
  SiRNA target sequence
aaaatgaggaggtaaggttaaa

SEQ ID NO: 173021 - DNA, 22 bp, Artificial sequence
  SiRNA target sequence
aaatgaggaggtaaggttaaat

SEQ ID NO: 173022 - DNA, 22 bp, Artificial sequence
  SiRNA target sequence
aatgaggaggtaaggttaaatg

SEQ ID NO: 173023 - DNA, 22 bp, Artificial sequence
  SiRNA target sequence
atgaggaggtaaggttaaatgg

SEQ ID NO: 173024 - DNA, 22 bp, Artificial sequence
  SiRNA target sequence
tgaggaggtaaggttaaatgga

SEQ ID NO: 173025 - DNA, 22 bp, Artificial sequence
  SiRNA target sequence
gaggaggtaaggttaaatggaa

SEQ ID NO: 173026 - DNA, 22 bp, Artificial sequence
  SiRNA target sequence
aggaggtaaggttaaatggaaa

SEQ ID NO: 173027 - DNA, 22 bp, Artificial sequence
  SiRNA target sequence
ggaggtaaggttaaatggaaaa

SEQ ID NO: 173028 - DNA, 22 bp, Artificial sequence
  SiRNA target sequence
gaggtaaggttaaatggaaaaa

SEQ ID NO: 173029 - DNA, 22 bp, Artificial sequence
  SiRNA target sequence
aggtaaggttaaatggaaaaag

SEQ ID NO: 173030 - DNA, 22 bp, Artificial sequence
  SiRNA target sequence
ggtaaggttaaatggaaaaaga

SEQ ID NO: 173031 - DNA, 22 bp, Artificial sequence
  SiRNA target sequence
gtaaggttaaatggaaaaagaa

SEQ ID NO: 173032 - DNA, 22 bp, Artificial sequence
  SiRNA target sequence
taaggttaaatggaaaaagaaa

SEQ ID NO: 173033 - DNA, 22 bp, Artificial sequence
  SiRNA target sequence
aaggttaaatggaaaaagaaaa

SEQ ID NO: 173034 - DNA, 22 bp, Artificial sequence
  SiRNA target sequence
aggttaaatggaaaaagaaaat

SEQ ID NO: 173035 - DNA, 22 bp, Artificial sequence
  SiRNA target sequence
ggttaaatggaaaaagaaaatt

SEQ ID NO: 173036 - DNA, 22 bp, Artificial sequence
  SiRNA target sequence
gttaaatggaaaaagaaaatta

SEQ ID NO: 173037 - DNA, 22 bp, Artificial sequence
  SiRNA target sequence
ttaaatggaaaaagaaaattaa

SEQ ID NO: 173038 - DNA, 22 bp, Artificial sequence
  SiRNA target sequence
taaatggaaaaagaaaattaaa

SEQ ID NO: 173039 - DNA, 22 bp, Artificial sequence
  SiRNA target sequence
aaatggaaaaagaaaattaaat

SEQ ID NO: 173040 - DNA, 22 bp, Artificial sequence
  SiRNA target sequence
aatggaaaaagaaaattaaata

SEQ ID NO: 173041 - DNA, 22 bp, Artificial sequence
  SiRNA target sequence
atggaaaaagaaaattaaatat

SEQ ID NO: 173042 - DNA, 22 bp, Artificial sequence
  SiRNA target sequence
tggaaaaagaaaattaaatatt

SEQ ID NO: 173043 - DNA, 22 bp, Artificial sequence
  SiRNA target sequence
ggaaaaagaaaattaaatatta

SEQ ID NO: 173044 - DNA, 22 bp, Artificial sequence
  SiRNA target sequence
gaaaaagaaaattaaatattaa

SEQ ID NO: 173045 - DNA, 22 bp, Artificial sequence
  SiRNA target sequence
aaaaagaaaattaaatattaac

SEQ ID NO: 173046 - DNA, 22 bp, Artificial sequence
  SiRNA target sequence
aaaagaaaattaaatattaaca

SEQ ID NO: 173047 - DNA, 22 bp, Artificial sequence
  SiRNA target sequence
aaagaaaattaaatattaacac

SEQ ID NO: 173048 - DNA, 22 bp, Artificial sequence
  SiRNA target sequence
aagaaaattaaatattaacaca

SEQ ID NO: 173049 - DNA, 22 bp, Artificial sequence
  SiRNA target sequence
agaaaattaaatattaacacag

SEQ ID NO: 173050 - DNA, 22 bp, Artificial sequence
  SiRNA target sequence
gaaaattaaatattaacacagt

SEQ ID NO: 173051 - DNA, 22 bp, Artificial sequence
  SiRNA target sequence
aaaattaaatattaacacagtt

SEQ ID NO: 173052 - DNA, 22 bp, Artificial sequence
  SiRNA target sequence
aaattaaatattaacacagtta

SEQ ID NO: 173053 - DNA, 22 bp, Artificial sequence
  SiRNA target sequence
aattaaatattaacacagttac

SEQ ID NO: 173054 - DNA, 22 bp, Artificial sequence
  SiRNA target sequence
attaaatattaacacagttaca

SEQ ID NO: 173055 - DNA, 22 bp, Artificial sequence
  SiRNA target sequence
ttaaatattaacacagttacat

SEQ ID NO: 173056 - DNA, 22 bp, Artificial sequence
  SiRNA target sequence
taaatattaacacagttacatt

SEQ ID NO: 173057 - DNA, 22 bp, Artificial sequence
  SiRNA target sequence
aaatattaacacagttacatta

SEQ ID NO: 173058 - DNA, 22 bp, Artificial sequence
  SiRNA target sequence
aatattaacacagttacattaa

SEQ ID NO: 173059 - DNA, 22 bp, Artificial sequence
  SiRNA target sequence
atattaacacagttacattaaa

SEQ ID NO: 173060 - DNA, 22 bp, Artificial sequence
  SiRNA target sequence
tattaacacagttacattaaat

SEQ ID NO: 173061 - DNA, 22 bp, Artificial sequence
  SiRNA target sequence
attaacacagttacattaaata

SEQ ID NO: 173062 - DNA, 22 bp, Artificial sequence
  SiRNA target sequence
ttaacacagttacattaaataa

SEQ ID NO: 173063 - DNA, 22 bp, Artificial sequence
  SiRNA target sequence
taacacagttacattaaataaa

SEQ ID NO: 173064 - DNA, 22 bp, Artificial sequence
  SiRNA target sequence
aacacagttacattaaataaaa

SEQ ID NO: 173065 - DNA, 22 bp, Artificial sequence
  SiRNA target sequence
acacagttacattaaataaaat

SEQ ID NO: 173066 - DNA, 22 bp, Artificial sequence
  SiRNA target sequence
cacagttacattaaataaaatt

SEQ ID NO: 173067 - DNA, 22 bp, Artificial sequence
  SiRNA target sequence
acagttacattaaataaaatta

SEQ ID NO: 173068 - DNA, 22 bp, Artificial sequence
  SiRNA target sequence
cagttacattaaataaaattaa

SEQ ID NO: 173069 - DNA, 22 bp, Artificial sequence
  SiRNA target sequence
agttacattaaataaaattaat

SEQ ID NO: 173070 - DNA, 22 bp, Artificial sequence
  SiRNA target sequence
gttacattaaataaaattaata

SEQ ID NO: 173071 - DNA, 22 bp, Artificial sequence
  SiRNA target sequence
ttacattaaataaaattaatat

SEQ ID NO: 173072 - DNA, 22 bp, Artificial sequence
  SiRNA target sequence
tacattaaataaaattaatata

SEQ ID NO: 173073 - DNA, 22 bp, Artificial sequence
  SiRNA target sequence
acattaaataaaattaatatac

SEQ ID NO: 173074 - DNA, 22 bp, Artificial sequence
  SiRNA target sequence
cattaaataaaattaatatacc

SEQ ID NO: 173075 - DNA, 22 bp, Artificial sequence
  SiRNA target sequence
attaaataaaattaatatacct

SEQ ID NO: 173076 - DNA, 22 bp, Artificial sequence
  SiRNA target sequence
ttaaataaaattaatatacctg

SEQ ID NO: 173077 - DNA, 22 bp, Artificial sequence
  SiRNA target sequence
taaataaaattaatatacctga

SEQ ID NO: 173078 - DNA, 22 bp, Artificial sequence
  SiRNA target sequence
aaataaaattaatatacctgag

SEQ ID NO: 173079 - DNA, 22 bp, Artificial sequence
  SiRNA target sequence
aataaaattaatatacctgaga

SEQ ID NO: 173080 - DNA, 22 bp, Artificial sequence
  SiRNA target sequence
ataaaattaatatacctgagat

SEQ ID NO: 173081 - DNA, 22 bp, Artificial sequence
  SiRNA target sequence
taaaattaatatacctgagata

SEQ ID NO: 173082 - DNA, 22 bp, Artificial sequence
  SiRNA target sequence
aaaattaatatacctgagatag

SEQ ID NO: 173083 - DNA, 22 bp, Artificial sequence
  SiRNA target sequence
aaattaatatacctgagataga

SEQ ID NO: 173084 - DNA, 22 bp, Artificial sequence
  SiRNA target sequence
aattaatatacctgagatagat

SEQ ID NO: 173085 - DNA, 22 bp, Artificial sequence
  SiRNA target sequence
attaatatacctgagatagatt

SEQ ID NO: 173086 - DNA, 22 bp, Artificial sequence
  SiRNA target sequence
ttaatatacctgagatagatta

SEQ ID NO: 173087 - DNA, 22 bp, Artificial sequence
  SiRNA target sequence
taatatacctgagatagattat

SEQ ID NO: 173088 - DNA, 22 bp, Artificial sequence
  SiRNA target sequence
aatatacctgagatagattata

SEQ ID NO: 173089 - DNA, 22 bp, Artificial sequence
  SiRNA target sequence
atatacctgagatagattataa

SEQ ID NO: 173090 - DNA, 22 bp, Artificial sequence
  SiRNA target sequence
tatacctgagatagattataaa

SEQ ID NO: 173091 - DNA, 22 bp, Artificial sequence
  SiRNA target sequence
atacctgagatagattataaat

SEQ ID NO: 173092 - DNA, 22 bp, Artificial sequence
  SiRNA target sequence
tacctgagatagattataaata

SEQ ID NO: 173093 - DNA, 22 bp, Artificial sequence
  SiRNA target sequence
acctgagatagattataaatat

SEQ ID NO: 173094 - DNA, 22 bp, Artificial sequence
  SiRNA target sequence
cctgagatagattataaatata

SEQ ID NO: 173095 - DNA, 22 bp, Artificial sequence
  SiRNA target sequence
ctgagatagattataaatataa

SEQ ID NO: 173096 - DNA, 22 bp, Artificial sequence
  SiRNA target sequence
tgagatagattataaatataaa

SEQ ID NO: 173097 - DNA, 22 bp, Artificial sequence
  SiRNA target sequence
gagatagattataaatataaaa

SEQ ID NO: 173098 - DNA, 22 bp, Artificial sequence
  SiRNA target sequence
agatagattataaatataaaaa

SEQ ID NO: 173099 - DNA, 22 bp, Artificial sequence
  SiRNA target sequence
gatagattataaatataaaaat

SEQ ID NO: 173100 - DNA, 22 bp, Artificial sequence
  SiRNA target sequence
atagattataaatataaaaatg

SEQ ID NO: 173101 - DNA, 22 bp, Artificial sequence
  SiRNA target sequence
tagattataaatataaaaatgg

SEQ ID NO: 173102 - DNA, 22 bp, Artificial sequence
  SiRNA target sequence
agattataaatataaaaatgga

SEQ ID NO: 173103 - DNA, 22 bp, Artificial sequence
  SiRNA target sequence
gattataaatataaaaatggag

SEQ ID NO: 173104 - DNA, 22 bp, Artificial sequence
  SiRNA target sequence
attataaatataaaaatggagt

SEQ ID NO: 173105 - DNA, 22 bp, Artificial sequence
  SiRNA target sequence
ttataaatataaaaatggagtg

SEQ ID NO: 173106 - DNA, 22 bp, Artificial sequence
  SiRNA target sequence
tataaatataaaaatggagtgt

SEQ ID NO: 173107 - DNA, 22 bp, Artificial sequence
  SiRNA target sequence
ataaatataaaaatggagtgtt

SEQ ID NO: 173108 - DNA, 22 bp, Artificial sequence
  SiRNA target sequence
taaatataaaaatggagtgttt

SEQ ID NO: 173109 - DNA, 22 bp, Artificial sequence
  SiRNA target sequence
aaatataaaaatggagtgttta

SEQ ID NO: 173110 - DNA, 22 bp, Artificial sequence
  SiRNA target sequence
aatataaaaatggagtgtttac

SEQ ID NO: 173111 - DNA, 22 bp, Artificial sequence
  SiRNA target sequence
atataaaaatggagtgtttaca

SEQ ID NO: 173112 - DNA, 22 bp, Artificial sequence
  SiRNA target sequence
tataaaaatggagtgtttacat

SEQ ID NO: 173113 - DNA, 22 bp, Artificial sequence
  SiRNA target sequence
ataaaaatggagtgtttacata

SEQ ID NO: 173114 - DNA, 22 bp, Artificial sequence
  SiRNA target sequence
taaaaatggagtgtttacatat

SEQ ID NO: 173115 - DNA, 22 bp, Artificial sequence
  SiRNA target sequence
aaaaatggagtgtttacatata

SEQ ID NO: 173116 - DNA, 22 bp, Artificial sequence
  SiRNA target sequence
aaaatggagtgtttacatatac

SEQ ID NO: 173117 - DNA, 22 bp, Artificial sequence
  SiRNA target sequence
aaatggagtgtttacatataca

SEQ ID NO: 173118 - DNA, 22 bp, Artificial sequence
  SiRNA target sequence
aatggagtgtttacatatacac

SEQ ID NO: 173119 - DNA, 22 bp, Artificial sequence
  SiRNA target sequence
atggagtgtttacatatacaca

SEQ ID NO: 173120 - DNA, 22 bp, Artificial sequence
  SiRNA target sequence
tggagtgtttacatatacacag

SEQ ID NO: 173121 - DNA, 22 bp, Artificial sequence
  SiRNA target sequence
ggagtgtttacatatacacaga

SEQ ID NO: 173122 - DNA, 22 bp, Artificial sequence
  SiRNA target sequence
gagtgtttacatatacacagat

SEQ ID NO: 173123 - DNA, 22 bp, Artificial sequence
  SiRNA target sequence
agtgtttacatatacacagatc

SEQ ID NO: 173124 - DNA, 22 bp, Artificial sequence
  SiRNA target sequence
gtgtttacatatacacagatca

SEQ ID NO: 173125 - DNA, 22 bp, Artificial sequence
  SiRNA target sequence
tgtttacatatacacagatcaa

SEQ ID NO: 173126 - DNA, 22 bp, Artificial sequence
  SiRNA target sequence
gtttacatatacacagatcaaa

SEQ ID NO: 173127 - DNA, 22 bp, Artificial sequence
  SiRNA target sequence
tttacatatacacagatcaaaa

SEQ ID NO: 173128 - DNA, 22 bp, Artificial sequence
  SiRNA target sequence
ttacatatacacagatcaaaaa

SEQ ID NO: 173129 - DNA, 22 bp, Artificial sequence
  SiRNA target sequence
tacatatacacagatcaaaaat

SEQ ID NO: 173130 - DNA, 22 bp, Artificial sequence
  SiRNA target sequence
acatatacacagatcaaaaata

SEQ ID NO: 173131 - DNA, 22 bp, Artificial sequence
  SiRNA target sequence
catatacacagatcaaaaataa

SEQ ID NO: 173132 - DNA, 22 bp, Artificial sequence
  SiRNA target sequence
atatacacagatcaaaaataat

SEQ ID NO: 173133 - DNA, 22 bp, Artificial sequence
  SiRNA target sequence
tatacacagatcaaaaataata

SEQ ID NO: 173134 - DNA, 22 bp, Artificial sequence
  SiRNA target sequence
atacacagatcaaaaataataa

SEQ ID NO: 173135 - DNA, 22 bp, Artificial sequence
  SiRNA target sequence
tacacagatcaaaaataataag

SEQ ID NO: 173136 - DNA, 22 bp, Artificial sequence
  SiRNA target sequence
acacagatcaaaaataataaga

SEQ ID NO: 173137 - DNA, 22 bp, Artificial sequence
  SiRNA target sequence
cacagatcaaaaataataagaa

SEQ ID NO: 173138 - DNA, 22 bp, Artificial sequence
  SiRNA target sequence
acagatcaaaaataataagaaa

SEQ ID NO: 173139 - DNA, 22 bp, Artificial sequence
  SiRNA target sequence
cagatcaaaaataataagaaaa

SEQ ID NO: 173140 - DNA, 22 bp, Artificial sequence
  SiRNA target sequence
agatcaaaaataataagaaaaa

SEQ ID NO: 173141 - DNA, 22 bp, Artificial sequence
  SiRNA target sequence
gatcaaaaataataagaaaaaa

SEQ ID NO: 173142 - DNA, 22 bp, Artificial sequence
  SiRNA target sequence
atcaaaaataataagaaaaaaa

SEQ ID NO: 173143 - DNA, 22 bp, Artificial sequence
  SiRNA target sequence
tcaaaaataataagaaaaaaaa

SEQ ID NO: 173144 - DNA, 22 bp, Artificial sequence
  SiRNA target sequence
caaaaataataagaaaaaaaaa

SEQ ID NO: 173145 - DNA, 22 bp, Artificial sequence
  SiRNA target sequence
aaaaataataagaaaaaaaaat

SEQ ID NO: 173146 - DNA, 22 bp, Artificial sequence
  SiRNA target sequence
aaaataataagaaaaaaaaata

SEQ ID NO: 173147 - DNA, 22 bp, Artificial sequence
  SiRNA target sequence
aaataataagaaaaaaaaatat

SEQ ID NO: 173148 - DNA, 22 bp, Artificial sequence
  SiRNA target sequence
aataataagaaaaaaaaatatt

SEQ ID NO: 173149 - DNA, 22 bp, Artificial sequence
  SiRNA target sequence
ataataagaaaaaaaaatattt

SEQ ID NO: 173150 - DNA, 22 bp, Artificial sequence
  SiRNA target sequence
taataagaaaaaaaaatattta

SEQ ID NO: 173151 - DNA, 22 bp, Artificial sequence
  SiRNA target sequence
aataagaaaaaaaaatatttaa

SEQ ID NO: 173152 - DNA, 22 bp, Artificial sequence
  SiRNA target sequence
ataagaaaaaaaaatatttaag

SEQ ID NO: 173153 - DNA, 22 bp, Artificial sequence
  SiRNA target sequence
taagaaaaaaaaatatttaaga

SEQ ID NO: 173154 - DNA, 22 bp, Artificial sequence
  SiRNA target sequence
aagaaaaaaaaatatttaagaa

SEQ ID NO: 173155 - DNA, 22 bp, Artificial sequence
  SiRNA target sequence
agaaaaaaaaatatttaagaat

SEQ ID NO: 173156 - DNA, 22 bp, Artificial sequence
  SiRNA target sequence
gaaaaaaaaatatttaagaata

SEQ ID NO: 173157 - DNA, 22 bp, Artificial sequence
  SiRNA target sequence
aaaaaaaaatatttaagaatat

SEQ ID NO: 173158 - DNA, 22 bp, Artificial sequence
  SiRNA target sequence
aaaaaaaatatttaagaatatt

SEQ ID NO: 173159 - DNA, 22 bp, Artificial sequence
  SiRNA target sequence
aaaaaaatatttaagaatattg

SEQ ID NO: 173160 - DNA, 22 bp, Artificial sequence
  SiRNA target sequence
aaaaaatatttaagaatattgg

SEQ ID NO: 173161 - DNA, 22 bp, Artificial sequence
  SiRNA target sequence
aaaaatatttaagaatattggg

SEQ ID NO: 173162 - DNA, 22 bp, Artificial sequence
  SiRNA target sequence
aaaatatttaagaatattgggt

SEQ ID NO: 173163 - DNA, 22 bp, Artificial sequence
  SiRNA target sequence
aaatatttaagaatattgggtc

SEQ ID NO: 173164 - DNA, 22 bp, Artificial sequence
  SiRNA target sequence
aatatttaagaatattgggtct

SEQ ID NO: 173165 - DNA, 22 bp, Artificial sequence
  SiRNA target sequence
atatttaagaatattgggtcta

SEQ ID NO: 173166 - DNA, 22 bp, Artificial sequence
  SiRNA target sequence
tatttaagaatattgggtctag

SEQ ID NO: 173167 - DNA, 22 bp, Artificial sequence
  SiRNA target sequence
atttaagaatattgggtctaga

SEQ ID NO: 173168 - DNA, 22 bp, Artificial sequence
  SiRNA target sequence
tttaagaatattgggtctagaa

SEQ ID NO: 173169 - DNA, 22 bp, Artificial sequence
  SiRNA target sequence
ttaagaatattgggtctagaac

SEQ ID NO: 173170 - DNA, 22 bp, Artificial sequence
  SiRNA target sequence
taagaatattgggtctagaacc

SEQ ID NO: 173171 - DNA, 22 bp, Artificial sequence
  SiRNA target sequence
aagaatattgggtctagaacct

SEQ ID NO: 173172 - DNA, 22 bp, Artificial sequence
  SiRNA target sequence
agaatattgggtctagaacctt

SEQ ID NO: 173173 - DNA, 22 bp, Artificial sequence
  SiRNA target sequence
gaatattgggtctagaaccttt

SEQ ID NO: 173174 - DNA, 22 bp, Artificial sequence
  SiRNA target sequence
aatattgggtctagaacctttt

SEQ ID NO: 173175 - DNA, 22 bp, Artificial sequence
  SiRNA target sequence
atattgggtctagaaccttttc

SEQ ID NO: 173176 - DNA, 22 bp, Artificial sequence
  SiRNA target sequence
tattgggtctagaaccttttct

SEQ ID NO: 173177 - DNA, 22 bp, Artificial sequence
  SiRNA target sequence
attgggtctagaaccttttctt

SEQ ID NO: 173178 - DNA, 22 bp, Artificial sequence
  SiRNA target sequence
ttgggtctagaaccttttctta

SEQ ID NO: 173179 - DNA, 22 bp, Artificial sequence
  SiRNA target sequence
tgggtctagaaccttttcttaa

SEQ ID NO: 173180 - DNA, 22 bp, Artificial sequence
  SiRNA target sequence
gggtctagaaccttttcttaat

SEQ ID NO: 173181 - DNA, 22 bp, Artificial sequence
  SiRNA target sequence
ggtctagaaccttttcttaatt

SEQ ID NO: 173182 - DNA, 22 bp, Artificial sequence
  SiRNA target sequence
gtctagaaccttttcttaattt

SEQ ID NO: 173183 - DNA, 22 bp, Artificial sequence
  SiRNA target sequence
tctagaaccttttcttaatttt

SEQ ID NO: 173184 - DNA, 22 bp, Artificial sequence
  SiRNA target sequence
ctagaaccttttcttaatttta

SEQ ID NO: 173185 - DNA, 22 bp, Artificial sequence
  SiRNA target sequence
tagaaccttttcttaattttat

SEQ ID NO: 173186 - DNA, 22 bp, Artificial sequence
  SiRNA target sequence
agaaccttttcttaattttatt

SEQ ID NO: 173187 - DNA, 22 bp, Artificial sequence
  SiRNA target sequence
gaaccttttcttaattttatta

SEQ ID NO: 173188 - DNA, 22 bp, Artificial sequence
  SiRNA target sequence
aaccttttcttaattttattaa

SEQ ID NO: 173189 - DNA, 22 bp, Artificial sequence
  SiRNA target sequence
accttttcttaattttattaag

SEQ ID NO: 173190 - DNA, 22 bp, Artificial sequence
  SiRNA target sequence
ccttttcttaattttattaagg

SEQ ID NO: 173191 - DNA, 22 bp, Artificial sequence
  SiRNA target sequence
cttttcttaattttattaagga

SEQ ID NO: 173192 - DNA, 22 bp, Artificial sequence
  SiRNA target sequence
ttttcttaattttattaaggaa

SEQ ID NO: 173193 - DNA, 22 bp, Artificial sequence
  SiRNA target sequence
tttcttaattttattaaggaaa

SEQ ID NO: 173194 - DNA, 22 bp, Artificial sequence
  SiRNA target sequence
ttcttaattttattaaggaaag

SEQ ID NO: 173195 - DNA, 22 bp, Artificial sequence
  SiRNA target sequence
tcttaattttattaaggaaagt

SEQ ID NO: 173196 - DNA, 22 bp, Artificial sequence
  SiRNA target sequence
cttaattttattaaggaaagta

SEQ ID NO: 173197 - DNA, 22 bp, Artificial sequence
  SiRNA target sequence
ttaattttattaaggaaagtaa

SEQ ID NO: 173198 - DNA, 22 bp, Artificial sequence
  SiRNA target sequence
taattttattaaggaaagtaaa

SEQ ID NO: 173199 - DNA, 22 bp, Artificial sequence
  SiRNA target sequence
aattttattaaggaaagtaaac

SEQ ID NO: 173200 - DNA, 22 bp, Artificial sequence
  SiRNA target sequence
attttattaaggaaagtaaaca

SEQ ID NO: 173201 - DNA, 22 bp, Artificial sequence
  SiRNA target sequence
ttttattaaggaaagtaaacat

SEQ ID NO: 173202 - DNA, 22 bp, Artificial sequence
  SiRNA target sequence
tttattaaggaaagtaaacata

SEQ ID NO: 173203 - DNA, 22 bp, Artificial sequence
  SiRNA target sequence
ttattaaggaaagtaaacataa

SEQ ID NO: 173204 - DNA, 22 bp, Artificial sequence
  SiRNA target sequence
tattaaggaaagtaaacataaa

SEQ ID NO: 173205 - DNA, 22 bp, Artificial sequence
  SiRNA target sequence
attaaggaaagtaaacataaag

SEQ ID NO: 173206 - DNA, 22 bp, Artificial sequence
  SiRNA target sequence
ttaaggaaagtaaacataaaga

SEQ ID NO: 173207 - DNA, 22 bp, Artificial sequence
  SiRNA target sequence
taaggaaagtaaacataaagaa

SEQ ID NO: 173208 - DNA, 22 bp, Artificial sequence
  SiRNA target sequence
aaggaaagtaaacataaagaat

SEQ ID NO: 173209 - DNA, 22 bp, Artificial sequence
  SiRNA target sequence
aggaaagtaaacataaagaatt

SEQ ID NO: 173210 - DNA, 22 bp, Artificial sequence
  SiRNA target sequence
ggaaagtaaacataaagaatta

SEQ ID NO: 173211 - DNA, 22 bp, Artificial sequence
  SiRNA target sequence
gaaagtaaacataaagaattag

SEQ ID NO: 173212 - DNA, 22 bp, Artificial sequence
  SiRNA target sequence
aaagtaaacataaagaattaga

SEQ ID NO: 173213 - DNA, 22 bp, Artificial sequence
  SiRNA target sequence
aagtaaacataaagaattagaa

SEQ ID NO: 173214 - DNA, 22 bp, Artificial sequence
  SiRNA target sequence
agtaaacataaagaattagaat

SEQ ID NO: 173215 - DNA, 22 bp, Artificial sequence
  SiRNA target sequence
gtaaacataaagaattagaata

SEQ ID NO: 173216 - DNA, 22 bp, Artificial sequence
  SiRNA target sequence
taaacataaagaattagaatat

SEQ ID NO: 173217 - DNA, 22 bp, Artificial sequence
  SiRNA target sequence
aaacataaagaattagaatatg

SEQ ID NO: 173218 - DNA, 22 bp, Artificial sequence
  SiRNA target sequence
aacataaagaattagaatatga

SEQ ID NO: 173219 - DNA, 22 bp, Artificial sequence
  SiRNA target sequence
acataaagaattagaatatgat

SEQ ID NO: 173220 - DNA, 22 bp, Artificial sequence
  SiRNA target sequence
cataaagaattagaatatgatg

SEQ ID NO: 173221 - DNA, 22 bp, Artificial sequence
  SiRNA target sequence
ataaagaattagaatatgatgt

SEQ ID NO: 173222 - DNA, 22 bp, Artificial sequence
  SiRNA target sequence
taaagaattagaatatgatgta

SEQ ID NO: 173223 - DNA, 22 bp, Artificial sequence
  SiRNA target sequence
aaagaattagaatatgatgtat

SEQ ID NO: 173224 - DNA, 22 bp, Artificial sequence
  SiRNA target sequence
aagaattagaatatgatgtatg

SEQ ID NO: 173225 - DNA, 22 bp, Artificial sequence
  SiRNA target sequence
agaattagaatatgatgtatgc

SEQ ID NO: 173226 - DNA, 22 bp, Artificial sequence
  SiRNA target sequence
gaattagaatatgatgtatgcg

SEQ ID NO: 173227 - DNA, 22 bp, Artificial sequence
  SiRNA target sequence
aattagaatatgatgtatgcga

SEQ ID NO: 173228 - DNA, 22 bp, Artificial sequence
  SiRNA target sequence
attagaatatgatgtatgcgaa

SEQ ID NO: 173229 - DNA, 22 bp, Artificial sequence
  SiRNA target sequence
ttagaatatgatgtatgcgaaa

SEQ ID NO: 173230 - DNA, 22 bp, Artificial sequence
  SiRNA target sequence
tagaatatgatgtatgcgaaat

SEQ ID NO: 173231 - DNA, 22 bp, Artificial sequence
  SiRNA target sequence
agaatatgatgtatgcgaaata

SEQ ID NO: 173232 - DNA, 22 bp, Artificial sequence
  SiRNA target sequence
gaatatgatgtatgcgaaatat

SEQ ID NO: 173233 - DNA, 22 bp, Artificial sequence
  SiRNA target sequence
aatatgatgtatgcgaaatata

SEQ ID NO: 173234 - DNA, 22 bp, Artificial sequence
  SiRNA target sequence
atatgatgtatgcgaaatatac

SEQ ID NO: 173235 - DNA, 22 bp, Artificial sequence
  SiRNA target sequence
tatgatgtatgcgaaatataca

SEQ ID NO: 173236 - DNA, 22 bp, Artificial sequence
  SiRNA target sequence
atgatgtatgcgaaatatacat

SEQ ID NO: 173237 - DNA, 22 bp, Artificial sequence
  SiRNA target sequence
tgatgtatgcgaaatatacatt

SEQ ID NO: 173238 - DNA, 22 bp, Artificial sequence
  SiRNA target sequence
gatgtatgcgaaatatacattt

SEQ ID NO: 173239 - DNA, 22 bp, Artificial sequence
  SiRNA target sequence
atgtatgcgaaatatacatttg

SEQ ID NO: 173240 - DNA, 22 bp, Artificial sequence
  SiRNA target sequence
tgtatgcgaaatatacatttgt

SEQ ID NO: 173241 - DNA, 22 bp, Artificial sequence
  SiRNA target sequence
gtatgcgaaatatacatttgta

SEQ ID NO: 173242 - DNA, 22 bp, Artificial sequence
  SiRNA target sequence
tatgcgaaatatacatttgtaa

SEQ ID NO: 173243 - DNA, 22 bp, Artificial sequence
  SiRNA target sequence
atgcgaaatatacatttgtaat

SEQ ID NO: 173244 - DNA, 22 bp, Artificial sequence
  SiRNA target sequence
tgcgaaatatacatttgtaatc

SEQ ID NO: 173245 - DNA, 22 bp, Artificial sequence
  SiRNA target sequence
gcgaaatatacatttgtaatca

SEQ ID NO: 173246 - DNA, 22 bp, Artificial sequence
  SiRNA target sequence
cgaaatatacatttgtaatcag

SEQ ID NO: 173247 - DNA, 22 bp, Artificial sequence
  SiRNA target sequence
gaaatatacatttgtaatcagg

SEQ ID NO: 173248 - DNA, 22 bp, Artificial sequence
  SiRNA target sequence
aaatatacatttgtaatcaggg

SEQ ID NO: 173249 - DNA, 22 bp, Artificial sequence
  SiRNA target sequence
aatatacatttgtaatcaggga

SEQ ID NO: 173250 - DNA, 22 bp, Artificial sequence
  SiRNA target sequence
atatacatttgtaatcagggat

SEQ ID NO: 173251 - DNA, 22 bp, Artificial sequence
  SiRNA target sequence
tatacatttgtaatcagggatg

SEQ ID NO: 173252 - DNA, 22 bp, Artificial sequence
  SiRNA target sequence
atacatttgtaatcagggatgc

SEQ ID NO: 173253 - DNA, 22 bp, Artificial sequence
  SiRNA target sequence
tacatttgtaatcagggatgca

SEQ ID NO: 173254 - DNA, 22 bp, Artificial sequence
  SiRNA target sequence
acatttgtaatcagggatgcat

SEQ ID NO: 173255 - DNA, 22 bp, Artificial sequence
  SiRNA target sequence
catttgtaatcagggatgcatt

SEQ ID NO: 173256 - DNA, 22 bp, Artificial sequence
  SiRNA target sequence
atttgtaatcagggatgcatta

SEQ ID NO: 173257 - DNA, 22 bp, Artificial sequence
  SiRNA target sequence
tttgtaatcagggatgcattaa

SEQ ID NO: 173258 - DNA, 22 bp, Artificial sequence
  SiRNA target sequence
ttgtaatcagggatgcattaat

SEQ ID NO: 173259 - DNA, 22 bp, Artificial sequence
  SiRNA target sequence
tgtaatcagggatgcattaatg

SEQ ID NO: 173260 - DNA, 22 bp, Artificial sequence
  SiRNA target sequence
gtaatcagggatgcattaatgg

SEQ ID NO: 173261 - DNA, 22 bp, Artificial sequence
  SiRNA target sequence
taatcagggatgcattaatgga

SEQ ID NO: 173262 - DNA, 22 bp, Artificial sequence
  SiRNA target sequence
aatcagggatgcattaatggac

SEQ ID NO: 173263 - DNA, 22 bp, Artificial sequence
  SiRNA target sequence
atcagggatgcattaatggacc

SEQ ID NO: 173264 - DNA, 22 bp, Artificial sequence
  SiRNA target sequence
tcagggatgcattaatggacca

SEQ ID NO: 173265 - DNA, 22 bp, Artificial sequence
  SiRNA target sequence
cagggatgcattaatggaccag

SEQ ID NO: 173266 - DNA, 22 bp, Artificial sequence
  SiRNA target sequence
agggatgcattaatggaccagg

SEQ ID NO: 173267 - DNA, 22 bp, Artificial sequence
  SiRNA target sequence
gggatgcattaatggaccagga

SEQ ID NO: 173268 - DNA, 22 bp, Artificial sequence
  SiRNA target sequence
ggatgcattaatggaccaggac

SEQ ID NO: 173269 - DNA, 22 bp, Artificial sequence
  SiRNA target sequence
gatgcattaatggaccaggaca

SEQ ID NO: 173270 - DNA, 22 bp, Artificial sequence
  SiRNA target sequence
atgcattaatggaccaggacaa

SEQ ID NO: 173271 - DNA, 22 bp, Artificial sequence
  SiRNA target sequence
tgcattaatggaccaggacaat

SEQ ID NO: 173272 - DNA, 22 bp, Artificial sequence
  SiRNA target sequence
gcattaatggaccaggacaatt

SEQ ID NO: 173273 - DNA, 22 bp, Artificial sequence
  SiRNA target sequence
cattaatggaccaggacaattg

SEQ ID NO: 173274 - DNA, 22 bp, Artificial sequence
  SiRNA target sequence
attaatggaccaggacaattgt

SEQ ID NO: 173275 - DNA, 22 bp, Artificial sequence
  SiRNA target sequence
ttaatggaccaggacaattgta

SEQ ID NO: 173276 - DNA, 22 bp, Artificial sequence
  SiRNA target sequence
taatggaccaggacaattgtat

SEQ ID NO: 173277 - DNA, 22 bp, Artificial sequence
  SiRNA target sequence
aatggaccaggacaattgtata

SEQ ID NO: 173278 - DNA, 22 bp, Artificial sequence
  SiRNA target sequence
atggaccaggacaattgtatac

SEQ ID NO: 173279 - DNA, 22 bp, Artificial sequence
  SiRNA target sequence
tggaccaggacaattgtataca

SEQ ID NO: 173280 - DNA, 22 bp, Artificial sequence
  SiRNA target sequence
ggaccaggacaattgtatacag

SEQ ID NO: 173281 - DNA, 22 bp, Artificial sequence
  SiRNA target sequence
gaccaggacaattgtatacaga

SEQ ID NO: 173282 - DNA, 22 bp, Artificial sequence
  SiRNA target sequence
accaggacaattgtatacagat

SEQ ID NO: 173283 - DNA, 22 bp, Artificial sequence
  SiRNA target sequence
ccaggacaattgtatacagata

SEQ ID NO: 173284 - DNA, 22 bp, Artificial sequence
  SiRNA target sequence
caggacaattgtatacagataa

SEQ ID NO: 173285 - DNA, 22 bp, Artificial sequence
  SiRNA target sequence
aggacaattgtatacagataat

SEQ ID NO: 173286 - DNA, 22 bp, Artificial sequence
  SiRNA target sequence
ggacaattgtatacagataatt

SEQ ID NO: 173287 - DNA, 22 bp, Artificial sequence
  SiRNA target sequence
gacaattgtatacagataattt

SEQ ID NO: 173288 - DNA, 22 bp, Artificial sequence
  SiRNA target sequence
acaattgtatacagataattta

SEQ ID NO: 173289 - DNA, 22 bp, Artificial sequence
  SiRNA target sequence
caattgtatacagataatttat

SEQ ID NO: 173290 - DNA, 22 bp, Artificial sequence
  SiRNA target sequence
aattgtatacagataatttata

SEQ ID NO: 173291 - DNA, 22 bp, Artificial sequence
  SiRNA target sequence
attgtatacagataatttatat

SEQ ID NO: 173292 - DNA, 22 bp, Artificial sequence
  SiRNA target sequence
ttgtatacagataatttatatg

SEQ ID NO: 173293 - DNA, 22 bp, Artificial sequence
  SiRNA target sequence
tgtatacagataatttatatgt

SEQ ID NO: 173294 - DNA, 22 bp, Artificial sequence
  SiRNA target sequence
gtatacagataatttatatgta

SEQ ID NO: 173295 - DNA, 22 bp, Artificial sequence
  SiRNA target sequence
tatacagataatttatatgtaa

SEQ ID NO: 173296 - DNA, 22 bp, Artificial sequence
  SiRNA target sequence
atacagataatttatatgtaaa

SEQ ID NO: 173297 - DNA, 22 bp, Artificial sequence
  SiRNA target sequence
tacagataatttatatgtaaat

SEQ ID NO: 173298 - DNA, 22 bp, Artificial sequence
  SiRNA target sequence
acagataatttatatgtaaata

SEQ ID NO: 173299 - DNA, 22 bp, Artificial sequence
  SiRNA target sequence
cagataatttatatgtaaataa

SEQ ID NO: 173300 - DNA, 22 bp, Artificial sequence
  SiRNA target sequence
agataatttatatgtaaataat

SEQ ID NO: 173301 - DNA, 22 bp, Artificial sequence
  SiRNA target sequence
gataatttatatgtaaataatt

SEQ ID NO: 173302 - DNA, 22 bp, Artificial sequence
  SiRNA target sequence
ataatttatatgtaaataattc

SEQ ID NO: 173303 - DNA, 22 bp, Artificial sequence
  SiRNA target sequence
taatttatatgtaaataattca

SEQ ID NO: 173304 - DNA, 22 bp, Artificial sequence
  SiRNA target sequence
aatttatatgtaaataattcag

SEQ ID NO: 173305 - DNA, 22 bp, Artificial sequence
  SiRNA target sequence
atttatatgtaaataattcaga

SEQ ID NO: 173306 - DNA, 22 bp, Artificial sequence
  SiRNA target sequence
tttatatgtaaataattcagaa

SEQ ID NO: 173307 - DNA, 22 bp, Artificial sequence
  SiRNA target sequence
ttatatgtaaataattcagaat

SEQ ID NO: 173308 - DNA, 22 bp, Artificial sequence
  SiRNA target sequence
tatatgtaaataattcagaata

SEQ ID NO: 173309 - DNA, 22 bp, Artificial sequence
  SiRNA target sequence
atatgtaaataattcagaatac

SEQ ID NO: 173310 - DNA, 22 bp, Artificial sequence
  SiRNA target sequence
tatgtaaataattcagaataca

SEQ ID NO: 173311 - DNA, 22 bp, Artificial sequence
  SiRNA target sequence
atgtaaataattcagaatacat

SEQ ID NO: 173312 - DNA, 22 bp, Artificial sequence
  SiRNA target sequence
tgtaaataattcagaatacata

SEQ ID NO: 173313 - DNA, 22 bp, Artificial sequence
  SiRNA target sequence
gtaaataattcagaatacatag

SEQ ID NO: 173314 - DNA, 22 bp, Artificial sequence
  SiRNA target sequence
taaataattcagaatacataga

SEQ ID NO: 173315 - DNA, 22 bp, Artificial sequence
  SiRNA target sequence
aaataattcagaatacatagat

SEQ ID NO: 173316 - DNA, 22 bp, Artificial sequence
  SiRNA target sequence
aataattcagaatacatagata

SEQ ID NO: 173317 - DNA, 22 bp, Artificial sequence
  SiRNA target sequence
ataattcagaatacatagatat

SEQ ID NO: 173318 - DNA, 22 bp, Artificial sequence
  SiRNA target sequence
taattcagaatacatagatatt

SEQ ID NO: 173319 - DNA, 22 bp, Artificial sequence
  SiRNA target sequence
aattcagaatacatagatattg

SEQ ID NO: 173320 - DNA, 22 bp, Artificial sequence
  SiRNA target sequence
attcagaatacatagatattga

SEQ ID NO: 173321 - DNA, 22 bp, Artificial sequence
  SiRNA target sequence
ttcagaatacatagatattgat

SEQ ID NO: 173322 - DNA, 22 bp, Artificial sequence
  SiRNA target sequence
tcagaatacatagatattgatc

SEQ ID NO: 173323 - DNA, 22 bp, Artificial sequence
  SiRNA target sequence
cagaatacatagatattgatct

SEQ ID NO: 173324 - DNA, 22 bp, Artificial sequence
  SiRNA target sequence
agaatacatagatattgatctt

SEQ ID NO: 173325 - DNA, 22 bp, Artificial sequence
  SiRNA target sequence
gaatacatagatattgatcttg

SEQ ID NO: 173326 - DNA, 22 bp, Artificial sequence
  SiRNA target sequence
aatacatagatattgatcttgg

SEQ ID NO: 173327 - DNA, 22 bp, Artificial sequence
  SiRNA target sequence
atacatagatattgatcttggt

SEQ ID NO: 173328 - DNA, 22 bp, Artificial sequence
  SiRNA target sequence
tacatagatattgatcttggta

SEQ ID NO: 173329 - DNA, 22 bp, Artificial sequence
  SiRNA target sequence
acatagatattgatcttggtat

SEQ ID NO: 173330 - DNA, 22 bp, Artificial sequence
  SiRNA target sequence
catagatattgatcttggtatt

SEQ ID NO: 173331 - DNA, 22 bp, Artificial sequence
  SiRNA target sequence
atagatattgatcttggtattg

SEQ ID NO: 173332 - DNA, 22 bp, Artificial sequence
  SiRNA target sequence
tagatattgatcttggtattga

SEQ ID NO: 173333 - DNA, 22 bp, Artificial sequence
  SiRNA target sequence
agatattgatcttggtattgat

SEQ ID NO: 173334 - DNA, 22 bp, Artificial sequence
  SiRNA target sequence
gatattgatcttggtattgatt

SEQ ID NO: 173335 - DNA, 22 bp, Artificial sequence
  SiRNA target sequence
atattgatcttggtattgattg

SEQ ID NO: 173336 - DNA, 22 bp, Artificial sequence
  SiRNA target sequence
tattgatcttggtattgattgt

SEQ ID NO: 173337 - DNA, 22 bp, Artificial sequence
  SiRNA target sequence
attgatcttggtattgattgta

SEQ ID NO: 173338 - DNA, 22 bp, Artificial sequence
  SiRNA target sequence
ttgatcttggtattgattgtaa

SEQ ID NO: 173339 - DNA, 22 bp, Artificial sequence
  SiRNA target sequence
tgatcttggtattgattgtaaa

SEQ ID NO: 173340 - DNA, 22 bp, Artificial sequence
  SiRNA target sequence
gatcttggtattgattgtaaac

SEQ ID NO: 173341 - DNA, 22 bp, Artificial sequence
  SiRNA target sequence
atcttggtattgattgtaaaca

SEQ ID NO: 173342 - DNA, 22 bp, Artificial sequence
  SiRNA target sequence
tcttggtattgattgtaaacag

SEQ ID NO: 173343 - DNA, 22 bp, Artificial sequence
  SiRNA target sequence
cttggtattgattgtaaacagt

SEQ ID NO: 173344 - DNA, 22 bp, Artificial sequence
  SiRNA target sequence
ttggtattgattgtaaacagtt

SEQ ID NO: 173345 - DNA, 22 bp, Artificial sequence
  SiRNA target sequence
tggtattgattgtaaacagtta

SEQ ID NO: 173346 - DNA, 22 bp, Artificial sequence
  SiRNA target sequence
ggtattgattgtaaacagttac

SEQ ID NO: 173347 - DNA, 22 bp, Artificial sequence
  SiRNA target sequence
gtattgattgtaaacagttaca

SEQ ID NO: 173348 - DNA, 22 bp, Artificial sequence
  SiRNA target sequence
tattgattgtaaacagttacaa

SEQ ID NO: 173349 - DNA, 22 bp, Artificial sequence
  SiRNA target sequence
attgattgtaaacagttacaaa

SEQ ID NO: 173350 - DNA, 22 bp, Artificial sequence
  SiRNA target sequence
ttgattgtaaacagttacaaaa

SEQ ID NO: 173351 - DNA, 22 bp, Artificial sequence
  SiRNA target sequence
tgattgtaaacagttacaaaaa

SEQ ID NO: 173352 - DNA, 22 bp, Artificial sequence
  SiRNA target sequence
gattgtaaacagttacaaaaaa

SEQ ID NO: 173353 - DNA, 22 bp, Artificial sequence
  SiRNA target sequence
attgtaaacagttacaaaaaag

SEQ ID NO: 173354 - DNA, 22 bp, Artificial sequence
  SiRNA target sequence
ttgtaaacagttacaaaaaagg

SEQ ID NO: 173355 - DNA, 22 bp, Artificial sequence
  SiRNA target sequence
tgtaaacagttacaaaaaagga

SEQ ID NO: 173356 - DNA, 22 bp, Artificial sequence
  SiRNA target sequence
gtaaacagttacaaaaaaggac

SEQ ID NO: 173357 - DNA, 22 bp, Artificial sequence
  SiRNA target sequence
taaacagttacaaaaaaggaca

SEQ ID NO: 173358 - DNA, 22 bp, Artificial sequence
  SiRNA target sequence
aaacagttacaaaaaaggacat

SEQ ID NO: 173359 - DNA, 22 bp, Artificial sequence
  SiRNA target sequence
aacagttacaaaaaaggacata

SEQ ID NO: 173360 - DNA, 22 bp, Artificial sequence
  SiRNA target sequence
acagttacaaaaaaggacatat

SEQ ID NO: 173361 - DNA, 22 bp, Artificial sequence
  SiRNA target sequence
cagttacaaaaaaggacatata

SEQ ID NO: 173362 - DNA, 22 bp, Artificial sequence
  SiRNA target sequence
agttacaaaaaaggacatatag

SEQ ID NO: 173363 - DNA, 22 bp, Artificial sequence
  SiRNA target sequence
gttacaaaaaaggacatataga

SEQ ID NO: 173364 - DNA, 22 bp, Artificial sequence
  SiRNA target sequence
ttacaaaaaaggacatatagaa

SEQ ID NO: 173365 - DNA, 22 bp, Artificial sequence
  SiRNA target sequence
tacaaaaaaggacatatagaaa

SEQ ID NO: 173366 - DNA, 22 bp, Artificial sequence
  SiRNA target sequence
acaaaaaaggacatatagaaaa

SEQ ID NO: 173367 - DNA, 22 bp, Artificial sequence
  SiRNA target sequence
caaaaaaggacatatagaaaaa

SEQ ID NO: 173368 - DNA, 22 bp, Artificial sequence
  SiRNA target sequence
aaaaaaggacatatagaaaaat

SEQ ID NO: 173369 - DNA, 22 bp, Artificial sequence
  SiRNA target sequence
aaaaaggacatatagaaaaata

SEQ ID NO: 173370 - DNA, 22 bp, Artificial sequence
  SiRNA target sequence
aaaaggacatatagaaaaatag

SEQ ID NO: 173371 - DNA, 22 bp, Artificial sequence
  SiRNA target sequence
aaaggacatatagaaaaataga

SEQ ID NO: 173372 - DNA, 22 bp, Artificial sequence
  SiRNA target sequence
aaggacatatagaaaaatagaa

SEQ ID NO: 173373 - DNA, 22 bp, Artificial sequence
  SiRNA target sequence
aggacatatagaaaaatagaaa

SEQ ID NO: 173374 - DNA, 22 bp, Artificial sequence
  SiRNA target sequence
ggacatatagaaaaatagaaac

SEQ ID NO: 173375 - DNA, 22 bp, Artificial sequence
  SiRNA target sequence
gacatatagaaaaatagaaaca

SEQ ID NO: 173376 - DNA, 22 bp, Artificial sequence
  SiRNA target sequence
acatatagaaaaatagaaacaa

SEQ ID NO: 173377 - DNA, 22 bp, Artificial sequence
  SiRNA target sequence
catatagaaaaatagaaacaaa

SEQ ID NO: 173378 - DNA, 22 bp, Artificial sequence
  SiRNA target sequence
atatagaaaaatagaaacaaag

SEQ ID NO: 173379 - DNA, 22 bp, Artificial sequence
  SiRNA target sequence
tatagaaaaatagaaacaaaga

SEQ ID NO: 173380 - DNA, 22 bp, Artificial sequence
  SiRNA target sequence
atagaaaaatagaaacaaagaa

SEQ ID NO: 173381 - DNA, 22 bp, Artificial sequence
  SiRNA target sequence
tagaaaaatagaaacaaagaaa

SEQ ID NO: 173382 - DNA, 22 bp, Artificial sequence
  SiRNA target sequence
agaaaaatagaaacaaagaaag

SEQ ID NO: 173383 - DNA, 22 bp, Artificial sequence
  SiRNA target sequence
gaaaaatagaaacaaagaaagt

SEQ ID NO: 173384 - DNA, 22 bp, Artificial sequence
  SiRNA target sequence
aaaaatagaaacaaagaaagtt

SEQ ID NO: 173385 - DNA, 22 bp, Artificial sequence
  SiRNA target sequence
aaaatagaaacaaagaaagtta

SEQ ID NO: 173386 - DNA, 22 bp, Artificial sequence
  SiRNA target sequence
aaatagaaacaaagaaagttaa

SEQ ID NO: 173387 - DNA, 22 bp, Artificial sequence
  SiRNA target sequence
aatagaaacaaagaaagttaat

SEQ ID NO: 173388 - DNA, 22 bp, Artificial sequence
  SiRNA target sequence
atagaaacaaagaaagttaatt

SEQ ID NO: 173389 - DNA, 22 bp, Artificial sequence
  SiRNA target sequence
tagaaacaaagaaagttaattt

SEQ ID NO: 173390 - DNA, 22 bp, Artificial sequence
  SiRNA target sequence
agaaacaaagaaagttaatttt

SEQ ID NO: 173391 - DNA, 22 bp, Artificial sequence
  SiRNA target sequence
gaaacaaagaaagttaatttta

SEQ ID NO: 173392 - DNA, 22 bp, Artificial sequence
  SiRNA target sequence
aaacaaagaaagttaattttaa

SEQ ID NO: 173393 - DNA, 22 bp, Artificial sequence
  SiRNA target sequence
aacaaagaaagttaattttaaa

SEQ ID NO: 173394 - DNA, 22 bp, Artificial sequence
  SiRNA target sequence
acaaagaaagttaattttaaaa

SEQ ID NO: 173395 - DNA, 22 bp, Artificial sequence
  SiRNA target sequence
caaagaaagttaattttaaaat

SEQ ID NO: 173396 - DNA, 22 bp, Artificial sequence
  SiRNA target sequence
aaagaaagttaattttaaaata

SEQ ID NO: 173397 - DNA, 22 bp, Artificial sequence
  SiRNA target sequence
aagaaagttaattttaaaatag

SEQ ID NO: 173398 - DNA, 22 bp, Artificial sequence
  SiRNA target sequence
agaaagttaattttaaaataga

SEQ ID NO: 173399 - DNA, 22 bp, Artificial sequence
  SiRNA target sequence
gaaagttaattttaaaatagaa

SEQ ID NO: 173400 - DNA, 22 bp, Artificial sequence
  SiRNA target sequence
aaagttaattttaaaatagaat

SEQ ID NO: 173401 - DNA, 22 bp, Artificial sequence
  SiRNA target sequence
aagttaattttaaaatagaatg

SEQ ID NO: 173402 - DNA, 22 bp, Artificial sequence
  SiRNA target sequence
agttaattttaaaatagaatgg

SEQ ID NO: 173403 - DNA, 22 bp, Artificial sequence
  SiRNA target sequence
gttaattttaaaatagaatggt

SEQ ID NO: 173404 - DNA, 22 bp, Artificial sequence
  SiRNA target sequence
ttaattttaaaatagaatggta

SEQ ID NO: 173405 - DNA, 22 bp, Artificial sequence
  SiRNA target sequence
taattttaaaatagaatggtaa

SEQ ID NO: 173406 - DNA, 23 bp, Artificial sequence
  SiRNA target sequence
atgaatactgaaaataaaccatg

SEQ ID NO: 173407 - DNA, 23 bp, Artificial sequence
  SiRNA target sequence
tgaatactgaaaataaaccatgt

SEQ ID NO: 173408 - DNA, 23 bp, Artificial sequence
  SiRNA target sequence
gaatactgaaaataaaccatgta

SEQ ID NO: 173409 - DNA, 23 bp, Artificial sequence
  SiRNA target sequence
aatactgaaaataaaccatgtat

SEQ ID NO: 173410 - DNA, 23 bp, Artificial sequence
  SiRNA target sequence
atactgaaaataaaccatgtatt

SEQ ID NO: 173411 - DNA, 23 bp, Artificial sequence
  SiRNA target sequence
tactgaaaataaaccatgtattt

SEQ ID NO: 173412 - DNA, 23 bp, Artificial sequence
  SiRNA target sequence
actgaaaataaaccatgtatttc

SEQ ID NO: 173413 - DNA, 23 bp, Artificial sequence
  SiRNA target sequence
ctgaaaataaaccatgtatttca

SEQ ID NO: 173414 - DNA, 23 bp, Artificial sequence
  SiRNA target sequence
tgaaaataaaccatgtatttcac

SEQ ID NO: 173415 - DNA, 23 bp, Artificial sequence
  SiRNA target sequence
gaaaataaaccatgtatttcacc

SEQ ID NO: 173416 - DNA, 23 bp, Artificial sequence
  SiRNA target sequence
aaaataaaccatgtatttcacca

SEQ ID NO: 173417 - DNA, 23 bp, Artificial sequence
  SiRNA target sequence
aaataaaccatgtatttcaccat

SEQ ID NO: 173418 - DNA, 23 bp, Artificial sequence
  SiRNA target sequence
aataaaccatgtatttcaccatt

SEQ ID NO: 173419 - DNA, 23 bp, Artificial sequence
  SiRNA target sequence
ataaaccatgtatttcaccattt

SEQ ID NO: 173420 - DNA, 23 bp, Artificial sequence
  SiRNA target sequence
taaaccatgtatttcaccattta

SEQ ID NO: 173421 - DNA, 23 bp, Artificial sequence
  SiRNA target sequence
aaaccatgtatttcaccatttac

SEQ ID NO: 173422 - DNA, 23 bp, Artificial sequence
  SiRNA target sequence
aaccatgtatttcaccatttacc

SEQ ID NO: 173423 - DNA, 23 bp, Artificial sequence
  SiRNA target sequence
accatgtatttcaccatttacct

SEQ ID NO: 173424 - DNA, 23 bp, Artificial sequence
  SiRNA target sequence
ccatgtatttcaccatttacctt

SEQ ID NO: 173425 - DNA, 23 bp, Artificial sequence
  SiRNA target sequence
catgtatttcaccatttaccttt

SEQ ID NO: 173426 - DNA, 23 bp, Artificial sequence
  SiRNA target sequence
atgtatttcaccatttaccttta

SEQ ID NO: 173427 - DNA, 23 bp, Artificial sequence
  SiRNA target sequence
tgtatttcaccatttacctttaa

SEQ ID NO: 173428 - DNA, 23 bp, Artificial sequence
  SiRNA target sequence
gtatttcaccatttacctttaaa

SEQ ID NO: 173429 - DNA, 23 bp, Artificial sequence
  SiRNA target sequence
tatttcaccatttacctttaaac

SEQ ID NO: 173430 - DNA, 23 bp, Artificial sequence
  SiRNA target sequence
atttcaccatttacctttaaact

SEQ ID NO: 173431 - DNA, 23 bp, Artificial sequence
  SiRNA target sequence
tttcaccatttacctttaaacta

SEQ ID NO: 173432 - DNA, 23 bp, Artificial sequence
  SiRNA target sequence
ttcaccatttacctttaaactag

SEQ ID NO: 173433 - DNA, 23 bp, Artificial sequence
  SiRNA target sequence
tcaccatttacctttaaactaga

SEQ ID NO: 173434 - DNA, 23 bp, Artificial sequence
  SiRNA target sequence
caccatttacctttaaactagaa

SEQ ID NO: 173435 - DNA, 23 bp, Artificial sequence
  SiRNA target sequence
accatttacctttaaactagaag

SEQ ID NO: 173436 - DNA, 23 bp, Artificial sequence
  SiRNA target sequence
ccatttacctttaaactagaaga

SEQ ID NO: 173437 - DNA, 23 bp, Artificial sequence
  SiRNA target sequence
catttacctttaaactagaagat

SEQ ID NO: 173438 - DNA, 23 bp, Artificial sequence
  SiRNA target sequence
atttacctttaaactagaagatt

SEQ ID NO: 173439 - DNA, 23 bp, Artificial sequence
  SiRNA target sequence
tttacctttaaactagaagattg

SEQ ID NO: 173440 - DNA, 23 bp, Artificial sequence
  SiRNA target sequence
ttacctttaaactagaagattgc

SEQ ID NO: 173441 - DNA, 23 bp, Artificial sequence
  SiRNA target sequence
tacctttaaactagaagattgcc

SEQ ID NO: 173442 - DNA, 23 bp, Artificial sequence
  SiRNA target sequence
acctttaaactagaagattgcct

SEQ ID NO: 173443 - DNA, 23 bp, Artificial sequence
  SiRNA target sequence
cctttaaactagaagattgcctg

SEQ ID NO: 173444 - DNA, 23 bp, Artificial sequence
  SiRNA target sequence
ctttaaactagaagattgcctgg

SEQ ID NO: 173445 - DNA, 23 bp, Artificial sequence
  SiRNA target sequence
tttaaactagaagattgcctggc

SEQ ID NO: 173446 - DNA, 23 bp, Artificial sequence
  SiRNA target sequence
ttaaactagaagattgcctggca

SEQ ID NO: 173447 - DNA, 23 bp, Artificial sequence
  SiRNA target sequence
taaactagaagattgcctggcat

SEQ ID NO: 173448 - DNA, 23 bp, Artificial sequence
  SiRNA target sequence
aaactagaagattgcctggcatg

SEQ ID NO: 173449 - DNA, 23 bp, Artificial sequence
  SiRNA target sequence
aactagaagattgcctggcatgt

SEQ ID NO: 173450 - DNA, 23 bp, Artificial sequence
  SiRNA target sequence
actagaagattgcctggcatgtt

SEQ ID NO: 173451 - DNA, 23 bp, Artificial sequence
  SiRNA target sequence
ctagaagattgcctggcatgttc

SEQ ID NO: 173452 - DNA, 23 bp, Artificial sequence
  SiRNA target sequence
tagaagattgcctggcatgttcg

SEQ ID NO: 173453 - DNA, 23 bp, Artificial sequence
  SiRNA target sequence
agaagattgcctggcatgttcgg

SEQ ID NO: 173454 - DNA, 23 bp, Artificial sequence
  SiRNA target sequence
gaagattgcctggcatgttcggc

SEQ ID NO: 173455 - DNA, 23 bp, Artificial sequence
  SiRNA target sequence
aagattgcctggcatgttcggct

SEQ ID NO: 173456 - DNA, 23 bp, Artificial sequence
  SiRNA target sequence
agattgcctggcatgttcggctt

SEQ ID NO: 173457 - DNA, 23 bp, Artificial sequence
  SiRNA target sequence
gattgcctggcatgttcggcttg

SEQ ID NO: 173458 - DNA, 23 bp, Artificial sequence
  SiRNA target sequence
attgcctggcatgttcggcttgt

SEQ ID NO: 173459 - DNA, 23 bp, Artificial sequence
  SiRNA target sequence
ttgcctggcatgttcggcttgta

SEQ ID NO: 173460 - DNA, 23 bp, Artificial sequence
  SiRNA target sequence
tgcctggcatgttcggcttgtat

SEQ ID NO: 173461 - DNA, 23 bp, Artificial sequence
  SiRNA target sequence
gcctggcatgttcggcttgtatt

SEQ ID NO: 173462 - DNA, 23 bp, Artificial sequence
  SiRNA target sequence
cctggcatgttcggcttgtattg

SEQ ID NO: 173463 - DNA, 23 bp, Artificial sequence
  SiRNA target sequence
ctggcatgttcggcttgtattgc

SEQ ID NO: 173464 - DNA, 23 bp, Artificial sequence
  SiRNA target sequence
tggcatgttcggcttgtattgct

SEQ ID NO: 173465 - DNA, 23 bp, Artificial sequence
  SiRNA target sequence
ggcatgttcggcttgtattgctg

SEQ ID NO: 173466 - DNA, 23 bp, Artificial sequence
  SiRNA target sequence
gcatgttcggcttgtattgctga

SEQ ID NO: 173467 - DNA, 23 bp, Artificial sequence
  SiRNA target sequence
catgttcggcttgtattgctgat

SEQ ID NO: 173468 - DNA, 23 bp, Artificial sequence
  SiRNA target sequence
atgttcggcttgtattgctgatt

SEQ ID NO: 173469 - DNA, 23 bp, Artificial sequence
  SiRNA target sequence
tgttcggcttgtattgctgattt

SEQ ID NO: 173470 - DNA, 23 bp, Artificial sequence
  SiRNA target sequence
gttcggcttgtattgctgatttt

SEQ ID NO: 173471 - DNA, 23 bp, Artificial sequence
  SiRNA target sequence
ttcggcttgtattgctgattttt

SEQ ID NO: 173472 - DNA, 23 bp, Artificial sequence
  SiRNA target sequence
tcggcttgtattgctgatttttc

SEQ ID NO: 173473 - DNA, 23 bp, Artificial sequence
  SiRNA target sequence
cggcttgtattgctgatttttct

SEQ ID NO: 173474 - DNA, 23 bp, Artificial sequence
  SiRNA target sequence
ggcttgtattgctgatttttctg

SEQ ID NO: 173475 - DNA, 23 bp, Artificial sequence
  SiRNA target sequence
gcttgtattgctgatttttctgt

SEQ ID NO: 173476 - DNA, 23 bp, Artificial sequence
  SiRNA target sequence
cttgtattgctgatttttctgtt

SEQ ID NO: 173477 - DNA, 23 bp, Artificial sequence
  SiRNA target sequence
ttgtattgctgatttttctgttc

SEQ ID NO: 173478 - DNA, 23 bp, Artificial sequence
  SiRNA target sequence
tgtattgctgatttttctgttcc

SEQ ID NO: 173479 - DNA, 23 bp, Artificial sequence
  SiRNA target sequence
gtattgctgatttttctgttcca

SEQ ID NO: 173480 - DNA, 23 bp, Artificial sequence
  SiRNA target sequence
tattgctgatttttctgttccaa

SEQ ID NO: 173481 - DNA, 23 bp, Artificial sequence
  SiRNA target sequence
attgctgatttttctgttccaaa

SEQ ID NO: 173482 - DNA, 23 bp, Artificial sequence
  SiRNA target sequence
ttgctgatttttctgttccaaaa

SEQ ID NO: 173483 - DNA, 23 bp, Artificial sequence
  SiRNA target sequence
tgctgatttttctgttccaaaaa

SEQ ID NO: 173484 - DNA, 23 bp, Artificial sequence
  SiRNA target sequence
gctgatttttctgttccaaaaat

SEQ ID NO: 173485 - DNA, 23 bp, Artificial sequence
  SiRNA target sequence
ctgatttttctgttccaaaaatt

SEQ ID NO: 173486 - DNA, 23 bp, Artificial sequence
  SiRNA target sequence
tgatttttctgttccaaaaattc

SEQ ID NO: 173487 - DNA, 23 bp, Artificial sequence
  SiRNA target sequence
gatttttctgttccaaaaattcc

SEQ ID NO: 173488 - DNA, 23 bp, Artificial sequence
  SiRNA target sequence
atttttctgttccaaaaattcct

SEQ ID NO: 173489 - DNA, 23 bp, Artificial sequence
  SiRNA target sequence
tttttctgttccaaaaattccta

SEQ ID NO: 173490 - DNA, 23 bp, Artificial sequence
  SiRNA target sequence
ttttctgttccaaaaattcctac

SEQ ID NO: 173491 - DNA, 23 bp, Artificial sequence
  SiRNA target sequence
tttctgttccaaaaattcctact

SEQ ID NO: 173492 - DNA, 23 bp, Artificial sequence
  SiRNA target sequence
ttctgttccaaaaattcctactt

SEQ ID NO: 173493 - DNA, 23 bp, Artificial sequence
  SiRNA target sequence
tctgttccaaaaattcctactta

SEQ ID NO: 173494 - DNA, 23 bp, Artificial sequence
  SiRNA target sequence
ctgttccaaaaattcctacttac

SEQ ID NO: 173495 - DNA, 23 bp, Artificial sequence
  SiRNA target sequence
tgttccaaaaattcctacttaca

SEQ ID NO: 173496 - DNA, 23 bp, Artificial sequence
  SiRNA target sequence
gttccaaaaattcctacttacac

SEQ ID NO: 173497 - DNA, 23 bp, Artificial sequence
  SiRNA target sequence
ttccaaaaattcctacttacaca

SEQ ID NO: 173498 - DNA, 23 bp, Artificial sequence
  SiRNA target sequence
tccaaaaattcctacttacacag

SEQ ID NO: 173499 - DNA, 23 bp, Artificial sequence
  SiRNA target sequence
ccaaaaattcctacttacacaga

SEQ ID NO: 173500 - DNA, 23 bp, Artificial sequence
  SiRNA target sequence
caaaaattcctacttacacagaa

SEQ ID NO: 173501 - DNA, 23 bp, Artificial sequence
  SiRNA target sequence
aaaaattcctacttacacagaac

SEQ ID NO: 173502 - DNA, 23 bp, Artificial sequence
  SiRNA target sequence
aaaattcctacttacacagaact

SEQ ID NO: 173503 - DNA, 23 bp, Artificial sequence
  SiRNA target sequence
aaattcctacttacacagaactg

SEQ ID NO: 173504 - DNA, 23 bp, Artificial sequence
  SiRNA target sequence
aattcctacttacacagaactga

SEQ ID NO: 173505 - DNA, 23 bp, Artificial sequence
  SiRNA target sequence
attcctacttacacagaactgaa

SEQ ID NO: 173506 - DNA, 23 bp, Artificial sequence
  SiRNA target sequence
ttcctacttacacagaactgaaa

SEQ ID NO: 173507 - DNA, 23 bp, Artificial sequence
  SiRNA target sequence
tcctacttacacagaactgaaag

SEQ ID NO: 173508 - DNA, 23 bp, Artificial sequence
  SiRNA target sequence
cctacttacacagaactgaaaga

SEQ ID NO: 173509 - DNA, 23 bp, Artificial sequence
  SiRNA target sequence
ctacttacacagaactgaaagat

SEQ ID NO: 173510 - DNA, 23 bp, Artificial sequence
  SiRNA target sequence
tacttacacagaactgaaagatg

SEQ ID NO: 173511 - DNA, 23 bp, Artificial sequence
  SiRNA target sequence
acttacacagaactgaaagatgt

SEQ ID NO: 173512 - DNA, 23 bp, Artificial sequence
  SiRNA target sequence
cttacacagaactgaaagatgtc

SEQ ID NO: 173513 - DNA, 23 bp, Artificial sequence
  SiRNA target sequence
ttacacagaactgaaagatgtcc

SEQ ID NO: 173514 - DNA, 23 bp, Artificial sequence
  SiRNA target sequence
tacacagaactgaaagatgtccc

SEQ ID NO: 173515 - DNA, 23 bp, Artificial sequence
  SiRNA target sequence
acacagaactgaaagatgtccct

SEQ ID NO: 173516 - DNA, 23 bp, Artificial sequence
  SiRNA target sequence
cacagaactgaaagatgtccctt

SEQ ID NO: 173517 - DNA, 23 bp, Artificial sequence
  SiRNA target sequence
acagaactgaaagatgtcccttt

SEQ ID NO: 173518 - DNA, 23 bp, Artificial sequence
  SiRNA target sequence
cagaactgaaagatgtcccttta

SEQ ID NO: 173519 - DNA, 23 bp, Artificial sequence
  SiRNA target sequence
agaactgaaagatgtccctttaa

SEQ ID NO: 173520 - DNA, 23 bp, Artificial sequence
  SiRNA target sequence
gaactgaaagatgtccctttaac

SEQ ID NO: 173521 - DNA, 23 bp, Artificial sequence
  SiRNA target sequence
aactgaaagatgtccctttaaca

SEQ ID NO: 173522 - DNA, 23 bp, Artificial sequence
  SiRNA target sequence
actgaaagatgtccctttaacat

SEQ ID NO: 173523 - DNA, 23 bp, Artificial sequence
  SiRNA target sequence
ctgaaagatgtccctttaacatt

SEQ ID NO: 173524 - DNA, 23 bp, Artificial sequence
  SiRNA target sequence
tgaaagatgtccctttaacattt

SEQ ID NO: 173525 - DNA, 23 bp, Artificial sequence
  SiRNA target sequence
gaaagatgtccctttaacatttt

SEQ ID NO: 173526 - DNA, 23 bp, Artificial sequence
  SiRNA target sequence
aaagatgtccctttaacattttt

SEQ ID NO: 173527 - DNA, 23 bp, Artificial sequence
  SiRNA target sequence
aagatgtccctttaacattttta

SEQ ID NO: 173528 - DNA, 23 bp, Artificial sequence
  SiRNA target sequence
agatgtccctttaacatttttat

SEQ ID NO: 173529 - DNA, 23 bp, Artificial sequence
  SiRNA target sequence
gatgtccctttaacatttttatt

SEQ ID NO: 173530 - DNA, 23 bp, Artificial sequence
  SiRNA target sequence
atgtccctttaacatttttatta

SEQ ID NO: 173531 - DNA, 23 bp, Artificial sequence
  SiRNA target sequence
tgtccctttaacatttttattat

SEQ ID NO: 173532 - DNA, 23 bp, Artificial sequence
  SiRNA target sequence
gtccctttaacatttttattatc

SEQ ID NO: 173533 - DNA, 23 bp, Artificial sequence
  SiRNA target sequence
tccctttaacatttttattatca

SEQ ID NO: 173534 - DNA, 23 bp, Artificial sequence
  SiRNA target sequence
ccctttaacatttttattatcac

SEQ ID NO: 173535 - DNA, 23 bp, Artificial sequence
  SiRNA target sequence
cctttaacatttttattatcacc

SEQ ID NO: 173536 - DNA, 23 bp, Artificial sequence
  SiRNA target sequence
ctttaacatttttattatcacca

SEQ ID NO: 173537 - DNA, 23 bp, Artificial sequence
  SiRNA target sequence
tttaacatttttattatcaccac

SEQ ID NO: 173538 - DNA, 23 bp, Artificial sequence
  SiRNA target sequence
ttaacatttttattatcaccaca

SEQ ID NO: 173539 - DNA, 23 bp, Artificial sequence
  SiRNA target sequence
taacatttttattatcaccacat

SEQ ID NO: 173540 - DNA, 23 bp, Artificial sequence
  SiRNA target sequence
aacatttttattatcaccacatt

SEQ ID NO: 173541 - DNA, 23 bp, Artificial sequence
  SiRNA target sequence
acatttttattatcaccacattc

SEQ ID NO: 173542 - DNA, 23 bp, Artificial sequence
  SiRNA target sequence
catttttattatcaccacattcg

SEQ ID NO: 173543 - DNA, 23 bp, Artificial sequence
  SiRNA target sequence
atttttattatcaccacattcga

SEQ ID NO: 173544 - DNA, 23 bp, Artificial sequence
  SiRNA target sequence
tttttattatcaccacattcgaa

SEQ ID NO: 173545 - DNA, 23 bp, Artificial sequence
  SiRNA target sequence
ttttattatcaccacattcgaaa

SEQ ID NO: 173546 - DNA, 23 bp, Artificial sequence
  SiRNA target sequence
tttattatcaccacattcgaaaa

SEQ ID NO: 173547 - DNA, 23 bp, Artificial sequence
  SiRNA target sequence
ttattatcaccacattcgaaaat

SEQ ID NO: 173548 - DNA, 23 bp, Artificial sequence
  SiRNA target sequence
tattatcaccacattcgaaaatg

SEQ ID NO: 173549 - DNA, 23 bp, Artificial sequence
  SiRNA target sequence
attatcaccacattcgaaaatga

SEQ ID NO: 173550 - DNA, 23 bp, Artificial sequence
  SiRNA target sequence
ttatcaccacattcgaaaatgaa

SEQ ID NO: 173551 - DNA, 23 bp, Artificial sequence
  SiRNA target sequence
tatcaccacattcgaaaatgaat

SEQ ID NO: 173552 - DNA, 23 bp, Artificial sequence
  SiRNA target sequence
atcaccacattcgaaaatgaata

SEQ ID NO: 173553 - DNA, 23 bp, Artificial sequence
  SiRNA target sequence
tcaccacattcgaaaatgaatat

SEQ ID NO: 173554 - DNA, 23 bp, Artificial sequence
  SiRNA target sequence
caccacattcgaaaatgaatatg

SEQ ID NO: 173555 - DNA, 23 bp, Artificial sequence
  SiRNA target sequence
accacattcgaaaatgaatatgt

SEQ ID NO: 173556 - DNA, 23 bp, Artificial sequence
  SiRNA target sequence
ccacattcgaaaatgaatatgta

SEQ ID NO: 173557 - DNA, 23 bp, Artificial sequence
  SiRNA target sequence
cacattcgaaaatgaatatgtat

SEQ ID NO: 173558 - DNA, 23 bp, Artificial sequence
  SiRNA target sequence
acattcgaaaatgaatatgtatg

SEQ ID NO: 173559 - DNA, 23 bp, Artificial sequence
  SiRNA target sequence
cattcgaaaatgaatatgtatgc

SEQ ID NO: 173560 - DNA, 23 bp, Artificial sequence
  SiRNA target sequence
attcgaaaatgaatatgtatgca

SEQ ID NO: 173561 - DNA, 23 bp, Artificial sequence
  SiRNA target sequence
ttcgaaaatgaatatgtatgcac

SEQ ID NO: 173562 - DNA, 23 bp, Artificial sequence
  SiRNA target sequence
tcgaaaatgaatatgtatgcaca

SEQ ID NO: 173563 - DNA, 23 bp, Artificial sequence
  SiRNA target sequence
cgaaaatgaatatgtatgcacac

SEQ ID NO: 173564 - DNA, 23 bp, Artificial sequence
  SiRNA target sequence
gaaaatgaatatgtatgcacact

SEQ ID NO: 173565 - DNA, 23 bp, Artificial sequence
  SiRNA target sequence
aaaatgaatatgtatgcacacta

SEQ ID NO: 173566 - DNA, 23 bp, Artificial sequence
  SiRNA target sequence
aaatgaatatgtatgcacactat

SEQ ID NO: 173567 - DNA, 23 bp, Artificial sequence
  SiRNA target sequence
aatgaatatgtatgcacactata

SEQ ID NO: 173568 - DNA, 23 bp, Artificial sequence
  SiRNA target sequence
atgaatatgtatgcacactataa

SEQ ID NO: 173569 - DNA, 23 bp, Artificial sequence
  SiRNA target sequence
tgaatatgtatgcacactataac

SEQ ID NO: 173570 - DNA, 23 bp, Artificial sequence
  SiRNA target sequence
gaatatgtatgcacactataaca

SEQ ID NO: 173571 - DNA, 23 bp, Artificial sequence
  SiRNA target sequence
aatatgtatgcacactataacaa

SEQ ID NO: 173572 - DNA, 23 bp, Artificial sequence
  SiRNA target sequence
atatgtatgcacactataacaat

SEQ ID NO: 173573 - DNA, 23 bp, Artificial sequence
  SiRNA target sequence
tatgtatgcacactataacaatc

SEQ ID NO: 173574 - DNA, 23 bp, Artificial sequence
  SiRNA target sequence
atgtatgcacactataacaatca

SEQ ID NO: 173575 - DNA, 23 bp, Artificial sequence
  SiRNA target sequence
tgtatgcacactataacaatcat

SEQ ID NO: 173576 - DNA, 23 bp, Artificial sequence
  SiRNA target sequence
gtatgcacactataacaatcata

SEQ ID NO: 173577 - DNA, 23 bp, Artificial sequence
  SiRNA target sequence
tatgcacactataacaatcatat

SEQ ID NO: 173578 - DNA, 23 bp, Artificial sequence
  SiRNA target sequence
atgcacactataacaatcatata

SEQ ID NO: 173579 - DNA, 23 bp, Artificial sequence
  SiRNA target sequence
tgcacactataacaatcatataa

SEQ ID NO: 173580 - DNA, 23 bp, Artificial sequence
  SiRNA target sequence
gcacactataacaatcatataat

SEQ ID NO: 173581 - DNA, 23 bp, Artificial sequence
  SiRNA target sequence
cacactataacaatcatataatg

SEQ ID NO: 173582 - DNA, 23 bp, Artificial sequence
  SiRNA target sequence
acactataacaatcatataatgt

SEQ ID NO: 173583 - DNA, 23 bp, Artificial sequence
  SiRNA target sequence
cactataacaatcatataatgtc

SEQ ID NO: 173584 - DNA, 23 bp, Artificial sequence
  SiRNA target sequence
actataacaatcatataatgtcc

SEQ ID NO: 173585 - DNA, 23 bp, Artificial sequence
  SiRNA target sequence
ctataacaatcatataatgtcct

SEQ ID NO: 173586 - DNA, 23 bp, Artificial sequence
  SiRNA target sequence
tataacaatcatataatgtcctt

SEQ ID NO: 173587 - DNA, 23 bp, Artificial sequence
  SiRNA target sequence
ataacaatcatataatgtccttt

SEQ ID NO: 173588 - DNA, 23 bp, Artificial sequence
  SiRNA target sequence
taacaatcatataatgtccttta

SEQ ID NO: 173589 - DNA, 23 bp, Artificial sequence
  SiRNA target sequence
aacaatcatataatgtcctttag

SEQ ID NO: 173590 - DNA, 23 bp, Artificial sequence
  SiRNA target sequence
acaatcatataatgtcctttagt

SEQ ID NO: 173591 - DNA, 23 bp, Artificial sequence
  SiRNA target sequence
caatcatataatgtcctttagtg

SEQ ID NO: 173592 - DNA, 23 bp, Artificial sequence
  SiRNA target sequence
aatcatataatgtcctttagtga

SEQ ID NO: 173593 - DNA, 23 bp, Artificial sequence
  SiRNA target sequence
atcatataatgtcctttagtgat

SEQ ID NO: 173594 - DNA, 23 bp, Artificial sequence
  SiRNA target sequence
tcatataatgtcctttagtgatt

SEQ ID NO: 173595 - DNA, 23 bp, Artificial sequence
  SiRNA target sequence
catataatgtcctttagtgattt

SEQ ID NO: 173596 - DNA, 23 bp, Artificial sequence
  SiRNA target sequence
atataatgtcctttagtgatttt

SEQ ID NO: 173597 - DNA, 23 bp, Artificial sequence
  SiRNA target sequence
tataatgtcctttagtgattttg

SEQ ID NO: 173598 - DNA, 23 bp, Artificial sequence
  SiRNA target sequence
ataatgtcctttagtgattttga

SEQ ID NO: 173599 - DNA, 23 bp, Artificial sequence
  SiRNA target sequence
taatgtcctttagtgattttgaa

SEQ ID NO: 173600 - DNA, 23 bp, Artificial sequence
  SiRNA target sequence
aatgtcctttagtgattttgaat

SEQ ID NO: 173601 - DNA, 23 bp, Artificial sequence
  SiRNA target sequence
atgtcctttagtgattttgaata

SEQ ID NO: 173602 - DNA, 23 bp, Artificial sequence
  SiRNA target sequence
tgtcctttagtgattttgaatat

SEQ ID NO: 173603 - DNA, 23 bp, Artificial sequence
  SiRNA target sequence
gtcctttagtgattttgaatatc

SEQ ID NO: 173604 - DNA, 23 bp, Artificial sequence
  SiRNA target sequence
tcctttagtgattttgaatatca

SEQ ID NO: 173605 - DNA, 23 bp, Artificial sequence
  SiRNA target sequence
cctttagtgattttgaatatcac

SEQ ID NO: 173606 - DNA, 23 bp, Artificial sequence
  SiRNA target sequence
ctttagtgattttgaatatcact

SEQ ID NO: 173607 - DNA, 23 bp, Artificial sequence
  SiRNA target sequence
tttagtgattttgaatatcactt

SEQ ID NO: 173608 - DNA, 23 bp, Artificial sequence
  SiRNA target sequence
ttagtgattttgaatatcactta

SEQ ID NO: 173609 - DNA, 23 bp, Artificial sequence
  SiRNA target sequence
tagtgattttgaatatcacttaa

SEQ ID NO: 173610 - DNA, 23 bp, Artificial sequence
  SiRNA target sequence
agtgattttgaatatcacttaat

SEQ ID NO: 173611 - DNA, 23 bp, Artificial sequence
  SiRNA target sequence
gtgattttgaatatcacttaatt

SEQ ID NO: 173612 - DNA, 23 bp, Artificial sequence
  SiRNA target sequence
tgattttgaatatcacttaattt

SEQ ID NO: 173613 - DNA, 23 bp, Artificial sequence
  SiRNA target sequence
gattttgaatatcacttaatttc

SEQ ID NO: 173614 - DNA, 23 bp, Artificial sequence
  SiRNA target sequence
attttgaatatcacttaatttca

SEQ ID NO: 173615 - DNA, 23 bp, Artificial sequence
  SiRNA target sequence
ttttgaatatcacttaatttcat

SEQ ID NO: 173616 - DNA, 23 bp, Artificial sequence
  SiRNA target sequence
tttgaatatcacttaatttcatt

SEQ ID NO: 173617 - DNA, 23 bp, Artificial sequence
  SiRNA target sequence
ttgaatatcacttaatttcattt

SEQ ID NO: 173618 - DNA, 23 bp, Artificial sequence
  SiRNA target sequence
tgaatatcacttaatttcattta

SEQ ID NO: 173619 - DNA, 23 bp, Artificial sequence
  SiRNA target sequence
gaatatcacttaatttcatttat

SEQ ID NO: 173620 - DNA, 23 bp, Artificial sequence
  SiRNA target sequence
aatatcacttaatttcatttata

SEQ ID NO: 173621 - DNA, 23 bp, Artificial sequence
  SiRNA target sequence
atatcacttaatttcatttataa

SEQ ID NO: 173622 - DNA, 23 bp, Artificial sequence
  SiRNA target sequence
tatcacttaatttcatttataaa

SEQ ID NO: 173623 - DNA, 23 bp, Artificial sequence
  SiRNA target sequence
atcacttaatttcatttataaaa

SEQ ID NO: 173624 - DNA, 23 bp, Artificial sequence
  SiRNA target sequence
tcacttaatttcatttataaaac

SEQ ID NO: 173625 - DNA, 23 bp, Artificial sequence
  SiRNA target sequence
cacttaatttcatttataaaact

SEQ ID NO: 173626 - DNA, 23 bp, Artificial sequence
  SiRNA target sequence
acttaatttcatttataaaacta

SEQ ID NO: 173627 - DNA, 23 bp, Artificial sequence
  SiRNA target sequence
cttaatttcatttataaaactaa

SEQ ID NO: 173628 - DNA, 23 bp, Artificial sequence
  SiRNA target sequence
ttaatttcatttataaaactaaa

SEQ ID NO: 173629 - DNA, 23 bp, Artificial sequence
  SiRNA target sequence
taatttcatttataaaactaaaa

SEQ ID NO: 173630 - DNA, 23 bp, Artificial sequence
  SiRNA target sequence
aatttcatttataaaactaaaat

SEQ ID NO: 173631 - DNA, 23 bp, Artificial sequence
  SiRNA target sequence
atttcatttataaaactaaaatt

SEQ ID NO: 173632 - DNA, 23 bp, Artificial sequence
  SiRNA target sequence
tttcatttataaaactaaaattt

SEQ ID NO: 173633 - DNA, 23 bp, Artificial sequence
  SiRNA target sequence
ttcatttataaaactaaaattta

SEQ ID NO: 173634 - DNA, 23 bp, Artificial sequence
  SiRNA target sequence
tcatttataaaactaaaatttaa

SEQ ID NO: 173635 - DNA, 23 bp, Artificial sequence
  SiRNA target sequence
catttataaaactaaaatttaat

SEQ ID NO: 173636 - DNA, 23 bp, Artificial sequence
  SiRNA target sequence
atttataaaactaaaatttaatg

SEQ ID NO: 173637 - DNA, 23 bp, Artificial sequence
  SiRNA target sequence
tttataaaactaaaatttaatgt

SEQ ID NO: 173638 - DNA, 23 bp, Artificial sequence
  SiRNA target sequence
ttataaaactaaaatttaatgta

SEQ ID NO: 173639 - DNA, 23 bp, Artificial sequence
  SiRNA target sequence
tataaaactaaaatttaatgtaa

SEQ ID NO: 173640 - DNA, 23 bp, Artificial sequence
  SiRNA target sequence
ataaaactaaaatttaatgtaat

SEQ ID NO: 173641 - DNA, 23 bp, Artificial sequence
  SiRNA target sequence
taaaactaaaatttaatgtaata

SEQ ID NO: 173642 - DNA, 23 bp, Artificial sequence
  SiRNA target sequence
aaaactaaaatttaatgtaataa

SEQ ID NO: 173643 - DNA, 23 bp, Artificial sequence
  SiRNA target sequence
aaactaaaatttaatgtaataaa

SEQ ID NO: 173644 - DNA, 23 bp, Artificial sequence
  SiRNA target sequence
aactaaaatttaatgtaataaaa

SEQ ID NO: 173645 - DNA, 23 bp, Artificial sequence
  SiRNA target sequence
actaaaatttaatgtaataaaag

SEQ ID NO: 173646 - DNA, 23 bp, Artificial sequence
  SiRNA target sequence
ctaaaatttaatgtaataaaagt

SEQ ID NO: 173647 - DNA, 23 bp, Artificial sequence
  SiRNA target sequence
taaaatttaatgtaataaaagta

SEQ ID NO: 173648 - DNA, 23 bp, Artificial sequence
  SiRNA target sequence
aaaatttaatgtaataaaagtat

SEQ ID NO: 173649 - DNA, 23 bp, Artificial sequence
  SiRNA target sequence
aaatttaatgtaataaaagtata

SEQ ID NO: 173650 - DNA, 23 bp, Artificial sequence
  SiRNA target sequence
aatttaatgtaataaaagtatat

SEQ ID NO: 173651 - DNA, 23 bp, Artificial sequence
  SiRNA target sequence
atttaatgtaataaaagtatatg

SEQ ID NO: 173652 - DNA, 23 bp, Artificial sequence
  SiRNA target sequence
tttaatgtaataaaagtatatga

SEQ ID NO: 173653 - DNA, 23 bp, Artificial sequence
  SiRNA target sequence
ttaatgtaataaaagtatatgat

SEQ ID NO: 173654 - DNA, 23 bp, Artificial sequence
  SiRNA target sequence
taatgtaataaaagtatatgata

SEQ ID NO: 173655 - DNA, 23 bp, Artificial sequence
  SiRNA target sequence
aatgtaataaaagtatatgatac

SEQ ID NO: 173656 - DNA, 23 bp, Artificial sequence
  SiRNA target sequence
atgtaataaaagtatatgataca

SEQ ID NO: 173657 - DNA, 23 bp, Artificial sequence
  SiRNA target sequence
tgtaataaaagtatatgatacat

SEQ ID NO: 173658 - DNA, 23 bp, Artificial sequence
  SiRNA target sequence
gtaataaaagtatatgatacatc

SEQ ID NO: 173659 - DNA, 23 bp, Artificial sequence
  SiRNA target sequence
taataaaagtatatgatacatct

SEQ ID NO: 173660 - DNA, 23 bp, Artificial sequence
  SiRNA target sequence
aataaaagtatatgatacatctt

SEQ ID NO: 173661 - DNA, 23 bp, Artificial sequence
  SiRNA target sequence
ataaaagtatatgatacatctta

SEQ ID NO: 173662 - DNA, 23 bp, Artificial sequence
  SiRNA target sequence
taaaagtatatgatacatcttat

SEQ ID NO: 173663 - DNA, 23 bp, Artificial sequence
  SiRNA target sequence
aaaagtatatgatacatcttatg

SEQ ID NO: 173664 - DNA, 23 bp, Artificial sequence
  SiRNA target sequence
aaagtatatgatacatcttatgt

SEQ ID NO: 173665 - DNA, 23 bp, Artificial sequence
  SiRNA target sequence
aagtatatgatacatcttatgtc

SEQ ID NO: 173666 - DNA, 23 bp, Artificial sequence
  SiRNA target sequence
agtatatgatacatcttatgtca

SEQ ID NO: 173667 - DNA, 23 bp, Artificial sequence
  SiRNA target sequence
gtatatgatacatcttatgtcaa

SEQ ID NO: 173668 - DNA, 23 bp, Artificial sequence
  SiRNA target sequence
tatatgatacatcttatgtcaaa

SEQ ID NO: 173669 - DNA, 23 bp, Artificial sequence
  SiRNA target sequence
atatgatacatcttatgtcaaaa

SEQ ID NO: 173670 - DNA, 23 bp, Artificial sequence
  SiRNA target sequence
tatgatacatcttatgtcaaaaa

SEQ ID NO: 173671 - DNA, 23 bp, Artificial sequence
  SiRNA target sequence
atgatacatcttatgtcaaaaat

SEQ ID NO: 173672 - DNA, 23 bp, Artificial sequence
  SiRNA target sequence
tgatacatcttatgtcaaaaata

SEQ ID NO: 173673 - DNA, 23 bp, Artificial sequence
  SiRNA target sequence
gatacatcttatgtcaaaaatat

SEQ ID NO: 173674 - DNA, 23 bp, Artificial sequence
  SiRNA target sequence
atacatcttatgtcaaaaatatt

SEQ ID NO: 173675 - DNA, 23 bp, Artificial sequence
  SiRNA target sequence
tacatcttatgtcaaaaatattc

SEQ ID NO: 173676 - DNA, 23 bp, Artificial sequence
  SiRNA target sequence
acatcttatgtcaaaaatattct

SEQ ID NO: 173677 - DNA, 23 bp, Artificial sequence
  SiRNA target sequence
catcttatgtcaaaaatattctg

SEQ ID NO: 173678 - DNA, 23 bp, Artificial sequence
  SiRNA target sequence
atcttatgtcaaaaatattctgt

SEQ ID NO: 173679 - DNA, 23 bp, Artificial sequence
  SiRNA target sequence
tcttatgtcaaaaatattctgta

SEQ ID NO: 173680 - DNA, 23 bp, Artificial sequence
  SiRNA target sequence
cttatgtcaaaaatattctgtat

SEQ ID NO: 173681 - DNA, 23 bp, Artificial sequence
  SiRNA target sequence
ttatgtcaaaaatattctgtatg

SEQ ID NO: 173682 - DNA, 23 bp, Artificial sequence
  SiRNA target sequence
tatgtcaaaaatattctgtatga

SEQ ID NO: 173683 - DNA, 23 bp, Artificial sequence
  SiRNA target sequence
atgtcaaaaatattctgtatgat

SEQ ID NO: 173684 - DNA, 23 bp, Artificial sequence
  SiRNA target sequence
tgtcaaaaatattctgtatgata

SEQ ID NO: 173685 - DNA, 23 bp, Artificial sequence
  SiRNA target sequence
gtcaaaaatattctgtatgatag

SEQ ID NO: 173686 - DNA, 23 bp, Artificial sequence
  SiRNA target sequence
tcaaaaatattctgtatgatagt

SEQ ID NO: 173687 - DNA, 23 bp, Artificial sequence
  SiRNA target sequence
caaaaatattctgtatgatagtg

SEQ ID NO: 173688 - DNA, 23 bp, Artificial sequence
  SiRNA target sequence
aaaaatattctgtatgatagtgt

SEQ ID NO: 173689 - DNA, 23 bp, Artificial sequence
  SiRNA target sequence
aaaatattctgtatgatagtgtt

SEQ ID NO: 173690 - DNA, 23 bp, Artificial sequence
  SiRNA target sequence
aaatattctgtatgatagtgttt

SEQ ID NO: 173691 - DNA, 23 bp, Artificial sequence
  SiRNA target sequence
aatattctgtatgatagtgttta

SEQ ID NO: 173692 - DNA, 23 bp, Artificial sequence
  SiRNA target sequence
atattctgtatgatagtgtttat

SEQ ID NO: 173693 - DNA, 23 bp, Artificial sequence
  SiRNA target sequence
tattctgtatgatagtgtttatg

SEQ ID NO: 173694 - DNA, 23 bp, Artificial sequence
  SiRNA target sequence
attctgtatgatagtgtttatga

SEQ ID NO: 173695 - DNA, 23 bp, Artificial sequence
  SiRNA target sequence
ttctgtatgatagtgtttatgag

SEQ ID NO: 173696 - DNA, 23 bp, Artificial sequence
  SiRNA target sequence
tctgtatgatagtgtttatgagg

SEQ ID NO: 173697 - DNA, 23 bp, Artificial sequence
  SiRNA target sequence
ctgtatgatagtgtttatgagga

SEQ ID NO: 173698 - DNA, 23 bp, Artificial sequence
  SiRNA target sequence
tgtatgatagtgtttatgaggaa

SEQ ID NO: 173699 - DNA, 23 bp, Artificial sequence
  SiRNA target sequence
gtatgatagtgtttatgaggaaa

SEQ ID NO: 173700 - DNA, 23 bp, Artificial sequence
  SiRNA target sequence
tatgatagtgtttatgaggaaag

SEQ ID NO: 173701 - DNA, 23 bp, Artificial sequence
  SiRNA target sequence
atgatagtgtttatgaggaaagc

SEQ ID NO: 173702 - DNA, 23 bp, Artificial sequence
  SiRNA target sequence
tgatagtgtttatgaggaaagca

SEQ ID NO: 173703 - DNA, 23 bp, Artificial sequence
  SiRNA target sequence
gatagtgtttatgaggaaagcac

SEQ ID NO: 173704 - DNA, 23 bp, Artificial sequence
  SiRNA target sequence
atagtgtttatgaggaaagcacg

SEQ ID NO: 173705 - DNA, 23 bp, Artificial sequence
  SiRNA target sequence
tagtgtttatgaggaaagcacga

SEQ ID NO: 173706 - DNA, 23 bp, Artificial sequence
  SiRNA target sequence
agtgtttatgaggaaagcacgag

SEQ ID NO: 173707 - DNA, 23 bp, Artificial sequence
  SiRNA target sequence
gtgtttatgaggaaagcacgaga

SEQ ID NO: 173708 - DNA, 23 bp, Artificial sequence
  SiRNA target sequence
tgtttatgaggaaagcacgagag

SEQ ID NO: 173709 - DNA, 23 bp, Artificial sequence
  SiRNA target sequence
gtttatgaggaaagcacgagaga

SEQ ID NO: 173710 - DNA, 23 bp, Artificial sequence
  SiRNA target sequence
tttatgaggaaagcacgagagac

SEQ ID NO: 173711 - DNA, 23 bp, Artificial sequence
  SiRNA target sequence
ttatgaggaaagcacgagagaca

SEQ ID NO: 173712 - DNA, 23 bp, Artificial sequence
  SiRNA target sequence
tatgaggaaagcacgagagacaa

SEQ ID NO: 173713 - DNA, 23 bp, Artificial sequence
  SiRNA target sequence
atgaggaaagcacgagagacaaa

SEQ ID NO: 173714 - DNA, 23 bp, Artificial sequence
  SiRNA target sequence
tgaggaaagcacgagagacaaaa

SEQ ID NO: 173715 - DNA, 23 bp, Artificial sequence
  SiRNA target sequence
gaggaaagcacgagagacaaaat

SEQ ID NO: 173716 - DNA, 23 bp, Artificial sequence
  SiRNA target sequence
aggaaagcacgagagacaaaata

SEQ ID NO: 173717 - DNA, 23 bp, Artificial sequence
  SiRNA target sequence
ggaaagcacgagagacaaaataa

SEQ ID NO: 173718 - DNA, 23 bp, Artificial sequence
  SiRNA target sequence
gaaagcacgagagacaaaataat

SEQ ID NO: 173719 - DNA, 23 bp, Artificial sequence
  SiRNA target sequence
aaagcacgagagacaaaataata

SEQ ID NO: 173720 - DNA, 23 bp, Artificial sequence
  SiRNA target sequence
aagcacgagagacaaaataataa

SEQ ID NO: 173721 - DNA, 23 bp, Artificial sequence
  SiRNA target sequence
agcacgagagacaaaataataat

SEQ ID NO: 173722 - DNA, 23 bp, Artificial sequence
  SiRNA target sequence
gcacgagagacaaaataataata

SEQ ID NO: 173723 - DNA, 23 bp, Artificial sequence
  SiRNA target sequence
cacgagagacaaaataataataa

SEQ ID NO: 173724 - DNA, 23 bp, Artificial sequence
  SiRNA target sequence
acgagagacaaaataataataag

SEQ ID NO: 173725 - DNA, 23 bp, Artificial sequence
  SiRNA target sequence
cgagagacaaaataataataagt

SEQ ID NO: 173726 - DNA, 23 bp, Artificial sequence
  SiRNA target sequence
gagagacaaaataataataagtg

SEQ ID NO: 173727 - DNA, 23 bp, Artificial sequence
  SiRNA target sequence
agagacaaaataataataagtga

SEQ ID NO: 173728 - DNA, 23 bp, Artificial sequence
  SiRNA target sequence
gagacaaaataataataagtgac

SEQ ID NO: 173729 - DNA, 23 bp, Artificial sequence
  SiRNA target sequence
agacaaaataataataagtgact

SEQ ID NO: 173730 - DNA, 23 bp, Artificial sequence
  SiRNA target sequence
gacaaaataataataagtgactg

SEQ ID NO: 173731 - DNA, 23 bp, Artificial sequence
  SiRNA target sequence
acaaaataataataagtgactgt

SEQ ID NO: 173732 - DNA, 23 bp, Artificial sequence
  SiRNA target sequence
caaaataataataagtgactgtc

SEQ ID NO: 173733 - DNA, 23 bp, Artificial sequence
  SiRNA target sequence
aaaataataataagtgactgtcc

SEQ ID NO: 173734 - DNA, 23 bp, Artificial sequence
  SiRNA target sequence
aaataataataagtgactgtcct

SEQ ID NO: 173735 - DNA, 23 bp, Artificial sequence
  SiRNA target sequence
aataataataagtgactgtcctg

SEQ ID NO: 173736 - DNA, 23 bp, Artificial sequence
  SiRNA target sequence
ataataataagtgactgtcctgg

SEQ ID NO: 173737 - DNA, 23 bp, Artificial sequence
  SiRNA target sequence
taataataagtgactgtcctggg

SEQ ID NO: 173738 - DNA, 23 bp, Artificial sequence
  SiRNA target sequence
aataataagtgactgtcctggga

SEQ ID NO: 173739 - DNA, 23 bp, Artificial sequence
  SiRNA target sequence
ataataagtgactgtcctgggac

SEQ ID NO: 173740 - DNA, 23 bp, Artificial sequence
  SiRNA target sequence
taataagtgactgtcctgggact

SEQ ID NO: 173741 - DNA, 23 bp, Artificial sequence
  SiRNA target sequence
aataagtgactgtcctgggactg

SEQ ID NO: 173742 - DNA, 23 bp, Artificial sequence
  SiRNA target sequence
ataagtgactgtcctgggactgt

SEQ ID NO: 173743 - DNA, 23 bp, Artificial sequence
  SiRNA target sequence
taagtgactgtcctgggactgtt

SEQ ID NO: 173744 - DNA, 23 bp, Artificial sequence
  SiRNA target sequence
aagtgactgtcctgggactgttt

SEQ ID NO: 173745 - DNA, 23 bp, Artificial sequence
  SiRNA target sequence
agtgactgtcctgggactgtttc

SEQ ID NO: 173746 - DNA, 23 bp, Artificial sequence
  SiRNA target sequence
gtgactgtcctgggactgtttca

SEQ ID NO: 173747 - DNA, 23 bp, Artificial sequence
  SiRNA target sequence
tgactgtcctgggactgtttcat

SEQ ID NO: 173748 - DNA, 23 bp, Artificial sequence
  SiRNA target sequence
gactgtcctgggactgtttcata

SEQ ID NO: 173749 - DNA, 23 bp, Artificial sequence
  SiRNA target sequence
actgtcctgggactgtttcatat

SEQ ID NO: 173750 - DNA, 23 bp, Artificial sequence
  SiRNA target sequence
ctgtcctgggactgtttcatata

SEQ ID NO: 173751 - DNA, 23 bp, Artificial sequence
  SiRNA target sequence
tgtcctgggactgtttcatatat

SEQ ID NO: 173752 - DNA, 23 bp, Artificial sequence
  SiRNA target sequence
gtcctgggactgtttcatatatt

SEQ ID NO: 173753 - DNA, 23 bp, Artificial sequence
  SiRNA target sequence
tcctgggactgtttcatatattg

SEQ ID NO: 173754 - DNA, 23 bp, Artificial sequence
  SiRNA target sequence
cctgggactgtttcatatattga

SEQ ID NO: 173755 - DNA, 23 bp, Artificial sequence
  SiRNA target sequence
ctgggactgtttcatatattgaa

SEQ ID NO: 173756 - DNA, 23 bp, Artificial sequence
  SiRNA target sequence
tgggactgtttcatatattgaaa

SEQ ID NO: 173757 - DNA, 23 bp, Artificial sequence
  SiRNA target sequence
gggactgtttcatatattgaaag

SEQ ID NO: 173758 - DNA, 23 bp, Artificial sequence
  SiRNA target sequence
ggactgtttcatatattgaaagg

SEQ ID NO: 173759 - DNA, 23 bp, Artificial sequence
  SiRNA target sequence
gactgtttcatatattgaaaggc

SEQ ID NO: 173760 - DNA, 23 bp, Artificial sequence
  SiRNA target sequence
actgtttcatatattgaaaggca

SEQ ID NO: 173761 - DNA, 23 bp, Artificial sequence
  SiRNA target sequence
ctgtttcatatattgaaaggcaa

SEQ ID NO: 173762 - DNA, 23 bp, Artificial sequence
  SiRNA target sequence
tgtttcatatattgaaaggcaag

SEQ ID NO: 173763 - DNA, 23 bp, Artificial sequence
  SiRNA target sequence
gtttcatatattgaaaggcaagc

SEQ ID NO: 173764 - DNA, 23 bp, Artificial sequence
  SiRNA target sequence
tttcatatattgaaaggcaagca

SEQ ID NO: 173765 - DNA, 23 bp, Artificial sequence
  SiRNA target sequence
ttcatatattgaaaggcaagcac

SEQ ID NO: 173766 - DNA, 23 bp, Artificial sequence
  SiRNA target sequence
tcatatattgaaaggcaagcaca

SEQ ID NO: 173767 - DNA, 23 bp, Artificial sequence
  SiRNA target sequence
catatattgaaaggcaagcacac

SEQ ID NO: 173768 - DNA, 23 bp, Artificial sequence
  SiRNA target sequence
atatattgaaaggcaagcacacc

SEQ ID NO: 173769 - DNA, 23 bp, Artificial sequence
  SiRNA target sequence
tatattgaaaggcaagcacacca

SEQ ID NO: 173770 - DNA, 23 bp, Artificial sequence
  SiRNA target sequence
atattgaaaggcaagcacaccat

SEQ ID NO: 173771 - DNA, 23 bp, Artificial sequence
  SiRNA target sequence
tattgaaaggcaagcacaccatt

SEQ ID NO: 173772 - DNA, 23 bp, Artificial sequence
  SiRNA target sequence
attgaaaggcaagcacaccattt

SEQ ID NO: 173773 - DNA, 23 bp, Artificial sequence
  SiRNA target sequence
ttgaaaggcaagcacaccattta

SEQ ID NO: 173774 - DNA, 23 bp, Artificial sequence
  SiRNA target sequence
tgaaaggcaagcacaccatttaa

SEQ ID NO: 173775 - DNA, 23 bp, Artificial sequence
  SiRNA target sequence
gaaaggcaagcacaccatttaat

SEQ ID NO: 173776 - DNA, 23 bp, Artificial sequence
  SiRNA target sequence
aaaggcaagcacaccatttaatt

SEQ ID NO: 173777 - DNA, 23 bp, Artificial sequence
  SiRNA target sequence
aaggcaagcacaccatttaattg

SEQ ID NO: 173778 - DNA, 23 bp, Artificial sequence
  SiRNA target sequence
aggcaagcacaccatttaattga

SEQ ID NO: 173779 - DNA, 23 bp, Artificial sequence
  SiRNA target sequence
ggcaagcacaccatttaattgaa

SEQ ID NO: 173780 - DNA, 23 bp, Artificial sequence
  SiRNA target sequence
gcaagcacaccatttaattgaat

SEQ ID NO: 173781 - DNA, 23 bp, Artificial sequence
  SiRNA target sequence
caagcacaccatttaattgaata

SEQ ID NO: 173782 - DNA, 23 bp, Artificial sequence
  SiRNA target sequence
aagcacaccatttaattgaatat

SEQ ID NO: 173783 - DNA, 23 bp, Artificial sequence
  SiRNA target sequence
agcacaccatttaattgaatatt

SEQ ID NO: 173784 - DNA, 23 bp, Artificial sequence
  SiRNA target sequence
gcacaccatttaattgaatattt

SEQ ID NO: 173785 - DNA, 23 bp, Artificial sequence
  SiRNA target sequence
cacaccatttaattgaatattta

SEQ ID NO: 173786 - DNA, 23 bp, Artificial sequence
  SiRNA target sequence
acaccatttaattgaatatttat

SEQ ID NO: 173787 - DNA, 23 bp, Artificial sequence
  SiRNA target sequence
caccatttaattgaatatttatc

SEQ ID NO: 173788 - DNA, 23 bp, Artificial sequence
  SiRNA target sequence
accatttaattgaatatttatct

SEQ ID NO: 173789 - DNA, 23 bp, Artificial sequence
  SiRNA target sequence
ccatttaattgaatatttatctg

SEQ ID NO: 173790 - DNA, 23 bp, Artificial sequence
  SiRNA target sequence
catttaattgaatatttatctgt

SEQ ID NO: 173791 - DNA, 23 bp, Artificial sequence
  SiRNA target sequence
atttaattgaatatttatctgtt

SEQ ID NO: 173792 - DNA, 23 bp, Artificial sequence
  SiRNA target sequence
tttaattgaatatttatctgtta

SEQ ID NO: 173793 - DNA, 23 bp, Artificial sequence
  SiRNA target sequence
ttaattgaatatttatctgttac

SEQ ID NO: 173794 - DNA, 23 bp, Artificial sequence
  SiRNA target sequence
taattgaatatttatctgttact

SEQ ID NO: 173795 - DNA, 23 bp, Artificial sequence
  SiRNA target sequence
aattgaatatttatctgttactt

SEQ ID NO: 173796 - DNA, 23 bp, Artificial sequence
  SiRNA target sequence
attgaatatttatctgttacttc

SEQ ID NO: 173797 - DNA, 23 bp, Artificial sequence
  SiRNA target sequence
ttgaatatttatctgttacttct

SEQ ID NO: 173798 - DNA, 23 bp, Artificial sequence
  SiRNA target sequence
tgaatatttatctgttacttcta

SEQ ID NO: 173799 - DNA, 23 bp, Artificial sequence
  SiRNA target sequence
gaatatttatctgttacttctac

SEQ ID NO: 173800 - DNA, 23 bp, Artificial sequence
  SiRNA target sequence
aatatttatctgttacttctaca

SEQ ID NO: 173801 - DNA, 23 bp, Artificial sequence
  SiRNA target sequence
atatttatctgttacttctacac

SEQ ID NO: 173802 - DNA, 23 bp, Artificial sequence
  SiRNA target sequence
tatttatctgttacttctacaca

SEQ ID NO: 173803 - DNA, 23 bp, Artificial sequence
  SiRNA target sequence
atttatctgttacttctacacaa

SEQ ID NO: 173804 - DNA, 23 bp, Artificial sequence
  SiRNA target sequence
tttatctgttacttctacacaac

SEQ ID NO: 173805 - DNA, 23 bp, Artificial sequence
  SiRNA target sequence
ttatctgttacttctacacaaca

SEQ ID NO: 173806 - DNA, 23 bp, Artificial sequence
  SiRNA target sequence
tatctgttacttctacacaacaa

SEQ ID NO: 173807 - DNA, 23 bp, Artificial sequence
  SiRNA target sequence
atctgttacttctacacaacaac

SEQ ID NO: 173808 - DNA, 23 bp, Artificial sequence
  SiRNA target sequence
tctgttacttctacacaacaaca

SEQ ID NO: 173809 - DNA, 23 bp, Artificial sequence
  SiRNA target sequence
ctgttacttctacacaacaacaa

SEQ ID NO: 173810 - DNA, 23 bp, Artificial sequence
  SiRNA target sequence
tgttacttctacacaacaacaag

SEQ ID NO: 173811 - DNA, 23 bp, Artificial sequence
  SiRNA target sequence
gttacttctacacaacaacaagc

SEQ ID NO: 173812 - DNA, 23 bp, Artificial sequence
  SiRNA target sequence
ttacttctacacaacaacaagcc

SEQ ID NO: 173813 - DNA, 23 bp, Artificial sequence
  SiRNA target sequence
tacttctacacaacaacaagcca

SEQ ID NO: 173814 - DNA, 23 bp, Artificial sequence
  SiRNA target sequence
acttctacacaacaacaagccat

SEQ ID NO: 173815 - DNA, 23 bp, Artificial sequence
  SiRNA target sequence
cttctacacaacaacaagccata

SEQ ID NO: 173816 - DNA, 23 bp, Artificial sequence
  SiRNA target sequence
ttctacacaacaacaagccataa

SEQ ID NO: 173817 - DNA, 23 bp, Artificial sequence
  SiRNA target sequence
tctacacaacaacaagccataaa

SEQ ID NO: 173818 - DNA, 23 bp, Artificial sequence
  SiRNA target sequence
ctacacaacaacaagccataaag

SEQ ID NO: 173819 - DNA, 23 bp, Artificial sequence
  SiRNA target sequence
tacacaacaacaagccataaagc

SEQ ID NO: 173820 - DNA, 23 bp, Artificial sequence
  SiRNA target sequence
acacaacaacaagccataaagct

SEQ ID NO: 173821 - DNA, 23 bp, Artificial sequence
  SiRNA target sequence
cacaacaacaagccataaagcta

SEQ ID NO: 173822 - DNA, 23 bp, Artificial sequence
  SiRNA target sequence
acaacaacaagccataaagctac

SEQ ID NO: 173823 - DNA, 23 bp, Artificial sequence
  SiRNA target sequence
caacaacaagccataaagctact

SEQ ID NO: 173824 - DNA, 23 bp, Artificial sequence
  SiRNA target sequence
aacaacaagccataaagctactt

SEQ ID NO: 173825 - DNA, 23 bp, Artificial sequence
  SiRNA target sequence
acaacaagccataaagctacttg

SEQ ID NO: 173826 - DNA, 23 bp, Artificial sequence
  SiRNA target sequence
caacaagccataaagctacttgc

SEQ ID NO: 173827 - DNA, 23 bp, Artificial sequence
  SiRNA target sequence
aacaagccataaagctacttgct

SEQ ID NO: 173828 - DNA, 23 bp, Artificial sequence
  SiRNA target sequence
acaagccataaagctacttgctc

SEQ ID NO: 173829 - DNA, 23 bp, Artificial sequence
  SiRNA target sequence
caagccataaagctacttgctca

SEQ ID NO: 173830 - DNA, 23 bp, Artificial sequence
  SiRNA target sequence
aagccataaagctacttgctcag

SEQ ID NO: 173831 - DNA, 23 bp, Artificial sequence
  SiRNA target sequence
agccataaagctacttgctcagg

SEQ ID NO: 173832 - DNA, 23 bp, Artificial sequence
  SiRNA target sequence
gccataaagctacttgctcaggg

SEQ ID NO: 173833 - DNA, 23 bp, Artificial sequence
  SiRNA target sequence
ccataaagctacttgctcagggg

SEQ ID NO: 173834 - DNA, 23 bp, Artificial sequence
  SiRNA target sequence
cataaagctacttgctcaggggc

SEQ ID NO: 173835 - DNA, 23 bp, Artificial sequence
  SiRNA target sequence
ataaagctacttgctcaggggcg

SEQ ID NO: 173836 - DNA, 23 bp, Artificial sequence
  SiRNA target sequence
taaagctacttgctcaggggcga

SEQ ID NO: 173837 - DNA, 23 bp, Artificial sequence
  SiRNA target sequence
aaagctacttgctcaggggcgaa

SEQ ID NO: 173838 - DNA, 23 bp, Artificial sequence
  SiRNA target sequence
aagctacttgctcaggggcgaag

SEQ ID NO: 173839 - DNA, 23 bp, Artificial sequence
  SiRNA target sequence
agctacttgctcaggggcgaagt

SEQ ID NO: 173840 - DNA, 23 bp, Artificial sequence
  SiRNA target sequence
gctacttgctcaggggcgaagta

SEQ ID NO: 173841 - DNA, 23 bp, Artificial sequence
  SiRNA target sequence
ctacttgctcaggggcgaagtat

SEQ ID NO: 173842 - DNA, 23 bp, Artificial sequence
  SiRNA target sequence
tacttgctcaggggcgaagtata

SEQ ID NO: 173843 - DNA, 23 bp, Artificial sequence
  SiRNA target sequence
acttgctcaggggcgaagtataa

SEQ ID NO: 173844 - DNA, 23 bp, Artificial sequence
  SiRNA target sequence
cttgctcaggggcgaagtataag

SEQ ID NO: 173845 - DNA, 23 bp, Artificial sequence
  SiRNA target sequence
ttgctcaggggcgaagtataagt

SEQ ID NO: 173846 - DNA, 23 bp, Artificial sequence
  SiRNA target sequence
tgctcaggggcgaagtataagtg

SEQ ID NO: 173847 - DNA, 23 bp, Artificial sequence
  SiRNA target sequence
gctcaggggcgaagtataagtgt

SEQ ID NO: 173848 - DNA, 23 bp, Artificial sequence
  SiRNA target sequence
ctcaggggcgaagtataagtgtc

SEQ ID NO: 173849 - DNA, 23 bp, Artificial sequence
  SiRNA target sequence
tcaggggcgaagtataagtgtca

SEQ ID NO: 173850 - DNA, 23 bp, Artificial sequence
  SiRNA target sequence
caggggcgaagtataagtgtcat

SEQ ID NO: 173851 - DNA, 23 bp, Artificial sequence
  SiRNA target sequence
aggggcgaagtataagtgtcata

SEQ ID NO: 173852 - DNA, 23 bp, Artificial sequence
  SiRNA target sequence
ggggcgaagtataagtgtcatac

SEQ ID NO: 173853 - DNA, 23 bp, Artificial sequence
  SiRNA target sequence
gggcgaagtataagtgtcataca

SEQ ID NO: 173854 - DNA, 23 bp, Artificial sequence
  SiRNA target sequence
ggcgaagtataagtgtcatacag

SEQ ID NO: 173855 - DNA, 23 bp, Artificial sequence
  SiRNA target sequence
gcgaagtataagtgtcatacagt

SEQ ID NO: 173856 - DNA, 23 bp, Artificial sequence
  SiRNA target sequence
cgaagtataagtgtcatacagtg

SEQ ID NO: 173857 - DNA, 23 bp, Artificial sequence
  SiRNA target sequence
gaagtataagtgtcatacagtgc

SEQ ID NO: 173858 - DNA, 23 bp, Artificial sequence
  SiRNA target sequence
aagtataagtgtcatacagtgct

SEQ ID NO: 173859 - DNA, 23 bp, Artificial sequence
  SiRNA target sequence
agtataagtgtcatacagtgcta

SEQ ID NO: 173860 - DNA, 23 bp, Artificial sequence
  SiRNA target sequence
gtataagtgtcatacagtgctat

SEQ ID NO: 173861 - DNA, 23 bp, Artificial sequence
  SiRNA target sequence
tataagtgtcatacagtgctatg

SEQ ID NO: 173862 - DNA, 23 bp, Artificial sequence
  SiRNA target sequence
ataagtgtcatacagtgctatga

SEQ ID NO: 173863 - DNA, 23 bp, Artificial sequence
  SiRNA target sequence
taagtgtcatacagtgctatgat

SEQ ID NO: 173864 - DNA, 23 bp, Artificial sequence
  SiRNA target sequence
aagtgtcatacagtgctatgata

SEQ ID NO: 173865 - DNA, 23 bp, Artificial sequence
  SiRNA target sequence
agtgtcatacagtgctatgataa

SEQ ID NO: 173866 - DNA, 23 bp, Artificial sequence
  SiRNA target sequence
gtgtcatacagtgctatgataaa

SEQ ID NO: 173867 - DNA, 23 bp, Artificial sequence
  SiRNA target sequence
tgtcatacagtgctatgataaat

SEQ ID NO: 173868 - DNA, 23 bp, Artificial sequence
  SiRNA target sequence
gtcatacagtgctatgataaatt

SEQ ID NO: 173869 - DNA, 23 bp, Artificial sequence
  SiRNA target sequence
tcatacagtgctatgataaattt

SEQ ID NO: 173870 - DNA, 23 bp, Artificial sequence
  SiRNA target sequence
catacagtgctatgataaatttt

SEQ ID NO: 173871 - DNA, 23 bp, Artificial sequence
  SiRNA target sequence
atacagtgctatgataaattttt

SEQ ID NO: 173872 - DNA, 23 bp, Artificial sequence
  SiRNA target sequence
tacagtgctatgataaattttta

SEQ ID NO: 173873 - DNA, 23 bp, Artificial sequence
  SiRNA target sequence
acagtgctatgataaatttttag

SEQ ID NO: 173874 - DNA, 23 bp, Artificial sequence
  SiRNA target sequence
cagtgctatgataaatttttaga

SEQ ID NO: 173875 - DNA, 23 bp, Artificial sequence
  SiRNA target sequence
agtgctatgataaatttttagag

SEQ ID NO: 173876 - DNA, 23 bp, Artificial sequence
  SiRNA target sequence
gtgctatgataaatttttagaga

SEQ ID NO: 173877 - DNA, 23 bp, Artificial sequence
  SiRNA target sequence
tgctatgataaatttttagagaa

SEQ ID NO: 173878 - DNA, 23 bp, Artificial sequence
  SiRNA target sequence
gctatgataaatttttagagaat

SEQ ID NO: 173879 - DNA, 23 bp, Artificial sequence
  SiRNA target sequence
ctatgataaatttttagagaata

SEQ ID NO: 173880 - DNA, 23 bp, Artificial sequence
  SiRNA target sequence
tatgataaatttttagagaatag

SEQ ID NO: 173881 - DNA, 23 bp, Artificial sequence
  SiRNA target sequence
atgataaatttttagagaatagc

SEQ ID NO: 173882 - DNA, 23 bp, Artificial sequence
  SiRNA target sequence
tgataaatttttagagaatagcg

SEQ ID NO: 173883 - DNA, 23 bp, Artificial sequence
  SiRNA target sequence
gataaatttttagagaatagcga

SEQ ID NO: 173884 - DNA, 23 bp, Artificial sequence
  SiRNA target sequence
ataaatttttagagaatagcgat

SEQ ID NO: 173885 - DNA, 23 bp, Artificial sequence
  SiRNA target sequence
taaatttttagagaatagcgatg

SEQ ID NO: 173886 - DNA, 23 bp, Artificial sequence
  SiRNA target sequence
aaatttttagagaatagcgatga

SEQ ID NO: 173887 - DNA, 23 bp, Artificial sequence
  SiRNA target sequence
aatttttagagaatagcgatgat

SEQ ID NO: 173888 - DNA, 23 bp, Artificial sequence
  SiRNA target sequence
atttttagagaatagcgatgatg

SEQ ID NO: 173889 - DNA, 23 bp, Artificial sequence
  SiRNA target sequence
tttttagagaatagcgatgatgt

SEQ ID NO: 173890 - DNA, 23 bp, Artificial sequence
  SiRNA target sequence
ttttagagaatagcgatgatgtt

SEQ ID NO: 173891 - DNA, 23 bp, Artificial sequence
  SiRNA target sequence
tttagagaatagcgatgatgttt

SEQ ID NO: 173892 - DNA, 23 bp, Artificial sequence
  SiRNA target sequence
ttagagaatagcgatgatgtttt

SEQ ID NO: 173893 - DNA, 23 bp, Artificial sequence
  SiRNA target sequence
tagagaatagcgatgatgtttta

SEQ ID NO: 173894 - DNA, 23 bp, Artificial sequence
  SiRNA target sequence
agagaatagcgatgatgttttaa

SEQ ID NO: 173895 - DNA, 23 bp, Artificial sequence
  SiRNA target sequence
gagaatagcgatgatgttttaac

SEQ ID NO: 173896 - DNA, 23 bp, Artificial sequence
  SiRNA target sequence
agaatagcgatgatgttttaact

SEQ ID NO: 173897 - DNA, 23 bp, Artificial sequence
  SiRNA target sequence
gaatagcgatgatgttttaacta

SEQ ID NO: 173898 - DNA, 23 bp, Artificial sequence
  SiRNA target sequence
aatagcgatgatgttttaactac

SEQ ID NO: 173899 - DNA, 23 bp, Artificial sequence
  SiRNA target sequence
atagcgatgatgttttaactacc

SEQ ID NO: 173900 - DNA, 23 bp, Artificial sequence
  SiRNA target sequence
tagcgatgatgttttaactacct

SEQ ID NO: 173901 - DNA, 23 bp, Artificial sequence
  SiRNA target sequence
agcgatgatgttttaactaccta

SEQ ID NO: 173902 - DNA, 23 bp, Artificial sequence
  SiRNA target sequence
gcgatgatgttttaactacctat

SEQ ID NO: 173903 - DNA, 23 bp, Artificial sequence
  SiRNA target sequence
cgatgatgttttaactacctatg

SEQ ID NO: 173904 - DNA, 23 bp, Artificial sequence
  SiRNA target sequence
gatgatgttttaactacctatga

SEQ ID NO: 173905 - DNA, 23 bp, Artificial sequence
  SiRNA target sequence
atgatgttttaactacctatgat

SEQ ID NO: 173906 - DNA, 23 bp, Artificial sequence
  SiRNA target sequence
tgatgttttaactacctatgatt

SEQ ID NO: 173907 - DNA, 23 bp, Artificial sequence
  SiRNA target sequence
gatgttttaactacctatgattt

SEQ ID NO: 173908 - DNA, 23 bp, Artificial sequence
  SiRNA target sequence
atgttttaactacctatgatttt

SEQ ID NO: 173909 - DNA, 23 bp, Artificial sequence
  SiRNA target sequence
tgttttaactacctatgattttt

SEQ ID NO: 173910 - DNA, 23 bp, Artificial sequence
  SiRNA target sequence
gttttaactacctatgattttta

SEQ ID NO: 173911 - DNA, 23 bp, Artificial sequence
  SiRNA target sequence
ttttaactacctatgatttttat

SEQ ID NO: 173912 - DNA, 23 bp, Artificial sequence
  SiRNA target sequence
tttaactacctatgatttttata

SEQ ID NO: 173913 - DNA, 23 bp, Artificial sequence
  SiRNA target sequence
ttaactacctatgatttttataa

SEQ ID NO: 173914 - DNA, 23 bp, Artificial sequence
  SiRNA target sequence
taactacctatgatttttataaa

SEQ ID NO: 173915 - DNA, 23 bp, Artificial sequence
  SiRNA target sequence
aactacctatgatttttataaaa

SEQ ID NO: 173916 - DNA, 23 bp, Artificial sequence
  SiRNA target sequence
actacctatgatttttataaaat

SEQ ID NO: 173917 - DNA, 23 bp, Artificial sequence
  SiRNA target sequence
ctacctatgatttttataaaatg

SEQ ID NO: 173918 - DNA, 23 bp, Artificial sequence
  SiRNA target sequence
tacctatgatttttataaaatga

SEQ ID NO: 173919 - DNA, 23 bp, Artificial sequence
  SiRNA target sequence
acctatgatttttataaaatgat

SEQ ID NO: 173920 - DNA, 23 bp, Artificial sequence
  SiRNA target sequence
cctatgatttttataaaatgatt

SEQ ID NO: 173921 - DNA, 23 bp, Artificial sequence
  SiRNA target sequence
ctatgatttttataaaatgattt

SEQ ID NO: 173922 - DNA, 23 bp, Artificial sequence
  SiRNA target sequence
tatgatttttataaaatgatttt

SEQ ID NO: 173923 - DNA, 23 bp, Artificial sequence
  SiRNA target sequence
atgatttttataaaatgattttg

SEQ ID NO: 173924 - DNA, 23 bp, Artificial sequence
  SiRNA target sequence
tgatttttataaaatgattttgg

SEQ ID NO: 173925 - DNA, 23 bp, Artificial sequence
  SiRNA target sequence
gatttttataaaatgattttgga

SEQ ID NO: 173926 - DNA, 23 bp, Artificial sequence
  SiRNA target sequence
atttttataaaatgattttggat

SEQ ID NO: 173927 - DNA, 23 bp, Artificial sequence
  SiRNA target sequence
tttttataaaatgattttggatc

SEQ ID NO: 173928 - DNA, 23 bp, Artificial sequence
  SiRNA target sequence
ttttataaaatgattttggatct

SEQ ID NO: 173929 - DNA, 23 bp, Artificial sequence
  SiRNA target sequence
tttataaaatgattttggatcta

SEQ ID NO: 173930 - DNA, 23 bp, Artificial sequence
  SiRNA target sequence
ttataaaatgattttggatctag

SEQ ID NO: 173931 - DNA, 23 bp, Artificial sequence
  SiRNA target sequence
tataaaatgattttggatctagg

SEQ ID NO: 173932 - DNA, 23 bp, Artificial sequence
  SiRNA target sequence
ataaaatgattttggatctagga

SEQ ID NO: 173933 - DNA, 23 bp, Artificial sequence
  SiRNA target sequence
taaaatgattttggatctaggat

SEQ ID NO: 173934 - DNA, 23 bp, Artificial sequence
  SiRNA target sequence
aaaatgattttggatctaggatt

SEQ ID NO: 173935 - DNA, 23 bp, Artificial sequence
  SiRNA target sequence
aaatgattttggatctaggattt

SEQ ID NO: 173936 - DNA, 23 bp, Artificial sequence
  SiRNA target sequence
aatgattttggatctaggatttt

SEQ ID NO: 173937 - DNA, 23 bp, Artificial sequence
  SiRNA target sequence
atgattttggatctaggattttt

SEQ ID NO: 173938 - DNA, 23 bp, Artificial sequence
  SiRNA target sequence
tgattttggatctaggattttta

SEQ ID NO: 173939 - DNA, 23 bp, Artificial sequence
  SiRNA target sequence
gattttggatctaggatttttac

SEQ ID NO: 173940 - DNA, 23 bp, Artificial sequence
  SiRNA target sequence
attttggatctaggatttttaca

SEQ ID NO: 173941 - DNA, 23 bp, Artificial sequence
  SiRNA target sequence
ttttggatctaggatttttacag

SEQ ID NO: 173942 - DNA, 23 bp, Artificial sequence
  SiRNA target sequence
tttggatctaggatttttacagc

SEQ ID NO: 173943 - DNA, 23 bp, Artificial sequence
  SiRNA target sequence
ttggatctaggatttttacagca

SEQ ID NO: 173944 - DNA, 23 bp, Artificial sequence
  SiRNA target sequence
tggatctaggatttttacagcat

SEQ ID NO: 173945 - DNA, 23 bp, Artificial sequence
  SiRNA target sequence
ggatctaggatttttacagcata

SEQ ID NO: 173946 - DNA, 23 bp, Artificial sequence
  SiRNA target sequence
gatctaggatttttacagcataa

SEQ ID NO: 173947 - DNA, 23 bp, Artificial sequence
  SiRNA target sequence
atctaggatttttacagcataat

SEQ ID NO: 173948 - DNA, 23 bp, Artificial sequence
  SiRNA target sequence
tctaggatttttacagcataatt

SEQ ID NO: 173949 - DNA, 23 bp, Artificial sequence
  SiRNA target sequence
ctaggatttttacagcataattt

SEQ ID NO: 173950 - DNA, 23 bp, Artificial sequence
  SiRNA target sequence
taggatttttacagcataatttt

SEQ ID NO: 173951 - DNA, 23 bp, Artificial sequence
  SiRNA target sequence
aggatttttacagcataatttta

SEQ ID NO: 173952 - DNA, 23 bp, Artificial sequence
  SiRNA target sequence
ggatttttacagcataattttat

SEQ ID NO: 173953 - DNA, 23 bp, Artificial sequence
  SiRNA target sequence
gatttttacagcataattttatt

SEQ ID NO: 173954 - DNA, 23 bp, Artificial sequence
  SiRNA target sequence
atttttacagcataattttatta

SEQ ID NO: 173955 - DNA, 23 bp, Artificial sequence
  SiRNA target sequence
tttttacagcataattttattaa

SEQ ID NO: 173956 - DNA, 23 bp, Artificial sequence
  SiRNA target sequence
ttttacagcataattttattaaa

SEQ ID NO: 173957 - DNA, 23 bp, Artificial sequence
  SiRNA target sequence
tttacagcataattttattaaag

SEQ ID NO: 173958 - DNA, 23 bp, Artificial sequence
  SiRNA target sequence
ttacagcataattttattaaagg

SEQ ID NO: 173959 - DNA, 23 bp, Artificial sequence
  SiRNA target sequence
tacagcataattttattaaagga

SEQ ID NO: 173960 - DNA, 23 bp, Artificial sequence
  SiRNA target sequence
acagcataattttattaaaggaa

SEQ ID NO: 173961 - DNA, 23 bp, Artificial sequence
  SiRNA target sequence
cagcataattttattaaaggaac

SEQ ID NO: 173962 - DNA, 23 bp, Artificial sequence
  SiRNA target sequence
agcataattttattaaaggaacc

SEQ ID NO: 173963 - DNA, 23 bp, Artificial sequence
  SiRNA target sequence
gcataattttattaaaggaacct

SEQ ID NO: 173964 - DNA, 23 bp, Artificial sequence
  SiRNA target sequence
cataattttattaaaggaacctg

SEQ ID NO: 173965 - DNA, 23 bp, Artificial sequence
  SiRNA target sequence
ataattttattaaaggaacctgt

SEQ ID NO: 173966 - DNA, 23 bp, Artificial sequence
  SiRNA target sequence
taattttattaaaggaacctgtg

SEQ ID NO: 173967 - DNA, 23 bp, Artificial sequence
  SiRNA target sequence
aattttattaaaggaacctgtga

SEQ ID NO: 173968 - DNA, 23 bp, Artificial sequence
  SiRNA target sequence
attttattaaaggaacctgtgag

SEQ ID NO: 173969 - DNA, 23 bp, Artificial sequence
  SiRNA target sequence
ttttattaaaggaacctgtgaga

SEQ ID NO: 173970 - DNA, 23 bp, Artificial sequence
  SiRNA target sequence
tttattaaaggaacctgtgagaa

SEQ ID NO: 173971 - DNA, 23 bp, Artificial sequence
  SiRNA target sequence
ttattaaaggaacctgtgagaaa

SEQ ID NO: 173972 - DNA, 23 bp, Artificial sequence
  SiRNA target sequence
tattaaaggaacctgtgagaaat

SEQ ID NO: 173973 - DNA, 23 bp, Artificial sequence
  SiRNA target sequence
attaaaggaacctgtgagaaatg

SEQ ID NO: 173974 - DNA, 23 bp, Artificial sequence
  SiRNA target sequence
ttaaaggaacctgtgagaaatgg

SEQ ID NO: 173975 - DNA, 23 bp, Artificial sequence
  SiRNA target sequence
taaaggaacctgtgagaaatggg

SEQ ID NO: 173976 - DNA, 23 bp, Artificial sequence
  SiRNA target sequence
aaaggaacctgtgagaaatggga

SEQ ID NO: 173977 - DNA, 23 bp, Artificial sequence
  SiRNA target sequence
aaggaacctgtgagaaatgggag

SEQ ID NO: 173978 - DNA, 23 bp, Artificial sequence
  SiRNA target sequence
aggaacctgtgagaaatgggaga

SEQ ID NO: 173979 - DNA, 23 bp, Artificial sequence
  SiRNA target sequence
ggaacctgtgagaaatgggagaa

SEQ ID NO: 173980 - DNA, 23 bp, Artificial sequence
  SiRNA target sequence
gaacctgtgagaaatgggagaag

SEQ ID NO: 173981 - DNA, 23 bp, Artificial sequence
  SiRNA target sequence
aacctgtgagaaatgggagaagt

SEQ ID NO: 173982 - DNA, 23 bp, Artificial sequence
  SiRNA target sequence
acctgtgagaaatgggagaagtg

SEQ ID NO: 173983 - DNA, 23 bp, Artificial sequence
  SiRNA target sequence
cctgtgagaaatgggagaagtgt

SEQ ID NO: 173984 - DNA, 23 bp, Artificial sequence
  SiRNA target sequence
ctgtgagaaatgggagaagtgta

SEQ ID NO: 173985 - DNA, 23 bp, Artificial sequence
  SiRNA target sequence
tgtgagaaatgggagaagtgtac

SEQ ID NO: 173986 - DNA, 23 bp, Artificial sequence
  SiRNA target sequence
gtgagaaatgggagaagtgtact

SEQ ID NO: 173987 - DNA, 23 bp, Artificial sequence
  SiRNA target sequence
tgagaaatgggagaagtgtacta

SEQ ID NO: 173988 - DNA, 23 bp, Artificial sequence
  SiRNA target sequence
gagaaatgggagaagtgtactat

SEQ ID NO: 173989 - DNA, 23 bp, Artificial sequence
  SiRNA target sequence
agaaatgggagaagtgtactatt

SEQ ID NO: 173990 - DNA, 23 bp, Artificial sequence
  SiRNA target sequence
gaaatgggagaagtgtactattg

SEQ ID NO: 173991 - DNA, 23 bp, Artificial sequence
  SiRNA target sequence
aaatgggagaagtgtactattgg

SEQ ID NO: 173992 - DNA, 23 bp, Artificial sequence
  SiRNA target sequence
aatgggagaagtgtactattgga

SEQ ID NO: 173993 - DNA, 23 bp, Artificial sequence
  SiRNA target sequence
atgggagaagtgtactattggat

SEQ ID NO: 173994 - DNA, 23 bp, Artificial sequence
  SiRNA target sequence
tgggagaagtgtactattggata

SEQ ID NO: 173995 - DNA, 23 bp, Artificial sequence
  SiRNA target sequence
gggagaagtgtactattggatat

SEQ ID NO: 173996 - DNA, 23 bp, Artificial sequence
  SiRNA target sequence
ggagaagtgtactattggatatc

SEQ ID NO: 173997 - DNA, 23 bp, Artificial sequence
  SiRNA target sequence
gagaagtgtactattggatatca

SEQ ID NO: 173998 - DNA, 23 bp, Artificial sequence
  SiRNA target sequence
agaagtgtactattggatatcat

SEQ ID NO: 173999 - DNA, 23 bp, Artificial sequence
  SiRNA target sequence
gaagtgtactattggatatcatt

SEQ ID NO: 174000 - DNA, 23 bp, Artificial sequence
  SiRNA target sequence
aagtgtactattggatatcatta

SEQ ID NO: 174001 - DNA, 23 bp, Artificial sequence
  SiRNA target sequence
agtgtactattggatatcattat

SEQ ID NO: 174002 - DNA, 23 bp, Artificial sequence
  SiRNA target sequence
gtgtactattggatatcattatg

SEQ ID NO: 174003 - DNA, 23 bp, Artificial sequence
  SiRNA target sequence
tgtactattggatatcattatgg

SEQ ID NO: 174004 - DNA, 23 bp, Artificial sequence
  SiRNA target sequence
gtactattggatatcattatgga

SEQ ID NO: 174005 - DNA, 23 bp, Artificial sequence
  SiRNA target sequence
tactattggatatcattatggat

SEQ ID NO: 174006 - DNA, 23 bp, Artificial sequence
  SiRNA target sequence
actattggatatcattatggata

SEQ ID NO: 174007 - DNA, 23 bp, Artificial sequence
  SiRNA target sequence
ctattggatatcattatggatat

SEQ ID NO: 174008 - DNA, 23 bp, Artificial sequence
  SiRNA target sequence
tattggatatcattatggatatt

SEQ ID NO: 174009 - DNA, 23 bp, Artificial sequence
  SiRNA target sequence
attggatatcattatggatattt

SEQ ID NO: 174010 - DNA, 23 bp, Artificial sequence
  SiRNA target sequence
ttggatatcattatggatattta

SEQ ID NO: 174011 - DNA, 23 bp, Artificial sequence
  SiRNA target sequence
tggatatcattatggatatttag

SEQ ID NO: 174012 - DNA, 23 bp, Artificial sequence
  SiRNA target sequence
ggatatcattatggatatttaga

SEQ ID NO: 174013 - DNA, 23 bp, Artificial sequence
  SiRNA target sequence
gatatcattatggatatttagaa

SEQ ID NO: 174014 - DNA, 23 bp, Artificial sequence
  SiRNA target sequence
atatcattatggatatttagaac

SEQ ID NO: 174015 - DNA, 23 bp, Artificial sequence
  SiRNA target sequence
tatcattatggatatttagaaca

SEQ ID NO: 174016 - DNA, 23 bp, Artificial sequence
  SiRNA target sequence
atcattatggatatttagaacac

SEQ ID NO: 174017 - DNA, 23 bp, Artificial sequence
  SiRNA target sequence
tcattatggatatttagaacaca

SEQ ID NO: 174018 - DNA, 23 bp, Artificial sequence
  SiRNA target sequence
cattatggatatttagaacacat

SEQ ID NO: 174019 - DNA, 23 bp, Artificial sequence
  SiRNA target sequence
attatggatatttagaacacata

SEQ ID NO: 174020 - DNA, 23 bp, Artificial sequence
  SiRNA target sequence
ttatggatatttagaacacatat

SEQ ID NO: 174021 - DNA, 23 bp, Artificial sequence
  SiRNA target sequence
tatggatatttagaacacatatt

SEQ ID NO: 174022 - DNA, 23 bp, Artificial sequence
  SiRNA target sequence
atggatatttagaacacatatta

SEQ ID NO: 174023 - DNA, 23 bp, Artificial sequence
  SiRNA target sequence
tggatatttagaacacatattaa

SEQ ID NO: 174024 - DNA, 23 bp, Artificial sequence
  SiRNA target sequence
ggatatttagaacacatattaaa

SEQ ID NO: 174025 - DNA, 23 bp, Artificial sequence
  SiRNA target sequence
gatatttagaacacatattaaat

SEQ ID NO: 174026 - DNA, 23 bp, Artificial sequence
  SiRNA target sequence
atatttagaacacatattaaata

SEQ ID NO: 174027 - DNA, 23 bp, Artificial sequence
  SiRNA target sequence
tatttagaacacatattaaataa

SEQ ID NO: 174028 - DNA, 23 bp, Artificial sequence
  SiRNA target sequence
atttagaacacatattaaataag

SEQ ID NO: 174029 - DNA, 23 bp, Artificial sequence
  SiRNA target sequence
tttagaacacatattaaataaga

SEQ ID NO: 174030 - DNA, 23 bp, Artificial sequence
  SiRNA target sequence
ttagaacacatattaaataagaa

SEQ ID NO: 174031 - DNA, 23 bp, Artificial sequence
  SiRNA target sequence
tagaacacatattaaataagaag

SEQ ID NO: 174032 - DNA, 23 bp, Artificial sequence
  SiRNA target sequence
agaacacatattaaataagaaga

SEQ ID NO: 174033 - DNA, 23 bp, Artificial sequence
  SiRNA target sequence
gaacacatattaaataagaagaa

SEQ ID NO: 174034 - DNA, 23 bp, Artificial sequence
  SiRNA target sequence
aacacatattaaataagaagaac

SEQ ID NO: 174035 - DNA, 23 bp, Artificial sequence
  SiRNA target sequence
acacatattaaataagaagaaca

SEQ ID NO: 174036 - DNA, 23 bp, Artificial sequence
  SiRNA target sequence
cacatattaaataagaagaacaa

SEQ ID NO: 174037 - DNA, 23 bp, Artificial sequence
  SiRNA target sequence
acatattaaataagaagaacaat

SEQ ID NO: 174038 - DNA, 23 bp, Artificial sequence
  SiRNA target sequence
catattaaataagaagaacaatt

SEQ ID NO: 174039 - DNA, 23 bp, Artificial sequence
  SiRNA target sequence
atattaaataagaagaacaatta

SEQ ID NO: 174040 - DNA, 23 bp, Artificial sequence
  SiRNA target sequence
tattaaataagaagaacaattat

SEQ ID NO: 174041 - DNA, 23 bp, Artificial sequence
  SiRNA target sequence
attaaataagaagaacaattatt

SEQ ID NO: 174042 - DNA, 23 bp, Artificial sequence
  SiRNA target sequence
ttaaataagaagaacaattattt

SEQ ID NO: 174043 - DNA, 23 bp, Artificial sequence
  SiRNA target sequence
taaataagaagaacaattattta

SEQ ID NO: 174044 - DNA, 23 bp, Artificial sequence
  SiRNA target sequence
aaataagaagaacaattatttaa

SEQ ID NO: 174045 - DNA, 23 bp, Artificial sequence
  SiRNA target sequence
aataagaagaacaattatttaac

SEQ ID NO: 174046 - DNA, 23 bp, Artificial sequence
  SiRNA target sequence
ataagaagaacaattatttaaca

SEQ ID NO: 174047 - DNA, 23 bp, Artificial sequence
  SiRNA target sequence
taagaagaacaattatttaacaa

SEQ ID NO: 174048 - DNA, 23 bp, Artificial sequence
  SiRNA target sequence
aagaagaacaattatttaacaaa

SEQ ID NO: 174049 - DNA, 23 bp, Artificial sequence
  SiRNA target sequence
agaagaacaattatttaacaaaa

SEQ ID NO: 174050 - DNA, 23 bp, Artificial sequence
  SiRNA target sequence
gaagaacaattatttaacaaaaa

SEQ ID NO: 174051 - DNA, 23 bp, Artificial sequence
  SiRNA target sequence
aagaacaattatttaacaaaaaa

SEQ ID NO: 174052 - DNA, 23 bp, Artificial sequence
  SiRNA target sequence
agaacaattatttaacaaaaaat

SEQ ID NO: 174053 - DNA, 23 bp, Artificial sequence
  SiRNA target sequence
gaacaattatttaacaaaaaatg

SEQ ID NO: 174054 - DNA, 23 bp, Artificial sequence
  SiRNA target sequence
aacaattatttaacaaaaaatga

SEQ ID NO: 174055 - DNA, 23 bp, Artificial sequence
  SiRNA target sequence
acaattatttaacaaaaaatgat

SEQ ID NO: 174056 - DNA, 23 bp, Artificial sequence
  SiRNA target sequence
caattatttaacaaaaaatgata

SEQ ID NO: 174057 - DNA, 23 bp, Artificial sequence
  SiRNA target sequence
aattatttaacaaaaaatgatag

SEQ ID NO: 174058 - DNA, 23 bp, Artificial sequence
  SiRNA target sequence
attatttaacaaaaaatgatagt

SEQ ID NO: 174059 - DNA, 23 bp, Artificial sequence
  SiRNA target sequence
ttatttaacaaaaaatgatagta

SEQ ID NO: 174060 - DNA, 23 bp, Artificial sequence
  SiRNA target sequence
tatttaacaaaaaatgatagtat

SEQ ID NO: 174061 - DNA, 23 bp, Artificial sequence
  SiRNA target sequence
atttaacaaaaaatgatagtata

SEQ ID NO: 174062 - DNA, 23 bp, Artificial sequence
  SiRNA target sequence
tttaacaaaaaatgatagtataa

SEQ ID NO: 174063 - DNA, 23 bp, Artificial sequence
  SiRNA target sequence
ttaacaaaaaatgatagtataaa

SEQ ID NO: 174064 - DNA, 23 bp, Artificial sequence
  SiRNA target sequence
taacaaaaaatgatagtataaaa

SEQ ID NO: 174065 - DNA, 23 bp, Artificial sequence
  SiRNA target sequence
aacaaaaaatgatagtataaaaa

SEQ ID NO: 174066 - DNA, 23 bp, Artificial sequence
  SiRNA target sequence
acaaaaaatgatagtataaaaat

SEQ ID NO: 174067 - DNA, 23 bp, Artificial sequence
  SiRNA target sequence
caaaaaatgatagtataaaaata

SEQ ID NO: 174068 - DNA, 23 bp, Artificial sequence
  SiRNA target sequence
aaaaaatgatagtataaaaatat

SEQ ID NO: 174069 - DNA, 23 bp, Artificial sequence
  SiRNA target sequence
aaaaatgatagtataaaaatatt

SEQ ID NO: 174070 - DNA, 23 bp, Artificial sequence
  SiRNA target sequence
aaaatgatagtataaaaatattt

SEQ ID NO: 174071 - DNA, 23 bp, Artificial sequence
  SiRNA target sequence
aaatgatagtataaaaatattta

SEQ ID NO: 174072 - DNA, 23 bp, Artificial sequence
  SiRNA target sequence
aatgatagtataaaaatatttaa

SEQ ID NO: 174073 - DNA, 23 bp, Artificial sequence
  SiRNA target sequence
atgatagtataaaaatatttaac

SEQ ID NO: 174074 - DNA, 23 bp, Artificial sequence
  SiRNA target sequence
tgatagtataaaaatatttaaca

SEQ ID NO: 174075 - DNA, 23 bp, Artificial sequence
  SiRNA target sequence
gatagtataaaaatatttaacag

SEQ ID NO: 174076 - DNA, 23 bp, Artificial sequence
  SiRNA target sequence
atagtataaaaatatttaacagt

SEQ ID NO: 174077 - DNA, 23 bp, Artificial sequence
  SiRNA target sequence
tagtataaaaatatttaacagta

SEQ ID NO: 174078 - DNA, 23 bp, Artificial sequence
  SiRNA target sequence
agtataaaaatatttaacagtaa

SEQ ID NO: 174079 - DNA, 23 bp, Artificial sequence
  SiRNA target sequence
gtataaaaatatttaacagtaaa

SEQ ID NO: 174080 - DNA, 23 bp, Artificial sequence
  SiRNA target sequence
tataaaaatatttaacagtaaaa

SEQ ID NO: 174081 - DNA, 23 bp, Artificial sequence
  SiRNA target sequence
ataaaaatatttaacagtaaaaa

SEQ ID NO: 174082 - DNA, 23 bp, Artificial sequence
  SiRNA target sequence
taaaaatatttaacagtaaaaat

SEQ ID NO: 174083 - DNA, 23 bp, Artificial sequence
  SiRNA target sequence
aaaaatatttaacagtaaaaatg

SEQ ID NO: 174084 - DNA, 23 bp, Artificial sequence
  SiRNA target sequence
aaaatatttaacagtaaaaatga

SEQ ID NO: 174085 - DNA, 23 bp, Artificial sequence
  SiRNA target sequence
aaatatttaacagtaaaaatgag

SEQ ID NO: 174086 - DNA, 23 bp, Artificial sequence
  SiRNA target sequence
aatatttaacagtaaaaatgagg

SEQ ID NO: 174087 - DNA, 23 bp, Artificial sequence
  SiRNA target sequence
atatttaacagtaaaaatgagga

SEQ ID NO: 174088 - DNA, 23 bp, Artificial sequence
  SiRNA target sequence
tatttaacagtaaaaatgaggag

SEQ ID NO: 174089 - DNA, 23 bp, Artificial sequence
  SiRNA target sequence
atttaacagtaaaaatgaggagg

SEQ ID NO: 174090 - DNA, 23 bp, Artificial sequence
  SiRNA target sequence
tttaacagtaaaaatgaggaggt

SEQ ID NO: 174091 - DNA, 23 bp, Artificial sequence
  SiRNA target sequence
ttaacagtaaaaatgaggaggta

SEQ ID NO: 174092 - DNA, 23 bp, Artificial sequence
  SiRNA target sequence
taacagtaaaaatgaggaggtaa

SEQ ID NO: 174093 - DNA, 23 bp, Artificial sequence
  SiRNA target sequence
aacagtaaaaatgaggaggtaag

SEQ ID NO: 174094 - DNA, 23 bp, Artificial sequence
  SiRNA target sequence
acagtaaaaatgaggaggtaagg

SEQ ID NO: 174095 - DNA, 23 bp, Artificial sequence
  SiRNA target sequence
cagtaaaaatgaggaggtaaggt

SEQ ID NO: 174096 - DNA, 23 bp, Artificial sequence
  SiRNA target sequence
agtaaaaatgaggaggtaaggtt

SEQ ID NO: 174097 - DNA, 23 bp, Artificial sequence
  SiRNA target sequence
gtaaaaatgaggaggtaaggtta

SEQ ID NO: 174098 - DNA, 23 bp, Artificial sequence
  SiRNA target sequence
taaaaatgaggaggtaaggttaa

SEQ ID NO: 174099 - DNA, 23 bp, Artificial sequence
  SiRNA target sequence
aaaaatgaggaggtaaggttaaa

SEQ ID NO: 174100 - DNA, 23 bp, Artificial sequence
  SiRNA target sequence
aaaatgaggaggtaaggttaaat

SEQ ID NO: 174101 - DNA, 23 bp, Artificial sequence
  SiRNA target sequence
aaatgaggaggtaaggttaaatg

SEQ ID NO: 174102 - DNA, 23 bp, Artificial sequence
  SiRNA target sequence
aatgaggaggtaaggttaaatgg

SEQ ID NO: 174103 - DNA, 23 bp, Artificial sequence
  SiRNA target sequence
atgaggaggtaaggttaaatgga

SEQ ID NO: 174104 - DNA, 23 bp, Artificial sequence
  SiRNA target sequence
tgaggaggtaaggttaaatggaa

SEQ ID NO: 174105 - DNA, 23 bp, Artificial sequence
  SiRNA target sequence
gaggaggtaaggttaaatggaaa

SEQ ID NO: 174106 - DNA, 23 bp, Artificial sequence
  SiRNA target sequence
aggaggtaaggttaaatggaaaa

SEQ ID NO: 174107 - DNA, 23 bp, Artificial sequence
  SiRNA target sequence
ggaggtaaggttaaatggaaaaa

SEQ ID NO: 174108 - DNA, 23 bp, Artificial sequence
  SiRNA target sequence
gaggtaaggttaaatggaaaaag

SEQ ID NO: 174109 - DNA, 23 bp, Artificial sequence
  SiRNA target sequence
aggtaaggttaaatggaaaaaga

SEQ ID NO: 174110 - DNA, 23 bp, Artificial sequence
  SiRNA target sequence
ggtaaggttaaatggaaaaagaa

SEQ ID NO: 174111 - DNA, 23 bp, Artificial sequence
  SiRNA target sequence
gtaaggttaaatggaaaaagaaa

SEQ ID NO: 174112 - DNA, 23 bp, Artificial sequence
  SiRNA target sequence
taaggttaaatggaaaaagaaaa

SEQ ID NO: 174113 - DNA, 23 bp, Artificial sequence
  SiRNA target sequence
aaggttaaatggaaaaagaaaat

SEQ ID NO: 174114 - DNA, 23 bp, Artificial sequence
  SiRNA target sequence
aggttaaatggaaaaagaaaatt

SEQ ID NO: 174115 - DNA, 23 bp, Artificial sequence
  SiRNA target sequence
ggttaaatggaaaaagaaaatta

SEQ ID NO: 174116 - DNA, 23 bp, Artificial sequence
  SiRNA target sequence
gttaaatggaaaaagaaaattaa

SEQ ID NO: 174117 - DNA, 23 bp, Artificial sequence
  SiRNA target sequence
ttaaatggaaaaagaaaattaaa

SEQ ID NO: 174118 - DNA, 23 bp, Artificial sequence
  SiRNA target sequence
taaatggaaaaagaaaattaaat

SEQ ID NO: 174119 - DNA, 23 bp, Artificial sequence
  SiRNA target sequence
aaatggaaaaagaaaattaaata

SEQ ID NO: 174120 - DNA, 23 bp, Artificial sequence
  SiRNA target sequence
aatggaaaaagaaaattaaatat

SEQ ID NO: 174121 - DNA, 23 bp, Artificial sequence
  SiRNA target sequence
atggaaaaagaaaattaaatatt

SEQ ID NO: 174122 - DNA, 23 bp, Artificial sequence
  SiRNA target sequence
tggaaaaagaaaattaaatatta

SEQ ID NO: 174123 - DNA, 23 bp, Artificial sequence
  SiRNA target sequence
ggaaaaagaaaattaaatattaa

SEQ ID NO: 174124 - DNA, 23 bp, Artificial sequence
  SiRNA target sequence
gaaaaagaaaattaaatattaac

SEQ ID NO: 174125 - DNA, 23 bp, Artificial sequence
  SiRNA target sequence
aaaaagaaaattaaatattaaca

SEQ ID NO: 174126 - DNA, 23 bp, Artificial sequence
  SiRNA target sequence
aaaagaaaattaaatattaacac

SEQ ID NO: 174127 - DNA, 23 bp, Artificial sequence
  SiRNA target sequence
aaagaaaattaaatattaacaca

SEQ ID NO: 174128 - DNA, 23 bp, Artificial sequence
  SiRNA target sequence
aagaaaattaaatattaacacag

SEQ ID NO: 174129 - DNA, 23 bp, Artificial sequence
  SiRNA target sequence
agaaaattaaatattaacacagt

SEQ ID NO: 174130 - DNA, 23 bp, Artificial sequence
  SiRNA target sequence
gaaaattaaatattaacacagtt

SEQ ID NO: 174131 - DNA, 23 bp, Artificial sequence
  SiRNA target sequence
aaaattaaatattaacacagtta

SEQ ID NO: 174132 - DNA, 23 bp, Artificial sequence
  SiRNA target sequence
aaattaaatattaacacagttac

SEQ ID NO: 174133 - DNA, 23 bp, Artificial sequence
  SiRNA target sequence
aattaaatattaacacagttaca

SEQ ID NO: 174134 - DNA, 23 bp, Artificial sequence
  SiRNA target sequence
attaaatattaacacagttacat

SEQ ID NO: 174135 - DNA, 23 bp, Artificial sequence
  SiRNA target sequence
ttaaatattaacacagttacatt

SEQ ID NO: 174136 - DNA, 23 bp, Artificial sequence
  SiRNA target sequence
taaatattaacacagttacatta

SEQ ID NO: 174137 - DNA, 23 bp, Artificial sequence
  SiRNA target sequence
aaatattaacacagttacattaa

SEQ ID NO: 174138 - DNA, 23 bp, Artificial sequence
  SiRNA target sequence
aatattaacacagttacattaaa

SEQ ID NO: 174139 - DNA, 23 bp, Artificial sequence
  SiRNA target sequence
atattaacacagttacattaaat

SEQ ID NO: 174140 - DNA, 23 bp, Artificial sequence
  SiRNA target sequence
tattaacacagttacattaaata

SEQ ID NO: 174141 - DNA, 23 bp, Artificial sequence
  SiRNA target sequence
attaacacagttacattaaataa

SEQ ID NO: 174142 - DNA, 23 bp, Artificial sequence
  SiRNA target sequence
ttaacacagttacattaaataaa

SEQ ID NO: 174143 - DNA, 23 bp, Artificial sequence
  SiRNA target sequence
taacacagttacattaaataaaa

SEQ ID NO: 174144 - DNA, 23 bp, Artificial sequence
  SiRNA target sequence
aacacagttacattaaataaaat

SEQ ID NO: 174145 - DNA, 23 bp, Artificial sequence
  SiRNA target sequence
acacagttacattaaataaaatt

SEQ ID NO: 174146 - DNA, 23 bp, Artificial sequence
  SiRNA target sequence
cacagttacattaaataaaatta

SEQ ID NO: 174147 - DNA, 23 bp, Artificial sequence
  SiRNA target sequence
acagttacattaaataaaattaa

SEQ ID NO: 174148 - DNA, 23 bp, Artificial sequence
  SiRNA target sequence
cagttacattaaataaaattaat

SEQ ID NO: 174149 - DNA, 23 bp, Artificial sequence
  SiRNA target sequence
agttacattaaataaaattaata

SEQ ID NO: 174150 - DNA, 23 bp, Artificial sequence
  SiRNA target sequence
gttacattaaataaaattaatat

SEQ ID NO: 174151 - DNA, 23 bp, Artificial sequence
  SiRNA target sequence
ttacattaaataaaattaatata

SEQ ID NO: 174152 - DNA, 23 bp, Artificial sequence
  SiRNA target sequence
tacattaaataaaattaatatac

SEQ ID NO: 174153 - DNA, 23 bp, Artificial sequence
  SiRNA target sequence
acattaaataaaattaatatacc

SEQ ID NO: 174154 - DNA, 23 bp, Artificial sequence
  SiRNA target sequence
cattaaataaaattaatatacct

SEQ ID NO: 174155 - DNA, 23 bp, Artificial sequence
  SiRNA target sequence
attaaataaaattaatatacctg

SEQ ID NO: 174156 - DNA, 23 bp, Artificial sequence
  SiRNA target sequence
ttaaataaaattaatatacctga

SEQ ID NO: 174157 - DNA, 23 bp, Artificial sequence
  SiRNA target sequence
taaataaaattaatatacctgag

SEQ ID NO: 174158 - DNA, 23 bp, Artificial sequence
  SiRNA target sequence
aaataaaattaatatacctgaga

SEQ ID NO: 174159 - DNA, 23 bp, Artificial sequence
  SiRNA target sequence
aataaaattaatatacctgagat

SEQ ID NO: 174160 - DNA, 23 bp, Artificial sequence
  SiRNA target sequence
ataaaattaatatacctgagata

SEQ ID NO: 174161 - DNA, 23 bp, Artificial sequence
  SiRNA target sequence
taaaattaatatacctgagatag

SEQ ID NO: 174162 - DNA, 23 bp, Artificial sequence
  SiRNA target sequence
aaaattaatatacctgagataga

SEQ ID NO: 174163 - DNA, 23 bp, Artificial sequence
  SiRNA target sequence
aaattaatatacctgagatagat

SEQ ID NO: 174164 - DNA, 23 bp, Artificial sequence
  SiRNA target sequence
aattaatatacctgagatagatt

SEQ ID NO: 174165 - DNA, 23 bp, Artificial sequence
  SiRNA target sequence
attaatatacctgagatagatta

SEQ ID NO: 174166 - DNA, 23 bp, Artificial sequence
  SiRNA target sequence
ttaatatacctgagatagattat

SEQ ID NO: 174167 - DNA, 23 bp, Artificial sequence
  SiRNA target sequence
taatatacctgagatagattata

SEQ ID NO: 174168 - DNA, 23 bp, Artificial sequence
  SiRNA target sequence
aatatacctgagatagattataa

SEQ ID NO: 174169 - DNA, 23 bp, Artificial sequence
  SiRNA target sequence
atatacctgagatagattataaa

SEQ ID NO: 174170 - DNA, 23 bp, Artificial sequence
  SiRNA target sequence
tatacctgagatagattataaat

SEQ ID NO: 174171 - DNA, 23 bp, Artificial sequence
  SiRNA target sequence
atacctgagatagattataaata

SEQ ID NO: 174172 - DNA, 23 bp, Artificial sequence
  SiRNA target sequence
tacctgagatagattataaatat

SEQ ID NO: 174173 - DNA, 23 bp, Artificial sequence
  SiRNA target sequence
acctgagatagattataaatata

SEQ ID NO: 174174 - DNA, 23 bp, Artificial sequence
  SiRNA target sequence
cctgagatagattataaatataa

SEQ ID NO: 174175 - DNA, 23 bp, Artificial sequence
  SiRNA target sequence
ctgagatagattataaatataaa

SEQ ID NO: 174176 - DNA, 23 bp, Artificial sequence
  SiRNA target sequence
tgagatagattataaatataaaa

SEQ ID NO: 174177 - DNA, 23 bp, Artificial sequence
  SiRNA target sequence
gagatagattataaatataaaaa

SEQ ID NO: 174178 - DNA, 23 bp, Artificial sequence
  SiRNA target sequence
agatagattataaatataaaaat

SEQ ID NO: 174179 - DNA, 23 bp, Artificial sequence
  SiRNA target sequence
gatagattataaatataaaaatg

SEQ ID NO: 174180 - DNA, 23 bp, Artificial sequence
  SiRNA target sequence
atagattataaatataaaaatgg

SEQ ID NO: 174181 - DNA, 23 bp, Artificial sequence
  SiRNA target sequence
tagattataaatataaaaatgga

SEQ ID NO: 174182 - DNA, 23 bp, Artificial sequence
  SiRNA target sequence
agattataaatataaaaatggag

SEQ ID NO: 174183 - DNA, 23 bp, Artificial sequence
  SiRNA target sequence
gattataaatataaaaatggagt

SEQ ID NO: 174184 - DNA, 23 bp, Artificial sequence
  SiRNA target sequence
attataaatataaaaatggagtg

SEQ ID NO: 174185 - DNA, 23 bp, Artificial sequence
  SiRNA target sequence
ttataaatataaaaatggagtgt

SEQ ID NO: 174186 - DNA, 23 bp, Artificial sequence
  SiRNA target sequence
tataaatataaaaatggagtgtt

SEQ ID NO: 174187 - DNA, 23 bp, Artificial sequence
  SiRNA target sequence
ataaatataaaaatggagtgttt

SEQ ID NO: 174188 - DNA, 23 bp, Artificial sequence
  SiRNA target sequence
taaatataaaaatggagtgttta

SEQ ID NO: 174189 - DNA, 23 bp, Artificial sequence
  SiRNA target sequence
aaatataaaaatggagtgtttac

SEQ ID NO: 174190 - DNA, 23 bp, Artificial sequence
  SiRNA target sequence
aatataaaaatggagtgtttaca

SEQ ID NO: 174191 - DNA, 23 bp, Artificial sequence
  SiRNA target sequence
atataaaaatggagtgtttacat

SEQ ID NO: 174192 - DNA, 23 bp, Artificial sequence
  SiRNA target sequence
tataaaaatggagtgtttacata

SEQ ID NO: 174193 - DNA, 23 bp, Artificial sequence
  SiRNA target sequence
ataaaaatggagtgtttacatat

SEQ ID NO: 174194 - DNA, 23 bp, Artificial sequence
  SiRNA target sequence
taaaaatggagtgtttacatata

SEQ ID NO: 174195 - DNA, 23 bp, Artificial sequence
  SiRNA target sequence
aaaaatggagtgtttacatatac

SEQ ID NO: 174196 - DNA, 23 bp, Artificial sequence
  SiRNA target sequence
aaaatggagtgtttacatataca

SEQ ID NO: 174197 - DNA, 23 bp, Artificial sequence
  SiRNA target sequence
aaatggagtgtttacatatacac

SEQ ID NO: 174198 - DNA, 23 bp, Artificial sequence
  SiRNA target sequence
aatggagtgtttacatatacaca

SEQ ID NO: 174199 - DNA, 23 bp, Artificial sequence
  SiRNA target sequence
atggagtgtttacatatacacag

SEQ ID NO: 174200 - DNA, 23 bp, Artificial sequence
  SiRNA target sequence
tggagtgtttacatatacacaga

SEQ ID NO: 174201 - DNA, 23 bp, Artificial sequence
  SiRNA target sequence
ggagtgtttacatatacacagat

SEQ ID NO: 174202 - DNA, 23 bp, Artificial sequence
  SiRNA target sequence
gagtgtttacatatacacagatc

SEQ ID NO: 174203 - DNA, 23 bp, Artificial sequence
  SiRNA target sequence
agtgtttacatatacacagatca

SEQ ID NO: 174204 - DNA, 23 bp, Artificial sequence
  SiRNA target sequence
gtgtttacatatacacagatcaa

SEQ ID NO: 174205 - DNA, 23 bp, Artificial sequence
  SiRNA target sequence
tgtttacatatacacagatcaaa

SEQ ID NO: 174206 - DNA, 23 bp, Artificial sequence
  SiRNA target sequence
gtttacatatacacagatcaaaa

SEQ ID NO: 174207 - DNA, 23 bp, Artificial sequence
  SiRNA target sequence
tttacatatacacagatcaaaaa

SEQ ID NO: 174208 - DNA, 23 bp, Artificial sequence
  SiRNA target sequence
ttacatatacacagatcaaaaat

SEQ ID NO: 174209 - DNA, 23 bp, Artificial sequence
  SiRNA target sequence
tacatatacacagatcaaaaata

SEQ ID NO: 174210 - DNA, 23 bp, Artificial sequence
  SiRNA target sequence
acatatacacagatcaaaaataa

SEQ ID NO: 174211 - DNA, 23 bp, Artificial sequence
  SiRNA target sequence
catatacacagatcaaaaataat

SEQ ID NO: 174212 - DNA, 23 bp, Artificial sequence
  SiRNA target sequence
atatacacagatcaaaaataata

SEQ ID NO: 174213 - DNA, 23 bp, Artificial sequence
  SiRNA target sequence
tatacacagatcaaaaataataa

SEQ ID NO: 174214 - DNA, 23 bp, Artificial sequence
  SiRNA target sequence
atacacagatcaaaaataataag

SEQ ID NO: 174215 - DNA, 23 bp, Artificial sequence
  SiRNA target sequence
tacacagatcaaaaataataaga

SEQ ID NO: 174216 - DNA, 23 bp, Artificial sequence
  SiRNA target sequence
acacagatcaaaaataataagaa

SEQ ID NO: 174217 - DNA, 23 bp, Artificial sequence
  SiRNA target sequence
cacagatcaaaaataataagaaa

SEQ ID NO: 174218 - DNA, 23 bp, Artificial sequence
  SiRNA target sequence
acagatcaaaaataataagaaaa

SEQ ID NO: 174219 - DNA, 23 bp, Artificial sequence
  SiRNA target sequence
cagatcaaaaataataagaaaaa

SEQ ID NO: 174220 - DNA, 23 bp, Artificial sequence
  SiRNA target sequence
agatcaaaaataataagaaaaaa

SEQ ID NO: 174221 - DNA, 23 bp, Artificial sequence
  SiRNA target sequence
gatcaaaaataataagaaaaaaa

SEQ ID NO: 174222 - DNA, 23 bp, Artificial sequence
  SiRNA target sequence
atcaaaaataataagaaaaaaaa

SEQ ID NO: 174223 - DNA, 23 bp, Artificial sequence
  SiRNA target sequence
tcaaaaataataagaaaaaaaaa

SEQ ID NO: 174224 - DNA, 23 bp, Artificial sequence
  SiRNA target sequence
caaaaataataagaaaaaaaaat

SEQ ID NO: 174225 - DNA, 23 bp, Artificial sequence
  SiRNA target sequence
aaaaataataagaaaaaaaaata

SEQ ID NO: 174226 - DNA, 23 bp, Artificial sequence
  SiRNA target sequence
aaaataataagaaaaaaaaatat

SEQ ID NO: 174227 - DNA, 23 bp, Artificial sequence
  SiRNA target sequence
aaataataagaaaaaaaaatatt

SEQ ID NO: 174228 - DNA, 23 bp, Artificial sequence
  SiRNA target sequence
aataataagaaaaaaaaatattt

SEQ ID NO: 174229 - DNA, 23 bp, Artificial sequence
  SiRNA target sequence
ataataagaaaaaaaaatattta

SEQ ID NO: 174230 - DNA, 23 bp, Artificial sequence
  SiRNA target sequence
taataagaaaaaaaaatatttaa

SEQ ID NO: 174231 - DNA, 23 bp, Artificial sequence
  SiRNA target sequence
aataagaaaaaaaaatatttaag

SEQ ID NO: 174232 - DNA, 23 bp, Artificial sequence
  SiRNA target sequence
ataagaaaaaaaaatatttaaga

SEQ ID NO: 174233 - DNA, 23 bp, Artificial sequence
  SiRNA target sequence
taagaaaaaaaaatatttaagaa

SEQ ID NO: 174234 - DNA, 23 bp, Artificial sequence
  SiRNA target sequence
aagaaaaaaaaatatttaagaat

SEQ ID NO: 174235 - DNA, 23 bp, Artificial sequence
  SiRNA target sequence
agaaaaaaaaatatttaagaata

SEQ ID NO: 174236 - DNA, 23 bp, Artificial sequence
  SiRNA target sequence
gaaaaaaaaatatttaagaatat

SEQ ID NO: 174237 - DNA, 23 bp, Artificial sequence
  SiRNA target sequence
aaaaaaaaatatttaagaatatt

SEQ ID NO: 174238 - DNA, 23 bp, Artificial sequence
  SiRNA target sequence
aaaaaaaatatttaagaatattg

SEQ ID NO: 174239 - DNA, 23 bp, Artificial sequence
  SiRNA target sequence
aaaaaaatatttaagaatattgg

SEQ ID NO: 174240 - DNA, 23 bp, Artificial sequence
  SiRNA target sequence
aaaaaatatttaagaatattggg

SEQ ID NO: 174241 - DNA, 23 bp, Artificial sequence
  SiRNA target sequence
aaaaatatttaagaatattgggt

SEQ ID NO: 174242 - DNA, 23 bp, Artificial sequence
  SiRNA target sequence
aaaatatttaagaatattgggtc

SEQ ID NO: 174243 - DNA, 23 bp, Artificial sequence
  SiRNA target sequence
aaatatttaagaatattgggtct

SEQ ID NO: 174244 - DNA, 23 bp, Artificial sequence
  SiRNA target sequence
aatatttaagaatattgggtcta

SEQ ID NO: 174245 - DNA, 23 bp, Artificial sequence
  SiRNA target sequence
atatttaagaatattgggtctag

SEQ ID NO: 174246 - DNA, 23 bp, Artificial sequence
  SiRNA target sequence
tatttaagaatattgggtctaga

SEQ ID NO: 174247 - DNA, 23 bp, Artificial sequence
  SiRNA target sequence
atttaagaatattgggtctagaa

SEQ ID NO: 174248 - DNA, 23 bp, Artificial sequence
  SiRNA target sequence
tttaagaatattgggtctagaac

SEQ ID NO: 174249 - DNA, 23 bp, Artificial sequence
  SiRNA target sequence
ttaagaatattgggtctagaacc

SEQ ID NO: 174250 - DNA, 23 bp, Artificial sequence
  SiRNA target sequence
taagaatattgggtctagaacct

SEQ ID NO: 174251 - DNA, 23 bp, Artificial sequence
  SiRNA target sequence
aagaatattgggtctagaacctt

SEQ ID NO: 174252 - DNA, 23 bp, Artificial sequence
  SiRNA target sequence
agaatattgggtctagaaccttt

SEQ ID NO: 174253 - DNA, 23 bp, Artificial sequence
  SiRNA target sequence
gaatattgggtctagaacctttt

SEQ ID NO: 174254 - DNA, 23 bp, Artificial sequence
  SiRNA target sequence
aatattgggtctagaaccttttc

SEQ ID NO: 174255 - DNA, 23 bp, Artificial sequence
  SiRNA target sequence
atattgggtctagaaccttttct

SEQ ID NO: 174256 - DNA, 23 bp, Artificial sequence
  SiRNA target sequence
tattgggtctagaaccttttctt

SEQ ID NO: 174257 - DNA, 23 bp, Artificial sequence
  SiRNA target sequence
attgggtctagaaccttttctta

SEQ ID NO: 174258 - DNA, 23 bp, Artificial sequence
  SiRNA target sequence
ttgggtctagaaccttttcttaa

SEQ ID NO: 174259 - DNA, 23 bp, Artificial sequence
  SiRNA target sequence
tgggtctagaaccttttcttaat

SEQ ID NO: 174260 - DNA, 23 bp, Artificial sequence
  SiRNA target sequence
gggtctagaaccttttcttaatt

SEQ ID NO: 174261 - DNA, 23 bp, Artificial sequence
  SiRNA target sequence
ggtctagaaccttttcttaattt

SEQ ID NO: 174262 - DNA, 23 bp, Artificial sequence
  SiRNA target sequence
gtctagaaccttttcttaatttt

SEQ ID NO: 174263 - DNA, 23 bp, Artificial sequence
  SiRNA target sequence
tctagaaccttttcttaatttta

SEQ ID NO: 174264 - DNA, 23 bp, Artificial sequence
  SiRNA target sequence
ctagaaccttttcttaattttat

SEQ ID NO: 174265 - DNA, 23 bp, Artificial sequence
  SiRNA target sequence
tagaaccttttcttaattttatt

SEQ ID NO: 174266 - DNA, 23 bp, Artificial sequence
  SiRNA target sequence
agaaccttttcttaattttatta

SEQ ID NO: 174267 - DNA, 23 bp, Artificial sequence
  SiRNA target sequence
gaaccttttcttaattttattaa

SEQ ID NO: 174268 - DNA, 23 bp, Artificial sequence
  SiRNA target sequence
aaccttttcttaattttattaag

SEQ ID NO: 174269 - DNA, 23 bp, Artificial sequence
  SiRNA target sequence
accttttcttaattttattaagg

SEQ ID NO: 174270 - DNA, 23 bp, Artificial sequence
  SiRNA target sequence
ccttttcttaattttattaagga

SEQ ID NO: 174271 - DNA, 23 bp, Artificial sequence
  SiRNA target sequence
cttttcttaattttattaaggaa

SEQ ID NO: 174272 - DNA, 23 bp, Artificial sequence
  SiRNA target sequence
ttttcttaattttattaaggaaa

SEQ ID NO: 174273 - DNA, 23 bp, Artificial sequence
  SiRNA target sequence
tttcttaattttattaaggaaag

SEQ ID NO: 174274 - DNA, 23 bp, Artificial sequence
  SiRNA target sequence
ttcttaattttattaaggaaagt

SEQ ID NO: 174275 - DNA, 23 bp, Artificial sequence
  SiRNA target sequence
tcttaattttattaaggaaagta

SEQ ID NO: 174276 - DNA, 23 bp, Artificial sequence
  SiRNA target sequence
cttaattttattaaggaaagtaa

SEQ ID NO: 174277 - DNA, 23 bp, Artificial sequence
  SiRNA target sequence
ttaattttattaaggaaagtaaa

SEQ ID NO: 174278 - DNA, 23 bp, Artificial sequence
  SiRNA target sequence
taattttattaaggaaagtaaac

SEQ ID NO: 174279 - DNA, 23 bp, Artificial sequence
  SiRNA target sequence
aattttattaaggaaagtaaaca

SEQ ID NO: 174280 - DNA, 23 bp, Artificial sequence
  SiRNA target sequence
attttattaaggaaagtaaacat

SEQ ID NO: 174281 - DNA, 23 bp, Artificial sequence
  SiRNA target sequence
ttttattaaggaaagtaaacata

SEQ ID NO: 174282 - DNA, 23 bp, Artificial sequence
  SiRNA target sequence
tttattaaggaaagtaaacataa

SEQ ID NO: 174283 - DNA, 23 bp, Artificial sequence
  SiRNA target sequence
ttattaaggaaagtaaacataaa

SEQ ID NO: 174284 - DNA, 23 bp, Artificial sequence
  SiRNA target sequence
tattaaggaaagtaaacataaag

SEQ ID NO: 174285 - DNA, 23 bp, Artificial sequence
  SiRNA target sequence
attaaggaaagtaaacataaaga

SEQ ID NO: 174286 - DNA, 23 bp, Artificial sequence
  SiRNA target sequence
ttaaggaaagtaaacataaagaa

SEQ ID NO: 174287 - DNA, 23 bp, Artificial sequence
  SiRNA target sequence
taaggaaagtaaacataaagaat

SEQ ID NO: 174288 - DNA, 23 bp, Artificial sequence
  SiRNA target sequence
aaggaaagtaaacataaagaatt

SEQ ID NO: 174289 - DNA, 23 bp, Artificial sequence
  SiRNA target sequence
aggaaagtaaacataaagaatta

SEQ ID NO: 174290 - DNA, 23 bp, Artificial sequence
  SiRNA target sequence
ggaaagtaaacataaagaattag

SEQ ID NO: 174291 - DNA, 23 bp, Artificial sequence
  SiRNA target sequence
gaaagtaaacataaagaattaga

SEQ ID NO: 174292 - DNA, 23 bp, Artificial sequence
  SiRNA target sequence
aaagtaaacataaagaattagaa

SEQ ID NO: 174293 - DNA, 23 bp, Artificial sequence
  SiRNA target sequence
aagtaaacataaagaattagaat

SEQ ID NO: 174294 - DNA, 23 bp, Artificial sequence
  SiRNA target sequence
agtaaacataaagaattagaata

SEQ ID NO: 174295 - DNA, 23 bp, Artificial sequence
  SiRNA target sequence
gtaaacataaagaattagaatat

SEQ ID NO: 174296 - DNA, 23 bp, Artificial sequence
  SiRNA target sequence
taaacataaagaattagaatatg

SEQ ID NO: 174297 - DNA, 23 bp, Artificial sequence
  SiRNA target sequence
aaacataaagaattagaatatga

SEQ ID NO: 174298 - DNA, 23 bp, Artificial sequence
  SiRNA target sequence
aacataaagaattagaatatgat

SEQ ID NO: 174299 - DNA, 23 bp, Artificial sequence
  SiRNA target sequence
acataaagaattagaatatgatg

SEQ ID NO: 174300 - DNA, 23 bp, Artificial sequence
  SiRNA target sequence
cataaagaattagaatatgatgt

SEQ ID NO: 174301 - DNA, 23 bp, Artificial sequence
  SiRNA target sequence
ataaagaattagaatatgatgta

SEQ ID NO: 174302 - DNA, 23 bp, Artificial sequence
  SiRNA target sequence
taaagaattagaatatgatgtat

SEQ ID NO: 174303 - DNA, 23 bp, Artificial sequence
  SiRNA target sequence
aaagaattagaatatgatgtatg

SEQ ID NO: 174304 - DNA, 23 bp, Artificial sequence
  SiRNA target sequence
aagaattagaatatgatgtatgc

SEQ ID NO: 174305 - DNA, 23 bp, Artificial sequence
  SiRNA target sequence
agaattagaatatgatgtatgcg

SEQ ID NO: 174306 - DNA, 23 bp, Artificial sequence
  SiRNA target sequence
gaattagaatatgatgtatgcga

SEQ ID NO: 174307 - DNA, 23 bp, Artificial sequence
  SiRNA target sequence
aattagaatatgatgtatgcgaa

SEQ ID NO: 174308 - DNA, 23 bp, Artificial sequence
  SiRNA target sequence
attagaatatgatgtatgcgaaa

SEQ ID NO: 174309 - DNA, 23 bp, Artificial sequence
  SiRNA target sequence
ttagaatatgatgtatgcgaaat

SEQ ID NO: 174310 - DNA, 23 bp, Artificial sequence
  SiRNA target sequence
tagaatatgatgtatgcgaaata

SEQ ID NO: 174311 - DNA, 23 bp, Artificial sequence
  SiRNA target sequence
agaatatgatgtatgcgaaatat

SEQ ID NO: 174312 - DNA, 23 bp, Artificial sequence
  SiRNA target sequence
gaatatgatgtatgcgaaatata

SEQ ID NO: 174313 - DNA, 23 bp, Artificial sequence
  SiRNA target sequence
aatatgatgtatgcgaaatatac

SEQ ID NO: 174314 - DNA, 23 bp, Artificial sequence
  SiRNA target sequence
atatgatgtatgcgaaatataca

SEQ ID NO: 174315 - DNA, 23 bp, Artificial sequence
  SiRNA target sequence
tatgatgtatgcgaaatatacat

SEQ ID NO: 174316 - DNA, 23 bp, Artificial sequence
  SiRNA target sequence
atgatgtatgcgaaatatacatt

SEQ ID NO: 174317 - DNA, 23 bp, Artificial sequence
  SiRNA target sequence
tgatgtatgcgaaatatacattt

SEQ ID NO: 174318 - DNA, 23 bp, Artificial sequence
  SiRNA target sequence
gatgtatgcgaaatatacatttg

SEQ ID NO: 174319 - DNA, 23 bp, Artificial sequence
  SiRNA target sequence
atgtatgcgaaatatacatttgt

SEQ ID NO: 174320 - DNA, 23 bp, Artificial sequence
  SiRNA target sequence
tgtatgcgaaatatacatttgta

SEQ ID NO: 174321 - DNA, 23 bp, Artificial sequence
  SiRNA target sequence
gtatgcgaaatatacatttgtaa

SEQ ID NO: 174322 - DNA, 23 bp, Artificial sequence
  SiRNA target sequence
tatgcgaaatatacatttgtaat

SEQ ID NO: 174323 - DNA, 23 bp, Artificial sequence
  SiRNA target sequence
atgcgaaatatacatttgtaatc

SEQ ID NO: 174324 - DNA, 23 bp, Artificial sequence
  SiRNA target sequence
tgcgaaatatacatttgtaatca

SEQ ID NO: 174325 - DNA, 23 bp, Artificial sequence
  SiRNA target sequence
gcgaaatatacatttgtaatcag

SEQ ID NO: 174326 - DNA, 23 bp, Artificial sequence
  SiRNA target sequence
cgaaatatacatttgtaatcagg

SEQ ID NO: 174327 - DNA, 23 bp, Artificial sequence
  SiRNA target sequence
gaaatatacatttgtaatcaggg

SEQ ID NO: 174328 - DNA, 23 bp, Artificial sequence
  SiRNA target sequence
aaatatacatttgtaatcaggga

SEQ ID NO: 174329 - DNA, 23 bp, Artificial sequence
  SiRNA target sequence
aatatacatttgtaatcagggat

SEQ ID NO: 174330 - DNA, 23 bp, Artificial sequence
  SiRNA target sequence
atatacatttgtaatcagggatg

SEQ ID NO: 174331 - DNA, 23 bp, Artificial sequence
  SiRNA target sequence
tatacatttgtaatcagggatgc

SEQ ID NO: 174332 - DNA, 23 bp, Artificial sequence
  SiRNA target sequence
atacatttgtaatcagggatgca

SEQ ID NO: 174333 - DNA, 23 bp, Artificial sequence
  SiRNA target sequence
tacatttgtaatcagggatgcat

SEQ ID NO: 174334 - DNA, 23 bp, Artificial sequence
  SiRNA target sequence
acatttgtaatcagggatgcatt

SEQ ID NO: 174335 - DNA, 23 bp, Artificial sequence
  SiRNA target sequence
catttgtaatcagggatgcatta

SEQ ID NO: 174336 - DNA, 23 bp, Artificial sequence
  SiRNA target sequence
atttgtaatcagggatgcattaa

SEQ ID NO: 174337 - DNA, 23 bp, Artificial sequence
  SiRNA target sequence
tttgtaatcagggatgcattaat

SEQ ID NO: 174338 - DNA, 23 bp, Artificial sequence
  SiRNA target sequence
ttgtaatcagggatgcattaatg

SEQ ID NO: 174339 - DNA, 23 bp, Artificial sequence
  SiRNA target sequence
tgtaatcagggatgcattaatgg

SEQ ID NO: 174340 - DNA, 23 bp, Artificial sequence
  SiRNA target sequence
gtaatcagggatgcattaatgga

SEQ ID NO: 174341 - DNA, 23 bp, Artificial sequence
  SiRNA target sequence
taatcagggatgcattaatggac

SEQ ID NO: 174342 - DNA, 23 bp, Artificial sequence
  SiRNA target sequence
aatcagggatgcattaatggacc

SEQ ID NO: 174343 - DNA, 23 bp, Artificial sequence
  SiRNA target sequence
atcagggatgcattaatggacca

SEQ ID NO: 174344 - DNA, 23 bp, Artificial sequence
  SiRNA target sequence
tcagggatgcattaatggaccag

SEQ ID NO: 174345 - DNA, 23 bp, Artificial sequence
  SiRNA target sequence
cagggatgcattaatggaccagg

SEQ ID NO: 174346 - DNA, 23 bp, Artificial sequence
  SiRNA target sequence
agggatgcattaatggaccagga

SEQ ID NO: 174347 - DNA, 23 bp, Artificial sequence
  SiRNA target sequence
gggatgcattaatggaccaggac

SEQ ID NO: 174348 - DNA, 23 bp, Artificial sequence
  SiRNA target sequence
ggatgcattaatggaccaggaca

SEQ ID NO: 174349 - DNA, 23 bp, Artificial sequence
  SiRNA target sequence
gatgcattaatggaccaggacaa

SEQ ID NO: 174350 - DNA, 23 bp, Artificial sequence
  SiRNA target sequence
atgcattaatggaccaggacaat

SEQ ID NO: 174351 - DNA, 23 bp, Artificial sequence
  SiRNA target sequence
tgcattaatggaccaggacaatt

SEQ ID NO: 174352 - DNA, 23 bp, Artificial sequence
  SiRNA target sequence
gcattaatggaccaggacaattg

SEQ ID NO: 174353 - DNA, 23 bp, Artificial sequence
  SiRNA target sequence
cattaatggaccaggacaattgt

SEQ ID NO: 174354 - DNA, 23 bp, Artificial sequence
  SiRNA target sequence
attaatggaccaggacaattgta

SEQ ID NO: 174355 - DNA, 23 bp, Artificial sequence
  SiRNA target sequence
ttaatggaccaggacaattgtat

SEQ ID NO: 174356 - DNA, 23 bp, Artificial sequence
  SiRNA target sequence
taatggaccaggacaattgtata

SEQ ID NO: 174357 - DNA, 23 bp, Artificial sequence
  SiRNA target sequence
aatggaccaggacaattgtatac

SEQ ID NO: 174358 - DNA, 23 bp, Artificial sequence
  SiRNA target sequence
atggaccaggacaattgtataca

SEQ ID NO: 174359 - DNA, 23 bp, Artificial sequence
  SiRNA target sequence
tggaccaggacaattgtatacag

SEQ ID NO: 174360 - DNA, 23 bp, Artificial sequence
  SiRNA target sequence
ggaccaggacaattgtatacaga

SEQ ID NO: 174361 - DNA, 23 bp, Artificial sequence
  SiRNA target sequence
gaccaggacaattgtatacagat

SEQ ID NO: 174362 - DNA, 23 bp, Artificial sequence
  SiRNA target sequence
accaggacaattgtatacagata

SEQ ID NO: 174363 - DNA, 23 bp, Artificial sequence
  SiRNA target sequence
ccaggacaattgtatacagataa

SEQ ID NO: 174364 - DNA, 23 bp, Artificial sequence
  SiRNA target sequence
caggacaattgtatacagataat

SEQ ID NO: 174365 - DNA, 23 bp, Artificial sequence
  SiRNA target sequence
aggacaattgtatacagataatt

SEQ ID NO: 174366 - DNA, 23 bp, Artificial sequence
  SiRNA target sequence
ggacaattgtatacagataattt

SEQ ID NO: 174367 - DNA, 23 bp, Artificial sequence
  SiRNA target sequence
gacaattgtatacagataattta

SEQ ID NO: 174368 - DNA, 23 bp, Artificial sequence
  SiRNA target sequence
acaattgtatacagataatttat

SEQ ID NO: 174369 - DNA, 23 bp, Artificial sequence
  SiRNA target sequence
caattgtatacagataatttata

SEQ ID NO: 174370 - DNA, 23 bp, Artificial sequence
  SiRNA target sequence
aattgtatacagataatttatat

SEQ ID NO: 174371 - DNA, 23 bp, Artificial sequence
  SiRNA target sequence
attgtatacagataatttatatg

SEQ ID NO: 174372 - DNA, 23 bp, Artificial sequence
  SiRNA target sequence
ttgtatacagataatttatatgt

SEQ ID NO: 174373 - DNA, 23 bp, Artificial sequence
  SiRNA target sequence
tgtatacagataatttatatgta

SEQ ID NO: 174374 - DNA, 23 bp, Artificial sequence
  SiRNA target sequence
gtatacagataatttatatgtaa

SEQ ID NO: 174375 - DNA, 23 bp, Artificial sequence
  SiRNA target sequence
tatacagataatttatatgtaaa

SEQ ID NO: 174376 - DNA, 23 bp, Artificial sequence
  SiRNA target sequence
atacagataatttatatgtaaat

SEQ ID NO: 174377 - DNA, 23 bp, Artificial sequence
  SiRNA target sequence
tacagataatttatatgtaaata

SEQ ID NO: 174378 - DNA, 23 bp, Artificial sequence
  SiRNA target sequence
acagataatttatatgtaaataa

SEQ ID NO: 174379 - DNA, 23 bp, Artificial sequence
  SiRNA target sequence
cagataatttatatgtaaataat

SEQ ID NO: 174380 - DNA, 23 bp, Artificial sequence
  SiRNA target sequence
agataatttatatgtaaataatt

SEQ ID NO: 174381 - DNA, 23 bp, Artificial sequence
  SiRNA target sequence
gataatttatatgtaaataattc

SEQ ID NO: 174382 - DNA, 23 bp, Artificial sequence
  SiRNA target sequence
ataatttatatgtaaataattca

SEQ ID NO: 174383 - DNA, 23 bp, Artificial sequence
  SiRNA target sequence
taatttatatgtaaataattcag

SEQ ID NO: 174384 - DNA, 23 bp, Artificial sequence
  SiRNA target sequence
aatttatatgtaaataattcaga

SEQ ID NO: 174385 - DNA, 23 bp, Artificial sequence
  SiRNA target sequence
atttatatgtaaataattcagaa

SEQ ID NO: 174386 - DNA, 23 bp, Artificial sequence
  SiRNA target sequence
tttatatgtaaataattcagaat

SEQ ID NO: 174387 - DNA, 23 bp, Artificial sequence
  SiRNA target sequence
ttatatgtaaataattcagaata

SEQ ID NO: 174388 - DNA, 23 bp, Artificial sequence
  SiRNA target sequence
tatatgtaaataattcagaatac

SEQ ID NO: 174389 - DNA, 23 bp, Artificial sequence
  SiRNA target sequence
atatgtaaataattcagaataca

SEQ ID NO: 174390 - DNA, 23 bp, Artificial sequence
  SiRNA target sequence
tatgtaaataattcagaatacat

SEQ ID NO: 174391 - DNA, 23 bp, Artificial sequence
  SiRNA target sequence
atgtaaataattcagaatacata

SEQ ID NO: 174392 - DNA, 23 bp, Artificial sequence
  SiRNA target sequence
tgtaaataattcagaatacatag

SEQ ID NO: 174393 - DNA, 23 bp, Artificial sequence
  SiRNA target sequence
gtaaataattcagaatacataga

SEQ ID NO: 174394 - DNA, 23 bp, Artificial sequence
  SiRNA target sequence
taaataattcagaatacatagat

SEQ ID NO: 174395 - DNA, 23 bp, Artificial sequence
  SiRNA target sequence
aaataattcagaatacatagata

SEQ ID NO: 174396 - DNA, 23 bp, Artificial sequence
  SiRNA target sequence
aataattcagaatacatagatat

SEQ ID NO: 174397 - DNA, 23 bp, Artificial sequence
  SiRNA target sequence
ataattcagaatacatagatatt

SEQ ID NO: 174398 - DNA, 23 bp, Artificial sequence
  SiRNA target sequence
taattcagaatacatagatattg

SEQ ID NO: 174399 - DNA, 23 bp, Artificial sequence
  SiRNA target sequence
aattcagaatacatagatattga

SEQ ID NO: 174400 - DNA, 23 bp, Artificial sequence
  SiRNA target sequence
attcagaatacatagatattgat

SEQ ID NO: 174401 - DNA, 23 bp, Artificial sequence
  SiRNA target sequence
ttcagaatacatagatattgatc

SEQ ID NO: 174402 - DNA, 23 bp, Artificial sequence
  SiRNA target sequence
tcagaatacatagatattgatct

SEQ ID NO: 174403 - DNA, 23 bp, Artificial sequence
  SiRNA target sequence
cagaatacatagatattgatctt

SEQ ID NO: 174404 - DNA, 23 bp, Artificial sequence
  SiRNA target sequence
agaatacatagatattgatcttg

SEQ ID NO: 174405 - DNA, 23 bp, Artificial sequence
  SiRNA target sequence
gaatacatagatattgatcttgg

SEQ ID NO: 174406 - DNA, 23 bp, Artificial sequence
  SiRNA target sequence
aatacatagatattgatcttggt

SEQ ID NO: 174407 - DNA, 23 bp, Artificial sequence
  SiRNA target sequence
atacatagatattgatcttggta

SEQ ID NO: 174408 - DNA, 23 bp, Artificial sequence
  SiRNA target sequence
tacatagatattgatcttggtat

SEQ ID NO: 174409 - DNA, 23 bp, Artificial sequence
  SiRNA target sequence
acatagatattgatcttggtatt

SEQ ID NO: 174410 - DNA, 23 bp, Artificial sequence
  SiRNA target sequence
catagatattgatcttggtattg

SEQ ID NO: 174411 - DNA, 23 bp, Artificial sequence
  SiRNA target sequence
atagatattgatcttggtattga

SEQ ID NO: 174412 - DNA, 23 bp, Artificial sequence
  SiRNA target sequence
tagatattgatcttggtattgat

SEQ ID NO: 174413 - DNA, 23 bp, Artificial sequence
  SiRNA target sequence
agatattgatcttggtattgatt

SEQ ID NO: 174414 - DNA, 23 bp, Artificial sequence
  SiRNA target sequence
gatattgatcttggtattgattg

SEQ ID NO: 174415 - DNA, 23 bp, Artificial sequence
  SiRNA target sequence
atattgatcttggtattgattgt

SEQ ID NO: 174416 - DNA, 23 bp, Artificial sequence
  SiRNA target sequence
tattgatcttggtattgattgta

SEQ ID NO: 174417 - DNA, 23 bp, Artificial sequence
  SiRNA target sequence
attgatcttggtattgattgtaa

SEQ ID NO: 174418 - DNA, 23 bp, Artificial sequence
  SiRNA target sequence
ttgatcttggtattgattgtaaa

SEQ ID NO: 174419 - DNA, 23 bp, Artificial sequence
  SiRNA target sequence
tgatcttggtattgattgtaaac

SEQ ID NO: 174420 - DNA, 23 bp, Artificial sequence
  SiRNA target sequence
gatcttggtattgattgtaaaca

SEQ ID NO: 174421 - DNA, 23 bp, Artificial sequence
  SiRNA target sequence
atcttggtattgattgtaaacag

SEQ ID NO: 174422 - DNA, 23 bp, Artificial sequence
  SiRNA target sequence
tcttggtattgattgtaaacagt

SEQ ID NO: 174423 - DNA, 23 bp, Artificial sequence
  SiRNA target sequence
cttggtattgattgtaaacagtt

SEQ ID NO: 174424 - DNA, 23 bp, Artificial sequence
  SiRNA target sequence
ttggtattgattgtaaacagtta

SEQ ID NO: 174425 - DNA, 23 bp, Artificial sequence
  SiRNA target sequence
tggtattgattgtaaacagttac

SEQ ID NO: 174426 - DNA, 23 bp, Artificial sequence
  SiRNA target sequence
ggtattgattgtaaacagttaca

SEQ ID NO: 174427 - DNA, 23 bp, Artificial sequence
  SiRNA target sequence
gtattgattgtaaacagttacaa

SEQ ID NO: 174428 - DNA, 23 bp, Artificial sequence
  SiRNA target sequence
tattgattgtaaacagttacaaa

SEQ ID NO: 174429 - DNA, 23 bp, Artificial sequence
  SiRNA target sequence
attgattgtaaacagttacaaaa

SEQ ID NO: 174430 - DNA, 23 bp, Artificial sequence
  SiRNA target sequence
ttgattgtaaacagttacaaaaa

SEQ ID NO: 174431 - DNA, 23 bp, Artificial sequence
  SiRNA target sequence
tgattgtaaacagttacaaaaaa

SEQ ID NO: 174432 - DNA, 23 bp, Artificial sequence
  SiRNA target sequence
gattgtaaacagttacaaaaaag

SEQ ID NO: 174433 - DNA, 23 bp, Artificial sequence
  SiRNA target sequence
attgtaaacagttacaaaaaagg

SEQ ID NO: 174434 - DNA, 23 bp, Artificial sequence
  SiRNA target sequence
ttgtaaacagttacaaaaaagga

SEQ ID NO: 174435 - DNA, 23 bp, Artificial sequence
  SiRNA target sequence
tgtaaacagttacaaaaaaggac

SEQ ID NO: 174436 - DNA, 23 bp, Artificial sequence
  SiRNA target sequence
gtaaacagttacaaaaaaggaca

SEQ ID NO: 174437 - DNA, 23 bp, Artificial sequence
  SiRNA target sequence
taaacagttacaaaaaaggacat

SEQ ID NO: 174438 - DNA, 23 bp, Artificial sequence
  SiRNA target sequence
aaacagttacaaaaaaggacata

SEQ ID NO: 174439 - DNA, 23 bp, Artificial sequence
  SiRNA target sequence
aacagttacaaaaaaggacatat

SEQ ID NO: 174440 - DNA, 23 bp, Artificial sequence
  SiRNA target sequence
acagttacaaaaaaggacatata

SEQ ID NO: 174441 - DNA, 23 bp, Artificial sequence
  SiRNA target sequence
cagttacaaaaaaggacatatag

SEQ ID NO: 174442 - DNA, 23 bp, Artificial sequence
  SiRNA target sequence
agttacaaaaaaggacatataga

SEQ ID NO: 174443 - DNA, 23 bp, Artificial sequence
  SiRNA target sequence
gttacaaaaaaggacatatagaa

SEQ ID NO: 174444 - DNA, 23 bp, Artificial sequence
  SiRNA target sequence
ttacaaaaaaggacatatagaaa

SEQ ID NO: 174445 - DNA, 23 bp, Artificial sequence
  SiRNA target sequence
tacaaaaaaggacatatagaaaa

SEQ ID NO: 174446 - DNA, 23 bp, Artificial sequence
  SiRNA target sequence
acaaaaaaggacatatagaaaaa

SEQ ID NO: 174447 - DNA, 23 bp, Artificial sequence
  SiRNA target sequence
caaaaaaggacatatagaaaaat

SEQ ID NO: 174448 - DNA, 23 bp, Artificial sequence
  SiRNA target sequence
aaaaaaggacatatagaaaaata

SEQ ID NO: 174449 - DNA, 23 bp, Artificial sequence
  SiRNA target sequence
aaaaaggacatatagaaaaatag

SEQ ID NO: 174450 - DNA, 23 bp, Artificial sequence
  SiRNA target sequence
aaaaggacatatagaaaaataga

SEQ ID NO: 174451 - DNA, 23 bp, Artificial sequence
  SiRNA target sequence
aaaggacatatagaaaaatagaa

SEQ ID NO: 174452 - DNA, 23 bp, Artificial sequence
  SiRNA target sequence
aaggacatatagaaaaatagaaa

SEQ ID NO: 174453 - DNA, 23 bp, Artificial sequence
  SiRNA target sequence
aggacatatagaaaaatagaaac

SEQ ID NO: 174454 - DNA, 23 bp, Artificial sequence
  SiRNA target sequence
ggacatatagaaaaatagaaaca

SEQ ID NO: 174455 - DNA, 23 bp, Artificial sequence
  SiRNA target sequence
gacatatagaaaaatagaaacaa

SEQ ID NO: 174456 - DNA, 23 bp, Artificial sequence
  SiRNA target sequence
acatatagaaaaatagaaacaaa

SEQ ID NO: 174457 - DNA, 23 bp, Artificial sequence
  SiRNA target sequence
catatagaaaaatagaaacaaag

SEQ ID NO: 174458 - DNA, 23 bp, Artificial sequence
  SiRNA target sequence
atatagaaaaatagaaacaaaga

SEQ ID NO: 174459 - DNA, 23 bp, Artificial sequence
  SiRNA target sequence
tatagaaaaatagaaacaaagaa

SEQ ID NO: 174460 - DNA, 23 bp, Artificial sequence
  SiRNA target sequence
atagaaaaatagaaacaaagaaa

SEQ ID NO: 174461 - DNA, 23 bp, Artificial sequence
  SiRNA target sequence
tagaaaaatagaaacaaagaaag

SEQ ID NO: 174462 - DNA, 23 bp, Artificial sequence
  SiRNA target sequence
agaaaaatagaaacaaagaaagt

SEQ ID NO: 174463 - DNA, 23 bp, Artificial sequence
  SiRNA target sequence
gaaaaatagaaacaaagaaagtt

SEQ ID NO: 174464 - DNA, 23 bp, Artificial sequence
  SiRNA target sequence
aaaaatagaaacaaagaaagtta

SEQ ID NO: 174465 - DNA, 23 bp, Artificial sequence
  SiRNA target sequence
aaaatagaaacaaagaaagttaa

SEQ ID NO: 174466 - DNA, 23 bp, Artificial sequence
  SiRNA target sequence
aaatagaaacaaagaaagttaat

SEQ ID NO: 174467 - DNA, 23 bp, Artificial sequence
  SiRNA target sequence
aatagaaacaaagaaagttaatt

SEQ ID NO: 174468 - DNA, 23 bp, Artificial sequence
  SiRNA target sequence
atagaaacaaagaaagttaattt

SEQ ID NO: 174469 - DNA, 23 bp, Artificial sequence
  SiRNA target sequence
tagaaacaaagaaagttaatttt

SEQ ID NO: 174470 - DNA, 23 bp, Artificial sequence
  SiRNA target sequence
agaaacaaagaaagttaatttta

SEQ ID NO: 174471 - DNA, 23 bp, Artificial sequence
  SiRNA target sequence
gaaacaaagaaagttaattttaa

SEQ ID NO: 174472 - DNA, 23 bp, Artificial sequence
  SiRNA target sequence
aaacaaagaaagttaattttaaa

SEQ ID NO: 174473 - DNA, 23 bp, Artificial sequence
  SiRNA target sequence
aacaaagaaagttaattttaaaa

SEQ ID NO: 174474 - DNA, 23 bp, Artificial sequence
  SiRNA target sequence
acaaagaaagttaattttaaaat

SEQ ID NO: 174475 - DNA, 23 bp, Artificial sequence
  SiRNA target sequence
caaagaaagttaattttaaaata

SEQ ID NO: 174476 - DNA, 23 bp, Artificial sequence
  SiRNA target sequence
aaagaaagttaattttaaaatag

SEQ ID NO: 174477 - DNA, 23 bp, Artificial sequence
  SiRNA target sequence
aagaaagttaattttaaaataga

SEQ ID NO: 174478 - DNA, 23 bp, Artificial sequence
  SiRNA target sequence
agaaagttaattttaaaatagaa

SEQ ID NO: 174479 - DNA, 23 bp, Artificial sequence
  SiRNA target sequence
gaaagttaattttaaaatagaat

SEQ ID NO: 174480 - DNA, 23 bp, Artificial sequence
  SiRNA target sequence
aaagttaattttaaaatagaatg

SEQ ID NO: 174481 - DNA, 23 bp, Artificial sequence
  SiRNA target sequence
aagttaattttaaaatagaatgg

SEQ ID NO: 174482 - DNA, 23 bp, Artificial sequence
  SiRNA target sequence
agttaattttaaaatagaatggt

SEQ ID NO: 174483 - DNA, 23 bp, Artificial sequence
  SiRNA target sequence
gttaattttaaaatagaatggta

SEQ ID NO: 174484 - DNA, 23 bp, Artificial sequence
  SiRNA target sequence
ttaattttaaaatagaatggtaa

SEQ ID NO: 174485 - DNA, 24 bp, Artificial sequence
  SiRNA target sequence
atgaatactgaaaataaaccatgt

SEQ ID NO: 174486 - DNA, 24 bp, Artificial sequence
  SiRNA target sequence
tgaatactgaaaataaaccatgta

SEQ ID NO: 174487 - DNA, 24 bp, Artificial sequence
  SiRNA target sequence
gaatactgaaaataaaccatgtat

SEQ ID NO: 174488 - DNA, 24 bp, Artificial sequence
  SiRNA target sequence
aatactgaaaataaaccatgtatt

SEQ ID NO: 174489 - DNA, 24 bp, Artificial sequence
  SiRNA target sequence
atactgaaaataaaccatgtattt

SEQ ID NO: 174490 - DNA, 24 bp, Artificial sequence
  SiRNA target sequence
tactgaaaataaaccatgtatttc

SEQ ID NO: 174491 - DNA, 24 bp, Artificial sequence
  SiRNA target sequence
actgaaaataaaccatgtatttca

SEQ ID NO: 174492 - DNA, 24 bp, Artificial sequence
  SiRNA target sequence
ctgaaaataaaccatgtatttcac

SEQ ID NO: 174493 - DNA, 24 bp, Artificial sequence
  SiRNA target sequence
tgaaaataaaccatgtatttcacc

SEQ ID NO: 174494 - DNA, 24 bp, Artificial sequence
  SiRNA target sequence
gaaaataaaccatgtatttcacca

SEQ ID NO: 174495 - DNA, 24 bp, Artificial sequence
  SiRNA target sequence
aaaataaaccatgtatttcaccat

SEQ ID NO: 174496 - DNA, 24 bp, Artificial sequence
  SiRNA target sequence
aaataaaccatgtatttcaccatt

SEQ ID NO: 174497 - DNA, 24 bp, Artificial sequence
  SiRNA target sequence
aataaaccatgtatttcaccattt

SEQ ID NO: 174498 - DNA, 24 bp, Artificial sequence
  SiRNA target sequence
ataaaccatgtatttcaccattta

SEQ ID NO: 174499 - DNA, 24 bp, Artificial sequence
  SiRNA target sequence
taaaccatgtatttcaccatttac

SEQ ID NO: 174500 - DNA, 24 bp, Artificial sequence
  SiRNA target sequence
aaaccatgtatttcaccatttacc

SEQ ID NO: 174501 - DNA, 24 bp, Artificial sequence
  SiRNA target sequence
aaccatgtatttcaccatttacct

SEQ ID NO: 174502 - DNA, 24 bp, Artificial sequence
  SiRNA target sequence
accatgtatttcaccatttacctt

SEQ ID NO: 174503 - DNA, 24 bp, Artificial sequence
  SiRNA target sequence
ccatgtatttcaccatttaccttt

SEQ ID NO: 174504 - DNA, 24 bp, Artificial sequence
  SiRNA target sequence
catgtatttcaccatttaccttta

SEQ ID NO: 174505 - DNA, 24 bp, Artificial sequence
  SiRNA target sequence
atgtatttcaccatttacctttaa

SEQ ID NO: 174506 - DNA, 24 bp, Artificial sequence
  SiRNA target sequence
tgtatttcaccatttacctttaaa

SEQ ID NO: 174507 - DNA, 24 bp, Artificial sequence
  SiRNA target sequence
gtatttcaccatttacctttaaac

SEQ ID NO: 174508 - DNA, 24 bp, Artificial sequence
  SiRNA target sequence
tatttcaccatttacctttaaact

SEQ ID NO: 174509 - DNA, 24 bp, Artificial sequence
  SiRNA target sequence
atttcaccatttacctttaaacta

SEQ ID NO: 174510 - DNA, 24 bp, Artificial sequence
  SiRNA target sequence
tttcaccatttacctttaaactag

SEQ ID NO: 174511 - DNA, 24 bp, Artificial sequence
  SiRNA target sequence
ttcaccatttacctttaaactaga

SEQ ID NO: 174512 - DNA, 24 bp, Artificial sequence
  SiRNA target sequence
tcaccatttacctttaaactagaa

SEQ ID NO: 174513 - DNA, 24 bp, Artificial sequence
  SiRNA target sequence
caccatttacctttaaactagaag

SEQ ID NO: 174514 - DNA, 24 bp, Artificial sequence
  SiRNA target sequence
accatttacctttaaactagaaga

SEQ ID NO: 174515 - DNA, 24 bp, Artificial sequence
  SiRNA target sequence
ccatttacctttaaactagaagat

SEQ ID NO: 174516 - DNA, 24 bp, Artificial sequence
  SiRNA target sequence
catttacctttaaactagaagatt

SEQ ID NO: 174517 - DNA, 24 bp, Artificial sequence
  SiRNA target sequence
atttacctttaaactagaagattg

SEQ ID NO: 174518 - DNA, 24 bp, Artificial sequence
  SiRNA target sequence
tttacctttaaactagaagattgc

SEQ ID NO: 174519 - DNA, 24 bp, Artificial sequence
  SiRNA target sequence
ttacctttaaactagaagattgcc

SEQ ID NO: 174520 - DNA, 24 bp, Artificial sequence
  SiRNA target sequence
tacctttaaactagaagattgcct

SEQ ID NO: 174521 - DNA, 24 bp, Artificial sequence
  SiRNA target sequence
acctttaaactagaagattgcctg

SEQ ID NO: 174522 - DNA, 24 bp, Artificial sequence
  SiRNA target sequence
cctttaaactagaagattgcctgg

SEQ ID NO: 174523 - DNA, 24 bp, Artificial sequence
  SiRNA target sequence
ctttaaactagaagattgcctggc

SEQ ID NO: 174524 - DNA, 24 bp, Artificial sequence
  SiRNA target sequence
tttaaactagaagattgcctggca

SEQ ID NO: 174525 - DNA, 24 bp, Artificial sequence
  SiRNA target sequence
ttaaactagaagattgcctggcat

SEQ ID NO: 174526 - DNA, 24 bp, Artificial sequence
  SiRNA target sequence
taaactagaagattgcctggcatg

SEQ ID NO: 174527 - DNA, 24 bp, Artificial sequence
  SiRNA target sequence
aaactagaagattgcctggcatgt

SEQ ID NO: 174528 - DNA, 24 bp, Artificial sequence
  SiRNA target sequence
aactagaagattgcctggcatgtt

SEQ ID NO: 174529 - DNA, 24 bp, Artificial sequence
  SiRNA target sequence
actagaagattgcctggcatgttc

SEQ ID NO: 174530 - DNA, 24 bp, Artificial sequence
  SiRNA target sequence
ctagaagattgcctggcatgttcg

SEQ ID NO: 174531 - DNA, 24 bp, Artificial sequence
  SiRNA target sequence
tagaagattgcctggcatgttcgg

SEQ ID NO: 174532 - DNA, 24 bp, Artificial sequence
  SiRNA target sequence
agaagattgcctggcatgttcggc

SEQ ID NO: 174533 - DNA, 24 bp, Artificial sequence
  SiRNA target sequence
gaagattgcctggcatgttcggct

SEQ ID NO: 174534 - DNA, 24 bp, Artificial sequence
  SiRNA target sequence
aagattgcctggcatgttcggctt

SEQ ID NO: 174535 - DNA, 24 bp, Artificial sequence
  SiRNA target sequence
agattgcctggcatgttcggcttg

SEQ ID NO: 174536 - DNA, 24 bp, Artificial sequence
  SiRNA target sequence
gattgcctggcatgttcggcttgt

SEQ ID NO: 174537 - DNA, 24 bp, Artificial sequence
  SiRNA target sequence
attgcctggcatgttcggcttgta

SEQ ID NO: 174538 - DNA, 24 bp, Artificial sequence
  SiRNA target sequence
ttgcctggcatgttcggcttgtat

SEQ ID NO: 174539 - DNA, 24 bp, Artificial sequence
  SiRNA target sequence
tgcctggcatgttcggcttgtatt

SEQ ID NO: 174540 - DNA, 24 bp, Artificial sequence
  SiRNA target sequence
gcctggcatgttcggcttgtattg

SEQ ID NO: 174541 - DNA, 24 bp, Artificial sequence
  SiRNA target sequence
cctggcatgttcggcttgtattgc

SEQ ID NO: 174542 - DNA, 24 bp, Artificial sequence
  SiRNA target sequence
ctggcatgttcggcttgtattgct

SEQ ID NO: 174543 - DNA, 24 bp, Artificial sequence
  SiRNA target sequence
tggcatgttcggcttgtattgctg

SEQ ID NO: 174544 - DNA, 24 bp, Artificial sequence
  SiRNA target sequence
ggcatgttcggcttgtattgctga

SEQ ID NO: 174545 - DNA, 24 bp, Artificial sequence
  SiRNA target sequence
gcatgttcggcttgtattgctgat

SEQ ID NO: 174546 - DNA, 24 bp, Artificial sequence
  SiRNA target sequence
catgttcggcttgtattgctgatt

SEQ ID NO: 174547 - DNA, 24 bp, Artificial sequence
  SiRNA target sequence
atgttcggcttgtattgctgattt

SEQ ID NO: 174548 - DNA, 24 bp, Artificial sequence
  SiRNA target sequence
tgttcggcttgtattgctgatttt

SEQ ID NO: 174549 - DNA, 24 bp, Artificial sequence
  SiRNA target sequence
gttcggcttgtattgctgattttt

SEQ ID NO: 174550 - DNA, 24 bp, Artificial sequence
  SiRNA target sequence
ttcggcttgtattgctgatttttc

SEQ ID NO: 174551 - DNA, 24 bp, Artificial sequence
  SiRNA target sequence
tcggcttgtattgctgatttttct

SEQ ID NO: 174552 - DNA, 24 bp, Artificial sequence
  SiRNA target sequence
cggcttgtattgctgatttttctg

SEQ ID NO: 174553 - DNA, 24 bp, Artificial sequence
  SiRNA target sequence
ggcttgtattgctgatttttctgt

SEQ ID NO: 174554 - DNA, 24 bp, Artificial sequence
  SiRNA target sequence
gcttgtattgctgatttttctgtt

SEQ ID NO: 174555 - DNA, 24 bp, Artificial sequence
  SiRNA target sequence
cttgtattgctgatttttctgttc

SEQ ID NO: 174556 - DNA, 24 bp, Artificial sequence
  SiRNA target sequence
ttgtattgctgatttttctgttcc

SEQ ID NO: 174557 - DNA, 24 bp, Artificial sequence
  SiRNA target sequence
tgtattgctgatttttctgttcca

SEQ ID NO: 174558 - DNA, 24 bp, Artificial sequence
  SiRNA target sequence
gtattgctgatttttctgttccaa

SEQ ID NO: 174559 - DNA, 24 bp, Artificial sequence
  SiRNA target sequence
tattgctgatttttctgttccaaa

SEQ ID NO: 174560 - DNA, 24 bp, Artificial sequence
  SiRNA target sequence
attgctgatttttctgttccaaaa

SEQ ID NO: 174561 - DNA, 24 bp, Artificial sequence
  SiRNA target sequence
ttgctgatttttctgttccaaaaa

SEQ ID NO: 174562 - DNA, 24 bp, Artificial sequence
  SiRNA target sequence
tgctgatttttctgttccaaaaat

SEQ ID NO: 174563 - DNA, 24 bp, Artificial sequence
  SiRNA target sequence
gctgatttttctgttccaaaaatt

SEQ ID NO: 174564 - DNA, 24 bp, Artificial sequence
  SiRNA target sequence
ctgatttttctgttccaaaaattc

SEQ ID NO: 174565 - DNA, 24 bp, Artificial sequence
  SiRNA target sequence
tgatttttctgttccaaaaattcc

SEQ ID NO: 174566 - DNA, 24 bp, Artificial sequence
  SiRNA target sequence
gatttttctgttccaaaaattcct

SEQ ID NO: 174567 - DNA, 24 bp, Artificial sequence
  SiRNA target sequence
atttttctgttccaaaaattccta

SEQ ID NO: 174568 - DNA, 24 bp, Artificial sequence
  SiRNA target sequence
tttttctgttccaaaaattcctac

SEQ ID NO: 174569 - DNA, 24 bp, Artificial sequence
  SiRNA target sequence
ttttctgttccaaaaattcctact

SEQ ID NO: 174570 - DNA, 24 bp, Artificial sequence
  SiRNA target sequence
tttctgttccaaaaattcctactt

SEQ ID NO: 174571 - DNA, 24 bp, Artificial sequence
  SiRNA target sequence
ttctgttccaaaaattcctactta

SEQ ID NO: 174572 - DNA, 24 bp, Artificial sequence
  SiRNA target sequence
tctgttccaaaaattcctacttac

SEQ ID NO: 174573 - DNA, 24 bp, Artificial sequence
  SiRNA target sequence
ctgttccaaaaattcctacttaca

SEQ ID NO: 174574 - DNA, 24 bp, Artificial sequence
  SiRNA target sequence
tgttccaaaaattcctacttacac

SEQ ID NO: 174575 - DNA, 24 bp, Artificial sequence
  SiRNA target sequence
gttccaaaaattcctacttacaca

SEQ ID NO: 174576 - DNA, 24 bp, Artificial sequence
  SiRNA target sequence
ttccaaaaattcctacttacacag

SEQ ID NO: 174577 - DNA, 24 bp, Artificial sequence
  SiRNA target sequence
tccaaaaattcctacttacacaga

SEQ ID NO: 174578 - DNA, 24 bp, Artificial sequence
  SiRNA target sequence
ccaaaaattcctacttacacagaa

SEQ ID NO: 174579 - DNA, 24 bp, Artificial sequence
  SiRNA target sequence
caaaaattcctacttacacagaac

SEQ ID NO: 174580 - DNA, 24 bp, Artificial sequence
  SiRNA target sequence
aaaaattcctacttacacagaact

SEQ ID NO: 174581 - DNA, 24 bp, Artificial sequence
  SiRNA target sequence
aaaattcctacttacacagaactg

SEQ ID NO: 174582 - DNA, 24 bp, Artificial sequence
  SiRNA target sequence
aaattcctacttacacagaactga

SEQ ID NO: 174583 - DNA, 24 bp, Artificial sequence
  SiRNA target sequence
aattcctacttacacagaactgaa

SEQ ID NO: 174584 - DNA, 24 bp, Artificial sequence
  SiRNA target sequence
attcctacttacacagaactgaaa

SEQ ID NO: 174585 - DNA, 24 bp, Artificial sequence
  SiRNA target sequence
ttcctacttacacagaactgaaag

SEQ ID NO: 174586 - DNA, 24 bp, Artificial sequence
  SiRNA target sequence
tcctacttacacagaactgaaaga

SEQ ID NO: 174587 - DNA, 24 bp, Artificial sequence
  SiRNA target sequence
cctacttacacagaactgaaagat

SEQ ID NO: 174588 - DNA, 24 bp, Artificial sequence
  SiRNA target sequence
ctacttacacagaactgaaagatg

SEQ ID NO: 174589 - DNA, 24 bp, Artificial sequence
  SiRNA target sequence
tacttacacagaactgaaagatgt

SEQ ID NO: 174590 - DNA, 24 bp, Artificial sequence
  SiRNA target sequence
acttacacagaactgaaagatgtc

SEQ ID NO: 174591 - DNA, 24 bp, Artificial sequence
  SiRNA target sequence
cttacacagaactgaaagatgtcc

SEQ ID NO: 174592 - DNA, 24 bp, Artificial sequence
  SiRNA target sequence
ttacacagaactgaaagatgtccc

SEQ ID NO: 174593 - DNA, 24 bp, Artificial sequence
  SiRNA target sequence
tacacagaactgaaagatgtccct

SEQ ID NO: 174594 - DNA, 24 bp, Artificial sequence
  SiRNA target sequence
acacagaactgaaagatgtccctt

SEQ ID NO: 174595 - DNA, 24 bp, Artificial sequence
  SiRNA target sequence
cacagaactgaaagatgtcccttt

SEQ ID NO: 174596 - DNA, 24 bp, Artificial sequence
  SiRNA target sequence
acagaactgaaagatgtcccttta

SEQ ID NO: 174597 - DNA, 24 bp, Artificial sequence
  SiRNA target sequence
cagaactgaaagatgtccctttaa

SEQ ID NO: 174598 - DNA, 24 bp, Artificial sequence
  SiRNA target sequence
agaactgaaagatgtccctttaac

SEQ ID NO: 174599 - DNA, 24 bp, Artificial sequence
  SiRNA target sequence
gaactgaaagatgtccctttaaca

SEQ ID NO: 174600 - DNA, 24 bp, Artificial sequence
  SiRNA target sequence
aactgaaagatgtccctttaacat

SEQ ID NO: 174601 - DNA, 24 bp, Artificial sequence
  SiRNA target sequence
actgaaagatgtccctttaacatt

SEQ ID NO: 174602 - DNA, 24 bp, Artificial sequence
  SiRNA target sequence
ctgaaagatgtccctttaacattt

SEQ ID NO: 174603 - DNA, 24 bp, Artificial sequence
  SiRNA target sequence
tgaaagatgtccctttaacatttt

SEQ ID NO: 174604 - DNA, 24 bp, Artificial sequence
  SiRNA target sequence
gaaagatgtccctttaacattttt

SEQ ID NO: 174605 - DNA, 24 bp, Artificial sequence
  SiRNA target sequence
aaagatgtccctttaacattttta

SEQ ID NO: 174606 - DNA, 24 bp, Artificial sequence
  SiRNA target sequence
aagatgtccctttaacatttttat

SEQ ID NO: 174607 - DNA, 24 bp, Artificial sequence
  SiRNA target sequence
agatgtccctttaacatttttatt

SEQ ID NO: 174608 - DNA, 24 bp, Artificial sequence
  SiRNA target sequence
gatgtccctttaacatttttatta

SEQ ID NO: 174609 - DNA, 24 bp, Artificial sequence
  SiRNA target sequence
atgtccctttaacatttttattat

SEQ ID NO: 174610 - DNA, 24 bp, Artificial sequence
  SiRNA target sequence
tgtccctttaacatttttattatc

SEQ ID NO: 174611 - DNA, 24 bp, Artificial sequence
  SiRNA target sequence
gtccctttaacatttttattatca

SEQ ID NO: 174612 - DNA, 24 bp, Artificial sequence
  SiRNA target sequence
tccctttaacatttttattatcac

SEQ ID NO: 174613 - DNA, 24 bp, Artificial sequence
  SiRNA target sequence
ccctttaacatttttattatcacc

SEQ ID NO: 174614 - DNA, 24 bp, Artificial sequence
  SiRNA target sequence
cctttaacatttttattatcacca

SEQ ID NO: 174615 - DNA, 24 bp, Artificial sequence
  SiRNA target sequence
ctttaacatttttattatcaccac

SEQ ID NO: 174616 - DNA, 24 bp, Artificial sequence
  SiRNA target sequence
tttaacatttttattatcaccaca

SEQ ID NO: 174617 - DNA, 24 bp, Artificial sequence
  SiRNA target sequence
ttaacatttttattatcaccacat

SEQ ID NO: 174618 - DNA, 24 bp, Artificial sequence
  SiRNA target sequence
taacatttttattatcaccacatt

SEQ ID NO: 174619 - DNA, 24 bp, Artificial sequence
  SiRNA target sequence
aacatttttattatcaccacattc

SEQ ID NO: 174620 - DNA, 24 bp, Artificial sequence
  SiRNA target sequence
acatttttattatcaccacattcg

SEQ ID NO: 174621 - DNA, 24 bp, Artificial sequence
  SiRNA target sequence
catttttattatcaccacattcga

SEQ ID NO: 174622 - DNA, 24 bp, Artificial sequence
  SiRNA target sequence
atttttattatcaccacattcgaa

SEQ ID NO: 174623 - DNA, 24 bp, Artificial sequence
  SiRNA target sequence
tttttattatcaccacattcgaaa

SEQ ID NO: 174624 - DNA, 24 bp, Artificial sequence
  SiRNA target sequence
ttttattatcaccacattcgaaaa

SEQ ID NO: 174625 - DNA, 24 bp, Artificial sequence
  SiRNA target sequence
tttattatcaccacattcgaaaat

SEQ ID NO: 174626 - DNA, 24 bp, Artificial sequence
  SiRNA target sequence
ttattatcaccacattcgaaaatg

SEQ ID NO: 174627 - DNA, 24 bp, Artificial sequence
  SiRNA target sequence
tattatcaccacattcgaaaatga

SEQ ID NO: 174628 - DNA, 24 bp, Artificial sequence
  SiRNA target sequence
attatcaccacattcgaaaatgaa

SEQ ID NO: 174629 - DNA, 24 bp, Artificial sequence
  SiRNA target sequence
ttatcaccacattcgaaaatgaat

SEQ ID NO: 174630 - DNA, 24 bp, Artificial sequence
  SiRNA target sequence
tatcaccacattcgaaaatgaata

SEQ ID NO: 174631 - DNA, 24 bp, Artificial sequence
  SiRNA target sequence
atcaccacattcgaaaatgaatat

SEQ ID NO: 174632 - DNA, 24 bp, Artificial sequence
  SiRNA target sequence
tcaccacattcgaaaatgaatatg

SEQ ID NO: 174633 - DNA, 24 bp, Artificial sequence
  SiRNA target sequence
caccacattcgaaaatgaatatgt

SEQ ID NO: 174634 - DNA, 24 bp, Artificial sequence
  SiRNA target sequence
accacattcgaaaatgaatatgta

SEQ ID NO: 174635 - DNA, 24 bp, Artificial sequence
  SiRNA target sequence
ccacattcgaaaatgaatatgtat

SEQ ID NO: 174636 - DNA, 24 bp, Artificial sequence
  SiRNA target sequence
cacattcgaaaatgaatatgtatg

SEQ ID NO: 174637 - DNA, 24 bp, Artificial sequence
  SiRNA target sequence
acattcgaaaatgaatatgtatgc

SEQ ID NO: 174638 - DNA, 24 bp, Artificial sequence
  SiRNA target sequence
cattcgaaaatgaatatgtatgca

SEQ ID NO: 174639 - DNA, 24 bp, Artificial sequence
  SiRNA target sequence
attcgaaaatgaatatgtatgcac

SEQ ID NO: 174640 - DNA, 24 bp, Artificial sequence
  SiRNA target sequence
ttcgaaaatgaatatgtatgcaca

SEQ ID NO: 174641 - DNA, 24 bp, Artificial sequence
  SiRNA target sequence
tcgaaaatgaatatgtatgcacac

SEQ ID NO: 174642 - DNA, 24 bp, Artificial sequence
  SiRNA target sequence
cgaaaatgaatatgtatgcacact

SEQ ID NO: 174643 - DNA, 24 bp, Artificial sequence
  SiRNA target sequence
gaaaatgaatatgtatgcacacta

SEQ ID NO: 174644 - DNA, 24 bp, Artificial sequence
  SiRNA target sequence
aaaatgaatatgtatgcacactat

SEQ ID NO: 174645 - DNA, 24 bp, Artificial sequence
  SiRNA target sequence
aaatgaatatgtatgcacactata

SEQ ID NO: 174646 - DNA, 24 bp, Artificial sequence
  SiRNA target sequence
aatgaatatgtatgcacactataa

SEQ ID NO: 174647 - DNA, 24 bp, Artificial sequence
  SiRNA target sequence
atgaatatgtatgcacactataac

SEQ ID NO: 174648 - DNA, 24 bp, Artificial sequence
  SiRNA target sequence
tgaatatgtatgcacactataaca

SEQ ID NO: 174649 - DNA, 24 bp, Artificial sequence
  SiRNA target sequence
gaatatgtatgcacactataacaa

SEQ ID NO: 174650 - DNA, 24 bp, Artificial sequence
  SiRNA target sequence
aatatgtatgcacactataacaat

SEQ ID NO: 174651 - DNA, 24 bp, Artificial sequence
  SiRNA target sequence
atatgtatgcacactataacaatc

SEQ ID NO: 174652 - DNA, 24 bp, Artificial sequence
  SiRNA target sequence
tatgtatgcacactataacaatca

SEQ ID NO: 174653 - DNA, 24 bp, Artificial sequence
  SiRNA target sequence
atgtatgcacactataacaatcat

SEQ ID NO: 174654 - DNA, 24 bp, Artificial sequence
  SiRNA target sequence
tgtatgcacactataacaatcata

SEQ ID NO: 174655 - DNA, 24 bp, Artificial sequence
  SiRNA target sequence
gtatgcacactataacaatcatat

SEQ ID NO: 174656 - DNA, 24 bp, Artificial sequence
  SiRNA target sequence
tatgcacactataacaatcatata

SEQ ID NO: 174657 - DNA, 24 bp, Artificial sequence
  SiRNA target sequence
atgcacactataacaatcatataa

SEQ ID NO: 174658 - DNA, 24 bp, Artificial sequence
  SiRNA target sequence
tgcacactataacaatcatataat

SEQ ID NO: 174659 - DNA, 24 bp, Artificial sequence
  SiRNA target sequence
gcacactataacaatcatataatg

SEQ ID NO: 174660 - DNA, 24 bp, Artificial sequence
  SiRNA target sequence
cacactataacaatcatataatgt

SEQ ID NO: 174661 - DNA, 24 bp, Artificial sequence
  SiRNA target sequence
acactataacaatcatataatgtc

SEQ ID NO: 174662 - DNA, 24 bp, Artificial sequence
  SiRNA target sequence
cactataacaatcatataatgtcc

SEQ ID NO: 174663 - DNA, 24 bp, Artificial sequence
  SiRNA target sequence
actataacaatcatataatgtcct

SEQ ID NO: 174664 - DNA, 24 bp, Artificial sequence
  SiRNA target sequence
ctataacaatcatataatgtcctt

SEQ ID NO: 174665 - DNA, 24 bp, Artificial sequence
  SiRNA target sequence
tataacaatcatataatgtccttt

SEQ ID NO: 174666 - DNA, 24 bp, Artificial sequence
  SiRNA target sequence
ataacaatcatataatgtccttta

SEQ ID NO: 174667 - DNA, 24 bp, Artificial sequence
  SiRNA target sequence
taacaatcatataatgtcctttag

SEQ ID NO: 174668 - DNA, 24 bp, Artificial sequence
  SiRNA target sequence
aacaatcatataatgtcctttagt

SEQ ID NO: 174669 - DNA, 24 bp, Artificial sequence
  SiRNA target sequence
acaatcatataatgtcctttagtg

SEQ ID NO: 174670 - DNA, 24 bp, Artificial sequence
  SiRNA target sequence
caatcatataatgtcctttagtga

SEQ ID NO: 174671 - DNA, 24 bp, Artificial sequence
  SiRNA target sequence
aatcatataatgtcctttagtgat

SEQ ID NO: 174672 - DNA, 24 bp, Artificial sequence
  SiRNA target sequence
atcatataatgtcctttagtgatt

SEQ ID NO: 174673 - DNA, 24 bp, Artificial sequence
  SiRNA target sequence
tcatataatgtcctttagtgattt

SEQ ID NO: 174674 - DNA, 24 bp, Artificial sequence
  SiRNA target sequence
catataatgtcctttagtgatttt

SEQ ID NO: 174675 - DNA, 24 bp, Artificial sequence
  SiRNA target sequence
atataatgtcctttagtgattttg

SEQ ID NO: 174676 - DNA, 24 bp, Artificial sequence
  SiRNA target sequence
tataatgtcctttagtgattttga

SEQ ID NO: 174677 - DNA, 24 bp, Artificial sequence
  SiRNA target sequence
ataatgtcctttagtgattttgaa

SEQ ID NO: 174678 - DNA, 24 bp, Artificial sequence
  SiRNA target sequence
taatgtcctttagtgattttgaat

SEQ ID NO: 174679 - DNA, 24 bp, Artificial sequence
  SiRNA target sequence
aatgtcctttagtgattttgaata

SEQ ID NO: 174680 - DNA, 24 bp, Artificial sequence
  SiRNA target sequence
atgtcctttagtgattttgaatat

SEQ ID NO: 174681 - DNA, 24 bp, Artificial sequence
  SiRNA target sequence
tgtcctttagtgattttgaatatc

SEQ ID NO: 174682 - DNA, 24 bp, Artificial sequence
  SiRNA target sequence
gtcctttagtgattttgaatatca

SEQ ID NO: 174683 - DNA, 24 bp, Artificial sequence
  SiRNA target sequence
tcctttagtgattttgaatatcac

SEQ ID NO: 174684 - DNA, 24 bp, Artificial sequence
  SiRNA target sequence
cctttagtgattttgaatatcact

SEQ ID NO: 174685 - DNA, 24 bp, Artificial sequence
  SiRNA target sequence
ctttagtgattttgaatatcactt

SEQ ID NO: 174686 - DNA, 24 bp, Artificial sequence
  SiRNA target sequence
tttagtgattttgaatatcactta

SEQ ID NO: 174687 - DNA, 24 bp, Artificial sequence
  SiRNA target sequence
ttagtgattttgaatatcacttaa

SEQ ID NO: 174688 - DNA, 24 bp, Artificial sequence
  SiRNA target sequence
tagtgattttgaatatcacttaat

SEQ ID NO: 174689 - DNA, 24 bp, Artificial sequence
  SiRNA target sequence
agtgattttgaatatcacttaatt

SEQ ID NO: 174690 - DNA, 24 bp, Artificial sequence
  SiRNA target sequence
gtgattttgaatatcacttaattt

SEQ ID NO: 174691 - DNA, 24 bp, Artificial sequence
  SiRNA target sequence
tgattttgaatatcacttaatttc

SEQ ID NO: 174692 - DNA, 24 bp, Artificial sequence
  SiRNA target sequence
gattttgaatatcacttaatttca

SEQ ID NO: 174693 - DNA, 24 bp, Artificial sequence
  SiRNA target sequence
attttgaatatcacttaatttcat

SEQ ID NO: 174694 - DNA, 24 bp, Artificial sequence
  SiRNA target sequence
ttttgaatatcacttaatttcatt

SEQ ID NO: 174695 - DNA, 24 bp, Artificial sequence
  SiRNA target sequence
tttgaatatcacttaatttcattt

SEQ ID NO: 174696 - DNA, 24 bp, Artificial sequence
  SiRNA target sequence
ttgaatatcacttaatttcattta

SEQ ID NO: 174697 - DNA, 24 bp, Artificial sequence
  SiRNA target sequence
tgaatatcacttaatttcatttat

SEQ ID NO: 174698 - DNA, 24 bp, Artificial sequence
  SiRNA target sequence
gaatatcacttaatttcatttata

SEQ ID NO: 174699 - DNA, 24 bp, Artificial sequence
  SiRNA target sequence
aatatcacttaatttcatttataa

SEQ ID NO: 174700 - DNA, 24 bp, Artificial sequence
  SiRNA target sequence
atatcacttaatttcatttataaa

SEQ ID NO: 174701 - DNA, 24 bp, Artificial sequence
  SiRNA target sequence
tatcacttaatttcatttataaaa

SEQ ID NO: 174702 - DNA, 24 bp, Artificial sequence
  SiRNA target sequence
atcacttaatttcatttataaaac

SEQ ID NO: 174703 - DNA, 24 bp, Artificial sequence
  SiRNA target sequence
tcacttaatttcatttataaaact

SEQ ID NO: 174704 - DNA, 24 bp, Artificial sequence
  SiRNA target sequence
cacttaatttcatttataaaacta

SEQ ID NO: 174705 - DNA, 24 bp, Artificial sequence
  SiRNA target sequence
acttaatttcatttataaaactaa

SEQ ID NO: 174706 - DNA, 24 bp, Artificial sequence
  SiRNA target sequence
cttaatttcatttataaaactaaa

SEQ ID NO: 174707 - DNA, 24 bp, Artificial sequence
  SiRNA target sequence
ttaatttcatttataaaactaaaa

SEQ ID NO: 174708 - DNA, 24 bp, Artificial sequence
  SiRNA target sequence
taatttcatttataaaactaaaat

SEQ ID NO: 174709 - DNA, 24 bp, Artificial sequence
  SiRNA target sequence
aatttcatttataaaactaaaatt

SEQ ID NO: 174710 - DNA, 24 bp, Artificial sequence
  SiRNA target sequence
atttcatttataaaactaaaattt

SEQ ID NO: 174711 - DNA, 24 bp, Artificial sequence
  SiRNA target sequence
tttcatttataaaactaaaattta

SEQ ID NO: 174712 - DNA, 24 bp, Artificial sequence
  SiRNA target sequence
ttcatttataaaactaaaatttaa

SEQ ID NO: 174713 - DNA, 24 bp, Artificial sequence
  SiRNA target sequence
tcatttataaaactaaaatttaat

SEQ ID NO: 174714 - DNA, 24 bp, Artificial sequence
  SiRNA target sequence
catttataaaactaaaatttaatg

SEQ ID NO: 174715 - DNA, 24 bp, Artificial sequence
  SiRNA target sequence
atttataaaactaaaatttaatgt

SEQ ID NO: 174716 - DNA, 24 bp, Artificial sequence
  SiRNA target sequence
tttataaaactaaaatttaatgta

SEQ ID NO: 174717 - DNA, 24 bp, Artificial sequence
  SiRNA target sequence
ttataaaactaaaatttaatgtaa

SEQ ID NO: 174718 - DNA, 24 bp, Artificial sequence
  SiRNA target sequence
tataaaactaaaatttaatgtaat

SEQ ID NO: 174719 - DNA, 24 bp, Artificial sequence
  SiRNA target sequence
ataaaactaaaatttaatgtaata

SEQ ID NO: 174720 - DNA, 24 bp, Artificial sequence
  SiRNA target sequence
taaaactaaaatttaatgtaataa

SEQ ID NO: 174721 - DNA, 24 bp, Artificial sequence
  SiRNA target sequence
aaaactaaaatttaatgtaataaa

SEQ ID NO: 174722 - DNA, 24 bp, Artificial sequence
  SiRNA target sequence
aaactaaaatttaatgtaataaaa

SEQ ID NO: 174723 - DNA, 24 bp, Artificial sequence
  SiRNA target sequence
aactaaaatttaatgtaataaaag

SEQ ID NO: 174724 - DNA, 24 bp, Artificial sequence
  SiRNA target sequence
actaaaatttaatgtaataaaagt

SEQ ID NO: 174725 - DNA, 24 bp, Artificial sequence
  SiRNA target sequence
ctaaaatttaatgtaataaaagta

SEQ ID NO: 174726 - DNA, 24 bp, Artificial sequence
  SiRNA target sequence
taaaatttaatgtaataaaagtat

SEQ ID NO: 174727 - DNA, 24 bp, Artificial sequence
  SiRNA target sequence
aaaatttaatgtaataaaagtata

SEQ ID NO: 174728 - DNA, 24 bp, Artificial sequence
  SiRNA target sequence
aaatttaatgtaataaaagtatat

SEQ ID NO: 174729 - DNA, 24 bp, Artificial sequence
  SiRNA target sequence
aatttaatgtaataaaagtatatg

SEQ ID NO: 174730 - DNA, 24 bp, Artificial sequence
  SiRNA target sequence
atttaatgtaataaaagtatatga

SEQ ID NO: 174731 - DNA, 24 bp, Artificial sequence
  SiRNA target sequence
tttaatgtaataaaagtatatgat

SEQ ID NO: 174732 - DNA, 24 bp, Artificial sequence
  SiRNA target sequence
ttaatgtaataaaagtatatgata

SEQ ID NO: 174733 - DNA, 24 bp, Artificial sequence
  SiRNA target sequence
taatgtaataaaagtatatgatac

SEQ ID NO: 174734 - DNA, 24 bp, Artificial sequence
  SiRNA target sequence
aatgtaataaaagtatatgataca

SEQ ID NO: 174735 - DNA, 24 bp, Artificial sequence
  SiRNA target sequence
atgtaataaaagtatatgatacat

SEQ ID NO: 174736 - DNA, 24 bp, Artificial sequence
  SiRNA target sequence
tgtaataaaagtatatgatacatc

SEQ ID NO: 174737 - DNA, 24 bp, Artificial sequence
  SiRNA target sequence
gtaataaaagtatatgatacatct

SEQ ID NO: 174738 - DNA, 24 bp, Artificial sequence
  SiRNA target sequence
taataaaagtatatgatacatctt

SEQ ID NO: 174739 - DNA, 24 bp, Artificial sequence
  SiRNA target sequence
aataaaagtatatgatacatctta

SEQ ID NO: 174740 - DNA, 24 bp, Artificial sequence
  SiRNA target sequence
ataaaagtatatgatacatcttat

SEQ ID NO: 174741 - DNA, 24 bp, Artificial sequence
  SiRNA target sequence
taaaagtatatgatacatcttatg

SEQ ID NO: 174742 - DNA, 24 bp, Artificial sequence
  SiRNA target sequence
aaaagtatatgatacatcttatgt

SEQ ID NO: 174743 - DNA, 24 bp, Artificial sequence
  SiRNA target sequence
aaagtatatgatacatcttatgtc

SEQ ID NO: 174744 - DNA, 24 bp, Artificial sequence
  SiRNA target sequence
aagtatatgatacatcttatgtca

SEQ ID NO: 174745 - DNA, 24 bp, Artificial sequence
  SiRNA target sequence
agtatatgatacatcttatgtcaa

SEQ ID NO: 174746 - DNA, 24 bp, Artificial sequence
  SiRNA target sequence
gtatatgatacatcttatgtcaaa

SEQ ID NO: 174747 - DNA, 24 bp, Artificial sequence
  SiRNA target sequence
tatatgatacatcttatgtcaaaa

SEQ ID NO: 174748 - DNA, 24 bp, Artificial sequence
  SiRNA target sequence
atatgatacatcttatgtcaaaaa

SEQ ID NO: 174749 - DNA, 24 bp, Artificial sequence
  SiRNA target sequence
tatgatacatcttatgtcaaaaat

SEQ ID NO: 174750 - DNA, 24 bp, Artificial sequence
  SiRNA target sequence
atgatacatcttatgtcaaaaata

SEQ ID NO: 174751 - DNA, 24 bp, Artificial sequence
  SiRNA target sequence
tgatacatcttatgtcaaaaatat

SEQ ID NO: 174752 - DNA, 24 bp, Artificial sequence
  SiRNA target sequence
gatacatcttatgtcaaaaatatt

SEQ ID NO: 174753 - DNA, 24 bp, Artificial sequence
  SiRNA target sequence
atacatcttatgtcaaaaatattc

SEQ ID NO: 174754 - DNA, 24 bp, Artificial sequence
  SiRNA target sequence
tacatcttatgtcaaaaatattct

SEQ ID NO: 174755 - DNA, 24 bp, Artificial sequence
  SiRNA target sequence
acatcttatgtcaaaaatattctg

SEQ ID NO: 174756 - DNA, 24 bp, Artificial sequence
  SiRNA target sequence
catcttatgtcaaaaatattctgt

SEQ ID NO: 174757 - DNA, 24 bp, Artificial sequence
  SiRNA target sequence
atcttatgtcaaaaatattctgta

SEQ ID NO: 174758 - DNA, 24 bp, Artificial sequence
  SiRNA target sequence
tcttatgtcaaaaatattctgtat

SEQ ID NO: 174759 - DNA, 24 bp, Artificial sequence
  SiRNA target sequence
cttatgtcaaaaatattctgtatg

SEQ ID NO: 174760 - DNA, 24 bp, Artificial sequence
  SiRNA target sequence
ttatgtcaaaaatattctgtatga

SEQ ID NO: 174761 - DNA, 24 bp, Artificial sequence
  SiRNA target sequence
tatgtcaaaaatattctgtatgat

SEQ ID NO: 174762 - DNA, 24 bp, Artificial sequence
  SiRNA target sequence
atgtcaaaaatattctgtatgata

SEQ ID NO: 174763 - DNA, 24 bp, Artificial sequence
  SiRNA target sequence
tgtcaaaaatattctgtatgatag

SEQ ID NO: 174764 - DNA, 24 bp, Artificial sequence
  SiRNA target sequence
gtcaaaaatattctgtatgatagt

SEQ ID NO: 174765 - DNA, 24 bp, Artificial sequence
  SiRNA target sequence
tcaaaaatattctgtatgatagtg

SEQ ID NO: 174766 - DNA, 24 bp, Artificial sequence
  SiRNA target sequence
caaaaatattctgtatgatagtgt

SEQ ID NO: 174767 - DNA, 24 bp, Artificial sequence
  SiRNA target sequence
aaaaatattctgtatgatagtgtt

SEQ ID NO: 174768 - DNA, 24 bp, Artificial sequence
  SiRNA target sequence
aaaatattctgtatgatagtgttt

SEQ ID NO: 174769 - DNA, 24 bp, Artificial sequence
  SiRNA target sequence
aaatattctgtatgatagtgttta

SEQ ID NO: 174770 - DNA, 24 bp, Artificial sequence
  SiRNA target sequence
aatattctgtatgatagtgtttat

SEQ ID NO: 174771 - DNA, 24 bp, Artificial sequence
  SiRNA target sequence
atattctgtatgatagtgtttatg

SEQ ID NO: 174772 - DNA, 24 bp, Artificial sequence
  SiRNA target sequence
tattctgtatgatagtgtttatga

SEQ ID NO: 174773 - DNA, 24 bp, Artificial sequence
  SiRNA target sequence
attctgtatgatagtgtttatgag

SEQ ID NO: 174774 - DNA, 24 bp, Artificial sequence
  SiRNA target sequence
ttctgtatgatagtgtttatgagg

SEQ ID NO: 174775 - DNA, 24 bp, Artificial sequence
  SiRNA target sequence
tctgtatgatagtgtttatgagga

SEQ ID NO: 174776 - DNA, 24 bp, Artificial sequence
  SiRNA target sequence
ctgtatgatagtgtttatgaggaa

SEQ ID NO: 174777 - DNA, 24 bp, Artificial sequence
  SiRNA target sequence
tgtatgatagtgtttatgaggaaa

SEQ ID NO: 174778 - DNA, 24 bp, Artificial sequence
  SiRNA target sequence
gtatgatagtgtttatgaggaaag

SEQ ID NO: 174779 - DNA, 24 bp, Artificial sequence
  SiRNA target sequence
tatgatagtgtttatgaggaaagc

SEQ ID NO: 174780 - DNA, 24 bp, Artificial sequence
  SiRNA target sequence
atgatagtgtttatgaggaaagca

SEQ ID NO: 174781 - DNA, 24 bp, Artificial sequence
  SiRNA target sequence
tgatagtgtttatgaggaaagcac

SEQ ID NO: 174782 - DNA, 24 bp, Artificial sequence
  SiRNA target sequence
gatagtgtttatgaggaaagcacg

SEQ ID NO: 174783 - DNA, 24 bp, Artificial sequence
  SiRNA target sequence
atagtgtttatgaggaaagcacga

SEQ ID NO: 174784 - DNA, 24 bp, Artificial sequence
  SiRNA target sequence
tagtgtttatgaggaaagcacgag

SEQ ID NO: 174785 - DNA, 24 bp, Artificial sequence
  SiRNA target sequence
agtgtttatgaggaaagcacgaga

SEQ ID NO: 174786 - DNA, 24 bp, Artificial sequence
  SiRNA target sequence
gtgtttatgaggaaagcacgagag

SEQ ID NO: 174787 - DNA, 24 bp, Artificial sequence
  SiRNA target sequence
tgtttatgaggaaagcacgagaga

SEQ ID NO: 174788 - DNA, 24 bp, Artificial sequence
  SiRNA target sequence
gtttatgaggaaagcacgagagac

SEQ ID NO: 174789 - DNA, 24 bp, Artificial sequence
  SiRNA target sequence
tttatgaggaaagcacgagagaca

SEQ ID NO: 174790 - DNA, 24 bp, Artificial sequence
  SiRNA target sequence
ttatgaggaaagcacgagagacaa

SEQ ID NO: 174791 - DNA, 24 bp, Artificial sequence
  SiRNA target sequence
tatgaggaaagcacgagagacaaa

SEQ ID NO: 174792 - DNA, 24 bp, Artificial sequence
  SiRNA target sequence
atgaggaaagcacgagagacaaaa

SEQ ID NO: 174793 - DNA, 24 bp, Artificial sequence
  SiRNA target sequence
tgaggaaagcacgagagacaaaat

SEQ ID NO: 174794 - DNA, 24 bp, Artificial sequence
  SiRNA target sequence
gaggaaagcacgagagacaaaata

SEQ ID NO: 174795 - DNA, 24 bp, Artificial sequence
  SiRNA target sequence
aggaaagcacgagagacaaaataa

SEQ ID NO: 174796 - DNA, 24 bp, Artificial sequence
  SiRNA target sequence
ggaaagcacgagagacaaaataat

SEQ ID NO: 174797 - DNA, 24 bp, Artificial sequence
  SiRNA target sequence
gaaagcacgagagacaaaataata

SEQ ID NO: 174798 - DNA, 24 bp, Artificial sequence
  SiRNA target sequence
aaagcacgagagacaaaataataa

SEQ ID NO: 174799 - DNA, 24 bp, Artificial sequence
  SiRNA target sequence
aagcacgagagacaaaataataat

SEQ ID NO: 174800 - DNA, 24 bp, Artificial sequence
  SiRNA target sequence
agcacgagagacaaaataataata

SEQ ID NO: 174801 - DNA, 24 bp, Artificial sequence
  SiRNA target sequence
gcacgagagacaaaataataataa

SEQ ID NO: 174802 - DNA, 24 bp, Artificial sequence
  SiRNA target sequence
cacgagagacaaaataataataag

SEQ ID NO: 174803 - DNA, 24 bp, Artificial sequence
  SiRNA target sequence
acgagagacaaaataataataagt

SEQ ID NO: 174804 - DNA, 24 bp, Artificial sequence
  SiRNA target sequence
cgagagacaaaataataataagtg

SEQ ID NO: 174805 - DNA, 24 bp, Artificial sequence
  SiRNA target sequence
gagagacaaaataataataagtga

SEQ ID NO: 174806 - DNA, 24 bp, Artificial sequence
  SiRNA target sequence
agagacaaaataataataagtgac

SEQ ID NO: 174807 - DNA, 24 bp, Artificial sequence
  SiRNA target sequence
gagacaaaataataataagtgact

SEQ ID NO: 174808 - DNA, 24 bp, Artificial sequence
  SiRNA target sequence
agacaaaataataataagtgactg

SEQ ID NO: 174809 - DNA, 24 bp, Artificial sequence
  SiRNA target sequence
gacaaaataataataagtgactgt

SEQ ID NO: 174810 - DNA, 24 bp, Artificial sequence
  SiRNA target sequence
acaaaataataataagtgactgtc

SEQ ID NO: 174811 - DNA, 24 bp, Artificial sequence
  SiRNA target sequence
caaaataataataagtgactgtcc

SEQ ID NO: 174812 - DNA, 24 bp, Artificial sequence
  SiRNA target sequence
aaaataataataagtgactgtcct

SEQ ID NO: 174813 - DNA, 24 bp, Artificial sequence
  SiRNA target sequence
aaataataataagtgactgtcctg

SEQ ID NO: 174814 - DNA, 24 bp, Artificial sequence
  SiRNA target sequence
aataataataagtgactgtcctgg

SEQ ID NO: 174815 - DNA, 24 bp, Artificial sequence
  SiRNA target sequence
ataataataagtgactgtcctggg

SEQ ID NO: 174816 - DNA, 24 bp, Artificial sequence
  SiRNA target sequence
taataataagtgactgtcctggga

SEQ ID NO: 174817 - DNA, 24 bp, Artificial sequence
  SiRNA target sequence
aataataagtgactgtcctgggac

SEQ ID NO: 174818 - DNA, 24 bp, Artificial sequence
  SiRNA target sequence
ataataagtgactgtcctgggact

SEQ ID NO: 174819 - DNA, 24 bp, Artificial sequence
  SiRNA target sequence
taataagtgactgtcctgggactg

SEQ ID NO: 174820 - DNA, 24 bp, Artificial sequence
  SiRNA target sequence
aataagtgactgtcctgggactgt

SEQ ID NO: 174821 - DNA, 24 bp, Artificial sequence
  SiRNA target sequence
ataagtgactgtcctgggactgtt

SEQ ID NO: 174822 - DNA, 24 bp, Artificial sequence
  SiRNA target sequence
taagtgactgtcctgggactgttt

SEQ ID NO: 174823 - DNA, 24 bp, Artificial sequence
  SiRNA target sequence
aagtgactgtcctgggactgtttc

SEQ ID NO: 174824 - DNA, 24 bp, Artificial sequence
  SiRNA target sequence
agtgactgtcctgggactgtttca

SEQ ID NO: 174825 - DNA, 24 bp, Artificial sequence
  SiRNA target sequence
gtgactgtcctgggactgtttcat

SEQ ID NO: 174826 - DNA, 24 bp, Artificial sequence
  SiRNA target sequence
tgactgtcctgggactgtttcata

SEQ ID NO: 174827 - DNA, 24 bp, Artificial sequence
  SiRNA target sequence
gactgtcctgggactgtttcatat

SEQ ID NO: 174828 - DNA, 24 bp, Artificial sequence
  SiRNA target sequence
actgtcctgggactgtttcatata

SEQ ID NO: 174829 - DNA, 24 bp, Artificial sequence
  SiRNA target sequence
ctgtcctgggactgtttcatatat

SEQ ID NO: 174830 - DNA, 24 bp, Artificial sequence
  SiRNA target sequence
tgtcctgggactgtttcatatatt

SEQ ID NO: 174831 - DNA, 24 bp, Artificial sequence
  SiRNA target sequence
gtcctgggactgtttcatatattg

SEQ ID NO: 174832 - DNA, 24 bp, Artificial sequence
  SiRNA target sequence
tcctgggactgtttcatatattga

SEQ ID NO: 174833 - DNA, 24 bp, Artificial sequence
  SiRNA target sequence
cctgggactgtttcatatattgaa

SEQ ID NO: 174834 - DNA, 24 bp, Artificial sequence
  SiRNA target sequence
ctgggactgtttcatatattgaaa

SEQ ID NO: 174835 - DNA, 24 bp, Artificial sequence
  SiRNA target sequence
tgggactgtttcatatattgaaag

SEQ ID NO: 174836 - DNA, 24 bp, Artificial sequence
  SiRNA target sequence
gggactgtttcatatattgaaagg

SEQ ID NO: 174837 - DNA, 24 bp, Artificial sequence
  SiRNA target sequence
ggactgtttcatatattgaaaggc

SEQ ID NO: 174838 - DNA, 24 bp, Artificial sequence
  SiRNA target sequence
gactgtttcatatattgaaaggca

SEQ ID NO: 174839 - DNA, 24 bp, Artificial sequence
  SiRNA target sequence
actgtttcatatattgaaaggcaa

SEQ ID NO: 174840 - DNA, 24 bp, Artificial sequence
  SiRNA target sequence
ctgtttcatatattgaaaggcaag

SEQ ID NO: 174841 - DNA, 24 bp, Artificial sequence
  SiRNA target sequence
tgtttcatatattgaaaggcaagc

SEQ ID NO: 174842 - DNA, 24 bp, Artificial sequence
  SiRNA target sequence
gtttcatatattgaaaggcaagca

SEQ ID NO: 174843 - DNA, 24 bp, Artificial sequence
  SiRNA target sequence
tttcatatattgaaaggcaagcac

SEQ ID NO: 174844 - DNA, 24 bp, Artificial sequence
  SiRNA target sequence
ttcatatattgaaaggcaagcaca

SEQ ID NO: 174845 - DNA, 24 bp, Artificial sequence
  SiRNA target sequence
tcatatattgaaaggcaagcacac

SEQ ID NO: 174846 - DNA, 24 bp, Artificial sequence
  SiRNA target sequence
catatattgaaaggcaagcacacc

SEQ ID NO: 174847 - DNA, 24 bp, Artificial sequence
  SiRNA target sequence
atatattgaaaggcaagcacacca

SEQ ID NO: 174848 - DNA, 24 bp, Artificial sequence
  SiRNA target sequence
tatattgaaaggcaagcacaccat

SEQ ID NO: 174849 - DNA, 24 bp, Artificial sequence
  SiRNA target sequence
atattgaaaggcaagcacaccatt

SEQ ID NO: 174850 - DNA, 24 bp, Artificial sequence
  SiRNA target sequence
tattgaaaggcaagcacaccattt

SEQ ID NO: 174851 - DNA, 24 bp, Artificial sequence
  SiRNA target sequence
attgaaaggcaagcacaccattta

SEQ ID NO: 174852 - DNA, 24 bp, Artificial sequence
  SiRNA target sequence
ttgaaaggcaagcacaccatttaa

SEQ ID NO: 174853 - DNA, 24 bp, Artificial sequence
  SiRNA target sequence
tgaaaggcaagcacaccatttaat

SEQ ID NO: 174854 - DNA, 24 bp, Artificial sequence
  SiRNA target sequence
gaaaggcaagcacaccatttaatt

SEQ ID NO: 174855 - DNA, 24 bp, Artificial sequence
  SiRNA target sequence
aaaggcaagcacaccatttaattg

SEQ ID NO: 174856 - DNA, 24 bp, Artificial sequence
  SiRNA target sequence
aaggcaagcacaccatttaattga

SEQ ID NO: 174857 - DNA, 24 bp, Artificial sequence
  SiRNA target sequence
aggcaagcacaccatttaattgaa

SEQ ID NO: 174858 - DNA, 24 bp, Artificial sequence
  SiRNA target sequence
ggcaagcacaccatttaattgaat

SEQ ID NO: 174859 - DNA, 24 bp, Artificial sequence
  SiRNA target sequence
gcaagcacaccatttaattgaata

SEQ ID NO: 174860 - DNA, 24 bp, Artificial sequence
  SiRNA target sequence
caagcacaccatttaattgaatat

SEQ ID NO: 174861 - DNA, 24 bp, Artificial sequence
  SiRNA target sequence
aagcacaccatttaattgaatatt

SEQ ID NO: 174862 - DNA, 24 bp, Artificial sequence
  SiRNA target sequence
agcacaccatttaattgaatattt

SEQ ID NO: 174863 - DNA, 24 bp, Artificial sequence
  SiRNA target sequence
gcacaccatttaattgaatattta

SEQ ID NO: 174864 - DNA, 24 bp, Artificial sequence
  SiRNA target sequence
cacaccatttaattgaatatttat

SEQ ID NO: 174865 - DNA, 24 bp, Artificial sequence
  SiRNA target sequence
acaccatttaattgaatatttatc

SEQ ID NO: 174866 - DNA, 24 bp, Artificial sequence
  SiRNA target sequence
caccatttaattgaatatttatct

SEQ ID NO: 174867 - DNA, 24 bp, Artificial sequence
  SiRNA target sequence
accatttaattgaatatttatctg

SEQ ID NO: 174868 - DNA, 24 bp, Artificial sequence
  SiRNA target sequence
ccatttaattgaatatttatctgt

SEQ ID NO: 174869 - DNA, 24 bp, Artificial sequence
  SiRNA target sequence
catttaattgaatatttatctgtt

SEQ ID NO: 174870 - DNA, 24 bp, Artificial sequence
  SiRNA target sequence
atttaattgaatatttatctgtta

SEQ ID NO: 174871 - DNA, 24 bp, Artificial sequence
  SiRNA target sequence
tttaattgaatatttatctgttac

SEQ ID NO: 174872 - DNA, 24 bp, Artificial sequence
  SiRNA target sequence
ttaattgaatatttatctgttact

SEQ ID NO: 174873 - DNA, 24 bp, Artificial sequence
  SiRNA target sequence
taattgaatatttatctgttactt

SEQ ID NO: 174874 - DNA, 24 bp, Artificial sequence
  SiRNA target sequence
aattgaatatttatctgttacttc

SEQ ID NO: 174875 - DNA, 24 bp, Artificial sequence
  SiRNA target sequence
attgaatatttatctgttacttct

SEQ ID NO: 174876 - DNA, 24 bp, Artificial sequence
  SiRNA target sequence
ttgaatatttatctgttacttcta

SEQ ID NO: 174877 - DNA, 24 bp, Artificial sequence
  SiRNA target sequence
tgaatatttatctgttacttctac

SEQ ID NO: 174878 - DNA, 24 bp, Artificial sequence
  SiRNA target sequence
gaatatttatctgttacttctaca

SEQ ID NO: 174879 - DNA, 24 bp, Artificial sequence
  SiRNA target sequence
aatatttatctgttacttctacac

SEQ ID NO: 174880 - DNA, 24 bp, Artificial sequence
  SiRNA target sequence
atatttatctgttacttctacaca

SEQ ID NO: 174881 - DNA, 24 bp, Artificial sequence
  SiRNA target sequence
tatttatctgttacttctacacaa

SEQ ID NO: 174882 - DNA, 24 bp, Artificial sequence
  SiRNA target sequence
atttatctgttacttctacacaac

SEQ ID NO: 174883 - DNA, 24 bp, Artificial sequence
  SiRNA target sequence
tttatctgttacttctacacaaca

SEQ ID NO: 174884 - DNA, 24 bp, Artificial sequence
  SiRNA target sequence
ttatctgttacttctacacaacaa

SEQ ID NO: 174885 - DNA, 24 bp, Artificial sequence
  SiRNA target sequence
tatctgttacttctacacaacaac

SEQ ID NO: 174886 - DNA, 24 bp, Artificial sequence
  SiRNA target sequence
atctgttacttctacacaacaaca

SEQ ID NO: 174887 - DNA, 24 bp, Artificial sequence
  SiRNA target sequence
tctgttacttctacacaacaacaa

SEQ ID NO: 174888 - DNA, 24 bp, Artificial sequence
  SiRNA target sequence
ctgttacttctacacaacaacaag

SEQ ID NO: 174889 - DNA, 24 bp, Artificial sequence
  SiRNA target sequence
tgttacttctacacaacaacaagc

SEQ ID NO: 174890 - DNA, 24 bp, Artificial sequence
  SiRNA target sequence
gttacttctacacaacaacaagcc

SEQ ID NO: 174891 - DNA, 24 bp, Artificial sequence
  SiRNA target sequence
ttacttctacacaacaacaagcca

SEQ ID NO: 174892 - DNA, 24 bp, Artificial sequence
  SiRNA target sequence
tacttctacacaacaacaagccat

SEQ ID NO: 174893 - DNA, 24 bp, Artificial sequence
  SiRNA target sequence
acttctacacaacaacaagccata

SEQ ID NO: 174894 - DNA, 24 bp, Artificial sequence
  SiRNA target sequence
cttctacacaacaacaagccataa

SEQ ID NO: 174895 - DNA, 24 bp, Artificial sequence
  SiRNA target sequence
ttctacacaacaacaagccataaa

SEQ ID NO: 174896 - DNA, 24 bp, Artificial sequence
  SiRNA target sequence
tctacacaacaacaagccataaag

SEQ ID NO: 174897 - DNA, 24 bp, Artificial sequence
  SiRNA target sequence
ctacacaacaacaagccataaagc

SEQ ID NO: 174898 - DNA, 24 bp, Artificial sequence
  SiRNA target sequence
tacacaacaacaagccataaagct

SEQ ID NO: 174899 - DNA, 24 bp, Artificial sequence
  SiRNA target sequence
acacaacaacaagccataaagcta

SEQ ID NO: 174900 - DNA, 24 bp, Artificial sequence
  SiRNA target sequence
cacaacaacaagccataaagctac

SEQ ID NO: 174901 - DNA, 24 bp, Artificial sequence
  SiRNA target sequence
acaacaacaagccataaagctact

SEQ ID NO: 174902 - DNA, 24 bp, Artificial sequence
  SiRNA target sequence
caacaacaagccataaagctactt

SEQ ID NO: 174903 - DNA, 24 bp, Artificial sequence
  SiRNA target sequence
aacaacaagccataaagctacttg

SEQ ID NO: 174904 - DNA, 24 bp, Artificial sequence
  SiRNA target sequence
acaacaagccataaagctacttgc

SEQ ID NO: 174905 - DNA, 24 bp, Artificial sequence
  SiRNA target sequence
caacaagccataaagctacttgct

SEQ ID NO: 174906 - DNA, 24 bp, Artificial sequence
  SiRNA target sequence
aacaagccataaagctacttgctc

SEQ ID NO: 174907 - DNA, 24 bp, Artificial sequence
  SiRNA target sequence
acaagccataaagctacttgctca

SEQ ID NO: 174908 - DNA, 24 bp, Artificial sequence
  SiRNA target sequence
caagccataaagctacttgctcag

SEQ ID NO: 174909 - DNA, 24 bp, Artificial sequence
  SiRNA target sequence
aagccataaagctacttgctcagg

SEQ ID NO: 174910 - DNA, 24 bp, Artificial sequence
  SiRNA target sequence
agccataaagctacttgctcaggg

SEQ ID NO: 174911 - DNA, 24 bp, Artificial sequence
  SiRNA target sequence
gccataaagctacttgctcagggg

SEQ ID NO: 174912 - DNA, 24 bp, Artificial sequence
  SiRNA target sequence
ccataaagctacttgctcaggggc

SEQ ID NO: 174913 - DNA, 24 bp, Artificial sequence
  SiRNA target sequence
cataaagctacttgctcaggggcg

SEQ ID NO: 174914 - DNA, 24 bp, Artificial sequence
  SiRNA target sequence
ataaagctacttgctcaggggcga

SEQ ID NO: 174915 - DNA, 24 bp, Artificial sequence
  SiRNA target sequence
taaagctacttgctcaggggcgaa

SEQ ID NO: 174916 - DNA, 24 bp, Artificial sequence
  SiRNA target sequence
aaagctacttgctcaggggcgaag

SEQ ID NO: 174917 - DNA, 24 bp, Artificial sequence
  SiRNA target sequence
aagctacttgctcaggggcgaagt

SEQ ID NO: 174918 - DNA, 24 bp, Artificial sequence
  SiRNA target sequence
agctacttgctcaggggcgaagta

SEQ ID NO: 174919 - DNA, 24 bp, Artificial sequence
  SiRNA target sequence
gctacttgctcaggggcgaagtat

SEQ ID NO: 174920 - DNA, 24 bp, Artificial sequence
  SiRNA target sequence
ctacttgctcaggggcgaagtata

SEQ ID NO: 174921 - DNA, 24 bp, Artificial sequence
  SiRNA target sequence
tacttgctcaggggcgaagtataa

SEQ ID NO: 174922 - DNA, 24 bp, Artificial sequence
  SiRNA target sequence
acttgctcaggggcgaagtataag

SEQ ID NO: 174923 - DNA, 24 bp, Artificial sequence
  SiRNA target sequence
cttgctcaggggcgaagtataagt

SEQ ID NO: 174924 - DNA, 24 bp, Artificial sequence
  SiRNA target sequence
ttgctcaggggcgaagtataagtg

SEQ ID NO: 174925 - DNA, 24 bp, Artificial sequence
  SiRNA target sequence
tgctcaggggcgaagtataagtgt

SEQ ID NO: 174926 - DNA, 24 bp, Artificial sequence
  SiRNA target sequence
gctcaggggcgaagtataagtgtc

SEQ ID NO: 174927 - DNA, 24 bp, Artificial sequence
  SiRNA target sequence
ctcaggggcgaagtataagtgtca

SEQ ID NO: 174928 - DNA, 24 bp, Artificial sequence
  SiRNA target sequence
tcaggggcgaagtataagtgtcat

SEQ ID NO: 174929 - DNA, 24 bp, Artificial sequence
  SiRNA target sequence
caggggcgaagtataagtgtcata

SEQ ID NO: 174930 - DNA, 24 bp, Artificial sequence
  SiRNA target sequence
aggggcgaagtataagtgtcatac

SEQ ID NO: 174931 - DNA, 24 bp, Artificial sequence
  SiRNA target sequence
ggggcgaagtataagtgtcataca

SEQ ID NO: 174932 - DNA, 24 bp, Artificial sequence
  SiRNA target sequence
gggcgaagtataagtgtcatacag

SEQ ID NO: 174933 - DNA, 24 bp, Artificial sequence
  SiRNA target sequence
ggcgaagtataagtgtcatacagt

SEQ ID NO: 174934 - DNA, 24 bp, Artificial sequence
  SiRNA target sequence
gcgaagtataagtgtcatacagtg

SEQ ID NO: 174935 - DNA, 24 bp, Artificial sequence
  SiRNA target sequence
cgaagtataagtgtcatacagtgc

SEQ ID NO: 174936 - DNA, 24 bp, Artificial sequence
  SiRNA target sequence
gaagtataagtgtcatacagtgct

SEQ ID NO: 174937 - DNA, 24 bp, Artificial sequence
  SiRNA target sequence
aagtataagtgtcatacagtgcta

SEQ ID NO: 174938 - DNA, 24 bp, Artificial sequence
  SiRNA target sequence
agtataagtgtcatacagtgctat

SEQ ID NO: 174939 - DNA, 24 bp, Artificial sequence
  SiRNA target sequence
gtataagtgtcatacagtgctatg

SEQ ID NO: 174940 - DNA, 24 bp, Artificial sequence
  SiRNA target sequence
tataagtgtcatacagtgctatga

SEQ ID NO: 174941 - DNA, 24 bp, Artificial sequence
  SiRNA target sequence
ataagtgtcatacagtgctatgat

SEQ ID NO: 174942 - DNA, 24 bp, Artificial sequence
  SiRNA target sequence
taagtgtcatacagtgctatgata

SEQ ID NO: 174943 - DNA, 24 bp, Artificial sequence
  SiRNA target sequence
aagtgtcatacagtgctatgataa

SEQ ID NO: 174944 - DNA, 24 bp, Artificial sequence
  SiRNA target sequence
agtgtcatacagtgctatgataaa

SEQ ID NO: 174945 - DNA, 24 bp, Artificial sequence
  SiRNA target sequence
gtgtcatacagtgctatgataaat

SEQ ID NO: 174946 - DNA, 24 bp, Artificial sequence
  SiRNA target sequence
tgtcatacagtgctatgataaatt

SEQ ID NO: 174947 - DNA, 24 bp, Artificial sequence
  SiRNA target sequence
gtcatacagtgctatgataaattt

SEQ ID NO: 174948 - DNA, 24 bp, Artificial sequence
  SiRNA target sequence
tcatacagtgctatgataaatttt

SEQ ID NO: 174949 - DNA, 24 bp, Artificial sequence
  SiRNA target sequence
catacagtgctatgataaattttt

SEQ ID NO: 174950 - DNA, 24 bp, Artificial sequence
  SiRNA target sequence
atacagtgctatgataaattttta

SEQ ID NO: 174951 - DNA, 24 bp, Artificial sequence
  SiRNA target sequence
tacagtgctatgataaatttttag

SEQ ID NO: 174952 - DNA, 24 bp, Artificial sequence
  SiRNA target sequence
acagtgctatgataaatttttaga

SEQ ID NO: 174953 - DNA, 24 bp, Artificial sequence
  SiRNA target sequence
cagtgctatgataaatttttagag

SEQ ID NO: 174954 - DNA, 24 bp, Artificial sequence
  SiRNA target sequence
agtgctatgataaatttttagaga

SEQ ID NO: 174955 - DNA, 24 bp, Artificial sequence
  SiRNA target sequence
gtgctatgataaatttttagagaa

SEQ ID NO: 174956 - DNA, 24 bp, Artificial sequence
  SiRNA target sequence
tgctatgataaatttttagagaat

SEQ ID NO: 174957 - DNA, 24 bp, Artificial sequence
  SiRNA target sequence
gctatgataaatttttagagaata

SEQ ID NO: 174958 - DNA, 24 bp, Artificial sequence
  SiRNA target sequence
ctatgataaatttttagagaatag

SEQ ID NO: 174959 - DNA, 24 bp, Artificial sequence
  SiRNA target sequence
tatgataaatttttagagaatagc

SEQ ID NO: 174960 - DNA, 24 bp, Artificial sequence
  SiRNA target sequence
atgataaatttttagagaatagcg

SEQ ID NO: 174961 - DNA, 24 bp, Artificial sequence
  SiRNA target sequence
tgataaatttttagagaatagcga

SEQ ID NO: 174962 - DNA, 24 bp, Artificial sequence
  SiRNA target sequence
gataaatttttagagaatagcgat

SEQ ID NO: 174963 - DNA, 24 bp, Artificial sequence
  SiRNA target sequence
ataaatttttagagaatagcgatg

SEQ ID NO: 174964 - DNA, 24 bp, Artificial sequence
  SiRNA target sequence
taaatttttagagaatagcgatga

SEQ ID NO: 174965 - DNA, 24 bp, Artificial sequence
  SiRNA target sequence
aaatttttagagaatagcgatgat

SEQ ID NO: 174966 - DNA, 24 bp, Artificial sequence
  SiRNA target sequence
aatttttagagaatagcgatgatg

SEQ ID NO: 174967 - DNA, 24 bp, Artificial sequence
  SiRNA target sequence
atttttagagaatagcgatgatgt

SEQ ID NO: 174968 - DNA, 24 bp, Artificial sequence
  SiRNA target sequence
tttttagagaatagcgatgatgtt

SEQ ID NO: 174969 - DNA, 24 bp, Artificial sequence
  SiRNA target sequence
ttttagagaatagcgatgatgttt

SEQ ID NO: 174970 - DNA, 24 bp, Artificial sequence
  SiRNA target sequence
tttagagaatagcgatgatgtttt

SEQ ID NO: 174971 - DNA, 24 bp, Artificial sequence
  SiRNA target sequence
ttagagaatagcgatgatgtttta

SEQ ID NO: 174972 - DNA, 24 bp, Artificial sequence
  SiRNA target sequence
tagagaatagcgatgatgttttaa

SEQ ID NO: 174973 - DNA, 24 bp, Artificial sequence
  SiRNA target sequence
agagaatagcgatgatgttttaac

SEQ ID NO: 174974 - DNA, 24 bp, Artificial sequence
  SiRNA target sequence
gagaatagcgatgatgttttaact

SEQ ID NO: 174975 - DNA, 24 bp, Artificial sequence
  SiRNA target sequence
agaatagcgatgatgttttaacta

SEQ ID NO: 174976 - DNA, 24 bp, Artificial sequence
  SiRNA target sequence
gaatagcgatgatgttttaactac

SEQ ID NO: 174977 - DNA, 24 bp, Artificial sequence
  SiRNA target sequence
aatagcgatgatgttttaactacc

SEQ ID NO: 174978 - DNA, 24 bp, Artificial sequence
  SiRNA target sequence
atagcgatgatgttttaactacct

SEQ ID NO: 174979 - DNA, 24 bp, Artificial sequence
  SiRNA target sequence
tagcgatgatgttttaactaccta

SEQ ID NO: 174980 - DNA, 24 bp, Artificial sequence
  SiRNA target sequence
agcgatgatgttttaactacctat

SEQ ID NO: 174981 - DNA, 24 bp, Artificial sequence
  SiRNA target sequence
gcgatgatgttttaactacctatg

SEQ ID NO: 174982 - DNA, 24 bp, Artificial sequence
  SiRNA target sequence
cgatgatgttttaactacctatga

SEQ ID NO: 174983 - DNA, 24 bp, Artificial sequence
  SiRNA target sequence
gatgatgttttaactacctatgat

SEQ ID NO: 174984 - DNA, 24 bp, Artificial sequence
  SiRNA target sequence
atgatgttttaactacctatgatt

SEQ ID NO: 174985 - DNA, 24 bp, Artificial sequence
  SiRNA target sequence
tgatgttttaactacctatgattt

SEQ ID NO: 174986 - DNA, 24 bp, Artificial sequence
  SiRNA target sequence
gatgttttaactacctatgatttt

SEQ ID NO: 174987 - DNA, 24 bp, Artificial sequence
  SiRNA target sequence
atgttttaactacctatgattttt

SEQ ID NO: 174988 - DNA, 24 bp, Artificial sequence
  SiRNA target sequence
tgttttaactacctatgattttta

SEQ ID NO: 174989 - DNA, 24 bp, Artificial sequence
  SiRNA target sequence
gttttaactacctatgatttttat

SEQ ID NO: 174990 - DNA, 24 bp, Artificial sequence
  SiRNA target sequence
ttttaactacctatgatttttata

SEQ ID NO: 174991 - DNA, 24 bp, Artificial sequence
  SiRNA target sequence
tttaactacctatgatttttataa

SEQ ID NO: 174992 - DNA, 24 bp, Artificial sequence
  SiRNA target sequence
ttaactacctatgatttttataaa

SEQ ID NO: 174993 - DNA, 24 bp, Artificial sequence
  SiRNA target sequence
taactacctatgatttttataaaa

SEQ ID NO: 174994 - DNA, 24 bp, Artificial sequence
  SiRNA target sequence
aactacctatgatttttataaaat

SEQ ID NO: 174995 - DNA, 24 bp, Artificial sequence
  SiRNA target sequence
actacctatgatttttataaaatg

SEQ ID NO: 174996 - DNA, 24 bp, Artificial sequence
  SiRNA target sequence
ctacctatgatttttataaaatga

SEQ ID NO: 174997 - DNA, 24 bp, Artificial sequence
  SiRNA target sequence
tacctatgatttttataaaatgat

SEQ ID NO: 174998 - DNA, 24 bp, Artificial sequence
  SiRNA target sequence
acctatgatttttataaaatgatt

SEQ ID NO: 174999 - DNA, 24 bp, Artificial sequence
  SiRNA target sequence
cctatgatttttataaaatgattt

SEQ ID NO: 175000 - DNA, 24 bp, Artificial sequence
  SiRNA target sequence
ctatgatttttataaaatgatttt

SEQ ID NO: 175001 - DNA, 24 bp, Artificial sequence
  SiRNA target sequence
tatgatttttataaaatgattttg

SEQ ID NO: 175002 - DNA, 24 bp, Artificial sequence
  SiRNA target sequence
atgatttttataaaatgattttgg

SEQ ID NO: 175003 - DNA, 24 bp, Artificial sequence
  SiRNA target sequence
tgatttttataaaatgattttgga

SEQ ID NO: 175004 - DNA, 24 bp, Artificial sequence
  SiRNA target sequence
gatttttataaaatgattttggat

SEQ ID NO: 175005 - DNA, 24 bp, Artificial sequence
  SiRNA target sequence
atttttataaaatgattttggatc

SEQ ID NO: 175006 - DNA, 24 bp, Artificial sequence
  SiRNA target sequence
tttttataaaatgattttggatct

SEQ ID NO: 175007 - DNA, 24 bp, Artificial sequence
  SiRNA target sequence
ttttataaaatgattttggatcta

SEQ ID NO: 175008 - DNA, 24 bp, Artificial sequence
  SiRNA target sequence
tttataaaatgattttggatctag

SEQ ID NO: 175009 - DNA, 24 bp, Artificial sequence
  SiRNA target sequence
ttataaaatgattttggatctagg

SEQ ID NO: 175010 - DNA, 24 bp, Artificial sequence
  SiRNA target sequence
tataaaatgattttggatctagga

SEQ ID NO: 175011 - DNA, 24 bp, Artificial sequence
  SiRNA target sequence
ataaaatgattttggatctaggat

SEQ ID NO: 175012 - DNA, 24 bp, Artificial sequence
  SiRNA target sequence
taaaatgattttggatctaggatt

SEQ ID NO: 175013 - DNA, 24 bp, Artificial sequence
  SiRNA target sequence
aaaatgattttggatctaggattt

SEQ ID NO: 175014 - DNA, 24 bp, Artificial sequence
  SiRNA target sequence
aaatgattttggatctaggatttt

SEQ ID NO: 175015 - DNA, 24 bp, Artificial sequence
  SiRNA target sequence
aatgattttggatctaggattttt

SEQ ID NO: 175016 - DNA, 24 bp, Artificial sequence
  SiRNA target sequence
atgattttggatctaggattttta

SEQ ID NO: 175017 - DNA, 24 bp, Artificial sequence
  SiRNA target sequence
tgattttggatctaggatttttac

SEQ ID NO: 175018 - DNA, 24 bp, Artificial sequence
  SiRNA target sequence
gattttggatctaggatttttaca

SEQ ID NO: 175019 - DNA, 24 bp, Artificial sequence
  SiRNA target sequence
attttggatctaggatttttacag

SEQ ID NO: 175020 - DNA, 24 bp, Artificial sequence
  SiRNA target sequence
ttttggatctaggatttttacagc

SEQ ID NO: 175021 - DNA, 24 bp, Artificial sequence
  SiRNA target sequence
tttggatctaggatttttacagca

SEQ ID NO: 175022 - DNA, 24 bp, Artificial sequence
  SiRNA target sequence
ttggatctaggatttttacagcat

SEQ ID NO: 175023 - DNA, 24 bp, Artificial sequence
  SiRNA target sequence
tggatctaggatttttacagcata

SEQ ID NO: 175024 - DNA, 24 bp, Artificial sequence
  SiRNA target sequence
ggatctaggatttttacagcataa

SEQ ID NO: 175025 - DNA, 24 bp, Artificial sequence
  SiRNA target sequence
gatctaggatttttacagcataat

SEQ ID NO: 175026 - DNA, 24 bp, Artificial sequence
  SiRNA target sequence
atctaggatttttacagcataatt

SEQ ID NO: 175027 - DNA, 24 bp, Artificial sequence
  SiRNA target sequence
tctaggatttttacagcataattt

SEQ ID NO: 175028 - DNA, 24 bp, Artificial sequence
  SiRNA target sequence
ctaggatttttacagcataatttt

SEQ ID NO: 175029 - DNA, 24 bp, Artificial sequence
  SiRNA target sequence
taggatttttacagcataatttta

SEQ ID NO: 175030 - DNA, 24 bp, Artificial sequence
  SiRNA target sequence
aggatttttacagcataattttat

SEQ ID NO: 175031 - DNA, 24 bp, Artificial sequence
  SiRNA target sequence
ggatttttacagcataattttatt

SEQ ID NO: 175032 - DNA, 24 bp, Artificial sequence
  SiRNA target sequence
gatttttacagcataattttatta

SEQ ID NO: 175033 - DNA, 24 bp, Artificial sequence
  SiRNA target sequence
atttttacagcataattttattaa

SEQ ID NO: 175034 - DNA, 24 bp, Artificial sequence
  SiRNA target sequence
tttttacagcataattttattaaa

SEQ ID NO: 175035 - DNA, 24 bp, Artificial sequence
  SiRNA target sequence
ttttacagcataattttattaaag

SEQ ID NO: 175036 - DNA, 24 bp, Artificial sequence
  SiRNA target sequence
tttacagcataattttattaaagg

SEQ ID NO: 175037 - DNA, 24 bp, Artificial sequence
  SiRNA target sequence
ttacagcataattttattaaagga

SEQ ID NO: 175038 - DNA, 24 bp, Artificial sequence
  SiRNA target sequence
tacagcataattttattaaaggaa

SEQ ID NO: 175039 - DNA, 24 bp, Artificial sequence
  SiRNA target sequence
acagcataattttattaaaggaac

SEQ ID NO: 175040 - DNA, 24 bp, Artificial sequence
  SiRNA target sequence
cagcataattttattaaaggaacc

SEQ ID NO: 175041 - DNA, 24 bp, Artificial sequence
  SiRNA target sequence
agcataattttattaaaggaacct

SEQ ID NO: 175042 - DNA, 24 bp, Artificial sequence
  SiRNA target sequence
gcataattttattaaaggaacctg

SEQ ID NO: 175043 - DNA, 24 bp, Artificial sequence
  SiRNA target sequence
cataattttattaaaggaacctgt

SEQ ID NO: 175044 - DNA, 24 bp, Artificial sequence
  SiRNA target sequence
ataattttattaaaggaacctgtg

SEQ ID NO: 175045 - DNA, 24 bp, Artificial sequence
  SiRNA target sequence
taattttattaaaggaacctgtga

SEQ ID NO: 175046 - DNA, 24 bp, Artificial sequence
  SiRNA target sequence
aattttattaaaggaacctgtgag

SEQ ID NO: 175047 - DNA, 24 bp, Artificial sequence
  SiRNA target sequence
attttattaaaggaacctgtgaga

SEQ ID NO: 175048 - DNA, 24 bp, Artificial sequence
  SiRNA target sequence
ttttattaaaggaacctgtgagaa

SEQ ID NO: 175049 - DNA, 24 bp, Artificial sequence
  SiRNA target sequence
tttattaaaggaacctgtgagaaa

SEQ ID NO: 175050 - DNA, 24 bp, Artificial sequence
  SiRNA target sequence
ttattaaaggaacctgtgagaaat

SEQ ID NO: 175051 - DNA, 24 bp, Artificial sequence
  SiRNA target sequence
tattaaaggaacctgtgagaaatg

SEQ ID NO: 175052 - DNA, 24 bp, Artificial sequence
  SiRNA target sequence
attaaaggaacctgtgagaaatgg

SEQ ID NO: 175053 - DNA, 24 bp, Artificial sequence
  SiRNA target sequence
ttaaaggaacctgtgagaaatggg

SEQ ID NO: 175054 - DNA, 24 bp, Artificial sequence
  SiRNA target sequence
taaaggaacctgtgagaaatggga

SEQ ID NO: 175055 - DNA, 24 bp, Artificial sequence
  SiRNA target sequence
aaaggaacctgtgagaaatgggag

SEQ ID NO: 175056 - DNA, 24 bp, Artificial sequence
  SiRNA target sequence
aaggaacctgtgagaaatgggaga

SEQ ID NO: 175057 - DNA, 24 bp, Artificial sequence
  SiRNA target sequence
aggaacctgtgagaaatgggagaa

SEQ ID NO: 175058 - DNA, 24 bp, Artificial sequence
  SiRNA target sequence
ggaacctgtgagaaatgggagaag

SEQ ID NO: 175059 - DNA, 24 bp, Artificial sequence
  SiRNA target sequence
gaacctgtgagaaatgggagaagt

SEQ ID NO: 175060 - DNA, 24 bp, Artificial sequence
  SiRNA target sequence
aacctgtgagaaatgggagaagtg

SEQ ID NO: 175061 - DNA, 24 bp, Artificial sequence
  SiRNA target sequence
acctgtgagaaatgggagaagtgt

SEQ ID NO: 175062 - DNA, 24 bp, Artificial sequence
  SiRNA target sequence
cctgtgagaaatgggagaagtgta

SEQ ID NO: 175063 - DNA, 24 bp, Artificial sequence
  SiRNA target sequence
ctgtgagaaatgggagaagtgtac

SEQ ID NO: 175064 - DNA, 24 bp, Artificial sequence
  SiRNA target sequence
tgtgagaaatgggagaagtgtact

SEQ ID NO: 175065 - DNA, 24 bp, Artificial sequence
  SiRNA target sequence
gtgagaaatgggagaagtgtacta

SEQ ID NO: 175066 - DNA, 24 bp, Artificial sequence
  SiRNA target sequence
tgagaaatgggagaagtgtactat

SEQ ID NO: 175067 - DNA, 24 bp, Artificial sequence
  SiRNA target sequence
gagaaatgggagaagtgtactatt

SEQ ID NO: 175068 - DNA, 24 bp, Artificial sequence
  SiRNA target sequence
agaaatgggagaagtgtactattg

SEQ ID NO: 175069 - DNA, 24 bp, Artificial sequence
  SiRNA target sequence
gaaatgggagaagtgtactattgg

SEQ ID NO: 175070 - DNA, 24 bp, Artificial sequence
  SiRNA target sequence
aaatgggagaagtgtactattgga

SEQ ID NO: 175071 - DNA, 24 bp, Artificial sequence
  SiRNA target sequence
aatgggagaagtgtactattggat

SEQ ID NO: 175072 - DNA, 24 bp, Artificial sequence
  SiRNA target sequence
atgggagaagtgtactattggata

SEQ ID NO: 175073 - DNA, 24 bp, Artificial sequence
  SiRNA target sequence
tgggagaagtgtactattggatat

SEQ ID NO: 175074 - DNA, 24 bp, Artificial sequence
  SiRNA target sequence
gggagaagtgtactattggatatc

SEQ ID NO: 175075 - DNA, 24 bp, Artificial sequence
  SiRNA target sequence
ggagaagtgtactattggatatca

SEQ ID NO: 175076 - DNA, 24 bp, Artificial sequence
  SiRNA target sequence
gagaagtgtactattggatatcat

SEQ ID NO: 175077 - DNA, 24 bp, Artificial sequence
  SiRNA target sequence
agaagtgtactattggatatcatt

SEQ ID NO: 175078 - DNA, 24 bp, Artificial sequence
  SiRNA target sequence
gaagtgtactattggatatcatta

SEQ ID NO: 175079 - DNA, 24 bp, Artificial sequence
  SiRNA target sequence
aagtgtactattggatatcattat

SEQ ID NO: 175080 - DNA, 24 bp, Artificial sequence
  SiRNA target sequence
agtgtactattggatatcattatg

SEQ ID NO: 175081 - DNA, 24 bp, Artificial sequence
  SiRNA target sequence
gtgtactattggatatcattatgg

SEQ ID NO: 175082 - DNA, 24 bp, Artificial sequence
  SiRNA target sequence
tgtactattggatatcattatgga

SEQ ID NO: 175083 - DNA, 24 bp, Artificial sequence
  SiRNA target sequence
gtactattggatatcattatggat

SEQ ID NO: 175084 - DNA, 24 bp, Artificial sequence
  SiRNA target sequence
tactattggatatcattatggata

SEQ ID NO: 175085 - DNA, 24 bp, Artificial sequence
  SiRNA target sequence
actattggatatcattatggatat

SEQ ID NO: 175086 - DNA, 24 bp, Artificial sequence
  SiRNA target sequence
ctattggatatcattatggatatt

SEQ ID NO: 175087 - DNA, 24 bp, Artificial sequence
  SiRNA target sequence
tattggatatcattatggatattt

SEQ ID NO: 175088 - DNA, 24 bp, Artificial sequence
  SiRNA target sequence
attggatatcattatggatattta

SEQ ID NO: 175089 - DNA, 24 bp, Artificial sequence
  SiRNA target sequence
ttggatatcattatggatatttag

SEQ ID NO: 175090 - DNA, 24 bp, Artificial sequence
  SiRNA target sequence
tggatatcattatggatatttaga

SEQ ID NO: 175091 - DNA, 24 bp, Artificial sequence
  SiRNA target sequence
ggatatcattatggatatttagaa

SEQ ID NO: 175092 - DNA, 24 bp, Artificial sequence
  SiRNA target sequence
gatatcattatggatatttagaac

SEQ ID NO: 175093 - DNA, 24 bp, Artificial sequence
  SiRNA target sequence
atatcattatggatatttagaaca

SEQ ID NO: 175094 - DNA, 24 bp, Artificial sequence
  SiRNA target sequence
tatcattatggatatttagaacac

SEQ ID NO: 175095 - DNA, 24 bp, Artificial sequence
  SiRNA target sequence
atcattatggatatttagaacaca

SEQ ID NO: 175096 - DNA, 24 bp, Artificial sequence
  SiRNA target sequence
tcattatggatatttagaacacat

SEQ ID NO: 175097 - DNA, 24 bp, Artificial sequence
  SiRNA target sequence
cattatggatatttagaacacata

SEQ ID NO: 175098 - DNA, 24 bp, Artificial sequence
  SiRNA target sequence
attatggatatttagaacacatat

SEQ ID NO: 175099 - DNA, 24 bp, Artificial sequence
  SiRNA target sequence
ttatggatatttagaacacatatt

SEQ ID NO: 175100 - DNA, 24 bp, Artificial sequence
  SiRNA target sequence
tatggatatttagaacacatatta

SEQ ID NO: 175101 - DNA, 24 bp, Artificial sequence
  SiRNA target sequence
atggatatttagaacacatattaa

SEQ ID NO: 175102 - DNA, 24 bp, Artificial sequence
  SiRNA target sequence
tggatatttagaacacatattaaa

SEQ ID NO: 175103 - DNA, 24 bp, Artificial sequence
  SiRNA target sequence
ggatatttagaacacatattaaat

SEQ ID NO: 175104 - DNA, 24 bp, Artificial sequence
  SiRNA target sequence
gatatttagaacacatattaaata

SEQ ID NO: 175105 - DNA, 24 bp, Artificial sequence
  SiRNA target sequence
atatttagaacacatattaaataa

SEQ ID NO: 175106 - DNA, 24 bp, Artificial sequence
  SiRNA target sequence
tatttagaacacatattaaataag

SEQ ID NO: 175107 - DNA, 24 bp, Artificial sequence
  SiRNA target sequence
atttagaacacatattaaataaga

SEQ ID NO: 175108 - DNA, 24 bp, Artificial sequence
  SiRNA target sequence
tttagaacacatattaaataagaa

SEQ ID NO: 175109 - DNA, 24 bp, Artificial sequence
  SiRNA target sequence
ttagaacacatattaaataagaag

SEQ ID NO: 175110 - DNA, 24 bp, Artificial sequence
  SiRNA target sequence
tagaacacatattaaataagaaga

SEQ ID NO: 175111 - DNA, 24 bp, Artificial sequence
  SiRNA target sequence
agaacacatattaaataagaagaa

SEQ ID NO: 175112 - DNA, 24 bp, Artificial sequence
  SiRNA target sequence
gaacacatattaaataagaagaac

SEQ ID NO: 175113 - DNA, 24 bp, Artificial sequence
  SiRNA target sequence
aacacatattaaataagaagaaca

SEQ ID NO: 175114 - DNA, 24 bp, Artificial sequence
  SiRNA target sequence
acacatattaaataagaagaacaa

SEQ ID NO: 175115 - DNA, 24 bp, Artificial sequence
  SiRNA target sequence
cacatattaaataagaagaacaat

SEQ ID NO: 175116 - DNA, 24 bp, Artificial sequence
  SiRNA target sequence
acatattaaataagaagaacaatt

SEQ ID NO: 175117 - DNA, 24 bp, Artificial sequence
  SiRNA target sequence
catattaaataagaagaacaatta

SEQ ID NO: 175118 - DNA, 24 bp, Artificial sequence
  SiRNA target sequence
atattaaataagaagaacaattat

SEQ ID NO: 175119 - DNA, 24 bp, Artificial sequence
  SiRNA target sequence
tattaaataagaagaacaattatt

SEQ ID NO: 175120 - DNA, 24 bp, Artificial sequence
  SiRNA target sequence
attaaataagaagaacaattattt

SEQ ID NO: 175121 - DNA, 24 bp, Artificial sequence
  SiRNA target sequence
ttaaataagaagaacaattattta

SEQ ID NO: 175122 - DNA, 24 bp, Artificial sequence
  SiRNA target sequence
taaataagaagaacaattatttaa

SEQ ID NO: 175123 - DNA, 24 bp, Artificial sequence
  SiRNA target sequence
aaataagaagaacaattatttaac

SEQ ID NO: 175124 - DNA, 24 bp, Artificial sequence
  SiRNA target sequence
aataagaagaacaattatttaaca

SEQ ID NO: 175125 - DNA, 24 bp, Artificial sequence
  SiRNA target sequence
ataagaagaacaattatttaacaa

SEQ ID NO: 175126 - DNA, 24 bp, Artificial sequence
  SiRNA target sequence
taagaagaacaattatttaacaaa

SEQ ID NO: 175127 - DNA, 24 bp, Artificial sequence
  SiRNA target sequence
aagaagaacaattatttaacaaaa

SEQ ID NO: 175128 - DNA, 24 bp, Artificial sequence
  SiRNA target sequence
agaagaacaattatttaacaaaaa

SEQ ID NO: 175129 - DNA, 24 bp, Artificial sequence
  SiRNA target sequence
gaagaacaattatttaacaaaaaa

SEQ ID NO: 175130 - DNA, 24 bp, Artificial sequence
  SiRNA target sequence
aagaacaattatttaacaaaaaat

SEQ ID NO: 175131 - DNA, 24 bp, Artificial sequence
  SiRNA target sequence
agaacaattatttaacaaaaaatg

SEQ ID NO: 175132 - DNA, 24 bp, Artificial sequence
  SiRNA target sequence
gaacaattatttaacaaaaaatga

SEQ ID NO: 175133 - DNA, 24 bp, Artificial sequence
  SiRNA target sequence
aacaattatttaacaaaaaatgat

SEQ ID NO: 175134 - DNA, 24 bp, Artificial sequence
  SiRNA target sequence
acaattatttaacaaaaaatgata

SEQ ID NO: 175135 - DNA, 24 bp, Artificial sequence
  SiRNA target sequence
caattatttaacaaaaaatgatag

SEQ ID NO: 175136 - DNA, 24 bp, Artificial sequence
  SiRNA target sequence
aattatttaacaaaaaatgatagt

SEQ ID NO: 175137 - DNA, 24 bp, Artificial sequence
  SiRNA target sequence
attatttaacaaaaaatgatagta

SEQ ID NO: 175138 - DNA, 24 bp, Artificial sequence
  SiRNA target sequence
ttatttaacaaaaaatgatagtat

SEQ ID NO: 175139 - DNA, 24 bp, Artificial sequence
  SiRNA target sequence
tatttaacaaaaaatgatagtata

SEQ ID NO: 175140 - DNA, 24 bp, Artificial sequence
  SiRNA target sequence
atttaacaaaaaatgatagtataa

SEQ ID NO: 175141 - DNA, 24 bp, Artificial sequence
  SiRNA target sequence
tttaacaaaaaatgatagtataaa

SEQ ID NO: 175142 - DNA, 24 bp, Artificial sequence
  SiRNA target sequence
ttaacaaaaaatgatagtataaaa

SEQ ID NO: 175143 - DNA, 24 bp, Artificial sequence
  SiRNA target sequence
taacaaaaaatgatagtataaaaa

SEQ ID NO: 175144 - DNA, 24 bp, Artificial sequence
  SiRNA target sequence
aacaaaaaatgatagtataaaaat

SEQ ID NO: 175145 - DNA, 24 bp, Artificial sequence
  SiRNA target sequence
acaaaaaatgatagtataaaaata

SEQ ID NO: 175146 - DNA, 24 bp, Artificial sequence
  SiRNA target sequence
caaaaaatgatagtataaaaatat

SEQ ID NO: 175147 - DNA, 24 bp, Artificial sequence
  SiRNA target sequence
aaaaaatgatagtataaaaatatt

SEQ ID NO: 175148 - DNA, 24 bp, Artificial sequence
  SiRNA target sequence
aaaaatgatagtataaaaatattt

SEQ ID NO: 175149 - DNA, 24 bp, Artificial sequence
  SiRNA target sequence
aaaatgatagtataaaaatattta

SEQ ID NO: 175150 - DNA, 24 bp, Artificial sequence
  SiRNA target sequence
aaatgatagtataaaaatatttaa

SEQ ID NO: 175151 - DNA, 24 bp, Artificial sequence
  SiRNA target sequence
aatgatagtataaaaatatttaac

SEQ ID NO: 175152 - DNA, 24 bp, Artificial sequence
  SiRNA target sequence
atgatagtataaaaatatttaaca

SEQ ID NO: 175153 - DNA, 24 bp, Artificial sequence
  SiRNA target sequence
tgatagtataaaaatatttaacag

SEQ ID NO: 175154 - DNA, 24 bp, Artificial sequence
  SiRNA target sequence
gatagtataaaaatatttaacagt

SEQ ID NO: 175155 - DNA, 24 bp, Artificial sequence
  SiRNA target sequence
atagtataaaaatatttaacagta

SEQ ID NO: 175156 - DNA, 24 bp, Artificial sequence
  SiRNA target sequence
tagtataaaaatatttaacagtaa

SEQ ID NO: 175157 - DNA, 24 bp, Artificial sequence
  SiRNA target sequence
agtataaaaatatttaacagtaaa

SEQ ID NO: 175158 - DNA, 24 bp, Artificial sequence
  SiRNA target sequence
gtataaaaatatttaacagtaaaa

SEQ ID NO: 175159 - DNA, 24 bp, Artificial sequence
  SiRNA target sequence
tataaaaatatttaacagtaaaaa

SEQ ID NO: 175160 - DNA, 24 bp, Artificial sequence
  SiRNA target sequence
ataaaaatatttaacagtaaaaat

SEQ ID NO: 175161 - DNA, 24 bp, Artificial sequence
  SiRNA target sequence
taaaaatatttaacagtaaaaatg

SEQ ID NO: 175162 - DNA, 24 bp, Artificial sequence
  SiRNA target sequence
aaaaatatttaacagtaaaaatga

SEQ ID NO: 175163 - DNA, 24 bp, Artificial sequence
  SiRNA target sequence
aaaatatttaacagtaaaaatgag

SEQ ID NO: 175164 - DNA, 24 bp, Artificial sequence
  SiRNA target sequence
aaatatttaacagtaaaaatgagg

SEQ ID NO: 175165 - DNA, 24 bp, Artificial sequence
  SiRNA target sequence
aatatttaacagtaaaaatgagga

SEQ ID NO: 175166 - DNA, 24 bp, Artificial sequence
  SiRNA target sequence
atatttaacagtaaaaatgaggag

SEQ ID NO: 175167 - DNA, 24 bp, Artificial sequence
  SiRNA target sequence
tatttaacagtaaaaatgaggagg

SEQ ID NO: 175168 - DNA, 24 bp, Artificial sequence
  SiRNA target sequence
atttaacagtaaaaatgaggaggt

SEQ ID NO: 175169 - DNA, 24 bp, Artificial sequence
  SiRNA target sequence
tttaacagtaaaaatgaggaggta

SEQ ID NO: 175170 - DNA, 24 bp, Artificial sequence
  SiRNA target sequence
ttaacagtaaaaatgaggaggtaa

SEQ ID NO: 175171 - DNA, 24 bp, Artificial sequence
  SiRNA target sequence
taacagtaaaaatgaggaggtaag

SEQ ID NO: 175172 - DNA, 24 bp, Artificial sequence
  SiRNA target sequence
aacagtaaaaatgaggaggtaagg

SEQ ID NO: 175173 - DNA, 24 bp, Artificial sequence
  SiRNA target sequence
acagtaaaaatgaggaggtaaggt

SEQ ID NO: 175174 - DNA, 24 bp, Artificial sequence
  SiRNA target sequence
cagtaaaaatgaggaggtaaggtt

SEQ ID NO: 175175 - DNA, 24 bp, Artificial sequence
  SiRNA target sequence
agtaaaaatgaggaggtaaggtta

SEQ ID NO: 175176 - DNA, 24 bp, Artificial sequence
  SiRNA target sequence
gtaaaaatgaggaggtaaggttaa

SEQ ID NO: 175177 - DNA, 24 bp, Artificial sequence
  SiRNA target sequence
taaaaatgaggaggtaaggttaaa

SEQ ID NO: 175178 - DNA, 24 bp, Artificial sequence
  SiRNA target sequence
aaaaatgaggaggtaaggttaaat

SEQ ID NO: 175179 - DNA, 24 bp, Artificial sequence
  SiRNA target sequence
aaaatgaggaggtaaggttaaatg

SEQ ID NO: 175180 - DNA, 24 bp, Artificial sequence
  SiRNA target sequence
aaatgaggaggtaaggttaaatgg

SEQ ID NO: 175181 - DNA, 24 bp, Artificial sequence
  SiRNA target sequence
aatgaggaggtaaggttaaatgga

SEQ ID NO: 175182 - DNA, 24 bp, Artificial sequence
  SiRNA target sequence
atgaggaggtaaggttaaatggaa

SEQ ID NO: 175183 - DNA, 24 bp, Artificial sequence
  SiRNA target sequence
tgaggaggtaaggttaaatggaaa

SEQ ID NO: 175184 - DNA, 24 bp, Artificial sequence
  SiRNA target sequence
gaggaggtaaggttaaatggaaaa

SEQ ID NO: 175185 - DNA, 24 bp, Artificial sequence
  SiRNA target sequence
aggaggtaaggttaaatggaaaaa

SEQ ID NO: 175186 - DNA, 24 bp, Artificial sequence
  SiRNA target sequence
ggaggtaaggttaaatggaaaaag

SEQ ID NO: 175187 - DNA, 24 bp, Artificial sequence
  SiRNA target sequence
gaggtaaggttaaatggaaaaaga

SEQ ID NO: 175188 - DNA, 24 bp, Artificial sequence
  SiRNA target sequence
aggtaaggttaaatggaaaaagaa

SEQ ID NO: 175189 - DNA, 24 bp, Artificial sequence
  SiRNA target sequence
ggtaaggttaaatggaaaaagaaa

SEQ ID NO: 175190 - DNA, 24 bp, Artificial sequence
  SiRNA target sequence
gtaaggttaaatggaaaaagaaaa

SEQ ID NO: 175191 - DNA, 24 bp, Artificial sequence
  SiRNA target sequence
taaggttaaatggaaaaagaaaat

SEQ ID NO: 175192 - DNA, 24 bp, Artificial sequence
  SiRNA target sequence
aaggttaaatggaaaaagaaaatt

SEQ ID NO: 175193 - DNA, 24 bp, Artificial sequence
  SiRNA target sequence
aggttaaatggaaaaagaaaatta

SEQ ID NO: 175194 - DNA, 24 bp, Artificial sequence
  SiRNA target sequence
ggttaaatggaaaaagaaaattaa

SEQ ID NO: 175195 - DNA, 24 bp, Artificial sequence
  SiRNA target sequence
gttaaatggaaaaagaaaattaaa

SEQ ID NO: 175196 - DNA, 24 bp, Artificial sequence
  SiRNA target sequence
ttaaatggaaaaagaaaattaaat

SEQ ID NO: 175197 - DNA, 24 bp, Artificial sequence
  SiRNA target sequence
taaatggaaaaagaaaattaaata

SEQ ID NO: 175198 - DNA, 24 bp, Artificial sequence
  SiRNA target sequence
aaatggaaaaagaaaattaaatat

SEQ ID NO: 175199 - DNA, 24 bp, Artificial sequence
  SiRNA target sequence
aatggaaaaagaaaattaaatatt

SEQ ID NO: 175200 - DNA, 24 bp, Artificial sequence
  SiRNA target sequence
atggaaaaagaaaattaaatatta

SEQ ID NO: 175201 - DNA, 24 bp, Artificial sequence
  SiRNA target sequence
tggaaaaagaaaattaaatattaa

SEQ ID NO: 175202 - DNA, 24 bp, Artificial sequence
  SiRNA target sequence
ggaaaaagaaaattaaatattaac

SEQ ID NO: 175203 - DNA, 24 bp, Artificial sequence
  SiRNA target sequence
gaaaaagaaaattaaatattaaca

SEQ ID NO: 175204 - DNA, 24 bp, Artificial sequence
  SiRNA target sequence
aaaaagaaaattaaatattaacac

SEQ ID NO: 175205 - DNA, 24 bp, Artificial sequence
  SiRNA target sequence
aaaagaaaattaaatattaacaca

SEQ ID NO: 175206 - DNA, 24 bp, Artificial sequence
  SiRNA target sequence
aaagaaaattaaatattaacacag

SEQ ID NO: 175207 - DNA, 24 bp, Artificial sequence
  SiRNA target sequence
aagaaaattaaatattaacacagt

SEQ ID NO: 175208 - DNA, 24 bp, Artificial sequence
  SiRNA target sequence
agaaaattaaatattaacacagtt

SEQ ID NO: 175209 - DNA, 24 bp, Artificial sequence
  SiRNA target sequence
gaaaattaaatattaacacagtta

SEQ ID NO: 175210 - DNA, 24 bp, Artificial sequence
  SiRNA target sequence
aaaattaaatattaacacagttac

SEQ ID NO: 175211 - DNA, 24 bp, Artificial sequence
  SiRNA target sequence
aaattaaatattaacacagttaca

SEQ ID NO: 175212 - DNA, 24 bp, Artificial sequence
  SiRNA target sequence
aattaaatattaacacagttacat

SEQ ID NO: 175213 - DNA, 24 bp, Artificial sequence
  SiRNA target sequence
attaaatattaacacagttacatt

SEQ ID NO: 175214 - DNA, 24 bp, Artificial sequence
  SiRNA target sequence
ttaaatattaacacagttacatta

SEQ ID NO: 175215 - DNA, 24 bp, Artificial sequence
  SiRNA target sequence
taaatattaacacagttacattaa

SEQ ID NO: 175216 - DNA, 24 bp, Artificial sequence
  SiRNA target sequence
aaatattaacacagttacattaaa

SEQ ID NO: 175217 - DNA, 24 bp, Artificial sequence
  SiRNA target sequence
aatattaacacagttacattaaat

SEQ ID NO: 175218 - DNA, 24 bp, Artificial sequence
  SiRNA target sequence
atattaacacagttacattaaata

SEQ ID NO: 175219 - DNA, 24 bp, Artificial sequence
  SiRNA target sequence
tattaacacagttacattaaataa

SEQ ID NO: 175220 - DNA, 24 bp, Artificial sequence
  SiRNA target sequence
attaacacagttacattaaataaa

SEQ ID NO: 175221 - DNA, 24 bp, Artificial sequence
  SiRNA target sequence
ttaacacagttacattaaataaaa

SEQ ID NO: 175222 - DNA, 24 bp, Artificial sequence
  SiRNA target sequence
taacacagttacattaaataaaat

SEQ ID NO: 175223 - DNA, 24 bp, Artificial sequence
  SiRNA target sequence
aacacagttacattaaataaaatt

SEQ ID NO: 175224 - DNA, 24 bp, Artificial sequence
  SiRNA target sequence
acacagttacattaaataaaatta

SEQ ID NO: 175225 - DNA, 24 bp, Artificial sequence
  SiRNA target sequence
cacagttacattaaataaaattaa

SEQ ID NO: 175226 - DNA, 24 bp, Artificial sequence
  SiRNA target sequence
acagttacattaaataaaattaat

SEQ ID NO: 175227 - DNA, 24 bp, Artificial sequence
  SiRNA target sequence
cagttacattaaataaaattaata

SEQ ID NO: 175228 - DNA, 24 bp, Artificial sequence
  SiRNA target sequence
agttacattaaataaaattaatat

SEQ ID NO: 175229 - DNA, 24 bp, Artificial sequence
  SiRNA target sequence
gttacattaaataaaattaatata

SEQ ID NO: 175230 - DNA, 24 bp, Artificial sequence
  SiRNA target sequence
ttacattaaataaaattaatatac

SEQ ID NO: 175231 - DNA, 24 bp, Artificial sequence
  SiRNA target sequence
tacattaaataaaattaatatacc

SEQ ID NO: 175232 - DNA, 24 bp, Artificial sequence
  SiRNA target sequence
acattaaataaaattaatatacct

SEQ ID NO: 175233 - DNA, 24 bp, Artificial sequence
  SiRNA target sequence
cattaaataaaattaatatacctg

SEQ ID NO: 175234 - DNA, 24 bp, Artificial sequence
  SiRNA target sequence
attaaataaaattaatatacctga

SEQ ID NO: 175235 - DNA, 24 bp, Artificial sequence
  SiRNA target sequence
ttaaataaaattaatatacctgag

SEQ ID NO: 175236 - DNA, 24 bp, Artificial sequence
  SiRNA target sequence
taaataaaattaatatacctgaga

SEQ ID NO: 175237 - DNA, 24 bp, Artificial sequence
  SiRNA target sequence
aaataaaattaatatacctgagat

SEQ ID NO: 175238 - DNA, 24 bp, Artificial sequence
  SiRNA target sequence
aataaaattaatatacctgagata

SEQ ID NO: 175239 - DNA, 24 bp, Artificial sequence
  SiRNA target sequence
ataaaattaatatacctgagatag

SEQ ID NO: 175240 - DNA, 24 bp, Artificial sequence
  SiRNA target sequence
taaaattaatatacctgagataga

SEQ ID NO: 175241 - DNA, 24 bp, Artificial sequence
  SiRNA target sequence
aaaattaatatacctgagatagat

SEQ ID NO: 175242 - DNA, 24 bp, Artificial sequence
  SiRNA target sequence
aaattaatatacctgagatagatt

SEQ ID NO: 175243 - DNA, 24 bp, Artificial sequence
  SiRNA target sequence
aattaatatacctgagatagatta

SEQ ID NO: 175244 - DNA, 24 bp, Artificial sequence
  SiRNA target sequence
attaatatacctgagatagattat

SEQ ID NO: 175245 - DNA, 24 bp, Artificial sequence
  SiRNA target sequence
ttaatatacctgagatagattata

SEQ ID NO: 175246 - DNA, 24 bp, Artificial sequence
  SiRNA target sequence
taatatacctgagatagattataa

SEQ ID NO: 175247 - DNA, 24 bp, Artificial sequence
  SiRNA target sequence
aatatacctgagatagattataaa

SEQ ID NO: 175248 - DNA, 24 bp, Artificial sequence
  SiRNA target sequence
atatacctgagatagattataaat

SEQ ID NO: 175249 - DNA, 24 bp, Artificial sequence
  SiRNA target sequence
tatacctgagatagattataaata

SEQ ID NO: 175250 - DNA, 24 bp, Artificial sequence
  SiRNA target sequence
atacctgagatagattataaatat

SEQ ID NO: 175251 - DNA, 24 bp, Artificial sequence
  SiRNA target sequence
tacctgagatagattataaatata

SEQ ID NO: 175252 - DNA, 24 bp, Artificial sequence
  SiRNA target sequence
acctgagatagattataaatataa

SEQ ID NO: 175253 - DNA, 24 bp, Artificial sequence
  SiRNA target sequence
cctgagatagattataaatataaa

SEQ ID NO: 175254 - DNA, 24 bp, Artificial sequence
  SiRNA target sequence
ctgagatagattataaatataaaa

SEQ ID NO: 175255 - DNA, 24 bp, Artificial sequence
  SiRNA target sequence
tgagatagattataaatataaaaa

SEQ ID NO: 175256 - DNA, 24 bp, Artificial sequence
  SiRNA target sequence
gagatagattataaatataaaaat

SEQ ID NO: 175257 - DNA, 24 bp, Artificial sequence
  SiRNA target sequence
agatagattataaatataaaaatg

SEQ ID NO: 175258 - DNA, 24 bp, Artificial sequence
  SiRNA target sequence
gatagattataaatataaaaatgg

SEQ ID NO: 175259 - DNA, 24 bp, Artificial sequence
  SiRNA target sequence
atagattataaatataaaaatgga

SEQ ID NO: 175260 - DNA, 24 bp, Artificial sequence
  SiRNA target sequence
tagattataaatataaaaatggag

SEQ ID NO: 175261 - DNA, 24 bp, Artificial sequence
  SiRNA target sequence
agattataaatataaaaatggagt

SEQ ID NO: 175262 - DNA, 24 bp, Artificial sequence
  SiRNA target sequence
gattataaatataaaaatggagtg

SEQ ID NO: 175263 - DNA, 24 bp, Artificial sequence
  SiRNA target sequence
attataaatataaaaatggagtgt

SEQ ID NO: 175264 - DNA, 24 bp, Artificial sequence
  SiRNA target sequence
ttataaatataaaaatggagtgtt

SEQ ID NO: 175265 - DNA, 24 bp, Artificial sequence
  SiRNA target sequence
tataaatataaaaatggagtgttt

SEQ ID NO: 175266 - DNA, 24 bp, Artificial sequence
  SiRNA target sequence
ataaatataaaaatggagtgttta

SEQ ID NO: 175267 - DNA, 24 bp, Artificial sequence
  SiRNA target sequence
taaatataaaaatggagtgtttac

SEQ ID NO: 175268 - DNA, 24 bp, Artificial sequence
  SiRNA target sequence
aaatataaaaatggagtgtttaca

SEQ ID NO: 175269 - DNA, 24 bp, Artificial sequence
  SiRNA target sequence
aatataaaaatggagtgtttacat

SEQ ID NO: 175270 - DNA, 24 bp, Artificial sequence
  SiRNA target sequence
atataaaaatggagtgtttacata

SEQ ID NO: 175271 - DNA, 24 bp, Artificial sequence
  SiRNA target sequence
tataaaaatggagtgtttacatat

SEQ ID NO: 175272 - DNA, 24 bp, Artificial sequence
  SiRNA target sequence
ataaaaatggagtgtttacatata

SEQ ID NO: 175273 - DNA, 24 bp, Artificial sequence
  SiRNA target sequence
taaaaatggagtgtttacatatac

SEQ ID NO: 175274 - DNA, 24 bp, Artificial sequence
  SiRNA target sequence
aaaaatggagtgtttacatataca

SEQ ID NO: 175275 - DNA, 24 bp, Artificial sequence
  SiRNA target sequence
aaaatggagtgtttacatatacac

SEQ ID NO: 175276 - DNA, 24 bp, Artificial sequence
  SiRNA target sequence
aaatggagtgtttacatatacaca

SEQ ID NO: 175277 - DNA, 24 bp, Artificial sequence
  SiRNA target sequence
aatggagtgtttacatatacacag

SEQ ID NO: 175278 - DNA, 24 bp, Artificial sequence
  SiRNA target sequence
atggagtgtttacatatacacaga

SEQ ID NO: 175279 - DNA, 24 bp, Artificial sequence
  SiRNA target sequence
tggagtgtttacatatacacagat

SEQ ID NO: 175280 - DNA, 24 bp, Artificial sequence
  SiRNA target sequence
ggagtgtttacatatacacagatc

SEQ ID NO: 175281 - DNA, 24 bp, Artificial sequence
  SiRNA target sequence
gagtgtttacatatacacagatca

SEQ ID NO: 175282 - DNA, 24 bp, Artificial sequence
  SiRNA target sequence
agtgtttacatatacacagatcaa

SEQ ID NO: 175283 - DNA, 24 bp, Artificial sequence
  SiRNA target sequence
gtgtttacatatacacagatcaaa

SEQ ID NO: 175284 - DNA, 24 bp, Artificial sequence
  SiRNA target sequence
tgtttacatatacacagatcaaaa

SEQ ID NO: 175285 - DNA, 24 bp, Artificial sequence
  SiRNA target sequence
gtttacatatacacagatcaaaaa

SEQ ID NO: 175286 - DNA, 24 bp, Artificial sequence
  SiRNA target sequence
tttacatatacacagatcaaaaat

SEQ ID NO: 175287 - DNA, 24 bp, Artificial sequence
  SiRNA target sequence
ttacatatacacagatcaaaaata

SEQ ID NO: 175288 - DNA, 24 bp, Artificial sequence
  SiRNA target sequence
tacatatacacagatcaaaaataa

SEQ ID NO: 175289 - DNA, 24 bp, Artificial sequence
  SiRNA target sequence
acatatacacagatcaaaaataat

SEQ ID NO: 175290 - DNA, 24 bp, Artificial sequence
  SiRNA target sequence
catatacacagatcaaaaataata

SEQ ID NO: 175291 - DNA, 24 bp, Artificial sequence
  SiRNA target sequence
atatacacagatcaaaaataataa

SEQ ID NO: 175292 - DNA, 24 bp, Artificial sequence
  SiRNA target sequence
tatacacagatcaaaaataataag

SEQ ID NO: 175293 - DNA, 24 bp, Artificial sequence
  SiRNA target sequence
atacacagatcaaaaataataaga

SEQ ID NO: 175294 - DNA, 24 bp, Artificial sequence
  SiRNA target sequence
tacacagatcaaaaataataagaa

SEQ ID NO: 175295 - DNA, 24 bp, Artificial sequence
  SiRNA target sequence
acacagatcaaaaataataagaaa

SEQ ID NO: 175296 - DNA, 24 bp, Artificial sequence
  SiRNA target sequence
cacagatcaaaaataataagaaaa

SEQ ID NO: 175297 - DNA, 24 bp, Artificial sequence
  SiRNA target sequence
acagatcaaaaataataagaaaaa

SEQ ID NO: 175298 - DNA, 24 bp, Artificial sequence
  SiRNA target sequence
cagatcaaaaataataagaaaaaa

SEQ ID NO: 175299 - DNA, 24 bp, Artificial sequence
  SiRNA target sequence
agatcaaaaataataagaaaaaaa

SEQ ID NO: 175300 - DNA, 24 bp, Artificial sequence
  SiRNA target sequence
gatcaaaaataataagaaaaaaaa

SEQ ID NO: 175301 - DNA, 24 bp, Artificial sequence
  SiRNA target sequence
atcaaaaataataagaaaaaaaaa

SEQ ID NO: 175302 - DNA, 24 bp, Artificial sequence
  SiRNA target sequence
tcaaaaataataagaaaaaaaaat

SEQ ID NO: 175303 - DNA, 24 bp, Artificial sequence
  SiRNA target sequence
caaaaataataagaaaaaaaaata

SEQ ID NO: 175304 - DNA, 24 bp, Artificial sequence
  SiRNA target sequence
aaaaataataagaaaaaaaaatat

SEQ ID NO: 175305 - DNA, 24 bp, Artificial sequence
  SiRNA target sequence
aaaataataagaaaaaaaaatatt

SEQ ID NO: 175306 - DNA, 24 bp, Artificial sequence
  SiRNA target sequence
aaataataagaaaaaaaaatattt

SEQ ID NO: 175307 - DNA, 24 bp, Artificial sequence
  SiRNA target sequence
aataataagaaaaaaaaatattta

SEQ ID NO: 175308 - DNA, 24 bp, Artificial sequence
  SiRNA target sequence
ataataagaaaaaaaaatatttaa

SEQ ID NO: 175309 - DNA, 24 bp, Artificial sequence
  SiRNA target sequence
taataagaaaaaaaaatatttaag

SEQ ID NO: 175310 - DNA, 24 bp, Artificial sequence
  SiRNA target sequence
aataagaaaaaaaaatatttaaga

SEQ ID NO: 175311 - DNA, 24 bp, Artificial sequence
  SiRNA target sequence
ataagaaaaaaaaatatttaagaa

SEQ ID NO: 175312 - DNA, 24 bp, Artificial sequence
  SiRNA target sequence
taagaaaaaaaaatatttaagaat

SEQ ID NO: 175313 - DNA, 24 bp, Artificial sequence
  SiRNA target sequence
aagaaaaaaaaatatttaagaata

SEQ ID NO: 175314 - DNA, 24 bp, Artificial sequence
  SiRNA target sequence
agaaaaaaaaatatttaagaatat

SEQ ID NO: 175315 - DNA, 24 bp, Artificial sequence
  SiRNA target sequence
gaaaaaaaaatatttaagaatatt

SEQ ID NO: 175316 - DNA, 24 bp, Artificial sequence
  SiRNA target sequence
aaaaaaaaatatttaagaatattg

SEQ ID NO: 175317 - DNA, 24 bp, Artificial sequence
  SiRNA target sequence
aaaaaaaatatttaagaatattgg

SEQ ID NO: 175318 - DNA, 24 bp, Artificial sequence
  SiRNA target sequence
aaaaaaatatttaagaatattggg

SEQ ID NO: 175319 - DNA, 24 bp, Artificial sequence
  SiRNA target sequence
aaaaaatatttaagaatattgggt

SEQ ID NO: 175320 - DNA, 24 bp, Artificial sequence
  SiRNA target sequence
aaaaatatttaagaatattgggtc

SEQ ID NO: 175321 - DNA, 24 bp, Artificial sequence
  SiRNA target sequence
aaaatatttaagaatattgggtct

SEQ ID NO: 175322 - DNA, 24 bp, Artificial sequence
  SiRNA target sequence
aaatatttaagaatattgggtcta

SEQ ID NO: 175323 - DNA, 24 bp, Artificial sequence
  SiRNA target sequence
aatatttaagaatattgggtctag

SEQ ID NO: 175324 - DNA, 24 bp, Artificial sequence
  SiRNA target sequence
atatttaagaatattgggtctaga

SEQ ID NO: 175325 - DNA, 24 bp, Artificial sequence
  SiRNA target sequence
tatttaagaatattgggtctagaa

SEQ ID NO: 175326 - DNA, 24 bp, Artificial sequence
  SiRNA target sequence
atttaagaatattgggtctagaac

SEQ ID NO: 175327 - DNA, 24 bp, Artificial sequence
  SiRNA target sequence
tttaagaatattgggtctagaacc

SEQ ID NO: 175328 - DNA, 24 bp, Artificial sequence
  SiRNA target sequence
ttaagaatattgggtctagaacct

SEQ ID NO: 175329 - DNA, 24 bp, Artificial sequence
  SiRNA target sequence
taagaatattgggtctagaacctt

SEQ ID NO: 175330 - DNA, 24 bp, Artificial sequence
  SiRNA target sequence
aagaatattgggtctagaaccttt

SEQ ID NO: 175331 - DNA, 24 bp, Artificial sequence
  SiRNA target sequence
agaatattgggtctagaacctttt

SEQ ID NO: 175332 - DNA, 24 bp, Artificial sequence
  SiRNA target sequence
gaatattgggtctagaaccttttc

SEQ ID NO: 175333 - DNA, 24 bp, Artificial sequence
  SiRNA target sequence
aatattgggtctagaaccttttct

SEQ ID NO: 175334 - DNA, 24 bp, Artificial sequence
  SiRNA target sequence
atattgggtctagaaccttttctt

SEQ ID NO: 175335 - DNA, 24 bp, Artificial sequence
  SiRNA target sequence
tattgggtctagaaccttttctta

SEQ ID NO: 175336 - DNA, 24 bp, Artificial sequence
  SiRNA target sequence
attgggtctagaaccttttcttaa

SEQ ID NO: 175337 - DNA, 24 bp, Artificial sequence
  SiRNA target sequence
ttgggtctagaaccttttcttaat

SEQ ID NO: 175338 - DNA, 24 bp, Artificial sequence
  SiRNA target sequence
tgggtctagaaccttttcttaatt

SEQ ID NO: 175339 - DNA, 24 bp, Artificial sequence
  SiRNA target sequence
gggtctagaaccttttcttaattt

SEQ ID NO: 175340 - DNA, 24 bp, Artificial sequence
  SiRNA target sequence
ggtctagaaccttttcttaatttt

SEQ ID NO: 175341 - DNA, 24 bp, Artificial sequence
  SiRNA target sequence
gtctagaaccttttcttaatttta

SEQ ID NO: 175342 - DNA, 24 bp, Artificial sequence
  SiRNA target sequence
tctagaaccttttcttaattttat

SEQ ID NO: 175343 - DNA, 24 bp, Artificial sequence
  SiRNA target sequence
ctagaaccttttcttaattttatt

SEQ ID NO: 175344 - DNA, 24 bp, Artificial sequence
  SiRNA target sequence
tagaaccttttcttaattttatta

SEQ ID NO: 175345 - DNA, 24 bp, Artificial sequence
  SiRNA target sequence
agaaccttttcttaattttattaa

SEQ ID NO: 175346 - DNA, 24 bp, Artificial sequence
  SiRNA target sequence
gaaccttttcttaattttattaag

SEQ ID NO: 175347 - DNA, 24 bp, Artificial sequence
  SiRNA target sequence
aaccttttcttaattttattaagg

SEQ ID NO: 175348 - DNA, 24 bp, Artificial sequence
  SiRNA target sequence
accttttcttaattttattaagga

SEQ ID NO: 175349 - DNA, 24 bp, Artificial sequence
  SiRNA target sequence
ccttttcttaattttattaaggaa

SEQ ID NO: 175350 - DNA, 24 bp, Artificial sequence
  SiRNA target sequence
cttttcttaattttattaaggaaa

SEQ ID NO: 175351 - DNA, 24 bp, Artificial sequence
  SiRNA target sequence
ttttcttaattttattaaggaaag

SEQ ID NO: 175352 - DNA, 24 bp, Artificial sequence
  SiRNA target sequence
tttcttaattttattaaggaaagt

SEQ ID NO: 175353 - DNA, 24 bp, Artificial sequence
  SiRNA target sequence
ttcttaattttattaaggaaagta

SEQ ID NO: 175354 - DNA, 24 bp, Artificial sequence
  SiRNA target sequence
tcttaattttattaaggaaagtaa

SEQ ID NO: 175355 - DNA, 24 bp, Artificial sequence
  SiRNA target sequence
cttaattttattaaggaaagtaaa

SEQ ID NO: 175356 - DNA, 24 bp, Artificial sequence
  SiRNA target sequence
ttaattttattaaggaaagtaaac

SEQ ID NO: 175357 - DNA, 24 bp, Artificial sequence
  SiRNA target sequence
taattttattaaggaaagtaaaca

SEQ ID NO: 175358 - DNA, 24 bp, Artificial sequence
  SiRNA target sequence
aattttattaaggaaagtaaacat

SEQ ID NO: 175359 - DNA, 24 bp, Artificial sequence
  SiRNA target sequence
attttattaaggaaagtaaacata

SEQ ID NO: 175360 - DNA, 24 bp, Artificial sequence
  SiRNA target sequence
ttttattaaggaaagtaaacataa

SEQ ID NO: 175361 - DNA, 24 bp, Artificial sequence
  SiRNA target sequence
tttattaaggaaagtaaacataaa

SEQ ID NO: 175362 - DNA, 24 bp, Artificial sequence
  SiRNA target sequence
ttattaaggaaagtaaacataaag

SEQ ID NO: 175363 - DNA, 24 bp, Artificial sequence
  SiRNA target sequence
tattaaggaaagtaaacataaaga

SEQ ID NO: 175364 - DNA, 24 bp, Artificial sequence
  SiRNA target sequence
attaaggaaagtaaacataaagaa

SEQ ID NO: 175365 - DNA, 24 bp, Artificial sequence
  SiRNA target sequence
ttaaggaaagtaaacataaagaat

SEQ ID NO: 175366 - DNA, 24 bp, Artificial sequence
  SiRNA target sequence
taaggaaagtaaacataaagaatt

SEQ ID NO: 175367 - DNA, 24 bp, Artificial sequence
  SiRNA target sequence
aaggaaagtaaacataaagaatta

SEQ ID NO: 175368 - DNA, 24 bp, Artificial sequence
  SiRNA target sequence
aggaaagtaaacataaagaattag

SEQ ID NO: 175369 - DNA, 24 bp, Artificial sequence
  SiRNA target sequence
ggaaagtaaacataaagaattaga

SEQ ID NO: 175370 - DNA, 24 bp, Artificial sequence
  SiRNA target sequence
gaaagtaaacataaagaattagaa

SEQ ID NO: 175371 - DNA, 24 bp, Artificial sequence
  SiRNA target sequence
aaagtaaacataaagaattagaat

SEQ ID NO: 175372 - DNA, 24 bp, Artificial sequence
  SiRNA target sequence
aagtaaacataaagaattagaata

SEQ ID NO: 175373 - DNA, 24 bp, Artificial sequence
  SiRNA target sequence
agtaaacataaagaattagaatat

SEQ ID NO: 175374 - DNA, 24 bp, Artificial sequence
  SiRNA target sequence
gtaaacataaagaattagaatatg

SEQ ID NO: 175375 - DNA, 24 bp, Artificial sequence
  SiRNA target sequence
taaacataaagaattagaatatga

SEQ ID NO: 175376 - DNA, 24 bp, Artificial sequence
  SiRNA target sequence
aaacataaagaattagaatatgat

SEQ ID NO: 175377 - DNA, 24 bp, Artificial sequence
  SiRNA target sequence
aacataaagaattagaatatgatg

SEQ ID NO: 175378 - DNA, 24 bp, Artificial sequence
  SiRNA target sequence
acataaagaattagaatatgatgt

SEQ ID NO: 175379 - DNA, 24 bp, Artificial sequence
  SiRNA target sequence
cataaagaattagaatatgatgta

SEQ ID NO: 175380 - DNA, 24 bp, Artificial sequence
  SiRNA target sequence
ataaagaattagaatatgatgtat

SEQ ID NO: 175381 - DNA, 24 bp, Artificial sequence
  SiRNA target sequence
taaagaattagaatatgatgtatg

SEQ ID NO: 175382 - DNA, 24 bp, Artificial sequence
  SiRNA target sequence
aaagaattagaatatgatgtatgc

SEQ ID NO: 175383 - DNA, 24 bp, Artificial sequence
  SiRNA target sequence
aagaattagaatatgatgtatgcg

SEQ ID NO: 175384 - DNA, 24 bp, Artificial sequence
  SiRNA target sequence
agaattagaatatgatgtatgcga

SEQ ID NO: 175385 - DNA, 24 bp, Artificial sequence
  SiRNA target sequence
gaattagaatatgatgtatgcgaa

SEQ ID NO: 175386 - DNA, 24 bp, Artificial sequence
  SiRNA target sequence
aattagaatatgatgtatgcgaaa

SEQ ID NO: 175387 - DNA, 24 bp, Artificial sequence
  SiRNA target sequence
attagaatatgatgtatgcgaaat

SEQ ID NO: 175388 - DNA, 24 bp, Artificial sequence
  SiRNA target sequence
ttagaatatgatgtatgcgaaata

SEQ ID NO: 175389 - DNA, 24 bp, Artificial sequence
  SiRNA target sequence
tagaatatgatgtatgcgaaatat

SEQ ID NO: 175390 - DNA, 24 bp, Artificial sequence
  SiRNA target sequence
agaatatgatgtatgcgaaatata

SEQ ID NO: 175391 - DNA, 24 bp, Artificial sequence
  SiRNA target sequence
gaatatgatgtatgcgaaatatac

SEQ ID NO: 175392 - DNA, 24 bp, Artificial sequence
  SiRNA target sequence
aatatgatgtatgcgaaatataca

SEQ ID NO: 175393 - DNA, 24 bp, Artificial sequence
  SiRNA target sequence
atatgatgtatgcgaaatatacat

SEQ ID NO: 175394 - DNA, 24 bp, Artificial sequence
  SiRNA target sequence
tatgatgtatgcgaaatatacatt

SEQ ID NO: 175395 - DNA, 24 bp, Artificial sequence
  SiRNA target sequence
atgatgtatgcgaaatatacattt

SEQ ID NO: 175396 - DNA, 24 bp, Artificial sequence
  SiRNA target sequence
tgatgtatgcgaaatatacatttg

SEQ ID NO: 175397 - DNA, 24 bp, Artificial sequence
  SiRNA target sequence
gatgtatgcgaaatatacatttgt

SEQ ID NO: 175398 - DNA, 24 bp, Artificial sequence
  SiRNA target sequence
atgtatgcgaaatatacatttgta

SEQ ID NO: 175399 - DNA, 24 bp, Artificial sequence
  SiRNA target sequence
tgtatgcgaaatatacatttgtaa

SEQ ID NO: 175400 - DNA, 24 bp, Artificial sequence
  SiRNA target sequence
gtatgcgaaatatacatttgtaat

SEQ ID NO: 175401 - DNA, 24 bp, Artificial sequence
  SiRNA target sequence
tatgcgaaatatacatttgtaatc

SEQ ID NO: 175402 - DNA, 24 bp, Artificial sequence
  SiRNA target sequence
atgcgaaatatacatttgtaatca

SEQ ID NO: 175403 - DNA, 24 bp, Artificial sequence
  SiRNA target sequence
tgcgaaatatacatttgtaatcag

SEQ ID NO: 175404 - DNA, 24 bp, Artificial sequence
  SiRNA target sequence
gcgaaatatacatttgtaatcagg

SEQ ID NO: 175405 - DNA, 24 bp, Artificial sequence
  SiRNA target sequence
cgaaatatacatttgtaatcaggg

SEQ ID NO: 175406 - DNA, 24 bp, Artificial sequence
  SiRNA target sequence
gaaatatacatttgtaatcaggga

SEQ ID NO: 175407 - DNA, 24 bp, Artificial sequence
  SiRNA target sequence
aaatatacatttgtaatcagggat

SEQ ID NO: 175408 - DNA, 24 bp, Artificial sequence
  SiRNA target sequence
aatatacatttgtaatcagggatg

SEQ ID NO: 175409 - DNA, 24 bp, Artificial sequence
  SiRNA target sequence
atatacatttgtaatcagggatgc

SEQ ID NO: 175410 - DNA, 24 bp, Artificial sequence
  SiRNA target sequence
tatacatttgtaatcagggatgca

SEQ ID NO: 175411 - DNA, 24 bp, Artificial sequence
  SiRNA target sequence
atacatttgtaatcagggatgcat

SEQ ID NO: 175412 - DNA, 24 bp, Artificial sequence
  SiRNA target sequence
tacatttgtaatcagggatgcatt

SEQ ID NO: 175413 - DNA, 24 bp, Artificial sequence
  SiRNA target sequence
acatttgtaatcagggatgcatta

SEQ ID NO: 175414 - DNA, 24 bp, Artificial sequence
  SiRNA target sequence
catttgtaatcagggatgcattaa

SEQ ID NO: 175415 - DNA, 24 bp, Artificial sequence
  SiRNA target sequence
atttgtaatcagggatgcattaat

SEQ ID NO: 175416 - DNA, 24 bp, Artificial sequence
  SiRNA target sequence
tttgtaatcagggatgcattaatg

SEQ ID NO: 175417 - DNA, 24 bp, Artificial sequence
  SiRNA target sequence
ttgtaatcagggatgcattaatgg

SEQ ID NO: 175418 - DNA, 24 bp, Artificial sequence
  SiRNA target sequence
tgtaatcagggatgcattaatgga

SEQ ID NO: 175419 - DNA, 24 bp, Artificial sequence
  SiRNA target sequence
gtaatcagggatgcattaatggac

SEQ ID NO: 175420 - DNA, 24 bp, Artificial sequence
  SiRNA target sequence
taatcagggatgcattaatggacc

SEQ ID NO: 175421 - DNA, 24 bp, Artificial sequence
  SiRNA target sequence
aatcagggatgcattaatggacca

SEQ ID NO: 175422 - DNA, 24 bp, Artificial sequence
  SiRNA target sequence
atcagggatgcattaatggaccag

SEQ ID NO: 175423 - DNA, 24 bp, Artificial sequence
  SiRNA target sequence
tcagggatgcattaatggaccagg

SEQ ID NO: 175424 - DNA, 24 bp, Artificial sequence
  SiRNA target sequence
cagggatgcattaatggaccagga

SEQ ID NO: 175425 - DNA, 24 bp, Artificial sequence
  SiRNA target sequence
agggatgcattaatggaccaggac

SEQ ID NO: 175426 - DNA, 24 bp, Artificial sequence
  SiRNA target sequence
gggatgcattaatggaccaggaca

SEQ ID NO: 175427 - DNA, 24 bp, Artificial sequence
  SiRNA target sequence
ggatgcattaatggaccaggacaa

SEQ ID NO: 175428 - DNA, 24 bp, Artificial sequence
  SiRNA target sequence
gatgcattaatggaccaggacaat

SEQ ID NO: 175429 - DNA, 24 bp, Artificial sequence
  SiRNA target sequence
atgcattaatggaccaggacaatt

SEQ ID NO: 175430 - DNA, 24 bp, Artificial sequence
  SiRNA target sequence
tgcattaatggaccaggacaattg

SEQ ID NO: 175431 - DNA, 24 bp, Artificial sequence
  SiRNA target sequence
gcattaatggaccaggacaattgt

SEQ ID NO: 175432 - DNA, 24 bp, Artificial sequence
  SiRNA target sequence
cattaatggaccaggacaattgta

SEQ ID NO: 175433 - DNA, 24 bp, Artificial sequence
  SiRNA target sequence
attaatggaccaggacaattgtat

SEQ ID NO: 175434 - DNA, 24 bp, Artificial sequence
  SiRNA target sequence
ttaatggaccaggacaattgtata

SEQ ID NO: 175435 - DNA, 24 bp, Artificial sequence
  SiRNA target sequence
taatggaccaggacaattgtatac

SEQ ID NO: 175436 - DNA, 24 bp, Artificial sequence
  SiRNA target sequence
aatggaccaggacaattgtataca

SEQ ID NO: 175437 - DNA, 24 bp, Artificial sequence
  SiRNA target sequence
atggaccaggacaattgtatacag

SEQ ID NO: 175438 - DNA, 24 bp, Artificial sequence
  SiRNA target sequence
tggaccaggacaattgtatacaga

SEQ ID NO: 175439 - DNA, 24 bp, Artificial sequence
  SiRNA target sequence
ggaccaggacaattgtatacagat

SEQ ID NO: 175440 - DNA, 24 bp, Artificial sequence
  SiRNA target sequence
gaccaggacaattgtatacagata

SEQ ID NO: 175441 - DNA, 24 bp, Artificial sequence
  SiRNA target sequence
accaggacaattgtatacagataa

SEQ ID NO: 175442 - DNA, 24 bp, Artificial sequence
  SiRNA target sequence
ccaggacaattgtatacagataat

SEQ ID NO: 175443 - DNA, 24 bp, Artificial sequence
  SiRNA target sequence
caggacaattgtatacagataatt

SEQ ID NO: 175444 - DNA, 24 bp, Artificial sequence
  SiRNA target sequence
aggacaattgtatacagataattt

SEQ ID NO: 175445 - DNA, 24 bp, Artificial sequence
  SiRNA target sequence
ggacaattgtatacagataattta

SEQ ID NO: 175446 - DNA, 24 bp, Artificial sequence
  SiRNA target sequence
gacaattgtatacagataatttat

SEQ ID NO: 175447 - DNA, 24 bp, Artificial sequence
  SiRNA target sequence
acaattgtatacagataatttata

SEQ ID NO: 175448 - DNA, 24 bp, Artificial sequence
  SiRNA target sequence
caattgtatacagataatttatat

SEQ ID NO: 175449 - DNA, 24 bp, Artificial sequence
  SiRNA target sequence
aattgtatacagataatttatatg

SEQ ID NO: 175450 - DNA, 24 bp, Artificial sequence
  SiRNA target sequence
attgtatacagataatttatatgt

SEQ ID NO: 175451 - DNA, 24 bp, Artificial sequence
  SiRNA target sequence
ttgtatacagataatttatatgta

SEQ ID NO: 175452 - DNA, 24 bp, Artificial sequence
  SiRNA target sequence
tgtatacagataatttatatgtaa

SEQ ID NO: 175453 - DNA, 24 bp, Artificial sequence
  SiRNA target sequence
gtatacagataatttatatgtaaa

SEQ ID NO: 175454 - DNA, 24 bp, Artificial sequence
  SiRNA target sequence
tatacagataatttatatgtaaat

SEQ ID NO: 175455 - DNA, 24 bp, Artificial sequence
  SiRNA target sequence
atacagataatttatatgtaaata

SEQ ID NO: 175456 - DNA, 24 bp, Artificial sequence
  SiRNA target sequence
tacagataatttatatgtaaataa

SEQ ID NO: 175457 - DNA, 24 bp, Artificial sequence
  SiRNA target sequence
acagataatttatatgtaaataat

SEQ ID NO: 175458 - DNA, 24 bp, Artificial sequence
  SiRNA target sequence
cagataatttatatgtaaataatt

SEQ ID NO: 175459 - DNA, 24 bp, Artificial sequence
  SiRNA target sequence
agataatttatatgtaaataattc

SEQ ID NO: 175460 - DNA, 24 bp, Artificial sequence
  SiRNA target sequence
gataatttatatgtaaataattca

SEQ ID NO: 175461 - DNA, 24 bp, Artificial sequence
  SiRNA target sequence
ataatttatatgtaaataattcag

SEQ ID NO: 175462 - DNA, 24 bp, Artificial sequence
  SiRNA target sequence
taatttatatgtaaataattcaga

SEQ ID NO: 175463 - DNA, 24 bp, Artificial sequence
  SiRNA target sequence
aatttatatgtaaataattcagaa

SEQ ID NO: 175464 - DNA, 24 bp, Artificial sequence
  SiRNA target sequence
atttatatgtaaataattcagaat

SEQ ID NO: 175465 - DNA, 24 bp, Artificial sequence
  SiRNA target sequence
tttatatgtaaataattcagaata

SEQ ID NO: 175466 - DNA, 24 bp, Artificial sequence
  SiRNA target sequence
ttatatgtaaataattcagaatac

SEQ ID NO: 175467 - DNA, 24 bp, Artificial sequence
  SiRNA target sequence
tatatgtaaataattcagaataca

SEQ ID NO: 175468 - DNA, 24 bp, Artificial sequence
  SiRNA target sequence
atatgtaaataattcagaatacat

SEQ ID NO: 175469 - DNA, 24 bp, Artificial sequence
  SiRNA target sequence
tatgtaaataattcagaatacata

SEQ ID NO: 175470 - DNA, 24 bp, Artificial sequence
  SiRNA target sequence
atgtaaataattcagaatacatag

SEQ ID NO: 175471 - DNA, 24 bp, Artificial sequence
  SiRNA target sequence
tgtaaataattcagaatacataga

SEQ ID NO: 175472 - DNA, 24 bp, Artificial sequence
  SiRNA target sequence
gtaaataattcagaatacatagat

SEQ ID NO: 175473 - DNA, 24 bp, Artificial sequence
  SiRNA target sequence
taaataattcagaatacatagata

SEQ ID NO: 175474 - DNA, 24 bp, Artificial sequence
  SiRNA target sequence
aaataattcagaatacatagatat

SEQ ID NO: 175475 - DNA, 24 bp, Artificial sequence
  SiRNA target sequence
aataattcagaatacatagatatt

SEQ ID NO: 175476 - DNA, 24 bp, Artificial sequence
  SiRNA target sequence
ataattcagaatacatagatattg

SEQ ID NO: 175477 - DNA, 24 bp, Artificial sequence
  SiRNA target sequence
taattcagaatacatagatattga

SEQ ID NO: 175478 - DNA, 24 bp, Artificial sequence
  SiRNA target sequence
aattcagaatacatagatattgat

SEQ ID NO: 175479 - DNA, 24 bp, Artificial sequence
  SiRNA target sequence
attcagaatacatagatattgatc

SEQ ID NO: 175480 - DNA, 24 bp, Artificial sequence
  SiRNA target sequence
ttcagaatacatagatattgatct

SEQ ID NO: 175481 - DNA, 24 bp, Artificial sequence
  SiRNA target sequence
tcagaatacatagatattgatctt

SEQ ID NO: 175482 - DNA, 24 bp, Artificial sequence
  SiRNA target sequence
cagaatacatagatattgatcttg

SEQ ID NO: 175483 - DNA, 24 bp, Artificial sequence
  SiRNA target sequence
agaatacatagatattgatcttgg

SEQ ID NO: 175484 - DNA, 24 bp, Artificial sequence
  SiRNA target sequence
gaatacatagatattgatcttggt

SEQ ID NO: 175485 - DNA, 24 bp, Artificial sequence
  SiRNA target sequence
aatacatagatattgatcttggta

SEQ ID NO: 175486 - DNA, 24 bp, Artificial sequence
  SiRNA target sequence
atacatagatattgatcttggtat

SEQ ID NO: 175487 - DNA, 24 bp, Artificial sequence
  SiRNA target sequence
tacatagatattgatcttggtatt

SEQ ID NO: 175488 - DNA, 24 bp, Artificial sequence
  SiRNA target sequence
acatagatattgatcttggtattg

SEQ ID NO: 175489 - DNA, 24 bp, Artificial sequence
  SiRNA target sequence
catagatattgatcttggtattga

SEQ ID NO: 175490 - DNA, 24 bp, Artificial sequence
  SiRNA target sequence
atagatattgatcttggtattgat

SEQ ID NO: 175491 - DNA, 24 bp, Artificial sequence
  SiRNA target sequence
tagatattgatcttggtattgatt

SEQ ID NO: 175492 - DNA, 24 bp, Artificial sequence
  SiRNA target sequence
agatattgatcttggtattgattg

SEQ ID NO: 175493 - DNA, 24 bp, Artificial sequence
  SiRNA target sequence
gatattgatcttggtattgattgt

SEQ ID NO: 175494 - DNA, 24 bp, Artificial sequence
  SiRNA target sequence
atattgatcttggtattgattgta

SEQ ID NO: 175495 - DNA, 24 bp, Artificial sequence
  SiRNA target sequence
tattgatcttggtattgattgtaa

SEQ ID NO: 175496 - DNA, 24 bp, Artificial sequence
  SiRNA target sequence
attgatcttggtattgattgtaaa

SEQ ID NO: 175497 - DNA, 24 bp, Artificial sequence
  SiRNA target sequence
ttgatcttggtattgattgtaaac

SEQ ID NO: 175498 - DNA, 24 bp, Artificial sequence
  SiRNA target sequence
tgatcttggtattgattgtaaaca

SEQ ID NO: 175499 - DNA, 24 bp, Artificial sequence
  SiRNA target sequence
gatcttggtattgattgtaaacag

SEQ ID NO: 175500 - DNA, 24 bp, Artificial sequence
  SiRNA target sequence
atcttggtattgattgtaaacagt

SEQ ID NO: 175501 - DNA, 24 bp, Artificial sequence
  SiRNA target sequence
tcttggtattgattgtaaacagtt

SEQ ID NO: 175502 - DNA, 24 bp, Artificial sequence
  SiRNA target sequence
cttggtattgattgtaaacagtta

SEQ ID NO: 175503 - DNA, 24 bp, Artificial sequence
  SiRNA target sequence
ttggtattgattgtaaacagttac

SEQ ID NO: 175504 - DNA, 24 bp, Artificial sequence
  SiRNA target sequence
tggtattgattgtaaacagttaca

SEQ ID NO: 175505 - DNA, 24 bp, Artificial sequence
  SiRNA target sequence
ggtattgattgtaaacagttacaa

SEQ ID NO: 175506 - DNA, 24 bp, Artificial sequence
  SiRNA target sequence
gtattgattgtaaacagttacaaa

SEQ ID NO: 175507 - DNA, 24 bp, Artificial sequence
  SiRNA target sequence
tattgattgtaaacagttacaaaa

SEQ ID NO: 175508 - DNA, 24 bp, Artificial sequence
  SiRNA target sequence
attgattgtaaacagttacaaaaa

SEQ ID NO: 175509 - DNA, 24 bp, Artificial sequence
  SiRNA target sequence
ttgattgtaaacagttacaaaaaa

SEQ ID NO: 175510 - DNA, 24 bp, Artificial sequence
  SiRNA target sequence
tgattgtaaacagttacaaaaaag

SEQ ID NO: 175511 - DNA, 24 bp, Artificial sequence
  SiRNA target sequence
gattgtaaacagttacaaaaaagg

SEQ ID NO: 175512 - DNA, 24 bp, Artificial sequence
  SiRNA target sequence
attgtaaacagttacaaaaaagga

SEQ ID NO: 175513 - DNA, 24 bp, Artificial sequence
  SiRNA target sequence
ttgtaaacagttacaaaaaaggac

SEQ ID NO: 175514 - DNA, 24 bp, Artificial sequence
  SiRNA target sequence
tgtaaacagttacaaaaaaggaca

SEQ ID NO: 175515 - DNA, 24 bp, Artificial sequence
  SiRNA target sequence
gtaaacagttacaaaaaaggacat

SEQ ID NO: 175516 - DNA, 24 bp, Artificial sequence
  SiRNA target sequence
taaacagttacaaaaaaggacata

SEQ ID NO: 175517 - DNA, 24 bp, Artificial sequence
  SiRNA target sequence
aaacagttacaaaaaaggacatat

SEQ ID NO: 175518 - DNA, 24 bp, Artificial sequence
  SiRNA target sequence
aacagttacaaaaaaggacatata

SEQ ID NO: 175519 - DNA, 24 bp, Artificial sequence
  SiRNA target sequence
acagttacaaaaaaggacatatag

SEQ ID NO: 175520 - DNA, 24 bp, Artificial sequence
  SiRNA target sequence
cagttacaaaaaaggacatataga

SEQ ID NO: 175521 - DNA, 24 bp, Artificial sequence
  SiRNA target sequence
agttacaaaaaaggacatatagaa

SEQ ID NO: 175522 - DNA, 24 bp, Artificial sequence
  SiRNA target sequence
gttacaaaaaaggacatatagaaa

SEQ ID NO: 175523 - DNA, 24 bp, Artificial sequence
  SiRNA target sequence
ttacaaaaaaggacatatagaaaa

SEQ ID NO: 175524 - DNA, 24 bp, Artificial sequence
  SiRNA target sequence
tacaaaaaaggacatatagaaaaa

SEQ ID NO: 175525 - DNA, 24 bp, Artificial sequence
  SiRNA target sequence
acaaaaaaggacatatagaaaaat

SEQ ID NO: 175526 - DNA, 24 bp, Artificial sequence
  SiRNA target sequence
caaaaaaggacatatagaaaaata

SEQ ID NO: 175527 - DNA, 24 bp, Artificial sequence
  SiRNA target sequence
aaaaaaggacatatagaaaaatag

SEQ ID NO: 175528 - DNA, 24 bp, Artificial sequence
  SiRNA target sequence
aaaaaggacatatagaaaaataga

SEQ ID NO: 175529 - DNA, 24 bp, Artificial sequence
  SiRNA target sequence
aaaaggacatatagaaaaatagaa

SEQ ID NO: 175530 - DNA, 24 bp, Artificial sequence
  SiRNA target sequence
aaaggacatatagaaaaatagaaa

SEQ ID NO: 175531 - DNA, 24 bp, Artificial sequence
  SiRNA target sequence
aaggacatatagaaaaatagaaac

SEQ ID NO: 175532 - DNA, 24 bp, Artificial sequence
  SiRNA target sequence
aggacatatagaaaaatagaaaca

SEQ ID NO: 175533 - DNA, 24 bp, Artificial sequence
  SiRNA target sequence
ggacatatagaaaaatagaaacaa

SEQ ID NO: 175534 - DNA, 24 bp, Artificial sequence
  SiRNA target sequence
gacatatagaaaaatagaaacaaa

SEQ ID NO: 175535 - DNA, 24 bp, Artificial sequence
  SiRNA target sequence
acatatagaaaaatagaaacaaag

SEQ ID NO: 175536 - DNA, 24 bp, Artificial sequence
  SiRNA target sequence
catatagaaaaatagaaacaaaga

SEQ ID NO: 175537 - DNA, 24 bp, Artificial sequence
  SiRNA target sequence
atatagaaaaatagaaacaaagaa

SEQ ID NO: 175538 - DNA, 24 bp, Artificial sequence
  SiRNA target sequence
tatagaaaaatagaaacaaagaaa

SEQ ID NO: 175539 - DNA, 24 bp, Artificial sequence
  SiRNA target sequence
atagaaaaatagaaacaaagaaag

SEQ ID NO: 175540 - DNA, 24 bp, Artificial sequence
  SiRNA target sequence
tagaaaaatagaaacaaagaaagt

SEQ ID NO: 175541 - DNA, 24 bp, Artificial sequence
  SiRNA target sequence
agaaaaatagaaacaaagaaagtt

SEQ ID NO: 175542 - DNA, 24 bp, Artificial sequence
  SiRNA target sequence
gaaaaatagaaacaaagaaagtta

SEQ ID NO: 175543 - DNA, 24 bp, Artificial sequence
  SiRNA target sequence
aaaaatagaaacaaagaaagttaa

SEQ ID NO: 175544 - DNA, 24 bp, Artificial sequence
  SiRNA target sequence
aaaatagaaacaaagaaagttaat

SEQ ID NO: 175545 - DNA, 24 bp, Artificial sequence
  SiRNA target sequence
aaatagaaacaaagaaagttaatt

SEQ ID NO: 175546 - DNA, 24 bp, Artificial sequence
  SiRNA target sequence
aatagaaacaaagaaagttaattt

SEQ ID NO: 175547 - DNA, 24 bp, Artificial sequence
  SiRNA target sequence
atagaaacaaagaaagttaatttt

SEQ ID NO: 175548 - DNA, 24 bp, Artificial sequence
  SiRNA target sequence
tagaaacaaagaaagttaatttta

SEQ ID NO: 175549 - DNA, 24 bp, Artificial sequence
  SiRNA target sequence
agaaacaaagaaagttaattttaa

SEQ ID NO: 175550 - DNA, 24 bp, Artificial sequence
  SiRNA target sequence
gaaacaaagaaagttaattttaaa

SEQ ID NO: 175551 - DNA, 24 bp, Artificial sequence
  SiRNA target sequence
aaacaaagaaagttaattttaaaa

SEQ ID NO: 175552 - DNA, 24 bp, Artificial sequence
  SiRNA target sequence
aacaaagaaagttaattttaaaat

SEQ ID NO: 175553 - DNA, 24 bp, Artificial sequence
  SiRNA target sequence
acaaagaaagttaattttaaaata

SEQ ID NO: 175554 - DNA, 24 bp, Artificial sequence
  SiRNA target sequence
caaagaaagttaattttaaaatag

SEQ ID NO: 175555 - DNA, 24 bp, Artificial sequence
  SiRNA target sequence
aaagaaagttaattttaaaataga

SEQ ID NO: 175556 - DNA, 24 bp, Artificial sequence
  SiRNA target sequence
aagaaagttaattttaaaatagaa

SEQ ID NO: 175557 - DNA, 24 bp, Artificial sequence
  SiRNA target sequence
agaaagttaattttaaaatagaat

SEQ ID NO: 175558 - DNA, 24 bp, Artificial sequence
  SiRNA target sequence
gaaagttaattttaaaatagaatg

SEQ ID NO: 175559 - DNA, 24 bp, Artificial sequence
  SiRNA target sequence
aaagttaattttaaaatagaatgg

SEQ ID NO: 175560 - DNA, 24 bp, Artificial sequence
  SiRNA target sequence
aagttaattttaaaatagaatggt

SEQ ID NO: 175561 - DNA, 24 bp, Artificial sequence
  SiRNA target sequence
agttaattttaaaatagaatggta

SEQ ID NO: 175562 - DNA, 24 bp, Artificial sequence
  SiRNA target sequence
gttaattttaaaatagaatggtaa

SEQ ID NO: 175563 - DNA, 25 bp, Artificial sequence
  SiRNA target sequence
atgaatactgaaaataaaccatgta

SEQ ID NO: 175564 - DNA, 25 bp, Artificial sequence
  SiRNA target sequence
tgaatactgaaaataaaccatgtat

SEQ ID NO: 175565 - DNA, 25 bp, Artificial sequence
  SiRNA target sequence
gaatactgaaaataaaccatgtatt

SEQ ID NO: 175566 - DNA, 25 bp, Artificial sequence
  SiRNA target sequence
aatactgaaaataaaccatgtattt

SEQ ID NO: 175567 - DNA, 25 bp, Artificial sequence
  SiRNA target sequence
atactgaaaataaaccatgtatttc

SEQ ID NO: 175568 - DNA, 25 bp, Artificial sequence
  SiRNA target sequence
tactgaaaataaaccatgtatttca

SEQ ID NO: 175569 - DNA, 25 bp, Artificial sequence
  SiRNA target sequence
actgaaaataaaccatgtatttcac

SEQ ID NO: 175570 - DNA, 25 bp, Artificial sequence
  SiRNA target sequence
ctgaaaataaaccatgtatttcacc

SEQ ID NO: 175571 - DNA, 25 bp, Artificial sequence
  SiRNA target sequence
tgaaaataaaccatgtatttcacca

SEQ ID NO: 175572 - DNA, 25 bp, Artificial sequence
  SiRNA target sequence
gaaaataaaccatgtatttcaccat

SEQ ID NO: 175573 - DNA, 25 bp, Artificial sequence
  SiRNA target sequence
aaaataaaccatgtatttcaccatt

SEQ ID NO: 175574 - DNA, 25 bp, Artificial sequence
  SiRNA target sequence
aaataaaccatgtatttcaccattt

SEQ ID NO: 175575 - DNA, 25 bp, Artificial sequence
  SiRNA target sequence
aataaaccatgtatttcaccattta

SEQ ID NO: 175576 - DNA, 25 bp, Artificial sequence
  SiRNA target sequence
ataaaccatgtatttcaccatttac

SEQ ID NO: 175577 - DNA, 25 bp, Artificial sequence
  SiRNA target sequence
taaaccatgtatttcaccatttacc

SEQ ID NO: 175578 - DNA, 25 bp, Artificial sequence
  SiRNA target sequence
aaaccatgtatttcaccatttacct

SEQ ID NO: 175579 - DNA, 25 bp, Artificial sequence
  SiRNA target sequence
aaccatgtatttcaccatttacctt

SEQ ID NO: 175580 - DNA, 25 bp, Artificial sequence
  SiRNA target sequence
accatgtatttcaccatttaccttt

SEQ ID NO: 175581 - DNA, 25 bp, Artificial sequence
  SiRNA target sequence
ccatgtatttcaccatttaccttta

SEQ ID NO: 175582 - DNA, 25 bp, Artificial sequence
  SiRNA target sequence
catgtatttcaccatttacctttaa

SEQ ID NO: 175583 - DNA, 25 bp, Artificial sequence
  SiRNA target sequence
atgtatttcaccatttacctttaaa

SEQ ID NO: 175584 - DNA, 25 bp, Artificial sequence
  SiRNA target sequence
tgtatttcaccatttacctttaaac

SEQ ID NO: 175585 - DNA, 25 bp, Artificial sequence
  SiRNA target sequence
gtatttcaccatttacctttaaact

SEQ ID NO: 175586 - DNA, 25 bp, Artificial sequence
  SiRNA target sequence
tatttcaccatttacctttaaacta

SEQ ID NO: 175587 - DNA, 25 bp, Artificial sequence
  SiRNA target sequence
atttcaccatttacctttaaactag

SEQ ID NO: 175588 - DNA, 25 bp, Artificial sequence
  SiRNA target sequence
tttcaccatttacctttaaactaga

SEQ ID NO: 175589 - DNA, 25 bp, Artificial sequence
  SiRNA target sequence
ttcaccatttacctttaaactagaa

SEQ ID NO: 175590 - DNA, 25 bp, Artificial sequence
  SiRNA target sequence
tcaccatttacctttaaactagaag

SEQ ID NO: 175591 - DNA, 25 bp, Artificial sequence
  SiRNA target sequence
caccatttacctttaaactagaaga

SEQ ID NO: 175592 - DNA, 25 bp, Artificial sequence
  SiRNA target sequence
accatttacctttaaactagaagat

SEQ ID NO: 175593 - DNA, 25 bp, Artificial sequence
  SiRNA target sequence
ccatttacctttaaactagaagatt

SEQ ID NO: 175594 - DNA, 25 bp, Artificial sequence
  SiRNA target sequence
catttacctttaaactagaagattg

SEQ ID NO: 175595 - DNA, 25 bp, Artificial sequence
  SiRNA target sequence
atttacctttaaactagaagattgc

SEQ ID NO: 175596 - DNA, 25 bp, Artificial sequence
  SiRNA target sequence
tttacctttaaactagaagattgcc

SEQ ID NO: 175597 - DNA, 25 bp, Artificial sequence
  SiRNA target sequence
ttacctttaaactagaagattgcct

SEQ ID NO: 175598 - DNA, 25 bp, Artificial sequence
  SiRNA target sequence
tacctttaaactagaagattgcctg

SEQ ID NO: 175599 - DNA, 25 bp, Artificial sequence
  SiRNA target sequence
acctttaaactagaagattgcctgg

SEQ ID NO: 175600 - DNA, 25 bp, Artificial sequence
  SiRNA target sequence
cctttaaactagaagattgcctggc

SEQ ID NO: 175601 - DNA, 25 bp, Artificial sequence
  SiRNA target sequence
ctttaaactagaagattgcctggca

SEQ ID NO: 175602 - DNA, 25 bp, Artificial sequence
  SiRNA target sequence
tttaaactagaagattgcctggcat

SEQ ID NO: 175603 - DNA, 25 bp, Artificial sequence
  SiRNA target sequence
ttaaactagaagattgcctggcatg

SEQ ID NO: 175604 - DNA, 25 bp, Artificial sequence
  SiRNA target sequence
taaactagaagattgcctggcatgt

SEQ ID NO: 175605 - DNA, 25 bp, Artificial sequence
  SiRNA target sequence
aaactagaagattgcctggcatgtt

SEQ ID NO: 175606 - DNA, 25 bp, Artificial sequence
  SiRNA target sequence
aactagaagattgcctggcatgttc

SEQ ID NO: 175607 - DNA, 25 bp, Artificial sequence
  SiRNA target sequence
actagaagattgcctggcatgttcg

SEQ ID NO: 175608 - DNA, 25 bp, Artificial sequence
  SiRNA target sequence
ctagaagattgcctggcatgttcgg

SEQ ID NO: 175609 - DNA, 25 bp, Artificial sequence
  SiRNA target sequence
tagaagattgcctggcatgttcggc

SEQ ID NO: 175610 - DNA, 25 bp, Artificial sequence
  SiRNA target sequence
agaagattgcctggcatgttcggct

SEQ ID NO: 175611 - DNA, 25 bp, Artificial sequence
  SiRNA target sequence
gaagattgcctggcatgttcggctt

SEQ ID NO: 175612 - DNA, 25 bp, Artificial sequence
  SiRNA target sequence
aagattgcctggcatgttcggcttg

SEQ ID NO: 175613 - DNA, 25 bp, Artificial sequence
  SiRNA target sequence
agattgcctggcatgttcggcttgt

SEQ ID NO: 175614 - DNA, 25 bp, Artificial sequence
  SiRNA target sequence
gattgcctggcatgttcggcttgta

SEQ ID NO: 175615 - DNA, 25 bp, Artificial sequence
  SiRNA target sequence
attgcctggcatgttcggcttgtat

SEQ ID NO: 175616 - DNA, 25 bp, Artificial sequence
  SiRNA target sequence
ttgcctggcatgttcggcttgtatt

SEQ ID NO: 175617 - DNA, 25 bp, Artificial sequence
  SiRNA target sequence
tgcctggcatgttcggcttgtattg

SEQ ID NO: 175618 - DNA, 25 bp, Artificial sequence
  SiRNA target sequence
gcctggcatgttcggcttgtattgc

SEQ ID NO: 175619 - DNA, 25 bp, Artificial sequence
  SiRNA target sequence
cctggcatgttcggcttgtattgct

SEQ ID NO: 175620 - DNA, 25 bp, Artificial sequence
  SiRNA target sequence
ctggcatgttcggcttgtattgctg

SEQ ID NO: 175621 - DNA, 25 bp, Artificial sequence
  SiRNA target sequence
tggcatgttcggcttgtattgctga

SEQ ID NO: 175622 - DNA, 25 bp, Artificial sequence
  SiRNA target sequence
ggcatgttcggcttgtattgctgat

SEQ ID NO: 175623 - DNA, 25 bp, Artificial sequence
  SiRNA target sequence
gcatgttcggcttgtattgctgatt

SEQ ID NO: 175624 - DNA, 25 bp, Artificial sequence
  SiRNA target sequence
catgttcggcttgtattgctgattt

SEQ ID NO: 175625 - DNA, 25 bp, Artificial sequence
  SiRNA target sequence
atgttcggcttgtattgctgatttt

SEQ ID NO: 175626 - DNA, 25 bp, Artificial sequence
  SiRNA target sequence
tgttcggcttgtattgctgattttt

SEQ ID NO: 175627 - DNA, 25 bp, Artificial sequence
  SiRNA target sequence
gttcggcttgtattgctgatttttc

SEQ ID NO: 175628 - DNA, 25 bp, Artificial sequence
  SiRNA target sequence
ttcggcttgtattgctgatttttct

SEQ ID NO: 175629 - DNA, 25 bp, Artificial sequence
  SiRNA target sequence
tcggcttgtattgctgatttttctg

SEQ ID NO: 175630 - DNA, 25 bp, Artificial sequence
  SiRNA target sequence
cggcttgtattgctgatttttctgt

SEQ ID NO: 175631 - DNA, 25 bp, Artificial sequence
  SiRNA target sequence
ggcttgtattgctgatttttctgtt

SEQ ID NO: 175632 - DNA, 25 bp, Artificial sequence
  SiRNA target sequence
gcttgtattgctgatttttctgttc

SEQ ID NO: 175633 - DNA, 25 bp, Artificial sequence
  SiRNA target sequence
cttgtattgctgatttttctgttcc

SEQ ID NO: 175634 - DNA, 25 bp, Artificial sequence
  SiRNA target sequence
ttgtattgctgatttttctgttcca

SEQ ID NO: 175635 - DNA, 25 bp, Artificial sequence
  SiRNA target sequence
tgtattgctgatttttctgttccaa

SEQ ID NO: 175636 - DNA, 25 bp, Artificial sequence
  SiRNA target sequence
gtattgctgatttttctgttccaaa

SEQ ID NO: 175637 - DNA, 25 bp, Artificial sequence
  SiRNA target sequence
tattgctgatttttctgttccaaaa

SEQ ID NO: 175638 - DNA, 25 bp, Artificial sequence
  SiRNA target sequence
attgctgatttttctgttccaaaaa

SEQ ID NO: 175639 - DNA, 25 bp, Artificial sequence
  SiRNA target sequence
ttgctgatttttctgttccaaaaat

SEQ ID NO: 175640 - DNA, 25 bp, Artificial sequence
  SiRNA target sequence
tgctgatttttctgttccaaaaatt

SEQ ID NO: 175641 - DNA, 25 bp, Artificial sequence
  SiRNA target sequence
gctgatttttctgttccaaaaattc

SEQ ID NO: 175642 - DNA, 25 bp, Artificial sequence
  SiRNA target sequence
ctgatttttctgttccaaaaattcc

SEQ ID NO: 175643 - DNA, 25 bp, Artificial sequence
  SiRNA target sequence
tgatttttctgttccaaaaattcct

SEQ ID NO: 175644 - DNA, 25 bp, Artificial sequence
  SiRNA target sequence
gatttttctgttccaaaaattccta

SEQ ID NO: 175645 - DNA, 25 bp, Artificial sequence
  SiRNA target sequence
atttttctgttccaaaaattcctac

SEQ ID NO: 175646 - DNA, 25 bp, Artificial sequence
  SiRNA target sequence
tttttctgttccaaaaattcctact

SEQ ID NO: 175647 - DNA, 25 bp, Artificial sequence
  SiRNA target sequence
ttttctgttccaaaaattcctactt

SEQ ID NO: 175648 - DNA, 25 bp, Artificial sequence
  SiRNA target sequence
tttctgttccaaaaattcctactta

SEQ ID NO: 175649 - DNA, 25 bp, Artificial sequence
  SiRNA target sequence
ttctgttccaaaaattcctacttac

SEQ ID NO: 175650 - DNA, 25 bp, Artificial sequence
  SiRNA target sequence
tctgttccaaaaattcctacttaca

SEQ ID NO: 175651 - DNA, 25 bp, Artificial sequence
  SiRNA target sequence
ctgttccaaaaattcctacttacac

SEQ ID NO: 175652 - DNA, 25 bp, Artificial sequence
  SiRNA target sequence
tgttccaaaaattcctacttacaca

SEQ ID NO: 175653 - DNA, 25 bp, Artificial sequence
  SiRNA target sequence
gttccaaaaattcctacttacacag

SEQ ID NO: 175654 - DNA, 25 bp, Artificial sequence
  SiRNA target sequence
ttccaaaaattcctacttacacaga

SEQ ID NO: 175655 - DNA, 25 bp, Artificial sequence
  SiRNA target sequence
tccaaaaattcctacttacacagaa

SEQ ID NO: 175656 - DNA, 25 bp, Artificial sequence
  SiRNA target sequence
ccaaaaattcctacttacacagaac

SEQ ID NO: 175657 - DNA, 25 bp, Artificial sequence
  SiRNA target sequence
caaaaattcctacttacacagaact

SEQ ID NO: 175658 - DNA, 25 bp, Artificial sequence
  SiRNA target sequence
aaaaattcctacttacacagaactg

SEQ ID NO: 175659 - DNA, 25 bp, Artificial sequence
  SiRNA target sequence
aaaattcctacttacacagaactga

SEQ ID NO: 175660 - DNA, 25 bp, Artificial sequence
  SiRNA target sequence
aaattcctacttacacagaactgaa

SEQ ID NO: 175661 - DNA, 25 bp, Artificial sequence
  SiRNA target sequence
aattcctacttacacagaactgaaa

SEQ ID NO: 175662 - DNA, 25 bp, Artificial sequence
  SiRNA target sequence
attcctacttacacagaactgaaag

SEQ ID NO: 175663 - DNA, 25 bp, Artificial sequence
  SiRNA target sequence
ttcctacttacacagaactgaaaga

SEQ ID NO: 175664 - DNA, 25 bp, Artificial sequence
  SiRNA target sequence
tcctacttacacagaactgaaagat

SEQ ID NO: 175665 - DNA, 25 bp, Artificial sequence
  SiRNA target sequence
cctacttacacagaactgaaagatg

SEQ ID NO: 175666 - DNA, 25 bp, Artificial sequence
  SiRNA target sequence
ctacttacacagaactgaaagatgt

SEQ ID NO: 175667 - DNA, 25 bp, Artificial sequence
  SiRNA target sequence
tacttacacagaactgaaagatgtc

SEQ ID NO: 175668 - DNA, 25 bp, Artificial sequence
  SiRNA target sequence
acttacacagaactgaaagatgtcc

SEQ ID NO: 175669 - DNA, 25 bp, Artificial sequence
  SiRNA target sequence
cttacacagaactgaaagatgtccc

SEQ ID NO: 175670 - DNA, 25 bp, Artificial sequence
  SiRNA target sequence
ttacacagaactgaaagatgtccct

SEQ ID NO: 175671 - DNA, 25 bp, Artificial sequence
  SiRNA target sequence
tacacagaactgaaagatgtccctt

SEQ ID NO: 175672 - DNA, 25 bp, Artificial sequence
  SiRNA target sequence
acacagaactgaaagatgtcccttt

SEQ ID NO: 175673 - DNA, 25 bp, Artificial sequence
  SiRNA target sequence
cacagaactgaaagatgtcccttta

SEQ ID NO: 175674 - DNA, 25 bp, Artificial sequence
  SiRNA target sequence
acagaactgaaagatgtccctttaa

SEQ ID NO: 175675 - DNA, 25 bp, Artificial sequence
  SiRNA target sequence
cagaactgaaagatgtccctttaac

SEQ ID NO: 175676 - DNA, 25 bp, Artificial sequence
  SiRNA target sequence
agaactgaaagatgtccctttaaca

SEQ ID NO: 175677 - DNA, 25 bp, Artificial sequence
  SiRNA target sequence
gaactgaaagatgtccctttaacat

SEQ ID NO: 175678 - DNA, 25 bp, Artificial sequence
  SiRNA target sequence
aactgaaagatgtccctttaacatt

SEQ ID NO: 175679 - DNA, 25 bp, Artificial sequence
  SiRNA target sequence
actgaaagatgtccctttaacattt

SEQ ID NO: 175680 - DNA, 25 bp, Artificial sequence
  SiRNA target sequence
ctgaaagatgtccctttaacatttt

SEQ ID NO: 175681 - DNA, 25 bp, Artificial sequence
  SiRNA target sequence
tgaaagatgtccctttaacattttt

SEQ ID NO: 175682 - DNA, 25 bp, Artificial sequence
  SiRNA target sequence
gaaagatgtccctttaacattttta

SEQ ID NO: 175683 - DNA, 25 bp, Artificial sequence
  SiRNA target sequence
aaagatgtccctttaacatttttat

SEQ ID NO: 175684 - DNA, 25 bp, Artificial sequence
  SiRNA target sequence
aagatgtccctttaacatttttatt

SEQ ID NO: 175685 - DNA, 25 bp, Artificial sequence
  SiRNA target sequence
agatgtccctttaacatttttatta

SEQ ID NO: 175686 - DNA, 25 bp, Artificial sequence
  SiRNA target sequence
gatgtccctttaacatttttattat

SEQ ID NO: 175687 - DNA, 25 bp, Artificial sequence
  SiRNA target sequence
atgtccctttaacatttttattatc

SEQ ID NO: 175688 - DNA, 25 bp, Artificial sequence
  SiRNA target sequence
tgtccctttaacatttttattatca

SEQ ID NO: 175689 - DNA, 25 bp, Artificial sequence
  SiRNA target sequence
gtccctttaacatttttattatcac

SEQ ID NO: 175690 - DNA, 25 bp, Artificial sequence
  SiRNA target sequence
tccctttaacatttttattatcacc

SEQ ID NO: 175691 - DNA, 25 bp, Artificial sequence
  SiRNA target sequence
ccctttaacatttttattatcacca

SEQ ID NO: 175692 - DNA, 25 bp, Artificial sequence
  SiRNA target sequence
cctttaacatttttattatcaccac

SEQ ID NO: 175693 - DNA, 25 bp, Artificial sequence
  SiRNA target sequence
ctttaacatttttattatcaccaca

SEQ ID NO: 175694 - DNA, 25 bp, Artificial sequence
  SiRNA target sequence
tttaacatttttattatcaccacat

SEQ ID NO: 175695 - DNA, 25 bp, Artificial sequence
  SiRNA target sequence
ttaacatttttattatcaccacatt

SEQ ID NO: 175696 - DNA, 25 bp, Artificial sequence
  SiRNA target sequence
taacatttttattatcaccacattc

SEQ ID NO: 175697 - DNA, 25 bp, Artificial sequence
  SiRNA target sequence
aacatttttattatcaccacattcg

SEQ ID NO: 175698 - DNA, 25 bp, Artificial sequence
  SiRNA target sequence
acatttttattatcaccacattcga

SEQ ID NO: 175699 - DNA, 25 bp, Artificial sequence
  SiRNA target sequence
catttttattatcaccacattcgaa

SEQ ID NO: 175700 - DNA, 25 bp, Artificial sequence
  SiRNA target sequence
atttttattatcaccacattcgaaa

SEQ ID NO: 175701 - DNA, 25 bp, Artificial sequence
  SiRNA target sequence
tttttattatcaccacattcgaaaa

SEQ ID NO: 175702 - DNA, 25 bp, Artificial sequence
  SiRNA target sequence
ttttattatcaccacattcgaaaat

SEQ ID NO: 175703 - DNA, 25 bp, Artificial sequence
  SiRNA target sequence
tttattatcaccacattcgaaaatg

SEQ ID NO: 175704 - DNA, 25 bp, Artificial sequence
  SiRNA target sequence
ttattatcaccacattcgaaaatga

SEQ ID NO: 175705 - DNA, 25 bp, Artificial sequence
  SiRNA target sequence
tattatcaccacattcgaaaatgaa

SEQ ID NO: 175706 - DNA, 25 bp, Artificial sequence
  SiRNA target sequence
attatcaccacattcgaaaatgaat

SEQ ID NO: 175707 - DNA, 25 bp, Artificial sequence
  SiRNA target sequence
ttatcaccacattcgaaaatgaata

SEQ ID NO: 175708 - DNA, 25 bp, Artificial sequence
  SiRNA target sequence
tatcaccacattcgaaaatgaatat

SEQ ID NO: 175709 - DNA, 25 bp, Artificial sequence
  SiRNA target sequence
atcaccacattcgaaaatgaatatg

SEQ ID NO: 175710 - DNA, 25 bp, Artificial sequence
  SiRNA target sequence
tcaccacattcgaaaatgaatatgt

SEQ ID NO: 175711 - DNA, 25 bp, Artificial sequence
  SiRNA target sequence
caccacattcgaaaatgaatatgta

SEQ ID NO: 175712 - DNA, 25 bp, Artificial sequence
  SiRNA target sequence
accacattcgaaaatgaatatgtat

SEQ ID NO: 175713 - DNA, 25 bp, Artificial sequence
  SiRNA target sequence
ccacattcgaaaatgaatatgtatg

SEQ ID NO: 175714 - DNA, 25 bp, Artificial sequence
  SiRNA target sequence
cacattcgaaaatgaatatgtatgc

SEQ ID NO: 175715 - DNA, 25 bp, Artificial sequence
  SiRNA target sequence
acattcgaaaatgaatatgtatgca

SEQ ID NO: 175716 - DNA, 25 bp, Artificial sequence
  SiRNA target sequence
cattcgaaaatgaatatgtatgcac

SEQ ID NO: 175717 - DNA, 25 bp, Artificial sequence
  SiRNA target sequence
attcgaaaatgaatatgtatgcaca

SEQ ID NO: 175718 - DNA, 25 bp, Artificial sequence
  SiRNA target sequence
ttcgaaaatgaatatgtatgcacac

SEQ ID NO: 175719 - DNA, 25 bp, Artificial sequence
  SiRNA target sequence
tcgaaaatgaatatgtatgcacact

SEQ ID NO: 175720 - DNA, 25 bp, Artificial sequence
  SiRNA target sequence
cgaaaatgaatatgtatgcacacta

SEQ ID NO: 175721 - DNA, 25 bp, Artificial sequence
  SiRNA target sequence
gaaaatgaatatgtatgcacactat

SEQ ID NO: 175722 - DNA, 25 bp, Artificial sequence
  SiRNA target sequence
aaaatgaatatgtatgcacactata

SEQ ID NO: 175723 - DNA, 25 bp, Artificial sequence
  SiRNA target sequence
aaatgaatatgtatgcacactataa

SEQ ID NO: 175724 - DNA, 25 bp, Artificial sequence
  SiRNA target sequence
aatgaatatgtatgcacactataac

SEQ ID NO: 175725 - DNA, 25 bp, Artificial sequence
  SiRNA target sequence
atgaatatgtatgcacactataaca

SEQ ID NO: 175726 - DNA, 25 bp, Artificial sequence
  SiRNA target sequence
tgaatatgtatgcacactataacaa

SEQ ID NO: 175727 - DNA, 25 bp, Artificial sequence
  SiRNA target sequence
gaatatgtatgcacactataacaat

SEQ ID NO: 175728 - DNA, 25 bp, Artificial sequence
  SiRNA target sequence
aatatgtatgcacactataacaatc

SEQ ID NO: 175729 - DNA, 25 bp, Artificial sequence
  SiRNA target sequence
atatgtatgcacactataacaatca

SEQ ID NO: 175730 - DNA, 25 bp, Artificial sequence
  SiRNA target sequence
tatgtatgcacactataacaatcat

SEQ ID NO: 175731 - DNA, 25 bp, Artificial sequence
  SiRNA target sequence
atgtatgcacactataacaatcata

SEQ ID NO: 175732 - DNA, 25 bp, Artificial sequence
  SiRNA target sequence
tgtatgcacactataacaatcatat

SEQ ID NO: 175733 - DNA, 25 bp, Artificial sequence
  SiRNA target sequence
gtatgcacactataacaatcatata

SEQ ID NO: 175734 - DNA, 25 bp, Artificial sequence
  SiRNA target sequence
tatgcacactataacaatcatataa

SEQ ID NO: 175735 - DNA, 25 bp, Artificial sequence
  SiRNA target sequence
atgcacactataacaatcatataat

SEQ ID NO: 175736 - DNA, 25 bp, Artificial sequence
  SiRNA target sequence
tgcacactataacaatcatataatg

SEQ ID NO: 175737 - DNA, 25 bp, Artificial sequence
  SiRNA target sequence
gcacactataacaatcatataatgt

SEQ ID NO: 175738 - DNA, 25 bp, Artificial sequence
  SiRNA target sequence
cacactataacaatcatataatgtc

SEQ ID NO: 175739 - DNA, 25 bp, Artificial sequence
  SiRNA target sequence
acactataacaatcatataatgtcc

SEQ ID NO: 175740 - DNA, 25 bp, Artificial sequence
  SiRNA target sequence
cactataacaatcatataatgtcct

SEQ ID NO: 175741 - DNA, 25 bp, Artificial sequence
  SiRNA target sequence
actataacaatcatataatgtcctt

SEQ ID NO: 175742 - DNA, 25 bp, Artificial sequence
  SiRNA target sequence
ctataacaatcatataatgtccttt

SEQ ID NO: 175743 - DNA, 25 bp, Artificial sequence
  SiRNA target sequence
tataacaatcatataatgtccttta

SEQ ID NO: 175744 - DNA, 25 bp, Artificial sequence
  SiRNA target sequence
ataacaatcatataatgtcctttag

SEQ ID NO: 175745 - DNA, 25 bp, Artificial sequence
  SiRNA target sequence
taacaatcatataatgtcctttagt

SEQ ID NO: 175746 - DNA, 25 bp, Artificial sequence
  SiRNA target sequence
aacaatcatataatgtcctttagtg

SEQ ID NO: 175747 - DNA, 25 bp, Artificial sequence
  SiRNA target sequence
acaatcatataatgtcctttagtga

SEQ ID NO: 175748 - DNA, 25 bp, Artificial sequence
  SiRNA target sequence
caatcatataatgtcctttagtgat

SEQ ID NO: 175749 - DNA, 25 bp, Artificial sequence
  SiRNA target sequence
aatcatataatgtcctttagtgatt

SEQ ID NO: 175750 - DNA, 25 bp, Artificial sequence
  SiRNA target sequence
atcatataatgtcctttagtgattt

SEQ ID NO: 175751 - DNA, 25 bp, Artificial sequence
  SiRNA target sequence
tcatataatgtcctttagtgatttt

SEQ ID NO: 175752 - DNA, 25 bp, Artificial sequence
  SiRNA target sequence
catataatgtcctttagtgattttg

SEQ ID NO: 175753 - DNA, 25 bp, Artificial sequence
  SiRNA target sequence
atataatgtcctttagtgattttga

SEQ ID NO: 175754 - DNA, 25 bp, Artificial sequence
  SiRNA target sequence
tataatgtcctttagtgattttgaa

SEQ ID NO: 175755 - DNA, 25 bp, Artificial sequence
  SiRNA target sequence
ataatgtcctttagtgattttgaat

SEQ ID NO: 175756 - DNA, 25 bp, Artificial sequence
  SiRNA target sequence
taatgtcctttagtgattttgaata

SEQ ID NO: 175757 - DNA, 25 bp, Artificial sequence
  SiRNA target sequence
aatgtcctttagtgattttgaatat

SEQ ID NO: 175758 - DNA, 25 bp, Artificial sequence
  SiRNA target sequence
atgtcctttagtgattttgaatatc

SEQ ID NO: 175759 - DNA, 25 bp, Artificial sequence
  SiRNA target sequence
tgtcctttagtgattttgaatatca

SEQ ID NO: 175760 - DNA, 25 bp, Artificial sequence
  SiRNA target sequence
gtcctttagtgattttgaatatcac

SEQ ID NO: 175761 - DNA, 25 bp, Artificial sequence
  SiRNA target sequence
tcctttagtgattttgaatatcact

SEQ ID NO: 175762 - DNA, 25 bp, Artificial sequence
  SiRNA target sequence
cctttagtgattttgaatatcactt

SEQ ID NO: 175763 - DNA, 25 bp, Artificial sequence
  SiRNA target sequence
ctttagtgattttgaatatcactta

SEQ ID NO: 175764 - DNA, 25 bp, Artificial sequence
  SiRNA target sequence
tttagtgattttgaatatcacttaa

SEQ ID NO: 175765 - DNA, 25 bp, Artificial sequence
  SiRNA target sequence
ttagtgattttgaatatcacttaat

SEQ ID NO: 175766 - DNA, 25 bp, Artificial sequence
  SiRNA target sequence
tagtgattttgaatatcacttaatt

SEQ ID NO: 175767 - DNA, 25 bp, Artificial sequence
  SiRNA target sequence
agtgattttgaatatcacttaattt

SEQ ID NO: 175768 - DNA, 25 bp, Artificial sequence
  SiRNA target sequence
gtgattttgaatatcacttaatttc

SEQ ID NO: 175769 - DNA, 25 bp, Artificial sequence
  SiRNA target sequence
tgattttgaatatcacttaatttca

SEQ ID NO: 175770 - DNA, 25 bp, Artificial sequence
  SiRNA target sequence
gattttgaatatcacttaatttcat

SEQ ID NO: 175771 - DNA, 25 bp, Artificial sequence
  SiRNA target sequence
attttgaatatcacttaatttcatt

SEQ ID NO: 175772 - DNA, 25 bp, Artificial sequence
  SiRNA target sequence
ttttgaatatcacttaatttcattt

SEQ ID NO: 175773 - DNA, 25 bp, Artificial sequence
  SiRNA target sequence
tttgaatatcacttaatttcattta

SEQ ID NO: 175774 - DNA, 25 bp, Artificial sequence
  SiRNA target sequence
ttgaatatcacttaatttcatttat

SEQ ID NO: 175775 - DNA, 25 bp, Artificial sequence
  SiRNA target sequence
tgaatatcacttaatttcatttata

SEQ ID NO: 175776 - DNA, 25 bp, Artificial sequence
  SiRNA target sequence
gaatatcacttaatttcatttataa

SEQ ID NO: 175777 - DNA, 25 bp, Artificial sequence
  SiRNA target sequence
aatatcacttaatttcatttataaa

SEQ ID NO: 175778 - DNA, 25 bp, Artificial sequence
  SiRNA target sequence
atatcacttaatttcatttataaaa

SEQ ID NO: 175779 - DNA, 25 bp, Artificial sequence
  SiRNA target sequence
tatcacttaatttcatttataaaac

SEQ ID NO: 175780 - DNA, 25 bp, Artificial sequence
  SiRNA target sequence
atcacttaatttcatttataaaact

SEQ ID NO: 175781 - DNA, 25 bp, Artificial sequence
  SiRNA target sequence
tcacttaatttcatttataaaacta

SEQ ID NO: 175782 - DNA, 25 bp, Artificial sequence
  SiRNA target sequence
cacttaatttcatttataaaactaa

SEQ ID NO: 175783 - DNA, 25 bp, Artificial sequence
  SiRNA target sequence
acttaatttcatttataaaactaaa

SEQ ID NO: 175784 - DNA, 25 bp, Artificial sequence
  SiRNA target sequence
cttaatttcatttataaaactaaaa

SEQ ID NO: 175785 - DNA, 25 bp, Artificial sequence
  SiRNA target sequence
ttaatttcatttataaaactaaaat

SEQ ID NO: 175786 - DNA, 25 bp, Artificial sequence
  SiRNA target sequence
taatttcatttataaaactaaaatt

SEQ ID NO: 175787 - DNA, 25 bp, Artificial sequence
  SiRNA target sequence
aatttcatttataaaactaaaattt

SEQ ID NO: 175788 - DNA, 25 bp, Artificial sequence
  SiRNA target sequence
atttcatttataaaactaaaattta

SEQ ID NO: 175789 - DNA, 25 bp, Artificial sequence
  SiRNA target sequence
tttcatttataaaactaaaatttaa

SEQ ID NO: 175790 - DNA, 25 bp, Artificial sequence
  SiRNA target sequence
ttcatttataaaactaaaatttaat

SEQ ID NO: 175791 - DNA, 25 bp, Artificial sequence
  SiRNA target sequence
tcatttataaaactaaaatttaatg

SEQ ID NO: 175792 - DNA, 25 bp, Artificial sequence
  SiRNA target sequence
catttataaaactaaaatttaatgt

SEQ ID NO: 175793 - DNA, 25 bp, Artificial sequence
  SiRNA target sequence
atttataaaactaaaatttaatgta

SEQ ID NO: 175794 - DNA, 25 bp, Artificial sequence
  SiRNA target sequence
tttataaaactaaaatttaatgtaa

SEQ ID NO: 175795 - DNA, 25 bp, Artificial sequence
  SiRNA target sequence
ttataaaactaaaatttaatgtaat

SEQ ID NO: 175796 - DNA, 25 bp, Artificial sequence
  SiRNA target sequence
tataaaactaaaatttaatgtaata

SEQ ID NO: 175797 - DNA, 25 bp, Artificial sequence
  SiRNA target sequence
ataaaactaaaatttaatgtaataa

SEQ ID NO: 175798 - DNA, 25 bp, Artificial sequence
  SiRNA target sequence
taaaactaaaatttaatgtaataaa

SEQ ID NO: 175799 - DNA, 25 bp, Artificial sequence
  SiRNA target sequence
aaaactaaaatttaatgtaataaaa

SEQ ID NO: 175800 - DNA, 25 bp, Artificial sequence
  SiRNA target sequence
aaactaaaatttaatgtaataaaag

SEQ ID NO: 175801 - DNA, 25 bp, Artificial sequence
  SiRNA target sequence
aactaaaatttaatgtaataaaagt

SEQ ID NO: 175802 - DNA, 25 bp, Artificial sequence
  SiRNA target sequence
actaaaatttaatgtaataaaagta

SEQ ID NO: 175803 - DNA, 25 bp, Artificial sequence
  SiRNA target sequence
ctaaaatttaatgtaataaaagtat

SEQ ID NO: 175804 - DNA, 25 bp, Artificial sequence
  SiRNA target sequence
taaaatttaatgtaataaaagtata

SEQ ID NO: 175805 - DNA, 25 bp, Artificial sequence
  SiRNA target sequence
aaaatttaatgtaataaaagtatat

SEQ ID NO: 175806 - DNA, 25 bp, Artificial sequence
  SiRNA target sequence
aaatttaatgtaataaaagtatatg

SEQ ID NO: 175807 - DNA, 25 bp, Artificial sequence
  SiRNA target sequence
aatttaatgtaataaaagtatatga

SEQ ID NO: 175808 - DNA, 25 bp, Artificial sequence
  SiRNA target sequence
atttaatgtaataaaagtatatgat

SEQ ID NO: 175809 - DNA, 25 bp, Artificial sequence
  SiRNA target sequence
tttaatgtaataaaagtatatgata

SEQ ID NO: 175810 - DNA, 25 bp, Artificial sequence
  SiRNA target sequence
ttaatgtaataaaagtatatgatac

SEQ ID NO: 175811 - DNA, 25 bp, Artificial sequence
  SiRNA target sequence
taatgtaataaaagtatatgataca

SEQ ID NO: 175812 - DNA, 25 bp, Artificial sequence
  SiRNA target sequence
aatgtaataaaagtatatgatacat

SEQ ID NO: 175813 - DNA, 25 bp, Artificial sequence
  SiRNA target sequence
atgtaataaaagtatatgatacatc

SEQ ID NO: 175814 - DNA, 25 bp, Artificial sequence
  SiRNA target sequence
tgtaataaaagtatatgatacatct

SEQ ID NO: 175815 - DNA, 25 bp, Artificial sequence
  SiRNA target sequence
gtaataaaagtatatgatacatctt

SEQ ID NO: 175816 - DNA, 25 bp, Artificial sequence
  SiRNA target sequence
taataaaagtatatgatacatctta

SEQ ID NO: 175817 - DNA, 25 bp, Artificial sequence
  SiRNA target sequence
aataaaagtatatgatacatcttat

SEQ ID NO: 175818 - DNA, 25 bp, Artificial sequence
  SiRNA target sequence
ataaaagtatatgatacatcttatg

SEQ ID NO: 175819 - DNA, 25 bp, Artificial sequence
  SiRNA target sequence
taaaagtatatgatacatcttatgt

SEQ ID NO: 175820 - DNA, 25 bp, Artificial sequence
  SiRNA target sequence
aaaagtatatgatacatcttatgtc

SEQ ID NO: 175821 - DNA, 25 bp, Artificial sequence
  SiRNA target sequence
aaagtatatgatacatcttatgtca

SEQ ID NO: 175822 - DNA, 25 bp, Artificial sequence
  SiRNA target sequence
aagtatatgatacatcttatgtcaa

SEQ ID NO: 175823 - DNA, 25 bp, Artificial sequence
  SiRNA target sequence
agtatatgatacatcttatgtcaaa

SEQ ID NO: 175824 - DNA, 25 bp, Artificial sequence
  SiRNA target sequence
gtatatgatacatcttatgtcaaaa

SEQ ID NO: 175825 - DNA, 25 bp, Artificial sequence
  SiRNA target sequence
tatatgatacatcttatgtcaaaaa

SEQ ID NO: 175826 - DNA, 25 bp, Artificial sequence
  SiRNA target sequence
atatgatacatcttatgtcaaaaat

SEQ ID NO: 175827 - DNA, 25 bp, Artificial sequence
  SiRNA target sequence
tatgatacatcttatgtcaaaaata

SEQ ID NO: 175828 - DNA, 25 bp, Artificial sequence
  SiRNA target sequence
atgatacatcttatgtcaaaaatat

SEQ ID NO: 175829 - DNA, 25 bp, Artificial sequence
  SiRNA target sequence
tgatacatcttatgtcaaaaatatt

SEQ ID NO: 175830 - DNA, 25 bp, Artificial sequence
  SiRNA target sequence
gatacatcttatgtcaaaaatattc

SEQ ID NO: 175831 - DNA, 25 bp, Artificial sequence
  SiRNA target sequence
atacatcttatgtcaaaaatattct

SEQ ID NO: 175832 - DNA, 25 bp, Artificial sequence
  SiRNA target sequence
tacatcttatgtcaaaaatattctg

SEQ ID NO: 175833 - DNA, 25 bp, Artificial sequence
  SiRNA target sequence
acatcttatgtcaaaaatattctgt

SEQ ID NO: 175834 - DNA, 25 bp, Artificial sequence
  SiRNA target sequence
catcttatgtcaaaaatattctgta

SEQ ID NO: 175835 - DNA, 25 bp, Artificial sequence
  SiRNA target sequence
atcttatgtcaaaaatattctgtat

SEQ ID NO: 175836 - DNA, 25 bp, Artificial sequence
  SiRNA target sequence
tcttatgtcaaaaatattctgtatg

SEQ ID NO: 175837 - DNA, 25 bp, Artificial sequence
  SiRNA target sequence
cttatgtcaaaaatattctgtatga

SEQ ID NO: 175838 - DNA, 25 bp, Artificial sequence
  SiRNA target sequence
ttatgtcaaaaatattctgtatgat

SEQ ID NO: 175839 - DNA, 25 bp, Artificial sequence
  SiRNA target sequence
tatgtcaaaaatattctgtatgata

SEQ ID NO: 175840 - DNA, 25 bp, Artificial sequence
  SiRNA target sequence
atgtcaaaaatattctgtatgatag

SEQ ID NO: 175841 - DNA, 25 bp, Artificial sequence
  SiRNA target sequence
tgtcaaaaatattctgtatgatagt

SEQ ID NO: 175842 - DNA, 25 bp, Artificial sequence
  SiRNA target sequence
gtcaaaaatattctgtatgatagtg

SEQ ID NO: 175843 - DNA, 25 bp, Artificial sequence
  SiRNA target sequence
tcaaaaatattctgtatgatagtgt

SEQ ID NO: 175844 - DNA, 25 bp, Artificial sequence
  SiRNA target sequence
caaaaatattctgtatgatagtgtt

SEQ ID NO: 175845 - DNA, 25 bp, Artificial sequence
  SiRNA target sequence
aaaaatattctgtatgatagtgttt

SEQ ID NO: 175846 - DNA, 25 bp, Artificial sequence
  SiRNA target sequence
aaaatattctgtatgatagtgttta

SEQ ID NO: 175847 - DNA, 25 bp, Artificial sequence
  SiRNA target sequence
aaatattctgtatgatagtgtttat

SEQ ID NO: 175848 - DNA, 25 bp, Artificial sequence
  SiRNA target sequence
aatattctgtatgatagtgtttatg

SEQ ID NO: 175849 - DNA, 25 bp, Artificial sequence
  SiRNA target sequence
atattctgtatgatagtgtttatga

SEQ ID NO: 175850 - DNA, 25 bp, Artificial sequence
  SiRNA target sequence
tattctgtatgatagtgtttatgag

SEQ ID NO: 175851 - DNA, 25 bp, Artificial sequence
  SiRNA target sequence
attctgtatgatagtgtttatgagg

SEQ ID NO: 175852 - DNA, 25 bp, Artificial sequence
  SiRNA target sequence
ttctgtatgatagtgtttatgagga

SEQ ID NO: 175853 - DNA, 25 bp, Artificial sequence
  SiRNA target sequence
tctgtatgatagtgtttatgaggaa

SEQ ID NO: 175854 - DNA, 25 bp, Artificial sequence
  SiRNA target sequence
ctgtatgatagtgtttatgaggaaa

SEQ ID NO: 175855 - DNA, 25 bp, Artificial sequence
  SiRNA target sequence
tgtatgatagtgtttatgaggaaag

SEQ ID NO: 175856 - DNA, 25 bp, Artificial sequence
  SiRNA target sequence
gtatgatagtgtttatgaggaaagc

SEQ ID NO: 175857 - DNA, 25 bp, Artificial sequence
  SiRNA target sequence
tatgatagtgtttatgaggaaagca

SEQ ID NO: 175858 - DNA, 25 bp, Artificial sequence
  SiRNA target sequence
atgatagtgtttatgaggaaagcac

SEQ ID NO: 175859 - DNA, 25 bp, Artificial sequence
  SiRNA target sequence
tgatagtgtttatgaggaaagcacg

SEQ ID NO: 175860 - DNA, 25 bp, Artificial sequence
  SiRNA target sequence
gatagtgtttatgaggaaagcacga

SEQ ID NO: 175861 - DNA, 25 bp, Artificial sequence
  SiRNA target sequence
atagtgtttatgaggaaagcacgag

SEQ ID NO: 175862 - DNA, 25 bp, Artificial sequence
  SiRNA target sequence
tagtgtttatgaggaaagcacgaga

SEQ ID NO: 175863 - DNA, 25 bp, Artificial sequence
  SiRNA target sequence
agtgtttatgaggaaagcacgagag

SEQ ID NO: 175864 - DNA, 25 bp, Artificial sequence
  SiRNA target sequence
gtgtttatgaggaaagcacgagaga

SEQ ID NO: 175865 - DNA, 25 bp, Artificial sequence
  SiRNA target sequence
tgtttatgaggaaagcacgagagac

SEQ ID NO: 175866 - DNA, 25 bp, Artificial sequence
  SiRNA target sequence
gtttatgaggaaagcacgagagaca

SEQ ID NO: 175867 - DNA, 25 bp, Artificial sequence
  SiRNA target sequence
tttatgaggaaagcacgagagacaa

SEQ ID NO: 175868 - DNA, 25 bp, Artificial sequence
  SiRNA target sequence
ttatgaggaaagcacgagagacaaa

SEQ ID NO: 175869 - DNA, 25 bp, Artificial sequence
  SiRNA target sequence
tatgaggaaagcacgagagacaaaa

SEQ ID NO: 175870 - DNA, 25 bp, Artificial sequence
  SiRNA target sequence
atgaggaaagcacgagagacaaaat

SEQ ID NO: 175871 - DNA, 25 bp, Artificial sequence
  SiRNA target sequence
tgaggaaagcacgagagacaaaata

SEQ ID NO: 175872 - DNA, 25 bp, Artificial sequence
  SiRNA target sequence
gaggaaagcacgagagacaaaataa

SEQ ID NO: 175873 - DNA, 25 bp, Artificial sequence
  SiRNA target sequence
aggaaagcacgagagacaaaataat

SEQ ID NO: 175874 - DNA, 25 bp, Artificial sequence
  SiRNA target sequence
ggaaagcacgagagacaaaataata

SEQ ID NO: 175875 - DNA, 25 bp, Artificial sequence
  SiRNA target sequence
gaaagcacgagagacaaaataataa

SEQ ID NO: 175876 - DNA, 25 bp, Artificial sequence
  SiRNA target sequence
aaagcacgagagacaaaataataat

SEQ ID NO: 175877 - DNA, 25 bp, Artificial sequence
  SiRNA target sequence
aagcacgagagacaaaataataata

SEQ ID NO: 175878 - DNA, 25 bp, Artificial sequence
  SiRNA target sequence
agcacgagagacaaaataataataa

SEQ ID NO: 175879 - DNA, 25 bp, Artificial sequence
  SiRNA target sequence
gcacgagagacaaaataataataag

SEQ ID NO: 175880 - DNA, 25 bp, Artificial sequence
  SiRNA target sequence
cacgagagacaaaataataataagt

SEQ ID NO: 175881 - DNA, 25 bp, Artificial sequence
  SiRNA target sequence
acgagagacaaaataataataagtg

SEQ ID NO: 175882 - DNA, 25 bp, Artificial sequence
  SiRNA target sequence
cgagagacaaaataataataagtga

SEQ ID NO: 175883 - DNA, 25 bp, Artificial sequence
  SiRNA target sequence
gagagacaaaataataataagtgac

SEQ ID NO: 175884 - DNA, 25 bp, Artificial sequence
  SiRNA target sequence
agagacaaaataataataagtgact

SEQ ID NO: 175885 - DNA, 25 bp, Artificial sequence
  SiRNA target sequence
gagacaaaataataataagtgactg

SEQ ID NO: 175886 - DNA, 25 bp, Artificial sequence
  SiRNA target sequence
agacaaaataataataagtgactgt

SEQ ID NO: 175887 - DNA, 25 bp, Artificial sequence
  SiRNA target sequence
gacaaaataataataagtgactgtc

SEQ ID NO: 175888 - DNA, 25 bp, Artificial sequence
  SiRNA target sequence
acaaaataataataagtgactgtcc

SEQ ID NO: 175889 - DNA, 25 bp, Artificial sequence
  SiRNA target sequence
caaaataataataagtgactgtcct

SEQ ID NO: 175890 - DNA, 25 bp, Artificial sequence
  SiRNA target sequence
aaaataataataagtgactgtcctg

SEQ ID NO: 175891 - DNA, 25 bp, Artificial sequence
  SiRNA target sequence
aaataataataagtgactgtcctgg

SEQ ID NO: 175892 - DNA, 25 bp, Artificial sequence
  SiRNA target sequence
aataataataagtgactgtcctggg

SEQ ID NO: 175893 - DNA, 25 bp, Artificial sequence
  SiRNA target sequence
ataataataagtgactgtcctggga

SEQ ID NO: 175894 - DNA, 25 bp, Artificial sequence
  SiRNA target sequence
taataataagtgactgtcctgggac

SEQ ID NO: 175895 - DNA, 25 bp, Artificial sequence
  SiRNA target sequence
aataataagtgactgtcctgggact

SEQ ID NO: 175896 - DNA, 25 bp, Artificial sequence
  SiRNA target sequence
ataataagtgactgtcctgggactg

SEQ ID NO: 175897 - DNA, 25 bp, Artificial sequence
  SiRNA target sequence
taataagtgactgtcctgggactgt

SEQ ID NO: 175898 - DNA, 25 bp, Artificial sequence
  SiRNA target sequence
aataagtgactgtcctgggactgtt

SEQ ID NO: 175899 - DNA, 25 bp, Artificial sequence
  SiRNA target sequence
ataagtgactgtcctgggactgttt

SEQ ID NO: 175900 - DNA, 25 bp, Artificial sequence
  SiRNA target sequence
taagtgactgtcctgggactgtttc

SEQ ID NO: 175901 - DNA, 25 bp, Artificial sequence
  SiRNA target sequence
aagtgactgtcctgggactgtttca

SEQ ID NO: 175902 - DNA, 25 bp, Artificial sequence
  SiRNA target sequence
agtgactgtcctgggactgtttcat

SEQ ID NO: 175903 - DNA, 25 bp, Artificial sequence
  SiRNA target sequence
gtgactgtcctgggactgtttcata

SEQ ID NO: 175904 - DNA, 25 bp, Artificial sequence
  SiRNA target sequence
tgactgtcctgggactgtttcatat

SEQ ID NO: 175905 - DNA, 25 bp, Artificial sequence
  SiRNA target sequence
gactgtcctgggactgtttcatata

SEQ ID NO: 175906 - DNA, 25 bp, Artificial sequence
  SiRNA target sequence
actgtcctgggactgtttcatatat

SEQ ID NO: 175907 - DNA, 25 bp, Artificial sequence
  SiRNA target sequence
ctgtcctgggactgtttcatatatt

SEQ ID NO: 175908 - DNA, 25 bp, Artificial sequence
  SiRNA target sequence
tgtcctgggactgtttcatatattg

SEQ ID NO: 175909 - DNA, 25 bp, Artificial sequence
  SiRNA target sequence
gtcctgggactgtttcatatattga

SEQ ID NO: 175910 - DNA, 25 bp, Artificial sequence
  SiRNA target sequence
tcctgggactgtttcatatattgaa

SEQ ID NO: 175911 - DNA, 25 bp, Artificial sequence
  SiRNA target sequence
cctgggactgtttcatatattgaaa

SEQ ID NO: 175912 - DNA, 25 bp, Artificial sequence
  SiRNA target sequence
ctgggactgtttcatatattgaaag

SEQ ID NO: 175913 - DNA, 25 bp, Artificial sequence
  SiRNA target sequence
tgggactgtttcatatattgaaagg

SEQ ID NO: 175914 - DNA, 25 bp, Artificial sequence
  SiRNA target sequence
gggactgtttcatatattgaaaggc

SEQ ID NO: 175915 - DNA, 25 bp, Artificial sequence
  SiRNA target sequence
ggactgtttcatatattgaaaggca

SEQ ID NO: 175916 - DNA, 25 bp, Artificial sequence
  SiRNA target sequence
gactgtttcatatattgaaaggcaa

SEQ ID NO: 175917 - DNA, 25 bp, Artificial sequence
  SiRNA target sequence
actgtttcatatattgaaaggcaag

SEQ ID NO: 175918 - DNA, 25 bp, Artificial sequence
  SiRNA target sequence
ctgtttcatatattgaaaggcaagc

SEQ ID NO: 175919 - DNA, 25 bp, Artificial sequence
  SiRNA target sequence
tgtttcatatattgaaaggcaagca

SEQ ID NO: 175920 - DNA, 25 bp, Artificial sequence
  SiRNA target sequence
gtttcatatattgaaaggcaagcac

SEQ ID NO: 175921 - DNA, 25 bp, Artificial sequence
  SiRNA target sequence
tttcatatattgaaaggcaagcaca

SEQ ID NO: 175922 - DNA, 25 bp, Artificial sequence
  SiRNA target sequence
ttcatatattgaaaggcaagcacac

SEQ ID NO: 175923 - DNA, 25 bp, Artificial sequence
  SiRNA target sequence
tcatatattgaaaggcaagcacacc

SEQ ID NO: 175924 - DNA, 25 bp, Artificial sequence
  SiRNA target sequence
catatattgaaaggcaagcacacca

SEQ ID NO: 175925 - DNA, 25 bp, Artificial sequence
  SiRNA target sequence
atatattgaaaggcaagcacaccat

SEQ ID NO: 175926 - DNA, 25 bp, Artificial sequence
  SiRNA target sequence
tatattgaaaggcaagcacaccatt

SEQ ID NO: 175927 - DNA, 25 bp, Artificial sequence
  SiRNA target sequence
atattgaaaggcaagcacaccattt

SEQ ID NO: 175928 - DNA, 25 bp, Artificial sequence
  SiRNA target sequence
tattgaaaggcaagcacaccattta

SEQ ID NO: 175929 - DNA, 25 bp, Artificial sequence
  SiRNA target sequence
attgaaaggcaagcacaccatttaa

SEQ ID NO: 175930 - DNA, 25 bp, Artificial sequence
  SiRNA target sequence
ttgaaaggcaagcacaccatttaat

SEQ ID NO: 175931 - DNA, 25 bp, Artificial sequence
  SiRNA target sequence
tgaaaggcaagcacaccatttaatt

SEQ ID NO: 175932 - DNA, 25 bp, Artificial sequence
  SiRNA target sequence
gaaaggcaagcacaccatttaattg

SEQ ID NO: 175933 - DNA, 25 bp, Artificial sequence
  SiRNA target sequence
aaaggcaagcacaccatttaattga

SEQ ID NO: 175934 - DNA, 25 bp, Artificial sequence
  SiRNA target sequence
aaggcaagcacaccatttaattgaa

SEQ ID NO: 175935 - DNA, 25 bp, Artificial sequence
  SiRNA target sequence
aggcaagcacaccatttaattgaat

SEQ ID NO: 175936 - DNA, 25 bp, Artificial sequence
  SiRNA target sequence
ggcaagcacaccatttaattgaata

SEQ ID NO: 175937 - DNA, 25 bp, Artificial sequence
  SiRNA target sequence
gcaagcacaccatttaattgaatat

SEQ ID NO: 175938 - DNA, 25 bp, Artificial sequence
  SiRNA target sequence
caagcacaccatttaattgaatatt

SEQ ID NO: 175939 - DNA, 25 bp, Artificial sequence
  SiRNA target sequence
aagcacaccatttaattgaatattt

SEQ ID NO: 175940 - DNA, 25 bp, Artificial sequence
  SiRNA target sequence
agcacaccatttaattgaatattta

SEQ ID NO: 175941 - DNA, 25 bp, Artificial sequence
  SiRNA target sequence
gcacaccatttaattgaatatttat

SEQ ID NO: 175942 - DNA, 25 bp, Artificial sequence
  SiRNA target sequence
cacaccatttaattgaatatttatc

SEQ ID NO: 175943 - DNA, 25 bp, Artificial sequence
  SiRNA target sequence
acaccatttaattgaatatttatct

SEQ ID NO: 175944 - DNA, 25 bp, Artificial sequence
  SiRNA target sequence
caccatttaattgaatatttatctg

SEQ ID NO: 175945 - DNA, 25 bp, Artificial sequence
  SiRNA target sequence
accatttaattgaatatttatctgt

SEQ ID NO: 175946 - DNA, 25 bp, Artificial sequence
  SiRNA target sequence
ccatttaattgaatatttatctgtt

SEQ ID NO: 175947 - DNA, 25 bp, Artificial sequence
  SiRNA target sequence
catttaattgaatatttatctgtta

SEQ ID NO: 175948 - DNA, 25 bp, Artificial sequence
  SiRNA target sequence
atttaattgaatatttatctgttac

SEQ ID NO: 175949 - DNA, 25 bp, Artificial sequence
  SiRNA target sequence
tttaattgaatatttatctgttact

SEQ ID NO: 175950 - DNA, 25 bp, Artificial sequence
  SiRNA target sequence
ttaattgaatatttatctgttactt

SEQ ID NO: 175951 - DNA, 25 bp, Artificial sequence
  SiRNA target sequence
taattgaatatttatctgttacttc

SEQ ID NO: 175952 - DNA, 25 bp, Artificial sequence
  SiRNA target sequence
aattgaatatttatctgttacttct

SEQ ID NO: 175953 - DNA, 25 bp, Artificial sequence
  SiRNA target sequence
attgaatatttatctgttacttcta

SEQ ID NO: 175954 - DNA, 25 bp, Artificial sequence
  SiRNA target sequence
ttgaatatttatctgttacttctac

SEQ ID NO: 175955 - DNA, 25 bp, Artificial sequence
  SiRNA target sequence
tgaatatttatctgttacttctaca

SEQ ID NO: 175956 - DNA, 25 bp, Artificial sequence
  SiRNA target sequence
gaatatttatctgttacttctacac

SEQ ID NO: 175957 - DNA, 25 bp, Artificial sequence
  SiRNA target sequence
aatatttatctgttacttctacaca

SEQ ID NO: 175958 - DNA, 25 bp, Artificial sequence
  SiRNA target sequence
atatttatctgttacttctacacaa

SEQ ID NO: 175959 - DNA, 25 bp, Artificial sequence
  SiRNA target sequence
tatttatctgttacttctacacaac

SEQ ID NO: 175960 - DNA, 25 bp, Artificial sequence
  SiRNA target sequence
atttatctgttacttctacacaaca

SEQ ID NO: 175961 - DNA, 25 bp, Artificial sequence
  SiRNA target sequence
tttatctgttacttctacacaacaa

SEQ ID NO: 175962 - DNA, 25 bp, Artificial sequence
  SiRNA target sequence
ttatctgttacttctacacaacaac

SEQ ID NO: 175963 - DNA, 25 bp, Artificial sequence
  SiRNA target sequence
tatctgttacttctacacaacaaca

SEQ ID NO: 175964 - DNA, 25 bp, Artificial sequence
  SiRNA target sequence
atctgttacttctacacaacaacaa

SEQ ID NO: 175965 - DNA, 25 bp, Artificial sequence
  SiRNA target sequence
tctgttacttctacacaacaacaag

SEQ ID NO: 175966 - DNA, 25 bp, Artificial sequence
  SiRNA target sequence
ctgttacttctacacaacaacaagc

SEQ ID NO: 175967 - DNA, 25 bp, Artificial sequence
  SiRNA target sequence
tgttacttctacacaacaacaagcc

SEQ ID NO: 175968 - DNA, 25 bp, Artificial sequence
  SiRNA target sequence
gttacttctacacaacaacaagcca

SEQ ID NO: 175969 - DNA, 25 bp, Artificial sequence
  SiRNA target sequence
ttacttctacacaacaacaagccat

SEQ ID NO: 175970 - DNA, 25 bp, Artificial sequence
  SiRNA target sequence
tacttctacacaacaacaagccata

SEQ ID NO: 175971 - DNA, 25 bp, Artificial sequence
  SiRNA target sequence
acttctacacaacaacaagccataa

SEQ ID NO: 175972 - DNA, 25 bp, Artificial sequence
  SiRNA target sequence
cttctacacaacaacaagccataaa

SEQ ID NO: 175973 - DNA, 25 bp, Artificial sequence
  SiRNA target sequence
ttctacacaacaacaagccataaag

SEQ ID NO: 175974 - DNA, 25 bp, Artificial sequence
  SiRNA target sequence
tctacacaacaacaagccataaagc

SEQ ID NO: 175975 - DNA, 25 bp, Artificial sequence
  SiRNA target sequence
ctacacaacaacaagccataaagct

SEQ ID NO: 175976 - DNA, 25 bp, Artificial sequence
  SiRNA target sequence
tacacaacaacaagccataaagcta

SEQ ID NO: 175977 - DNA, 25 bp, Artificial sequence
  SiRNA target sequence
acacaacaacaagccataaagctac

SEQ ID NO: 175978 - DNA, 25 bp, Artificial sequence
  SiRNA target sequence
cacaacaacaagccataaagctact

SEQ ID NO: 175979 - DNA, 25 bp, Artificial sequence
  SiRNA target sequence
acaacaacaagccataaagctactt

SEQ ID NO: 175980 - DNA, 25 bp, Artificial sequence
  SiRNA target sequence
caacaacaagccataaagctacttg

SEQ ID NO: 175981 - DNA, 25 bp, Artificial sequence
  SiRNA target sequence
aacaacaagccataaagctacttgc

SEQ ID NO: 175982 - DNA, 25 bp, Artificial sequence
  SiRNA target sequence
acaacaagccataaagctacttgct

SEQ ID NO: 175983 - DNA, 25 bp, Artificial sequence
  SiRNA target sequence
caacaagccataaagctacttgctc

SEQ ID NO: 175984 - DNA, 25 bp, Artificial sequence
  SiRNA target sequence
aacaagccataaagctacttgctca

SEQ ID NO: 175985 - DNA, 25 bp, Artificial sequence
  SiRNA target sequence
acaagccataaagctacttgctcag

SEQ ID NO: 175986 - DNA, 25 bp, Artificial sequence
  SiRNA target sequence
caagccataaagctacttgctcagg

SEQ ID NO: 175987 - DNA, 25 bp, Artificial sequence
  SiRNA target sequence
aagccataaagctacttgctcaggg

SEQ ID NO: 175988 - DNA, 25 bp, Artificial sequence
  SiRNA target sequence
agccataaagctacttgctcagggg

SEQ ID NO: 175989 - DNA, 25 bp, Artificial sequence
  SiRNA target sequence
gccataaagctacttgctcaggggc

SEQ ID NO: 175990 - DNA, 25 bp, Artificial sequence
  SiRNA target sequence
ccataaagctacttgctcaggggcg

SEQ ID NO: 175991 - DNA, 25 bp, Artificial sequence
  SiRNA target sequence
cataaagctacttgctcaggggcga

SEQ ID NO: 175992 - DNA, 25 bp, Artificial sequence
  SiRNA target sequence
ataaagctacttgctcaggggcgaa

SEQ ID NO: 175993 - DNA, 25 bp, Artificial sequence
  SiRNA target sequence
taaagctacttgctcaggggcgaag

SEQ ID NO: 175994 - DNA, 25 bp, Artificial sequence
  SiRNA target sequence
aaagctacttgctcaggggcgaagt

SEQ ID NO: 175995 - DNA, 25 bp, Artificial sequence
  SiRNA target sequence
aagctacttgctcaggggcgaagta

SEQ ID NO: 175996 - DNA, 25 bp, Artificial sequence
  SiRNA target sequence
agctacttgctcaggggcgaagtat

SEQ ID NO: 175997 - DNA, 25 bp, Artificial sequence
  SiRNA target sequence
gctacttgctcaggggcgaagtata

SEQ ID NO: 175998 - DNA, 25 bp, Artificial sequence
  SiRNA target sequence
ctacttgctcaggggcgaagtataa

SEQ ID NO: 175999 - DNA, 25 bp, Artificial sequence
  SiRNA target sequence
tacttgctcaggggcgaagtataag

SEQ ID NO: 176000 - DNA, 25 bp, Artificial sequence
  SiRNA target sequence
acttgctcaggggcgaagtataagt

SEQ ID NO: 176001 - DNA, 25 bp, Artificial sequence
  SiRNA target sequence
cttgctcaggggcgaagtataagtg

SEQ ID NO: 176002 - DNA, 25 bp, Artificial sequence
  SiRNA target sequence
ttgctcaggggcgaagtataagtgt

SEQ ID NO: 176003 - DNA, 25 bp, Artificial sequence
  SiRNA target sequence
tgctcaggggcgaagtataagtgtc

SEQ ID NO: 176004 - DNA, 25 bp, Artificial sequence
  SiRNA target sequence
gctcaggggcgaagtataagtgtca

SEQ ID NO: 176005 - DNA, 25 bp, Artificial sequence
  SiRNA target sequence
ctcaggggcgaagtataagtgtcat

SEQ ID NO: 176006 - DNA, 25 bp, Artificial sequence
  SiRNA target sequence
tcaggggcgaagtataagtgtcata

SEQ ID NO: 176007 - DNA, 25 bp, Artificial sequence
  SiRNA target sequence
caggggcgaagtataagtgtcatac

SEQ ID NO: 176008 - DNA, 25 bp, Artificial sequence
  SiRNA target sequence
aggggcgaagtataagtgtcataca

SEQ ID NO: 176009 - DNA, 25 bp, Artificial sequence
  SiRNA target sequence
ggggcgaagtataagtgtcatacag

SEQ ID NO: 176010 - DNA, 25 bp, Artificial sequence
  SiRNA target sequence
gggcgaagtataagtgtcatacagt

SEQ ID NO: 176011 - DNA, 25 bp, Artificial sequence
  SiRNA target sequence
ggcgaagtataagtgtcatacagtg

SEQ ID NO: 176012 - DNA, 25 bp, Artificial sequence
  SiRNA target sequence
gcgaagtataagtgtcatacagtgc

SEQ ID NO: 176013 - DNA, 25 bp, Artificial sequence
  SiRNA target sequence
cgaagtataagtgtcatacagtgct

SEQ ID NO: 176014 - DNA, 25 bp, Artificial sequence
  SiRNA target sequence
gaagtataagtgtcatacagtgcta

SEQ ID NO: 176015 - DNA, 25 bp, Artificial sequence
  SiRNA target sequence
aagtataagtgtcatacagtgctat

SEQ ID NO: 176016 - DNA, 25 bp, Artificial sequence
  SiRNA target sequence
agtataagtgtcatacagtgctatg

SEQ ID NO: 176017 - DNA, 25 bp, Artificial sequence
  SiRNA target sequence
gtataagtgtcatacagtgctatga

SEQ ID NO: 176018 - DNA, 25 bp, Artificial sequence
  SiRNA target sequence
tataagtgtcatacagtgctatgat

SEQ ID NO: 176019 - DNA, 25 bp, Artificial sequence
  SiRNA target sequence
ataagtgtcatacagtgctatgata

SEQ ID NO: 176020 - DNA, 25 bp, Artificial sequence
  SiRNA target sequence
taagtgtcatacagtgctatgataa

SEQ ID NO: 176021 - DNA, 25 bp, Artificial sequence
  SiRNA target sequence
aagtgtcatacagtgctatgataaa

SEQ ID NO: 176022 - DNA, 25 bp, Artificial sequence
  SiRNA target sequence
agtgtcatacagtgctatgataaat

SEQ ID NO: 176023 - DNA, 25 bp, Artificial sequence
  SiRNA target sequence
gtgtcatacagtgctatgataaatt

SEQ ID NO: 176024 - DNA, 25 bp, Artificial sequence
  SiRNA target sequence
tgtcatacagtgctatgataaattt

SEQ ID NO: 176025 - DNA, 25 bp, Artificial sequence
  SiRNA target sequence
gtcatacagtgctatgataaatttt

SEQ ID NO: 176026 - DNA, 25 bp, Artificial sequence
  SiRNA target sequence
tcatacagtgctatgataaattttt

SEQ ID NO: 176027 - DNA, 25 bp, Artificial sequence
  SiRNA target sequence
catacagtgctatgataaattttta

SEQ ID NO: 176028 - DNA, 25 bp, Artificial sequence
  SiRNA target sequence
atacagtgctatgataaatttttag

SEQ ID NO: 176029 - DNA, 25 bp, Artificial sequence
  SiRNA target sequence
tacagtgctatgataaatttttaga

SEQ ID NO: 176030 - DNA, 25 bp, Artificial sequence
  SiRNA target sequence
acagtgctatgataaatttttagag

SEQ ID NO: 176031 - DNA, 25 bp, Artificial sequence
  SiRNA target sequence
cagtgctatgataaatttttagaga

SEQ ID NO: 176032 - DNA, 25 bp, Artificial sequence
  SiRNA target sequence
agtgctatgataaatttttagagaa

SEQ ID NO: 176033 - DNA, 25 bp, Artificial sequence
  SiRNA target sequence
gtgctatgataaatttttagagaat

SEQ ID NO: 176034 - DNA, 25 bp, Artificial sequence
  SiRNA target sequence
tgctatgataaatttttagagaata

SEQ ID NO: 176035 - DNA, 25 bp, Artificial sequence
  SiRNA target sequence
gctatgataaatttttagagaatag

SEQ ID NO: 176036 - DNA, 25 bp, Artificial sequence
  SiRNA target sequence
ctatgataaatttttagagaatagc

SEQ ID NO: 176037 - DNA, 25 bp, Artificial sequence
  SiRNA target sequence
tatgataaatttttagagaatagcg

SEQ ID NO: 176038 - DNA, 25 bp, Artificial sequence
  SiRNA target sequence
atgataaatttttagagaatagcga

SEQ ID NO: 176039 - DNA, 25 bp, Artificial sequence
  SiRNA target sequence
tgataaatttttagagaatagcgat

SEQ ID NO: 176040 - DNA, 25 bp, Artificial sequence
  SiRNA target sequence
gataaatttttagagaatagcgatg

SEQ ID NO: 176041 - DNA, 25 bp, Artificial sequence
  SiRNA target sequence
ataaatttttagagaatagcgatga

SEQ ID NO: 176042 - DNA, 25 bp, Artificial sequence
  SiRNA target sequence
taaatttttagagaatagcgatgat

SEQ ID NO: 176043 - DNA, 25 bp, Artificial sequence
  SiRNA target sequence
aaatttttagagaatagcgatgatg

SEQ ID NO: 176044 - DNA, 25 bp, Artificial sequence
  SiRNA target sequence
aatttttagagaatagcgatgatgt

SEQ ID NO: 176045 - DNA, 25 bp, Artificial sequence
  SiRNA target sequence
atttttagagaatagcgatgatgtt

SEQ ID NO: 176046 - DNA, 25 bp, Artificial sequence
  SiRNA target sequence
tttttagagaatagcgatgatgttt

SEQ ID NO: 176047 - DNA, 25 bp, Artificial sequence
  SiRNA target sequence
ttttagagaatagcgatgatgtttt

SEQ ID NO: 176048 - DNA, 25 bp, Artificial sequence
  SiRNA target sequence
tttagagaatagcgatgatgtttta

SEQ ID NO: 176049 - DNA, 25 bp, Artificial sequence
  SiRNA target sequence
ttagagaatagcgatgatgttttaa

SEQ ID NO: 176050 - DNA, 25 bp, Artificial sequence
  SiRNA target sequence
tagagaatagcgatgatgttttaac

SEQ ID NO: 176051 - DNA, 25 bp, Artificial sequence
  SiRNA target sequence
agagaatagcgatgatgttttaact

SEQ ID NO: 176052 - DNA, 25 bp, Artificial sequence
  SiRNA target sequence
gagaatagcgatgatgttttaacta

SEQ ID NO: 176053 - DNA, 25 bp, Artificial sequence
  SiRNA target sequence
agaatagcgatgatgttttaactac

SEQ ID NO: 176054 - DNA, 25 bp, Artificial sequence
  SiRNA target sequence
gaatagcgatgatgttttaactacc

SEQ ID NO: 176055 - DNA, 25 bp, Artificial sequence
  SiRNA target sequence
aatagcgatgatgttttaactacct

SEQ ID NO: 176056 - DNA, 25 bp, Artificial sequence
  SiRNA target sequence
atagcgatgatgttttaactaccta

SEQ ID NO: 176057 - DNA, 25 bp, Artificial sequence
  SiRNA target sequence
tagcgatgatgttttaactacctat

SEQ ID NO: 176058 - DNA, 25 bp, Artificial sequence
  SiRNA target sequence
agcgatgatgttttaactacctatg

SEQ ID NO: 176059 - DNA, 25 bp, Artificial sequence
  SiRNA target sequence
gcgatgatgttttaactacctatga

SEQ ID NO: 176060 - DNA, 25 bp, Artificial sequence
  SiRNA target sequence
cgatgatgttttaactacctatgat

SEQ ID NO: 176061 - DNA, 25 bp, Artificial sequence
  SiRNA target sequence
gatgatgttttaactacctatgatt

SEQ ID NO: 176062 - DNA, 25 bp, Artificial sequence
  SiRNA target sequence
atgatgttttaactacctatgattt

SEQ ID NO: 176063 - DNA, 25 bp, Artificial sequence
  SiRNA target sequence
tgatgttttaactacctatgatttt

SEQ ID NO: 176064 - DNA, 25 bp, Artificial sequence
  SiRNA target sequence
gatgttttaactacctatgattttt

SEQ ID NO: 176065 - DNA, 25 bp, Artificial sequence
  SiRNA target sequence
atgttttaactacctatgattttta

SEQ ID NO: 176066 - DNA, 25 bp, Artificial sequence
  SiRNA target sequence
tgttttaactacctatgatttttat

SEQ ID NO: 176067 - DNA, 25 bp, Artificial sequence
  SiRNA target sequence
gttttaactacctatgatttttata

SEQ ID NO: 176068 - DNA, 25 bp, Artificial sequence
  SiRNA target sequence
ttttaactacctatgatttttataa

SEQ ID NO: 176069 - DNA, 25 bp, Artificial sequence
  SiRNA target sequence
tttaactacctatgatttttataaa

SEQ ID NO: 176070 - DNA, 25 bp, Artificial sequence
  SiRNA target sequence
ttaactacctatgatttttataaaa

SEQ ID NO: 176071 - DNA, 25 bp, Artificial sequence
  SiRNA target sequence
taactacctatgatttttataaaat

SEQ ID NO: 176072 - DNA, 25 bp, Artificial sequence
  SiRNA target sequence
aactacctatgatttttataaaatg

SEQ ID NO: 176073 - DNA, 25 bp, Artificial sequence
  SiRNA target sequence
actacctatgatttttataaaatga

SEQ ID NO: 176074 - DNA, 25 bp, Artificial sequence
  SiRNA target sequence
ctacctatgatttttataaaatgat

SEQ ID NO: 176075 - DNA, 25 bp, Artificial sequence
  SiRNA target sequence
tacctatgatttttataaaatgatt

SEQ ID NO: 176076 - DNA, 25 bp, Artificial sequence
  SiRNA target sequence
acctatgatttttataaaatgattt

SEQ ID NO: 176077 - DNA, 25 bp, Artificial sequence
  SiRNA target sequence
cctatgatttttataaaatgatttt

SEQ ID NO: 176078 - DNA, 25 bp, Artificial sequence
  SiRNA target sequence
ctatgatttttataaaatgattttg

SEQ ID NO: 176079 - DNA, 25 bp, Artificial sequence
  SiRNA target sequence
tatgatttttataaaatgattttgg

SEQ ID NO: 176080 - DNA, 25 bp, Artificial sequence
  SiRNA target sequence
atgatttttataaaatgattttgga

SEQ ID NO: 176081 - DNA, 25 bp, Artificial sequence
  SiRNA target sequence
tgatttttataaaatgattttggat

SEQ ID NO: 176082 - DNA, 25 bp, Artificial sequence
  SiRNA target sequence
gatttttataaaatgattttggatc

SEQ ID NO: 176083 - DNA, 25 bp, Artificial sequence
  SiRNA target sequence
atttttataaaatgattttggatct

SEQ ID NO: 176084 - DNA, 25 bp, Artificial sequence
  SiRNA target sequence
tttttataaaatgattttggatcta

SEQ ID NO: 176085 - DNA, 25 bp, Artificial sequence
  SiRNA target sequence
ttttataaaatgattttggatctag

SEQ ID NO: 176086 - DNA, 25 bp, Artificial sequence
  SiRNA target sequence
tttataaaatgattttggatctagg

SEQ ID NO: 176087 - DNA, 25 bp, Artificial sequence
  SiRNA target sequence
ttataaaatgattttggatctagga

SEQ ID NO: 176088 - DNA, 25 bp, Artificial sequence
  SiRNA target sequence
tataaaatgattttggatctaggat

SEQ ID NO: 176089 - DNA, 25 bp, Artificial sequence
  SiRNA target sequence
ataaaatgattttggatctaggatt

SEQ ID NO: 176090 - DNA, 25 bp, Artificial sequence
  SiRNA target sequence
taaaatgattttggatctaggattt

SEQ ID NO: 176091 - DNA, 25 bp, Artificial sequence
  SiRNA target sequence
aaaatgattttggatctaggatttt

SEQ ID NO: 176092 - DNA, 25 bp, Artificial sequence
  SiRNA target sequence
aaatgattttggatctaggattttt

SEQ ID NO: 176093 - DNA, 25 bp, Artificial sequence
  SiRNA target sequence
aatgattttggatctaggattttta

SEQ ID NO: 176094 - DNA, 25 bp, Artificial sequence
  SiRNA target sequence
atgattttggatctaggatttttac

SEQ ID NO: 176095 - DNA, 25 bp, Artificial sequence
  SiRNA target sequence
tgattttggatctaggatttttaca

SEQ ID NO: 176096 - DNA, 25 bp, Artificial sequence
  SiRNA target sequence
gattttggatctaggatttttacag

SEQ ID NO: 176097 - DNA, 25 bp, Artificial sequence
  SiRNA target sequence
attttggatctaggatttttacagc

SEQ ID NO: 176098 - DNA, 25 bp, Artificial sequence
  SiRNA target sequence
ttttggatctaggatttttacagca

SEQ ID NO: 176099 - DNA, 25 bp, Artificial sequence
  SiRNA target sequence
tttggatctaggatttttacagcat

SEQ ID NO: 176100 - DNA, 25 bp, Artificial sequence
  SiRNA target sequence
ttggatctaggatttttacagcata

SEQ ID NO: 176101 - DNA, 25 bp, Artificial sequence
  SiRNA target sequence
tggatctaggatttttacagcataa

SEQ ID NO: 176102 - DNA, 25 bp, Artificial sequence
  SiRNA target sequence
ggatctaggatttttacagcataat

SEQ ID NO: 176103 - DNA, 25 bp, Artificial sequence
  SiRNA target sequence
gatctaggatttttacagcataatt

SEQ ID NO: 176104 - DNA, 25 bp, Artificial sequence
  SiRNA target sequence
atctaggatttttacagcataattt

SEQ ID NO: 176105 - DNA, 25 bp, Artificial sequence
  SiRNA target sequence
tctaggatttttacagcataatttt

SEQ ID NO: 176106 - DNA, 25 bp, Artificial sequence
  SiRNA target sequence
ctaggatttttacagcataatttta

SEQ ID NO: 176107 - DNA, 25 bp, Artificial sequence
  SiRNA target sequence
taggatttttacagcataattttat

SEQ ID NO: 176108 - DNA, 25 bp, Artificial sequence
  SiRNA target sequence
aggatttttacagcataattttatt

SEQ ID NO: 176109 - DNA, 25 bp, Artificial sequence
  SiRNA target sequence
ggatttttacagcataattttatta

SEQ ID NO: 176110 - DNA, 25 bp, Artificial sequence
  SiRNA target sequence
gatttttacagcataattttattaa

SEQ ID NO: 176111 - DNA, 25 bp, Artificial sequence
  SiRNA target sequence
atttttacagcataattttattaaa

SEQ ID NO: 176112 - DNA, 25 bp, Artificial sequence
  SiRNA target sequence
tttttacagcataattttattaaag

SEQ ID NO: 176113 - DNA, 25 bp, Artificial sequence
  SiRNA target sequence
ttttacagcataattttattaaagg

SEQ ID NO: 176114 - DNA, 25 bp, Artificial sequence
  SiRNA target sequence
tttacagcataattttattaaagga

SEQ ID NO: 176115 - DNA, 25 bp, Artificial sequence
  SiRNA target sequence
ttacagcataattttattaaaggaa

SEQ ID NO: 176116 - DNA, 25 bp, Artificial sequence
  SiRNA target sequence
tacagcataattttattaaaggaac

SEQ ID NO: 176117 - DNA, 25 bp, Artificial sequence
  SiRNA target sequence
acagcataattttattaaaggaacc

SEQ ID NO: 176118 - DNA, 25 bp, Artificial sequence
  SiRNA target sequence
cagcataattttattaaaggaacct

SEQ ID NO: 176119 - DNA, 25 bp, Artificial sequence
  SiRNA target sequence
agcataattttattaaaggaacctg

SEQ ID NO: 176120 - DNA, 25 bp, Artificial sequence
  SiRNA target sequence
gcataattttattaaaggaacctgt

SEQ ID NO: 176121 - DNA, 25 bp, Artificial sequence
  SiRNA target sequence
cataattttattaaaggaacctgtg

SEQ ID NO: 176122 - DNA, 25 bp, Artificial sequence
  SiRNA target sequence
ataattttattaaaggaacctgtga

SEQ ID NO: 176123 - DNA, 25 bp, Artificial sequence
  SiRNA target sequence
taattttattaaaggaacctgtgag

SEQ ID NO: 176124 - DNA, 25 bp, Artificial sequence
  SiRNA target sequence
aattttattaaaggaacctgtgaga

SEQ ID NO: 176125 - DNA, 25 bp, Artificial sequence
  SiRNA target sequence
attttattaaaggaacctgtgagaa

SEQ ID NO: 176126 - DNA, 25 bp, Artificial sequence
  SiRNA target sequence
ttttattaaaggaacctgtgagaaa

SEQ ID NO: 176127 - DNA, 25 bp, Artificial sequence
  SiRNA target sequence
tttattaaaggaacctgtgagaaat

SEQ ID NO: 176128 - DNA, 25 bp, Artificial sequence
  SiRNA target sequence
ttattaaaggaacctgtgagaaatg

SEQ ID NO: 176129 - DNA, 25 bp, Artificial sequence
  SiRNA target sequence
tattaaaggaacctgtgagaaatgg

SEQ ID NO: 176130 - DNA, 25 bp, Artificial sequence
  SiRNA target sequence
attaaaggaacctgtgagaaatggg

SEQ ID NO: 176131 - DNA, 25 bp, Artificial sequence
  SiRNA target sequence
ttaaaggaacctgtgagaaatggga

SEQ ID NO: 176132 - DNA, 25 bp, Artificial sequence
  SiRNA target sequence
taaaggaacctgtgagaaatgggag

SEQ ID NO: 176133 - DNA, 25 bp, Artificial sequence
  SiRNA target sequence
aaaggaacctgtgagaaatgggaga

SEQ ID NO: 176134 - DNA, 25 bp, Artificial sequence
  SiRNA target sequence
aaggaacctgtgagaaatgggagaa

SEQ ID NO: 176135 - DNA, 25 bp, Artificial sequence
  SiRNA target sequence
aggaacctgtgagaaatgggagaag

SEQ ID NO: 176136 - DNA, 25 bp, Artificial sequence
  SiRNA target sequence
ggaacctgtgagaaatgggagaagt

SEQ ID NO: 176137 - DNA, 25 bp, Artificial sequence
  SiRNA target sequence
gaacctgtgagaaatgggagaagtg

SEQ ID NO: 176138 - DNA, 25 bp, Artificial sequence
  SiRNA target sequence
aacctgtgagaaatgggagaagtgt

SEQ ID NO: 176139 - DNA, 25 bp, Artificial sequence
  SiRNA target sequence
acctgtgagaaatgggagaagtgta

SEQ ID NO: 176140 - DNA, 25 bp, Artificial sequence
  SiRNA target sequence
cctgtgagaaatgggagaagtgtac

SEQ ID NO: 176141 - DNA, 25 bp, Artificial sequence
  SiRNA target sequence
ctgtgagaaatgggagaagtgtact

SEQ ID NO: 176142 - DNA, 25 bp, Artificial sequence
  SiRNA target sequence
tgtgagaaatgggagaagtgtacta

SEQ ID NO: 176143 - DNA, 25 bp, Artificial sequence
  SiRNA target sequence
gtgagaaatgggagaagtgtactat

SEQ ID NO: 176144 - DNA, 25 bp, Artificial sequence
  SiRNA target sequence
tgagaaatgggagaagtgtactatt

SEQ ID NO: 176145 - DNA, 25 bp, Artificial sequence
  SiRNA target sequence
gagaaatgggagaagtgtactattg

SEQ ID NO: 176146 - DNA, 25 bp, Artificial sequence
  SiRNA target sequence
agaaatgggagaagtgtactattgg

SEQ ID NO: 176147 - DNA, 25 bp, Artificial sequence
  SiRNA target sequence
gaaatgggagaagtgtactattgga

SEQ ID NO: 176148 - DNA, 25 bp, Artificial sequence
  SiRNA target sequence
aaatgggagaagtgtactattggat

SEQ ID NO: 176149 - DNA, 25 bp, Artificial sequence
  SiRNA target sequence
aatgggagaagtgtactattggata

SEQ ID NO: 176150 - DNA, 25 bp, Artificial sequence
  SiRNA target sequence
atgggagaagtgtactattggatat

SEQ ID NO: 176151 - DNA, 25 bp, Artificial sequence
  SiRNA target sequence
tgggagaagtgtactattggatatc

SEQ ID NO: 176152 - DNA, 25 bp, Artificial sequence
  SiRNA target sequence
gggagaagtgtactattggatatca

SEQ ID NO: 176153 - DNA, 25 bp, Artificial sequence
  SiRNA target sequence
ggagaagtgtactattggatatcat

SEQ ID NO: 176154 - DNA, 25 bp, Artificial sequence
  SiRNA target sequence
gagaagtgtactattggatatcatt

SEQ ID NO: 176155 - DNA, 25 bp, Artificial sequence
  SiRNA target sequence
agaagtgtactattggatatcatta

SEQ ID NO: 176156 - DNA, 25 bp, Artificial sequence
  SiRNA target sequence
gaagtgtactattggatatcattat

SEQ ID NO: 176157 - DNA, 25 bp, Artificial sequence
  SiRNA target sequence
aagtgtactattggatatcattatg

SEQ ID NO: 176158 - DNA, 25 bp, Artificial sequence
  SiRNA target sequence
agtgtactattggatatcattatgg

SEQ ID NO: 176159 - DNA, 25 bp, Artificial sequence
  SiRNA target sequence
gtgtactattggatatcattatgga

SEQ ID NO: 176160 - DNA, 25 bp, Artificial sequence
  SiRNA target sequence
tgtactattggatatcattatggat

SEQ ID NO: 176161 - DNA, 25 bp, Artificial sequence
  SiRNA target sequence
gtactattggatatcattatggata

SEQ ID NO: 176162 - DNA, 25 bp, Artificial sequence
  SiRNA target sequence
tactattggatatcattatggatat

SEQ ID NO: 176163 - DNA, 25 bp, Artificial sequence
  SiRNA target sequence
actattggatatcattatggatatt

SEQ ID NO: 176164 - DNA, 25 bp, Artificial sequence
  SiRNA target sequence
ctattggatatcattatggatattt

SEQ ID NO: 176165 - DNA, 25 bp, Artificial sequence
  SiRNA target sequence
tattggatatcattatggatattta

SEQ ID NO: 176166 - DNA, 25 bp, Artificial sequence
  SiRNA target sequence
attggatatcattatggatatttag

SEQ ID NO: 176167 - DNA, 25 bp, Artificial sequence
  SiRNA target sequence
ttggatatcattatggatatttaga

SEQ ID NO: 176168 - DNA, 25 bp, Artificial sequence
  SiRNA target sequence
tggatatcattatggatatttagaa

SEQ ID NO: 176169 - DNA, 25 bp, Artificial sequence
  SiRNA target sequence
ggatatcattatggatatttagaac

SEQ ID NO: 176170 - DNA, 25 bp, Artificial sequence
  SiRNA target sequence
gatatcattatggatatttagaaca

SEQ ID NO: 176171 - DNA, 25 bp, Artificial sequence
  SiRNA target sequence
atatcattatggatatttagaacac

SEQ ID NO: 176172 - DNA, 25 bp, Artificial sequence
  SiRNA target sequence
tatcattatggatatttagaacaca

SEQ ID NO: 176173 - DNA, 25 bp, Artificial sequence
  SiRNA target sequence
atcattatggatatttagaacacat

SEQ ID NO: 176174 - DNA, 25 bp, Artificial sequence
  SiRNA target sequence
tcattatggatatttagaacacata

SEQ ID NO: 176175 - DNA, 25 bp, Artificial sequence
  SiRNA target sequence
cattatggatatttagaacacatat

SEQ ID NO: 176176 - DNA, 25 bp, Artificial sequence
  SiRNA target sequence
attatggatatttagaacacatatt

SEQ ID NO: 176177 - DNA, 25 bp, Artificial sequence
  SiRNA target sequence
ttatggatatttagaacacatatta

SEQ ID NO: 176178 - DNA, 25 bp, Artificial sequence
  SiRNA target sequence
tatggatatttagaacacatattaa

SEQ ID NO: 176179 - DNA, 25 bp, Artificial sequence
  SiRNA target sequence
atggatatttagaacacatattaaa

SEQ ID NO: 176180 - DNA, 25 bp, Artificial sequence
  SiRNA target sequence
tggatatttagaacacatattaaat

SEQ ID NO: 176181 - DNA, 25 bp, Artificial sequence
  SiRNA target sequence
ggatatttagaacacatattaaata

SEQ ID NO: 176182 - DNA, 25 bp, Artificial sequence
  SiRNA target sequence
gatatttagaacacatattaaataa

SEQ ID NO: 176183 - DNA, 25 bp, Artificial sequence
  SiRNA target sequence
atatttagaacacatattaaataag

SEQ ID NO: 176184 - DNA, 25 bp, Artificial sequence
  SiRNA target sequence
tatttagaacacatattaaataaga

SEQ ID NO: 176185 - DNA, 25 bp, Artificial sequence
  SiRNA target sequence
atttagaacacatattaaataagaa

SEQ ID NO: 176186 - DNA, 25 bp, Artificial sequence
  SiRNA target sequence
tttagaacacatattaaataagaag

SEQ ID NO: 176187 - DNA, 25 bp, Artificial sequence
  SiRNA target sequence
ttagaacacatattaaataagaaga

SEQ ID NO: 176188 - DNA, 25 bp, Artificial sequence
  SiRNA target sequence
tagaacacatattaaataagaagaa

SEQ ID NO: 176189 - DNA, 25 bp, Artificial sequence
  SiRNA target sequence
agaacacatattaaataagaagaac

SEQ ID NO: 176190 - DNA, 25 bp, Artificial sequence
  SiRNA target sequence
gaacacatattaaataagaagaaca

SEQ ID NO: 176191 - DNA, 25 bp, Artificial sequence
  SiRNA target sequence
aacacatattaaataagaagaacaa

SEQ ID NO: 176192 - DNA, 25 bp, Artificial sequence
  SiRNA target sequence
acacatattaaataagaagaacaat

SEQ ID NO: 176193 - DNA, 25 bp, Artificial sequence
  SiRNA target sequence
cacatattaaataagaagaacaatt

SEQ ID NO: 176194 - DNA, 25 bp, Artificial sequence
  SiRNA target sequence
acatattaaataagaagaacaatta

SEQ ID NO: 176195 - DNA, 25 bp, Artificial sequence
  SiRNA target sequence
catattaaataagaagaacaattat

SEQ ID NO: 176196 - DNA, 25 bp, Artificial sequence
  SiRNA target sequence
atattaaataagaagaacaattatt

SEQ ID NO: 176197 - DNA, 25 bp, Artificial sequence
  SiRNA target sequence
tattaaataagaagaacaattattt

SEQ ID NO: 176198 - DNA, 25 bp, Artificial sequence
  SiRNA target sequence
attaaataagaagaacaattattta

SEQ ID NO: 176199 - DNA, 25 bp, Artificial sequence
  SiRNA target sequence
ttaaataagaagaacaattatttaa

SEQ ID NO: 176200 - DNA, 25 bp, Artificial sequence
  SiRNA target sequence
taaataagaagaacaattatttaac

SEQ ID NO: 176201 - DNA, 25 bp, Artificial sequence
  SiRNA target sequence
aaataagaagaacaattatttaaca

SEQ ID NO: 176202 - DNA, 25 bp, Artificial sequence
  SiRNA target sequence
aataagaagaacaattatttaacaa

SEQ ID NO: 176203 - DNA, 25 bp, Artificial sequence
  SiRNA target sequence
ataagaagaacaattatttaacaaa

SEQ ID NO: 176204 - DNA, 25 bp, Artificial sequence
  SiRNA target sequence
taagaagaacaattatttaacaaaa

SEQ ID NO: 176205 - DNA, 25 bp, Artificial sequence
  SiRNA target sequence
aagaagaacaattatttaacaaaaa

SEQ ID NO: 176206 - DNA, 25 bp, Artificial sequence
  SiRNA target sequence
agaagaacaattatttaacaaaaaa

SEQ ID NO: 176207 - DNA, 25 bp, Artificial sequence
  SiRNA target sequence
gaagaacaattatttaacaaaaaat

SEQ ID NO: 176208 - DNA, 25 bp, Artificial sequence
  SiRNA target sequence
aagaacaattatttaacaaaaaatg

SEQ ID NO: 176209 - DNA, 25 bp, Artificial sequence
  SiRNA target sequence
agaacaattatttaacaaaaaatga

SEQ ID NO: 176210 - DNA, 25 bp, Artificial sequence
  SiRNA target sequence
gaacaattatttaacaaaaaatgat

SEQ ID NO: 176211 - DNA, 25 bp, Artificial sequence
  SiRNA target sequence
aacaattatttaacaaaaaatgata

SEQ ID NO: 176212 - DNA, 25 bp, Artificial sequence
  SiRNA target sequence
acaattatttaacaaaaaatgatag

SEQ ID NO: 176213 - DNA, 25 bp, Artificial sequence
  SiRNA target sequence
caattatttaacaaaaaatgatagt

SEQ ID NO: 176214 - DNA, 25 bp, Artificial sequence
  SiRNA target sequence
aattatttaacaaaaaatgatagta

SEQ ID NO: 176215 - DNA, 25 bp, Artificial sequence
  SiRNA target sequence
attatttaacaaaaaatgatagtat

SEQ ID NO: 176216 - DNA, 25 bp, Artificial sequence
  SiRNA target sequence
ttatttaacaaaaaatgatagtata

SEQ ID NO: 176217 - DNA, 25 bp, Artificial sequence
  SiRNA target sequence
tatttaacaaaaaatgatagtataa

SEQ ID NO: 176218 - DNA, 25 bp, Artificial sequence
  SiRNA target sequence
atttaacaaaaaatgatagtataaa

SEQ ID NO: 176219 - DNA, 25 bp, Artificial sequence
  SiRNA target sequence
tttaacaaaaaatgatagtataaaa

SEQ ID NO: 176220 - DNA, 25 bp, Artificial sequence
  SiRNA target sequence
ttaacaaaaaatgatagtataaaaa

SEQ ID NO: 176221 - DNA, 25 bp, Artificial sequence
  SiRNA target sequence
taacaaaaaatgatagtataaaaat

SEQ ID NO: 176222 - DNA, 25 bp, Artificial sequence
  SiRNA target sequence
aacaaaaaatgatagtataaaaata

SEQ ID NO: 176223 - DNA, 25 bp, Artificial sequence
  SiRNA target sequence
acaaaaaatgatagtataaaaatat

SEQ ID NO: 176224 - DNA, 25 bp, Artificial sequence
  SiRNA target sequence
caaaaaatgatagtataaaaatatt

SEQ ID NO: 176225 - DNA, 25 bp, Artificial sequence
  SiRNA target sequence
aaaaaatgatagtataaaaatattt

SEQ ID NO: 176226 - DNA, 25 bp, Artificial sequence
  SiRNA target sequence
aaaaatgatagtataaaaatattta

SEQ ID NO: 176227 - DNA, 25 bp, Artificial sequence
  SiRNA target sequence
aaaatgatagtataaaaatatttaa

SEQ ID NO: 176228 - DNA, 25 bp, Artificial sequence
  SiRNA target sequence
aaatgatagtataaaaatatttaac

SEQ ID NO: 176229 - DNA, 25 bp, Artificial sequence
  SiRNA target sequence
aatgatagtataaaaatatttaaca

SEQ ID NO: 176230 - DNA, 25 bp, Artificial sequence
  SiRNA target sequence
atgatagtataaaaatatttaacag

SEQ ID NO: 176231 - DNA, 25 bp, Artificial sequence
  SiRNA target sequence
tgatagtataaaaatatttaacagt

SEQ ID NO: 176232 - DNA, 25 bp, Artificial sequence
  SiRNA target sequence
gatagtataaaaatatttaacagta

SEQ ID NO: 176233 - DNA, 25 bp, Artificial sequence
  SiRNA target sequence
atagtataaaaatatttaacagtaa

SEQ ID NO: 176234 - DNA, 25 bp, Artificial sequence
  SiRNA target sequence
tagtataaaaatatttaacagtaaa

SEQ ID NO: 176235 - DNA, 25 bp, Artificial sequence
  SiRNA target sequence
agtataaaaatatttaacagtaaaa

SEQ ID NO: 176236 - DNA, 25 bp, Artificial sequence
  SiRNA target sequence
gtataaaaatatttaacagtaaaaa

SEQ ID NO: 176237 - DNA, 25 bp, Artificial sequence
  SiRNA target sequence
tataaaaatatttaacagtaaaaat

SEQ ID NO: 176238 - DNA, 25 bp, Artificial sequence
  SiRNA target sequence
ataaaaatatttaacagtaaaaatg

SEQ ID NO: 176239 - DNA, 25 bp, Artificial sequence
  SiRNA target sequence
taaaaatatttaacagtaaaaatga

SEQ ID NO: 176240 - DNA, 25 bp, Artificial sequence
  SiRNA target sequence
aaaaatatttaacagtaaaaatgag

SEQ ID NO: 176241 - DNA, 25 bp, Artificial sequence
  SiRNA target sequence
aaaatatttaacagtaaaaatgagg

SEQ ID NO: 176242 - DNA, 25 bp, Artificial sequence
  SiRNA target sequence
aaatatttaacagtaaaaatgagga

SEQ ID NO: 176243 - DNA, 25 bp, Artificial sequence
  SiRNA target sequence
aatatttaacagtaaaaatgaggag

SEQ ID NO: 176244 - DNA, 25 bp, Artificial sequence
  SiRNA target sequence
atatttaacagtaaaaatgaggagg

SEQ ID NO: 176245 - DNA, 25 bp, Artificial sequence
  SiRNA target sequence
tatttaacagtaaaaatgaggaggt

SEQ ID NO: 176246 - DNA, 25 bp, Artificial sequence
  SiRNA target sequence
atttaacagtaaaaatgaggaggta

SEQ ID NO: 176247 - DNA, 25 bp, Artificial sequence
  SiRNA target sequence
tttaacagtaaaaatgaggaggtaa

SEQ ID NO: 176248 - DNA, 25 bp, Artificial sequence
  SiRNA target sequence
ttaacagtaaaaatgaggaggtaag

SEQ ID NO: 176249 - DNA, 25 bp, Artificial sequence
  SiRNA target sequence
taacagtaaaaatgaggaggtaagg

SEQ ID NO: 176250 - DNA, 25 bp, Artificial sequence
  SiRNA target sequence
aacagtaaaaatgaggaggtaaggt

SEQ ID NO: 176251 - DNA, 25 bp, Artificial sequence
  SiRNA target sequence
acagtaaaaatgaggaggtaaggtt

SEQ ID NO: 176252 - DNA, 25 bp, Artificial sequence
  SiRNA target sequence
cagtaaaaatgaggaggtaaggtta

SEQ ID NO: 176253 - DNA, 25 bp, Artificial sequence
  SiRNA target sequence
agtaaaaatgaggaggtaaggttaa

SEQ ID NO: 176254 - DNA, 25 bp, Artificial sequence
  SiRNA target sequence
gtaaaaatgaggaggtaaggttaaa

SEQ ID NO: 176255 - DNA, 25 bp, Artificial sequence
  SiRNA target sequence
taaaaatgaggaggtaaggttaaat

SEQ ID NO: 176256 - DNA, 25 bp, Artificial sequence
  SiRNA target sequence
aaaaatgaggaggtaaggttaaatg

SEQ ID NO: 176257 - DNA, 25 bp, Artificial sequence
  SiRNA target sequence
aaaatgaggaggtaaggttaaatgg

SEQ ID NO: 176258 - DNA, 25 bp, Artificial sequence
  SiRNA target sequence
aaatgaggaggtaaggttaaatgga

SEQ ID NO: 176259 - DNA, 25 bp, Artificial sequence
  SiRNA target sequence
aatgaggaggtaaggttaaatggaa

SEQ ID NO: 176260 - DNA, 25 bp, Artificial sequence
  SiRNA target sequence
atgaggaggtaaggttaaatggaaa

SEQ ID NO: 176261 - DNA, 25 bp, Artificial sequence
  SiRNA target sequence
tgaggaggtaaggttaaatggaaaa

SEQ ID NO: 176262 - DNA, 25 bp, Artificial sequence
  SiRNA target sequence
gaggaggtaaggttaaatggaaaaa

SEQ ID NO: 176263 - DNA, 25 bp, Artificial sequence
  SiRNA target sequence
aggaggtaaggttaaatggaaaaag

SEQ ID NO: 176264 - DNA, 25 bp, Artificial sequence
  SiRNA target sequence
ggaggtaaggttaaatggaaaaaga

SEQ ID NO: 176265 - DNA, 25 bp, Artificial sequence
  SiRNA target sequence
gaggtaaggttaaatggaaaaagaa

SEQ ID NO: 176266 - DNA, 25 bp, Artificial sequence
  SiRNA target sequence
aggtaaggttaaatggaaaaagaaa

SEQ ID NO: 176267 - DNA, 25 bp, Artificial sequence
  SiRNA target sequence
ggtaaggttaaatggaaaaagaaaa

SEQ ID NO: 176268 - DNA, 25 bp, Artificial sequence
  SiRNA target sequence
gtaaggttaaatggaaaaagaaaat

SEQ ID NO: 176269 - DNA, 25 bp, Artificial sequence
  SiRNA target sequence
taaggttaaatggaaaaagaaaatt

SEQ ID NO: 176270 - DNA, 25 bp, Artificial sequence
  SiRNA target sequence
aaggttaaatggaaaaagaaaatta

SEQ ID NO: 176271 - DNA, 25 bp, Artificial sequence
  SiRNA target sequence
aggttaaatggaaaaagaaaattaa

SEQ ID NO: 176272 - DNA, 25 bp, Artificial sequence
  SiRNA target sequence
ggttaaatggaaaaagaaaattaaa

SEQ ID NO: 176273 - DNA, 25 bp, Artificial sequence
  SiRNA target sequence
gttaaatggaaaaagaaaattaaat

SEQ ID NO: 176274 - DNA, 25 bp, Artificial sequence
  SiRNA target sequence
ttaaatggaaaaagaaaattaaata

SEQ ID NO: 176275 - DNA, 25 bp, Artificial sequence
  SiRNA target sequence
taaatggaaaaagaaaattaaatat

SEQ ID NO: 176276 - DNA, 25 bp, Artificial sequence
  SiRNA target sequence
aaatggaaaaagaaaattaaatatt

SEQ ID NO: 176277 - DNA, 25 bp, Artificial sequence
  SiRNA target sequence
aatggaaaaagaaaattaaatatta

SEQ ID NO: 176278 - DNA, 25 bp, Artificial sequence
  SiRNA target sequence
atggaaaaagaaaattaaatattaa

SEQ ID NO: 176279 - DNA, 25 bp, Artificial sequence
  SiRNA target sequence
tggaaaaagaaaattaaatattaac

SEQ ID NO: 176280 - DNA, 25 bp, Artificial sequence
  SiRNA target sequence
ggaaaaagaaaattaaatattaaca

SEQ ID NO: 176281 - DNA, 25 bp, Artificial sequence
  SiRNA target sequence
gaaaaagaaaattaaatattaacac

SEQ ID NO: 176282 - DNA, 25 bp, Artificial sequence
  SiRNA target sequence
aaaaagaaaattaaatattaacaca

SEQ ID NO: 176283 - DNA, 25 bp, Artificial sequence
  SiRNA target sequence
aaaagaaaattaaatattaacacag

SEQ ID NO: 176284 - DNA, 25 bp, Artificial sequence
  SiRNA target sequence
aaagaaaattaaatattaacacagt

SEQ ID NO: 176285 - DNA, 25 bp, Artificial sequence
  SiRNA target sequence
aagaaaattaaatattaacacagtt

SEQ ID NO: 176286 - DNA, 25 bp, Artificial sequence
  SiRNA target sequence
agaaaattaaatattaacacagtta

SEQ ID NO: 176287 - DNA, 25 bp, Artificial sequence
  SiRNA target sequence
gaaaattaaatattaacacagttac

SEQ ID NO: 176288 - DNA, 25 bp, Artificial sequence
  SiRNA target sequence
aaaattaaatattaacacagttaca

SEQ ID NO: 176289 - DNA, 25 bp, Artificial sequence
  SiRNA target sequence
aaattaaatattaacacagttacat

SEQ ID NO: 176290 - DNA, 25 bp, Artificial sequence
  SiRNA target sequence
aattaaatattaacacagttacatt

SEQ ID NO: 176291 - DNA, 25 bp, Artificial sequence
  SiRNA target sequence
attaaatattaacacagttacatta

SEQ ID NO: 176292 - DNA, 25 bp, Artificial sequence
  SiRNA target sequence
ttaaatattaacacagttacattaa

SEQ ID NO: 176293 - DNA, 25 bp, Artificial sequence
  SiRNA target sequence
taaatattaacacagttacattaaa

SEQ ID NO: 176294 - DNA, 25 bp, Artificial sequence
  SiRNA target sequence
aaatattaacacagttacattaaat

SEQ ID NO: 176295 - DNA, 25 bp, Artificial sequence
  SiRNA target sequence
aatattaacacagttacattaaata

SEQ ID NO: 176296 - DNA, 25 bp, Artificial sequence
  SiRNA target sequence
atattaacacagttacattaaataa

SEQ ID NO: 176297 - DNA, 25 bp, Artificial sequence
  SiRNA target sequence
tattaacacagttacattaaataaa

SEQ ID NO: 176298 - DNA, 25 bp, Artificial sequence
  SiRNA target sequence
attaacacagttacattaaataaaa

SEQ ID NO: 176299 - DNA, 25 bp, Artificial sequence
  SiRNA target sequence
ttaacacagttacattaaataaaat

SEQ ID NO: 176300 - DNA, 25 bp, Artificial sequence
  SiRNA target sequence
taacacagttacattaaataaaatt

SEQ ID NO: 176301 - DNA, 25 bp, Artificial sequence
  SiRNA target sequence
aacacagttacattaaataaaatta

SEQ ID NO: 176302 - DNA, 25 bp, Artificial sequence
  SiRNA target sequence
acacagttacattaaataaaattaa

SEQ ID NO: 176303 - DNA, 25 bp, Artificial sequence
  SiRNA target sequence
cacagttacattaaataaaattaat

SEQ ID NO: 176304 - DNA, 25 bp, Artificial sequence
  SiRNA target sequence
acagttacattaaataaaattaata

SEQ ID NO: 176305 - DNA, 25 bp, Artificial sequence
  SiRNA target sequence
cagttacattaaataaaattaatat

SEQ ID NO: 176306 - DNA, 25 bp, Artificial sequence
  SiRNA target sequence
agttacattaaataaaattaatata

SEQ ID NO: 176307 - DNA, 25 bp, Artificial sequence
  SiRNA target sequence
gttacattaaataaaattaatatac

SEQ ID NO: 176308 - DNA, 25 bp, Artificial sequence
  SiRNA target sequence
ttacattaaataaaattaatatacc

SEQ ID NO: 176309 - DNA, 25 bp, Artificial sequence
  SiRNA target sequence
tacattaaataaaattaatatacct

SEQ ID NO: 176310 - DNA, 25 bp, Artificial sequence
  SiRNA target sequence
acattaaataaaattaatatacctg

SEQ ID NO: 176311 - DNA, 25 bp, Artificial sequence
  SiRNA target sequence
cattaaataaaattaatatacctga

SEQ ID NO: 176312 - DNA, 25 bp, Artificial sequence
  SiRNA target sequence
attaaataaaattaatatacctgag

SEQ ID NO: 176313 - DNA, 25 bp, Artificial sequence
  SiRNA target sequence
ttaaataaaattaatatacctgaga

SEQ ID NO: 176314 - DNA, 25 bp, Artificial sequence
  SiRNA target sequence
taaataaaattaatatacctgagat

SEQ ID NO: 176315 - DNA, 25 bp, Artificial sequence
  SiRNA target sequence
aaataaaattaatatacctgagata

SEQ ID NO: 176316 - DNA, 25 bp, Artificial sequence
  SiRNA target sequence
aataaaattaatatacctgagatag

SEQ ID NO: 176317 - DNA, 25 bp, Artificial sequence
  SiRNA target sequence
ataaaattaatatacctgagataga

SEQ ID NO: 176318 - DNA, 25 bp, Artificial sequence
  SiRNA target sequence
taaaattaatatacctgagatagat

SEQ ID NO: 176319 - DNA, 25 bp, Artificial sequence
  SiRNA target sequence
aaaattaatatacctgagatagatt

SEQ ID NO: 176320 - DNA, 25 bp, Artificial sequence
  SiRNA target sequence
aaattaatatacctgagatagatta

SEQ ID NO: 176321 - DNA, 25 bp, Artificial sequence
  SiRNA target sequence
aattaatatacctgagatagattat

SEQ ID NO: 176322 - DNA, 25 bp, Artificial sequence
  SiRNA target sequence
attaatatacctgagatagattata

SEQ ID NO: 176323 - DNA, 25 bp, Artificial sequence
  SiRNA target sequence
ttaatatacctgagatagattataa

SEQ ID NO: 176324 - DNA, 25 bp, Artificial sequence
  SiRNA target sequence
taatatacctgagatagattataaa

SEQ ID NO: 176325 - DNA, 25 bp, Artificial sequence
  SiRNA target sequence
aatatacctgagatagattataaat

SEQ ID NO: 176326 - DNA, 25 bp, Artificial sequence
  SiRNA target sequence
atatacctgagatagattataaata

SEQ ID NO: 176327 - DNA, 25 bp, Artificial sequence
  SiRNA target sequence
tatacctgagatagattataaatat

SEQ ID NO: 176328 - DNA, 25 bp, Artificial sequence
  SiRNA target sequence
atacctgagatagattataaatata

SEQ ID NO: 176329 - DNA, 25 bp, Artificial sequence
  SiRNA target sequence
tacctgagatagattataaatataa

SEQ ID NO: 176330 - DNA, 25 bp, Artificial sequence
  SiRNA target sequence
acctgagatagattataaatataaa

SEQ ID NO: 176331 - DNA, 25 bp, Artificial sequence
  SiRNA target sequence
cctgagatagattataaatataaaa

SEQ ID NO: 176332 - DNA, 25 bp, Artificial sequence
  SiRNA target sequence
ctgagatagattataaatataaaaa

SEQ ID NO: 176333 - DNA, 25 bp, Artificial sequence
  SiRNA target sequence
tgagatagattataaatataaaaat

SEQ ID NO: 176334 - DNA, 25 bp, Artificial sequence
  SiRNA target sequence
gagatagattataaatataaaaatg

SEQ ID NO: 176335 - DNA, 25 bp, Artificial sequence
  SiRNA target sequence
agatagattataaatataaaaatgg

SEQ ID NO: 176336 - DNA, 25 bp, Artificial sequence
  SiRNA target sequence
gatagattataaatataaaaatgga

SEQ ID NO: 176337 - DNA, 25 bp, Artificial sequence
  SiRNA target sequence
atagattataaatataaaaatggag

SEQ ID NO: 176338 - DNA, 25 bp, Artificial sequence
  SiRNA target sequence
tagattataaatataaaaatggagt

SEQ ID NO: 176339 - DNA, 25 bp, Artificial sequence
  SiRNA target sequence
agattataaatataaaaatggagtg

SEQ ID NO: 176340 - DNA, 25 bp, Artificial sequence
  SiRNA target sequence
gattataaatataaaaatggagtgt

SEQ ID NO: 176341 - DNA, 25 bp, Artificial sequence
  SiRNA target sequence
attataaatataaaaatggagtgtt

SEQ ID NO: 176342 - DNA, 25 bp, Artificial sequence
  SiRNA target sequence
ttataaatataaaaatggagtgttt

SEQ ID NO: 176343 - DNA, 25 bp, Artificial sequence
  SiRNA target sequence
tataaatataaaaatggagtgttta

SEQ ID NO: 176344 - DNA, 25 bp, Artificial sequence
  SiRNA target sequence
ataaatataaaaatggagtgtttac

SEQ ID NO: 176345 - DNA, 25 bp, Artificial sequence
  SiRNA target sequence
taaatataaaaatggagtgtttaca

SEQ ID NO: 176346 - DNA, 25 bp, Artificial sequence
  SiRNA target sequence
aaatataaaaatggagtgtttacat

SEQ ID NO: 176347 - DNA, 25 bp, Artificial sequence
  SiRNA target sequence
aatataaaaatggagtgtttacata

SEQ ID NO: 176348 - DNA, 25 bp, Artificial sequence
  SiRNA target sequence
atataaaaatggagtgtttacatat

SEQ ID NO: 176349 - DNA, 25 bp, Artificial sequence
  SiRNA target sequence
tataaaaatggagtgtttacatata

SEQ ID NO: 176350 - DNA, 25 bp, Artificial sequence
  SiRNA target sequence
ataaaaatggagtgtttacatatac

SEQ ID NO: 176351 - DNA, 25 bp, Artificial sequence
  SiRNA target sequence
taaaaatggagtgtttacatataca

SEQ ID NO: 176352 - DNA, 25 bp, Artificial sequence
  SiRNA target sequence
aaaaatggagtgtttacatatacac

SEQ ID NO: 176353 - DNA, 25 bp, Artificial sequence
  SiRNA target sequence
aaaatggagtgtttacatatacaca

SEQ ID NO: 176354 - DNA, 25 bp, Artificial sequence
  SiRNA target sequence
aaatggagtgtttacatatacacag

SEQ ID NO: 176355 - DNA, 25 bp, Artificial sequence
  SiRNA target sequence
aatggagtgtttacatatacacaga

SEQ ID NO: 176356 - DNA, 25 bp, Artificial sequence
  SiRNA target sequence
atggagtgtttacatatacacagat

SEQ ID NO: 176357 - DNA, 25 bp, Artificial sequence
  SiRNA target sequence
tggagtgtttacatatacacagatc

SEQ ID NO: 176358 - DNA, 25 bp, Artificial sequence
  SiRNA target sequence
ggagtgtttacatatacacagatca

SEQ ID NO: 176359 - DNA, 25 bp, Artificial sequence
  SiRNA target sequence
gagtgtttacatatacacagatcaa

SEQ ID NO: 176360 - DNA, 25 bp, Artificial sequence
  SiRNA target sequence
agtgtttacatatacacagatcaaa

SEQ ID NO: 176361 - DNA, 25 bp, Artificial sequence
  SiRNA target sequence
gtgtttacatatacacagatcaaaa

SEQ ID NO: 176362 - DNA, 25 bp, Artificial sequence
  SiRNA target sequence
tgtttacatatacacagatcaaaaa

SEQ ID NO: 176363 - DNA, 25 bp, Artificial sequence
  SiRNA target sequence
gtttacatatacacagatcaaaaat

SEQ ID NO: 176364 - DNA, 25 bp, Artificial sequence
  SiRNA target sequence
tttacatatacacagatcaaaaata

SEQ ID NO: 176365 - DNA, 25 bp, Artificial sequence
  SiRNA target sequence
ttacatatacacagatcaaaaataa

SEQ ID NO: 176366 - DNA, 25 bp, Artificial sequence
  SiRNA target sequence
tacatatacacagatcaaaaataat

SEQ ID NO: 176367 - DNA, 25 bp, Artificial sequence
  SiRNA target sequence
acatatacacagatcaaaaataata

SEQ ID NO: 176368 - DNA, 25 bp, Artificial sequence
  SiRNA target sequence
catatacacagatcaaaaataataa

SEQ ID NO: 176369 - DNA, 25 bp, Artificial sequence
  SiRNA target sequence
atatacacagatcaaaaataataag

SEQ ID NO: 176370 - DNA, 25 bp, Artificial sequence
  SiRNA target sequence
tatacacagatcaaaaataataaga

SEQ ID NO: 176371 - DNA, 25 bp, Artificial sequence
  SiRNA target sequence
atacacagatcaaaaataataagaa

SEQ ID NO: 176372 - DNA, 25 bp, Artificial sequence
  SiRNA target sequence
tacacagatcaaaaataataagaaa

SEQ ID NO: 176373 - DNA, 25 bp, Artificial sequence
  SiRNA target sequence
acacagatcaaaaataataagaaaa

SEQ ID NO: 176374 - DNA, 25 bp, Artificial sequence
  SiRNA target sequence
cacagatcaaaaataataagaaaaa

SEQ ID NO: 176375 - DNA, 25 bp, Artificial sequence
  SiRNA target sequence
acagatcaaaaataataagaaaaaa

SEQ ID NO: 176376 - DNA, 25 bp, Artificial sequence
  SiRNA target sequence
cagatcaaaaataataagaaaaaaa

SEQ ID NO: 176377 - DNA, 25 bp, Artificial sequence
  SiRNA target sequence
agatcaaaaataataagaaaaaaaa

SEQ ID NO: 176378 - DNA, 25 bp, Artificial sequence
  SiRNA target sequence
gatcaaaaataataagaaaaaaaaa

SEQ ID NO: 176379 - DNA, 25 bp, Artificial sequence
  SiRNA target sequence
atcaaaaataataagaaaaaaaaat

SEQ ID NO: 176380 - DNA, 25 bp, Artificial sequence
  SiRNA target sequence
tcaaaaataataagaaaaaaaaata

SEQ ID NO: 176381 - DNA, 25 bp, Artificial sequence
  SiRNA target sequence
caaaaataataagaaaaaaaaatat

SEQ ID NO: 176382 - DNA, 25 bp, Artificial sequence
  SiRNA target sequence
aaaaataataagaaaaaaaaatatt

SEQ ID NO: 176383 - DNA, 25 bp, Artificial sequence
  SiRNA target sequence
aaaataataagaaaaaaaaatattt

SEQ ID NO: 176384 - DNA, 25 bp, Artificial sequence
  SiRNA target sequence
aaataataagaaaaaaaaatattta

SEQ ID NO: 176385 - DNA, 25 bp, Artificial sequence
  SiRNA target sequence
aataataagaaaaaaaaatatttaa

SEQ ID NO: 176386 - DNA, 25 bp, Artificial sequence
  SiRNA target sequence
ataataagaaaaaaaaatatttaag

SEQ ID NO: 176387 - DNA, 25 bp, Artificial sequence
  SiRNA target sequence
taataagaaaaaaaaatatttaaga

SEQ ID NO: 176388 - DNA, 25 bp, Artificial sequence
  SiRNA target sequence
aataagaaaaaaaaatatttaagaa

SEQ ID NO: 176389 - DNA, 25 bp, Artificial sequence
  SiRNA target sequence
ataagaaaaaaaaatatttaagaat

SEQ ID NO: 176390 - DNA, 25 bp, Artificial sequence
  SiRNA target sequence
taagaaaaaaaaatatttaagaata

SEQ ID NO: 176391 - DNA, 25 bp, Artificial sequence
  SiRNA target sequence
aagaaaaaaaaatatttaagaatat

SEQ ID NO: 176392 - DNA, 25 bp, Artificial sequence
  SiRNA target sequence
agaaaaaaaaatatttaagaatatt

SEQ ID NO: 176393 - DNA, 25 bp, Artificial sequence
  SiRNA target sequence
gaaaaaaaaatatttaagaatattg

SEQ ID NO: 176394 - DNA, 25 bp, Artificial sequence
  SiRNA target sequence
aaaaaaaaatatttaagaatattgg

SEQ ID NO: 176395 - DNA, 25 bp, Artificial sequence
  SiRNA target sequence
aaaaaaaatatttaagaatattggg

SEQ ID NO: 176396 - DNA, 25 bp, Artificial sequence
  SiRNA target sequence
aaaaaaatatttaagaatattgggt

SEQ ID NO: 176397 - DNA, 25 bp, Artificial sequence
  SiRNA target sequence
aaaaaatatttaagaatattgggtc

SEQ ID NO: 176398 - DNA, 25 bp, Artificial sequence
  SiRNA target sequence
aaaaatatttaagaatattgggtct

SEQ ID NO: 176399 - DNA, 25 bp, Artificial sequence
  SiRNA target sequence
aaaatatttaagaatattgggtcta

SEQ ID NO: 176400 - DNA, 25 bp, Artificial sequence
  SiRNA target sequence
aaatatttaagaatattgggtctag

SEQ ID NO: 176401 - DNA, 25 bp, Artificial sequence
  SiRNA target sequence
aatatttaagaatattgggtctaga

SEQ ID NO: 176402 - DNA, 25 bp, Artificial sequence
  SiRNA target sequence
atatttaagaatattgggtctagaa

SEQ ID NO: 176403 - DNA, 25 bp, Artificial sequence
  SiRNA target sequence
tatttaagaatattgggtctagaac

SEQ ID NO: 176404 - DNA, 25 bp, Artificial sequence
  SiRNA target sequence
atttaagaatattgggtctagaacc

SEQ ID NO: 176405 - DNA, 25 bp, Artificial sequence
  SiRNA target sequence
tttaagaatattgggtctagaacct

SEQ ID NO: 176406 - DNA, 25 bp, Artificial sequence
  SiRNA target sequence
ttaagaatattgggtctagaacctt

SEQ ID NO: 176407 - DNA, 25 bp, Artificial sequence
  SiRNA target sequence
taagaatattgggtctagaaccttt

SEQ ID NO: 176408 - DNA, 25 bp, Artificial sequence
  SiRNA target sequence
aagaatattgggtctagaacctttt

SEQ ID NO: 176409 - DNA, 25 bp, Artificial sequence
  SiRNA target sequence
agaatattgggtctagaaccttttc

SEQ ID NO: 176410 - DNA, 25 bp, Artificial sequence
  SiRNA target sequence
gaatattgggtctagaaccttttct

SEQ ID NO: 176411 - DNA, 25 bp, Artificial sequence
  SiRNA target sequence
aatattgggtctagaaccttttctt

SEQ ID NO: 176412 - DNA, 25 bp, Artificial sequence
  SiRNA target sequence
atattgggtctagaaccttttctta

SEQ ID NO: 176413 - DNA, 25 bp, Artificial sequence
  SiRNA target sequence
tattgggtctagaaccttttcttaa

SEQ ID NO: 176414 - DNA, 25 bp, Artificial sequence
  SiRNA target sequence
attgggtctagaaccttttcttaat

SEQ ID NO: 176415 - DNA, 25 bp, Artificial sequence
  SiRNA target sequence
ttgggtctagaaccttttcttaatt

SEQ ID NO: 176416 - DNA, 25 bp, Artificial sequence
  SiRNA target sequence
tgggtctagaaccttttcttaattt

SEQ ID NO: 176417 - DNA, 25 bp, Artificial sequence
  SiRNA target sequence
gggtctagaaccttttcttaatttt

SEQ ID NO: 176418 - DNA, 25 bp, Artificial sequence
  SiRNA target sequence
ggtctagaaccttttcttaatttta

SEQ ID NO: 176419 - DNA, 25 bp, Artificial sequence
  SiRNA target sequence
gtctagaaccttttcttaattttat

SEQ ID NO: 176420 - DNA, 25 bp, Artificial sequence
  SiRNA target sequence
tctagaaccttttcttaattttatt

SEQ ID NO: 176421 - DNA, 25 bp, Artificial sequence
  SiRNA target sequence
ctagaaccttttcttaattttatta

SEQ ID NO: 176422 - DNA, 25 bp, Artificial sequence
  SiRNA target sequence
tagaaccttttcttaattttattaa

SEQ ID NO: 176423 - DNA, 25 bp, Artificial sequence
  SiRNA target sequence
agaaccttttcttaattttattaag

SEQ ID NO: 176424 - DNA, 25 bp, Artificial sequence
  SiRNA target sequence
gaaccttttcttaattttattaagg

SEQ ID NO: 176425 - DNA, 25 bp, Artificial sequence
  SiRNA target sequence
aaccttttcttaattttattaagga

SEQ ID NO: 176426 - DNA, 25 bp, Artificial sequence
  SiRNA target sequence
accttttcttaattttattaaggaa

SEQ ID NO: 176427 - DNA, 25 bp, Artificial sequence
  SiRNA target sequence
ccttttcttaattttattaaggaaa

SEQ ID NO: 176428 - DNA, 25 bp, Artificial sequence
  SiRNA target sequence
cttttcttaattttattaaggaaag

SEQ ID NO: 176429 - DNA, 25 bp, Artificial sequence
  SiRNA target sequence
ttttcttaattttattaaggaaagt

SEQ ID NO: 176430 - DNA, 25 bp, Artificial sequence
  SiRNA target sequence
tttcttaattttattaaggaaagta

SEQ ID NO: 176431 - DNA, 25 bp, Artificial sequence
  SiRNA target sequence
ttcttaattttattaaggaaagtaa

SEQ ID NO: 176432 - DNA, 25 bp, Artificial sequence
  SiRNA target sequence
tcttaattttattaaggaaagtaaa

SEQ ID NO: 176433 - DNA, 25 bp, Artificial sequence
  SiRNA target sequence
cttaattttattaaggaaagtaaac

SEQ ID NO: 176434 - DNA, 25 bp, Artificial sequence
  SiRNA target sequence
ttaattttattaaggaaagtaaaca

SEQ ID NO: 176435 - DNA, 25 bp, Artificial sequence
  SiRNA target sequence
taattttattaaggaaagtaaacat

SEQ ID NO: 176436 - DNA, 25 bp, Artificial sequence
  SiRNA target sequence
aattttattaaggaaagtaaacata

SEQ ID NO: 176437 - DNA, 25 bp, Artificial sequence
  SiRNA target sequence
attttattaaggaaagtaaacataa

SEQ ID NO: 176438 - DNA, 25 bp, Artificial sequence
  SiRNA target sequence
ttttattaaggaaagtaaacataaa

SEQ ID NO: 176439 - DNA, 25 bp, Artificial sequence
  SiRNA target sequence
tttattaaggaaagtaaacataaag

SEQ ID NO: 176440 - DNA, 25 bp, Artificial sequence
  SiRNA target sequence
ttattaaggaaagtaaacataaaga

SEQ ID NO: 176441 - DNA, 25 bp, Artificial sequence
  SiRNA target sequence
tattaaggaaagtaaacataaagaa

SEQ ID NO: 176442 - DNA, 25 bp, Artificial sequence
  SiRNA target sequence
attaaggaaagtaaacataaagaat

SEQ ID NO: 176443 - DNA, 25 bp, Artificial sequence
  SiRNA target sequence
ttaaggaaagtaaacataaagaatt

SEQ ID NO: 176444 - DNA, 25 bp, Artificial sequence
  SiRNA target sequence
taaggaaagtaaacataaagaatta

SEQ ID NO: 176445 - DNA, 25 bp, Artificial sequence
  SiRNA target sequence
aaggaaagtaaacataaagaattag

SEQ ID NO: 176446 - DNA, 25 bp, Artificial sequence
  SiRNA target sequence
aggaaagtaaacataaagaattaga

SEQ ID NO: 176447 - DNA, 25 bp, Artificial sequence
  SiRNA target sequence
ggaaagtaaacataaagaattagaa

SEQ ID NO: 176448 - DNA, 25 bp, Artificial sequence
  SiRNA target sequence
gaaagtaaacataaagaattagaat

SEQ ID NO: 176449 - DNA, 25 bp, Artificial sequence
  SiRNA target sequence
aaagtaaacataaagaattagaata

SEQ ID NO: 176450 - DNA, 25 bp, Artificial sequence
  SiRNA target sequence
aagtaaacataaagaattagaatat

SEQ ID NO: 176451 - DNA, 25 bp, Artificial sequence
  SiRNA target sequence
agtaaacataaagaattagaatatg

SEQ ID NO: 176452 - DNA, 25 bp, Artificial sequence
  SiRNA target sequence
gtaaacataaagaattagaatatga

SEQ ID NO: 176453 - DNA, 25 bp, Artificial sequence
  SiRNA target sequence
taaacataaagaattagaatatgat

SEQ ID NO: 176454 - DNA, 25 bp, Artificial sequence
  SiRNA target sequence
aaacataaagaattagaatatgatg

SEQ ID NO: 176455 - DNA, 25 bp, Artificial sequence
  SiRNA target sequence
aacataaagaattagaatatgatgt

SEQ ID NO: 176456 - DNA, 25 bp, Artificial sequence
  SiRNA target sequence
acataaagaattagaatatgatgta

SEQ ID NO: 176457 - DNA, 25 bp, Artificial sequence
  SiRNA target sequence
cataaagaattagaatatgatgtat

SEQ ID NO: 176458 - DNA, 25 bp, Artificial sequence
  SiRNA target sequence
ataaagaattagaatatgatgtatg

SEQ ID NO: 176459 - DNA, 25 bp, Artificial sequence
  SiRNA target sequence
taaagaattagaatatgatgtatgc

SEQ ID NO: 176460 - DNA, 25 bp, Artificial sequence
  SiRNA target sequence
aaagaattagaatatgatgtatgcg

SEQ ID NO: 176461 - DNA, 25 bp, Artificial sequence
  SiRNA target sequence
aagaattagaatatgatgtatgcga

SEQ ID NO: 176462 - DNA, 25 bp, Artificial sequence
  SiRNA target sequence
agaattagaatatgatgtatgcgaa

SEQ ID NO: 176463 - DNA, 25 bp, Artificial sequence
  SiRNA target sequence
gaattagaatatgatgtatgcgaaa

SEQ ID NO: 176464 - DNA, 25 bp, Artificial sequence
  SiRNA target sequence
aattagaatatgatgtatgcgaaat

SEQ ID NO: 176465 - DNA, 25 bp, Artificial sequence
  SiRNA target sequence
attagaatatgatgtatgcgaaata

SEQ ID NO: 176466 - DNA, 25 bp, Artificial sequence
  SiRNA target sequence
ttagaatatgatgtatgcgaaatat

SEQ ID NO: 176467 - DNA, 25 bp, Artificial sequence
  SiRNA target sequence
tagaatatgatgtatgcgaaatata

SEQ ID NO: 176468 - DNA, 25 bp, Artificial sequence
  SiRNA target sequence
agaatatgatgtatgcgaaatatac

SEQ ID NO: 176469 - DNA, 25 bp, Artificial sequence
  SiRNA target sequence
gaatatgatgtatgcgaaatataca

SEQ ID NO: 176470 - DNA, 25 bp, Artificial sequence
  SiRNA target sequence
aatatgatgtatgcgaaatatacat

SEQ ID NO: 176471 - DNA, 25 bp, Artificial sequence
  SiRNA target sequence
atatgatgtatgcgaaatatacatt

SEQ ID NO: 176472 - DNA, 25 bp, Artificial sequence
  SiRNA target sequence
tatgatgtatgcgaaatatacattt

SEQ ID NO: 176473 - DNA, 25 bp, Artificial sequence
  SiRNA target sequence
atgatgtatgcgaaatatacatttg

SEQ ID NO: 176474 - DNA, 25 bp, Artificial sequence
  SiRNA target sequence
tgatgtatgcgaaatatacatttgt

SEQ ID NO: 176475 - DNA, 25 bp, Artificial sequence
  SiRNA target sequence
gatgtatgcgaaatatacatttgta

SEQ ID NO: 176476 - DNA, 25 bp, Artificial sequence
  SiRNA target sequence
atgtatgcgaaatatacatttgtaa

SEQ ID NO: 176477 - DNA, 25 bp, Artificial sequence
  SiRNA target sequence
tgtatgcgaaatatacatttgtaat

SEQ ID NO: 176478 - DNA, 25 bp, Artificial sequence
  SiRNA target sequence
gtatgcgaaatatacatttgtaatc

SEQ ID NO: 176479 - DNA, 25 bp, Artificial sequence
  SiRNA target sequence
tatgcgaaatatacatttgtaatca

SEQ ID NO: 176480 - DNA, 25 bp, Artificial sequence
  SiRNA target sequence
atgcgaaatatacatttgtaatcag

SEQ ID NO: 176481 - DNA, 25 bp, Artificial sequence
  SiRNA target sequence
tgcgaaatatacatttgtaatcagg

SEQ ID NO: 176482 - DNA, 25 bp, Artificial sequence
  SiRNA target sequence
gcgaaatatacatttgtaatcaggg

SEQ ID NO: 176483 - DNA, 25 bp, Artificial sequence
  SiRNA target sequence
cgaaatatacatttgtaatcaggga

SEQ ID NO: 176484 - DNA, 25 bp, Artificial sequence
  SiRNA target sequence
gaaatatacatttgtaatcagggat

SEQ ID NO: 176485 - DNA, 25 bp, Artificial sequence
  SiRNA target sequence
aaatatacatttgtaatcagggatg

SEQ ID NO: 176486 - DNA, 25 bp, Artificial sequence
  SiRNA target sequence
aatatacatttgtaatcagggatgc

SEQ ID NO: 176487 - DNA, 25 bp, Artificial sequence
  SiRNA target sequence
atatacatttgtaatcagggatgca

SEQ ID NO: 176488 - DNA, 25 bp, Artificial sequence
  SiRNA target sequence
tatacatttgtaatcagggatgcat

SEQ ID NO: 176489 - DNA, 25 bp, Artificial sequence
  SiRNA target sequence
atacatttgtaatcagggatgcatt

SEQ ID NO: 176490 - DNA, 25 bp, Artificial sequence
  SiRNA target sequence
tacatttgtaatcagggatgcatta

SEQ ID NO: 176491 - DNA, 25 bp, Artificial sequence
  SiRNA target sequence
acatttgtaatcagggatgcattaa

SEQ ID NO: 176492 - DNA, 25 bp, Artificial sequence
  SiRNA target sequence
catttgtaatcagggatgcattaat

SEQ ID NO: 176493 - DNA, 25 bp, Artificial sequence
  SiRNA target sequence
atttgtaatcagggatgcattaatg

SEQ ID NO: 176494 - DNA, 25 bp, Artificial sequence
  SiRNA target sequence
tttgtaatcagggatgcattaatgg

SEQ ID NO: 176495 - DNA, 25 bp, Artificial sequence
  SiRNA target sequence
ttgtaatcagggatgcattaatgga

SEQ ID NO: 176496 - DNA, 25 bp, Artificial sequence
  SiRNA target sequence
tgtaatcagggatgcattaatggac

SEQ ID NO: 176497 - DNA, 25 bp, Artificial sequence
  SiRNA target sequence
gtaatcagggatgcattaatggacc

SEQ ID NO: 176498 - DNA, 25 bp, Artificial sequence
  SiRNA target sequence
taatcagggatgcattaatggacca

SEQ ID NO: 176499 - DNA, 25 bp, Artificial sequence
  SiRNA target sequence
aatcagggatgcattaatggaccag

SEQ ID NO: 176500 - DNA, 25 bp, Artificial sequence
  SiRNA target sequence
atcagggatgcattaatggaccagg

SEQ ID NO: 176501 - DNA, 25 bp, Artificial sequence
  SiRNA target sequence
tcagggatgcattaatggaccagga

SEQ ID NO: 176502 - DNA, 25 bp, Artificial sequence
  SiRNA target sequence
cagggatgcattaatggaccaggac

SEQ ID NO: 176503 - DNA, 25 bp, Artificial sequence
  SiRNA target sequence
agggatgcattaatggaccaggaca

SEQ ID NO: 176504 - DNA, 25 bp, Artificial sequence
  SiRNA target sequence
gggatgcattaatggaccaggacaa

SEQ ID NO: 176505 - DNA, 25 bp, Artificial sequence
  SiRNA target sequence
ggatgcattaatggaccaggacaat

SEQ ID NO: 176506 - DNA, 25 bp, Artificial sequence
  SiRNA target sequence
gatgcattaatggaccaggacaatt

SEQ ID NO: 176507 - DNA, 25 bp, Artificial sequence
  SiRNA target sequence
atgcattaatggaccaggacaattg

SEQ ID NO: 176508 - DNA, 25 bp, Artificial sequence
  SiRNA target sequence
tgcattaatggaccaggacaattgt

SEQ ID NO: 176509 - DNA, 25 bp, Artificial sequence
  SiRNA target sequence
gcattaatggaccaggacaattgta

SEQ ID NO: 176510 - DNA, 25 bp, Artificial sequence
  SiRNA target sequence
cattaatggaccaggacaattgtat

SEQ ID NO: 176511 - DNA, 25 bp, Artificial sequence
  SiRNA target sequence
attaatggaccaggacaattgtata

SEQ ID NO: 176512 - DNA, 25 bp, Artificial sequence
  SiRNA target sequence
ttaatggaccaggacaattgtatac

SEQ ID NO: 176513 - DNA, 25 bp, Artificial sequence
  SiRNA target sequence
taatggaccaggacaattgtataca

SEQ ID NO: 176514 - DNA, 25 bp, Artificial sequence
  SiRNA target sequence
aatggaccaggacaattgtatacag

SEQ ID NO: 176515 - DNA, 25 bp, Artificial sequence
  SiRNA target sequence
atggaccaggacaattgtatacaga

SEQ ID NO: 176516 - DNA, 25 bp, Artificial sequence
  SiRNA target sequence
tggaccaggacaattgtatacagat

SEQ ID NO: 176517 - DNA, 25 bp, Artificial sequence
  SiRNA target sequence
ggaccaggacaattgtatacagata

SEQ ID NO: 176518 - DNA, 25 bp, Artificial sequence
  SiRNA target sequence
gaccaggacaattgtatacagataa

SEQ ID NO: 176519 - DNA, 25 bp, Artificial sequence
  SiRNA target sequence
accaggacaattgtatacagataat

SEQ ID NO: 176520 - DNA, 25 bp, Artificial sequence
  SiRNA target sequence
ccaggacaattgtatacagataatt

SEQ ID NO: 176521 - DNA, 25 bp, Artificial sequence
  SiRNA target sequence
caggacaattgtatacagataattt

SEQ ID NO: 176522 - DNA, 25 bp, Artificial sequence
  SiRNA target sequence
aggacaattgtatacagataattta

SEQ ID NO: 176523 - DNA, 25 bp, Artificial sequence
  SiRNA target sequence
ggacaattgtatacagataatttat

SEQ ID NO: 176524 - DNA, 25 bp, Artificial sequence
  SiRNA target sequence
gacaattgtatacagataatttata

SEQ ID NO: 176525 - DNA, 25 bp, Artificial sequence
  SiRNA target sequence
acaattgtatacagataatttatat

SEQ ID NO: 176526 - DNA, 25 bp, Artificial sequence
  SiRNA target sequence
caattgtatacagataatttatatg

SEQ ID NO: 176527 - DNA, 25 bp, Artificial sequence
  SiRNA target sequence
aattgtatacagataatttatatgt

SEQ ID NO: 176528 - DNA, 25 bp, Artificial sequence
  SiRNA target sequence
attgtatacagataatttatatgta

SEQ ID NO: 176529 - DNA, 25 bp, Artificial sequence
  SiRNA target sequence
ttgtatacagataatttatatgtaa

SEQ ID NO: 176530 - DNA, 25 bp, Artificial sequence
  SiRNA target sequence
tgtatacagataatttatatgtaaa

SEQ ID NO: 176531 - DNA, 25 bp, Artificial sequence
  SiRNA target sequence
gtatacagataatttatatgtaaat

SEQ ID NO: 176532 - DNA, 25 bp, Artificial sequence
  SiRNA target sequence
tatacagataatttatatgtaaata

SEQ ID NO: 176533 - DNA, 25 bp, Artificial sequence
  SiRNA target sequence
atacagataatttatatgtaaataa

SEQ ID NO: 176534 - DNA, 25 bp, Artificial sequence
  SiRNA target sequence
tacagataatttatatgtaaataat

SEQ ID NO: 176535 - DNA, 25 bp, Artificial sequence
  SiRNA target sequence
acagataatttatatgtaaataatt

SEQ ID NO: 176536 - DNA, 25 bp, Artificial sequence
  SiRNA target sequence
cagataatttatatgtaaataattc

SEQ ID NO: 176537 - DNA, 25 bp, Artificial sequence
  SiRNA target sequence
agataatttatatgtaaataattca

SEQ ID NO: 176538 - DNA, 25 bp, Artificial sequence
  SiRNA target sequence
gataatttatatgtaaataattcag

SEQ ID NO: 176539 - DNA, 25 bp, Artificial sequence
  SiRNA target sequence
ataatttatatgtaaataattcaga

SEQ ID NO: 176540 - DNA, 25 bp, Artificial sequence
  SiRNA target sequence
taatttatatgtaaataattcagaa

SEQ ID NO: 176541 - DNA, 25 bp, Artificial sequence
  SiRNA target sequence
aatttatatgtaaataattcagaat

SEQ ID NO: 176542 - DNA, 25 bp, Artificial sequence
  SiRNA target sequence
atttatatgtaaataattcagaata

SEQ ID NO: 176543 - DNA, 25 bp, Artificial sequence
  SiRNA target sequence
tttatatgtaaataattcagaatac

SEQ ID NO: 176544 - DNA, 25 bp, Artificial sequence
  SiRNA target sequence
ttatatgtaaataattcagaataca

SEQ ID NO: 176545 - DNA, 25 bp, Artificial sequence
  SiRNA target sequence
tatatgtaaataattcagaatacat

SEQ ID NO: 176546 - DNA, 25 bp, Artificial sequence
  SiRNA target sequence
atatgtaaataattcagaatacata

SEQ ID NO: 176547 - DNA, 25 bp, Artificial sequence
  SiRNA target sequence
tatgtaaataattcagaatacatag

SEQ ID NO: 176548 - DNA, 25 bp, Artificial sequence
  SiRNA target sequence
atgtaaataattcagaatacataga

SEQ ID NO: 176549 - DNA, 25 bp, Artificial sequence
  SiRNA target sequence
tgtaaataattcagaatacatagat

SEQ ID NO: 176550 - DNA, 25 bp, Artificial sequence
  SiRNA target sequence
gtaaataattcagaatacatagata

SEQ ID NO: 176551 - DNA, 25 bp, Artificial sequence
  SiRNA target sequence
taaataattcagaatacatagatat

SEQ ID NO: 176552 - DNA, 25 bp, Artificial sequence
  SiRNA target sequence
aaataattcagaatacatagatatt

SEQ ID NO: 176553 - DNA, 25 bp, Artificial sequence
  SiRNA target sequence
aataattcagaatacatagatattg

SEQ ID NO: 176554 - DNA, 25 bp, Artificial sequence
  SiRNA target sequence
ataattcagaatacatagatattga

SEQ ID NO: 176555 - DNA, 25 bp, Artificial sequence
  SiRNA target sequence
taattcagaatacatagatattgat

SEQ ID NO: 176556 - DNA, 25 bp, Artificial sequence
  SiRNA target sequence
aattcagaatacatagatattgatc

SEQ ID NO: 176557 - DNA, 25 bp, Artificial sequence
  SiRNA target sequence
attcagaatacatagatattgatct

SEQ ID NO: 176558 - DNA, 25 bp, Artificial sequence
  SiRNA target sequence
ttcagaatacatagatattgatctt

SEQ ID NO: 176559 - DNA, 25 bp, Artificial sequence
  SiRNA target sequence
tcagaatacatagatattgatcttg

SEQ ID NO: 176560 - DNA, 25 bp, Artificial sequence
  SiRNA target sequence
cagaatacatagatattgatcttgg

SEQ ID NO: 176561 - DNA, 25 bp, Artificial sequence
  SiRNA target sequence
agaatacatagatattgatcttggt

SEQ ID NO: 176562 - DNA, 25 bp, Artificial sequence
  SiRNA target sequence
gaatacatagatattgatcttggta

SEQ ID NO: 176563 - DNA, 25 bp, Artificial sequence
  SiRNA target sequence
aatacatagatattgatcttggtat

SEQ ID NO: 176564 - DNA, 25 bp, Artificial sequence
  SiRNA target sequence
atacatagatattgatcttggtatt

SEQ ID NO: 176565 - DNA, 25 bp, Artificial sequence
  SiRNA target sequence
tacatagatattgatcttggtattg

SEQ ID NO: 176566 - DNA, 25 bp, Artificial sequence
  SiRNA target sequence
acatagatattgatcttggtattga

SEQ ID NO: 176567 - DNA, 25 bp, Artificial sequence
  SiRNA target sequence
catagatattgatcttggtattgat

SEQ ID NO: 176568 - DNA, 25 bp, Artificial sequence
  SiRNA target sequence
atagatattgatcttggtattgatt

SEQ ID NO: 176569 - DNA, 25 bp, Artificial sequence
  SiRNA target sequence
tagatattgatcttggtattgattg

SEQ ID NO: 176570 - DNA, 25 bp, Artificial sequence
  SiRNA target sequence
agatattgatcttggtattgattgt

SEQ ID NO: 176571 - DNA, 25 bp, Artificial sequence
  SiRNA target sequence
gatattgatcttggtattgattgta

SEQ ID NO: 176572 - DNA, 25 bp, Artificial sequence
  SiRNA target sequence
atattgatcttggtattgattgtaa

SEQ ID NO: 176573 - DNA, 25 bp, Artificial sequence
  SiRNA target sequence
tattgatcttggtattgattgtaaa

SEQ ID NO: 176574 - DNA, 25 bp, Artificial sequence
  SiRNA target sequence
attgatcttggtattgattgtaaac

SEQ ID NO: 176575 - DNA, 25 bp, Artificial sequence
  SiRNA target sequence
ttgatcttggtattgattgtaaaca

SEQ ID NO: 176576 - DNA, 25 bp, Artificial sequence
  SiRNA target sequence
tgatcttggtattgattgtaaacag

SEQ ID NO: 176577 - DNA, 25 bp, Artificial sequence
  SiRNA target sequence
gatcttggtattgattgtaaacagt

SEQ ID NO: 176578 - DNA, 25 bp, Artificial sequence
  SiRNA target sequence
atcttggtattgattgtaaacagtt

SEQ ID NO: 176579 - DNA, 25 bp, Artificial sequence
  SiRNA target sequence
tcttggtattgattgtaaacagtta

SEQ ID NO: 176580 - DNA, 25 bp, Artificial sequence
  SiRNA target sequence
cttggtattgattgtaaacagttac

SEQ ID NO: 176581 - DNA, 25 bp, Artificial sequence
  SiRNA target sequence
ttggtattgattgtaaacagttaca

SEQ ID NO: 176582 - DNA, 25 bp, Artificial sequence
  SiRNA target sequence
tggtattgattgtaaacagttacaa

SEQ ID NO: 176583 - DNA, 25 bp, Artificial sequence
  SiRNA target sequence
ggtattgattgtaaacagttacaaa

SEQ ID NO: 176584 - DNA, 25 bp, Artificial sequence
  SiRNA target sequence
gtattgattgtaaacagttacaaaa

SEQ ID NO: 176585 - DNA, 25 bp, Artificial sequence
  SiRNA target sequence
tattgattgtaaacagttacaaaaa

SEQ ID NO: 176586 - DNA, 25 bp, Artificial sequence
  SiRNA target sequence
attgattgtaaacagttacaaaaaa

SEQ ID NO: 176587 - DNA, 25 bp, Artificial sequence
  SiRNA target sequence
ttgattgtaaacagttacaaaaaag

SEQ ID NO: 176588 - DNA, 25 bp, Artificial sequence
  SiRNA target sequence
tgattgtaaacagttacaaaaaagg

SEQ ID NO: 176589 - DNA, 25 bp, Artificial sequence
  SiRNA target sequence
gattgtaaacagttacaaaaaagga

SEQ ID NO: 176590 - DNA, 25 bp, Artificial sequence
  SiRNA target sequence
attgtaaacagttacaaaaaaggac

SEQ ID NO: 176591 - DNA, 25 bp, Artificial sequence
  SiRNA target sequence
ttgtaaacagttacaaaaaaggaca

SEQ ID NO: 176592 - DNA, 25 bp, Artificial sequence
  SiRNA target sequence
tgtaaacagttacaaaaaaggacat

SEQ ID NO: 176593 - DNA, 25 bp, Artificial sequence
  SiRNA target sequence
gtaaacagttacaaaaaaggacata

SEQ ID NO: 176594 - DNA, 25 bp, Artificial sequence
  SiRNA target sequence
taaacagttacaaaaaaggacatat

SEQ ID NO: 176595 - DNA, 25 bp, Artificial sequence
  SiRNA target sequence
aaacagttacaaaaaaggacatata

SEQ ID NO: 176596 - DNA, 25 bp, Artificial sequence
  SiRNA target sequence
aacagttacaaaaaaggacatatag

SEQ ID NO: 176597 - DNA, 25 bp, Artificial sequence
  SiRNA target sequence
acagttacaaaaaaggacatataga

SEQ ID NO: 176598 - DNA, 25 bp, Artificial sequence
  SiRNA target sequence
cagttacaaaaaaggacatatagaa

SEQ ID NO: 176599 - DNA, 25 bp, Artificial sequence
  SiRNA target sequence
agttacaaaaaaggacatatagaaa

SEQ ID NO: 176600 - DNA, 25 bp, Artificial sequence
  SiRNA target sequence
gttacaaaaaaggacatatagaaaa

SEQ ID NO: 176601 - DNA, 25 bp, Artificial sequence
  SiRNA target sequence
ttacaaaaaaggacatatagaaaaa

SEQ ID NO: 176602 - DNA, 25 bp, Artificial sequence
  SiRNA target sequence
tacaaaaaaggacatatagaaaaat

SEQ ID NO: 176603 - DNA, 25 bp, Artificial sequence
  SiRNA target sequence
acaaaaaaggacatatagaaaaata

SEQ ID NO: 176604 - DNA, 25 bp, Artificial sequence
  SiRNA target sequence
caaaaaaggacatatagaaaaatag

SEQ ID NO: 176605 - DNA, 25 bp, Artificial sequence
  SiRNA target sequence
aaaaaaggacatatagaaaaataga

SEQ ID NO: 176606 - DNA, 25 bp, Artificial sequence
  SiRNA target sequence
aaaaaggacatatagaaaaatagaa

SEQ ID NO: 176607 - DNA, 25 bp, Artificial sequence
  SiRNA target sequence
aaaaggacatatagaaaaatagaaa

SEQ ID NO: 176608 - DNA, 25 bp, Artificial sequence
  SiRNA target sequence
aaaggacatatagaaaaatagaaac

SEQ ID NO: 176609 - DNA, 25 bp, Artificial sequence
  SiRNA target sequence
aaggacatatagaaaaatagaaaca

SEQ ID NO: 176610 - DNA, 25 bp, Artificial sequence
  SiRNA target sequence
aggacatatagaaaaatagaaacaa

SEQ ID NO: 176611 - DNA, 25 bp, Artificial sequence
  SiRNA target sequence
ggacatatagaaaaatagaaacaaa

SEQ ID NO: 176612 - DNA, 25 bp, Artificial sequence
  SiRNA target sequence
gacatatagaaaaatagaaacaaag

SEQ ID NO: 176613 - DNA, 25 bp, Artificial sequence
  SiRNA target sequence
acatatagaaaaatagaaacaaaga

SEQ ID NO: 176614 - DNA, 25 bp, Artificial sequence
  SiRNA target sequence
catatagaaaaatagaaacaaagaa

SEQ ID NO: 176615 - DNA, 25 bp, Artificial sequence
  SiRNA target sequence
atatagaaaaatagaaacaaagaaa

SEQ ID NO: 176616 - DNA, 25 bp, Artificial sequence
  SiRNA target sequence
tatagaaaaatagaaacaaagaaag

SEQ ID NO: 176617 - DNA, 25 bp, Artificial sequence
  SiRNA target sequence
atagaaaaatagaaacaaagaaagt

SEQ ID NO: 176618 - DNA, 25 bp, Artificial sequence
  SiRNA target sequence
tagaaaaatagaaacaaagaaagtt

SEQ ID NO: 176619 - DNA, 25 bp, Artificial sequence
  SiRNA target sequence
agaaaaatagaaacaaagaaagtta

SEQ ID NO: 176620 - DNA, 25 bp, Artificial sequence
  SiRNA target sequence
gaaaaatagaaacaaagaaagttaa

SEQ ID NO: 176621 - DNA, 25 bp, Artificial sequence
  SiRNA target sequence
aaaaatagaaacaaagaaagttaat

SEQ ID NO: 176622 - DNA, 25 bp, Artificial sequence
  SiRNA target sequence
aaaatagaaacaaagaaagttaatt

SEQ ID NO: 176623 - DNA, 25 bp, Artificial sequence
  SiRNA target sequence
aaatagaaacaaagaaagttaattt

SEQ ID NO: 176624 - DNA, 25 bp, Artificial sequence
  SiRNA target sequence
aatagaaacaaagaaagttaatttt

SEQ ID NO: 176625 - DNA, 25 bp, Artificial sequence
  SiRNA target sequence
atagaaacaaagaaagttaatttta

SEQ ID NO: 176626 - DNA, 25 bp, Artificial sequence
  SiRNA target sequence
tagaaacaaagaaagttaattttaa

SEQ ID NO: 176627 - DNA, 25 bp, Artificial sequence
  SiRNA target sequence
agaaacaaagaaagttaattttaaa

SEQ ID NO: 176628 - DNA, 25 bp, Artificial sequence
  SiRNA target sequence
gaaacaaagaaagttaattttaaaa

SEQ ID NO: 176629 - DNA, 25 bp, Artificial sequence
  SiRNA target sequence
aaacaaagaaagttaattttaaaat

SEQ ID NO: 176630 - DNA, 25 bp, Artificial sequence
  SiRNA target sequence
aacaaagaaagttaattttaaaata

SEQ ID NO: 176631 - DNA, 25 bp, Artificial sequence
  SiRNA target sequence
acaaagaaagttaattttaaaatag

SEQ ID NO: 176632 - DNA, 25 bp, Artificial sequence
  SiRNA target sequence
caaagaaagttaattttaaaataga

SEQ ID NO: 176633 - DNA, 25 bp, Artificial sequence
  SiRNA target sequence
aaagaaagttaattttaaaatagaa

SEQ ID NO: 176634 - DNA, 25 bp, Artificial sequence
  SiRNA target sequence
aagaaagttaattttaaaatagaat

SEQ ID NO: 176635 - DNA, 25 bp, Artificial sequence
  SiRNA target sequence
agaaagttaattttaaaatagaatg

SEQ ID NO: 176636 - DNA, 25 bp, Artificial sequence
  SiRNA target sequence
gaaagttaattttaaaatagaatgg

SEQ ID NO: 176637 - DNA, 25 bp, Artificial sequence
  SiRNA target sequence
aaagttaattttaaaatagaatggt

SEQ ID NO: 176638 - DNA, 25 bp, Artificial sequence
  SiRNA target sequence
aagttaattttaaaatagaatggta

SEQ ID NO: 176639 - DNA, 25 bp, Artificial sequence
  SiRNA target sequence
agttaattttaaaatagaatggtaa

SEQ ID NO: 176640 - DNA, 26 bp, Artificial sequence
  SiRNA target sequence
atgaatactgaaaataaaccatgtat

SEQ ID NO: 176641 - DNA, 26 bp, Artificial sequence
  SiRNA target sequence
tgaatactgaaaataaaccatgtatt

SEQ ID NO: 176642 - DNA, 26 bp, Artificial sequence
  SiRNA target sequence
gaatactgaaaataaaccatgtattt

SEQ ID NO: 176643 - DNA, 26 bp, Artificial sequence
  SiRNA target sequence
aatactgaaaataaaccatgtatttc

SEQ ID NO: 176644 - DNA, 26 bp, Artificial sequence
  SiRNA target sequence
atactgaaaataaaccatgtatttca

SEQ ID NO: 176645 - DNA, 26 bp, Artificial sequence
  SiRNA target sequence
tactgaaaataaaccatgtatttcac

SEQ ID NO: 176646 - DNA, 26 bp, Artificial sequence
  SiRNA target sequence
actgaaaataaaccatgtatttcacc

SEQ ID NO: 176647 - DNA, 26 bp, Artificial sequence
  SiRNA target sequence
ctgaaaataaaccatgtatttcacca

SEQ ID NO: 176648 - DNA, 26 bp, Artificial sequence
  SiRNA target sequence
tgaaaataaaccatgtatttcaccat

SEQ ID NO: 176649 - DNA, 26 bp, Artificial sequence
  SiRNA target sequence
gaaaataaaccatgtatttcaccatt

SEQ ID NO: 176650 - DNA, 26 bp, Artificial sequence
  SiRNA target sequence
aaaataaaccatgtatttcaccattt

SEQ ID NO: 176651 - DNA, 26 bp, Artificial sequence
  SiRNA target sequence
aaataaaccatgtatttcaccattta

SEQ ID NO: 176652 - DNA, 26 bp, Artificial sequence
  SiRNA target sequence
aataaaccatgtatttcaccatttac

SEQ ID NO: 176653 - DNA, 26 bp, Artificial sequence
  SiRNA target sequence
ataaaccatgtatttcaccatttacc

SEQ ID NO: 176654 - DNA, 26 bp, Artificial sequence
  SiRNA target sequence
taaaccatgtatttcaccatttacct

SEQ ID NO: 176655 - DNA, 26 bp, Artificial sequence
  SiRNA target sequence
aaaccatgtatttcaccatttacctt

SEQ ID NO: 176656 - DNA, 26 bp, Artificial sequence
  SiRNA target sequence
aaccatgtatttcaccatttaccttt

SEQ ID NO: 176657 - DNA, 26 bp, Artificial sequence
  SiRNA target sequence
accatgtatttcaccatttaccttta

SEQ ID NO: 176658 - DNA, 26 bp, Artificial sequence
  SiRNA target sequence
ccatgtatttcaccatttacctttaa

SEQ ID NO: 176659 - DNA, 26 bp, Artificial sequence
  SiRNA target sequence
catgtatttcaccatttacctttaaa

SEQ ID NO: 176660 - DNA, 26 bp, Artificial sequence
  SiRNA target sequence
atgtatttcaccatttacctttaaac

SEQ ID NO: 176661 - DNA, 26 bp, Artificial sequence
  SiRNA target sequence
tgtatttcaccatttacctttaaact

SEQ ID NO: 176662 - DNA, 26 bp, Artificial sequence
  SiRNA target sequence
gtatttcaccatttacctttaaacta

SEQ ID NO: 176663 - DNA, 26 bp, Artificial sequence
  SiRNA target sequence
tatttcaccatttacctttaaactag

SEQ ID NO: 176664 - DNA, 26 bp, Artificial sequence
  SiRNA target sequence
atttcaccatttacctttaaactaga

SEQ ID NO: 176665 - DNA, 26 bp, Artificial sequence
  SiRNA target sequence
tttcaccatttacctttaaactagaa

SEQ ID NO: 176666 - DNA, 26 bp, Artificial sequence
  SiRNA target sequence
ttcaccatttacctttaaactagaag

SEQ ID NO: 176667 - DNA, 26 bp, Artificial sequence
  SiRNA target sequence
tcaccatttacctttaaactagaaga

SEQ ID NO: 176668 - DNA, 26 bp, Artificial sequence
  SiRNA target sequence
caccatttacctttaaactagaagat

SEQ ID NO: 176669 - DNA, 26 bp, Artificial sequence
  SiRNA target sequence
accatttacctttaaactagaagatt

SEQ ID NO: 176670 - DNA, 26 bp, Artificial sequence
  SiRNA target sequence
ccatttacctttaaactagaagattg

SEQ ID NO: 176671 - DNA, 26 bp, Artificial sequence
  SiRNA target sequence
catttacctttaaactagaagattgc

SEQ ID NO: 176672 - DNA, 26 bp, Artificial sequence
  SiRNA target sequence
atttacctttaaactagaagattgcc

SEQ ID NO: 176673 - DNA, 26 bp, Artificial sequence
  SiRNA target sequence
tttacctttaaactagaagattgcct

SEQ ID NO: 176674 - DNA, 26 bp, Artificial sequence
  SiRNA target sequence
ttacctttaaactagaagattgcctg

SEQ ID NO: 176675 - DNA, 26 bp, Artificial sequence
  SiRNA target sequence
tacctttaaactagaagattgcctgg

SEQ ID NO: 176676 - DNA, 26 bp, Artificial sequence
  SiRNA target sequence
acctttaaactagaagattgcctggc

SEQ ID NO: 176677 - DNA, 26 bp, Artificial sequence
  SiRNA target sequence
cctttaaactagaagattgcctggca

SEQ ID NO: 176678 - DNA, 26 bp, Artificial sequence
  SiRNA target sequence
ctttaaactagaagattgcctggcat

SEQ ID NO: 176679 - DNA, 26 bp, Artificial sequence
  SiRNA target sequence
tttaaactagaagattgcctggcatg

SEQ ID NO: 176680 - DNA, 26 bp, Artificial sequence
  SiRNA target sequence
ttaaactagaagattgcctggcatgt

SEQ ID NO: 176681 - DNA, 26 bp, Artificial sequence
  SiRNA target sequence
taaactagaagattgcctggcatgtt

SEQ ID NO: 176682 - DNA, 26 bp, Artificial sequence
  SiRNA target sequence
aaactagaagattgcctggcatgttc

SEQ ID NO: 176683 - DNA, 26 bp, Artificial sequence
  SiRNA target sequence
aactagaagattgcctggcatgttcg

SEQ ID NO: 176684 - DNA, 26 bp, Artificial sequence
  SiRNA target sequence
actagaagattgcctggcatgttcgg

SEQ ID NO: 176685 - DNA, 26 bp, Artificial sequence
  SiRNA target sequence
ctagaagattgcctggcatgttcggc

SEQ ID NO: 176686 - DNA, 26 bp, Artificial sequence
  SiRNA target sequence
tagaagattgcctggcatgttcggct

SEQ ID NO: 176687 - DNA, 26 bp, Artificial sequence
  SiRNA target sequence
agaagattgcctggcatgttcggctt

SEQ ID NO: 176688 - DNA, 26 bp, Artificial sequence
  SiRNA target sequence
gaagattgcctggcatgttcggcttg

SEQ ID NO: 176689 - DNA, 26 bp, Artificial sequence
  SiRNA target sequence
aagattgcctggcatgttcggcttgt

SEQ ID NO: 176690 - DNA, 26 bp, Artificial sequence
  SiRNA target sequence
agattgcctggcatgttcggcttgta

SEQ ID NO: 176691 - DNA, 26 bp, Artificial sequence
  SiRNA target sequence
gattgcctggcatgttcggcttgtat

SEQ ID NO: 176692 - DNA, 26 bp, Artificial sequence
  SiRNA target sequence
attgcctggcatgttcggcttgtatt

SEQ ID NO: 176693 - DNA, 26 bp, Artificial sequence
  SiRNA target sequence
ttgcctggcatgttcggcttgtattg

SEQ ID NO: 176694 - DNA, 26 bp, Artificial sequence
  SiRNA target sequence
tgcctggcatgttcggcttgtattgc

SEQ ID NO: 176695 - DNA, 26 bp, Artificial sequence
  SiRNA target sequence
gcctggcatgttcggcttgtattgct

SEQ ID NO: 176696 - DNA, 26 bp, Artificial sequence
  SiRNA target sequence
cctggcatgttcggcttgtattgctg

SEQ ID NO: 176697 - DNA, 26 bp, Artificial sequence
  SiRNA target sequence
ctggcatgttcggcttgtattgctga

SEQ ID NO: 176698 - DNA, 26 bp, Artificial sequence
  SiRNA target sequence
tggcatgttcggcttgtattgctgat

SEQ ID NO: 176699 - DNA, 26 bp, Artificial sequence
  SiRNA target sequence
ggcatgttcggcttgtattgctgatt

SEQ ID NO: 176700 - DNA, 26 bp, Artificial sequence
  SiRNA target sequence
gcatgttcggcttgtattgctgattt

SEQ ID NO: 176701 - DNA, 26 bp, Artificial sequence
  SiRNA target sequence
catgttcggcttgtattgctgatttt

SEQ ID NO: 176702 - DNA, 26 bp, Artificial sequence
  SiRNA target sequence
atgttcggcttgtattgctgattttt

SEQ ID NO: 176703 - DNA, 26 bp, Artificial sequence
  SiRNA target sequence
tgttcggcttgtattgctgatttttc

SEQ ID NO: 176704 - DNA, 26 bp, Artificial sequence
  SiRNA target sequence
gttcggcttgtattgctgatttttct

SEQ ID NO: 176705 - DNA, 26 bp, Artificial sequence
  SiRNA target sequence
ttcggcttgtattgctgatttttctg

SEQ ID NO: 176706 - DNA, 26 bp, Artificial sequence
  SiRNA target sequence
tcggcttgtattgctgatttttctgt

SEQ ID NO: 176707 - DNA, 26 bp, Artificial sequence
  SiRNA target sequence
cggcttgtattgctgatttttctgtt

SEQ ID NO: 176708 - DNA, 26 bp, Artificial sequence
  SiRNA target sequence
ggcttgtattgctgatttttctgttc

SEQ ID NO: 176709 - DNA, 26 bp, Artificial sequence
  SiRNA target sequence
gcttgtattgctgatttttctgttcc

SEQ ID NO: 176710 - DNA, 26 bp, Artificial sequence
  SiRNA target sequence
cttgtattgctgatttttctgttcca

SEQ ID NO: 176711 - DNA, 26 bp, Artificial sequence
  SiRNA target sequence
ttgtattgctgatttttctgttccaa

SEQ ID NO: 176712 - DNA, 26 bp, Artificial sequence
  SiRNA target sequence
tgtattgctgatttttctgttccaaa

SEQ ID NO: 176713 - DNA, 26 bp, Artificial sequence
  SiRNA target sequence
gtattgctgatttttctgttccaaaa

SEQ ID NO: 176714 - DNA, 26 bp, Artificial sequence
  SiRNA target sequence
tattgctgatttttctgttccaaaaa

SEQ ID NO: 176715 - DNA, 26 bp, Artificial sequence
  SiRNA target sequence
attgctgatttttctgttccaaaaat

SEQ ID NO: 176716 - DNA, 26 bp, Artificial sequence
  SiRNA target sequence
ttgctgatttttctgttccaaaaatt

SEQ ID NO: 176717 - DNA, 26 bp, Artificial sequence
  SiRNA target sequence
tgctgatttttctgttccaaaaattc

SEQ ID NO: 176718 - DNA, 26 bp, Artificial sequence
  SiRNA target sequence
gctgatttttctgttccaaaaattcc

SEQ ID NO: 176719 - DNA, 26 bp, Artificial sequence
  SiRNA target sequence
ctgatttttctgttccaaaaattcct

SEQ ID NO: 176720 - DNA, 26 bp, Artificial sequence
  SiRNA target sequence
tgatttttctgttccaaaaattccta

SEQ ID NO: 176721 - DNA, 26 bp, Artificial sequence
  SiRNA target sequence
gatttttctgttccaaaaattcctac

SEQ ID NO: 176722 - DNA, 26 bp, Artificial sequence
  SiRNA target sequence
atttttctgttccaaaaattcctact

SEQ ID NO: 176723 - DNA, 26 bp, Artificial sequence
  SiRNA target sequence
tttttctgttccaaaaattcctactt

SEQ ID NO: 176724 - DNA, 26 bp, Artificial sequence
  SiRNA target sequence
ttttctgttccaaaaattcctactta

SEQ ID NO: 176725 - DNA, 26 bp, Artificial sequence
  SiRNA target sequence
tttctgttccaaaaattcctacttac

SEQ ID NO: 176726 - DNA, 26 bp, Artificial sequence
  SiRNA target sequence
ttctgttccaaaaattcctacttaca

SEQ ID NO: 176727 - DNA, 26 bp, Artificial sequence
  SiRNA target sequence
tctgttccaaaaattcctacttacac

SEQ ID NO: 176728 - DNA, 26 bp, Artificial sequence
  SiRNA target sequence
ctgttccaaaaattcctacttacaca

SEQ ID NO: 176729 - DNA, 26 bp, Artificial sequence
  SiRNA target sequence
tgttccaaaaattcctacttacacag

SEQ ID NO: 176730 - DNA, 26 bp, Artificial sequence
  SiRNA target sequence
gttccaaaaattcctacttacacaga

SEQ ID NO: 176731 - DNA, 26 bp, Artificial sequence
  SiRNA target sequence
ttccaaaaattcctacttacacagaa

SEQ ID NO: 176732 - DNA, 26 bp, Artificial sequence
  SiRNA target sequence
tccaaaaattcctacttacacagaac

SEQ ID NO: 176733 - DNA, 26 bp, Artificial sequence
  SiRNA target sequence
ccaaaaattcctacttacacagaact

SEQ ID NO: 176734 - DNA, 26 bp, Artificial sequence
  SiRNA target sequence
caaaaattcctacttacacagaactg

SEQ ID NO: 176735 - DNA, 26 bp, Artificial sequence
  SiRNA target sequence
aaaaattcctacttacacagaactga

SEQ ID NO: 176736 - DNA, 26 bp, Artificial sequence
  SiRNA target sequence
aaaattcctacttacacagaactgaa

SEQ ID NO: 176737 - DNA, 26 bp, Artificial sequence
  SiRNA target sequence
aaattcctacttacacagaactgaaa

SEQ ID NO: 176738 - DNA, 26 bp, Artificial sequence
  SiRNA target sequence
aattcctacttacacagaactgaaag

SEQ ID NO: 176739 - DNA, 26 bp, Artificial sequence
  SiRNA target sequence
attcctacttacacagaactgaaaga

SEQ ID NO: 176740 - DNA, 26 bp, Artificial sequence
  SiRNA target sequence
ttcctacttacacagaactgaaagat

SEQ ID NO: 176741 - DNA, 26 bp, Artificial sequence
  SiRNA target sequence
tcctacttacacagaactgaaagatg

SEQ ID NO: 176742 - DNA, 26 bp, Artificial sequence
  SiRNA target sequence
cctacttacacagaactgaaagatgt

SEQ ID NO: 176743 - DNA, 26 bp, Artificial sequence
  SiRNA target sequence
ctacttacacagaactgaaagatgtc

SEQ ID NO: 176744 - DNA, 26 bp, Artificial sequence
  SiRNA target sequence
tacttacacagaactgaaagatgtcc

SEQ ID NO: 176745 - DNA, 26 bp, Artificial sequence
  SiRNA target sequence
acttacacagaactgaaagatgtccc

SEQ ID NO: 176746 - DNA, 26 bp, Artificial sequence
  SiRNA target sequence
cttacacagaactgaaagatgtccct

SEQ ID NO: 176747 - DNA, 26 bp, Artificial sequence
  SiRNA target sequence
ttacacagaactgaaagatgtccctt

SEQ ID NO: 176748 - DNA, 26 bp, Artificial sequence
  SiRNA target sequence
tacacagaactgaaagatgtcccttt

SEQ ID NO: 176749 - DNA, 26 bp, Artificial sequence
  SiRNA target sequence
acacagaactgaaagatgtcccttta

SEQ ID NO: 176750 - DNA, 26 bp, Artificial sequence
  SiRNA target sequence
cacagaactgaaagatgtccctttaa

SEQ ID NO: 176751 - DNA, 26 bp, Artificial sequence
  SiRNA target sequence
acagaactgaaagatgtccctttaac

SEQ ID NO: 176752 - DNA, 26 bp, Artificial sequence
  SiRNA target sequence
cagaactgaaagatgtccctttaaca

SEQ ID NO: 176753 - DNA, 26 bp, Artificial sequence
  SiRNA target sequence
agaactgaaagatgtccctttaacat

SEQ ID NO: 176754 - DNA, 26 bp, Artificial sequence
  SiRNA target sequence
gaactgaaagatgtccctttaacatt

SEQ ID NO: 176755 - DNA, 26 bp, Artificial sequence
  SiRNA target sequence
aactgaaagatgtccctttaacattt

SEQ ID NO: 176756 - DNA, 26 bp, Artificial sequence
  SiRNA target sequence
actgaaagatgtccctttaacatttt

SEQ ID NO: 176757 - DNA, 26 bp, Artificial sequence
  SiRNA target sequence
ctgaaagatgtccctttaacattttt

SEQ ID NO: 176758 - DNA, 26 bp, Artificial sequence
  SiRNA target sequence
tgaaagatgtccctttaacattttta

SEQ ID NO: 176759 - DNA, 26 bp, Artificial sequence
  SiRNA target sequence
gaaagatgtccctttaacatttttat

SEQ ID NO: 176760 - DNA, 26 bp, Artificial sequence
  SiRNA target sequence
aaagatgtccctttaacatttttatt

SEQ ID NO: 176761 - DNA, 26 bp, Artificial sequence
  SiRNA target sequence
aagatgtccctttaacatttttatta

SEQ ID NO: 176762 - DNA, 26 bp, Artificial sequence
  SiRNA target sequence
agatgtccctttaacatttttattat

SEQ ID NO: 176763 - DNA, 26 bp, Artificial sequence
  SiRNA target sequence
gatgtccctttaacatttttattatc

SEQ ID NO: 176764 - DNA, 26 bp, Artificial sequence
  SiRNA target sequence
atgtccctttaacatttttattatca

SEQ ID NO: 176765 - DNA, 26 bp, Artificial sequence
  SiRNA target sequence
tgtccctttaacatttttattatcac

SEQ ID NO: 176766 - DNA, 26 bp, Artificial sequence
  SiRNA target sequence
gtccctttaacatttttattatcacc

SEQ ID NO: 176767 - DNA, 26 bp, Artificial sequence
  SiRNA target sequence
tccctttaacatttttattatcacca

SEQ ID NO: 176768 - DNA, 26 bp, Artificial sequence
  SiRNA target sequence
ccctttaacatttttattatcaccac

SEQ ID NO: 176769 - DNA, 26 bp, Artificial sequence
  SiRNA target sequence
cctttaacatttttattatcaccaca

SEQ ID NO: 176770 - DNA, 26 bp, Artificial sequence
  SiRNA target sequence
ctttaacatttttattatcaccacat

SEQ ID NO: 176771 - DNA, 26 bp, Artificial sequence
  SiRNA target sequence
tttaacatttttattatcaccacatt

SEQ ID NO: 176772 - DNA, 26 bp, Artificial sequence
  SiRNA target sequence
ttaacatttttattatcaccacattc

SEQ ID NO: 176773 - DNA, 26 bp, Artificial sequence
  SiRNA target sequence
taacatttttattatcaccacattcg

SEQ ID NO: 176774 - DNA, 26 bp, Artificial sequence
  SiRNA target sequence
aacatttttattatcaccacattcga

SEQ ID NO: 176775 - DNA, 26 bp, Artificial sequence
  SiRNA target sequence
acatttttattatcaccacattcgaa

SEQ ID NO: 176776 - DNA, 26 bp, Artificial sequence
  SiRNA target sequence
catttttattatcaccacattcgaaa

SEQ ID NO: 176777 - DNA, 26 bp, Artificial sequence
  SiRNA target sequence
atttttattatcaccacattcgaaaa

SEQ ID NO: 176778 - DNA, 26 bp, Artificial sequence
  SiRNA target sequence
tttttattatcaccacattcgaaaat

SEQ ID NO: 176779 - DNA, 26 bp, Artificial sequence
  SiRNA target sequence
ttttattatcaccacattcgaaaatg

SEQ ID NO: 176780 - DNA, 26 bp, Artificial sequence
  SiRNA target sequence
tttattatcaccacattcgaaaatga

SEQ ID NO: 176781 - DNA, 26 bp, Artificial sequence
  SiRNA target sequence
ttattatcaccacattcgaaaatgaa

SEQ ID NO: 176782 - DNA, 26 bp, Artificial sequence
  SiRNA target sequence
tattatcaccacattcgaaaatgaat

SEQ ID NO: 176783 - DNA, 26 bp, Artificial sequence
  SiRNA target sequence
attatcaccacattcgaaaatgaata

SEQ ID NO: 176784 - DNA, 26 bp, Artificial sequence
  SiRNA target sequence
ttatcaccacattcgaaaatgaatat

SEQ ID NO: 176785 - DNA, 26 bp, Artificial sequence
  SiRNA target sequence
tatcaccacattcgaaaatgaatatg

SEQ ID NO: 176786 - DNA, 26 bp, Artificial sequence
  SiRNA target sequence
atcaccacattcgaaaatgaatatgt

SEQ ID NO: 176787 - DNA, 26 bp, Artificial sequence
  SiRNA target sequence
tcaccacattcgaaaatgaatatgta

SEQ ID NO: 176788 - DNA, 26 bp, Artificial sequence
  SiRNA target sequence
caccacattcgaaaatgaatatgtat

SEQ ID NO: 176789 - DNA, 26 bp, Artificial sequence
  SiRNA target sequence
accacattcgaaaatgaatatgtatg

SEQ ID NO: 176790 - DNA, 26 bp, Artificial sequence
  SiRNA target sequence
ccacattcgaaaatgaatatgtatgc

SEQ ID NO: 176791 - DNA, 26 bp, Artificial sequence
  SiRNA target sequence
cacattcgaaaatgaatatgtatgca

SEQ ID NO: 176792 - DNA, 26 bp, Artificial sequence
  SiRNA target sequence
acattcgaaaatgaatatgtatgcac

SEQ ID NO: 176793 - DNA, 26 bp, Artificial sequence
  SiRNA target sequence
cattcgaaaatgaatatgtatgcaca

SEQ ID NO: 176794 - DNA, 26 bp, Artificial sequence
  SiRNA target sequence
attcgaaaatgaatatgtatgcacac

SEQ ID NO: 176795 - DNA, 26 bp, Artificial sequence
  SiRNA target sequence
ttcgaaaatgaatatgtatgcacact

SEQ ID NO: 176796 - DNA, 26 bp, Artificial sequence
  SiRNA target sequence
tcgaaaatgaatatgtatgcacacta

SEQ ID NO: 176797 - DNA, 26 bp, Artificial sequence
  SiRNA target sequence
cgaaaatgaatatgtatgcacactat

SEQ ID NO: 176798 - DNA, 26 bp, Artificial sequence
  SiRNA target sequence
gaaaatgaatatgtatgcacactata

SEQ ID NO: 176799 - DNA, 26 bp, Artificial sequence
  SiRNA target sequence
aaaatgaatatgtatgcacactataa

SEQ ID NO: 176800 - DNA, 26 bp, Artificial sequence
  SiRNA target sequence
aaatgaatatgtatgcacactataac

SEQ ID NO: 176801 - DNA, 26 bp, Artificial sequence
  SiRNA target sequence
aatgaatatgtatgcacactataaca

SEQ ID NO: 176802 - DNA, 26 bp, Artificial sequence
  SiRNA target sequence
atgaatatgtatgcacactataacaa

SEQ ID NO: 176803 - DNA, 26 bp, Artificial sequence
  SiRNA target sequence
tgaatatgtatgcacactataacaat

SEQ ID NO: 176804 - DNA, 26 bp, Artificial sequence
  SiRNA target sequence
gaatatgtatgcacactataacaatc

SEQ ID NO: 176805 - DNA, 26 bp, Artificial sequence
  SiRNA target sequence
aatatgtatgcacactataacaatca

SEQ ID NO: 176806 - DNA, 26 bp, Artificial sequence
  SiRNA target sequence
atatgtatgcacactataacaatcat

SEQ ID NO: 176807 - DNA, 26 bp, Artificial sequence
  SiRNA target sequence
tatgtatgcacactataacaatcata

SEQ ID NO: 176808 - DNA, 26 bp, Artificial sequence
  SiRNA target sequence
atgtatgcacactataacaatcatat

SEQ ID NO: 176809 - DNA, 26 bp, Artificial sequence
  SiRNA target sequence
tgtatgcacactataacaatcatata

SEQ ID NO: 176810 - DNA, 26 bp, Artificial sequence
  SiRNA target sequence
gtatgcacactataacaatcatataa

SEQ ID NO: 176811 - DNA, 26 bp, Artificial sequence
  SiRNA target sequence
tatgcacactataacaatcatataat

SEQ ID NO: 176812 - DNA, 26 bp, Artificial sequence
  SiRNA target sequence
atgcacactataacaatcatataatg

SEQ ID NO: 176813 - DNA, 26 bp, Artificial sequence
  SiRNA target sequence
tgcacactataacaatcatataatgt

SEQ ID NO: 176814 - DNA, 26 bp, Artificial sequence
  SiRNA target sequence
gcacactataacaatcatataatgtc

SEQ ID NO: 176815 - DNA, 26 bp, Artificial sequence
  SiRNA target sequence
cacactataacaatcatataatgtcc

SEQ ID NO: 176816 - DNA, 26 bp, Artificial sequence
  SiRNA target sequence
acactataacaatcatataatgtcct

SEQ ID NO: 176817 - DNA, 26 bp, Artificial sequence
  SiRNA target sequence
cactataacaatcatataatgtcctt

SEQ ID NO: 176818 - DNA, 26 bp, Artificial sequence
  SiRNA target sequence
actataacaatcatataatgtccttt

SEQ ID NO: 176819 - DNA, 26 bp, Artificial sequence
  SiRNA target sequence
ctataacaatcatataatgtccttta

SEQ ID NO: 176820 - DNA, 26 bp, Artificial sequence
  SiRNA target sequence
tataacaatcatataatgtcctttag

SEQ ID NO: 176821 - DNA, 26 bp, Artificial sequence
  SiRNA target sequence
ataacaatcatataatgtcctttagt

SEQ ID NO: 176822 - DNA, 26 bp, Artificial sequence
  SiRNA target sequence
taacaatcatataatgtcctttagtg

SEQ ID NO: 176823 - DNA, 26 bp, Artificial sequence
  SiRNA target sequence
aacaatcatataatgtcctttagtga

SEQ ID NO: 176824 - DNA, 26 bp, Artificial sequence
  SiRNA target sequence
acaatcatataatgtcctttagtgat

SEQ ID NO: 176825 - DNA, 26 bp, Artificial sequence
  SiRNA target sequence
caatcatataatgtcctttagtgatt

SEQ ID NO: 176826 - DNA, 26 bp, Artificial sequence
  SiRNA target sequence
aatcatataatgtcctttagtgattt

SEQ ID NO: 176827 - DNA, 26 bp, Artificial sequence
  SiRNA target sequence
atcatataatgtcctttagtgatttt

SEQ ID NO: 176828 - DNA, 26 bp, Artificial sequence
  SiRNA target sequence
tcatataatgtcctttagtgattttg

SEQ ID NO: 176829 - DNA, 26 bp, Artificial sequence
  SiRNA target sequence
catataatgtcctttagtgattttga

SEQ ID NO: 176830 - DNA, 26 bp, Artificial sequence
  SiRNA target sequence
atataatgtcctttagtgattttgaa

SEQ ID NO: 176831 - DNA, 26 bp, Artificial sequence
  SiRNA target sequence
tataatgtcctttagtgattttgaat

SEQ ID NO: 176832 - DNA, 26 bp, Artificial sequence
  SiRNA target sequence
ataatgtcctttagtgattttgaata

SEQ ID NO: 176833 - DNA, 26 bp, Artificial sequence
  SiRNA target sequence
taatgtcctttagtgattttgaatat

SEQ ID NO: 176834 - DNA, 26 bp, Artificial sequence
  SiRNA target sequence
aatgtcctttagtgattttgaatatc

SEQ ID NO: 176835 - DNA, 26 bp, Artificial sequence
  SiRNA target sequence
atgtcctttagtgattttgaatatca

SEQ ID NO: 176836 - DNA, 26 bp, Artificial sequence
  SiRNA target sequence
tgtcctttagtgattttgaatatcac

SEQ ID NO: 176837 - DNA, 26 bp, Artificial sequence
  SiRNA target sequence
gtcctttagtgattttgaatatcact

SEQ ID NO: 176838 - DNA, 26 bp, Artificial sequence
  SiRNA target sequence
tcctttagtgattttgaatatcactt

SEQ ID NO: 176839 - DNA, 26 bp, Artificial sequence
  SiRNA target sequence
cctttagtgattttgaatatcactta

SEQ ID NO: 176840 - DNA, 26 bp, Artificial sequence
  SiRNA target sequence
ctttagtgattttgaatatcacttaa

SEQ ID NO: 176841 - DNA, 26 bp, Artificial sequence
  SiRNA target sequence
tttagtgattttgaatatcacttaat

SEQ ID NO: 176842 - DNA, 26 bp, Artificial sequence
  SiRNA target sequence
ttagtgattttgaatatcacttaatt

SEQ ID NO: 176843 - DNA, 26 bp, Artificial sequence
  SiRNA target sequence
tagtgattttgaatatcacttaattt

SEQ ID NO: 176844 - DNA, 26 bp, Artificial sequence
  SiRNA target sequence
agtgattttgaatatcacttaatttc

SEQ ID NO: 176845 - DNA, 26 bp, Artificial sequence
  SiRNA target sequence
gtgattttgaatatcacttaatttca

SEQ ID NO: 176846 - DNA, 26 bp, Artificial sequence
  SiRNA target sequence
tgattttgaatatcacttaatttcat

SEQ ID NO: 176847 - DNA, 26 bp, Artificial sequence
  SiRNA target sequence
gattttgaatatcacttaatttcatt

SEQ ID NO: 176848 - DNA, 26 bp, Artificial sequence
  SiRNA target sequence
attttgaatatcacttaatttcattt

SEQ ID NO: 176849 - DNA, 26 bp, Artificial sequence
  SiRNA target sequence
ttttgaatatcacttaatttcattta

SEQ ID NO: 176850 - DNA, 26 bp, Artificial sequence
  SiRNA target sequence
tttgaatatcacttaatttcatttat

SEQ ID NO: 176851 - DNA, 26 bp, Artificial sequence
  SiRNA target sequence
ttgaatatcacttaatttcatttata

SEQ ID NO: 176852 - DNA, 26 bp, Artificial sequence
  SiRNA target sequence
tgaatatcacttaatttcatttataa

SEQ ID NO: 176853 - DNA, 26 bp, Artificial sequence
  SiRNA target sequence
gaatatcacttaatttcatttataaa

SEQ ID NO: 176854 - DNA, 26 bp, Artificial sequence
  SiRNA target sequence
aatatcacttaatttcatttataaaa

SEQ ID NO: 176855 - DNA, 26 bp, Artificial sequence
  SiRNA target sequence
atatcacttaatttcatttataaaac

SEQ ID NO: 176856 - DNA, 26 bp, Artificial sequence
  SiRNA target sequence
tatcacttaatttcatttataaaact

SEQ ID NO: 176857 - DNA, 26 bp, Artificial sequence
  SiRNA target sequence
atcacttaatttcatttataaaacta

SEQ ID NO: 176858 - DNA, 26 bp, Artificial sequence
  SiRNA target sequence
tcacttaatttcatttataaaactaa

SEQ ID NO: 176859 - DNA, 26 bp, Artificial sequence
  SiRNA target sequence
cacttaatttcatttataaaactaaa

SEQ ID NO: 176860 - DNA, 26 bp, Artificial sequence
  SiRNA target sequence
acttaatttcatttataaaactaaaa

SEQ ID NO: 176861 - DNA, 26 bp, Artificial sequence
  SiRNA target sequence
cttaatttcatttataaaactaaaat

SEQ ID NO: 176862 - DNA, 26 bp, Artificial sequence
  SiRNA target sequence
ttaatttcatttataaaactaaaatt

SEQ ID NO: 176863 - DNA, 26 bp, Artificial sequence
  SiRNA target sequence
taatttcatttataaaactaaaattt

SEQ ID NO: 176864 - DNA, 26 bp, Artificial sequence
  SiRNA target sequence
aatttcatttataaaactaaaattta

SEQ ID NO: 176865 - DNA, 26 bp, Artificial sequence
  SiRNA target sequence
atttcatttataaaactaaaatttaa

SEQ ID NO: 176866 - DNA, 26 bp, Artificial sequence
  SiRNA target sequence
tttcatttataaaactaaaatttaat

SEQ ID NO: 176867 - DNA, 26 bp, Artificial sequence
  SiRNA target sequence
ttcatttataaaactaaaatttaatg

SEQ ID NO: 176868 - DNA, 26 bp, Artificial sequence
  SiRNA target sequence
tcatttataaaactaaaatttaatgt

SEQ ID NO: 176869 - DNA, 26 bp, Artificial sequence
  SiRNA target sequence
catttataaaactaaaatttaatgta

SEQ ID NO: 176870 - DNA, 26 bp, Artificial sequence
  SiRNA target sequence
atttataaaactaaaatttaatgtaa

SEQ ID NO: 176871 - DNA, 26 bp, Artificial sequence
  SiRNA target sequence
tttataaaactaaaatttaatgtaat

SEQ ID NO: 176872 - DNA, 26 bp, Artificial sequence
  SiRNA target sequence
ttataaaactaaaatttaatgtaata

SEQ ID NO: 176873 - DNA, 26 bp, Artificial sequence
  SiRNA target sequence
tataaaactaaaatttaatgtaataa

SEQ ID NO: 176874 - DNA, 26 bp, Artificial sequence
  SiRNA target sequence
ataaaactaaaatttaatgtaataaa

SEQ ID NO: 176875 - DNA, 26 bp, Artificial sequence
  SiRNA target sequence
taaaactaaaatttaatgtaataaaa

SEQ ID NO: 176876 - DNA, 26 bp, Artificial sequence
  SiRNA target sequence
aaaactaaaatttaatgtaataaaag

SEQ ID NO: 176877 - DNA, 26 bp, Artificial sequence
  SiRNA target sequence
aaactaaaatttaatgtaataaaagt

SEQ ID NO: 176878 - DNA, 26 bp, Artificial sequence
  SiRNA target sequence
aactaaaatttaatgtaataaaagta

SEQ ID NO: 176879 - DNA, 26 bp, Artificial sequence
  SiRNA target sequence
actaaaatttaatgtaataaaagtat

SEQ ID NO: 176880 - DNA, 26 bp, Artificial sequence
  SiRNA target sequence
ctaaaatttaatgtaataaaagtata

SEQ ID NO: 176881 - DNA, 26 bp, Artificial sequence
  SiRNA target sequence
taaaatttaatgtaataaaagtatat

SEQ ID NO: 176882 - DNA, 26 bp, Artificial sequence
  SiRNA target sequence
aaaatttaatgtaataaaagtatatg

SEQ ID NO: 176883 - DNA, 26 bp, Artificial sequence
  SiRNA target sequence
aaatttaatgtaataaaagtatatga

SEQ ID NO: 176884 - DNA, 26 bp, Artificial sequence
  SiRNA target sequence
aatttaatgtaataaaagtatatgat

SEQ ID NO: 176885 - DNA, 26 bp, Artificial sequence
  SiRNA target sequence
atttaatgtaataaaagtatatgata

SEQ ID NO: 176886 - DNA, 26 bp, Artificial sequence
  SiRNA target sequence
tttaatgtaataaaagtatatgatac

SEQ ID NO: 176887 - DNA, 26 bp, Artificial sequence
  SiRNA target sequence
ttaatgtaataaaagtatatgataca

SEQ ID NO: 176888 - DNA, 26 bp, Artificial sequence
  SiRNA target sequence
taatgtaataaaagtatatgatacat

SEQ ID NO: 176889 - DNA, 26 bp, Artificial sequence
  SiRNA target sequence
aatgtaataaaagtatatgatacatc

SEQ ID NO: 176890 - DNA, 26 bp, Artificial sequence
  SiRNA target sequence
atgtaataaaagtatatgatacatct

SEQ ID NO: 176891 - DNA, 26 bp, Artificial sequence
  SiRNA target sequence
tgtaataaaagtatatgatacatctt

SEQ ID NO: 176892 - DNA, 26 bp, Artificial sequence
  SiRNA target sequence
gtaataaaagtatatgatacatctta

SEQ ID NO: 176893 - DNA, 26 bp, Artificial sequence
  SiRNA target sequence
taataaaagtatatgatacatcttat

SEQ ID NO: 176894 - DNA, 26 bp, Artificial sequence
  SiRNA target sequence
aataaaagtatatgatacatcttatg

SEQ ID NO: 176895 - DNA, 26 bp, Artificial sequence
  SiRNA target sequence
ataaaagtatatgatacatcttatgt

SEQ ID NO: 176896 - DNA, 26 bp, Artificial sequence
  SiRNA target sequence
taaaagtatatgatacatcttatgtc

SEQ ID NO: 176897 - DNA, 26 bp, Artificial sequence
  SiRNA target sequence
aaaagtatatgatacatcttatgtca

SEQ ID NO: 176898 - DNA, 26 bp, Artificial sequence
  SiRNA target sequence
aaagtatatgatacatcttatgtcaa

SEQ ID NO: 176899 - DNA, 26 bp, Artificial sequence
  SiRNA target sequence
aagtatatgatacatcttatgtcaaa

SEQ ID NO: 176900 - DNA, 26 bp, Artificial sequence
  SiRNA target sequence
agtatatgatacatcttatgtcaaaa

SEQ ID NO: 176901 - DNA, 26 bp, Artificial sequence
  SiRNA target sequence
gtatatgatacatcttatgtcaaaaa

SEQ ID NO: 176902 - DNA, 26 bp, Artificial sequence
  SiRNA target sequence
tatatgatacatcttatgtcaaaaat

SEQ ID NO: 176903 - DNA, 26 bp, Artificial sequence
  SiRNA target sequence
atatgatacatcttatgtcaaaaata

SEQ ID NO: 176904 - DNA, 26 bp, Artificial sequence
  SiRNA target sequence
tatgatacatcttatgtcaaaaatat

SEQ ID NO: 176905 - DNA, 26 bp, Artificial sequence
  SiRNA target sequence
atgatacatcttatgtcaaaaatatt

SEQ ID NO: 176906 - DNA, 26 bp, Artificial sequence
  SiRNA target sequence
tgatacatcttatgtcaaaaatattc

SEQ ID NO: 176907 - DNA, 26 bp, Artificial sequence
  SiRNA target sequence
gatacatcttatgtcaaaaatattct

SEQ ID NO: 176908 - DNA, 26 bp, Artificial sequence
  SiRNA target sequence
atacatcttatgtcaaaaatattctg

SEQ ID NO: 176909 - DNA, 26 bp, Artificial sequence
  SiRNA target sequence
tacatcttatgtcaaaaatattctgt

SEQ ID NO: 176910 - DNA, 26 bp, Artificial sequence
  SiRNA target sequence
acatcttatgtcaaaaatattctgta

SEQ ID NO: 176911 - DNA, 26 bp, Artificial sequence
  SiRNA target sequence
catcttatgtcaaaaatattctgtat

SEQ ID NO: 176912 - DNA, 26 bp, Artificial sequence
  SiRNA target sequence
atcttatgtcaaaaatattctgtatg

SEQ ID NO: 176913 - DNA, 26 bp, Artificial sequence
  SiRNA target sequence
tcttatgtcaaaaatattctgtatga

SEQ ID NO: 176914 - DNA, 26 bp, Artificial sequence
  SiRNA target sequence
cttatgtcaaaaatattctgtatgat

SEQ ID NO: 176915 - DNA, 26 bp, Artificial sequence
  SiRNA target sequence
ttatgtcaaaaatattctgtatgata

SEQ ID NO: 176916 - DNA, 26 bp, Artificial sequence
  SiRNA target sequence
tatgtcaaaaatattctgtatgatag

SEQ ID NO: 176917 - DNA, 26 bp, Artificial sequence
  SiRNA target sequence
atgtcaaaaatattctgtatgatagt

SEQ ID NO: 176918 - DNA, 26 bp, Artificial sequence
  SiRNA target sequence
tgtcaaaaatattctgtatgatagtg

SEQ ID NO: 176919 - DNA, 26 bp, Artificial sequence
  SiRNA target sequence
gtcaaaaatattctgtatgatagtgt

SEQ ID NO: 176920 - DNA, 26 bp, Artificial sequence
  SiRNA target sequence
tcaaaaatattctgtatgatagtgtt

SEQ ID NO: 176921 - DNA, 26 bp, Artificial sequence
  SiRNA target sequence
caaaaatattctgtatgatagtgttt

SEQ ID NO: 176922 - DNA, 26 bp, Artificial sequence
  SiRNA target sequence
aaaaatattctgtatgatagtgttta

SEQ ID NO: 176923 - DNA, 26 bp, Artificial sequence
  SiRNA target sequence
aaaatattctgtatgatagtgtttat

SEQ ID NO: 176924 - DNA, 26 bp, Artificial sequence
  SiRNA target sequence
aaatattctgtatgatagtgtttatg

SEQ ID NO: 176925 - DNA, 26 bp, Artificial sequence
  SiRNA target sequence
aatattctgtatgatagtgtttatga

SEQ ID NO: 176926 - DNA, 26 bp, Artificial sequence
  SiRNA target sequence
atattctgtatgatagtgtttatgag

SEQ ID NO: 176927 - DNA, 26 bp, Artificial sequence
  SiRNA target sequence
tattctgtatgatagtgtttatgagg

SEQ ID NO: 176928 - DNA, 26 bp, Artificial sequence
  SiRNA target sequence
attctgtatgatagtgtttatgagga

SEQ ID NO: 176929 - DNA, 26 bp, Artificial sequence
  SiRNA target sequence
ttctgtatgatagtgtttatgaggaa

SEQ ID NO: 176930 - DNA, 26 bp, Artificial sequence
  SiRNA target sequence
tctgtatgatagtgtttatgaggaaa

SEQ ID NO: 176931 - DNA, 26 bp, Artificial sequence
  SiRNA target sequence
ctgtatgatagtgtttatgaggaaag

SEQ ID NO: 176932 - DNA, 26 bp, Artificial sequence
  SiRNA target sequence
tgtatgatagtgtttatgaggaaagc

SEQ ID NO: 176933 - DNA, 26 bp, Artificial sequence
  SiRNA target sequence
gtatgatagtgtttatgaggaaagca

SEQ ID NO: 176934 - DNA, 26 bp, Artificial sequence
  SiRNA target sequence
tatgatagtgtttatgaggaaagcac

SEQ ID NO: 176935 - DNA, 26 bp, Artificial sequence
  SiRNA target sequence
atgatagtgtttatgaggaaagcacg

SEQ ID NO: 176936 - DNA, 26 bp, Artificial sequence
  SiRNA target sequence
tgatagtgtttatgaggaaagcacga

SEQ ID NO: 176937 - DNA, 26 bp, Artificial sequence
  SiRNA target sequence
gatagtgtttatgaggaaagcacgag

SEQ ID NO: 176938 - DNA, 26 bp, Artificial sequence
  SiRNA target sequence
atagtgtttatgaggaaagcacgaga

SEQ ID NO: 176939 - DNA, 26 bp, Artificial sequence
  SiRNA target sequence
tagtgtttatgaggaaagcacgagag

SEQ ID NO: 176940 - DNA, 26 bp, Artificial sequence
  SiRNA target sequence
agtgtttatgaggaaagcacgagaga

SEQ ID NO: 176941 - DNA, 26 bp, Artificial sequence
  SiRNA target sequence
gtgtttatgaggaaagcacgagagac

SEQ ID NO: 176942 - DNA, 26 bp, Artificial sequence
  SiRNA target sequence
tgtttatgaggaaagcacgagagaca

SEQ ID NO: 176943 - DNA, 26 bp, Artificial sequence
  SiRNA target sequence
gtttatgaggaaagcacgagagacaa

SEQ ID NO: 176944 - DNA, 26 bp, Artificial sequence
  SiRNA target sequence
tttatgaggaaagcacgagagacaaa

SEQ ID NO: 176945 - DNA, 26 bp, Artificial sequence
  SiRNA target sequence
ttatgaggaaagcacgagagacaaaa

SEQ ID NO: 176946 - DNA, 26 bp, Artificial sequence
  SiRNA target sequence
tatgaggaaagcacgagagacaaaat

SEQ ID NO: 176947 - DNA, 26 bp, Artificial sequence
  SiRNA target sequence
atgaggaaagcacgagagacaaaata

SEQ ID NO: 176948 - DNA, 26 bp, Artificial sequence
  SiRNA target sequence
tgaggaaagcacgagagacaaaataa

SEQ ID NO: 176949 - DNA, 26 bp, Artificial sequence
  SiRNA target sequence
gaggaaagcacgagagacaaaataat

SEQ ID NO: 176950 - DNA, 26 bp, Artificial sequence
  SiRNA target sequence
aggaaagcacgagagacaaaataata

SEQ ID NO: 176951 - DNA, 26 bp, Artificial sequence
  SiRNA target sequence
ggaaagcacgagagacaaaataataa

SEQ ID NO: 176952 - DNA, 26 bp, Artificial sequence
  SiRNA target sequence
gaaagcacgagagacaaaataataat

SEQ ID NO: 176953 - DNA, 26 bp, Artificial sequence
  SiRNA target sequence
aaagcacgagagacaaaataataata

SEQ ID NO: 176954 - DNA, 26 bp, Artificial sequence
  SiRNA target sequence
aagcacgagagacaaaataataataa

SEQ ID NO: 176955 - DNA, 26 bp, Artificial sequence
  SiRNA target sequence
agcacgagagacaaaataataataag

SEQ ID NO: 176956 - DNA, 26 bp, Artificial sequence
  SiRNA target sequence
gcacgagagacaaaataataataagt

SEQ ID NO: 176957 - DNA, 26 bp, Artificial sequence
  SiRNA target sequence
cacgagagacaaaataataataagtg

SEQ ID NO: 176958 - DNA, 26 bp, Artificial sequence
  SiRNA target sequence
acgagagacaaaataataataagtga

SEQ ID NO: 176959 - DNA, 26 bp, Artificial sequence
  SiRNA target sequence
cgagagacaaaataataataagtgac

SEQ ID NO: 176960 - DNA, 26 bp, Artificial sequence
  SiRNA target sequence
gagagacaaaataataataagtgact

SEQ ID NO: 176961 - DNA, 26 bp, Artificial sequence
  SiRNA target sequence
agagacaaaataataataagtgactg

SEQ ID NO: 176962 - DNA, 26 bp, Artificial sequence
  SiRNA target sequence
gagacaaaataataataagtgactgt

SEQ ID NO: 176963 - DNA, 26 bp, Artificial sequence
  SiRNA target sequence
agacaaaataataataagtgactgtc

SEQ ID NO: 176964 - DNA, 26 bp, Artificial sequence
  SiRNA target sequence
gacaaaataataataagtgactgtcc

SEQ ID NO: 176965 - DNA, 26 bp, Artificial sequence
  SiRNA target sequence
acaaaataataataagtgactgtcct

SEQ ID NO: 176966 - DNA, 26 bp, Artificial sequence
  SiRNA target sequence
caaaataataataagtgactgtcctg

SEQ ID NO: 176967 - DNA, 26 bp, Artificial sequence
  SiRNA target sequence
aaaataataataagtgactgtcctgg

SEQ ID NO: 176968 - DNA, 26 bp, Artificial sequence
  SiRNA target sequence
aaataataataagtgactgtcctggg

SEQ ID NO: 176969 - DNA, 26 bp, Artificial sequence
  SiRNA target sequence
aataataataagtgactgtcctggga

SEQ ID NO: 176970 - DNA, 26 bp, Artificial sequence
  SiRNA target sequence
ataataataagtgactgtcctgggac

SEQ ID NO: 176971 - DNA, 26 bp, Artificial sequence
  SiRNA target sequence
taataataagtgactgtcctgggact

SEQ ID NO: 176972 - DNA, 26 bp, Artificial sequence
  SiRNA target sequence
aataataagtgactgtcctgggactg

SEQ ID NO: 176973 - DNA, 26 bp, Artificial sequence
  SiRNA target sequence
ataataagtgactgtcctgggactgt

SEQ ID NO: 176974 - DNA, 26 bp, Artificial sequence
  SiRNA target sequence
taataagtgactgtcctgggactgtt

SEQ ID NO: 176975 - DNA, 26 bp, Artificial sequence
  SiRNA target sequence
aataagtgactgtcctgggactgttt

SEQ ID NO: 176976 - DNA, 26 bp, Artificial sequence
  SiRNA target sequence
ataagtgactgtcctgggactgtttc

SEQ ID NO: 176977 - DNA, 26 bp, Artificial sequence
  SiRNA target sequence
taagtgactgtcctgggactgtttca

SEQ ID NO: 176978 - DNA, 26 bp, Artificial sequence
  SiRNA target sequence
aagtgactgtcctgggactgtttcat

SEQ ID NO: 176979 - DNA, 26 bp, Artificial sequence
  SiRNA target sequence
agtgactgtcctgggactgtttcata

SEQ ID NO: 176980 - DNA, 26 bp, Artificial sequence
  SiRNA target sequence
gtgactgtcctgggactgtttcatat

SEQ ID NO: 176981 - DNA, 26 bp, Artificial sequence
  SiRNA target sequence
tgactgtcctgggactgtttcatata

SEQ ID NO: 176982 - DNA, 26 bp, Artificial sequence
  SiRNA target sequence
gactgtcctgggactgtttcatatat

SEQ ID NO: 176983 - DNA, 26 bp, Artificial sequence
  SiRNA target sequence
actgtcctgggactgtttcatatatt

SEQ ID NO: 176984 - DNA, 26 bp, Artificial sequence
  SiRNA target sequence
ctgtcctgggactgtttcatatattg

SEQ ID NO: 176985 - DNA, 26 bp, Artificial sequence
  SiRNA target sequence
tgtcctgggactgtttcatatattga

SEQ ID NO: 176986 - DNA, 26 bp, Artificial sequence
  SiRNA target sequence
gtcctgggactgtttcatatattgaa

SEQ ID NO: 176987 - DNA, 26 bp, Artificial sequence
  SiRNA target sequence
tcctgggactgtttcatatattgaaa

SEQ ID NO: 176988 - DNA, 26 bp, Artificial sequence
  SiRNA target sequence
cctgggactgtttcatatattgaaag

SEQ ID NO: 176989 - DNA, 26 bp, Artificial sequence
  SiRNA target sequence
ctgggactgtttcatatattgaaagg

SEQ ID NO: 176990 - DNA, 26 bp, Artificial sequence
  SiRNA target sequence
tgggactgtttcatatattgaaaggc

SEQ ID NO: 176991 - DNA, 26 bp, Artificial sequence
  SiRNA target sequence
gggactgtttcatatattgaaaggca

SEQ ID NO: 176992 - DNA, 26 bp, Artificial sequence
  SiRNA target sequence
ggactgtttcatatattgaaaggcaa

SEQ ID NO: 176993 - DNA, 26 bp, Artificial sequence
  SiRNA target sequence
gactgtttcatatattgaaaggcaag

SEQ ID NO: 176994 - DNA, 26 bp, Artificial sequence
  SiRNA target sequence
actgtttcatatattgaaaggcaagc

SEQ ID NO: 176995 - DNA, 26 bp, Artificial sequence
  SiRNA target sequence
ctgtttcatatattgaaaggcaagca

SEQ ID NO: 176996 - DNA, 26 bp, Artificial sequence
  SiRNA target sequence
tgtttcatatattgaaaggcaagcac

SEQ ID NO: 176997 - DNA, 26 bp, Artificial sequence
  SiRNA target sequence
gtttcatatattgaaaggcaagcaca

SEQ ID NO: 176998 - DNA, 26 bp, Artificial sequence
  SiRNA target sequence
tttcatatattgaaaggcaagcacac

SEQ ID NO: 176999 - DNA, 26 bp, Artificial sequence
  SiRNA target sequence
ttcatatattgaaaggcaagcacacc

SEQ ID NO: 177000 - DNA, 26 bp, Artificial sequence
  SiRNA target sequence
tcatatattgaaaggcaagcacacca

SEQ ID NO: 177001 - DNA, 26 bp, Artificial sequence
  SiRNA target sequence
catatattgaaaggcaagcacaccat

SEQ ID NO: 177002 - DNA, 26 bp, Artificial sequence
  SiRNA target sequence
atatattgaaaggcaagcacaccatt

SEQ ID NO: 177003 - DNA, 26 bp, Artificial sequence
  SiRNA target sequence
tatattgaaaggcaagcacaccattt

SEQ ID NO: 177004 - DNA, 26 bp, Artificial sequence
  SiRNA target sequence
atattgaaaggcaagcacaccattta

SEQ ID NO: 177005 - DNA, 26 bp, Artificial sequence
  SiRNA target sequence
tattgaaaggcaagcacaccatttaa

SEQ ID NO: 177006 - DNA, 26 bp, Artificial sequence
  SiRNA target sequence
attgaaaggcaagcacaccatttaat

SEQ ID NO: 177007 - DNA, 26 bp, Artificial sequence
  SiRNA target sequence
ttgaaaggcaagcacaccatttaatt

SEQ ID NO: 177008 - DNA, 26 bp, Artificial sequence
  SiRNA target sequence
tgaaaggcaagcacaccatttaattg

SEQ ID NO: 177009 - DNA, 26 bp, Artificial sequence
  SiRNA target sequence
gaaaggcaagcacaccatttaattga

SEQ ID NO: 177010 - DNA, 26 bp, Artificial sequence
  SiRNA target sequence
aaaggcaagcacaccatttaattgaa

SEQ ID NO: 177011 - DNA, 26 bp, Artificial sequence
  SiRNA target sequence
aaggcaagcacaccatttaattgaat

SEQ ID NO: 177012 - DNA, 26 bp, Artificial sequence
  SiRNA target sequence
aggcaagcacaccatttaattgaata

SEQ ID NO: 177013 - DNA, 26 bp, Artificial sequence
  SiRNA target sequence
ggcaagcacaccatttaattgaatat

SEQ ID NO: 177014 - DNA, 26 bp, Artificial sequence
  SiRNA target sequence
gcaagcacaccatttaattgaatatt

SEQ ID NO: 177015 - DNA, 26 bp, Artificial sequence
  SiRNA target sequence
caagcacaccatttaattgaatattt

SEQ ID NO: 177016 - DNA, 26 bp, Artificial sequence
  SiRNA target sequence
aagcacaccatttaattgaatattta

SEQ ID NO: 177017 - DNA, 26 bp, Artificial sequence
  SiRNA target sequence
agcacaccatttaattgaatatttat

SEQ ID NO: 177018 - DNA, 26 bp, Artificial sequence
  SiRNA target sequence
gcacaccatttaattgaatatttatc

SEQ ID NO: 177019 - DNA, 26 bp, Artificial sequence
  SiRNA target sequence
cacaccatttaattgaatatttatct

SEQ ID NO: 177020 - DNA, 26 bp, Artificial sequence
  SiRNA target sequence
acaccatttaattgaatatttatctg

SEQ ID NO: 177021 - DNA, 26 bp, Artificial sequence
  SiRNA target sequence
caccatttaattgaatatttatctgt

SEQ ID NO: 177022 - DNA, 26 bp, Artificial sequence
  SiRNA target sequence
accatttaattgaatatttatctgtt

SEQ ID NO: 177023 - DNA, 26 bp, Artificial sequence
  SiRNA target sequence
ccatttaattgaatatttatctgtta

SEQ ID NO: 177024 - DNA, 26 bp, Artificial sequence
  SiRNA target sequence
catttaattgaatatttatctgttac

SEQ ID NO: 177025 - DNA, 26 bp, Artificial sequence
  SiRNA target sequence
atttaattgaatatttatctgttact

SEQ ID NO: 177026 - DNA, 26 bp, Artificial sequence
  SiRNA target sequence
tttaattgaatatttatctgttactt

SEQ ID NO: 177027 - DNA, 26 bp, Artificial sequence
  SiRNA target sequence
ttaattgaatatttatctgttacttc

SEQ ID NO: 177028 - DNA, 26 bp, Artificial sequence
  SiRNA target sequence
taattgaatatttatctgttacttct

SEQ ID NO: 177029 - DNA, 26 bp, Artificial sequence
  SiRNA target sequence
aattgaatatttatctgttacttcta

SEQ ID NO: 177030 - DNA, 26 bp, Artificial sequence
  SiRNA target sequence
attgaatatttatctgttacttctac

SEQ ID NO: 177031 - DNA, 26 bp, Artificial sequence
  SiRNA target sequence
ttgaatatttatctgttacttctaca

SEQ ID NO: 177032 - DNA, 26 bp, Artificial sequence
  SiRNA target sequence
tgaatatttatctgttacttctacac

SEQ ID NO: 177033 - DNA, 26 bp, Artificial sequence
  SiRNA target sequence
gaatatttatctgttacttctacaca

SEQ ID NO: 177034 - DNA, 26 bp, Artificial sequence
  SiRNA target sequence
aatatttatctgttacttctacacaa

SEQ ID NO: 177035 - DNA, 26 bp, Artificial sequence
  SiRNA target sequence
atatttatctgttacttctacacaac

SEQ ID NO: 177036 - DNA, 26 bp, Artificial sequence
  SiRNA target sequence
tatttatctgttacttctacacaaca

SEQ ID NO: 177037 - DNA, 26 bp, Artificial sequence
  SiRNA target sequence
atttatctgttacttctacacaacaa

SEQ ID NO: 177038 - DNA, 26 bp, Artificial sequence
  SiRNA target sequence
tttatctgttacttctacacaacaac

SEQ ID NO: 177039 - DNA, 26 bp, Artificial sequence
  SiRNA target sequence
ttatctgttacttctacacaacaaca

SEQ ID NO: 177040 - DNA, 26 bp, Artificial sequence
  SiRNA target sequence
tatctgttacttctacacaacaacaa

SEQ ID NO: 177041 - DNA, 26 bp, Artificial sequence
  SiRNA target sequence
atctgttacttctacacaacaacaag

SEQ ID NO: 177042 - DNA, 26 bp, Artificial sequence
  SiRNA target sequence
tctgttacttctacacaacaacaagc

SEQ ID NO: 177043 - DNA, 26 bp, Artificial sequence
  SiRNA target sequence
ctgttacttctacacaacaacaagcc

SEQ ID NO: 177044 - DNA, 26 bp, Artificial sequence
  SiRNA target sequence
tgttacttctacacaacaacaagcca

SEQ ID NO: 177045 - DNA, 26 bp, Artificial sequence
  SiRNA target sequence
gttacttctacacaacaacaagccat

SEQ ID NO: 177046 - DNA, 26 bp, Artificial sequence
  SiRNA target sequence
ttacttctacacaacaacaagccata

SEQ ID NO: 177047 - DNA, 26 bp, Artificial sequence
  SiRNA target sequence
tacttctacacaacaacaagccataa

SEQ ID NO: 177048 - DNA, 26 bp, Artificial sequence
  SiRNA target sequence
acttctacacaacaacaagccataaa

SEQ ID NO: 177049 - DNA, 26 bp, Artificial sequence
  SiRNA target sequence
cttctacacaacaacaagccataaag

SEQ ID NO: 177050 - DNA, 26 bp, Artificial sequence
  SiRNA target sequence
ttctacacaacaacaagccataaagc

SEQ ID NO: 177051 - DNA, 26 bp, Artificial sequence
  SiRNA target sequence
tctacacaacaacaagccataaagct

SEQ ID NO: 177052 - DNA, 26 bp, Artificial sequence
  SiRNA target sequence
ctacacaacaacaagccataaagcta

SEQ ID NO: 177053 - DNA, 26 bp, Artificial sequence
  SiRNA target sequence
tacacaacaacaagccataaagctac

SEQ ID NO: 177054 - DNA, 26 bp, Artificial sequence
  SiRNA target sequence
acacaacaacaagccataaagctact

SEQ ID NO: 177055 - DNA, 26 bp, Artificial sequence
  SiRNA target sequence
cacaacaacaagccataaagctactt

SEQ ID NO: 177056 - DNA, 26 bp, Artificial sequence
  SiRNA target sequence
acaacaacaagccataaagctacttg

SEQ ID NO: 177057 - DNA, 26 bp, Artificial sequence
  SiRNA target sequence
caacaacaagccataaagctacttgc

SEQ ID NO: 177058 - DNA, 26 bp, Artificial sequence
  SiRNA target sequence
aacaacaagccataaagctacttgct

SEQ ID NO: 177059 - DNA, 26 bp, Artificial sequence
  SiRNA target sequence
acaacaagccataaagctacttgctc

SEQ ID NO: 177060 - DNA, 26 bp, Artificial sequence
  SiRNA target sequence
caacaagccataaagctacttgctca

SEQ ID NO: 177061 - DNA, 26 bp, Artificial sequence
  SiRNA target sequence
aacaagccataaagctacttgctcag

SEQ ID NO: 177062 - DNA, 26 bp, Artificial sequence
  SiRNA target sequence
acaagccataaagctacttgctcagg

SEQ ID NO: 177063 - DNA, 26 bp, Artificial sequence
  SiRNA target sequence
caagccataaagctacttgctcaggg

SEQ ID NO: 177064 - DNA, 26 bp, Artificial sequence
  SiRNA target sequence
aagccataaagctacttgctcagggg

SEQ ID NO: 177065 - DNA, 26 bp, Artificial sequence
  SiRNA target sequence
agccataaagctacttgctcaggggc

SEQ ID NO: 177066 - DNA, 26 bp, Artificial sequence
  SiRNA target sequence
gccataaagctacttgctcaggggcg

SEQ ID NO: 177067 - DNA, 26 bp, Artificial sequence
  SiRNA target sequence
ccataaagctacttgctcaggggcga

SEQ ID NO: 177068 - DNA, 26 bp, Artificial sequence
  SiRNA target sequence
cataaagctacttgctcaggggcgaa

SEQ ID NO: 177069 - DNA, 26 bp, Artificial sequence
  SiRNA target sequence
ataaagctacttgctcaggggcgaag

SEQ ID NO: 177070 - DNA, 26 bp, Artificial sequence
  SiRNA target sequence
taaagctacttgctcaggggcgaagt

SEQ ID NO: 177071 - DNA, 26 bp, Artificial sequence
  SiRNA target sequence
aaagctacttgctcaggggcgaagta

SEQ ID NO: 177072 - DNA, 26 bp, Artificial sequence
  SiRNA target sequence
aagctacttgctcaggggcgaagtat

SEQ ID NO: 177073 - DNA, 26 bp, Artificial sequence
  SiRNA target sequence
agctacttgctcaggggcgaagtata

SEQ ID NO: 177074 - DNA, 26 bp, Artificial sequence
  SiRNA target sequence
gctacttgctcaggggcgaagtataa

SEQ ID NO: 177075 - DNA, 26 bp, Artificial sequence
  SiRNA target sequence
ctacttgctcaggggcgaagtataag

SEQ ID NO: 177076 - DNA, 26 bp, Artificial sequence
  SiRNA target sequence
tacttgctcaggggcgaagtataagt

SEQ ID NO: 177077 - DNA, 26 bp, Artificial sequence
  SiRNA target sequence
acttgctcaggggcgaagtataagtg

SEQ ID NO: 177078 - DNA, 26 bp, Artificial sequence
  SiRNA target sequence
cttgctcaggggcgaagtataagtgt

SEQ ID NO: 177079 - DNA, 26 bp, Artificial sequence
  SiRNA target sequence
ttgctcaggggcgaagtataagtgtc

SEQ ID NO: 177080 - DNA, 26 bp, Artificial sequence
  SiRNA target sequence
tgctcaggggcgaagtataagtgtca

SEQ ID NO: 177081 - DNA, 26 bp, Artificial sequence
  SiRNA target sequence
gctcaggggcgaagtataagtgtcat

SEQ ID NO: 177082 - DNA, 26 bp, Artificial sequence
  SiRNA target sequence
ctcaggggcgaagtataagtgtcata

SEQ ID NO: 177083 - DNA, 26 bp, Artificial sequence
  SiRNA target sequence
tcaggggcgaagtataagtgtcatac

SEQ ID NO: 177084 - DNA, 26 bp, Artificial sequence
  SiRNA target sequence
caggggcgaagtataagtgtcataca

SEQ ID NO: 177085 - DNA, 26 bp, Artificial sequence
  SiRNA target sequence
aggggcgaagtataagtgtcatacag

SEQ ID NO: 177086 - DNA, 26 bp, Artificial sequence
  SiRNA target sequence
ggggcgaagtataagtgtcatacagt

SEQ ID NO: 177087 - DNA, 26 bp, Artificial sequence
  SiRNA target sequence
gggcgaagtataagtgtcatacagtg

SEQ ID NO: 177088 - DNA, 26 bp, Artificial sequence
  SiRNA target sequence
ggcgaagtataagtgtcatacagtgc

SEQ ID NO: 177089 - DNA, 26 bp, Artificial sequence
  SiRNA target sequence
gcgaagtataagtgtcatacagtgct

SEQ ID NO: 177090 - DNA, 26 bp, Artificial sequence
  SiRNA target sequence
cgaagtataagtgtcatacagtgcta

SEQ ID NO: 177091 - DNA, 26 bp, Artificial sequence
  SiRNA target sequence
gaagtataagtgtcatacagtgctat

SEQ ID NO: 177092 - DNA, 26 bp, Artificial sequence
  SiRNA target sequence
aagtataagtgtcatacagtgctatg

SEQ ID NO: 177093 - DNA, 26 bp, Artificial sequence
  SiRNA target sequence
agtataagtgtcatacagtgctatga

SEQ ID NO: 177094 - DNA, 26 bp, Artificial sequence
  SiRNA target sequence
gtataagtgtcatacagtgctatgat

SEQ ID NO: 177095 - DNA, 26 bp, Artificial sequence
  SiRNA target sequence
tataagtgtcatacagtgctatgata

SEQ ID NO: 177096 - DNA, 26 bp, Artificial sequence
  SiRNA target sequence
ataagtgtcatacagtgctatgataa

SEQ ID NO: 177097 - DNA, 26 bp, Artificial sequence
  SiRNA target sequence
taagtgtcatacagtgctatgataaa

SEQ ID NO: 177098 - DNA, 26 bp, Artificial sequence
  SiRNA target sequence
aagtgtcatacagtgctatgataaat

SEQ ID NO: 177099 - DNA, 26 bp, Artificial sequence
  SiRNA target sequence
agtgtcatacagtgctatgataaatt

SEQ ID NO: 177100 - DNA, 26 bp, Artificial sequence
  SiRNA target sequence
gtgtcatacagtgctatgataaattt

SEQ ID NO: 177101 - DNA, 26 bp, Artificial sequence
  SiRNA target sequence
tgtcatacagtgctatgataaatttt

SEQ ID NO: 177102 - DNA, 26 bp, Artificial sequence
  SiRNA target sequence
gtcatacagtgctatgataaattttt

SEQ ID NO: 177103 - DNA, 26 bp, Artificial sequence
  SiRNA target sequence
tcatacagtgctatgataaattttta

SEQ ID NO: 177104 - DNA, 26 bp, Artificial sequence
  SiRNA target sequence
catacagtgctatgataaatttttag

SEQ ID NO: 177105 - DNA, 26 bp, Artificial sequence
  SiRNA target sequence
atacagtgctatgataaatttttaga

SEQ ID NO: 177106 - DNA, 26 bp, Artificial sequence
  SiRNA target sequence
tacagtgctatgataaatttttagag

SEQ ID NO: 177107 - DNA, 26 bp, Artificial sequence
  SiRNA target sequence
acagtgctatgataaatttttagaga

SEQ ID NO: 177108 - DNA, 26 bp, Artificial sequence
  SiRNA target sequence
cagtgctatgataaatttttagagaa

SEQ ID NO: 177109 - DNA, 26 bp, Artificial sequence
  SiRNA target sequence
agtgctatgataaatttttagagaat

SEQ ID NO: 177110 - DNA, 26 bp, Artificial sequence
  SiRNA target sequence
gtgctatgataaatttttagagaata

SEQ ID NO: 177111 - DNA, 26 bp, Artificial sequence
  SiRNA target sequence
tgctatgataaatttttagagaatag

SEQ ID NO: 177112 - DNA, 26 bp, Artificial sequence
  SiRNA target sequence
gctatgataaatttttagagaatagc

SEQ ID NO: 177113 - DNA, 26 bp, Artificial sequence
  SiRNA target sequence
ctatgataaatttttagagaatagcg

SEQ ID NO: 177114 - DNA, 26 bp, Artificial sequence
  SiRNA target sequence
tatgataaatttttagagaatagcga

SEQ ID NO: 177115 - DNA, 26 bp, Artificial sequence
  SiRNA target sequence
atgataaatttttagagaatagcgat

SEQ ID NO: 177116 - DNA, 26 bp, Artificial sequence
  SiRNA target sequence
tgataaatttttagagaatagcgatg

SEQ ID NO: 177117 - DNA, 26 bp, Artificial sequence
  SiRNA target sequence
gataaatttttagagaatagcgatga

SEQ ID NO: 177118 - DNA, 26 bp, Artificial sequence
  SiRNA target sequence
ataaatttttagagaatagcgatgat

SEQ ID NO: 177119 - DNA, 26 bp, Artificial sequence
  SiRNA target sequence
taaatttttagagaatagcgatgatg

SEQ ID NO: 177120 - DNA, 26 bp, Artificial sequence
  SiRNA target sequence
aaatttttagagaatagcgatgatgt

SEQ ID NO: 177121 - DNA, 26 bp, Artificial sequence
  SiRNA target sequence
aatttttagagaatagcgatgatgtt

SEQ ID NO: 177122 - DNA, 26 bp, Artificial sequence
  SiRNA target sequence
atttttagagaatagcgatgatgttt

SEQ ID NO: 177123 - DNA, 26 bp, Artificial sequence
  SiRNA target sequence
tttttagagaatagcgatgatgtttt

SEQ ID NO: 177124 - DNA, 26 bp, Artificial sequence
  SiRNA target sequence
ttttagagaatagcgatgatgtttta

SEQ ID NO: 177125 - DNA, 26 bp, Artificial sequence
  SiRNA target sequence
tttagagaatagcgatgatgttttaa

SEQ ID NO: 177126 - DNA, 26 bp, Artificial sequence
  SiRNA target sequence
ttagagaatagcgatgatgttttaac

SEQ ID NO: 177127 - DNA, 26 bp, Artificial sequence
  SiRNA target sequence
tagagaatagcgatgatgttttaact

SEQ ID NO: 177128 - DNA, 26 bp, Artificial sequence
  SiRNA target sequence
agagaatagcgatgatgttttaacta

SEQ ID NO: 177129 - DNA, 26 bp, Artificial sequence
  SiRNA target sequence
gagaatagcgatgatgttttaactac

SEQ ID NO: 177130 - DNA, 26 bp, Artificial sequence
  SiRNA target sequence
agaatagcgatgatgttttaactacc

SEQ ID NO: 177131 - DNA, 26 bp, Artificial sequence
  SiRNA target sequence
gaatagcgatgatgttttaactacct

SEQ ID NO: 177132 - DNA, 26 bp, Artificial sequence
  SiRNA target sequence
aatagcgatgatgttttaactaccta

SEQ ID NO: 177133 - DNA, 26 bp, Artificial sequence
  SiRNA target sequence
atagcgatgatgttttaactacctat

SEQ ID NO: 177134 - DNA, 26 bp, Artificial sequence
  SiRNA target sequence
tagcgatgatgttttaactacctatg

SEQ ID NO: 177135 - DNA, 26 bp, Artificial sequence
  SiRNA target sequence
agcgatgatgttttaactacctatga

SEQ ID NO: 177136 - DNA, 26 bp, Artificial sequence
  SiRNA target sequence
gcgatgatgttttaactacctatgat

SEQ ID NO: 177137 - DNA, 26 bp, Artificial sequence
  SiRNA target sequence
cgatgatgttttaactacctatgatt

SEQ ID NO: 177138 - DNA, 26 bp, Artificial sequence
  SiRNA target sequence
gatgatgttttaactacctatgattt

SEQ ID NO: 177139 - DNA, 26 bp, Artificial sequence
  SiRNA target sequence
atgatgttttaactacctatgatttt

SEQ ID NO: 177140 - DNA, 26 bp, Artificial sequence
  SiRNA target sequence
tgatgttttaactacctatgattttt

SEQ ID NO: 177141 - DNA, 26 bp, Artificial sequence
  SiRNA target sequence
gatgttttaactacctatgattttta

SEQ ID NO: 177142 - DNA, 26 bp, Artificial sequence
  SiRNA target sequence
atgttttaactacctatgatttttat

SEQ ID NO: 177143 - DNA, 26 bp, Artificial sequence
  SiRNA target sequence
tgttttaactacctatgatttttata

SEQ ID NO: 177144 - DNA, 26 bp, Artificial sequence
  SiRNA target sequence
gttttaactacctatgatttttataa

SEQ ID NO: 177145 - DNA, 26 bp, Artificial sequence
  SiRNA target sequence
ttttaactacctatgatttttataaa

SEQ ID NO: 177146 - DNA, 26 bp, Artificial sequence
  SiRNA target sequence
tttaactacctatgatttttataaaa

SEQ ID NO: 177147 - DNA, 26 bp, Artificial sequence
  SiRNA target sequence
ttaactacctatgatttttataaaat

SEQ ID NO: 177148 - DNA, 26 bp, Artificial sequence
  SiRNA target sequence
taactacctatgatttttataaaatg

SEQ ID NO: 177149 - DNA, 26 bp, Artificial sequence
  SiRNA target sequence
aactacctatgatttttataaaatga

SEQ ID NO: 177150 - DNA, 26 bp, Artificial sequence
  SiRNA target sequence
actacctatgatttttataaaatgat

SEQ ID NO: 177151 - DNA, 26 bp, Artificial sequence
  SiRNA target sequence
ctacctatgatttttataaaatgatt

SEQ ID NO: 177152 - DNA, 26 bp, Artificial sequence
  SiRNA target sequence
tacctatgatttttataaaatgattt

SEQ ID NO: 177153 - DNA, 26 bp, Artificial sequence
  SiRNA target sequence
acctatgatttttataaaatgatttt

SEQ ID NO: 177154 - DNA, 26 bp, Artificial sequence
  SiRNA target sequence
cctatgatttttataaaatgattttg

SEQ ID NO: 177155 - DNA, 26 bp, Artificial sequence
  SiRNA target sequence
ctatgatttttataaaatgattttgg

SEQ ID NO: 177156 - DNA, 26 bp, Artificial sequence
  SiRNA target sequence
tatgatttttataaaatgattttgga

SEQ ID NO: 177157 - DNA, 26 bp, Artificial sequence
  SiRNA target sequence
atgatttttataaaatgattttggat

SEQ ID NO: 177158 - DNA, 26 bp, Artificial sequence
  SiRNA target sequence
tgatttttataaaatgattttggatc

SEQ ID NO: 177159 - DNA, 26 bp, Artificial sequence
  SiRNA target sequence
gatttttataaaatgattttggatct

SEQ ID NO: 177160 - DNA, 26 bp, Artificial sequence
  SiRNA target sequence
atttttataaaatgattttggatcta

SEQ ID NO: 177161 - DNA, 26 bp, Artificial sequence
  SiRNA target sequence
tttttataaaatgattttggatctag

SEQ ID NO: 177162 - DNA, 26 bp, Artificial sequence
  SiRNA target sequence
ttttataaaatgattttggatctagg

SEQ ID NO: 177163 - DNA, 26 bp, Artificial sequence
  SiRNA target sequence
tttataaaatgattttggatctagga

SEQ ID NO: 177164 - DNA, 26 bp, Artificial sequence
  SiRNA target sequence
ttataaaatgattttggatctaggat

SEQ ID NO: 177165 - DNA, 26 bp, Artificial sequence
  SiRNA target sequence
tataaaatgattttggatctaggatt

SEQ ID NO: 177166 - DNA, 26 bp, Artificial sequence
  SiRNA target sequence
ataaaatgattttggatctaggattt

SEQ ID NO: 177167 - DNA, 26 bp, Artificial sequence
  SiRNA target sequence
taaaatgattttggatctaggatttt

SEQ ID NO: 177168 - DNA, 26 bp, Artificial sequence
  SiRNA target sequence
aaaatgattttggatctaggattttt

SEQ ID NO: 177169 - DNA, 26 bp, Artificial sequence
  SiRNA target sequence
aaatgattttggatctaggattttta

SEQ ID NO: 177170 - DNA, 26 bp, Artificial sequence
  SiRNA target sequence
aatgattttggatctaggatttttac

SEQ ID NO: 177171 - DNA, 26 bp, Artificial sequence
  SiRNA target sequence
atgattttggatctaggatttttaca

SEQ ID NO: 177172 - DNA, 26 bp, Artificial sequence
  SiRNA target sequence
tgattttggatctaggatttttacag

SEQ ID NO: 177173 - DNA, 26 bp, Artificial sequence
  SiRNA target sequence
gattttggatctaggatttttacagc

SEQ ID NO: 177174 - DNA, 26 bp, Artificial sequence
  SiRNA target sequence
attttggatctaggatttttacagca

SEQ ID NO: 177175 - DNA, 26 bp, Artificial sequence
  SiRNA target sequence
ttttggatctaggatttttacagcat

SEQ ID NO: 177176 - DNA, 26 bp, Artificial sequence
  SiRNA target sequence
tttggatctaggatttttacagcata

SEQ ID NO: 177177 - DNA, 26 bp, Artificial sequence
  SiRNA target sequence
ttggatctaggatttttacagcataa

SEQ ID NO: 177178 - DNA, 26 bp, Artificial sequence
  SiRNA target sequence
tggatctaggatttttacagcataat

SEQ ID NO: 177179 - DNA, 26 bp, Artificial sequence
  SiRNA target sequence
ggatctaggatttttacagcataatt

SEQ ID NO: 177180 - DNA, 26 bp, Artificial sequence
  SiRNA target sequence
gatctaggatttttacagcataattt

SEQ ID NO: 177181 - DNA, 26 bp, Artificial sequence
  SiRNA target sequence
atctaggatttttacagcataatttt

SEQ ID NO: 177182 - DNA, 26 bp, Artificial sequence
  SiRNA target sequence
tctaggatttttacagcataatttta

SEQ ID NO: 177183 - DNA, 26 bp, Artificial sequence
  SiRNA target sequence
ctaggatttttacagcataattttat

SEQ ID NO: 177184 - DNA, 26 bp, Artificial sequence
  SiRNA target sequence
taggatttttacagcataattttatt

SEQ ID NO: 177185 - DNA, 26 bp, Artificial sequence
  SiRNA target sequence
aggatttttacagcataattttatta

SEQ ID NO: 177186 - DNA, 26 bp, Artificial sequence
  SiRNA target sequence
ggatttttacagcataattttattaa

SEQ ID NO: 177187 - DNA, 26 bp, Artificial sequence
  SiRNA target sequence
gatttttacagcataattttattaaa

SEQ ID NO: 177188 - DNA, 26 bp, Artificial sequence
  SiRNA target sequence
atttttacagcataattttattaaag

SEQ ID NO: 177189 - DNA, 26 bp, Artificial sequence
  SiRNA target sequence
tttttacagcataattttattaaagg

SEQ ID NO: 177190 - DNA, 26 bp, Artificial sequence
  SiRNA target sequence
ttttacagcataattttattaaagga

SEQ ID NO: 177191 - DNA, 26 bp, Artificial sequence
  SiRNA target sequence
tttacagcataattttattaaaggaa

SEQ ID NO: 177192 - DNA, 26 bp, Artificial sequence
  SiRNA target sequence
ttacagcataattttattaaaggaac

SEQ ID NO: 177193 - DNA, 26 bp, Artificial sequence
  SiRNA target sequence
tacagcataattttattaaaggaacc

SEQ ID NO: 177194 - DNA, 26 bp, Artificial sequence
  SiRNA target sequence
acagcataattttattaaaggaacct

SEQ ID NO: 177195 - DNA, 26 bp, Artificial sequence
  SiRNA target sequence
cagcataattttattaaaggaacctg

SEQ ID NO: 177196 - DNA, 26 bp, Artificial sequence
  SiRNA target sequence
agcataattttattaaaggaacctgt

SEQ ID NO: 177197 - DNA, 26 bp, Artificial sequence
  SiRNA target sequence
gcataattttattaaaggaacctgtg

SEQ ID NO: 177198 - DNA, 26 bp, Artificial sequence
  SiRNA target sequence
cataattttattaaaggaacctgtga

SEQ ID NO: 177199 - DNA, 26 bp, Artificial sequence
  SiRNA target sequence
ataattttattaaaggaacctgtgag

SEQ ID NO: 177200 - DNA, 26 bp, Artificial sequence
  SiRNA target sequence
taattttattaaaggaacctgtgaga

SEQ ID NO: 177201 - DNA, 26 bp, Artificial sequence
  SiRNA target sequence
aattttattaaaggaacctgtgagaa

SEQ ID NO: 177202 - DNA, 26 bp, Artificial sequence
  SiRNA target sequence
attttattaaaggaacctgtgagaaa

SEQ ID NO: 177203 - DNA, 26 bp, Artificial sequence
  SiRNA target sequence
ttttattaaaggaacctgtgagaaat

SEQ ID NO: 177204 - DNA, 26 bp, Artificial sequence
  SiRNA target sequence
tttattaaaggaacctgtgagaaatg

SEQ ID NO: 177205 - DNA, 26 bp, Artificial sequence
  SiRNA target sequence
ttattaaaggaacctgtgagaaatgg

SEQ ID NO: 177206 - DNA, 26 bp, Artificial sequence
  SiRNA target sequence
tattaaaggaacctgtgagaaatggg

SEQ ID NO: 177207 - DNA, 26 bp, Artificial sequence
  SiRNA target sequence
attaaaggaacctgtgagaaatggga

SEQ ID NO: 177208 - DNA, 26 bp, Artificial sequence
  SiRNA target sequence
ttaaaggaacctgtgagaaatgggag

SEQ ID NO: 177209 - DNA, 26 bp, Artificial sequence
  SiRNA target sequence
taaaggaacctgtgagaaatgggaga

SEQ ID NO: 177210 - DNA, 26 bp, Artificial sequence
  SiRNA target sequence
aaaggaacctgtgagaaatgggagaa

SEQ ID NO: 177211 - DNA, 26 bp, Artificial sequence
  SiRNA target sequence
aaggaacctgtgagaaatgggagaag

SEQ ID NO: 177212 - DNA, 26 bp, Artificial sequence
  SiRNA target sequence
aggaacctgtgagaaatgggagaagt

SEQ ID NO: 177213 - DNA, 26 bp, Artificial sequence
  SiRNA target sequence
ggaacctgtgagaaatgggagaagtg

SEQ ID NO: 177214 - DNA, 26 bp, Artificial sequence
  SiRNA target sequence
gaacctgtgagaaatgggagaagtgt

SEQ ID NO: 177215 - DNA, 26 bp, Artificial sequence
  SiRNA target sequence
aacctgtgagaaatgggagaagtgta

SEQ ID NO: 177216 - DNA, 26 bp, Artificial sequence
  SiRNA target sequence
acctgtgagaaatgggagaagtgtac

SEQ ID NO: 177217 - DNA, 26 bp, Artificial sequence
  SiRNA target sequence
cctgtgagaaatgggagaagtgtact

SEQ ID NO: 177218 - DNA, 26 bp, Artificial sequence
  SiRNA target sequence
ctgtgagaaatgggagaagtgtacta

SEQ ID NO: 177219 - DNA, 26 bp, Artificial sequence
  SiRNA target sequence
tgtgagaaatgggagaagtgtactat

SEQ ID NO: 177220 - DNA, 26 bp, Artificial sequence
  SiRNA target sequence
gtgagaaatgggagaagtgtactatt

SEQ ID NO: 177221 - DNA, 26 bp, Artificial sequence
  SiRNA target sequence
tgagaaatgggagaagtgtactattg

SEQ ID NO: 177222 - DNA, 26 bp, Artificial sequence
  SiRNA target sequence
gagaaatgggagaagtgtactattgg

SEQ ID NO: 177223 - DNA, 26 bp, Artificial sequence
  SiRNA target sequence
agaaatgggagaagtgtactattgga

SEQ ID NO: 177224 - DNA, 26 bp, Artificial sequence
  SiRNA target sequence
gaaatgggagaagtgtactattggat

SEQ ID NO: 177225 - DNA, 26 bp, Artificial sequence
  SiRNA target sequence
aaatgggagaagtgtactattggata

SEQ ID NO: 177226 - DNA, 26 bp, Artificial sequence
  SiRNA target sequence
aatgggagaagtgtactattggatat

SEQ ID NO: 177227 - DNA, 26 bp, Artificial sequence
  SiRNA target sequence
atgggagaagtgtactattggatatc

SEQ ID NO: 177228 - DNA, 26 bp, Artificial sequence
  SiRNA target sequence
tgggagaagtgtactattggatatca

SEQ ID NO: 177229 - DNA, 26 bp, Artificial sequence
  SiRNA target sequence
gggagaagtgtactattggatatcat

SEQ ID NO: 177230 - DNA, 26 bp, Artificial sequence
  SiRNA target sequence
ggagaagtgtactattggatatcatt

SEQ ID NO: 177231 - DNA, 26 bp, Artificial sequence
  SiRNA target sequence
gagaagtgtactattggatatcatta

SEQ ID NO: 177232 - DNA, 26 bp, Artificial sequence
  SiRNA target sequence
agaagtgtactattggatatcattat

SEQ ID NO: 177233 - DNA, 26 bp, Artificial sequence
  SiRNA target sequence
gaagtgtactattggatatcattatg

SEQ ID NO: 177234 - DNA, 26 bp, Artificial sequence
  SiRNA target sequence
aagtgtactattggatatcattatgg

SEQ ID NO: 177235 - DNA, 26 bp, Artificial sequence
  SiRNA target sequence
agtgtactattggatatcattatgga

SEQ ID NO: 177236 - DNA, 26 bp, Artificial sequence
  SiRNA target sequence
gtgtactattggatatcattatggat

SEQ ID NO: 177237 - DNA, 26 bp, Artificial sequence
  SiRNA target sequence
tgtactattggatatcattatggata

SEQ ID NO: 177238 - DNA, 26 bp, Artificial sequence
  SiRNA target sequence
gtactattggatatcattatggatat

SEQ ID NO: 177239 - DNA, 26 bp, Artificial sequence
  SiRNA target sequence
tactattggatatcattatggatatt

SEQ ID NO: 177240 - DNA, 26 bp, Artificial sequence
  SiRNA target sequence
actattggatatcattatggatattt

SEQ ID NO: 177241 - DNA, 26 bp, Artificial sequence
  SiRNA target sequence
ctattggatatcattatggatattta

SEQ ID NO: 177242 - DNA, 26 bp, Artificial sequence
  SiRNA target sequence
tattggatatcattatggatatttag

SEQ ID NO: 177243 - DNA, 26 bp, Artificial sequence
  SiRNA target sequence
attggatatcattatggatatttaga

SEQ ID NO: 177244 - DNA, 26 bp, Artificial sequence
  SiRNA target sequence
ttggatatcattatggatatttagaa

SEQ ID NO: 177245 - DNA, 26 bp, Artificial sequence
  SiRNA target sequence
tggatatcattatggatatttagaac

SEQ ID NO: 177246 - DNA, 26 bp, Artificial sequence
  SiRNA target sequence
ggatatcattatggatatttagaaca

SEQ ID NO: 177247 - DNA, 26 bp, Artificial sequence
  SiRNA target sequence
gatatcattatggatatttagaacac

SEQ ID NO: 177248 - DNA, 26 bp, Artificial sequence
  SiRNA target sequence
atatcattatggatatttagaacaca

SEQ ID NO: 177249 - DNA, 26 bp, Artificial sequence
  SiRNA target sequence
tatcattatggatatttagaacacat

SEQ ID NO: 177250 - DNA, 26 bp, Artificial sequence
  SiRNA target sequence
atcattatggatatttagaacacata

SEQ ID NO: 177251 - DNA, 26 bp, Artificial sequence
  SiRNA target sequence
tcattatggatatttagaacacatat

SEQ ID NO: 177252 - DNA, 26 bp, Artificial sequence
  SiRNA target sequence
cattatggatatttagaacacatatt

SEQ ID NO: 177253 - DNA, 26 bp, Artificial sequence
  SiRNA target sequence
attatggatatttagaacacatatta

SEQ ID NO: 177254 - DNA, 26 bp, Artificial sequence
  SiRNA target sequence
ttatggatatttagaacacatattaa

SEQ ID NO: 177255 - DNA, 26 bp, Artificial sequence
  SiRNA target sequence
tatggatatttagaacacatattaaa

SEQ ID NO: 177256 - DNA, 26 bp, Artificial sequence
  SiRNA target sequence
atggatatttagaacacatattaaat

SEQ ID NO: 177257 - DNA, 26 bp, Artificial sequence
  SiRNA target sequence
tggatatttagaacacatattaaata

SEQ ID NO: 177258 - DNA, 26 bp, Artificial sequence
  SiRNA target sequence
ggatatttagaacacatattaaataa

SEQ ID NO: 177259 - DNA, 26 bp, Artificial sequence
  SiRNA target sequence
gatatttagaacacatattaaataag

SEQ ID NO: 177260 - DNA, 26 bp, Artificial sequence
  SiRNA target sequence
atatttagaacacatattaaataaga

SEQ ID NO: 177261 - DNA, 26 bp, Artificial sequence
  SiRNA target sequence
tatttagaacacatattaaataagaa

SEQ ID NO: 177262 - DNA, 26 bp, Artificial sequence
  SiRNA target sequence
atttagaacacatattaaataagaag

SEQ ID NO: 177263 - DNA, 26 bp, Artificial sequence
  SiRNA target sequence
tttagaacacatattaaataagaaga

SEQ ID NO: 177264 - DNA, 26 bp, Artificial sequence
  SiRNA target sequence
ttagaacacatattaaataagaagaa

SEQ ID NO: 177265 - DNA, 26 bp, Artificial sequence
  SiRNA target sequence
tagaacacatattaaataagaagaac

SEQ ID NO: 177266 - DNA, 26 bp, Artificial sequence
  SiRNA target sequence
agaacacatattaaataagaagaaca

SEQ ID NO: 177267 - DNA, 26 bp, Artificial sequence
  SiRNA target sequence
gaacacatattaaataagaagaacaa

SEQ ID NO: 177268 - DNA, 26 bp, Artificial sequence
  SiRNA target sequence
aacacatattaaataagaagaacaat

SEQ ID NO: 177269 - DNA, 26 bp, Artificial sequence
  SiRNA target sequence
acacatattaaataagaagaacaatt

SEQ ID NO: 177270 - DNA, 26 bp, Artificial sequence
  SiRNA target sequence
cacatattaaataagaagaacaatta

SEQ ID NO: 177271 - DNA, 26 bp, Artificial sequence
  SiRNA target sequence
acatattaaataagaagaacaattat

SEQ ID NO: 177272 - DNA, 26 bp, Artificial sequence
  SiRNA target sequence
catattaaataagaagaacaattatt

SEQ ID NO: 177273 - DNA, 26 bp, Artificial sequence
  SiRNA target sequence
atattaaataagaagaacaattattt

SEQ ID NO: 177274 - DNA, 26 bp, Artificial sequence
  SiRNA target sequence
tattaaataagaagaacaattattta

SEQ ID NO: 177275 - DNA, 26 bp, Artificial sequence
  SiRNA target sequence
attaaataagaagaacaattatttaa

SEQ ID NO: 177276 - DNA, 26 bp, Artificial sequence
  SiRNA target sequence
ttaaataagaagaacaattatttaac

SEQ ID NO: 177277 - DNA, 26 bp, Artificial sequence
  SiRNA target sequence
taaataagaagaacaattatttaaca

SEQ ID NO: 177278 - DNA, 26 bp, Artificial sequence
  SiRNA target sequence
aaataagaagaacaattatttaacaa

SEQ ID NO: 177279 - DNA, 26 bp, Artificial sequence
  SiRNA target sequence
aataagaagaacaattatttaacaaa

SEQ ID NO: 177280 - DNA, 26 bp, Artificial sequence
  SiRNA target sequence
ataagaagaacaattatttaacaaaa

SEQ ID NO: 177281 - DNA, 26 bp, Artificial sequence
  SiRNA target sequence
taagaagaacaattatttaacaaaaa

SEQ ID NO: 177282 - DNA, 26 bp, Artificial sequence
  SiRNA target sequence
aagaagaacaattatttaacaaaaaa

SEQ ID NO: 177283 - DNA, 26 bp, Artificial sequence
  SiRNA target sequence
agaagaacaattatttaacaaaaaat

SEQ ID NO: 177284 - DNA, 26 bp, Artificial sequence
  SiRNA target sequence
gaagaacaattatttaacaaaaaatg

SEQ ID NO: 177285 - DNA, 26 bp, Artificial sequence
  SiRNA target sequence
aagaacaattatttaacaaaaaatga

SEQ ID NO: 177286 - DNA, 26 bp, Artificial sequence
  SiRNA target sequence
agaacaattatttaacaaaaaatgat

SEQ ID NO: 177287 - DNA, 26 bp, Artificial sequence
  SiRNA target sequence
gaacaattatttaacaaaaaatgata

SEQ ID NO: 177288 - DNA, 26 bp, Artificial sequence
  SiRNA target sequence
aacaattatttaacaaaaaatgatag

SEQ ID NO: 177289 - DNA, 26 bp, Artificial sequence
  SiRNA target sequence
acaattatttaacaaaaaatgatagt

SEQ ID NO: 177290 - DNA, 26 bp, Artificial sequence
  SiRNA target sequence
caattatttaacaaaaaatgatagta

SEQ ID NO: 177291 - DNA, 26 bp, Artificial sequence
  SiRNA target sequence
aattatttaacaaaaaatgatagtat

SEQ ID NO: 177292 - DNA, 26 bp, Artificial sequence
  SiRNA target sequence
attatttaacaaaaaatgatagtata

SEQ ID NO: 177293 - DNA, 26 bp, Artificial sequence
  SiRNA target sequence
ttatttaacaaaaaatgatagtataa

SEQ ID NO: 177294 - DNA, 26 bp, Artificial sequence
  SiRNA target sequence
tatttaacaaaaaatgatagtataaa

SEQ ID NO: 177295 - DNA, 26 bp, Artificial sequence
  SiRNA target sequence
atttaacaaaaaatgatagtataaaa

SEQ ID NO: 177296 - DNA, 26 bp, Artificial sequence
  SiRNA target sequence
tttaacaaaaaatgatagtataaaaa

SEQ ID NO: 177297 - DNA, 26 bp, Artificial sequence
  SiRNA target sequence
ttaacaaaaaatgatagtataaaaat

SEQ ID NO: 177298 - DNA, 26 bp, Artificial sequence
  SiRNA target sequence
taacaaaaaatgatagtataaaaata

SEQ ID NO: 177299 - DNA, 26 bp, Artificial sequence
  SiRNA target sequence
aacaaaaaatgatagtataaaaatat

SEQ ID NO: 177300 - DNA, 26 bp, Artificial sequence
  SiRNA target sequence
acaaaaaatgatagtataaaaatatt

SEQ ID NO: 177301 - DNA, 26 bp, Artificial sequence
  SiRNA target sequence
caaaaaatgatagtataaaaatattt

SEQ ID NO: 177302 - DNA, 26 bp, Artificial sequence
  SiRNA target sequence
aaaaaatgatagtataaaaatattta

SEQ ID NO: 177303 - DNA, 26 bp, Artificial sequence
  SiRNA target sequence
aaaaatgatagtataaaaatatttaa

SEQ ID NO: 177304 - DNA, 26 bp, Artificial sequence
  SiRNA target sequence
aaaatgatagtataaaaatatttaac

SEQ ID NO: 177305 - DNA, 26 bp, Artificial sequence
  SiRNA target sequence
aaatgatagtataaaaatatttaaca

SEQ ID NO: 177306 - DNA, 26 bp, Artificial sequence
  SiRNA target sequence
aatgatagtataaaaatatttaacag

SEQ ID NO: 177307 - DNA, 26 bp, Artificial sequence
  SiRNA target sequence
atgatagtataaaaatatttaacagt

SEQ ID NO: 177308 - DNA, 26 bp, Artificial sequence
  SiRNA target sequence
tgatagtataaaaatatttaacagta

SEQ ID NO: 177309 - DNA, 26 bp, Artificial sequence
  SiRNA target sequence
gatagtataaaaatatttaacagtaa

SEQ ID NO: 177310 - DNA, 26 bp, Artificial sequence
  SiRNA target sequence
atagtataaaaatatttaacagtaaa

SEQ ID NO: 177311 - DNA, 26 bp, Artificial sequence
  SiRNA target sequence
tagtataaaaatatttaacagtaaaa

SEQ ID NO: 177312 - DNA, 26 bp, Artificial sequence
  SiRNA target sequence
agtataaaaatatttaacagtaaaaa

SEQ ID NO: 177313 - DNA, 26 bp, Artificial sequence
  SiRNA target sequence
gtataaaaatatttaacagtaaaaat

SEQ ID NO: 177314 - DNA, 26 bp, Artificial sequence
  SiRNA target sequence
tataaaaatatttaacagtaaaaatg

SEQ ID NO: 177315 - DNA, 26 bp, Artificial sequence
  SiRNA target sequence
ataaaaatatttaacagtaaaaatga

SEQ ID NO: 177316 - DNA, 26 bp, Artificial sequence
  SiRNA target sequence
taaaaatatttaacagtaaaaatgag

SEQ ID NO: 177317 - DNA, 26 bp, Artificial sequence
  SiRNA target sequence
aaaaatatttaacagtaaaaatgagg

SEQ ID NO: 177318 - DNA, 26 bp, Artificial sequence
  SiRNA target sequence
aaaatatttaacagtaaaaatgagga

SEQ ID NO: 177319 - DNA, 26 bp, Artificial sequence
  SiRNA target sequence
aaatatttaacagtaaaaatgaggag

SEQ ID NO: 177320 - DNA, 26 bp, Artificial sequence
  SiRNA target sequence
aatatttaacagtaaaaatgaggagg

SEQ ID NO: 177321 - DNA, 26 bp, Artificial sequence
  SiRNA target sequence
atatttaacagtaaaaatgaggaggt

SEQ ID NO: 177322 - DNA, 26 bp, Artificial sequence
  SiRNA target sequence
tatttaacagtaaaaatgaggaggta

SEQ ID NO: 177323 - DNA, 26 bp, Artificial sequence
  SiRNA target sequence
atttaacagtaaaaatgaggaggtaa

SEQ ID NO: 177324 - DNA, 26 bp, Artificial sequence
  SiRNA target sequence
tttaacagtaaaaatgaggaggtaag

SEQ ID NO: 177325 - DNA, 26 bp, Artificial sequence
  SiRNA target sequence
ttaacagtaaaaatgaggaggtaagg

SEQ ID NO: 177326 - DNA, 26 bp, Artificial sequence
  SiRNA target sequence
taacagtaaaaatgaggaggtaaggt

SEQ ID NO: 177327 - DNA, 26 bp, Artificial sequence
  SiRNA target sequence
aacagtaaaaatgaggaggtaaggtt

SEQ ID NO: 177328 - DNA, 26 bp, Artificial sequence
  SiRNA target sequence
acagtaaaaatgaggaggtaaggtta

SEQ ID NO: 177329 - DNA, 26 bp, Artificial sequence
  SiRNA target sequence
cagtaaaaatgaggaggtaaggttaa

SEQ ID NO: 177330 - DNA, 26 bp, Artificial sequence
  SiRNA target sequence
agtaaaaatgaggaggtaaggttaaa

SEQ ID NO: 177331 - DNA, 26 bp, Artificial sequence
  SiRNA target sequence
gtaaaaatgaggaggtaaggttaaat

SEQ ID NO: 177332 - DNA, 26 bp, Artificial sequence
  SiRNA target sequence
taaaaatgaggaggtaaggttaaatg

SEQ ID NO: 177333 - DNA, 26 bp, Artificial sequence
  SiRNA target sequence
aaaaatgaggaggtaaggttaaatgg

SEQ ID NO: 177334 - DNA, 26 bp, Artificial sequence
  SiRNA target sequence
aaaatgaggaggtaaggttaaatgga

SEQ ID NO: 177335 - DNA, 26 bp, Artificial sequence
  SiRNA target sequence
aaatgaggaggtaaggttaaatggaa

SEQ ID NO: 177336 - DNA, 26 bp, Artificial sequence
  SiRNA target sequence
aatgaggaggtaaggttaaatggaaa

SEQ ID NO: 177337 - DNA, 26 bp, Artificial sequence
  SiRNA target sequence
atgaggaggtaaggttaaatggaaaa

SEQ ID NO: 177338 - DNA, 26 bp, Artificial sequence
  SiRNA target sequence
tgaggaggtaaggttaaatggaaaaa

SEQ ID NO: 177339 - DNA, 26 bp, Artificial sequence
  SiRNA target sequence
gaggaggtaaggttaaatggaaaaag

SEQ ID NO: 177340 - DNA, 26 bp, Artificial sequence
  SiRNA target sequence
aggaggtaaggttaaatggaaaaaga

SEQ ID NO: 177341 - DNA, 26 bp, Artificial sequence
  SiRNA target sequence
ggaggtaaggttaaatggaaaaagaa

SEQ ID NO: 177342 - DNA, 26 bp, Artificial sequence
  SiRNA target sequence
gaggtaaggttaaatggaaaaagaaa

SEQ ID NO: 177343 - DNA, 26 bp, Artificial sequence
  SiRNA target sequence
aggtaaggttaaatggaaaaagaaaa

SEQ ID NO: 177344 - DNA, 26 bp, Artificial sequence
  SiRNA target sequence
ggtaaggttaaatggaaaaagaaaat

SEQ ID NO: 177345 - DNA, 26 bp, Artificial sequence
  SiRNA target sequence
gtaaggttaaatggaaaaagaaaatt

SEQ ID NO: 177346 - DNA, 26 bp, Artificial sequence
  SiRNA target sequence
taaggttaaatggaaaaagaaaatta

SEQ ID NO: 177347 - DNA, 26 bp, Artificial sequence
  SiRNA target sequence
aaggttaaatggaaaaagaaaattaa

SEQ ID NO: 177348 - DNA, 26 bp, Artificial sequence
  SiRNA target sequence
aggttaaatggaaaaagaaaattaaa

SEQ ID NO: 177349 - DNA, 26 bp, Artificial sequence
  SiRNA target sequence
ggttaaatggaaaaagaaaattaaat

SEQ ID NO: 177350 - DNA, 26 bp, Artificial sequence
  SiRNA target sequence
gttaaatggaaaaagaaaattaaata

SEQ ID NO: 177351 - DNA, 26 bp, Artificial sequence
  SiRNA target sequence
ttaaatggaaaaagaaaattaaatat

SEQ ID NO: 177352 - DNA, 26 bp, Artificial sequence
  SiRNA target sequence
taaatggaaaaagaaaattaaatatt

SEQ ID NO: 177353 - DNA, 26 bp, Artificial sequence
  SiRNA target sequence
aaatggaaaaagaaaattaaatatta

SEQ ID NO: 177354 - DNA, 26 bp, Artificial sequence
  SiRNA target sequence
aatggaaaaagaaaattaaatattaa

SEQ ID NO: 177355 - DNA, 26 bp, Artificial sequence
  SiRNA target sequence
atggaaaaagaaaattaaatattaac

SEQ ID NO: 177356 - DNA, 26 bp, Artificial sequence
  SiRNA target sequence
tggaaaaagaaaattaaatattaaca

SEQ ID NO: 177357 - DNA, 26 bp, Artificial sequence
  SiRNA target sequence
ggaaaaagaaaattaaatattaacac

SEQ ID NO: 177358 - DNA, 26 bp, Artificial sequence
  SiRNA target sequence
gaaaaagaaaattaaatattaacaca

SEQ ID NO: 177359 - DNA, 26 bp, Artificial sequence
  SiRNA target sequence
aaaaagaaaattaaatattaacacag

SEQ ID NO: 177360 - DNA, 26 bp, Artificial sequence
  SiRNA target sequence
aaaagaaaattaaatattaacacagt

SEQ ID NO: 177361 - DNA, 26 bp, Artificial sequence
  SiRNA target sequence
aaagaaaattaaatattaacacagtt

SEQ ID NO: 177362 - DNA, 26 bp, Artificial sequence
  SiRNA target sequence
aagaaaattaaatattaacacagtta

SEQ ID NO: 177363 - DNA, 26 bp, Artificial sequence
  SiRNA target sequence
agaaaattaaatattaacacagttac

SEQ ID NO: 177364 - DNA, 26 bp, Artificial sequence
  SiRNA target sequence
gaaaattaaatattaacacagttaca

SEQ ID NO: 177365 - DNA, 26 bp, Artificial sequence
  SiRNA target sequence
aaaattaaatattaacacagttacat

SEQ ID NO: 177366 - DNA, 26 bp, Artificial sequence
  SiRNA target sequence
aaattaaatattaacacagttacatt

SEQ ID NO: 177367 - DNA, 26 bp, Artificial sequence
  SiRNA target sequence
aattaaatattaacacagttacatta

SEQ ID NO: 177368 - DNA, 26 bp, Artificial sequence
  SiRNA target sequence
attaaatattaacacagttacattaa

SEQ ID NO: 177369 - DNA, 26 bp, Artificial sequence
  SiRNA target sequence
ttaaatattaacacagttacattaaa

SEQ ID NO: 177370 - DNA, 26 bp, Artificial sequence
  SiRNA target sequence
taaatattaacacagttacattaaat

SEQ ID NO: 177371 - DNA, 26 bp, Artificial sequence
  SiRNA target sequence
aaatattaacacagttacattaaata

SEQ ID NO: 177372 - DNA, 26 bp, Artificial sequence
  SiRNA target sequence
aatattaacacagttacattaaataa

SEQ ID NO: 177373 - DNA, 26 bp, Artificial sequence
  SiRNA target sequence
atattaacacagttacattaaataaa

SEQ ID NO: 177374 - DNA, 26 bp, Artificial sequence
  SiRNA target sequence
tattaacacagttacattaaataaaa

SEQ ID NO: 177375 - DNA, 26 bp, Artificial sequence
  SiRNA target sequence
attaacacagttacattaaataaaat

SEQ ID NO: 177376 - DNA, 26 bp, Artificial sequence
  SiRNA target sequence
ttaacacagttacattaaataaaatt

SEQ ID NO: 177377 - DNA, 26 bp, Artificial sequence
  SiRNA target sequence
taacacagttacattaaataaaatta

SEQ ID NO: 177378 - DNA, 26 bp, Artificial sequence
  SiRNA target sequence
aacacagttacattaaataaaattaa

SEQ ID NO: 177379 - DNA, 26 bp, Artificial sequence
  SiRNA target sequence
acacagttacattaaataaaattaat

SEQ ID NO: 177380 - DNA, 26 bp, Artificial sequence
  SiRNA target sequence
cacagttacattaaataaaattaata

SEQ ID NO: 177381 - DNA, 26 bp, Artificial sequence
  SiRNA target sequence
acagttacattaaataaaattaatat

SEQ ID NO: 177382 - DNA, 26 bp, Artificial sequence
  SiRNA target sequence
cagttacattaaataaaattaatata

SEQ ID NO: 177383 - DNA, 26 bp, Artificial sequence
  SiRNA target sequence
agttacattaaataaaattaatatac

SEQ ID NO: 177384 - DNA, 26 bp, Artificial sequence
  SiRNA target sequence
gttacattaaataaaattaatatacc

SEQ ID NO: 177385 - DNA, 26 bp, Artificial sequence
  SiRNA target sequence
ttacattaaataaaattaatatacct

SEQ ID NO: 177386 - DNA, 26 bp, Artificial sequence
  SiRNA target sequence
tacattaaataaaattaatatacctg

SEQ ID NO: 177387 - DNA, 26 bp, Artificial sequence
  SiRNA target sequence
acattaaataaaattaatatacctga

SEQ ID NO: 177388 - DNA, 26 bp, Artificial sequence
  SiRNA target sequence
cattaaataaaattaatatacctgag

SEQ ID NO: 177389 - DNA, 26 bp, Artificial sequence
  SiRNA target sequence
attaaataaaattaatatacctgaga

SEQ ID NO: 177390 - DNA, 26 bp, Artificial sequence
  SiRNA target sequence
ttaaataaaattaatatacctgagat

SEQ ID NO: 177391 - DNA, 26 bp, Artificial sequence
  SiRNA target sequence
taaataaaattaatatacctgagata

SEQ ID NO: 177392 - DNA, 26 bp, Artificial sequence
  SiRNA target sequence
aaataaaattaatatacctgagatag

SEQ ID NO: 177393 - DNA, 26 bp, Artificial sequence
  SiRNA target sequence
aataaaattaatatacctgagataga

SEQ ID NO: 177394 - DNA, 26 bp, Artificial sequence
  SiRNA target sequence
ataaaattaatatacctgagatagat

SEQ ID NO: 177395 - DNA, 26 bp, Artificial sequence
  SiRNA target sequence
taaaattaatatacctgagatagatt

SEQ ID NO: 177396 - DNA, 26 bp, Artificial sequence
  SiRNA target sequence
aaaattaatatacctgagatagatta

SEQ ID NO: 177397 - DNA, 26 bp, Artificial sequence
  SiRNA target sequence
aaattaatatacctgagatagattat

SEQ ID NO: 177398 - DNA, 26 bp, Artificial sequence
  SiRNA target sequence
aattaatatacctgagatagattata

SEQ ID NO: 177399 - DNA, 26 bp, Artificial sequence
  SiRNA target sequence
attaatatacctgagatagattataa

SEQ ID NO: 177400 - DNA, 26 bp, Artificial sequence
  SiRNA target sequence
ttaatatacctgagatagattataaa

SEQ ID NO: 177401 - DNA, 26 bp, Artificial sequence
  SiRNA target sequence
taatatacctgagatagattataaat

SEQ ID NO: 177402 - DNA, 26 bp, Artificial sequence
  SiRNA target sequence
aatatacctgagatagattataaata

SEQ ID NO: 177403 - DNA, 26 bp, Artificial sequence
  SiRNA target sequence
atatacctgagatagattataaatat

SEQ ID NO: 177404 - DNA, 26 bp, Artificial sequence
  SiRNA target sequence
tatacctgagatagattataaatata

SEQ ID NO: 177405 - DNA, 26 bp, Artificial sequence
  SiRNA target sequence
atacctgagatagattataaatataa

SEQ ID NO: 177406 - DNA, 26 bp, Artificial sequence
  SiRNA target sequence
tacctgagatagattataaatataaa

SEQ ID NO: 177407 - DNA, 26 bp, Artificial sequence
  SiRNA target sequence
acctgagatagattataaatataaaa

SEQ ID NO: 177408 - DNA, 26 bp, Artificial sequence
  SiRNA target sequence
cctgagatagattataaatataaaaa

SEQ ID NO: 177409 - DNA, 26 bp, Artificial sequence
  SiRNA target sequence
ctgagatagattataaatataaaaat

SEQ ID NO: 177410 - DNA, 26 bp, Artificial sequence
  SiRNA target sequence
tgagatagattataaatataaaaatg

SEQ ID NO: 177411 - DNA, 26 bp, Artificial sequence
  SiRNA target sequence
gagatagattataaatataaaaatgg

SEQ ID NO: 177412 - DNA, 26 bp, Artificial sequence
  SiRNA target sequence
agatagattataaatataaaaatgga

SEQ ID NO: 177413 - DNA, 26 bp, Artificial sequence
  SiRNA target sequence
gatagattataaatataaaaatggag

SEQ ID NO: 177414 - DNA, 26 bp, Artificial sequence
  SiRNA target sequence
atagattataaatataaaaatggagt

SEQ ID NO: 177415 - DNA, 26 bp, Artificial sequence
  SiRNA target sequence
tagattataaatataaaaatggagtg

SEQ ID NO: 177416 - DNA, 26 bp, Artificial sequence
  SiRNA target sequence
agattataaatataaaaatggagtgt

SEQ ID NO: 177417 - DNA, 26 bp, Artificial sequence
  SiRNA target sequence
gattataaatataaaaatggagtgtt

SEQ ID NO: 177418 - DNA, 26 bp, Artificial sequence
  SiRNA target sequence
attataaatataaaaatggagtgttt

SEQ ID NO: 177419 - DNA, 26 bp, Artificial sequence
  SiRNA target sequence
ttataaatataaaaatggagtgttta

SEQ ID NO: 177420 - DNA, 26 bp, Artificial sequence
  SiRNA target sequence
tataaatataaaaatggagtgtttac

SEQ ID NO: 177421 - DNA, 26 bp, Artificial sequence
  SiRNA target sequence
ataaatataaaaatggagtgtttaca

SEQ ID NO: 177422 - DNA, 26 bp, Artificial sequence
  SiRNA target sequence
taaatataaaaatggagtgtttacat

SEQ ID NO: 177423 - DNA, 26 bp, Artificial sequence
  SiRNA target sequence
aaatataaaaatggagtgtttacata

SEQ ID NO: 177424 - DNA, 26 bp, Artificial sequence
  SiRNA target sequence
aatataaaaatggagtgtttacatat

SEQ ID NO: 177425 - DNA, 26 bp, Artificial sequence
  SiRNA target sequence
atataaaaatggagtgtttacatata

SEQ ID NO: 177426 - DNA, 26 bp, Artificial sequence
  SiRNA target sequence
tataaaaatggagtgtttacatatac

SEQ ID NO: 177427 - DNA, 26 bp, Artificial sequence
  SiRNA target sequence
ataaaaatggagtgtttacatataca

SEQ ID NO: 177428 - DNA, 26 bp, Artificial sequence
  SiRNA target sequence
taaaaatggagtgtttacatatacac

SEQ ID NO: 177429 - DNA, 26 bp, Artificial sequence
  SiRNA target sequence
aaaaatggagtgtttacatatacaca

SEQ ID NO: 177430 - DNA, 26 bp, Artificial sequence
  SiRNA target sequence
aaaatggagtgtttacatatacacag

SEQ ID NO: 177431 - DNA, 26 bp, Artificial sequence
  SiRNA target sequence
aaatggagtgtttacatatacacaga

SEQ ID NO: 177432 - DNA, 26 bp, Artificial sequence
  SiRNA target sequence
aatggagtgtttacatatacacagat

SEQ ID NO: 177433 - DNA, 26 bp, Artificial sequence
  SiRNA target sequence
atggagtgtttacatatacacagatc

SEQ ID NO: 177434 - DNA, 26 bp, Artificial sequence
  SiRNA target sequence
tggagtgtttacatatacacagatca

SEQ ID NO: 177435 - DNA, 26 bp, Artificial sequence
  SiRNA target sequence
ggagtgtttacatatacacagatcaa

SEQ ID NO: 177436 - DNA, 26 bp, Artificial sequence
  SiRNA target sequence
gagtgtttacatatacacagatcaaa

SEQ ID NO: 177437 - DNA, 26 bp, Artificial sequence
  SiRNA target sequence
agtgtttacatatacacagatcaaaa

SEQ ID NO: 177438 - DNA, 26 bp, Artificial sequence
  SiRNA target sequence
gtgtttacatatacacagatcaaaaa

SEQ ID NO: 177439 - DNA, 26 bp, Artificial sequence
  SiRNA target sequence
tgtttacatatacacagatcaaaaat

SEQ ID NO: 177440 - DNA, 26 bp, Artificial sequence
  SiRNA target sequence
gtttacatatacacagatcaaaaata

SEQ ID NO: 177441 - DNA, 26 bp, Artificial sequence
  SiRNA target sequence
tttacatatacacagatcaaaaataa

SEQ ID NO: 177442 - DNA, 26 bp, Artificial sequence
  SiRNA target sequence
ttacatatacacagatcaaaaataat

SEQ ID NO: 177443 - DNA, 26 bp, Artificial sequence
  SiRNA target sequence
tacatatacacagatcaaaaataata

SEQ ID NO: 177444 - DNA, 26 bp, Artificial sequence
  SiRNA target sequence
acatatacacagatcaaaaataataa

SEQ ID NO: 177445 - DNA, 26 bp, Artificial sequence
  SiRNA target sequence
catatacacagatcaaaaataataag

SEQ ID NO: 177446 - DNA, 26 bp, Artificial sequence
  SiRNA target sequence
atatacacagatcaaaaataataaga

SEQ ID NO: 177447 - DNA, 26 bp, Artificial sequence
  SiRNA target sequence
tatacacagatcaaaaataataagaa

SEQ ID NO: 177448 - DNA, 26 bp, Artificial sequence
  SiRNA target sequence
atacacagatcaaaaataataagaaa

SEQ ID NO: 177449 - DNA, 26 bp, Artificial sequence
  SiRNA target sequence
tacacagatcaaaaataataagaaaa

SEQ ID NO: 177450 - DNA, 26 bp, Artificial sequence
  SiRNA target sequence
acacagatcaaaaataataagaaaaa

SEQ ID NO: 177451 - DNA, 26 bp, Artificial sequence
  SiRNA target sequence
cacagatcaaaaataataagaaaaaa

SEQ ID NO: 177452 - DNA, 26 bp, Artificial sequence
  SiRNA target sequence
acagatcaaaaataataagaaaaaaa

SEQ ID NO: 177453 - DNA, 26 bp, Artificial sequence
  SiRNA target sequence
cagatcaaaaataataagaaaaaaaa

SEQ ID NO: 177454 - DNA, 26 bp, Artificial sequence
  SiRNA target sequence
agatcaaaaataataagaaaaaaaaa

SEQ ID NO: 177455 - DNA, 26 bp, Artificial sequence
  SiRNA target sequence
gatcaaaaataataagaaaaaaaaat

SEQ ID NO: 177456 - DNA, 26 bp, Artificial sequence
  SiRNA target sequence
atcaaaaataataagaaaaaaaaata

SEQ ID NO: 177457 - DNA, 26 bp, Artificial sequence
  SiRNA target sequence
tcaaaaataataagaaaaaaaaatat

SEQ ID NO: 177458 - DNA, 26 bp, Artificial sequence
  SiRNA target sequence
caaaaataataagaaaaaaaaatatt

SEQ ID NO: 177459 - DNA, 26 bp, Artificial sequence
  SiRNA target sequence
aaaaataataagaaaaaaaaatattt

SEQ ID NO: 177460 - DNA, 26 bp, Artificial sequence
  SiRNA target sequence
aaaataataagaaaaaaaaatattta

SEQ ID NO: 177461 - DNA, 26 bp, Artificial sequence
  SiRNA target sequence
aaataataagaaaaaaaaatatttaa

SEQ ID NO: 177462 - DNA, 26 bp, Artificial sequence
  SiRNA target sequence
aataataagaaaaaaaaatatttaag

SEQ ID NO: 177463 - DNA, 26 bp, Artificial sequence
  SiRNA target sequence
ataataagaaaaaaaaatatttaaga

SEQ ID NO: 177464 - DNA, 26 bp, Artificial sequence
  SiRNA target sequence
taataagaaaaaaaaatatttaagaa

SEQ ID NO: 177465 - DNA, 26 bp, Artificial sequence
  SiRNA target sequence
aataagaaaaaaaaatatttaagaat

SEQ ID NO: 177466 - DNA, 26 bp, Artificial sequence
  SiRNA target sequence
ataagaaaaaaaaatatttaagaata

SEQ ID NO: 177467 - DNA, 26 bp, Artificial sequence
  SiRNA target sequence
taagaaaaaaaaatatttaagaatat

SEQ ID NO: 177468 - DNA, 26 bp, Artificial sequence
  SiRNA target sequence
aagaaaaaaaaatatttaagaatatt

SEQ ID NO: 177469 - DNA, 26 bp, Artificial sequence
  SiRNA target sequence
agaaaaaaaaatatttaagaatattg

SEQ ID NO: 177470 - DNA, 26 bp, Artificial sequence
  SiRNA target sequence
gaaaaaaaaatatttaagaatattgg

SEQ ID NO: 177471 - DNA, 26 bp, Artificial sequence
  SiRNA target sequence
aaaaaaaaatatttaagaatattggg

SEQ ID NO: 177472 - DNA, 26 bp, Artificial sequence
  SiRNA target sequence
aaaaaaaatatttaagaatattgggt

SEQ ID NO: 177473 - DNA, 26 bp, Artificial sequence
  SiRNA target sequence
aaaaaaatatttaagaatattgggtc

SEQ ID NO: 177474 - DNA, 26 bp, Artificial sequence
  SiRNA target sequence
aaaaaatatttaagaatattgggtct

SEQ ID NO: 177475 - DNA, 26 bp, Artificial sequence
  SiRNA target sequence
aaaaatatttaagaatattgggtcta

SEQ ID NO: 177476 - DNA, 26 bp, Artificial sequence
  SiRNA target sequence
aaaatatttaagaatattgggtctag

SEQ ID NO: 177477 - DNA, 26 bp, Artificial sequence
  SiRNA target sequence
aaatatttaagaatattgggtctaga

SEQ ID NO: 177478 - DNA, 26 bp, Artificial sequence
  SiRNA target sequence
aatatttaagaatattgggtctagaa

SEQ ID NO: 177479 - DNA, 26 bp, Artificial sequence
  SiRNA target sequence
atatttaagaatattgggtctagaac

SEQ ID NO: 177480 - DNA, 26 bp, Artificial sequence
  SiRNA target sequence
tatttaagaatattgggtctagaacc

SEQ ID NO: 177481 - DNA, 26 bp, Artificial sequence
  SiRNA target sequence
atttaagaatattgggtctagaacct

SEQ ID NO: 177482 - DNA, 26 bp, Artificial sequence
  SiRNA target sequence
tttaagaatattgggtctagaacctt

SEQ ID NO: 177483 - DNA, 26 bp, Artificial sequence
  SiRNA target sequence
ttaagaatattgggtctagaaccttt

SEQ ID NO: 177484 - DNA, 26 bp, Artificial sequence
  SiRNA target sequence
taagaatattgggtctagaacctttt

SEQ ID NO: 177485 - DNA, 26 bp, Artificial sequence
  SiRNA target sequence
aagaatattgggtctagaaccttttc

SEQ ID NO: 177486 - DNA, 26 bp, Artificial sequence
  SiRNA target sequence
agaatattgggtctagaaccttttct

SEQ ID NO: 177487 - DNA, 26 bp, Artificial sequence
  SiRNA target sequence
gaatattgggtctagaaccttttctt

SEQ ID NO: 177488 - DNA, 26 bp, Artificial sequence
  SiRNA target sequence
aatattgggtctagaaccttttctta

SEQ ID NO: 177489 - DNA, 26 bp, Artificial sequence
  SiRNA target sequence
atattgggtctagaaccttttcttaa

SEQ ID NO: 177490 - DNA, 26 bp, Artificial sequence
  SiRNA target sequence
tattgggtctagaaccttttcttaat

SEQ ID NO: 177491 - DNA, 26 bp, Artificial sequence
  SiRNA target sequence
attgggtctagaaccttttcttaatt

SEQ ID NO: 177492 - DNA, 26 bp, Artificial sequence
  SiRNA target sequence
ttgggtctagaaccttttcttaattt

SEQ ID NO: 177493 - DNA, 26 bp, Artificial sequence
  SiRNA target sequence
tgggtctagaaccttttcttaatttt

SEQ ID NO: 177494 - DNA, 26 bp, Artificial sequence
  SiRNA target sequence
gggtctagaaccttttcttaatttta

SEQ ID NO: 177495 - DNA, 26 bp, Artificial sequence
  SiRNA target sequence
ggtctagaaccttttcttaattttat

SEQ ID NO: 177496 - DNA, 26 bp, Artificial sequence
  SiRNA target sequence
gtctagaaccttttcttaattttatt

SEQ ID NO: 177497 - DNA, 26 bp, Artificial sequence
  SiRNA target sequence
tctagaaccttttcttaattttatta

SEQ ID NO: 177498 - DNA, 26 bp, Artificial sequence
  SiRNA target sequence
ctagaaccttttcttaattttattaa

SEQ ID NO: 177499 - DNA, 26 bp, Artificial sequence
  SiRNA target sequence
tagaaccttttcttaattttattaag

SEQ ID NO: 177500 - DNA, 26 bp, Artificial sequence
  SiRNA target sequence
agaaccttttcttaattttattaagg

SEQ ID NO: 177501 - DNA, 26 bp, Artificial sequence
  SiRNA target sequence
gaaccttttcttaattttattaagga

SEQ ID NO: 177502 - DNA, 26 bp, Artificial sequence
  SiRNA target sequence
aaccttttcttaattttattaaggaa

SEQ ID NO: 177503 - DNA, 26 bp, Artificial sequence
  SiRNA target sequence
accttttcttaattttattaaggaaa

SEQ ID NO: 177504 - DNA, 26 bp, Artificial sequence
  SiRNA target sequence
ccttttcttaattttattaaggaaag

SEQ ID NO: 177505 - DNA, 26 bp, Artificial sequence
  SiRNA target sequence
cttttcttaattttattaaggaaagt

SEQ ID NO: 177506 - DNA, 26 bp, Artificial sequence
  SiRNA target sequence
ttttcttaattttattaaggaaagta

SEQ ID NO: 177507 - DNA, 26 bp, Artificial sequence
  SiRNA target sequence
tttcttaattttattaaggaaagtaa

SEQ ID NO: 177508 - DNA, 26 bp, Artificial sequence
  SiRNA target sequence
ttcttaattttattaaggaaagtaaa

SEQ ID NO: 177509 - DNA, 26 bp, Artificial sequence
  SiRNA target sequence
tcttaattttattaaggaaagtaaac

SEQ ID NO: 177510 - DNA, 26 bp, Artificial sequence
  SiRNA target sequence
cttaattttattaaggaaagtaaaca

SEQ ID NO: 177511 - DNA, 26 bp, Artificial sequence
  SiRNA target sequence
ttaattttattaaggaaagtaaacat

SEQ ID NO: 177512 - DNA, 26 bp, Artificial sequence
  SiRNA target sequence
taattttattaaggaaagtaaacata

SEQ ID NO: 177513 - DNA, 26 bp, Artificial sequence
  SiRNA target sequence
aattttattaaggaaagtaaacataa

SEQ ID NO: 177514 - DNA, 26 bp, Artificial sequence
  SiRNA target sequence
attttattaaggaaagtaaacataaa

SEQ ID NO: 177515 - DNA, 26 bp, Artificial sequence
  SiRNA target sequence
ttttattaaggaaagtaaacataaag

SEQ ID NO: 177516 - DNA, 26 bp, Artificial sequence
  SiRNA target sequence
tttattaaggaaagtaaacataaaga

SEQ ID NO: 177517 - DNA, 26 bp, Artificial sequence
  SiRNA target sequence
ttattaaggaaagtaaacataaagaa

SEQ ID NO: 177518 - DNA, 26 bp, Artificial sequence
  SiRNA target sequence
tattaaggaaagtaaacataaagaat

SEQ ID NO: 177519 - DNA, 26 bp, Artificial sequence
  SiRNA target sequence
attaaggaaagtaaacataaagaatt

SEQ ID NO: 177520 - DNA, 26 bp, Artificial sequence
  SiRNA target sequence
ttaaggaaagtaaacataaagaatta

SEQ ID NO: 177521 - DNA, 26 bp, Artificial sequence
  SiRNA target sequence
taaggaaagtaaacataaagaattag

SEQ ID NO: 177522 - DNA, 26 bp, Artificial sequence
  SiRNA target sequence
aaggaaagtaaacataaagaattaga

SEQ ID NO: 177523 - DNA, 26 bp, Artificial sequence
  SiRNA target sequence
aggaaagtaaacataaagaattagaa

SEQ ID NO: 177524 - DNA, 26 bp, Artificial sequence
  SiRNA target sequence
ggaaagtaaacataaagaattagaat

SEQ ID NO: 177525 - DNA, 26 bp, Artificial sequence
  SiRNA target sequence
gaaagtaaacataaagaattagaata

SEQ ID NO: 177526 - DNA, 26 bp, Artificial sequence
  SiRNA target sequence
aaagtaaacataaagaattagaatat

SEQ ID NO: 177527 - DNA, 26 bp, Artificial sequence
  SiRNA target sequence
aagtaaacataaagaattagaatatg

SEQ ID NO: 177528 - DNA, 26 bp, Artificial sequence
  SiRNA target sequence
agtaaacataaagaattagaatatga

SEQ ID NO: 177529 - DNA, 26 bp, Artificial sequence
  SiRNA target sequence
gtaaacataaagaattagaatatgat

SEQ ID NO: 177530 - DNA, 26 bp, Artificial sequence
  SiRNA target sequence
taaacataaagaattagaatatgatg

SEQ ID NO: 177531 - DNA, 26 bp, Artificial sequence
  SiRNA target sequence
aaacataaagaattagaatatgatgt

SEQ ID NO: 177532 - DNA, 26 bp, Artificial sequence
  SiRNA target sequence
aacataaagaattagaatatgatgta

SEQ ID NO: 177533 - DNA, 26 bp, Artificial sequence
  SiRNA target sequence
acataaagaattagaatatgatgtat

SEQ ID NO: 177534 - DNA, 26 bp, Artificial sequence
  SiRNA target sequence
cataaagaattagaatatgatgtatg

SEQ ID NO: 177535 - DNA, 26 bp, Artificial sequence
  SiRNA target sequence
ataaagaattagaatatgatgtatgc

SEQ ID NO: 177536 - DNA, 26 bp, Artificial sequence
  SiRNA target sequence
taaagaattagaatatgatgtatgcg

SEQ ID NO: 177537 - DNA, 26 bp, Artificial sequence
  SiRNA target sequence
aaagaattagaatatgatgtatgcga

SEQ ID NO: 177538 - DNA, 26 bp, Artificial sequence
  SiRNA target sequence
aagaattagaatatgatgtatgcgaa

SEQ ID NO: 177539 - DNA, 26 bp, Artificial sequence
  SiRNA target sequence
agaattagaatatgatgtatgcgaaa

SEQ ID NO: 177540 - DNA, 26 bp, Artificial sequence
  SiRNA target sequence
gaattagaatatgatgtatgcgaaat

SEQ ID NO: 177541 - DNA, 26 bp, Artificial sequence
  SiRNA target sequence
aattagaatatgatgtatgcgaaata

SEQ ID NO: 177542 - DNA, 26 bp, Artificial sequence
  SiRNA target sequence
attagaatatgatgtatgcgaaatat

SEQ ID NO: 177543 - DNA, 26 bp, Artificial sequence
  SiRNA target sequence
ttagaatatgatgtatgcgaaatata

SEQ ID NO: 177544 - DNA, 26 bp, Artificial sequence
  SiRNA target sequence
tagaatatgatgtatgcgaaatatac

SEQ ID NO: 177545 - DNA, 26 bp, Artificial sequence
  SiRNA target sequence
agaatatgatgtatgcgaaatataca

SEQ ID NO: 177546 - DNA, 26 bp, Artificial sequence
  SiRNA target sequence
gaatatgatgtatgcgaaatatacat

SEQ ID NO: 177547 - DNA, 26 bp, Artificial sequence
  SiRNA target sequence
aatatgatgtatgcgaaatatacatt

SEQ ID NO: 177548 - DNA, 26 bp, Artificial sequence
  SiRNA target sequence
atatgatgtatgcgaaatatacattt

SEQ ID NO: 177549 - DNA, 26 bp, Artificial sequence
  SiRNA target sequence
tatgatgtatgcgaaatatacatttg

SEQ ID NO: 177550 - DNA, 26 bp, Artificial sequence
  SiRNA target sequence
atgatgtatgcgaaatatacatttgt

SEQ ID NO: 177551 - DNA, 26 bp, Artificial sequence
  SiRNA target sequence
tgatgtatgcgaaatatacatttgta

SEQ ID NO: 177552 - DNA, 26 bp, Artificial sequence
  SiRNA target sequence
gatgtatgcgaaatatacatttgtaa

SEQ ID NO: 177553 - DNA, 26 bp, Artificial sequence
  SiRNA target sequence
atgtatgcgaaatatacatttgtaat

SEQ ID NO: 177554 - DNA, 26 bp, Artificial sequence
  SiRNA target sequence
tgtatgcgaaatatacatttgtaatc

SEQ ID NO: 177555 - DNA, 26 bp, Artificial sequence
  SiRNA target sequence
gtatgcgaaatatacatttgtaatca

SEQ ID NO: 177556 - DNA, 26 bp, Artificial sequence
  SiRNA target sequence
tatgcgaaatatacatttgtaatcag

SEQ ID NO: 177557 - DNA, 26 bp, Artificial sequence
  SiRNA target sequence
atgcgaaatatacatttgtaatcagg

SEQ ID NO: 177558 - DNA, 26 bp, Artificial sequence
  SiRNA target sequence
tgcgaaatatacatttgtaatcaggg

SEQ ID NO: 177559 - DNA, 26 bp, Artificial sequence
  SiRNA target sequence
gcgaaatatacatttgtaatcaggga

SEQ ID NO: 177560 - DNA, 26 bp, Artificial sequence
  SiRNA target sequence
cgaaatatacatttgtaatcagggat

SEQ ID NO: 177561 - DNA, 26 bp, Artificial sequence
  SiRNA target sequence
gaaatatacatttgtaatcagggatg

SEQ ID NO: 177562 - DNA, 26 bp, Artificial sequence
  SiRNA target sequence
aaatatacatttgtaatcagggatgc

SEQ ID NO: 177563 - DNA, 26 bp, Artificial sequence
  SiRNA target sequence
aatatacatttgtaatcagggatgca

SEQ ID NO: 177564 - DNA, 26 bp, Artificial sequence
  SiRNA target sequence
atatacatttgtaatcagggatgcat

SEQ ID NO: 177565 - DNA, 26 bp, Artificial sequence
  SiRNA target sequence
tatacatttgtaatcagggatgcatt

SEQ ID NO: 177566 - DNA, 26 bp, Artificial sequence
  SiRNA target sequence
atacatttgtaatcagggatgcatta

SEQ ID NO: 177567 - DNA, 26 bp, Artificial sequence
  SiRNA target sequence
tacatttgtaatcagggatgcattaa

SEQ ID NO: 177568 - DNA, 26 bp, Artificial sequence
  SiRNA target sequence
acatttgtaatcagggatgcattaat

SEQ ID NO: 177569 - DNA, 26 bp, Artificial sequence
  SiRNA target sequence
catttgtaatcagggatgcattaatg

SEQ ID NO: 177570 - DNA, 26 bp, Artificial sequence
  SiRNA target sequence
atttgtaatcagggatgcattaatgg

SEQ ID NO: 177571 - DNA, 26 bp, Artificial sequence
  SiRNA target sequence
tttgtaatcagggatgcattaatgga

SEQ ID NO: 177572 - DNA, 26 bp, Artificial sequence
  SiRNA target sequence
ttgtaatcagggatgcattaatggac

SEQ ID NO: 177573 - DNA, 26 bp, Artificial sequence
  SiRNA target sequence
tgtaatcagggatgcattaatggacc

SEQ ID NO: 177574 - DNA, 26 bp, Artificial sequence
  SiRNA target sequence
gtaatcagggatgcattaatggacca

SEQ ID NO: 177575 - DNA, 26 bp, Artificial sequence
  SiRNA target sequence
taatcagggatgcattaatggaccag

SEQ ID NO: 177576 - DNA, 26 bp, Artificial sequence
  SiRNA target sequence
aatcagggatgcattaatggaccagg

SEQ ID NO: 177577 - DNA, 26 bp, Artificial sequence
  SiRNA target sequence
atcagggatgcattaatggaccagga

SEQ ID NO: 177578 - DNA, 26 bp, Artificial sequence
  SiRNA target sequence
tcagggatgcattaatggaccaggac

SEQ ID NO: 177579 - DNA, 26 bp, Artificial sequence
  SiRNA target sequence
cagggatgcattaatggaccaggaca

SEQ ID NO: 177580 - DNA, 26 bp, Artificial sequence
  SiRNA target sequence
agggatgcattaatggaccaggacaa

SEQ ID NO: 177581 - DNA, 26 bp, Artificial sequence
  SiRNA target sequence
gggatgcattaatggaccaggacaat

SEQ ID NO: 177582 - DNA, 26 bp, Artificial sequence
  SiRNA target sequence
ggatgcattaatggaccaggacaatt

SEQ ID NO: 177583 - DNA, 26 bp, Artificial sequence
  SiRNA target sequence
gatgcattaatggaccaggacaattg

SEQ ID NO: 177584 - DNA, 26 bp, Artificial sequence
  SiRNA target sequence
atgcattaatggaccaggacaattgt

SEQ ID NO: 177585 - DNA, 26 bp, Artificial sequence
  SiRNA target sequence
tgcattaatggaccaggacaattgta

SEQ ID NO: 177586 - DNA, 26 bp, Artificial sequence
  SiRNA target sequence
gcattaatggaccaggacaattgtat

SEQ ID NO: 177587 - DNA, 26 bp, Artificial sequence
  SiRNA target sequence
cattaatggaccaggacaattgtata

SEQ ID NO: 177588 - DNA, 26 bp, Artificial sequence
  SiRNA target sequence
attaatggaccaggacaattgtatac

SEQ ID NO: 177589 - DNA, 26 bp, Artificial sequence
  SiRNA target sequence
ttaatggaccaggacaattgtataca

SEQ ID NO: 177590 - DNA, 26 bp, Artificial sequence
  SiRNA target sequence
taatggaccaggacaattgtatacag

SEQ ID NO: 177591 - DNA, 26 bp, Artificial sequence
  SiRNA target sequence
aatggaccaggacaattgtatacaga

SEQ ID NO: 177592 - DNA, 26 bp, Artificial sequence
  SiRNA target sequence
atggaccaggacaattgtatacagat

SEQ ID NO: 177593 - DNA, 26 bp, Artificial sequence
  SiRNA target sequence
tggaccaggacaattgtatacagata

SEQ ID NO: 177594 - DNA, 26 bp, Artificial sequence
  SiRNA target sequence
ggaccaggacaattgtatacagataa

SEQ ID NO: 177595 - DNA, 26 bp, Artificial sequence
  SiRNA target sequence
gaccaggacaattgtatacagataat

SEQ ID NO: 177596 - DNA, 26 bp, Artificial sequence
  SiRNA target sequence
accaggacaattgtatacagataatt

SEQ ID NO: 177597 - DNA, 26 bp, Artificial sequence
  SiRNA target sequence
ccaggacaattgtatacagataattt

SEQ ID NO: 177598 - DNA, 26 bp, Artificial sequence
  SiRNA target sequence
caggacaattgtatacagataattta

SEQ ID NO: 177599 - DNA, 26 bp, Artificial sequence
  SiRNA target sequence
aggacaattgtatacagataatttat

SEQ ID NO: 177600 - DNA, 26 bp, Artificial sequence
  SiRNA target sequence
ggacaattgtatacagataatttata

SEQ ID NO: 177601 - DNA, 26 bp, Artificial sequence
  SiRNA target sequence
gacaattgtatacagataatttatat

SEQ ID NO: 177602 - DNA, 26 bp, Artificial sequence
  SiRNA target sequence
acaattgtatacagataatttatatg

SEQ ID NO: 177603 - DNA, 26 bp, Artificial sequence
  SiRNA target sequence
caattgtatacagataatttatatgt

SEQ ID NO: 177604 - DNA, 26 bp, Artificial sequence
  SiRNA target sequence
aattgtatacagataatttatatgta

SEQ ID NO: 177605 - DNA, 26 bp, Artificial sequence
  SiRNA target sequence
attgtatacagataatttatatgtaa

SEQ ID NO: 177606 - DNA, 26 bp, Artificial sequence
  SiRNA target sequence
ttgtatacagataatttatatgtaaa

SEQ ID NO: 177607 - DNA, 26 bp, Artificial sequence
  SiRNA target sequence
tgtatacagataatttatatgtaaat

SEQ ID NO: 177608 - DNA, 26 bp, Artificial sequence
  SiRNA target sequence
gtatacagataatttatatgtaaata

SEQ ID NO: 177609 - DNA, 26 bp, Artificial sequence
  SiRNA target sequence
tatacagataatttatatgtaaataa

SEQ ID NO: 177610 - DNA, 26 bp, Artificial sequence
  SiRNA target sequence
atacagataatttatatgtaaataat

SEQ ID NO: 177611 - DNA, 26 bp, Artificial sequence
  SiRNA target sequence
tacagataatttatatgtaaataatt

SEQ ID NO: 177612 - DNA, 26 bp, Artificial sequence
  SiRNA target sequence
acagataatttatatgtaaataattc

SEQ ID NO: 177613 - DNA, 26 bp, Artificial sequence
  SiRNA target sequence
cagataatttatatgtaaataattca

SEQ ID NO: 177614 - DNA, 26 bp, Artificial sequence
  SiRNA target sequence
agataatttatatgtaaataattcag

SEQ ID NO: 177615 - DNA, 26 bp, Artificial sequence
  SiRNA target sequence
gataatttatatgtaaataattcaga

SEQ ID NO: 177616 - DNA, 26 bp, Artificial sequence
  SiRNA target sequence
ataatttatatgtaaataattcagaa

SEQ ID NO: 177617 - DNA, 26 bp, Artificial sequence
  SiRNA target sequence
taatttatatgtaaataattcagaat

SEQ ID NO: 177618 - DNA, 26 bp, Artificial sequence
  SiRNA target sequence
aatttatatgtaaataattcagaata

SEQ ID NO: 177619 - DNA, 26 bp, Artificial sequence
  SiRNA target sequence
atttatatgtaaataattcagaatac

SEQ ID NO: 177620 - DNA, 26 bp, Artificial sequence
  SiRNA target sequence
tttatatgtaaataattcagaataca

SEQ ID NO: 177621 - DNA, 26 bp, Artificial sequence
  SiRNA target sequence
ttatatgtaaataattcagaatacat

SEQ ID NO: 177622 - DNA, 26 bp, Artificial sequence
  SiRNA target sequence
tatatgtaaataattcagaatacata

SEQ ID NO: 177623 - DNA, 26 bp, Artificial sequence
  SiRNA target sequence
atatgtaaataattcagaatacatag

SEQ ID NO: 177624 - DNA, 26 bp, Artificial sequence
  SiRNA target sequence
tatgtaaataattcagaatacataga

SEQ ID NO: 177625 - DNA, 26 bp, Artificial sequence
  SiRNA target sequence
atgtaaataattcagaatacatagat

SEQ ID NO: 177626 - DNA, 26 bp, Artificial sequence
  SiRNA target sequence
tgtaaataattcagaatacatagata

SEQ ID NO: 177627 - DNA, 26 bp, Artificial sequence
  SiRNA target sequence
gtaaataattcagaatacatagatat

SEQ ID NO: 177628 - DNA, 26 bp, Artificial sequence
  SiRNA target sequence
taaataattcagaatacatagatatt

SEQ ID NO: 177629 - DNA, 26 bp, Artificial sequence
  SiRNA target sequence
aaataattcagaatacatagatattg

SEQ ID NO: 177630 - DNA, 26 bp, Artificial sequence
  SiRNA target sequence
aataattcagaatacatagatattga

SEQ ID NO: 177631 - DNA, 26 bp, Artificial sequence
  SiRNA target sequence
ataattcagaatacatagatattgat

SEQ ID NO: 177632 - DNA, 26 bp, Artificial sequence
  SiRNA target sequence
taattcagaatacatagatattgatc

SEQ ID NO: 177633 - DNA, 26 bp, Artificial sequence
  SiRNA target sequence
aattcagaatacatagatattgatct

SEQ ID NO: 177634 - DNA, 26 bp, Artificial sequence
  SiRNA target sequence
attcagaatacatagatattgatctt

SEQ ID NO: 177635 - DNA, 26 bp, Artificial sequence
  SiRNA target sequence
ttcagaatacatagatattgatcttg

SEQ ID NO: 177636 - DNA, 26 bp, Artificial sequence
  SiRNA target sequence
tcagaatacatagatattgatcttgg

SEQ ID NO: 177637 - DNA, 26 bp, Artificial sequence
  SiRNA target sequence
cagaatacatagatattgatcttggt

SEQ ID NO: 177638 - DNA, 26 bp, Artificial sequence
  SiRNA target sequence
agaatacatagatattgatcttggta

SEQ ID NO: 177639 - DNA, 26 bp, Artificial sequence
  SiRNA target sequence
gaatacatagatattgatcttggtat

SEQ ID NO: 177640 - DNA, 26 bp, Artificial sequence
  SiRNA target sequence
aatacatagatattgatcttggtatt

SEQ ID NO: 177641 - DNA, 26 bp, Artificial sequence
  SiRNA target sequence
atacatagatattgatcttggtattg

SEQ ID NO: 177642 - DNA, 26 bp, Artificial sequence
  SiRNA target sequence
tacatagatattgatcttggtattga

SEQ ID NO: 177643 - DNA, 26 bp, Artificial sequence
  SiRNA target sequence
acatagatattgatcttggtattgat

SEQ ID NO: 177644 - DNA, 26 bp, Artificial sequence
  SiRNA target sequence
catagatattgatcttggtattgatt

SEQ ID NO: 177645 - DNA, 26 bp, Artificial sequence
  SiRNA target sequence
atagatattgatcttggtattgattg

SEQ ID NO: 177646 - DNA, 26 bp, Artificial sequence
  SiRNA target sequence
tagatattgatcttggtattgattgt

SEQ ID NO: 177647 - DNA, 26 bp, Artificial sequence
  SiRNA target sequence
agatattgatcttggtattgattgta

SEQ ID NO: 177648 - DNA, 26 bp, Artificial sequence
  SiRNA target sequence
gatattgatcttggtattgattgtaa

SEQ ID NO: 177649 - DNA, 26 bp, Artificial sequence
  SiRNA target sequence
atattgatcttggtattgattgtaaa

SEQ ID NO: 177650 - DNA, 26 bp, Artificial sequence
  SiRNA target sequence
tattgatcttggtattgattgtaaac

SEQ ID NO: 177651 - DNA, 26 bp, Artificial sequence
  SiRNA target sequence
attgatcttggtattgattgtaaaca

SEQ ID NO: 177652 - DNA, 26 bp, Artificial sequence
  SiRNA target sequence
ttgatcttggtattgattgtaaacag

SEQ ID NO: 177653 - DNA, 26 bp, Artificial sequence
  SiRNA target sequence
tgatcttggtattgattgtaaacagt

SEQ ID NO: 177654 - DNA, 26 bp, Artificial sequence
  SiRNA target sequence
gatcttggtattgattgtaaacagtt

SEQ ID NO: 177655 - DNA, 26 bp, Artificial sequence
  SiRNA target sequence
atcttggtattgattgtaaacagtta

SEQ ID NO: 177656 - DNA, 26 bp, Artificial sequence
  SiRNA target sequence
tcttggtattgattgtaaacagttac

SEQ ID NO: 177657 - DNA, 26 bp, Artificial sequence
  SiRNA target sequence
cttggtattgattgtaaacagttaca

SEQ ID NO: 177658 - DNA, 26 bp, Artificial sequence
  SiRNA target sequence
ttggtattgattgtaaacagttacaa

SEQ ID NO: 177659 - DNA, 26 bp, Artificial sequence
  SiRNA target sequence
tggtattgattgtaaacagttacaaa

SEQ ID NO: 177660 - DNA, 26 bp, Artificial sequence
  SiRNA target sequence
ggtattgattgtaaacagttacaaaa

SEQ ID NO: 177661 - DNA, 26 bp, Artificial sequence
  SiRNA target sequence
gtattgattgtaaacagttacaaaaa

SEQ ID NO: 177662 - DNA, 26 bp, Artificial sequence
  SiRNA target sequence
tattgattgtaaacagttacaaaaaa

SEQ ID NO: 177663 - DNA, 26 bp, Artificial sequence
  SiRNA target sequence
attgattgtaaacagttacaaaaaag

SEQ ID NO: 177664 - DNA, 26 bp, Artificial sequence
  SiRNA target sequence
ttgattgtaaacagttacaaaaaagg

SEQ ID NO: 177665 - DNA, 26 bp, Artificial sequence
  SiRNA target sequence
tgattgtaaacagttacaaaaaagga

SEQ ID NO: 177666 - DNA, 26 bp, Artificial sequence
  SiRNA target sequence
gattgtaaacagttacaaaaaaggac

SEQ ID NO: 177667 - DNA, 26 bp, Artificial sequence
  SiRNA target sequence
attgtaaacagttacaaaaaaggaca

SEQ ID NO: 177668 - DNA, 26 bp, Artificial sequence
  SiRNA target sequence
ttgtaaacagttacaaaaaaggacat

SEQ ID NO: 177669 - DNA, 26 bp, Artificial sequence
  SiRNA target sequence
tgtaaacagttacaaaaaaggacata

SEQ ID NO: 177670 - DNA, 26 bp, Artificial sequence
  SiRNA target sequence
gtaaacagttacaaaaaaggacatat

SEQ ID NO: 177671 - DNA, 26 bp, Artificial sequence
  SiRNA target sequence
taaacagttacaaaaaaggacatata

SEQ ID NO: 177672 - DNA, 26 bp, Artificial sequence
  SiRNA target sequence
aaacagttacaaaaaaggacatatag

SEQ ID NO: 177673 - DNA, 26 bp, Artificial sequence
  SiRNA target sequence
aacagttacaaaaaaggacatataga

SEQ ID NO: 177674 - DNA, 26 bp, Artificial sequence
  SiRNA target sequence
acagttacaaaaaaggacatatagaa

SEQ ID NO: 177675 - DNA, 26 bp, Artificial sequence
  SiRNA target sequence
cagttacaaaaaaggacatatagaaa

SEQ ID NO: 177676 - DNA, 26 bp, Artificial sequence
  SiRNA target sequence
agttacaaaaaaggacatatagaaaa

SEQ ID NO: 177677 - DNA, 26 bp, Artificial sequence
  SiRNA target sequence
gttacaaaaaaggacatatagaaaaa

SEQ ID NO: 177678 - DNA, 26 bp, Artificial sequence
  SiRNA target sequence
ttacaaaaaaggacatatagaaaaat

SEQ ID NO: 177679 - DNA, 26 bp, Artificial sequence
  SiRNA target sequence
tacaaaaaaggacatatagaaaaata

SEQ ID NO: 177680 - DNA, 26 bp, Artificial sequence
  SiRNA target sequence
acaaaaaaggacatatagaaaaatag

SEQ ID NO: 177681 - DNA, 26 bp, Artificial sequence
  SiRNA target sequence
caaaaaaggacatatagaaaaataga

SEQ ID NO: 177682 - DNA, 26 bp, Artificial sequence
  SiRNA target sequence
aaaaaaggacatatagaaaaatagaa

SEQ ID NO: 177683 - DNA, 26 bp, Artificial sequence
  SiRNA target sequence
aaaaaggacatatagaaaaatagaaa

SEQ ID NO: 177684 - DNA, 26 bp, Artificial sequence
  SiRNA target sequence
aaaaggacatatagaaaaatagaaac

SEQ ID NO: 177685 - DNA, 26 bp, Artificial sequence
  SiRNA target sequence
aaaggacatatagaaaaatagaaaca

SEQ ID NO: 177686 - DNA, 26 bp, Artificial sequence
  SiRNA target sequence
aaggacatatagaaaaatagaaacaa

SEQ ID NO: 177687 - DNA, 26 bp, Artificial sequence
  SiRNA target sequence
aggacatatagaaaaatagaaacaaa

SEQ ID NO: 177688 - DNA, 26 bp, Artificial sequence
  SiRNA target sequence
ggacatatagaaaaatagaaacaaag

SEQ ID NO: 177689 - DNA, 26 bp, Artificial sequence
  SiRNA target sequence
gacatatagaaaaatagaaacaaaga

SEQ ID NO: 177690 - DNA, 26 bp, Artificial sequence
  SiRNA target sequence
acatatagaaaaatagaaacaaagaa

SEQ ID NO: 177691 - DNA, 26 bp, Artificial sequence
  SiRNA target sequence
catatagaaaaatagaaacaaagaaa

SEQ ID NO: 177692 - DNA, 26 bp, Artificial sequence
  SiRNA target sequence
atatagaaaaatagaaacaaagaaag

SEQ ID NO: 177693 - DNA, 26 bp, Artificial sequence
  SiRNA target sequence
tatagaaaaatagaaacaaagaaagt

SEQ ID NO: 177694 - DNA, 26 bp, Artificial sequence
  SiRNA target sequence
atagaaaaatagaaacaaagaaagtt

SEQ ID NO: 177695 - DNA, 26 bp, Artificial sequence
  SiRNA target sequence
tagaaaaatagaaacaaagaaagtta

SEQ ID NO: 177696 - DNA, 26 bp, Artificial sequence
  SiRNA target sequence
agaaaaatagaaacaaagaaagttaa

SEQ ID NO: 177697 - DNA, 26 bp, Artificial sequence
  SiRNA target sequence
gaaaaatagaaacaaagaaagttaat

SEQ ID NO: 177698 - DNA, 26 bp, Artificial sequence
  SiRNA target sequence
aaaaatagaaacaaagaaagttaatt

SEQ ID NO: 177699 - DNA, 26 bp, Artificial sequence
  SiRNA target sequence
aaaatagaaacaaagaaagttaattt

SEQ ID NO: 177700 - DNA, 26 bp, Artificial sequence
  SiRNA target sequence
aaatagaaacaaagaaagttaatttt

SEQ ID NO: 177701 - DNA, 26 bp, Artificial sequence
  SiRNA target sequence
aatagaaacaaagaaagttaatttta

SEQ ID NO: 177702 - DNA, 26 bp, Artificial sequence
  SiRNA target sequence
atagaaacaaagaaagttaattttaa

SEQ ID NO: 177703 - DNA, 26 bp, Artificial sequence
  SiRNA target sequence
tagaaacaaagaaagttaattttaaa

SEQ ID NO: 177704 - DNA, 26 bp, Artificial sequence
  SiRNA target sequence
agaaacaaagaaagttaattttaaaa

SEQ ID NO: 177705 - DNA, 26 bp, Artificial sequence
  SiRNA target sequence
gaaacaaagaaagttaattttaaaat

SEQ ID NO: 177706 - DNA, 26 bp, Artificial sequence
  SiRNA target sequence
aaacaaagaaagttaattttaaaata

SEQ ID NO: 177707 - DNA, 26 bp, Artificial sequence
  SiRNA target sequence
aacaaagaaagttaattttaaaatag

SEQ ID NO: 177708 - DNA, 26 bp, Artificial sequence
  SiRNA target sequence
acaaagaaagttaattttaaaataga

SEQ ID NO: 177709 - DNA, 26 bp, Artificial sequence
  SiRNA target sequence
caaagaaagttaattttaaaatagaa

SEQ ID NO: 177710 - DNA, 26 bp, Artificial sequence
  SiRNA target sequence
aaagaaagttaattttaaaatagaat

SEQ ID NO: 177711 - DNA, 26 bp, Artificial sequence
  SiRNA target sequence
aagaaagttaattttaaaatagaatg

SEQ ID NO: 177712 - DNA, 26 bp, Artificial sequence
  SiRNA target sequence
agaaagttaattttaaaatagaatgg

SEQ ID NO: 177713 - DNA, 26 bp, Artificial sequence
  SiRNA target sequence
gaaagttaattttaaaatagaatggt

SEQ ID NO: 177714 - DNA, 26 bp, Artificial sequence
  SiRNA target sequence
aaagttaattttaaaatagaatggta

SEQ ID NO: 177715 - DNA, 26 bp, Artificial sequence
  SiRNA target sequence
aagttaattttaaaatagaatggtaa

SEQ ID NO: 177716 - DNA, 27 bp, Artificial sequence
  SiRNA target sequence
atgaatactgaaaataaaccatgtatt

SEQ ID NO: 177717 - DNA, 27 bp, Artificial sequence
  SiRNA target sequence
tgaatactgaaaataaaccatgtattt

SEQ ID NO: 177718 - DNA, 27 bp, Artificial sequence
  SiRNA target sequence
gaatactgaaaataaaccatgtatttc

SEQ ID NO: 177719 - DNA, 27 bp, Artificial sequence
  SiRNA target sequence
aatactgaaaataaaccatgtatttca

SEQ ID NO: 177720 - DNA, 27 bp, Artificial sequence
  SiRNA target sequence
atactgaaaataaaccatgtatttcac

SEQ ID NO: 177721 - DNA, 27 bp, Artificial sequence
  SiRNA target sequence
tactgaaaataaaccatgtatttcacc

SEQ ID NO: 177722 - DNA, 27 bp, Artificial sequence
  SiRNA target sequence
actgaaaataaaccatgtatttcacca

SEQ ID NO: 177723 - DNA, 27 bp, Artificial sequence
  SiRNA target sequence
ctgaaaataaaccatgtatttcaccat

SEQ ID NO: 177724 - DNA, 27 bp, Artificial sequence
  SiRNA target sequence
tgaaaataaaccatgtatttcaccatt

SEQ ID NO: 177725 - DNA, 27 bp, Artificial sequence
  SiRNA target sequence
gaaaataaaccatgtatttcaccattt

SEQ ID NO: 177726 - DNA, 27 bp, Artificial sequence
  SiRNA target sequence
aaaataaaccatgtatttcaccattta

SEQ ID NO: 177727 - DNA, 27 bp, Artificial sequence
  SiRNA target sequence
aaataaaccatgtatttcaccatttac

SEQ ID NO: 177728 - DNA, 27 bp, Artificial sequence
  SiRNA target sequence
aataaaccatgtatttcaccatttacc

SEQ ID NO: 177729 - DNA, 27 bp, Artificial sequence
  SiRNA target sequence
ataaaccatgtatttcaccatttacct

SEQ ID NO: 177730 - DNA, 27 bp, Artificial sequence
  SiRNA target sequence
taaaccatgtatttcaccatttacctt

SEQ ID NO: 177731 - DNA, 27 bp, Artificial sequence
  SiRNA target sequence
aaaccatgtatttcaccatttaccttt

SEQ ID NO: 177732 - DNA, 27 bp, Artificial sequence
  SiRNA target sequence
aaccatgtatttcaccatttaccttta

SEQ ID NO: 177733 - DNA, 27 bp, Artificial sequence
  SiRNA target sequence
accatgtatttcaccatttacctttaa

SEQ ID NO: 177734 - DNA, 27 bp, Artificial sequence
  SiRNA target sequence
ccatgtatttcaccatttacctttaaa

SEQ ID NO: 177735 - DNA, 27 bp, Artificial sequence
  SiRNA target sequence
catgtatttcaccatttacctttaaac

SEQ ID NO: 177736 - DNA, 27 bp, Artificial sequence
  SiRNA target sequence
atgtatttcaccatttacctttaaact

SEQ ID NO: 177737 - DNA, 27 bp, Artificial sequence
  SiRNA target sequence
tgtatttcaccatttacctttaaacta

SEQ ID NO: 177738 - DNA, 27 bp, Artificial sequence
  SiRNA target sequence
gtatttcaccatttacctttaaactag

SEQ ID NO: 177739 - DNA, 27 bp, Artificial sequence
  SiRNA target sequence
tatttcaccatttacctttaaactaga

SEQ ID NO: 177740 - DNA, 27 bp, Artificial sequence
  SiRNA target sequence
atttcaccatttacctttaaactagaa

SEQ ID NO: 177741 - DNA, 27 bp, Artificial sequence
  SiRNA target sequence
tttcaccatttacctttaaactagaag

SEQ ID NO: 177742 - DNA, 27 bp, Artificial sequence
  SiRNA target sequence
ttcaccatttacctttaaactagaaga

SEQ ID NO: 177743 - DNA, 27 bp, Artificial sequence
  SiRNA target sequence
tcaccatttacctttaaactagaagat

SEQ ID NO: 177744 - DNA, 27 bp, Artificial sequence
  SiRNA target sequence
caccatttacctttaaactagaagatt

SEQ ID NO: 177745 - DNA, 27 bp, Artificial sequence
  SiRNA target sequence
accatttacctttaaactagaagattg

SEQ ID NO: 177746 - DNA, 27 bp, Artificial sequence
  SiRNA target sequence
ccatttacctttaaactagaagattgc

SEQ ID NO: 177747 - DNA, 27 bp, Artificial sequence
  SiRNA target sequence
catttacctttaaactagaagattgcc

SEQ ID NO: 177748 - DNA, 27 bp, Artificial sequence
  SiRNA target sequence
atttacctttaaactagaagattgcct

SEQ ID NO: 177749 - DNA, 27 bp, Artificial sequence
  SiRNA target sequence
tttacctttaaactagaagattgcctg

SEQ ID NO: 177750 - DNA, 27 bp, Artificial sequence
  SiRNA target sequence
ttacctttaaactagaagattgcctgg

SEQ ID NO: 177751 - DNA, 27 bp, Artificial sequence
  SiRNA target sequence
tacctttaaactagaagattgcctggc

SEQ ID NO: 177752 - DNA, 27 bp, Artificial sequence
  SiRNA target sequence
acctttaaactagaagattgcctggca

SEQ ID NO: 177753 - DNA, 27 bp, Artificial sequence
  SiRNA target sequence
cctttaaactagaagattgcctggcat

SEQ ID NO: 177754 - DNA, 27 bp, Artificial sequence
  SiRNA target sequence
ctttaaactagaagattgcctggcatg

SEQ ID NO: 177755 - DNA, 27 bp, Artificial sequence
  SiRNA target sequence
tttaaactagaagattgcctggcatgt

SEQ ID NO: 177756 - DNA, 27 bp, Artificial sequence
  SiRNA target sequence
ttaaactagaagattgcctggcatgtt

SEQ ID NO: 177757 - DNA, 27 bp, Artificial sequence
  SiRNA target sequence
taaactagaagattgcctggcatgttc

SEQ ID NO: 177758 - DNA, 27 bp, Artificial sequence
  SiRNA target sequence
aaactagaagattgcctggcatgttcg

SEQ ID NO: 177759 - DNA, 27 bp, Artificial sequence
  SiRNA target sequence
aactagaagattgcctggcatgttcgg

SEQ ID NO: 177760 - DNA, 27 bp, Artificial sequence
  SiRNA target sequence
actagaagattgcctggcatgttcggc

SEQ ID NO: 177761 - DNA, 27 bp, Artificial sequence
  SiRNA target sequence
ctagaagattgcctggcatgttcggct

SEQ ID NO: 177762 - DNA, 27 bp, Artificial sequence
  SiRNA target sequence
tagaagattgcctggcatgttcggctt

SEQ ID NO: 177763 - DNA, 27 bp, Artificial sequence
  SiRNA target sequence
agaagattgcctggcatgttcggcttg

SEQ ID NO: 177764 - DNA, 27 bp, Artificial sequence
  SiRNA target sequence
gaagattgcctggcatgttcggcttgt

SEQ ID NO: 177765 - DNA, 27 bp, Artificial sequence
  SiRNA target sequence
aagattgcctggcatgttcggcttgta

SEQ ID NO: 177766 - DNA, 27 bp, Artificial sequence
  SiRNA target sequence
agattgcctggcatgttcggcttgtat

SEQ ID NO: 177767 - DNA, 27 bp, Artificial sequence
  SiRNA target sequence
gattgcctggcatgttcggcttgtatt

SEQ ID NO: 177768 - DNA, 27 bp, Artificial sequence
  SiRNA target sequence
attgcctggcatgttcggcttgtattg

SEQ ID NO: 177769 - DNA, 27 bp, Artificial sequence
  SiRNA target sequence
ttgcctggcatgttcggcttgtattgc

SEQ ID NO: 177770 - DNA, 27 bp, Artificial sequence
  SiRNA target sequence
tgcctggcatgttcggcttgtattgct

SEQ ID NO: 177771 - DNA, 27 bp, Artificial sequence
  SiRNA target sequence
gcctggcatgttcggcttgtattgctg

SEQ ID NO: 177772 - DNA, 27 bp, Artificial sequence
  SiRNA target sequence
cctggcatgttcggcttgtattgctga

SEQ ID NO: 177773 - DNA, 27 bp, Artificial sequence
  SiRNA target sequence
ctggcatgttcggcttgtattgctgat

SEQ ID NO: 177774 - DNA, 27 bp, Artificial sequence
  SiRNA target sequence
tggcatgttcggcttgtattgctgatt

SEQ ID NO: 177775 - DNA, 27 bp, Artificial sequence
  SiRNA target sequence
ggcatgttcggcttgtattgctgattt

SEQ ID NO: 177776 - DNA, 27 bp, Artificial sequence
  SiRNA target sequence
gcatgttcggcttgtattgctgatttt

SEQ ID NO: 177777 - DNA, 27 bp, Artificial sequence
  SiRNA target sequence
catgttcggcttgtattgctgattttt

SEQ ID NO: 177778 - DNA, 27 bp, Artificial sequence
  SiRNA target sequence
atgttcggcttgtattgctgatttttc

SEQ ID NO: 177779 - DNA, 27 bp, Artificial sequence
  SiRNA target sequence
tgttcggcttgtattgctgatttttct

SEQ ID NO: 177780 - DNA, 27 bp, Artificial sequence
  SiRNA target sequence
gttcggcttgtattgctgatttttctg

SEQ ID NO: 177781 - DNA, 27 bp, Artificial sequence
  SiRNA target sequence
ttcggcttgtattgctgatttttctgt

SEQ ID NO: 177782 - DNA, 27 bp, Artificial sequence
  SiRNA target sequence
tcggcttgtattgctgatttttctgtt

SEQ ID NO: 177783 - DNA, 27 bp, Artificial sequence
  SiRNA target sequence
cggcttgtattgctgatttttctgttc

SEQ ID NO: 177784 - DNA, 27 bp, Artificial sequence
  SiRNA target sequence
ggcttgtattgctgatttttctgttcc

SEQ ID NO: 177785 - DNA, 27 bp, Artificial sequence
  SiRNA target sequence
gcttgtattgctgatttttctgttcca

SEQ ID NO: 177786 - DNA, 27 bp, Artificial sequence
  SiRNA target sequence
cttgtattgctgatttttctgttccaa

SEQ ID NO: 177787 - DNA, 27 bp, Artificial sequence
  SiRNA target sequence
ttgtattgctgatttttctgttccaaa

SEQ ID NO: 177788 - DNA, 27 bp, Artificial sequence
  SiRNA target sequence
tgtattgctgatttttctgttccaaaa

SEQ ID NO: 177789 - DNA, 27 bp, Artificial sequence
  SiRNA target sequence
gtattgctgatttttctgttccaaaaa

SEQ ID NO: 177790 - DNA, 27 bp, Artificial sequence
  SiRNA target sequence
tattgctgatttttctgttccaaaaat

SEQ ID NO: 177791 - DNA, 27 bp, Artificial sequence
  SiRNA target sequence
attgctgatttttctgttccaaaaatt

SEQ ID NO: 177792 - DNA, 27 bp, Artificial sequence
  SiRNA target sequence
ttgctgatttttctgttccaaaaattc

SEQ ID NO: 177793 - DNA, 27 bp, Artificial sequence
  SiRNA target sequence
tgctgatttttctgttccaaaaattcc

SEQ ID NO: 177794 - DNA, 27 bp, Artificial sequence
  SiRNA target sequence
gctgatttttctgttccaaaaattcct

SEQ ID NO: 177795 - DNA, 27 bp, Artificial sequence
  SiRNA target sequence
ctgatttttctgttccaaaaattccta

SEQ ID NO: 177796 - DNA, 27 bp, Artificial sequence
  SiRNA target sequence
tgatttttctgttccaaaaattcctac

SEQ ID NO: 177797 - DNA, 27 bp, Artificial sequence
  SiRNA target sequence
gatttttctgttccaaaaattcctact

SEQ ID NO: 177798 - DNA, 27 bp, Artificial sequence
  SiRNA target sequence
atttttctgttccaaaaattcctactt

SEQ ID NO: 177799 - DNA, 27 bp, Artificial sequence
  SiRNA target sequence
tttttctgttccaaaaattcctactta

SEQ ID NO: 177800 - DNA, 27 bp, Artificial sequence
  SiRNA target sequence
ttttctgttccaaaaattcctacttac

SEQ ID NO: 177801 - DNA, 27 bp, Artificial sequence
  SiRNA target sequence
tttctgttccaaaaattcctacttaca

SEQ ID NO: 177802 - DNA, 27 bp, Artificial sequence
  SiRNA target sequence
ttctgttccaaaaattcctacttacac

SEQ ID NO: 177803 - DNA, 27 bp, Artificial sequence
  SiRNA target sequence
tctgttccaaaaattcctacttacaca

SEQ ID NO: 177804 - DNA, 27 bp, Artificial sequence
  SiRNA target sequence
ctgttccaaaaattcctacttacacag

SEQ ID NO: 177805 - DNA, 27 bp, Artificial sequence
  SiRNA target sequence
tgttccaaaaattcctacttacacaga

SEQ ID NO: 177806 - DNA, 27 bp, Artificial sequence
  SiRNA target sequence
gttccaaaaattcctacttacacagaa

SEQ ID NO: 177807 - DNA, 27 bp, Artificial sequence
  SiRNA target sequence
ttccaaaaattcctacttacacagaac

SEQ ID NO: 177808 - DNA, 27 bp, Artificial sequence
  SiRNA target sequence
tccaaaaattcctacttacacagaact

SEQ ID NO: 177809 - DNA, 27 bp, Artificial sequence
  SiRNA target sequence
ccaaaaattcctacttacacagaactg

SEQ ID NO: 177810 - DNA, 27 bp, Artificial sequence
  SiRNA target sequence
caaaaattcctacttacacagaactga

SEQ ID NO: 177811 - DNA, 27 bp, Artificial sequence
  SiRNA target sequence
aaaaattcctacttacacagaactgaa

SEQ ID NO: 177812 - DNA, 27 bp, Artificial sequence
  SiRNA target sequence
aaaattcctacttacacagaactgaaa

SEQ ID NO: 177813 - DNA, 27 bp, Artificial sequence
  SiRNA target sequence
aaattcctacttacacagaactgaaag

SEQ ID NO: 177814 - DNA, 27 bp, Artificial sequence
  SiRNA target sequence
aattcctacttacacagaactgaaaga

SEQ ID NO: 177815 - DNA, 27 bp, Artificial sequence
  SiRNA target sequence
attcctacttacacagaactgaaagat

SEQ ID NO: 177816 - DNA, 27 bp, Artificial sequence
  SiRNA target sequence
ttcctacttacacagaactgaaagatg

SEQ ID NO: 177817 - DNA, 27 bp, Artificial sequence
  SiRNA target sequence
tcctacttacacagaactgaaagatgt

SEQ ID NO: 177818 - DNA, 27 bp, Artificial sequence
  SiRNA target sequence
cctacttacacagaactgaaagatgtc

SEQ ID NO: 177819 - DNA, 27 bp, Artificial sequence
  SiRNA target sequence
ctacttacacagaactgaaagatgtcc

SEQ ID NO: 177820 - DNA, 27 bp, Artificial sequence
  SiRNA target sequence
tacttacacagaactgaaagatgtccc

SEQ ID NO: 177821 - DNA, 27 bp, Artificial sequence
  SiRNA target sequence
acttacacagaactgaaagatgtccct

SEQ ID NO: 177822 - DNA, 27 bp, Artificial sequence
  SiRNA target sequence
cttacacagaactgaaagatgtccctt

SEQ ID NO: 177823 - DNA, 27 bp, Artificial sequence
  SiRNA target sequence
ttacacagaactgaaagatgtcccttt

SEQ ID NO: 177824 - DNA, 27 bp, Artificial sequence
  SiRNA target sequence
tacacagaactgaaagatgtcccttta

SEQ ID NO: 177825 - DNA, 27 bp, Artificial sequence
  SiRNA target sequence
acacagaactgaaagatgtccctttaa

SEQ ID NO: 177826 - DNA, 27 bp, Artificial sequence
  SiRNA target sequence
cacagaactgaaagatgtccctttaac

SEQ ID NO: 177827 - DNA, 27 bp, Artificial sequence
  SiRNA target sequence
acagaactgaaagatgtccctttaaca

SEQ ID NO: 177828 - DNA, 27 bp, Artificial sequence
  SiRNA target sequence
cagaactgaaagatgtccctttaacat

SEQ ID NO: 177829 - DNA, 27 bp, Artificial sequence
  SiRNA target sequence
agaactgaaagatgtccctttaacatt

SEQ ID NO: 177830 - DNA, 27 bp, Artificial sequence
  SiRNA target sequence
gaactgaaagatgtccctttaacattt

SEQ ID NO: 177831 - DNA, 27 bp, Artificial sequence
  SiRNA target sequence
aactgaaagatgtccctttaacatttt

SEQ ID NO: 177832 - DNA, 27 bp, Artificial sequence
  SiRNA target sequence
actgaaagatgtccctttaacattttt

SEQ ID NO: 177833 - DNA, 27 bp, Artificial sequence
  SiRNA target sequence
ctgaaagatgtccctttaacattttta

SEQ ID NO: 177834 - DNA, 27 bp, Artificial sequence
  SiRNA target sequence
tgaaagatgtccctttaacatttttat

SEQ ID NO: 177835 - DNA, 27 bp, Artificial sequence
  SiRNA target sequence
gaaagatgtccctttaacatttttatt

SEQ ID NO: 177836 - DNA, 27 bp, Artificial sequence
  SiRNA target sequence
aaagatgtccctttaacatttttatta

SEQ ID NO: 177837 - DNA, 27 bp, Artificial sequence
  SiRNA target sequence
aagatgtccctttaacatttttattat

SEQ ID NO: 177838 - DNA, 27 bp, Artificial sequence
  SiRNA target sequence
agatgtccctttaacatttttattatc

SEQ ID NO: 177839 - DNA, 27 bp, Artificial sequence
  SiRNA target sequence
gatgtccctttaacatttttattatca

SEQ ID NO: 177840 - DNA, 27 bp, Artificial sequence
  SiRNA target sequence
atgtccctttaacatttttattatcac

SEQ ID NO: 177841 - DNA, 27 bp, Artificial sequence
  SiRNA target sequence
tgtccctttaacatttttattatcacc

SEQ ID NO: 177842 - DNA, 27 bp, Artificial sequence
  SiRNA target sequence
gtccctttaacatttttattatcacca

SEQ ID NO: 177843 - DNA, 27 bp, Artificial sequence
  SiRNA target sequence
tccctttaacatttttattatcaccac

SEQ ID NO: 177844 - DNA, 27 bp, Artificial sequence
  SiRNA target sequence
ccctttaacatttttattatcaccaca

SEQ ID NO: 177845 - DNA, 27 bp, Artificial sequence
  SiRNA target sequence
cctttaacatttttattatcaccacat

SEQ ID NO: 177846 - DNA, 27 bp, Artificial sequence
  SiRNA target sequence
ctttaacatttttattatcaccacatt

SEQ ID NO: 177847 - DNA, 27 bp, Artificial sequence
  SiRNA target sequence
tttaacatttttattatcaccacattc

SEQ ID NO: 177848 - DNA, 27 bp, Artificial sequence
  SiRNA target sequence
ttaacatttttattatcaccacattcg

SEQ ID NO: 177849 - DNA, 27 bp, Artificial sequence
  SiRNA target sequence
taacatttttattatcaccacattcga

SEQ ID NO: 177850 - DNA, 27 bp, Artificial sequence
  SiRNA target sequence
aacatttttattatcaccacattcgaa

SEQ ID NO: 177851 - DNA, 27 bp, Artificial sequence
  SiRNA target sequence
acatttttattatcaccacattcgaaa

SEQ ID NO: 177852 - DNA, 27 bp, Artificial sequence
  SiRNA target sequence
catttttattatcaccacattcgaaaa

SEQ ID NO: 177853 - DNA, 27 bp, Artificial sequence
  SiRNA target sequence
atttttattatcaccacattcgaaaat

SEQ ID NO: 177854 - DNA, 27 bp, Artificial sequence
  SiRNA target sequence
tttttattatcaccacattcgaaaatg

SEQ ID NO: 177855 - DNA, 27 bp, Artificial sequence
  SiRNA target sequence
ttttattatcaccacattcgaaaatga

SEQ ID NO: 177856 - DNA, 27 bp, Artificial sequence
  SiRNA target sequence
tttattatcaccacattcgaaaatgaa

SEQ ID NO: 177857 - DNA, 27 bp, Artificial sequence
  SiRNA target sequence
ttattatcaccacattcgaaaatgaat

SEQ ID NO: 177858 - DNA, 27 bp, Artificial sequence
  SiRNA target sequence
tattatcaccacattcgaaaatgaata

SEQ ID NO: 177859 - DNA, 27 bp, Artificial sequence
  SiRNA target sequence
attatcaccacattcgaaaatgaatat

SEQ ID NO: 177860 - DNA, 27 bp, Artificial sequence
  SiRNA target sequence
ttatcaccacattcgaaaatgaatatg

SEQ ID NO: 177861 - DNA, 27 bp, Artificial sequence
  SiRNA target sequence
tatcaccacattcgaaaatgaatatgt

SEQ ID NO: 177862 - DNA, 27 bp, Artificial sequence
  SiRNA target sequence
atcaccacattcgaaaatgaatatgta

SEQ ID NO: 177863 - DNA, 27 bp, Artificial sequence
  SiRNA target sequence
tcaccacattcgaaaatgaatatgtat

SEQ ID NO: 177864 - DNA, 27 bp, Artificial sequence
  SiRNA target sequence
caccacattcgaaaatgaatatgtatg

SEQ ID NO: 177865 - DNA, 27 bp, Artificial sequence
  SiRNA target sequence
accacattcgaaaatgaatatgtatgc

SEQ ID NO: 177866 - DNA, 27 bp, Artificial sequence
  SiRNA target sequence
ccacattcgaaaatgaatatgtatgca

SEQ ID NO: 177867 - DNA, 27 bp, Artificial sequence
  SiRNA target sequence
cacattcgaaaatgaatatgtatgcac

SEQ ID NO: 177868 - DNA, 27 bp, Artificial sequence
  SiRNA target sequence
acattcgaaaatgaatatgtatgcaca

SEQ ID NO: 177869 - DNA, 27 bp, Artificial sequence
  SiRNA target sequence
cattcgaaaatgaatatgtatgcacac

SEQ ID NO: 177870 - DNA, 27 bp, Artificial sequence
  SiRNA target sequence
attcgaaaatgaatatgtatgcacact

SEQ ID NO: 177871 - DNA, 27 bp, Artificial sequence
  SiRNA target sequence
ttcgaaaatgaatatgtatgcacacta

SEQ ID NO: 177872 - DNA, 27 bp, Artificial sequence
  SiRNA target sequence
tcgaaaatgaatatgtatgcacactat

SEQ ID NO: 177873 - DNA, 27 bp, Artificial sequence
  SiRNA target sequence
cgaaaatgaatatgtatgcacactata

SEQ ID NO: 177874 - DNA, 27 bp, Artificial sequence
  SiRNA target sequence
gaaaatgaatatgtatgcacactataa

SEQ ID NO: 177875 - DNA, 27 bp, Artificial sequence
  SiRNA target sequence
aaaatgaatatgtatgcacactataac

SEQ ID NO: 177876 - DNA, 27 bp, Artificial sequence
  SiRNA target sequence
aaatgaatatgtatgcacactataaca

SEQ ID NO: 177877 - DNA, 27 bp, Artificial sequence
  SiRNA target sequence
aatgaatatgtatgcacactataacaa

SEQ ID NO: 177878 - DNA, 27 bp, Artificial sequence
  SiRNA target sequence
atgaatatgtatgcacactataacaat

SEQ ID NO: 177879 - DNA, 27 bp, Artificial sequence
  SiRNA target sequence
tgaatatgtatgcacactataacaatc

SEQ ID NO: 177880 - DNA, 27 bp, Artificial sequence
  SiRNA target sequence
gaatatgtatgcacactataacaatca

SEQ ID NO: 177881 - DNA, 27 bp, Artificial sequence
  SiRNA target sequence
aatatgtatgcacactataacaatcat

SEQ ID NO: 177882 - DNA, 27 bp, Artificial sequence
  SiRNA target sequence
atatgtatgcacactataacaatcata

SEQ ID NO: 177883 - DNA, 27 bp, Artificial sequence
  SiRNA target sequence
tatgtatgcacactataacaatcatat

SEQ ID NO: 177884 - DNA, 27 bp, Artificial sequence
  SiRNA target sequence
atgtatgcacactataacaatcatata

SEQ ID NO: 177885 - DNA, 27 bp, Artificial sequence
  SiRNA target sequence
tgtatgcacactataacaatcatataa

SEQ ID NO: 177886 - DNA, 27 bp, Artificial sequence
  SiRNA target sequence
gtatgcacactataacaatcatataat

SEQ ID NO: 177887 - DNA, 27 bp, Artificial sequence
  SiRNA target sequence
tatgcacactataacaatcatataatg

SEQ ID NO: 177888 - DNA, 27 bp, Artificial sequence
  SiRNA target sequence
atgcacactataacaatcatataatgt

SEQ ID NO: 177889 - DNA, 27 bp, Artificial sequence
  SiRNA target sequence
tgcacactataacaatcatataatgtc

SEQ ID NO: 177890 - DNA, 27 bp, Artificial sequence
  SiRNA target sequence
gcacactataacaatcatataatgtcc

SEQ ID NO: 177891 - DNA, 27 bp, Artificial sequence
  SiRNA target sequence
cacactataacaatcatataatgtcct

SEQ ID NO: 177892 - DNA, 27 bp, Artificial sequence
  SiRNA target sequence
acactataacaatcatataatgtcctt

SEQ ID NO: 177893 - DNA, 27 bp, Artificial sequence
  SiRNA target sequence
cactataacaatcatataatgtccttt

SEQ ID NO: 177894 - DNA, 27 bp, Artificial sequence
  SiRNA target sequence
actataacaatcatataatgtccttta

SEQ ID NO: 177895 - DNA, 27 bp, Artificial sequence
  SiRNA target sequence
ctataacaatcatataatgtcctttag

SEQ ID NO: 177896 - DNA, 27 bp, Artificial sequence
  SiRNA target sequence
tataacaatcatataatgtcctttagt

SEQ ID NO: 177897 - DNA, 27 bp, Artificial sequence
  SiRNA target sequence
ataacaatcatataatgtcctttagtg

SEQ ID NO: 177898 - DNA, 27 bp, Artificial sequence
  SiRNA target sequence
taacaatcatataatgtcctttagtga

SEQ ID NO: 177899 - DNA, 27 bp, Artificial sequence
  SiRNA target sequence
aacaatcatataatgtcctttagtgat

SEQ ID NO: 177900 - DNA, 27 bp, Artificial sequence
  SiRNA target sequence
acaatcatataatgtcctttagtgatt

SEQ ID NO: 177901 - DNA, 27 bp, Artificial sequence
  SiRNA target sequence
caatcatataatgtcctttagtgattt

SEQ ID NO: 177902 - DNA, 27 bp, Artificial sequence
  SiRNA target sequence
aatcatataatgtcctttagtgatttt

SEQ ID NO: 177903 - DNA, 27 bp, Artificial sequence
  SiRNA target sequence
atcatataatgtcctttagtgattttg

SEQ ID NO: 177904 - DNA, 27 bp, Artificial sequence
  SiRNA target sequence
tcatataatgtcctttagtgattttga

SEQ ID NO: 177905 - DNA, 27 bp, Artificial sequence
  SiRNA target sequence
catataatgtcctttagtgattttgaa

SEQ ID NO: 177906 - DNA, 27 bp, Artificial sequence
  SiRNA target sequence
atataatgtcctttagtgattttgaat

SEQ ID NO: 177907 - DNA, 27 bp, Artificial sequence
  SiRNA target sequence
tataatgtcctttagtgattttgaata

SEQ ID NO: 177908 - DNA, 27 bp, Artificial sequence
  SiRNA target sequence
ataatgtcctttagtgattttgaatat

SEQ ID NO: 177909 - DNA, 27 bp, Artificial sequence
  SiRNA target sequence
taatgtcctttagtgattttgaatatc

SEQ ID NO: 177910 - DNA, 27 bp, Artificial sequence
  SiRNA target sequence
aatgtcctttagtgattttgaatatca

SEQ ID NO: 177911 - DNA, 27 bp, Artificial sequence
  SiRNA target sequence
atgtcctttagtgattttgaatatcac

SEQ ID NO: 177912 - DNA, 27 bp, Artificial sequence
  SiRNA target sequence
tgtcctttagtgattttgaatatcact

SEQ ID NO: 177913 - DNA, 27 bp, Artificial sequence
  SiRNA target sequence
gtcctttagtgattttgaatatcactt

SEQ ID NO: 177914 - DNA, 27 bp, Artificial sequence
  SiRNA target sequence
tcctttagtgattttgaatatcactta

SEQ ID NO: 177915 - DNA, 27 bp, Artificial sequence
  SiRNA target sequence
cctttagtgattttgaatatcacttaa

SEQ ID NO: 177916 - DNA, 27 bp, Artificial sequence
  SiRNA target sequence
ctttagtgattttgaatatcacttaat

SEQ ID NO: 177917 - DNA, 27 bp, Artificial sequence
  SiRNA target sequence
tttagtgattttgaatatcacttaatt

SEQ ID NO: 177918 - DNA, 27 bp, Artificial sequence
  SiRNA target sequence
ttagtgattttgaatatcacttaattt

SEQ ID NO: 177919 - DNA, 27 bp, Artificial sequence
  SiRNA target sequence
tagtgattttgaatatcacttaatttc

SEQ ID NO: 177920 - DNA, 27 bp, Artificial sequence
  SiRNA target sequence
agtgattttgaatatcacttaatttca

SEQ ID NO: 177921 - DNA, 27 bp, Artificial sequence
  SiRNA target sequence
gtgattttgaatatcacttaatttcat

SEQ ID NO: 177922 - DNA, 27 bp, Artificial sequence
  SiRNA target sequence
tgattttgaatatcacttaatttcatt

SEQ ID NO: 177923 - DNA, 27 bp, Artificial sequence
  SiRNA target sequence
gattttgaatatcacttaatttcattt

SEQ ID NO: 177924 - DNA, 27 bp, Artificial sequence
  SiRNA target sequence
attttgaatatcacttaatttcattta

SEQ ID NO: 177925 - DNA, 27 bp, Artificial sequence
  SiRNA target sequence
ttttgaatatcacttaatttcatttat

SEQ ID NO: 177926 - DNA, 27 bp, Artificial sequence
  SiRNA target sequence
tttgaatatcacttaatttcatttata

SEQ ID NO: 177927 - DNA, 27 bp, Artificial sequence
  SiRNA target sequence
ttgaatatcacttaatttcatttataa

SEQ ID NO: 177928 - DNA, 27 bp, Artificial sequence
  SiRNA target sequence
tgaatatcacttaatttcatttataaa

SEQ ID NO: 177929 - DNA, 27 bp, Artificial sequence
  SiRNA target sequence
gaatatcacttaatttcatttataaaa

SEQ ID NO: 177930 - DNA, 27 bp, Artificial sequence
  SiRNA target sequence
aatatcacttaatttcatttataaaac

SEQ ID NO: 177931 - DNA, 27 bp, Artificial sequence
  SiRNA target sequence
atatcacttaatttcatttataaaact

SEQ ID NO: 177932 - DNA, 27 bp, Artificial sequence
  SiRNA target sequence
tatcacttaatttcatttataaaacta

SEQ ID NO: 177933 - DNA, 27 bp, Artificial sequence
  SiRNA target sequence
atcacttaatttcatttataaaactaa

SEQ ID NO: 177934 - DNA, 27 bp, Artificial sequence
  SiRNA target sequence
tcacttaatttcatttataaaactaaa

SEQ ID NO: 177935 - DNA, 27 bp, Artificial sequence
  SiRNA target sequence
cacttaatttcatttataaaactaaaa

SEQ ID NO: 177936 - DNA, 27 bp, Artificial sequence
  SiRNA target sequence
acttaatttcatttataaaactaaaat

SEQ ID NO: 177937 - DNA, 27 bp, Artificial sequence
  SiRNA target sequence
cttaatttcatttataaaactaaaatt

SEQ ID NO: 177938 - DNA, 27 bp, Artificial sequence
  SiRNA target sequence
ttaatttcatttataaaactaaaattt

SEQ ID NO: 177939 - DNA, 27 bp, Artificial sequence
  SiRNA target sequence
taatttcatttataaaactaaaattta

SEQ ID NO: 177940 - DNA, 27 bp, Artificial sequence
  SiRNA target sequence
aatttcatttataaaactaaaatttaa

SEQ ID NO: 177941 - DNA, 27 bp, Artificial sequence
  SiRNA target sequence
atttcatttataaaactaaaatttaat

SEQ ID NO: 177942 - DNA, 27 bp, Artificial sequence
  SiRNA target sequence
tttcatttataaaactaaaatttaatg

SEQ ID NO: 177943 - DNA, 27 bp, Artificial sequence
  SiRNA target sequence
ttcatttataaaactaaaatttaatgt

SEQ ID NO: 177944 - DNA, 27 bp, Artificial sequence
  SiRNA target sequence
tcatttataaaactaaaatttaatgta

SEQ ID NO: 177945 - DNA, 27 bp, Artificial sequence
  SiRNA target sequence
catttataaaactaaaatttaatgtaa

SEQ ID NO: 177946 - DNA, 27 bp, Artificial sequence
  SiRNA target sequence
atttataaaactaaaatttaatgtaat

SEQ ID NO: 177947 - DNA, 27 bp, Artificial sequence
  SiRNA target sequence
tttataaaactaaaatttaatgtaata

SEQ ID NO: 177948 - DNA, 27 bp, Artificial sequence
  SiRNA target sequence
ttataaaactaaaatttaatgtaataa

SEQ ID NO: 177949 - DNA, 27 bp, Artificial sequence
  SiRNA target sequence
tataaaactaaaatttaatgtaataaa

SEQ ID NO: 177950 - DNA, 27 bp, Artificial sequence
  SiRNA target sequence
ataaaactaaaatttaatgtaataaaa

SEQ ID NO: 177951 - DNA, 27 bp, Artificial sequence
  SiRNA target sequence
taaaactaaaatttaatgtaataaaag

SEQ ID NO: 177952 - DNA, 27 bp, Artificial sequence
  SiRNA target sequence
aaaactaaaatttaatgtaataaaagt

SEQ ID NO: 177953 - DNA, 27 bp, Artificial sequence
  SiRNA target sequence
aaactaaaatttaatgtaataaaagta

SEQ ID NO: 177954 - DNA, 27 bp, Artificial sequence
  SiRNA target sequence
aactaaaatttaatgtaataaaagtat

SEQ ID NO: 177955 - DNA, 27 bp, Artificial sequence
  SiRNA target sequence
actaaaatttaatgtaataaaagtata

SEQ ID NO: 177956 - DNA, 27 bp, Artificial sequence
  SiRNA target sequence
ctaaaatttaatgtaataaaagtatat

SEQ ID NO: 177957 - DNA, 27 bp, Artificial sequence
  SiRNA target sequence
taaaatttaatgtaataaaagtatatg

SEQ ID NO: 177958 - DNA, 27 bp, Artificial sequence
  SiRNA target sequence
aaaatttaatgtaataaaagtatatga

SEQ ID NO: 177959 - DNA, 27 bp, Artificial sequence
  SiRNA target sequence
aaatttaatgtaataaaagtatatgat

SEQ ID NO: 177960 - DNA, 27 bp, Artificial sequence
  SiRNA target sequence
aatttaatgtaataaaagtatatgata

SEQ ID NO: 177961 - DNA, 27 bp, Artificial sequence
  SiRNA target sequence
atttaatgtaataaaagtatatgatac

SEQ ID NO: 177962 - DNA, 27 bp, Artificial sequence
  SiRNA target sequence
tttaatgtaataaaagtatatgataca

SEQ ID NO: 177963 - DNA, 27 bp, Artificial sequence
  SiRNA target sequence
ttaatgtaataaaagtatatgatacat

SEQ ID NO: 177964 - DNA, 27 bp, Artificial sequence
  SiRNA target sequence
taatgtaataaaagtatatgatacatc

SEQ ID NO: 177965 - DNA, 27 bp, Artificial sequence
  SiRNA target sequence
aatgtaataaaagtatatgatacatct

SEQ ID NO: 177966 - DNA, 27 bp, Artificial sequence
  SiRNA target sequence
atgtaataaaagtatatgatacatctt

SEQ ID NO: 177967 - DNA, 27 bp, Artificial sequence
  SiRNA target sequence
tgtaataaaagtatatgatacatctta

SEQ ID NO: 177968 - DNA, 27 bp, Artificial sequence
  SiRNA target sequence
gtaataaaagtatatgatacatcttat

SEQ ID NO: 177969 - DNA, 27 bp, Artificial sequence
  SiRNA target sequence
taataaaagtatatgatacatcttatg

SEQ ID NO: 177970 - DNA, 27 bp, Artificial sequence
  SiRNA target sequence
aataaaagtatatgatacatcttatgt

SEQ ID NO: 177971 - DNA, 27 bp, Artificial sequence
  SiRNA target sequence
ataaaagtatatgatacatcttatgtc

SEQ ID NO: 177972 - DNA, 27 bp, Artificial sequence
  SiRNA target sequence
taaaagtatatgatacatcttatgtca

SEQ ID NO: 177973 - DNA, 27 bp, Artificial sequence
  SiRNA target sequence
aaaagtatatgatacatcttatgtcaa

SEQ ID NO: 177974 - DNA, 27 bp, Artificial sequence
  SiRNA target sequence
aaagtatatgatacatcttatgtcaaa

SEQ ID NO: 177975 - DNA, 27 bp, Artificial sequence
  SiRNA target sequence
aagtatatgatacatcttatgtcaaaa

SEQ ID NO: 177976 - DNA, 27 bp, Artificial sequence
  SiRNA target sequence
agtatatgatacatcttatgtcaaaaa

SEQ ID NO: 177977 - DNA, 27 bp, Artificial sequence
  SiRNA target sequence
gtatatgatacatcttatgtcaaaaat

SEQ ID NO: 177978 - DNA, 27 bp, Artificial sequence
  SiRNA target sequence
tatatgatacatcttatgtcaaaaata

SEQ ID NO: 177979 - DNA, 27 bp, Artificial sequence
  SiRNA target sequence
atatgatacatcttatgtcaaaaatat

SEQ ID NO: 177980 - DNA, 27 bp, Artificial sequence
  SiRNA target sequence
tatgatacatcttatgtcaaaaatatt

SEQ ID NO: 177981 - DNA, 27 bp, Artificial sequence
  SiRNA target sequence
atgatacatcttatgtcaaaaatattc

SEQ ID NO: 177982 - DNA, 27 bp, Artificial sequence
  SiRNA target sequence
tgatacatcttatgtcaaaaatattct

SEQ ID NO: 177983 - DNA, 27 bp, Artificial sequence
  SiRNA target sequence
gatacatcttatgtcaaaaatattctg

SEQ ID NO: 177984 - DNA, 27 bp, Artificial sequence
  SiRNA target sequence
atacatcttatgtcaaaaatattctgt

SEQ ID NO: 177985 - DNA, 27 bp, Artificial sequence
  SiRNA target sequence
tacatcttatgtcaaaaatattctgta

SEQ ID NO: 177986 - DNA, 27 bp, Artificial sequence
  SiRNA target sequence
acatcttatgtcaaaaatattctgtat

SEQ ID NO: 177987 - DNA, 27 bp, Artificial sequence
  SiRNA target sequence
catcttatgtcaaaaatattctgtatg

SEQ ID NO: 177988 - DNA, 27 bp, Artificial sequence
  SiRNA target sequence
atcttatgtcaaaaatattctgtatga

SEQ ID NO: 177989 - DNA, 27 bp, Artificial sequence
  SiRNA target sequence
tcttatgtcaaaaatattctgtatgat

SEQ ID NO: 177990 - DNA, 27 bp, Artificial sequence
  SiRNA target sequence
cttatgtcaaaaatattctgtatgata

SEQ ID NO: 177991 - DNA, 27 bp, Artificial sequence
  SiRNA target sequence
ttatgtcaaaaatattctgtatgatag

SEQ ID NO: 177992 - DNA, 27 bp, Artificial sequence
  SiRNA target sequence
tatgtcaaaaatattctgtatgatagt

SEQ ID NO: 177993 - DNA, 27 bp, Artificial sequence
  SiRNA target sequence
atgtcaaaaatattctgtatgatagtg

SEQ ID NO: 177994 - DNA, 27 bp, Artificial sequence
  SiRNA target sequence
tgtcaaaaatattctgtatgatagtgt

SEQ ID NO: 177995 - DNA, 27 bp, Artificial sequence
  SiRNA target sequence
gtcaaaaatattctgtatgatagtgtt

SEQ ID NO: 177996 - DNA, 27 bp, Artificial sequence
  SiRNA target sequence
tcaaaaatattctgtatgatagtgttt

SEQ ID NO: 177997 - DNA, 27 bp, Artificial sequence
  SiRNA target sequence
caaaaatattctgtatgatagtgttta

SEQ ID NO: 177998 - DNA, 27 bp, Artificial sequence
  SiRNA target sequence
aaaaatattctgtatgatagtgtttat

SEQ ID NO: 177999 - DNA, 27 bp, Artificial sequence
  SiRNA target sequence
aaaatattctgtatgatagtgtttatg

SEQ ID NO: 178000 - DNA, 27 bp, Artificial sequence
  SiRNA target sequence
aaatattctgtatgatagtgtttatga

SEQ ID NO: 178001 - DNA, 27 bp, Artificial sequence
  SiRNA target sequence
aatattctgtatgatagtgtttatgag

SEQ ID NO: 178002 - DNA, 27 bp, Artificial sequence
  SiRNA target sequence
atattctgtatgatagtgtttatgagg

SEQ ID NO: 178003 - DNA, 27 bp, Artificial sequence
  SiRNA target sequence
tattctgtatgatagtgtttatgagga

SEQ ID NO: 178004 - DNA, 27 bp, Artificial sequence
  SiRNA target sequence
attctgtatgatagtgtttatgaggaa

SEQ ID NO: 178005 - DNA, 27 bp, Artificial sequence
  SiRNA target sequence
ttctgtatgatagtgtttatgaggaaa

SEQ ID NO: 178006 - DNA, 27 bp, Artificial sequence
  SiRNA target sequence
tctgtatgatagtgtttatgaggaaag

SEQ ID NO: 178007 - DNA, 27 bp, Artificial sequence
  SiRNA target sequence
ctgtatgatagtgtttatgaggaaagc

SEQ ID NO: 178008 - DNA, 27 bp, Artificial sequence
  SiRNA target sequence
tgtatgatagtgtttatgaggaaagca

SEQ ID NO: 178009 - DNA, 27 bp, Artificial sequence
  SiRNA target sequence
gtatgatagtgtttatgaggaaagcac

SEQ ID NO: 178010 - DNA, 27 bp, Artificial sequence
  SiRNA target sequence
tatgatagtgtttatgaggaaagcacg

SEQ ID NO: 178011 - DNA, 27 bp, Artificial sequence
  SiRNA target sequence
atgatagtgtttatgaggaaagcacga

SEQ ID NO: 178012 - DNA, 27 bp, Artificial sequence
  SiRNA target sequence
tgatagtgtttatgaggaaagcacgag

SEQ ID NO: 178013 - DNA, 27 bp, Artificial sequence
  SiRNA target sequence
gatagtgtttatgaggaaagcacgaga

SEQ ID NO: 178014 - DNA, 27 bp, Artificial sequence
  SiRNA target sequence
atagtgtttatgaggaaagcacgagag

SEQ ID NO: 178015 - DNA, 27 bp, Artificial sequence
  SiRNA target sequence
tagtgtttatgaggaaagcacgagaga

SEQ ID NO: 178016 - DNA, 27 bp, Artificial sequence
  SiRNA target sequence
agtgtttatgaggaaagcacgagagac

SEQ ID NO: 178017 - DNA, 27 bp, Artificial sequence
  SiRNA target sequence
gtgtttatgaggaaagcacgagagaca

SEQ ID NO: 178018 - DNA, 27 bp, Artificial sequence
  SiRNA target sequence
tgtttatgaggaaagcacgagagacaa

SEQ ID NO: 178019 - DNA, 27 bp, Artificial sequence
  SiRNA target sequence
gtttatgaggaaagcacgagagacaaa

SEQ ID NO: 178020 - DNA, 27 bp, Artificial sequence
  SiRNA target sequence
tttatgaggaaagcacgagagacaaaa

SEQ ID NO: 178021 - DNA, 27 bp, Artificial sequence
  SiRNA target sequence
ttatgaggaaagcacgagagacaaaat

SEQ ID NO: 178022 - DNA, 27 bp, Artificial sequence
  SiRNA target sequence
tatgaggaaagcacgagagacaaaata

SEQ ID NO: 178023 - DNA, 27 bp, Artificial sequence
  SiRNA target sequence
atgaggaaagcacgagagacaaaataa

SEQ ID NO: 178024 - DNA, 27 bp, Artificial sequence
  SiRNA target sequence
tgaggaaagcacgagagacaaaataat

SEQ ID NO: 178025 - DNA, 27 bp, Artificial sequence
  SiRNA target sequence
gaggaaagcacgagagacaaaataata

SEQ ID NO: 178026 - DNA, 27 bp, Artificial sequence
  SiRNA target sequence
aggaaagcacgagagacaaaataataa

SEQ ID NO: 178027 - DNA, 27 bp, Artificial sequence
  SiRNA target sequence
ggaaagcacgagagacaaaataataat

SEQ ID NO: 178028 - DNA, 27 bp, Artificial sequence
  SiRNA target sequence
gaaagcacgagagacaaaataataata

SEQ ID NO: 178029 - DNA, 27 bp, Artificial sequence
  SiRNA target sequence
aaagcacgagagacaaaataataataa

SEQ ID NO: 178030 - DNA, 27 bp, Artificial sequence
  SiRNA target sequence
aagcacgagagacaaaataataataag

SEQ ID NO: 178031 - DNA, 27 bp, Artificial sequence
  SiRNA target sequence
agcacgagagacaaaataataataagt

SEQ ID NO: 178032 - DNA, 27 bp, Artificial sequence
  SiRNA target sequence
gcacgagagacaaaataataataagtg

SEQ ID NO: 178033 - DNA, 27 bp, Artificial sequence
  SiRNA target sequence
cacgagagacaaaataataataagtga

SEQ ID NO: 178034 - DNA, 27 bp, Artificial sequence
  SiRNA target sequence
acgagagacaaaataataataagtgac

SEQ ID NO: 178035 - DNA, 27 bp, Artificial sequence
  SiRNA target sequence
cgagagacaaaataataataagtgact

SEQ ID NO: 178036 - DNA, 27 bp, Artificial sequence
  SiRNA target sequence
gagagacaaaataataataagtgactg

SEQ ID NO: 178037 - DNA, 27 bp, Artificial sequence
  SiRNA target sequence
agagacaaaataataataagtgactgt

SEQ ID NO: 178038 - DNA, 27 bp, Artificial sequence
  SiRNA target sequence
gagacaaaataataataagtgactgtc

SEQ ID NO: 178039 - DNA, 27 bp, Artificial sequence
  SiRNA target sequence
agacaaaataataataagtgactgtcc

SEQ ID NO: 178040 - DNA, 27 bp, Artificial sequence
  SiRNA target sequence
gacaaaataataataagtgactgtcct

SEQ ID NO: 178041 - DNA, 27 bp, Artificial sequence
  SiRNA target sequence
acaaaataataataagtgactgtcctg

SEQ ID NO: 178042 - DNA, 27 bp, Artificial sequence
  SiRNA target sequence
caaaataataataagtgactgtcctgg

SEQ ID NO: 178043 - DNA, 27 bp, Artificial sequence
  SiRNA target sequence
aaaataataataagtgactgtcctggg

SEQ ID NO: 178044 - DNA, 27 bp, Artificial sequence
  SiRNA target sequence
aaataataataagtgactgtcctggga

SEQ ID NO: 178045 - DNA, 27 bp, Artificial sequence
  SiRNA target sequence
aataataataagtgactgtcctgggac

SEQ ID NO: 178046 - DNA, 27 bp, Artificial sequence
  SiRNA target sequence
ataataataagtgactgtcctgggact

SEQ ID NO: 178047 - DNA, 27 bp, Artificial sequence
  SiRNA target sequence
taataataagtgactgtcctgggactg

SEQ ID NO: 178048 - DNA, 27 bp, Artificial sequence
  SiRNA target sequence
aataataagtgactgtcctgggactgt

SEQ ID NO: 178049 - DNA, 27 bp, Artificial sequence
  SiRNA target sequence
ataataagtgactgtcctgggactgtt

SEQ ID NO: 178050 - DNA, 27 bp, Artificial sequence
  SiRNA target sequence
taataagtgactgtcctgggactgttt

SEQ ID NO: 178051 - DNA, 27 bp, Artificial sequence
  SiRNA target sequence
aataagtgactgtcctgggactgtttc

SEQ ID NO: 178052 - DNA, 27 bp, Artificial sequence
  SiRNA target sequence
ataagtgactgtcctgggactgtttca

SEQ ID NO: 178053 - DNA, 27 bp, Artificial sequence
  SiRNA target sequence
taagtgactgtcctgggactgtttcat

SEQ ID NO: 178054 - DNA, 27 bp, Artificial sequence
  SiRNA target sequence
aagtgactgtcctgggactgtttcata

SEQ ID NO: 178055 - DNA, 27 bp, Artificial sequence
  SiRNA target sequence
agtgactgtcctgggactgtttcatat

SEQ ID NO: 178056 - DNA, 27 bp, Artificial sequence
  SiRNA target sequence
gtgactgtcctgggactgtttcatata

SEQ ID NO: 178057 - DNA, 27 bp, Artificial sequence
  SiRNA target sequence
tgactgtcctgggactgtttcatatat

SEQ ID NO: 178058 - DNA, 27 bp, Artificial sequence
  SiRNA target sequence
gactgtcctgggactgtttcatatatt

SEQ ID NO: 178059 - DNA, 27 bp, Artificial sequence
  SiRNA target sequence
actgtcctgggactgtttcatatattg

SEQ ID NO: 178060 - DNA, 27 bp, Artificial sequence
  SiRNA target sequence
ctgtcctgggactgtttcatatattga

SEQ ID NO: 178061 - DNA, 27 bp, Artificial sequence
  SiRNA target sequence
tgtcctgggactgtttcatatattgaa

SEQ ID NO: 178062 - DNA, 27 bp, Artificial sequence
  SiRNA target sequence
gtcctgggactgtttcatatattgaaa

SEQ ID NO: 178063 - DNA, 27 bp, Artificial sequence
  SiRNA target sequence
tcctgggactgtttcatatattgaaag

SEQ ID NO: 178064 - DNA, 27 bp, Artificial sequence
  SiRNA target sequence
cctgggactgtttcatatattgaaagg

SEQ ID NO: 178065 - DNA, 27 bp, Artificial sequence
  SiRNA target sequence
ctgggactgtttcatatattgaaaggc

SEQ ID NO: 178066 - DNA, 27 bp, Artificial sequence
  SiRNA target sequence
tgggactgtttcatatattgaaaggca

SEQ ID NO: 178067 - DNA, 27 bp, Artificial sequence
  SiRNA target sequence
gggactgtttcatatattgaaaggcaa

SEQ ID NO: 178068 - DNA, 27 bp, Artificial sequence
  SiRNA target sequence
ggactgtttcatatattgaaaggcaag

SEQ ID NO: 178069 - DNA, 27 bp, Artificial sequence
  SiRNA target sequence
gactgtttcatatattgaaaggcaagc

SEQ ID NO: 178070 - DNA, 27 bp, Artificial sequence
  SiRNA target sequence
actgtttcatatattgaaaggcaagca

SEQ ID NO: 178071 - DNA, 27 bp, Artificial sequence
  SiRNA target sequence
ctgtttcatatattgaaaggcaagcac

SEQ ID NO: 178072 - DNA, 27 bp, Artificial sequence
  SiRNA target sequence
tgtttcatatattgaaaggcaagcaca

SEQ ID NO: 178073 - DNA, 27 bp, Artificial sequence
  SiRNA target sequence
gtttcatatattgaaaggcaagcacac

SEQ ID NO: 178074 - DNA, 27 bp, Artificial sequence
  SiRNA target sequence
tttcatatattgaaaggcaagcacacc

SEQ ID NO: 178075 - DNA, 27 bp, Artificial sequence
  SiRNA target sequence
ttcatatattgaaaggcaagcacacca

SEQ ID NO: 178076 - DNA, 27 bp, Artificial sequence
  SiRNA target sequence
tcatatattgaaaggcaagcacaccat

SEQ ID NO: 178077 - DNA, 27 bp, Artificial sequence
  SiRNA target sequence
catatattgaaaggcaagcacaccatt

SEQ ID NO: 178078 - DNA, 27 bp, Artificial sequence
  SiRNA target sequence
atatattgaaaggcaagcacaccattt

SEQ ID NO: 178079 - DNA, 27 bp, Artificial sequence
  SiRNA target sequence
tatattgaaaggcaagcacaccattta

SEQ ID NO: 178080 - DNA, 27 bp, Artificial sequence
  SiRNA target sequence
atattgaaaggcaagcacaccatttaa

SEQ ID NO: 178081 - DNA, 27 bp, Artificial sequence
  SiRNA target sequence
tattgaaaggcaagcacaccatttaat

SEQ ID NO: 178082 - DNA, 27 bp, Artificial sequence
  SiRNA target sequence
attgaaaggcaagcacaccatttaatt

SEQ ID NO: 178083 - DNA, 27 bp, Artificial sequence
  SiRNA target sequence
ttgaaaggcaagcacaccatttaattg

SEQ ID NO: 178084 - DNA, 27 bp, Artificial sequence
  SiRNA target sequence
tgaaaggcaagcacaccatttaattga

SEQ ID NO: 178085 - DNA, 27 bp, Artificial sequence
  SiRNA target sequence
gaaaggcaagcacaccatttaattgaa

SEQ ID NO: 178086 - DNA, 27 bp, Artificial sequence
  SiRNA target sequence
aaaggcaagcacaccatttaattgaat

SEQ ID NO: 178087 - DNA, 27 bp, Artificial sequence
  SiRNA target sequence
aaggcaagcacaccatttaattgaata

SEQ ID NO: 178088 - DNA, 27 bp, Artificial sequence
  SiRNA target sequence
aggcaagcacaccatttaattgaatat

SEQ ID NO: 178089 - DNA, 27 bp, Artificial sequence
  SiRNA target sequence
ggcaagcacaccatttaattgaatatt

SEQ ID NO: 178090 - DNA, 27 bp, Artificial sequence
  SiRNA target sequence
gcaagcacaccatttaattgaatattt

SEQ ID NO: 178091 - DNA, 27 bp, Artificial sequence
  SiRNA target sequence
caagcacaccatttaattgaatattta

SEQ ID NO: 178092 - DNA, 27 bp, Artificial sequence
  SiRNA target sequence
aagcacaccatttaattgaatatttat

SEQ ID NO: 178093 - DNA, 27 bp, Artificial sequence
  SiRNA target sequence
agcacaccatttaattgaatatttatc

SEQ ID NO: 178094 - DNA, 27 bp, Artificial sequence
  SiRNA target sequence
gcacaccatttaattgaatatttatct

SEQ ID NO: 178095 - DNA, 27 bp, Artificial sequence
  SiRNA target sequence
cacaccatttaattgaatatttatctg

SEQ ID NO: 178096 - DNA, 27 bp, Artificial sequence
  SiRNA target sequence
acaccatttaattgaatatttatctgt

SEQ ID NO: 178097 - DNA, 27 bp, Artificial sequence
  SiRNA target sequence
caccatttaattgaatatttatctgtt

SEQ ID NO: 178098 - DNA, 27 bp, Artificial sequence
  SiRNA target sequence
accatttaattgaatatttatctgtta

SEQ ID NO: 178099 - DNA, 27 bp, Artificial sequence
  SiRNA target sequence
ccatttaattgaatatttatctgttac

SEQ ID NO: 178100 - DNA, 27 bp, Artificial sequence
  SiRNA target sequence
catttaattgaatatttatctgttact

SEQ ID NO: 178101 - DNA, 27 bp, Artificial sequence
  SiRNA target sequence
atttaattgaatatttatctgttactt

SEQ ID NO: 178102 - DNA, 27 bp, Artificial sequence
  SiRNA target sequence
tttaattgaatatttatctgttacttc

SEQ ID NO: 178103 - DNA, 27 bp, Artificial sequence
  SiRNA target sequence
ttaattgaatatttatctgttacttct

SEQ ID NO: 178104 - DNA, 27 bp, Artificial sequence
  SiRNA target sequence
taattgaatatttatctgttacttcta

SEQ ID NO: 178105 - DNA, 27 bp, Artificial sequence
  SiRNA target sequence
aattgaatatttatctgttacttctac

SEQ ID NO: 178106 - DNA, 27 bp, Artificial sequence
  SiRNA target sequence
attgaatatttatctgttacttctaca

SEQ ID NO: 178107 - DNA, 27 bp, Artificial sequence
  SiRNA target sequence
ttgaatatttatctgttacttctacac

SEQ ID NO: 178108 - DNA, 27 bp, Artificial sequence
  SiRNA target sequence
tgaatatttatctgttacttctacaca

SEQ ID NO: 178109 - DNA, 27 bp, Artificial sequence
  SiRNA target sequence
gaatatttatctgttacttctacacaa

SEQ ID NO: 178110 - DNA, 27 bp, Artificial sequence
  SiRNA target sequence
aatatttatctgttacttctacacaac

SEQ ID NO: 178111 - DNA, 27 bp, Artificial sequence
  SiRNA target sequence
atatttatctgttacttctacacaaca

SEQ ID NO: 178112 - DNA, 27 bp, Artificial sequence
  SiRNA target sequence
tatttatctgttacttctacacaacaa

SEQ ID NO: 178113 - DNA, 27 bp, Artificial sequence
  SiRNA target sequence
atttatctgttacttctacacaacaac

SEQ ID NO: 178114 - DNA, 27 bp, Artificial sequence
  SiRNA target sequence
tttatctgttacttctacacaacaaca

SEQ ID NO: 178115 - DNA, 27 bp, Artificial sequence
  SiRNA target sequence
ttatctgttacttctacacaacaacaa

SEQ ID NO: 178116 - DNA, 27 bp, Artificial sequence
  SiRNA target sequence
tatctgttacttctacacaacaacaag

SEQ ID NO: 178117 - DNA, 27 bp, Artificial sequence
  SiRNA target sequence
atctgttacttctacacaacaacaagc

SEQ ID NO: 178118 - DNA, 27 bp, Artificial sequence
  SiRNA target sequence
tctgttacttctacacaacaacaagcc

SEQ ID NO: 178119 - DNA, 27 bp, Artificial sequence
  SiRNA target sequence
ctgttacttctacacaacaacaagcca

SEQ ID NO: 178120 - DNA, 27 bp, Artificial sequence
  SiRNA target sequence
tgttacttctacacaacaacaagccat

SEQ ID NO: 178121 - DNA, 27 bp, Artificial sequence
  SiRNA target sequence
gttacttctacacaacaacaagccata

SEQ ID NO: 178122 - DNA, 27 bp, Artificial sequence
  SiRNA target sequence
ttacttctacacaacaacaagccataa

SEQ ID NO: 178123 - DNA, 27 bp, Artificial sequence
  SiRNA target sequence
tacttctacacaacaacaagccataaa

SEQ ID NO: 178124 - DNA, 27 bp, Artificial sequence
  SiRNA target sequence
acttctacacaacaacaagccataaag

SEQ ID NO: 178125 - DNA, 27 bp, Artificial sequence
  SiRNA target sequence
cttctacacaacaacaagccataaagc

SEQ ID NO: 178126 - DNA, 27 bp, Artificial sequence
  SiRNA target sequence
ttctacacaacaacaagccataaagct

SEQ ID NO: 178127 - DNA, 27 bp, Artificial sequence
  SiRNA target sequence
tctacacaacaacaagccataaagcta

SEQ ID NO: 178128 - DNA, 27 bp, Artificial sequence
  SiRNA target sequence
ctacacaacaacaagccataaagctac

SEQ ID NO: 178129 - DNA, 27 bp, Artificial sequence
  SiRNA target sequence
tacacaacaacaagccataaagctact

SEQ ID NO: 178130 - DNA, 27 bp, Artificial sequence
  SiRNA target sequence
acacaacaacaagccataaagctactt

SEQ ID NO: 178131 - DNA, 27 bp, Artificial sequence
  SiRNA target sequence
cacaacaacaagccataaagctacttg

SEQ ID NO: 178132 - DNA, 27 bp, Artificial sequence
  SiRNA target sequence
acaacaacaagccataaagctacttgc

SEQ ID NO: 178133 - DNA, 27 bp, Artificial sequence
  SiRNA target sequence
caacaacaagccataaagctacttgct

SEQ ID NO: 178134 - DNA, 27 bp, Artificial sequence
  SiRNA target sequence
aacaacaagccataaagctacttgctc

SEQ ID NO: 178135 - DNA, 27 bp, Artificial sequence
  SiRNA target sequence
acaacaagccataaagctacttgctca

SEQ ID NO: 178136 - DNA, 27 bp, Artificial sequence
  SiRNA target sequence
caacaagccataaagctacttgctcag

SEQ ID NO: 178137 - DNA, 27 bp, Artificial sequence
  SiRNA target sequence
aacaagccataaagctacttgctcagg

SEQ ID NO: 178138 - DNA, 27 bp, Artificial sequence
  SiRNA target sequence
acaagccataaagctacttgctcaggg

SEQ ID NO: 178139 - DNA, 27 bp, Artificial sequence
  SiRNA target sequence
caagccataaagctacttgctcagggg

SEQ ID NO: 178140 - DNA, 27 bp, Artificial sequence
  SiRNA target sequence
aagccataaagctacttgctcaggggc

SEQ ID NO: 178141 - DNA, 27 bp, Artificial sequence
  SiRNA target sequence
agccataaagctacttgctcaggggcg

SEQ ID NO: 178142 - DNA, 27 bp, Artificial sequence
  SiRNA target sequence
gccataaagctacttgctcaggggcga

SEQ ID NO: 178143 - DNA, 27 bp, Artificial sequence
  SiRNA target sequence
ccataaagctacttgctcaggggcgaa

SEQ ID NO: 178144 - DNA, 27 bp, Artificial sequence
  SiRNA target sequence
cataaagctacttgctcaggggcgaag

SEQ ID NO: 178145 - DNA, 27 bp, Artificial sequence
  SiRNA target sequence
ataaagctacttgctcaggggcgaagt

SEQ ID NO: 178146 - DNA, 27 bp, Artificial sequence
  SiRNA target sequence
taaagctacttgctcaggggcgaagta

SEQ ID NO: 178147 - DNA, 27 bp, Artificial sequence
  SiRNA target sequence
aaagctacttgctcaggggcgaagtat

SEQ ID NO: 178148 - DNA, 27 bp, Artificial sequence
  SiRNA target sequence
aagctacttgctcaggggcgaagtata

SEQ ID NO: 178149 - DNA, 27 bp, Artificial sequence
  SiRNA target sequence
agctacttgctcaggggcgaagtataa

SEQ ID NO: 178150 - DNA, 27 bp, Artificial sequence
  SiRNA target sequence
gctacttgctcaggggcgaagtataag

SEQ ID NO: 178151 - DNA, 27 bp, Artificial sequence
  SiRNA target sequence
ctacttgctcaggggcgaagtataagt

SEQ ID NO: 178152 - DNA, 27 bp, Artificial sequence
  SiRNA target sequence
tacttgctcaggggcgaagtataagtg

SEQ ID NO: 178153 - DNA, 27 bp, Artificial sequence
  SiRNA target sequence
acttgctcaggggcgaagtataagtgt

SEQ ID NO: 178154 - DNA, 27 bp, Artificial sequence
  SiRNA target sequence
cttgctcaggggcgaagtataagtgtc

SEQ ID NO: 178155 - DNA, 27 bp, Artificial sequence
  SiRNA target sequence
ttgctcaggggcgaagtataagtgtca

SEQ ID NO: 178156 - DNA, 27 bp, Artificial sequence
  SiRNA target sequence
tgctcaggggcgaagtataagtgtcat

SEQ ID NO: 178157 - DNA, 27 bp, Artificial sequence
  SiRNA target sequence
gctcaggggcgaagtataagtgtcata

SEQ ID NO: 178158 - DNA, 27 bp, Artificial sequence
  SiRNA target sequence
ctcaggggcgaagtataagtgtcatac

SEQ ID NO: 178159 - DNA, 27 bp, Artificial sequence
  SiRNA target sequence
tcaggggcgaagtataagtgtcataca

SEQ ID NO: 178160 - DNA, 27 bp, Artificial sequence
  SiRNA target sequence
caggggcgaagtataagtgtcatacag

SEQ ID NO: 178161 - DNA, 27 bp, Artificial sequence
  SiRNA target sequence
aggggcgaagtataagtgtcatacagt

SEQ ID NO: 178162 - DNA, 27 bp, Artificial sequence
  SiRNA target sequence
ggggcgaagtataagtgtcatacagtg

SEQ ID NO: 178163 - DNA, 27 bp, Artificial sequence
  SiRNA target sequence
gggcgaagtataagtgtcatacagtgc

SEQ ID NO: 178164 - DNA, 27 bp, Artificial sequence
  SiRNA target sequence
ggcgaagtataagtgtcatacagtgct

SEQ ID NO: 178165 - DNA, 27 bp, Artificial sequence
  SiRNA target sequence
gcgaagtataagtgtcatacagtgcta

SEQ ID NO: 178166 - DNA, 27 bp, Artificial sequence
  SiRNA target sequence
cgaagtataagtgtcatacagtgctat

SEQ ID NO: 178167 - DNA, 27 bp, Artificial sequence
  SiRNA target sequence
gaagtataagtgtcatacagtgctatg

SEQ ID NO: 178168 - DNA, 27 bp, Artificial sequence
  SiRNA target sequence
aagtataagtgtcatacagtgctatga

SEQ ID NO: 178169 - DNA, 27 bp, Artificial sequence
  SiRNA target sequence
agtataagtgtcatacagtgctatgat

SEQ ID NO: 178170 - DNA, 27 bp, Artificial sequence
  SiRNA target sequence
gtataagtgtcatacagtgctatgata

SEQ ID NO: 178171 - DNA, 27 bp, Artificial sequence
  SiRNA target sequence
tataagtgtcatacagtgctatgataa

SEQ ID NO: 178172 - DNA, 27 bp, Artificial sequence
  SiRNA target sequence
ataagtgtcatacagtgctatgataaa

SEQ ID NO: 178173 - DNA, 27 bp, Artificial sequence
  SiRNA target sequence
taagtgtcatacagtgctatgataaat

SEQ ID NO: 178174 - DNA, 27 bp, Artificial sequence
  SiRNA target sequence
aagtgtcatacagtgctatgataaatt

SEQ ID NO: 178175 - DNA, 27 bp, Artificial sequence
  SiRNA target sequence
agtgtcatacagtgctatgataaattt

SEQ ID NO: 178176 - DNA, 27 bp, Artificial sequence
  SiRNA target sequence
gtgtcatacagtgctatgataaatttt

SEQ ID NO: 178177 - DNA, 27 bp, Artificial sequence
  SiRNA target sequence
tgtcatacagtgctatgataaattttt

SEQ ID NO: 178178 - DNA, 27 bp, Artificial sequence
  SiRNA target sequence
gtcatacagtgctatgataaattttta

SEQ ID NO: 178179 - DNA, 27 bp, Artificial sequence
  SiRNA target sequence
tcatacagtgctatgataaatttttag

SEQ ID NO: 178180 - DNA, 27 bp, Artificial sequence
  SiRNA target sequence
catacagtgctatgataaatttttaga

SEQ ID NO: 178181 - DNA, 27 bp, Artificial sequence
  SiRNA target sequence
atacagtgctatgataaatttttagag

SEQ ID NO: 178182 - DNA, 27 bp, Artificial sequence
  SiRNA target sequence
tacagtgctatgataaatttttagaga

SEQ ID NO: 178183 - DNA, 27 bp, Artificial sequence
  SiRNA target sequence
acagtgctatgataaatttttagagaa

SEQ ID NO: 178184 - DNA, 27 bp, Artificial sequence
  SiRNA target sequence
cagtgctatgataaatttttagagaat

SEQ ID NO: 178185 - DNA, 27 bp, Artificial sequence
  SiRNA target sequence
agtgctatgataaatttttagagaata

SEQ ID NO: 178186 - DNA, 27 bp, Artificial sequence
  SiRNA target sequence
gtgctatgataaatttttagagaatag

SEQ ID NO: 178187 - DNA, 27 bp, Artificial sequence
  SiRNA target sequence
tgctatgataaatttttagagaatagc

SEQ ID NO: 178188 - DNA, 27 bp, Artificial sequence
  SiRNA target sequence
gctatgataaatttttagagaatagcg

SEQ ID NO: 178189 - DNA, 27 bp, Artificial sequence
  SiRNA target sequence
ctatgataaatttttagagaatagcga

SEQ ID NO: 178190 - DNA, 27 bp, Artificial sequence
  SiRNA target sequence
tatgataaatttttagagaatagcgat

SEQ ID NO: 178191 - DNA, 27 bp, Artificial sequence
  SiRNA target sequence
atgataaatttttagagaatagcgatg

SEQ ID NO: 178192 - DNA, 27 bp, Artificial sequence
  SiRNA target sequence
tgataaatttttagagaatagcgatga

SEQ ID NO: 178193 - DNA, 27 bp, Artificial sequence
  SiRNA target sequence
gataaatttttagagaatagcgatgat

SEQ ID NO: 178194 - DNA, 27 bp, Artificial sequence
  SiRNA target sequence
ataaatttttagagaatagcgatgatg

SEQ ID NO: 178195 - DNA, 27 bp, Artificial sequence
  SiRNA target sequence
taaatttttagagaatagcgatgatgt

SEQ ID NO: 178196 - DNA, 27 bp, Artificial sequence
  SiRNA target sequence
aaatttttagagaatagcgatgatgtt

SEQ ID NO: 178197 - DNA, 27 bp, Artificial sequence
  SiRNA target sequence
aatttttagagaatagcgatgatgttt

SEQ ID NO: 178198 - DNA, 27 bp, Artificial sequence
  SiRNA target sequence
atttttagagaatagcgatgatgtttt

SEQ ID NO: 178199 - DNA, 27 bp, Artificial sequence
  SiRNA target sequence
tttttagagaatagcgatgatgtttta

SEQ ID NO: 178200 - DNA, 27 bp, Artificial sequence
  SiRNA target sequence
ttttagagaatagcgatgatgttttaa

SEQ ID NO: 178201 - DNA, 27 bp, Artificial sequence
  SiRNA target sequence
tttagagaatagcgatgatgttttaac

SEQ ID NO: 178202 - DNA, 27 bp, Artificial sequence
  SiRNA target sequence
ttagagaatagcgatgatgttttaact

SEQ ID NO: 178203 - DNA, 27 bp, Artificial sequence
  SiRNA target sequence
tagagaatagcgatgatgttttaacta

SEQ ID NO: 178204 - DNA, 27 bp, Artificial sequence
  SiRNA target sequence
agagaatagcgatgatgttttaactac

SEQ ID NO: 178205 - DNA, 27 bp, Artificial sequence
  SiRNA target sequence
gagaatagcgatgatgttttaactacc

SEQ ID NO: 178206 - DNA, 27 bp, Artificial sequence
  SiRNA target sequence
agaatagcgatgatgttttaactacct

SEQ ID NO: 178207 - DNA, 27 bp, Artificial sequence
  SiRNA target sequence
gaatagcgatgatgttttaactaccta

SEQ ID NO: 178208 - DNA, 27 bp, Artificial sequence
  SiRNA target sequence
aatagcgatgatgttttaactacctat

SEQ ID NO: 178209 - DNA, 27 bp, Artificial sequence
  SiRNA target sequence
atagcgatgatgttttaactacctatg

SEQ ID NO: 178210 - DNA, 27 bp, Artificial sequence
  SiRNA target sequence
tagcgatgatgttttaactacctatga

SEQ ID NO: 178211 - DNA, 27 bp, Artificial sequence
  SiRNA target sequence
agcgatgatgttttaactacctatgat

SEQ ID NO: 178212 - DNA, 27 bp, Artificial sequence
  SiRNA target sequence
gcgatgatgttttaactacctatgatt

SEQ ID NO: 178213 - DNA, 27 bp, Artificial sequence
  SiRNA target sequence
cgatgatgttttaactacctatgattt

SEQ ID NO: 178214 - DNA, 27 bp, Artificial sequence
  SiRNA target sequence
gatgatgttttaactacctatgatttt

SEQ ID NO: 178215 - DNA, 27 bp, Artificial sequence
  SiRNA target sequence
atgatgttttaactacctatgattttt

SEQ ID NO: 178216 - DNA, 27 bp, Artificial sequence
  SiRNA target sequence
tgatgttttaactacctatgattttta

SEQ ID NO: 178217 - DNA, 27 bp, Artificial sequence
  SiRNA target sequence
gatgttttaactacctatgatttttat

SEQ ID NO: 178218 - DNA, 27 bp, Artificial sequence
  SiRNA target sequence
atgttttaactacctatgatttttata

SEQ ID NO: 178219 - DNA, 27 bp, Artificial sequence
  SiRNA target sequence
tgttttaactacctatgatttttataa

SEQ ID NO: 178220 - DNA, 27 bp, Artificial sequence
  SiRNA target sequence
gttttaactacctatgatttttataaa

SEQ ID NO: 178221 - DNA, 27 bp, Artificial sequence
  SiRNA target sequence
ttttaactacctatgatttttataaaa

SEQ ID NO: 178222 - DNA, 27 bp, Artificial sequence
  SiRNA target sequence
tttaactacctatgatttttataaaat

SEQ ID NO: 178223 - DNA, 27 bp, Artificial sequence
  SiRNA target sequence
ttaactacctatgatttttataaaatg

SEQ ID NO: 178224 - DNA, 27 bp, Artificial sequence
  SiRNA target sequence
taactacctatgatttttataaaatga

SEQ ID NO: 178225 - DNA, 27 bp, Artificial sequence
  SiRNA target sequence
aactacctatgatttttataaaatgat

SEQ ID NO: 178226 - DNA, 27 bp, Artificial sequence
  SiRNA target sequence
actacctatgatttttataaaatgatt

SEQ ID NO: 178227 - DNA, 27 bp, Artificial sequence
  SiRNA target sequence
ctacctatgatttttataaaatgattt

SEQ ID NO: 178228 - DNA, 27 bp, Artificial sequence
  SiRNA target sequence
tacctatgatttttataaaatgatttt

SEQ ID NO: 178229 - DNA, 27 bp, Artificial sequence
  SiRNA target sequence
acctatgatttttataaaatgattttg

SEQ ID NO: 178230 - DNA, 27 bp, Artificial sequence
  SiRNA target sequence
cctatgatttttataaaatgattttgg

SEQ ID NO: 178231 - DNA, 27 bp, Artificial sequence
  SiRNA target sequence
ctatgatttttataaaatgattttgga

SEQ ID NO: 178232 - DNA, 27 bp, Artificial sequence
  SiRNA target sequence
tatgatttttataaaatgattttggat

SEQ ID NO: 178233 - DNA, 27 bp, Artificial sequence
  SiRNA target sequence
atgatttttataaaatgattttggatc

SEQ ID NO: 178234 - DNA, 27 bp, Artificial sequence
  SiRNA target sequence
tgatttttataaaatgattttggatct

SEQ ID NO: 178235 - DNA, 27 bp, Artificial sequence
  SiRNA target sequence
gatttttataaaatgattttggatcta

SEQ ID NO: 178236 - DNA, 27 bp, Artificial sequence
  SiRNA target sequence
atttttataaaatgattttggatctag

SEQ ID NO: 178237 - DNA, 27 bp, Artificial sequence
  SiRNA target sequence
tttttataaaatgattttggatctagg

SEQ ID NO: 178238 - DNA, 27 bp, Artificial sequence
  SiRNA target sequence
ttttataaaatgattttggatctagga

SEQ ID NO: 178239 - DNA, 27 bp, Artificial sequence
  SiRNA target sequence
tttataaaatgattttggatctaggat

SEQ ID NO: 178240 - DNA, 27 bp, Artificial sequence
  SiRNA target sequence
ttataaaatgattttggatctaggatt

SEQ ID NO: 178241 - DNA, 27 bp, Artificial sequence
  SiRNA target sequence
tataaaatgattttggatctaggattt

SEQ ID NO: 178242 - DNA, 27 bp, Artificial sequence
  SiRNA target sequence
ataaaatgattttggatctaggatttt

SEQ ID NO: 178243 - DNA, 27 bp, Artificial sequence
  SiRNA target sequence
taaaatgattttggatctaggattttt

SEQ ID NO: 178244 - DNA, 27 bp, Artificial sequence
  SiRNA target sequence
aaaatgattttggatctaggattttta

SEQ ID NO: 178245 - DNA, 27 bp, Artificial sequence
  SiRNA target sequence
aaatgattttggatctaggatttttac

SEQ ID NO: 178246 - DNA, 27 bp, Artificial sequence
  SiRNA target sequence
aatgattttggatctaggatttttaca

SEQ ID NO: 178247 - DNA, 27 bp, Artificial sequence
  SiRNA target sequence
atgattttggatctaggatttttacag

SEQ ID NO: 178248 - DNA, 27 bp, Artificial sequence
  SiRNA target sequence
tgattttggatctaggatttttacagc

SEQ ID NO: 178249 - DNA, 27 bp, Artificial sequence
  SiRNA target sequence
gattttggatctaggatttttacagca

SEQ ID NO: 178250 - DNA, 27 bp, Artificial sequence
  SiRNA target sequence
attttggatctaggatttttacagcat

SEQ ID NO: 178251 - DNA, 27 bp, Artificial sequence
  SiRNA target sequence
ttttggatctaggatttttacagcata

SEQ ID NO: 178252 - DNA, 27 bp, Artificial sequence
  SiRNA target sequence
tttggatctaggatttttacagcataa

SEQ ID NO: 178253 - DNA, 27 bp, Artificial sequence
  SiRNA target sequence
ttggatctaggatttttacagcataat

SEQ ID NO: 178254 - DNA, 27 bp, Artificial sequence
  SiRNA target sequence
tggatctaggatttttacagcataatt

SEQ ID NO: 178255 - DNA, 27 bp, Artificial sequence
  SiRNA target sequence
ggatctaggatttttacagcataattt

SEQ ID NO: 178256 - DNA, 27 bp, Artificial sequence
  SiRNA target sequence
gatctaggatttttacagcataatttt

SEQ ID NO: 178257 - DNA, 27 bp, Artificial sequence
  SiRNA target sequence
atctaggatttttacagcataatttta

SEQ ID NO: 178258 - DNA, 27 bp, Artificial sequence
  SiRNA target sequence
tctaggatttttacagcataattttat

SEQ ID NO: 178259 - DNA, 27 bp, Artificial sequence
  SiRNA target sequence
ctaggatttttacagcataattttatt

SEQ ID NO: 178260 - DNA, 27 bp, Artificial sequence
  SiRNA target sequence
taggatttttacagcataattttatta

SEQ ID NO: 178261 - DNA, 27 bp, Artificial sequence
  SiRNA target sequence
aggatttttacagcataattttattaa

SEQ ID NO: 178262 - DNA, 27 bp, Artificial sequence
  SiRNA target sequence
ggatttttacagcataattttattaaa

SEQ ID NO: 178263 - DNA, 27 bp, Artificial sequence
  SiRNA target sequence
gatttttacagcataattttattaaag

SEQ ID NO: 178264 - DNA, 27 bp, Artificial sequence
  SiRNA target sequence
atttttacagcataattttattaaagg

SEQ ID NO: 178265 - DNA, 27 bp, Artificial sequence
  SiRNA target sequence
tttttacagcataattttattaaagga

SEQ ID NO: 178266 - DNA, 27 bp, Artificial sequence
  SiRNA target sequence
ttttacagcataattttattaaaggaa

SEQ ID NO: 178267 - DNA, 27 bp, Artificial sequence
  SiRNA target sequence
tttacagcataattttattaaaggaac

SEQ ID NO: 178268 - DNA, 27 bp, Artificial sequence
  SiRNA target sequence
ttacagcataattttattaaaggaacc

SEQ ID NO: 178269 - DNA, 27 bp, Artificial sequence
  SiRNA target sequence
tacagcataattttattaaaggaacct

SEQ ID NO: 178270 - DNA, 27 bp, Artificial sequence
  SiRNA target sequence
acagcataattttattaaaggaacctg

SEQ ID NO: 178271 - DNA, 27 bp, Artificial sequence
  SiRNA target sequence
cagcataattttattaaaggaacctgt

SEQ ID NO: 178272 - DNA, 27 bp, Artificial sequence
  SiRNA target sequence
agcataattttattaaaggaacctgtg

SEQ ID NO: 178273 - DNA, 27 bp, Artificial sequence
  SiRNA target sequence
gcataattttattaaaggaacctgtga

SEQ ID NO: 178274 - DNA, 27 bp, Artificial sequence
  SiRNA target sequence
cataattttattaaaggaacctgtgag

SEQ ID NO: 178275 - DNA, 27 bp, Artificial sequence
  SiRNA target sequence
ataattttattaaaggaacctgtgaga

SEQ ID NO: 178276 - DNA, 27 bp, Artificial sequence
  SiRNA target sequence
taattttattaaaggaacctgtgagaa

SEQ ID NO: 178277 - DNA, 27 bp, Artificial sequence
  SiRNA target sequence
aattttattaaaggaacctgtgagaaa

SEQ ID NO: 178278 - DNA, 27 bp, Artificial sequence
  SiRNA target sequence
attttattaaaggaacctgtgagaaat

SEQ ID NO: 178279 - DNA, 27 bp, Artificial sequence
  SiRNA target sequence
ttttattaaaggaacctgtgagaaatg

SEQ ID NO: 178280 - DNA, 27 bp, Artificial sequence
  SiRNA target sequence
tttattaaaggaacctgtgagaaatgg

SEQ ID NO: 178281 - DNA, 27 bp, Artificial sequence
  SiRNA target sequence
ttattaaaggaacctgtgagaaatggg

SEQ ID NO: 178282 - DNA, 27 bp, Artificial sequence
  SiRNA target sequence
tattaaaggaacctgtgagaaatggga

SEQ ID NO: 178283 - DNA, 27 bp, Artificial sequence
  SiRNA target sequence
attaaaggaacctgtgagaaatgggag

SEQ ID NO: 178284 - DNA, 27 bp, Artificial sequence
  SiRNA target sequence
ttaaaggaacctgtgagaaatgggaga

SEQ ID NO: 178285 - DNA, 27 bp, Artificial sequence
  SiRNA target sequence
taaaggaacctgtgagaaatgggagaa

SEQ ID NO: 178286 - DNA, 27 bp, Artificial sequence
  SiRNA target sequence
aaaggaacctgtgagaaatgggagaag

SEQ ID NO: 178287 - DNA, 27 bp, Artificial sequence
  SiRNA target sequence
aaggaacctgtgagaaatgggagaagt

SEQ ID NO: 178288 - DNA, 27 bp, Artificial sequence
  SiRNA target sequence
aggaacctgtgagaaatgggagaagtg

SEQ ID NO: 178289 - DNA, 27 bp, Artificial sequence
  SiRNA target sequence
ggaacctgtgagaaatgggagaagtgt

SEQ ID NO: 178290 - DNA, 27 bp, Artificial sequence
  SiRNA target sequence
gaacctgtgagaaatgggagaagtgta

SEQ ID NO: 178291 - DNA, 27 bp, Artificial sequence
  SiRNA target sequence
aacctgtgagaaatgggagaagtgtac

SEQ ID NO: 178292 - DNA, 27 bp, Artificial sequence
  SiRNA target sequence
acctgtgagaaatgggagaagtgtact

SEQ ID NO: 178293 - DNA, 27 bp, Artificial sequence
  SiRNA target sequence
cctgtgagaaatgggagaagtgtacta

SEQ ID NO: 178294 - DNA, 27 bp, Artificial sequence
  SiRNA target sequence
ctgtgagaaatgggagaagtgtactat

SEQ ID NO: 178295 - DNA, 27 bp, Artificial sequence
  SiRNA target sequence
tgtgagaaatgggagaagtgtactatt

SEQ ID NO: 178296 - DNA, 27 bp, Artificial sequence
  SiRNA target sequence
gtgagaaatgggagaagtgtactattg

SEQ ID NO: 178297 - DNA, 27 bp, Artificial sequence
  SiRNA target sequence
tgagaaatgggagaagtgtactattgg

SEQ ID NO: 178298 - DNA, 27 bp, Artificial sequence
  SiRNA target sequence
gagaaatgggagaagtgtactattgga

SEQ ID NO: 178299 - DNA, 27 bp, Artificial sequence
  SiRNA target sequence
agaaatgggagaagtgtactattggat

SEQ ID NO: 178300 - DNA, 27 bp, Artificial sequence
  SiRNA target sequence
gaaatgggagaagtgtactattggata

SEQ ID NO: 178301 - DNA, 27 bp, Artificial sequence
  SiRNA target sequence
aaatgggagaagtgtactattggatat

SEQ ID NO: 178302 - DNA, 27 bp, Artificial sequence
  SiRNA target sequence
aatgggagaagtgtactattggatatc

SEQ ID NO: 178303 - DNA, 27 bp, Artificial sequence
  SiRNA target sequence
atgggagaagtgtactattggatatca

SEQ ID NO: 178304 - DNA, 27 bp, Artificial sequence
  SiRNA target sequence
tgggagaagtgtactattggatatcat

SEQ ID NO: 178305 - DNA, 27 bp, Artificial sequence
  SiRNA target sequence
gggagaagtgtactattggatatcatt

SEQ ID NO: 178306 - DNA, 27 bp, Artificial sequence
  SiRNA target sequence
ggagaagtgtactattggatatcatta

SEQ ID NO: 178307 - DNA, 27 bp, Artificial sequence
  SiRNA target sequence
gagaagtgtactattggatatcattat

SEQ ID NO: 178308 - DNA, 27 bp, Artificial sequence
  SiRNA target sequence
agaagtgtactattggatatcattatg

SEQ ID NO: 178309 - DNA, 27 bp, Artificial sequence
  SiRNA target sequence
gaagtgtactattggatatcattatgg

SEQ ID NO: 178310 - DNA, 27 bp, Artificial sequence
  SiRNA target sequence
aagtgtactattggatatcattatgga

SEQ ID NO: 178311 - DNA, 27 bp, Artificial sequence
  SiRNA target sequence
agtgtactattggatatcattatggat

SEQ ID NO: 178312 - DNA, 27 bp, Artificial sequence
  SiRNA target sequence
gtgtactattggatatcattatggata

SEQ ID NO: 178313 - DNA, 27 bp, Artificial sequence
  SiRNA target sequence
tgtactattggatatcattatggatat

SEQ ID NO: 178314 - DNA, 27 bp, Artificial sequence
  SiRNA target sequence
gtactattggatatcattatggatatt

SEQ ID NO: 178315 - DNA, 27 bp, Artificial sequence
  SiRNA target sequence
tactattggatatcattatggatattt

SEQ ID NO: 178316 - DNA, 27 bp, Artificial sequence
  SiRNA target sequence
actattggatatcattatggatattta

SEQ ID NO: 178317 - DNA, 27 bp, Artificial sequence
  SiRNA target sequence
ctattggatatcattatggatatttag

SEQ ID NO: 178318 - DNA, 27 bp, Artificial sequence
  SiRNA target sequence
tattggatatcattatggatatttaga

SEQ ID NO: 178319 - DNA, 27 bp, Artificial sequence
  SiRNA target sequence
attggatatcattatggatatttagaa

SEQ ID NO: 178320 - DNA, 27 bp, Artificial sequence
  SiRNA target sequence
ttggatatcattatggatatttagaac

SEQ ID NO: 178321 - DNA, 27 bp, Artificial sequence
  SiRNA target sequence
tggatatcattatggatatttagaaca

SEQ ID NO: 178322 - DNA, 27 bp, Artificial sequence
  SiRNA target sequence
ggatatcattatggatatttagaacac

SEQ ID NO: 178323 - DNA, 27 bp, Artificial sequence
  SiRNA target sequence
gatatcattatggatatttagaacaca

SEQ ID NO: 178324 - DNA, 27 bp, Artificial sequence
  SiRNA target sequence
atatcattatggatatttagaacacat

SEQ ID NO: 178325 - DNA, 27 bp, Artificial sequence
  SiRNA target sequence
tatcattatggatatttagaacacata

SEQ ID NO: 178326 - DNA, 27 bp, Artificial sequence
  SiRNA target sequence
atcattatggatatttagaacacatat

SEQ ID NO: 178327 - DNA, 27 bp, Artificial sequence
  SiRNA target sequence
tcattatggatatttagaacacatatt

SEQ ID NO: 178328 - DNA, 27 bp, Artificial sequence
  SiRNA target sequence
cattatggatatttagaacacatatta

SEQ ID NO: 178329 - DNA, 27 bp, Artificial sequence
  SiRNA target sequence
attatggatatttagaacacatattaa

SEQ ID NO: 178330 - DNA, 27 bp, Artificial sequence
  SiRNA target sequence
ttatggatatttagaacacatattaaa

SEQ ID NO: 178331 - DNA, 27 bp, Artificial sequence
  SiRNA target sequence
tatggatatttagaacacatattaaat

SEQ ID NO: 178332 - DNA, 27 bp, Artificial sequence
  SiRNA target sequence
atggatatttagaacacatattaaata

SEQ ID NO: 178333 - DNA, 27 bp, Artificial sequence
  SiRNA target sequence
tggatatttagaacacatattaaataa

SEQ ID NO: 178334 - DNA, 27 bp, Artificial sequence
  SiRNA target sequence
ggatatttagaacacatattaaataag

SEQ ID NO: 178335 - DNA, 27 bp, Artificial sequence
  SiRNA target sequence
gatatttagaacacatattaaataaga

SEQ ID NO: 178336 - DNA, 27 bp, Artificial sequence
  SiRNA target sequence
atatttagaacacatattaaataagaa

SEQ ID NO: 178337 - DNA, 27 bp, Artificial sequence
  SiRNA target sequence
tatttagaacacatattaaataagaag

SEQ ID NO: 178338 - DNA, 27 bp, Artificial sequence
  SiRNA target sequence
atttagaacacatattaaataagaaga

SEQ ID NO: 178339 - DNA, 27 bp, Artificial sequence
  SiRNA target sequence
tttagaacacatattaaataagaagaa

SEQ ID NO: 178340 - DNA, 27 bp, Artificial sequence
  SiRNA target sequence
ttagaacacatattaaataagaagaac

SEQ ID NO: 178341 - DNA, 27 bp, Artificial sequence
  SiRNA target sequence
tagaacacatattaaataagaagaaca

SEQ ID NO: 178342 - DNA, 27 bp, Artificial sequence
  SiRNA target sequence
agaacacatattaaataagaagaacaa

SEQ ID NO: 178343 - DNA, 27 bp, Artificial sequence
  SiRNA target sequence
gaacacatattaaataagaagaacaat

SEQ ID NO: 178344 - DNA, 27 bp, Artificial sequence
  SiRNA target sequence
aacacatattaaataagaagaacaatt

SEQ ID NO: 178345 - DNA, 27 bp, Artificial sequence
  SiRNA target sequence
acacatattaaataagaagaacaatta

SEQ ID NO: 178346 - DNA, 27 bp, Artificial sequence
  SiRNA target sequence
cacatattaaataagaagaacaattat

SEQ ID NO: 178347 - DNA, 27 bp, Artificial sequence
  SiRNA target sequence
acatattaaataagaagaacaattatt

SEQ ID NO: 178348 - DNA, 27 bp, Artificial sequence
  SiRNA target sequence
catattaaataagaagaacaattattt

SEQ ID NO: 178349 - DNA, 27 bp, Artificial sequence
  SiRNA target sequence
atattaaataagaagaacaattattta

SEQ ID NO: 178350 - DNA, 27 bp, Artificial sequence
  SiRNA target sequence
tattaaataagaagaacaattatttaa

SEQ ID NO: 178351 - DNA, 27 bp, Artificial sequence
  SiRNA target sequence
attaaataagaagaacaattatttaac

SEQ ID NO: 178352 - DNA, 27 bp, Artificial sequence
  SiRNA target sequence
ttaaataagaagaacaattatttaaca

SEQ ID NO: 178353 - DNA, 27 bp, Artificial sequence
  SiRNA target sequence
taaataagaagaacaattatttaacaa

SEQ ID NO: 178354 - DNA, 27 bp, Artificial sequence
  SiRNA target sequence
aaataagaagaacaattatttaacaaa

SEQ ID NO: 178355 - DNA, 27 bp, Artificial sequence
  SiRNA target sequence
aataagaagaacaattatttaacaaaa

SEQ ID NO: 178356 - DNA, 27 bp, Artificial sequence
  SiRNA target sequence
ataagaagaacaattatttaacaaaaa

SEQ ID NO: 178357 - DNA, 27 bp, Artificial sequence
  SiRNA target sequence
taagaagaacaattatttaacaaaaaa

SEQ ID NO: 178358 - DNA, 27 bp, Artificial sequence
  SiRNA target sequence
aagaagaacaattatttaacaaaaaat

SEQ ID NO: 178359 - DNA, 27 bp, Artificial sequence
  SiRNA target sequence
agaagaacaattatttaacaaaaaatg

SEQ ID NO: 178360 - DNA, 27 bp, Artificial sequence
  SiRNA target sequence
gaagaacaattatttaacaaaaaatga

SEQ ID NO: 178361 - DNA, 27 bp, Artificial sequence
  SiRNA target sequence
aagaacaattatttaacaaaaaatgat

SEQ ID NO: 178362 - DNA, 27 bp, Artificial sequence
  SiRNA target sequence
agaacaattatttaacaaaaaatgata

SEQ ID NO: 178363 - DNA, 27 bp, Artificial sequence
  SiRNA target sequence
gaacaattatttaacaaaaaatgatag

SEQ ID NO: 178364 - DNA, 27 bp, Artificial sequence
  SiRNA target sequence
aacaattatttaacaaaaaatgatagt

SEQ ID NO: 178365 - DNA, 27 bp, Artificial sequence
  SiRNA target sequence
acaattatttaacaaaaaatgatagta

SEQ ID NO: 178366 - DNA, 27 bp, Artificial sequence
  SiRNA target sequence
caattatttaacaaaaaatgatagtat

SEQ ID NO: 178367 - DNA, 27 bp, Artificial sequence
  SiRNA target sequence
aattatttaacaaaaaatgatagtata

SEQ ID NO: 178368 - DNA, 27 bp, Artificial sequence
  SiRNA target sequence
attatttaacaaaaaatgatagtataa

SEQ ID NO: 178369 - DNA, 27 bp, Artificial sequence
  SiRNA target sequence
ttatttaacaaaaaatgatagtataaa

SEQ ID NO: 178370 - DNA, 27 bp, Artificial sequence
  SiRNA target sequence
tatttaacaaaaaatgatagtataaaa

SEQ ID NO: 178371 - DNA, 27 bp, Artificial sequence
  SiRNA target sequence
atttaacaaaaaatgatagtataaaaa

SEQ ID NO: 178372 - DNA, 27 bp, Artificial sequence
  SiRNA target sequence
tttaacaaaaaatgatagtataaaaat

SEQ ID NO: 178373 - DNA, 27 bp, Artificial sequence
  SiRNA target sequence
ttaacaaaaaatgatagtataaaaata

SEQ ID NO: 178374 - DNA, 27 bp, Artificial sequence
  SiRNA target sequence
taacaaaaaatgatagtataaaaatat

SEQ ID NO: 178375 - DNA, 27 bp, Artificial sequence
  SiRNA target sequence
aacaaaaaatgatagtataaaaatatt

SEQ ID NO: 178376 - DNA, 27 bp, Artificial sequence
  SiRNA target sequence
acaaaaaatgatagtataaaaatattt

SEQ ID NO: 178377 - DNA, 27 bp, Artificial sequence
  SiRNA target sequence
caaaaaatgatagtataaaaatattta

SEQ ID NO: 178378 - DNA, 27 bp, Artificial sequence
  SiRNA target sequence
aaaaaatgatagtataaaaatatttaa

SEQ ID NO: 178379 - DNA, 27 bp, Artificial sequence
  SiRNA target sequence
aaaaatgatagtataaaaatatttaac

SEQ ID NO: 178380 - DNA, 27 bp, Artificial sequence
  SiRNA target sequence
aaaatgatagtataaaaatatttaaca

SEQ ID NO: 178381 - DNA, 27 bp, Artificial sequence
  SiRNA target sequence
aaatgatagtataaaaatatttaacag

SEQ ID NO: 178382 - DNA, 27 bp, Artificial sequence
  SiRNA target sequence
aatgatagtataaaaatatttaacagt

SEQ ID NO: 178383 - DNA, 27 bp, Artificial sequence
  SiRNA target sequence
atgatagtataaaaatatttaacagta

SEQ ID NO: 178384 - DNA, 27 bp, Artificial sequence
  SiRNA target sequence
tgatagtataaaaatatttaacagtaa

SEQ ID NO: 178385 - DNA, 27 bp, Artificial sequence
  SiRNA target sequence
gatagtataaaaatatttaacagtaaa

SEQ ID NO: 178386 - DNA, 27 bp, Artificial sequence
  SiRNA target sequence
atagtataaaaatatttaacagtaaaa

SEQ ID NO: 178387 - DNA, 27 bp, Artificial sequence
  SiRNA target sequence
tagtataaaaatatttaacagtaaaaa

SEQ ID NO: 178388 - DNA, 27 bp, Artificial sequence
  SiRNA target sequence
agtataaaaatatttaacagtaaaaat

SEQ ID NO: 178389 - DNA, 27 bp, Artificial sequence
  SiRNA target sequence
gtataaaaatatttaacagtaaaaatg

SEQ ID NO: 178390 - DNA, 27 bp, Artificial sequence
  SiRNA target sequence
tataaaaatatttaacagtaaaaatga

SEQ ID NO: 178391 - DNA, 27 bp, Artificial sequence
  SiRNA target sequence
ataaaaatatttaacagtaaaaatgag

SEQ ID NO: 178392 - DNA, 27 bp, Artificial sequence
  SiRNA target sequence
taaaaatatttaacagtaaaaatgagg

SEQ ID NO: 178393 - DNA, 27 bp, Artificial sequence
  SiRNA target sequence
aaaaatatttaacagtaaaaatgagga

SEQ ID NO: 178394 - DNA, 27 bp, Artificial sequence
  SiRNA target sequence
aaaatatttaacagtaaaaatgaggag

SEQ ID NO: 178395 - DNA, 27 bp, Artificial sequence
  SiRNA target sequence
aaatatttaacagtaaaaatgaggagg

SEQ ID NO: 178396 - DNA, 27 bp, Artificial sequence
  SiRNA target sequence
aatatttaacagtaaaaatgaggaggt

SEQ ID NO: 178397 - DNA, 27 bp, Artificial sequence
  SiRNA target sequence
atatttaacagtaaaaatgaggaggta

SEQ ID NO: 178398 - DNA, 27 bp, Artificial sequence
  SiRNA target sequence
tatttaacagtaaaaatgaggaggtaa

SEQ ID NO: 178399 - DNA, 27 bp, Artificial sequence
  SiRNA target sequence
atttaacagtaaaaatgaggaggtaag

SEQ ID NO: 178400 - DNA, 27 bp, Artificial sequence
  SiRNA target sequence
tttaacagtaaaaatgaggaggtaagg

SEQ ID NO: 178401 - DNA, 27 bp, Artificial sequence
  SiRNA target sequence
ttaacagtaaaaatgaggaggtaaggt

SEQ ID NO: 178402 - DNA, 27 bp, Artificial sequence
  SiRNA target sequence
taacagtaaaaatgaggaggtaaggtt

SEQ ID NO: 178403 - DNA, 27 bp, Artificial sequence
  SiRNA target sequence
aacagtaaaaatgaggaggtaaggtta

SEQ ID NO: 178404 - DNA, 27 bp, Artificial sequence
  SiRNA target sequence
acagtaaaaatgaggaggtaaggttaa

SEQ ID NO: 178405 - DNA, 27 bp, Artificial sequence
  SiRNA target sequence
cagtaaaaatgaggaggtaaggttaaa

SEQ ID NO: 178406 - DNA, 27 bp, Artificial sequence
  SiRNA target sequence
agtaaaaatgaggaggtaaggttaaat

SEQ ID NO: 178407 - DNA, 27 bp, Artificial sequence
  SiRNA target sequence
gtaaaaatgaggaggtaaggttaaatg

SEQ ID NO: 178408 - DNA, 27 bp, Artificial sequence
  SiRNA target sequence
taaaaatgaggaggtaaggttaaatgg

SEQ ID NO: 178409 - DNA, 27 bp, Artificial sequence
  SiRNA target sequence
aaaaatgaggaggtaaggttaaatgga

SEQ ID NO: 178410 - DNA, 27 bp, Artificial sequence
  SiRNA target sequence
aaaatgaggaggtaaggttaaatggaa

SEQ ID NO: 178411 - DNA, 27 bp, Artificial sequence
  SiRNA target sequence
aaatgaggaggtaaggttaaatggaaa

SEQ ID NO: 178412 - DNA, 27 bp, Artificial sequence
  SiRNA target sequence
aatgaggaggtaaggttaaatggaaaa

SEQ ID NO: 178413 - DNA, 27 bp, Artificial sequence
  SiRNA target sequence
atgaggaggtaaggttaaatggaaaaa

SEQ ID NO: 178414 - DNA, 27 bp, Artificial sequence
  SiRNA target sequence
tgaggaggtaaggttaaatggaaaaag

SEQ ID NO: 178415 - DNA, 27 bp, Artificial sequence
  SiRNA target sequence
gaggaggtaaggttaaatggaaaaaga

SEQ ID NO: 178416 - DNA, 27 bp, Artificial sequence
  SiRNA target sequence
aggaggtaaggttaaatggaaaaagaa

SEQ ID NO: 178417 - DNA, 27 bp, Artificial sequence
  SiRNA target sequence
ggaggtaaggttaaatggaaaaagaaa

SEQ ID NO: 178418 - DNA, 27 bp, Artificial sequence
  SiRNA target sequence
gaggtaaggttaaatggaaaaagaaaa

SEQ ID NO: 178419 - DNA, 27 bp, Artificial sequence
  SiRNA target sequence
aggtaaggttaaatggaaaaagaaaat

SEQ ID NO: 178420 - DNA, 27 bp, Artificial sequence
  SiRNA target sequence
ggtaaggttaaatggaaaaagaaaatt

SEQ ID NO: 178421 - DNA, 27 bp, Artificial sequence
  SiRNA target sequence
gtaaggttaaatggaaaaagaaaatta

SEQ ID NO: 178422 - DNA, 27 bp, Artificial sequence
  SiRNA target sequence
taaggttaaatggaaaaagaaaattaa

SEQ ID NO: 178423 - DNA, 27 bp, Artificial sequence
  SiRNA target sequence
aaggttaaatggaaaaagaaaattaaa

SEQ ID NO: 178424 - DNA, 27 bp, Artificial sequence
  SiRNA target sequence
aggttaaatggaaaaagaaaattaaat

SEQ ID NO: 178425 - DNA, 27 bp, Artificial sequence
  SiRNA target sequence
ggttaaatggaaaaagaaaattaaata

SEQ ID NO: 178426 - DNA, 27 bp, Artificial sequence
  SiRNA target sequence
gttaaatggaaaaagaaaattaaatat

SEQ ID NO: 178427 - DNA, 27 bp, Artificial sequence
  SiRNA target sequence
ttaaatggaaaaagaaaattaaatatt

SEQ ID NO: 178428 - DNA, 27 bp, Artificial sequence
  SiRNA target sequence
taaatggaaaaagaaaattaaatatta

SEQ ID NO: 178429 - DNA, 27 bp, Artificial sequence
  SiRNA target sequence
aaatggaaaaagaaaattaaatattaa

SEQ ID NO: 178430 - DNA, 27 bp, Artificial sequence
  SiRNA target sequence
aatggaaaaagaaaattaaatattaac

SEQ ID NO: 178431 - DNA, 27 bp, Artificial sequence
  SiRNA target sequence
atggaaaaagaaaattaaatattaaca

SEQ ID NO: 178432 - DNA, 27 bp, Artificial sequence
  SiRNA target sequence
tggaaaaagaaaattaaatattaacac

SEQ ID NO: 178433 - DNA, 27 bp, Artificial sequence
  SiRNA target sequence
ggaaaaagaaaattaaatattaacaca

SEQ ID NO: 178434 - DNA, 27 bp, Artificial sequence
  SiRNA target sequence
gaaaaagaaaattaaatattaacacag

SEQ ID NO: 178435 - DNA, 27 bp, Artificial sequence
  SiRNA target sequence
aaaaagaaaattaaatattaacacagt

SEQ ID NO: 178436 - DNA, 27 bp, Artificial sequence
  SiRNA target sequence
aaaagaaaattaaatattaacacagtt

SEQ ID NO: 178437 - DNA, 27 bp, Artificial sequence
  SiRNA target sequence
aaagaaaattaaatattaacacagtta

SEQ ID NO: 178438 - DNA, 27 bp, Artificial sequence
  SiRNA target sequence
aagaaaattaaatattaacacagttac

SEQ ID NO: 178439 - DNA, 27 bp, Artificial sequence
  SiRNA target sequence
agaaaattaaatattaacacagttaca

SEQ ID NO: 178440 - DNA, 27 bp, Artificial sequence
  SiRNA target sequence
gaaaattaaatattaacacagttacat

SEQ ID NO: 178441 - DNA, 27 bp, Artificial sequence
  SiRNA target sequence
aaaattaaatattaacacagttacatt

SEQ ID NO: 178442 - DNA, 27 bp, Artificial sequence
  SiRNA target sequence
aaattaaatattaacacagttacatta

SEQ ID NO: 178443 - DNA, 27 bp, Artificial sequence
  SiRNA target sequence
aattaaatattaacacagttacattaa

SEQ ID NO: 178444 - DNA, 27 bp, Artificial sequence
  SiRNA target sequence
attaaatattaacacagttacattaaa

SEQ ID NO: 178445 - DNA, 27 bp, Artificial sequence
  SiRNA target sequence
ttaaatattaacacagttacattaaat

SEQ ID NO: 178446 - DNA, 27 bp, Artificial sequence
  SiRNA target sequence
taaatattaacacagttacattaaata

SEQ ID NO: 178447 - DNA, 27 bp, Artificial sequence
  SiRNA target sequence
aaatattaacacagttacattaaataa

SEQ ID NO: 178448 - DNA, 27 bp, Artificial sequence
  SiRNA target sequence
aatattaacacagttacattaaataaa

SEQ ID NO: 178449 - DNA, 27 bp, Artificial sequence
  SiRNA target sequence
atattaacacagttacattaaataaaa

SEQ ID NO: 178450 - DNA, 27 bp, Artificial sequence
  SiRNA target sequence
tattaacacagttacattaaataaaat

SEQ ID NO: 178451 - DNA, 27 bp, Artificial sequence
  SiRNA target sequence
attaacacagttacattaaataaaatt

SEQ ID NO: 178452 - DNA, 27 bp, Artificial sequence
  SiRNA target sequence
ttaacacagttacattaaataaaatta

SEQ ID NO: 178453 - DNA, 27 bp, Artificial sequence
  SiRNA target sequence
taacacagttacattaaataaaattaa

SEQ ID NO: 178454 - DNA, 27 bp, Artificial sequence
  SiRNA target sequence
aacacagttacattaaataaaattaat

SEQ ID NO: 178455 - DNA, 27 bp, Artificial sequence
  SiRNA target sequence
acacagttacattaaataaaattaata

SEQ ID NO: 178456 - DNA, 27 bp, Artificial sequence
  SiRNA target sequence
cacagttacattaaataaaattaatat

SEQ ID NO: 178457 - DNA, 27 bp, Artificial sequence
  SiRNA target sequence
acagttacattaaataaaattaatata

SEQ ID NO: 178458 - DNA, 27 bp, Artificial sequence
  SiRNA target sequence
cagttacattaaataaaattaatatac

SEQ ID NO: 178459 - DNA, 27 bp, Artificial sequence
  SiRNA target sequence
agttacattaaataaaattaatatacc

SEQ ID NO: 178460 - DNA, 27 bp, Artificial sequence
  SiRNA target sequence
gttacattaaataaaattaatatacct

SEQ ID NO: 178461 - DNA, 27 bp, Artificial sequence
  SiRNA target sequence
ttacattaaataaaattaatatacctg

SEQ ID NO: 178462 - DNA, 27 bp, Artificial sequence
  SiRNA target sequence
tacattaaataaaattaatatacctga

SEQ ID NO: 178463 - DNA, 27 bp, Artificial sequence
  SiRNA target sequence
acattaaataaaattaatatacctgag

SEQ ID NO: 178464 - DNA, 27 bp, Artificial sequence
  SiRNA target sequence
cattaaataaaattaatatacctgaga

SEQ ID NO: 178465 - DNA, 27 bp, Artificial sequence
  SiRNA target sequence
attaaataaaattaatatacctgagat

SEQ ID NO: 178466 - DNA, 27 bp, Artificial sequence
  SiRNA target sequence
ttaaataaaattaatatacctgagata

SEQ ID NO: 178467 - DNA, 27 bp, Artificial sequence
  SiRNA target sequence
taaataaaattaatatacctgagatag

SEQ ID NO: 178468 - DNA, 27 bp, Artificial sequence
  SiRNA target sequence
aaataaaattaatatacctgagataga

SEQ ID NO: 178469 - DNA, 27 bp, Artificial sequence
  SiRNA target sequence
aataaaattaatatacctgagatagat

SEQ ID NO: 178470 - DNA, 27 bp, Artificial sequence
  SiRNA target sequence
ataaaattaatatacctgagatagatt

SEQ ID NO: 178471 - DNA, 27 bp, Artificial sequence
  SiRNA target sequence
taaaattaatatacctgagatagatta

SEQ ID NO: 178472 - DNA, 27 bp, Artificial sequence
  SiRNA target sequence
aaaattaatatacctgagatagattat

SEQ ID NO: 178473 - DNA, 27 bp, Artificial sequence
  SiRNA target sequence
aaattaatatacctgagatagattata

SEQ ID NO: 178474 - DNA, 27 bp, Artificial sequence
  SiRNA target sequence
aattaatatacctgagatagattataa

SEQ ID NO: 178475 - DNA, 27 bp, Artificial sequence
  SiRNA target sequence
attaatatacctgagatagattataaa

SEQ ID NO: 178476 - DNA, 27 bp, Artificial sequence
  SiRNA target sequence
ttaatatacctgagatagattataaat

SEQ ID NO: 178477 - DNA, 27 bp, Artificial sequence
  SiRNA target sequence
taatatacctgagatagattataaata

SEQ ID NO: 178478 - DNA, 27 bp, Artificial sequence
  SiRNA target sequence
aatatacctgagatagattataaatat

SEQ ID NO: 178479 - DNA, 27 bp, Artificial sequence
  SiRNA target sequence
atatacctgagatagattataaatata

SEQ ID NO: 178480 - DNA, 27 bp, Artificial sequence
  SiRNA target sequence
tatacctgagatagattataaatataa

SEQ ID NO: 178481 - DNA, 27 bp, Artificial sequence
  SiRNA target sequence
atacctgagatagattataaatataaa

SEQ ID NO: 178482 - DNA, 27 bp, Artificial sequence
  SiRNA target sequence
tacctgagatagattataaatataaaa

SEQ ID NO: 178483 - DNA, 27 bp, Artificial sequence
  SiRNA target sequence
acctgagatagattataaatataaaaa

SEQ ID NO: 178484 - DNA, 27 bp, Artificial sequence
  SiRNA target sequence
cctgagatagattataaatataaaaat

SEQ ID NO: 178485 - DNA, 27 bp, Artificial sequence
  SiRNA target sequence
ctgagatagattataaatataaaaatg

SEQ ID NO: 178486 - DNA, 27 bp, Artificial sequence
  SiRNA target sequence
tgagatagattataaatataaaaatgg

SEQ ID NO: 178487 - DNA, 27 bp, Artificial sequence
  SiRNA target sequence
gagatagattataaatataaaaatgga

SEQ ID NO: 178488 - DNA, 27 bp, Artificial sequence
  SiRNA target sequence
agatagattataaatataaaaatggag

SEQ ID NO: 178489 - DNA, 27 bp, Artificial sequence
  SiRNA target sequence
gatagattataaatataaaaatggagt

SEQ ID NO: 178490 - DNA, 27 bp, Artificial sequence
  SiRNA target sequence
atagattataaatataaaaatggagtg

SEQ ID NO: 178491 - DNA, 27 bp, Artificial sequence
  SiRNA target sequence
tagattataaatataaaaatggagtgt

SEQ ID NO: 178492 - DNA, 27 bp, Artificial sequence
  SiRNA target sequence
agattataaatataaaaatggagtgtt

SEQ ID NO: 178493 - DNA, 27 bp, Artificial sequence
  SiRNA target sequence
gattataaatataaaaatggagtgttt

SEQ ID NO: 178494 - DNA, 27 bp, Artificial sequence
  SiRNA target sequence
attataaatataaaaatggagtgttta

SEQ ID NO: 178495 - DNA, 27 bp, Artificial sequence
  SiRNA target sequence
ttataaatataaaaatggagtgtttac

SEQ ID NO: 178496 - DNA, 27 bp, Artificial sequence
  SiRNA target sequence
tataaatataaaaatggagtgtttaca

SEQ ID NO: 178497 - DNA, 27 bp, Artificial sequence
  SiRNA target sequence
ataaatataaaaatggagtgtttacat

SEQ ID NO: 178498 - DNA, 27 bp, Artificial sequence
  SiRNA target sequence
taaatataaaaatggagtgtttacata

SEQ ID NO: 178499 - DNA, 27 bp, Artificial sequence
  SiRNA target sequence
aaatataaaaatggagtgtttacatat

SEQ ID NO: 178500 - DNA, 27 bp, Artificial sequence
  SiRNA target sequence
aatataaaaatggagtgtttacatata

SEQ ID NO: 178501 - DNA, 27 bp, Artificial sequence
  SiRNA target sequence
atataaaaatggagtgtttacatatac

SEQ ID NO: 178502 - DNA, 27 bp, Artificial sequence
  SiRNA target sequence
tataaaaatggagtgtttacatataca

SEQ ID NO: 178503 - DNA, 27 bp, Artificial sequence
  SiRNA target sequence
ataaaaatggagtgtttacatatacac

SEQ ID NO: 178504 - DNA, 27 bp, Artificial sequence
  SiRNA target sequence
taaaaatggagtgtttacatatacaca

SEQ ID NO: 178505 - DNA, 27 bp, Artificial sequence
  SiRNA target sequence
aaaaatggagtgtttacatatacacag

SEQ ID NO: 178506 - DNA, 27 bp, Artificial sequence
  SiRNA target sequence
aaaatggagtgtttacatatacacaga

SEQ ID NO: 178507 - DNA, 27 bp, Artificial sequence
  SiRNA target sequence
aaatggagtgtttacatatacacagat

SEQ ID NO: 178508 - DNA, 27 bp, Artificial sequence
  SiRNA target sequence
aatggagtgtttacatatacacagatc

SEQ ID NO: 178509 - DNA, 27 bp, Artificial sequence
  SiRNA target sequence
atggagtgtttacatatacacagatca

SEQ ID NO: 178510 - DNA, 27 bp, Artificial sequence
  SiRNA target sequence
tggagtgtttacatatacacagatcaa

SEQ ID NO: 178511 - DNA, 27 bp, Artificial sequence
  SiRNA target sequence
ggagtgtttacatatacacagatcaaa

SEQ ID NO: 178512 - DNA, 27 bp, Artificial sequence
  SiRNA target sequence
gagtgtttacatatacacagatcaaaa

SEQ ID NO: 178513 - DNA, 27 bp, Artificial sequence
  SiRNA target sequence
agtgtttacatatacacagatcaaaaa

SEQ ID NO: 178514 - DNA, 27 bp, Artificial sequence
  SiRNA target sequence
gtgtttacatatacacagatcaaaaat

SEQ ID NO: 178515 - DNA, 27 bp, Artificial sequence
  SiRNA target sequence
tgtttacatatacacagatcaaaaata

SEQ ID NO: 178516 - DNA, 27 bp, Artificial sequence
  SiRNA target sequence
gtttacatatacacagatcaaaaataa

SEQ ID NO: 178517 - DNA, 27 bp, Artificial sequence
  SiRNA target sequence
tttacatatacacagatcaaaaataat

SEQ ID NO: 178518 - DNA, 27 bp, Artificial sequence
  SiRNA target sequence
ttacatatacacagatcaaaaataata

SEQ ID NO: 178519 - DNA, 27 bp, Artificial sequence
  SiRNA target sequence
tacatatacacagatcaaaaataataa

SEQ ID NO: 178520 - DNA, 27 bp, Artificial sequence
  SiRNA target sequence
acatatacacagatcaaaaataataag

SEQ ID NO: 178521 - DNA, 27 bp, Artificial sequence
  SiRNA target sequence
catatacacagatcaaaaataataaga

SEQ ID NO: 178522 - DNA, 27 bp, Artificial sequence
  SiRNA target sequence
atatacacagatcaaaaataataagaa

SEQ ID NO: 178523 - DNA, 27 bp, Artificial sequence
  SiRNA target sequence
tatacacagatcaaaaataataagaaa

SEQ ID NO: 178524 - DNA, 27 bp, Artificial sequence
  SiRNA target sequence
atacacagatcaaaaataataagaaaa

SEQ ID NO: 178525 - DNA, 27 bp, Artificial sequence
  SiRNA target sequence
tacacagatcaaaaataataagaaaaa

SEQ ID NO: 178526 - DNA, 27 bp, Artificial sequence
  SiRNA target sequence
acacagatcaaaaataataagaaaaaa

SEQ ID NO: 178527 - DNA, 27 bp, Artificial sequence
  SiRNA target sequence
cacagatcaaaaataataagaaaaaaa

SEQ ID NO: 178528 - DNA, 27 bp, Artificial sequence
  SiRNA target sequence
acagatcaaaaataataagaaaaaaaa

SEQ ID NO: 178529 - DNA, 27 bp, Artificial sequence
  SiRNA target sequence
cagatcaaaaataataagaaaaaaaaa

SEQ ID NO: 178530 - DNA, 27 bp, Artificial sequence
  SiRNA target sequence
agatcaaaaataataagaaaaaaaaat

SEQ ID NO: 178531 - DNA, 27 bp, Artificial sequence
  SiRNA target sequence
gatcaaaaataataagaaaaaaaaata

SEQ ID NO: 178532 - DNA, 27 bp, Artificial sequence
  SiRNA target sequence
atcaaaaataataagaaaaaaaaatat

SEQ ID NO: 178533 - DNA, 27 bp, Artificial sequence
  SiRNA target sequence
tcaaaaataataagaaaaaaaaatatt

SEQ ID NO: 178534 - DNA, 27 bp, Artificial sequence
  SiRNA target sequence
caaaaataataagaaaaaaaaatattt

SEQ ID NO: 178535 - DNA, 27 bp, Artificial sequence
  SiRNA target sequence
aaaaataataagaaaaaaaaatattta

SEQ ID NO: 178536 - DNA, 27 bp, Artificial sequence
  SiRNA target sequence
aaaataataagaaaaaaaaatatttaa

SEQ ID NO: 178537 - DNA, 27 bp, Artificial sequence
  SiRNA target sequence
aaataataagaaaaaaaaatatttaag

SEQ ID NO: 178538 - DNA, 27 bp, Artificial sequence
  SiRNA target sequence
aataataagaaaaaaaaatatttaaga

SEQ ID NO: 178539 - DNA, 27 bp, Artificial sequence
  SiRNA target sequence
ataataagaaaaaaaaatatttaagaa

SEQ ID NO: 178540 - DNA, 27 bp, Artificial sequence
  SiRNA target sequence
taataagaaaaaaaaatatttaagaat

SEQ ID NO: 178541 - DNA, 27 bp, Artificial sequence
  SiRNA target sequence
aataagaaaaaaaaatatttaagaata

SEQ ID NO: 178542 - DNA, 27 bp, Artificial sequence
  SiRNA target sequence
ataagaaaaaaaaatatttaagaatat

SEQ ID NO: 178543 - DNA, 27 bp, Artificial sequence
  SiRNA target sequence
taagaaaaaaaaatatttaagaatatt

SEQ ID NO: 178544 - DNA, 27 bp, Artificial sequence
  SiRNA target sequence
aagaaaaaaaaatatttaagaatattg

SEQ ID NO: 178545 - DNA, 27 bp, Artificial sequence
  SiRNA target sequence
agaaaaaaaaatatttaagaatattgg

SEQ ID NO: 178546 - DNA, 27 bp, Artificial sequence
  SiRNA target sequence
gaaaaaaaaatatttaagaatattggg

SEQ ID NO: 178547 - DNA, 27 bp, Artificial sequence
  SiRNA target sequence
aaaaaaaaatatttaagaatattgggt

SEQ ID NO: 178548 - DNA, 27 bp, Artificial sequence
  SiRNA target sequence
aaaaaaaatatttaagaatattgggtc

SEQ ID NO: 178549 - DNA, 27 bp, Artificial sequence
  SiRNA target sequence
aaaaaaatatttaagaatattgggtct

SEQ ID NO: 178550 - DNA, 27 bp, Artificial sequence
  SiRNA target sequence
aaaaaatatttaagaatattgggtcta

SEQ ID NO: 178551 - DNA, 27 bp, Artificial sequence
  SiRNA target sequence
aaaaatatttaagaatattgggtctag

SEQ ID NO: 178552 - DNA, 27 bp, Artificial sequence
  SiRNA target sequence
aaaatatttaagaatattgggtctaga

SEQ ID NO: 178553 - DNA, 27 bp, Artificial sequence
  SiRNA target sequence
aaatatttaagaatattgggtctagaa

SEQ ID NO: 178554 - DNA, 27 bp, Artificial sequence
  SiRNA target sequence
aatatttaagaatattgggtctagaac

SEQ ID NO: 178555 - DNA, 27 bp, Artificial sequence
  SiRNA target sequence
atatttaagaatattgggtctagaacc

SEQ ID NO: 178556 - DNA, 27 bp, Artificial sequence
  SiRNA target sequence
tatttaagaatattgggtctagaacct

SEQ ID NO: 178557 - DNA, 27 bp, Artificial sequence
  SiRNA target sequence
atttaagaatattgggtctagaacctt

SEQ ID NO: 178558 - DNA, 27 bp, Artificial sequence
  SiRNA target sequence
tttaagaatattgggtctagaaccttt

SEQ ID NO: 178559 - DNA, 27 bp, Artificial sequence
  SiRNA target sequence
ttaagaatattgggtctagaacctttt

SEQ ID NO: 178560 - DNA, 27 bp, Artificial sequence
  SiRNA target sequence
taagaatattgggtctagaaccttttc

SEQ ID NO: 178561 - DNA, 27 bp, Artificial sequence
  SiRNA target sequence
aagaatattgggtctagaaccttttct

SEQ ID NO: 178562 - DNA, 27 bp, Artificial sequence
  SiRNA target sequence
agaatattgggtctagaaccttttctt

SEQ ID NO: 178563 - DNA, 27 bp, Artificial sequence
  SiRNA target sequence
gaatattgggtctagaaccttttctta

SEQ ID NO: 178564 - DNA, 27 bp, Artificial sequence
  SiRNA target sequence
aatattgggtctagaaccttttcttaa

SEQ ID NO: 178565 - DNA, 27 bp, Artificial sequence
  SiRNA target sequence
atattgggtctagaaccttttcttaat

SEQ ID NO: 178566 - DNA, 27 bp, Artificial sequence
  SiRNA target sequence
tattgggtctagaaccttttcttaatt

SEQ ID NO: 178567 - DNA, 27 bp, Artificial sequence
  SiRNA target sequence
attgggtctagaaccttttcttaattt

SEQ ID NO: 178568 - DNA, 27 bp, Artificial sequence
  SiRNA target sequence
ttgggtctagaaccttttcttaatttt

SEQ ID NO: 178569 - DNA, 27 bp, Artificial sequence
  SiRNA target sequence
tgggtctagaaccttttcttaatttta

SEQ ID NO: 178570 - DNA, 27 bp, Artificial sequence
  SiRNA target sequence
gggtctagaaccttttcttaattttat

SEQ ID NO: 178571 - DNA, 27 bp, Artificial sequence
  SiRNA target sequence
ggtctagaaccttttcttaattttatt

SEQ ID NO: 178572 - DNA, 27 bp, Artificial sequence
  SiRNA target sequence
gtctagaaccttttcttaattttatta

SEQ ID NO: 178573 - DNA, 27 bp, Artificial sequence
  SiRNA target sequence
tctagaaccttttcttaattttattaa

SEQ ID NO: 178574 - DNA, 27 bp, Artificial sequence
  SiRNA target sequence
ctagaaccttttcttaattttattaag

SEQ ID NO: 178575 - DNA, 27 bp, Artificial sequence
  SiRNA target sequence
tagaaccttttcttaattttattaagg

SEQ ID NO: 178576 - DNA, 27 bp, Artificial sequence
  SiRNA target sequence
agaaccttttcttaattttattaagga

SEQ ID NO: 178577 - DNA, 27 bp, Artificial sequence
  SiRNA target sequence
gaaccttttcttaattttattaaggaa

SEQ ID NO: 178578 - DNA, 27 bp, Artificial sequence
  SiRNA target sequence
aaccttttcttaattttattaaggaaa

SEQ ID NO: 178579 - DNA, 27 bp, Artificial sequence
  SiRNA target sequence
accttttcttaattttattaaggaaag

SEQ ID NO: 178580 - DNA, 27 bp, Artificial sequence
  SiRNA target sequence
ccttttcttaattttattaaggaaagt

SEQ ID NO: 178581 - DNA, 27 bp, Artificial sequence
  SiRNA target sequence
cttttcttaattttattaaggaaagta

SEQ ID NO: 178582 - DNA, 27 bp, Artificial sequence
  SiRNA target sequence
ttttcttaattttattaaggaaagtaa

SEQ ID NO: 178583 - DNA, 27 bp, Artificial sequence
  SiRNA target sequence
tttcttaattttattaaggaaagtaaa

SEQ ID NO: 178584 - DNA, 27 bp, Artificial sequence
  SiRNA target sequence
ttcttaattttattaaggaaagtaaac

SEQ ID NO: 178585 - DNA, 27 bp, Artificial sequence
  SiRNA target sequence
tcttaattttattaaggaaagtaaaca

SEQ ID NO: 178586 - DNA, 27 bp, Artificial sequence
  SiRNA target sequence
cttaattttattaaggaaagtaaacat

SEQ ID NO: 178587 - DNA, 27 bp, Artificial sequence
  SiRNA target sequence
ttaattttattaaggaaagtaaacata

SEQ ID NO: 178588 - DNA, 27 bp, Artificial sequence
  SiRNA target sequence
taattttattaaggaaagtaaacataa

SEQ ID NO: 178589 - DNA, 27 bp, Artificial sequence
  SiRNA target sequence
aattttattaaggaaagtaaacataaa

SEQ ID NO: 178590 - DNA, 27 bp, Artificial sequence
  SiRNA target sequence
attttattaaggaaagtaaacataaag

SEQ ID NO: 178591 - DNA, 27 bp, Artificial sequence
  SiRNA target sequence
ttttattaaggaaagtaaacataaaga

SEQ ID NO: 178592 - DNA, 27 bp, Artificial sequence
  SiRNA target sequence
tttattaaggaaagtaaacataaagaa

SEQ ID NO: 178593 - DNA, 27 bp, Artificial sequence
  SiRNA target sequence
ttattaaggaaagtaaacataaagaat

SEQ ID NO: 178594 - DNA, 27 bp, Artificial sequence
  SiRNA target sequence
tattaaggaaagtaaacataaagaatt

SEQ ID NO: 178595 - DNA, 27 bp, Artificial sequence
  SiRNA target sequence
attaaggaaagtaaacataaagaatta

SEQ ID NO: 178596 - DNA, 27 bp, Artificial sequence
  SiRNA target sequence
ttaaggaaagtaaacataaagaattag

SEQ ID NO: 178597 - DNA, 27 bp, Artificial sequence
  SiRNA target sequence
taaggaaagtaaacataaagaattaga

SEQ ID NO: 178598 - DNA, 27 bp, Artificial sequence
  SiRNA target sequence
aaggaaagtaaacataaagaattagaa

SEQ ID NO: 178599 - DNA, 27 bp, Artificial sequence
  SiRNA target sequence
aggaaagtaaacataaagaattagaat

SEQ ID NO: 178600 - DNA, 27 bp, Artificial sequence
  SiRNA target sequence
ggaaagtaaacataaagaattagaata

SEQ ID NO: 178601 - DNA, 27 bp, Artificial sequence
  SiRNA target sequence
gaaagtaaacataaagaattagaatat

SEQ ID NO: 178602 - DNA, 27 bp, Artificial sequence
  SiRNA target sequence
aaagtaaacataaagaattagaatatg

SEQ ID NO: 178603 - DNA, 27 bp, Artificial sequence
  SiRNA target sequence
aagtaaacataaagaattagaatatga

SEQ ID NO: 178604 - DNA, 27 bp, Artificial sequence
  SiRNA target sequence
agtaaacataaagaattagaatatgat

SEQ ID NO: 178605 - DNA, 27 bp, Artificial sequence
  SiRNA target sequence
gtaaacataaagaattagaatatgatg

SEQ ID NO: 178606 - DNA, 27 bp, Artificial sequence
  SiRNA target sequence
taaacataaagaattagaatatgatgt

SEQ ID NO: 178607 - DNA, 27 bp, Artificial sequence
  SiRNA target sequence
aaacataaagaattagaatatgatgta

SEQ ID NO: 178608 - DNA, 27 bp, Artificial sequence
  SiRNA target sequence
aacataaagaattagaatatgatgtat

SEQ ID NO: 178609 - DNA, 27 bp, Artificial sequence
  SiRNA target sequence
acataaagaattagaatatgatgtatg

SEQ ID NO: 178610 - DNA, 27 bp, Artificial sequence
  SiRNA target sequence
cataaagaattagaatatgatgtatgc

SEQ ID NO: 178611 - DNA, 27 bp, Artificial sequence
  SiRNA target sequence
ataaagaattagaatatgatgtatgcg

SEQ ID NO: 178612 - DNA, 27 bp, Artificial sequence
  SiRNA target sequence
taaagaattagaatatgatgtatgcga

SEQ ID NO: 178613 - DNA, 27 bp, Artificial sequence
  SiRNA target sequence
aaagaattagaatatgatgtatgcgaa

SEQ ID NO: 178614 - DNA, 27 bp, Artificial sequence
  SiRNA target sequence
aagaattagaatatgatgtatgcgaaa

SEQ ID NO: 178615 - DNA, 27 bp, Artificial sequence
  SiRNA target sequence
agaattagaatatgatgtatgcgaaat

SEQ ID NO: 178616 - DNA, 27 bp, Artificial sequence
  SiRNA target sequence
gaattagaatatgatgtatgcgaaata

SEQ ID NO: 178617 - DNA, 27 bp, Artificial sequence
  SiRNA target sequence
aattagaatatgatgtatgcgaaatat

SEQ ID NO: 178618 - DNA, 27 bp, Artificial sequence
  SiRNA target sequence
attagaatatgatgtatgcgaaatata

SEQ ID NO: 178619 - DNA, 27 bp, Artificial sequence
  SiRNA target sequence
ttagaatatgatgtatgcgaaatatac

SEQ ID NO: 178620 - DNA, 27 bp, Artificial sequence
  SiRNA target sequence
tagaatatgatgtatgcgaaatataca

SEQ ID NO: 178621 - DNA, 27 bp, Artificial sequence
  SiRNA target sequence
agaatatgatgtatgcgaaatatacat

SEQ ID NO: 178622 - DNA, 27 bp, Artificial sequence
  SiRNA target sequence
gaatatgatgtatgcgaaatatacatt

SEQ ID NO: 178623 - DNA, 27 bp, Artificial sequence
  SiRNA target sequence
aatatgatgtatgcgaaatatacattt

SEQ ID NO: 178624 - DNA, 27 bp, Artificial sequence
  SiRNA target sequence
atatgatgtatgcgaaatatacatttg

SEQ ID NO: 178625 - DNA, 27 bp, Artificial sequence
  SiRNA target sequence
tatgatgtatgcgaaatatacatttgt

SEQ ID NO: 178626 - DNA, 27 bp, Artificial sequence
  SiRNA target sequence
atgatgtatgcgaaatatacatttgta

SEQ ID NO: 178627 - DNA, 27 bp, Artificial sequence
  SiRNA target sequence
tgatgtatgcgaaatatacatttgtaa

SEQ ID NO: 178628 - DNA, 27 bp, Artificial sequence
  SiRNA target sequence
gatgtatgcgaaatatacatttgtaat

SEQ ID NO: 178629 - DNA, 27 bp, Artificial sequence
  SiRNA target sequence
atgtatgcgaaatatacatttgtaatc

SEQ ID NO: 178630 - DNA, 27 bp, Artificial sequence
  SiRNA target sequence
tgtatgcgaaatatacatttgtaatca

SEQ ID NO: 178631 - DNA, 27 bp, Artificial sequence
  SiRNA target sequence
gtatgcgaaatatacatttgtaatcag

SEQ ID NO: 178632 - DNA, 27 bp, Artificial sequence
  SiRNA target sequence
tatgcgaaatatacatttgtaatcagg

SEQ ID NO: 178633 - DNA, 27 bp, Artificial sequence
  SiRNA target sequence
atgcgaaatatacatttgtaatcaggg

SEQ ID NO: 178634 - DNA, 27 bp, Artificial sequence
  SiRNA target sequence
tgcgaaatatacatttgtaatcaggga

SEQ ID NO: 178635 - DNA, 27 bp, Artificial sequence
  SiRNA target sequence
gcgaaatatacatttgtaatcagggat

SEQ ID NO: 178636 - DNA, 27 bp, Artificial sequence
  SiRNA target sequence
cgaaatatacatttgtaatcagggatg

SEQ ID NO: 178637 - DNA, 27 bp, Artificial sequence
  SiRNA target sequence
gaaatatacatttgtaatcagggatgc

SEQ ID NO: 178638 - DNA, 27 bp, Artificial sequence
  SiRNA target sequence
aaatatacatttgtaatcagggatgca

SEQ ID NO: 178639 - DNA, 27 bp, Artificial sequence
  SiRNA target sequence
aatatacatttgtaatcagggatgcat

SEQ ID NO: 178640 - DNA, 27 bp, Artificial sequence
  SiRNA target sequence
atatacatttgtaatcagggatgcatt

SEQ ID NO: 178641 - DNA, 27 bp, Artificial sequence
  SiRNA target sequence
tatacatttgtaatcagggatgcatta

SEQ ID NO: 178642 - DNA, 27 bp, Artificial sequence
  SiRNA target sequence
atacatttgtaatcagggatgcattaa

SEQ ID NO: 178643 - DNA, 27 bp, Artificial sequence
  SiRNA target sequence
tacatttgtaatcagggatgcattaat

SEQ ID NO: 178644 - DNA, 27 bp, Artificial sequence
  SiRNA target sequence
acatttgtaatcagggatgcattaatg

SEQ ID NO: 178645 - DNA, 27 bp, Artificial sequence
  SiRNA target sequence
catttgtaatcagggatgcattaatgg

SEQ ID NO: 178646 - DNA, 27 bp, Artificial sequence
  SiRNA target sequence
atttgtaatcagggatgcattaatgga

SEQ ID NO: 178647 - DNA, 27 bp, Artificial sequence
  SiRNA target sequence
tttgtaatcagggatgcattaatggac

SEQ ID NO: 178648 - DNA, 27 bp, Artificial sequence
  SiRNA target sequence
ttgtaatcagggatgcattaatggacc

SEQ ID NO: 178649 - DNA, 27 bp, Artificial sequence
  SiRNA target sequence
tgtaatcagggatgcattaatggacca

SEQ ID NO: 178650 - DNA, 27 bp, Artificial sequence
  SiRNA target sequence
gtaatcagggatgcattaatggaccag

SEQ ID NO: 178651 - DNA, 27 bp, Artificial sequence
  SiRNA target sequence
taatcagggatgcattaatggaccagg

SEQ ID NO: 178652 - DNA, 27 bp, Artificial sequence
  SiRNA target sequence
aatcagggatgcattaatggaccagga

SEQ ID NO: 178653 - DNA, 27 bp, Artificial sequence
  SiRNA target sequence
atcagggatgcattaatggaccaggac

SEQ ID NO: 178654 - DNA, 27 bp, Artificial sequence
  SiRNA target sequence
tcagggatgcattaatggaccaggaca

SEQ ID NO: 178655 - DNA, 27 bp, Artificial sequence
  SiRNA target sequence
cagggatgcattaatggaccaggacaa

SEQ ID NO: 178656 - DNA, 27 bp, Artificial sequence
  SiRNA target sequence
agggatgcattaatggaccaggacaat

SEQ ID NO: 178657 - DNA, 27 bp, Artificial sequence
  SiRNA target sequence
gggatgcattaatggaccaggacaatt

SEQ ID NO: 178658 - DNA, 27 bp, Artificial sequence
  SiRNA target sequence
ggatgcattaatggaccaggacaattg

SEQ ID NO: 178659 - DNA, 27 bp, Artificial sequence
  SiRNA target sequence
gatgcattaatggaccaggacaattgt

SEQ ID NO: 178660 - DNA, 27 bp, Artificial sequence
  SiRNA target sequence
atgcattaatggaccaggacaattgta

SEQ ID NO: 178661 - DNA, 27 bp, Artificial sequence
  SiRNA target sequence
tgcattaatggaccaggacaattgtat

SEQ ID NO: 178662 - DNA, 27 bp, Artificial sequence
  SiRNA target sequence
gcattaatggaccaggacaattgtata

SEQ ID NO: 178663 - DNA, 27 bp, Artificial sequence
  SiRNA target sequence
cattaatggaccaggacaattgtatac

SEQ ID NO: 178664 - DNA, 27 bp, Artificial sequence
  SiRNA target sequence
attaatggaccaggacaattgtataca

SEQ ID NO: 178665 - DNA, 27 bp, Artificial sequence
  SiRNA target sequence
ttaatggaccaggacaattgtatacag

SEQ ID NO: 178666 - DNA, 27 bp, Artificial sequence
  SiRNA target sequence
taatggaccaggacaattgtatacaga

SEQ ID NO: 178667 - DNA, 27 bp, Artificial sequence
  SiRNA target sequence
aatggaccaggacaattgtatacagat

SEQ ID NO: 178668 - DNA, 27 bp, Artificial sequence
  SiRNA target sequence
atggaccaggacaattgtatacagata

SEQ ID NO: 178669 - DNA, 27 bp, Artificial sequence
  SiRNA target sequence
tggaccaggacaattgtatacagataa

SEQ ID NO: 178670 - DNA, 27 bp, Artificial sequence
  SiRNA target sequence
ggaccaggacaattgtatacagataat

SEQ ID NO: 178671 - DNA, 27 bp, Artificial sequence
  SiRNA target sequence
gaccaggacaattgtatacagataatt

SEQ ID NO: 178672 - DNA, 27 bp, Artificial sequence
  SiRNA target sequence
accaggacaattgtatacagataattt

SEQ ID NO: 178673 - DNA, 27 bp, Artificial sequence
  SiRNA target sequence
ccaggacaattgtatacagataattta

SEQ ID NO: 178674 - DNA, 27 bp, Artificial sequence
  SiRNA target sequence
caggacaattgtatacagataatttat

SEQ ID NO: 178675 - DNA, 27 bp, Artificial sequence
  SiRNA target sequence
aggacaattgtatacagataatttata

SEQ ID NO: 178676 - DNA, 27 bp, Artificial sequence
  SiRNA target sequence
ggacaattgtatacagataatttatat

SEQ ID NO: 178677 - DNA, 27 bp, Artificial sequence
  SiRNA target sequence
gacaattgtatacagataatttatatg

SEQ ID NO: 178678 - DNA, 27 bp, Artificial sequence
  SiRNA target sequence
acaattgtatacagataatttatatgt

SEQ ID NO: 178679 - DNA, 27 bp, Artificial sequence
  SiRNA target sequence
caattgtatacagataatttatatgta

SEQ ID NO: 178680 - DNA, 27 bp, Artificial sequence
  SiRNA target sequence
aattgtatacagataatttatatgtaa

SEQ ID NO: 178681 - DNA, 27 bp, Artificial sequence
  SiRNA target sequence
attgtatacagataatttatatgtaaa

SEQ ID NO: 178682 - DNA, 27 bp, Artificial sequence
  SiRNA target sequence
ttgtatacagataatttatatgtaaat

SEQ ID NO: 178683 - DNA, 27 bp, Artificial sequence
  SiRNA target sequence
tgtatacagataatttatatgtaaata

SEQ ID NO: 178684 - DNA, 27 bp, Artificial sequence
  SiRNA target sequence
gtatacagataatttatatgtaaataa

SEQ ID NO: 178685 - DNA, 27 bp, Artificial sequence
  SiRNA target sequence
tatacagataatttatatgtaaataat

SEQ ID NO: 178686 - DNA, 27 bp, Artificial sequence
  SiRNA target sequence
atacagataatttatatgtaaataatt

SEQ ID NO: 178687 - DNA, 27 bp, Artificial sequence
  SiRNA target sequence
tacagataatttatatgtaaataattc

SEQ ID NO: 178688 - DNA, 27 bp, Artificial sequence
  SiRNA target sequence
acagataatttatatgtaaataattca

SEQ ID NO: 178689 - DNA, 27 bp, Artificial sequence
  SiRNA target sequence
cagataatttatatgtaaataattcag

SEQ ID NO: 178690 - DNA, 27 bp, Artificial sequence
  SiRNA target sequence
agataatttatatgtaaataattcaga

SEQ ID NO: 178691 - DNA, 27 bp, Artificial sequence
  SiRNA target sequence
gataatttatatgtaaataattcagaa

SEQ ID NO: 178692 - DNA, 27 bp, Artificial sequence
  SiRNA target sequence
ataatttatatgtaaataattcagaat

SEQ ID NO: 178693 - DNA, 27 bp, Artificial sequence
  SiRNA target sequence
taatttatatgtaaataattcagaata

SEQ ID NO: 178694 - DNA, 27 bp, Artificial sequence
  SiRNA target sequence
aatttatatgtaaataattcagaatac

SEQ ID NO: 178695 - DNA, 27 bp, Artificial sequence
  SiRNA target sequence
atttatatgtaaataattcagaataca

SEQ ID NO: 178696 - DNA, 27 bp, Artificial sequence
  SiRNA target sequence
tttatatgtaaataattcagaatacat

SEQ ID NO: 178697 - DNA, 27 bp, Artificial sequence
  SiRNA target sequence
ttatatgtaaataattcagaatacata

SEQ ID NO: 178698 - DNA, 27 bp, Artificial sequence
  SiRNA target sequence
tatatgtaaataattcagaatacatag

SEQ ID NO: 178699 - DNA, 27 bp, Artificial sequence
  SiRNA target sequence
atatgtaaataattcagaatacataga

SEQ ID NO: 178700 - DNA, 27 bp, Artificial sequence
  SiRNA target sequence
tatgtaaataattcagaatacatagat

SEQ ID NO: 178701 - DNA, 27 bp, Artificial sequence
  SiRNA target sequence
atgtaaataattcagaatacatagata

SEQ ID NO: 178702 - DNA, 27 bp, Artificial sequence
  SiRNA target sequence
tgtaaataattcagaatacatagatat

SEQ ID NO: 178703 - DNA, 27 bp, Artificial sequence
  SiRNA target sequence
gtaaataattcagaatacatagatatt

SEQ ID NO: 178704 - DNA, 27 bp, Artificial sequence
  SiRNA target sequence
taaataattcagaatacatagatattg

SEQ ID NO: 178705 - DNA, 27 bp, Artificial sequence
  SiRNA target sequence
aaataattcagaatacatagatattga

SEQ ID NO: 178706 - DNA, 27 bp, Artificial sequence
  SiRNA target sequence
aataattcagaatacatagatattgat

SEQ ID NO: 178707 - DNA, 27 bp, Artificial sequence
  SiRNA target sequence
ataattcagaatacatagatattgatc

SEQ ID NO: 178708 - DNA, 27 bp, Artificial sequence
  SiRNA target sequence
taattcagaatacatagatattgatct

SEQ ID NO: 178709 - DNA, 27 bp, Artificial sequence
  SiRNA target sequence
aattcagaatacatagatattgatctt

SEQ ID NO: 178710 - DNA, 27 bp, Artificial sequence
  SiRNA target sequence
attcagaatacatagatattgatcttg

SEQ ID NO: 178711 - DNA, 27 bp, Artificial sequence
  SiRNA target sequence
ttcagaatacatagatattgatcttgg

SEQ ID NO: 178712 - DNA, 27 bp, Artificial sequence
  SiRNA target sequence
tcagaatacatagatattgatcttggt

SEQ ID NO: 178713 - DNA, 27 bp, Artificial sequence
  SiRNA target sequence
cagaatacatagatattgatcttggta

SEQ ID NO: 178714 - DNA, 27 bp, Artificial sequence
  SiRNA target sequence
agaatacatagatattgatcttggtat

SEQ ID NO: 178715 - DNA, 27 bp, Artificial sequence
  SiRNA target sequence
gaatacatagatattgatcttggtatt

SEQ ID NO: 178716 - DNA, 27 bp, Artificial sequence
  SiRNA target sequence
aatacatagatattgatcttggtattg

SEQ ID NO: 178717 - DNA, 27 bp, Artificial sequence
  SiRNA target sequence
atacatagatattgatcttggtattga

SEQ ID NO: 178718 - DNA, 27 bp, Artificial sequence
  SiRNA target sequence
tacatagatattgatcttggtattgat

SEQ ID NO: 178719 - DNA, 27 bp, Artificial sequence
  SiRNA target sequence
acatagatattgatcttggtattgatt

SEQ ID NO: 178720 - DNA, 27 bp, Artificial sequence
  SiRNA target sequence
catagatattgatcttggtattgattg

SEQ ID NO: 178721 - DNA, 27 bp, Artificial sequence
  SiRNA target sequence
atagatattgatcttggtattgattgt

SEQ ID NO: 178722 - DNA, 27 bp, Artificial sequence
  SiRNA target sequence
tagatattgatcttggtattgattgta

SEQ ID NO: 178723 - DNA, 27 bp, Artificial sequence
  SiRNA target sequence
agatattgatcttggtattgattgtaa

SEQ ID NO: 178724 - DNA, 27 bp, Artificial sequence
  SiRNA target sequence
gatattgatcttggtattgattgtaaa

SEQ ID NO: 178725 - DNA, 27 bp, Artificial sequence
  SiRNA target sequence
atattgatcttggtattgattgtaaac

SEQ ID NO: 178726 - DNA, 27 bp, Artificial sequence
  SiRNA target sequence
tattgatcttggtattgattgtaaaca

SEQ ID NO: 178727 - DNA, 27 bp, Artificial sequence
  SiRNA target sequence
attgatcttggtattgattgtaaacag

SEQ ID NO: 178728 - DNA, 27 bp, Artificial sequence
  SiRNA target sequence
ttgatcttggtattgattgtaaacagt

SEQ ID NO: 178729 - DNA, 27 bp, Artificial sequence
  SiRNA target sequence
tgatcttggtattgattgtaaacagtt

SEQ ID NO: 178730 - DNA, 27 bp, Artificial sequence
  SiRNA target sequence
gatcttggtattgattgtaaacagtta

SEQ ID NO: 178731 - DNA, 27 bp, Artificial sequence
  SiRNA target sequence
atcttggtattgattgtaaacagttac

SEQ ID NO: 178732 - DNA, 27 bp, Artificial sequence
  SiRNA target sequence
tcttggtattgattgtaaacagttaca

SEQ ID NO: 178733 - DNA, 27 bp, Artificial sequence
  SiRNA target sequence
cttggtattgattgtaaacagttacaa

SEQ ID NO: 178734 - DNA, 27 bp, Artificial sequence
  SiRNA target sequence
ttggtattgattgtaaacagttacaaa

SEQ ID NO: 178735 - DNA, 27 bp, Artificial sequence
  SiRNA target sequence
tggtattgattgtaaacagttacaaaa

SEQ ID NO: 178736 - DNA, 27 bp, Artificial sequence
  SiRNA target sequence
ggtattgattgtaaacagttacaaaaa

SEQ ID NO: 178737 - DNA, 27 bp, Artificial sequence
  SiRNA target sequence
gtattgattgtaaacagttacaaaaaa

SEQ ID NO: 178738 - DNA, 27 bp, Artificial sequence
  SiRNA target sequence
tattgattgtaaacagttacaaaaaag

SEQ ID NO: 178739 - DNA, 27 bp, Artificial sequence
  SiRNA target sequence
attgattgtaaacagttacaaaaaagg

SEQ ID NO: 178740 - DNA, 27 bp, Artificial sequence
  SiRNA target sequence
ttgattgtaaacagttacaaaaaagga

SEQ ID NO: 178741 - DNA, 27 bp, Artificial sequence
  SiRNA target sequence
tgattgtaaacagttacaaaaaaggac

SEQ ID NO: 178742 - DNA, 27 bp, Artificial sequence
  SiRNA target sequence
gattgtaaacagttacaaaaaaggaca

SEQ ID NO: 178743 - DNA, 27 bp, Artificial sequence
  SiRNA target sequence
attgtaaacagttacaaaaaaggacat

SEQ ID NO: 178744 - DNA, 27 bp, Artificial sequence
  SiRNA target sequence
ttgtaaacagttacaaaaaaggacata

SEQ ID NO: 178745 - DNA, 27 bp, Artificial sequence
  SiRNA target sequence
tgtaaacagttacaaaaaaggacatat

SEQ ID NO: 178746 - DNA, 27 bp, Artificial sequence
  SiRNA target sequence
gtaaacagttacaaaaaaggacatata

SEQ ID NO: 178747 - DNA, 27 bp, Artificial sequence
  SiRNA target sequence
taaacagttacaaaaaaggacatatag

SEQ ID NO: 178748 - DNA, 27 bp, Artificial sequence
  SiRNA target sequence
aaacagttacaaaaaaggacatataga

SEQ ID NO: 178749 - DNA, 27 bp, Artificial sequence
  SiRNA target sequence
aacagttacaaaaaaggacatatagaa

SEQ ID NO: 178750 - DNA, 27 bp, Artificial sequence
  SiRNA target sequence
acagttacaaaaaaggacatatagaaa

SEQ ID NO: 178751 - DNA, 27 bp, Artificial sequence
  SiRNA target sequence
cagttacaaaaaaggacatatagaaaa

SEQ ID NO: 178752 - DNA, 27 bp, Artificial sequence
  SiRNA target sequence
agttacaaaaaaggacatatagaaaaa

SEQ ID NO: 178753 - DNA, 27 bp, Artificial sequence
  SiRNA target sequence
gttacaaaaaaggacatatagaaaaat

SEQ ID NO: 178754 - DNA, 27 bp, Artificial sequence
  SiRNA target sequence
ttacaaaaaaggacatatagaaaaata

SEQ ID NO: 178755 - DNA, 27 bp, Artificial sequence
  SiRNA target sequence
tacaaaaaaggacatatagaaaaatag

SEQ ID NO: 178756 - DNA, 27 bp, Artificial sequence
  SiRNA target sequence
acaaaaaaggacatatagaaaaataga

SEQ ID NO: 178757 - DNA, 27 bp, Artificial sequence
  SiRNA target sequence
caaaaaaggacatatagaaaaatagaa

SEQ ID NO: 178758 - DNA, 27 bp, Artificial sequence
  SiRNA target sequence
aaaaaaggacatatagaaaaatagaaa

SEQ ID NO: 178759 - DNA, 27 bp, Artificial sequence
  SiRNA target sequence
aaaaaggacatatagaaaaatagaaac

SEQ ID NO: 178760 - DNA, 27 bp, Artificial sequence
  SiRNA target sequence
aaaaggacatatagaaaaatagaaaca

SEQ ID NO: 178761 - DNA, 27 bp, Artificial sequence
  SiRNA target sequence
aaaggacatatagaaaaatagaaacaa

SEQ ID NO: 178762 - DNA, 27 bp, Artificial sequence
  SiRNA target sequence
aaggacatatagaaaaatagaaacaaa

SEQ ID NO: 178763 - DNA, 27 bp, Artificial sequence
  SiRNA target sequence
aggacatatagaaaaatagaaacaaag

SEQ ID NO: 178764 - DNA, 27 bp, Artificial sequence
  SiRNA target sequence
ggacatatagaaaaatagaaacaaaga

SEQ ID NO: 178765 - DNA, 27 bp, Artificial sequence
  SiRNA target sequence
gacatatagaaaaatagaaacaaagaa

SEQ ID NO: 178766 - DNA, 27 bp, Artificial sequence
  SiRNA target sequence
acatatagaaaaatagaaacaaagaaa

SEQ ID NO: 178767 - DNA, 27 bp, Artificial sequence
  SiRNA target sequence
catatagaaaaatagaaacaaagaaag

SEQ ID NO: 178768 - DNA, 27 bp, Artificial sequence
  SiRNA target sequence
atatagaaaaatagaaacaaagaaagt

SEQ ID NO: 178769 - DNA, 27 bp, Artificial sequence
  SiRNA target sequence
tatagaaaaatagaaacaaagaaagtt

SEQ ID NO: 178770 - DNA, 27 bp, Artificial sequence
  SiRNA target sequence
atagaaaaatagaaacaaagaaagtta

SEQ ID NO: 178771 - DNA, 27 bp, Artificial sequence
  SiRNA target sequence
tagaaaaatagaaacaaagaaagttaa

SEQ ID NO: 178772 - DNA, 27 bp, Artificial sequence
  SiRNA target sequence
agaaaaatagaaacaaagaaagttaat

SEQ ID NO: 178773 - DNA, 27 bp, Artificial sequence
  SiRNA target sequence
gaaaaatagaaacaaagaaagttaatt

SEQ ID NO: 178774 - DNA, 27 bp, Artificial sequence
  SiRNA target sequence
aaaaatagaaacaaagaaagttaattt

SEQ ID NO: 178775 - DNA, 27 bp, Artificial sequence
  SiRNA target sequence
aaaatagaaacaaagaaagttaatttt

SEQ ID NO: 178776 - DNA, 27 bp, Artificial sequence
  SiRNA target sequence
aaatagaaacaaagaaagttaatttta

SEQ ID NO: 178777 - DNA, 27 bp, Artificial sequence
  SiRNA target sequence
aatagaaacaaagaaagttaattttaa

SEQ ID NO: 178778 - DNA, 27 bp, Artificial sequence
  SiRNA target sequence
atagaaacaaagaaagttaattttaaa

SEQ ID NO: 178779 - DNA, 27 bp, Artificial sequence
  SiRNA target sequence
tagaaacaaagaaagttaattttaaaa

SEQ ID NO: 178780 - DNA, 27 bp, Artificial sequence
  SiRNA target sequence
agaaacaaagaaagttaattttaaaat

SEQ ID NO: 178781 - DNA, 27 bp, Artificial sequence
  SiRNA target sequence
gaaacaaagaaagttaattttaaaata

SEQ ID NO: 178782 - DNA, 27 bp, Artificial sequence
  SiRNA target sequence
aaacaaagaaagttaattttaaaatag

SEQ ID NO: 178783 - DNA, 27 bp, Artificial sequence
  SiRNA target sequence
aacaaagaaagttaattttaaaataga

SEQ ID NO: 178784 - DNA, 27 bp, Artificial sequence
  SiRNA target sequence
acaaagaaagttaattttaaaatagaa

SEQ ID NO: 178785 - DNA, 27 bp, Artificial sequence
  SiRNA target sequence
caaagaaagttaattttaaaatagaat

SEQ ID NO: 178786 - DNA, 27 bp, Artificial sequence
  SiRNA target sequence
aaagaaagttaattttaaaatagaatg

SEQ ID NO: 178787 - DNA, 27 bp, Artificial sequence
  SiRNA target sequence
aagaaagttaattttaaaatagaatgg

SEQ ID NO: 178788 - DNA, 27 bp, Artificial sequence
  SiRNA target sequence
agaaagttaattttaaaatagaatggt

SEQ ID NO: 178789 - DNA, 27 bp, Artificial sequence
  SiRNA target sequence
gaaagttaattttaaaatagaatggta

SEQ ID NO: 178790 - DNA, 27 bp, Artificial sequence
  SiRNA target sequence
aaagttaattttaaaatagaatggtaa

SEQ ID NO: 178791 - DNA, 19 bp, Artificial sequence
  SiRNA target sequence
atggccaagaatgaatcta

SEQ ID NO: 178792 - DNA, 19 bp, Artificial sequence
  SiRNA target sequence
tggccaagaatgaatctaa

SEQ ID NO: 178793 - DNA, 19 bp, Artificial sequence
  SiRNA target sequence
ggccaagaatgaatctaat

SEQ ID NO: 178794 - DNA, 19 bp, Artificial sequence
  SiRNA target sequence
gccaagaatgaatctaata

SEQ ID NO: 178795 - DNA, 19 bp, Artificial sequence
  SiRNA target sequence
ccaagaatgaatctaataa

SEQ ID NO: 178796 - DNA, 19 bp, Artificial sequence
  SiRNA target sequence
caagaatgaatctaataaa

SEQ ID NO: 178797 - DNA, 19 bp, Artificial sequence
  SiRNA target sequence
aagaatgaatctaataaaa

SEQ ID NO: 178798 - DNA, 19 bp, Artificial sequence
  SiRNA target sequence
agaatgaatctaataaaat

SEQ ID NO: 178799 - DNA, 19 bp, Artificial sequence
  SiRNA target sequence
gaatgaatctaataaaata

SEQ ID NO: 178800 - DNA, 19 bp, Artificial sequence
  SiRNA target sequence
aatgaatctaataaaataa

SEQ ID NO: 178801 - DNA, 19 bp, Artificial sequence
  SiRNA target sequence
atgaatctaataaaataac

SEQ ID NO: 178802 - DNA, 19 bp, Artificial sequence
  SiRNA target sequence
tgaatctaataaaataacg

SEQ ID NO: 178803 - DNA, 19 bp, Artificial sequence
  SiRNA target sequence
gaatctaataaaataacga

SEQ ID NO: 178804 - DNA, 19 bp, Artificial sequence
  SiRNA target sequence
aatctaataaaataacgag

SEQ ID NO: 178805 - DNA, 19 bp, Artificial sequence
  SiRNA target sequence
atctaataaaataacgaga

SEQ ID NO: 178806 - DNA, 19 bp, Artificial sequence
  SiRNA target sequence
tctaataaaataacgagac

SEQ ID NO: 178807 - DNA, 19 bp, Artificial sequence
  SiRNA target sequence
ctaataaaataacgagact

SEQ ID NO: 178808 - DNA, 19 bp, Artificial sequence
  SiRNA target sequence
taataaaataacgagactg

SEQ ID NO: 178809 - DNA, 19 bp, Artificial sequence
  SiRNA target sequence
aataaaataacgagactgg

SEQ ID NO: 178810 - DNA, 19 bp, Artificial sequence
  SiRNA target sequence
ataaaataacgagactggc

SEQ ID NO: 178811 - DNA, 19 bp, Artificial sequence
  SiRNA target sequence
taaaataacgagactggca

SEQ ID NO: 178812 - DNA, 19 bp, Artificial sequence
  SiRNA target sequence
aaaataacgagactggcaa

SEQ ID NO: 178813 - DNA, 19 bp, Artificial sequence
  SiRNA target sequence
aaataacgagactggcaat

SEQ ID NO: 178814 - DNA, 19 bp, Artificial sequence
  SiRNA target sequence
aataacgagactggcaatt

SEQ ID NO: 178815 - DNA, 19 bp, Artificial sequence
  SiRNA target sequence
ataacgagactggcaattg

SEQ ID NO: 178816 - DNA, 19 bp, Artificial sequence
  SiRNA target sequence
taacgagactggcaattgt

SEQ ID NO: 178817 - DNA, 19 bp, Artificial sequence
  SiRNA target sequence
aacgagactggcaattgtt

SEQ ID NO: 178818 - DNA, 19 bp, Artificial sequence
  SiRNA target sequence
acgagactggcaattgtta

SEQ ID NO: 178819 - DNA, 19 bp, Artificial sequence
  SiRNA target sequence
cgagactggcaattgttaa

SEQ ID NO: 178820 - DNA, 19 bp, Artificial sequence
  SiRNA target sequence
gagactggcaattgttaat

SEQ ID NO: 178821 - DNA, 19 bp, Artificial sequence
  SiRNA target sequence
agactggcaattgttaatt

SEQ ID NO: 178822 - DNA, 19 bp, Artificial sequence
  SiRNA target sequence
gactggcaattgttaatta

SEQ ID NO: 178823 - DNA, 19 bp, Artificial sequence
  SiRNA target sequence
actggcaattgttaattat

SEQ ID NO: 178824 - DNA, 19 bp, Artificial sequence
  SiRNA target sequence
ctggcaattgttaattatg

SEQ ID NO: 178825 - DNA, 19 bp, Artificial sequence
  SiRNA target sequence
tggcaattgttaattatga

SEQ ID NO: 178826 - DNA, 19 bp, Artificial sequence
  SiRNA target sequence
ggcaattgttaattatgaa

SEQ ID NO: 178827 - DNA, 19 bp, Artificial sequence
  SiRNA target sequence
gcaattgttaattatgaac

SEQ ID NO: 178828 - DNA, 19 bp, Artificial sequence
  SiRNA target sequence
caattgttaattatgaact

SEQ ID NO: 178829 - DNA, 19 bp, Artificial sequence
  SiRNA target sequence
aattgttaattatgaacta

SEQ ID NO: 178830 - DNA, 19 bp, Artificial sequence
  SiRNA target sequence
attgttaattatgaactat

SEQ ID NO: 178831 - DNA, 19 bp, Artificial sequence
  SiRNA target sequence
ttgttaattatgaactatg

SEQ ID NO: 178832 - DNA, 19 bp, Artificial sequence
  SiRNA target sequence
tgttaattatgaactatgt

SEQ ID NO: 178833 - DNA, 19 bp, Artificial sequence
  SiRNA target sequence
gttaattatgaactatgta

SEQ ID NO: 178834 - DNA, 19 bp, Artificial sequence
  SiRNA target sequence
ttaattatgaactatgtaa

SEQ ID NO: 178835 - DNA, 19 bp, Artificial sequence
  SiRNA target sequence
taattatgaactatgtaaa

SEQ ID NO: 178836 - DNA, 19 bp, Artificial sequence
  SiRNA target sequence
aattatgaactatgtaaac

SEQ ID NO: 178837 - DNA, 19 bp, Artificial sequence
  SiRNA target sequence
attatgaactatgtaaacc

SEQ ID NO: 178838 - DNA, 19 bp, Artificial sequence
  SiRNA target sequence
ttatgaactatgtaaaccg

SEQ ID NO: 178839 - DNA, 19 bp, Artificial sequence
  SiRNA target sequence
tatgaactatgtaaaccga

SEQ ID NO: 178840 - DNA, 19 bp, Artificial sequence
  SiRNA target sequence
atgaactatgtaaaccgaa

SEQ ID NO: 178841 - DNA, 19 bp, Artificial sequence
  SiRNA target sequence
tgaactatgtaaaccgaag

SEQ ID NO: 178842 - DNA, 19 bp, Artificial sequence
  SiRNA target sequence
gaactatgtaaaccgaagg

SEQ ID NO: 178843 - DNA, 19 bp, Artificial sequence
  SiRNA target sequence
aactatgtaaaccgaagga

SEQ ID NO: 178844 - DNA, 19 bp, Artificial sequence
  SiRNA target sequence
actatgtaaaccgaaggaa

SEQ ID NO: 178845 - DNA, 19 bp, Artificial sequence
  SiRNA target sequence
ctatgtaaaccgaaggaat

SEQ ID NO: 178846 - DNA, 19 bp, Artificial sequence
  SiRNA target sequence
tatgtaaaccgaaggaatg

SEQ ID NO: 178847 - DNA, 19 bp, Artificial sequence
  SiRNA target sequence
atgtaaaccgaaggaatgt

SEQ ID NO: 178848 - DNA, 19 bp, Artificial sequence
  SiRNA target sequence
tgtaaaccgaaggaatgta

SEQ ID NO: 178849 - DNA, 19 bp, Artificial sequence
  SiRNA target sequence
gtaaaccgaaggaatgtat

SEQ ID NO: 178850 - DNA, 19 bp, Artificial sequence
  SiRNA target sequence
taaaccgaaggaatgtatg

SEQ ID NO: 178851 - DNA, 19 bp, Artificial sequence
  SiRNA target sequence
aaaccgaaggaatgtatgt

SEQ ID NO: 178852 - DNA, 19 bp, Artificial sequence
  SiRNA target sequence
aaccgaaggaatgtatgtc

SEQ ID NO: 178853 - DNA, 19 bp, Artificial sequence
  SiRNA target sequence
accgaaggaatgtatgtca

SEQ ID NO: 178854 - DNA, 19 bp, Artificial sequence
  SiRNA target sequence
ccgaaggaatgtatgtcag

SEQ ID NO: 178855 - DNA, 19 bp, Artificial sequence
  SiRNA target sequence
cgaaggaatgtatgtcaga

SEQ ID NO: 178856 - DNA, 19 bp, Artificial sequence
  SiRNA target sequence
gaaggaatgtatgtcagaa

SEQ ID NO: 178857 - DNA, 19 bp, Artificial sequence
  SiRNA target sequence
aaggaatgtatgtcagaat

SEQ ID NO: 178858 - DNA, 19 bp, Artificial sequence
  SiRNA target sequence
aggaatgtatgtcagaatg

SEQ ID NO: 178859 - DNA, 19 bp, Artificial sequence
  SiRNA target sequence
ggaatgtatgtcagaatgt

SEQ ID NO: 178860 - DNA, 19 bp, Artificial sequence
  SiRNA target sequence
gaatgtatgtcagaatgta

SEQ ID NO: 178861 - DNA, 19 bp, Artificial sequence
  SiRNA target sequence
aatgtatgtcagaatgtaa

SEQ ID NO: 178862 - DNA, 19 bp, Artificial sequence
  SiRNA target sequence
atgtatgtcagaatgtaaa

SEQ ID NO: 178863 - DNA, 19 bp, Artificial sequence
  SiRNA target sequence
tgtatgtcagaatgtaaaa

SEQ ID NO: 178864 - DNA, 19 bp, Artificial sequence
  SiRNA target sequence
gtatgtcagaatgtaaaaa

SEQ ID NO: 178865 - DNA, 19 bp, Artificial sequence
  SiRNA target sequence
tatgtcagaatgtaaaaag

SEQ ID NO: 178866 - DNA, 19 bp, Artificial sequence
  SiRNA target sequence
atgtcagaatgtaaaaagg

SEQ ID NO: 178867 - DNA, 19 bp, Artificial sequence
  SiRNA target sequence
tgtcagaatgtaaaaaggc

SEQ ID NO: 178868 - DNA, 19 bp, Artificial sequence
  SiRNA target sequence
gtcagaatgtaaaaaggcg

SEQ ID NO: 178869 - DNA, 19 bp, Artificial sequence
  SiRNA target sequence
tcagaatgtaaaaaggcgt

SEQ ID NO: 178870 - DNA, 19 bp, Artificial sequence
  SiRNA target sequence
cagaatgtaaaaaggcgtg

SEQ ID NO: 178871 - DNA, 19 bp, Artificial sequence
  SiRNA target sequence
agaatgtaaaaaggcgtgt

SEQ ID NO: 178872 - DNA, 19 bp, Artificial sequence
  SiRNA target sequence
gaatgtaaaaaggcgtgtc

SEQ ID NO: 178873 - DNA, 19 bp, Artificial sequence
  SiRNA target sequence
aatgtaaaaaggcgtgtcc

SEQ ID NO: 178874 - DNA, 19 bp, Artificial sequence
  SiRNA target sequence
atgtaaaaaggcgtgtcct

SEQ ID NO: 178875 - DNA, 19 bp, Artificial sequence
  SiRNA target sequence
tgtaaaaaggcgtgtcctg

SEQ ID NO: 178876 - DNA, 19 bp, Artificial sequence
  SiRNA target sequence
gtaaaaaggcgtgtcctgt

SEQ ID NO: 178877 - DNA, 19 bp, Artificial sequence
  SiRNA target sequence
taaaaaggcgtgtcctgtt

SEQ ID NO: 178878 - DNA, 19 bp, Artificial sequence
  SiRNA target sequence
aaaaaggcgtgtcctgtta

SEQ ID NO: 178879 - DNA, 19 bp, Artificial sequence
  SiRNA target sequence
aaaaggcgtgtcctgttaa

SEQ ID NO: 178880 - DNA, 19 bp, Artificial sequence
  SiRNA target sequence
aaaggcgtgtcctgttaat

SEQ ID NO: 178881 - DNA, 19 bp, Artificial sequence
  SiRNA target sequence
aaggcgtgtcctgttaata

SEQ ID NO: 178882 - DNA, 19 bp, Artificial sequence
  SiRNA target sequence
aggcgtgtcctgttaataa

SEQ ID NO: 178883 - DNA, 19 bp, Artificial sequence
  SiRNA target sequence
ggcgtgtcctgttaataaa

SEQ ID NO: 178884 - DNA, 19 bp, Artificial sequence
  SiRNA target sequence
gcgtgtcctgttaataaaa

SEQ ID NO: 178885 - DNA, 19 bp, Artificial sequence
  SiRNA target sequence
cgtgtcctgttaataaaac

SEQ ID NO: 178886 - DNA, 19 bp, Artificial sequence
  SiRNA target sequence
gtgtcctgttaataaaaca

SEQ ID NO: 178887 - DNA, 19 bp, Artificial sequence
  SiRNA target sequence
tgtcctgttaataaaacag

SEQ ID NO: 178888 - DNA, 19 bp, Artificial sequence
  SiRNA target sequence
gtcctgttaataaaacagg

SEQ ID NO: 178889 - DNA, 19 bp, Artificial sequence
  SiRNA target sequence
tcctgttaataaaacagga

SEQ ID NO: 178890 - DNA, 19 bp, Artificial sequence
  SiRNA target sequence
cctgttaataaaacaggaa

SEQ ID NO: 178891 - DNA, 19 bp, Artificial sequence
  SiRNA target sequence
ctgttaataaaacaggaaa

SEQ ID NO: 178892 - DNA, 19 bp, Artificial sequence
  SiRNA target sequence
tgttaataaaacaggaaag

SEQ ID NO: 178893 - DNA, 19 bp, Artificial sequence
  SiRNA target sequence
gttaataaaacaggaaagg

SEQ ID NO: 178894 - DNA, 19 bp, Artificial sequence
  SiRNA target sequence
ttaataaaacaggaaagga

SEQ ID NO: 178895 - DNA, 19 bp, Artificial sequence
  SiRNA target sequence
taataaaacaggaaaggag

SEQ ID NO: 178896 - DNA, 19 bp, Artificial sequence
  SiRNA target sequence
aataaaacaggaaaggagt

SEQ ID NO: 178897 - DNA, 19 bp, Artificial sequence
  SiRNA target sequence
ataaaacaggaaaggagtg

SEQ ID NO: 178898 - DNA, 19 bp, Artificial sequence
  SiRNA target sequence
taaaacaggaaaggagtgt

SEQ ID NO: 178899 - DNA, 19 bp, Artificial sequence
  SiRNA target sequence
aaaacaggaaaggagtgta

SEQ ID NO: 178900 - DNA, 19 bp, Artificial sequence
  SiRNA target sequence
aaacaggaaaggagtgtat

SEQ ID NO: 178901 - DNA, 19 bp, Artificial sequence
  SiRNA target sequence
aacaggaaaggagtgtatt

SEQ ID NO: 178902 - DNA, 19 bp, Artificial sequence
  SiRNA target sequence
acaggaaaggagtgtatta

SEQ ID NO: 178903 - DNA, 19 bp, Artificial sequence
  SiRNA target sequence
caggaaaggagtgtattac

SEQ ID NO: 178904 - DNA, 19 bp, Artificial sequence
  SiRNA target sequence
aggaaaggagtgtattaca

SEQ ID NO: 178905 - DNA, 19 bp, Artificial sequence
  SiRNA target sequence
ggaaaggagtgtattacaa

SEQ ID NO: 178906 - DNA, 19 bp, Artificial sequence
  SiRNA target sequence
gaaaggagtgtattacaat

SEQ ID NO: 178907 - DNA, 19 bp, Artificial sequence
  SiRNA target sequence
aaaggagtgtattacaatt

SEQ ID NO: 178908 - DNA, 19 bp, Artificial sequence
  SiRNA target sequence
aaggagtgtattacaattg

SEQ ID NO: 178909 - DNA, 19 bp, Artificial sequence
  SiRNA target sequence
aggagtgtattacaattga

SEQ ID NO: 178910 - DNA, 19 bp, Artificial sequence
  SiRNA target sequence
ggagtgtattacaattgat

SEQ ID NO: 178911 - DNA, 19 bp, Artificial sequence
  SiRNA target sequence
gagtgtattacaattgata

SEQ ID NO: 178912 - DNA, 19 bp, Artificial sequence
  SiRNA target sequence
agtgtattacaattgatac

SEQ ID NO: 178913 - DNA, 19 bp, Artificial sequence
  SiRNA target sequence
gtgtattacaattgatact

SEQ ID NO: 178914 - DNA, 19 bp, Artificial sequence
  SiRNA target sequence
tgtattacaattgatacta

SEQ ID NO: 178915 - DNA, 19 bp, Artificial sequence
  SiRNA target sequence
gtattacaattgatactaa

SEQ ID NO: 178916 - DNA, 19 bp, Artificial sequence
  SiRNA target sequence
tattacaattgatactaaa

SEQ ID NO: 178917 - DNA, 19 bp, Artificial sequence
  SiRNA target sequence
attacaattgatactaaat

SEQ ID NO: 178918 - DNA, 19 bp, Artificial sequence
  SiRNA target sequence
ttacaattgatactaaatc

SEQ ID NO: 178919 - DNA, 19 bp, Artificial sequence
  SiRNA target sequence
tacaattgatactaaatca

SEQ ID NO: 178920 - DNA, 19 bp, Artificial sequence
  SiRNA target sequence
acaattgatactaaatcac

SEQ ID NO: 178921 - DNA, 19 bp, Artificial sequence
  SiRNA target sequence
caattgatactaaatcaca

SEQ ID NO: 178922 - DNA, 19 bp, Artificial sequence
  SiRNA target sequence
aattgatactaaatcacat

SEQ ID NO: 178923 - DNA, 19 bp, Artificial sequence
  SiRNA target sequence
attgatactaaatcacata

SEQ ID NO: 178924 - DNA, 19 bp, Artificial sequence
  SiRNA target sequence
ttgatactaaatcacatat

SEQ ID NO: 178925 - DNA, 19 bp, Artificial sequence
  SiRNA target sequence
tgatactaaatcacatatc

SEQ ID NO: 178926 - DNA, 19 bp, Artificial sequence
  SiRNA target sequence
gatactaaatcacatatct

SEQ ID NO: 178927 - DNA, 19 bp, Artificial sequence
  SiRNA target sequence
atactaaatcacatatctc

SEQ ID NO: 178928 - DNA, 19 bp, Artificial sequence
  SiRNA target sequence
tactaaatcacatatctca

SEQ ID NO: 178929 - DNA, 19 bp, Artificial sequence
  SiRNA target sequence
actaaatcacatatctcag

SEQ ID NO: 178930 - DNA, 19 bp, Artificial sequence
  SiRNA target sequence
ctaaatcacatatctcaga

SEQ ID NO: 178931 - DNA, 19 bp, Artificial sequence
  SiRNA target sequence
taaatcacatatctcagaa

SEQ ID NO: 178932 - DNA, 19 bp, Artificial sequence
  SiRNA target sequence
aaatcacatatctcagaaa

SEQ ID NO: 178933 - DNA, 19 bp, Artificial sequence
  SiRNA target sequence
aatcacatatctcagaaat

SEQ ID NO: 178934 - DNA, 19 bp, Artificial sequence
  SiRNA target sequence
atcacatatctcagaaatt

SEQ ID NO: 178935 - DNA, 19 bp, Artificial sequence
  SiRNA target sequence
tcacatatctcagaaattc

SEQ ID NO: 178936 - DNA, 19 bp, Artificial sequence
  SiRNA target sequence
cacatatctcagaaattct

SEQ ID NO: 178937 - DNA, 19 bp, Artificial sequence
  SiRNA target sequence
acatatctcagaaattctg

SEQ ID NO: 178938 - DNA, 19 bp, Artificial sequence
  SiRNA target sequence
catatctcagaaattctgt

SEQ ID NO: 178939 - DNA, 19 bp, Artificial sequence
  SiRNA target sequence
atatctcagaaattctgtg

SEQ ID NO: 178940 - DNA, 19 bp, Artificial sequence
  SiRNA target sequence
tatctcagaaattctgtgt

SEQ ID NO: 178941 - DNA, 19 bp, Artificial sequence
  SiRNA target sequence
atctcagaaattctgtgta

SEQ ID NO: 178942 - DNA, 19 bp, Artificial sequence
  SiRNA target sequence
tctcagaaattctgtgtat

SEQ ID NO: 178943 - DNA, 19 bp, Artificial sequence
  SiRNA target sequence
ctcagaaattctgtgtata

SEQ ID NO: 178944 - DNA, 19 bp, Artificial sequence
  SiRNA target sequence
tcagaaattctgtgtatag

SEQ ID NO: 178945 - DNA, 19 bp, Artificial sequence
  SiRNA target sequence
cagaaattctgtgtatagg

SEQ ID NO: 178946 - DNA, 19 bp, Artificial sequence
  SiRNA target sequence
agaaattctgtgtatagga

SEQ ID NO: 178947 - DNA, 19 bp, Artificial sequence
  SiRNA target sequence
gaaattctgtgtataggat

SEQ ID NO: 178948 - DNA, 19 bp, Artificial sequence
  SiRNA target sequence
aaattctgtgtataggatg

SEQ ID NO: 178949 - DNA, 19 bp, Artificial sequence
  SiRNA target sequence
aattctgtgtataggatgt

SEQ ID NO: 178950 - DNA, 19 bp, Artificial sequence
  SiRNA target sequence
attctgtgtataggatgtt

SEQ ID NO: 178951 - DNA, 19 bp, Artificial sequence
  SiRNA target sequence
ttctgtgtataggatgttc

SEQ ID NO: 178952 - DNA, 19 bp, Artificial sequence
  SiRNA target sequence
tctgtgtataggatgttct

SEQ ID NO: 178953 - DNA, 19 bp, Artificial sequence
  SiRNA target sequence
ctgtgtataggatgttctg

SEQ ID NO: 178954 - DNA, 19 bp, Artificial sequence
  SiRNA target sequence
tgtgtataggatgttctgc

SEQ ID NO: 178955 - DNA, 19 bp, Artificial sequence
  SiRNA target sequence
gtgtataggatgttctgcg

SEQ ID NO: 178956 - DNA, 19 bp, Artificial sequence
  SiRNA target sequence
tgtataggatgttctgcgt

SEQ ID NO: 178957 - DNA, 19 bp, Artificial sequence
  SiRNA target sequence
gtataggatgttctgcgtg

SEQ ID NO: 178958 - DNA, 19 bp, Artificial sequence
  SiRNA target sequence
tataggatgttctgcgtgt

SEQ ID NO: 178959 - DNA, 19 bp, Artificial sequence
  SiRNA target sequence
ataggatgttctgcgtgtc

SEQ ID NO: 178960 - DNA, 19 bp, Artificial sequence
  SiRNA target sequence
taggatgttctgcgtgtca

SEQ ID NO: 178961 - DNA, 19 bp, Artificial sequence
  SiRNA target sequence
aggatgttctgcgtgtcaa

SEQ ID NO: 178962 - DNA, 19 bp, Artificial sequence
  SiRNA target sequence
ggatgttctgcgtgtcaaa

SEQ ID NO: 178963 - DNA, 19 bp, Artificial sequence
  SiRNA target sequence
gatgttctgcgtgtcaaaa

SEQ ID NO: 178964 - DNA, 19 bp, Artificial sequence
  SiRNA target sequence
atgttctgcgtgtcaaaag

SEQ ID NO: 178965 - DNA, 19 bp, Artificial sequence
  SiRNA target sequence
tgttctgcgtgtcaaaaga

SEQ ID NO: 178966 - DNA, 19 bp, Artificial sequence
  SiRNA target sequence
gttctgcgtgtcaaaagaa

SEQ ID NO: 178967 - DNA, 19 bp, Artificial sequence
  SiRNA target sequence
ttctgcgtgtcaaaagaaa

SEQ ID NO: 178968 - DNA, 19 bp, Artificial sequence
  SiRNA target sequence
tctgcgtgtcaaaagaaat

SEQ ID NO: 178969 - DNA, 19 bp, Artificial sequence
  SiRNA target sequence
ctgcgtgtcaaaagaaatg

SEQ ID NO: 178970 - DNA, 19 bp, Artificial sequence
  SiRNA target sequence
tgcgtgtcaaaagaaatgt

SEQ ID NO: 178971 - DNA, 19 bp, Artificial sequence
  SiRNA target sequence
gcgtgtcaaaagaaatgtc

SEQ ID NO: 178972 - DNA, 19 bp, Artificial sequence
  SiRNA target sequence
cgtgtcaaaagaaatgtcc

SEQ ID NO: 178973 - DNA, 19 bp, Artificial sequence
  SiRNA target sequence
gtgtcaaaagaaatgtcct

SEQ ID NO: 178974 - DNA, 19 bp, Artificial sequence
  SiRNA target sequence
tgtcaaaagaaatgtcctt

SEQ ID NO: 178975 - DNA, 19 bp, Artificial sequence
  SiRNA target sequence
gtcaaaagaaatgtccttt

SEQ ID NO: 178976 - DNA, 19 bp, Artificial sequence
  SiRNA target sequence
tcaaaagaaatgtcctttt

SEQ ID NO: 178977 - DNA, 19 bp, Artificial sequence
  SiRNA target sequence
caaaagaaatgtcctttta

SEQ ID NO: 178978 - DNA, 19 bp, Artificial sequence
  SiRNA target sequence
aaaagaaatgtccttttaa

SEQ ID NO: 178979 - DNA, 19 bp, Artificial sequence
  SiRNA target sequence
aaagaaatgtccttttaag

SEQ ID NO: 178980 - DNA, 19 bp, Artificial sequence
  SiRNA target sequence
aagaaatgtccttttaagg

SEQ ID NO: 178981 - DNA, 19 bp, Artificial sequence
  SiRNA target sequence
agaaatgtccttttaaggc

SEQ ID NO: 178982 - DNA, 19 bp, Artificial sequence
  SiRNA target sequence
gaaatgtccttttaaggcg

SEQ ID NO: 178983 - DNA, 19 bp, Artificial sequence
  SiRNA target sequence
aaatgtccttttaaggcga

SEQ ID NO: 178984 - DNA, 19 bp, Artificial sequence
  SiRNA target sequence
aatgtccttttaaggcgat

SEQ ID NO: 178985 - DNA, 19 bp, Artificial sequence
  SiRNA target sequence
atgtccttttaaggcgatt

SEQ ID NO: 178986 - DNA, 19 bp, Artificial sequence
  SiRNA target sequence
tgtccttttaaggcgatta

SEQ ID NO: 178987 - DNA, 19 bp, Artificial sequence
  SiRNA target sequence
gtccttttaaggcgattac

SEQ ID NO: 178988 - DNA, 19 bp, Artificial sequence
  SiRNA target sequence
tccttttaaggcgattaca

SEQ ID NO: 178989 - DNA, 19 bp, Artificial sequence
  SiRNA target sequence
ccttttaaggcgattacaa

SEQ ID NO: 178990 - DNA, 19 bp, Artificial sequence
  SiRNA target sequence
cttttaaggcgattacaat

SEQ ID NO: 178991 - DNA, 19 bp, Artificial sequence
  SiRNA target sequence
ttttaaggcgattacaatt

SEQ ID NO: 178992 - DNA, 19 bp, Artificial sequence
  SiRNA target sequence
tttaaggcgattacaattg

SEQ ID NO: 178993 - DNA, 19 bp, Artificial sequence
  SiRNA target sequence
ttaaggcgattacaattgt

SEQ ID NO: 178994 - DNA, 19 bp, Artificial sequence
  SiRNA target sequence
taaggcgattacaattgta

SEQ ID NO: 178995 - DNA, 19 bp, Artificial sequence
  SiRNA target sequence
aaggcgattacaattgtaa

SEQ ID NO: 178996 - DNA, 19 bp, Artificial sequence
  SiRNA target sequence
aggcgattacaattgtaaa

SEQ ID NO: 178997 - DNA, 19 bp, Artificial sequence
  SiRNA target sequence
ggcgattacaattgtaaat

SEQ ID NO: 178998 - DNA, 19 bp, Artificial sequence
  SiRNA target sequence
gcgattacaattgtaaatt

SEQ ID NO: 178999 - DNA, 19 bp, Artificial sequence
  SiRNA target sequence
cgattacaattgtaaattt

SEQ ID NO: 179000 - DNA, 19 bp, Artificial sequence
  SiRNA target sequence
gattacaattgtaaattta

SEQ ID NO: 179001 - DNA, 19 bp, Artificial sequence
  SiRNA target sequence
attacaattgtaaatttac

SEQ ID NO: 179002 - DNA, 19 bp, Artificial sequence
  SiRNA target sequence
ttacaattgtaaatttacc

SEQ ID NO: 179003 - DNA, 19 bp, Artificial sequence
  SiRNA target sequence
tacaattgtaaatttacct

SEQ ID NO: 179004 - DNA, 19 bp, Artificial sequence
  SiRNA target sequence
acaattgtaaatttaccta

SEQ ID NO: 179005 - DNA, 19 bp, Artificial sequence
  SiRNA target sequence
caattgtaaatttacctac

SEQ ID NO: 179006 - DNA, 19 bp, Artificial sequence
  SiRNA target sequence
aattgtaaatttacctaca

SEQ ID NO: 179007 - DNA, 19 bp, Artificial sequence
  SiRNA target sequence
attgtaaatttacctacaa

SEQ ID NO: 179008 - DNA, 19 bp, Artificial sequence
  SiRNA target sequence
ttgtaaatttacctacaaa

SEQ ID NO: 179009 - DNA, 19 bp, Artificial sequence
  SiRNA target sequence
tgtaaatttacctacaaat

SEQ ID NO: 179010 - DNA, 19 bp, Artificial sequence
  SiRNA target sequence
gtaaatttacctacaaatc

SEQ ID NO: 179011 - DNA, 19 bp, Artificial sequence
  SiRNA target sequence
taaatttacctacaaatct

SEQ ID NO: 179012 - DNA, 19 bp, Artificial sequence
  SiRNA target sequence
aaatttacctacaaatcta

SEQ ID NO: 179013 - DNA, 19 bp, Artificial sequence
  SiRNA target sequence
aatttacctacaaatctag

SEQ ID NO: 179014 - DNA, 19 bp, Artificial sequence
  SiRNA target sequence
atttacctacaaatctaga

SEQ ID NO: 179015 - DNA, 19 bp, Artificial sequence
  SiRNA target sequence
tttacctacaaatctagat

SEQ ID NO: 179016 - DNA, 19 bp, Artificial sequence
  SiRNA target sequence
ttacctacaaatctagata

SEQ ID NO: 179017 - DNA, 19 bp, Artificial sequence
  SiRNA target sequence
tacctacaaatctagataa

SEQ ID NO: 179018 - DNA, 19 bp, Artificial sequence
  SiRNA target sequence
acctacaaatctagataaa

SEQ ID NO: 179019 - DNA, 19 bp, Artificial sequence
  SiRNA target sequence
cctacaaatctagataaag

SEQ ID NO: 179020 - DNA, 19 bp, Artificial sequence
  SiRNA target sequence
ctacaaatctagataaaga

SEQ ID NO: 179021 - DNA, 19 bp, Artificial sequence
  SiRNA target sequence
tacaaatctagataaagac

SEQ ID NO: 179022 - DNA, 19 bp, Artificial sequence
  SiRNA target sequence
acaaatctagataaagaca

SEQ ID NO: 179023 - DNA, 19 bp, Artificial sequence
  SiRNA target sequence
caaatctagataaagacat

SEQ ID NO: 179024 - DNA, 19 bp, Artificial sequence
  SiRNA target sequence
aaatctagataaagacatt

SEQ ID NO: 179025 - DNA, 19 bp, Artificial sequence
  SiRNA target sequence
aatctagataaagacattt

SEQ ID NO: 179026 - DNA, 19 bp, Artificial sequence
  SiRNA target sequence
atctagataaagacatttc

SEQ ID NO: 179027 - DNA, 19 bp, Artificial sequence
  SiRNA target sequence
tctagataaagacatttca

SEQ ID NO: 179028 - DNA, 19 bp, Artificial sequence
  SiRNA target sequence
ctagataaagacatttcac

SEQ ID NO: 179029 - DNA, 19 bp, Artificial sequence
  SiRNA target sequence
tagataaagacatttcaca

SEQ ID NO: 179030 - DNA, 19 bp, Artificial sequence
  SiRNA target sequence
agataaagacatttcacat

SEQ ID NO: 179031 - DNA, 19 bp, Artificial sequence
  SiRNA target sequence
gataaagacatttcacata

SEQ ID NO: 179032 - DNA, 19 bp, Artificial sequence
  SiRNA target sequence
ataaagacatttcacatag

SEQ ID NO: 179033 - DNA, 19 bp, Artificial sequence
  SiRNA target sequence
taaagacatttcacataga

SEQ ID NO: 179034 - DNA, 19 bp, Artificial sequence
  SiRNA target sequence
aaagacatttcacatagat

SEQ ID NO: 179035 - DNA, 19 bp, Artificial sequence
  SiRNA target sequence
aagacatttcacatagata

SEQ ID NO: 179036 - DNA, 19 bp, Artificial sequence
  SiRNA target sequence
agacatttcacatagatat

SEQ ID NO: 179037 - DNA, 19 bp, Artificial sequence
  SiRNA target sequence
gacatttcacatagatatt

SEQ ID NO: 179038 - DNA, 19 bp, Artificial sequence
  SiRNA target sequence
acatttcacatagatattc

SEQ ID NO: 179039 - DNA, 19 bp, Artificial sequence
  SiRNA target sequence
catttcacatagatattcg

SEQ ID NO: 179040 - DNA, 19 bp, Artificial sequence
  SiRNA target sequence
atttcacatagatattcgg

SEQ ID NO: 179041 - DNA, 19 bp, Artificial sequence
  SiRNA target sequence
tttcacatagatattcggc

SEQ ID NO: 179042 - DNA, 19 bp, Artificial sequence
  SiRNA target sequence
ttcacatagatattcggca

SEQ ID NO: 179043 - DNA, 19 bp, Artificial sequence
  SiRNA target sequence
tcacatagatattcggcaa

SEQ ID NO: 179044 - DNA, 19 bp, Artificial sequence
  SiRNA target sequence
cacatagatattcggcaaa

SEQ ID NO: 179045 - DNA, 19 bp, Artificial sequence
  SiRNA target sequence
acatagatattcggcaaat

SEQ ID NO: 179046 - DNA, 19 bp, Artificial sequence
  SiRNA target sequence
catagatattcggcaaatg

SEQ ID NO: 179047 - DNA, 19 bp, Artificial sequence
  SiRNA target sequence
atagatattcggcaaatgg

SEQ ID NO: 179048 - DNA, 19 bp, Artificial sequence
  SiRNA target sequence
tagatattcggcaaatggt

SEQ ID NO: 179049 - DNA, 19 bp, Artificial sequence
  SiRNA target sequence
agatattcggcaaatggtt

SEQ ID NO: 179050 - DNA, 19 bp, Artificial sequence
  SiRNA target sequence
gatattcggcaaatggttt

SEQ ID NO: 179051 - DNA, 19 bp, Artificial sequence
  SiRNA target sequence
atattcggcaaatggtttt

SEQ ID NO: 179052 - DNA, 19 bp, Artificial sequence
  SiRNA target sequence
tattcggcaaatggtttta

SEQ ID NO: 179053 - DNA, 19 bp, Artificial sequence
  SiRNA target sequence
attcggcaaatggttttaa

SEQ ID NO: 179054 - DNA, 19 bp, Artificial sequence
  SiRNA target sequence
ttcggcaaatggttttaaa

SEQ ID NO: 179055 - DNA, 19 bp, Artificial sequence
  SiRNA target sequence
tcggcaaatggttttaaac

SEQ ID NO: 179056 - DNA, 19 bp, Artificial sequence
  SiRNA target sequence
cggcaaatggttttaaact

SEQ ID NO: 179057 - DNA, 19 bp, Artificial sequence
  SiRNA target sequence
ggcaaatggttttaaactt

SEQ ID NO: 179058 - DNA, 19 bp, Artificial sequence
  SiRNA target sequence
gcaaatggttttaaacttc

SEQ ID NO: 179059 - DNA, 19 bp, Artificial sequence
  SiRNA target sequence
caaatggttttaaacttca

SEQ ID NO: 179060 - DNA, 19 bp, Artificial sequence
  SiRNA target sequence
aaatggttttaaacttcac

SEQ ID NO: 179061 - DNA, 19 bp, Artificial sequence
  SiRNA target sequence
aatggttttaaacttcaca

SEQ ID NO: 179062 - DNA, 19 bp, Artificial sequence
  SiRNA target sequence
atggttttaaacttcacag

SEQ ID NO: 179063 - DNA, 19 bp, Artificial sequence
  SiRNA target sequence
tggttttaaacttcacaga

SEQ ID NO: 179064 - DNA, 19 bp, Artificial sequence
  SiRNA target sequence
ggttttaaacttcacagat

SEQ ID NO: 179065 - DNA, 19 bp, Artificial sequence
  SiRNA target sequence
gttttaaacttcacagatt

SEQ ID NO: 179066 - DNA, 19 bp, Artificial sequence
  SiRNA target sequence
ttttaaacttcacagatta

SEQ ID NO: 179067 - DNA, 19 bp, Artificial sequence
  SiRNA target sequence
tttaaacttcacagattac

SEQ ID NO: 179068 - DNA, 19 bp, Artificial sequence
  SiRNA target sequence
ttaaacttcacagattacc

SEQ ID NO: 179069 - DNA, 19 bp, Artificial sequence
  SiRNA target sequence
taaacttcacagattacca

SEQ ID NO: 179070 - DNA, 19 bp, Artificial sequence
  SiRNA target sequence
aaacttcacagattaccaa

SEQ ID NO: 179071 - DNA, 19 bp, Artificial sequence
  SiRNA target sequence
aacttcacagattaccaat

SEQ ID NO: 179072 - DNA, 19 bp, Artificial sequence
  SiRNA target sequence
acttcacagattaccaatc

SEQ ID NO: 179073 - DNA, 19 bp, Artificial sequence
  SiRNA target sequence
cttcacagattaccaatcc

SEQ ID NO: 179074 - DNA, 19 bp, Artificial sequence
  SiRNA target sequence
ttcacagattaccaatccc

SEQ ID NO: 179075 - DNA, 19 bp, Artificial sequence
  SiRNA target sequence
tcacagattaccaatccct

SEQ ID NO: 179076 - DNA, 19 bp, Artificial sequence
  SiRNA target sequence
cacagattaccaatcccta

SEQ ID NO: 179077 - DNA, 19 bp, Artificial sequence
  SiRNA target sequence
acagattaccaatccctaa

SEQ ID NO: 179078 - DNA, 19 bp, Artificial sequence
  SiRNA target sequence
cagattaccaatccctaaa

SEQ ID NO: 179079 - DNA, 19 bp, Artificial sequence
  SiRNA target sequence
agattaccaatccctaaat

SEQ ID NO: 179080 - DNA, 19 bp, Artificial sequence
  SiRNA target sequence
gattaccaatccctaaata

SEQ ID NO: 179081 - DNA, 19 bp, Artificial sequence
  SiRNA target sequence
attaccaatccctaaatat

SEQ ID NO: 179082 - DNA, 19 bp, Artificial sequence
  SiRNA target sequence
ttaccaatccctaaatatg

SEQ ID NO: 179083 - DNA, 19 bp, Artificial sequence
  SiRNA target sequence
taccaatccctaaatatgg

SEQ ID NO: 179084 - DNA, 19 bp, Artificial sequence
  SiRNA target sequence
accaatccctaaatatggt

SEQ ID NO: 179085 - DNA, 19 bp, Artificial sequence
  SiRNA target sequence
ccaatccctaaatatggta

SEQ ID NO: 179086 - DNA, 19 bp, Artificial sequence
  SiRNA target sequence
caatccctaaatatggtaa

SEQ ID NO: 179087 - DNA, 19 bp, Artificial sequence
  SiRNA target sequence
aatccctaaatatggtaag

SEQ ID NO: 179088 - DNA, 19 bp, Artificial sequence
  SiRNA target sequence
atccctaaatatggtaagg

SEQ ID NO: 179089 - DNA, 19 bp, Artificial sequence
  SiRNA target sequence
tccctaaatatggtaaggt

SEQ ID NO: 179090 - DNA, 19 bp, Artificial sequence
  SiRNA target sequence
ccctaaatatggtaaggtt

SEQ ID NO: 179091 - DNA, 19 bp, Artificial sequence
  SiRNA target sequence
cctaaatatggtaaggttt

SEQ ID NO: 179092 - DNA, 19 bp, Artificial sequence
  SiRNA target sequence
ctaaatatggtaaggtttt

SEQ ID NO: 179093 - DNA, 19 bp, Artificial sequence
  SiRNA target sequence
taaatatggtaaggtttta

SEQ ID NO: 179094 - DNA, 19 bp, Artificial sequence
  SiRNA target sequence
aaatatggtaaggttttag

SEQ ID NO: 179095 - DNA, 19 bp, Artificial sequence
  SiRNA target sequence
aatatggtaaggttttagg

SEQ ID NO: 179096 - DNA, 19 bp, Artificial sequence
  SiRNA target sequence
atatggtaaggttttaggg

SEQ ID NO: 179097 - DNA, 19 bp, Artificial sequence
  SiRNA target sequence
tatggtaaggttttagggc

SEQ ID NO: 179098 - DNA, 19 bp, Artificial sequence
  SiRNA target sequence
atggtaaggttttagggct

SEQ ID NO: 179099 - DNA, 19 bp, Artificial sequence
  SiRNA target sequence
tggtaaggttttagggcta

SEQ ID NO: 179100 - DNA, 19 bp, Artificial sequence
  SiRNA target sequence
ggtaaggttttagggctag

SEQ ID NO: 179101 - DNA, 19 bp, Artificial sequence
  SiRNA target sequence
gtaaggttttagggctagt

SEQ ID NO: 179102 - DNA, 19 bp, Artificial sequence
  SiRNA target sequence
taaggttttagggctagta

SEQ ID NO: 179103 - DNA, 19 bp, Artificial sequence
  SiRNA target sequence
aaggttttagggctagtag

SEQ ID NO: 179104 - DNA, 19 bp, Artificial sequence
  SiRNA target sequence
aggttttagggctagtagg

SEQ ID NO: 179105 - DNA, 19 bp, Artificial sequence
  SiRNA target sequence
ggttttagggctagtaggc

SEQ ID NO: 179106 - DNA, 19 bp, Artificial sequence
  SiRNA target sequence
gttttagggctagtaggca

SEQ ID NO: 179107 - DNA, 19 bp, Artificial sequence
  SiRNA target sequence
ttttagggctagtaggcac

SEQ ID NO: 179108 - DNA, 19 bp, Artificial sequence
  SiRNA target sequence
tttagggctagtaggcact

SEQ ID NO: 179109 - DNA, 19 bp, Artificial sequence
  SiRNA target sequence
ttagggctagtaggcacta

SEQ ID NO: 179110 - DNA, 19 bp, Artificial sequence
  SiRNA target sequence
tagggctagtaggcactaa

SEQ ID NO: 179111 - DNA, 19 bp, Artificial sequence
  SiRNA target sequence
agggctagtaggcactaat

SEQ ID NO: 179112 - DNA, 19 bp, Artificial sequence
  SiRNA target sequence
gggctagtaggcactaatg

SEQ ID NO: 179113 - DNA, 19 bp, Artificial sequence
  SiRNA target sequence
ggctagtaggcactaatgg

SEQ ID NO: 179114 - DNA, 19 bp, Artificial sequence
  SiRNA target sequence
gctagtaggcactaatggt

SEQ ID NO: 179115 - DNA, 19 bp, Artificial sequence
  SiRNA target sequence
ctagtaggcactaatggta

SEQ ID NO: 179116 - DNA, 19 bp, Artificial sequence
  SiRNA target sequence
tagtaggcactaatggtat

SEQ ID NO: 179117 - DNA, 19 bp, Artificial sequence
  SiRNA target sequence
agtaggcactaatggtata

SEQ ID NO: 179118 - DNA, 19 bp, Artificial sequence
  SiRNA target sequence
gtaggcactaatggtatag

SEQ ID NO: 179119 - DNA, 19 bp, Artificial sequence
  SiRNA target sequence
taggcactaatggtatagg

SEQ ID NO: 179120 - DNA, 19 bp, Artificial sequence
  SiRNA target sequence
aggcactaatggtatagga

SEQ ID NO: 179121 - DNA, 19 bp, Artificial sequence
  SiRNA target sequence
ggcactaatggtataggaa

SEQ ID NO: 179122 - DNA, 19 bp, Artificial sequence
  SiRNA target sequence
gcactaatggtataggaaa

SEQ ID NO: 179123 - DNA, 19 bp, Artificial sequence
  SiRNA target sequence
cactaatggtataggaaaa

SEQ ID NO: 179124 - DNA, 19 bp, Artificial sequence
  SiRNA target sequence
actaatggtataggaaaaa

SEQ ID NO: 179125 - DNA, 19 bp, Artificial sequence
  SiRNA target sequence
ctaatggtataggaaaaag

SEQ ID NO: 179126 - DNA, 19 bp, Artificial sequence
  SiRNA target sequence
taatggtataggaaaaagt

SEQ ID NO: 179127 - DNA, 19 bp, Artificial sequence
  SiRNA target sequence
aatggtataggaaaaagta

SEQ ID NO: 179128 - DNA, 19 bp, Artificial sequence
  SiRNA target sequence
atggtataggaaaaagtac

SEQ ID NO: 179129 - DNA, 19 bp, Artificial sequence
  SiRNA target sequence
tggtataggaaaaagtact

SEQ ID NO: 179130 - DNA, 19 bp, Artificial sequence
  SiRNA target sequence
ggtataggaaaaagtactg

SEQ ID NO: 179131 - DNA, 19 bp, Artificial sequence
  SiRNA target sequence
gtataggaaaaagtactgc

SEQ ID NO: 179132 - DNA, 19 bp, Artificial sequence
  SiRNA target sequence
tataggaaaaagtactgca

SEQ ID NO: 179133 - DNA, 19 bp, Artificial sequence
  SiRNA target sequence
ataggaaaaagtactgcac

SEQ ID NO: 179134 - DNA, 19 bp, Artificial sequence
  SiRNA target sequence
taggaaaaagtactgcact

SEQ ID NO: 179135 - DNA, 19 bp, Artificial sequence
  SiRNA target sequence
aggaaaaagtactgcactt

SEQ ID NO: 179136 - DNA, 19 bp, Artificial sequence
  SiRNA target sequence
ggaaaaagtactgcactta

SEQ ID NO: 179137 - DNA, 19 bp, Artificial sequence
  SiRNA target sequence
gaaaaagtactgcacttaa

SEQ ID NO: 179138 - DNA, 19 bp, Artificial sequence
  SiRNA target sequence
aaaaagtactgcacttaaa

SEQ ID NO: 179139 - DNA, 19 bp, Artificial sequence
  SiRNA target sequence
aaaagtactgcacttaaaa

SEQ ID NO: 179140 - DNA, 19 bp, Artificial sequence
  SiRNA target sequence
aaagtactgcacttaaaat

SEQ ID NO: 179141 - DNA, 19 bp, Artificial sequence
  SiRNA target sequence
aagtactgcacttaaaata

SEQ ID NO: 179142 - DNA, 19 bp, Artificial sequence
  SiRNA target sequence
agtactgcacttaaaatat

SEQ ID NO: 179143 - DNA, 19 bp, Artificial sequence
  SiRNA target sequence
gtactgcacttaaaatatt

SEQ ID NO: 179144 - DNA, 19 bp, Artificial sequence
  SiRNA target sequence
tactgcacttaaaatatta

SEQ ID NO: 179145 - DNA, 19 bp, Artificial sequence
  SiRNA target sequence
actgcacttaaaatattat

SEQ ID NO: 179146 - DNA, 19 bp, Artificial sequence
  SiRNA target sequence
ctgcacttaaaatattatc

SEQ ID NO: 179147 - DNA, 19 bp, Artificial sequence
  SiRNA target sequence
tgcacttaaaatattatcg

SEQ ID NO: 179148 - DNA, 19 bp, Artificial sequence
  SiRNA target sequence
gcacttaaaatattatcgg

SEQ ID NO: 179149 - DNA, 19 bp, Artificial sequence
  SiRNA target sequence
cacttaaaatattatcggg

SEQ ID NO: 179150 - DNA, 19 bp, Artificial sequence
  SiRNA target sequence
acttaaaatattatcgggc

SEQ ID NO: 179151 - DNA, 19 bp, Artificial sequence
  SiRNA target sequence
cttaaaatattatcgggca

SEQ ID NO: 179152 - DNA, 19 bp, Artificial sequence
  SiRNA target sequence
ttaaaatattatcgggcaa

SEQ ID NO: 179153 - DNA, 19 bp, Artificial sequence
  SiRNA target sequence
taaaatattatcgggcaat

SEQ ID NO: 179154 - DNA, 19 bp, Artificial sequence
  SiRNA target sequence
aaaatattatcgggcaatc

SEQ ID NO: 179155 - DNA, 19 bp, Artificial sequence
  SiRNA target sequence
aaatattatcgggcaatct

SEQ ID NO: 179156 - DNA, 19 bp, Artificial sequence
  SiRNA target sequence
aatattatcgggcaatctt

SEQ ID NO: 179157 - DNA, 19 bp, Artificial sequence
  SiRNA target sequence
atattatcgggcaatctta

SEQ ID NO: 179158 - DNA, 19 bp, Artificial sequence
  SiRNA target sequence
tattatcgggcaatcttaa

SEQ ID NO: 179159 - DNA, 19 bp, Artificial sequence
  SiRNA target sequence
attatcgggcaatcttaaa

SEQ ID NO: 179160 - DNA, 19 bp, Artificial sequence
  SiRNA target sequence
ttatcgggcaatcttaaac

SEQ ID NO: 179161 - DNA, 19 bp, Artificial sequence
  SiRNA target sequence
tatcgggcaatcttaaacc

SEQ ID NO: 179162 - DNA, 19 bp, Artificial sequence
  SiRNA target sequence
atcgggcaatcttaaacca

SEQ ID NO: 179163 - DNA, 19 bp, Artificial sequence
  SiRNA target sequence
tcgggcaatcttaaaccaa

SEQ ID NO: 179164 - DNA, 19 bp, Artificial sequence
  SiRNA target sequence
cgggcaatcttaaaccaaa

SEQ ID NO: 179165 - DNA, 19 bp, Artificial sequence
  SiRNA target sequence
gggcaatcttaaaccaaac

SEQ ID NO: 179166 - DNA, 19 bp, Artificial sequence
  SiRNA target sequence
ggcaatcttaaaccaaact

SEQ ID NO: 179167 - DNA, 19 bp, Artificial sequence
  SiRNA target sequence
gcaatcttaaaccaaactt

SEQ ID NO: 179168 - DNA, 19 bp, Artificial sequence
  SiRNA target sequence
caatcttaaaccaaactta

SEQ ID NO: 179169 - DNA, 19 bp, Artificial sequence
  SiRNA target sequence
aatcttaaaccaaacttag

SEQ ID NO: 179170 - DNA, 19 bp, Artificial sequence
  SiRNA target sequence
atcttaaaccaaacttagg

SEQ ID NO: 179171 - DNA, 19 bp, Artificial sequence
  SiRNA target sequence
tcttaaaccaaacttagga

SEQ ID NO: 179172 - DNA, 19 bp, Artificial sequence
  SiRNA target sequence
cttaaaccaaacttaggaa

SEQ ID NO: 179173 - DNA, 19 bp, Artificial sequence
  SiRNA target sequence
ttaaaccaaacttaggaaa

SEQ ID NO: 179174 - DNA, 19 bp, Artificial sequence
  SiRNA target sequence
taaaccaaacttaggaaag

SEQ ID NO: 179175 - DNA, 19 bp, Artificial sequence
  SiRNA target sequence
aaaccaaacttaggaaagt

SEQ ID NO: 179176 - DNA, 19 bp, Artificial sequence
  SiRNA target sequence
aaccaaacttaggaaagtt

SEQ ID NO: 179177 - DNA, 19 bp, Artificial sequence
  SiRNA target sequence
accaaacttaggaaagttc

SEQ ID NO: 179178 - DNA, 19 bp, Artificial sequence
  SiRNA target sequence
ccaaacttaggaaagttcg

SEQ ID NO: 179179 - DNA, 19 bp, Artificial sequence
  SiRNA target sequence
caaacttaggaaagttcga

SEQ ID NO: 179180 - DNA, 19 bp, Artificial sequence
  SiRNA target sequence
aaacttaggaaagttcgac

SEQ ID NO: 179181 - DNA, 19 bp, Artificial sequence
  SiRNA target sequence
aacttaggaaagttcgacg

SEQ ID NO: 179182 - DNA, 19 bp, Artificial sequence
  SiRNA target sequence
acttaggaaagttcgacgt

SEQ ID NO: 179183 - DNA, 19 bp, Artificial sequence
  SiRNA target sequence
cttaggaaagttcgacgtt

SEQ ID NO: 179184 - DNA, 19 bp, Artificial sequence
  SiRNA target sequence
ttaggaaagttcgacgtta

SEQ ID NO: 179185 - DNA, 19 bp, Artificial sequence
  SiRNA target sequence
taggaaagttcgacgttac

SEQ ID NO: 179186 - DNA, 19 bp, Artificial sequence
  SiRNA target sequence
aggaaagttcgacgttacg

SEQ ID NO: 179187 - DNA, 19 bp, Artificial sequence
  SiRNA target sequence
ggaaagttcgacgttacgc

SEQ ID NO: 179188 - DNA, 19 bp, Artificial sequence
  SiRNA target sequence
gaaagttcgacgttacgcc

SEQ ID NO: 179189 - DNA, 19 bp, Artificial sequence
  SiRNA target sequence
aaagttcgacgttacgccc

SEQ ID NO: 179190 - DNA, 19 bp, Artificial sequence
  SiRNA target sequence
aagttcgacgttacgcccg

SEQ ID NO: 179191 - DNA, 19 bp, Artificial sequence
  SiRNA target sequence
agttcgacgttacgcccga

SEQ ID NO: 179192 - DNA, 19 bp, Artificial sequence
  SiRNA target sequence
gttcgacgttacgcccgac

SEQ ID NO: 179193 - DNA, 19 bp, Artificial sequence
  SiRNA target sequence
ttcgacgttacgcccgact

SEQ ID NO: 179194 - DNA, 19 bp, Artificial sequence
  SiRNA target sequence
tcgacgttacgcccgactg

SEQ ID NO: 179195 - DNA, 19 bp, Artificial sequence
  SiRNA target sequence
cgacgttacgcccgactgg

SEQ ID NO: 179196 - DNA, 19 bp, Artificial sequence
  SiRNA target sequence
gacgttacgcccgactggg

SEQ ID NO: 179197 - DNA, 19 bp, Artificial sequence
  SiRNA target sequence
acgttacgcccgactgggc

SEQ ID NO: 179198 - DNA, 19 bp, Artificial sequence
  SiRNA target sequence
cgttacgcccgactgggca

SEQ ID NO: 179199 - DNA, 19 bp, Artificial sequence
  SiRNA target sequence
gttacgcccgactgggcag

SEQ ID NO: 179200 - DNA, 19 bp, Artificial sequence
  SiRNA target sequence
ttacgcccgactgggcagc

SEQ ID NO: 179201 - DNA, 19 bp, Artificial sequence
  SiRNA target sequence
tacgcccgactgggcagca

SEQ ID NO: 179202 - DNA, 19 bp, Artificial sequence
  SiRNA target sequence
acgcccgactgggcagcaa

SEQ ID NO: 179203 - DNA, 19 bp, Artificial sequence
  SiRNA target sequence
cgcccgactgggcagcaat

SEQ ID NO: 179204 - DNA, 19 bp, Artificial sequence
  SiRNA target sequence
gcccgactgggcagcaatt

SEQ ID NO: 179205 - DNA, 19 bp, Artificial sequence
  SiRNA target sequence
cccgactgggcagcaattc

SEQ ID NO: 179206 - DNA, 19 bp, Artificial sequence
  SiRNA target sequence
ccgactgggcagcaattct

SEQ ID NO: 179207 - DNA, 19 bp, Artificial sequence
  SiRNA target sequence
cgactgggcagcaattcta

SEQ ID NO: 179208 - DNA, 19 bp, Artificial sequence
  SiRNA target sequence
gactgggcagcaattctaa

SEQ ID NO: 179209 - DNA, 19 bp, Artificial sequence
  SiRNA target sequence
actgggcagcaattctaaa

SEQ ID NO: 179210 - DNA, 19 bp, Artificial sequence
  SiRNA target sequence
ctgggcagcaattctaaat

SEQ ID NO: 179211 - DNA, 19 bp, Artificial sequence
  SiRNA target sequence
tgggcagcaattctaaata

SEQ ID NO: 179212 - DNA, 19 bp, Artificial sequence
  SiRNA target sequence
gggcagcaattctaaataa

SEQ ID NO: 179213 - DNA, 19 bp, Artificial sequence
  SiRNA target sequence
ggcagcaattctaaataat

SEQ ID NO: 179214 - DNA, 19 bp, Artificial sequence
  SiRNA target sequence
gcagcaattctaaataatt

SEQ ID NO: 179215 - DNA, 19 bp, Artificial sequence
  SiRNA target sequence
cagcaattctaaataatta

SEQ ID NO: 179216 - DNA, 19 bp, Artificial sequence
  SiRNA target sequence
agcaattctaaataattat

SEQ ID NO: 179217 - DNA, 19 bp, Artificial sequence
  SiRNA target sequence
gcaattctaaataattata

SEQ ID NO: 179218 - DNA, 19 bp, Artificial sequence
  SiRNA target sequence
caattctaaataattataa

SEQ ID NO: 179219 - DNA, 19 bp, Artificial sequence
  SiRNA target sequence
aattctaaataattataaa

SEQ ID NO: 179220 - DNA, 19 bp, Artificial sequence
  SiRNA target sequence
attctaaataattataaag

SEQ ID NO: 179221 - DNA, 19 bp, Artificial sequence
  SiRNA target sequence
ttctaaataattataaagg

SEQ ID NO: 179222 - DNA, 19 bp, Artificial sequence
  SiRNA target sequence
tctaaataattataaagga

SEQ ID NO: 179223 - DNA, 19 bp, Artificial sequence
  SiRNA target sequence
ctaaataattataaaggat

SEQ ID NO: 179224 - DNA, 19 bp, Artificial sequence
  SiRNA target sequence
taaataattataaaggatc

SEQ ID NO: 179225 - DNA, 19 bp, Artificial sequence
  SiRNA target sequence
aaataattataaaggatct

SEQ ID NO: 179226 - DNA, 19 bp, Artificial sequence
  SiRNA target sequence
aataattataaaggatctg

SEQ ID NO: 179227 - DNA, 19 bp, Artificial sequence
  SiRNA target sequence
ataattataaaggatctga

SEQ ID NO: 179228 - DNA, 19 bp, Artificial sequence
  SiRNA target sequence
taattataaaggatctgaa

SEQ ID NO: 179229 - DNA, 19 bp, Artificial sequence
  SiRNA target sequence
aattataaaggatctgaac

SEQ ID NO: 179230 - DNA, 19 bp, Artificial sequence
  SiRNA target sequence
attataaaggatctgaact

SEQ ID NO: 179231 - DNA, 19 bp, Artificial sequence
  SiRNA target sequence
ttataaaggatctgaactt

SEQ ID NO: 179232 - DNA, 19 bp, Artificial sequence
  SiRNA target sequence
tataaaggatctgaacttc

SEQ ID NO: 179233 - DNA, 19 bp, Artificial sequence
  SiRNA target sequence
ataaaggatctgaacttca

SEQ ID NO: 179234 - DNA, 19 bp, Artificial sequence
  SiRNA target sequence
taaaggatctgaacttcat

SEQ ID NO: 179235 - DNA, 19 bp, Artificial sequence
  SiRNA target sequence
aaaggatctgaacttcatg

SEQ ID NO: 179236 - DNA, 19 bp, Artificial sequence
  SiRNA target sequence
aaggatctgaacttcatgg

SEQ ID NO: 179237 - DNA, 19 bp, Artificial sequence
  SiRNA target sequence
aggatctgaacttcatgga

SEQ ID NO: 179238 - DNA, 19 bp, Artificial sequence
  SiRNA target sequence
ggatctgaacttcatggat

SEQ ID NO: 179239 - DNA, 19 bp, Artificial sequence
  SiRNA target sequence
gatctgaacttcatggatt

SEQ ID NO: 179240 - DNA, 19 bp, Artificial sequence
  SiRNA target sequence
atctgaacttcatggattt

SEQ ID NO: 179241 - DNA, 19 bp, Artificial sequence
  SiRNA target sequence
tctgaacttcatggatttt

SEQ ID NO: 179242 - DNA, 19 bp, Artificial sequence
  SiRNA target sequence
ctgaacttcatggattttt

SEQ ID NO: 179243 - DNA, 19 bp, Artificial sequence
  SiRNA target sequence
tgaacttcatggatttttt

SEQ ID NO: 179244 - DNA, 19 bp, Artificial sequence
  SiRNA target sequence
gaacttcatggatttttta

SEQ ID NO: 179245 - DNA, 19 bp, Artificial sequence
  SiRNA target sequence
aacttcatggattttttac

SEQ ID NO: 179246 - DNA, 19 bp, Artificial sequence
  SiRNA target sequence
acttcatggattttttact

SEQ ID NO: 179247 - DNA, 19 bp, Artificial sequence
  SiRNA target sequence
cttcatggattttttacta

SEQ ID NO: 179248 - DNA, 19 bp, Artificial sequence
  SiRNA target sequence
ttcatggattttttactaa

SEQ ID NO: 179249 - DNA, 19 bp, Artificial sequence
  SiRNA target sequence
tcatggattttttactaaa

SEQ ID NO: 179250 - DNA, 19 bp, Artificial sequence
  SiRNA target sequence
catggattttttactaaaa

SEQ ID NO: 179251 - DNA, 19 bp, Artificial sequence
  SiRNA target sequence
atggattttttactaaaat

SEQ ID NO: 179252 - DNA, 19 bp, Artificial sequence
  SiRNA target sequence
tggattttttactaaaatt

SEQ ID NO: 179253 - DNA, 19 bp, Artificial sequence
  SiRNA target sequence
ggattttttactaaaattt

SEQ ID NO: 179254 - DNA, 19 bp, Artificial sequence
  SiRNA target sequence
gattttttactaaaatttt

SEQ ID NO: 179255 - DNA, 19 bp, Artificial sequence
  SiRNA target sequence
attttttactaaaatttta

SEQ ID NO: 179256 - DNA, 19 bp, Artificial sequence
  SiRNA target sequence
ttttttactaaaattttag

SEQ ID NO: 179257 - DNA, 19 bp, Artificial sequence
  SiRNA target sequence
tttttactaaaattttaga

SEQ ID NO: 179258 - DNA, 19 bp, Artificial sequence
  SiRNA target sequence
ttttactaaaattttagaa

SEQ ID NO: 179259 - DNA, 19 bp, Artificial sequence
  SiRNA target sequence
tttactaaaattttagaag

SEQ ID NO: 179260 - DNA, 19 bp, Artificial sequence
  SiRNA target sequence
ttactaaaattttagaagg

SEQ ID NO: 179261 - DNA, 19 bp, Artificial sequence
  SiRNA target sequence
tactaaaattttagaaggg

SEQ ID NO: 179262 - DNA, 19 bp, Artificial sequence
  SiRNA target sequence
actaaaattttagaagggt

SEQ ID NO: 179263 - DNA, 19 bp, Artificial sequence
  SiRNA target sequence
ctaaaattttagaagggtc

SEQ ID NO: 179264 - DNA, 19 bp, Artificial sequence
  SiRNA target sequence
taaaattttagaagggtct

SEQ ID NO: 179265 - DNA, 19 bp, Artificial sequence
  SiRNA target sequence
aaaattttagaagggtcta

SEQ ID NO: 179266 - DNA, 19 bp, Artificial sequence
  SiRNA target sequence
aaattttagaagggtctat

SEQ ID NO: 179267 - DNA, 19 bp, Artificial sequence
  SiRNA target sequence
aattttagaagggtctatt

SEQ ID NO: 179268 - DNA, 19 bp, Artificial sequence
  SiRNA target sequence
attttagaagggtctatta

SEQ ID NO: 179269 - DNA, 19 bp, Artificial sequence
  SiRNA target sequence
ttttagaagggtctattaa

SEQ ID NO: 179270 - DNA, 19 bp, Artificial sequence
  SiRNA target sequence
tttagaagggtctattaaa

SEQ ID NO: 179271 - DNA, 19 bp, Artificial sequence
  SiRNA target sequence
ttagaagggtctattaaag

SEQ ID NO: 179272 - DNA, 19 bp, Artificial sequence
  SiRNA target sequence
tagaagggtctattaaagc

SEQ ID NO: 179273 - DNA, 19 bp, Artificial sequence
  SiRNA target sequence
agaagggtctattaaagct

SEQ ID NO: 179274 - DNA, 19 bp, Artificial sequence
  SiRNA target sequence
gaagggtctattaaagcta

SEQ ID NO: 179275 - DNA, 19 bp, Artificial sequence
  SiRNA target sequence
aagggtctattaaagctat

SEQ ID NO: 179276 - DNA, 19 bp, Artificial sequence
  SiRNA target sequence
agggtctattaaagctatt

SEQ ID NO: 179277 - DNA, 19 bp, Artificial sequence
  SiRNA target sequence
gggtctattaaagctattt

SEQ ID NO: 179278 - DNA, 19 bp, Artificial sequence
  SiRNA target sequence
ggtctattaaagctatttc

SEQ ID NO: 179279 - DNA, 19 bp, Artificial sequence
  SiRNA target sequence
gtctattaaagctatttct

SEQ ID NO: 179280 - DNA, 19 bp, Artificial sequence
  SiRNA target sequence
tctattaaagctatttcta

SEQ ID NO: 179281 - DNA, 19 bp, Artificial sequence
  SiRNA target sequence
ctattaaagctatttctaa

SEQ ID NO: 179282 - DNA, 19 bp, Artificial sequence
  SiRNA target sequence
tattaaagctatttctaag

SEQ ID NO: 179283 - DNA, 19 bp, Artificial sequence
  SiRNA target sequence
attaaagctatttctaaga

SEQ ID NO: 179284 - DNA, 19 bp, Artificial sequence
  SiRNA target sequence
ttaaagctatttctaagat

SEQ ID NO: 179285 - DNA, 19 bp, Artificial sequence
  SiRNA target sequence
taaagctatttctaagata

SEQ ID NO: 179286 - DNA, 19 bp, Artificial sequence
  SiRNA target sequence
aaagctatttctaagatac

SEQ ID NO: 179287 - DNA, 19 bp, Artificial sequence
  SiRNA target sequence
aagctatttctaagataca

SEQ ID NO: 179288 - DNA, 19 bp, Artificial sequence
  SiRNA target sequence
agctatttctaagatacag

SEQ ID NO: 179289 - DNA, 19 bp, Artificial sequence
  SiRNA target sequence
gctatttctaagatacagt

SEQ ID NO: 179290 - DNA, 19 bp, Artificial sequence
  SiRNA target sequence
ctatttctaagatacagta

SEQ ID NO: 179291 - DNA, 19 bp, Artificial sequence
  SiRNA target sequence
tatttctaagatacagtat

SEQ ID NO: 179292 - DNA, 19 bp, Artificial sequence
  SiRNA target sequence
atttctaagatacagtata

SEQ ID NO: 179293 - DNA, 19 bp, Artificial sequence
  SiRNA target sequence
tttctaagatacagtatat

SEQ ID NO: 179294 - DNA, 19 bp, Artificial sequence
  SiRNA target sequence
ttctaagatacagtatata

SEQ ID NO: 179295 - DNA, 19 bp, Artificial sequence
  SiRNA target sequence
tctaagatacagtatatag

SEQ ID NO: 179296 - DNA, 19 bp, Artificial sequence
  SiRNA target sequence
ctaagatacagtatataga

SEQ ID NO: 179297 - DNA, 19 bp, Artificial sequence
  SiRNA target sequence
taagatacagtatatagat

SEQ ID NO: 179298 - DNA, 19 bp, Artificial sequence
  SiRNA target sequence
aagatacagtatatagata

SEQ ID NO: 179299 - DNA, 19 bp, Artificial sequence
  SiRNA target sequence
agatacagtatatagataa

SEQ ID NO: 179300 - DNA, 19 bp, Artificial sequence
  SiRNA target sequence
gatacagtatatagataaa

SEQ ID NO: 179301 - DNA, 19 bp, Artificial sequence
  SiRNA target sequence
atacagtatatagataaaa

SEQ ID NO: 179302 - DNA, 19 bp, Artificial sequence
  SiRNA target sequence
tacagtatatagataaaat

SEQ ID NO: 179303 - DNA, 19 bp, Artificial sequence
  SiRNA target sequence
acagtatatagataaaatg

SEQ ID NO: 179304 - DNA, 19 bp, Artificial sequence
  SiRNA target sequence
cagtatatagataaaatgc

SEQ ID NO: 179305 - DNA, 19 bp, Artificial sequence
  SiRNA target sequence
agtatatagataaaatgcc

SEQ ID NO: 179306 - DNA, 19 bp, Artificial sequence
  SiRNA target sequence
gtatatagataaaatgcct

SEQ ID NO: 179307 - DNA, 19 bp, Artificial sequence
  SiRNA target sequence
tatatagataaaatgccta

SEQ ID NO: 179308 - DNA, 19 bp, Artificial sequence
  SiRNA target sequence
atatagataaaatgcctaa

SEQ ID NO: 179309 - DNA, 19 bp, Artificial sequence
  SiRNA target sequence
tatagataaaatgcctaaa

SEQ ID NO: 179310 - DNA, 19 bp, Artificial sequence
  SiRNA target sequence
atagataaaatgcctaaat

SEQ ID NO: 179311 - DNA, 19 bp, Artificial sequence
  SiRNA target sequence
tagataaaatgcctaaatt

SEQ ID NO: 179312 - DNA, 19 bp, Artificial sequence
  SiRNA target sequence
agataaaatgcctaaattt

SEQ ID NO: 179313 - DNA, 19 bp, Artificial sequence
  SiRNA target sequence
gataaaatgcctaaatttt

SEQ ID NO: 179314 - DNA, 19 bp, Artificial sequence
  SiRNA target sequence
ataaaatgcctaaattttt

SEQ ID NO: 179315 - DNA, 19 bp, Artificial sequence
  SiRNA target sequence
taaaatgcctaaattttta

SEQ ID NO: 179316 - DNA, 19 bp, Artificial sequence
  SiRNA target sequence
aaaatgcctaaatttttaa

SEQ ID NO: 179317 - DNA, 19 bp, Artificial sequence
  SiRNA target sequence
aaatgcctaaatttttaaa

SEQ ID NO: 179318 - DNA, 19 bp, Artificial sequence
  SiRNA target sequence
aatgcctaaatttttaaaa

SEQ ID NO: 179319 - DNA, 19 bp, Artificial sequence
  SiRNA target sequence
atgcctaaatttttaaaag

SEQ ID NO: 179320 - DNA, 19 bp, Artificial sequence
  SiRNA target sequence
tgcctaaatttttaaaagg

SEQ ID NO: 179321 - DNA, 19 bp, Artificial sequence
  SiRNA target sequence
gcctaaatttttaaaagga

SEQ ID NO: 179322 - DNA, 19 bp, Artificial sequence
  SiRNA target sequence
cctaaatttttaaaaggac

SEQ ID NO: 179323 - DNA, 19 bp, Artificial sequence
  SiRNA target sequence
ctaaatttttaaaaggacg

SEQ ID NO: 179324 - DNA, 19 bp, Artificial sequence
  SiRNA target sequence
taaatttttaaaaggacgc

SEQ ID NO: 179325 - DNA, 19 bp, Artificial sequence
  SiRNA target sequence
aaatttttaaaaggacgct

SEQ ID NO: 179326 - DNA, 19 bp, Artificial sequence
  SiRNA target sequence
aatttttaaaaggacgcta

SEQ ID NO: 179327 - DNA, 19 bp, Artificial sequence
  SiRNA target sequence
atttttaaaaggacgctat

SEQ ID NO: 179328 - DNA, 19 bp, Artificial sequence
  SiRNA target sequence
tttttaaaaggacgctata

SEQ ID NO: 179329 - DNA, 19 bp, Artificial sequence
  SiRNA target sequence
ttttaaaaggacgctataa

SEQ ID NO: 179330 - DNA, 19 bp, Artificial sequence
  SiRNA target sequence
tttaaaaggacgctataag

SEQ ID NO: 179331 - DNA, 19 bp, Artificial sequence
  SiRNA target sequence
ttaaaaggacgctataagt

SEQ ID NO: 179332 - DNA, 19 bp, Artificial sequence
  SiRNA target sequence
taaaaggacgctataagtc

SEQ ID NO: 179333 - DNA, 19 bp, Artificial sequence
  SiRNA target sequence
aaaaggacgctataagtca

SEQ ID NO: 179334 - DNA, 19 bp, Artificial sequence
  SiRNA target sequence
aaaggacgctataagtcag

SEQ ID NO: 179335 - DNA, 19 bp, Artificial sequence
  SiRNA target sequence
aaggacgctataagtcaga

SEQ ID NO: 179336 - DNA, 19 bp, Artificial sequence
  SiRNA target sequence
aggacgctataagtcagaa

SEQ ID NO: 179337 - DNA, 19 bp, Artificial sequence
  SiRNA target sequence
ggacgctataagtcagaaa

SEQ ID NO: 179338 - DNA, 19 bp, Artificial sequence
  SiRNA target sequence
gacgctataagtcagaaat

SEQ ID NO: 179339 - DNA, 19 bp, Artificial sequence
  SiRNA target sequence
acgctataagtcagaaatc

SEQ ID NO: 179340 - DNA, 19 bp, Artificial sequence
  SiRNA target sequence
cgctataagtcagaaatcg

SEQ ID NO: 179341 - DNA, 19 bp, Artificial sequence
  SiRNA target sequence
gctataagtcagaaatcgc

SEQ ID NO: 179342 - DNA, 19 bp, Artificial sequence
  SiRNA target sequence
ctataagtcagaaatcgcc

SEQ ID NO: 179343 - DNA, 19 bp, Artificial sequence
  SiRNA target sequence
tataagtcagaaatcgcct

SEQ ID NO: 179344 - DNA, 19 bp, Artificial sequence
  SiRNA target sequence
ataagtcagaaatcgcctc

SEQ ID NO: 179345 - DNA, 19 bp, Artificial sequence
  SiRNA target sequence
taagtcagaaatcgcctcc

SEQ ID NO: 179346 - DNA, 19 bp, Artificial sequence
  SiRNA target sequence
aagtcagaaatcgcctccg

SEQ ID NO: 179347 - DNA, 19 bp, Artificial sequence
  SiRNA target sequence
agtcagaaatcgcctccgg

SEQ ID NO: 179348 - DNA, 19 bp, Artificial sequence
  SiRNA target sequence
gtcagaaatcgcctccgga

SEQ ID NO: 179349 - DNA, 19 bp, Artificial sequence
  SiRNA target sequence
tcagaaatcgcctccggaa

SEQ ID NO: 179350 - DNA, 19 bp, Artificial sequence
  SiRNA target sequence
cagaaatcgcctccggaaa

SEQ ID NO: 179351 - DNA, 19 bp, Artificial sequence
  SiRNA target sequence
agaaatcgcctccggaaaa

SEQ ID NO: 179352 - DNA, 19 bp, Artificial sequence
  SiRNA target sequence
gaaatcgcctccggaaaaa

SEQ ID NO: 179353 - DNA, 19 bp, Artificial sequence
  SiRNA target sequence
aaatcgcctccggaaaaat

SEQ ID NO: 179354 - DNA, 19 bp, Artificial sequence
  SiRNA target sequence
aatcgcctccggaaaaatg

SEQ ID NO: 179355 - DNA, 19 bp, Artificial sequence
  SiRNA target sequence
atcgcctccggaaaaatgt

SEQ ID NO: 179356 - DNA, 19 bp, Artificial sequence
  SiRNA target sequence
tcgcctccggaaaaatgtt

SEQ ID NO: 179357 - DNA, 19 bp, Artificial sequence
  SiRNA target sequence
cgcctccggaaaaatgttg

SEQ ID NO: 179358 - DNA, 19 bp, Artificial sequence
  SiRNA target sequence
gcctccggaaaaatgttgt

SEQ ID NO: 179359 - DNA, 19 bp, Artificial sequence
  SiRNA target sequence
cctccggaaaaatgttgtt

SEQ ID NO: 179360 - DNA, 19 bp, Artificial sequence
  SiRNA target sequence
ctccggaaaaatgttgttt

SEQ ID NO: 179361 - DNA, 19 bp, Artificial sequence
  SiRNA target sequence
tccggaaaaatgttgttta

SEQ ID NO: 179362 - DNA, 19 bp, Artificial sequence
  SiRNA target sequence
ccggaaaaatgttgtttac

SEQ ID NO: 179363 - DNA, 19 bp, Artificial sequence
  SiRNA target sequence
cggaaaaatgttgtttact

SEQ ID NO: 179364 - DNA, 19 bp, Artificial sequence
  SiRNA target sequence
ggaaaaatgttgtttactg

SEQ ID NO: 179365 - DNA, 19 bp, Artificial sequence
  SiRNA target sequence
gaaaaatgttgtttactgt

SEQ ID NO: 179366 - DNA, 19 bp, Artificial sequence
  SiRNA target sequence
aaaaatgttgtttactgtt

SEQ ID NO: 179367 - DNA, 19 bp, Artificial sequence
  SiRNA target sequence
aaaatgttgtttactgtta

SEQ ID NO: 179368 - DNA, 19 bp, Artificial sequence
  SiRNA target sequence
aaatgttgtttactgttaa

SEQ ID NO: 179369 - DNA, 19 bp, Artificial sequence
  SiRNA target sequence
aatgttgtttactgttaat

SEQ ID NO: 179370 - DNA, 19 bp, Artificial sequence
  SiRNA target sequence
atgttgtttactgttaatg

SEQ ID NO: 179371 - DNA, 19 bp, Artificial sequence
  SiRNA target sequence
tgttgtttactgttaatga

SEQ ID NO: 179372 - DNA, 19 bp, Artificial sequence
  SiRNA target sequence
gttgtttactgttaatgat

SEQ ID NO: 179373 - DNA, 19 bp, Artificial sequence
  SiRNA target sequence
ttgtttactgttaatgata

SEQ ID NO: 179374 - DNA, 19 bp, Artificial sequence
  SiRNA target sequence
tgtttactgttaatgatat

SEQ ID NO: 179375 - DNA, 19 bp, Artificial sequence
  SiRNA target sequence
gtttactgttaatgatata

SEQ ID NO: 179376 - DNA, 19 bp, Artificial sequence
  SiRNA target sequence
tttactgttaatgatatat

SEQ ID NO: 179377 - DNA, 19 bp, Artificial sequence
  SiRNA target sequence
ttactgttaatgatatatt

SEQ ID NO: 179378 - DNA, 19 bp, Artificial sequence
  SiRNA target sequence
tactgttaatgatatatta

SEQ ID NO: 179379 - DNA, 19 bp, Artificial sequence
  SiRNA target sequence
actgttaatgatatattaa

SEQ ID NO: 179380 - DNA, 19 bp, Artificial sequence
  SiRNA target sequence
ctgttaatgatatattaaa

SEQ ID NO: 179381 - DNA, 19 bp, Artificial sequence
  SiRNA target sequence
tgttaatgatatattaaaa

SEQ ID NO: 179382 - DNA, 19 bp, Artificial sequence
  SiRNA target sequence
gttaatgatatattaaaaa

SEQ ID NO: 179383 - DNA, 19 bp, Artificial sequence
  SiRNA target sequence
ttaatgatatattaaaaaa

SEQ ID NO: 179384 - DNA, 19 bp, Artificial sequence
  SiRNA target sequence
taatgatatattaaaaaaa

SEQ ID NO: 179385 - DNA, 19 bp, Artificial sequence
  SiRNA target sequence
aatgatatattaaaaaaag

SEQ ID NO: 179386 - DNA, 19 bp, Artificial sequence
  SiRNA target sequence
atgatatattaaaaaaagt

SEQ ID NO: 179387 - DNA, 19 bp, Artificial sequence
  SiRNA target sequence
tgatatattaaaaaaagtt

SEQ ID NO: 179388 - DNA, 19 bp, Artificial sequence
  SiRNA target sequence
gatatattaaaaaaagttg

SEQ ID NO: 179389 - DNA, 19 bp, Artificial sequence
  SiRNA target sequence
atatattaaaaaaagttga

SEQ ID NO: 179390 - DNA, 19 bp, Artificial sequence
  SiRNA target sequence
tatattaaaaaaagttgat

SEQ ID NO: 179391 - DNA, 19 bp, Artificial sequence
  SiRNA target sequence
atattaaaaaaagttgatg

SEQ ID NO: 179392 - DNA, 19 bp, Artificial sequence
  SiRNA target sequence
tattaaaaaaagttgatga

SEQ ID NO: 179393 - DNA, 19 bp, Artificial sequence
  SiRNA target sequence
attaaaaaaagttgatgaa

SEQ ID NO: 179394 - DNA, 19 bp, Artificial sequence
  SiRNA target sequence
ttaaaaaaagttgatgaaa

SEQ ID NO: 179395 - DNA, 19 bp, Artificial sequence
  SiRNA target sequence
taaaaaaagttgatgaaaa

SEQ ID NO: 179396 - DNA, 19 bp, Artificial sequence
  SiRNA target sequence
aaaaaaagttgatgaaaaa

SEQ ID NO: 179397 - DNA, 19 bp, Artificial sequence
  SiRNA target sequence
aaaaaagttgatgaaaaaa

SEQ ID NO: 179398 - DNA, 19 bp, Artificial sequence
  SiRNA target sequence
aaaaagttgatgaaaaaaa

SEQ ID NO: 179399 - DNA, 19 bp, Artificial sequence
  SiRNA target sequence
aaaagttgatgaaaaaaat

SEQ ID NO: 179400 - DNA, 19 bp, Artificial sequence
  SiRNA target sequence
aaagttgatgaaaaaaata

SEQ ID NO: 179401 - DNA, 19 bp, Artificial sequence
  SiRNA target sequence
aagttgatgaaaaaaataa

SEQ ID NO: 179402 - DNA, 19 bp, Artificial sequence
  SiRNA target sequence
agttgatgaaaaaaataaa

SEQ ID NO: 179403 - DNA, 19 bp, Artificial sequence
  SiRNA target sequence
gttgatgaaaaaaataaat

SEQ ID NO: 179404 - DNA, 19 bp, Artificial sequence
  SiRNA target sequence
ttgatgaaaaaaataaatt

SEQ ID NO: 179405 - DNA, 19 bp, Artificial sequence
  SiRNA target sequence
tgatgaaaaaaataaattt

SEQ ID NO: 179406 - DNA, 19 bp, Artificial sequence
  SiRNA target sequence
gatgaaaaaaataaatttg

SEQ ID NO: 179407 - DNA, 19 bp, Artificial sequence
  SiRNA target sequence
atgaaaaaaataaatttga

SEQ ID NO: 179408 - DNA, 19 bp, Artificial sequence
  SiRNA target sequence
tgaaaaaaataaatttgac

SEQ ID NO: 179409 - DNA, 19 bp, Artificial sequence
  SiRNA target sequence
gaaaaaaataaatttgact

SEQ ID NO: 179410 - DNA, 19 bp, Artificial sequence
  SiRNA target sequence
aaaaaaataaatttgacta

SEQ ID NO: 179411 - DNA, 19 bp, Artificial sequence
  SiRNA target sequence
aaaaaataaatttgactat

SEQ ID NO: 179412 - DNA, 19 bp, Artificial sequence
  SiRNA target sequence
aaaaataaatttgactatt

SEQ ID NO: 179413 - DNA, 19 bp, Artificial sequence
  SiRNA target sequence
aaaataaatttgactatta

SEQ ID NO: 179414 - DNA, 19 bp, Artificial sequence
  SiRNA target sequence
aaataaatttgactattac

SEQ ID NO: 179415 - DNA, 19 bp, Artificial sequence
  SiRNA target sequence
aataaatttgactattacg

SEQ ID NO: 179416 - DNA, 19 bp, Artificial sequence
  SiRNA target sequence
ataaatttgactattacgt

SEQ ID NO: 179417 - DNA, 19 bp, Artificial sequence
  SiRNA target sequence
taaatttgactattacgta

SEQ ID NO: 179418 - DNA, 19 bp, Artificial sequence
  SiRNA target sequence
aaatttgactattacgtag

SEQ ID NO: 179419 - DNA, 19 bp, Artificial sequence
  SiRNA target sequence
aatttgactattacgtaga

SEQ ID NO: 179420 - DNA, 19 bp, Artificial sequence
  SiRNA target sequence
atttgactattacgtagat

SEQ ID NO: 179421 - DNA, 19 bp, Artificial sequence
  SiRNA target sequence
tttgactattacgtagata

SEQ ID NO: 179422 - DNA, 19 bp, Artificial sequence
  SiRNA target sequence
ttgactattacgtagataa

SEQ ID NO: 179423 - DNA, 19 bp, Artificial sequence
  SiRNA target sequence
tgactattacgtagataaa

SEQ ID NO: 179424 - DNA, 19 bp, Artificial sequence
  SiRNA target sequence
gactattacgtagataaaa

SEQ ID NO: 179425 - DNA, 19 bp, Artificial sequence
  SiRNA target sequence
actattacgtagataaaat

SEQ ID NO: 179426 - DNA, 19 bp, Artificial sequence
  SiRNA target sequence
ctattacgtagataaaatg

SEQ ID NO: 179427 - DNA, 19 bp, Artificial sequence
  SiRNA target sequence
tattacgtagataaaatgg

SEQ ID NO: 179428 - DNA, 19 bp, Artificial sequence
  SiRNA target sequence
attacgtagataaaatggc

SEQ ID NO: 179429 - DNA, 19 bp, Artificial sequence
  SiRNA target sequence
ttacgtagataaaatggca

SEQ ID NO: 179430 - DNA, 19 bp, Artificial sequence
  SiRNA target sequence
tacgtagataaaatggcac

SEQ ID NO: 179431 - DNA, 19 bp, Artificial sequence
  SiRNA target sequence
acgtagataaaatggcact

SEQ ID NO: 179432 - DNA, 19 bp, Artificial sequence
  SiRNA target sequence
cgtagataaaatggcactt

SEQ ID NO: 179433 - DNA, 19 bp, Artificial sequence
  SiRNA target sequence
gtagataaaatggcactta

SEQ ID NO: 179434 - DNA, 19 bp, Artificial sequence
  SiRNA target sequence
tagataaaatggcacttaa

SEQ ID NO: 179435 - DNA, 19 bp, Artificial sequence
  SiRNA target sequence
agataaaatggcacttaaa

SEQ ID NO: 179436 - DNA, 19 bp, Artificial sequence
  SiRNA target sequence
gataaaatggcacttaaaa

SEQ ID NO: 179437 - DNA, 19 bp, Artificial sequence
  SiRNA target sequence
ataaaatggcacttaaaaa

SEQ ID NO: 179438 - DNA, 19 bp, Artificial sequence
  SiRNA target sequence
taaaatggcacttaaaaat

SEQ ID NO: 179439 - DNA, 19 bp, Artificial sequence
  SiRNA target sequence
aaaatggcacttaaaaatg

SEQ ID NO: 179440 - DNA, 19 bp, Artificial sequence
  SiRNA target sequence
aaatggcacttaaaaatgt

SEQ ID NO: 179441 - DNA, 19 bp, Artificial sequence
  SiRNA target sequence
aatggcacttaaaaatgta

SEQ ID NO: 179442 - DNA, 19 bp, Artificial sequence
  SiRNA target sequence
atggcacttaaaaatgtat

SEQ ID NO: 179443 - DNA, 19 bp, Artificial sequence
  SiRNA target sequence
tggcacttaaaaatgtatt

SEQ ID NO: 179444 - DNA, 19 bp, Artificial sequence
  SiRNA target sequence
ggcacttaaaaatgtatta

SEQ ID NO: 179445 - DNA, 19 bp, Artificial sequence
  SiRNA target sequence
gcacttaaaaatgtattaa

SEQ ID NO: 179446 - DNA, 19 bp, Artificial sequence
  SiRNA target sequence
cacttaaaaatgtattaac

SEQ ID NO: 179447 - DNA, 19 bp, Artificial sequence
  SiRNA target sequence
acttaaaaatgtattaaca

SEQ ID NO: 179448 - DNA, 19 bp, Artificial sequence
  SiRNA target sequence
cttaaaaatgtattaacaa

SEQ ID NO: 179449 - DNA, 19 bp, Artificial sequence
  SiRNA target sequence
ttaaaaatgtattaacaag

SEQ ID NO: 179450 - DNA, 19 bp, Artificial sequence
  SiRNA target sequence
taaaaatgtattaacaaga

SEQ ID NO: 179451 - DNA, 19 bp, Artificial sequence
  SiRNA target sequence
aaaaatgtattaacaagag

SEQ ID NO: 179452 - DNA, 19 bp, Artificial sequence
  SiRNA target sequence
aaaatgtattaacaagaga

SEQ ID NO: 179453 - DNA, 19 bp, Artificial sequence
  SiRNA target sequence
aaatgtattaacaagagaa

SEQ ID NO: 179454 - DNA, 19 bp, Artificial sequence
  SiRNA target sequence
aatgtattaacaagagaat

SEQ ID NO: 179455 - DNA, 19 bp, Artificial sequence
  SiRNA target sequence
atgtattaacaagagaatt

SEQ ID NO: 179456 - DNA, 19 bp, Artificial sequence
  SiRNA target sequence
tgtattaacaagagaatta

SEQ ID NO: 179457 - DNA, 19 bp, Artificial sequence
  SiRNA target sequence
gtattaacaagagaattag

SEQ ID NO: 179458 - DNA, 19 bp, Artificial sequence
  SiRNA target sequence
tattaacaagagaattaga

SEQ ID NO: 179459 - DNA, 19 bp, Artificial sequence
  SiRNA target sequence
attaacaagagaattagag

SEQ ID NO: 179460 - DNA, 19 bp, Artificial sequence
  SiRNA target sequence
ttaacaagagaattagagc

SEQ ID NO: 179461 - DNA, 19 bp, Artificial sequence
  SiRNA target sequence
taacaagagaattagagca

SEQ ID NO: 179462 - DNA, 19 bp, Artificial sequence
  SiRNA target sequence
aacaagagaattagagcaa

SEQ ID NO: 179463 - DNA, 19 bp, Artificial sequence
  SiRNA target sequence
acaagagaattagagcaat

SEQ ID NO: 179464 - DNA, 19 bp, Artificial sequence
  SiRNA target sequence
caagagaattagagcaatt

SEQ ID NO: 179465 - DNA, 19 bp, Artificial sequence
  SiRNA target sequence
aagagaattagagcaatta

SEQ ID NO: 179466 - DNA, 19 bp, Artificial sequence
  SiRNA target sequence
agagaattagagcaattaa

SEQ ID NO: 179467 - DNA, 19 bp, Artificial sequence
  SiRNA target sequence
gagaattagagcaattaag

SEQ ID NO: 179468 - DNA, 19 bp, Artificial sequence
  SiRNA target sequence
agaattagagcaattaagt

SEQ ID NO: 179469 - DNA, 19 bp, Artificial sequence
  SiRNA target sequence
gaattagagcaattaagtg

SEQ ID NO: 179470 - DNA, 19 bp, Artificial sequence
  SiRNA target sequence
aattagagcaattaagtgg

SEQ ID NO: 179471 - DNA, 19 bp, Artificial sequence
  SiRNA target sequence
attagagcaattaagtggt

SEQ ID NO: 179472 - DNA, 19 bp, Artificial sequence
  SiRNA target sequence
ttagagcaattaagtggtg

SEQ ID NO: 179473 - DNA, 19 bp, Artificial sequence
  SiRNA target sequence
tagagcaattaagtggtgg

SEQ ID NO: 179474 - DNA, 19 bp, Artificial sequence
  SiRNA target sequence
agagcaattaagtggtggt

SEQ ID NO: 179475 - DNA, 19 bp, Artificial sequence
  SiRNA target sequence
gagcaattaagtggtggtg

SEQ ID NO: 179476 - DNA, 19 bp, Artificial sequence
  SiRNA target sequence
agcaattaagtggtggtga

SEQ ID NO: 179477 - DNA, 19 bp, Artificial sequence
  SiRNA target sequence
gcaattaagtggtggtgaa

SEQ ID NO: 179478 - DNA, 19 bp, Artificial sequence
  SiRNA target sequence
caattaagtggtggtgaac

SEQ ID NO: 179479 - DNA, 19 bp, Artificial sequence
  SiRNA target sequence
aattaagtggtggtgaact

SEQ ID NO: 179480 - DNA, 19 bp, Artificial sequence
  SiRNA target sequence
attaagtggtggtgaactt

SEQ ID NO: 179481 - DNA, 19 bp, Artificial sequence
  SiRNA target sequence
ttaagtggtggtgaacttc

SEQ ID NO: 179482 - DNA, 19 bp, Artificial sequence
  SiRNA target sequence
taagtggtggtgaacttca

SEQ ID NO: 179483 - DNA, 19 bp, Artificial sequence
  SiRNA target sequence
aagtggtggtgaacttcaa

SEQ ID NO: 179484 - DNA, 19 bp, Artificial sequence
  SiRNA target sequence
agtggtggtgaacttcaaa

SEQ ID NO: 179485 - DNA, 19 bp, Artificial sequence
  SiRNA target sequence
gtggtggtgaacttcaaag

SEQ ID NO: 179486 - DNA, 19 bp, Artificial sequence
  SiRNA target sequence
tggtggtgaacttcaaaga

SEQ ID NO: 179487 - DNA, 19 bp, Artificial sequence
  SiRNA target sequence
ggtggtgaacttcaaagat

SEQ ID NO: 179488 - DNA, 19 bp, Artificial sequence
  SiRNA target sequence
gtggtgaacttcaaagatt

SEQ ID NO: 179489 - DNA, 19 bp, Artificial sequence
  SiRNA target sequence
tggtgaacttcaaagattt

SEQ ID NO: 179490 - DNA, 19 bp, Artificial sequence
  SiRNA target sequence
ggtgaacttcaaagatttt

SEQ ID NO: 179491 - DNA, 19 bp, Artificial sequence
  SiRNA target sequence
gtgaacttcaaagattttg

SEQ ID NO: 179492 - DNA, 19 bp, Artificial sequence
  SiRNA target sequence
tgaacttcaaagattttgt

SEQ ID NO: 179493 - DNA, 19 bp, Artificial sequence
  SiRNA target sequence
gaacttcaaagattttgta

SEQ ID NO: 179494 - DNA, 19 bp, Artificial sequence
  SiRNA target sequence
aacttcaaagattttgtat

SEQ ID NO: 179495 - DNA, 19 bp, Artificial sequence
  SiRNA target sequence
acttcaaagattttgtatt

SEQ ID NO: 179496 - DNA, 19 bp, Artificial sequence
  SiRNA target sequence
cttcaaagattttgtattg

SEQ ID NO: 179497 - DNA, 19 bp, Artificial sequence
  SiRNA target sequence
ttcaaagattttgtattgc

SEQ ID NO: 179498 - DNA, 19 bp, Artificial sequence
  SiRNA target sequence
tcaaagattttgtattgca

SEQ ID NO: 179499 - DNA, 19 bp, Artificial sequence
  SiRNA target sequence
caaagattttgtattgcat

SEQ ID NO: 179500 - DNA, 19 bp, Artificial sequence
  SiRNA target sequence
aaagattttgtattgcata

SEQ ID NO: 179501 - DNA, 19 bp, Artificial sequence
  SiRNA target sequence
aagattttgtattgcatac

SEQ ID NO: 179502 - DNA, 19 bp, Artificial sequence
  SiRNA target sequence
agattttgtattgcataca

SEQ ID NO: 179503 - DNA, 19 bp, Artificial sequence
  SiRNA target sequence
gattttgtattgcatacac

SEQ ID NO: 179504 - DNA, 19 bp, Artificial sequence
  SiRNA target sequence
attttgtattgcatacaca

SEQ ID NO: 179505 - DNA, 19 bp, Artificial sequence
  SiRNA target sequence
ttttgtattgcatacacat

SEQ ID NO: 179506 - DNA, 19 bp, Artificial sequence
  SiRNA target sequence
tttgtattgcatacacatg

SEQ ID NO: 179507 - DNA, 19 bp, Artificial sequence
  SiRNA target sequence
ttgtattgcatacacatgt

SEQ ID NO: 179508 - DNA, 19 bp, Artificial sequence
  SiRNA target sequence
tgtattgcatacacatgtt

SEQ ID NO: 179509 - DNA, 19 bp, Artificial sequence
  SiRNA target sequence
gtattgcatacacatgttt

SEQ ID NO: 179510 - DNA, 19 bp, Artificial sequence
  SiRNA target sequence
tattgcatacacatgttta

SEQ ID NO: 179511 - DNA, 19 bp, Artificial sequence
  SiRNA target sequence
attgcatacacatgtttac

SEQ ID NO: 179512 - DNA, 19 bp, Artificial sequence
  SiRNA target sequence
ttgcatacacatgtttaca

SEQ ID NO: 179513 - DNA, 19 bp, Artificial sequence
  SiRNA target sequence
tgcatacacatgtttacaa

SEQ ID NO: 179514 - DNA, 19 bp, Artificial sequence
  SiRNA target sequence
gcatacacatgtttacaag

SEQ ID NO: 179515 - DNA, 19 bp, Artificial sequence
  SiRNA target sequence
catacacatgtttacaaga

SEQ ID NO: 179516 - DNA, 19 bp, Artificial sequence
  SiRNA target sequence
atacacatgtttacaagaa

SEQ ID NO: 179517 - DNA, 19 bp, Artificial sequence
  SiRNA target sequence
tacacatgtttacaagaag

SEQ ID NO: 179518 - DNA, 19 bp, Artificial sequence
  SiRNA target sequence
acacatgtttacaagaagg

SEQ ID NO: 179519 - DNA, 19 bp, Artificial sequence
  SiRNA target sequence
cacatgtttacaagaagga

SEQ ID NO: 179520 - DNA, 19 bp, Artificial sequence
  SiRNA target sequence
acatgtttacaagaaggaa

SEQ ID NO: 179521 - DNA, 19 bp, Artificial sequence
  SiRNA target sequence
catgtttacaagaaggaaa

SEQ ID NO: 179522 - DNA, 19 bp, Artificial sequence
  SiRNA target sequence
atgtttacaagaaggaaat

SEQ ID NO: 179523 - DNA, 19 bp, Artificial sequence
  SiRNA target sequence
tgtttacaagaaggaaatg

SEQ ID NO: 179524 - DNA, 19 bp, Artificial sequence
  SiRNA target sequence
gtttacaagaaggaaatgt

SEQ ID NO: 179525 - DNA, 19 bp, Artificial sequence
  SiRNA target sequence
tttacaagaaggaaatgtt

SEQ ID NO: 179526 - DNA, 19 bp, Artificial sequence
  SiRNA target sequence
ttacaagaaggaaatgttt

SEQ ID NO: 179527 - DNA, 19 bp, Artificial sequence
  SiRNA target sequence
tacaagaaggaaatgttta

SEQ ID NO: 179528 - DNA, 19 bp, Artificial sequence
  SiRNA target sequence
acaagaaggaaatgtttat

SEQ ID NO: 179529 - DNA, 19 bp, Artificial sequence
  SiRNA target sequence
caagaaggaaatgtttata

SEQ ID NO: 179530 - DNA, 19 bp, Artificial sequence
  SiRNA target sequence
aagaaggaaatgtttatat

SEQ ID NO: 179531 - DNA, 19 bp, Artificial sequence
  SiRNA target sequence
agaaggaaatgtttatatt

SEQ ID NO: 179532 - DNA, 19 bp, Artificial sequence
  SiRNA target sequence
gaaggaaatgtttatattt

SEQ ID NO: 179533 - DNA, 19 bp, Artificial sequence
  SiRNA target sequence
aaggaaatgtttatatttt

SEQ ID NO: 179534 - DNA, 19 bp, Artificial sequence
  SiRNA target sequence
aggaaatgtttatattttt

SEQ ID NO: 179535 - DNA, 19 bp, Artificial sequence
  SiRNA target sequence
ggaaatgtttatatttttg

SEQ ID NO: 179536 - DNA, 19 bp, Artificial sequence
  SiRNA target sequence
gaaatgtttatatttttga

SEQ ID NO: 179537 - DNA, 19 bp, Artificial sequence
  SiRNA target sequence
aaatgtttatatttttgat

SEQ ID NO: 179538 - DNA, 19 bp, Artificial sequence
  SiRNA target sequence
aatgtttatatttttgatg

SEQ ID NO: 179539 - DNA, 19 bp, Artificial sequence
  SiRNA target sequence
atgtttatatttttgatga

SEQ ID NO: 179540 - DNA, 19 bp, Artificial sequence
  SiRNA target sequence
tgtttatatttttgatgaa

SEQ ID NO: 179541 - DNA, 19 bp, Artificial sequence
  SiRNA target sequence
gtttatatttttgatgaac

SEQ ID NO: 179542 - DNA, 19 bp, Artificial sequence
  SiRNA target sequence
tttatatttttgatgaacc

SEQ ID NO: 179543 - DNA, 19 bp, Artificial sequence
  SiRNA target sequence
ttatatttttgatgaaccc

SEQ ID NO: 179544 - DNA, 19 bp, Artificial sequence
  SiRNA target sequence
tatatttttgatgaaccca

SEQ ID NO: 179545 - DNA, 19 bp, Artificial sequence
  SiRNA target sequence
atatttttgatgaacccac

SEQ ID NO: 179546 - DNA, 19 bp, Artificial sequence
  SiRNA target sequence
tatttttgatgaacccact

SEQ ID NO: 179547 - DNA, 19 bp, Artificial sequence
  SiRNA target sequence
atttttgatgaacccacta

SEQ ID NO: 179548 - DNA, 19 bp, Artificial sequence
  SiRNA target sequence
tttttgatgaacccactag

SEQ ID NO: 179549 - DNA, 19 bp, Artificial sequence
  SiRNA target sequence
ttttgatgaacccactagt

SEQ ID NO: 179550 - DNA, 19 bp, Artificial sequence
  SiRNA target sequence
tttgatgaacccactagtt

SEQ ID NO: 179551 - DNA, 19 bp, Artificial sequence
  SiRNA target sequence
ttgatgaacccactagttt

SEQ ID NO: 179552 - DNA, 19 bp, Artificial sequence
  SiRNA target sequence
tgatgaacccactagtttt

SEQ ID NO: 179553 - DNA, 19 bp, Artificial sequence
  SiRNA target sequence
gatgaacccactagttttt

SEQ ID NO: 179554 - DNA, 19 bp, Artificial sequence
  SiRNA target sequence
atgaacccactagtttttt

SEQ ID NO: 179555 - DNA, 19 bp, Artificial sequence
  SiRNA target sequence
tgaacccactagttttttg

SEQ ID NO: 179556 - DNA, 19 bp, Artificial sequence
  SiRNA target sequence
gaacccactagttttttgg

SEQ ID NO: 179557 - DNA, 19 bp, Artificial sequence
  SiRNA target sequence
aacccactagttttttgga

SEQ ID NO: 179558 - DNA, 19 bp, Artificial sequence
  SiRNA target sequence
acccactagttttttggat

SEQ ID NO: 179559 - DNA, 19 bp, Artificial sequence
  SiRNA target sequence
cccactagttttttggatg

SEQ ID NO: 179560 - DNA, 19 bp, Artificial sequence
  SiRNA target sequence
ccactagttttttggatgt

SEQ ID NO: 179561 - DNA, 19 bp, Artificial sequence
  SiRNA target sequence
cactagttttttggatgtt

SEQ ID NO: 179562 - DNA, 19 bp, Artificial sequence
  SiRNA target sequence
actagttttttggatgtta

SEQ ID NO: 179563 - DNA, 19 bp, Artificial sequence
  SiRNA target sequence
ctagttttttggatgttaa

SEQ ID NO: 179564 - DNA, 19 bp, Artificial sequence
  SiRNA target sequence
tagttttttggatgttaag

SEQ ID NO: 179565 - DNA, 19 bp, Artificial sequence
  SiRNA target sequence
agttttttggatgttaagc

SEQ ID NO: 179566 - DNA, 19 bp, Artificial sequence
  SiRNA target sequence
gttttttggatgttaagca

SEQ ID NO: 179567 - DNA, 19 bp, Artificial sequence
  SiRNA target sequence
ttttttggatgttaagcag

SEQ ID NO: 179568 - DNA, 19 bp, Artificial sequence
  SiRNA target sequence
tttttggatgttaagcagc

SEQ ID NO: 179569 - DNA, 19 bp, Artificial sequence
  SiRNA target sequence
ttttggatgttaagcagcg

SEQ ID NO: 179570 - DNA, 19 bp, Artificial sequence
  SiRNA target sequence
tttggatgttaagcagcga

SEQ ID NO: 179571 - DNA, 19 bp, Artificial sequence
  SiRNA target sequence
ttggatgttaagcagcgac

SEQ ID NO: 179572 - DNA, 19 bp, Artificial sequence
  SiRNA target sequence
tggatgttaagcagcgact

SEQ ID NO: 179573 - DNA, 19 bp, Artificial sequence
  SiRNA target sequence
ggatgttaagcagcgacta

SEQ ID NO: 179574 - DNA, 19 bp, Artificial sequence
  SiRNA target sequence
gatgttaagcagcgactag

SEQ ID NO: 179575 - DNA, 19 bp, Artificial sequence
  SiRNA target sequence
atgttaagcagcgactagc

SEQ ID NO: 179576 - DNA, 19 bp, Artificial sequence
  SiRNA target sequence
tgttaagcagcgactagca

SEQ ID NO: 179577 - DNA, 19 bp, Artificial sequence
  SiRNA target sequence
gttaagcagcgactagcag

SEQ ID NO: 179578 - DNA, 19 bp, Artificial sequence
  SiRNA target sequence
ttaagcagcgactagcagc

SEQ ID NO: 179579 - DNA, 19 bp, Artificial sequence
  SiRNA target sequence
taagcagcgactagcagct

SEQ ID NO: 179580 - DNA, 19 bp, Artificial sequence
  SiRNA target sequence
aagcagcgactagcagctg

SEQ ID NO: 179581 - DNA, 19 bp, Artificial sequence
  SiRNA target sequence
agcagcgactagcagctgc

SEQ ID NO: 179582 - DNA, 19 bp, Artificial sequence
  SiRNA target sequence
gcagcgactagcagctgct

SEQ ID NO: 179583 - DNA, 19 bp, Artificial sequence
  SiRNA target sequence
cagcgactagcagctgcta

SEQ ID NO: 179584 - DNA, 19 bp, Artificial sequence
  SiRNA target sequence
agcgactagcagctgctaa

SEQ ID NO: 179585 - DNA, 19 bp, Artificial sequence
  SiRNA target sequence
gcgactagcagctgctaag

SEQ ID NO: 179586 - DNA, 19 bp, Artificial sequence
  SiRNA target sequence
cgactagcagctgctaagg

SEQ ID NO: 179587 - DNA, 19 bp, Artificial sequence
  SiRNA target sequence
gactagcagctgctaagga

SEQ ID NO: 179588 - DNA, 19 bp, Artificial sequence
  SiRNA target sequence
actagcagctgctaaggaa

SEQ ID NO: 179589 - DNA, 19 bp, Artificial sequence
  SiRNA target sequence
ctagcagctgctaaggaaa

SEQ ID NO: 179590 - DNA, 19 bp, Artificial sequence
  SiRNA target sequence
tagcagctgctaaggaaat

SEQ ID NO: 179591 - DNA, 19 bp, Artificial sequence
  SiRNA target sequence
agcagctgctaaggaaata

SEQ ID NO: 179592 - DNA, 19 bp, Artificial sequence
  SiRNA target sequence
gcagctgctaaggaaataa

SEQ ID NO: 179593 - DNA, 19 bp, Artificial sequence
  SiRNA target sequence
cagctgctaaggaaataag

SEQ ID NO: 179594 - DNA, 19 bp, Artificial sequence
  SiRNA target sequence
agctgctaaggaaataaga

SEQ ID NO: 179595 - DNA, 19 bp, Artificial sequence
  SiRNA target sequence
gctgctaaggaaataagaa

SEQ ID NO: 179596 - DNA, 19 bp, Artificial sequence
  SiRNA target sequence
ctgctaaggaaataagaaa

SEQ ID NO: 179597 - DNA, 19 bp, Artificial sequence
  SiRNA target sequence
tgctaaggaaataagaaat

SEQ ID NO: 179598 - DNA, 19 bp, Artificial sequence
  SiRNA target sequence
gctaaggaaataagaaatt

SEQ ID NO: 179599 - DNA, 19 bp, Artificial sequence
  SiRNA target sequence
ctaaggaaataagaaattt

SEQ ID NO: 179600 - DNA, 19 bp, Artificial sequence
  SiRNA target sequence
taaggaaataagaaatttg

SEQ ID NO: 179601 - DNA, 19 bp, Artificial sequence
  SiRNA target sequence
aaggaaataagaaatttgt

SEQ ID NO: 179602 - DNA, 19 bp, Artificial sequence
  SiRNA target sequence
aggaaataagaaatttgtg

SEQ ID NO: 179603 - DNA, 19 bp, Artificial sequence
  SiRNA target sequence
ggaaataagaaatttgtgt

SEQ ID NO: 179604 - DNA, 19 bp, Artificial sequence
  SiRNA target sequence
gaaataagaaatttgtgtg

SEQ ID NO: 179605 - DNA, 19 bp, Artificial sequence
  SiRNA target sequence
aaataagaaatttgtgtga

SEQ ID NO: 179606 - DNA, 19 bp, Artificial sequence
  SiRNA target sequence
aataagaaatttgtgtgaa

SEQ ID NO: 179607 - DNA, 19 bp, Artificial sequence
  SiRNA target sequence
ataagaaatttgtgtgaag

SEQ ID NO: 179608 - DNA, 19 bp, Artificial sequence
  SiRNA target sequence
taagaaatttgtgtgaaga

SEQ ID NO: 179609 - DNA, 19 bp, Artificial sequence
  SiRNA target sequence
aagaaatttgtgtgaagaa

SEQ ID NO: 179610 - DNA, 19 bp, Artificial sequence
  SiRNA target sequence
agaaatttgtgtgaagaaa

SEQ ID NO: 179611 - DNA, 19 bp, Artificial sequence
  SiRNA target sequence
gaaatttgtgtgaagaaaa

SEQ ID NO: 179612 - DNA, 19 bp, Artificial sequence
  SiRNA target sequence
aaatttgtgtgaagaaaat

SEQ ID NO: 179613 - DNA, 19 bp, Artificial sequence
  SiRNA target sequence
aatttgtgtgaagaaaata

SEQ ID NO: 179614 - DNA, 19 bp, Artificial sequence
  SiRNA target sequence
atttgtgtgaagaaaataa

SEQ ID NO: 179615 - DNA, 19 bp, Artificial sequence
  SiRNA target sequence
tttgtgtgaagaaaataaa

SEQ ID NO: 179616 - DNA, 19 bp, Artificial sequence
  SiRNA target sequence
ttgtgtgaagaaaataaat

SEQ ID NO: 179617 - DNA, 19 bp, Artificial sequence
  SiRNA target sequence
tgtgtgaagaaaataaata

SEQ ID NO: 179618 - DNA, 19 bp, Artificial sequence
  SiRNA target sequence
gtgtgaagaaaataaatat

SEQ ID NO: 179619 - DNA, 19 bp, Artificial sequence
  SiRNA target sequence
tgtgaagaaaataaatatg

SEQ ID NO: 179620 - DNA, 19 bp, Artificial sequence
  SiRNA target sequence
gtgaagaaaataaatatgt

SEQ ID NO: 179621 - DNA, 19 bp, Artificial sequence
  SiRNA target sequence
tgaagaaaataaatatgtt

SEQ ID NO: 179622 - DNA, 19 bp, Artificial sequence
  SiRNA target sequence
gaagaaaataaatatgttg

SEQ ID NO: 179623 - DNA, 19 bp, Artificial sequence
  SiRNA target sequence
aagaaaataaatatgttgt

SEQ ID NO: 179624 - DNA, 19 bp, Artificial sequence
  SiRNA target sequence
agaaaataaatatgttgta

SEQ ID NO: 179625 - DNA, 19 bp, Artificial sequence
  SiRNA target sequence
gaaaataaatatgttgtag

SEQ ID NO: 179626 - DNA, 19 bp, Artificial sequence
  SiRNA target sequence
aaaataaatatgttgtagt

SEQ ID NO: 179627 - DNA, 19 bp, Artificial sequence
  SiRNA target sequence
aaataaatatgttgtagtt

SEQ ID NO: 179628 - DNA, 19 bp, Artificial sequence
  SiRNA target sequence
aataaatatgttgtagttg

SEQ ID NO: 179629 - DNA, 19 bp, Artificial sequence
  SiRNA target sequence
ataaatatgttgtagttgt

SEQ ID NO: 179630 - DNA, 19 bp, Artificial sequence
  SiRNA target sequence
taaatatgttgtagttgtc

SEQ ID NO: 179631 - DNA, 19 bp, Artificial sequence
  SiRNA target sequence
aaatatgttgtagttgtcg

SEQ ID NO: 179632 - DNA, 19 bp, Artificial sequence
  SiRNA target sequence
aatatgttgtagttgtcga

SEQ ID NO: 179633 - DNA, 19 bp, Artificial sequence
  SiRNA target sequence
atatgttgtagttgtcgaa

SEQ ID NO: 179634 - DNA, 19 bp, Artificial sequence
  SiRNA target sequence
tatgttgtagttgtcgaac

SEQ ID NO: 179635 - DNA, 19 bp, Artificial sequence
  SiRNA target sequence
atgttgtagttgtcgaaca

SEQ ID NO: 179636 - DNA, 19 bp, Artificial sequence
  SiRNA target sequence
tgttgtagttgtcgaacac

SEQ ID NO: 179637 - DNA, 19 bp, Artificial sequence
  SiRNA target sequence
gttgtagttgtcgaacacg

SEQ ID NO: 179638 - DNA, 19 bp, Artificial sequence
  SiRNA target sequence
ttgtagttgtcgaacacga

SEQ ID NO: 179639 - DNA, 19 bp, Artificial sequence
  SiRNA target sequence
tgtagttgtcgaacacgat

SEQ ID NO: 179640 - DNA, 19 bp, Artificial sequence
  SiRNA target sequence
gtagttgtcgaacacgatt

SEQ ID NO: 179641 - DNA, 19 bp, Artificial sequence
  SiRNA target sequence
tagttgtcgaacacgattt

SEQ ID NO: 179642 - DNA, 19 bp, Artificial sequence
  SiRNA target sequence
agttgtcgaacacgattta

SEQ ID NO: 179643 - DNA, 19 bp, Artificial sequence
  SiRNA target sequence
gttgtcgaacacgatttag

SEQ ID NO: 179644 - DNA, 19 bp, Artificial sequence
  SiRNA target sequence
ttgtcgaacacgatttagc

SEQ ID NO: 179645 - DNA, 19 bp, Artificial sequence
  SiRNA target sequence
tgtcgaacacgatttagcc

SEQ ID NO: 179646 - DNA, 19 bp, Artificial sequence
  SiRNA target sequence
gtcgaacacgatttagcca

SEQ ID NO: 179647 - DNA, 19 bp, Artificial sequence
  SiRNA target sequence
tcgaacacgatttagccat

SEQ ID NO: 179648 - DNA, 19 bp, Artificial sequence
  SiRNA target sequence
cgaacacgatttagccatt

SEQ ID NO: 179649 - DNA, 19 bp, Artificial sequence
  SiRNA target sequence
gaacacgatttagccattt

SEQ ID NO: 179650 - DNA, 19 bp, Artificial sequence
  SiRNA target sequence
aacacgatttagccatttt

SEQ ID NO: 179651 - DNA, 19 bp, Artificial sequence
  SiRNA target sequence
acacgatttagccatttta

SEQ ID NO: 179652 - DNA, 19 bp, Artificial sequence
  SiRNA target sequence
cacgatttagccattttag

SEQ ID NO: 179653 - DNA, 19 bp, Artificial sequence
  SiRNA target sequence
acgatttagccattttaga

SEQ ID NO: 179654 - DNA, 19 bp, Artificial sequence
  SiRNA target sequence
cgatttagccattttagat

SEQ ID NO: 179655 - DNA, 19 bp, Artificial sequence
  SiRNA target sequence
gatttagccattttagatt

SEQ ID NO: 179656 - DNA, 19 bp, Artificial sequence
  SiRNA target sequence
atttagccattttagattt

SEQ ID NO: 179657 - DNA, 19 bp, Artificial sequence
  SiRNA target sequence
tttagccattttagatttg

SEQ ID NO: 179658 - DNA, 19 bp, Artificial sequence
  SiRNA target sequence
ttagccattttagatttga

SEQ ID NO: 179659 - DNA, 19 bp, Artificial sequence
  SiRNA target sequence
tagccattttagatttgat

SEQ ID NO: 179660 - DNA, 19 bp, Artificial sequence
  SiRNA target sequence
agccattttagatttgatg

SEQ ID NO: 179661 - DNA, 19 bp, Artificial sequence
  SiRNA target sequence
gccattttagatttgatgt

SEQ ID NO: 179662 - DNA, 19 bp, Artificial sequence
  SiRNA target sequence
ccattttagatttgatgtg

SEQ ID NO: 179663 - DNA, 19 bp, Artificial sequence
  SiRNA target sequence
cattttagatttgatgtgt

SEQ ID NO: 179664 - DNA, 19 bp, Artificial sequence
  SiRNA target sequence
attttagatttgatgtgtg

SEQ ID NO: 179665 - DNA, 19 bp, Artificial sequence
  SiRNA target sequence
ttttagatttgatgtgtga

SEQ ID NO: 179666 - DNA, 19 bp, Artificial sequence
  SiRNA target sequence
tttagatttgatgtgtgat

SEQ ID NO: 179667 - DNA, 19 bp, Artificial sequence
  SiRNA target sequence
ttagatttgatgtgtgatt

SEQ ID NO: 179668 - DNA, 19 bp, Artificial sequence
  SiRNA target sequence
tagatttgatgtgtgattt

SEQ ID NO: 179669 - DNA, 19 bp, Artificial sequence
  SiRNA target sequence
agatttgatgtgtgatttt

SEQ ID NO: 179670 - DNA, 19 bp, Artificial sequence
  SiRNA target sequence
gatttgatgtgtgattttg

SEQ ID NO: 179671 - DNA, 19 bp, Artificial sequence
  SiRNA target sequence
atttgatgtgtgattttgg

SEQ ID NO: 179672 - DNA, 19 bp, Artificial sequence
  SiRNA target sequence
tttgatgtgtgattttgga

SEQ ID NO: 179673 - DNA, 19 bp, Artificial sequence
  SiRNA target sequence
ttgatgtgtgattttggat

SEQ ID NO: 179674 - DNA, 19 bp, Artificial sequence
  SiRNA target sequence
tgatgtgtgattttggatg

SEQ ID NO: 179675 - DNA, 19 bp, Artificial sequence
  SiRNA target sequence
gatgtgtgattttggatgt

SEQ ID NO: 179676 - DNA, 19 bp, Artificial sequence
  SiRNA target sequence
atgtgtgattttggatgtg

SEQ ID NO: 179677 - DNA, 19 bp, Artificial sequence
  SiRNA target sequence
tgtgtgattttggatgtgt

SEQ ID NO: 179678 - DNA, 19 bp, Artificial sequence
  SiRNA target sequence
gtgtgattttggatgtgtt

SEQ ID NO: 179679 - DNA, 19 bp, Artificial sequence
  SiRNA target sequence
tgtgattttggatgtgttc

SEQ ID NO: 179680 - DNA, 19 bp, Artificial sequence
  SiRNA target sequence
gtgattttggatgtgttct

SEQ ID NO: 179681 - DNA, 19 bp, Artificial sequence
  SiRNA target sequence
tgattttggatgtgttcta

SEQ ID NO: 179682 - DNA, 19 bp, Artificial sequence
  SiRNA target sequence
gattttggatgtgttctat

SEQ ID NO: 179683 - DNA, 19 bp, Artificial sequence
  SiRNA target sequence
attttggatgtgttctata

SEQ ID NO: 179684 - DNA, 19 bp, Artificial sequence
  SiRNA target sequence
ttttggatgtgttctatac

SEQ ID NO: 179685 - DNA, 19 bp, Artificial sequence
  SiRNA target sequence
tttggatgtgttctatacg

SEQ ID NO: 179686 - DNA, 19 bp, Artificial sequence
  SiRNA target sequence
ttggatgtgttctatacgg

SEQ ID NO: 179687 - DNA, 19 bp, Artificial sequence
  SiRNA target sequence
tggatgtgttctatacgga

SEQ ID NO: 179688 - DNA, 19 bp, Artificial sequence
  SiRNA target sequence
ggatgtgttctatacggac

SEQ ID NO: 179689 - DNA, 19 bp, Artificial sequence
  SiRNA target sequence
gatgtgttctatacggaca

SEQ ID NO: 179690 - DNA, 19 bp, Artificial sequence
  SiRNA target sequence
atgtgttctatacggacaa

SEQ ID NO: 179691 - DNA, 19 bp, Artificial sequence
  SiRNA target sequence
tgtgttctatacggacaat

SEQ ID NO: 179692 - DNA, 19 bp, Artificial sequence
  SiRNA target sequence
gtgttctatacggacaatc

SEQ ID NO: 179693 - DNA, 19 bp, Artificial sequence
  SiRNA target sequence
tgttctatacggacaatct

SEQ ID NO: 179694 - DNA, 19 bp, Artificial sequence
  SiRNA target sequence
gttctatacggacaatctg

SEQ ID NO: 179695 - DNA, 19 bp, Artificial sequence
  SiRNA target sequence
ttctatacggacaatctgg

SEQ ID NO: 179696 - DNA, 19 bp, Artificial sequence
  SiRNA target sequence
tctatacggacaatctggg

SEQ ID NO: 179697 - DNA, 19 bp, Artificial sequence
  SiRNA target sequence
ctatacggacaatctgggg

SEQ ID NO: 179698 - DNA, 19 bp, Artificial sequence
  SiRNA target sequence
tatacggacaatctggggc

SEQ ID NO: 179699 - DNA, 19 bp, Artificial sequence
  SiRNA target sequence
atacggacaatctggggca

SEQ ID NO: 179700 - DNA, 19 bp, Artificial sequence
  SiRNA target sequence
tacggacaatctggggcat

SEQ ID NO: 179701 - DNA, 19 bp, Artificial sequence
  SiRNA target sequence
acggacaatctggggcata

SEQ ID NO: 179702 - DNA, 19 bp, Artificial sequence
  SiRNA target sequence
cggacaatctggggcatac

SEQ ID NO: 179703 - DNA, 19 bp, Artificial sequence
  SiRNA target sequence
ggacaatctggggcatacg

SEQ ID NO: 179704 - DNA, 19 bp, Artificial sequence
  SiRNA target sequence
gacaatctggggcatacgg

SEQ ID NO: 179705 - DNA, 19 bp, Artificial sequence
  SiRNA target sequence
acaatctggggcatacggt

SEQ ID NO: 179706 - DNA, 19 bp, Artificial sequence
  SiRNA target sequence
caatctggggcatacggtg

SEQ ID NO: 179707 - DNA, 19 bp, Artificial sequence
  SiRNA target sequence
aatctggggcatacggtgt

SEQ ID NO: 179708 - DNA, 19 bp, Artificial sequence
  SiRNA target sequence
atctggggcatacggtgta

SEQ ID NO: 179709 - DNA, 19 bp, Artificial sequence
  SiRNA target sequence
tctggggcatacggtgtaa

SEQ ID NO: 179710 - DNA, 19 bp, Artificial sequence
  SiRNA target sequence
ctggggcatacggtgtaat

SEQ ID NO: 179711 - DNA, 19 bp, Artificial sequence
  SiRNA target sequence
tggggcatacggtgtaata

SEQ ID NO: 179712 - DNA, 19 bp, Artificial sequence
  SiRNA target sequence
ggggcatacggtgtaataa

SEQ ID NO: 179713 - DNA, 19 bp, Artificial sequence
  SiRNA target sequence
gggcatacggtgtaataag

SEQ ID NO: 179714 - DNA, 19 bp, Artificial sequence
  SiRNA target sequence
ggcatacggtgtaataagc

SEQ ID NO: 179715 - DNA, 19 bp, Artificial sequence
  SiRNA target sequence
gcatacggtgtaataagcg

SEQ ID NO: 179716 - DNA, 19 bp, Artificial sequence
  SiRNA target sequence
catacggtgtaataagcgc

SEQ ID NO: 179717 - DNA, 19 bp, Artificial sequence
  SiRNA target sequence
atacggtgtaataagcgca

SEQ ID NO: 179718 - DNA, 19 bp, Artificial sequence
  SiRNA target sequence
tacggtgtaataagcgcac

SEQ ID NO: 179719 - DNA, 19 bp, Artificial sequence
  SiRNA target sequence
acggtgtaataagcgcacc

SEQ ID NO: 179720 - DNA, 19 bp, Artificial sequence
  SiRNA target sequence
cggtgtaataagcgcacca

SEQ ID NO: 179721 - DNA, 19 bp, Artificial sequence
  SiRNA target sequence
ggtgtaataagcgcaccat

SEQ ID NO: 179722 - DNA, 19 bp, Artificial sequence
  SiRNA target sequence
gtgtaataagcgcaccata

SEQ ID NO: 179723 - DNA, 19 bp, Artificial sequence
  SiRNA target sequence
tgtaataagcgcaccatac

SEQ ID NO: 179724 - DNA, 19 bp, Artificial sequence
  SiRNA target sequence
gtaataagcgcaccatacg

SEQ ID NO: 179725 - DNA, 19 bp, Artificial sequence
  SiRNA target sequence
taataagcgcaccatacgt

SEQ ID NO: 179726 - DNA, 19 bp, Artificial sequence
  SiRNA target sequence
aataagcgcaccatacgtt

SEQ ID NO: 179727 - DNA, 19 bp, Artificial sequence
  SiRNA target sequence
ataagcgcaccatacgtta

SEQ ID NO: 179728 - DNA, 19 bp, Artificial sequence
  SiRNA target sequence
taagcgcaccatacgttat

SEQ ID NO: 179729 - DNA, 19 bp, Artificial sequence
  SiRNA target sequence
aagcgcaccatacgttatt

SEQ ID NO: 179730 - DNA, 19 bp, Artificial sequence
  SiRNA target sequence
agcgcaccatacgttatta

SEQ ID NO: 179731 - DNA, 19 bp, Artificial sequence
  SiRNA target sequence
gcgcaccatacgttattaa

SEQ ID NO: 179732 - DNA, 19 bp, Artificial sequence
  SiRNA target sequence
cgcaccatacgttattaaa

SEQ ID NO: 179733 - DNA, 19 bp, Artificial sequence
  SiRNA target sequence
gcaccatacgttattaaat

SEQ ID NO: 179734 - DNA, 19 bp, Artificial sequence
  SiRNA target sequence
caccatacgttattaaatc

SEQ ID NO: 179735 - DNA, 19 bp, Artificial sequence
  SiRNA target sequence
accatacgttattaaatca

SEQ ID NO: 179736 - DNA, 19 bp, Artificial sequence
  SiRNA target sequence
ccatacgttattaaatcag

SEQ ID NO: 179737 - DNA, 19 bp, Artificial sequence
  SiRNA target sequence
catacgttattaaatcagc

SEQ ID NO: 179738 - DNA, 19 bp, Artificial sequence
  SiRNA target sequence
atacgttattaaatcagca

SEQ ID NO: 179739 - DNA, 19 bp, Artificial sequence
  SiRNA target sequence
tacgttattaaatcagcaa

SEQ ID NO: 179740 - DNA, 19 bp, Artificial sequence
  SiRNA target sequence
acgttattaaatcagcaat

SEQ ID NO: 179741 - DNA, 19 bp, Artificial sequence
  SiRNA target sequence
cgttattaaatcagcaata

SEQ ID NO: 179742 - DNA, 19 bp, Artificial sequence
  SiRNA target sequence
gttattaaatcagcaataa

SEQ ID NO: 179743 - DNA, 19 bp, Artificial sequence
  SiRNA target sequence
ttattaaatcagcaataaa

SEQ ID NO: 179744 - DNA, 19 bp, Artificial sequence
  SiRNA target sequence
tattaaatcagcaataaat

SEQ ID NO: 179745 - DNA, 19 bp, Artificial sequence
  SiRNA target sequence
attaaatcagcaataaata

SEQ ID NO: 179746 - DNA, 19 bp, Artificial sequence
  SiRNA target sequence
ttaaatcagcaataaatat

SEQ ID NO: 179747 - DNA, 19 bp, Artificial sequence
  SiRNA target sequence
taaatcagcaataaatata

SEQ ID NO: 179748 - DNA, 19 bp, Artificial sequence
  SiRNA target sequence
aaatcagcaataaatatat

SEQ ID NO: 179749 - DNA, 19 bp, Artificial sequence
  SiRNA target sequence
aatcagcaataaatatatt

SEQ ID NO: 179750 - DNA, 19 bp, Artificial sequence
  SiRNA target sequence
atcagcaataaatatattt

SEQ ID NO: 179751 - DNA, 19 bp, Artificial sequence
  SiRNA target sequence
tcagcaataaatatatttc

SEQ ID NO: 179752 - DNA, 19 bp, Artificial sequence
  SiRNA target sequence
cagcaataaatatatttct

SEQ ID NO: 179753 - DNA, 19 bp, Artificial sequence
  SiRNA target sequence
agcaataaatatatttctt

SEQ ID NO: 179754 - DNA, 19 bp, Artificial sequence
  SiRNA target sequence
gcaataaatatatttcttg

SEQ ID NO: 179755 - DNA, 19 bp, Artificial sequence
  SiRNA target sequence
caataaatatatttcttga

SEQ ID NO: 179756 - DNA, 19 bp, Artificial sequence
  SiRNA target sequence
aataaatatatttcttgat

SEQ ID NO: 179757 - DNA, 19 bp, Artificial sequence
  SiRNA target sequence
ataaatatatttcttgatg

SEQ ID NO: 179758 - DNA, 19 bp, Artificial sequence
  SiRNA target sequence
taaatatatttcttgatgg

SEQ ID NO: 179759 - DNA, 19 bp, Artificial sequence
  SiRNA target sequence
aaatatatttcttgatgga

SEQ ID NO: 179760 - DNA, 19 bp, Artificial sequence
  SiRNA target sequence
aatatatttcttgatggat

SEQ ID NO: 179761 - DNA, 19 bp, Artificial sequence
  SiRNA target sequence
atatatttcttgatggatt

SEQ ID NO: 179762 - DNA, 19 bp, Artificial sequence
  SiRNA target sequence
tatatttcttgatggattt

SEQ ID NO: 179763 - DNA, 19 bp, Artificial sequence
  SiRNA target sequence
atatttcttgatggatttt

SEQ ID NO: 179764 - DNA, 19 bp, Artificial sequence
  SiRNA target sequence
tatttcttgatggattttt

SEQ ID NO: 179765 - DNA, 19 bp, Artificial sequence
  SiRNA target sequence
atttcttgatggatttttg

SEQ ID NO: 179766 - DNA, 19 bp, Artificial sequence
  SiRNA target sequence
tttcttgatggatttttgc

SEQ ID NO: 179767 - DNA, 19 bp, Artificial sequence
  SiRNA target sequence
ttcttgatggatttttgcc

SEQ ID NO: 179768 - DNA, 19 bp, Artificial sequence
  SiRNA target sequence
tcttgatggatttttgcct

SEQ ID NO: 179769 - DNA, 19 bp, Artificial sequence
  SiRNA target sequence
cttgatggatttttgccta

SEQ ID NO: 179770 - DNA, 19 bp, Artificial sequence
  SiRNA target sequence
ttgatggatttttgcctac

SEQ ID NO: 179771 - DNA, 19 bp, Artificial sequence
  SiRNA target sequence
tgatggatttttgcctaca

SEQ ID NO: 179772 - DNA, 19 bp, Artificial sequence
  SiRNA target sequence
gatggatttttgcctacag

SEQ ID NO: 179773 - DNA, 19 bp, Artificial sequence
  SiRNA target sequence
atggatttttgcctacaga

SEQ ID NO: 179774 - DNA, 19 bp, Artificial sequence
  SiRNA target sequence
tggatttttgcctacagaa

SEQ ID NO: 179775 - DNA, 19 bp, Artificial sequence
  SiRNA target sequence
ggatttttgcctacagaaa

SEQ ID NO: 179776 - DNA, 19 bp, Artificial sequence
  SiRNA target sequence
gatttttgcctacagaaaa

SEQ ID NO: 179777 - DNA, 19 bp, Artificial sequence
  SiRNA target sequence
atttttgcctacagaaaac

SEQ ID NO: 179778 - DNA, 19 bp, Artificial sequence
  SiRNA target sequence
tttttgcctacagaaaaca

SEQ ID NO: 179779 - DNA, 19 bp, Artificial sequence
  SiRNA target sequence
ttttgcctacagaaaacat

SEQ ID NO: 179780 - DNA, 19 bp, Artificial sequence
  SiRNA target sequence
tttgcctacagaaaacatg

SEQ ID NO: 179781 - DNA, 19 bp, Artificial sequence
  SiRNA target sequence
ttgcctacagaaaacatga

SEQ ID NO: 179782 - DNA, 19 bp, Artificial sequence
  SiRNA target sequence
tgcctacagaaaacatgaa

SEQ ID NO: 179783 - DNA, 19 bp, Artificial sequence
  SiRNA target sequence
gcctacagaaaacatgaaa

SEQ ID NO: 179784 - DNA, 19 bp, Artificial sequence
  SiRNA target sequence
cctacagaaaacatgaaat

SEQ ID NO: 179785 - DNA, 19 bp, Artificial sequence
  SiRNA target sequence
ctacagaaaacatgaaatt

SEQ ID NO: 179786 - DNA, 19 bp, Artificial sequence
  SiRNA target sequence
tacagaaaacatgaaattt

SEQ ID NO: 179787 - DNA, 19 bp, Artificial sequence
  SiRNA target sequence
acagaaaacatgaaattta

SEQ ID NO: 179788 - DNA, 19 bp, Artificial sequence
  SiRNA target sequence
cagaaaacatgaaatttag

SEQ ID NO: 179789 - DNA, 19 bp, Artificial sequence
  SiRNA target sequence
agaaaacatgaaatttaga

SEQ ID NO: 179790 - DNA, 19 bp, Artificial sequence
  SiRNA target sequence
gaaaacatgaaatttagaa

SEQ ID NO: 179791 - DNA, 19 bp, Artificial sequence
  SiRNA target sequence
aaaacatgaaatttagaaa

SEQ ID NO: 179792 - DNA, 19 bp, Artificial sequence
  SiRNA target sequence
aaacatgaaatttagaaat

SEQ ID NO: 179793 - DNA, 19 bp, Artificial sequence
  SiRNA target sequence
aacatgaaatttagaaatt

SEQ ID NO: 179794 - DNA, 19 bp, Artificial sequence
  SiRNA target sequence
acatgaaatttagaaattc

SEQ ID NO: 179795 - DNA, 19 bp, Artificial sequence
  SiRNA target sequence
catgaaatttagaaattca

SEQ ID NO: 179796 - DNA, 19 bp, Artificial sequence
  SiRNA target sequence
atgaaatttagaaattcag

SEQ ID NO: 179797 - DNA, 19 bp, Artificial sequence
  SiRNA target sequence
tgaaatttagaaattcaga

SEQ ID NO: 179798 - DNA, 19 bp, Artificial sequence
  SiRNA target sequence
gaaatttagaaattcagag

SEQ ID NO: 179799 - DNA, 19 bp, Artificial sequence
  SiRNA target sequence
aaatttagaaattcagagt

SEQ ID NO: 179800 - DNA, 19 bp, Artificial sequence
  SiRNA target sequence
aatttagaaattcagagtt

SEQ ID NO: 179801 - DNA, 19 bp, Artificial sequence
  SiRNA target sequence
atttagaaattcagagtta

SEQ ID NO: 179802 - DNA, 19 bp, Artificial sequence
  SiRNA target sequence
tttagaaattcagagttaa

SEQ ID NO: 179803 - DNA, 19 bp, Artificial sequence
  SiRNA target sequence
ttagaaattcagagttaaa

SEQ ID NO: 179804 - DNA, 19 bp, Artificial sequence
  SiRNA target sequence
tagaaattcagagttaaag

SEQ ID NO: 179805 - DNA, 19 bp, Artificial sequence
  SiRNA target sequence
agaaattcagagttaaagt

SEQ ID NO: 179806 - DNA, 19 bp, Artificial sequence
  SiRNA target sequence
gaaattcagagttaaagtt

SEQ ID NO: 179807 - DNA, 19 bp, Artificial sequence
  SiRNA target sequence
aaattcagagttaaagttt

SEQ ID NO: 179808 - DNA, 19 bp, Artificial sequence
  SiRNA target sequence
aattcagagttaaagttta

SEQ ID NO: 179809 - DNA, 19 bp, Artificial sequence
  SiRNA target sequence
attcagagttaaagtttaa

SEQ ID NO: 179810 - DNA, 19 bp, Artificial sequence
  SiRNA target sequence
ttcagagttaaagtttaat

SEQ ID NO: 179811 - DNA, 19 bp, Artificial sequence
  SiRNA target sequence
tcagagttaaagtttaata

SEQ ID NO: 179812 - DNA, 19 bp, Artificial sequence
  SiRNA target sequence
cagagttaaagtttaatat

SEQ ID NO: 179813 - DNA, 19 bp, Artificial sequence
  SiRNA target sequence
agagttaaagtttaatatt

SEQ ID NO: 179814 - DNA, 19 bp, Artificial sequence
  SiRNA target sequence
gagttaaagtttaatattt

SEQ ID NO: 179815 - DNA, 19 bp, Artificial sequence
  SiRNA target sequence
agttaaagtttaatatttc

SEQ ID NO: 179816 - DNA, 19 bp, Artificial sequence
  SiRNA target sequence
gttaaagtttaatatttcg

SEQ ID NO: 179817 - DNA, 19 bp, Artificial sequence
  SiRNA target sequence
ttaaagtttaatatttcgg

SEQ ID NO: 179818 - DNA, 19 bp, Artificial sequence
  SiRNA target sequence
taaagtttaatatttcgga

SEQ ID NO: 179819 - DNA, 19 bp, Artificial sequence
  SiRNA target sequence
aaagtttaatatttcggaa

SEQ ID NO: 179820 - DNA, 19 bp, Artificial sequence
  SiRNA target sequence
aagtttaatatttcggaaa

SEQ ID NO: 179821 - DNA, 19 bp, Artificial sequence
  SiRNA target sequence
agtttaatatttcggaaac

SEQ ID NO: 179822 - DNA, 19 bp, Artificial sequence
  SiRNA target sequence
gtttaatatttcggaaaca

SEQ ID NO: 179823 - DNA, 19 bp, Artificial sequence
  SiRNA target sequence
tttaatatttcggaaacac

SEQ ID NO: 179824 - DNA, 19 bp, Artificial sequence
  SiRNA target sequence
ttaatatttcggaaacact

SEQ ID NO: 179825 - DNA, 19 bp, Artificial sequence
  SiRNA target sequence
taatatttcggaaacactt

SEQ ID NO: 179826 - DNA, 19 bp, Artificial sequence
  SiRNA target sequence
aatatttcggaaacacttg

SEQ ID NO: 179827 - DNA, 19 bp, Artificial sequence
  SiRNA target sequence
atatttcggaaacacttga

SEQ ID NO: 179828 - DNA, 19 bp, Artificial sequence
  SiRNA target sequence
tatttcggaaacacttgat

SEQ ID NO: 179829 - DNA, 19 bp, Artificial sequence
  SiRNA target sequence
atttcggaaacacttgata

SEQ ID NO: 179830 - DNA, 19 bp, Artificial sequence
  SiRNA target sequence
tttcggaaacacttgatag

SEQ ID NO: 179831 - DNA, 19 bp, Artificial sequence
  SiRNA target sequence
ttcggaaacacttgatagt

SEQ ID NO: 179832 - DNA, 19 bp, Artificial sequence
  SiRNA target sequence
tcggaaacacttgatagta

SEQ ID NO: 179833 - DNA, 19 bp, Artificial sequence
  SiRNA target sequence
cggaaacacttgatagtat

SEQ ID NO: 179834 - DNA, 19 bp, Artificial sequence
  SiRNA target sequence
ggaaacacttgatagtatt

SEQ ID NO: 179835 - DNA, 19 bp, Artificial sequence
  SiRNA target sequence
gaaacacttgatagtatta

SEQ ID NO: 179836 - DNA, 19 bp, Artificial sequence
  SiRNA target sequence
aaacacttgatagtattat

SEQ ID NO: 179837 - DNA, 19 bp, Artificial sequence
  SiRNA target sequence
aacacttgatagtattata

SEQ ID NO: 179838 - DNA, 19 bp, Artificial sequence
  SiRNA target sequence
acacttgatagtattatat

SEQ ID NO: 179839 - DNA, 19 bp, Artificial sequence
  SiRNA target sequence
cacttgatagtattatatc

SEQ ID NO: 179840 - DNA, 19 bp, Artificial sequence
  SiRNA target sequence
acttgatagtattatatct

SEQ ID NO: 179841 - DNA, 19 bp, Artificial sequence
  SiRNA target sequence
cttgatagtattatatcta

SEQ ID NO: 179842 - DNA, 19 bp, Artificial sequence
  SiRNA target sequence
ttgatagtattatatctac

SEQ ID NO: 179843 - DNA, 19 bp, Artificial sequence
  SiRNA target sequence
tgatagtattatatctacc

SEQ ID NO: 179844 - DNA, 19 bp, Artificial sequence
  SiRNA target sequence
gatagtattatatctacca

SEQ ID NO: 179845 - DNA, 19 bp, Artificial sequence
  SiRNA target sequence
atagtattatatctaccag

SEQ ID NO: 179846 - DNA, 19 bp, Artificial sequence
  SiRNA target sequence
tagtattatatctaccaga

SEQ ID NO: 179847 - DNA, 19 bp, Artificial sequence
  SiRNA target sequence
agtattatatctaccagag

SEQ ID NO: 179848 - DNA, 19 bp, Artificial sequence
  SiRNA target sequence
gtattatatctaccagaga

SEQ ID NO: 179849 - DNA, 19 bp, Artificial sequence
  SiRNA target sequence
tattatatctaccagagac

SEQ ID NO: 179850 - DNA, 19 bp, Artificial sequence
  SiRNA target sequence
attatatctaccagagacc

SEQ ID NO: 179851 - DNA, 19 bp, Artificial sequence
  SiRNA target sequence
ttatatctaccagagacca

SEQ ID NO: 179852 - DNA, 19 bp, Artificial sequence
  SiRNA target sequence
tatatctaccagagaccag

SEQ ID NO: 179853 - DNA, 19 bp, Artificial sequence
  SiRNA target sequence
atatctaccagagaccagt

SEQ ID NO: 179854 - DNA, 19 bp, Artificial sequence
  SiRNA target sequence
tatctaccagagaccagta

SEQ ID NO: 179855 - DNA, 19 bp, Artificial sequence
  SiRNA target sequence
atctaccagagaccagtat

SEQ ID NO: 179856 - DNA, 19 bp, Artificial sequence
  SiRNA target sequence
tctaccagagaccagtatc

SEQ ID NO: 179857 - DNA, 19 bp, Artificial sequence
  SiRNA target sequence
ctaccagagaccagtatca

SEQ ID NO: 179858 - DNA, 19 bp, Artificial sequence
  SiRNA target sequence
taccagagaccagtatcat

SEQ ID NO: 179859 - DNA, 19 bp, Artificial sequence
  SiRNA target sequence
accagagaccagtatcatt

SEQ ID NO: 179860 - DNA, 19 bp, Artificial sequence
  SiRNA target sequence
ccagagaccagtatcatta

SEQ ID NO: 179861 - DNA, 19 bp, Artificial sequence
  SiRNA target sequence
cagagaccagtatcattat

SEQ ID NO: 179862 - DNA, 19 bp, Artificial sequence
  SiRNA target sequence
agagaccagtatcattatc

SEQ ID NO: 179863 - DNA, 19 bp, Artificial sequence
  SiRNA target sequence
gagaccagtatcattatcc

SEQ ID NO: 179864 - DNA, 19 bp, Artificial sequence
  SiRNA target sequence
agaccagtatcattatccc

SEQ ID NO: 179865 - DNA, 19 bp, Artificial sequence
  SiRNA target sequence
gaccagtatcattatccca

SEQ ID NO: 179866 - DNA, 19 bp, Artificial sequence
  SiRNA target sequence
accagtatcattatcccaa

SEQ ID NO: 179867 - DNA, 19 bp, Artificial sequence
  SiRNA target sequence
ccagtatcattatcccaat

SEQ ID NO: 179868 - DNA, 19 bp, Artificial sequence
  SiRNA target sequence
cagtatcattatcccaatt

SEQ ID NO: 179869 - DNA, 19 bp, Artificial sequence
  SiRNA target sequence
agtatcattatcccaattt

SEQ ID NO: 179870 - DNA, 19 bp, Artificial sequence
  SiRNA target sequence
gtatcattatcccaatttg

SEQ ID NO: 179871 - DNA, 19 bp, Artificial sequence
  SiRNA target sequence
tatcattatcccaatttga

SEQ ID NO: 179872 - DNA, 19 bp, Artificial sequence
  SiRNA target sequence
atcattatcccaatttgat

SEQ ID NO: 179873 - DNA, 19 bp, Artificial sequence
  SiRNA target sequence
tcattatcccaatttgata

SEQ ID NO: 179874 - DNA, 19 bp, Artificial sequence
  SiRNA target sequence
cattatcccaatttgataa

SEQ ID NO: 179875 - DNA, 19 bp, Artificial sequence
  SiRNA target sequence
attatcccaatttgataaa

SEQ ID NO: 179876 - DNA, 19 bp, Artificial sequence
  SiRNA target sequence
ttatcccaatttgataaaa

SEQ ID NO: 179877 - DNA, 19 bp, Artificial sequence
  SiRNA target sequence
tatcccaatttgataaaaa

SEQ ID NO: 179878 - DNA, 19 bp, Artificial sequence
  SiRNA target sequence
atcccaatttgataaaaac

SEQ ID NO: 179879 - DNA, 19 bp, Artificial sequence
  SiRNA target sequence
tcccaatttgataaaaaca

SEQ ID NO: 179880 - DNA, 19 bp, Artificial sequence
  SiRNA target sequence
cccaatttgataaaaacat

SEQ ID NO: 179881 - DNA, 19 bp, Artificial sequence
  SiRNA target sequence
ccaatttgataaaaacata

SEQ ID NO: 179882 - DNA, 19 bp, Artificial sequence
  SiRNA target sequence
caatttgataaaaacatat

SEQ ID NO: 179883 - DNA, 19 bp, Artificial sequence
  SiRNA target sequence
aatttgataaaaacatatc

SEQ ID NO: 179884 - DNA, 19 bp, Artificial sequence
  SiRNA target sequence
atttgataaaaacatatcc

SEQ ID NO: 179885 - DNA, 19 bp, Artificial sequence
  SiRNA target sequence
tttgataaaaacatatcca

SEQ ID NO: 179886 - DNA, 19 bp, Artificial sequence
  SiRNA target sequence
ttgataaaaacatatccaa

SEQ ID NO: 179887 - DNA, 19 bp, Artificial sequence
  SiRNA target sequence
tgataaaaacatatccaaa

SEQ ID NO: 179888 - DNA, 19 bp, Artificial sequence
  SiRNA target sequence
gataaaaacatatccaaat

SEQ ID NO: 179889 - DNA, 19 bp, Artificial sequence
  SiRNA target sequence
ataaaaacatatccaaatt

SEQ ID NO: 179890 - DNA, 19 bp, Artificial sequence
  SiRNA target sequence
taaaaacatatccaaattt

SEQ ID NO: 179891 - DNA, 19 bp, Artificial sequence
  SiRNA target sequence
aaaaacatatccaaatttt

SEQ ID NO: 179892 - DNA, 19 bp, Artificial sequence
  SiRNA target sequence
aaaacatatccaaatttta

SEQ ID NO: 179893 - DNA, 19 bp, Artificial sequence
  SiRNA target sequence
aaacatatccaaattttac

SEQ ID NO: 179894 - DNA, 19 bp, Artificial sequence
  SiRNA target sequence
aacatatccaaattttacg

SEQ ID NO: 179895 - DNA, 19 bp, Artificial sequence
  SiRNA target sequence
acatatccaaattttacgc

SEQ ID NO: 179896 - DNA, 19 bp, Artificial sequence
  SiRNA target sequence
catatccaaattttacgct

SEQ ID NO: 179897 - DNA, 19 bp, Artificial sequence
  SiRNA target sequence
atatccaaattttacgctt

SEQ ID NO: 179898 - DNA, 19 bp, Artificial sequence
  SiRNA target sequence
tatccaaattttacgctta

SEQ ID NO: 179899 - DNA, 19 bp, Artificial sequence
  SiRNA target sequence
atccaaattttacgcttaa

SEQ ID NO: 179900 - DNA, 19 bp, Artificial sequence
  SiRNA target sequence
tccaaattttacgcttaaa

SEQ ID NO: 179901 - DNA, 19 bp, Artificial sequence
  SiRNA target sequence
ccaaattttacgcttaaag

SEQ ID NO: 179902 - DNA, 19 bp, Artificial sequence
  SiRNA target sequence
caaattttacgcttaaagt

SEQ ID NO: 179903 - DNA, 19 bp, Artificial sequence
  SiRNA target sequence
aaattttacgcttaaagtt

SEQ ID NO: 179904 - DNA, 19 bp, Artificial sequence
  SiRNA target sequence
aattttacgcttaaagttg

SEQ ID NO: 179905 - DNA, 19 bp, Artificial sequence
  SiRNA target sequence
attttacgcttaaagttga

SEQ ID NO: 179906 - DNA, 19 bp, Artificial sequence
  SiRNA target sequence
ttttacgcttaaagttgaa

SEQ ID NO: 179907 - DNA, 19 bp, Artificial sequence
  SiRNA target sequence
tttacgcttaaagttgaag

SEQ ID NO: 179908 - DNA, 19 bp, Artificial sequence
  SiRNA target sequence
ttacgcttaaagttgaagg

SEQ ID NO: 179909 - DNA, 19 bp, Artificial sequence
  SiRNA target sequence
tacgcttaaagttgaaggc

SEQ ID NO: 179910 - DNA, 19 bp, Artificial sequence
  SiRNA target sequence
acgcttaaagttgaaggcg

SEQ ID NO: 179911 - DNA, 19 bp, Artificial sequence
  SiRNA target sequence
cgcttaaagttgaaggcgg

SEQ ID NO: 179912 - DNA, 19 bp, Artificial sequence
  SiRNA target sequence
gcttaaagttgaaggcggt

SEQ ID NO: 179913 - DNA, 19 bp, Artificial sequence
  SiRNA target sequence
cttaaagttgaaggcggta

SEQ ID NO: 179914 - DNA, 19 bp, Artificial sequence
  SiRNA target sequence
ttaaagttgaaggcggtaa

SEQ ID NO: 179915 - DNA, 19 bp, Artificial sequence
  SiRNA target sequence
taaagttgaaggcggtaac

SEQ ID NO: 179916 - DNA, 19 bp, Artificial sequence
  SiRNA target sequence
aaagttgaaggcggtaact

SEQ ID NO: 179917 - DNA, 19 bp, Artificial sequence
  SiRNA target sequence
aagttgaaggcggtaactt

SEQ ID NO: 179918 - DNA, 19 bp, Artificial sequence
  SiRNA target sequence
agttgaaggcggtaacttt

SEQ ID NO: 179919 - DNA, 19 bp, Artificial sequence
  SiRNA target sequence
gttgaaggcggtaactttt

SEQ ID NO: 179920 - DNA, 19 bp, Artificial sequence
  SiRNA target sequence
ttgaaggcggtaacttttc

SEQ ID NO: 179921 - DNA, 19 bp, Artificial sequence
  SiRNA target sequence
tgaaggcggtaacttttca

SEQ ID NO: 179922 - DNA, 19 bp, Artificial sequence
  SiRNA target sequence
gaaggcggtaacttttcag

SEQ ID NO: 179923 - DNA, 19 bp, Artificial sequence
  SiRNA target sequence
aaggcggtaacttttcaga

SEQ ID NO: 179924 - DNA, 19 bp, Artificial sequence
  SiRNA target sequence
aggcggtaacttttcagat

SEQ ID NO: 179925 - DNA, 19 bp, Artificial sequence
  SiRNA target sequence
ggcggtaacttttcagatt

SEQ ID NO: 179926 - DNA, 19 bp, Artificial sequence
  SiRNA target sequence
gcggtaacttttcagattc

SEQ ID NO: 179927 - DNA, 19 bp, Artificial sequence
  SiRNA target sequence
cggtaacttttcagattct

SEQ ID NO: 179928 - DNA, 19 bp, Artificial sequence
  SiRNA target sequence
ggtaacttttcagattctg

SEQ ID NO: 179929 - DNA, 19 bp, Artificial sequence
  SiRNA target sequence
gtaacttttcagattctga

SEQ ID NO: 179930 - DNA, 19 bp, Artificial sequence
  SiRNA target sequence
taacttttcagattctgaa

SEQ ID NO: 179931 - DNA, 19 bp, Artificial sequence
  SiRNA target sequence
aacttttcagattctgaaa

SEQ ID NO: 179932 - DNA, 19 bp, Artificial sequence
  SiRNA target sequence
acttttcagattctgaaat

SEQ ID NO: 179933 - DNA, 19 bp, Artificial sequence
  SiRNA target sequence
cttttcagattctgaaatt

SEQ ID NO: 179934 - DNA, 19 bp, Artificial sequence
  SiRNA target sequence
ttttcagattctgaaattg

SEQ ID NO: 179935 - DNA, 19 bp, Artificial sequence
  SiRNA target sequence
tttcagattctgaaattgt

SEQ ID NO: 179936 - DNA, 19 bp, Artificial sequence
  SiRNA target sequence
ttcagattctgaaattgtt

SEQ ID NO: 179937 - DNA, 19 bp, Artificial sequence
  SiRNA target sequence
tcagattctgaaattgttg

SEQ ID NO: 179938 - DNA, 19 bp, Artificial sequence
  SiRNA target sequence
cagattctgaaattgttgt

SEQ ID NO: 179939 - DNA, 19 bp, Artificial sequence
  SiRNA target sequence
agattctgaaattgttgta

SEQ ID NO: 179940 - DNA, 19 bp, Artificial sequence
  SiRNA target sequence
gattctgaaattgttgtat

SEQ ID NO: 179941 - DNA, 19 bp, Artificial sequence
  SiRNA target sequence
attctgaaattgttgtatt

SEQ ID NO: 179942 - DNA, 19 bp, Artificial sequence
  SiRNA target sequence
ttctgaaattgttgtattt

SEQ ID NO: 179943 - DNA, 19 bp, Artificial sequence
  SiRNA target sequence
tctgaaattgttgtatttc

SEQ ID NO: 179944 - DNA, 19 bp, Artificial sequence
  SiRNA target sequence
ctgaaattgttgtatttct

SEQ ID NO: 179945 - DNA, 19 bp, Artificial sequence
  SiRNA target sequence
tgaaattgttgtatttctt

SEQ ID NO: 179946 - DNA, 19 bp, Artificial sequence
  SiRNA target sequence
gaaattgttgtatttcttg

SEQ ID NO: 179947 - DNA, 19 bp, Artificial sequence
  SiRNA target sequence
aaattgttgtatttcttgg

SEQ ID NO: 179948 - DNA, 19 bp, Artificial sequence
  SiRNA target sequence
aattgttgtatttcttggt

SEQ ID NO: 179949 - DNA, 19 bp, Artificial sequence
  SiRNA target sequence
attgttgtatttcttggtg

SEQ ID NO: 179950 - DNA, 19 bp, Artificial sequence
  SiRNA target sequence
ttgttgtatttcttggtga

SEQ ID NO: 179951 - DNA, 19 bp, Artificial sequence
  SiRNA target sequence
tgttgtatttcttggtgaa

SEQ ID NO: 179952 - DNA, 19 bp, Artificial sequence
  SiRNA target sequence
gttgtatttcttggtgaaa

SEQ ID NO: 179953 - DNA, 19 bp, Artificial sequence
  SiRNA target sequence
ttgtatttcttggtgaaaa

SEQ ID NO: 179954 - DNA, 19 bp, Artificial sequence
  SiRNA target sequence
tgtatttcttggtgaaaat

SEQ ID NO: 179955 - DNA, 19 bp, Artificial sequence
  SiRNA target sequence
gtatttcttggtgaaaatg

SEQ ID NO: 179956 - DNA, 19 bp, Artificial sequence
  SiRNA target sequence
tatttcttggtgaaaatgg

SEQ ID NO: 179957 - DNA, 19 bp, Artificial sequence
  SiRNA target sequence
atttcttggtgaaaatgga

SEQ ID NO: 179958 - DNA, 19 bp, Artificial sequence
  SiRNA target sequence
tttcttggtgaaaatggaa

SEQ ID NO: 179959 - DNA, 19 bp, Artificial sequence
  SiRNA target sequence
ttcttggtgaaaatggaat

SEQ ID NO: 179960 - DNA, 19 bp, Artificial sequence
  SiRNA target sequence
tcttggtgaaaatggaatg

SEQ ID NO: 179961 - DNA, 19 bp, Artificial sequence
  SiRNA target sequence
cttggtgaaaatggaatgg

SEQ ID NO: 179962 - DNA, 19 bp, Artificial sequence
  SiRNA target sequence
ttggtgaaaatggaatggg

SEQ ID NO: 179963 - DNA, 19 bp, Artificial sequence
  SiRNA target sequence
tggtgaaaatggaatgggc

SEQ ID NO: 179964 - DNA, 19 bp, Artificial sequence
  SiRNA target sequence
ggtgaaaatggaatgggca

SEQ ID NO: 179965 - DNA, 19 bp, Artificial sequence
  SiRNA target sequence
gtgaaaatggaatgggcaa

SEQ ID NO: 179966 - DNA, 19 bp, Artificial sequence
  SiRNA target sequence
tgaaaatggaatgggcaaa

SEQ ID NO: 179967 - DNA, 19 bp, Artificial sequence
  SiRNA target sequence
gaaaatggaatgggcaaaa

SEQ ID NO: 179968 - DNA, 19 bp, Artificial sequence
  SiRNA target sequence
aaaatggaatgggcaaaac

SEQ ID NO: 179969 - DNA, 19 bp, Artificial sequence
  SiRNA target sequence
aaatggaatgggcaaaact

SEQ ID NO: 179970 - DNA, 19 bp, Artificial sequence
  SiRNA target sequence
aatggaatgggcaaaacta

SEQ ID NO: 179971 - DNA, 19 bp, Artificial sequence
  SiRNA target sequence
atggaatgggcaaaactac

SEQ ID NO: 179972 - DNA, 19 bp, Artificial sequence
  SiRNA target sequence
tggaatgggcaaaactact

SEQ ID NO: 179973 - DNA, 19 bp, Artificial sequence
  SiRNA target sequence
ggaatgggcaaaactactt

SEQ ID NO: 179974 - DNA, 19 bp, Artificial sequence
  SiRNA target sequence
gaatgggcaaaactacttt

SEQ ID NO: 179975 - DNA, 19 bp, Artificial sequence
  SiRNA target sequence
aatgggcaaaactacttta

SEQ ID NO: 179976 - DNA, 19 bp, Artificial sequence
  SiRNA target sequence
atgggcaaaactactttag

SEQ ID NO: 179977 - DNA, 19 bp, Artificial sequence
  SiRNA target sequence
tgggcaaaactactttagt

SEQ ID NO: 179978 - DNA, 19 bp, Artificial sequence
  SiRNA target sequence
gggcaaaactactttagta

SEQ ID NO: 179979 - DNA, 19 bp, Artificial sequence
  SiRNA target sequence
ggcaaaactactttagtag

SEQ ID NO: 179980 - DNA, 19 bp, Artificial sequence
  SiRNA target sequence
gcaaaactactttagtagg

SEQ ID NO: 179981 - DNA, 19 bp, Artificial sequence
  SiRNA target sequence
caaaactactttagtaggt

SEQ ID NO: 179982 - DNA, 19 bp, Artificial sequence
  SiRNA target sequence
aaaactactttagtaggtt

SEQ ID NO: 179983 - DNA, 19 bp, Artificial sequence
  SiRNA target sequence
aaactactttagtaggttt

SEQ ID NO: 179984 - DNA, 19 bp, Artificial sequence
  SiRNA target sequence
aactactttagtaggtttg

SEQ ID NO: 179985 - DNA, 19 bp, Artificial sequence
  SiRNA target sequence
actactttagtaggtttga

SEQ ID NO: 179986 - DNA, 19 bp, Artificial sequence
  SiRNA target sequence
ctactttagtaggtttgat

SEQ ID NO: 179987 - DNA, 19 bp, Artificial sequence
  SiRNA target sequence
tactttagtaggtttgatt

SEQ ID NO: 179988 - DNA, 19 bp, Artificial sequence
  SiRNA target sequence
actttagtaggtttgattt

SEQ ID NO: 179989 - DNA, 19 bp, Artificial sequence
  SiRNA target sequence
ctttagtaggtttgatttc

SEQ ID NO: 179990 - DNA, 19 bp, Artificial sequence
  SiRNA target sequence
tttagtaggtttgatttcg

SEQ ID NO: 179991 - DNA, 19 bp, Artificial sequence
  SiRNA target sequence
ttagtaggtttgatttcgg

SEQ ID NO: 179992 - DNA, 19 bp, Artificial sequence
  SiRNA target sequence
tagtaggtttgatttcggg

SEQ ID NO: 179993 - DNA, 19 bp, Artificial sequence
  SiRNA target sequence
agtaggtttgatttcgggg

SEQ ID NO: 179994 - DNA, 19 bp, Artificial sequence
  SiRNA target sequence
gtaggtttgatttcggggt

SEQ ID NO: 179995 - DNA, 19 bp, Artificial sequence
  SiRNA target sequence
taggtttgatttcggggtt

SEQ ID NO: 179996 - DNA, 19 bp, Artificial sequence
  SiRNA target sequence
aggtttgatttcggggtta

SEQ ID NO: 179997 - DNA, 19 bp, Artificial sequence
  SiRNA target sequence
ggtttgatttcggggttaa

SEQ ID NO: 179998 - DNA, 19 bp, Artificial sequence
  SiRNA target sequence
gtttgatttcggggttaat

SEQ ID NO: 179999 - DNA, 19 bp, Artificial sequence
  SiRNA target sequence
tttgatttcggggttaatt

SEQ ID NO: 180000 - DNA, 19 bp, Artificial sequence
  SiRNA target sequence
ttgatttcggggttaatta

SEQ ID NO: 180001 - DNA, 19 bp, Artificial sequence
  SiRNA target sequence
tgatttcggggttaattaa

SEQ ID NO: 180002 - DNA, 19 bp, Artificial sequence
  SiRNA target sequence
gatttcggggttaattaaa

SEQ ID NO: 180003 - DNA, 19 bp, Artificial sequence
  SiRNA target sequence
atttcggggttaattaaag

SEQ ID NO: 180004 - DNA, 19 bp, Artificial sequence
  SiRNA target sequence
tttcggggttaattaaaga

SEQ ID NO: 180005 - DNA, 19 bp, Artificial sequence
  SiRNA target sequence
ttcggggttaattaaagat

SEQ ID NO: 180006 - DNA, 19 bp, Artificial sequence
  SiRNA target sequence
tcggggttaattaaagatg

SEQ ID NO: 180007 - DNA, 19 bp, Artificial sequence
  SiRNA target sequence
cggggttaattaaagatga

SEQ ID NO: 180008 - DNA, 19 bp, Artificial sequence
  SiRNA target sequence
ggggttaattaaagatgat

SEQ ID NO: 180009 - DNA, 19 bp, Artificial sequence
  SiRNA target sequence
gggttaattaaagatgata

SEQ ID NO: 180010 - DNA, 19 bp, Artificial sequence
  SiRNA target sequence
ggttaattaaagatgataa

SEQ ID NO: 180011 - DNA, 19 bp, Artificial sequence
  SiRNA target sequence
gttaattaaagatgataac

SEQ ID NO: 180012 - DNA, 19 bp, Artificial sequence
  SiRNA target sequence
ttaattaaagatgataacg

SEQ ID NO: 180013 - DNA, 19 bp, Artificial sequence
  SiRNA target sequence
taattaaagatgataacgg

SEQ ID NO: 180014 - DNA, 19 bp, Artificial sequence
  SiRNA target sequence
aattaaagatgataacggg

SEQ ID NO: 180015 - DNA, 19 bp, Artificial sequence
  SiRNA target sequence
attaaagatgataacgggg

SEQ ID NO: 180016 - DNA, 19 bp, Artificial sequence
  SiRNA target sequence
ttaaagatgataacgggga

SEQ ID NO: 180017 - DNA, 19 bp, Artificial sequence
  SiRNA target sequence
taaagatgataacggggaa

SEQ ID NO: 180018 - DNA, 19 bp, Artificial sequence
  SiRNA target sequence
aaagatgataacggggaag

SEQ ID NO: 180019 - DNA, 19 bp, Artificial sequence
  SiRNA target sequence
aagatgataacggggaaga

SEQ ID NO: 180020 - DNA, 19 bp, Artificial sequence
  SiRNA target sequence
agatgataacggggaagag

SEQ ID NO: 180021 - DNA, 19 bp, Artificial sequence
  SiRNA target sequence
gatgataacggggaagagt

SEQ ID NO: 180022 - DNA, 19 bp, Artificial sequence
  SiRNA target sequence
atgataacggggaagagtt

SEQ ID NO: 180023 - DNA, 19 bp, Artificial sequence
  SiRNA target sequence
tgataacggggaagagttc

SEQ ID NO: 180024 - DNA, 19 bp, Artificial sequence
  SiRNA target sequence
gataacggggaagagttcg

SEQ ID NO: 180025 - DNA, 19 bp, Artificial sequence
  SiRNA target sequence
ataacggggaagagttcgg

SEQ ID NO: 180026 - DNA, 19 bp, Artificial sequence
  SiRNA target sequence
taacggggaagagttcggt

SEQ ID NO: 180027 - DNA, 19 bp, Artificial sequence
  SiRNA target sequence
aacggggaagagttcggtt

SEQ ID NO: 180028 - DNA, 19 bp, Artificial sequence
  SiRNA target sequence
acggggaagagttcggttt

SEQ ID NO: 180029 - DNA, 19 bp, Artificial sequence
  SiRNA target sequence
cggggaagagttcggtttg

SEQ ID NO: 180030 - DNA, 19 bp, Artificial sequence
  SiRNA target sequence
ggggaagagttcggtttgt

SEQ ID NO: 180031 - DNA, 19 bp, Artificial sequence
  SiRNA target sequence
gggaagagttcggtttgtt

SEQ ID NO: 180032 - DNA, 19 bp, Artificial sequence
  SiRNA target sequence
ggaagagttcggtttgttg

SEQ ID NO: 180033 - DNA, 19 bp, Artificial sequence
  SiRNA target sequence
gaagagttcggtttgttgt

SEQ ID NO: 180034 - DNA, 19 bp, Artificial sequence
  SiRNA target sequence
aagagttcggtttgttgtc

SEQ ID NO: 180035 - DNA, 19 bp, Artificial sequence
  SiRNA target sequence
agagttcggtttgttgtca

SEQ ID NO: 180036 - DNA, 19 bp, Artificial sequence
  SiRNA target sequence
gagttcggtttgttgtcat

SEQ ID NO: 180037 - DNA, 19 bp, Artificial sequence
  SiRNA target sequence
agttcggtttgttgtcata

SEQ ID NO: 180038 - DNA, 19 bp, Artificial sequence
  SiRNA target sequence
gttcggtttgttgtcatat

SEQ ID NO: 180039 - DNA, 19 bp, Artificial sequence
  SiRNA target sequence
ttcggtttgttgtcatata

SEQ ID NO: 180040 - DNA, 19 bp, Artificial sequence
  SiRNA target sequence
tcggtttgttgtcatatag

SEQ ID NO: 180041 - DNA, 19 bp, Artificial sequence
  SiRNA target sequence
cggtttgttgtcatatagt

SEQ ID NO: 180042 - DNA, 19 bp, Artificial sequence
  SiRNA target sequence
ggtttgttgtcatatagtc

SEQ ID NO: 180043 - DNA, 19 bp, Artificial sequence
  SiRNA target sequence
gtttgttgtcatatagtct

SEQ ID NO: 180044 - DNA, 19 bp, Artificial sequence
  SiRNA target sequence
tttgttgtcatatagtctt

SEQ ID NO: 180045 - DNA, 19 bp, Artificial sequence
  SiRNA target sequence
ttgttgtcatatagtctta

SEQ ID NO: 180046 - DNA, 19 bp, Artificial sequence
  SiRNA target sequence
tgttgtcatatagtcttaa

SEQ ID NO: 180047 - DNA, 19 bp, Artificial sequence
  SiRNA target sequence
gttgtcatatagtcttaaa

SEQ ID NO: 180048 - DNA, 19 bp, Artificial sequence
  SiRNA target sequence
ttgtcatatagtcttaaac

SEQ ID NO: 180049 - DNA, 19 bp, Artificial sequence
  SiRNA target sequence
tgtcatatagtcttaaacc

SEQ ID NO: 180050 - DNA, 19 bp, Artificial sequence
  SiRNA target sequence
gtcatatagtcttaaaccg

SEQ ID NO: 180051 - DNA, 19 bp, Artificial sequence
  SiRNA target sequence
tcatatagtcttaaaccgc

SEQ ID NO: 180052 - DNA, 19 bp, Artificial sequence
  SiRNA target sequence
catatagtcttaaaccgca

SEQ ID NO: 180053 - DNA, 19 bp, Artificial sequence
  SiRNA target sequence
atatagtcttaaaccgcaa

SEQ ID NO: 180054 - DNA, 19 bp, Artificial sequence
  SiRNA target sequence
tatagtcttaaaccgcaaa

SEQ ID NO: 180055 - DNA, 19 bp, Artificial sequence
  SiRNA target sequence
atagtcttaaaccgcaaaa

SEQ ID NO: 180056 - DNA, 19 bp, Artificial sequence
  SiRNA target sequence
tagtcttaaaccgcaaaaa

SEQ ID NO: 180057 - DNA, 19 bp, Artificial sequence
  SiRNA target sequence
agtcttaaaccgcaaaaaa

SEQ ID NO: 180058 - DNA, 19 bp, Artificial sequence
  SiRNA target sequence
gtcttaaaccgcaaaaaat

SEQ ID NO: 180059 - DNA, 19 bp, Artificial sequence
  SiRNA target sequence
tcttaaaccgcaaaaaatc

SEQ ID NO: 180060 - DNA, 19 bp, Artificial sequence
  SiRNA target sequence
cttaaaccgcaaaaaatca

SEQ ID NO: 180061 - DNA, 19 bp, Artificial sequence
  SiRNA target sequence
ttaaaccgcaaaaaatcat

SEQ ID NO: 180062 - DNA, 19 bp, Artificial sequence
  SiRNA target sequence
taaaccgcaaaaaatcata

SEQ ID NO: 180063 - DNA, 19 bp, Artificial sequence
  SiRNA target sequence
aaaccgcaaaaaatcatac

SEQ ID NO: 180064 - DNA, 19 bp, Artificial sequence
  SiRNA target sequence
aaccgcaaaaaatcatacc

SEQ ID NO: 180065 - DNA, 19 bp, Artificial sequence
  SiRNA target sequence
accgcaaaaaatcataccg

SEQ ID NO: 180066 - DNA, 19 bp, Artificial sequence
  SiRNA target sequence
ccgcaaaaaatcataccga

SEQ ID NO: 180067 - DNA, 19 bp, Artificial sequence
  SiRNA target sequence
cgcaaaaaatcataccgaa

SEQ ID NO: 180068 - DNA, 19 bp, Artificial sequence
  SiRNA target sequence
gcaaaaaatcataccgaaa

SEQ ID NO: 180069 - DNA, 19 bp, Artificial sequence
  SiRNA target sequence
caaaaaatcataccgaaat

SEQ ID NO: 180070 - DNA, 19 bp, Artificial sequence
  SiRNA target sequence
aaaaaatcataccgaaata

SEQ ID NO: 180071 - DNA, 19 bp, Artificial sequence
  SiRNA target sequence
aaaaatcataccgaaatac

SEQ ID NO: 180072 - DNA, 19 bp, Artificial sequence
  SiRNA target sequence
aaaatcataccgaaataca

SEQ ID NO: 180073 - DNA, 19 bp, Artificial sequence
  SiRNA target sequence
aaatcataccgaaatacaa

SEQ ID NO: 180074 - DNA, 19 bp, Artificial sequence
  SiRNA target sequence
aatcataccgaaatacaaa

SEQ ID NO: 180075 - DNA, 19 bp, Artificial sequence
  SiRNA target sequence
atcataccgaaatacaaag

SEQ ID NO: 180076 - DNA, 19 bp, Artificial sequence
  SiRNA target sequence
tcataccgaaatacaaagg

SEQ ID NO: 180077 - DNA, 19 bp, Artificial sequence
  SiRNA target sequence
cataccgaaatacaaagga

SEQ ID NO: 180078 - DNA, 19 bp, Artificial sequence
  SiRNA target sequence
ataccgaaatacaaaggaa

SEQ ID NO: 180079 - DNA, 19 bp, Artificial sequence
  SiRNA target sequence
taccgaaatacaaaggaac

SEQ ID NO: 180080 - DNA, 19 bp, Artificial sequence
  SiRNA target sequence
accgaaatacaaaggaaca

SEQ ID NO: 180081 - DNA, 19 bp, Artificial sequence
  SiRNA target sequence
ccgaaatacaaaggaacag

SEQ ID NO: 180082 - DNA, 19 bp, Artificial sequence
  SiRNA target sequence
cgaaatacaaaggaacagt

SEQ ID NO: 180083 - DNA, 19 bp, Artificial sequence
  SiRNA target sequence
gaaatacaaaggaacagtt

SEQ ID NO: 180084 - DNA, 19 bp, Artificial sequence
  SiRNA target sequence
aaatacaaaggaacagtta

SEQ ID NO: 180085 - DNA, 19 bp, Artificial sequence
  SiRNA target sequence
aatacaaaggaacagttag

SEQ ID NO: 180086 - DNA, 19 bp, Artificial sequence
  SiRNA target sequence
atacaaaggaacagttaga

SEQ ID NO: 180087 - DNA, 19 bp, Artificial sequence
  SiRNA target sequence
tacaaaggaacagttagag

SEQ ID NO: 180088 - DNA, 19 bp, Artificial sequence
  SiRNA target sequence
acaaaggaacagttagaga

SEQ ID NO: 180089 - DNA, 19 bp, Artificial sequence
  SiRNA target sequence
caaaggaacagttagagat

SEQ ID NO: 180090 - DNA, 19 bp, Artificial sequence
  SiRNA target sequence
aaaggaacagttagagatc

SEQ ID NO: 180091 - DNA, 19 bp, Artificial sequence
  SiRNA target sequence
aaggaacagttagagatct

SEQ ID NO: 180092 - DNA, 19 bp, Artificial sequence
  SiRNA target sequence
aggaacagttagagatctt

SEQ ID NO: 180093 - DNA, 19 bp, Artificial sequence
  SiRNA target sequence
ggaacagttagagatcttt

SEQ ID NO: 180094 - DNA, 19 bp, Artificial sequence
  SiRNA target sequence
gaacagttagagatctttt

SEQ ID NO: 180095 - DNA, 19 bp, Artificial sequence
  SiRNA target sequence
aacagttagagatcttttt

SEQ ID NO: 180096 - DNA, 19 bp, Artificial sequence
  SiRNA target sequence
acagttagagatcttttta

SEQ ID NO: 180097 - DNA, 19 bp, Artificial sequence
  SiRNA target sequence
cagttagagatctttttat

SEQ ID NO: 180098 - DNA, 19 bp, Artificial sequence
  SiRNA target sequence
agttagagatctttttatg

SEQ ID NO: 180099 - DNA, 19 bp, Artificial sequence
  SiRNA target sequence
gttagagatctttttatgt

SEQ ID NO: 180100 - DNA, 19 bp, Artificial sequence
  SiRNA target sequence
ttagagatctttttatgtc

SEQ ID NO: 180101 - DNA, 19 bp, Artificial sequence
  SiRNA target sequence
tagagatctttttatgtca

SEQ ID NO: 180102 - DNA, 19 bp, Artificial sequence
  SiRNA target sequence
agagatctttttatgtcaa

SEQ ID NO: 180103 - DNA, 19 bp, Artificial sequence
  SiRNA target sequence
gagatctttttatgtcaaa

SEQ ID NO: 180104 - DNA, 19 bp, Artificial sequence
  SiRNA target sequence
agatctttttatgtcaaaa

SEQ ID NO: 180105 - DNA, 19 bp, Artificial sequence
  SiRNA target sequence
gatctttttatgtcaaaaa

SEQ ID NO: 180106 - DNA, 19 bp, Artificial sequence
  SiRNA target sequence
atctttttatgtcaaaaat

SEQ ID NO: 180107 - DNA, 19 bp, Artificial sequence
  SiRNA target sequence
tctttttatgtcaaaaatt

SEQ ID NO: 180108 - DNA, 19 bp, Artificial sequence
  SiRNA target sequence
ctttttatgtcaaaaattc

SEQ ID NO: 180109 - DNA, 19 bp, Artificial sequence
  SiRNA target sequence
tttttatgtcaaaaattcg

SEQ ID NO: 180110 - DNA, 19 bp, Artificial sequence
  SiRNA target sequence
ttttatgtcaaaaattcgt

SEQ ID NO: 180111 - DNA, 19 bp, Artificial sequence
  SiRNA target sequence
tttatgtcaaaaattcgtt

SEQ ID NO: 180112 - DNA, 19 bp, Artificial sequence
  SiRNA target sequence
ttatgtcaaaaattcgttc

SEQ ID NO: 180113 - DNA, 19 bp, Artificial sequence
  SiRNA target sequence
tatgtcaaaaattcgttct

SEQ ID NO: 180114 - DNA, 19 bp, Artificial sequence
  SiRNA target sequence
atgtcaaaaattcgttctt

SEQ ID NO: 180115 - DNA, 19 bp, Artificial sequence
  SiRNA target sequence
tgtcaaaaattcgttcttc

SEQ ID NO: 180116 - DNA, 19 bp, Artificial sequence
  SiRNA target sequence
gtcaaaaattcgttcttcc

SEQ ID NO: 180117 - DNA, 19 bp, Artificial sequence
  SiRNA target sequence
tcaaaaattcgttcttcct

SEQ ID NO: 180118 - DNA, 19 bp, Artificial sequence
  SiRNA target sequence
caaaaattcgttcttcctt

SEQ ID NO: 180119 - DNA, 19 bp, Artificial sequence
  SiRNA target sequence
aaaaattcgttcttccttt

SEQ ID NO: 180120 - DNA, 19 bp, Artificial sequence
  SiRNA target sequence
aaaattcgttcttcctttt

SEQ ID NO: 180121 - DNA, 19 bp, Artificial sequence
  SiRNA target sequence
aaattcgttcttccttttt

SEQ ID NO: 180122 - DNA, 19 bp, Artificial sequence
  SiRNA target sequence
aattcgttcttccttttta

SEQ ID NO: 180123 - DNA, 19 bp, Artificial sequence
  SiRNA target sequence
attcgttcttcctttttag

SEQ ID NO: 180124 - DNA, 19 bp, Artificial sequence
  SiRNA target sequence
ttcgttcttcctttttaga

SEQ ID NO: 180125 - DNA, 19 bp, Artificial sequence
  SiRNA target sequence
tcgttcttcctttttagac

SEQ ID NO: 180126 - DNA, 19 bp, Artificial sequence
  SiRNA target sequence
cgttcttcctttttagacg

SEQ ID NO: 180127 - DNA, 19 bp, Artificial sequence
  SiRNA target sequence
gttcttcctttttagacgc

SEQ ID NO: 180128 - DNA, 19 bp, Artificial sequence
  SiRNA target sequence
ttcttcctttttagacgct

SEQ ID NO: 180129 - DNA, 19 bp, Artificial sequence
  SiRNA target sequence
tcttcctttttagacgcta

SEQ ID NO: 180130 - DNA, 19 bp, Artificial sequence
  SiRNA target sequence
cttcctttttagacgctaa

SEQ ID NO: 180131 - DNA, 19 bp, Artificial sequence
  SiRNA target sequence
ttcctttttagacgctaat

SEQ ID NO: 180132 - DNA, 19 bp, Artificial sequence
  SiRNA target sequence
tcctttttagacgctaatt

SEQ ID NO: 180133 - DNA, 19 bp, Artificial sequence
  SiRNA target sequence
cctttttagacgctaattt

SEQ ID NO: 180134 - DNA, 19 bp, Artificial sequence
  SiRNA target sequence
ctttttagacgctaatttt

SEQ ID NO: 180135 - DNA, 19 bp, Artificial sequence
  SiRNA target sequence
tttttagacgctaattttg

SEQ ID NO: 180136 - DNA, 19 bp, Artificial sequence
  SiRNA target sequence
ttttagacgctaattttgt

SEQ ID NO: 180137 - DNA, 19 bp, Artificial sequence
  SiRNA target sequence
tttagacgctaattttgtt

SEQ ID NO: 180138 - DNA, 19 bp, Artificial sequence
  SiRNA target sequence
ttagacgctaattttgtta

SEQ ID NO: 180139 - DNA, 19 bp, Artificial sequence
  SiRNA target sequence
tagacgctaattttgttaa

SEQ ID NO: 180140 - DNA, 19 bp, Artificial sequence
  SiRNA target sequence
agacgctaattttgttaat

SEQ ID NO: 180141 - DNA, 19 bp, Artificial sequence
  SiRNA target sequence
gacgctaattttgttaatg

SEQ ID NO: 180142 - DNA, 19 bp, Artificial sequence
  SiRNA target sequence
acgctaattttgttaatga

SEQ ID NO: 180143 - DNA, 19 bp, Artificial sequence
  SiRNA target sequence
cgctaattttgttaatgaa

SEQ ID NO: 180144 - DNA, 19 bp, Artificial sequence
  SiRNA target sequence
gctaattttgttaatgaag

SEQ ID NO: 180145 - DNA, 19 bp, Artificial sequence
  SiRNA target sequence
ctaattttgttaatgaagc

SEQ ID NO: 180146 - DNA, 19 bp, Artificial sequence
  SiRNA target sequence
taattttgttaatgaagct

SEQ ID NO: 180147 - DNA, 19 bp, Artificial sequence
  SiRNA target sequence
aattttgttaatgaagcta

SEQ ID NO: 180148 - DNA, 19 bp, Artificial sequence
  SiRNA target sequence
attttgttaatgaagctat

SEQ ID NO: 180149 - DNA, 19 bp, Artificial sequence
  SiRNA target sequence
ttttgttaatgaagctatt

SEQ ID NO: 180150 - DNA, 19 bp, Artificial sequence
  SiRNA target sequence
tttgttaatgaagctatta

SEQ ID NO: 180151 - DNA, 19 bp, Artificial sequence
  SiRNA target sequence
ttgttaatgaagctattaa

SEQ ID NO: 180152 - DNA, 19 bp, Artificial sequence
  SiRNA target sequence
tgttaatgaagctattaaa

SEQ ID NO: 180153 - DNA, 19 bp, Artificial sequence
  SiRNA target sequence
gttaatgaagctattaaac

SEQ ID NO: 180154 - DNA, 19 bp, Artificial sequence
  SiRNA target sequence
ttaatgaagctattaaacc

SEQ ID NO: 180155 - DNA, 19 bp, Artificial sequence
  SiRNA target sequence
taatgaagctattaaacct

SEQ ID NO: 180156 - DNA, 19 bp, Artificial sequence
  SiRNA target sequence
aatgaagctattaaacctt

SEQ ID NO: 180157 - DNA, 19 bp, Artificial sequence
  SiRNA target sequence
atgaagctattaaaccttt

SEQ ID NO: 180158 - DNA, 19 bp, Artificial sequence
  SiRNA target sequence
tgaagctattaaaccttta

SEQ ID NO: 180159 - DNA, 19 bp, Artificial sequence
  SiRNA target sequence
gaagctattaaacctttag

SEQ ID NO: 180160 - DNA, 19 bp, Artificial sequence
  SiRNA target sequence
aagctattaaacctttaga

SEQ ID NO: 180161 - DNA, 19 bp, Artificial sequence
  SiRNA target sequence
agctattaaacctttagat

SEQ ID NO: 180162 - DNA, 19 bp, Artificial sequence
  SiRNA target sequence
gctattaaacctttagata

SEQ ID NO: 180163 - DNA, 19 bp, Artificial sequence
  SiRNA target sequence
ctattaaacctttagatat

SEQ ID NO: 180164 - DNA, 19 bp, Artificial sequence
  SiRNA target sequence
tattaaacctttagatatt

SEQ ID NO: 180165 - DNA, 19 bp, Artificial sequence
  SiRNA target sequence
attaaacctttagatattc

SEQ ID NO: 180166 - DNA, 19 bp, Artificial sequence
  SiRNA target sequence
ttaaacctttagatattca

SEQ ID NO: 180167 - DNA, 19 bp, Artificial sequence
  SiRNA target sequence
taaacctttagatattcat

SEQ ID NO: 180168 - DNA, 19 bp, Artificial sequence
  SiRNA target sequence
aaacctttagatattcatc

SEQ ID NO: 180169 - DNA, 19 bp, Artificial sequence
  SiRNA target sequence
aacctttagatattcatca

SEQ ID NO: 180170 - DNA, 19 bp, Artificial sequence
  SiRNA target sequence
acctttagatattcatcat

SEQ ID NO: 180171 - DNA, 19 bp, Artificial sequence
  SiRNA target sequence
cctttagatattcatcatt

SEQ ID NO: 180172 - DNA, 19 bp, Artificial sequence
  SiRNA target sequence
ctttagatattcatcattt

SEQ ID NO: 180173 - DNA, 19 bp, Artificial sequence
  SiRNA target sequence
tttagatattcatcattta

SEQ ID NO: 180174 - DNA, 19 bp, Artificial sequence
  SiRNA target sequence
ttagatattcatcatttat

SEQ ID NO: 180175 - DNA, 19 bp, Artificial sequence
  SiRNA target sequence
tagatattcatcatttata

SEQ ID NO: 180176 - DNA, 19 bp, Artificial sequence
  SiRNA target sequence
agatattcatcatttatac

SEQ ID NO: 180177 - DNA, 19 bp, Artificial sequence
  SiRNA target sequence
gatattcatcatttatacg

SEQ ID NO: 180178 - DNA, 19 bp, Artificial sequence
  SiRNA target sequence
atattcatcatttatacga

SEQ ID NO: 180179 - DNA, 19 bp, Artificial sequence
  SiRNA target sequence
tattcatcatttatacgac

SEQ ID NO: 180180 - DNA, 19 bp, Artificial sequence
  SiRNA target sequence
attcatcatttatacgacc

SEQ ID NO: 180181 - DNA, 19 bp, Artificial sequence
  SiRNA target sequence
ttcatcatttatacgacca

SEQ ID NO: 180182 - DNA, 19 bp, Artificial sequence
  SiRNA target sequence
tcatcatttatacgaccaa

SEQ ID NO: 180183 - DNA, 19 bp, Artificial sequence
  SiRNA target sequence
catcatttatacgaccaac

SEQ ID NO: 180184 - DNA, 19 bp, Artificial sequence
  SiRNA target sequence
atcatttatacgaccaact

SEQ ID NO: 180185 - DNA, 19 bp, Artificial sequence
  SiRNA target sequence
tcatttatacgaccaactt

SEQ ID NO: 180186 - DNA, 19 bp, Artificial sequence
  SiRNA target sequence
catttatacgaccaacttg

SEQ ID NO: 180187 - DNA, 19 bp, Artificial sequence
  SiRNA target sequence
atttatacgaccaacttgt

SEQ ID NO: 180188 - DNA, 19 bp, Artificial sequence
  SiRNA target sequence
tttatacgaccaacttgta

SEQ ID NO: 180189 - DNA, 19 bp, Artificial sequence
  SiRNA target sequence
ttatacgaccaacttgtag

SEQ ID NO: 180190 - DNA, 19 bp, Artificial sequence
  SiRNA target sequence
tatacgaccaacttgtaga

SEQ ID NO: 180191 - DNA, 19 bp, Artificial sequence
  SiRNA target sequence
atacgaccaacttgtagaa

SEQ ID NO: 180192 - DNA, 19 bp, Artificial sequence
  SiRNA target sequence
tacgaccaacttgtagaaa

SEQ ID NO: 180193 - DNA, 19 bp, Artificial sequence
  SiRNA target sequence
acgaccaacttgtagaaaa

SEQ ID NO: 180194 - DNA, 19 bp, Artificial sequence
  SiRNA target sequence
cgaccaacttgtagaaaac

SEQ ID NO: 180195 - DNA, 19 bp, Artificial sequence
  SiRNA target sequence
gaccaacttgtagaaaact

SEQ ID NO: 180196 - DNA, 19 bp, Artificial sequence
  SiRNA target sequence
accaacttgtagaaaactt

SEQ ID NO: 180197 - DNA, 19 bp, Artificial sequence
  SiRNA target sequence
ccaacttgtagaaaacttg

SEQ ID NO: 180198 - DNA, 19 bp, Artificial sequence
  SiRNA target sequence
caacttgtagaaaacttga

SEQ ID NO: 180199 - DNA, 19 bp, Artificial sequence
  SiRNA target sequence
aacttgtagaaaacttgag

SEQ ID NO: 180200 - DNA, 19 bp, Artificial sequence
  SiRNA target sequence
acttgtagaaaacttgagt

SEQ ID NO: 180201 - DNA, 19 bp, Artificial sequence
  SiRNA target sequence
cttgtagaaaacttgagtg

SEQ ID NO: 180202 - DNA, 19 bp, Artificial sequence
  SiRNA target sequence
ttgtagaaaacttgagtgg

SEQ ID NO: 180203 - DNA, 19 bp, Artificial sequence
  SiRNA target sequence
tgtagaaaacttgagtggt

SEQ ID NO: 180204 - DNA, 19 bp, Artificial sequence
  SiRNA target sequence
gtagaaaacttgagtggtg

SEQ ID NO: 180205 - DNA, 19 bp, Artificial sequence
  SiRNA target sequence
tagaaaacttgagtggtgg

SEQ ID NO: 180206 - DNA, 19 bp, Artificial sequence
  SiRNA target sequence
agaaaacttgagtggtgga

SEQ ID NO: 180207 - DNA, 19 bp, Artificial sequence
  SiRNA target sequence
gaaaacttgagtggtggag

SEQ ID NO: 180208 - DNA, 19 bp, Artificial sequence
  SiRNA target sequence
aaaacttgagtggtggaga

SEQ ID NO: 180209 - DNA, 19 bp, Artificial sequence
  SiRNA target sequence
aaacttgagtggtggagaa

SEQ ID NO: 180210 - DNA, 19 bp, Artificial sequence
  SiRNA target sequence
aacttgagtggtggagaat

SEQ ID NO: 180211 - DNA, 19 bp, Artificial sequence
  SiRNA target sequence
acttgagtggtggagaatt

SEQ ID NO: 180212 - DNA, 19 bp, Artificial sequence
  SiRNA target sequence
cttgagtggtggagaatta

SEQ ID NO: 180213 - DNA, 19 bp, Artificial sequence
  SiRNA target sequence
ttgagtggtggagaattac

SEQ ID NO: 180214 - DNA, 19 bp, Artificial sequence
  SiRNA target sequence
tgagtggtggagaattaca

SEQ ID NO: 180215 - DNA, 19 bp, Artificial sequence
  SiRNA target sequence
gagtggtggagaattacaa

SEQ ID NO: 180216 - DNA, 19 bp, Artificial sequence
  SiRNA target sequence
agtggtggagaattacaaa

SEQ ID NO: 180217 - DNA, 19 bp, Artificial sequence
  SiRNA target sequence
gtggtggagaattacaaag

SEQ ID NO: 180218 - DNA, 19 bp, Artificial sequence
  SiRNA target sequence
tggtggagaattacaaaga

SEQ ID NO: 180219 - DNA, 19 bp, Artificial sequence
  SiRNA target sequence
ggtggagaattacaaagaa

SEQ ID NO: 180220 - DNA, 19 bp, Artificial sequence
  SiRNA target sequence
gtggagaattacaaagaat

SEQ ID NO: 180221 - DNA, 19 bp, Artificial sequence
  SiRNA target sequence
tggagaattacaaagaatt

SEQ ID NO: 180222 - DNA, 19 bp, Artificial sequence
  SiRNA target sequence
ggagaattacaaagaattg

SEQ ID NO: 180223 - DNA, 19 bp, Artificial sequence
  SiRNA target sequence
gagaattacaaagaattgc

SEQ ID NO: 180224 - DNA, 19 bp, Artificial sequence
  SiRNA target sequence
agaattacaaagaattgca

SEQ ID NO: 180225 - DNA, 19 bp, Artificial sequence
  SiRNA target sequence
gaattacaaagaattgcaa

SEQ ID NO: 180226 - DNA, 19 bp, Artificial sequence
  SiRNA target sequence
aattacaaagaattgcaat

SEQ ID NO: 180227 - DNA, 19 bp, Artificial sequence
  SiRNA target sequence
attacaaagaattgcaata

SEQ ID NO: 180228 - DNA, 19 bp, Artificial sequence
  SiRNA target sequence
ttacaaagaattgcaataa

SEQ ID NO: 180229 - DNA, 19 bp, Artificial sequence
  SiRNA target sequence
tacaaagaattgcaataat

SEQ ID NO: 180230 - DNA, 19 bp, Artificial sequence
  SiRNA target sequence
acaaagaattgcaataata

SEQ ID NO: 180231 - DNA, 19 bp, Artificial sequence
  SiRNA target sequence
caaagaattgcaataataa

SEQ ID NO: 180232 - DNA, 19 bp, Artificial sequence
  SiRNA target sequence
aaagaattgcaataataat

SEQ ID NO: 180233 - DNA, 19 bp, Artificial sequence
  SiRNA target sequence
aagaattgcaataataata

SEQ ID NO: 180234 - DNA, 19 bp, Artificial sequence
  SiRNA target sequence
agaattgcaataataatat

SEQ ID NO: 180235 - DNA, 19 bp, Artificial sequence
  SiRNA target sequence
gaattgcaataataatatg

SEQ ID NO: 180236 - DNA, 19 bp, Artificial sequence
  SiRNA target sequence
aattgcaataataatatgt

SEQ ID NO: 180237 - DNA, 19 bp, Artificial sequence
  SiRNA target sequence
attgcaataataatatgtt

SEQ ID NO: 180238 - DNA, 19 bp, Artificial sequence
  SiRNA target sequence
ttgcaataataatatgttt

SEQ ID NO: 180239 - DNA, 19 bp, Artificial sequence
  SiRNA target sequence
tgcaataataatatgttta

SEQ ID NO: 180240 - DNA, 19 bp, Artificial sequence
  SiRNA target sequence
gcaataataatatgtttag

SEQ ID NO: 180241 - DNA, 19 bp, Artificial sequence
  SiRNA target sequence
caataataatatgtttagg

SEQ ID NO: 180242 - DNA, 19 bp, Artificial sequence
  SiRNA target sequence
aataataatatgtttagga

SEQ ID NO: 180243 - DNA, 19 bp, Artificial sequence
  SiRNA target sequence
ataataatatgtttaggaa

SEQ ID NO: 180244 - DNA, 19 bp, Artificial sequence
  SiRNA target sequence
taataatatgtttaggaaa

SEQ ID NO: 180245 - DNA, 19 bp, Artificial sequence
  SiRNA target sequence
aataatatgtttaggaaaa

SEQ ID NO: 180246 - DNA, 19 bp, Artificial sequence
  SiRNA target sequence
ataatatgtttaggaaaag

SEQ ID NO: 180247 - DNA, 19 bp, Artificial sequence
  SiRNA target sequence
taatatgtttaggaaaaga

SEQ ID NO: 180248 - DNA, 19 bp, Artificial sequence
  SiRNA target sequence
aatatgtttaggaaaagat

SEQ ID NO: 180249 - DNA, 19 bp, Artificial sequence
  SiRNA target sequence
atatgtttaggaaaagatg

SEQ ID NO: 180250 - DNA, 19 bp, Artificial sequence
  SiRNA target sequence
tatgtttaggaaaagatgc

SEQ ID NO: 180251 - DNA, 19 bp, Artificial sequence
  SiRNA target sequence
atgtttaggaaaagatgct

SEQ ID NO: 180252 - DNA, 19 bp, Artificial sequence
  SiRNA target sequence
tgtttaggaaaagatgcta

SEQ ID NO: 180253 - DNA, 19 bp, Artificial sequence
  SiRNA target sequence
gtttaggaaaagatgctaa

SEQ ID NO: 180254 - DNA, 19 bp, Artificial sequence
  SiRNA target sequence
tttaggaaaagatgctaac

SEQ ID NO: 180255 - DNA, 19 bp, Artificial sequence
  SiRNA target sequence
ttaggaaaagatgctaacc

SEQ ID NO: 180256 - DNA, 19 bp, Artificial sequence
  SiRNA target sequence
taggaaaagatgctaacct

SEQ ID NO: 180257 - DNA, 19 bp, Artificial sequence
  SiRNA target sequence
aggaaaagatgctaacctt

SEQ ID NO: 180258 - DNA, 19 bp, Artificial sequence
  SiRNA target sequence
ggaaaagatgctaaccttt

SEQ ID NO: 180259 - DNA, 19 bp, Artificial sequence
  SiRNA target sequence
gaaaagatgctaaccttta

SEQ ID NO: 180260 - DNA, 19 bp, Artificial sequence
  SiRNA target sequence
aaaagatgctaacctttat

SEQ ID NO: 180261 - DNA, 19 bp, Artificial sequence
  SiRNA target sequence
aaagatgctaacctttatt

SEQ ID NO: 180262 - DNA, 19 bp, Artificial sequence
  SiRNA target sequence
aagatgctaacctttattt

SEQ ID NO: 180263 - DNA, 19 bp, Artificial sequence
  SiRNA target sequence
agatgctaacctttattta

SEQ ID NO: 180264 - DNA, 19 bp, Artificial sequence
  SiRNA target sequence
gatgctaacctttatttat

SEQ ID NO: 180265 - DNA, 19 bp, Artificial sequence
  SiRNA target sequence
atgctaacctttatttatt

SEQ ID NO: 180266 - DNA, 19 bp, Artificial sequence
  SiRNA target sequence
tgctaacctttatttatta

SEQ ID NO: 180267 - DNA, 19 bp, Artificial sequence
  SiRNA target sequence
gctaacctttatttattag

SEQ ID NO: 180268 - DNA, 19 bp, Artificial sequence
  SiRNA target sequence
ctaacctttatttattaga

SEQ ID NO: 180269 - DNA, 19 bp, Artificial sequence
  SiRNA target sequence
taacctttatttattagat

SEQ ID NO: 180270 - DNA, 19 bp, Artificial sequence
  SiRNA target sequence
aacctttatttattagatg

SEQ ID NO: 180271 - DNA, 19 bp, Artificial sequence
  SiRNA target sequence
acctttatttattagatga

SEQ ID NO: 180272 - DNA, 19 bp, Artificial sequence
  SiRNA target sequence
cctttatttattagatgaa

SEQ ID NO: 180273 - DNA, 19 bp, Artificial sequence
  SiRNA target sequence
ctttatttattagatgaac

SEQ ID NO: 180274 - DNA, 19 bp, Artificial sequence
  SiRNA target sequence
tttatttattagatgaacc

SEQ ID NO: 180275 - DNA, 19 bp, Artificial sequence
  SiRNA target sequence
ttatttattagatgaacct

SEQ ID NO: 180276 - DNA, 19 bp, Artificial sequence
  SiRNA target sequence
tatttattagatgaacctt

SEQ ID NO: 180277 - DNA, 19 bp, Artificial sequence
  SiRNA target sequence
atttattagatgaaccttc

SEQ ID NO: 180278 - DNA, 19 bp, Artificial sequence
  SiRNA target sequence
tttattagatgaaccttct

SEQ ID NO: 180279 - DNA, 19 bp, Artificial sequence
  SiRNA target sequence
ttattagatgaaccttctg

SEQ ID NO: 180280 - DNA, 19 bp, Artificial sequence
  SiRNA target sequence
tattagatgaaccttctgc

SEQ ID NO: 180281 - DNA, 19 bp, Artificial sequence
  SiRNA target sequence
attagatgaaccttctgcg

SEQ ID NO: 180282 - DNA, 19 bp, Artificial sequence
  SiRNA target sequence
ttagatgaaccttctgcgt

SEQ ID NO: 180283 - DNA, 19 bp, Artificial sequence
  SiRNA target sequence
tagatgaaccttctgcgta

SEQ ID NO: 180284 - DNA, 19 bp, Artificial sequence
  SiRNA target sequence
agatgaaccttctgcgtat

SEQ ID NO: 180285 - DNA, 19 bp, Artificial sequence
  SiRNA target sequence
gatgaaccttctgcgtatc

SEQ ID NO: 180286 - DNA, 19 bp, Artificial sequence
  SiRNA target sequence
atgaaccttctgcgtatct

SEQ ID NO: 180287 - DNA, 19 bp, Artificial sequence
  SiRNA target sequence
tgaaccttctgcgtatcta

SEQ ID NO: 180288 - DNA, 19 bp, Artificial sequence
  SiRNA target sequence
gaaccttctgcgtatctag

SEQ ID NO: 180289 - DNA, 19 bp, Artificial sequence
  SiRNA target sequence
aaccttctgcgtatctaga

SEQ ID NO: 180290 - DNA, 19 bp, Artificial sequence
  SiRNA target sequence
accttctgcgtatctagat

SEQ ID NO: 180291 - DNA, 19 bp, Artificial sequence
  SiRNA target sequence
ccttctgcgtatctagatt

SEQ ID NO: 180292 - DNA, 19 bp, Artificial sequence
  SiRNA target sequence
cttctgcgtatctagattc

SEQ ID NO: 180293 - DNA, 19 bp, Artificial sequence
  SiRNA target sequence
ttctgcgtatctagattca

SEQ ID NO: 180294 - DNA, 19 bp, Artificial sequence
  SiRNA target sequence
tctgcgtatctagattcag

SEQ ID NO: 180295 - DNA, 19 bp, Artificial sequence
  SiRNA target sequence
ctgcgtatctagattcaga

SEQ ID NO: 180296 - DNA, 19 bp, Artificial sequence
  SiRNA target sequence
tgcgtatctagattcagat

SEQ ID NO: 180297 - DNA, 19 bp, Artificial sequence
  SiRNA target sequence
gcgtatctagattcagatc

SEQ ID NO: 180298 - DNA, 19 bp, Artificial sequence
  SiRNA target sequence
cgtatctagattcagatca

SEQ ID NO: 180299 - DNA, 19 bp, Artificial sequence
  SiRNA target sequence
gtatctagattcagatcag

SEQ ID NO: 180300 - DNA, 19 bp, Artificial sequence
  SiRNA target sequence
tatctagattcagatcaga

SEQ ID NO: 180301 - DNA, 19 bp, Artificial sequence
  SiRNA target sequence
atctagattcagatcagag

SEQ ID NO: 180302 - DNA, 19 bp, Artificial sequence
  SiRNA target sequence
tctagattcagatcagaga

SEQ ID NO: 180303 - DNA, 19 bp, Artificial sequence
  SiRNA target sequence
ctagattcagatcagagaa

SEQ ID NO: 180304 - DNA, 19 bp, Artificial sequence
  SiRNA target sequence
tagattcagatcagagaat

SEQ ID NO: 180305 - DNA, 19 bp, Artificial sequence
  SiRNA target sequence
agattcagatcagagaata

SEQ ID NO: 180306 - DNA, 19 bp, Artificial sequence
  SiRNA target sequence
gattcagatcagagaatag

SEQ ID NO: 180307 - DNA, 19 bp, Artificial sequence
  SiRNA target sequence
attcagatcagagaatagc

SEQ ID NO: 180308 - DNA, 19 bp, Artificial sequence
  SiRNA target sequence
ttcagatcagagaatagcg

SEQ ID NO: 180309 - DNA, 19 bp, Artificial sequence
  SiRNA target sequence
tcagatcagagaatagcga

SEQ ID NO: 180310 - DNA, 19 bp, Artificial sequence
  SiRNA target sequence
cagatcagagaatagcgat

SEQ ID NO: 180311 - DNA, 19 bp, Artificial sequence
  SiRNA target sequence
agatcagagaatagcgatt

SEQ ID NO: 180312 - DNA, 19 bp, Artificial sequence
  SiRNA target sequence
gatcagagaatagcgattt

SEQ ID NO: 180313 - DNA, 19 bp, Artificial sequence
  SiRNA target sequence
atcagagaatagcgatttc

SEQ ID NO: 180314 - DNA, 19 bp, Artificial sequence
  SiRNA target sequence
tcagagaatagcgatttca

SEQ ID NO: 180315 - DNA, 19 bp, Artificial sequence
  SiRNA target sequence
cagagaatagcgatttcaa

SEQ ID NO: 180316 - DNA, 19 bp, Artificial sequence
  SiRNA target sequence
agagaatagcgatttcaaa

SEQ ID NO: 180317 - DNA, 19 bp, Artificial sequence
  SiRNA target sequence
gagaatagcgatttcaaaa

SEQ ID NO: 180318 - DNA, 19 bp, Artificial sequence
  SiRNA target sequence
agaatagcgatttcaaaag

SEQ ID NO: 180319 - DNA, 19 bp, Artificial sequence
  SiRNA target sequence
gaatagcgatttcaaaagt

SEQ ID NO: 180320 - DNA, 19 bp, Artificial sequence
  SiRNA target sequence
aatagcgatttcaaaagtt

SEQ ID NO: 180321 - DNA, 19 bp, Artificial sequence
  SiRNA target sequence
atagcgatttcaaaagtta

SEQ ID NO: 180322 - DNA, 19 bp, Artificial sequence
  SiRNA target sequence
tagcgatttcaaaagttat

SEQ ID NO: 180323 - DNA, 19 bp, Artificial sequence
  SiRNA target sequence
agcgatttcaaaagttata

SEQ ID NO: 180324 - DNA, 19 bp, Artificial sequence
  SiRNA target sequence
gcgatttcaaaagttataa

SEQ ID NO: 180325 - DNA, 19 bp, Artificial sequence
  SiRNA target sequence
cgatttcaaaagttataaa

SEQ ID NO: 180326 - DNA, 19 bp, Artificial sequence
  SiRNA target sequence
gatttcaaaagttataaaa

SEQ ID NO: 180327 - DNA, 19 bp, Artificial sequence
  SiRNA target sequence
atttcaaaagttataaaaa

SEQ ID NO: 180328 - DNA, 19 bp, Artificial sequence
  SiRNA target sequence
tttcaaaagttataaaaag

SEQ ID NO: 180329 - DNA, 19 bp, Artificial sequence
  SiRNA target sequence
ttcaaaagttataaaaagg

SEQ ID NO: 180330 - DNA, 19 bp, Artificial sequence
  SiRNA target sequence
tcaaaagttataaaaaggt

SEQ ID NO: 180331 - DNA, 19 bp, Artificial sequence
  SiRNA target sequence
caaaagttataaaaaggtt

SEQ ID NO: 180332 - DNA, 19 bp, Artificial sequence
  SiRNA target sequence
aaaagttataaaaaggttt

SEQ ID NO: 180333 - DNA, 19 bp, Artificial sequence
  SiRNA target sequence
aaagttataaaaaggttta

SEQ ID NO: 180334 - DNA, 19 bp, Artificial sequence
  SiRNA target sequence
aagttataaaaaggtttat

SEQ ID NO: 180335 - DNA, 19 bp, Artificial sequence
  SiRNA target sequence
agttataaaaaggtttatt

SEQ ID NO: 180336 - DNA, 19 bp, Artificial sequence
  SiRNA target sequence
gttataaaaaggtttattt

SEQ ID NO: 180337 - DNA, 19 bp, Artificial sequence
  SiRNA target sequence
ttataaaaaggtttattta

SEQ ID NO: 180338 - DNA, 19 bp, Artificial sequence
  SiRNA target sequence
tataaaaaggtttatttat

SEQ ID NO: 180339 - DNA, 19 bp, Artificial sequence
  SiRNA target sequence
ataaaaaggtttatttatg

SEQ ID NO: 180340 - DNA, 19 bp, Artificial sequence
  SiRNA target sequence
taaaaaggtttatttatgg

SEQ ID NO: 180341 - DNA, 19 bp, Artificial sequence
  SiRNA target sequence
aaaaaggtttatttatggg

SEQ ID NO: 180342 - DNA, 19 bp, Artificial sequence
  SiRNA target sequence
aaaaggtttatttatggga

SEQ ID NO: 180343 - DNA, 19 bp, Artificial sequence
  SiRNA target sequence
aaaggtttatttatgggaa

SEQ ID NO: 180344 - DNA, 19 bp, Artificial sequence
  SiRNA target sequence
aaggtttatttatgggaag

SEQ ID NO: 180345 - DNA, 19 bp, Artificial sequence
  SiRNA target sequence
aggtttatttatgggaaga

SEQ ID NO: 180346 - DNA, 19 bp, Artificial sequence
  SiRNA target sequence
ggtttatttatgggaagaa

SEQ ID NO: 180347 - DNA, 19 bp, Artificial sequence
  SiRNA target sequence
gtttatttatgggaagaag

SEQ ID NO: 180348 - DNA, 19 bp, Artificial sequence
  SiRNA target sequence
tttatttatgggaagaagc

SEQ ID NO: 180349 - DNA, 19 bp, Artificial sequence
  SiRNA target sequence
ttatttatgggaagaagcg

SEQ ID NO: 180350 - DNA, 19 bp, Artificial sequence
  SiRNA target sequence
tatttatgggaagaagcga

SEQ ID NO: 180351 - DNA, 19 bp, Artificial sequence
  SiRNA target sequence
atttatgggaagaagcgaa

SEQ ID NO: 180352 - DNA, 19 bp, Artificial sequence
  SiRNA target sequence
tttatgggaagaagcgaac

SEQ ID NO: 180353 - DNA, 19 bp, Artificial sequence
  SiRNA target sequence
ttatgggaagaagcgaaca

SEQ ID NO: 180354 - DNA, 19 bp, Artificial sequence
  SiRNA target sequence
tatgggaagaagcgaacag

SEQ ID NO: 180355 - DNA, 19 bp, Artificial sequence
  SiRNA target sequence
atgggaagaagcgaacagc

SEQ ID NO: 180356 - DNA, 19 bp, Artificial sequence
  SiRNA target sequence
tgggaagaagcgaacagcc

SEQ ID NO: 180357 - DNA, 19 bp, Artificial sequence
  SiRNA target sequence
gggaagaagcgaacagcct

SEQ ID NO: 180358 - DNA, 19 bp, Artificial sequence
  SiRNA target sequence
ggaagaagcgaacagcctt

SEQ ID NO: 180359 - DNA, 19 bp, Artificial sequence
  SiRNA target sequence
gaagaagcgaacagccttt

SEQ ID NO: 180360 - DNA, 19 bp, Artificial sequence
  SiRNA target sequence
aagaagcgaacagcctttg

SEQ ID NO: 180361 - DNA, 19 bp, Artificial sequence
  SiRNA target sequence
agaagcgaacagcctttgt

SEQ ID NO: 180362 - DNA, 19 bp, Artificial sequence
  SiRNA target sequence
gaagcgaacagcctttgtg

SEQ ID NO: 180363 - DNA, 19 bp, Artificial sequence
  SiRNA target sequence
aagcgaacagcctttgtgg

SEQ ID NO: 180364 - DNA, 19 bp, Artificial sequence
  SiRNA target sequence
agcgaacagcctttgtggt

SEQ ID NO: 180365 - DNA, 19 bp, Artificial sequence
  SiRNA target sequence
gcgaacagcctttgtggtt

SEQ ID NO: 180366 - DNA, 19 bp, Artificial sequence
  SiRNA target sequence
cgaacagcctttgtggttg

SEQ ID NO: 180367 - DNA, 19 bp, Artificial sequence
  SiRNA target sequence
gaacagcctttgtggttga

SEQ ID NO: 180368 - DNA, 19 bp, Artificial sequence
  SiRNA target sequence
aacagcctttgtggttgaa

SEQ ID NO: 180369 - DNA, 19 bp, Artificial sequence
  SiRNA target sequence
acagcctttgtggttgaac

SEQ ID NO: 180370 - DNA, 19 bp, Artificial sequence
  SiRNA target sequence
cagcctttgtggttgaaca

SEQ ID NO: 180371 - DNA, 19 bp, Artificial sequence
  SiRNA target sequence
agcctttgtggttgaacat

SEQ ID NO: 180372 - DNA, 19 bp, Artificial sequence
  SiRNA target sequence
gcctttgtggttgaacatg

SEQ ID NO: 180373 - DNA, 19 bp, Artificial sequence
  SiRNA target sequence
cctttgtggttgaacatga

SEQ ID NO: 180374 - DNA, 19 bp, Artificial sequence
  SiRNA target sequence
ctttgtggttgaacatgat

SEQ ID NO: 180375 - DNA, 19 bp, Artificial sequence
  SiRNA target sequence
tttgtggttgaacatgatt

SEQ ID NO: 180376 - DNA, 19 bp, Artificial sequence
  SiRNA target sequence
ttgtggttgaacatgattt

SEQ ID NO: 180377 - DNA, 19 bp, Artificial sequence
  SiRNA target sequence
tgtggttgaacatgattta

SEQ ID NO: 180378 - DNA, 19 bp, Artificial sequence
  SiRNA target sequence
gtggttgaacatgatttaa

SEQ ID NO: 180379 - DNA, 19 bp, Artificial sequence
  SiRNA target sequence
tggttgaacatgatttaat

SEQ ID NO: 180380 - DNA, 19 bp, Artificial sequence
  SiRNA target sequence
ggttgaacatgatttaatt

SEQ ID NO: 180381 - DNA, 19 bp, Artificial sequence
  SiRNA target sequence
gttgaacatgatttaattg

SEQ ID NO: 180382 - DNA, 19 bp, Artificial sequence
  SiRNA target sequence
ttgaacatgatttaattgt

SEQ ID NO: 180383 - DNA, 19 bp, Artificial sequence
  SiRNA target sequence
tgaacatgatttaattgta

SEQ ID NO: 180384 - DNA, 19 bp, Artificial sequence
  SiRNA target sequence
gaacatgatttaattgtag

SEQ ID NO: 180385 - DNA, 19 bp, Artificial sequence
  SiRNA target sequence
aacatgatttaattgtagg

SEQ ID NO: 180386 - DNA, 19 bp, Artificial sequence
  SiRNA target sequence
acatgatttaattgtaggt

SEQ ID NO: 180387 - DNA, 19 bp, Artificial sequence
  SiRNA target sequence
catgatttaattgtaggta

SEQ ID NO: 180388 - DNA, 19 bp, Artificial sequence
  SiRNA target sequence
atgatttaattgtaggtac

SEQ ID NO: 180389 - DNA, 19 bp, Artificial sequence
  SiRNA target sequence
tgatttaattgtaggtaca

SEQ ID NO: 180390 - DNA, 19 bp, Artificial sequence
  SiRNA target sequence
gatttaattgtaggtacat

SEQ ID NO: 180391 - DNA, 19 bp, Artificial sequence
  SiRNA target sequence
atttaattgtaggtacata

SEQ ID NO: 180392 - DNA, 19 bp, Artificial sequence
  SiRNA target sequence
tttaattgtaggtacatat

SEQ ID NO: 180393 - DNA, 19 bp, Artificial sequence
  SiRNA target sequence
ttaattgtaggtacatatt

SEQ ID NO: 180394 - DNA, 19 bp, Artificial sequence
  SiRNA target sequence
taattgtaggtacatattt

SEQ ID NO: 180395 - DNA, 19 bp, Artificial sequence
  SiRNA target sequence
aattgtaggtacatatttg

SEQ ID NO: 180396 - DNA, 19 bp, Artificial sequence
  SiRNA target sequence
attgtaggtacatatttgg

SEQ ID NO: 180397 - DNA, 19 bp, Artificial sequence
  SiRNA target sequence
ttgtaggtacatatttggc

SEQ ID NO: 180398 - DNA, 19 bp, Artificial sequence
  SiRNA target sequence
tgtaggtacatatttggct

SEQ ID NO: 180399 - DNA, 19 bp, Artificial sequence
  SiRNA target sequence
gtaggtacatatttggctg

SEQ ID NO: 180400 - DNA, 19 bp, Artificial sequence
  SiRNA target sequence
taggtacatatttggctga

SEQ ID NO: 180401 - DNA, 19 bp, Artificial sequence
  SiRNA target sequence
aggtacatatttggctgat

SEQ ID NO: 180402 - DNA, 19 bp, Artificial sequence
  SiRNA target sequence
ggtacatatttggctgata

SEQ ID NO: 180403 - DNA, 19 bp, Artificial sequence
  SiRNA target sequence
gtacatatttggctgataa

SEQ ID NO: 180404 - DNA, 19 bp, Artificial sequence
  SiRNA target sequence
tacatatttggctgataaa

SEQ ID NO: 180405 - DNA, 19 bp, Artificial sequence
  SiRNA target sequence
acatatttggctgataaag

SEQ ID NO: 180406 - DNA, 19 bp, Artificial sequence
  SiRNA target sequence
catatttggctgataaagt

SEQ ID NO: 180407 - DNA, 19 bp, Artificial sequence
  SiRNA target sequence
atatttggctgataaagtt

SEQ ID NO: 180408 - DNA, 19 bp, Artificial sequence
  SiRNA target sequence
tatttggctgataaagttg

SEQ ID NO: 180409 - DNA, 19 bp, Artificial sequence
  SiRNA target sequence
atttggctgataaagttgt

SEQ ID NO: 180410 - DNA, 19 bp, Artificial sequence
  SiRNA target sequence
tttggctgataaagttgtt

SEQ ID NO: 180411 - DNA, 19 bp, Artificial sequence
  SiRNA target sequence
ttggctgataaagttgttg

SEQ ID NO: 180412 - DNA, 19 bp, Artificial sequence
  SiRNA target sequence
tggctgataaagttgttgt

SEQ ID NO: 180413 - DNA, 19 bp, Artificial sequence
  SiRNA target sequence
ggctgataaagttgttgtt

SEQ ID NO: 180414 - DNA, 19 bp, Artificial sequence
  SiRNA target sequence
gctgataaagttgttgttt

SEQ ID NO: 180415 - DNA, 19 bp, Artificial sequence
  SiRNA target sequence
ctgataaagttgttgtttt

SEQ ID NO: 180416 - DNA, 19 bp, Artificial sequence
  SiRNA target sequence
tgataaagttgttgttttt

SEQ ID NO: 180417 - DNA, 19 bp, Artificial sequence
  SiRNA target sequence
gataaagttgttgtttttg

SEQ ID NO: 180418 - DNA, 19 bp, Artificial sequence
  SiRNA target sequence
ataaagttgttgtttttga

SEQ ID NO: 180419 - DNA, 19 bp, Artificial sequence
  SiRNA target sequence
taaagttgttgtttttgag

SEQ ID NO: 180420 - DNA, 19 bp, Artificial sequence
  SiRNA target sequence
aaagttgttgtttttgagg

SEQ ID NO: 180421 - DNA, 19 bp, Artificial sequence
  SiRNA target sequence
aagttgttgtttttgaggg

SEQ ID NO: 180422 - DNA, 19 bp, Artificial sequence
  SiRNA target sequence
agttgttgtttttgaggga

SEQ ID NO: 180423 - DNA, 19 bp, Artificial sequence
  SiRNA target sequence
gttgttgtttttgagggaa

SEQ ID NO: 180424 - DNA, 19 bp, Artificial sequence
  SiRNA target sequence
ttgttgtttttgagggaag

SEQ ID NO: 180425 - DNA, 19 bp, Artificial sequence
  SiRNA target sequence
tgttgtttttgagggaagc

SEQ ID NO: 180426 - DNA, 19 bp, Artificial sequence
  SiRNA target sequence
gttgtttttgagggaagcc

SEQ ID NO: 180427 - DNA, 19 bp, Artificial sequence
  SiRNA target sequence
ttgtttttgagggaagccc

SEQ ID NO: 180428 - DNA, 19 bp, Artificial sequence
  SiRNA target sequence
tgtttttgagggaagccct

SEQ ID NO: 180429 - DNA, 19 bp, Artificial sequence
  SiRNA target sequence
gtttttgagggaagcccta

SEQ ID NO: 180430 - DNA, 19 bp, Artificial sequence
  SiRNA target sequence
tttttgagggaagccctag

SEQ ID NO: 180431 - DNA, 19 bp, Artificial sequence
  SiRNA target sequence
ttttgagggaagccctagt

SEQ ID NO: 180432 - DNA, 19 bp, Artificial sequence
  SiRNA target sequence
tttgagggaagccctagtg

SEQ ID NO: 180433 - DNA, 19 bp, Artificial sequence
  SiRNA target sequence
ttgagggaagccctagtgt

SEQ ID NO: 180434 - DNA, 19 bp, Artificial sequence
  SiRNA target sequence
tgagggaagccctagtgtt

SEQ ID NO: 180435 - DNA, 19 bp, Artificial sequence
  SiRNA target sequence
gagggaagccctagtgttc

SEQ ID NO: 180436 - DNA, 19 bp, Artificial sequence
  SiRNA target sequence
agggaagccctagtgttca

SEQ ID NO: 180437 - DNA, 19 bp, Artificial sequence
  SiRNA target sequence
gggaagccctagtgttcat

SEQ ID NO: 180438 - DNA, 19 bp, Artificial sequence
  SiRNA target sequence
ggaagccctagtgttcata

SEQ ID NO: 180439 - DNA, 19 bp, Artificial sequence
  SiRNA target sequence
gaagccctagtgttcatag

SEQ ID NO: 180440 - DNA, 19 bp, Artificial sequence
  SiRNA target sequence
aagccctagtgttcatagc

SEQ ID NO: 180441 - DNA, 19 bp, Artificial sequence
  SiRNA target sequence
agccctagtgttcatagca

SEQ ID NO: 180442 - DNA, 19 bp, Artificial sequence
  SiRNA target sequence
gccctagtgttcatagcac

SEQ ID NO: 180443 - DNA, 19 bp, Artificial sequence
  SiRNA target sequence
ccctagtgttcatagcact

SEQ ID NO: 180444 - DNA, 19 bp, Artificial sequence
  SiRNA target sequence
cctagtgttcatagcactg

SEQ ID NO: 180445 - DNA, 19 bp, Artificial sequence
  SiRNA target sequence
ctagtgttcatagcactgc

SEQ ID NO: 180446 - DNA, 19 bp, Artificial sequence
  SiRNA target sequence
tagtgttcatagcactgct

SEQ ID NO: 180447 - DNA, 19 bp, Artificial sequence
  SiRNA target sequence
agtgttcatagcactgctc

SEQ ID NO: 180448 - DNA, 19 bp, Artificial sequence
  SiRNA target sequence
gtgttcatagcactgctca

SEQ ID NO: 180449 - DNA, 19 bp, Artificial sequence
  SiRNA target sequence
tgttcatagcactgctcat

SEQ ID NO: 180450 - DNA, 19 bp, Artificial sequence
  SiRNA target sequence
gttcatagcactgctcata

SEQ ID NO: 180451 - DNA, 19 bp, Artificial sequence
  SiRNA target sequence
ttcatagcactgctcataa

SEQ ID NO: 180452 - DNA, 19 bp, Artificial sequence
  SiRNA target sequence
tcatagcactgctcataaa

SEQ ID NO: 180453 - DNA, 19 bp, Artificial sequence
  SiRNA target sequence
catagcactgctcataaac

SEQ ID NO: 180454 - DNA, 19 bp, Artificial sequence
  SiRNA target sequence
atagcactgctcataaacc

SEQ ID NO: 180455 - DNA, 19 bp, Artificial sequence
  SiRNA target sequence
tagcactgctcataaaccg

SEQ ID NO: 180456 - DNA, 19 bp, Artificial sequence
  SiRNA target sequence
agcactgctcataaaccga

SEQ ID NO: 180457 - DNA, 19 bp, Artificial sequence
  SiRNA target sequence
gcactgctcataaaccgat

SEQ ID NO: 180458 - DNA, 19 bp, Artificial sequence
  SiRNA target sequence
cactgctcataaaccgatg

SEQ ID NO: 180459 - DNA, 19 bp, Artificial sequence
  SiRNA target sequence
actgctcataaaccgatgg

SEQ ID NO: 180460 - DNA, 19 bp, Artificial sequence
  SiRNA target sequence
ctgctcataaaccgatgga

SEQ ID NO: 180461 - DNA, 19 bp, Artificial sequence
  SiRNA target sequence
tgctcataaaccgatggat

SEQ ID NO: 180462 - DNA, 19 bp, Artificial sequence
  SiRNA target sequence
gctcataaaccgatggatt

SEQ ID NO: 180463 - DNA, 19 bp, Artificial sequence
  SiRNA target sequence
ctcataaaccgatggattt

SEQ ID NO: 180464 - DNA, 19 bp, Artificial sequence
  SiRNA target sequence
tcataaaccgatggatttg

SEQ ID NO: 180465 - DNA, 19 bp, Artificial sequence
  SiRNA target sequence
cataaaccgatggatttgc

SEQ ID NO: 180466 - DNA, 19 bp, Artificial sequence
  SiRNA target sequence
ataaaccgatggatttgca

SEQ ID NO: 180467 - DNA, 19 bp, Artificial sequence
  SiRNA target sequence
taaaccgatggatttgcat

SEQ ID NO: 180468 - DNA, 19 bp, Artificial sequence
  SiRNA target sequence
aaaccgatggatttgcata

SEQ ID NO: 180469 - DNA, 19 bp, Artificial sequence
  SiRNA target sequence
aaccgatggatttgcatag

SEQ ID NO: 180470 - DNA, 19 bp, Artificial sequence
  SiRNA target sequence
accgatggatttgcatagt

SEQ ID NO: 180471 - DNA, 19 bp, Artificial sequence
  SiRNA target sequence
ccgatggatttgcatagtg

SEQ ID NO: 180472 - DNA, 19 bp, Artificial sequence
  SiRNA target sequence
cgatggatttgcatagtgg

SEQ ID NO: 180473 - DNA, 19 bp, Artificial sequence
  SiRNA target sequence
gatggatttgcatagtgga

SEQ ID NO: 180474 - DNA, 19 bp, Artificial sequence
  SiRNA target sequence
atggatttgcatagtggaa

SEQ ID NO: 180475 - DNA, 19 bp, Artificial sequence
  SiRNA target sequence
tggatttgcatagtggaat

SEQ ID NO: 180476 - DNA, 19 bp, Artificial sequence
  SiRNA target sequence
ggatttgcatagtggaatg

SEQ ID NO: 180477 - DNA, 19 bp, Artificial sequence
  SiRNA target sequence
gatttgcatagtggaatga

SEQ ID NO: 180478 - DNA, 19 bp, Artificial sequence
  SiRNA target sequence
atttgcatagtggaatgaa

SEQ ID NO: 180479 - DNA, 19 bp, Artificial sequence
  SiRNA target sequence
tttgcatagtggaatgaat

SEQ ID NO: 180480 - DNA, 19 bp, Artificial sequence
  SiRNA target sequence
ttgcatagtggaatgaata

SEQ ID NO: 180481 - DNA, 19 bp, Artificial sequence
  SiRNA target sequence
tgcatagtggaatgaatat

SEQ ID NO: 180482 - DNA, 19 bp, Artificial sequence
  SiRNA target sequence
gcatagtggaatgaatatt

SEQ ID NO: 180483 - DNA, 19 bp, Artificial sequence
  SiRNA target sequence
catagtggaatgaatattt

SEQ ID NO: 180484 - DNA, 19 bp, Artificial sequence
  SiRNA target sequence
atagtggaatgaatatttt

SEQ ID NO: 180485 - DNA, 19 bp, Artificial sequence
  SiRNA target sequence
tagtggaatgaatattttt

SEQ ID NO: 180486 - DNA, 19 bp, Artificial sequence
  SiRNA target sequence
agtggaatgaatatttttt

SEQ ID NO: 180487 - DNA, 19 bp, Artificial sequence
  SiRNA target sequence
gtggaatgaatattttttt

SEQ ID NO: 180488 - DNA, 19 bp, Artificial sequence
  SiRNA target sequence
tggaatgaatattttttta

SEQ ID NO: 180489 - DNA, 19 bp, Artificial sequence
  SiRNA target sequence
ggaatgaatatttttttaa

SEQ ID NO: 180490 - DNA, 19 bp, Artificial sequence
  SiRNA target sequence
gaatgaatatttttttaaa

SEQ ID NO: 180491 - DNA, 19 bp, Artificial sequence
  SiRNA target sequence
aatgaatatttttttaaag

SEQ ID NO: 180492 - DNA, 19 bp, Artificial sequence
  SiRNA target sequence
atgaatatttttttaaaga

SEQ ID NO: 180493 - DNA, 19 bp, Artificial sequence
  SiRNA target sequence
tgaatatttttttaaagaa

SEQ ID NO: 180494 - DNA, 19 bp, Artificial sequence
  SiRNA target sequence
gaatatttttttaaagaat

SEQ ID NO: 180495 - DNA, 19 bp, Artificial sequence
  SiRNA target sequence
aatatttttttaaagaatc

SEQ ID NO: 180496 - DNA, 19 bp, Artificial sequence
  SiRNA target sequence
atatttttttaaagaatct

SEQ ID NO: 180497 - DNA, 19 bp, Artificial sequence
  SiRNA target sequence
tatttttttaaagaatctt

SEQ ID NO: 180498 - DNA, 19 bp, Artificial sequence
  SiRNA target sequence
atttttttaaagaatcttg

SEQ ID NO: 180499 - DNA, 19 bp, Artificial sequence
  SiRNA target sequence
tttttttaaagaatcttga

SEQ ID NO: 180500 - DNA, 19 bp, Artificial sequence
  SiRNA target sequence
ttttttaaagaatcttgat

SEQ ID NO: 180501 - DNA, 19 bp, Artificial sequence
  SiRNA target sequence
tttttaaagaatcttgata

SEQ ID NO: 180502 - DNA, 19 bp, Artificial sequence
  SiRNA target sequence
ttttaaagaatcttgatat

SEQ ID NO: 180503 - DNA, 19 bp, Artificial sequence
  SiRNA target sequence
tttaaagaatcttgatatt

SEQ ID NO: 180504 - DNA, 19 bp, Artificial sequence
  SiRNA target sequence
ttaaagaatcttgatatta

SEQ ID NO: 180505 - DNA, 19 bp, Artificial sequence
  SiRNA target sequence
taaagaatcttgatattac

SEQ ID NO: 180506 - DNA, 19 bp, Artificial sequence
  SiRNA target sequence
aaagaatcttgatattact

SEQ ID NO: 180507 - DNA, 19 bp, Artificial sequence
  SiRNA target sequence
aagaatcttgatattactt

SEQ ID NO: 180508 - DNA, 19 bp, Artificial sequence
  SiRNA target sequence
agaatcttgatattacttt

SEQ ID NO: 180509 - DNA, 19 bp, Artificial sequence
  SiRNA target sequence
gaatcttgatattactttt

SEQ ID NO: 180510 - DNA, 19 bp, Artificial sequence
  SiRNA target sequence
aatcttgatattactttta

SEQ ID NO: 180511 - DNA, 19 bp, Artificial sequence
  SiRNA target sequence
atcttgatattacttttag

SEQ ID NO: 180512 - DNA, 19 bp, Artificial sequence
  SiRNA target sequence
tcttgatattacttttaga

SEQ ID NO: 180513 - DNA, 19 bp, Artificial sequence
  SiRNA target sequence
cttgatattacttttagaa

SEQ ID NO: 180514 - DNA, 19 bp, Artificial sequence
  SiRNA target sequence
ttgatattacttttagaag

SEQ ID NO: 180515 - DNA, 19 bp, Artificial sequence
  SiRNA target sequence
tgatattacttttagaaga

SEQ ID NO: 180516 - DNA, 19 bp, Artificial sequence
  SiRNA target sequence
gatattacttttagaagag

SEQ ID NO: 180517 - DNA, 19 bp, Artificial sequence
  SiRNA target sequence
atattacttttagaagaga

SEQ ID NO: 180518 - DNA, 19 bp, Artificial sequence
  SiRNA target sequence
tattacttttagaagagac

SEQ ID NO: 180519 - DNA, 19 bp, Artificial sequence
  SiRNA target sequence
attacttttagaagagact

SEQ ID NO: 180520 - DNA, 19 bp, Artificial sequence
  SiRNA target sequence
ttacttttagaagagactc

SEQ ID NO: 180521 - DNA, 19 bp, Artificial sequence
  SiRNA target sequence
tacttttagaagagactct

SEQ ID NO: 180522 - DNA, 19 bp, Artificial sequence
  SiRNA target sequence
acttttagaagagactctt

SEQ ID NO: 180523 - DNA, 19 bp, Artificial sequence
  SiRNA target sequence
cttttagaagagactcttc

SEQ ID NO: 180524 - DNA, 19 bp, Artificial sequence
  SiRNA target sequence
ttttagaagagactcttcc

SEQ ID NO: 180525 - DNA, 19 bp, Artificial sequence
  SiRNA target sequence
tttagaagagactcttcca

SEQ ID NO: 180526 - DNA, 19 bp, Artificial sequence
  SiRNA target sequence
ttagaagagactcttccaa

SEQ ID NO: 180527 - DNA, 19 bp, Artificial sequence
  SiRNA target sequence
tagaagagactcttccaat

SEQ ID NO: 180528 - DNA, 19 bp, Artificial sequence
  SiRNA target sequence
agaagagactcttccaatt

SEQ ID NO: 180529 - DNA, 19 bp, Artificial sequence
  SiRNA target sequence
gaagagactcttccaattt

SEQ ID NO: 180530 - DNA, 19 bp, Artificial sequence
  SiRNA target sequence
aagagactcttccaatttt

SEQ ID NO: 180531 - DNA, 19 bp, Artificial sequence
  SiRNA target sequence
agagactcttccaatttta

SEQ ID NO: 180532 - DNA, 19 bp, Artificial sequence
  SiRNA target sequence
gagactcttccaattttag

SEQ ID NO: 180533 - DNA, 19 bp, Artificial sequence
  SiRNA target sequence
agactcttccaattttaga

SEQ ID NO: 180534 - DNA, 19 bp, Artificial sequence
  SiRNA target sequence
gactcttccaattttagac

SEQ ID NO: 180535 - DNA, 19 bp, Artificial sequence
  SiRNA target sequence
actcttccaattttagacc

SEQ ID NO: 180536 - DNA, 19 bp, Artificial sequence
  SiRNA target sequence
ctcttccaattttagacca

SEQ ID NO: 180537 - DNA, 19 bp, Artificial sequence
  SiRNA target sequence
tcttccaattttagaccaa

SEQ ID NO: 180538 - DNA, 19 bp, Artificial sequence
  SiRNA target sequence
cttccaattttagaccaag

SEQ ID NO: 180539 - DNA, 19 bp, Artificial sequence
  SiRNA target sequence
ttccaattttagaccaaga

SEQ ID NO: 180540 - DNA, 19 bp, Artificial sequence
  SiRNA target sequence
tccaattttagaccaagag

SEQ ID NO: 180541 - DNA, 19 bp, Artificial sequence
  SiRNA target sequence
ccaattttagaccaagagt

SEQ ID NO: 180542 - DNA, 19 bp, Artificial sequence
  SiRNA target sequence
caattttagaccaagagtt

SEQ ID NO: 180543 - DNA, 19 bp, Artificial sequence
  SiRNA target sequence
aattttagaccaagagtta

SEQ ID NO: 180544 - DNA, 19 bp, Artificial sequence
  SiRNA target sequence
attttagaccaagagttaa

SEQ ID NO: 180545 - DNA, 19 bp, Artificial sequence
  SiRNA target sequence
ttttagaccaagagttaat

SEQ ID NO: 180546 - DNA, 19 bp, Artificial sequence
  SiRNA target sequence
tttagaccaagagttaata

SEQ ID NO: 180547 - DNA, 19 bp, Artificial sequence
  SiRNA target sequence
ttagaccaagagttaataa

SEQ ID NO: 180548 - DNA, 19 bp, Artificial sequence
  SiRNA target sequence
tagaccaagagttaataag

SEQ ID NO: 180549 - DNA, 19 bp, Artificial sequence
  SiRNA target sequence
agaccaagagttaataagc

SEQ ID NO: 180550 - DNA, 19 bp, Artificial sequence
  SiRNA target sequence
gaccaagagttaataagcc

SEQ ID NO: 180551 - DNA, 19 bp, Artificial sequence
  SiRNA target sequence
accaagagttaataagccg

SEQ ID NO: 180552 - DNA, 19 bp, Artificial sequence
  SiRNA target sequence
ccaagagttaataagccga

SEQ ID NO: 180553 - DNA, 19 bp, Artificial sequence
  SiRNA target sequence
caagagttaataagccgaa

SEQ ID NO: 180554 - DNA, 19 bp, Artificial sequence
  SiRNA target sequence
aagagttaataagccgaat

SEQ ID NO: 180555 - DNA, 19 bp, Artificial sequence
  SiRNA target sequence
agagttaataagccgaatt

SEQ ID NO: 180556 - DNA, 19 bp, Artificial sequence
  SiRNA target sequence
gagttaataagccgaattc

SEQ ID NO: 180557 - DNA, 19 bp, Artificial sequence
  SiRNA target sequence
agttaataagccgaattcc

SEQ ID NO: 180558 - DNA, 19 bp, Artificial sequence
  SiRNA target sequence
gttaataagccgaattccg

SEQ ID NO: 180559 - DNA, 19 bp, Artificial sequence
  SiRNA target sequence
ttaataagccgaattccgc

SEQ ID NO: 180560 - DNA, 19 bp, Artificial sequence
  SiRNA target sequence
taataagccgaattccgca

SEQ ID NO: 180561 - DNA, 19 bp, Artificial sequence
  SiRNA target sequence
aataagccgaattccgcaa

SEQ ID NO: 180562 - DNA, 19 bp, Artificial sequence
  SiRNA target sequence
ataagccgaattccgcaaa

SEQ ID NO: 180563 - DNA, 19 bp, Artificial sequence
  SiRNA target sequence
taagccgaattccgcaaaa

SEQ ID NO: 180564 - DNA, 19 bp, Artificial sequence
  SiRNA target sequence
aagccgaattccgcaaaag

SEQ ID NO: 180565 - DNA, 19 bp, Artificial sequence
  SiRNA target sequence
agccgaattccgcaaaaga

SEQ ID NO: 180566 - DNA, 19 bp, Artificial sequence
  SiRNA target sequence
gccgaattccgcaaaagac

SEQ ID NO: 180567 - DNA, 19 bp, Artificial sequence
  SiRNA target sequence
ccgaattccgcaaaagaca

SEQ ID NO: 180568 - DNA, 19 bp, Artificial sequence
  SiRNA target sequence
cgaattccgcaaaagacag

SEQ ID NO: 180569 - DNA, 19 bp, Artificial sequence
  SiRNA target sequence
gaattccgcaaaagacaga

SEQ ID NO: 180570 - DNA, 19 bp, Artificial sequence
  SiRNA target sequence
aattccgcaaaagacagaa

SEQ ID NO: 180571 - DNA, 19 bp, Artificial sequence
  SiRNA target sequence
attccgcaaaagacagaac

SEQ ID NO: 180572 - DNA, 19 bp, Artificial sequence
  SiRNA target sequence
ttccgcaaaagacagaact

SEQ ID NO: 180573 - DNA, 19 bp, Artificial sequence
  SiRNA target sequence
tccgcaaaagacagaactc

SEQ ID NO: 180574 - DNA, 19 bp, Artificial sequence
  SiRNA target sequence
ccgcaaaagacagaactca

SEQ ID NO: 180575 - DNA, 19 bp, Artificial sequence
  SiRNA target sequence
cgcaaaagacagaactcag

SEQ ID NO: 180576 - DNA, 19 bp, Artificial sequence
  SiRNA target sequence
gcaaaagacagaactcaga

SEQ ID NO: 180577 - DNA, 19 bp, Artificial sequence
  SiRNA target sequence
caaaagacagaactcagaa

SEQ ID NO: 180578 - DNA, 19 bp, Artificial sequence
  SiRNA target sequence
aaaagacagaactcagaaa

SEQ ID NO: 180579 - DNA, 19 bp, Artificial sequence
  SiRNA target sequence
aaagacagaactcagaaag

SEQ ID NO: 180580 - DNA, 19 bp, Artificial sequence
  SiRNA target sequence
aagacagaactcagaaaga

SEQ ID NO: 180581 - DNA, 19 bp, Artificial sequence
  SiRNA target sequence
agacagaactcagaaagaa

SEQ ID NO: 180582 - DNA, 19 bp, Artificial sequence
  SiRNA target sequence
gacagaactcagaaagaag

SEQ ID NO: 180583 - DNA, 19 bp, Artificial sequence
  SiRNA target sequence
acagaactcagaaagaaga

SEQ ID NO: 180584 - DNA, 19 bp, Artificial sequence
  SiRNA target sequence
cagaactcagaaagaagag

SEQ ID NO: 180585 - DNA, 19 bp, Artificial sequence
  SiRNA target sequence
agaactcagaaagaagaga

SEQ ID NO: 180586 - DNA, 19 bp, Artificial sequence
  SiRNA target sequence
gaactcagaaagaagagaa

SEQ ID NO: 180587 - DNA, 19 bp, Artificial sequence
  SiRNA target sequence
aactcagaaagaagagaat

SEQ ID NO: 180588 - DNA, 19 bp, Artificial sequence
  SiRNA target sequence
actcagaaagaagagaata

SEQ ID NO: 180589 - DNA, 19 bp, Artificial sequence
  SiRNA target sequence
ctcagaaagaagagaataa

SEQ ID NO: 180590 - DNA, 19 bp, Artificial sequence
  SiRNA target sequence
tcagaaagaagagaataaa

SEQ ID NO: 180591 - DNA, 19 bp, Artificial sequence
  SiRNA target sequence
cagaaagaagagaataaat

SEQ ID NO: 180592 - DNA, 19 bp, Artificial sequence
  SiRNA target sequence
agaaagaagagaataaata

SEQ ID NO: 180593 - DNA, 19 bp, Artificial sequence
  SiRNA target sequence
gaaagaagagaataaatat

SEQ ID NO: 180594 - DNA, 19 bp, Artificial sequence
  SiRNA target sequence
aaagaagagaataaatatt

SEQ ID NO: 180595 - DNA, 19 bp, Artificial sequence
  SiRNA target sequence
aagaagagaataaatattt

SEQ ID NO: 180596 - DNA, 19 bp, Artificial sequence
  SiRNA target sequence
agaagagaataaatatttt

SEQ ID NO: 180597 - DNA, 19 bp, Artificial sequence
  SiRNA target sequence
gaagagaataaatattttt

SEQ ID NO: 180598 - DNA, 19 bp, Artificial sequence
  SiRNA target sequence
aagagaataaatatttttt

SEQ ID NO: 180599 - DNA, 19 bp, Artificial sequence
  SiRNA target sequence
agagaataaatattttttt

SEQ ID NO: 180600 - DNA, 19 bp, Artificial sequence
  SiRNA target sequence
gagaataaatatttttttt

SEQ ID NO: 180601 - DNA, 19 bp, Artificial sequence
  SiRNA target sequence
agaataaatattttttttg

SEQ ID NO: 180602 - DNA, 19 bp, Artificial sequence
  SiRNA target sequence
gaataaatattttttttga

SEQ ID NO: 180603 - DNA, 20 bp, Artificial sequence
  SiRNA target sequence
atggccaagaatgaatctaa

SEQ ID NO: 180604 - DNA, 20 bp, Artificial sequence
  SiRNA target sequence
tggccaagaatgaatctaat

SEQ ID NO: 180605 - DNA, 20 bp, Artificial sequence
  SiRNA target sequence
ggccaagaatgaatctaata

SEQ ID NO: 180606 - DNA, 20 bp, Artificial sequence
  SiRNA target sequence
gccaagaatgaatctaataa

SEQ ID NO: 180607 - DNA, 20 bp, Artificial sequence
  SiRNA target sequence
ccaagaatgaatctaataaa

SEQ ID NO: 180608 - DNA, 20 bp, Artificial sequence
  SiRNA target sequence
caagaatgaatctaataaaa

SEQ ID NO: 180609 - DNA, 20 bp, Artificial sequence
  SiRNA target sequence
aagaatgaatctaataaaat

SEQ ID NO: 180610 - DNA, 20 bp, Artificial sequence
  SiRNA target sequence
agaatgaatctaataaaata

SEQ ID NO: 180611 - DNA, 20 bp, Artificial sequence
  SiRNA target sequence
gaatgaatctaataaaataa

SEQ ID NO: 180612 - DNA, 20 bp, Artificial sequence
  SiRNA target sequence
aatgaatctaataaaataac

SEQ ID NO: 180613 - DNA, 20 bp, Artificial sequence
  SiRNA target sequence
atgaatctaataaaataacg

SEQ ID NO: 180614 - DNA, 20 bp, Artificial sequence
  SiRNA target sequence
tgaatctaataaaataacga

SEQ ID NO: 180615 - DNA, 20 bp, Artificial sequence
  SiRNA target sequence
gaatctaataaaataacgag

SEQ ID NO: 180616 - DNA, 20 bp, Artificial sequence
  SiRNA target sequence
aatctaataaaataacgaga

SEQ ID NO: 180617 - DNA, 20 bp, Artificial sequence
  SiRNA target sequence
atctaataaaataacgagac

SEQ ID NO: 180618 - DNA, 20 bp, Artificial sequence
  SiRNA target sequence
tctaataaaataacgagact

SEQ ID NO: 180619 - DNA, 20 bp, Artificial sequence
  SiRNA target sequence
ctaataaaataacgagactg

SEQ ID NO: 180620 - DNA, 20 bp, Artificial sequence
  SiRNA target sequence
taataaaataacgagactgg

SEQ ID NO: 180621 - DNA, 20 bp, Artificial sequence
  SiRNA target sequence
aataaaataacgagactggc

SEQ ID NO: 180622 - DNA, 20 bp, Artificial sequence
  SiRNA target sequence
ataaaataacgagactggca

SEQ ID NO: 180623 - DNA, 20 bp, Artificial sequence
  SiRNA target sequence
taaaataacgagactggcaa

SEQ ID NO: 180624 - DNA, 20 bp, Artificial sequence
  SiRNA target sequence
aaaataacgagactggcaat

SEQ ID NO: 180625 - DNA, 20 bp, Artificial sequence
  SiRNA target sequence
aaataacgagactggcaatt

SEQ ID NO: 180626 - DNA, 20 bp, Artificial sequence
  SiRNA target sequence
aataacgagactggcaattg

SEQ ID NO: 180627 - DNA, 20 bp, Artificial sequence
  SiRNA target sequence
ataacgagactggcaattgt

SEQ ID NO: 180628 - DNA, 20 bp, Artificial sequence
  SiRNA target sequence
taacgagactggcaattgtt

SEQ ID NO: 180629 - DNA, 20 bp, Artificial sequence
  SiRNA target sequence
aacgagactggcaattgtta

SEQ ID NO: 180630 - DNA, 20 bp, Artificial sequence
  SiRNA target sequence
acgagactggcaattgttaa

SEQ ID NO: 180631 - DNA, 20 bp, Artificial sequence
  SiRNA target sequence
cgagactggcaattgttaat

SEQ ID NO: 180632 - DNA, 20 bp, Artificial sequence
  SiRNA target sequence
gagactggcaattgttaatt

SEQ ID NO: 180633 - DNA, 20 bp, Artificial sequence
  SiRNA target sequence
agactggcaattgttaatta

SEQ ID NO: 180634 - DNA, 20 bp, Artificial sequence
  SiRNA target sequence
gactggcaattgttaattat

SEQ ID NO: 180635 - DNA, 20 bp, Artificial sequence
  SiRNA target sequence
actggcaattgttaattatg

SEQ ID NO: 180636 - DNA, 20 bp, Artificial sequence
  SiRNA target sequence
ctggcaattgttaattatga

SEQ ID NO: 180637 - DNA, 20 bp, Artificial sequence
  SiRNA target sequence
tggcaattgttaattatgaa

SEQ ID NO: 180638 - DNA, 20 bp, Artificial sequence
  SiRNA target sequence
ggcaattgttaattatgaac

SEQ ID NO: 180639 - DNA, 20 bp, Artificial sequence
  SiRNA target sequence
gcaattgttaattatgaact

SEQ ID NO: 180640 - DNA, 20 bp, Artificial sequence
  SiRNA target sequence
caattgttaattatgaacta

SEQ ID NO: 180641 - DNA, 20 bp, Artificial sequence
  SiRNA target sequence
aattgttaattatgaactat

SEQ ID NO: 180642 - DNA, 20 bp, Artificial sequence
  SiRNA target sequence
attgttaattatgaactatg

SEQ ID NO: 180643 - DNA, 20 bp, Artificial sequence
  SiRNA target sequence
ttgttaattatgaactatgt

SEQ ID NO: 180644 - DNA, 20 bp, Artificial sequence
  SiRNA target sequence
tgttaattatgaactatgta

SEQ ID NO: 180645 - DNA, 20 bp, Artificial sequence
  SiRNA target sequence
gttaattatgaactatgtaa

SEQ ID NO: 180646 - DNA, 20 bp, Artificial sequence
  SiRNA target sequence
ttaattatgaactatgtaaa

SEQ ID NO: 180647 - DNA, 20 bp, Artificial sequence
  SiRNA target sequence
taattatgaactatgtaaac

SEQ ID NO: 180648 - DNA, 20 bp, Artificial sequence
  SiRNA target sequence
aattatgaactatgtaaacc

SEQ ID NO: 180649 - DNA, 20 bp, Artificial sequence
  SiRNA target sequence
attatgaactatgtaaaccg

SEQ ID NO: 180650 - DNA, 20 bp, Artificial sequence
  SiRNA target sequence
ttatgaactatgtaaaccga

SEQ ID NO: 180651 - DNA, 20 bp, Artificial sequence
  SiRNA target sequence
tatgaactatgtaaaccgaa

SEQ ID NO: 180652 - DNA, 20 bp, Artificial sequence
  SiRNA target sequence
atgaactatgtaaaccgaag

SEQ ID NO: 180653 - DNA, 20 bp, Artificial sequence
  SiRNA target sequence
tgaactatgtaaaccgaagg

SEQ ID NO: 180654 - DNA, 20 bp, Artificial sequence
  SiRNA target sequence
gaactatgtaaaccgaagga

SEQ ID NO: 180655 - DNA, 20 bp, Artificial sequence
  SiRNA target sequence
aactatgtaaaccgaaggaa

SEQ ID NO: 180656 - DNA, 20 bp, Artificial sequence
  SiRNA target sequence
actatgtaaaccgaaggaat

SEQ ID NO: 180657 - DNA, 20 bp, Artificial sequence
  SiRNA target sequence
ctatgtaaaccgaaggaatg

SEQ ID NO: 180658 - DNA, 20 bp, Artificial sequence
  SiRNA target sequence
tatgtaaaccgaaggaatgt

SEQ ID NO: 180659 - DNA, 20 bp, Artificial sequence
  SiRNA target sequence
atgtaaaccgaaggaatgta

SEQ ID NO: 180660 - DNA, 20 bp, Artificial sequence
  SiRNA target sequence
tgtaaaccgaaggaatgtat

SEQ ID NO: 180661 - DNA, 20 bp, Artificial sequence
  SiRNA target sequence
gtaaaccgaaggaatgtatg

SEQ ID NO: 180662 - DNA, 20 bp, Artificial sequence
  SiRNA target sequence
taaaccgaaggaatgtatgt

SEQ ID NO: 180663 - DNA, 20 bp, Artificial sequence
  SiRNA target sequence
aaaccgaaggaatgtatgtc

SEQ ID NO: 180664 - DNA, 20 bp, Artificial sequence
  SiRNA target sequence
aaccgaaggaatgtatgtca

SEQ ID NO: 180665 - DNA, 20 bp, Artificial sequence
  SiRNA target sequence
accgaaggaatgtatgtcag

SEQ ID NO: 180666 - DNA, 20 bp, Artificial sequence
  SiRNA target sequence
ccgaaggaatgtatgtcaga

SEQ ID NO: 180667 - DNA, 20 bp, Artificial sequence
  SiRNA target sequence
cgaaggaatgtatgtcagaa

SEQ ID NO: 180668 - DNA, 20 bp, Artificial sequence
  SiRNA target sequence
gaaggaatgtatgtcagaat

SEQ ID NO: 180669 - DNA, 20 bp, Artificial sequence
  SiRNA target sequence
aaggaatgtatgtcagaatg

SEQ ID NO: 180670 - DNA, 20 bp, Artificial sequence
  SiRNA target sequence
aggaatgtatgtcagaatgt

SEQ ID NO: 180671 - DNA, 20 bp, Artificial sequence
  SiRNA target sequence
ggaatgtatgtcagaatgta

SEQ ID NO: 180672 - DNA, 20 bp, Artificial sequence
  SiRNA target sequence
gaatgtatgtcagaatgtaa

SEQ ID NO: 180673 - DNA, 20 bp, Artificial sequence
  SiRNA target sequence
aatgtatgtcagaatgtaaa

SEQ ID NO: 180674 - DNA, 20 bp, Artificial sequence
  SiRNA target sequence
atgtatgtcagaatgtaaaa

SEQ ID NO: 180675 - DNA, 20 bp, Artificial sequence
  SiRNA target sequence
tgtatgtcagaatgtaaaaa

SEQ ID NO: 180676 - DNA, 20 bp, Artificial sequence
  SiRNA target sequence
gtatgtcagaatgtaaaaag

SEQ ID NO: 180677 - DNA, 20 bp, Artificial sequence
  SiRNA target sequence
tatgtcagaatgtaaaaagg

SEQ ID NO: 180678 - DNA, 20 bp, Artificial sequence
  SiRNA target sequence
atgtcagaatgtaaaaaggc

SEQ ID NO: 180679 - DNA, 20 bp, Artificial sequence
  SiRNA target sequence
tgtcagaatgtaaaaaggcg

SEQ ID NO: 180680 - DNA, 20 bp, Artificial sequence
  SiRNA target sequence
gtcagaatgtaaaaaggcgt

SEQ ID NO: 180681 - DNA, 20 bp, Artificial sequence
  SiRNA target sequence
tcagaatgtaaaaaggcgtg

SEQ ID NO: 180682 - DNA, 20 bp, Artificial sequence
  SiRNA target sequence
cagaatgtaaaaaggcgtgt

SEQ ID NO: 180683 - DNA, 20 bp, Artificial sequence
  SiRNA target sequence
agaatgtaaaaaggcgtgtc

SEQ ID NO: 180684 - DNA, 20 bp, Artificial sequence
  SiRNA target sequence
gaatgtaaaaaggcgtgtcc

SEQ ID NO: 180685 - DNA, 20 bp, Artificial sequence
  SiRNA target sequence
aatgtaaaaaggcgtgtcct

SEQ ID NO: 180686 - DNA, 20 bp, Artificial sequence
  SiRNA target sequence
atgtaaaaaggcgtgtcctg

SEQ ID NO: 180687 - DNA, 20 bp, Artificial sequence
  SiRNA target sequence
tgtaaaaaggcgtgtcctgt

SEQ ID NO: 180688 - DNA, 20 bp, Artificial sequence
  SiRNA target sequence
gtaaaaaggcgtgtcctgtt

SEQ ID NO: 180689 - DNA, 20 bp, Artificial sequence
  SiRNA target sequence
taaaaaggcgtgtcctgtta

SEQ ID NO: 180690 - DNA, 20 bp, Artificial sequence
  SiRNA target sequence
aaaaaggcgtgtcctgttaa

SEQ ID NO: 180691 - DNA, 20 bp, Artificial sequence
  SiRNA target sequence
aaaaggcgtgtcctgttaat

SEQ ID NO: 180692 - DNA, 20 bp, Artificial sequence
  SiRNA target sequence
aaaggcgtgtcctgttaata

SEQ ID NO: 180693 - DNA, 20 bp, Artificial sequence
  SiRNA target sequence
aaggcgtgtcctgttaataa

SEQ ID NO: 180694 - DNA, 20 bp, Artificial sequence
  SiRNA target sequence
aggcgtgtcctgttaataaa

SEQ ID NO: 180695 - DNA, 20 bp, Artificial sequence
  SiRNA target sequence
ggcgtgtcctgttaataaaa

SEQ ID NO: 180696 - DNA, 20 bp, Artificial sequence
  SiRNA target sequence
gcgtgtcctgttaataaaac

SEQ ID NO: 180697 - DNA, 20 bp, Artificial sequence
  SiRNA target sequence
cgtgtcctgttaataaaaca

SEQ ID NO: 180698 - DNA, 20 bp, Artificial sequence
  SiRNA target sequence
gtgtcctgttaataaaacag

SEQ ID NO: 180699 - DNA, 20 bp, Artificial sequence
  SiRNA target sequence
tgtcctgttaataaaacagg

SEQ ID NO: 180700 - DNA, 20 bp, Artificial sequence
  SiRNA target sequence
gtcctgttaataaaacagga

SEQ ID NO: 180701 - DNA, 20 bp, Artificial sequence
  SiRNA target sequence
tcctgttaataaaacaggaa

SEQ ID NO: 180702 - DNA, 20 bp, Artificial sequence
  SiRNA target sequence
cctgttaataaaacaggaaa

SEQ ID NO: 180703 - DNA, 20 bp, Artificial sequence
  SiRNA target sequence
ctgttaataaaacaggaaag

SEQ ID NO: 180704 - DNA, 20 bp, Artificial sequence
  SiRNA target sequence
tgttaataaaacaggaaagg

SEQ ID NO: 180705 - DNA, 20 bp, Artificial sequence
  SiRNA target sequence
gttaataaaacaggaaagga

SEQ ID NO: 180706 - DNA, 20 bp, Artificial sequence
  SiRNA target sequence
ttaataaaacaggaaaggag

SEQ ID NO: 180707 - DNA, 20 bp, Artificial sequence
  SiRNA target sequence
taataaaacaggaaaggagt

SEQ ID NO: 180708 - DNA, 20 bp, Artificial sequence
  SiRNA target sequence
aataaaacaggaaaggagtg

SEQ ID NO: 180709 - DNA, 20 bp, Artificial sequence
  SiRNA target sequence
ataaaacaggaaaggagtgt

SEQ ID NO: 180710 - DNA, 20 bp, Artificial sequence
  SiRNA target sequence
taaaacaggaaaggagtgta

SEQ ID NO: 180711 - DNA, 20 bp, Artificial sequence
  SiRNA target sequence
aaaacaggaaaggagtgtat

SEQ ID NO: 180712 - DNA, 20 bp, Artificial sequence
  SiRNA target sequence
aaacaggaaaggagtgtatt

SEQ ID NO: 180713 - DNA, 20 bp, Artificial sequence
  SiRNA target sequence
aacaggaaaggagtgtatta

SEQ ID NO: 180714 - DNA, 20 bp, Artificial sequence
  SiRNA target sequence
acaggaaaggagtgtattac

SEQ ID NO: 180715 - DNA, 20 bp, Artificial sequence
  SiRNA target sequence
caggaaaggagtgtattaca

SEQ ID NO: 180716 - DNA, 20 bp, Artificial sequence
  SiRNA target sequence
aggaaaggagtgtattacaa

SEQ ID NO: 180717 - DNA, 20 bp, Artificial sequence
  SiRNA target sequence
ggaaaggagtgtattacaat

SEQ ID NO: 180718 - DNA, 20 bp, Artificial sequence
  SiRNA target sequence
gaaaggagtgtattacaatt

SEQ ID NO: 180719 - DNA, 20 bp, Artificial sequence
  SiRNA target sequence
aaaggagtgtattacaattg

SEQ ID NO: 180720 - DNA, 20 bp, Artificial sequence
  SiRNA target sequence
aaggagtgtattacaattga

SEQ ID NO: 180721 - DNA, 20 bp, Artificial sequence
  SiRNA target sequence
aggagtgtattacaattgat

SEQ ID NO: 180722 - DNA, 20 bp, Artificial sequence
  SiRNA target sequence
ggagtgtattacaattgata

SEQ ID NO: 180723 - DNA, 20 bp, Artificial sequence
  SiRNA target sequence
gagtgtattacaattgatac

SEQ ID NO: 180724 - DNA, 20 bp, Artificial sequence
  SiRNA target sequence
agtgtattacaattgatact

SEQ ID NO: 180725 - DNA, 20 bp, Artificial sequence
  SiRNA target sequence
gtgtattacaattgatacta

SEQ ID NO: 180726 - DNA, 20 bp, Artificial sequence
  SiRNA target sequence
tgtattacaattgatactaa

SEQ ID NO: 180727 - DNA, 20 bp, Artificial sequence
  SiRNA target sequence
gtattacaattgatactaaa

SEQ ID NO: 180728 - DNA, 20 bp, Artificial sequence
  SiRNA target sequence
tattacaattgatactaaat

SEQ ID NO: 180729 - DNA, 20 bp, Artificial sequence
  SiRNA target sequence
attacaattgatactaaatc

SEQ ID NO: 180730 - DNA, 20 bp, Artificial sequence
  SiRNA target sequence
ttacaattgatactaaatca

SEQ ID NO: 180731 - DNA, 20 bp, Artificial sequence
  SiRNA target sequence
tacaattgatactaaatcac

SEQ ID NO: 180732 - DNA, 20 bp, Artificial sequence
  SiRNA target sequence
acaattgatactaaatcaca

SEQ ID NO: 180733 - DNA, 20 bp, Artificial sequence
  SiRNA target sequence
caattgatactaaatcacat

SEQ ID NO: 180734 - DNA, 20 bp, Artificial sequence
  SiRNA target sequence
aattgatactaaatcacata

SEQ ID NO: 180735 - DNA, 20 bp, Artificial sequence
  SiRNA target sequence
attgatactaaatcacatat

SEQ ID NO: 180736 - DNA, 20 bp, Artificial sequence
  SiRNA target sequence
ttgatactaaatcacatatc

SEQ ID NO: 180737 - DNA, 20 bp, Artificial sequence
  SiRNA target sequence
tgatactaaatcacatatct

SEQ ID NO: 180738 - DNA, 20 bp, Artificial sequence
  SiRNA target sequence
gatactaaatcacatatctc

SEQ ID NO: 180739 - DNA, 20 bp, Artificial sequence
  SiRNA target sequence
atactaaatcacatatctca

SEQ ID NO: 180740 - DNA, 20 bp, Artificial sequence
  SiRNA target sequence
tactaaatcacatatctcag

SEQ ID NO: 180741 - DNA, 20 bp, Artificial sequence
  SiRNA target sequence
actaaatcacatatctcaga

SEQ ID NO: 180742 - DNA, 20 bp, Artificial sequence
  SiRNA target sequence
ctaaatcacatatctcagaa

SEQ ID NO: 180743 - DNA, 20 bp, Artificial sequence
  SiRNA target sequence
taaatcacatatctcagaaa

SEQ ID NO: 180744 - DNA, 20 bp, Artificial sequence
  SiRNA target sequence
aaatcacatatctcagaaat

SEQ ID NO: 180745 - DNA, 20 bp, Artificial sequence
  SiRNA target sequence
aatcacatatctcagaaatt

SEQ ID NO: 180746 - DNA, 20 bp, Artificial sequence
  SiRNA target sequence
atcacatatctcagaaattc

SEQ ID NO: 180747 - DNA, 20 bp, Artificial sequence
  SiRNA target sequence
tcacatatctcagaaattct

SEQ ID NO: 180748 - DNA, 20 bp, Artificial sequence
  SiRNA target sequence
cacatatctcagaaattctg

SEQ ID NO: 180749 - DNA, 20 bp, Artificial sequence
  SiRNA target sequence
acatatctcagaaattctgt

SEQ ID NO: 180750 - DNA, 20 bp, Artificial sequence
  SiRNA target sequence
catatctcagaaattctgtg

SEQ ID NO: 180751 - DNA, 20 bp, Artificial sequence
  SiRNA target sequence
atatctcagaaattctgtgt

SEQ ID NO: 180752 - DNA, 20 bp, Artificial sequence
  SiRNA target sequence
tatctcagaaattctgtgta

SEQ ID NO: 180753 - DNA, 20 bp, Artificial sequence
  SiRNA target sequence
atctcagaaattctgtgtat

SEQ ID NO: 180754 - DNA, 20 bp, Artificial sequence
  SiRNA target sequence
tctcagaaattctgtgtata

SEQ ID NO: 180755 - DNA, 20 bp, Artificial sequence
  SiRNA target sequence
ctcagaaattctgtgtatag

SEQ ID NO: 180756 - DNA, 20 bp, Artificial sequence
  SiRNA target sequence
tcagaaattctgtgtatagg

SEQ ID NO: 180757 - DNA, 20 bp, Artificial sequence
  SiRNA target sequence
cagaaattctgtgtatagga

SEQ ID NO: 180758 - DNA, 20 bp, Artificial sequence
  SiRNA target sequence
agaaattctgtgtataggat

SEQ ID NO: 180759 - DNA, 20 bp, Artificial sequence
  SiRNA target sequence
gaaattctgtgtataggatg

SEQ ID NO: 180760 - DNA, 20 bp, Artificial sequence
  SiRNA target sequence
aaattctgtgtataggatgt

SEQ ID NO: 180761 - DNA, 20 bp, Artificial sequence
  SiRNA target sequence
aattctgtgtataggatgtt

SEQ ID NO: 180762 - DNA, 20 bp, Artificial sequence
  SiRNA target sequence
attctgtgtataggatgttc

SEQ ID NO: 180763 - DNA, 20 bp, Artificial sequence
  SiRNA target sequence
ttctgtgtataggatgttct

SEQ ID NO: 180764 - DNA, 20 bp, Artificial sequence
  SiRNA target sequence
tctgtgtataggatgttctg

SEQ ID NO: 180765 - DNA, 20 bp, Artificial sequence
  SiRNA target sequence
ctgtgtataggatgttctgc

SEQ ID NO: 180766 - DNA, 20 bp, Artificial sequence
  SiRNA target sequence
tgtgtataggatgttctgcg

SEQ ID NO: 180767 - DNA, 20 bp, Artificial sequence
  SiRNA target sequence
gtgtataggatgttctgcgt

SEQ ID NO: 180768 - DNA, 20 bp, Artificial sequence
  SiRNA target sequence
tgtataggatgttctgcgtg

SEQ ID NO: 180769 - DNA, 20 bp, Artificial sequence
  SiRNA target sequence
gtataggatgttctgcgtgt

SEQ ID NO: 180770 - DNA, 20 bp, Artificial sequence
  SiRNA target sequence
tataggatgttctgcgtgtc

SEQ ID NO: 180771 - DNA, 20 bp, Artificial sequence
  SiRNA target sequence
ataggatgttctgcgtgtca

SEQ ID NO: 180772 - DNA, 20 bp, Artificial sequence
  SiRNA target sequence
taggatgttctgcgtgtcaa

SEQ ID NO: 180773 - DNA, 20 bp, Artificial sequence
  SiRNA target sequence
aggatgttctgcgtgtcaaa

SEQ ID NO: 180774 - DNA, 20 bp, Artificial sequence
  SiRNA target sequence
ggatgttctgcgtgtcaaaa

SEQ ID NO: 180775 - DNA, 20 bp, Artificial sequence
  SiRNA target sequence
gatgttctgcgtgtcaaaag

SEQ ID NO: 180776 - DNA, 20 bp, Artificial sequence
  SiRNA target sequence
atgttctgcgtgtcaaaaga

SEQ ID NO: 180777 - DNA, 20 bp, Artificial sequence
  SiRNA target sequence
tgttctgcgtgtcaaaagaa

SEQ ID NO: 180778 - DNA, 20 bp, Artificial sequence
  SiRNA target sequence
gttctgcgtgtcaaaagaaa

SEQ ID NO: 180779 - DNA, 20 bp, Artificial sequence
  SiRNA target sequence
ttctgcgtgtcaaaagaaat

SEQ ID NO: 180780 - DNA, 20 bp, Artificial sequence
  SiRNA target sequence
tctgcgtgtcaaaagaaatg

SEQ ID NO: 180781 - DNA, 20 bp, Artificial sequence
  SiRNA target sequence
ctgcgtgtcaaaagaaatgt

SEQ ID NO: 180782 - DNA, 20 bp, Artificial sequence
  SiRNA target sequence
tgcgtgtcaaaagaaatgtc

SEQ ID NO: 180783 - DNA, 20 bp, Artificial sequence
  SiRNA target sequence
gcgtgtcaaaagaaatgtcc

SEQ ID NO: 180784 - DNA, 20 bp, Artificial sequence
  SiRNA target sequence
cgtgtcaaaagaaatgtcct

SEQ ID NO: 180785 - DNA, 20 bp, Artificial sequence
  SiRNA target sequence
gtgtcaaaagaaatgtcctt

SEQ ID NO: 180786 - DNA, 20 bp, Artificial sequence
  SiRNA target sequence
tgtcaaaagaaatgtccttt

SEQ ID NO: 180787 - DNA, 20 bp, Artificial sequence
  SiRNA target sequence
gtcaaaagaaatgtcctttt

SEQ ID NO: 180788 - DNA, 20 bp, Artificial sequence
  SiRNA target sequence
tcaaaagaaatgtcctttta

SEQ ID NO: 180789 - DNA, 20 bp, Artificial sequence
  SiRNA target sequence
caaaagaaatgtccttttaa

SEQ ID NO: 180790 - DNA, 20 bp, Artificial sequence
  SiRNA target sequence
aaaagaaatgtccttttaag

SEQ ID NO: 180791 - DNA, 20 bp, Artificial sequence
  SiRNA target sequence
aaagaaatgtccttttaagg

SEQ ID NO: 180792 - DNA, 20 bp, Artificial sequence
  SiRNA target sequence
aagaaatgtccttttaaggc

SEQ ID NO: 180793 - DNA, 20 bp, Artificial sequence
  SiRNA target sequence
agaaatgtccttttaaggcg

SEQ ID NO: 180794 - DNA, 20 bp, Artificial sequence
  SiRNA target sequence
gaaatgtccttttaaggcga

SEQ ID NO: 180795 - DNA, 20 bp, Artificial sequence
  SiRNA target sequence
aaatgtccttttaaggcgat

SEQ ID NO: 180796 - DNA, 20 bp, Artificial sequence
  SiRNA target sequence
aatgtccttttaaggcgatt

SEQ ID NO: 180797 - DNA, 20 bp, Artificial sequence
  SiRNA target sequence
atgtccttttaaggcgatta

SEQ ID NO: 180798 - DNA, 20 bp, Artificial sequence
  SiRNA target sequence
tgtccttttaaggcgattac

SEQ ID NO: 180799 - DNA, 20 bp, Artificial sequence
  SiRNA target sequence
gtccttttaaggcgattaca

SEQ ID NO: 180800 - DNA, 20 bp, Artificial sequence
  SiRNA target sequence
tccttttaaggcgattacaa

SEQ ID NO: 180801 - DNA, 20 bp, Artificial sequence
  SiRNA target sequence
ccttttaaggcgattacaat

SEQ ID NO: 180802 - DNA, 20 bp, Artificial sequence
  SiRNA target sequence
cttttaaggcgattacaatt

SEQ ID NO: 180803 - DNA, 20 bp, Artificial sequence
  SiRNA target sequence
ttttaaggcgattacaattg

SEQ ID NO: 180804 - DNA, 20 bp, Artificial sequence
  SiRNA target sequence
tttaaggcgattacaattgt

SEQ ID NO: 180805 - DNA, 20 bp, Artificial sequence
  SiRNA target sequence
ttaaggcgattacaattgta

SEQ ID NO: 180806 - DNA, 20 bp, Artificial sequence
  SiRNA target sequence
taaggcgattacaattgtaa

SEQ ID NO: 180807 - DNA, 20 bp, Artificial sequence
  SiRNA target sequence
aaggcgattacaattgtaaa

SEQ ID NO: 180808 - DNA, 20 bp, Artificial sequence
  SiRNA target sequence
aggcgattacaattgtaaat

SEQ ID NO: 180809 - DNA, 20 bp, Artificial sequence
  SiRNA target sequence
ggcgattacaattgtaaatt

SEQ ID NO: 180810 - DNA, 20 bp, Artificial sequence
  SiRNA target sequence
gcgattacaattgtaaattt

SEQ ID NO: 180811 - DNA, 20 bp, Artificial sequence
  SiRNA target sequence
cgattacaattgtaaattta

SEQ ID NO: 180812 - DNA, 20 bp, Artificial sequence
  SiRNA target sequence
gattacaattgtaaatttac

SEQ ID NO: 180813 - DNA, 20 bp, Artificial sequence
  SiRNA target sequence
attacaattgtaaatttacc

SEQ ID NO: 180814 - DNA, 20 bp, Artificial sequence
  SiRNA target sequence
ttacaattgtaaatttacct

SEQ ID NO: 180815 - DNA, 20 bp, Artificial sequence
  SiRNA target sequence
tacaattgtaaatttaccta

SEQ ID NO: 180816 - DNA, 20 bp, Artificial sequence
  SiRNA target sequence
acaattgtaaatttacctac

SEQ ID NO: 180817 - DNA, 20 bp, Artificial sequence
  SiRNA target sequence
caattgtaaatttacctaca

SEQ ID NO: 180818 - DNA, 20 bp, Artificial sequence
  SiRNA target sequence
aattgtaaatttacctacaa

SEQ ID NO: 180819 - DNA, 20 bp, Artificial sequence
  SiRNA target sequence
attgtaaatttacctacaaa

SEQ ID NO: 180820 - DNA, 20 bp, Artificial sequence
  SiRNA target sequence
ttgtaaatttacctacaaat

SEQ ID NO: 180821 - DNA, 20 bp, Artificial sequence
  SiRNA target sequence
tgtaaatttacctacaaatc

SEQ ID NO: 180822 - DNA, 20 bp, Artificial sequence
  SiRNA target sequence
gtaaatttacctacaaatct

SEQ ID NO: 180823 - DNA, 20 bp, Artificial sequence
  SiRNA target sequence
taaatttacctacaaatcta

SEQ ID NO: 180824 - DNA, 20 bp, Artificial sequence
  SiRNA target sequence
aaatttacctacaaatctag

SEQ ID NO: 180825 - DNA, 20 bp, Artificial sequence
  SiRNA target sequence
aatttacctacaaatctaga

SEQ ID NO: 180826 - DNA, 20 bp, Artificial sequence
  SiRNA target sequence
atttacctacaaatctagat

SEQ ID NO: 180827 - DNA, 20 bp, Artificial sequence
  SiRNA target sequence
tttacctacaaatctagata

SEQ ID NO: 180828 - DNA, 20 bp, Artificial sequence
  SiRNA target sequence
ttacctacaaatctagataa

SEQ ID NO: 180829 - DNA, 20 bp, Artificial sequence
  SiRNA target sequence
tacctacaaatctagataaa

SEQ ID NO: 180830 - DNA, 20 bp, Artificial sequence
  SiRNA target sequence
acctacaaatctagataaag

SEQ ID NO: 180831 - DNA, 20 bp, Artificial sequence
  SiRNA target sequence
cctacaaatctagataaaga

SEQ ID NO: 180832 - DNA, 20 bp, Artificial sequence
  SiRNA target sequence
ctacaaatctagataaagac

SEQ ID NO: 180833 - DNA, 20 bp, Artificial sequence
  SiRNA target sequence
tacaaatctagataaagaca

SEQ ID NO: 180834 - DNA, 20 bp, Artificial sequence
  SiRNA target sequence
acaaatctagataaagacat

SEQ ID NO: 180835 - DNA, 20 bp, Artificial sequence
  SiRNA target sequence
caaatctagataaagacatt

SEQ ID NO: 180836 - DNA, 20 bp, Artificial sequence
  SiRNA target sequence
aaatctagataaagacattt

SEQ ID NO: 180837 - DNA, 20 bp, Artificial sequence
  SiRNA target sequence
aatctagataaagacatttc

SEQ ID NO: 180838 - DNA, 20 bp, Artificial sequence
  SiRNA target sequence
atctagataaagacatttca

SEQ ID NO: 180839 - DNA, 20 bp, Artificial sequence
  SiRNA target sequence
tctagataaagacatttcac

SEQ ID NO: 180840 - DNA, 20 bp, Artificial sequence
  SiRNA target sequence
ctagataaagacatttcaca

SEQ ID NO: 180841 - DNA, 20 bp, Artificial sequence
  SiRNA target sequence
tagataaagacatttcacat

SEQ ID NO: 180842 - DNA, 20 bp, Artificial sequence
  SiRNA target sequence
agataaagacatttcacata

SEQ ID NO: 180843 - DNA, 20 bp, Artificial sequence
  SiRNA target sequence
gataaagacatttcacatag

SEQ ID NO: 180844 - DNA, 20 bp, Artificial sequence
  SiRNA target sequence
ataaagacatttcacataga

SEQ ID NO: 180845 - DNA, 20 bp, Artificial sequence
  SiRNA target sequence
taaagacatttcacatagat

SEQ ID NO: 180846 - DNA, 20 bp, Artificial sequence
  SiRNA target sequence
aaagacatttcacatagata

SEQ ID NO: 180847 - DNA, 20 bp, Artificial sequence
  SiRNA target sequence
aagacatttcacatagatat

SEQ ID NO: 180848 - DNA, 20 bp, Artificial sequence
  SiRNA target sequence
agacatttcacatagatatt

SEQ ID NO: 180849 - DNA, 20 bp, Artificial sequence
  SiRNA target sequence
gacatttcacatagatattc

SEQ ID NO: 180850 - DNA, 20 bp, Artificial sequence
  SiRNA target sequence
acatttcacatagatattcg

SEQ ID NO: 180851 - DNA, 20 bp, Artificial sequence
  SiRNA target sequence
catttcacatagatattcgg

SEQ ID NO: 180852 - DNA, 20 bp, Artificial sequence
  SiRNA target sequence
atttcacatagatattcggc

SEQ ID NO: 180853 - DNA, 20 bp, Artificial sequence
  SiRNA target sequence
tttcacatagatattcggca

SEQ ID NO: 180854 - DNA, 20 bp, Artificial sequence
  SiRNA target sequence
ttcacatagatattcggcaa

SEQ ID NO: 180855 - DNA, 20 bp, Artificial sequence
  SiRNA target sequence
tcacatagatattcggcaaa

SEQ ID NO: 180856 - DNA, 20 bp, Artificial sequence
  SiRNA target sequence
cacatagatattcggcaaat

SEQ ID NO: 180857 - DNA, 20 bp, Artificial sequence
  SiRNA target sequence
acatagatattcggcaaatg

SEQ ID NO: 180858 - DNA, 20 bp, Artificial sequence
  SiRNA target sequence
catagatattcggcaaatgg

SEQ ID NO: 180859 - DNA, 20 bp, Artificial sequence
  SiRNA target sequence
atagatattcggcaaatggt

SEQ ID NO: 180860 - DNA, 20 bp, Artificial sequence
  SiRNA target sequence
tagatattcggcaaatggtt

SEQ ID NO: 180861 - DNA, 20 bp, Artificial sequence
  SiRNA target sequence
agatattcggcaaatggttt

SEQ ID NO: 180862 - DNA, 20 bp, Artificial sequence
  SiRNA target sequence
gatattcggcaaatggtttt

SEQ ID NO: 180863 - DNA, 20 bp, Artificial sequence
  SiRNA target sequence
atattcggcaaatggtttta

SEQ ID NO: 180864 - DNA, 20 bp, Artificial sequence
  SiRNA target sequence
tattcggcaaatggttttaa

SEQ ID NO: 180865 - DNA, 20 bp, Artificial sequence
  SiRNA target sequence
attcggcaaatggttttaaa

SEQ ID NO: 180866 - DNA, 20 bp, Artificial sequence
  SiRNA target sequence
ttcggcaaatggttttaaac

SEQ ID NO: 180867 - DNA, 20 bp, Artificial sequence
  SiRNA target sequence
tcggcaaatggttttaaact

SEQ ID NO: 180868 - DNA, 20 bp, Artificial sequence
  SiRNA target sequence
cggcaaatggttttaaactt

SEQ ID NO: 180869 - DNA, 20 bp, Artificial sequence
  SiRNA target sequence
ggcaaatggttttaaacttc

SEQ ID NO: 180870 - DNA, 20 bp, Artificial sequence
  SiRNA target sequence
gcaaatggttttaaacttca

SEQ ID NO: 180871 - DNA, 20 bp, Artificial sequence
  SiRNA target sequence
caaatggttttaaacttcac

SEQ ID NO: 180872 - DNA, 20 bp, Artificial sequence
  SiRNA target sequence
aaatggttttaaacttcaca

SEQ ID NO: 180873 - DNA, 20 bp, Artificial sequence
  SiRNA target sequence
aatggttttaaacttcacag

SEQ ID NO: 180874 - DNA, 20 bp, Artificial sequence
  SiRNA target sequence
atggttttaaacttcacaga

SEQ ID NO: 180875 - DNA, 20 bp, Artificial sequence
  SiRNA target sequence
tggttttaaacttcacagat

SEQ ID NO: 180876 - DNA, 20 bp, Artificial sequence
  SiRNA target sequence
ggttttaaacttcacagatt

SEQ ID NO: 180877 - DNA, 20 bp, Artificial sequence
  SiRNA target sequence
gttttaaacttcacagatta

SEQ ID NO: 180878 - DNA, 20 bp, Artificial sequence
  SiRNA target sequence
ttttaaacttcacagattac

SEQ ID NO: 180879 - DNA, 20 bp, Artificial sequence
  SiRNA target sequence
tttaaacttcacagattacc

SEQ ID NO: 180880 - DNA, 20 bp, Artificial sequence
  SiRNA target sequence
ttaaacttcacagattacca

SEQ ID NO: 180881 - DNA, 20 bp, Artificial sequence
  SiRNA target sequence
taaacttcacagattaccaa

SEQ ID NO: 180882 - DNA, 20 bp, Artificial sequence
  SiRNA target sequence
aaacttcacagattaccaat

SEQ ID NO: 180883 - DNA, 20 bp, Artificial sequence
  SiRNA target sequence
aacttcacagattaccaatc

SEQ ID NO: 180884 - DNA, 20 bp, Artificial sequence
  SiRNA target sequence
acttcacagattaccaatcc

SEQ ID NO: 180885 - DNA, 20 bp, Artificial sequence
  SiRNA target sequence
cttcacagattaccaatccc

SEQ ID NO: 180886 - DNA, 20 bp, Artificial sequence
  SiRNA target sequence
ttcacagattaccaatccct

SEQ ID NO: 180887 - DNA, 20 bp, Artificial sequence
  SiRNA target sequence
tcacagattaccaatcccta

SEQ ID NO: 180888 - DNA, 20 bp, Artificial sequence
  SiRNA target sequence
cacagattaccaatccctaa

SEQ ID NO: 180889 - DNA, 20 bp, Artificial sequence
  SiRNA target sequence
acagattaccaatccctaaa

SEQ ID NO: 180890 - DNA, 20 bp, Artificial sequence
  SiRNA target sequence
cagattaccaatccctaaat

SEQ ID NO: 180891 - DNA, 20 bp, Artificial sequence
  SiRNA target sequence
agattaccaatccctaaata

SEQ ID NO: 180892 - DNA, 20 bp, Artificial sequence
  SiRNA target sequence
gattaccaatccctaaatat

SEQ ID NO: 180893 - DNA, 20 bp, Artificial sequence
  SiRNA target sequence
attaccaatccctaaatatg

SEQ ID NO: 180894 - DNA, 20 bp, Artificial sequence
  SiRNA target sequence
ttaccaatccctaaatatgg

SEQ ID NO: 180895 - DNA, 20 bp, Artificial sequence
  SiRNA target sequence
taccaatccctaaatatggt

SEQ ID NO: 180896 - DNA, 20 bp, Artificial sequence
  SiRNA target sequence
accaatccctaaatatggta

SEQ ID NO: 180897 - DNA, 20 bp, Artificial sequence
  SiRNA target sequence
ccaatccctaaatatggtaa

SEQ ID NO: 180898 - DNA, 20 bp, Artificial sequence
  SiRNA target sequence
caatccctaaatatggtaag

SEQ ID NO: 180899 - DNA, 20 bp, Artificial sequence
  SiRNA target sequence
aatccctaaatatggtaagg

SEQ ID NO: 180900 - DNA, 20 bp, Artificial sequence
  SiRNA target sequence
atccctaaatatggtaaggt

SEQ ID NO: 180901 - DNA, 20 bp, Artificial sequence
  SiRNA target sequence
tccctaaatatggtaaggtt

SEQ ID NO: 180902 - DNA, 20 bp, Artificial sequence
  SiRNA target sequence
ccctaaatatggtaaggttt

SEQ ID NO: 180903 - DNA, 20 bp, Artificial sequence
  SiRNA target sequence
cctaaatatggtaaggtttt

SEQ ID NO: 180904 - DNA, 20 bp, Artificial sequence
  SiRNA target sequence
ctaaatatggtaaggtttta

SEQ ID NO: 180905 - DNA, 20 bp, Artificial sequence
  SiRNA target sequence
taaatatggtaaggttttag

SEQ ID NO: 180906 - DNA, 20 bp, Artificial sequence
  SiRNA target sequence
aaatatggtaaggttttagg

SEQ ID NO: 180907 - DNA, 20 bp, Artificial sequence
  SiRNA target sequence
aatatggtaaggttttaggg

SEQ ID NO: 180908 - DNA, 20 bp, Artificial sequence
  SiRNA target sequence
atatggtaaggttttagggc

SEQ ID NO: 180909 - DNA, 20 bp, Artificial sequence
  SiRNA target sequence
tatggtaaggttttagggct

SEQ ID NO: 180910 - DNA, 20 bp, Artificial sequence
  SiRNA target sequence
atggtaaggttttagggcta

SEQ ID NO: 180911 - DNA, 20 bp, Artificial sequence
  SiRNA target sequence
tggtaaggttttagggctag

SEQ ID NO: 180912 - DNA, 20 bp, Artificial sequence
  SiRNA target sequence
ggtaaggttttagggctagt

SEQ ID NO: 180913 - DNA, 20 bp, Artificial sequence
  SiRNA target sequence
gtaaggttttagggctagta

SEQ ID NO: 180914 - DNA, 20 bp, Artificial sequence
  SiRNA target sequence
taaggttttagggctagtag

SEQ ID NO: 180915 - DNA, 20 bp, Artificial sequence
  SiRNA target sequence
aaggttttagggctagtagg

SEQ ID NO: 180916 - DNA, 20 bp, Artificial sequence
  SiRNA target sequence
aggttttagggctagtaggc

SEQ ID NO: 180917 - DNA, 20 bp, Artificial sequence
  SiRNA target sequence
ggttttagggctagtaggca

SEQ ID NO: 180918 - DNA, 20 bp, Artificial sequence
  SiRNA target sequence
gttttagggctagtaggcac

SEQ ID NO: 180919 - DNA, 20 bp, Artificial sequence
  SiRNA target sequence
ttttagggctagtaggcact

SEQ ID NO: 180920 - DNA, 20 bp, Artificial sequence
  SiRNA target sequence
tttagggctagtaggcacta

SEQ ID NO: 180921 - DNA, 20 bp, Artificial sequence
  SiRNA target sequence
ttagggctagtaggcactaa

SEQ ID NO: 180922 - DNA, 20 bp, Artificial sequence
  SiRNA target sequence
tagggctagtaggcactaat

SEQ ID NO: 180923 - DNA, 20 bp, Artificial sequence
  SiRNA target sequence
agggctagtaggcactaatg

SEQ ID NO: 180924 - DNA, 20 bp, Artificial sequence
  SiRNA target sequence
gggctagtaggcactaatgg

SEQ ID NO: 180925 - DNA, 20 bp, Artificial sequence
  SiRNA target sequence
ggctagtaggcactaatggt

SEQ ID NO: 180926 - DNA, 20 bp, Artificial sequence
  SiRNA target sequence
gctagtaggcactaatggta

SEQ ID NO: 180927 - DNA, 20 bp, Artificial sequence
  SiRNA target sequence
ctagtaggcactaatggtat

SEQ ID NO: 180928 - DNA, 20 bp, Artificial sequence
  SiRNA target sequence
tagtaggcactaatggtata

SEQ ID NO: 180929 - DNA, 20 bp, Artificial sequence
  SiRNA target sequence
agtaggcactaatggtatag

SEQ ID NO: 180930 - DNA, 20 bp, Artificial sequence
  SiRNA target sequence
gtaggcactaatggtatagg

SEQ ID NO: 180931 - DNA, 20 bp, Artificial sequence
  SiRNA target sequence
taggcactaatggtatagga

SEQ ID NO: 180932 - DNA, 20 bp, Artificial sequence
  SiRNA target sequence
aggcactaatggtataggaa

SEQ ID NO: 180933 - DNA, 20 bp, Artificial sequence
  SiRNA target sequence
ggcactaatggtataggaaa

SEQ ID NO: 180934 - DNA, 20 bp, Artificial sequence
  SiRNA target sequence
gcactaatggtataggaaaa

SEQ ID NO: 180935 - DNA, 20 bp, Artificial sequence
  SiRNA target sequence
cactaatggtataggaaaaa

SEQ ID NO: 180936 - DNA, 20 bp, Artificial sequence
  SiRNA target sequence
actaatggtataggaaaaag

SEQ ID NO: 180937 - DNA, 20 bp, Artificial sequence
  SiRNA target sequence
ctaatggtataggaaaaagt

SEQ ID NO: 180938 - DNA, 20 bp, Artificial sequence
  SiRNA target sequence
taatggtataggaaaaagta

SEQ ID NO: 180939 - DNA, 20 bp, Artificial sequence
  SiRNA target sequence
aatggtataggaaaaagtac

SEQ ID NO: 180940 - DNA, 20 bp, Artificial sequence
  SiRNA target sequence
atggtataggaaaaagtact

SEQ ID NO: 180941 - DNA, 20 bp, Artificial sequence
  SiRNA target sequence
tggtataggaaaaagtactg

SEQ ID NO: 180942 - DNA, 20 bp, Artificial sequence
  SiRNA target sequence
ggtataggaaaaagtactgc

SEQ ID NO: 180943 - DNA, 20 bp, Artificial sequence
  SiRNA target sequence
gtataggaaaaagtactgca

SEQ ID NO: 180944 - DNA, 20 bp, Artificial sequence
  SiRNA target sequence
tataggaaaaagtactgcac

SEQ ID NO: 180945 - DNA, 20 bp, Artificial sequence
  SiRNA target sequence
ataggaaaaagtactgcact

SEQ ID NO: 180946 - DNA, 20 bp, Artificial sequence
  SiRNA target sequence
taggaaaaagtactgcactt

SEQ ID NO: 180947 - DNA, 20 bp, Artificial sequence
  SiRNA target sequence
aggaaaaagtactgcactta

SEQ ID NO: 180948 - DNA, 20 bp, Artificial sequence
  SiRNA target sequence
ggaaaaagtactgcacttaa

SEQ ID NO: 180949 - DNA, 20 bp, Artificial sequence
  SiRNA target sequence
gaaaaagtactgcacttaaa

SEQ ID NO: 180950 - DNA, 20 bp, Artificial sequence
  SiRNA target sequence
aaaaagtactgcacttaaaa

SEQ ID NO: 180951 - DNA, 20 bp, Artificial sequence
  SiRNA target sequence
aaaagtactgcacttaaaat

SEQ ID NO: 180952 - DNA, 20 bp, Artificial sequence
  SiRNA target sequence
aaagtactgcacttaaaata

SEQ ID NO: 180953 - DNA, 20 bp, Artificial sequence
  SiRNA target sequence
aagtactgcacttaaaatat

SEQ ID NO: 180954 - DNA, 20 bp, Artificial sequence
  SiRNA target sequence
agtactgcacttaaaatatt

SEQ ID NO: 180955 - DNA, 20 bp, Artificial sequence
  SiRNA target sequence
gtactgcacttaaaatatta

SEQ ID NO: 180956 - DNA, 20 bp, Artificial sequence
  SiRNA target sequence
tactgcacttaaaatattat

SEQ ID NO: 180957 - DNA, 20 bp, Artificial sequence
  SiRNA target sequence
actgcacttaaaatattatc

SEQ ID NO: 180958 - DNA, 20 bp, Artificial sequence
  SiRNA target sequence
ctgcacttaaaatattatcg

SEQ ID NO: 180959 - DNA, 20 bp, Artificial sequence
  SiRNA target sequence
tgcacttaaaatattatcgg

SEQ ID NO: 180960 - DNA, 20 bp, Artificial sequence
  SiRNA target sequence
gcacttaaaatattatcggg

SEQ ID NO: 180961 - DNA, 20 bp, Artificial sequence
  SiRNA target sequence
cacttaaaatattatcgggc

SEQ ID NO: 180962 - DNA, 20 bp, Artificial sequence
  SiRNA target sequence
acttaaaatattatcgggca

SEQ ID NO: 180963 - DNA, 20 bp, Artificial sequence
  SiRNA target sequence
cttaaaatattatcgggcaa

SEQ ID NO: 180964 - DNA, 20 bp, Artificial sequence
  SiRNA target sequence
ttaaaatattatcgggcaat

SEQ ID NO: 180965 - DNA, 20 bp, Artificial sequence
  SiRNA target sequence
taaaatattatcgggcaatc

SEQ ID NO: 180966 - DNA, 20 bp, Artificial sequence
  SiRNA target sequence
aaaatattatcgggcaatct

SEQ ID NO: 180967 - DNA, 20 bp, Artificial sequence
  SiRNA target sequence
aaatattatcgggcaatctt

SEQ ID NO: 180968 - DNA, 20 bp, Artificial sequence
  SiRNA target sequence
aatattatcgggcaatctta

SEQ ID NO: 180969 - DNA, 20 bp, Artificial sequence
  SiRNA target sequence
atattatcgggcaatcttaa

SEQ ID NO: 180970 - DNA, 20 bp, Artificial sequence
  SiRNA target sequence
tattatcgggcaatcttaaa

SEQ ID NO: 180971 - DNA, 20 bp, Artificial sequence
  SiRNA target sequence
attatcgggcaatcttaaac

SEQ ID NO: 180972 - DNA, 20 bp, Artificial sequence
  SiRNA target sequence
ttatcgggcaatcttaaacc

SEQ ID NO: 180973 - DNA, 20 bp, Artificial sequence
  SiRNA target sequence
tatcgggcaatcttaaacca

SEQ ID NO: 180974 - DNA, 20 bp, Artificial sequence
  SiRNA target sequence
atcgggcaatcttaaaccaa

SEQ ID NO: 180975 - DNA, 20 bp, Artificial sequence
  SiRNA target sequence
tcgggcaatcttaaaccaaa

SEQ ID NO: 180976 - DNA, 20 bp, Artificial sequence
  SiRNA target sequence
cgggcaatcttaaaccaaac

SEQ ID NO: 180977 - DNA, 20 bp, Artificial sequence
  SiRNA target sequence
gggcaatcttaaaccaaact

SEQ ID NO: 180978 - DNA, 20 bp, Artificial sequence
  SiRNA target sequence
ggcaatcttaaaccaaactt

SEQ ID NO: 180979 - DNA, 20 bp, Artificial sequence
  SiRNA target sequence
gcaatcttaaaccaaactta

SEQ ID NO: 180980 - DNA, 20 bp, Artificial sequence
  SiRNA target sequence
caatcttaaaccaaacttag

SEQ ID NO: 180981 - DNA, 20 bp, Artificial sequence
  SiRNA target sequence
aatcttaaaccaaacttagg

SEQ ID NO: 180982 - DNA, 20 bp, Artificial sequence
  SiRNA target sequence
atcttaaaccaaacttagga

SEQ ID NO: 180983 - DNA, 20 bp, Artificial sequence
  SiRNA target sequence
tcttaaaccaaacttaggaa

SEQ ID NO: 180984 - DNA, 20 bp, Artificial sequence
  SiRNA target sequence
cttaaaccaaacttaggaaa

SEQ ID NO: 180985 - DNA, 20 bp, Artificial sequence
  SiRNA target sequence
ttaaaccaaacttaggaaag

SEQ ID NO: 180986 - DNA, 20 bp, Artificial sequence
  SiRNA target sequence
taaaccaaacttaggaaagt

SEQ ID NO: 180987 - DNA, 20 bp, Artificial sequence
  SiRNA target sequence
aaaccaaacttaggaaagtt

SEQ ID NO: 180988 - DNA, 20 bp, Artificial sequence
  SiRNA target sequence
aaccaaacttaggaaagttc

SEQ ID NO: 180989 - DNA, 20 bp, Artificial sequence
  SiRNA target sequence
accaaacttaggaaagttcg

SEQ ID NO: 180990 - DNA, 20 bp, Artificial sequence
  SiRNA target sequence
ccaaacttaggaaagttcga

SEQ ID NO: 180991 - DNA, 20 bp, Artificial sequence
  SiRNA target sequence
caaacttaggaaagttcgac

SEQ ID NO: 180992 - DNA, 20 bp, Artificial sequence
  SiRNA target sequence
aaacttaggaaagttcgacg

SEQ ID NO: 180993 - DNA, 20 bp, Artificial sequence
  SiRNA target sequence
aacttaggaaagttcgacgt

SEQ ID NO: 180994 - DNA, 20 bp, Artificial sequence
  SiRNA target sequence
acttaggaaagttcgacgtt

SEQ ID NO: 180995 - DNA, 20 bp, Artificial sequence
  SiRNA target sequence
cttaggaaagttcgacgtta

SEQ ID NO: 180996 - DNA, 20 bp, Artificial sequence
  SiRNA target sequence
ttaggaaagttcgacgttac

SEQ ID NO: 180997 - DNA, 20 bp, Artificial sequence
  SiRNA target sequence
taggaaagttcgacgttacg

SEQ ID NO: 180998 - DNA, 20 bp, Artificial sequence
  SiRNA target sequence
aggaaagttcgacgttacgc

SEQ ID NO: 180999 - DNA, 20 bp, Artificial sequence
  SiRNA target sequence
ggaaagttcgacgttacgcc

SEQ ID NO: 181000 - DNA, 20 bp, Artificial sequence
  SiRNA target sequence
gaaagttcgacgttacgccc

SEQ ID NO: 181001 - DNA, 20 bp, Artificial sequence
  SiRNA target sequence
aaagttcgacgttacgcccg

SEQ ID NO: 181002 - DNA, 20 bp, Artificial sequence
  SiRNA target sequence
aagttcgacgttacgcccga

SEQ ID NO: 181003 - DNA, 20 bp, Artificial sequence
  SiRNA target sequence
agttcgacgttacgcccgac

SEQ ID NO: 181004 - DNA, 20 bp, Artificial sequence
  SiRNA target sequence
gttcgacgttacgcccgact

SEQ ID NO: 181005 - DNA, 20 bp, Artificial sequence
  SiRNA target sequence
ttcgacgttacgcccgactg

SEQ ID NO: 181006 - DNA, 20 bp, Artificial sequence
  SiRNA target sequence
tcgacgttacgcccgactgg

SEQ ID NO: 181007 - DNA, 20 bp, Artificial sequence
  SiRNA target sequence
cgacgttacgcccgactggg

SEQ ID NO: 181008 - DNA, 20 bp, Artificial sequence
  SiRNA target sequence
gacgttacgcccgactgggc

SEQ ID NO: 181009 - DNA, 20 bp, Artificial sequence
  SiRNA target sequence
acgttacgcccgactgggca

SEQ ID NO: 181010 - DNA, 20 bp, Artificial sequence
  SiRNA target sequence
cgttacgcccgactgggcag

SEQ ID NO: 181011 - DNA, 20 bp, Artificial sequence
  SiRNA target sequence
gttacgcccgactgggcagc

SEQ ID NO: 181012 - DNA, 20 bp, Artificial sequence
  SiRNA target sequence
ttacgcccgactgggcagca

SEQ ID NO: 181013 - DNA, 20 bp, Artificial sequence
  SiRNA target sequence
tacgcccgactgggcagcaa

SEQ ID NO: 181014 - DNA, 20 bp, Artificial sequence
  SiRNA target sequence
acgcccgactgggcagcaat

SEQ ID NO: 181015 - DNA, 20 bp, Artificial sequence
  SiRNA target sequence
cgcccgactgggcagcaatt

SEQ ID NO: 181016 - DNA, 20 bp, Artificial sequence
  SiRNA target sequence
gcccgactgggcagcaattc

SEQ ID NO: 181017 - DNA, 20 bp, Artificial sequence
  SiRNA target sequence
cccgactgggcagcaattct

SEQ ID NO: 181018 - DNA, 20 bp, Artificial sequence
  SiRNA target sequence
ccgactgggcagcaattcta

SEQ ID NO: 181019 - DNA, 20 bp, Artificial sequence
  SiRNA target sequence
cgactgggcagcaattctaa

SEQ ID NO: 181020 - DNA, 20 bp, Artificial sequence
  SiRNA target sequence
gactgggcagcaattctaaa

SEQ ID NO: 181021 - DNA, 20 bp, Artificial sequence
  SiRNA target sequence
actgggcagcaattctaaat

SEQ ID NO: 181022 - DNA, 20 bp, Artificial sequence
  SiRNA target sequence
ctgggcagcaattctaaata

SEQ ID NO: 181023 - DNA, 20 bp, Artificial sequence
  SiRNA target sequence
tgggcagcaattctaaataa

SEQ ID NO: 181024 - DNA, 20 bp, Artificial sequence
  SiRNA target sequence
gggcagcaattctaaataat

SEQ ID NO: 181025 - DNA, 20 bp, Artificial sequence
  SiRNA target sequence
ggcagcaattctaaataatt

SEQ ID NO: 181026 - DNA, 20 bp, Artificial sequence
  SiRNA target sequence
gcagcaattctaaataatta

SEQ ID NO: 181027 - DNA, 20 bp, Artificial sequence
  SiRNA target sequence
cagcaattctaaataattat

SEQ ID NO: 181028 - DNA, 20 bp, Artificial sequence
  SiRNA target sequence
agcaattctaaataattata

SEQ ID NO: 181029 - DNA, 20 bp, Artificial sequence
  SiRNA target sequence
gcaattctaaataattataa

SEQ ID NO: 181030 - DNA, 20 bp, Artificial sequence
  SiRNA target sequence
caattctaaataattataaa

SEQ ID NO: 181031 - DNA, 20 bp, Artificial sequence
  SiRNA target sequence
aattctaaataattataaag

SEQ ID NO: 181032 - DNA, 20 bp, Artificial sequence
  SiRNA target sequence
attctaaataattataaagg

SEQ ID NO: 181033 - DNA, 20 bp, Artificial sequence
  SiRNA target sequence
ttctaaataattataaagga

SEQ ID NO: 181034 - DNA, 20 bp, Artificial sequence
  SiRNA target sequence
tctaaataattataaaggat

SEQ ID NO: 181035 - DNA, 20 bp, Artificial sequence
  SiRNA target sequence
ctaaataattataaaggatc

SEQ ID NO: 181036 - DNA, 20 bp, Artificial sequence
  SiRNA target sequence
taaataattataaaggatct

SEQ ID NO: 181037 - DNA, 20 bp, Artificial sequence
  SiRNA target sequence
aaataattataaaggatctg

SEQ ID NO: 181038 - DNA, 20 bp, Artificial sequence
  SiRNA target sequence
aataattataaaggatctga

SEQ ID NO: 181039 - DNA, 20 bp, Artificial sequence
  SiRNA target sequence
ataattataaaggatctgaa

SEQ ID NO: 181040 - DNA, 20 bp, Artificial sequence
  SiRNA target sequence
taattataaaggatctgaac

SEQ ID NO: 181041 - DNA, 20 bp, Artificial sequence
  SiRNA target sequence
aattataaaggatctgaact

SEQ ID NO: 181042 - DNA, 20 bp, Artificial sequence
  SiRNA target sequence
attataaaggatctgaactt

SEQ ID NO: 181043 - DNA, 20 bp, Artificial sequence
  SiRNA target sequence
ttataaaggatctgaacttc

SEQ ID NO: 181044 - DNA, 20 bp, Artificial sequence
  SiRNA target sequence
tataaaggatctgaacttca

SEQ ID NO: 181045 - DNA, 20 bp, Artificial sequence
  SiRNA target sequence
ataaaggatctgaacttcat

SEQ ID NO: 181046 - DNA, 20 bp, Artificial sequence
  SiRNA target sequence
taaaggatctgaacttcatg

SEQ ID NO: 181047 - DNA, 20 bp, Artificial sequence
  SiRNA target sequence
aaaggatctgaacttcatgg

SEQ ID NO: 181048 - DNA, 20 bp, Artificial sequence
  SiRNA target sequence
aaggatctgaacttcatgga

SEQ ID NO: 181049 - DNA, 20 bp, Artificial sequence
  SiRNA target sequence
aggatctgaacttcatggat

SEQ ID NO: 181050 - DNA, 20 bp, Artificial sequence
  SiRNA target sequence
ggatctgaacttcatggatt

SEQ ID NO: 181051 - DNA, 20 bp, Artificial sequence
  SiRNA target sequence
gatctgaacttcatggattt

SEQ ID NO: 181052 - DNA, 20 bp, Artificial sequence
  SiRNA target sequence
atctgaacttcatggatttt

SEQ ID NO: 181053 - DNA, 20 bp, Artificial sequence
  SiRNA target sequence
tctgaacttcatggattttt

SEQ ID NO: 181054 - DNA, 20 bp, Artificial sequence
  SiRNA target sequence
ctgaacttcatggatttttt

SEQ ID NO: 181055 - DNA, 20 bp, Artificial sequence
  SiRNA target sequence
tgaacttcatggatttttta

SEQ ID NO: 181056 - DNA, 20 bp, Artificial sequence
  SiRNA target sequence
gaacttcatggattttttac

SEQ ID NO: 181057 - DNA, 20 bp, Artificial sequence
  SiRNA target sequence
aacttcatggattttttact

SEQ ID NO: 181058 - DNA, 20 bp, Artificial sequence
  SiRNA target sequence
acttcatggattttttacta

SEQ ID NO: 181059 - DNA, 20 bp, Artificial sequence
  SiRNA target sequence
cttcatggattttttactaa

SEQ ID NO: 181060 - DNA, 20 bp, Artificial sequence
  SiRNA target sequence
ttcatggattttttactaaa

SEQ ID NO: 181061 - DNA, 20 bp, Artificial sequence
  SiRNA target sequence
tcatggattttttactaaaa

SEQ ID NO: 181062 - DNA, 20 bp, Artificial sequence
  SiRNA target sequence
catggattttttactaaaat

SEQ ID NO: 181063 - DNA, 20 bp, Artificial sequence
  SiRNA target sequence
atggattttttactaaaatt

SEQ ID NO: 181064 - DNA, 20 bp, Artificial sequence
  SiRNA target sequence
tggattttttactaaaattt

SEQ ID NO: 181065 - DNA, 20 bp, Artificial sequence
  SiRNA target sequence
ggattttttactaaaatttt

SEQ ID NO: 181066 - DNA, 20 bp, Artificial sequence
  SiRNA target sequence
gattttttactaaaatttta

SEQ ID NO: 181067 - DNA, 20 bp, Artificial sequence
  SiRNA target sequence
attttttactaaaattttag

SEQ ID NO: 181068 - DNA, 20 bp, Artificial sequence
  SiRNA target sequence
ttttttactaaaattttaga

SEQ ID NO: 181069 - DNA, 20 bp, Artificial sequence
  SiRNA target sequence
tttttactaaaattttagaa

SEQ ID NO: 181070 - DNA, 20 bp, Artificial sequence
  SiRNA target sequence
ttttactaaaattttagaag

SEQ ID NO: 181071 - DNA, 20 bp, Artificial sequence
  SiRNA target sequence
tttactaaaattttagaagg

SEQ ID NO: 181072 - DNA, 20 bp, Artificial sequence
  SiRNA target sequence
ttactaaaattttagaaggg

SEQ ID NO: 181073 - DNA, 20 bp, Artificial sequence
  SiRNA target sequence
tactaaaattttagaagggt

SEQ ID NO: 181074 - DNA, 20 bp, Artificial sequence
  SiRNA target sequence
actaaaattttagaagggtc

SEQ ID NO: 181075 - DNA, 20 bp, Artificial sequence
  SiRNA target sequence
ctaaaattttagaagggtct

SEQ ID NO: 181076 - DNA, 20 bp, Artificial sequence
  SiRNA target sequence
taaaattttagaagggtcta

SEQ ID NO: 181077 - DNA, 20 bp, Artificial sequence
  SiRNA target sequence
aaaattttagaagggtctat

SEQ ID NO: 181078 - DNA, 20 bp, Artificial sequence
  SiRNA target sequence
aaattttagaagggtctatt

SEQ ID NO: 181079 - DNA, 20 bp, Artificial sequence
  SiRNA target sequence
aattttagaagggtctatta

SEQ ID NO: 181080 - DNA, 20 bp, Artificial sequence
  SiRNA target sequence
attttagaagggtctattaa

SEQ ID NO: 181081 - DNA, 20 bp, Artificial sequence
  SiRNA target sequence
ttttagaagggtctattaaa

SEQ ID NO: 181082 - DNA, 20 bp, Artificial sequence
  SiRNA target sequence
tttagaagggtctattaaag

SEQ ID NO: 181083 - DNA, 20 bp, Artificial sequence
  SiRNA target sequence
ttagaagggtctattaaagc

SEQ ID NO: 181084 - DNA, 20 bp, Artificial sequence
  SiRNA target sequence
tagaagggtctattaaagct

SEQ ID NO: 181085 - DNA, 20 bp, Artificial sequence
  SiRNA target sequence
agaagggtctattaaagcta

SEQ ID NO: 181086 - DNA, 20 bp, Artificial sequence
  SiRNA target sequence
gaagggtctattaaagctat

SEQ ID NO: 181087 - DNA, 20 bp, Artificial sequence
  SiRNA target sequence
aagggtctattaaagctatt

SEQ ID NO: 181088 - DNA, 20 bp, Artificial sequence
  SiRNA target sequence
agggtctattaaagctattt

SEQ ID NO: 181089 - DNA, 20 bp, Artificial sequence
  SiRNA target sequence
gggtctattaaagctatttc

SEQ ID NO: 181090 - DNA, 20 bp, Artificial sequence
  SiRNA target sequence
ggtctattaaagctatttct

SEQ ID NO: 181091 - DNA, 20 bp, Artificial sequence
  SiRNA target sequence
gtctattaaagctatttcta

SEQ ID NO: 181092 - DNA, 20 bp, Artificial sequence
  SiRNA target sequence
tctattaaagctatttctaa

SEQ ID NO: 181093 - DNA, 20 bp, Artificial sequence
  SiRNA target sequence
ctattaaagctatttctaag

SEQ ID NO: 181094 - DNA, 20 bp, Artificial sequence
  SiRNA target sequence
tattaaagctatttctaaga

SEQ ID NO: 181095 - DNA, 20 bp, Artificial sequence
  SiRNA target sequence
attaaagctatttctaagat

SEQ ID NO: 181096 - DNA, 20 bp, Artificial sequence
  SiRNA target sequence
ttaaagctatttctaagata

SEQ ID NO: 181097 - DNA, 20 bp, Artificial sequence
  SiRNA target sequence
taaagctatttctaagatac

SEQ ID NO: 181098 - DNA, 20 bp, Artificial sequence
  SiRNA target sequence
aaagctatttctaagataca

SEQ ID NO: 181099 - DNA, 20 bp, Artificial sequence
  SiRNA target sequence
aagctatttctaagatacag

SEQ ID NO: 181100 - DNA, 20 bp, Artificial sequence
  SiRNA target sequence
agctatttctaagatacagt

SEQ ID NO: 181101 - DNA, 20 bp, Artificial sequence
  SiRNA target sequence
gctatttctaagatacagta

SEQ ID NO: 181102 - DNA, 20 bp, Artificial sequence
  SiRNA target sequence
ctatttctaagatacagtat

SEQ ID NO: 181103 - DNA, 20 bp, Artificial sequence
  SiRNA target sequence
tatttctaagatacagtata

SEQ ID NO: 181104 - DNA, 20 bp, Artificial sequence
  SiRNA target sequence
atttctaagatacagtatat

SEQ ID NO: 181105 - DNA, 20 bp, Artificial sequence
  SiRNA target sequence
tttctaagatacagtatata

SEQ ID NO: 181106 - DNA, 20 bp, Artificial sequence
  SiRNA target sequence
ttctaagatacagtatatag

SEQ ID NO: 181107 - DNA, 20 bp, Artificial sequence
  SiRNA target sequence
tctaagatacagtatataga

SEQ ID NO: 181108 - DNA, 20 bp, Artificial sequence
  SiRNA target sequence
ctaagatacagtatatagat

SEQ ID NO: 181109 - DNA, 20 bp, Artificial sequence
  SiRNA target sequence
taagatacagtatatagata

SEQ ID NO: 181110 - DNA, 20 bp, Artificial sequence
  SiRNA target sequence
aagatacagtatatagataa

SEQ ID NO: 181111 - DNA, 20 bp, Artificial sequence
  SiRNA target sequence
agatacagtatatagataaa

SEQ ID NO: 181112 - DNA, 20 bp, Artificial sequence
  SiRNA target sequence
gatacagtatatagataaaa

SEQ ID NO: 181113 - DNA, 20 bp, Artificial sequence
  SiRNA target sequence
atacagtatatagataaaat

SEQ ID NO: 181114 - DNA, 20 bp, Artificial sequence
  SiRNA target sequence
tacagtatatagataaaatg

SEQ ID NO: 181115 - DNA, 20 bp, Artificial sequence
  SiRNA target sequence
acagtatatagataaaatgc

SEQ ID NO: 181116 - DNA, 20 bp, Artificial sequence
  SiRNA target sequence
cagtatatagataaaatgcc

SEQ ID NO: 181117 - DNA, 20 bp, Artificial sequence
  SiRNA target sequence
agtatatagataaaatgcct

SEQ ID NO: 181118 - DNA, 20 bp, Artificial sequence
  SiRNA target sequence
gtatatagataaaatgccta

SEQ ID NO: 181119 - DNA, 20 bp, Artificial sequence
  SiRNA target sequence
tatatagataaaatgcctaa

SEQ ID NO: 181120 - DNA, 20 bp, Artificial sequence
  SiRNA target sequence
atatagataaaatgcctaaa

SEQ ID NO: 181121 - DNA, 20 bp, Artificial sequence
  SiRNA target sequence
tatagataaaatgcctaaat

SEQ ID NO: 181122 - DNA, 20 bp, Artificial sequence
  SiRNA target sequence
atagataaaatgcctaaatt

SEQ ID NO: 181123 - DNA, 20 bp, Artificial sequence
  SiRNA target sequence
tagataaaatgcctaaattt

SEQ ID NO: 181124 - DNA, 20 bp, Artificial sequence
  SiRNA target sequence
agataaaatgcctaaatttt

SEQ ID NO: 181125 - DNA, 20 bp, Artificial sequence
  SiRNA target sequence
gataaaatgcctaaattttt

SEQ ID NO: 181126 - DNA, 20 bp, Artificial sequence
  SiRNA target sequence
ataaaatgcctaaattttta

SEQ ID NO: 181127 - DNA, 20 bp, Artificial sequence
  SiRNA target sequence
taaaatgcctaaatttttaa

SEQ ID NO: 181128 - DNA, 20 bp, Artificial sequence
  SiRNA target sequence
aaaatgcctaaatttttaaa

SEQ ID NO: 181129 - DNA, 20 bp, Artificial sequence
  SiRNA target sequence
aaatgcctaaatttttaaaa

SEQ ID NO: 181130 - DNA, 20 bp, Artificial sequence
  SiRNA target sequence
aatgcctaaatttttaaaag

SEQ ID NO: 181131 - DNA, 20 bp, Artificial sequence
  SiRNA target sequence
atgcctaaatttttaaaagg

SEQ ID NO: 181132 - DNA, 20 bp, Artificial sequence
  SiRNA target sequence
tgcctaaatttttaaaagga

SEQ ID NO: 181133 - DNA, 20 bp, Artificial sequence
  SiRNA target sequence
gcctaaatttttaaaaggac

SEQ ID NO: 181134 - DNA, 20 bp, Artificial sequence
  SiRNA target sequence
cctaaatttttaaaaggacg

SEQ ID NO: 181135 - DNA, 20 bp, Artificial sequence
  SiRNA target sequence
ctaaatttttaaaaggacgc

SEQ ID NO: 181136 - DNA, 20 bp, Artificial sequence
  SiRNA target sequence
taaatttttaaaaggacgct

SEQ ID NO: 181137 - DNA, 20 bp, Artificial sequence
  SiRNA target sequence
aaatttttaaaaggacgcta

SEQ ID NO: 181138 - DNA, 20 bp, Artificial sequence
  SiRNA target sequence
aatttttaaaaggacgctat

SEQ ID NO: 181139 - DNA, 20 bp, Artificial sequence
  SiRNA target sequence
atttttaaaaggacgctata

SEQ ID NO: 181140 - DNA, 20 bp, Artificial sequence
  SiRNA target sequence
tttttaaaaggacgctataa

SEQ ID NO: 181141 - DNA, 20 bp, Artificial sequence
  SiRNA target sequence
ttttaaaaggacgctataag

SEQ ID NO: 181142 - DNA, 20 bp, Artificial sequence
  SiRNA target sequence
tttaaaaggacgctataagt

SEQ ID NO: 181143 - DNA, 20 bp, Artificial sequence
  SiRNA target sequence
ttaaaaggacgctataagtc

SEQ ID NO: 181144 - DNA, 20 bp, Artificial sequence
  SiRNA target sequence
taaaaggacgctataagtca

SEQ ID NO: 181145 - DNA, 20 bp, Artificial sequence
  SiRNA target sequence
aaaaggacgctataagtcag

SEQ ID NO: 181146 - DNA, 20 bp, Artificial sequence
  SiRNA target sequence
aaaggacgctataagtcaga

SEQ ID NO: 181147 - DNA, 20 bp, Artificial sequence
  SiRNA target sequence
aaggacgctataagtcagaa

SEQ ID NO: 181148 - DNA, 20 bp, Artificial sequence
  SiRNA target sequence
aggacgctataagtcagaaa

SEQ ID NO: 181149 - DNA, 20 bp, Artificial sequence
  SiRNA target sequence
ggacgctataagtcagaaat

SEQ ID NO: 181150 - DNA, 20 bp, Artificial sequence
  SiRNA target sequence
gacgctataagtcagaaatc

SEQ ID NO: 181151 - DNA, 20 bp, Artificial sequence
  SiRNA target sequence
acgctataagtcagaaatcg

SEQ ID NO: 181152 - DNA, 20 bp, Artificial sequence
  SiRNA target sequence
cgctataagtcagaaatcgc

SEQ ID NO: 181153 - DNA, 20 bp, Artificial sequence
  SiRNA target sequence
gctataagtcagaaatcgcc

SEQ ID NO: 181154 - DNA, 20 bp, Artificial sequence
  SiRNA target sequence
ctataagtcagaaatcgcct

SEQ ID NO: 181155 - DNA, 20 bp, Artificial sequence
  SiRNA target sequence
tataagtcagaaatcgcctc

SEQ ID NO: 181156 - DNA, 20 bp, Artificial sequence
  SiRNA target sequence
ataagtcagaaatcgcctcc

SEQ ID NO: 181157 - DNA, 20 bp, Artificial sequence
  SiRNA target sequence
taagtcagaaatcgcctccg

SEQ ID NO: 181158 - DNA, 20 bp, Artificial sequence
  SiRNA target sequence
aagtcagaaatcgcctccgg

SEQ ID NO: 181159 - DNA, 20 bp, Artificial sequence
  SiRNA target sequence
agtcagaaatcgcctccgga

SEQ ID NO: 181160 - DNA, 20 bp, Artificial sequence
  SiRNA target sequence
gtcagaaatcgcctccggaa

SEQ ID NO: 181161 - DNA, 20 bp, Artificial sequence
  SiRNA target sequence
tcagaaatcgcctccggaaa

SEQ ID NO: 181162 - DNA, 20 bp, Artificial sequence
  SiRNA target sequence
cagaaatcgcctccggaaaa

SEQ ID NO: 181163 - DNA, 20 bp, Artificial sequence
  SiRNA target sequence
agaaatcgcctccggaaaaa

SEQ ID NO: 181164 - DNA, 20 bp, Artificial sequence
  SiRNA target sequence
gaaatcgcctccggaaaaat

SEQ ID NO: 181165 - DNA, 20 bp, Artificial sequence
  SiRNA target sequence
aaatcgcctccggaaaaatg

SEQ ID NO: 181166 - DNA, 20 bp, Artificial sequence
  SiRNA target sequence
aatcgcctccggaaaaatgt

SEQ ID NO: 181167 - DNA, 20 bp, Artificial sequence
  SiRNA target sequence
atcgcctccggaaaaatgtt

SEQ ID NO: 181168 - DNA, 20 bp, Artificial sequence
  SiRNA target sequence
tcgcctccggaaaaatgttg

SEQ ID NO: 181169 - DNA, 20 bp, Artificial sequence
  SiRNA target sequence
cgcctccggaaaaatgttgt

SEQ ID NO: 181170 - DNA, 20 bp, Artificial sequence
  SiRNA target sequence
gcctccggaaaaatgttgtt

SEQ ID NO: 181171 - DNA, 20 bp, Artificial sequence
  SiRNA target sequence
cctccggaaaaatgttgttt

SEQ ID NO: 181172 - DNA, 20 bp, Artificial sequence
  SiRNA target sequence
ctccggaaaaatgttgttta

SEQ ID NO: 181173 - DNA, 20 bp, Artificial sequence
  SiRNA target sequence
tccggaaaaatgttgtttac

SEQ ID NO: 181174 - DNA, 20 bp, Artificial sequence
  SiRNA target sequence
ccggaaaaatgttgtttact

SEQ ID NO: 181175 - DNA, 20 bp, Artificial sequence
  SiRNA target sequence
cggaaaaatgttgtttactg

SEQ ID NO: 181176 - DNA, 20 bp, Artificial sequence
  SiRNA target sequence
ggaaaaatgttgtttactgt

SEQ ID NO: 181177 - DNA, 20 bp, Artificial sequence
  SiRNA target sequence
gaaaaatgttgtttactgtt

SEQ ID NO: 181178 - DNA, 20 bp, Artificial sequence
  SiRNA target sequence
aaaaatgttgtttactgtta

SEQ ID NO: 181179 - DNA, 20 bp, Artificial sequence
  SiRNA target sequence
aaaatgttgtttactgttaa

SEQ ID NO: 181180 - DNA, 20 bp, Artificial sequence
  SiRNA target sequence
aaatgttgtttactgttaat

SEQ ID NO: 181181 - DNA, 20 bp, Artificial sequence
  SiRNA target sequence
aatgttgtttactgttaatg

SEQ ID NO: 181182 - DNA, 20 bp, Artificial sequence
  SiRNA target sequence
atgttgtttactgttaatga

SEQ ID NO: 181183 - DNA, 20 bp, Artificial sequence
  SiRNA target sequence
tgttgtttactgttaatgat

SEQ ID NO: 181184 - DNA, 20 bp, Artificial sequence
  SiRNA target sequence
gttgtttactgttaatgata

SEQ ID NO: 181185 - DNA, 20 bp, Artificial sequence
  SiRNA target sequence
ttgtttactgttaatgatat

SEQ ID NO: 181186 - DNA, 20 bp, Artificial sequence
  SiRNA target sequence
tgtttactgttaatgatata

SEQ ID NO: 181187 - DNA, 20 bp, Artificial sequence
  SiRNA target sequence
gtttactgttaatgatatat

SEQ ID NO: 181188 - DNA, 20 bp, Artificial sequence
  SiRNA target sequence
tttactgttaatgatatatt

SEQ ID NO: 181189 - DNA, 20 bp, Artificial sequence
  SiRNA target sequence
ttactgttaatgatatatta

SEQ ID NO: 181190 - DNA, 20 bp, Artificial sequence
  SiRNA target sequence
tactgttaatgatatattaa

SEQ ID NO: 181191 - DNA, 20 bp, Artificial sequence
  SiRNA target sequence
actgttaatgatatattaaa

SEQ ID NO: 181192 - DNA, 20 bp, Artificial sequence
  SiRNA target sequence
ctgttaatgatatattaaaa

SEQ ID NO: 181193 - DNA, 20 bp, Artificial sequence
  SiRNA target sequence
tgttaatgatatattaaaaa

SEQ ID NO: 181194 - DNA, 20 bp, Artificial sequence
  SiRNA target sequence
gttaatgatatattaaaaaa

SEQ ID NO: 181195 - DNA, 20 bp, Artificial sequence
  SiRNA target sequence
ttaatgatatattaaaaaaa

SEQ ID NO: 181196 - DNA, 20 bp, Artificial sequence
  SiRNA target sequence
taatgatatattaaaaaaag

SEQ ID NO: 181197 - DNA, 20 bp, Artificial sequence
  SiRNA target sequence
aatgatatattaaaaaaagt

SEQ ID NO: 181198 - DNA, 20 bp, Artificial sequence
  SiRNA target sequence
atgatatattaaaaaaagtt

SEQ ID NO: 181199 - DNA, 20 bp, Artificial sequence
  SiRNA target sequence
tgatatattaaaaaaagttg

SEQ ID NO: 181200 - DNA, 20 bp, Artificial sequence
  SiRNA target sequence
gatatattaaaaaaagttga

SEQ ID NO: 181201 - DNA, 20 bp, Artificial sequence
  SiRNA target sequence
atatattaaaaaaagttgat

SEQ ID NO: 181202 - DNA, 20 bp, Artificial sequence
  SiRNA target sequence
tatattaaaaaaagttgatg

SEQ ID NO: 181203 - DNA, 20 bp, Artificial sequence
  SiRNA target sequence
atattaaaaaaagttgatga

SEQ ID NO: 181204 - DNA, 20 bp, Artificial sequence
  SiRNA target sequence
tattaaaaaaagttgatgaa

SEQ ID NO: 181205 - DNA, 20 bp, Artificial sequence
  SiRNA target sequence
attaaaaaaagttgatgaaa

SEQ ID NO: 181206 - DNA, 20 bp, Artificial sequence
  SiRNA target sequence
ttaaaaaaagttgatgaaaa

SEQ ID NO: 181207 - DNA, 20 bp, Artificial sequence
  SiRNA target sequence
taaaaaaagttgatgaaaaa

SEQ ID NO: 181208 - DNA, 20 bp, Artificial sequence
  SiRNA target sequence
aaaaaaagttgatgaaaaaa

SEQ ID NO: 181209 - DNA, 20 bp, Artificial sequence
  SiRNA target sequence
aaaaaagttgatgaaaaaaa

SEQ ID NO: 181210 - DNA, 20 bp, Artificial sequence
  SiRNA target sequence
aaaaagttgatgaaaaaaat

SEQ ID NO: 181211 - DNA, 20 bp, Artificial sequence
  SiRNA target sequence
aaaagttgatgaaaaaaata

SEQ ID NO: 181212 - DNA, 20 bp, Artificial sequence
  SiRNA target sequence
aaagttgatgaaaaaaataa

SEQ ID NO: 181213 - DNA, 20 bp, Artificial sequence
  SiRNA target sequence
aagttgatgaaaaaaataaa

SEQ ID NO: 181214 - DNA, 20 bp, Artificial sequence
  SiRNA target sequence
agttgatgaaaaaaataaat

SEQ ID NO: 181215 - DNA, 20 bp, Artificial sequence
  SiRNA target sequence
gttgatgaaaaaaataaatt

SEQ ID NO: 181216 - DNA, 20 bp, Artificial sequence
  SiRNA target sequence
ttgatgaaaaaaataaattt

SEQ ID NO: 181217 - DNA, 20 bp, Artificial sequence
  SiRNA target sequence
tgatgaaaaaaataaatttg

SEQ ID NO: 181218 - DNA, 20 bp, Artificial sequence
  SiRNA target sequence
gatgaaaaaaataaatttga

SEQ ID NO: 181219 - DNA, 20 bp, Artificial sequence
  SiRNA target sequence
atgaaaaaaataaatttgac

SEQ ID NO: 181220 - DNA, 20 bp, Artificial sequence
  SiRNA target sequence
tgaaaaaaataaatttgact

SEQ ID NO: 181221 - DNA, 20 bp, Artificial sequence
  SiRNA target sequence
gaaaaaaataaatttgacta

SEQ ID NO: 181222 - DNA, 20 bp, Artificial sequence
  SiRNA target sequence
aaaaaaataaatttgactat

SEQ ID NO: 181223 - DNA, 20 bp, Artificial sequence
  SiRNA target sequence
aaaaaataaatttgactatt

SEQ ID NO: 181224 - DNA, 20 bp, Artificial sequence
  SiRNA target sequence
aaaaataaatttgactatta

SEQ ID NO: 181225 - DNA, 20 bp, Artificial sequence
  SiRNA target sequence
aaaataaatttgactattac

SEQ ID NO: 181226 - DNA, 20 bp, Artificial sequence
  SiRNA target sequence
aaataaatttgactattacg

SEQ ID NO: 181227 - DNA, 20 bp, Artificial sequence
  SiRNA target sequence
aataaatttgactattacgt

SEQ ID NO: 181228 - DNA, 20 bp, Artificial sequence
  SiRNA target sequence
ataaatttgactattacgta

SEQ ID NO: 181229 - DNA, 20 bp, Artificial sequence
  SiRNA target sequence
taaatttgactattacgtag

SEQ ID NO: 181230 - DNA, 20 bp, Artificial sequence
  SiRNA target sequence
aaatttgactattacgtaga

SEQ ID NO: 181231 - DNA, 20 bp, Artificial sequence
  SiRNA target sequence
aatttgactattacgtagat

SEQ ID NO: 181232 - DNA, 20 bp, Artificial sequence
  SiRNA target sequence
atttgactattacgtagata

SEQ ID NO: 181233 - DNA, 20 bp, Artificial sequence
  SiRNA target sequence
tttgactattacgtagataa

SEQ ID NO: 181234 - DNA, 20 bp, Artificial sequence
  SiRNA target sequence
ttgactattacgtagataaa

SEQ ID NO: 181235 - DNA, 20 bp, Artificial sequence
  SiRNA target sequence
tgactattacgtagataaaa

SEQ ID NO: 181236 - DNA, 20 bp, Artificial sequence
  SiRNA target sequence
gactattacgtagataaaat

SEQ ID NO: 181237 - DNA, 20 bp, Artificial sequence
  SiRNA target sequence
actattacgtagataaaatg

SEQ ID NO: 181238 - DNA, 20 bp, Artificial sequence
  SiRNA target sequence
ctattacgtagataaaatgg

SEQ ID NO: 181239 - DNA, 20 bp, Artificial sequence
  SiRNA target sequence
tattacgtagataaaatggc

SEQ ID NO: 181240 - DNA, 20 bp, Artificial sequence
  SiRNA target sequence
attacgtagataaaatggca

SEQ ID NO: 181241 - DNA, 20 bp, Artificial sequence
  SiRNA target sequence
ttacgtagataaaatggcac

SEQ ID NO: 181242 - DNA, 20 bp, Artificial sequence
  SiRNA target sequence
tacgtagataaaatggcact

SEQ ID NO: 181243 - DNA, 20 bp, Artificial sequence
  SiRNA target sequence
acgtagataaaatggcactt

SEQ ID NO: 181244 - DNA, 20 bp, Artificial sequence
  SiRNA target sequence
cgtagataaaatggcactta

SEQ ID NO: 181245 - DNA, 20 bp, Artificial sequence
  SiRNA target sequence
gtagataaaatggcacttaa

SEQ ID NO: 181246 - DNA, 20 bp, Artificial sequence
  SiRNA target sequence
tagataaaatggcacttaaa

SEQ ID NO: 181247 - DNA, 20 bp, Artificial sequence
  SiRNA target sequence
agataaaatggcacttaaaa

SEQ ID NO: 181248 - DNA, 20 bp, Artificial sequence
  SiRNA target sequence
gataaaatggcacttaaaaa

SEQ ID NO: 181249 - DNA, 20 bp, Artificial sequence
  SiRNA target sequence
ataaaatggcacttaaaaat

SEQ ID NO: 181250 - DNA, 20 bp, Artificial sequence
  SiRNA target sequence
taaaatggcacttaaaaatg

SEQ ID NO: 181251 - DNA, 20 bp, Artificial sequence
  SiRNA target sequence
aaaatggcacttaaaaatgt

SEQ ID NO: 181252 - DNA, 20 bp, Artificial sequence
  SiRNA target sequence
aaatggcacttaaaaatgta

SEQ ID NO: 181253 - DNA, 20 bp, Artificial sequence
  SiRNA target sequence
aatggcacttaaaaatgtat

SEQ ID NO: 181254 - DNA, 20 bp, Artificial sequence
  SiRNA target sequence
atggcacttaaaaatgtatt

SEQ ID NO: 181255 - DNA, 20 bp, Artificial sequence
  SiRNA target sequence
tggcacttaaaaatgtatta

SEQ ID NO: 181256 - DNA, 20 bp, Artificial sequence
  SiRNA target sequence
ggcacttaaaaatgtattaa

SEQ ID NO: 181257 - DNA, 20 bp, Artificial sequence
  SiRNA target sequence
gcacttaaaaatgtattaac

SEQ ID NO: 181258 - DNA, 20 bp, Artificial sequence
  SiRNA target sequence
cacttaaaaatgtattaaca

SEQ ID NO: 181259 - DNA, 20 bp, Artificial sequence
  SiRNA target sequence
acttaaaaatgtattaacaa

SEQ ID NO: 181260 - DNA, 20 bp, Artificial sequence
  SiRNA target sequence
cttaaaaatgtattaacaag

SEQ ID NO: 181261 - DNA, 20 bp, Artificial sequence
  SiRNA target sequence
ttaaaaatgtattaacaaga

SEQ ID NO: 181262 - DNA, 20 bp, Artificial sequence
  SiRNA target sequence
taaaaatgtattaacaagag

SEQ ID NO: 181263 - DNA, 20 bp, Artificial sequence
  SiRNA target sequence
aaaaatgtattaacaagaga

SEQ ID NO: 181264 - DNA, 20 bp, Artificial sequence
  SiRNA target sequence
aaaatgtattaacaagagaa

SEQ ID NO: 181265 - DNA, 20 bp, Artificial sequence
  SiRNA target sequence
aaatgtattaacaagagaat

SEQ ID NO: 181266 - DNA, 20 bp, Artificial sequence
  SiRNA target sequence
aatgtattaacaagagaatt

SEQ ID NO: 181267 - DNA, 20 bp, Artificial sequence
  SiRNA target sequence
atgtattaacaagagaatta

SEQ ID NO: 181268 - DNA, 20 bp, Artificial sequence
  SiRNA target sequence
tgtattaacaagagaattag

SEQ ID NO: 181269 - DNA, 20 bp, Artificial sequence
  SiRNA target sequence
gtattaacaagagaattaga

SEQ ID NO: 181270 - DNA, 20 bp, Artificial sequence
  SiRNA target sequence
tattaacaagagaattagag

SEQ ID NO: 181271 - DNA, 20 bp, Artificial sequence
  SiRNA target sequence
attaacaagagaattagagc

SEQ ID NO: 181272 - DNA, 20 bp, Artificial sequence
  SiRNA target sequence
ttaacaagagaattagagca

SEQ ID NO: 181273 - DNA, 20 bp, Artificial sequence
  SiRNA target sequence
taacaagagaattagagcaa

SEQ ID NO: 181274 - DNA, 20 bp, Artificial sequence
  SiRNA target sequence
aacaagagaattagagcaat

SEQ ID NO: 181275 - DNA, 20 bp, Artificial sequence
  SiRNA target sequence
acaagagaattagagcaatt

SEQ ID NO: 181276 - DNA, 20 bp, Artificial sequence
  SiRNA target sequence
caagagaattagagcaatta

SEQ ID NO: 181277 - DNA, 20 bp, Artificial sequence
  SiRNA target sequence
aagagaattagagcaattaa

SEQ ID NO: 181278 - DNA, 20 bp, Artificial sequence
  SiRNA target sequence
agagaattagagcaattaag

SEQ ID NO: 181279 - DNA, 20 bp, Artificial sequence
  SiRNA target sequence
gagaattagagcaattaagt

SEQ ID NO: 181280 - DNA, 20 bp, Artificial sequence
  SiRNA target sequence
agaattagagcaattaagtg

SEQ ID NO: 181281 - DNA, 20 bp, Artificial sequence
  SiRNA target sequence
gaattagagcaattaagtgg

SEQ ID NO: 181282 - DNA, 20 bp, Artificial sequence
  SiRNA target sequence
aattagagcaattaagtggt

SEQ ID NO: 181283 - DNA, 20 bp, Artificial sequence
  SiRNA target sequence
attagagcaattaagtggtg

SEQ ID NO: 181284 - DNA, 20 bp, Artificial sequence
  SiRNA target sequence
ttagagcaattaagtggtgg

SEQ ID NO: 181285 - DNA, 20 bp, Artificial sequence
  SiRNA target sequence
tagagcaattaagtggtggt

SEQ ID NO: 181286 - DNA, 20 bp, Artificial sequence
  SiRNA target sequence
agagcaattaagtggtggtg

SEQ ID NO: 181287 - DNA, 20 bp, Artificial sequence
  SiRNA target sequence
gagcaattaagtggtggtga

SEQ ID NO: 181288 - DNA, 20 bp, Artificial sequence
  SiRNA target sequence
agcaattaagtggtggtgaa

SEQ ID NO: 181289 - DNA, 20 bp, Artificial sequence
  SiRNA target sequence
gcaattaagtggtggtgaac

SEQ ID NO: 181290 - DNA, 20 bp, Artificial sequence
  SiRNA target sequence
caattaagtggtggtgaact

SEQ ID NO: 181291 - DNA, 20 bp, Artificial sequence
  SiRNA target sequence
aattaagtggtggtgaactt

SEQ ID NO: 181292 - DNA, 20 bp, Artificial sequence
  SiRNA target sequence
attaagtggtggtgaacttc

SEQ ID NO: 181293 - DNA, 20 bp, Artificial sequence
  SiRNA target sequence
ttaagtggtggtgaacttca

SEQ ID NO: 181294 - DNA, 20 bp, Artificial sequence
  SiRNA target sequence
taagtggtggtgaacttcaa

SEQ ID NO: 181295 - DNA, 20 bp, Artificial sequence
  SiRNA target sequence
aagtggtggtgaacttcaaa

SEQ ID NO: 181296 - DNA, 20 bp, Artificial sequence
  SiRNA target sequence
agtggtggtgaacttcaaag

SEQ ID NO: 181297 - DNA, 20 bp, Artificial sequence
  SiRNA target sequence
gtggtggtgaacttcaaaga

SEQ ID NO: 181298 - DNA, 20 bp, Artificial sequence
  SiRNA target sequence
tggtggtgaacttcaaagat

SEQ ID NO: 181299 - DNA, 20 bp, Artificial sequence
  SiRNA target sequence
ggtggtgaacttcaaagatt

SEQ ID NO: 181300 - DNA, 20 bp, Artificial sequence
  SiRNA target sequence
gtggtgaacttcaaagattt

SEQ ID NO: 181301 - DNA, 20 bp, Artificial sequence
  SiRNA target sequence
tggtgaacttcaaagatttt

SEQ ID NO: 181302 - DNA, 20 bp, Artificial sequence
  SiRNA target sequence
ggtgaacttcaaagattttg

SEQ ID NO: 181303 - DNA, 20 bp, Artificial sequence
  SiRNA target sequence
gtgaacttcaaagattttgt

SEQ ID NO: 181304 - DNA, 20 bp, Artificial sequence
  SiRNA target sequence
tgaacttcaaagattttgta

SEQ ID NO: 181305 - DNA, 20 bp, Artificial sequence
  SiRNA target sequence
gaacttcaaagattttgtat

SEQ ID NO: 181306 - DNA, 20 bp, Artificial sequence
  SiRNA target sequence
aacttcaaagattttgtatt

SEQ ID NO: 181307 - DNA, 20 bp, Artificial sequence
  SiRNA target sequence
acttcaaagattttgtattg

SEQ ID NO: 181308 - DNA, 20 bp, Artificial sequence
  SiRNA target sequence
cttcaaagattttgtattgc

SEQ ID NO: 181309 - DNA, 20 bp, Artificial sequence
  SiRNA target sequence
ttcaaagattttgtattgca

SEQ ID NO: 181310 - DNA, 20 bp, Artificial sequence
  SiRNA target sequence
tcaaagattttgtattgcat

SEQ ID NO: 181311 - DNA, 20 bp, Artificial sequence
  SiRNA target sequence
caaagattttgtattgcata

SEQ ID NO: 181312 - DNA, 20 bp, Artificial sequence
  SiRNA target sequence
aaagattttgtattgcatac

SEQ ID NO: 181313 - DNA, 20 bp, Artificial sequence
  SiRNA target sequence
aagattttgtattgcataca

SEQ ID NO: 181314 - DNA, 20 bp, Artificial sequence
  SiRNA target sequence
agattttgtattgcatacac

SEQ ID NO: 181315 - DNA, 20 bp, Artificial sequence
  SiRNA target sequence
gattttgtattgcatacaca

SEQ ID NO: 181316 - DNA, 20 bp, Artificial sequence
  SiRNA target sequence
attttgtattgcatacacat

SEQ ID NO: 181317 - DNA, 20 bp, Artificial sequence
  SiRNA target sequence
ttttgtattgcatacacatg

SEQ ID NO: 181318 - DNA, 20 bp, Artificial sequence
  SiRNA target sequence
tttgtattgcatacacatgt

SEQ ID NO: 181319 - DNA, 20 bp, Artificial sequence
  SiRNA target sequence
ttgtattgcatacacatgtt

SEQ ID NO: 181320 - DNA, 20 bp, Artificial sequence
  SiRNA target sequence
tgtattgcatacacatgttt

SEQ ID NO: 181321 - DNA, 20 bp, Artificial sequence
  SiRNA target sequence
gtattgcatacacatgttta

SEQ ID NO: 181322 - DNA, 20 bp, Artificial sequence
  SiRNA target sequence
tattgcatacacatgtttac

SEQ ID NO: 181323 - DNA, 20 bp, Artificial sequence
  SiRNA target sequence
attgcatacacatgtttaca

SEQ ID NO: 181324 - DNA, 20 bp, Artificial sequence
  SiRNA target sequence
ttgcatacacatgtttacaa

SEQ ID NO: 181325 - DNA, 20 bp, Artificial sequence
  SiRNA target sequence
tgcatacacatgtttacaag

SEQ ID NO: 181326 - DNA, 20 bp, Artificial sequence
  SiRNA target sequence
gcatacacatgtttacaaga

SEQ ID NO: 181327 - DNA, 20 bp, Artificial sequence
  SiRNA target sequence
catacacatgtttacaagaa

SEQ ID NO: 181328 - DNA, 20 bp, Artificial sequence
  SiRNA target sequence
atacacatgtttacaagaag

SEQ ID NO: 181329 - DNA, 20 bp, Artificial sequence
  SiRNA target sequence
tacacatgtttacaagaagg

SEQ ID NO: 181330 - DNA, 20 bp, Artificial sequence
  SiRNA target sequence
acacatgtttacaagaagga

SEQ ID NO: 181331 - DNA, 20 bp, Artificial sequence
  SiRNA target sequence
cacatgtttacaagaaggaa

SEQ ID NO: 181332 - DNA, 20 bp, Artificial sequence
  SiRNA target sequence
acatgtttacaagaaggaaa

SEQ ID NO: 181333 - DNA, 20 bp, Artificial sequence
  SiRNA target sequence
catgtttacaagaaggaaat

SEQ ID NO: 181334 - DNA, 20 bp, Artificial sequence
  SiRNA target sequence
atgtttacaagaaggaaatg

SEQ ID NO: 181335 - DNA, 20 bp, Artificial sequence
  SiRNA target sequence
tgtttacaagaaggaaatgt

SEQ ID NO: 181336 - DNA, 20 bp, Artificial sequence
  SiRNA target sequence
gtttacaagaaggaaatgtt

SEQ ID NO: 181337 - DNA, 20 bp, Artificial sequence
  SiRNA target sequence
tttacaagaaggaaatgttt

SEQ ID NO: 181338 - DNA, 20 bp, Artificial sequence
  SiRNA target sequence
ttacaagaaggaaatgttta

SEQ ID NO: 181339 - DNA, 20 bp, Artificial sequence
  SiRNA target sequence
tacaagaaggaaatgtttat

SEQ ID NO: 181340 - DNA, 20 bp, Artificial sequence
  SiRNA target sequence
acaagaaggaaatgtttata

SEQ ID NO: 181341 - DNA, 20 bp, Artificial sequence
  SiRNA target sequence
caagaaggaaatgtttatat

SEQ ID NO: 181342 - DNA, 20 bp, Artificial sequence
  SiRNA target sequence
aagaaggaaatgtttatatt

SEQ ID NO: 181343 - DNA, 20 bp, Artificial sequence
  SiRNA target sequence
agaaggaaatgtttatattt

SEQ ID NO: 181344 - DNA, 20 bp, Artificial sequence
  SiRNA target sequence
gaaggaaatgtttatatttt

SEQ ID NO: 181345 - DNA, 20 bp, Artificial sequence
  SiRNA target sequence
aaggaaatgtttatattttt

SEQ ID NO: 181346 - DNA, 20 bp, Artificial sequence
  SiRNA target sequence
aggaaatgtttatatttttg

SEQ ID NO: 181347 - DNA, 20 bp, Artificial sequence
  SiRNA target sequence
ggaaatgtttatatttttga

SEQ ID NO: 181348 - DNA, 20 bp, Artificial sequence
  SiRNA target sequence
gaaatgtttatatttttgat

SEQ ID NO: 181349 - DNA, 20 bp, Artificial sequence
  SiRNA target sequence
aaatgtttatatttttgatg

SEQ ID NO: 181350 - DNA, 20 bp, Artificial sequence
  SiRNA target sequence
aatgtttatatttttgatga

SEQ ID NO: 181351 - DNA, 20 bp, Artificial sequence
  SiRNA target sequence
atgtttatatttttgatgaa

SEQ ID NO: 181352 - DNA, 20 bp, Artificial sequence
  SiRNA target sequence
tgtttatatttttgatgaac

SEQ ID NO: 181353 - DNA, 20 bp, Artificial sequence
  SiRNA target sequence
gtttatatttttgatgaacc

SEQ ID NO: 181354 - DNA, 20 bp, Artificial sequence
  SiRNA target sequence
tttatatttttgatgaaccc

SEQ ID NO: 181355 - DNA, 20 bp, Artificial sequence
  SiRNA target sequence
ttatatttttgatgaaccca

SEQ ID NO: 181356 - DNA, 20 bp, Artificial sequence
  SiRNA target sequence
tatatttttgatgaacccac

SEQ ID NO: 181357 - DNA, 20 bp, Artificial sequence
  SiRNA target sequence
atatttttgatgaacccact

SEQ ID NO: 181358 - DNA, 20 bp, Artificial sequence
  SiRNA target sequence
tatttttgatgaacccacta

SEQ ID NO: 181359 - DNA, 20 bp, Artificial sequence
  SiRNA target sequence
atttttgatgaacccactag

SEQ ID NO: 181360 - DNA, 20 bp, Artificial sequence
  SiRNA target sequence
tttttgatgaacccactagt

SEQ ID NO: 181361 - DNA, 20 bp, Artificial sequence
  SiRNA target sequence
ttttgatgaacccactagtt

SEQ ID NO: 181362 - DNA, 20 bp, Artificial sequence
  SiRNA target sequence
tttgatgaacccactagttt

SEQ ID NO: 181363 - DNA, 20 bp, Artificial sequence
  SiRNA target sequence
ttgatgaacccactagtttt

SEQ ID NO: 181364 - DNA, 20 bp, Artificial sequence
  SiRNA target sequence
tgatgaacccactagttttt

SEQ ID NO: 181365 - DNA, 20 bp, Artificial sequence
  SiRNA target sequence
gatgaacccactagtttttt

SEQ ID NO: 181366 - DNA, 20 bp, Artificial sequence
  SiRNA target sequence
atgaacccactagttttttg

SEQ ID NO: 181367 - DNA, 20 bp, Artificial sequence
  SiRNA target sequence
tgaacccactagttttttgg

SEQ ID NO: 181368 - DNA, 20 bp, Artificial sequence
  SiRNA target sequence
gaacccactagttttttgga

SEQ ID NO: 181369 - DNA, 20 bp, Artificial sequence
  SiRNA target sequence
aacccactagttttttggat

SEQ ID NO: 181370 - DNA, 20 bp, Artificial sequence
  SiRNA target sequence
acccactagttttttggatg

SEQ ID NO: 181371 - DNA, 20 bp, Artificial sequence
  SiRNA target sequence
cccactagttttttggatgt

SEQ ID NO: 181372 - DNA, 20 bp, Artificial sequence
  SiRNA target sequence
ccactagttttttggatgtt

SEQ ID NO: 181373 - DNA, 20 bp, Artificial sequence
  SiRNA target sequence
cactagttttttggatgtta

SEQ ID NO: 181374 - DNA, 20 bp, Artificial sequence
  SiRNA target sequence
actagttttttggatgttaa

SEQ ID NO: 181375 - DNA, 20 bp, Artificial sequence
  SiRNA target sequence
ctagttttttggatgttaag

SEQ ID NO: 181376 - DNA, 20 bp, Artificial sequence
  SiRNA target sequence
tagttttttggatgttaagc

SEQ ID NO: 181377 - DNA, 20 bp, Artificial sequence
  SiRNA target sequence
agttttttggatgttaagca

SEQ ID NO: 181378 - DNA, 20 bp, Artificial sequence
  SiRNA target sequence
gttttttggatgttaagcag

SEQ ID NO: 181379 - DNA, 20 bp, Artificial sequence
  SiRNA target sequence
ttttttggatgttaagcagc

SEQ ID NO: 181380 - DNA, 20 bp, Artificial sequence
  SiRNA target sequence
tttttggatgttaagcagcg

SEQ ID NO: 181381 - DNA, 20 bp, Artificial sequence
  SiRNA target sequence
ttttggatgttaagcagcga

SEQ ID NO: 181382 - DNA, 20 bp, Artificial sequence
  SiRNA target sequence
tttggatgttaagcagcgac

SEQ ID NO: 181383 - DNA, 20 bp, Artificial sequence
  SiRNA target sequence
ttggatgttaagcagcgact

SEQ ID NO: 181384 - DNA, 20 bp, Artificial sequence
  SiRNA target sequence
tggatgttaagcagcgacta

SEQ ID NO: 181385 - DNA, 20 bp, Artificial sequence
  SiRNA target sequence
ggatgttaagcagcgactag

SEQ ID NO: 181386 - DNA, 20 bp, Artificial sequence
  SiRNA target sequence
gatgttaagcagcgactagc

SEQ ID NO: 181387 - DNA, 20 bp, Artificial sequence
  SiRNA target sequence
atgttaagcagcgactagca

SEQ ID NO: 181388 - DNA, 20 bp, Artificial sequence
  SiRNA target sequence
tgttaagcagcgactagcag

SEQ ID NO: 181389 - DNA, 20 bp, Artificial sequence
  SiRNA target sequence
gttaagcagcgactagcagc

SEQ ID NO: 181390 - DNA, 20 bp, Artificial sequence
  SiRNA target sequence
ttaagcagcgactagcagct

SEQ ID NO: 181391 - DNA, 20 bp, Artificial sequence
  SiRNA target sequence
taagcagcgactagcagctg

SEQ ID NO: 181392 - DNA, 20 bp, Artificial sequence
  SiRNA target sequence
aagcagcgactagcagctgc

SEQ ID NO: 181393 - DNA, 20 bp, Artificial sequence
  SiRNA target sequence
agcagcgactagcagctgct

SEQ ID NO: 181394 - DNA, 20 bp, Artificial sequence
  SiRNA target sequence
gcagcgactagcagctgcta

SEQ ID NO: 181395 - DNA, 20 bp, Artificial sequence
  SiRNA target sequence
cagcgactagcagctgctaa

SEQ ID NO: 181396 - DNA, 20 bp, Artificial sequence
  SiRNA target sequence
agcgactagcagctgctaag

SEQ ID NO: 181397 - DNA, 20 bp, Artificial sequence
  SiRNA target sequence
gcgactagcagctgctaagg

SEQ ID NO: 181398 - DNA, 20 bp, Artificial sequence
  SiRNA target sequence
cgactagcagctgctaagga

SEQ ID NO: 181399 - DNA, 20 bp, Artificial sequence
  SiRNA target sequence
gactagcagctgctaaggaa

SEQ ID NO: 181400 - DNA, 20 bp, Artificial sequence
  SiRNA target sequence
actagcagctgctaaggaaa

SEQ ID NO: 181401 - DNA, 20 bp, Artificial sequence
  SiRNA target sequence
ctagcagctgctaaggaaat

SEQ ID NO: 181402 - DNA, 20 bp, Artificial sequence
  SiRNA target sequence
tagcagctgctaaggaaata

SEQ ID NO: 181403 - DNA, 20 bp, Artificial sequence
  SiRNA target sequence
agcagctgctaaggaaataa

SEQ ID NO: 181404 - DNA, 20 bp, Artificial sequence
  SiRNA target sequence
gcagctgctaaggaaataag

SEQ ID NO: 181405 - DNA, 20 bp, Artificial sequence
  SiRNA target sequence
cagctgctaaggaaataaga

SEQ ID NO: 181406 - DNA, 20 bp, Artificial sequence
  SiRNA target sequence
agctgctaaggaaataagaa

SEQ ID NO: 181407 - DNA, 20 bp, Artificial sequence
  SiRNA target sequence
gctgctaaggaaataagaaa

SEQ ID NO: 181408 - DNA, 20 bp, Artificial sequence
  SiRNA target sequence
ctgctaaggaaataagaaat

SEQ ID NO: 181409 - DNA, 20 bp, Artificial sequence
  SiRNA target sequence
tgctaaggaaataagaaatt

SEQ ID NO: 181410 - DNA, 20 bp, Artificial sequence
  SiRNA target sequence
gctaaggaaataagaaattt

SEQ ID NO: 181411 - DNA, 20 bp, Artificial sequence
  SiRNA target sequence
ctaaggaaataagaaatttg

SEQ ID NO: 181412 - DNA, 20 bp, Artificial sequence
  SiRNA target sequence
taaggaaataagaaatttgt

SEQ ID NO: 181413 - DNA, 20 bp, Artificial sequence
  SiRNA target sequence
aaggaaataagaaatttgtg

SEQ ID NO: 181414 - DNA, 20 bp, Artificial sequence
  SiRNA target sequence
aggaaataagaaatttgtgt

SEQ ID NO: 181415 - DNA, 20 bp, Artificial sequence
  SiRNA target sequence
ggaaataagaaatttgtgtg

SEQ ID NO: 181416 - DNA, 20 bp, Artificial sequence
  SiRNA target sequence
gaaataagaaatttgtgtga

SEQ ID NO: 181417 - DNA, 20 bp, Artificial sequence
  SiRNA target sequence
aaataagaaatttgtgtgaa

SEQ ID NO: 181418 - DNA, 20 bp, Artificial sequence
  SiRNA target sequence
aataagaaatttgtgtgaag

SEQ ID NO: 181419 - DNA, 20 bp, Artificial sequence
  SiRNA target sequence
ataagaaatttgtgtgaaga

SEQ ID NO: 181420 - DNA, 20 bp, Artificial sequence
  SiRNA target sequence
taagaaatttgtgtgaagaa

SEQ ID NO: 181421 - DNA, 20 bp, Artificial sequence
  SiRNA target sequence
aagaaatttgtgtgaagaaa

SEQ ID NO: 181422 - DNA, 20 bp, Artificial sequence
  SiRNA target sequence
agaaatttgtgtgaagaaaa

SEQ ID NO: 181423 - DNA, 20 bp, Artificial sequence
  SiRNA target sequence
gaaatttgtgtgaagaaaat

SEQ ID NO: 181424 - DNA, 20 bp, Artificial sequence
  SiRNA target sequence
aaatttgtgtgaagaaaata

SEQ ID NO: 181425 - DNA, 20 bp, Artificial sequence
  SiRNA target sequence
aatttgtgtgaagaaaataa

SEQ ID NO: 181426 - DNA, 20 bp, Artificial sequence
  SiRNA target sequence
atttgtgtgaagaaaataaa

SEQ ID NO: 181427 - DNA, 20 bp, Artificial sequence
  SiRNA target sequence
tttgtgtgaagaaaataaat

SEQ ID NO: 181428 - DNA, 20 bp, Artificial sequence
  SiRNA target sequence
ttgtgtgaagaaaataaata

SEQ ID NO: 181429 - DNA, 20 bp, Artificial sequence
  SiRNA target sequence
tgtgtgaagaaaataaatat

SEQ ID NO: 181430 - DNA, 20 bp, Artificial sequence
  SiRNA target sequence
gtgtgaagaaaataaatatg

SEQ ID NO: 181431 - DNA, 20 bp, Artificial sequence
  SiRNA target sequence
tgtgaagaaaataaatatgt

SEQ ID NO: 181432 - DNA, 20 bp, Artificial sequence
  SiRNA target sequence
gtgaagaaaataaatatgtt

SEQ ID NO: 181433 - DNA, 20 bp, Artificial sequence
  SiRNA target sequence
tgaagaaaataaatatgttg

SEQ ID NO: 181434 - DNA, 20 bp, Artificial sequence
  SiRNA target sequence
gaagaaaataaatatgttgt

SEQ ID NO: 181435 - DNA, 20 bp, Artificial sequence
  SiRNA target sequence
aagaaaataaatatgttgta

SEQ ID NO: 181436 - DNA, 20 bp, Artificial sequence
  SiRNA target sequence
agaaaataaatatgttgtag

SEQ ID NO: 181437 - DNA, 20 bp, Artificial sequence
  SiRNA target sequence
gaaaataaatatgttgtagt

SEQ ID NO: 181438 - DNA, 20 bp, Artificial sequence
  SiRNA target sequence
aaaataaatatgttgtagtt

SEQ ID NO: 181439 - DNA, 20 bp, Artificial sequence
  SiRNA target sequence
aaataaatatgttgtagttg

SEQ ID NO: 181440 - DNA, 20 bp, Artificial sequence
  SiRNA target sequence
aataaatatgttgtagttgt

SEQ ID NO: 181441 - DNA, 20 bp, Artificial sequence
  SiRNA target sequence
ataaatatgttgtagttgtc

SEQ ID NO: 181442 - DNA, 20 bp, Artificial sequence
  SiRNA target sequence
taaatatgttgtagttgtcg

SEQ ID NO: 181443 - DNA, 20 bp, Artificial sequence
  SiRNA target sequence
aaatatgttgtagttgtcga

SEQ ID NO: 181444 - DNA, 20 bp, Artificial sequence
  SiRNA target sequence
aatatgttgtagttgtcgaa

SEQ ID NO: 181445 - DNA, 20 bp, Artificial sequence
  SiRNA target sequence
atatgttgtagttgtcgaac

SEQ ID NO: 181446 - DNA, 20 bp, Artificial sequence
  SiRNA target sequence
tatgttgtagttgtcgaaca

SEQ ID NO: 181447 - DNA, 20 bp, Artificial sequence
  SiRNA target sequence
atgttgtagttgtcgaacac

SEQ ID NO: 181448 - DNA, 20 bp, Artificial sequence
  SiRNA target sequence
tgttgtagttgtcgaacacg

SEQ ID NO: 181449 - DNA, 20 bp, Artificial sequence
  SiRNA target sequence
gttgtagttgtcgaacacga

SEQ ID NO: 181450 - DNA, 20 bp, Artificial sequence
  SiRNA target sequence
ttgtagttgtcgaacacgat

SEQ ID NO: 181451 - DNA, 20 bp, Artificial sequence
  SiRNA target sequence
tgtagttgtcgaacacgatt

SEQ ID NO: 181452 - DNA, 20 bp, Artificial sequence
  SiRNA target sequence
gtagttgtcgaacacgattt

SEQ ID NO: 181453 - DNA, 20 bp, Artificial sequence
  SiRNA target sequence
tagttgtcgaacacgattta

SEQ ID NO: 181454 - DNA, 20 bp, Artificial sequence
  SiRNA target sequence
agttgtcgaacacgatttag

SEQ ID NO: 181455 - DNA, 20 bp, Artificial sequence
  SiRNA target sequence
gttgtcgaacacgatttagc

SEQ ID NO: 181456 - DNA, 20 bp, Artificial sequence
  SiRNA target sequence
ttgtcgaacacgatttagcc

SEQ ID NO: 181457 - DNA, 20 bp, Artificial sequence
  SiRNA target sequence
tgtcgaacacgatttagcca

SEQ ID NO: 181458 - DNA, 20 bp, Artificial sequence
  SiRNA target sequence
gtcgaacacgatttagccat

SEQ ID NO: 181459 - DNA, 20 bp, Artificial sequence
  SiRNA target sequence
tcgaacacgatttagccatt

SEQ ID NO: 181460 - DNA, 20 bp, Artificial sequence
  SiRNA target sequence
cgaacacgatttagccattt

SEQ ID NO: 181461 - DNA, 20 bp, Artificial sequence
  SiRNA target sequence
gaacacgatttagccatttt

SEQ ID NO: 181462 - DNA, 20 bp, Artificial sequence
  SiRNA target sequence
aacacgatttagccatttta

SEQ ID NO: 181463 - DNA, 20 bp, Artificial sequence
  SiRNA target sequence
acacgatttagccattttag

SEQ ID NO: 181464 - DNA, 20 bp, Artificial sequence
  SiRNA target sequence
cacgatttagccattttaga

SEQ ID NO: 181465 - DNA, 20 bp, Artificial sequence
  SiRNA target sequence
acgatttagccattttagat

SEQ ID NO: 181466 - DNA, 20 bp, Artificial sequence
  SiRNA target sequence
cgatttagccattttagatt

SEQ ID NO: 181467 - DNA, 20 bp, Artificial sequence
  SiRNA target sequence
gatttagccattttagattt

SEQ ID NO: 181468 - DNA, 20 bp, Artificial sequence
  SiRNA target sequence
atttagccattttagatttg

SEQ ID NO: 181469 - DNA, 20 bp, Artificial sequence
  SiRNA target sequence
tttagccattttagatttga

SEQ ID NO: 181470 - DNA, 20 bp, Artificial sequence
  SiRNA target sequence
ttagccattttagatttgat

SEQ ID NO: 181471 - DNA, 20 bp, Artificial sequence
  SiRNA target sequence
tagccattttagatttgatg

SEQ ID NO: 181472 - DNA, 20 bp, Artificial sequence
  SiRNA target sequence
agccattttagatttgatgt

SEQ ID NO: 181473 - DNA, 20 bp, Artificial sequence
  SiRNA target sequence
gccattttagatttgatgtg

SEQ ID NO: 181474 - DNA, 20 bp, Artificial sequence
  SiRNA target sequence
ccattttagatttgatgtgt

SEQ ID NO: 181475 - DNA, 20 bp, Artificial sequence
  SiRNA target sequence
cattttagatttgatgtgtg

SEQ ID NO: 181476 - DNA, 20 bp, Artificial sequence
  SiRNA target sequence
attttagatttgatgtgtga

SEQ ID NO: 181477 - DNA, 20 bp, Artificial sequence
  SiRNA target sequence
ttttagatttgatgtgtgat

SEQ ID NO: 181478 - DNA, 20 bp, Artificial sequence
  SiRNA target sequence
tttagatttgatgtgtgatt

SEQ ID NO: 181479 - DNA, 20 bp, Artificial sequence
  SiRNA target sequence
ttagatttgatgtgtgattt

SEQ ID NO: 181480 - DNA, 20 bp, Artificial sequence
  SiRNA target sequence
tagatttgatgtgtgatttt

SEQ ID NO: 181481 - DNA, 20 bp, Artificial sequence
  SiRNA target sequence
agatttgatgtgtgattttg

SEQ ID NO: 181482 - DNA, 20 bp, Artificial sequence
  SiRNA target sequence
gatttgatgtgtgattttgg

SEQ ID NO: 181483 - DNA, 20 bp, Artificial sequence
  SiRNA target sequence
atttgatgtgtgattttgga

SEQ ID NO: 181484 - DNA, 20 bp, Artificial sequence
  SiRNA target sequence
tttgatgtgtgattttggat

SEQ ID NO: 181485 - DNA, 20 bp, Artificial sequence
  SiRNA target sequence
ttgatgtgtgattttggatg

SEQ ID NO: 181486 - DNA, 20 bp, Artificial sequence
  SiRNA target sequence
tgatgtgtgattttggatgt

SEQ ID NO: 181487 - DNA, 20 bp, Artificial sequence
  SiRNA target sequence
gatgtgtgattttggatgtg

SEQ ID NO: 181488 - DNA, 20 bp, Artificial sequence
  SiRNA target sequence
atgtgtgattttggatgtgt

SEQ ID NO: 181489 - DNA, 20 bp, Artificial sequence
  SiRNA target sequence
tgtgtgattttggatgtgtt

SEQ ID NO: 181490 - DNA, 20 bp, Artificial sequence
  SiRNA target sequence
gtgtgattttggatgtgttc

SEQ ID NO: 181491 - DNA, 20 bp, Artificial sequence
  SiRNA target sequence
tgtgattttggatgtgttct

SEQ ID NO: 181492 - DNA, 20 bp, Artificial sequence
  SiRNA target sequence
gtgattttggatgtgttcta

SEQ ID NO: 181493 - DNA, 20 bp, Artificial sequence
  SiRNA target sequence
tgattttggatgtgttctat

SEQ ID NO: 181494 - DNA, 20 bp, Artificial sequence
  SiRNA target sequence
gattttggatgtgttctata

SEQ ID NO: 181495 - DNA, 20 bp, Artificial sequence
  SiRNA target sequence
attttggatgtgttctatac

SEQ ID NO: 181496 - DNA, 20 bp, Artificial sequence
  SiRNA target sequence
ttttggatgtgttctatacg

SEQ ID NO: 181497 - DNA, 20 bp, Artificial sequence
  SiRNA target sequence
tttggatgtgttctatacgg

SEQ ID NO: 181498 - DNA, 20 bp, Artificial sequence
  SiRNA target sequence
ttggatgtgttctatacgga

SEQ ID NO: 181499 - DNA, 20 bp, Artificial sequence
  SiRNA target sequence
tggatgtgttctatacggac

SEQ ID NO: 181500 - DNA, 20 bp, Artificial sequence
  SiRNA target sequence
ggatgtgttctatacggaca

SEQ ID NO: 181501 - DNA, 20 bp, Artificial sequence
  SiRNA target sequence
gatgtgttctatacggacaa

SEQ ID NO: 181502 - DNA, 20 bp, Artificial sequence
  SiRNA target sequence
atgtgttctatacggacaat

SEQ ID NO: 181503 - DNA, 20 bp, Artificial sequence
  SiRNA target sequence
tgtgttctatacggacaatc

SEQ ID NO: 181504 - DNA, 20 bp, Artificial sequence
  SiRNA target sequence
gtgttctatacggacaatct

SEQ ID NO: 181505 - DNA, 20 bp, Artificial sequence
  SiRNA target sequence
tgttctatacggacaatctg

SEQ ID NO: 181506 - DNA, 20 bp, Artificial sequence
  SiRNA target sequence
gttctatacggacaatctgg

SEQ ID NO: 181507 - DNA, 20 bp, Artificial sequence
  SiRNA target sequence
ttctatacggacaatctggg

SEQ ID NO: 181508 - DNA, 20 bp, Artificial sequence
  SiRNA target sequence
tctatacggacaatctgggg

SEQ ID NO: 181509 - DNA, 20 bp, Artificial sequence
  SiRNA target sequence
ctatacggacaatctggggc

SEQ ID NO: 181510 - DNA, 20 bp, Artificial sequence
  SiRNA target sequence
tatacggacaatctggggca

SEQ ID NO: 181511 - DNA, 20 bp, Artificial sequence
  SiRNA target sequence
atacggacaatctggggcat

SEQ ID NO: 181512 - DNA, 20 bp, Artificial sequence
  SiRNA target sequence
tacggacaatctggggcata

SEQ ID NO: 181513 - DNA, 20 bp, Artificial sequence
  SiRNA target sequence
acggacaatctggggcatac

SEQ ID NO: 181514 - DNA, 20 bp, Artificial sequence
  SiRNA target sequence
cggacaatctggggcatacg

SEQ ID NO: 181515 - DNA, 20 bp, Artificial sequence
  SiRNA target sequence
ggacaatctggggcatacgg

SEQ ID NO: 181516 - DNA, 20 bp, Artificial sequence
  SiRNA target sequence
gacaatctggggcatacggt

SEQ ID NO: 181517 - DNA, 20 bp, Artificial sequence
  SiRNA target sequence
acaatctggggcatacggtg

SEQ ID NO: 181518 - DNA, 20 bp, Artificial sequence
  SiRNA target sequence
caatctggggcatacggtgt

SEQ ID NO: 181519 - DNA, 20 bp, Artificial sequence
  SiRNA target sequence
aatctggggcatacggtgta

SEQ ID NO: 181520 - DNA, 20 bp, Artificial sequence
  SiRNA target sequence
atctggggcatacggtgtaa

SEQ ID NO: 181521 - DNA, 20 bp, Artificial sequence
  SiRNA target sequence
tctggggcatacggtgtaat

SEQ ID NO: 181522 - DNA, 20 bp, Artificial sequence
  SiRNA target sequence
ctggggcatacggtgtaata

SEQ ID NO: 181523 - DNA, 20 bp, Artificial sequence
  SiRNA target sequence
tggggcatacggtgtaataa

SEQ ID NO: 181524 - DNA, 20 bp, Artificial sequence
  SiRNA target sequence
ggggcatacggtgtaataag

SEQ ID NO: 181525 - DNA, 20 bp, Artificial sequence
  SiRNA target sequence
gggcatacggtgtaataagc

SEQ ID NO: 181526 - DNA, 20 bp, Artificial sequence
  SiRNA target sequence
ggcatacggtgtaataagcg

SEQ ID NO: 181527 - DNA, 20 bp, Artificial sequence
  SiRNA target sequence
gcatacggtgtaataagcgc

SEQ ID NO: 181528 - DNA, 20 bp, Artificial sequence
  SiRNA target sequence
catacggtgtaataagcgca

SEQ ID NO: 181529 - DNA, 20 bp, Artificial sequence
  SiRNA target sequence
atacggtgtaataagcgcac

SEQ ID NO: 181530 - DNA, 20 bp, Artificial sequence
  SiRNA target sequence
tacggtgtaataagcgcacc

SEQ ID NO: 181531 - DNA, 20 bp, Artificial sequence
  SiRNA target sequence
acggtgtaataagcgcacca

SEQ ID NO: 181532 - DNA, 20 bp, Artificial sequence
  SiRNA target sequence
cggtgtaataagcgcaccat

SEQ ID NO: 181533 - DNA, 20 bp, Artificial sequence
  SiRNA target sequence
ggtgtaataagcgcaccata

SEQ ID NO: 181534 - DNA, 20 bp, Artificial sequence
  SiRNA target sequence
gtgtaataagcgcaccatac

SEQ ID NO: 181535 - DNA, 20 bp, Artificial sequence
  SiRNA target sequence
tgtaataagcgcaccatacg

SEQ ID NO: 181536 - DNA, 20 bp, Artificial sequence
  SiRNA target sequence
gtaataagcgcaccatacgt

SEQ ID NO: 181537 - DNA, 20 bp, Artificial sequence
  SiRNA target sequence
taataagcgcaccatacgtt

SEQ ID NO: 181538 - DNA, 20 bp, Artificial sequence
  SiRNA target sequence
aataagcgcaccatacgtta

SEQ ID NO: 181539 - DNA, 20 bp, Artificial sequence
  SiRNA target sequence
ataagcgcaccatacgttat

SEQ ID NO: 181540 - DNA, 20 bp, Artificial sequence
  SiRNA target sequence
taagcgcaccatacgttatt

SEQ ID NO: 181541 - DNA, 20 bp, Artificial sequence
  SiRNA target sequence
aagcgcaccatacgttatta

SEQ ID NO: 181542 - DNA, 20 bp, Artificial sequence
  SiRNA target sequence
agcgcaccatacgttattaa

SEQ ID NO: 181543 - DNA, 20 bp, Artificial sequence
  SiRNA target sequence
gcgcaccatacgttattaaa

SEQ ID NO: 181544 - DNA, 20 bp, Artificial sequence
  SiRNA target sequence
cgcaccatacgttattaaat

SEQ ID NO: 181545 - DNA, 20 bp, Artificial sequence
  SiRNA target sequence
gcaccatacgttattaaatc

SEQ ID NO: 181546 - DNA, 20 bp, Artificial sequence
  SiRNA target sequence
caccatacgttattaaatca

SEQ ID NO: 181547 - DNA, 20 bp, Artificial sequence
  SiRNA target sequence
accatacgttattaaatcag

SEQ ID NO: 181548 - DNA, 20 bp, Artificial sequence
  SiRNA target sequence
ccatacgttattaaatcagc

SEQ ID NO: 181549 - DNA, 20 bp, Artificial sequence
  SiRNA target sequence
catacgttattaaatcagca

SEQ ID NO: 181550 - DNA, 20 bp, Artificial sequence
  SiRNA target sequence
atacgttattaaatcagcaa

SEQ ID NO: 181551 - DNA, 20 bp, Artificial sequence
  SiRNA target sequence
tacgttattaaatcagcaat

SEQ ID NO: 181552 - DNA, 20 bp, Artificial sequence
  SiRNA target sequence
acgttattaaatcagcaata

SEQ ID NO: 181553 - DNA, 20 bp, Artificial sequence
  SiRNA target sequence
cgttattaaatcagcaataa

SEQ ID NO: 181554 - DNA, 20 bp, Artificial sequence
  SiRNA target sequence
gttattaaatcagcaataaa

SEQ ID NO: 181555 - DNA, 20 bp, Artificial sequence
  SiRNA target sequence
ttattaaatcagcaataaat

SEQ ID NO: 181556 - DNA, 20 bp, Artificial sequence
  SiRNA target sequence
tattaaatcagcaataaata

SEQ ID NO: 181557 - DNA, 20 bp, Artificial sequence
  SiRNA target sequence
attaaatcagcaataaatat

SEQ ID NO: 181558 - DNA, 20 bp, Artificial sequence
  SiRNA target sequence
ttaaatcagcaataaatata

SEQ ID NO: 181559 - DNA, 20 bp, Artificial sequence
  SiRNA target sequence
taaatcagcaataaatatat

SEQ ID NO: 181560 - DNA, 20 bp, Artificial sequence
  SiRNA target sequence
aaatcagcaataaatatatt

SEQ ID NO: 181561 - DNA, 20 bp, Artificial sequence
  SiRNA target sequence
aatcagcaataaatatattt

SEQ ID NO: 181562 - DNA, 20 bp, Artificial sequence
  SiRNA target sequence
atcagcaataaatatatttc

SEQ ID NO: 181563 - DNA, 20 bp, Artificial sequence
  SiRNA target sequence
tcagcaataaatatatttct

SEQ ID NO: 181564 - DNA, 20 bp, Artificial sequence
  SiRNA target sequence
cagcaataaatatatttctt

SEQ ID NO: 181565 - DNA, 20 bp, Artificial sequence
  SiRNA target sequence
agcaataaatatatttcttg

SEQ ID NO: 181566 - DNA, 20 bp, Artificial sequence
  SiRNA target sequence
gcaataaatatatttcttga

SEQ ID NO: 181567 - DNA, 20 bp, Artificial sequence
  SiRNA target sequence
caataaatatatttcttgat

SEQ ID NO: 181568 - DNA, 20 bp, Artificial sequence
  SiRNA target sequence
aataaatatatttcttgatg

SEQ ID NO: 181569 - DNA, 20 bp, Artificial sequence
  SiRNA target sequence
ataaatatatttcttgatgg

SEQ ID NO: 181570 - DNA, 20 bp, Artificial sequence
  SiRNA target sequence
taaatatatttcttgatgga

SEQ ID NO: 181571 - DNA, 20 bp, Artificial sequence
  SiRNA target sequence
aaatatatttcttgatggat

SEQ ID NO: 181572 - DNA, 20 bp, Artificial sequence
  SiRNA target sequence
aatatatttcttgatggatt

SEQ ID NO: 181573 - DNA, 20 bp, Artificial sequence
  SiRNA target sequence
atatatttcttgatggattt

SEQ ID NO: 181574 - DNA, 20 bp, Artificial sequence
  SiRNA target sequence
tatatttcttgatggatttt

SEQ ID NO: 181575 - DNA, 20 bp, Artificial sequence
  SiRNA target sequence
atatttcttgatggattttt

SEQ ID NO: 181576 - DNA, 20 bp, Artificial sequence
  SiRNA target sequence
tatttcttgatggatttttg

SEQ ID NO: 181577 - DNA, 20 bp, Artificial sequence
  SiRNA target sequence
atttcttgatggatttttgc

SEQ ID NO: 181578 - DNA, 20 bp, Artificial sequence
  SiRNA target sequence
tttcttgatggatttttgcc

SEQ ID NO: 181579 - DNA, 20 bp, Artificial sequence
  SiRNA target sequence
ttcttgatggatttttgcct

SEQ ID NO: 181580 - DNA, 20 bp, Artificial sequence
  SiRNA target sequence
tcttgatggatttttgccta

SEQ ID NO: 181581 - DNA, 20 bp, Artificial sequence
  SiRNA target sequence
cttgatggatttttgcctac

SEQ ID NO: 181582 - DNA, 20 bp, Artificial sequence
  SiRNA target sequence
ttgatggatttttgcctaca

SEQ ID NO: 181583 - DNA, 20 bp, Artificial sequence
  SiRNA target sequence
tgatggatttttgcctacag

SEQ ID NO: 181584 - DNA, 20 bp, Artificial sequence
  SiRNA target sequence
gatggatttttgcctacaga

SEQ ID NO: 181585 - DNA, 20 bp, Artificial sequence
  SiRNA target sequence
atggatttttgcctacagaa

SEQ ID NO: 181586 - DNA, 20 bp, Artificial sequence
  SiRNA target sequence
tggatttttgcctacagaaa

SEQ ID NO: 181587 - DNA, 20 bp, Artificial sequence
  SiRNA target sequence
ggatttttgcctacagaaaa

SEQ ID NO: 181588 - DNA, 20 bp, Artificial sequence
  SiRNA target sequence
gatttttgcctacagaaaac

SEQ ID NO: 181589 - DNA, 20 bp, Artificial sequence
  SiRNA target sequence
atttttgcctacagaaaaca

SEQ ID NO: 181590 - DNA, 20 bp, Artificial sequence
  SiRNA target sequence
tttttgcctacagaaaacat

SEQ ID NO: 181591 - DNA, 20 bp, Artificial sequence
  SiRNA target sequence
ttttgcctacagaaaacatg

SEQ ID NO: 181592 - DNA, 20 bp, Artificial sequence
  SiRNA target sequence
tttgcctacagaaaacatga

SEQ ID NO: 181593 - DNA, 20 bp, Artificial sequence
  SiRNA target sequence
ttgcctacagaaaacatgaa

SEQ ID NO: 181594 - DNA, 20 bp, Artificial sequence
  SiRNA target sequence
tgcctacagaaaacatgaaa

SEQ ID NO: 181595 - DNA, 20 bp, Artificial sequence
  SiRNA target sequence
gcctacagaaaacatgaaat

SEQ ID NO: 181596 - DNA, 20 bp, Artificial sequence
  SiRNA target sequence
cctacagaaaacatgaaatt

SEQ ID NO: 181597 - DNA, 20 bp, Artificial sequence
  SiRNA target sequence
ctacagaaaacatgaaattt

SEQ ID NO: 181598 - DNA, 20 bp, Artificial sequence
  SiRNA target sequence
tacagaaaacatgaaattta

SEQ ID NO: 181599 - DNA, 20 bp, Artificial sequence
  SiRNA target sequence
acagaaaacatgaaatttag

SEQ ID NO: 181600 - DNA, 20 bp, Artificial sequence
  SiRNA target sequence
cagaaaacatgaaatttaga

SEQ ID NO: 181601 - DNA, 20 bp, Artificial sequence
  SiRNA target sequence
agaaaacatgaaatttagaa

SEQ ID NO: 181602 - DNA, 20 bp, Artificial sequence
  SiRNA target sequence
gaaaacatgaaatttagaaa

SEQ ID NO: 181603 - DNA, 20 bp, Artificial sequence
  SiRNA target sequence
aaaacatgaaatttagaaat

SEQ ID NO: 181604 - DNA, 20 bp, Artificial sequence
  SiRNA target sequence
aaacatgaaatttagaaatt

SEQ ID NO: 181605 - DNA, 20 bp, Artificial sequence
  SiRNA target sequence
aacatgaaatttagaaattc

SEQ ID NO: 181606 - DNA, 20 bp, Artificial sequence
  SiRNA target sequence
acatgaaatttagaaattca

SEQ ID NO: 181607 - DNA, 20 bp, Artificial sequence
  SiRNA target sequence
catgaaatttagaaattcag

SEQ ID NO: 181608 - DNA, 20 bp, Artificial sequence
  SiRNA target sequence
atgaaatttagaaattcaga

SEQ ID NO: 181609 - DNA, 20 bp, Artificial sequence
  SiRNA target sequence
tgaaatttagaaattcagag

SEQ ID NO: 181610 - DNA, 20 bp, Artificial sequence
  SiRNA target sequence
gaaatttagaaattcagagt

SEQ ID NO: 181611 - DNA, 20 bp, Artificial sequence
  SiRNA target sequence
aaatttagaaattcagagtt

SEQ ID NO: 181612 - DNA, 20 bp, Artificial sequence
  SiRNA target sequence
aatttagaaattcagagtta

SEQ ID NO: 181613 - DNA, 20 bp, Artificial sequence
  SiRNA target sequence
atttagaaattcagagttaa

SEQ ID NO: 181614 - DNA, 20 bp, Artificial sequence
  SiRNA target sequence
tttagaaattcagagttaaa

SEQ ID NO: 181615 - DNA, 20 bp, Artificial sequence
  SiRNA target sequence
ttagaaattcagagttaaag

SEQ ID NO: 181616 - DNA, 20 bp, Artificial sequence
  SiRNA target sequence
tagaaattcagagttaaagt

SEQ ID NO: 181617 - DNA, 20 bp, Artificial sequence
  SiRNA target sequence
agaaattcagagttaaagtt

SEQ ID NO: 181618 - DNA, 20 bp, Artificial sequence
  SiRNA target sequence
gaaattcagagttaaagttt

SEQ ID NO: 181619 - DNA, 20 bp, Artificial sequence
  SiRNA target sequence
aaattcagagttaaagttta

SEQ ID NO: 181620 - DNA, 20 bp, Artificial sequence
  SiRNA target sequence
aattcagagttaaagtttaa

SEQ ID NO: 181621 - DNA, 20 bp, Artificial sequence
  SiRNA target sequence
attcagagttaaagtttaat

SEQ ID NO: 181622 - DNA, 20 bp, Artificial sequence
  SiRNA target sequence
ttcagagttaaagtttaata

SEQ ID NO: 181623 - DNA, 20 bp, Artificial sequence
  SiRNA target sequence
tcagagttaaagtttaatat

SEQ ID NO: 181624 - DNA, 20 bp, Artificial sequence
  SiRNA target sequence
cagagttaaagtttaatatt

SEQ ID NO: 181625 - DNA, 20 bp, Artificial sequence
  SiRNA target sequence
agagttaaagtttaatattt

SEQ ID NO: 181626 - DNA, 20 bp, Artificial sequence
  SiRNA target sequence
gagttaaagtttaatatttc

SEQ ID NO: 181627 - DNA, 20 bp, Artificial sequence
  SiRNA target sequence
agttaaagtttaatatttcg

SEQ ID NO: 181628 - DNA, 20 bp, Artificial sequence
  SiRNA target sequence
gttaaagtttaatatttcgg

SEQ ID NO: 181629 - DNA, 20 bp, Artificial sequence
  SiRNA target sequence
ttaaagtttaatatttcgga

SEQ ID NO: 181630 - DNA, 20 bp, Artificial sequence
  SiRNA target sequence
taaagtttaatatttcggaa

SEQ ID NO: 181631 - DNA, 20 bp, Artificial sequence
  SiRNA target sequence
aaagtttaatatttcggaaa

SEQ ID NO: 181632 - DNA, 20 bp, Artificial sequence
  SiRNA target sequence
aagtttaatatttcggaaac

SEQ ID NO: 181633 - DNA, 20 bp, Artificial sequence
  SiRNA target sequence
agtttaatatttcggaaaca

SEQ ID NO: 181634 - DNA, 20 bp, Artificial sequence
  SiRNA target sequence
gtttaatatttcggaaacac

SEQ ID NO: 181635 - DNA, 20 bp, Artificial sequence
  SiRNA target sequence
tttaatatttcggaaacact

SEQ ID NO: 181636 - DNA, 20 bp, Artificial sequence
  SiRNA target sequence
ttaatatttcggaaacactt

SEQ ID NO: 181637 - DNA, 20 bp, Artificial sequence
  SiRNA target sequence
taatatttcggaaacacttg

SEQ ID NO: 181638 - DNA, 20 bp, Artificial sequence
  SiRNA target sequence
aatatttcggaaacacttga

SEQ ID NO: 181639 - DNA, 20 bp, Artificial sequence
  SiRNA target sequence
atatttcggaaacacttgat

SEQ ID NO: 181640 - DNA, 20 bp, Artificial sequence
  SiRNA target sequence
tatttcggaaacacttgata

SEQ ID NO: 181641 - DNA, 20 bp, Artificial sequence
  SiRNA target sequence
atttcggaaacacttgatag

SEQ ID NO: 181642 - DNA, 20 bp, Artificial sequence
  SiRNA target sequence
tttcggaaacacttgatagt

SEQ ID NO: 181643 - DNA, 20 bp, Artificial sequence
  SiRNA target sequence
ttcggaaacacttgatagta

SEQ ID NO: 181644 - DNA, 20 bp, Artificial sequence
  SiRNA target sequence
tcggaaacacttgatagtat

SEQ ID NO: 181645 - DNA, 20 bp, Artificial sequence
  SiRNA target sequence
cggaaacacttgatagtatt

SEQ ID NO: 181646 - DNA, 20 bp, Artificial sequence
  SiRNA target sequence
ggaaacacttgatagtatta

SEQ ID NO: 181647 - DNA, 20 bp, Artificial sequence
  SiRNA target sequence
gaaacacttgatagtattat

SEQ ID NO: 181648 - DNA, 20 bp, Artificial sequence
  SiRNA target sequence
aaacacttgatagtattata

SEQ ID NO: 181649 - DNA, 20 bp, Artificial sequence
  SiRNA target sequence
aacacttgatagtattatat

SEQ ID NO: 181650 - DNA, 20 bp, Artificial sequence
  SiRNA target sequence
acacttgatagtattatatc

SEQ ID NO: 181651 - DNA, 20 bp, Artificial sequence
  SiRNA target sequence
cacttgatagtattatatct

SEQ ID NO: 181652 - DNA, 20 bp, Artificial sequence
  SiRNA target sequence
acttgatagtattatatcta

SEQ ID NO: 181653 - DNA, 20 bp, Artificial sequence
  SiRNA target sequence
cttgatagtattatatctac

SEQ ID NO: 181654 - DNA, 20 bp, Artificial sequence
  SiRNA target sequence
ttgatagtattatatctacc

SEQ ID NO: 181655 - DNA, 20 bp, Artificial sequence
  SiRNA target sequence
tgatagtattatatctacca

SEQ ID NO: 181656 - DNA, 20 bp, Artificial sequence
  SiRNA target sequence
gatagtattatatctaccag

SEQ ID NO: 181657 - DNA, 20 bp, Artificial sequence
  SiRNA target sequence
atagtattatatctaccaga

SEQ ID NO: 181658 - DNA, 20 bp, Artificial sequence
  SiRNA target sequence
tagtattatatctaccagag

SEQ ID NO: 181659 - DNA, 20 bp, Artificial sequence
  SiRNA target sequence
agtattatatctaccagaga

SEQ ID NO: 181660 - DNA, 20 bp, Artificial sequence
  SiRNA target sequence
gtattatatctaccagagac

SEQ ID NO: 181661 - DNA, 20 bp, Artificial sequence
  SiRNA target sequence
tattatatctaccagagacc

SEQ ID NO: 181662 - DNA, 20 bp, Artificial sequence
  SiRNA target sequence
attatatctaccagagacca

SEQ ID NO: 181663 - DNA, 20 bp, Artificial sequence
  SiRNA target sequence
ttatatctaccagagaccag

SEQ ID NO: 181664 - DNA, 20 bp, Artificial sequence
  SiRNA target sequence
tatatctaccagagaccagt

SEQ ID NO: 181665 - DNA, 20 bp, Artificial sequence
  SiRNA target sequence
atatctaccagagaccagta

SEQ ID NO: 181666 - DNA, 20 bp, Artificial sequence
  SiRNA target sequence
tatctaccagagaccagtat

SEQ ID NO: 181667 - DNA, 20 bp, Artificial sequence
  SiRNA target sequence
atctaccagagaccagtatc

SEQ ID NO: 181668 - DNA, 20 bp, Artificial sequence
  SiRNA target sequence
tctaccagagaccagtatca

SEQ ID NO: 181669 - DNA, 20 bp, Artificial sequence
  SiRNA target sequence
ctaccagagaccagtatcat

SEQ ID NO: 181670 - DNA, 20 bp, Artificial sequence
  SiRNA target sequence
taccagagaccagtatcatt

SEQ ID NO: 181671 - DNA, 20 bp, Artificial sequence
  SiRNA target sequence
accagagaccagtatcatta

SEQ ID NO: 181672 - DNA, 20 bp, Artificial sequence
  SiRNA target sequence
ccagagaccagtatcattat

SEQ ID NO: 181673 - DNA, 20 bp, Artificial sequence
  SiRNA target sequence
cagagaccagtatcattatc

SEQ ID NO: 181674 - DNA, 20 bp, Artificial sequence
  SiRNA target sequence
agagaccagtatcattatcc

SEQ ID NO: 181675 - DNA, 20 bp, Artificial sequence
  SiRNA target sequence
gagaccagtatcattatccc

SEQ ID NO: 181676 - DNA, 20 bp, Artificial sequence
  SiRNA target sequence
agaccagtatcattatccca

SEQ ID NO: 181677 - DNA, 20 bp, Artificial sequence
  SiRNA target sequence
gaccagtatcattatcccaa

SEQ ID NO: 181678 - DNA, 20 bp, Artificial sequence
  SiRNA target sequence
accagtatcattatcccaat

SEQ ID NO: 181679 - DNA, 20 bp, Artificial sequence
  SiRNA target sequence
ccagtatcattatcccaatt

SEQ ID NO: 181680 - DNA, 20 bp, Artificial sequence
  SiRNA target sequence
cagtatcattatcccaattt

SEQ ID NO: 181681 - DNA, 20 bp, Artificial sequence
  SiRNA target sequence
agtatcattatcccaatttg

SEQ ID NO: 181682 - DNA, 20 bp, Artificial sequence
  SiRNA target sequence
gtatcattatcccaatttga

SEQ ID NO: 181683 - DNA, 20 bp, Artificial sequence
  SiRNA target sequence
tatcattatcccaatttgat

SEQ ID NO: 181684 - DNA, 20 bp, Artificial sequence
  SiRNA target sequence
atcattatcccaatttgata

SEQ ID NO: 181685 - DNA, 20 bp, Artificial sequence
  SiRNA target sequence
tcattatcccaatttgataa

SEQ ID NO: 181686 - DNA, 20 bp, Artificial sequence
  SiRNA target sequence
cattatcccaatttgataaa

SEQ ID NO: 181687 - DNA, 20 bp, Artificial sequence
  SiRNA target sequence
attatcccaatttgataaaa

SEQ ID NO: 181688 - DNA, 20 bp, Artificial sequence
  SiRNA target sequence
ttatcccaatttgataaaaa

SEQ ID NO: 181689 - DNA, 20 bp, Artificial sequence
  SiRNA target sequence
tatcccaatttgataaaaac

SEQ ID NO: 181690 - DNA, 20 bp, Artificial sequence
  SiRNA target sequence
atcccaatttgataaaaaca

SEQ ID NO: 181691 - DNA, 20 bp, Artificial sequence
  SiRNA target sequence
tcccaatttgataaaaacat

SEQ ID NO: 181692 - DNA, 20 bp, Artificial sequence
  SiRNA target sequence
cccaatttgataaaaacata

SEQ ID NO: 181693 - DNA, 20 bp, Artificial sequence
  SiRNA target sequence
ccaatttgataaaaacatat

SEQ ID NO: 181694 - DNA, 20 bp, Artificial sequence
  SiRNA target sequence
caatttgataaaaacatatc

SEQ ID NO: 181695 - DNA, 20 bp, Artificial sequence
  SiRNA target sequence
aatttgataaaaacatatcc

SEQ ID NO: 181696 - DNA, 20 bp, Artificial sequence
  SiRNA target sequence
atttgataaaaacatatcca

SEQ ID NO: 181697 - DNA, 20 bp, Artificial sequence
  SiRNA target sequence
tttgataaaaacatatccaa

SEQ ID NO: 181698 - DNA, 20 bp, Artificial sequence
  SiRNA target sequence
ttgataaaaacatatccaaa

SEQ ID NO: 181699 - DNA, 20 bp, Artificial sequence
  SiRNA target sequence
tgataaaaacatatccaaat

SEQ ID NO: 181700 - DNA, 20 bp, Artificial sequence
  SiRNA target sequence
gataaaaacatatccaaatt

SEQ ID NO: 181701 - DNA, 20 bp, Artificial sequence
  SiRNA target sequence
ataaaaacatatccaaattt

SEQ ID NO: 181702 - DNA, 20 bp, Artificial sequence
  SiRNA target sequence
taaaaacatatccaaatttt

SEQ ID NO: 181703 - DNA, 20 bp, Artificial sequence
  SiRNA target sequence
aaaaacatatccaaatttta

SEQ ID NO: 181704 - DNA, 20 bp, Artificial sequence
  SiRNA target sequence
aaaacatatccaaattttac

SEQ ID NO: 181705 - DNA, 20 bp, Artificial sequence
  SiRNA target sequence
aaacatatccaaattttacg

SEQ ID NO: 181706 - DNA, 20 bp, Artificial sequence
  SiRNA target sequence
aacatatccaaattttacgc

SEQ ID NO: 181707 - DNA, 20 bp, Artificial sequence
  SiRNA target sequence
acatatccaaattttacgct

SEQ ID NO: 181708 - DNA, 20 bp, Artificial sequence
  SiRNA target sequence
catatccaaattttacgctt

SEQ ID NO: 181709 - DNA, 20 bp, Artificial sequence
  SiRNA target sequence
atatccaaattttacgctta

SEQ ID NO: 181710 - DNA, 20 bp, Artificial sequence
  SiRNA target sequence
tatccaaattttacgcttaa

SEQ ID NO: 181711 - DNA, 20 bp, Artificial sequence
  SiRNA target sequence
atccaaattttacgcttaaa

SEQ ID NO: 181712 - DNA, 20 bp, Artificial sequence
  SiRNA target sequence
tccaaattttacgcttaaag

SEQ ID NO: 181713 - DNA, 20 bp, Artificial sequence
  SiRNA target sequence
ccaaattttacgcttaaagt

SEQ ID NO: 181714 - DNA, 20 bp, Artificial sequence
  SiRNA target sequence
caaattttacgcttaaagtt

SEQ ID NO: 181715 - DNA, 20 bp, Artificial sequence
  SiRNA target sequence
aaattttacgcttaaagttg

SEQ ID NO: 181716 - DNA, 20 bp, Artificial sequence
  SiRNA target sequence
aattttacgcttaaagttga

SEQ ID NO: 181717 - DNA, 20 bp, Artificial sequence
  SiRNA target sequence
attttacgcttaaagttgaa

SEQ ID NO: 181718 - DNA, 20 bp, Artificial sequence
  SiRNA target sequence
ttttacgcttaaagttgaag

SEQ ID NO: 181719 - DNA, 20 bp, Artificial sequence
  SiRNA target sequence
tttacgcttaaagttgaagg

SEQ ID NO: 181720 - DNA, 20 bp, Artificial sequence
  SiRNA target sequence
ttacgcttaaagttgaaggc

SEQ ID NO: 181721 - DNA, 20 bp, Artificial sequence
  SiRNA target sequence
tacgcttaaagttgaaggcg

SEQ ID NO: 181722 - DNA, 20 bp, Artificial sequence
  SiRNA target sequence
acgcttaaagttgaaggcgg

SEQ ID NO: 181723 - DNA, 20 bp, Artificial sequence
  SiRNA target sequence
cgcttaaagttgaaggcggt

SEQ ID NO: 181724 - DNA, 20 bp, Artificial sequence
  SiRNA target sequence
gcttaaagttgaaggcggta

SEQ ID NO: 181725 - DNA, 20 bp, Artificial sequence
  SiRNA target sequence
cttaaagttgaaggcggtaa

SEQ ID NO: 181726 - DNA, 20 bp, Artificial sequence
  SiRNA target sequence
ttaaagttgaaggcggtaac

SEQ ID NO: 181727 - DNA, 20 bp, Artificial sequence
  SiRNA target sequence
taaagttgaaggcggtaact

SEQ ID NO: 181728 - DNA, 20 bp, Artificial sequence
  SiRNA target sequence
aaagttgaaggcggtaactt

SEQ ID NO: 181729 - DNA, 20 bp, Artificial sequence
  SiRNA target sequence
aagttgaaggcggtaacttt

SEQ ID NO: 181730 - DNA, 20 bp, Artificial sequence
  SiRNA target sequence
agttgaaggcggtaactttt

SEQ ID NO: 181731 - DNA, 20 bp, Artificial sequence
  SiRNA target sequence
gttgaaggcggtaacttttc

SEQ ID NO: 181732 - DNA, 20 bp, Artificial sequence
  SiRNA target sequence
ttgaaggcggtaacttttca

SEQ ID NO: 181733 - DNA, 20 bp, Artificial sequence
  SiRNA target sequence
tgaaggcggtaacttttcag

SEQ ID NO: 181734 - DNA, 20 bp, Artificial sequence
  SiRNA target sequence
gaaggcggtaacttttcaga

SEQ ID NO: 181735 - DNA, 20 bp, Artificial sequence
  SiRNA target sequence
aaggcggtaacttttcagat

SEQ ID NO: 181736 - DNA, 20 bp, Artificial sequence
  SiRNA target sequence
aggcggtaacttttcagatt

SEQ ID NO: 181737 - DNA, 20 bp, Artificial sequence
  SiRNA target sequence
ggcggtaacttttcagattc

SEQ ID NO: 181738 - DNA, 20 bp, Artificial sequence
  SiRNA target sequence
gcggtaacttttcagattct

SEQ ID NO: 181739 - DNA, 20 bp, Artificial sequence
  SiRNA target sequence
cggtaacttttcagattctg

SEQ ID NO: 181740 - DNA, 20 bp, Artificial sequence
  SiRNA target sequence
ggtaacttttcagattctga

SEQ ID NO: 181741 - DNA, 20 bp, Artificial sequence
  SiRNA target sequence
gtaacttttcagattctgaa

SEQ ID NO: 181742 - DNA, 20 bp, Artificial sequence
  SiRNA target sequence
taacttttcagattctgaaa

SEQ ID NO: 181743 - DNA, 20 bp, Artificial sequence
  SiRNA target sequence
aacttttcagattctgaaat

SEQ ID NO: 181744 - DNA, 20 bp, Artificial sequence
  SiRNA target sequence
acttttcagattctgaaatt

SEQ ID NO: 181745 - DNA, 20 bp, Artificial sequence
  SiRNA target sequence
cttttcagattctgaaattg

SEQ ID NO: 181746 - DNA, 20 bp, Artificial sequence
  SiRNA target sequence
ttttcagattctgaaattgt

SEQ ID NO: 181747 - DNA, 20 bp, Artificial sequence
  SiRNA target sequence
tttcagattctgaaattgtt

SEQ ID NO: 181748 - DNA, 20 bp, Artificial sequence
  SiRNA target sequence
ttcagattctgaaattgttg

SEQ ID NO: 181749 - DNA, 20 bp, Artificial sequence
  SiRNA target sequence
tcagattctgaaattgttgt

SEQ ID NO: 181750 - DNA, 20 bp, Artificial sequence
  SiRNA target sequence
cagattctgaaattgttgta

SEQ ID NO: 181751 - DNA, 20 bp, Artificial sequence
  SiRNA target sequence
agattctgaaattgttgtat

SEQ ID NO: 181752 - DNA, 20 bp, Artificial sequence
  SiRNA target sequence
gattctgaaattgttgtatt

SEQ ID NO: 181753 - DNA, 20 bp, Artificial sequence
  SiRNA target sequence
attctgaaattgttgtattt

SEQ ID NO: 181754 - DNA, 20 bp, Artificial sequence
  SiRNA target sequence
ttctgaaattgttgtatttc

SEQ ID NO: 181755 - DNA, 20 bp, Artificial sequence
  SiRNA target sequence
tctgaaattgttgtatttct

SEQ ID NO: 181756 - DNA, 20 bp, Artificial sequence
  SiRNA target sequence
ctgaaattgttgtatttctt

SEQ ID NO: 181757 - DNA, 20 bp, Artificial sequence
  SiRNA target sequence
tgaaattgttgtatttcttg

SEQ ID NO: 181758 - DNA, 20 bp, Artificial sequence
  SiRNA target sequence
gaaattgttgtatttcttgg

SEQ ID NO: 181759 - DNA, 20 bp, Artificial sequence
  SiRNA target sequence
aaattgttgtatttcttggt

SEQ ID NO: 181760 - DNA, 20 bp, Artificial sequence
  SiRNA target sequence
aattgttgtatttcttggtg

SEQ ID NO: 181761 - DNA, 20 bp, Artificial sequence
  SiRNA target sequence
attgttgtatttcttggtga

SEQ ID NO: 181762 - DNA, 20 bp, Artificial sequence
  SiRNA target sequence
ttgttgtatttcttggtgaa

SEQ ID NO: 181763 - DNA, 20 bp, Artificial sequence
  SiRNA target sequence
tgttgtatttcttggtgaaa

SEQ ID NO: 181764 - DNA, 20 bp, Artificial sequence
  SiRNA target sequence
gttgtatttcttggtgaaaa

SEQ ID NO: 181765 - DNA, 20 bp, Artificial sequence
  SiRNA target sequence
ttgtatttcttggtgaaaat

SEQ ID NO: 181766 - DNA, 20 bp, Artificial sequence
  SiRNA target sequence
tgtatttcttggtgaaaatg

SEQ ID NO: 181767 - DNA, 20 bp, Artificial sequence
  SiRNA target sequence
gtatttcttggtgaaaatgg

SEQ ID NO: 181768 - DNA, 20 bp, Artificial sequence
  SiRNA target sequence
tatttcttggtgaaaatgga

SEQ ID NO: 181769 - DNA, 20 bp, Artificial sequence
  SiRNA target sequence
atttcttggtgaaaatggaa

SEQ ID NO: 181770 - DNA, 20 bp, Artificial sequence
  SiRNA target sequence
tttcttggtgaaaatggaat

SEQ ID NO: 181771 - DNA, 20 bp, Artificial sequence
  SiRNA target sequence
ttcttggtgaaaatggaatg

SEQ ID NO: 181772 - DNA, 20 bp, Artificial sequence
  SiRNA target sequence
tcttggtgaaaatggaatgg

SEQ ID NO: 181773 - DNA, 20 bp, Artificial sequence
  SiRNA target sequence
cttggtgaaaatggaatggg

SEQ ID NO: 181774 - DNA, 20 bp, Artificial sequence
  SiRNA target sequence
ttggtgaaaatggaatgggc

SEQ ID NO: 181775 - DNA, 20 bp, Artificial sequence
  SiRNA target sequence
tggtgaaaatggaatgggca

SEQ ID NO: 181776 - DNA, 20 bp, Artificial sequence
  SiRNA target sequence
ggtgaaaatggaatgggcaa

SEQ ID NO: 181777 - DNA, 20 bp, Artificial sequence
  SiRNA target sequence
gtgaaaatggaatgggcaaa

SEQ ID NO: 181778 - DNA, 20 bp, Artificial sequence
  SiRNA target sequence
tgaaaatggaatgggcaaaa

SEQ ID NO: 181779 - DNA, 20 bp, Artificial sequence
  SiRNA target sequence
gaaaatggaatgggcaaaac

SEQ ID NO: 181780 - DNA, 20 bp, Artificial sequence
  SiRNA target sequence
aaaatggaatgggcaaaact

SEQ ID NO: 181781 - DNA, 20 bp, Artificial sequence
  SiRNA target sequence
aaatggaatgggcaaaacta

SEQ ID NO: 181782 - DNA, 20 bp, Artificial sequence
  SiRNA target sequence
aatggaatgggcaaaactac

SEQ ID NO: 181783 - DNA, 20 bp, Artificial sequence
  SiRNA target sequence
atggaatgggcaaaactact

SEQ ID NO: 181784 - DNA, 20 bp, Artificial sequence
  SiRNA target sequence
tggaatgggcaaaactactt

SEQ ID NO: 181785 - DNA, 20 bp, Artificial sequence
  SiRNA target sequence
ggaatgggcaaaactacttt

SEQ ID NO: 181786 - DNA, 20 bp, Artificial sequence
  SiRNA target sequence
gaatgggcaaaactacttta

SEQ ID NO: 181787 - DNA, 20 bp, Artificial sequence
  SiRNA target sequence
aatgggcaaaactactttag

SEQ ID NO: 181788 - DNA, 20 bp, Artificial sequence
  SiRNA target sequence
atgggcaaaactactttagt

SEQ ID NO: 181789 - DNA, 20 bp, Artificial sequence
  SiRNA target sequence
tgggcaaaactactttagta

SEQ ID NO: 181790 - DNA, 20 bp, Artificial sequence
  SiRNA target sequence
gggcaaaactactttagtag

SEQ ID NO: 181791 - DNA, 20 bp, Artificial sequence
  SiRNA target sequence
ggcaaaactactttagtagg

SEQ ID NO: 181792 - DNA, 20 bp, Artificial sequence
  SiRNA target sequence
gcaaaactactttagtaggt

SEQ ID NO: 181793 - DNA, 20 bp, Artificial sequence
  SiRNA target sequence
caaaactactttagtaggtt

SEQ ID NO: 181794 - DNA, 20 bp, Artificial sequence
  SiRNA target sequence
aaaactactttagtaggttt

SEQ ID NO: 181795 - DNA, 20 bp, Artificial sequence
  SiRNA target sequence
aaactactttagtaggtttg

SEQ ID NO: 181796 - DNA, 20 bp, Artificial sequence
  SiRNA target sequence
aactactttagtaggtttga

SEQ ID NO: 181797 - DNA, 20 bp, Artificial sequence
  SiRNA target sequence
actactttagtaggtttgat

SEQ ID NO: 181798 - DNA, 20 bp, Artificial sequence
  SiRNA target sequence
ctactttagtaggtttgatt

SEQ ID NO: 181799 - DNA, 20 bp, Artificial sequence
  SiRNA target sequence
tactttagtaggtttgattt

SEQ ID NO: 181800 - DNA, 20 bp, Artificial sequence
  SiRNA target sequence
actttagtaggtttgatttc

SEQ ID NO: 181801 - DNA, 20 bp, Artificial sequence
  SiRNA target sequence
ctttagtaggtttgatttcg

SEQ ID NO: 181802 - DNA, 20 bp, Artificial sequence
  SiRNA target sequence
tttagtaggtttgatttcgg

SEQ ID NO: 181803 - DNA, 20 bp, Artificial sequence
  SiRNA target sequence
ttagtaggtttgatttcggg

SEQ ID NO: 181804 - DNA, 20 bp, Artificial sequence
  SiRNA target sequence
tagtaggtttgatttcgggg

SEQ ID NO: 181805 - DNA, 20 bp, Artificial sequence
  SiRNA target sequence
agtaggtttgatttcggggt

SEQ ID NO: 181806 - DNA, 20 bp, Artificial sequence
  SiRNA target sequence
gtaggtttgatttcggggtt

SEQ ID NO: 181807 - DNA, 20 bp, Artificial sequence
  SiRNA target sequence
taggtttgatttcggggtta

SEQ ID NO: 181808 - DNA, 20 bp, Artificial sequence
  SiRNA target sequence
aggtttgatttcggggttaa

SEQ ID NO: 181809 - DNA, 20 bp, Artificial sequence
  SiRNA target sequence
ggtttgatttcggggttaat

SEQ ID NO: 181810 - DNA, 20 bp, Artificial sequence
  SiRNA target sequence
gtttgatttcggggttaatt

SEQ ID NO: 181811 - DNA, 20 bp, Artificial sequence
  SiRNA target sequence
tttgatttcggggttaatta

SEQ ID NO: 181812 - DNA, 20 bp, Artificial sequence
  SiRNA target sequence
ttgatttcggggttaattaa

SEQ ID NO: 181813 - DNA, 20 bp, Artificial sequence
  SiRNA target sequence
tgatttcggggttaattaaa

SEQ ID NO: 181814 - DNA, 20 bp, Artificial sequence
  SiRNA target sequence
gatttcggggttaattaaag

SEQ ID NO: 181815 - DNA, 20 bp, Artificial sequence
  SiRNA target sequence
atttcggggttaattaaaga

SEQ ID NO: 181816 - DNA, 20 bp, Artificial sequence
  SiRNA target sequence
tttcggggttaattaaagat

SEQ ID NO: 181817 - DNA, 20 bp, Artificial sequence
  SiRNA target sequence
ttcggggttaattaaagatg

SEQ ID NO: 181818 - DNA, 20 bp, Artificial sequence
  SiRNA target sequence
tcggggttaattaaagatga

SEQ ID NO: 181819 - DNA, 20 bp, Artificial sequence
  SiRNA target sequence
cggggttaattaaagatgat

SEQ ID NO: 181820 - DNA, 20 bp, Artificial sequence
  SiRNA target sequence
ggggttaattaaagatgata

SEQ ID NO: 181821 - DNA, 20 bp, Artificial sequence
  SiRNA target sequence
gggttaattaaagatgataa

SEQ ID NO: 181822 - DNA, 20 bp, Artificial sequence
  SiRNA target sequence
ggttaattaaagatgataac

SEQ ID NO: 181823 - DNA, 20 bp, Artificial sequence
  SiRNA target sequence
gttaattaaagatgataacg

SEQ ID NO: 181824 - DNA, 20 bp, Artificial sequence
  SiRNA target sequence
ttaattaaagatgataacgg

SEQ ID NO: 181825 - DNA, 20 bp, Artificial sequence
  SiRNA target sequence
taattaaagatgataacggg

SEQ ID NO: 181826 - DNA, 20 bp, Artificial sequence
  SiRNA target sequence
aattaaagatgataacgggg

SEQ ID NO: 181827 - DNA, 20 bp, Artificial sequence
  SiRNA target sequence
attaaagatgataacgggga

SEQ ID NO: 181828 - DNA, 20 bp, Artificial sequence
  SiRNA target sequence
ttaaagatgataacggggaa

SEQ ID NO: 181829 - DNA, 20 bp, Artificial sequence
  SiRNA target sequence
taaagatgataacggggaag

SEQ ID NO: 181830 - DNA, 20 bp, Artificial sequence
  SiRNA target sequence
aaagatgataacggggaaga

SEQ ID NO: 181831 - DNA, 20 bp, Artificial sequence
  SiRNA target sequence
aagatgataacggggaagag

SEQ ID NO: 181832 - DNA, 20 bp, Artificial sequence
  SiRNA target sequence
agatgataacggggaagagt

SEQ ID NO: 181833 - DNA, 20 bp, Artificial sequence
  SiRNA target sequence
gatgataacggggaagagtt

SEQ ID NO: 181834 - DNA, 20 bp, Artificial sequence
  SiRNA target sequence
atgataacggggaagagttc

SEQ ID NO: 181835 - DNA, 20 bp, Artificial sequence
  SiRNA target sequence
tgataacggggaagagttcg

SEQ ID NO: 181836 - DNA, 20 bp, Artificial sequence
  SiRNA target sequence
gataacggggaagagttcgg

SEQ ID NO: 181837 - DNA, 20 bp, Artificial sequence
  SiRNA target sequence
ataacggggaagagttcggt

SEQ ID NO: 181838 - DNA, 20 bp, Artificial sequence
  SiRNA target sequence
taacggggaagagttcggtt

SEQ ID NO: 181839 - DNA, 20 bp, Artificial sequence
  SiRNA target sequence
aacggggaagagttcggttt

SEQ ID NO: 181840 - DNA, 20 bp, Artificial sequence
  SiRNA target sequence
acggggaagagttcggtttg

SEQ ID NO: 181841 - DNA, 20 bp, Artificial sequence
  SiRNA target sequence
cggggaagagttcggtttgt

SEQ ID NO: 181842 - DNA, 20 bp, Artificial sequence
  SiRNA target sequence
ggggaagagttcggtttgtt

SEQ ID NO: 181843 - DNA, 20 bp, Artificial sequence
  SiRNA target sequence
gggaagagttcggtttgttg

SEQ ID NO: 181844 - DNA, 20 bp, Artificial sequence
  SiRNA target sequence
ggaagagttcggtttgttgt

SEQ ID NO: 181845 - DNA, 20 bp, Artificial sequence
  SiRNA target sequence
gaagagttcggtttgttgtc

SEQ ID NO: 181846 - DNA, 20 bp, Artificial sequence
  SiRNA target sequence
aagagttcggtttgttgtca

SEQ ID NO: 181847 - DNA, 20 bp, Artificial sequence
  SiRNA target sequence
agagttcggtttgttgtcat

SEQ ID NO: 181848 - DNA, 20 bp, Artificial sequence
  SiRNA target sequence
gagttcggtttgttgtcata

SEQ ID NO: 181849 - DNA, 20 bp, Artificial sequence
  SiRNA target sequence
agttcggtttgttgtcatat

SEQ ID NO: 181850 - DNA, 20 bp, Artificial sequence
  SiRNA target sequence
gttcggtttgttgtcatata

SEQ ID NO: 181851 - DNA, 20 bp, Artificial sequence
  SiRNA target sequence
ttcggtttgttgtcatatag

SEQ ID NO: 181852 - DNA, 20 bp, Artificial sequence
  SiRNA target sequence
tcggtttgttgtcatatagt

SEQ ID NO: 181853 - DNA, 20 bp, Artificial sequence
  SiRNA target sequence
cggtttgttgtcatatagtc

SEQ ID NO: 181854 - DNA, 20 bp, Artificial sequence
  SiRNA target sequence
ggtttgttgtcatatagtct

SEQ ID NO: 181855 - DNA, 20 bp, Artificial sequence
  SiRNA target sequence
gtttgttgtcatatagtctt

SEQ ID NO: 181856 - DNA, 20 bp, Artificial sequence
  SiRNA target sequence
tttgttgtcatatagtctta

SEQ ID NO: 181857 - DNA, 20 bp, Artificial sequence
  SiRNA target sequence
ttgttgtcatatagtcttaa

SEQ ID NO: 181858 - DNA, 20 bp, Artificial sequence
  SiRNA target sequence
tgttgtcatatagtcttaaa

SEQ ID NO: 181859 - DNA, 20 bp, Artificial sequence
  SiRNA target sequence
gttgtcatatagtcttaaac

SEQ ID NO: 181860 - DNA, 20 bp, Artificial sequence
  SiRNA target sequence
ttgtcatatagtcttaaacc

SEQ ID NO: 181861 - DNA, 20 bp, Artificial sequence
  SiRNA target sequence
tgtcatatagtcttaaaccg

SEQ ID NO: 181862 - DNA, 20 bp, Artificial sequence
  SiRNA target sequence
gtcatatagtcttaaaccgc

SEQ ID NO: 181863 - DNA, 20 bp, Artificial sequence
  SiRNA target sequence
tcatatagtcttaaaccgca

SEQ ID NO: 181864 - DNA, 20 bp, Artificial sequence
  SiRNA target sequence
catatagtcttaaaccgcaa

SEQ ID NO: 181865 - DNA, 20 bp, Artificial sequence
  SiRNA target sequence
atatagtcttaaaccgcaaa

SEQ ID NO: 181866 - DNA, 20 bp, Artificial sequence
  SiRNA target sequence
tatagtcttaaaccgcaaaa

SEQ ID NO: 181867 - DNA, 20 bp, Artificial sequence
  SiRNA target sequence
atagtcttaaaccgcaaaaa

SEQ ID NO: 181868 - DNA, 20 bp, Artificial sequence
  SiRNA target sequence
tagtcttaaaccgcaaaaaa

SEQ ID NO: 181869 - DNA, 20 bp, Artificial sequence
  SiRNA target sequence
agtcttaaaccgcaaaaaat

SEQ ID NO: 181870 - DNA, 20 bp, Artificial sequence
  SiRNA target sequence
gtcttaaaccgcaaaaaatc

SEQ ID NO: 181871 - DNA, 20 bp, Artificial sequence
  SiRNA target sequence
tcttaaaccgcaaaaaatca

SEQ ID NO: 181872 - DNA, 20 bp, Artificial sequence
  SiRNA target sequence
cttaaaccgcaaaaaatcat

SEQ ID NO: 181873 - DNA, 20 bp, Artificial sequence
  SiRNA target sequence
ttaaaccgcaaaaaatcata

SEQ ID NO: 181874 - DNA, 20 bp, Artificial sequence
  SiRNA target sequence
taaaccgcaaaaaatcatac

SEQ ID NO: 181875 - DNA, 20 bp, Artificial sequence
  SiRNA target sequence
aaaccgcaaaaaatcatacc

SEQ ID NO: 181876 - DNA, 20 bp, Artificial sequence
  SiRNA target sequence
aaccgcaaaaaatcataccg

SEQ ID NO: 181877 - DNA, 20 bp, Artificial sequence
  SiRNA target sequence
accgcaaaaaatcataccga

SEQ ID NO: 181878 - DNA, 20 bp, Artificial sequence
  SiRNA target sequence
ccgcaaaaaatcataccgaa

SEQ ID NO: 181879 - DNA, 20 bp, Artificial sequence
  SiRNA target sequence
cgcaaaaaatcataccgaaa

SEQ ID NO: 181880 - DNA, 20 bp, Artificial sequence
  SiRNA target sequence
gcaaaaaatcataccgaaat

SEQ ID NO: 181881 - DNA, 20 bp, Artificial sequence
  SiRNA target sequence
caaaaaatcataccgaaata

SEQ ID NO: 181882 - DNA, 20 bp, Artificial sequence
  SiRNA target sequence
aaaaaatcataccgaaatac

SEQ ID NO: 181883 - DNA, 20 bp, Artificial sequence
  SiRNA target sequence
aaaaatcataccgaaataca

SEQ ID NO: 181884 - DNA, 20 bp, Artificial sequence
  SiRNA target sequence
aaaatcataccgaaatacaa

SEQ ID NO: 181885 - DNA, 20 bp, Artificial sequence
  SiRNA target sequence
aaatcataccgaaatacaaa

SEQ ID NO: 181886 - DNA, 20 bp, Artificial sequence
  SiRNA target sequence
aatcataccgaaatacaaag

SEQ ID NO: 181887 - DNA, 20 bp, Artificial sequence
  SiRNA target sequence
atcataccgaaatacaaagg

SEQ ID NO: 181888 - DNA, 20 bp, Artificial sequence
  SiRNA target sequence
tcataccgaaatacaaagga

SEQ ID NO: 181889 - DNA, 20 bp, Artificial sequence
  SiRNA target sequence
cataccgaaatacaaaggaa

SEQ ID NO: 181890 - DNA, 20 bp, Artificial sequence
  SiRNA target sequence
ataccgaaatacaaaggaac

SEQ ID NO: 181891 - DNA, 20 bp, Artificial sequence
  SiRNA target sequence
taccgaaatacaaaggaaca

SEQ ID NO: 181892 - DNA, 20 bp, Artificial sequence
  SiRNA target sequence
accgaaatacaaaggaacag

SEQ ID NO: 181893 - DNA, 20 bp, Artificial sequence
  SiRNA target sequence
ccgaaatacaaaggaacagt

SEQ ID NO: 181894 - DNA, 20 bp, Artificial sequence
  SiRNA target sequence
cgaaatacaaaggaacagtt

SEQ ID NO: 181895 - DNA, 20 bp, Artificial sequence
  SiRNA target sequence
gaaatacaaaggaacagtta

SEQ ID NO: 181896 - DNA, 20 bp, Artificial sequence
  SiRNA target sequence
aaatacaaaggaacagttag

SEQ ID NO: 181897 - DNA, 20 bp, Artificial sequence
  SiRNA target sequence
aatacaaaggaacagttaga

SEQ ID NO: 181898 - DNA, 20 bp, Artificial sequence
  SiRNA target sequence
atacaaaggaacagttagag

SEQ ID NO: 181899 - DNA, 20 bp, Artificial sequence
  SiRNA target sequence
tacaaaggaacagttagaga

SEQ ID NO: 181900 - DNA, 20 bp, Artificial sequence
  SiRNA target sequence
acaaaggaacagttagagat

SEQ ID NO: 181901 - DNA, 20 bp, Artificial sequence
  SiRNA target sequence
caaaggaacagttagagatc

SEQ ID NO: 181902 - DNA, 20 bp, Artificial sequence
  SiRNA target sequence
aaaggaacagttagagatct

SEQ ID NO: 181903 - DNA, 20 bp, Artificial sequence
  SiRNA target sequence
aaggaacagttagagatctt

SEQ ID NO: 181904 - DNA, 20 bp, Artificial sequence
  SiRNA target sequence
aggaacagttagagatcttt

SEQ ID NO: 181905 - DNA, 20 bp, Artificial sequence
  SiRNA target sequence
ggaacagttagagatctttt

SEQ ID NO: 181906 - DNA, 20 bp, Artificial sequence
  SiRNA target sequence
gaacagttagagatcttttt

SEQ ID NO: 181907 - DNA, 20 bp, Artificial sequence
  SiRNA target sequence
aacagttagagatcttttta

SEQ ID NO: 181908 - DNA, 20 bp, Artificial sequence
  SiRNA target sequence
acagttagagatctttttat

SEQ ID NO: 181909 - DNA, 20 bp, Artificial sequence
  SiRNA target sequence
cagttagagatctttttatg

SEQ ID NO: 181910 - DNA, 20 bp, Artificial sequence
  SiRNA target sequence
agttagagatctttttatgt

SEQ ID NO: 181911 - DNA, 20 bp, Artificial sequence
  SiRNA target sequence
gttagagatctttttatgtc

SEQ ID NO: 181912 - DNA, 20 bp, Artificial sequence
  SiRNA target sequence
ttagagatctttttatgtca

SEQ ID NO: 181913 - DNA, 20 bp, Artificial sequence
  SiRNA target sequence
tagagatctttttatgtcaa

SEQ ID NO: 181914 - DNA, 20 bp, Artificial sequence
  SiRNA target sequence
agagatctttttatgtcaaa

SEQ ID NO: 181915 - DNA, 20 bp, Artificial sequence
  SiRNA target sequence
gagatctttttatgtcaaaa

SEQ ID NO: 181916 - DNA, 20 bp, Artificial sequence
  SiRNA target sequence
agatctttttatgtcaaaaa

SEQ ID NO: 181917 - DNA, 20 bp, Artificial sequence
  SiRNA target sequence
gatctttttatgtcaaaaat

SEQ ID NO: 181918 - DNA, 20 bp, Artificial sequence
  SiRNA target sequence
atctttttatgtcaaaaatt

SEQ ID NO: 181919 - DNA, 20 bp, Artificial sequence
  SiRNA target sequence
tctttttatgtcaaaaattc

SEQ ID NO: 181920 - DNA, 20 bp, Artificial sequence
  SiRNA target sequence
ctttttatgtcaaaaattcg

SEQ ID NO: 181921 - DNA, 20 bp, Artificial sequence
  SiRNA target sequence
tttttatgtcaaaaattcgt

SEQ ID NO: 181922 - DNA, 20 bp, Artificial sequence
  SiRNA target sequence
ttttatgtcaaaaattcgtt

SEQ ID NO: 181923 - DNA, 20 bp, Artificial sequence
  SiRNA target sequence
tttatgtcaaaaattcgttc

SEQ ID NO: 181924 - DNA, 20 bp, Artificial sequence
  SiRNA target sequence
ttatgtcaaaaattcgttct

SEQ ID NO: 181925 - DNA, 20 bp, Artificial sequence
  SiRNA target sequence
tatgtcaaaaattcgttctt

SEQ ID NO: 181926 - DNA, 20 bp, Artificial sequence
  SiRNA target sequence
atgtcaaaaattcgttcttc

SEQ ID NO: 181927 - DNA, 20 bp, Artificial sequence
  SiRNA target sequence
tgtcaaaaattcgttcttcc

SEQ ID NO: 181928 - DNA, 20 bp, Artificial sequence
  SiRNA target sequence
gtcaaaaattcgttcttcct

SEQ ID NO: 181929 - DNA, 20 bp, Artificial sequence
  SiRNA target sequence
tcaaaaattcgttcttcctt

SEQ ID NO: 181930 - DNA, 20 bp, Artificial sequence
  SiRNA target sequence
caaaaattcgttcttccttt

SEQ ID NO: 181931 - DNA, 20 bp, Artificial sequence
  SiRNA target sequence
aaaaattcgttcttcctttt

SEQ ID NO: 181932 - DNA, 20 bp, Artificial sequence
  SiRNA target sequence
aaaattcgttcttccttttt

SEQ ID NO: 181933 - DNA, 20 bp, Artificial sequence
  SiRNA target sequence
aaattcgttcttccttttta

SEQ ID NO: 181934 - DNA, 20 bp, Artificial sequence
  SiRNA target sequence
aattcgttcttcctttttag

SEQ ID NO: 181935 - DNA, 20 bp, Artificial sequence
  SiRNA target sequence
attcgttcttcctttttaga

SEQ ID NO: 181936 - DNA, 20 bp, Artificial sequence
  SiRNA target sequence
ttcgttcttcctttttagac

SEQ ID NO: 181937 - DNA, 20 bp, Artificial sequence
  SiRNA target sequence
tcgttcttcctttttagacg

SEQ ID NO: 181938 - DNA, 20 bp, Artificial sequence
  SiRNA target sequence
cgttcttcctttttagacgc

SEQ ID NO: 181939 - DNA, 20 bp, Artificial sequence
  SiRNA target sequence
gttcttcctttttagacgct

SEQ ID NO: 181940 - DNA, 20 bp, Artificial sequence
  SiRNA target sequence
ttcttcctttttagacgcta

SEQ ID NO: 181941 - DNA, 20 bp, Artificial sequence
  SiRNA target sequence
tcttcctttttagacgctaa

SEQ ID NO: 181942 - DNA, 20 bp, Artificial sequence
  SiRNA target sequence
cttcctttttagacgctaat

SEQ ID NO: 181943 - DNA, 20 bp, Artificial sequence
  SiRNA target sequence
ttcctttttagacgctaatt

SEQ ID NO: 181944 - DNA, 20 bp, Artificial sequence
  SiRNA target sequence
tcctttttagacgctaattt

SEQ ID NO: 181945 - DNA, 20 bp, Artificial sequence
  SiRNA target sequence
cctttttagacgctaatttt

SEQ ID NO: 181946 - DNA, 20 bp, Artificial sequence
  SiRNA target sequence
ctttttagacgctaattttg

SEQ ID NO: 181947 - DNA, 20 bp, Artificial sequence
  SiRNA target sequence
tttttagacgctaattttgt

SEQ ID NO: 181948 - DNA, 20 bp, Artificial sequence
  SiRNA target sequence
ttttagacgctaattttgtt

SEQ ID NO: 181949 - DNA, 20 bp, Artificial sequence
  SiRNA target sequence
tttagacgctaattttgtta

SEQ ID NO: 181950 - DNA, 20 bp, Artificial sequence
  SiRNA target sequence
ttagacgctaattttgttaa

SEQ ID NO: 181951 - DNA, 20 bp, Artificial sequence
  SiRNA target sequence
tagacgctaattttgttaat

SEQ ID NO: 181952 - DNA, 20 bp, Artificial sequence
  SiRNA target sequence
agacgctaattttgttaatg

SEQ ID NO: 181953 - DNA, 20 bp, Artificial sequence
  SiRNA target sequence
gacgctaattttgttaatga

SEQ ID NO: 181954 - DNA, 20 bp, Artificial sequence
  SiRNA target sequence
acgctaattttgttaatgaa

SEQ ID NO: 181955 - DNA, 20 bp, Artificial sequence
  SiRNA target sequence
cgctaattttgttaatgaag

SEQ ID NO: 181956 - DNA, 20 bp, Artificial sequence
  SiRNA target sequence
gctaattttgttaatgaagc

SEQ ID NO: 181957 - DNA, 20 bp, Artificial sequence
  SiRNA target sequence
ctaattttgttaatgaagct

SEQ ID NO: 181958 - DNA, 20 bp, Artificial sequence
  SiRNA target sequence
taattttgttaatgaagcta

SEQ ID NO: 181959 - DNA, 20 bp, Artificial sequence
  SiRNA target sequence
aattttgttaatgaagctat

SEQ ID NO: 181960 - DNA, 20 bp, Artificial sequence
  SiRNA target sequence
attttgttaatgaagctatt

SEQ ID NO: 181961 - DNA, 20 bp, Artificial sequence
  SiRNA target sequence
ttttgttaatgaagctatta

SEQ ID NO: 181962 - DNA, 20 bp, Artificial sequence
  SiRNA target sequence
tttgttaatgaagctattaa

SEQ ID NO: 181963 - DNA, 20 bp, Artificial sequence
  SiRNA target sequence
ttgttaatgaagctattaaa

SEQ ID NO: 181964 - DNA, 20 bp, Artificial sequence
  SiRNA target sequence
tgttaatgaagctattaaac

SEQ ID NO: 181965 - DNA, 20 bp, Artificial sequence
  SiRNA target sequence
gttaatgaagctattaaacc

SEQ ID NO: 181966 - DNA, 20 bp, Artificial sequence
  SiRNA target sequence
ttaatgaagctattaaacct

SEQ ID NO: 181967 - DNA, 20 bp, Artificial sequence
  SiRNA target sequence
taatgaagctattaaacctt

SEQ ID NO: 181968 - DNA, 20 bp, Artificial sequence
  SiRNA target sequence
aatgaagctattaaaccttt

SEQ ID NO: 181969 - DNA, 20 bp, Artificial sequence
  SiRNA target sequence
atgaagctattaaaccttta

SEQ ID NO: 181970 - DNA, 20 bp, Artificial sequence
  SiRNA target sequence
tgaagctattaaacctttag

SEQ ID NO: 181971 - DNA, 20 bp, Artificial sequence
  SiRNA target sequence
gaagctattaaacctttaga

SEQ ID NO: 181972 - DNA, 20 bp, Artificial sequence
  SiRNA target sequence
aagctattaaacctttagat

SEQ ID NO: 181973 - DNA, 20 bp, Artificial sequence
  SiRNA target sequence
agctattaaacctttagata

SEQ ID NO: 181974 - DNA, 20 bp, Artificial sequence
  SiRNA target sequence
gctattaaacctttagatat

SEQ ID NO: 181975 - DNA, 20 bp, Artificial sequence
  SiRNA target sequence
ctattaaacctttagatatt

SEQ ID NO: 181976 - DNA, 20 bp, Artificial sequence
  SiRNA target sequence
tattaaacctttagatattc

SEQ ID NO: 181977 - DNA, 20 bp, Artificial sequence
  SiRNA target sequence
attaaacctttagatattca

SEQ ID NO: 181978 - DNA, 20 bp, Artificial sequence
  SiRNA target sequence
ttaaacctttagatattcat

SEQ ID NO: 181979 - DNA, 20 bp, Artificial sequence
  SiRNA target sequence
taaacctttagatattcatc

SEQ ID NO: 181980 - DNA, 20 bp, Artificial sequence
  SiRNA target sequence
aaacctttagatattcatca

SEQ ID NO: 181981 - DNA, 20 bp, Artificial sequence
  SiRNA target sequence
aacctttagatattcatcat

SEQ ID NO: 181982 - DNA, 20 bp, Artificial sequence
  SiRNA target sequence
acctttagatattcatcatt

SEQ ID NO: 181983 - DNA, 20 bp, Artificial sequence
  SiRNA target sequence
cctttagatattcatcattt

SEQ ID NO: 181984 - DNA, 20 bp, Artificial sequence
  SiRNA target sequence
ctttagatattcatcattta

SEQ ID NO: 181985 - DNA, 20 bp, Artificial sequence
  SiRNA target sequence
tttagatattcatcatttat

SEQ ID NO: 181986 - DNA, 20 bp, Artificial sequence
  SiRNA target sequence
ttagatattcatcatttata

SEQ ID NO: 181987 - DNA, 20 bp, Artificial sequence
  SiRNA target sequence
tagatattcatcatttatac

SEQ ID NO: 181988 - DNA, 20 bp, Artificial sequence
  SiRNA target sequence
agatattcatcatttatacg

SEQ ID NO: 181989 - DNA, 20 bp, Artificial sequence
  SiRNA target sequence
gatattcatcatttatacga

SEQ ID NO: 181990 - DNA, 20 bp, Artificial sequence
  SiRNA target sequence
atattcatcatttatacgac

SEQ ID NO: 181991 - DNA, 20 bp, Artificial sequence
  SiRNA target sequence
tattcatcatttatacgacc

SEQ ID NO: 181992 - DNA, 20 bp, Artificial sequence
  SiRNA target sequence
attcatcatttatacgacca

SEQ ID NO: 181993 - DNA, 20 bp, Artificial sequence
  SiRNA target sequence
ttcatcatttatacgaccaa

SEQ ID NO: 181994 - DNA, 20 bp, Artificial sequence
  SiRNA target sequence
tcatcatttatacgaccaac

SEQ ID NO: 181995 - DNA, 20 bp, Artificial sequence
  SiRNA target sequence
catcatttatacgaccaact

SEQ ID NO: 181996 - DNA, 20 bp, Artificial sequence
  SiRNA target sequence
atcatttatacgaccaactt

SEQ ID NO: 181997 - DNA, 20 bp, Artificial sequence
  SiRNA target sequence
tcatttatacgaccaacttg

SEQ ID NO: 181998 - DNA, 20 bp, Artificial sequence
  SiRNA target sequence
catttatacgaccaacttgt

SEQ ID NO: 181999 - DNA, 20 bp, Artificial sequence
  SiRNA target sequence
atttatacgaccaacttgta

SEQ ID NO: 182000 - DNA, 20 bp, Artificial sequence
  SiRNA target sequence
tttatacgaccaacttgtag

SEQ ID NO: 182001 - DNA, 20 bp, Artificial sequence
  SiRNA target sequence
ttatacgaccaacttgtaga

SEQ ID NO: 182002 - DNA, 20 bp, Artificial sequence
  SiRNA target sequence
tatacgaccaacttgtagaa

SEQ ID NO: 182003 - DNA, 20 bp, Artificial sequence
  SiRNA target sequence
atacgaccaacttgtagaaa

SEQ ID NO: 182004 - DNA, 20 bp, Artificial sequence
  SiRNA target sequence
tacgaccaacttgtagaaaa

SEQ ID NO: 182005 - DNA, 20 bp, Artificial sequence
  SiRNA target sequence
acgaccaacttgtagaaaac

SEQ ID NO: 182006 - DNA, 20 bp, Artificial sequence
  SiRNA target sequence
cgaccaacttgtagaaaact

SEQ ID NO: 182007 - DNA, 20 bp, Artificial sequence
  SiRNA target sequence
gaccaacttgtagaaaactt

SEQ ID NO: 182008 - DNA, 20 bp, Artificial sequence
  SiRNA target sequence
accaacttgtagaaaacttg

SEQ ID NO: 182009 - DNA, 20 bp, Artificial sequence
  SiRNA target sequence
ccaacttgtagaaaacttga

SEQ ID NO: 182010 - DNA, 20 bp, Artificial sequence
  SiRNA target sequence
caacttgtagaaaacttgag

SEQ ID NO: 182011 - DNA, 20 bp, Artificial sequence
  SiRNA target sequence
aacttgtagaaaacttgagt

SEQ ID NO: 182012 - DNA, 20 bp, Artificial sequence
  SiRNA target sequence
acttgtagaaaacttgagtg

SEQ ID NO: 182013 - DNA, 20 bp, Artificial sequence
  SiRNA target sequence
cttgtagaaaacttgagtgg

SEQ ID NO: 182014 - DNA, 20 bp, Artificial sequence
  SiRNA target sequence
ttgtagaaaacttgagtggt

SEQ ID NO: 182015 - DNA, 20 bp, Artificial sequence
  SiRNA target sequence
tgtagaaaacttgagtggtg

SEQ ID NO: 182016 - DNA, 20 bp, Artificial sequence
  SiRNA target sequence
gtagaaaacttgagtggtgg

SEQ ID NO: 182017 - DNA, 20 bp, Artificial sequence
  SiRNA target sequence
tagaaaacttgagtggtgga

SEQ ID NO: 182018 - DNA, 20 bp, Artificial sequence
  SiRNA target sequence
agaaaacttgagtggtggag

SEQ ID NO: 182019 - DNA, 20 bp, Artificial sequence
  SiRNA target sequence
gaaaacttgagtggtggaga

SEQ ID NO: 182020 - DNA, 20 bp, Artificial sequence
  SiRNA target sequence
aaaacttgagtggtggagaa

SEQ ID NO: 182021 - DNA, 20 bp, Artificial sequence
  SiRNA target sequence
aaacttgagtggtggagaat

SEQ ID NO: 182022 - DNA, 20 bp, Artificial sequence
  SiRNA target sequence
aacttgagtggtggagaatt

SEQ ID NO: 182023 - DNA, 20 bp, Artificial sequence
  SiRNA target sequence
acttgagtggtggagaatta

SEQ ID NO: 182024 - DNA, 20 bp, Artificial sequence
  SiRNA target sequence
cttgagtggtggagaattac

SEQ ID NO: 182025 - DNA, 20 bp, Artificial sequence
  SiRNA target sequence
ttgagtggtggagaattaca

SEQ ID NO: 182026 - DNA, 20 bp, Artificial sequence
  SiRNA target sequence
tgagtggtggagaattacaa

SEQ ID NO: 182027 - DNA, 20 bp, Artificial sequence
  SiRNA target sequence
gagtggtggagaattacaaa

SEQ ID NO: 182028 - DNA, 20 bp, Artificial sequence
  SiRNA target sequence
agtggtggagaattacaaag

SEQ ID NO: 182029 - DNA, 20 bp, Artificial sequence
  SiRNA target sequence
gtggtggagaattacaaaga

SEQ ID NO: 182030 - DNA, 20 bp, Artificial sequence
  SiRNA target sequence
tggtggagaattacaaagaa

SEQ ID NO: 182031 - DNA, 20 bp, Artificial sequence
  SiRNA target sequence
ggtggagaattacaaagaat

SEQ ID NO: 182032 - DNA, 20 bp, Artificial sequence
  SiRNA target sequence
gtggagaattacaaagaatt

SEQ ID NO: 182033 - DNA, 20 bp, Artificial sequence
  SiRNA target sequence
tggagaattacaaagaattg

SEQ ID NO: 182034 - DNA, 20 bp, Artificial sequence
  SiRNA target sequence
ggagaattacaaagaattgc

SEQ ID NO: 182035 - DNA, 20 bp, Artificial sequence
  SiRNA target sequence
gagaattacaaagaattgca

SEQ ID NO: 182036 - DNA, 20 bp, Artificial sequence
  SiRNA target sequence
agaattacaaagaattgcaa

SEQ ID NO: 182037 - DNA, 20 bp, Artificial sequence
  SiRNA target sequence
gaattacaaagaattgcaat

SEQ ID NO: 182038 - DNA, 20 bp, Artificial sequence
  SiRNA target sequence
aattacaaagaattgcaata

SEQ ID NO: 182039 - DNA, 20 bp, Artificial sequence
  SiRNA target sequence
attacaaagaattgcaataa

SEQ ID NO: 182040 - DNA, 20 bp, Artificial sequence
  SiRNA target sequence
ttacaaagaattgcaataat

SEQ ID NO: 182041 - DNA, 20 bp, Artificial sequence
  SiRNA target sequence
tacaaagaattgcaataata

SEQ ID NO: 182042 - DNA, 20 bp, Artificial sequence
  SiRNA target sequence
acaaagaattgcaataataa

SEQ ID NO: 182043 - DNA, 20 bp, Artificial sequence
  SiRNA target sequence
caaagaattgcaataataat

SEQ ID NO: 182044 - DNA, 20 bp, Artificial sequence
  SiRNA target sequence
aaagaattgcaataataata

SEQ ID NO: 182045 - DNA, 20 bp, Artificial sequence
  SiRNA target sequence
aagaattgcaataataatat

SEQ ID NO: 182046 - DNA, 20 bp, Artificial sequence
  SiRNA target sequence
agaattgcaataataatatg

SEQ ID NO: 182047 - DNA, 20 bp, Artificial sequence
  SiRNA target sequence
gaattgcaataataatatgt

SEQ ID NO: 182048 - DNA, 20 bp, Artificial sequence
  SiRNA target sequence
aattgcaataataatatgtt

SEQ ID NO: 182049 - DNA, 20 bp, Artificial sequence
  SiRNA target sequence
attgcaataataatatgttt

SEQ ID NO: 182050 - DNA, 20 bp, Artificial sequence
  SiRNA target sequence
ttgcaataataatatgttta

SEQ ID NO: 182051 - DNA, 20 bp, Artificial sequence
  SiRNA target sequence
tgcaataataatatgtttag

SEQ ID NO: 182052 - DNA, 20 bp, Artificial sequence
  SiRNA target sequence
gcaataataatatgtttagg

SEQ ID NO: 182053 - DNA, 20 bp, Artificial sequence
  SiRNA target sequence
caataataatatgtttagga

SEQ ID NO: 182054 - DNA, 20 bp, Artificial sequence
  SiRNA target sequence
aataataatatgtttaggaa

SEQ ID NO: 182055 - DNA, 20 bp, Artificial sequence
  SiRNA target sequence
ataataatatgtttaggaaa

SEQ ID NO: 182056 - DNA, 20 bp, Artificial sequence
  SiRNA target sequence
taataatatgtttaggaaaa

SEQ ID NO: 182057 - DNA, 20 bp, Artificial sequence
  SiRNA target sequence
aataatatgtttaggaaaag

SEQ ID NO: 182058 - DNA, 20 bp, Artificial sequence
  SiRNA target sequence
ataatatgtttaggaaaaga

SEQ ID NO: 182059 - DNA, 20 bp, Artificial sequence
  SiRNA target sequence
taatatgtttaggaaaagat

SEQ ID NO: 182060 - DNA, 20 bp, Artificial sequence
  SiRNA target sequence
aatatgtttaggaaaagatg

SEQ ID NO: 182061 - DNA, 20 bp, Artificial sequence
  SiRNA target sequence
atatgtttaggaaaagatgc

SEQ ID NO: 182062 - DNA, 20 bp, Artificial sequence
  SiRNA target sequence
tatgtttaggaaaagatgct

SEQ ID NO: 182063 - DNA, 20 bp, Artificial sequence
  SiRNA target sequence
atgtttaggaaaagatgcta

SEQ ID NO: 182064 - DNA, 20 bp, Artificial sequence
  SiRNA target sequence
tgtttaggaaaagatgctaa

SEQ ID NO: 182065 - DNA, 20 bp, Artificial sequence
  SiRNA target sequence
gtttaggaaaagatgctaac

SEQ ID NO: 182066 - DNA, 20 bp, Artificial sequence
  SiRNA target sequence
tttaggaaaagatgctaacc

SEQ ID NO: 182067 - DNA, 20 bp, Artificial sequence
  SiRNA target sequence
ttaggaaaagatgctaacct

SEQ ID NO: 182068 - DNA, 20 bp, Artificial sequence
  SiRNA target sequence
taggaaaagatgctaacctt

SEQ ID NO: 182069 - DNA, 20 bp, Artificial sequence
  SiRNA target sequence
aggaaaagatgctaaccttt

SEQ ID NO: 182070 - DNA, 20 bp, Artificial sequence
  SiRNA target sequence
ggaaaagatgctaaccttta

SEQ ID NO: 182071 - DNA, 20 bp, Artificial sequence
  SiRNA target sequence
gaaaagatgctaacctttat

SEQ ID NO: 182072 - DNA, 20 bp, Artificial sequence
  SiRNA target sequence
aaaagatgctaacctttatt

SEQ ID NO: 182073 - DNA, 20 bp, Artificial sequence
  SiRNA target sequence
aaagatgctaacctttattt

SEQ ID NO: 182074 - DNA, 20 bp, Artificial sequence
  SiRNA target sequence
aagatgctaacctttattta

SEQ ID NO: 182075 - DNA, 20 bp, Artificial sequence
  SiRNA target sequence
agatgctaacctttatttat

SEQ ID NO: 182076 - DNA, 20 bp, Artificial sequence
  SiRNA target sequence
gatgctaacctttatttatt

SEQ ID NO: 182077 - DNA, 20 bp, Artificial sequence
  SiRNA target sequence
atgctaacctttatttatta

SEQ ID NO: 182078 - DNA, 20 bp, Artificial sequence
  SiRNA target sequence
tgctaacctttatttattag

SEQ ID NO: 182079 - DNA, 20 bp, Artificial sequence
  SiRNA target sequence
gctaacctttatttattaga

SEQ ID NO: 182080 - DNA, 20 bp, Artificial sequence
  SiRNA target sequence
ctaacctttatttattagat

SEQ ID NO: 182081 - DNA, 20 bp, Artificial sequence
  SiRNA target sequence
taacctttatttattagatg

SEQ ID NO: 182082 - DNA, 20 bp, Artificial sequence
  SiRNA target sequence
aacctttatttattagatga

SEQ ID NO: 182083 - DNA, 20 bp, Artificial sequence
  SiRNA target sequence
acctttatttattagatgaa

SEQ ID NO: 182084 - DNA, 20 bp, Artificial sequence
  SiRNA target sequence
cctttatttattagatgaac

SEQ ID NO: 182085 - DNA, 20 bp, Artificial sequence
  SiRNA target sequence
ctttatttattagatgaacc

SEQ ID NO: 182086 - DNA, 20 bp, Artificial sequence
  SiRNA target sequence
tttatttattagatgaacct

SEQ ID NO: 182087 - DNA, 20 bp, Artificial sequence
  SiRNA target sequence
ttatttattagatgaacctt

SEQ ID NO: 182088 - DNA, 20 bp, Artificial sequence
  SiRNA target sequence
tatttattagatgaaccttc

SEQ ID NO: 182089 - DNA, 20 bp, Artificial sequence
  SiRNA target sequence
atttattagatgaaccttct

SEQ ID NO: 182090 - DNA, 20 bp, Artificial sequence
  SiRNA target sequence
tttattagatgaaccttctg

SEQ ID NO: 182091 - DNA, 20 bp, Artificial sequence
  SiRNA target sequence
ttattagatgaaccttctgc

SEQ ID NO: 182092 - DNA, 20 bp, Artificial sequence
  SiRNA target sequence
tattagatgaaccttctgcg

SEQ ID NO: 182093 - DNA, 20 bp, Artificial sequence
  SiRNA target sequence
attagatgaaccttctgcgt

SEQ ID NO: 182094 - DNA, 20 bp, Artificial sequence
  SiRNA target sequence
ttagatgaaccttctgcgta

SEQ ID NO: 182095 - DNA, 20 bp, Artificial sequence
  SiRNA target sequence
tagatgaaccttctgcgtat

SEQ ID NO: 182096 - DNA, 20 bp, Artificial sequence
  SiRNA target sequence
agatgaaccttctgcgtatc

SEQ ID NO: 182097 - DNA, 20 bp, Artificial sequence
  SiRNA target sequence
gatgaaccttctgcgtatct

SEQ ID NO: 182098 - DNA, 20 bp, Artificial sequence
  SiRNA target sequence
atgaaccttctgcgtatcta

SEQ ID NO: 182099 - DNA, 20 bp, Artificial sequence
  SiRNA target sequence
tgaaccttctgcgtatctag

SEQ ID NO: 182100 - DNA, 20 bp, Artificial sequence
  SiRNA target sequence
gaaccttctgcgtatctaga

SEQ ID NO: 182101 - DNA, 20 bp, Artificial sequence
  SiRNA target sequence
aaccttctgcgtatctagat

SEQ ID NO: 182102 - DNA, 20 bp, Artificial sequence
  SiRNA target sequence
accttctgcgtatctagatt

SEQ ID NO: 182103 - DNA, 20 bp, Artificial sequence
  SiRNA target sequence
ccttctgcgtatctagattc

SEQ ID NO: 182104 - DNA, 20 bp, Artificial sequence
  SiRNA target sequence
cttctgcgtatctagattca

SEQ ID NO: 182105 - DNA, 20 bp, Artificial sequence
  SiRNA target sequence
ttctgcgtatctagattcag

SEQ ID NO: 182106 - DNA, 20 bp, Artificial sequence
  SiRNA target sequence
tctgcgtatctagattcaga

SEQ ID NO: 182107 - DNA, 20 bp, Artificial sequence
  SiRNA target sequence
ctgcgtatctagattcagat

SEQ ID NO: 182108 - DNA, 20 bp, Artificial sequence
  SiRNA target sequence
tgcgtatctagattcagatc

SEQ ID NO: 182109 - DNA, 20 bp, Artificial sequence
  SiRNA target sequence
gcgtatctagattcagatca

SEQ ID NO: 182110 - DNA, 20 bp, Artificial sequence
  SiRNA target sequence
cgtatctagattcagatcag

SEQ ID NO: 182111 - DNA, 20 bp, Artificial sequence
  SiRNA target sequence
gtatctagattcagatcaga

SEQ ID NO: 182112 - DNA, 20 bp, Artificial sequence
  SiRNA target sequence
tatctagattcagatcagag

SEQ ID NO: 182113 - DNA, 20 bp, Artificial sequence
  SiRNA target sequence
atctagattcagatcagaga

SEQ ID NO: 182114 - DNA, 20 bp, Artificial sequence
  SiRNA target sequence
tctagattcagatcagagaa

SEQ ID NO: 182115 - DNA, 20 bp, Artificial sequence
  SiRNA target sequence
ctagattcagatcagagaat

SEQ ID NO: 182116 - DNA, 20 bp, Artificial sequence
  SiRNA target sequence
tagattcagatcagagaata

SEQ ID NO: 182117 - DNA, 20 bp, Artificial sequence
  SiRNA target sequence
agattcagatcagagaatag

SEQ ID NO: 182118 - DNA, 20 bp, Artificial sequence
  SiRNA target sequence
gattcagatcagagaatagc

SEQ ID NO: 182119 - DNA, 20 bp, Artificial sequence
  SiRNA target sequence
attcagatcagagaatagcg

SEQ ID NO: 182120 - DNA, 20 bp, Artificial sequence
  SiRNA target sequence
ttcagatcagagaatagcga

SEQ ID NO: 182121 - DNA, 20 bp, Artificial sequence
  SiRNA target sequence
tcagatcagagaatagcgat

SEQ ID NO: 182122 - DNA, 20 bp, Artificial sequence
  SiRNA target sequence
cagatcagagaatagcgatt

SEQ ID NO: 182123 - DNA, 20 bp, Artificial sequence
  SiRNA target sequence
agatcagagaatagcgattt

SEQ ID NO: 182124 - DNA, 20 bp, Artificial sequence
  SiRNA target sequence
gatcagagaatagcgatttc

SEQ ID NO: 182125 - DNA, 20 bp, Artificial sequence
  SiRNA target sequence
atcagagaatagcgatttca

SEQ ID NO: 182126 - DNA, 20 bp, Artificial sequence
  SiRNA target sequence
tcagagaatagcgatttcaa

SEQ ID NO: 182127 - DNA, 20 bp, Artificial sequence
  SiRNA target sequence
cagagaatagcgatttcaaa

SEQ ID NO: 182128 - DNA, 20 bp, Artificial sequence
  SiRNA target sequence
agagaatagcgatttcaaaa

SEQ ID NO: 182129 - DNA, 20 bp, Artificial sequence
  SiRNA target sequence
gagaatagcgatttcaaaag

SEQ ID NO: 182130 - DNA, 20 bp, Artificial sequence
  SiRNA target sequence
agaatagcgatttcaaaagt

SEQ ID NO: 182131 - DNA, 20 bp, Artificial sequence
  SiRNA target sequence
gaatagcgatttcaaaagtt

SEQ ID NO: 182132 - DNA, 20 bp, Artificial sequence
  SiRNA target sequence
aatagcgatttcaaaagtta

SEQ ID NO: 182133 - DNA, 20 bp, Artificial sequence
  SiRNA target sequence
atagcgatttcaaaagttat

SEQ ID NO: 182134 - DNA, 20 bp, Artificial sequence
  SiRNA target sequence
tagcgatttcaaaagttata

SEQ ID NO: 182135 - DNA, 20 bp, Artificial sequence
  SiRNA target sequence
agcgatttcaaaagttataa

SEQ ID NO: 182136 - DNA, 20 bp, Artificial sequence
  SiRNA target sequence
gcgatttcaaaagttataaa

SEQ ID NO: 182137 - DNA, 20 bp, Artificial sequence
  SiRNA target sequence
cgatttcaaaagttataaaa

SEQ ID NO: 182138 - DNA, 20 bp, Artificial sequence
  SiRNA target sequence
gatttcaaaagttataaaaa

SEQ ID NO: 182139 - DNA, 20 bp, Artificial sequence
  SiRNA target sequence
atttcaaaagttataaaaag

SEQ ID NO: 182140 - DNA, 20 bp, Artificial sequence
  SiRNA target sequence
tttcaaaagttataaaaagg

SEQ ID NO: 182141 - DNA, 20 bp, Artificial sequence
  SiRNA target sequence
ttcaaaagttataaaaaggt

SEQ ID NO: 182142 - DNA, 20 bp, Artificial sequence
  SiRNA target sequence
tcaaaagttataaaaaggtt

SEQ ID NO: 182143 - DNA, 20 bp, Artificial sequence
  SiRNA target sequence
caaaagttataaaaaggttt

SEQ ID NO: 182144 - DNA, 20 bp, Artificial sequence
  SiRNA target sequence
aaaagttataaaaaggttta

SEQ ID NO: 182145 - DNA, 20 bp, Artificial sequence
  SiRNA target sequence
aaagttataaaaaggtttat

SEQ ID NO: 182146 - DNA, 20 bp, Artificial sequence
  SiRNA target sequence
aagttataaaaaggtttatt

SEQ ID NO: 182147 - DNA, 20 bp, Artificial sequence
  SiRNA target sequence
agttataaaaaggtttattt

SEQ ID NO: 182148 - DNA, 20 bp, Artificial sequence
  SiRNA target sequence
gttataaaaaggtttattta

SEQ ID NO: 182149 - DNA, 20 bp, Artificial sequence
  SiRNA target sequence
ttataaaaaggtttatttat

SEQ ID NO: 182150 - DNA, 20 bp, Artificial sequence
  SiRNA target sequence
tataaaaaggtttatttatg

SEQ ID NO: 182151 - DNA, 20 bp, Artificial sequence
  SiRNA target sequence
ataaaaaggtttatttatgg

SEQ ID NO: 182152 - DNA, 20 bp, Artificial sequence
  SiRNA target sequence
taaaaaggtttatttatggg

SEQ ID NO: 182153 - DNA, 20 bp, Artificial sequence
  SiRNA target sequence
aaaaaggtttatttatggga

SEQ ID NO: 182154 - DNA, 20 bp, Artificial sequence
  SiRNA target sequence
aaaaggtttatttatgggaa

SEQ ID NO: 182155 - DNA, 20 bp, Artificial sequence
  SiRNA target sequence
aaaggtttatttatgggaag

SEQ ID NO: 182156 - DNA, 20 bp, Artificial sequence
  SiRNA target sequence
aaggtttatttatgggaaga

SEQ ID NO: 182157 - DNA, 20 bp, Artificial sequence
  SiRNA target sequence
aggtttatttatgggaagaa

SEQ ID NO: 182158 - DNA, 20 bp, Artificial sequence
  SiRNA target sequence
ggtttatttatgggaagaag

SEQ ID NO: 182159 - DNA, 20 bp, Artificial sequence
  SiRNA target sequence
gtttatttatgggaagaagc

SEQ ID NO: 182160 - DNA, 20 bp, Artificial sequence
  SiRNA target sequence
tttatttatgggaagaagcg

SEQ ID NO: 182161 - DNA, 20 bp, Artificial sequence
  SiRNA target sequence
ttatttatgggaagaagcga

SEQ ID NO: 182162 - DNA, 20 bp, Artificial sequence
  SiRNA target sequence
tatttatgggaagaagcgaa

SEQ ID NO: 182163 - DNA, 20 bp, Artificial sequence
  SiRNA target sequence
atttatgggaagaagcgaac

SEQ ID NO: 182164 - DNA, 20 bp, Artificial sequence
  SiRNA target sequence
tttatgggaagaagcgaaca

SEQ ID NO: 182165 - DNA, 20 bp, Artificial sequence
  SiRNA target sequence
ttatgggaagaagcgaacag

SEQ ID NO: 182166 - DNA, 20 bp, Artificial sequence
  SiRNA target sequence
tatgggaagaagcgaacagc

SEQ ID NO: 182167 - DNA, 20 bp, Artificial sequence
  SiRNA target sequence
atgggaagaagcgaacagcc

SEQ ID NO: 182168 - DNA, 20 bp, Artificial sequence
  SiRNA target sequence
tgggaagaagcgaacagcct

SEQ ID NO: 182169 - DNA, 20 bp, Artificial sequence
  SiRNA target sequence
gggaagaagcgaacagcctt

SEQ ID NO: 182170 - DNA, 20 bp, Artificial sequence
  SiRNA target sequence
ggaagaagcgaacagccttt

SEQ ID NO: 182171 - DNA, 20 bp, Artificial sequence
  SiRNA target sequence
gaagaagcgaacagcctttg

SEQ ID NO: 182172 - DNA, 20 bp, Artificial sequence
  SiRNA target sequence
aagaagcgaacagcctttgt

SEQ ID NO: 182173 - DNA, 20 bp, Artificial sequence
  SiRNA target sequence
agaagcgaacagcctttgtg

SEQ ID NO: 182174 - DNA, 20 bp, Artificial sequence
  SiRNA target sequence
gaagcgaacagcctttgtgg

SEQ ID NO: 182175 - DNA, 20 bp, Artificial sequence
  SiRNA target sequence
aagcgaacagcctttgtggt

SEQ ID NO: 182176 - DNA, 20 bp, Artificial sequence
  SiRNA target sequence
agcgaacagcctttgtggtt

SEQ ID NO: 182177 - DNA, 20 bp, Artificial sequence
  SiRNA target sequence
gcgaacagcctttgtggttg

SEQ ID NO: 182178 - DNA, 20 bp, Artificial sequence
  SiRNA target sequence
cgaacagcctttgtggttga

SEQ ID NO: 182179 - DNA, 20 bp, Artificial sequence
  SiRNA target sequence
gaacagcctttgtggttgaa

SEQ ID NO: 182180 - DNA, 20 bp, Artificial sequence
  SiRNA target sequence
aacagcctttgtggttgaac

SEQ ID NO: 182181 - DNA, 20 bp, Artificial sequence
  SiRNA target sequence
acagcctttgtggttgaaca

SEQ ID NO: 182182 - DNA, 20 bp, Artificial sequence
  SiRNA target sequence
cagcctttgtggttgaacat

SEQ ID NO: 182183 - DNA, 20 bp, Artificial sequence
  SiRNA target sequence
agcctttgtggttgaacatg

SEQ ID NO: 182184 - DNA, 20 bp, Artificial sequence
  SiRNA target sequence
gcctttgtggttgaacatga

SEQ ID NO: 182185 - DNA, 20 bp, Artificial sequence
  SiRNA target sequence
cctttgtggttgaacatgat

SEQ ID NO: 182186 - DNA, 20 bp, Artificial sequence
  SiRNA target sequence
ctttgtggttgaacatgatt

SEQ ID NO: 182187 - DNA, 20 bp, Artificial sequence
  SiRNA target sequence
tttgtggttgaacatgattt

SEQ ID NO: 182188 - DNA, 20 bp, Artificial sequence
  SiRNA target sequence
ttgtggttgaacatgattta

SEQ ID NO: 182189 - DNA, 20 bp, Artificial sequence
  SiRNA target sequence
tgtggttgaacatgatttaa

SEQ ID NO: 182190 - DNA, 20 bp, Artificial sequence
  SiRNA target sequence
gtggttgaacatgatttaat

SEQ ID NO: 182191 - DNA, 20 bp, Artificial sequence
  SiRNA target sequence
tggttgaacatgatttaatt

SEQ ID NO: 182192 - DNA, 20 bp, Artificial sequence
  SiRNA target sequence
ggttgaacatgatttaattg

SEQ ID NO: 182193 - DNA, 20 bp, Artificial sequence
  SiRNA target sequence
gttgaacatgatttaattgt

SEQ ID NO: 182194 - DNA, 20 bp, Artificial sequence
  SiRNA target sequence
ttgaacatgatttaattgta

SEQ ID NO: 182195 - DNA, 20 bp, Artificial sequence
  SiRNA target sequence
tgaacatgatttaattgtag

SEQ ID NO: 182196 - DNA, 20 bp, Artificial sequence
  SiRNA target sequence
gaacatgatttaattgtagg

SEQ ID NO: 182197 - DNA, 20 bp, Artificial sequence
  SiRNA target sequence
aacatgatttaattgtaggt

SEQ ID NO: 182198 - DNA, 20 bp, Artificial sequence
  SiRNA target sequence
acatgatttaattgtaggta

SEQ ID NO: 182199 - DNA, 20 bp, Artificial sequence
  SiRNA target sequence
catgatttaattgtaggtac

SEQ ID NO: 182200 - DNA, 20 bp, Artificial sequence
  SiRNA target sequence
atgatttaattgtaggtaca

SEQ ID NO: 182201 - DNA, 20 bp, Artificial sequence
  SiRNA target sequence
tgatttaattgtaggtacat

SEQ ID NO: 182202 - DNA, 20 bp, Artificial sequence
  SiRNA target sequence
gatttaattgtaggtacata

SEQ ID NO: 182203 - DNA, 20 bp, Artificial sequence
  SiRNA target sequence
atttaattgtaggtacatat

SEQ ID NO: 182204 - DNA, 20 bp, Artificial sequence
  SiRNA target sequence
tttaattgtaggtacatatt

SEQ ID NO: 182205 - DNA, 20 bp, Artificial sequence
  SiRNA target sequence
ttaattgtaggtacatattt

SEQ ID NO: 182206 - DNA, 20 bp, Artificial sequence
  SiRNA target sequence
taattgtaggtacatatttg

SEQ ID NO: 182207 - DNA, 20 bp, Artificial sequence
  SiRNA target sequence
aattgtaggtacatatttgg

SEQ ID NO: 182208 - DNA, 20 bp, Artificial sequence
  SiRNA target sequence
attgtaggtacatatttggc

SEQ ID NO: 182209 - DNA, 20 bp, Artificial sequence
  SiRNA target sequence
ttgtaggtacatatttggct

SEQ ID NO: 182210 - DNA, 20 bp, Artificial sequence
  SiRNA target sequence
tgtaggtacatatttggctg

SEQ ID NO: 182211 - DNA, 20 bp, Artificial sequence
  SiRNA target sequence
gtaggtacatatttggctga

SEQ ID NO: 182212 - DNA, 20 bp, Artificial sequence
  SiRNA target sequence
taggtacatatttggctgat

SEQ ID NO: 182213 - DNA, 20 bp, Artificial sequence
  SiRNA target sequence
aggtacatatttggctgata

SEQ ID NO: 182214 - DNA, 20 bp, Artificial sequence
  SiRNA target sequence
ggtacatatttggctgataa

SEQ ID NO: 182215 - DNA, 20 bp, Artificial sequence
  SiRNA target sequence
gtacatatttggctgataaa

SEQ ID NO: 182216 - DNA, 20 bp, Artificial sequence
  SiRNA target sequence
tacatatttggctgataaag

SEQ ID NO: 182217 - DNA, 20 bp, Artificial sequence
  SiRNA target sequence
acatatttggctgataaagt

SEQ ID NO: 182218 - DNA, 20 bp, Artificial sequence
  SiRNA target sequence
catatttggctgataaagtt

SEQ ID NO: 182219 - DNA, 20 bp, Artificial sequence
  SiRNA target sequence
atatttggctgataaagttg

SEQ ID NO: 182220 - DNA, 20 bp, Artificial sequence
  SiRNA target sequence
tatttggctgataaagttgt

SEQ ID NO: 182221 - DNA, 20 bp, Artificial sequence
  SiRNA target sequence
atttggctgataaagttgtt

SEQ ID NO: 182222 - DNA, 20 bp, Artificial sequence
  SiRNA target sequence
tttggctgataaagttgttg

SEQ ID NO: 182223 - DNA, 20 bp, Artificial sequence
  SiRNA target sequence
ttggctgataaagttgttgt

SEQ ID NO: 182224 - DNA, 20 bp, Artificial sequence
  SiRNA target sequence
tggctgataaagttgttgtt

SEQ ID NO: 182225 - DNA, 20 bp, Artificial sequence
  SiRNA target sequence
ggctgataaagttgttgttt

SEQ ID NO: 182226 - DNA, 20 bp, Artificial sequence
  SiRNA target sequence
gctgataaagttgttgtttt

SEQ ID NO: 182227 - DNA, 20 bp, Artificial sequence
  SiRNA target sequence
ctgataaagttgttgttttt

SEQ ID NO: 182228 - DNA, 20 bp, Artificial sequence
  SiRNA target sequence
tgataaagttgttgtttttg

SEQ ID NO: 182229 - DNA, 20 bp, Artificial sequence
  SiRNA target sequence
gataaagttgttgtttttga

SEQ ID NO: 182230 - DNA, 20 bp, Artificial sequence
  SiRNA target sequence
ataaagttgttgtttttgag

SEQ ID NO: 182231 - DNA, 20 bp, Artificial sequence
  SiRNA target sequence
taaagttgttgtttttgagg

SEQ ID NO: 182232 - DNA, 20 bp, Artificial sequence
  SiRNA target sequence
aaagttgttgtttttgaggg

SEQ ID NO: 182233 - DNA, 20 bp, Artificial sequence
  SiRNA target sequence
aagttgttgtttttgaggga

SEQ ID NO: 182234 - DNA, 20 bp, Artificial sequence
  SiRNA target sequence
agttgttgtttttgagggaa

SEQ ID NO: 182235 - DNA, 20 bp, Artificial sequence
  SiRNA target sequence
gttgttgtttttgagggaag

SEQ ID NO: 182236 - DNA, 20 bp, Artificial sequence
  SiRNA target sequence
ttgttgtttttgagggaagc

SEQ ID NO: 182237 - DNA, 20 bp, Artificial sequence
  SiRNA target sequence
tgttgtttttgagggaagcc

SEQ ID NO: 182238 - DNA, 20 bp, Artificial sequence
  SiRNA target sequence
gttgtttttgagggaagccc

SEQ ID NO: 182239 - DNA, 20 bp, Artificial sequence
  SiRNA target sequence
ttgtttttgagggaagccct

SEQ ID NO: 182240 - DNA, 20 bp, Artificial sequence
  SiRNA target sequence
tgtttttgagggaagcccta

SEQ ID NO: 182241 - DNA, 20 bp, Artificial sequence
  SiRNA target sequence
gtttttgagggaagccctag

SEQ ID NO: 182242 - DNA, 20 bp, Artificial sequence
  SiRNA target sequence
tttttgagggaagccctagt

SEQ ID NO: 182243 - DNA, 20 bp, Artificial sequence
  SiRNA target sequence
ttttgagggaagccctagtg

SEQ ID NO: 182244 - DNA, 20 bp, Artificial sequence
  SiRNA target sequence
tttgagggaagccctagtgt

SEQ ID NO: 182245 - DNA, 20 bp, Artificial sequence
  SiRNA target sequence
ttgagggaagccctagtgtt

SEQ ID NO: 182246 - DNA, 20 bp, Artificial sequence
  SiRNA target sequence
tgagggaagccctagtgttc

SEQ ID NO: 182247 - DNA, 20 bp, Artificial sequence
  SiRNA target sequence
gagggaagccctagtgttca

SEQ ID NO: 182248 - DNA, 20 bp, Artificial sequence
  SiRNA target sequence
agggaagccctagtgttcat

SEQ ID NO: 182249 - DNA, 20 bp, Artificial sequence
  SiRNA target sequence
gggaagccctagtgttcata

SEQ ID NO: 182250 - DNA, 20 bp, Artificial sequence
  SiRNA target sequence
ggaagccctagtgttcatag

SEQ ID NO: 182251 - DNA, 20 bp, Artificial sequence
  SiRNA target sequence
gaagccctagtgttcatagc

SEQ ID NO: 182252 - DNA, 20 bp, Artificial sequence
  SiRNA target sequence
aagccctagtgttcatagca

SEQ ID NO: 182253 - DNA, 20 bp, Artificial sequence
  SiRNA target sequence
agccctagtgttcatagcac

SEQ ID NO: 182254 - DNA, 20 bp, Artificial sequence
  SiRNA target sequence
gccctagtgttcatagcact

SEQ ID NO: 182255 - DNA, 20 bp, Artificial sequence
  SiRNA target sequence
ccctagtgttcatagcactg

SEQ ID NO: 182256 - DNA, 20 bp, Artificial sequence
  SiRNA target sequence
cctagtgttcatagcactgc

SEQ ID NO: 182257 - DNA, 20 bp, Artificial sequence
  SiRNA target sequence
ctagtgttcatagcactgct

SEQ ID NO: 182258 - DNA, 20 bp, Artificial sequence
  SiRNA target sequence
tagtgttcatagcactgctc

SEQ ID NO: 182259 - DNA, 20 bp, Artificial sequence
  SiRNA target sequence
agtgttcatagcactgctca

SEQ ID NO: 182260 - DNA, 20 bp, Artificial sequence
  SiRNA target sequence
gtgttcatagcactgctcat

SEQ ID NO: 182261 - DNA, 20 bp, Artificial sequence
  SiRNA target sequence
tgttcatagcactgctcata

SEQ ID NO: 182262 - DNA, 20 bp, Artificial sequence
  SiRNA target sequence
gttcatagcactgctcataa

SEQ ID NO: 182263 - DNA, 20 bp, Artificial sequence
  SiRNA target sequence
ttcatagcactgctcataaa

SEQ ID NO: 182264 - DNA, 20 bp, Artificial sequence
  SiRNA target sequence
tcatagcactgctcataaac

SEQ ID NO: 182265 - DNA, 20 bp, Artificial sequence
  SiRNA target sequence
catagcactgctcataaacc

SEQ ID NO: 182266 - DNA, 20 bp, Artificial sequence
  SiRNA target sequence
atagcactgctcataaaccg

SEQ ID NO: 182267 - DNA, 20 bp, Artificial sequence
  SiRNA target sequence
tagcactgctcataaaccga

SEQ ID NO: 182268 - DNA, 20 bp, Artificial sequence
  SiRNA target sequence
agcactgctcataaaccgat

SEQ ID NO: 182269 - DNA, 20 bp, Artificial sequence
  SiRNA target sequence
gcactgctcataaaccgatg

SEQ ID NO: 182270 - DNA, 20 bp, Artificial sequence
  SiRNA target sequence
cactgctcataaaccgatgg

SEQ ID NO: 182271 - DNA, 20 bp, Artificial sequence
  SiRNA target sequence
actgctcataaaccgatgga

SEQ ID NO: 182272 - DNA, 20 bp, Artificial sequence
  SiRNA target sequence
ctgctcataaaccgatggat

SEQ ID NO: 182273 - DNA, 20 bp, Artificial sequence
  SiRNA target sequence
tgctcataaaccgatggatt

SEQ ID NO: 182274 - DNA, 20 bp, Artificial sequence
  SiRNA target sequence
gctcataaaccgatggattt

SEQ ID NO: 182275 - DNA, 20 bp, Artificial sequence
  SiRNA target sequence
ctcataaaccgatggatttg

SEQ ID NO: 182276 - DNA, 20 bp, Artificial sequence
  SiRNA target sequence
tcataaaccgatggatttgc

SEQ ID NO: 182277 - DNA, 20 bp, Artificial sequence
  SiRNA target sequence
cataaaccgatggatttgca

SEQ ID NO: 182278 - DNA, 20 bp, Artificial sequence
  SiRNA target sequence
ataaaccgatggatttgcat

SEQ ID NO: 182279 - DNA, 20 bp, Artificial sequence
  SiRNA target sequence
taaaccgatggatttgcata

SEQ ID NO: 182280 - DNA, 20 bp, Artificial sequence
  SiRNA target sequence
aaaccgatggatttgcatag

SEQ ID NO: 182281 - DNA, 20 bp, Artificial sequence
  SiRNA target sequence
aaccgatggatttgcatagt

SEQ ID NO: 182282 - DNA, 20 bp, Artificial sequence
  SiRNA target sequence
accgatggatttgcatagtg

SEQ ID NO: 182283 - DNA, 20 bp, Artificial sequence
  SiRNA target sequence
ccgatggatttgcatagtgg

SEQ ID NO: 182284 - DNA, 20 bp, Artificial sequence
  SiRNA target sequence
cgatggatttgcatagtgga

SEQ ID NO: 182285 - DNA, 20 bp, Artificial sequence
  SiRNA target sequence
gatggatttgcatagtggaa

SEQ ID NO: 182286 - DNA, 20 bp, Artificial sequence
  SiRNA target sequence
atggatttgcatagtggaat

SEQ ID NO: 182287 - DNA, 20 bp, Artificial sequence
  SiRNA target sequence
tggatttgcatagtggaatg

SEQ ID NO: 182288 - DNA, 20 bp, Artificial sequence
  SiRNA target sequence
ggatttgcatagtggaatga

SEQ ID NO: 182289 - DNA, 20 bp, Artificial sequence
  SiRNA target sequence
gatttgcatagtggaatgaa

SEQ ID NO: 182290 - DNA, 20 bp, Artificial sequence
  SiRNA target sequence
atttgcatagtggaatgaat

SEQ ID NO: 182291 - DNA, 20 bp, Artificial sequence
  SiRNA target sequence
tttgcatagtggaatgaata

SEQ ID NO: 182292 - DNA, 20 bp, Artificial sequence
  SiRNA target sequence
ttgcatagtggaatgaatat

SEQ ID NO: 182293 - DNA, 20 bp, Artificial sequence
  SiRNA target sequence
tgcatagtggaatgaatatt

SEQ ID NO: 182294 - DNA, 20 bp, Artificial sequence
  SiRNA target sequence
gcatagtggaatgaatattt

SEQ ID NO: 182295 - DNA, 20 bp, Artificial sequence
  SiRNA target sequence
catagtggaatgaatatttt

SEQ ID NO: 182296 - DNA, 20 bp, Artificial sequence
  SiRNA target sequence
atagtggaatgaatattttt

SEQ ID NO: 182297 - DNA, 20 bp, Artificial sequence
  SiRNA target sequence
tagtggaatgaatatttttt

SEQ ID NO: 182298 - DNA, 20 bp, Artificial sequence
  SiRNA target sequence
agtggaatgaatattttttt

SEQ ID NO: 182299 - DNA, 20 bp, Artificial sequence
  SiRNA target sequence
gtggaatgaatattttttta

SEQ ID NO: 182300 - DNA, 20 bp, Artificial sequence
  SiRNA target sequence
tggaatgaatatttttttaa

SEQ ID NO: 182301 - DNA, 20 bp, Artificial sequence
  SiRNA target sequence
ggaatgaatatttttttaaa

SEQ ID NO: 182302 - DNA, 20 bp, Artificial sequence
  SiRNA target sequence
gaatgaatatttttttaaag

SEQ ID NO: 182303 - DNA, 20 bp, Artificial sequence
  SiRNA target sequence
aatgaatatttttttaaaga

SEQ ID NO: 182304 - DNA, 20 bp, Artificial sequence
  SiRNA target sequence
atgaatatttttttaaagaa

SEQ ID NO: 182305 - DNA, 20 bp, Artificial sequence
  SiRNA target sequence
tgaatatttttttaaagaat

SEQ ID NO: 182306 - DNA, 20 bp, Artificial sequence
  SiRNA target sequence
gaatatttttttaaagaatc

SEQ ID NO: 182307 - DNA, 20 bp, Artificial sequence
  SiRNA target sequence
aatatttttttaaagaatct

SEQ ID NO: 182308 - DNA, 20 bp, Artificial sequence
  SiRNA target sequence
atatttttttaaagaatctt

SEQ ID NO: 182309 - DNA, 20 bp, Artificial sequence
  SiRNA target sequence
tatttttttaaagaatcttg

SEQ ID NO: 182310 - DNA, 20 bp, Artificial sequence
  SiRNA target sequence
atttttttaaagaatcttga

SEQ ID NO: 182311 - DNA, 20 bp, Artificial sequence
  SiRNA target sequence
tttttttaaagaatcttgat

SEQ ID NO: 182312 - DNA, 20 bp, Artificial sequence
  SiRNA target sequence
ttttttaaagaatcttgata

SEQ ID NO: 182313 - DNA, 20 bp, Artificial sequence
  SiRNA target sequence
tttttaaagaatcttgatat

SEQ ID NO: 182314 - DNA, 20 bp, Artificial sequence
  SiRNA target sequence
ttttaaagaatcttgatatt

SEQ ID NO: 182315 - DNA, 20 bp, Artificial sequence
  SiRNA target sequence
tttaaagaatcttgatatta

SEQ ID NO: 182316 - DNA, 20 bp, Artificial sequence
  SiRNA target sequence
ttaaagaatcttgatattac

SEQ ID NO: 182317 - DNA, 20 bp, Artificial sequence
  SiRNA target sequence
taaagaatcttgatattact

SEQ ID NO: 182318 - DNA, 20 bp, Artificial sequence
  SiRNA target sequence
aaagaatcttgatattactt

SEQ ID NO: 182319 - DNA, 20 bp, Artificial sequence
  SiRNA target sequence
aagaatcttgatattacttt

SEQ ID NO: 182320 - DNA, 20 bp, Artificial sequence
  SiRNA target sequence
agaatcttgatattactttt

SEQ ID NO: 182321 - DNA, 20 bp, Artificial sequence
  SiRNA target sequence
gaatcttgatattactttta

SEQ ID NO: 182322 - DNA, 20 bp, Artificial sequence
  SiRNA target sequence
aatcttgatattacttttag

SEQ ID NO: 182323 - DNA, 20 bp, Artificial sequence
  SiRNA target sequence
atcttgatattacttttaga

SEQ ID NO: 182324 - DNA, 20 bp, Artificial sequence
  SiRNA target sequence
tcttgatattacttttagaa

SEQ ID NO: 182325 - DNA, 20 bp, Artificial sequence
  SiRNA target sequence
cttgatattacttttagaag

SEQ ID NO: 182326 - DNA, 20 bp, Artificial sequence
  SiRNA target sequence
ttgatattacttttagaaga

SEQ ID NO: 182327 - DNA, 20 bp, Artificial sequence
  SiRNA target sequence
tgatattacttttagaagag

SEQ ID NO: 182328 - DNA, 20 bp, Artificial sequence
  SiRNA target sequence
gatattacttttagaagaga

SEQ ID NO: 182329 - DNA, 20 bp, Artificial sequence
  SiRNA target sequence
atattacttttagaagagac

SEQ ID NO: 182330 - DNA, 20 bp, Artificial sequence
  SiRNA target sequence
tattacttttagaagagact

SEQ ID NO: 182331 - DNA, 20 bp, Artificial sequence
  SiRNA target sequence
attacttttagaagagactc

SEQ ID NO: 182332 - DNA, 20 bp, Artificial sequence
  SiRNA target sequence
ttacttttagaagagactct

SEQ ID NO: 182333 - DNA, 20 bp, Artificial sequence
  SiRNA target sequence
tacttttagaagagactctt

SEQ ID NO: 182334 - DNA, 20 bp, Artificial sequence
  SiRNA target sequence
acttttagaagagactcttc

SEQ ID NO: 182335 - DNA, 20 bp, Artificial sequence
  SiRNA target sequence
cttttagaagagactcttcc

SEQ ID NO: 182336 - DNA, 20 bp, Artificial sequence
  SiRNA target sequence
ttttagaagagactcttcca

SEQ ID NO: 182337 - DNA, 20 bp, Artificial sequence
  SiRNA target sequence
tttagaagagactcttccaa

SEQ ID NO: 182338 - DNA, 20 bp, Artificial sequence
  SiRNA target sequence
ttagaagagactcttccaat

SEQ ID NO: 182339 - DNA, 20 bp, Artificial sequence
  SiRNA target sequence
tagaagagactcttccaatt

SEQ ID NO: 182340 - DNA, 20 bp, Artificial sequence
  SiRNA target sequence
agaagagactcttccaattt

SEQ ID NO: 182341 - DNA, 20 bp, Artificial sequence
  SiRNA target sequence
gaagagactcttccaatttt

SEQ ID NO: 182342 - DNA, 20 bp, Artificial sequence
  SiRNA target sequence
aagagactcttccaatttta

SEQ ID NO: 182343 - DNA, 20 bp, Artificial sequence
  SiRNA target sequence
agagactcttccaattttag

SEQ ID NO: 182344 - DNA, 20 bp, Artificial sequence
  SiRNA target sequence
gagactcttccaattttaga

SEQ ID NO: 182345 - DNA, 20 bp, Artificial sequence
  SiRNA target sequence
agactcttccaattttagac

SEQ ID NO: 182346 - DNA, 20 bp, Artificial sequence
  SiRNA target sequence
gactcttccaattttagacc

SEQ ID NO: 182347 - DNA, 20 bp, Artificial sequence
  SiRNA target sequence
actcttccaattttagacca

SEQ ID NO: 182348 - DNA, 20 bp, Artificial sequence
  SiRNA target sequence
ctcttccaattttagaccaa

SEQ ID NO: 182349 - DNA, 20 bp, Artificial sequence
  SiRNA target sequence
tcttccaattttagaccaag

SEQ ID NO: 182350 - DNA, 20 bp, Artificial sequence
  SiRNA target sequence
cttccaattttagaccaaga

SEQ ID NO: 182351 - DNA, 20 bp, Artificial sequence
  SiRNA target sequence
ttccaattttagaccaagag

SEQ ID NO: 182352 - DNA, 20 bp, Artificial sequence
  SiRNA target sequence
tccaattttagaccaagagt

SEQ ID NO: 182353 - DNA, 20 bp, Artificial sequence
  SiRNA target sequence
ccaattttagaccaagagtt

SEQ ID NO: 182354 - DNA, 20 bp, Artificial sequence
  SiRNA target sequence
caattttagaccaagagtta

SEQ ID NO: 182355 - DNA, 20 bp, Artificial sequence
  SiRNA target sequence
aattttagaccaagagttaa

SEQ ID NO: 182356 - DNA, 20 bp, Artificial sequence
  SiRNA target sequence
attttagaccaagagttaat

SEQ ID NO: 182357 - DNA, 20 bp, Artificial sequence
  SiRNA target sequence
ttttagaccaagagttaata

SEQ ID NO: 182358 - DNA, 20 bp, Artificial sequence
  SiRNA target sequence
tttagaccaagagttaataa

SEQ ID NO: 182359 - DNA, 20 bp, Artificial sequence
  SiRNA target sequence
ttagaccaagagttaataag

SEQ ID NO: 182360 - DNA, 20 bp, Artificial sequence
  SiRNA target sequence
tagaccaagagttaataagc

SEQ ID NO: 182361 - DNA, 20 bp, Artificial sequence
  SiRNA target sequence
agaccaagagttaataagcc

SEQ ID NO: 182362 - DNA, 20 bp, Artificial sequence
  SiRNA target sequence
gaccaagagttaataagccg

SEQ ID NO: 182363 - DNA, 20 bp, Artificial sequence
  SiRNA target sequence
accaagagttaataagccga

SEQ ID NO: 182364 - DNA, 20 bp, Artificial sequence
  SiRNA target sequence
ccaagagttaataagccgaa

SEQ ID NO: 182365 - DNA, 20 bp, Artificial sequence
  SiRNA target sequence
caagagttaataagccgaat

SEQ ID NO: 182366 - DNA, 20 bp, Artificial sequence
  SiRNA target sequence
aagagttaataagccgaatt

SEQ ID NO: 182367 - DNA, 20 bp, Artificial sequence
  SiRNA target sequence
agagttaataagccgaattc

SEQ ID NO: 182368 - DNA, 20 bp, Artificial sequence
  SiRNA target sequence
gagttaataagccgaattcc

SEQ ID NO: 182369 - DNA, 20 bp, Artificial sequence
  SiRNA target sequence
agttaataagccgaattccg

SEQ ID NO: 182370 - DNA, 20 bp, Artificial sequence
  SiRNA target sequence
gttaataagccgaattccgc

SEQ ID NO: 182371 - DNA, 20 bp, Artificial sequence
  SiRNA target sequence
ttaataagccgaattccgca

SEQ ID NO: 182372 - DNA, 20 bp, Artificial sequence
  SiRNA target sequence
taataagccgaattccgcaa

SEQ ID NO: 182373 - DNA, 20 bp, Artificial sequence
  SiRNA target sequence
aataagccgaattccgcaaa

SEQ ID NO: 182374 - DNA, 20 bp, Artificial sequence
  SiRNA target sequence
ataagccgaattccgcaaaa

SEQ ID NO: 182375 - DNA, 20 bp, Artificial sequence
  SiRNA target sequence
taagccgaattccgcaaaag

SEQ ID NO: 182376 - DNA, 20 bp, Artificial sequence
  SiRNA target sequence
aagccgaattccgcaaaaga

SEQ ID NO: 182377 - DNA, 20 bp, Artificial sequence
  SiRNA target sequence
agccgaattccgcaaaagac

SEQ ID NO: 182378 - DNA, 20 bp, Artificial sequence
  SiRNA target sequence
gccgaattccgcaaaagaca

SEQ ID NO: 182379 - DNA, 20 bp, Artificial sequence
  SiRNA target sequence
ccgaattccgcaaaagacag

SEQ ID NO: 182380 - DNA, 20 bp, Artificial sequence
  SiRNA target sequence
cgaattccgcaaaagacaga

SEQ ID NO: 182381 - DNA, 20 bp, Artificial sequence
  SiRNA target sequence
gaattccgcaaaagacagaa

SEQ ID NO: 182382 - DNA, 20 bp, Artificial sequence
  SiRNA target sequence
aattccgcaaaagacagaac

SEQ ID NO: 182383 - DNA, 20 bp, Artificial sequence
  SiRNA target sequence
attccgcaaaagacagaact

SEQ ID NO: 182384 - DNA, 20 bp, Artificial sequence
  SiRNA target sequence
ttccgcaaaagacagaactc

SEQ ID NO: 182385 - DNA, 20 bp, Artificial sequence
  SiRNA target sequence
tccgcaaaagacagaactca

SEQ ID NO: 182386 - DNA, 20 bp, Artificial sequence
  SiRNA target sequence
ccgcaaaagacagaactcag

SEQ ID NO: 182387 - DNA, 20 bp, Artificial sequence
  SiRNA target sequence
cgcaaaagacagaactcaga

SEQ ID NO: 182388 - DNA, 20 bp, Artificial sequence
  SiRNA target sequence
gcaaaagacagaactcagaa

SEQ ID NO: 182389 - DNA, 20 bp, Artificial sequence
  SiRNA target sequence
caaaagacagaactcagaaa

SEQ ID NO: 182390 - DNA, 20 bp, Artificial sequence
  SiRNA target sequence
aaaagacagaactcagaaag

SEQ ID NO: 182391 - DNA, 20 bp, Artificial sequence
  SiRNA target sequence
aaagacagaactcagaaaga

SEQ ID NO: 182392 - DNA, 20 bp, Artificial sequence
  SiRNA target sequence
aagacagaactcagaaagaa

SEQ ID NO: 182393 - DNA, 20 bp, Artificial sequence
  SiRNA target sequence
agacagaactcagaaagaag

SEQ ID NO: 182394 - DNA, 20 bp, Artificial sequence
  SiRNA target sequence
gacagaactcagaaagaaga

SEQ ID NO: 182395 - DNA, 20 bp, Artificial sequence
  SiRNA target sequence
acagaactcagaaagaagag

SEQ ID NO: 182396 - DNA, 20 bp, Artificial sequence
  SiRNA target sequence
cagaactcagaaagaagaga

SEQ ID NO: 182397 - DNA, 20 bp, Artificial sequence
  SiRNA target sequence
agaactcagaaagaagagaa

SEQ ID NO: 182398 - DNA, 20 bp, Artificial sequence
  SiRNA target sequence
gaactcagaaagaagagaat

SEQ ID NO: 182399 - DNA, 20 bp, Artificial sequence
  SiRNA target sequence
aactcagaaagaagagaata

SEQ ID NO: 182400 - DNA, 20 bp, Artificial sequence
  SiRNA target sequence
actcagaaagaagagaataa

SEQ ID NO: 182401 - DNA, 20 bp, Artificial sequence
  SiRNA target sequence
ctcagaaagaagagaataaa

SEQ ID NO: 182402 - DNA, 20 bp, Artificial sequence
  SiRNA target sequence
tcagaaagaagagaataaat

SEQ ID NO: 182403 - DNA, 20 bp, Artificial sequence
  SiRNA target sequence
cagaaagaagagaataaata

SEQ ID NO: 182404 - DNA, 20 bp, Artificial sequence
  SiRNA target sequence
agaaagaagagaataaatat

SEQ ID NO: 182405 - DNA, 20 bp, Artificial sequence
  SiRNA target sequence
gaaagaagagaataaatatt

SEQ ID NO: 182406 - DNA, 20 bp, Artificial sequence
  SiRNA target sequence
aaagaagagaataaatattt

SEQ ID NO: 182407 - DNA, 20 bp, Artificial sequence
  SiRNA target sequence
aagaagagaataaatatttt

SEQ ID NO: 182408 - DNA, 20 bp, Artificial sequence
  SiRNA target sequence
agaagagaataaatattttt

SEQ ID NO: 182409 - DNA, 20 bp, Artificial sequence
  SiRNA target sequence
gaagagaataaatatttttt

SEQ ID NO: 182410 - DNA, 20 bp, Artificial sequence
  SiRNA target sequence
aagagaataaatattttttt

SEQ ID NO: 182411 - DNA, 20 bp, Artificial sequence
  SiRNA target sequence
agagaataaatatttttttt

SEQ ID NO: 182412 - DNA, 20 bp, Artificial sequence
  SiRNA target sequence
gagaataaatattttttttg

SEQ ID NO: 182413 - DNA, 20 bp, Artificial sequence
  SiRNA target sequence
agaataaatattttttttga

SEQ ID NO: 182414 - DNA, 21 bp, Artificial sequence
  SiRNA target sequence
atggccaagaatgaatctaat

SEQ ID NO: 182415 - DNA, 21 bp, Artificial sequence
  SiRNA target sequence
tggccaagaatgaatctaata

SEQ ID NO: 182416 - DNA, 21 bp, Artificial sequence
  SiRNA target sequence
ggccaagaatgaatctaataa

SEQ ID NO: 182417 - DNA, 21 bp, Artificial sequence
  SiRNA target sequence
gccaagaatgaatctaataaa

SEQ ID NO: 182418 - DNA, 21 bp, Artificial sequence
  SiRNA target sequence
ccaagaatgaatctaataaaa

SEQ ID NO: 182419 - DNA, 21 bp, Artificial sequence
  SiRNA target sequence
caagaatgaatctaataaaat

SEQ ID NO: 182420 - DNA, 21 bp, Artificial sequence
  SiRNA target sequence
aagaatgaatctaataaaata

SEQ ID NO: 182421 - DNA, 21 bp, Artificial sequence
  SiRNA target sequence
agaatgaatctaataaaataa

SEQ ID NO: 182422 - DNA, 21 bp, Artificial sequence
  SiRNA target sequence
gaatgaatctaataaaataac

SEQ ID NO: 182423 - DNA, 21 bp, Artificial sequence
  SiRNA target sequence
aatgaatctaataaaataacg

SEQ ID NO: 182424 - DNA, 21 bp, Artificial sequence
  SiRNA target sequence
atgaatctaataaaataacga

SEQ ID NO: 182425 - DNA, 21 bp, Artificial sequence
  SiRNA target sequence
tgaatctaataaaataacgag

SEQ ID NO: 182426 - DNA, 21 bp, Artificial sequence
  SiRNA target sequence
gaatctaataaaataacgaga

SEQ ID NO: 182427 - DNA, 21 bp, Artificial sequence
  SiRNA target sequence
aatctaataaaataacgagac

SEQ ID NO: 182428 - DNA, 21 bp, Artificial sequence
  SiRNA target sequence
atctaataaaataacgagact

SEQ ID NO: 182429 - DNA, 21 bp, Artificial sequence
  SiRNA target sequence
tctaataaaataacgagactg

SEQ ID NO: 182430 - DNA, 21 bp, Artificial sequence
  SiRNA target sequence
ctaataaaataacgagactgg

SEQ ID NO: 182431 - DNA, 21 bp, Artificial sequence
  SiRNA target sequence
taataaaataacgagactggc

SEQ ID NO: 182432 - DNA, 21 bp, Artificial sequence
  SiRNA target sequence
aataaaataacgagactggca

SEQ ID NO: 182433 - DNA, 21 bp, Artificial sequence
  SiRNA target sequence
ataaaataacgagactggcaa

SEQ ID NO: 182434 - DNA, 21 bp, Artificial sequence
  SiRNA target sequence
taaaataacgagactggcaat

SEQ ID NO: 182435 - DNA, 21 bp, Artificial sequence
  SiRNA target sequence
aaaataacgagactggcaatt

SEQ ID NO: 182436 - DNA, 21 bp, Artificial sequence
  SiRNA target sequence
aaataacgagactggcaattg

SEQ ID NO: 182437 - DNA, 21 bp, Artificial sequence
  SiRNA target sequence
aataacgagactggcaattgt

SEQ ID NO: 182438 - DNA, 21 bp, Artificial sequence
  SiRNA target sequence
ataacgagactggcaattgtt

SEQ ID NO: 182439 - DNA, 21 bp, Artificial sequence
  SiRNA target sequence
taacgagactggcaattgtta

SEQ ID NO: 182440 - DNA, 21 bp, Artificial sequence
  SiRNA target sequence
aacgagactggcaattgttaa

SEQ ID NO: 182441 - DNA, 21 bp, Artificial sequence
  SiRNA target sequence
acgagactggcaattgttaat

SEQ ID NO: 182442 - DNA, 21 bp, Artificial sequence
  SiRNA target sequence
cgagactggcaattgttaatt

SEQ ID NO: 182443 - DNA, 21 bp, Artificial sequence
  SiRNA target sequence
gagactggcaattgttaatta

SEQ ID NO: 182444 - DNA, 21 bp, Artificial sequence
  SiRNA target sequence
agactggcaattgttaattat

SEQ ID NO: 182445 - DNA, 21 bp, Artificial sequence
  SiRNA target sequence
gactggcaattgttaattatg

SEQ ID NO: 182446 - DNA, 21 bp, Artificial sequence
  SiRNA target sequence
actggcaattgttaattatga

SEQ ID NO: 182447 - DNA, 21 bp, Artificial sequence
  SiRNA target sequence
ctggcaattgttaattatgaa

SEQ ID NO: 182448 - DNA, 21 bp, Artificial sequence
  SiRNA target sequence
tggcaattgttaattatgaac

SEQ ID NO: 182449 - DNA, 21 bp, Artificial sequence
  SiRNA target sequence
ggcaattgttaattatgaact

SEQ ID NO: 182450 - DNA, 21 bp, Artificial sequence
  SiRNA target sequence
gcaattgttaattatgaacta

SEQ ID NO: 182451 - DNA, 21 bp, Artificial sequence
  SiRNA target sequence
caattgttaattatgaactat

SEQ ID NO: 182452 - DNA, 21 bp, Artificial sequence
  SiRNA target sequence
aattgttaattatgaactatg

SEQ ID NO: 182453 - DNA, 21 bp, Artificial sequence
  SiRNA target sequence
attgttaattatgaactatgt

SEQ ID NO: 182454 - DNA, 21 bp, Artificial sequence
  SiRNA target sequence
ttgttaattatgaactatgta

SEQ ID NO: 182455 - DNA, 21 bp, Artificial sequence
  SiRNA target sequence
tgttaattatgaactatgtaa

SEQ ID NO: 182456 - DNA, 21 bp, Artificial sequence
  SiRNA target sequence
gttaattatgaactatgtaaa

SEQ ID NO: 182457 - DNA, 21 bp, Artificial sequence
  SiRNA target sequence
ttaattatgaactatgtaaac

SEQ ID NO: 182458 - DNA, 21 bp, Artificial sequence
  SiRNA target sequence
taattatgaactatgtaaacc

SEQ ID NO: 182459 - DNA, 21 bp, Artificial sequence
  SiRNA target sequence
aattatgaactatgtaaaccg

SEQ ID NO: 182460 - DNA, 21 bp, Artificial sequence
  SiRNA target sequence
attatgaactatgtaaaccga

SEQ ID NO: 182461 - DNA, 21 bp, Artificial sequence
  SiRNA target sequence
ttatgaactatgtaaaccgaa

SEQ ID NO: 182462 - DNA, 21 bp, Artificial sequence
  SiRNA target sequence
tatgaactatgtaaaccgaag

SEQ ID NO: 182463 - DNA, 21 bp, Artificial sequence
  SiRNA target sequence
atgaactatgtaaaccgaagg

SEQ ID NO: 182464 - DNA, 21 bp, Artificial sequence
  SiRNA target sequence
tgaactatgtaaaccgaagga

SEQ ID NO: 182465 - DNA, 21 bp, Artificial sequence
  SiRNA target sequence
gaactatgtaaaccgaaggaa

SEQ ID NO: 182466 - DNA, 21 bp, Artificial sequence
  SiRNA target sequence
aactatgtaaaccgaaggaat

SEQ ID NO: 182467 - DNA, 21 bp, Artificial sequence
  SiRNA target sequence
actatgtaaaccgaaggaatg

SEQ ID NO: 182468 - DNA, 21 bp, Artificial sequence
  SiRNA target sequence
ctatgtaaaccgaaggaatgt

SEQ ID NO: 182469 - DNA, 21 bp, Artificial sequence
  SiRNA target sequence
tatgtaaaccgaaggaatgta

SEQ ID NO: 182470 - DNA, 21 bp, Artificial sequence
  SiRNA target sequence
atgtaaaccgaaggaatgtat

SEQ ID NO: 182471 - DNA, 21 bp, Artificial sequence
  SiRNA target sequence
tgtaaaccgaaggaatgtatg

SEQ ID NO: 182472 - DNA, 21 bp, Artificial sequence
  SiRNA target sequence
gtaaaccgaaggaatgtatgt

SEQ ID NO: 182473 - DNA, 21 bp, Artificial sequence
  SiRNA target sequence
taaaccgaaggaatgtatgtc

SEQ ID NO: 182474 - DNA, 21 bp, Artificial sequence
  SiRNA target sequence
aaaccgaaggaatgtatgtca

SEQ ID NO: 182475 - DNA, 21 bp, Artificial sequence
  SiRNA target sequence
aaccgaaggaatgtatgtcag

SEQ ID NO: 182476 - DNA, 21 bp, Artificial sequence
  SiRNA target sequence
accgaaggaatgtatgtcaga

SEQ ID NO: 182477 - DNA, 21 bp, Artificial sequence
  SiRNA target sequence
ccgaaggaatgtatgtcagaa

SEQ ID NO: 182478 - DNA, 21 bp, Artificial sequence
  SiRNA target sequence
cgaaggaatgtatgtcagaat

SEQ ID NO: 182479 - DNA, 21 bp, Artificial sequence
  SiRNA target sequence
gaaggaatgtatgtcagaatg

SEQ ID NO: 182480 - DNA, 21 bp, Artificial sequence
  SiRNA target sequence
aaggaatgtatgtcagaatgt

SEQ ID NO: 182481 - DNA, 21 bp, Artificial sequence
  SiRNA target sequence
aggaatgtatgtcagaatgta

SEQ ID NO: 182482 - DNA, 21 bp, Artificial sequence
  SiRNA target sequence
ggaatgtatgtcagaatgtaa

SEQ ID NO: 182483 - DNA, 21 bp, Artificial sequence
  SiRNA target sequence
gaatgtatgtcagaatgtaaa

SEQ ID NO: 182484 - DNA, 21 bp, Artificial sequence
  SiRNA target sequence
aatgtatgtcagaatgtaaaa

SEQ ID NO: 182485 - DNA, 21 bp, Artificial sequence
  SiRNA target sequence
atgtatgtcagaatgtaaaaa

SEQ ID NO: 182486 - DNA, 21 bp, Artificial sequence
  SiRNA target sequence
tgtatgtcagaatgtaaaaag

SEQ ID NO: 182487 - DNA, 21 bp, Artificial sequence
  SiRNA target sequence
gtatgtcagaatgtaaaaagg

SEQ ID NO: 182488 - DNA, 21 bp, Artificial sequence
  SiRNA target sequence
tatgtcagaatgtaaaaaggc

SEQ ID NO: 182489 - DNA, 21 bp, Artificial sequence
  SiRNA target sequence
atgtcagaatgtaaaaaggcg

SEQ ID NO: 182490 - DNA, 21 bp, Artificial sequence
  SiRNA target sequence
tgtcagaatgtaaaaaggcgt

SEQ ID NO: 182491 - DNA, 21 bp, Artificial sequence
  SiRNA target sequence
gtcagaatgtaaaaaggcgtg

SEQ ID NO: 182492 - DNA, 21 bp, Artificial sequence
  SiRNA target sequence
tcagaatgtaaaaaggcgtgt

SEQ ID NO: 182493 - DNA, 21 bp, Artificial sequence
  SiRNA target sequence
cagaatgtaaaaaggcgtgtc

SEQ ID NO: 182494 - DNA, 21 bp, Artificial sequence
  SiRNA target sequence
agaatgtaaaaaggcgtgtcc

SEQ ID NO: 182495 - DNA, 21 bp, Artificial sequence
  SiRNA target sequence
gaatgtaaaaaggcgtgtcct

SEQ ID NO: 182496 - DNA, 21 bp, Artificial sequence
  SiRNA target sequence
aatgtaaaaaggcgtgtcctg

SEQ ID NO: 182497 - DNA, 21 bp, Artificial sequence
  SiRNA target sequence
atgtaaaaaggcgtgtcctgt

SEQ ID NO: 182498 - DNA, 21 bp, Artificial sequence
  SiRNA target sequence
tgtaaaaaggcgtgtcctgtt

SEQ ID NO: 182499 - DNA, 21 bp, Artificial sequence
  SiRNA target sequence
gtaaaaaggcgtgtcctgtta

SEQ ID NO: 182500 - DNA, 21 bp, Artificial sequence
  SiRNA target sequence
taaaaaggcgtgtcctgttaa

SEQ ID NO: 182501 - DNA, 21 bp, Artificial sequence
  SiRNA target sequence
aaaaaggcgtgtcctgttaat

SEQ ID NO: 182502 - DNA, 21 bp, Artificial sequence
  SiRNA target sequence
aaaaggcgtgtcctgttaata

SEQ ID NO: 182503 - DNA, 21 bp, Artificial sequence
  SiRNA target sequence
aaaggcgtgtcctgttaataa

SEQ ID NO: 182504 - DNA, 21 bp, Artificial sequence
  SiRNA target sequence
aaggcgtgtcctgttaataaa

SEQ ID NO: 182505 - DNA, 21 bp, Artificial sequence
  SiRNA target sequence
aggcgtgtcctgttaataaaa

SEQ ID NO: 182506 - DNA, 21 bp, Artificial sequence
  SiRNA target sequence
ggcgtgtcctgttaataaaac

SEQ ID NO: 182507 - DNA, 21 bp, Artificial sequence
  SiRNA target sequence
gcgtgtcctgttaataaaaca

SEQ ID NO: 182508 - DNA, 21 bp, Artificial sequence
  SiRNA target sequence
cgtgtcctgttaataaaacag

SEQ ID NO: 182509 - DNA, 21 bp, Artificial sequence
  SiRNA target sequence
gtgtcctgttaataaaacagg

SEQ ID NO: 182510 - DNA, 21 bp, Artificial sequence
  SiRNA target sequence
tgtcctgttaataaaacagga

SEQ ID NO: 182511 - DNA, 21 bp, Artificial sequence
  SiRNA target sequence
gtcctgttaataaaacaggaa

SEQ ID NO: 182512 - DNA, 21 bp, Artificial sequence
  SiRNA target sequence
tcctgttaataaaacaggaaa

SEQ ID NO: 182513 - DNA, 21 bp, Artificial sequence
  SiRNA target sequence
cctgttaataaaacaggaaag

SEQ ID NO: 182514 - DNA, 21 bp, Artificial sequence
  SiRNA target sequence
ctgttaataaaacaggaaagg

SEQ ID NO: 182515 - DNA, 21 bp, Artificial sequence
  SiRNA target sequence
tgttaataaaacaggaaagga

SEQ ID NO: 182516 - DNA, 21 bp, Artificial sequence
  SiRNA target sequence
gttaataaaacaggaaaggag

SEQ ID NO: 182517 - DNA, 21 bp, Artificial sequence
  SiRNA target sequence
ttaataaaacaggaaaggagt

SEQ ID NO: 182518 - DNA, 21 bp, Artificial sequence
  SiRNA target sequence
taataaaacaggaaaggagtg

SEQ ID NO: 182519 - DNA, 21 bp, Artificial sequence
  SiRNA target sequence
aataaaacaggaaaggagtgt

SEQ ID NO: 182520 - DNA, 21 bp, Artificial sequence
  SiRNA target sequence
ataaaacaggaaaggagtgta

SEQ ID NO: 182521 - DNA, 21 bp, Artificial sequence
  SiRNA target sequence
taaaacaggaaaggagtgtat

SEQ ID NO: 182522 - DNA, 21 bp, Artificial sequence
  SiRNA target sequence
aaaacaggaaaggagtgtatt

SEQ ID NO: 182523 - DNA, 21 bp, Artificial sequence
  SiRNA target sequence
aaacaggaaaggagtgtatta

SEQ ID NO: 182524 - DNA, 21 bp, Artificial sequence
  SiRNA target sequence
aacaggaaaggagtgtattac

SEQ ID NO: 182525 - DNA, 21 bp, Artificial sequence
  SiRNA target sequence
acaggaaaggagtgtattaca

SEQ ID NO: 182526 - DNA, 21 bp, Artificial sequence
  SiRNA target sequence
caggaaaggagtgtattacaa

SEQ ID NO: 182527 - DNA, 21 bp, Artificial sequence
  SiRNA target sequence
aggaaaggagtgtattacaat

SEQ ID NO: 182528 - DNA, 21 bp, Artificial sequence
  SiRNA target sequence
ggaaaggagtgtattacaatt

SEQ ID NO: 182529 - DNA, 21 bp, Artificial sequence
  SiRNA target sequence
gaaaggagtgtattacaattg

SEQ ID NO: 182530 - DNA, 21 bp, Artificial sequence
  SiRNA target sequence
aaaggagtgtattacaattga

SEQ ID NO: 182531 - DNA, 21 bp, Artificial sequence
  SiRNA target sequence
aaggagtgtattacaattgat

SEQ ID NO: 182532 - DNA, 21 bp, Artificial sequence
  SiRNA target sequence
aggagtgtattacaattgata

SEQ ID NO: 182533 - DNA, 21 bp, Artificial sequence
  SiRNA target sequence
ggagtgtattacaattgatac

SEQ ID NO: 182534 - DNA, 21 bp, Artificial sequence
  SiRNA target sequence
gagtgtattacaattgatact

SEQ ID NO: 182535 - DNA, 21 bp, Artificial sequence
  SiRNA target sequence
agtgtattacaattgatacta

SEQ ID NO: 182536 - DNA, 21 bp, Artificial sequence
  SiRNA target sequence
gtgtattacaattgatactaa

SEQ ID NO: 182537 - DNA, 21 bp, Artificial sequence
  SiRNA target sequence
tgtattacaattgatactaaa

SEQ ID NO: 182538 - DNA, 21 bp, Artificial sequence
  SiRNA target sequence
gtattacaattgatactaaat

SEQ ID NO: 182539 - DNA, 21 bp, Artificial sequence
  SiRNA target sequence
tattacaattgatactaaatc

SEQ ID NO: 182540 - DNA, 21 bp, Artificial sequence
  SiRNA target sequence
attacaattgatactaaatca

SEQ ID NO: 182541 - DNA, 21 bp, Artificial sequence
  SiRNA target sequence
ttacaattgatactaaatcac

SEQ ID NO: 182542 - DNA, 21 bp, Artificial sequence
  SiRNA target sequence
tacaattgatactaaatcaca

SEQ ID NO: 182543 - DNA, 21 bp, Artificial sequence
  SiRNA target sequence
acaattgatactaaatcacat

SEQ ID NO: 182544 - DNA, 21 bp, Artificial sequence
  SiRNA target sequence
caattgatactaaatcacata

SEQ ID NO: 182545 - DNA, 21 bp, Artificial sequence
  SiRNA target sequence
aattgatactaaatcacatat

SEQ ID NO: 182546 - DNA, 21 bp, Artificial sequence
  SiRNA target sequence
attgatactaaatcacatatc

SEQ ID NO: 182547 - DNA, 21 bp, Artificial sequence
  SiRNA target sequence
ttgatactaaatcacatatct

SEQ ID NO: 182548 - DNA, 21 bp, Artificial sequence
  SiRNA target sequence
tgatactaaatcacatatctc

SEQ ID NO: 182549 - DNA, 21 bp, Artificial sequence
  SiRNA target sequence
gatactaaatcacatatctca

SEQ ID NO: 182550 - DNA, 21 bp, Artificial sequence
  SiRNA target sequence
atactaaatcacatatctcag

SEQ ID NO: 182551 - DNA, 21 bp, Artificial sequence
  SiRNA target sequence
tactaaatcacatatctcaga

SEQ ID NO: 182552 - DNA, 21 bp, Artificial sequence
  SiRNA target sequence
actaaatcacatatctcagaa

SEQ ID NO: 182553 - DNA, 21 bp, Artificial sequence
  SiRNA target sequence
ctaaatcacatatctcagaaa

SEQ ID NO: 182554 - DNA, 21 bp, Artificial sequence
  SiRNA target sequence
taaatcacatatctcagaaat

SEQ ID NO: 182555 - DNA, 21 bp, Artificial sequence
  SiRNA target sequence
aaatcacatatctcagaaatt

SEQ ID NO: 182556 - DNA, 21 bp, Artificial sequence
  SiRNA target sequence
aatcacatatctcagaaattc

SEQ ID NO: 182557 - DNA, 21 bp, Artificial sequence
  SiRNA target sequence
atcacatatctcagaaattct

SEQ ID NO: 182558 - DNA, 21 bp, Artificial sequence
  SiRNA target sequence
tcacatatctcagaaattctg

SEQ ID NO: 182559 - DNA, 21 bp, Artificial sequence
  SiRNA target sequence
cacatatctcagaaattctgt

SEQ ID NO: 182560 - DNA, 21 bp, Artificial sequence
  SiRNA target sequence
acatatctcagaaattctgtg

SEQ ID NO: 182561 - DNA, 21 bp, Artificial sequence
  SiRNA target sequence
catatctcagaaattctgtgt

SEQ ID NO: 182562 - DNA, 21 bp, Artificial sequence
  SiRNA target sequence
atatctcagaaattctgtgta

SEQ ID NO: 182563 - DNA, 21 bp, Artificial sequence
  SiRNA target sequence
tatctcagaaattctgtgtat

SEQ ID NO: 182564 - DNA, 21 bp, Artificial sequence
  SiRNA target sequence
atctcagaaattctgtgtata

SEQ ID NO: 182565 - DNA, 21 bp, Artificial sequence
  SiRNA target sequence
tctcagaaattctgtgtatag

SEQ ID NO: 182566 - DNA, 21 bp, Artificial sequence
  SiRNA target sequence
ctcagaaattctgtgtatagg

SEQ ID NO: 182567 - DNA, 21 bp, Artificial sequence
  SiRNA target sequence
tcagaaattctgtgtatagga

SEQ ID NO: 182568 - DNA, 21 bp, Artificial sequence
  SiRNA target sequence
cagaaattctgtgtataggat

SEQ ID NO: 182569 - DNA, 21 bp, Artificial sequence
  SiRNA target sequence
agaaattctgtgtataggatg

SEQ ID NO: 182570 - DNA, 21 bp, Artificial sequence
  SiRNA target sequence
gaaattctgtgtataggatgt

SEQ ID NO: 182571 - DNA, 21 bp, Artificial sequence
  SiRNA target sequence
aaattctgtgtataggatgtt

SEQ ID NO: 182572 - DNA, 21 bp, Artificial sequence
  SiRNA target sequence
aattctgtgtataggatgttc

SEQ ID NO: 182573 - DNA, 21 bp, Artificial sequence
  SiRNA target sequence
attctgtgtataggatgttct

SEQ ID NO: 182574 - DNA, 21 bp, Artificial sequence
  SiRNA target sequence
ttctgtgtataggatgttctg

SEQ ID NO: 182575 - DNA, 21 bp, Artificial sequence
  SiRNA target sequence
tctgtgtataggatgttctgc

SEQ ID NO: 182576 - DNA, 21 bp, Artificial sequence
  SiRNA target sequence
ctgtgtataggatgttctgcg

SEQ ID NO: 182577 - DNA, 21 bp, Artificial sequence
  SiRNA target sequence
tgtgtataggatgttctgcgt

SEQ ID NO: 182578 - DNA, 21 bp, Artificial sequence
  SiRNA target sequence
gtgtataggatgttctgcgtg

SEQ ID NO: 182579 - DNA, 21 bp, Artificial sequence
  SiRNA target sequence
tgtataggatgttctgcgtgt

SEQ ID NO: 182580 - DNA, 21 bp, Artificial sequence
  SiRNA target sequence
gtataggatgttctgcgtgtc

SEQ ID NO: 182581 - DNA, 21 bp, Artificial sequence
  SiRNA target sequence
tataggatgttctgcgtgtca

SEQ ID NO: 182582 - DNA, 21 bp, Artificial sequence
  SiRNA target sequence
ataggatgttctgcgtgtcaa

SEQ ID NO: 182583 - DNA, 21 bp, Artificial sequence
  SiRNA target sequence
taggatgttctgcgtgtcaaa

SEQ ID NO: 182584 - DNA, 21 bp, Artificial sequence
  SiRNA target sequence
aggatgttctgcgtgtcaaaa

SEQ ID NO: 182585 - DNA, 21 bp, Artificial sequence
  SiRNA target sequence
ggatgttctgcgtgtcaaaag

SEQ ID NO: 182586 - DNA, 21 bp, Artificial sequence
  SiRNA target sequence
gatgttctgcgtgtcaaaaga

SEQ ID NO: 182587 - DNA, 21 bp, Artificial sequence
  SiRNA target sequence
atgttctgcgtgtcaaaagaa

SEQ ID NO: 182588 - DNA, 21 bp, Artificial sequence
  SiRNA target sequence
tgttctgcgtgtcaaaagaaa

SEQ ID NO: 182589 - DNA, 21 bp, Artificial sequence
  SiRNA target sequence
gttctgcgtgtcaaaagaaat

SEQ ID NO: 182590 - DNA, 21 bp, Artificial sequence
  SiRNA target sequence
ttctgcgtgtcaaaagaaatg

SEQ ID NO: 182591 - DNA, 21 bp, Artificial sequence
  SiRNA target sequence
tctgcgtgtcaaaagaaatgt

SEQ ID NO: 182592 - DNA, 21 bp, Artificial sequence
  SiRNA target sequence
ctgcgtgtcaaaagaaatgtc

SEQ ID NO: 182593 - DNA, 21 bp, Artificial sequence
  SiRNA target sequence
tgcgtgtcaaaagaaatgtcc

SEQ ID NO: 182594 - DNA, 21 bp, Artificial sequence
  SiRNA target sequence
gcgtgtcaaaagaaatgtcct

SEQ ID NO: 182595 - DNA, 21 bp, Artificial sequence
  SiRNA target sequence
cgtgtcaaaagaaatgtcctt

SEQ ID NO: 182596 - DNA, 21 bp, Artificial sequence
  SiRNA target sequence
gtgtcaaaagaaatgtccttt

SEQ ID NO: 182597 - DNA, 21 bp, Artificial sequence
  SiRNA target sequence
tgtcaaaagaaatgtcctttt

SEQ ID NO: 182598 - DNA, 21 bp, Artificial sequence
  SiRNA target sequence
gtcaaaagaaatgtcctttta

SEQ ID NO: 182599 - DNA, 21 bp, Artificial sequence
  SiRNA target sequence
tcaaaagaaatgtccttttaa

SEQ ID NO: 182600 - DNA, 21 bp, Artificial sequence
  SiRNA target sequence
caaaagaaatgtccttttaag

SEQ ID NO: 182601 - DNA, 21 bp, Artificial sequence
  SiRNA target sequence
aaaagaaatgtccttttaagg

SEQ ID NO: 182602 - DNA, 21 bp, Artificial sequence
  SiRNA target sequence
aaagaaatgtccttttaaggc

SEQ ID NO: 182603 - DNA, 21 bp, Artificial sequence
  SiRNA target sequence
aagaaatgtccttttaaggcg

SEQ ID NO: 182604 - DNA, 21 bp, Artificial sequence
  SiRNA target sequence
agaaatgtccttttaaggcga

SEQ ID NO: 182605 - DNA, 21 bp, Artificial sequence
  SiRNA target sequence
gaaatgtccttttaaggcgat

SEQ ID NO: 182606 - DNA, 21 bp, Artificial sequence
  SiRNA target sequence
aaatgtccttttaaggcgatt

SEQ ID NO: 182607 - DNA, 21 bp, Artificial sequence
  SiRNA target sequence
aatgtccttttaaggcgatta

SEQ ID NO: 182608 - DNA, 21 bp, Artificial sequence
  SiRNA target sequence
atgtccttttaaggcgattac

SEQ ID NO: 182609 - DNA, 21 bp, Artificial sequence
  SiRNA target sequence
tgtccttttaaggcgattaca

SEQ ID NO: 182610 - DNA, 21 bp, Artificial sequence
  SiRNA target sequence
gtccttttaaggcgattacaa

SEQ ID NO: 182611 - DNA, 21 bp, Artificial sequence
  SiRNA target sequence
tccttttaaggcgattacaat

SEQ ID NO: 182612 - DNA, 21 bp, Artificial sequence
  SiRNA target sequence
ccttttaaggcgattacaatt

SEQ ID NO: 182613 - DNA, 21 bp, Artificial sequence
  SiRNA target sequence
cttttaaggcgattacaattg

SEQ ID NO: 182614 - DNA, 21 bp, Artificial sequence
  SiRNA target sequence
ttttaaggcgattacaattgt

SEQ ID NO: 182615 - DNA, 21 bp, Artificial sequence
  SiRNA target sequence
tttaaggcgattacaattgta

SEQ ID NO: 182616 - DNA, 21 bp, Artificial sequence
  SiRNA target sequence
ttaaggcgattacaattgtaa

SEQ ID NO: 182617 - DNA, 21 bp, Artificial sequence
  SiRNA target sequence
taaggcgattacaattgtaaa

SEQ ID NO: 182618 - DNA, 21 bp, Artificial sequence
  SiRNA target sequence
aaggcgattacaattgtaaat

SEQ ID NO: 182619 - DNA, 21 bp, Artificial sequence
  SiRNA target sequence
aggcgattacaattgtaaatt

SEQ ID NO: 182620 - DNA, 21 bp, Artificial sequence
  SiRNA target sequence
ggcgattacaattgtaaattt

SEQ ID NO: 182621 - DNA, 21 bp, Artificial sequence
  SiRNA target sequence
gcgattacaattgtaaattta

SEQ ID NO: 182622 - DNA, 21 bp, Artificial sequence
  SiRNA target sequence
cgattacaattgtaaatttac

SEQ ID NO: 182623 - DNA, 21 bp, Artificial sequence
  SiRNA target sequence
gattacaattgtaaatttacc

SEQ ID NO: 182624 - DNA, 21 bp, Artificial sequence
  SiRNA target sequence
attacaattgtaaatttacct

SEQ ID NO: 182625 - DNA, 21 bp, Artificial sequence
  SiRNA target sequence
ttacaattgtaaatttaccta

SEQ ID NO: 182626 - DNA, 21 bp, Artificial sequence
  SiRNA target sequence
tacaattgtaaatttacctac

SEQ ID NO: 182627 - DNA, 21 bp, Artificial sequence
  SiRNA target sequence
acaattgtaaatttacctaca

SEQ ID NO: 182628 - DNA, 21 bp, Artificial sequence
  SiRNA target sequence
caattgtaaatttacctacaa

SEQ ID NO: 182629 - DNA, 21 bp, Artificial sequence
  SiRNA target sequence
aattgtaaatttacctacaaa

SEQ ID NO: 182630 - DNA, 21 bp, Artificial sequence
  SiRNA target sequence
attgtaaatttacctacaaat

SEQ ID NO: 182631 - DNA, 21 bp, Artificial sequence
  SiRNA target sequence
ttgtaaatttacctacaaatc

SEQ ID NO: 182632 - DNA, 21 bp, Artificial sequence
  SiRNA target sequence
tgtaaatttacctacaaatct

SEQ ID NO: 182633 - DNA, 21 bp, Artificial sequence
  SiRNA target sequence
gtaaatttacctacaaatcta

SEQ ID NO: 182634 - DNA, 21 bp, Artificial sequence
  SiRNA target sequence
taaatttacctacaaatctag

SEQ ID NO: 182635 - DNA, 21 bp, Artificial sequence
  SiRNA target sequence
aaatttacctacaaatctaga

SEQ ID NO: 182636 - DNA, 21 bp, Artificial sequence
  SiRNA target sequence
aatttacctacaaatctagat

SEQ ID NO: 182637 - DNA, 21 bp, Artificial sequence
  SiRNA target sequence
atttacctacaaatctagata

SEQ ID NO: 182638 - DNA, 21 bp, Artificial sequence
  SiRNA target sequence
tttacctacaaatctagataa

SEQ ID NO: 182639 - DNA, 21 bp, Artificial sequence
  SiRNA target sequence
ttacctacaaatctagataaa

SEQ ID NO: 182640 - DNA, 21 bp, Artificial sequence
  SiRNA target sequence
tacctacaaatctagataaag

SEQ ID NO: 182641 - DNA, 21 bp, Artificial sequence
  SiRNA target sequence
acctacaaatctagataaaga

SEQ ID NO: 182642 - DNA, 21 bp, Artificial sequence
  SiRNA target sequence
cctacaaatctagataaagac

SEQ ID NO: 182643 - DNA, 21 bp, Artificial sequence
  SiRNA target sequence
ctacaaatctagataaagaca

SEQ ID NO: 182644 - DNA, 21 bp, Artificial sequence
  SiRNA target sequence
tacaaatctagataaagacat

SEQ ID NO: 182645 - DNA, 21 bp, Artificial sequence
  SiRNA target sequence
acaaatctagataaagacatt

SEQ ID NO: 182646 - DNA, 21 bp, Artificial sequence
  SiRNA target sequence
caaatctagataaagacattt

SEQ ID NO: 182647 - DNA, 21 bp, Artificial sequence
  SiRNA target sequence
aaatctagataaagacatttc

SEQ ID NO: 182648 - DNA, 21 bp, Artificial sequence
  SiRNA target sequence
aatctagataaagacatttca

SEQ ID NO: 182649 - DNA, 21 bp, Artificial sequence
  SiRNA target sequence
atctagataaagacatttcac

SEQ ID NO: 182650 - DNA, 21 bp, Artificial sequence
  SiRNA target sequence
tctagataaagacatttcaca

SEQ ID NO: 182651 - DNA, 21 bp, Artificial sequence
  SiRNA target sequence
ctagataaagacatttcacat

SEQ ID NO: 182652 - DNA, 21 bp, Artificial sequence
  SiRNA target sequence
tagataaagacatttcacata

SEQ ID NO: 182653 - DNA, 21 bp, Artificial sequence
  SiRNA target sequence
agataaagacatttcacatag

SEQ ID NO: 182654 - DNA, 21 bp, Artificial sequence
  SiRNA target sequence
gataaagacatttcacataga

SEQ ID NO: 182655 - DNA, 21 bp, Artificial sequence
  SiRNA target sequence
ataaagacatttcacatagat

SEQ ID NO: 182656 - DNA, 21 bp, Artificial sequence
  SiRNA target sequence
taaagacatttcacatagata

SEQ ID NO: 182657 - DNA, 21 bp, Artificial sequence
  SiRNA target sequence
aaagacatttcacatagatat

SEQ ID NO: 182658 - DNA, 21 bp, Artificial sequence
  SiRNA target sequence
aagacatttcacatagatatt

SEQ ID NO: 182659 - DNA, 21 bp, Artificial sequence
  SiRNA target sequence
agacatttcacatagatattc

SEQ ID NO: 182660 - DNA, 21 bp, Artificial sequence
  SiRNA target sequence
gacatttcacatagatattcg

SEQ ID NO: 182661 - DNA, 21 bp, Artificial sequence
  SiRNA target sequence
acatttcacatagatattcgg

SEQ ID NO: 182662 - DNA, 21 bp, Artificial sequence
  SiRNA target sequence
catttcacatagatattcggc

SEQ ID NO: 182663 - DNA, 21 bp, Artificial sequence
  SiRNA target sequence
atttcacatagatattcggca

SEQ ID NO: 182664 - DNA, 21 bp, Artificial sequence
  SiRNA target sequence
tttcacatagatattcggcaa

SEQ ID NO: 182665 - DNA, 21 bp, Artificial sequence
  SiRNA target sequence
ttcacatagatattcggcaaa

SEQ ID NO: 182666 - DNA, 21 bp, Artificial sequence
  SiRNA target sequence
tcacatagatattcggcaaat

SEQ ID NO: 182667 - DNA, 21 bp, Artificial sequence
  SiRNA target sequence
cacatagatattcggcaaatg

SEQ ID NO: 182668 - DNA, 21 bp, Artificial sequence
  SiRNA target sequence
acatagatattcggcaaatgg

SEQ ID NO: 182669 - DNA, 21 bp, Artificial sequence
  SiRNA target sequence
catagatattcggcaaatggt

SEQ ID NO: 182670 - DNA, 21 bp, Artificial sequence
  SiRNA target sequence
atagatattcggcaaatggtt

SEQ ID NO: 182671 - DNA, 21 bp, Artificial sequence
  SiRNA target sequence
tagatattcggcaaatggttt

SEQ ID NO: 182672 - DNA, 21 bp, Artificial sequence
  SiRNA target sequence
agatattcggcaaatggtttt

SEQ ID NO: 182673 - DNA, 21 bp, Artificial sequence
  SiRNA target sequence
gatattcggcaaatggtttta

SEQ ID NO: 182674 - DNA, 21 bp, Artificial sequence
  SiRNA target sequence
atattcggcaaatggttttaa

SEQ ID NO: 182675 - DNA, 21 bp, Artificial sequence
  SiRNA target sequence
tattcggcaaatggttttaaa

SEQ ID NO: 182676 - DNA, 21 bp, Artificial sequence
  SiRNA target sequence
attcggcaaatggttttaaac

SEQ ID NO: 182677 - DNA, 21 bp, Artificial sequence
  SiRNA target sequence
ttcggcaaatggttttaaact

SEQ ID NO: 182678 - DNA, 21 bp, Artificial sequence
  SiRNA target sequence
tcggcaaatggttttaaactt

SEQ ID NO: 182679 - DNA, 21 bp, Artificial sequence
  SiRNA target sequence
cggcaaatggttttaaacttc

SEQ ID NO: 182680 - DNA, 21 bp, Artificial sequence
  SiRNA target sequence
ggcaaatggttttaaacttca

SEQ ID NO: 182681 - DNA, 21 bp, Artificial sequence
  SiRNA target sequence
gcaaatggttttaaacttcac

SEQ ID NO: 182682 - DNA, 21 bp, Artificial sequence
  SiRNA target sequence
caaatggttttaaacttcaca

SEQ ID NO: 182683 - DNA, 21 bp, Artificial sequence
  SiRNA target sequence
aaatggttttaaacttcacag

SEQ ID NO: 182684 - DNA, 21 bp, Artificial sequence
  SiRNA target sequence
aatggttttaaacttcacaga

SEQ ID NO: 182685 - DNA, 21 bp, Artificial sequence
  SiRNA target sequence
atggttttaaacttcacagat

SEQ ID NO: 182686 - DNA, 21 bp, Artificial sequence
  SiRNA target sequence
tggttttaaacttcacagatt

SEQ ID NO: 182687 - DNA, 21 bp, Artificial sequence
  SiRNA target sequence
ggttttaaacttcacagatta

SEQ ID NO: 182688 - DNA, 21 bp, Artificial sequence
  SiRNA target sequence
gttttaaacttcacagattac

SEQ ID NO: 182689 - DNA, 21 bp, Artificial sequence
  SiRNA target sequence
ttttaaacttcacagattacc

SEQ ID NO: 182690 - DNA, 21 bp, Artificial sequence
  SiRNA target sequence
tttaaacttcacagattacca

SEQ ID NO: 182691 - DNA, 21 bp, Artificial sequence
  SiRNA target sequence
ttaaacttcacagattaccaa

SEQ ID NO: 182692 - DNA, 21 bp, Artificial sequence
  SiRNA target sequence
taaacttcacagattaccaat

SEQ ID NO: 182693 - DNA, 21 bp, Artificial sequence
  SiRNA target sequence
aaacttcacagattaccaatc

SEQ ID NO: 182694 - DNA, 21 bp, Artificial sequence
  SiRNA target sequence
aacttcacagattaccaatcc

SEQ ID NO: 182695 - DNA, 21 bp, Artificial sequence
  SiRNA target sequence
acttcacagattaccaatccc

SEQ ID NO: 182696 - DNA, 21 bp, Artificial sequence
  SiRNA target sequence
cttcacagattaccaatccct

SEQ ID NO: 182697 - DNA, 21 bp, Artificial sequence
  SiRNA target sequence
ttcacagattaccaatcccta

SEQ ID NO: 182698 - DNA, 21 bp, Artificial sequence
  SiRNA target sequence
tcacagattaccaatccctaa

SEQ ID NO: 182699 - DNA, 21 bp, Artificial sequence
  SiRNA target sequence
cacagattaccaatccctaaa

SEQ ID NO: 182700 - DNA, 21 bp, Artificial sequence
  SiRNA target sequence
acagattaccaatccctaaat

SEQ ID NO: 182701 - DNA, 21 bp, Artificial sequence
  SiRNA target sequence
cagattaccaatccctaaata

SEQ ID NO: 182702 - DNA, 21 bp, Artificial sequence
  SiRNA target sequence
agattaccaatccctaaatat

SEQ ID NO: 182703 - DNA, 21 bp, Artificial sequence
  SiRNA target sequence
gattaccaatccctaaatatg

SEQ ID NO: 182704 - DNA, 21 bp, Artificial sequence
  SiRNA target sequence
attaccaatccctaaatatgg

SEQ ID NO: 182705 - DNA, 21 bp, Artificial sequence
  SiRNA target sequence
ttaccaatccctaaatatggt

SEQ ID NO: 182706 - DNA, 21 bp, Artificial sequence
  SiRNA target sequence
taccaatccctaaatatggta

SEQ ID NO: 182707 - DNA, 21 bp, Artificial sequence
  SiRNA target sequence
accaatccctaaatatggtaa

SEQ ID NO: 182708 - DNA, 21 bp, Artificial sequence
  SiRNA target sequence
ccaatccctaaatatggtaag

SEQ ID NO: 182709 - DNA, 21 bp, Artificial sequence
  SiRNA target sequence
caatccctaaatatggtaagg

SEQ ID NO: 182710 - DNA, 21 bp, Artificial sequence
  SiRNA target sequence
aatccctaaatatggtaaggt

SEQ ID NO: 182711 - DNA, 21 bp, Artificial sequence
  SiRNA target sequence
atccctaaatatggtaaggtt

SEQ ID NO: 182712 - DNA, 21 bp, Artificial sequence
  SiRNA target sequence
tccctaaatatggtaaggttt

SEQ ID NO: 182713 - DNA, 21 bp, Artificial sequence
  SiRNA target sequence
ccctaaatatggtaaggtttt

SEQ ID NO: 182714 - DNA, 21 bp, Artificial sequence
  SiRNA target sequence
cctaaatatggtaaggtttta

SEQ ID NO: 182715 - DNA, 21 bp, Artificial sequence
  SiRNA target sequence
ctaaatatggtaaggttttag

SEQ ID NO: 182716 - DNA, 21 bp, Artificial sequence
  SiRNA target sequence
taaatatggtaaggttttagg

SEQ ID NO: 182717 - DNA, 21 bp, Artificial sequence
  SiRNA target sequence
aaatatggtaaggttttaggg

SEQ ID NO: 182718 - DNA, 21 bp, Artificial sequence
  SiRNA target sequence
aatatggtaaggttttagggc

SEQ ID NO: 182719 - DNA, 21 bp, Artificial sequence
  SiRNA target sequence
atatggtaaggttttagggct

SEQ ID NO: 182720 - DNA, 21 bp, Artificial sequence
  SiRNA target sequence
tatggtaaggttttagggcta

SEQ ID NO: 182721 - DNA, 21 bp, Artificial sequence
  SiRNA target sequence
atggtaaggttttagggctag

SEQ ID NO: 182722 - DNA, 21 bp, Artificial sequence
  SiRNA target sequence
tggtaaggttttagggctagt

SEQ ID NO: 182723 - DNA, 21 bp, Artificial sequence
  SiRNA target sequence
ggtaaggttttagggctagta

SEQ ID NO: 182724 - DNA, 21 bp, Artificial sequence
  SiRNA target sequence
gtaaggttttagggctagtag

SEQ ID NO: 182725 - DNA, 21 bp, Artificial sequence
  SiRNA target sequence
taaggttttagggctagtagg

SEQ ID NO: 182726 - DNA, 21 bp, Artificial sequence
  SiRNA target sequence
aaggttttagggctagtaggc

SEQ ID NO: 182727 - DNA, 21 bp, Artificial sequence
  SiRNA target sequence
aggttttagggctagtaggca

SEQ ID NO: 182728 - DNA, 21 bp, Artificial sequence
  SiRNA target sequence
ggttttagggctagtaggcac

SEQ ID NO: 182729 - DNA, 21 bp, Artificial sequence
  SiRNA target sequence
gttttagggctagtaggcact

SEQ ID NO: 182730 - DNA, 21 bp, Artificial sequence
  SiRNA target sequence
ttttagggctagtaggcacta

SEQ ID NO: 182731 - DNA, 21 bp, Artificial sequence
  SiRNA target sequence
tttagggctagtaggcactaa

SEQ ID NO: 182732 - DNA, 21 bp, Artificial sequence
  SiRNA target sequence
ttagggctagtaggcactaat

SEQ ID NO: 182733 - DNA, 21 bp, Artificial sequence
  SiRNA target sequence
tagggctagtaggcactaatg

SEQ ID NO: 182734 - DNA, 21 bp, Artificial sequence
  SiRNA target sequence
agggctagtaggcactaatgg

SEQ ID NO: 182735 - DNA, 21 bp, Artificial sequence
  SiRNA target sequence
gggctagtaggcactaatggt

SEQ ID NO: 182736 - DNA, 21 bp, Artificial sequence
  SiRNA target sequence
ggctagtaggcactaatggta

SEQ ID NO: 182737 - DNA, 21 bp, Artificial sequence
  SiRNA target sequence
gctagtaggcactaatggtat

SEQ ID NO: 182738 - DNA, 21 bp, Artificial sequence
  SiRNA target sequence
ctagtaggcactaatggtata

SEQ ID NO: 182739 - DNA, 21 bp, Artificial sequence
  SiRNA target sequence
tagtaggcactaatggtatag

SEQ ID NO: 182740 - DNA, 21 bp, Artificial sequence
  SiRNA target sequence
agtaggcactaatggtatagg

SEQ ID NO: 182741 - DNA, 21 bp, Artificial sequence
  SiRNA target sequence
gtaggcactaatggtatagga

SEQ ID NO: 182742 - DNA, 21 bp, Artificial sequence
  SiRNA target sequence
taggcactaatggtataggaa

SEQ ID NO: 182743 - DNA, 21 bp, Artificial sequence
  SiRNA target sequence
aggcactaatggtataggaaa

SEQ ID NO: 182744 - DNA, 21 bp, Artificial sequence
  SiRNA target sequence
ggcactaatggtataggaaaa

SEQ ID NO: 182745 - DNA, 21 bp, Artificial sequence
  SiRNA target sequence
gcactaatggtataggaaaaa

SEQ ID NO: 182746 - DNA, 21 bp, Artificial sequence
  SiRNA target sequence
cactaatggtataggaaaaag

SEQ ID NO: 182747 - DNA, 21 bp, Artificial sequence
  SiRNA target sequence
actaatggtataggaaaaagt

SEQ ID NO: 182748 - DNA, 21 bp, Artificial sequence
  SiRNA target sequence
ctaatggtataggaaaaagta

SEQ ID NO: 182749 - DNA, 21 bp, Artificial sequence
  SiRNA target sequence
taatggtataggaaaaagtac

SEQ ID NO: 182750 - DNA, 21 bp, Artificial sequence
  SiRNA target sequence
aatggtataggaaaaagtact

SEQ ID NO: 182751 - DNA, 21 bp, Artificial sequence
  SiRNA target sequence
atggtataggaaaaagtactg

SEQ ID NO: 182752 - DNA, 21 bp, Artificial sequence
  SiRNA target sequence
tggtataggaaaaagtactgc

SEQ ID NO: 182753 - DNA, 21 bp, Artificial sequence
  SiRNA target sequence
ggtataggaaaaagtactgca

SEQ ID NO: 182754 - DNA, 21 bp, Artificial sequence
  SiRNA target sequence
gtataggaaaaagtactgcac

SEQ ID NO: 182755 - DNA, 21 bp, Artificial sequence
  SiRNA target sequence
tataggaaaaagtactgcact

SEQ ID NO: 182756 - DNA, 21 bp, Artificial sequence
  SiRNA target sequence
ataggaaaaagtactgcactt

SEQ ID NO: 182757 - DNA, 21 bp, Artificial sequence
  SiRNA target sequence
taggaaaaagtactgcactta

SEQ ID NO: 182758 - DNA, 21 bp, Artificial sequence
  SiRNA target sequence
aggaaaaagtactgcacttaa

SEQ ID NO: 182759 - DNA, 21 bp, Artificial sequence
  SiRNA target sequence
ggaaaaagtactgcacttaaa

SEQ ID NO: 182760 - DNA, 21 bp, Artificial sequence
  SiRNA target sequence
gaaaaagtactgcacttaaaa

SEQ ID NO: 182761 - DNA, 21 bp, Artificial sequence
  SiRNA target sequence
aaaaagtactgcacttaaaat

SEQ ID NO: 182762 - DNA, 21 bp, Artificial sequence
  SiRNA target sequence
aaaagtactgcacttaaaata

SEQ ID NO: 182763 - DNA, 21 bp, Artificial sequence
  SiRNA target sequence
aaagtactgcacttaaaatat

SEQ ID NO: 182764 - DNA, 21 bp, Artificial sequence
  SiRNA target sequence
aagtactgcacttaaaatatt

SEQ ID NO: 182765 - DNA, 21 bp, Artificial sequence
  SiRNA target sequence
agtactgcacttaaaatatta

SEQ ID NO: 182766 - DNA, 21 bp, Artificial sequence
  SiRNA target sequence
gtactgcacttaaaatattat

SEQ ID NO: 182767 - DNA, 21 bp, Artificial sequence
  SiRNA target sequence
tactgcacttaaaatattatc

SEQ ID NO: 182768 - DNA, 21 bp, Artificial sequence
  SiRNA target sequence
actgcacttaaaatattatcg

SEQ ID NO: 182769 - DNA, 21 bp, Artificial sequence
  SiRNA target sequence
ctgcacttaaaatattatcgg

SEQ ID NO: 182770 - DNA, 21 bp, Artificial sequence
  SiRNA target sequence
tgcacttaaaatattatcggg

SEQ ID NO: 182771 - DNA, 21 bp, Artificial sequence
  SiRNA target sequence
gcacttaaaatattatcgggc

SEQ ID NO: 182772 - DNA, 21 bp, Artificial sequence
  SiRNA target sequence
cacttaaaatattatcgggca

SEQ ID NO: 182773 - DNA, 21 bp, Artificial sequence
  SiRNA target sequence
acttaaaatattatcgggcaa

SEQ ID NO: 182774 - DNA, 21 bp, Artificial sequence
  SiRNA target sequence
cttaaaatattatcgggcaat

SEQ ID NO: 182775 - DNA, 21 bp, Artificial sequence
  SiRNA target sequence
ttaaaatattatcgggcaatc

SEQ ID NO: 182776 - DNA, 21 bp, Artificial sequence
  SiRNA target sequence
taaaatattatcgggcaatct

SEQ ID NO: 182777 - DNA, 21 bp, Artificial sequence
  SiRNA target sequence
aaaatattatcgggcaatctt

SEQ ID NO: 182778 - DNA, 21 bp, Artificial sequence
  SiRNA target sequence
aaatattatcgggcaatctta

SEQ ID NO: 182779 - DNA, 21 bp, Artificial sequence
  SiRNA target sequence
aatattatcgggcaatcttaa

SEQ ID NO: 182780 - DNA, 21 bp, Artificial sequence
  SiRNA target sequence
atattatcgggcaatcttaaa

SEQ ID NO: 182781 - DNA, 21 bp, Artificial sequence
  SiRNA target sequence
tattatcgggcaatcttaaac

SEQ ID NO: 182782 - DNA, 21 bp, Artificial sequence
  SiRNA target sequence
attatcgggcaatcttaaacc

SEQ ID NO: 182783 - DNA, 21 bp, Artificial sequence
  SiRNA target sequence
ttatcgggcaatcttaaacca

SEQ ID NO: 182784 - DNA, 21 bp, Artificial sequence
  SiRNA target sequence
tatcgggcaatcttaaaccaa

SEQ ID NO: 182785 - DNA, 21 bp, Artificial sequence
  SiRNA target sequence
atcgggcaatcttaaaccaaa

SEQ ID NO: 182786 - DNA, 21 bp, Artificial sequence
  SiRNA target sequence
tcgggcaatcttaaaccaaac

SEQ ID NO: 182787 - DNA, 21 bp, Artificial sequence
  SiRNA target sequence
cgggcaatcttaaaccaaact

SEQ ID NO: 182788 - DNA, 21 bp, Artificial sequence
  SiRNA target sequence
gggcaatcttaaaccaaactt

SEQ ID NO: 182789 - DNA, 21 bp, Artificial sequence
  SiRNA target sequence
ggcaatcttaaaccaaactta

SEQ ID NO: 182790 - DNA, 21 bp, Artificial sequence
  SiRNA target sequence
gcaatcttaaaccaaacttag

SEQ ID NO: 182791 - DNA, 21 bp, Artificial sequence
  SiRNA target sequence
caatcttaaaccaaacttagg

SEQ ID NO: 182792 - DNA, 21 bp, Artificial sequence
  SiRNA target sequence
aatcttaaaccaaacttagga

SEQ ID NO: 182793 - DNA, 21 bp, Artificial sequence
  SiRNA target sequence
atcttaaaccaaacttaggaa

SEQ ID NO: 182794 - DNA, 21 bp, Artificial sequence
  SiRNA target sequence
tcttaaaccaaacttaggaaa

SEQ ID NO: 182795 - DNA, 21 bp, Artificial sequence
  SiRNA target sequence
cttaaaccaaacttaggaaag

SEQ ID NO: 182796 - DNA, 21 bp, Artificial sequence
  SiRNA target sequence
ttaaaccaaacttaggaaagt

SEQ ID NO: 182797 - DNA, 21 bp, Artificial sequence
  SiRNA target sequence
taaaccaaacttaggaaagtt

SEQ ID NO: 182798 - DNA, 21 bp, Artificial sequence
  SiRNA target sequence
aaaccaaacttaggaaagttc

SEQ ID NO: 182799 - DNA, 21 bp, Artificial sequence
  SiRNA target sequence
aaccaaacttaggaaagttcg

SEQ ID NO: 182800 - DNA, 21 bp, Artificial sequence
  SiRNA target sequence
accaaacttaggaaagttcga

SEQ ID NO: 182801 - DNA, 21 bp, Artificial sequence
  SiRNA target sequence
ccaaacttaggaaagttcgac

SEQ ID NO: 182802 - DNA, 21 bp, Artificial sequence
  SiRNA target sequence
caaacttaggaaagttcgacg

SEQ ID NO: 182803 - DNA, 21 bp, Artificial sequence
  SiRNA target sequence
aaacttaggaaagttcgacgt

SEQ ID NO: 182804 - DNA, 21 bp, Artificial sequence
  SiRNA target sequence
aacttaggaaagttcgacgtt

SEQ ID NO: 182805 - DNA, 21 bp, Artificial sequence
  SiRNA target sequence
acttaggaaagttcgacgtta

SEQ ID NO: 182806 - DNA, 21 bp, Artificial sequence
  SiRNA target sequence
cttaggaaagttcgacgttac

SEQ ID NO: 182807 - DNA, 21 bp, Artificial sequence
  SiRNA target sequence
ttaggaaagttcgacgttacg

SEQ ID NO: 182808 - DNA, 21 bp, Artificial sequence
  SiRNA target sequence
taggaaagttcgacgttacgc

SEQ ID NO: 182809 - DNA, 21 bp, Artificial sequence
  SiRNA target sequence
aggaaagttcgacgttacgcc

SEQ ID NO: 182810 - DNA, 21 bp, Artificial sequence
  SiRNA target sequence
ggaaagttcgacgttacgccc

SEQ ID NO: 182811 - DNA, 21 bp, Artificial sequence
  SiRNA target sequence
gaaagttcgacgttacgcccg

SEQ ID NO: 182812 - DNA, 21 bp, Artificial sequence
  SiRNA target sequence
aaagttcgacgttacgcccga

SEQ ID NO: 182813 - DNA, 21 bp, Artificial sequence
  SiRNA target sequence
aagttcgacgttacgcccgac

SEQ ID NO: 182814 - DNA, 21 bp, Artificial sequence
  SiRNA target sequence
agttcgacgttacgcccgact

SEQ ID NO: 182815 - DNA, 21 bp, Artificial sequence
  SiRNA target sequence
gttcgacgttacgcccgactg

SEQ ID NO: 182816 - DNA, 21 bp, Artificial sequence
  SiRNA target sequence
ttcgacgttacgcccgactgg

SEQ ID NO: 182817 - DNA, 21 bp, Artificial sequence
  SiRNA target sequence
tcgacgttacgcccgactggg

SEQ ID NO: 182818 - DNA, 21 bp, Artificial sequence
  SiRNA target sequence
cgacgttacgcccgactgggc

SEQ ID NO: 182819 - DNA, 21 bp, Artificial sequence
  SiRNA target sequence
gacgttacgcccgactgggca

SEQ ID NO: 182820 - DNA, 21 bp, Artificial sequence
  SiRNA target sequence
acgttacgcccgactgggcag

SEQ ID NO: 182821 - DNA, 21 bp, Artificial sequence
  SiRNA target sequence
cgttacgcccgactgggcagc

SEQ ID NO: 182822 - DNA, 21 bp, Artificial sequence
  SiRNA target sequence
gttacgcccgactgggcagca

SEQ ID NO: 182823 - DNA, 21 bp, Artificial sequence
  SiRNA target sequence
ttacgcccgactgggcagcaa

SEQ ID NO: 182824 - DNA, 21 bp, Artificial sequence
  SiRNA target sequence
tacgcccgactgggcagcaat

SEQ ID NO: 182825 - DNA, 21 bp, Artificial sequence
  SiRNA target sequence
acgcccgactgggcagcaatt

SEQ ID NO: 182826 - DNA, 21 bp, Artificial sequence
  SiRNA target sequence
cgcccgactgggcagcaattc

SEQ ID NO: 182827 - DNA, 21 bp, Artificial sequence
  SiRNA target sequence
gcccgactgggcagcaattct

SEQ ID NO: 182828 - DNA, 21 bp, Artificial sequence
  SiRNA target sequence
cccgactgggcagcaattcta

SEQ ID NO: 182829 - DNA, 21 bp, Artificial sequence
  SiRNA target sequence
ccgactgggcagcaattctaa

SEQ ID NO: 182830 - DNA, 21 bp, Artificial sequence
  SiRNA target sequence
cgactgggcagcaattctaaa

SEQ ID NO: 182831 - DNA, 21 bp, Artificial sequence
  SiRNA target sequence
gactgggcagcaattctaaat

SEQ ID NO: 182832 - DNA, 21 bp, Artificial sequence
  SiRNA target sequence
actgggcagcaattctaaata

SEQ ID NO: 182833 - DNA, 21 bp, Artificial sequence
  SiRNA target sequence
ctgggcagcaattctaaataa

SEQ ID NO: 182834 - DNA, 21 bp, Artificial sequence
  SiRNA target sequence
tgggcagcaattctaaataat

SEQ ID NO: 182835 - DNA, 21 bp, Artificial sequence
  SiRNA target sequence
gggcagcaattctaaataatt

SEQ ID NO: 182836 - DNA, 21 bp, Artificial sequence
  SiRNA target sequence
ggcagcaattctaaataatta

SEQ ID NO: 182837 - DNA, 21 bp, Artificial sequence
  SiRNA target sequence
gcagcaattctaaataattat

SEQ ID NO: 182838 - DNA, 21 bp, Artificial sequence
  SiRNA target sequence
cagcaattctaaataattata

SEQ ID NO: 182839 - DNA, 21 bp, Artificial sequence
  SiRNA target sequence
agcaattctaaataattataa

SEQ ID NO: 182840 - DNA, 21 bp, Artificial sequence
  SiRNA target sequence
gcaattctaaataattataaa

SEQ ID NO: 182841 - DNA, 21 bp, Artificial sequence
  SiRNA target sequence
caattctaaataattataaag

SEQ ID NO: 182842 - DNA, 21 bp, Artificial sequence
  SiRNA target sequence
aattctaaataattataaagg

SEQ ID NO: 182843 - DNA, 21 bp, Artificial sequence
  SiRNA target sequence
attctaaataattataaagga

SEQ ID NO: 182844 - DNA, 21 bp, Artificial sequence
  SiRNA target sequence
ttctaaataattataaaggat

SEQ ID NO: 182845 - DNA, 21 bp, Artificial sequence
  SiRNA target sequence
tctaaataattataaaggatc

SEQ ID NO: 182846 - DNA, 21 bp, Artificial sequence
  SiRNA target sequence
ctaaataattataaaggatct

SEQ ID NO: 182847 - DNA, 21 bp, Artificial sequence
  SiRNA target sequence
taaataattataaaggatctg

SEQ ID NO: 182848 - DNA, 21 bp, Artificial sequence
  SiRNA target sequence
aaataattataaaggatctga

SEQ ID NO: 182849 - DNA, 21 bp, Artificial sequence
  SiRNA target sequence
aataattataaaggatctgaa

SEQ ID NO: 182850 - DNA, 21 bp, Artificial sequence
  SiRNA target sequence
ataattataaaggatctgaac

SEQ ID NO: 182851 - DNA, 21 bp, Artificial sequence
  SiRNA target sequence
taattataaaggatctgaact

SEQ ID NO: 182852 - DNA, 21 bp, Artificial sequence
  SiRNA target sequence
aattataaaggatctgaactt

SEQ ID NO: 182853 - DNA, 21 bp, Artificial sequence
  SiRNA target sequence
attataaaggatctgaacttc

SEQ ID NO: 182854 - DNA, 21 bp, Artificial sequence
  SiRNA target sequence
ttataaaggatctgaacttca

SEQ ID NO: 182855 - DNA, 21 bp, Artificial sequence
  SiRNA target sequence
tataaaggatctgaacttcat

SEQ ID NO: 182856 - DNA, 21 bp, Artificial sequence
  SiRNA target sequence
ataaaggatctgaacttcatg

SEQ ID NO: 182857 - DNA, 21 bp, Artificial sequence
  SiRNA target sequence
taaaggatctgaacttcatgg

SEQ ID NO: 182858 - DNA, 21 bp, Artificial sequence
  SiRNA target sequence
aaaggatctgaacttcatgga

SEQ ID NO: 182859 - DNA, 21 bp, Artificial sequence
  SiRNA target sequence
aaggatctgaacttcatggat

SEQ ID NO: 182860 - DNA, 21 bp, Artificial sequence
  SiRNA target sequence
aggatctgaacttcatggatt

SEQ ID NO: 182861 - DNA, 21 bp, Artificial sequence
  SiRNA target sequence
ggatctgaacttcatggattt

SEQ ID NO: 182862 - DNA, 21 bp, Artificial sequence
  SiRNA target sequence
gatctgaacttcatggatttt

SEQ ID NO: 182863 - DNA, 21 bp, Artificial sequence
  SiRNA target sequence
atctgaacttcatggattttt

SEQ ID NO: 182864 - DNA, 21 bp, Artificial sequence
  SiRNA target sequence
tctgaacttcatggatttttt

SEQ ID NO: 182865 - DNA, 21 bp, Artificial sequence
  SiRNA target sequence
ctgaacttcatggatttttta

SEQ ID NO: 182866 - DNA, 21 bp, Artificial sequence
  SiRNA target sequence
tgaacttcatggattttttac

SEQ ID NO: 182867 - DNA, 21 bp, Artificial sequence
  SiRNA target sequence
gaacttcatggattttttact

SEQ ID NO: 182868 - DNA, 21 bp, Artificial sequence
  SiRNA target sequence
aacttcatggattttttacta

SEQ ID NO: 182869 - DNA, 21 bp, Artificial sequence
  SiRNA target sequence
acttcatggattttttactaa

SEQ ID NO: 182870 - DNA, 21 bp, Artificial sequence
  SiRNA target sequence
cttcatggattttttactaaa

SEQ ID NO: 182871 - DNA, 21 bp, Artificial sequence
  SiRNA target sequence
ttcatggattttttactaaaa

SEQ ID NO: 182872 - DNA, 21 bp, Artificial sequence
  SiRNA target sequence
tcatggattttttactaaaat

SEQ ID NO: 182873 - DNA, 21 bp, Artificial sequence
  SiRNA target sequence
catggattttttactaaaatt

SEQ ID NO: 182874 - DNA, 21 bp, Artificial sequence
  SiRNA target sequence
atggattttttactaaaattt

SEQ ID NO: 182875 - DNA, 21 bp, Artificial sequence
  SiRNA target sequence
tggattttttactaaaatttt

SEQ ID NO: 182876 - DNA, 21 bp, Artificial sequence
  SiRNA target sequence
ggattttttactaaaatttta

SEQ ID NO: 182877 - DNA, 21 bp, Artificial sequence
  SiRNA target sequence
gattttttactaaaattttag

SEQ ID NO: 182878 - DNA, 21 bp, Artificial sequence
  SiRNA target sequence
attttttactaaaattttaga

SEQ ID NO: 182879 - DNA, 21 bp, Artificial sequence
  SiRNA target sequence
ttttttactaaaattttagaa

SEQ ID NO: 182880 - DNA, 21 bp, Artificial sequence
  SiRNA target sequence
tttttactaaaattttagaag

SEQ ID NO: 182881 - DNA, 21 bp, Artificial sequence
  SiRNA target sequence
ttttactaaaattttagaagg

SEQ ID NO: 182882 - DNA, 21 bp, Artificial sequence
  SiRNA target sequence
tttactaaaattttagaaggg

SEQ ID NO: 182883 - DNA, 21 bp, Artificial sequence
  SiRNA target sequence
ttactaaaattttagaagggt

SEQ ID NO: 182884 - DNA, 21 bp, Artificial sequence
  SiRNA target sequence
tactaaaattttagaagggtc

SEQ ID NO: 182885 - DNA, 21 bp, Artificial sequence
  SiRNA target sequence
actaaaattttagaagggtct

SEQ ID NO: 182886 - DNA, 21 bp, Artificial sequence
  SiRNA target sequence
ctaaaattttagaagggtcta

SEQ ID NO: 182887 - DNA, 21 bp, Artificial sequence
  SiRNA target sequence
taaaattttagaagggtctat

SEQ ID NO: 182888 - DNA, 21 bp, Artificial sequence
  SiRNA target sequence
aaaattttagaagggtctatt

SEQ ID NO: 182889 - DNA, 21 bp, Artificial sequence
  SiRNA target sequence
aaattttagaagggtctatta

SEQ ID NO: 182890 - DNA, 21 bp, Artificial sequence
  SiRNA target sequence
aattttagaagggtctattaa

SEQ ID NO: 182891 - DNA, 21 bp, Artificial sequence
  SiRNA target sequence
attttagaagggtctattaaa

SEQ ID NO: 182892 - DNA, 21 bp, Artificial sequence
  SiRNA target sequence
ttttagaagggtctattaaag

SEQ ID NO: 182893 - DNA, 21 bp, Artificial sequence
  SiRNA target sequence
tttagaagggtctattaaagc

SEQ ID NO: 182894 - DNA, 21 bp, Artificial sequence
  SiRNA target sequence
ttagaagggtctattaaagct

SEQ ID NO: 182895 - DNA, 21 bp, Artificial sequence
  SiRNA target sequence
tagaagggtctattaaagcta

SEQ ID NO: 182896 - DNA, 21 bp, Artificial sequence
  SiRNA target sequence
agaagggtctattaaagctat

SEQ ID NO: 182897 - DNA, 21 bp, Artificial sequence
  SiRNA target sequence
gaagggtctattaaagctatt

SEQ ID NO: 182898 - DNA, 21 bp, Artificial sequence
  SiRNA target sequence
aagggtctattaaagctattt

SEQ ID NO: 182899 - DNA, 21 bp, Artificial sequence
  SiRNA target sequence
agggtctattaaagctatttc

SEQ ID NO: 182900 - DNA, 21 bp, Artificial sequence
  SiRNA target sequence
gggtctattaaagctatttct

SEQ ID NO: 182901 - DNA, 21 bp, Artificial sequence
  SiRNA target sequence
ggtctattaaagctatttcta

SEQ ID NO: 182902 - DNA, 21 bp, Artificial sequence
  SiRNA target sequence
gtctattaaagctatttctaa

SEQ ID NO: 182903 - DNA, 21 bp, Artificial sequence
  SiRNA target sequence
tctattaaagctatttctaag

SEQ ID NO: 182904 - DNA, 21 bp, Artificial sequence
  SiRNA target sequence
ctattaaagctatttctaaga

SEQ ID NO: 182905 - DNA, 21 bp, Artificial sequence
  SiRNA target sequence
tattaaagctatttctaagat

SEQ ID NO: 182906 - DNA, 21 bp, Artificial sequence
  SiRNA target sequence
attaaagctatttctaagata

SEQ ID NO: 182907 - DNA, 21 bp, Artificial sequence
  SiRNA target sequence
ttaaagctatttctaagatac

SEQ ID NO: 182908 - DNA, 21 bp, Artificial sequence
  SiRNA target sequence
taaagctatttctaagataca

SEQ ID NO: 182909 - DNA, 21 bp, Artificial sequence
  SiRNA target sequence
aaagctatttctaagatacag

SEQ ID NO: 182910 - DNA, 21 bp, Artificial sequence
  SiRNA target sequence
aagctatttctaagatacagt

SEQ ID NO: 182911 - DNA, 21 bp, Artificial sequence
  SiRNA target sequence
agctatttctaagatacagta

SEQ ID NO: 182912 - DNA, 21 bp, Artificial sequence
  SiRNA target sequence
gctatttctaagatacagtat

SEQ ID NO: 182913 - DNA, 21 bp, Artificial sequence
  SiRNA target sequence
ctatttctaagatacagtata

SEQ ID NO: 182914 - DNA, 21 bp, Artificial sequence
  SiRNA target sequence
tatttctaagatacagtatat

SEQ ID NO: 182915 - DNA, 21 bp, Artificial sequence
  SiRNA target sequence
atttctaagatacagtatata

SEQ ID NO: 182916 - DNA, 21 bp, Artificial sequence
  SiRNA target sequence
tttctaagatacagtatatag

SEQ ID NO: 182917 - DNA, 21 bp, Artificial sequence
  SiRNA target sequence
ttctaagatacagtatataga

SEQ ID NO: 182918 - DNA, 21 bp, Artificial sequence
  SiRNA target sequence
tctaagatacagtatatagat

SEQ ID NO: 182919 - DNA, 21 bp, Artificial sequence
  SiRNA target sequence
ctaagatacagtatatagata

SEQ ID NO: 182920 - DNA, 21 bp, Artificial sequence
  SiRNA target sequence
taagatacagtatatagataa

SEQ ID NO: 182921 - DNA, 21 bp, Artificial sequence
  SiRNA target sequence
aagatacagtatatagataaa

SEQ ID NO: 182922 - DNA, 21 bp, Artificial sequence
  SiRNA target sequence
agatacagtatatagataaaa

SEQ ID NO: 182923 - DNA, 21 bp, Artificial sequence
  SiRNA target sequence
gatacagtatatagataaaat

SEQ ID NO: 182924 - DNA, 21 bp, Artificial sequence
  SiRNA target sequence
atacagtatatagataaaatg

SEQ ID NO: 182925 - DNA, 21 bp, Artificial sequence
  SiRNA target sequence
tacagtatatagataaaatgc

SEQ ID NO: 182926 - DNA, 21 bp, Artificial sequence
  SiRNA target sequence
acagtatatagataaaatgcc

SEQ ID NO: 182927 - DNA, 21 bp, Artificial sequence
  SiRNA target sequence
cagtatatagataaaatgcct

SEQ ID NO: 182928 - DNA, 21 bp, Artificial sequence
  SiRNA target sequence
agtatatagataaaatgccta

SEQ ID NO: 182929 - DNA, 21 bp, Artificial sequence
  SiRNA target sequence
gtatatagataaaatgcctaa

SEQ ID NO: 182930 - DNA, 21 bp, Artificial sequence
  SiRNA target sequence
tatatagataaaatgcctaaa

SEQ ID NO: 182931 - DNA, 21 bp, Artificial sequence
  SiRNA target sequence
atatagataaaatgcctaaat

SEQ ID NO: 182932 - DNA, 21 bp, Artificial sequence
  SiRNA target sequence
tatagataaaatgcctaaatt

SEQ ID NO: 182933 - DNA, 21 bp, Artificial sequence
  SiRNA target sequence
atagataaaatgcctaaattt

SEQ ID NO: 182934 - DNA, 21 bp, Artificial sequence
  SiRNA target sequence
tagataaaatgcctaaatttt

SEQ ID NO: 182935 - DNA, 21 bp, Artificial sequence
  SiRNA target sequence
agataaaatgcctaaattttt

SEQ ID NO: 182936 - DNA, 21 bp, Artificial sequence
  SiRNA target sequence
gataaaatgcctaaattttta

SEQ ID NO: 182937 - DNA, 21 bp, Artificial sequence
  SiRNA target sequence
ataaaatgcctaaatttttaa

SEQ ID NO: 182938 - DNA, 21 bp, Artificial sequence
  SiRNA target sequence
taaaatgcctaaatttttaaa

SEQ ID NO: 182939 - DNA, 21 bp, Artificial sequence
  SiRNA target sequence
aaaatgcctaaatttttaaaa

SEQ ID NO: 182940 - DNA, 21 bp, Artificial sequence
  SiRNA target sequence
aaatgcctaaatttttaaaag

SEQ ID NO: 182941 - DNA, 21 bp, Artificial sequence
  SiRNA target sequence
aatgcctaaatttttaaaagg

SEQ ID NO: 182942 - DNA, 21 bp, Artificial sequence
  SiRNA target sequence
atgcctaaatttttaaaagga

SEQ ID NO: 182943 - DNA, 21 bp, Artificial sequence
  SiRNA target sequence
tgcctaaatttttaaaaggac

SEQ ID NO: 182944 - DNA, 21 bp, Artificial sequence
  SiRNA target sequence
gcctaaatttttaaaaggacg

SEQ ID NO: 182945 - DNA, 21 bp, Artificial sequence
  SiRNA target sequence
cctaaatttttaaaaggacgc

SEQ ID NO: 182946 - DNA, 21 bp, Artificial sequence
  SiRNA target sequence
ctaaatttttaaaaggacgct

SEQ ID NO: 182947 - DNA, 21 bp, Artificial sequence
  SiRNA target sequence
taaatttttaaaaggacgcta

SEQ ID NO: 182948 - DNA, 21 bp, Artificial sequence
  SiRNA target sequence
aaatttttaaaaggacgctat

SEQ ID NO: 182949 - DNA, 21 bp, Artificial sequence
  SiRNA target sequence
aatttttaaaaggacgctata

SEQ ID NO: 182950 - DNA, 21 bp, Artificial sequence
  SiRNA target sequence
atttttaaaaggacgctataa

SEQ ID NO: 182951 - DNA, 21 bp, Artificial sequence
  SiRNA target sequence
tttttaaaaggacgctataag

SEQ ID NO: 182952 - DNA, 21 bp, Artificial sequence
  SiRNA target sequence
ttttaaaaggacgctataagt

SEQ ID NO: 182953 - DNA, 21 bp, Artificial sequence
  SiRNA target sequence
tttaaaaggacgctataagtc

SEQ ID NO: 182954 - DNA, 21 bp, Artificial sequence
  SiRNA target sequence
ttaaaaggacgctataagtca

SEQ ID NO: 182955 - DNA, 21 bp, Artificial sequence
  SiRNA target sequence
taaaaggacgctataagtcag

SEQ ID NO: 182956 - DNA, 21 bp, Artificial sequence
  SiRNA target sequence
aaaaggacgctataagtcaga

SEQ ID NO: 182957 - DNA, 21 bp, Artificial sequence
  SiRNA target sequence
aaaggacgctataagtcagaa

SEQ ID NO: 182958 - DNA, 21 bp, Artificial sequence
  SiRNA target sequence
aaggacgctataagtcagaaa

SEQ ID NO: 182959 - DNA, 21 bp, Artificial sequence
  SiRNA target sequence
aggacgctataagtcagaaat

SEQ ID NO: 182960 - DNA, 21 bp, Artificial sequence
  SiRNA target sequence
ggacgctataagtcagaaatc

SEQ ID NO: 182961 - DNA, 21 bp, Artificial sequence
  SiRNA target sequence
gacgctataagtcagaaatcg

SEQ ID NO: 182962 - DNA, 21 bp, Artificial sequence
  SiRNA target sequence
acgctataagtcagaaatcgc

SEQ ID NO: 182963 - DNA, 21 bp, Artificial sequence
  SiRNA target sequence
cgctataagtcagaaatcgcc

SEQ ID NO: 182964 - DNA, 21 bp, Artificial sequence
  SiRNA target sequence
gctataagtcagaaatcgcct

SEQ ID NO: 182965 - DNA, 21 bp, Artificial sequence
  SiRNA target sequence
ctataagtcagaaatcgcctc

SEQ ID NO: 182966 - DNA, 21 bp, Artificial sequence
  SiRNA target sequence
tataagtcagaaatcgcctcc

SEQ ID NO: 182967 - DNA, 21 bp, Artificial sequence
  SiRNA target sequence
ataagtcagaaatcgcctccg

SEQ ID NO: 182968 - DNA, 21 bp, Artificial sequence
  SiRNA target sequence
taagtcagaaatcgcctccgg

SEQ ID NO: 182969 - DNA, 21 bp, Artificial sequence
  SiRNA target sequence
aagtcagaaatcgcctccgga

SEQ ID NO: 182970 - DNA, 21 bp, Artificial sequence
  SiRNA target sequence
agtcagaaatcgcctccggaa

SEQ ID NO: 182971 - DNA, 21 bp, Artificial sequence
  SiRNA target sequence
gtcagaaatcgcctccggaaa

SEQ ID NO: 182972 - DNA, 21 bp, Artificial sequence
  SiRNA target sequence
tcagaaatcgcctccggaaaa

SEQ ID NO: 182973 - DNA, 21 bp, Artificial sequence
  SiRNA target sequence
cagaaatcgcctccggaaaaa

SEQ ID NO: 182974 - DNA, 21 bp, Artificial sequence
  SiRNA target sequence
agaaatcgcctccggaaaaat

SEQ ID NO: 182975 - DNA, 21 bp, Artificial sequence
  SiRNA target sequence
gaaatcgcctccggaaaaatg

SEQ ID NO: 182976 - DNA, 21 bp, Artificial sequence
  SiRNA target sequence
aaatcgcctccggaaaaatgt

SEQ ID NO: 182977 - DNA, 21 bp, Artificial sequence
  SiRNA target sequence
aatcgcctccggaaaaatgtt

SEQ ID NO: 182978 - DNA, 21 bp, Artificial sequence
  SiRNA target sequence
atcgcctccggaaaaatgttg

SEQ ID NO: 182979 - DNA, 21 bp, Artificial sequence
  SiRNA target sequence
tcgcctccggaaaaatgttgt

SEQ ID NO: 182980 - DNA, 21 bp, Artificial sequence
  SiRNA target sequence
cgcctccggaaaaatgttgtt

SEQ ID NO: 182981 - DNA, 21 bp, Artificial sequence
  SiRNA target sequence
gcctccggaaaaatgttgttt

SEQ ID NO: 182982 - DNA, 21 bp, Artificial sequence
  SiRNA target sequence
cctccggaaaaatgttgttta

SEQ ID NO: 182983 - DNA, 21 bp, Artificial sequence
  SiRNA target sequence
ctccggaaaaatgttgtttac

SEQ ID NO: 182984 - DNA, 21 bp, Artificial sequence
  SiRNA target sequence
tccggaaaaatgttgtttact

SEQ ID NO: 182985 - DNA, 21 bp, Artificial sequence
  SiRNA target sequence
ccggaaaaatgttgtttactg

SEQ ID NO: 182986 - DNA, 21 bp, Artificial sequence
  SiRNA target sequence
cggaaaaatgttgtttactgt

SEQ ID NO: 182987 - DNA, 21 bp, Artificial sequence
  SiRNA target sequence
ggaaaaatgttgtttactgtt

SEQ ID NO: 182988 - DNA, 21 bp, Artificial sequence
  SiRNA target sequence
gaaaaatgttgtttactgtta

SEQ ID NO: 182989 - DNA, 21 bp, Artificial sequence
  SiRNA target sequence
aaaaatgttgtttactgttaa

SEQ ID NO: 182990 - DNA, 21 bp, Artificial sequence
  SiRNA target sequence
aaaatgttgtttactgttaat

SEQ ID NO: 182991 - DNA, 21 bp, Artificial sequence
  SiRNA target sequence
aaatgttgtttactgttaatg

SEQ ID NO: 182992 - DNA, 21 bp, Artificial sequence
  SiRNA target sequence
aatgttgtttactgttaatga

SEQ ID NO: 182993 - DNA, 21 bp, Artificial sequence
  SiRNA target sequence
atgttgtttactgttaatgat

SEQ ID NO: 182994 - DNA, 21 bp, Artificial sequence
  SiRNA target sequence
tgttgtttactgttaatgata

SEQ ID NO: 182995 - DNA, 21 bp, Artificial sequence
  SiRNA target sequence
gttgtttactgttaatgatat

SEQ ID NO: 182996 - DNA, 21 bp, Artificial sequence
  SiRNA target sequence
ttgtttactgttaatgatata

SEQ ID NO: 182997 - DNA, 21 bp, Artificial sequence
  SiRNA target sequence
tgtttactgttaatgatatat

SEQ ID NO: 182998 - DNA, 21 bp, Artificial sequence
  SiRNA target sequence
gtttactgttaatgatatatt

SEQ ID NO: 182999 - DNA, 21 bp, Artificial sequence
  SiRNA target sequence
tttactgttaatgatatatta

SEQ ID NO: 183000 - DNA, 21 bp, Artificial sequence
  SiRNA target sequence
ttactgttaatgatatattaa

SEQ ID NO: 183001 - DNA, 21 bp, Artificial sequence
  SiRNA target sequence
tactgttaatgatatattaaa

SEQ ID NO: 183002 - DNA, 21 bp, Artificial sequence
  SiRNA target sequence
actgttaatgatatattaaaa

SEQ ID NO: 183003 - DNA, 21 bp, Artificial sequence
  SiRNA target sequence
ctgttaatgatatattaaaaa

SEQ ID NO: 183004 - DNA, 21 bp, Artificial sequence
  SiRNA target sequence
tgttaatgatatattaaaaaa

SEQ ID NO: 183005 - DNA, 21 bp, Artificial sequence
  SiRNA target sequence
gttaatgatatattaaaaaaa

SEQ ID NO: 183006 - DNA, 21 bp, Artificial sequence
  SiRNA target sequence
ttaatgatatattaaaaaaag

SEQ ID NO: 183007 - DNA, 21 bp, Artificial sequence
  SiRNA target sequence
taatgatatattaaaaaaagt

SEQ ID NO: 183008 - DNA, 21 bp, Artificial sequence
  SiRNA target sequence
aatgatatattaaaaaaagtt

SEQ ID NO: 183009 - DNA, 21 bp, Artificial sequence
  SiRNA target sequence
atgatatattaaaaaaagttg

SEQ ID NO: 183010 - DNA, 21 bp, Artificial sequence
  SiRNA target sequence
tgatatattaaaaaaagttga

SEQ ID NO: 183011 - DNA, 21 bp, Artificial sequence
  SiRNA target sequence
gatatattaaaaaaagttgat

SEQ ID NO: 183012 - DNA, 21 bp, Artificial sequence
  SiRNA target sequence
atatattaaaaaaagttgatg

SEQ ID NO: 183013 - DNA, 21 bp, Artificial sequence
  SiRNA target sequence
tatattaaaaaaagttgatga

SEQ ID NO: 183014 - DNA, 21 bp, Artificial sequence
  SiRNA target sequence
atattaaaaaaagttgatgaa

SEQ ID NO: 183015 - DNA, 21 bp, Artificial sequence
  SiRNA target sequence
tattaaaaaaagttgatgaaa

SEQ ID NO: 183016 - DNA, 21 bp, Artificial sequence
  SiRNA target sequence
attaaaaaaagttgatgaaaa

SEQ ID NO: 183017 - DNA, 21 bp, Artificial sequence
  SiRNA target sequence
ttaaaaaaagttgatgaaaaa

SEQ ID NO: 183018 - DNA, 21 bp, Artificial sequence
  SiRNA target sequence
taaaaaaagttgatgaaaaaa

SEQ ID NO: 183019 - DNA, 21 bp, Artificial sequence
  SiRNA target sequence
aaaaaaagttgatgaaaaaaa

SEQ ID NO: 183020 - DNA, 21 bp, Artificial sequence
  SiRNA target sequence
aaaaaagttgatgaaaaaaat

SEQ ID NO: 183021 - DNA, 21 bp, Artificial sequence
  SiRNA target sequence
aaaaagttgatgaaaaaaata

SEQ ID NO: 183022 - DNA, 21 bp, Artificial sequence
  SiRNA target sequence
aaaagttgatgaaaaaaataa

SEQ ID NO: 183023 - DNA, 21 bp, Artificial sequence
  SiRNA target sequence
aaagttgatgaaaaaaataaa

SEQ ID NO: 183024 - DNA, 21 bp, Artificial sequence
  SiRNA target sequence
aagttgatgaaaaaaataaat

SEQ ID NO: 183025 - DNA, 21 bp, Artificial sequence
  SiRNA target sequence
agttgatgaaaaaaataaatt

SEQ ID NO: 183026 - DNA, 21 bp, Artificial sequence
  SiRNA target sequence
gttgatgaaaaaaataaattt

SEQ ID NO: 183027 - DNA, 21 bp, Artificial sequence
  SiRNA target sequence
ttgatgaaaaaaataaatttg

SEQ ID NO: 183028 - DNA, 21 bp, Artificial sequence
  SiRNA target sequence
tgatgaaaaaaataaatttga

SEQ ID NO: 183029 - DNA, 21 bp, Artificial sequence
  SiRNA target sequence
gatgaaaaaaataaatttgac

SEQ ID NO: 183030 - DNA, 21 bp, Artificial sequence
  SiRNA target sequence
atgaaaaaaataaatttgact

SEQ ID NO: 183031 - DNA, 21 bp, Artificial sequence
  SiRNA target sequence
tgaaaaaaataaatttgacta

SEQ ID NO: 183032 - DNA, 21 bp, Artificial sequence
  SiRNA target sequence
gaaaaaaataaatttgactat

SEQ ID NO: 183033 - DNA, 21 bp, Artificial sequence
  SiRNA target sequence
aaaaaaataaatttgactatt

SEQ ID NO: 183034 - DNA, 21 bp, Artificial sequence
  SiRNA target sequence
aaaaaataaatttgactatta

SEQ ID NO: 183035 - DNA, 21 bp, Artificial sequence
  SiRNA target sequence
aaaaataaatttgactattac

SEQ ID NO: 183036 - DNA, 21 bp, Artificial sequence
  SiRNA target sequence
aaaataaatttgactattacg

SEQ ID NO: 183037 - DNA, 21 bp, Artificial sequence
  SiRNA target sequence
aaataaatttgactattacgt

SEQ ID NO: 183038 - DNA, 21 bp, Artificial sequence
  SiRNA target sequence
aataaatttgactattacgta

SEQ ID NO: 183039 - DNA, 21 bp, Artificial sequence
  SiRNA target sequence
ataaatttgactattacgtag

SEQ ID NO: 183040 - DNA, 21 bp, Artificial sequence
  SiRNA target sequence
taaatttgactattacgtaga

SEQ ID NO: 183041 - DNA, 21 bp, Artificial sequence
  SiRNA target sequence
aaatttgactattacgtagat

SEQ ID NO: 183042 - DNA, 21 bp, Artificial sequence
  SiRNA target sequence
aatttgactattacgtagata

SEQ ID NO: 183043 - DNA, 21 bp, Artificial sequence
  SiRNA target sequence
atttgactattacgtagataa

SEQ ID NO: 183044 - DNA, 21 bp, Artificial sequence
  SiRNA target sequence
tttgactattacgtagataaa

SEQ ID NO: 183045 - DNA, 21 bp, Artificial sequence
  SiRNA target sequence
ttgactattacgtagataaaa

SEQ ID NO: 183046 - DNA, 21 bp, Artificial sequence
  SiRNA target sequence
tgactattacgtagataaaat

SEQ ID NO: 183047 - DNA, 21 bp, Artificial sequence
  SiRNA target sequence
gactattacgtagataaaatg

SEQ ID NO: 183048 - DNA, 21 bp, Artificial sequence
  SiRNA target sequence
actattacgtagataaaatgg

SEQ ID NO: 183049 - DNA, 21 bp, Artificial sequence
  SiRNA target sequence
ctattacgtagataaaatggc

SEQ ID NO: 183050 - DNA, 21 bp, Artificial sequence
  SiRNA target sequence
tattacgtagataaaatggca

SEQ ID NO: 183051 - DNA, 21 bp, Artificial sequence
  SiRNA target sequence
attacgtagataaaatggcac

SEQ ID NO: 183052 - DNA, 21 bp, Artificial sequence
  SiRNA target sequence
ttacgtagataaaatggcact

SEQ ID NO: 183053 - DNA, 21 bp, Artificial sequence
  SiRNA target sequence
tacgtagataaaatggcactt

SEQ ID NO: 183054 - DNA, 21 bp, Artificial sequence
  SiRNA target sequence
acgtagataaaatggcactta

SEQ ID NO: 183055 - DNA, 21 bp, Artificial sequence
  SiRNA target sequence
cgtagataaaatggcacttaa

SEQ ID NO: 183056 - DNA, 21 bp, Artificial sequence
  SiRNA target sequence
gtagataaaatggcacttaaa

SEQ ID NO: 183057 - DNA, 21 bp, Artificial sequence
  SiRNA target sequence
tagataaaatggcacttaaaa

SEQ ID NO: 183058 - DNA, 21 bp, Artificial sequence
  SiRNA target sequence
agataaaatggcacttaaaaa

SEQ ID NO: 183059 - DNA, 21 bp, Artificial sequence
  SiRNA target sequence
gataaaatggcacttaaaaat

SEQ ID NO: 183060 - DNA, 21 bp, Artificial sequence
  SiRNA target sequence
ataaaatggcacttaaaaatg

SEQ ID NO: 183061 - DNA, 21 bp, Artificial sequence
  SiRNA target sequence
taaaatggcacttaaaaatgt

SEQ ID NO: 183062 - DNA, 21 bp, Artificial sequence
  SiRNA target sequence
aaaatggcacttaaaaatgta

SEQ ID NO: 183063 - DNA, 21 bp, Artificial sequence
  SiRNA target sequence
aaatggcacttaaaaatgtat

SEQ ID NO: 183064 - DNA, 21 bp, Artificial sequence
  SiRNA target sequence
aatggcacttaaaaatgtatt

SEQ ID NO: 183065 - DNA, 21 bp, Artificial sequence
  SiRNA target sequence
atggcacttaaaaatgtatta

SEQ ID NO: 183066 - DNA, 21 bp, Artificial sequence
  SiRNA target sequence
tggcacttaaaaatgtattaa

SEQ ID NO: 183067 - DNA, 21 bp, Artificial sequence
  SiRNA target sequence
ggcacttaaaaatgtattaac

SEQ ID NO: 183068 - DNA, 21 bp, Artificial sequence
  SiRNA target sequence
gcacttaaaaatgtattaaca

SEQ ID NO: 183069 - DNA, 21 bp, Artificial sequence
  SiRNA target sequence
cacttaaaaatgtattaacaa

SEQ ID NO: 183070 - DNA, 21 bp, Artificial sequence
  SiRNA target sequence
acttaaaaatgtattaacaag

SEQ ID NO: 183071 - DNA, 21 bp, Artificial sequence
  SiRNA target sequence
cttaaaaatgtattaacaaga

SEQ ID NO: 183072 - DNA, 21 bp, Artificial sequence
  SiRNA target sequence
ttaaaaatgtattaacaagag

SEQ ID NO: 183073 - DNA, 21 bp, Artificial sequence
  SiRNA target sequence
taaaaatgtattaacaagaga

SEQ ID NO: 183074 - DNA, 21 bp, Artificial sequence
  SiRNA target sequence
aaaaatgtattaacaagagaa

SEQ ID NO: 183075 - DNA, 21 bp, Artificial sequence
  SiRNA target sequence
aaaatgtattaacaagagaat

SEQ ID NO: 183076 - DNA, 21 bp, Artificial sequence
  SiRNA target sequence
aaatgtattaacaagagaatt

SEQ ID NO: 183077 - DNA, 21 bp, Artificial sequence
  SiRNA target sequence
aatgtattaacaagagaatta

SEQ ID NO: 183078 - DNA, 21 bp, Artificial sequence
  SiRNA target sequence
atgtattaacaagagaattag

SEQ ID NO: 183079 - DNA, 21 bp, Artificial sequence
  SiRNA target sequence
tgtattaacaagagaattaga

SEQ ID NO: 183080 - DNA, 21 bp, Artificial sequence
  SiRNA target sequence
gtattaacaagagaattagag

SEQ ID NO: 183081 - DNA, 21 bp, Artificial sequence
  SiRNA target sequence
tattaacaagagaattagagc

SEQ ID NO: 183082 - DNA, 21 bp, Artificial sequence
  SiRNA target sequence
attaacaagagaattagagca

SEQ ID NO: 183083 - DNA, 21 bp, Artificial sequence
  SiRNA target sequence
ttaacaagagaattagagcaa

SEQ ID NO: 183084 - DNA, 21 bp, Artificial sequence
  SiRNA target sequence
taacaagagaattagagcaat

SEQ ID NO: 183085 - DNA, 21 bp, Artificial sequence
  SiRNA target sequence
aacaagagaattagagcaatt

SEQ ID NO: 183086 - DNA, 21 bp, Artificial sequence
  SiRNA target sequence
acaagagaattagagcaatta

SEQ ID NO: 183087 - DNA, 21 bp, Artificial sequence
  SiRNA target sequence
caagagaattagagcaattaa

SEQ ID NO: 183088 - DNA, 21 bp, Artificial sequence
  SiRNA target sequence
aagagaattagagcaattaag

SEQ ID NO: 183089 - DNA, 21 bp, Artificial sequence
  SiRNA target sequence
agagaattagagcaattaagt

SEQ ID NO: 183090 - DNA, 21 bp, Artificial sequence
  SiRNA target sequence
gagaattagagcaattaagtg

SEQ ID NO: 183091 - DNA, 21 bp, Artificial sequence
  SiRNA target sequence
agaattagagcaattaagtgg

SEQ ID NO: 183092 - DNA, 21 bp, Artificial sequence
  SiRNA target sequence
gaattagagcaattaagtggt

SEQ ID NO: 183093 - DNA, 21 bp, Artificial sequence
  SiRNA target sequence
aattagagcaattaagtggtg

SEQ ID NO: 183094 - DNA, 21 bp, Artificial sequence
  SiRNA target sequence
attagagcaattaagtggtgg

SEQ ID NO: 183095 - DNA, 21 bp, Artificial sequence
  SiRNA target sequence
ttagagcaattaagtggtggt

SEQ ID NO: 183096 - DNA, 21 bp, Artificial sequence
  SiRNA target sequence
tagagcaattaagtggtggtg

SEQ ID NO: 183097 - DNA, 21 bp, Artificial sequence
  SiRNA target sequence
agagcaattaagtggtggtga

SEQ ID NO: 183098 - DNA, 21 bp, Artificial sequence
  SiRNA target sequence
gagcaattaagtggtggtgaa

SEQ ID NO: 183099 - DNA, 21 bp, Artificial sequence
  SiRNA target sequence
agcaattaagtggtggtgaac

SEQ ID NO: 183100 - DNA, 21 bp, Artificial sequence
  SiRNA target sequence
gcaattaagtggtggtgaact

SEQ ID NO: 183101 - DNA, 21 bp, Artificial sequence
  SiRNA target sequence
caattaagtggtggtgaactt

SEQ ID NO: 183102 - DNA, 21 bp, Artificial sequence
  SiRNA target sequence
aattaagtggtggtgaacttc

SEQ ID NO: 183103 - DNA, 21 bp, Artificial sequence
  SiRNA target sequence
attaagtggtggtgaacttca

SEQ ID NO: 183104 - DNA, 21 bp, Artificial sequence
  SiRNA target sequence
ttaagtggtggtgaacttcaa

SEQ ID NO: 183105 - DNA, 21 bp, Artificial sequence
  SiRNA target sequence
taagtggtggtgaacttcaaa

SEQ ID NO: 183106 - DNA, 21 bp, Artificial sequence
  SiRNA target sequence
aagtggtggtgaacttcaaag

SEQ ID NO: 183107 - DNA, 21 bp, Artificial sequence
  SiRNA target sequence
agtggtggtgaacttcaaaga

SEQ ID NO: 183108 - DNA, 21 bp, Artificial sequence
  SiRNA target sequence
gtggtggtgaacttcaaagat

SEQ ID NO: 183109 - DNA, 21 bp, Artificial sequence
  SiRNA target sequence
tggtggtgaacttcaaagatt

SEQ ID NO: 183110 - DNA, 21 bp, Artificial sequence
  SiRNA target sequence
ggtggtgaacttcaaagattt

SEQ ID NO: 183111 - DNA, 21 bp, Artificial sequence
  SiRNA target sequence
gtggtgaacttcaaagatttt

SEQ ID NO: 183112 - DNA, 21 bp, Artificial sequence
  SiRNA target sequence
tggtgaacttcaaagattttg

SEQ ID NO: 183113 - DNA, 21 bp, Artificial sequence
  SiRNA target sequence
ggtgaacttcaaagattttgt

SEQ ID NO: 183114 - DNA, 21 bp, Artificial sequence
  SiRNA target sequence
gtgaacttcaaagattttgta

SEQ ID NO: 183115 - DNA, 21 bp, Artificial sequence
  SiRNA target sequence
tgaacttcaaagattttgtat

SEQ ID NO: 183116 - DNA, 21 bp, Artificial sequence
  SiRNA target sequence
gaacttcaaagattttgtatt

SEQ ID NO: 183117 - DNA, 21 bp, Artificial sequence
  SiRNA target sequence
aacttcaaagattttgtattg

SEQ ID NO: 183118 - DNA, 21 bp, Artificial sequence
  SiRNA target sequence
acttcaaagattttgtattgc

SEQ ID NO: 183119 - DNA, 21 bp, Artificial sequence
  SiRNA target sequence
cttcaaagattttgtattgca

SEQ ID NO: 183120 - DNA, 21 bp, Artificial sequence
  SiRNA target sequence
ttcaaagattttgtattgcat

SEQ ID NO: 183121 - DNA, 21 bp, Artificial sequence
  SiRNA target sequence
tcaaagattttgtattgcata

SEQ ID NO: 183122 - DNA, 21 bp, Artificial sequence
  SiRNA target sequence
caaagattttgtattgcatac

SEQ ID NO: 183123 - DNA, 21 bp, Artificial sequence
  SiRNA target sequence
aaagattttgtattgcataca

SEQ ID NO: 183124 - DNA, 21 bp, Artificial sequence
  SiRNA target sequence
aagattttgtattgcatacac

SEQ ID NO: 183125 - DNA, 21 bp, Artificial sequence
  SiRNA target sequence
agattttgtattgcatacaca

SEQ ID NO: 183126 - DNA, 21 bp, Artificial sequence
  SiRNA target sequence
gattttgtattgcatacacat

SEQ ID NO: 183127 - DNA, 21 bp, Artificial sequence
  SiRNA target sequence
attttgtattgcatacacatg

SEQ ID NO: 183128 - DNA, 21 bp, Artificial sequence
  SiRNA target sequence
ttttgtattgcatacacatgt

SEQ ID NO: 183129 - DNA, 21 bp, Artificial sequence
  SiRNA target sequence
tttgtattgcatacacatgtt

SEQ ID NO: 183130 - DNA, 21 bp, Artificial sequence
  SiRNA target sequence
ttgtattgcatacacatgttt

SEQ ID NO: 183131 - DNA, 21 bp, Artificial sequence
  SiRNA target sequence
tgtattgcatacacatgttta

SEQ ID NO: 183132 - DNA, 21 bp, Artificial sequence
  SiRNA target sequence
gtattgcatacacatgtttac

SEQ ID NO: 183133 - DNA, 21 bp, Artificial sequence
  SiRNA target sequence
tattgcatacacatgtttaca

SEQ ID NO: 183134 - DNA, 21 bp, Artificial sequence
  SiRNA target sequence
attgcatacacatgtttacaa

SEQ ID NO: 183135 - DNA, 21 bp, Artificial sequence
  SiRNA target sequence
ttgcatacacatgtttacaag

SEQ ID NO: 183136 - DNA, 21 bp, Artificial sequence
  SiRNA target sequence
tgcatacacatgtttacaaga

SEQ ID NO: 183137 - DNA, 21 bp, Artificial sequence
  SiRNA target sequence
gcatacacatgtttacaagaa

SEQ ID NO: 183138 - DNA, 21 bp, Artificial sequence
  SiRNA target sequence
catacacatgtttacaagaag

SEQ ID NO: 183139 - DNA, 21 bp, Artificial sequence
  SiRNA target sequence
atacacatgtttacaagaagg

SEQ ID NO: 183140 - DNA, 21 bp, Artificial sequence
  SiRNA target sequence
tacacatgtttacaagaagga

SEQ ID NO: 183141 - DNA, 21 bp, Artificial sequence
  SiRNA target sequence
acacatgtttacaagaaggaa

SEQ ID NO: 183142 - DNA, 21 bp, Artificial sequence
  SiRNA target sequence
cacatgtttacaagaaggaaa

SEQ ID NO: 183143 - DNA, 21 bp, Artificial sequence
  SiRNA target sequence
acatgtttacaagaaggaaat

SEQ ID NO: 183144 - DNA, 21 bp, Artificial sequence
  SiRNA target sequence
catgtttacaagaaggaaatg

SEQ ID NO: 183145 - DNA, 21 bp, Artificial sequence
  SiRNA target sequence
atgtttacaagaaggaaatgt

SEQ ID NO: 183146 - DNA, 21 bp, Artificial sequence
  SiRNA target sequence
tgtttacaagaaggaaatgtt

SEQ ID NO: 183147 - DNA, 21 bp, Artificial sequence
  SiRNA target sequence
gtttacaagaaggaaatgttt

SEQ ID NO: 183148 - DNA, 21 bp, Artificial sequence
  SiRNA target sequence
tttacaagaaggaaatgttta

SEQ ID NO: 183149 - DNA, 21 bp, Artificial sequence
  SiRNA target sequence
ttacaagaaggaaatgtttat

SEQ ID NO: 183150 - DNA, 21 bp, Artificial sequence
  SiRNA target sequence
tacaagaaggaaatgtttata

SEQ ID NO: 183151 - DNA, 21 bp, Artificial sequence
  SiRNA target sequence
acaagaaggaaatgtttatat

SEQ ID NO: 183152 - DNA, 21 bp, Artificial sequence
  SiRNA target sequence
caagaaggaaatgtttatatt

SEQ ID NO: 183153 - DNA, 21 bp, Artificial sequence
  SiRNA target sequence
aagaaggaaatgtttatattt

SEQ ID NO: 183154 - DNA, 21 bp, Artificial sequence
  SiRNA target sequence
agaaggaaatgtttatatttt

SEQ ID NO: 183155 - DNA, 21 bp, Artificial sequence
  SiRNA target sequence
gaaggaaatgtttatattttt

SEQ ID NO: 183156 - DNA, 21 bp, Artificial sequence
  SiRNA target sequence
aaggaaatgtttatatttttg

SEQ ID NO: 183157 - DNA, 21 bp, Artificial sequence
  SiRNA target sequence
aggaaatgtttatatttttga

SEQ ID NO: 183158 - DNA, 21 bp, Artificial sequence
  SiRNA target sequence
ggaaatgtttatatttttgat

SEQ ID NO: 183159 - DNA, 21 bp, Artificial sequence
  SiRNA target sequence
gaaatgtttatatttttgatg

SEQ ID NO: 183160 - DNA, 21 bp, Artificial sequence
  SiRNA target sequence
aaatgtttatatttttgatga

SEQ ID NO: 183161 - DNA, 21 bp, Artificial sequence
  SiRNA target sequence
aatgtttatatttttgatgaa

SEQ ID NO: 183162 - DNA, 21 bp, Artificial sequence
  SiRNA target sequence
atgtttatatttttgatgaac

SEQ ID NO: 183163 - DNA, 21 bp, Artificial sequence
  SiRNA target sequence
tgtttatatttttgatgaacc

SEQ ID NO: 183164 - DNA, 21 bp, Artificial sequence
  SiRNA target sequence
gtttatatttttgatgaaccc

SEQ ID NO: 183165 - DNA, 21 bp, Artificial sequence
  SiRNA target sequence
tttatatttttgatgaaccca

SEQ ID NO: 183166 - DNA, 21 bp, Artificial sequence
  SiRNA target sequence
ttatatttttgatgaacccac

SEQ ID NO: 183167 - DNA, 21 bp, Artificial sequence
  SiRNA target sequence
tatatttttgatgaacccact

SEQ ID NO: 183168 - DNA, 21 bp, Artificial sequence
  SiRNA target sequence
atatttttgatgaacccacta

SEQ ID NO: 183169 - DNA, 21 bp, Artificial sequence
  SiRNA target sequence
tatttttgatgaacccactag

SEQ ID NO: 183170 - DNA, 21 bp, Artificial sequence
  SiRNA target sequence
atttttgatgaacccactagt

SEQ ID NO: 183171 - DNA, 21 bp, Artificial sequence
  SiRNA target sequence
tttttgatgaacccactagtt

SEQ ID NO: 183172 - DNA, 21 bp, Artificial sequence
  SiRNA target sequence
ttttgatgaacccactagttt

SEQ ID NO: 183173 - DNA, 21 bp, Artificial sequence
  SiRNA target sequence
tttgatgaacccactagtttt

SEQ ID NO: 183174 - DNA, 21 bp, Artificial sequence
  SiRNA target sequence
ttgatgaacccactagttttt

SEQ ID NO: 183175 - DNA, 21 bp, Artificial sequence
  SiRNA target sequence
tgatgaacccactagtttttt

SEQ ID NO: 183176 - DNA, 21 bp, Artificial sequence
  SiRNA target sequence
gatgaacccactagttttttg

SEQ ID NO: 183177 - DNA, 21 bp, Artificial sequence
  SiRNA target sequence
atgaacccactagttttttgg

SEQ ID NO: 183178 - DNA, 21 bp, Artificial sequence
  SiRNA target sequence
tgaacccactagttttttgga

SEQ ID NO: 183179 - DNA, 21 bp, Artificial sequence
  SiRNA target sequence
gaacccactagttttttggat

SEQ ID NO: 183180 - DNA, 21 bp, Artificial sequence
  SiRNA target sequence
aacccactagttttttggatg

SEQ ID NO: 183181 - DNA, 21 bp, Artificial sequence
  SiRNA target sequence
acccactagttttttggatgt

SEQ ID NO: 183182 - DNA, 21 bp, Artificial sequence
  SiRNA target sequence
cccactagttttttggatgtt

SEQ ID NO: 183183 - DNA, 21 bp, Artificial sequence
  SiRNA target sequence
ccactagttttttggatgtta

SEQ ID NO: 183184 - DNA, 21 bp, Artificial sequence
  SiRNA target sequence
cactagttttttggatgttaa

SEQ ID NO: 183185 - DNA, 21 bp, Artificial sequence
  SiRNA target sequence
actagttttttggatgttaag

SEQ ID NO: 183186 - DNA, 21 bp, Artificial sequence
  SiRNA target sequence
ctagttttttggatgttaagc

SEQ ID NO: 183187 - DNA, 21 bp, Artificial sequence
  SiRNA target sequence
tagttttttggatgttaagca

SEQ ID NO: 183188 - DNA, 21 bp, Artificial sequence
  SiRNA target sequence
agttttttggatgttaagcag

SEQ ID NO: 183189 - DNA, 21 bp, Artificial sequence
  SiRNA target sequence
gttttttggatgttaagcagc

SEQ ID NO: 183190 - DNA, 21 bp, Artificial sequence
  SiRNA target sequence
ttttttggatgttaagcagcg

SEQ ID NO: 183191 - DNA, 21 bp, Artificial sequence
  SiRNA target sequence
tttttggatgttaagcagcga

SEQ ID NO: 183192 - DNA, 21 bp, Artificial sequence
  SiRNA target sequence
ttttggatgttaagcagcgac

SEQ ID NO: 183193 - DNA, 21 bp, Artificial sequence
  SiRNA target sequence
tttggatgttaagcagcgact

SEQ ID NO: 183194 - DNA, 21 bp, Artificial sequence
  SiRNA target sequence
ttggatgttaagcagcgacta

SEQ ID NO: 183195 - DNA, 21 bp, Artificial sequence
  SiRNA target sequence
tggatgttaagcagcgactag

SEQ ID NO: 183196 - DNA, 21 bp, Artificial sequence
  SiRNA target sequence
ggatgttaagcagcgactagc

SEQ ID NO: 183197 - DNA, 21 bp, Artificial sequence
  SiRNA target sequence
gatgttaagcagcgactagca

SEQ ID NO: 183198 - DNA, 21 bp, Artificial sequence
  SiRNA target sequence
atgttaagcagcgactagcag

SEQ ID NO: 183199 - DNA, 21 bp, Artificial sequence
  SiRNA target sequence
tgttaagcagcgactagcagc

SEQ ID NO: 183200 - DNA, 21 bp, Artificial sequence
  SiRNA target sequence
gttaagcagcgactagcagct

SEQ ID NO: 183201 - DNA, 21 bp, Artificial sequence
  SiRNA target sequence
ttaagcagcgactagcagctg

SEQ ID NO: 183202 - DNA, 21 bp, Artificial sequence
  SiRNA target sequence
taagcagcgactagcagctgc

SEQ ID NO: 183203 - DNA, 21 bp, Artificial sequence
  SiRNA target sequence
aagcagcgactagcagctgct

SEQ ID NO: 183204 - DNA, 21 bp, Artificial sequence
  SiRNA target sequence
agcagcgactagcagctgcta

SEQ ID NO: 183205 - DNA, 21 bp, Artificial sequence
  SiRNA target sequence
gcagcgactagcagctgctaa

SEQ ID NO: 183206 - DNA, 21 bp, Artificial sequence
  SiRNA target sequence
cagcgactagcagctgctaag

SEQ ID NO: 183207 - DNA, 21 bp, Artificial sequence
  SiRNA target sequence
agcgactagcagctgctaagg

SEQ ID NO: 183208 - DNA, 21 bp, Artificial sequence
  SiRNA target sequence
gcgactagcagctgctaagga

SEQ ID NO: 183209 - DNA, 21 bp, Artificial sequence
  SiRNA target sequence
cgactagcagctgctaaggaa

SEQ ID NO: 183210 - DNA, 21 bp, Artificial sequence
  SiRNA target sequence
gactagcagctgctaaggaaa

SEQ ID NO: 183211 - DNA, 21 bp, Artificial sequence
  SiRNA target sequence
actagcagctgctaaggaaat

SEQ ID NO: 183212 - DNA, 21 bp, Artificial sequence
  SiRNA target sequence
ctagcagctgctaaggaaata

SEQ ID NO: 183213 - DNA, 21 bp, Artificial sequence
  SiRNA target sequence
tagcagctgctaaggaaataa

SEQ ID NO: 183214 - DNA, 21 bp, Artificial sequence
  SiRNA target sequence
agcagctgctaaggaaataag

SEQ ID NO: 183215 - DNA, 21 bp, Artificial sequence
  SiRNA target sequence
gcagctgctaaggaaataaga

SEQ ID NO: 183216 - DNA, 21 bp, Artificial sequence
  SiRNA target sequence
cagctgctaaggaaataagaa

SEQ ID NO: 183217 - DNA, 21 bp, Artificial sequence
  SiRNA target sequence
agctgctaaggaaataagaaa

SEQ ID NO: 183218 - DNA, 21 bp, Artificial sequence
  SiRNA target sequence
gctgctaaggaaataagaaat

SEQ ID NO: 183219 - DNA, 21 bp, Artificial sequence
  SiRNA target sequence
ctgctaaggaaataagaaatt

SEQ ID NO: 183220 - DNA, 21 bp, Artificial sequence
  SiRNA target sequence
tgctaaggaaataagaaattt

SEQ ID NO: 183221 - DNA, 21 bp, Artificial sequence
  SiRNA target sequence
gctaaggaaataagaaatttg

SEQ ID NO: 183222 - DNA, 21 bp, Artificial sequence
  SiRNA target sequence
ctaaggaaataagaaatttgt

SEQ ID NO: 183223 - DNA, 21 bp, Artificial sequence
  SiRNA target sequence
taaggaaataagaaatttgtg

SEQ ID NO: 183224 - DNA, 21 bp, Artificial sequence
  SiRNA target sequence
aaggaaataagaaatttgtgt

SEQ ID NO: 183225 - DNA, 21 bp, Artificial sequence
  SiRNA target sequence
aggaaataagaaatttgtgtg

SEQ ID NO: 183226 - DNA, 21 bp, Artificial sequence
  SiRNA target sequence
ggaaataagaaatttgtgtga

SEQ ID NO: 183227 - DNA, 21 bp, Artificial sequence
  SiRNA target sequence
gaaataagaaatttgtgtgaa

SEQ ID NO: 183228 - DNA, 21 bp, Artificial sequence
  SiRNA target sequence
aaataagaaatttgtgtgaag

SEQ ID NO: 183229 - DNA, 21 bp, Artificial sequence
  SiRNA target sequence
aataagaaatttgtgtgaaga

SEQ ID NO: 183230 - DNA, 21 bp, Artificial sequence
  SiRNA target sequence
ataagaaatttgtgtgaagaa

SEQ ID NO: 183231 - DNA, 21 bp, Artificial sequence
  SiRNA target sequence
taagaaatttgtgtgaagaaa

SEQ ID NO: 183232 - DNA, 21 bp, Artificial sequence
  SiRNA target sequence
aagaaatttgtgtgaagaaaa

SEQ ID NO: 183233 - DNA, 21 bp, Artificial sequence
  SiRNA target sequence
agaaatttgtgtgaagaaaat

SEQ ID NO: 183234 - DNA, 21 bp, Artificial sequence
  SiRNA target sequence
gaaatttgtgtgaagaaaata

SEQ ID NO: 183235 - DNA, 21 bp, Artificial sequence
  SiRNA target sequence
aaatttgtgtgaagaaaataa

SEQ ID NO: 183236 - DNA, 21 bp, Artificial sequence
  SiRNA target sequence
aatttgtgtgaagaaaataaa

SEQ ID NO: 183237 - DNA, 21 bp, Artificial sequence
  SiRNA target sequence
atttgtgtgaagaaaataaat

SEQ ID NO: 183238 - DNA, 21 bp, Artificial sequence
  SiRNA target sequence
tttgtgtgaagaaaataaata

SEQ ID NO: 183239 - DNA, 21 bp, Artificial sequence
  SiRNA target sequence
ttgtgtgaagaaaataaatat

SEQ ID NO: 183240 - DNA, 21 bp, Artificial sequence
  SiRNA target sequence
tgtgtgaagaaaataaatatg

SEQ ID NO: 183241 - DNA, 21 bp, Artificial sequence
  SiRNA target sequence
gtgtgaagaaaataaatatgt

SEQ ID NO: 183242 - DNA, 21 bp, Artificial sequence
  SiRNA target sequence
tgtgaagaaaataaatatgtt

SEQ ID NO: 183243 - DNA, 21 bp, Artificial sequence
  SiRNA target sequence
gtgaagaaaataaatatgttg

SEQ ID NO: 183244 - DNA, 21 bp, Artificial sequence
  SiRNA target sequence
tgaagaaaataaatatgttgt

SEQ ID NO: 183245 - DNA, 21 bp, Artificial sequence
  SiRNA target sequence
gaagaaaataaatatgttgta

SEQ ID NO: 183246 - DNA, 21 bp, Artificial sequence
  SiRNA target sequence
aagaaaataaatatgttgtag

SEQ ID NO: 183247 - DNA, 21 bp, Artificial sequence
  SiRNA target sequence
agaaaataaatatgttgtagt

SEQ ID NO: 183248 - DNA, 21 bp, Artificial sequence
  SiRNA target sequence
gaaaataaatatgttgtagtt

SEQ ID NO: 183249 - DNA, 21 bp, Artificial sequence
  SiRNA target sequence
aaaataaatatgttgtagttg

SEQ ID NO: 183250 - DNA, 21 bp, Artificial sequence
  SiRNA target sequence
aaataaatatgttgtagttgt

SEQ ID NO: 183251 - DNA, 21 bp, Artificial sequence
  SiRNA target sequence
aataaatatgttgtagttgtc

SEQ ID NO: 183252 - DNA, 21 bp, Artificial sequence
  SiRNA target sequence
ataaatatgttgtagttgtcg

SEQ ID NO: 183253 - DNA, 21 bp, Artificial sequence
  SiRNA target sequence
taaatatgttgtagttgtcga

SEQ ID NO: 183254 - DNA, 21 bp, Artificial sequence
  SiRNA target sequence
aaatatgttgtagttgtcgaa

SEQ ID NO: 183255 - DNA, 21 bp, Artificial sequence
  SiRNA target sequence
aatatgttgtagttgtcgaac

SEQ ID NO: 183256 - DNA, 21 bp, Artificial sequence
  SiRNA target sequence
atatgttgtagttgtcgaaca

SEQ ID NO: 183257 - DNA, 21 bp, Artificial sequence
  SiRNA target sequence
tatgttgtagttgtcgaacac

SEQ ID NO: 183258 - DNA, 21 bp, Artificial sequence
  SiRNA target sequence
atgttgtagttgtcgaacacg

SEQ ID NO: 183259 - DNA, 21 bp, Artificial sequence
  SiRNA target sequence
tgttgtagttgtcgaacacga

SEQ ID NO: 183260 - DNA, 21 bp, Artificial sequence
  SiRNA target sequence
gttgtagttgtcgaacacgat

SEQ ID NO: 183261 - DNA, 21 bp, Artificial sequence
  SiRNA target sequence
ttgtagttgtcgaacacgatt

SEQ ID NO: 183262 - DNA, 21 bp, Artificial sequence
  SiRNA target sequence
tgtagttgtcgaacacgattt

SEQ ID NO: 183263 - DNA, 21 bp, Artificial sequence
  SiRNA target sequence
gtagttgtcgaacacgattta

SEQ ID NO: 183264 - DNA, 21 bp, Artificial sequence
  SiRNA target sequence
tagttgtcgaacacgatttag

SEQ ID NO: 183265 - DNA, 21 bp, Artificial sequence
  SiRNA target sequence
agttgtcgaacacgatttagc

SEQ ID NO: 183266 - DNA, 21 bp, Artificial sequence
  SiRNA target sequence
gttgtcgaacacgatttagcc

SEQ ID NO: 183267 - DNA, 21 bp, Artificial sequence
  SiRNA target sequence
ttgtcgaacacgatttagcca

SEQ ID NO: 183268 - DNA, 21 bp, Artificial sequence
  SiRNA target sequence
tgtcgaacacgatttagccat

SEQ ID NO: 183269 - DNA, 21 bp, Artificial sequence
  SiRNA target sequence
gtcgaacacgatttagccatt

SEQ ID NO: 183270 - DNA, 21 bp, Artificial sequence
  SiRNA target sequence
tcgaacacgatttagccattt

SEQ ID NO: 183271 - DNA, 21 bp, Artificial sequence
  SiRNA target sequence
cgaacacgatttagccatttt

SEQ ID NO: 183272 - DNA, 21 bp, Artificial sequence
  SiRNA target sequence
gaacacgatttagccatttta

SEQ ID NO: 183273 - DNA, 21 bp, Artificial sequence
  SiRNA target sequence
aacacgatttagccattttag

SEQ ID NO: 183274 - DNA, 21 bp, Artificial sequence
  SiRNA target sequence
acacgatttagccattttaga

SEQ ID NO: 183275 - DNA, 21 bp, Artificial sequence
  SiRNA target sequence
cacgatttagccattttagat

SEQ ID NO: 183276 - DNA, 21 bp, Artificial sequence
  SiRNA target sequence
acgatttagccattttagatt

SEQ ID NO: 183277 - DNA, 21 bp, Artificial sequence
  SiRNA target sequence
cgatttagccattttagattt

SEQ ID NO: 183278 - DNA, 21 bp, Artificial sequence
  SiRNA target sequence
gatttagccattttagatttg

SEQ ID NO: 183279 - DNA, 21 bp, Artificial sequence
  SiRNA target sequence
atttagccattttagatttga

SEQ ID NO: 183280 - DNA, 21 bp, Artificial sequence
  SiRNA target sequence
tttagccattttagatttgat

SEQ ID NO: 183281 - DNA, 21 bp, Artificial sequence
  SiRNA target sequence
ttagccattttagatttgatg

SEQ ID NO: 183282 - DNA, 21 bp, Artificial sequence
  SiRNA target sequence
tagccattttagatttgatgt

SEQ ID NO: 183283 - DNA, 21 bp, Artificial sequence
  SiRNA target sequence
agccattttagatttgatgtg

SEQ ID NO: 183284 - DNA, 21 bp, Artificial sequence
  SiRNA target sequence
gccattttagatttgatgtgt

SEQ ID NO: 183285 - DNA, 21 bp, Artificial sequence
  SiRNA target sequence
ccattttagatttgatgtgtg

SEQ ID NO: 183286 - DNA, 21 bp, Artificial sequence
  SiRNA target sequence
cattttagatttgatgtgtga

SEQ ID NO: 183287 - DNA, 21 bp, Artificial sequence
  SiRNA target sequence
attttagatttgatgtgtgat

SEQ ID NO: 183288 - DNA, 21 bp, Artificial sequence
  SiRNA target sequence
ttttagatttgatgtgtgatt

SEQ ID NO: 183289 - DNA, 21 bp, Artificial sequence
  SiRNA target sequence
tttagatttgatgtgtgattt

SEQ ID NO: 183290 - DNA, 21 bp, Artificial sequence
  SiRNA target sequence
ttagatttgatgtgtgatttt

SEQ ID NO: 183291 - DNA, 21 bp, Artificial sequence
  SiRNA target sequence
tagatttgatgtgtgattttg

SEQ ID NO: 183292 - DNA, 21 bp, Artificial sequence
  SiRNA target sequence
agatttgatgtgtgattttgg

SEQ ID NO: 183293 - DNA, 21 bp, Artificial sequence
  SiRNA target sequence
gatttgatgtgtgattttgga

SEQ ID NO: 183294 - DNA, 21 bp, Artificial sequence
  SiRNA target sequence
atttgatgtgtgattttggat

SEQ ID NO: 183295 - DNA, 21 bp, Artificial sequence
  SiRNA target sequence
tttgatgtgtgattttggatg

SEQ ID NO: 183296 - DNA, 21 bp, Artificial sequence
  SiRNA target sequence
ttgatgtgtgattttggatgt

SEQ ID NO: 183297 - DNA, 21 bp, Artificial sequence
  SiRNA target sequence
tgatgtgtgattttggatgtg

SEQ ID NO: 183298 - DNA, 21 bp, Artificial sequence
  SiRNA target sequence
gatgtgtgattttggatgtgt

SEQ ID NO: 183299 - DNA, 21 bp, Artificial sequence
  SiRNA target sequence
atgtgtgattttggatgtgtt

SEQ ID NO: 183300 - DNA, 21 bp, Artificial sequence
  SiRNA target sequence
tgtgtgattttggatgtgttc

SEQ ID NO: 183301 - DNA, 21 bp, Artificial sequence
  SiRNA target sequence
gtgtgattttggatgtgttct

SEQ ID NO: 183302 - DNA, 21 bp, Artificial sequence
  SiRNA target sequence
tgtgattttggatgtgttcta

SEQ ID NO: 183303 - DNA, 21 bp, Artificial sequence
  SiRNA target sequence
gtgattttggatgtgttctat

SEQ ID NO: 183304 - DNA, 21 bp, Artificial sequence
  SiRNA target sequence
tgattttggatgtgttctata

SEQ ID NO: 183305 - DNA, 21 bp, Artificial sequence
  SiRNA target sequence
gattttggatgtgttctatac

SEQ ID NO: 183306 - DNA, 21 bp, Artificial sequence
  SiRNA target sequence
attttggatgtgttctatacg

SEQ ID NO: 183307 - DNA, 21 bp, Artificial sequence
  SiRNA target sequence
ttttggatgtgttctatacgg

SEQ ID NO: 183308 - DNA, 21 bp, Artificial sequence
  SiRNA target sequence
tttggatgtgttctatacgga

SEQ ID NO: 183309 - DNA, 21 bp, Artificial sequence
  SiRNA target sequence
ttggatgtgttctatacggac

SEQ ID NO: 183310 - DNA, 21 bp, Artificial sequence
  SiRNA target sequence
tggatgtgttctatacggaca

SEQ ID NO: 183311 - DNA, 21 bp, Artificial sequence
  SiRNA target sequence
ggatgtgttctatacggacaa

SEQ ID NO: 183312 - DNA, 21 bp, Artificial sequence
  SiRNA target sequence
gatgtgttctatacggacaat

SEQ ID NO: 183313 - DNA, 21 bp, Artificial sequence
  SiRNA target sequence
atgtgttctatacggacaatc

SEQ ID NO: 183314 - DNA, 21 bp, Artificial sequence
  SiRNA target sequence
tgtgttctatacggacaatct

SEQ ID NO: 183315 - DNA, 21 bp, Artificial sequence
  SiRNA target sequence
gtgttctatacggacaatctg

SEQ ID NO: 183316 - DNA, 21 bp, Artificial sequence
  SiRNA target sequence
tgttctatacggacaatctgg

SEQ ID NO: 183317 - DNA, 21 bp, Artificial sequence
  SiRNA target sequence
gttctatacggacaatctggg

SEQ ID NO: 183318 - DNA, 21 bp, Artificial sequence
  SiRNA target sequence
ttctatacggacaatctgggg

SEQ ID NO: 183319 - DNA, 21 bp, Artificial sequence
  SiRNA target sequence
tctatacggacaatctggggc

SEQ ID NO: 183320 - DNA, 21 bp, Artificial sequence
  SiRNA target sequence
ctatacggacaatctggggca

SEQ ID NO: 183321 - DNA, 21 bp, Artificial sequence
  SiRNA target sequence
tatacggacaatctggggcat

SEQ ID NO: 183322 - DNA, 21 bp, Artificial sequence
  SiRNA target sequence
atacggacaatctggggcata

SEQ ID NO: 183323 - DNA, 21 bp, Artificial sequence
  SiRNA target sequence
tacggacaatctggggcatac

SEQ ID NO: 183324 - DNA, 21 bp, Artificial sequence
  SiRNA target sequence
acggacaatctggggcatacg

SEQ ID NO: 183325 - DNA, 21 bp, Artificial sequence
  SiRNA target sequence
cggacaatctggggcatacgg

SEQ ID NO: 183326 - DNA, 21 bp, Artificial sequence
  SiRNA target sequence
ggacaatctggggcatacggt

SEQ ID NO: 183327 - DNA, 21 bp, Artificial sequence
  SiRNA target sequence
gacaatctggggcatacggtg

SEQ ID NO: 183328 - DNA, 21 bp, Artificial sequence
  SiRNA target sequence
acaatctggggcatacggtgt

SEQ ID NO: 183329 - DNA, 21 bp, Artificial sequence
  SiRNA target sequence
caatctggggcatacggtgta

SEQ ID NO: 183330 - DNA, 21 bp, Artificial sequence
  SiRNA target sequence
aatctggggcatacggtgtaa

SEQ ID NO: 183331 - DNA, 21 bp, Artificial sequence
  SiRNA target sequence
atctggggcatacggtgtaat

SEQ ID NO: 183332 - DNA, 21 bp, Artificial sequence
  SiRNA target sequence
tctggggcatacggtgtaata

SEQ ID NO: 183333 - DNA, 21 bp, Artificial sequence
  SiRNA target sequence
ctggggcatacggtgtaataa

SEQ ID NO: 183334 - DNA, 21 bp, Artificial sequence
  SiRNA target sequence
tggggcatacggtgtaataag

SEQ ID NO: 183335 - DNA, 21 bp, Artificial sequence
  SiRNA target sequence
ggggcatacggtgtaataagc

SEQ ID NO: 183336 - DNA, 21 bp, Artificial sequence
  SiRNA target sequence
gggcatacggtgtaataagcg

SEQ ID NO: 183337 - DNA, 21 bp, Artificial sequence
  SiRNA target sequence
ggcatacggtgtaataagcgc

SEQ ID NO: 183338 - DNA, 21 bp, Artificial sequence
  SiRNA target sequence
gcatacggtgtaataagcgca

SEQ ID NO: 183339 - DNA, 21 bp, Artificial sequence
  SiRNA target sequence
catacggtgtaataagcgcac

SEQ ID NO: 183340 - DNA, 21 bp, Artificial sequence
  SiRNA target sequence
atacggtgtaataagcgcacc

SEQ ID NO: 183341 - DNA, 21 bp, Artificial sequence
  SiRNA target sequence
tacggtgtaataagcgcacca

SEQ ID NO: 183342 - DNA, 21 bp, Artificial sequence
  SiRNA target sequence
acggtgtaataagcgcaccat

SEQ ID NO: 183343 - DNA, 21 bp, Artificial sequence
  SiRNA target sequence
cggtgtaataagcgcaccata

SEQ ID NO: 183344 - DNA, 21 bp, Artificial sequence
  SiRNA target sequence
ggtgtaataagcgcaccatac

SEQ ID NO: 183345 - DNA, 21 bp, Artificial sequence
  SiRNA target sequence
gtgtaataagcgcaccatacg

SEQ ID NO: 183346 - DNA, 21 bp, Artificial sequence
  SiRNA target sequence
tgtaataagcgcaccatacgt

SEQ ID NO: 183347 - DNA, 21 bp, Artificial sequence
  SiRNA target sequence
gtaataagcgcaccatacgtt

SEQ ID NO: 183348 - DNA, 21 bp, Artificial sequence
  SiRNA target sequence
taataagcgcaccatacgtta

SEQ ID NO: 183349 - DNA, 21 bp, Artificial sequence
  SiRNA target sequence
aataagcgcaccatacgttat

SEQ ID NO: 183350 - DNA, 21 bp, Artificial sequence
  SiRNA target sequence
ataagcgcaccatacgttatt

SEQ ID NO: 183351 - DNA, 21 bp, Artificial sequence
  SiRNA target sequence
taagcgcaccatacgttatta

SEQ ID NO: 183352 - DNA, 21 bp, Artificial sequence
  SiRNA target sequence
aagcgcaccatacgttattaa

SEQ ID NO: 183353 - DNA, 21 bp, Artificial sequence
  SiRNA target sequence
agcgcaccatacgttattaaa

SEQ ID NO: 183354 - DNA, 21 bp, Artificial sequence
  SiRNA target sequence
gcgcaccatacgttattaaat

SEQ ID NO: 183355 - DNA, 21 bp, Artificial sequence
  SiRNA target sequence
cgcaccatacgttattaaatc

SEQ ID NO: 183356 - DNA, 21 bp, Artificial sequence
  SiRNA target sequence
gcaccatacgttattaaatca

SEQ ID NO: 183357 - DNA, 21 bp, Artificial sequence
  SiRNA target sequence
caccatacgttattaaatcag

SEQ ID NO: 183358 - DNA, 21 bp, Artificial sequence
  SiRNA target sequence
accatacgttattaaatcagc

SEQ ID NO: 183359 - DNA, 21 bp, Artificial sequence
  SiRNA target sequence
ccatacgttattaaatcagca

SEQ ID NO: 183360 - DNA, 21 bp, Artificial sequence
  SiRNA target sequence
catacgttattaaatcagcaa

SEQ ID NO: 183361 - DNA, 21 bp, Artificial sequence
  SiRNA target sequence
atacgttattaaatcagcaat

SEQ ID NO: 183362 - DNA, 21 bp, Artificial sequence
  SiRNA target sequence
tacgttattaaatcagcaata

SEQ ID NO: 183363 - DNA, 21 bp, Artificial sequence
  SiRNA target sequence
acgttattaaatcagcaataa

SEQ ID NO: 183364 - DNA, 21 bp, Artificial sequence
  SiRNA target sequence
cgttattaaatcagcaataaa

SEQ ID NO: 183365 - DNA, 21 bp, Artificial sequence
  SiRNA target sequence
gttattaaatcagcaataaat

SEQ ID NO: 183366 - DNA, 21 bp, Artificial sequence
  SiRNA target sequence
ttattaaatcagcaataaata

SEQ ID NO: 183367 - DNA, 21 bp, Artificial sequence
  SiRNA target sequence
tattaaatcagcaataaatat

SEQ ID NO: 183368 - DNA, 21 bp, Artificial sequence
  SiRNA target sequence
attaaatcagcaataaatata

SEQ ID NO: 183369 - DNA, 21 bp, Artificial sequence
  SiRNA target sequence
ttaaatcagcaataaatatat

SEQ ID NO: 183370 - DNA, 21 bp, Artificial sequence
  SiRNA target sequence
taaatcagcaataaatatatt

SEQ ID NO: 183371 - DNA, 21 bp, Artificial sequence
  SiRNA target sequence
aaatcagcaataaatatattt

SEQ ID NO: 183372 - DNA, 21 bp, Artificial sequence
  SiRNA target sequence
aatcagcaataaatatatttc

SEQ ID NO: 183373 - DNA, 21 bp, Artificial sequence
  SiRNA target sequence
atcagcaataaatatatttct

SEQ ID NO: 183374 - DNA, 21 bp, Artificial sequence
  SiRNA target sequence
tcagcaataaatatatttctt

SEQ ID NO: 183375 - DNA, 21 bp, Artificial sequence
  SiRNA target sequence
cagcaataaatatatttcttg

SEQ ID NO: 183376 - DNA, 21 bp, Artificial sequence
  SiRNA target sequence
agcaataaatatatttcttga

SEQ ID NO: 183377 - DNA, 21 bp, Artificial sequence
  SiRNA target sequence
gcaataaatatatttcttgat

SEQ ID NO: 183378 - DNA, 21 bp, Artificial sequence
  SiRNA target sequence
caataaatatatttcttgatg

SEQ ID NO: 183379 - DNA, 21 bp, Artificial sequence
  SiRNA target sequence
aataaatatatttcttgatgg

SEQ ID NO: 183380 - DNA, 21 bp, Artificial sequence
  SiRNA target sequence
ataaatatatttcttgatgga

SEQ ID NO: 183381 - DNA, 21 bp, Artificial sequence
  SiRNA target sequence
taaatatatttcttgatggat

SEQ ID NO: 183382 - DNA, 21 bp, Artificial sequence
  SiRNA target sequence
aaatatatttcttgatggatt

SEQ ID NO: 183383 - DNA, 21 bp, Artificial sequence
  SiRNA target sequence
aatatatttcttgatggattt

SEQ ID NO: 183384 - DNA, 21 bp, Artificial sequence
  SiRNA target sequence
atatatttcttgatggatttt

SEQ ID NO: 183385 - DNA, 21 bp, Artificial sequence
  SiRNA target sequence
tatatttcttgatggattttt

SEQ ID NO: 183386 - DNA, 21 bp, Artificial sequence
  SiRNA target sequence
atatttcttgatggatttttg

SEQ ID NO: 183387 - DNA, 21 bp, Artificial sequence
  SiRNA target sequence
tatttcttgatggatttttgc

SEQ ID NO: 183388 - DNA, 21 bp, Artificial sequence
  SiRNA target sequence
atttcttgatggatttttgcc

SEQ ID NO: 183389 - DNA, 21 bp, Artificial sequence
  SiRNA target sequence
tttcttgatggatttttgcct

SEQ ID NO: 183390 - DNA, 21 bp, Artificial sequence
  SiRNA target sequence
ttcttgatggatttttgccta

SEQ ID NO: 183391 - DNA, 21 bp, Artificial sequence
  SiRNA target sequence
tcttgatggatttttgcctac

SEQ ID NO: 183392 - DNA, 21 bp, Artificial sequence
  SiRNA target sequence
cttgatggatttttgcctaca

SEQ ID NO: 183393 - DNA, 21 bp, Artificial sequence
  SiRNA target sequence
ttgatggatttttgcctacag

SEQ ID NO: 183394 - DNA, 21 bp, Artificial sequence
  SiRNA target sequence
tgatggatttttgcctacaga

SEQ ID NO: 183395 - DNA, 21 bp, Artificial sequence
  SiRNA target sequence
gatggatttttgcctacagaa

SEQ ID NO: 183396 - DNA, 21 bp, Artificial sequence
  SiRNA target sequence
atggatttttgcctacagaaa

SEQ ID NO: 183397 - DNA, 21 bp, Artificial sequence
  SiRNA target sequence
tggatttttgcctacagaaaa

SEQ ID NO: 183398 - DNA, 21 bp, Artificial sequence
  SiRNA target sequence
ggatttttgcctacagaaaac

SEQ ID NO: 183399 - DNA, 21 bp, Artificial sequence
  SiRNA target sequence
gatttttgcctacagaaaaca

SEQ ID NO: 183400 - DNA, 21 bp, Artificial sequence
  SiRNA target sequence
atttttgcctacagaaaacat

SEQ ID NO: 183401 - DNA, 21 bp, Artificial sequence
  SiRNA target sequence
tttttgcctacagaaaacatg

SEQ ID NO: 183402 - DNA, 21 bp, Artificial sequence
  SiRNA target sequence
ttttgcctacagaaaacatga

SEQ ID NO: 183403 - DNA, 21 bp, Artificial sequence
  SiRNA target sequence
tttgcctacagaaaacatgaa

SEQ ID NO: 183404 - DNA, 21 bp, Artificial sequence
  SiRNA target sequence
ttgcctacagaaaacatgaaa

SEQ ID NO: 183405 - DNA, 21 bp, Artificial sequence
  SiRNA target sequence
tgcctacagaaaacatgaaat

SEQ ID NO: 183406 - DNA, 21 bp, Artificial sequence
  SiRNA target sequence
gcctacagaaaacatgaaatt

SEQ ID NO: 183407 - DNA, 21 bp, Artificial sequence
  SiRNA target sequence
cctacagaaaacatgaaattt

SEQ ID NO: 183408 - DNA, 21 bp, Artificial sequence
  SiRNA target sequence
ctacagaaaacatgaaattta

SEQ ID NO: 183409 - DNA, 21 bp, Artificial sequence
  SiRNA target sequence
tacagaaaacatgaaatttag

SEQ ID NO: 183410 - DNA, 21 bp, Artificial sequence
  SiRNA target sequence
acagaaaacatgaaatttaga

SEQ ID NO: 183411 - DNA, 21 bp, Artificial sequence
  SiRNA target sequence
cagaaaacatgaaatttagaa

SEQ ID NO: 183412 - DNA, 21 bp, Artificial sequence
  SiRNA target sequence
agaaaacatgaaatttagaaa

SEQ ID NO: 183413 - DNA, 21 bp, Artificial sequence
  SiRNA target sequence
gaaaacatgaaatttagaaat

SEQ ID NO: 183414 - DNA, 21 bp, Artificial sequence
  SiRNA target sequence
aaaacatgaaatttagaaatt

SEQ ID NO: 183415 - DNA, 21 bp, Artificial sequence
  SiRNA target sequence
aaacatgaaatttagaaattc

SEQ ID NO: 183416 - DNA, 21 bp, Artificial sequence
  SiRNA target sequence
aacatgaaatttagaaattca

SEQ ID NO: 183417 - DNA, 21 bp, Artificial sequence
  SiRNA target sequence
acatgaaatttagaaattcag

SEQ ID NO: 183418 - DNA, 21 bp, Artificial sequence
  SiRNA target sequence
catgaaatttagaaattcaga

SEQ ID NO: 183419 - DNA, 21 bp, Artificial sequence
  SiRNA target sequence
atgaaatttagaaattcagag

SEQ ID NO: 183420 - DNA, 21 bp, Artificial sequence
  SiRNA target sequence
tgaaatttagaaattcagagt

SEQ ID NO: 183421 - DNA, 21 bp, Artificial sequence
  SiRNA target sequence
gaaatttagaaattcagagtt

SEQ ID NO: 183422 - DNA, 21 bp, Artificial sequence
  SiRNA target sequence
aaatttagaaattcagagtta

SEQ ID NO: 183423 - DNA, 21 bp, Artificial sequence
  SiRNA target sequence
aatttagaaattcagagttaa

SEQ ID NO: 183424 - DNA, 21 bp, Artificial sequence
  SiRNA target sequence
atttagaaattcagagttaaa

SEQ ID NO: 183425 - DNA, 21 bp, Artificial sequence
  SiRNA target sequence
tttagaaattcagagttaaag

SEQ ID NO: 183426 - DNA, 21 bp, Artificial sequence
  SiRNA target sequence
ttagaaattcagagttaaagt

SEQ ID NO: 183427 - DNA, 21 bp, Artificial sequence
  SiRNA target sequence
tagaaattcagagttaaagtt

SEQ ID NO: 183428 - DNA, 21 bp, Artificial sequence
  SiRNA target sequence
agaaattcagagttaaagttt

SEQ ID NO: 183429 - DNA, 21 bp, Artificial sequence
  SiRNA target sequence
gaaattcagagttaaagttta

SEQ ID NO: 183430 - DNA, 21 bp, Artificial sequence
  SiRNA target sequence
aaattcagagttaaagtttaa

SEQ ID NO: 183431 - DNA, 21 bp, Artificial sequence
  SiRNA target sequence
aattcagagttaaagtttaat

SEQ ID NO: 183432 - DNA, 21 bp, Artificial sequence
  SiRNA target sequence
attcagagttaaagtttaata

SEQ ID NO: 183433 - DNA, 21 bp, Artificial sequence
  SiRNA target sequence
ttcagagttaaagtttaatat

SEQ ID NO: 183434 - DNA, 21 bp, Artificial sequence
  SiRNA target sequence
tcagagttaaagtttaatatt

SEQ ID NO: 183435 - DNA, 21 bp, Artificial sequence
  SiRNA target sequence
cagagttaaagtttaatattt

SEQ ID NO: 183436 - DNA, 21 bp, Artificial sequence
  SiRNA target sequence
agagttaaagtttaatatttc

SEQ ID NO: 183437 - DNA, 21 bp, Artificial sequence
  SiRNA target sequence
gagttaaagtttaatatttcg

SEQ ID NO: 183438 - DNA, 21 bp, Artificial sequence
  SiRNA target sequence
agttaaagtttaatatttcgg

SEQ ID NO: 183439 - DNA, 21 bp, Artificial sequence
  SiRNA target sequence
gttaaagtttaatatttcgga

SEQ ID NO: 183440 - DNA, 21 bp, Artificial sequence
  SiRNA target sequence
ttaaagtttaatatttcggaa

SEQ ID NO: 183441 - DNA, 21 bp, Artificial sequence
  SiRNA target sequence
taaagtttaatatttcggaaa

SEQ ID NO: 183442 - DNA, 21 bp, Artificial sequence
  SiRNA target sequence
aaagtttaatatttcggaaac

SEQ ID NO: 183443 - DNA, 21 bp, Artificial sequence
  SiRNA target sequence
aagtttaatatttcggaaaca

SEQ ID NO: 183444 - DNA, 21 bp, Artificial sequence
  SiRNA target sequence
agtttaatatttcggaaacac

SEQ ID NO: 183445 - DNA, 21 bp, Artificial sequence
  SiRNA target sequence
gtttaatatttcggaaacact

SEQ ID NO: 183446 - DNA, 21 bp, Artificial sequence
  SiRNA target sequence
tttaatatttcggaaacactt

SEQ ID NO: 183447 - DNA, 21 bp, Artificial sequence
  SiRNA target sequence
ttaatatttcggaaacacttg

SEQ ID NO: 183448 - DNA, 21 bp, Artificial sequence
  SiRNA target sequence
taatatttcggaaacacttga

SEQ ID NO: 183449 - DNA, 21 bp, Artificial sequence
  SiRNA target sequence
aatatttcggaaacacttgat

SEQ ID NO: 183450 - DNA, 21 bp, Artificial sequence
  SiRNA target sequence
atatttcggaaacacttgata

SEQ ID NO: 183451 - DNA, 21 bp, Artificial sequence
  SiRNA target sequence
tatttcggaaacacttgatag

SEQ ID NO: 183452 - DNA, 21 bp, Artificial sequence
  SiRNA target sequence
atttcggaaacacttgatagt

SEQ ID NO: 183453 - DNA, 21 bp, Artificial sequence
  SiRNA target sequence
tttcggaaacacttgatagta

SEQ ID NO: 183454 - DNA, 21 bp, Artificial sequence
  SiRNA target sequence
ttcggaaacacttgatagtat

SEQ ID NO: 183455 - DNA, 21 bp, Artificial sequence
  SiRNA target sequence
tcggaaacacttgatagtatt

SEQ ID NO: 183456 - DNA, 21 bp, Artificial sequence
  SiRNA target sequence
cggaaacacttgatagtatta

SEQ ID NO: 183457 - DNA, 21 bp, Artificial sequence
  SiRNA target sequence
ggaaacacttgatagtattat

SEQ ID NO: 183458 - DNA, 21 bp, Artificial sequence
  SiRNA target sequence
gaaacacttgatagtattata

SEQ ID NO: 183459 - DNA, 21 bp, Artificial sequence
  SiRNA target sequence
aaacacttgatagtattatat

SEQ ID NO: 183460 - DNA, 21 bp, Artificial sequence
  SiRNA target sequence
aacacttgatagtattatatc

SEQ ID NO: 183461 - DNA, 21 bp, Artificial sequence
  SiRNA target sequence
acacttgatagtattatatct

SEQ ID NO: 183462 - DNA, 21 bp, Artificial sequence
  SiRNA target sequence
cacttgatagtattatatcta

SEQ ID NO: 183463 - DNA, 21 bp, Artificial sequence
  SiRNA target sequence
acttgatagtattatatctac

SEQ ID NO: 183464 - DNA, 21 bp, Artificial sequence
  SiRNA target sequence
cttgatagtattatatctacc

SEQ ID NO: 183465 - DNA, 21 bp, Artificial sequence
  SiRNA target sequence
ttgatagtattatatctacca

SEQ ID NO: 183466 - DNA, 21 bp, Artificial sequence
  SiRNA target sequence
tgatagtattatatctaccag

SEQ ID NO: 183467 - DNA, 21 bp, Artificial sequence
  SiRNA target sequence
gatagtattatatctaccaga

SEQ ID NO: 183468 - DNA, 21 bp, Artificial sequence
  SiRNA target sequence
atagtattatatctaccagag

SEQ ID NO: 183469 - DNA, 21 bp, Artificial sequence
  SiRNA target sequence
tagtattatatctaccagaga

SEQ ID NO: 183470 - DNA, 21 bp, Artificial sequence
  SiRNA target sequence
agtattatatctaccagagac

SEQ ID NO: 183471 - DNA, 21 bp, Artificial sequence
  SiRNA target sequence
gtattatatctaccagagacc

SEQ ID NO: 183472 - DNA, 21 bp, Artificial sequence
  SiRNA target sequence
tattatatctaccagagacca

SEQ ID NO: 183473 - DNA, 21 bp, Artificial sequence
  SiRNA target sequence
attatatctaccagagaccag

SEQ ID NO: 183474 - DNA, 21 bp, Artificial sequence
  SiRNA target sequence
ttatatctaccagagaccagt

SEQ ID NO: 183475 - DNA, 21 bp, Artificial sequence
  SiRNA target sequence
tatatctaccagagaccagta

SEQ ID NO: 183476 - DNA, 21 bp, Artificial sequence
  SiRNA target sequence
atatctaccagagaccagtat

SEQ ID NO: 183477 - DNA, 21 bp, Artificial sequence
  SiRNA target sequence
tatctaccagagaccagtatc

SEQ ID NO: 183478 - DNA, 21 bp, Artificial sequence
  SiRNA target sequence
atctaccagagaccagtatca

SEQ ID NO: 183479 - DNA, 21 bp, Artificial sequence
  SiRNA target sequence
tctaccagagaccagtatcat

SEQ ID NO: 183480 - DNA, 21 bp, Artificial sequence
  SiRNA target sequence
ctaccagagaccagtatcatt

SEQ ID NO: 183481 - DNA, 21 bp, Artificial sequence
  SiRNA target sequence
taccagagaccagtatcatta

SEQ ID NO: 183482 - DNA, 21 bp, Artificial sequence
  SiRNA target sequence
accagagaccagtatcattat

SEQ ID NO: 183483 - DNA, 21 bp, Artificial sequence
  SiRNA target sequence
ccagagaccagtatcattatc

SEQ ID NO: 183484 - DNA, 21 bp, Artificial sequence
  SiRNA target sequence
cagagaccagtatcattatcc

SEQ ID NO: 183485 - DNA, 21 bp, Artificial sequence
  SiRNA target sequence
agagaccagtatcattatccc

SEQ ID NO: 183486 - DNA, 21 bp, Artificial sequence
  SiRNA target sequence
gagaccagtatcattatccca

SEQ ID NO: 183487 - DNA, 21 bp, Artificial sequence
  SiRNA target sequence
agaccagtatcattatcccaa

SEQ ID NO: 183488 - DNA, 21 bp, Artificial sequence
  SiRNA target sequence
gaccagtatcattatcccaat

SEQ ID NO: 183489 - DNA, 21 bp, Artificial sequence
  SiRNA target sequence
accagtatcattatcccaatt

SEQ ID NO: 183490 - DNA, 21 bp, Artificial sequence
  SiRNA target sequence
ccagtatcattatcccaattt

SEQ ID NO: 183491 - DNA, 21 bp, Artificial sequence
  SiRNA target sequence
cagtatcattatcccaatttg

SEQ ID NO: 183492 - DNA, 21 bp, Artificial sequence
  SiRNA target sequence
agtatcattatcccaatttga

SEQ ID NO: 183493 - DNA, 21 bp, Artificial sequence
  SiRNA target sequence
gtatcattatcccaatttgat

SEQ ID NO: 183494 - DNA, 21 bp, Artificial sequence
  SiRNA target sequence
tatcattatcccaatttgata

SEQ ID NO: 183495 - DNA, 21 bp, Artificial sequence
  SiRNA target sequence
atcattatcccaatttgataa

SEQ ID NO: 183496 - DNA, 21 bp, Artificial sequence
  SiRNA target sequence
tcattatcccaatttgataaa

SEQ ID NO: 183497 - DNA, 21 bp, Artificial sequence
  SiRNA target sequence
cattatcccaatttgataaaa

SEQ ID NO: 183498 - DNA, 21 bp, Artificial sequence
  SiRNA target sequence
attatcccaatttgataaaaa

SEQ ID NO: 183499 - DNA, 21 bp, Artificial sequence
  SiRNA target sequence
ttatcccaatttgataaaaac

SEQ ID NO: 183500 - DNA, 21 bp, Artificial sequence
  SiRNA target sequence
tatcccaatttgataaaaaca

SEQ ID NO: 183501 - DNA, 21 bp, Artificial sequence
  SiRNA target sequence
atcccaatttgataaaaacat

SEQ ID NO: 183502 - DNA, 21 bp, Artificial sequence
  SiRNA target sequence
tcccaatttgataaaaacata

SEQ ID NO: 183503 - DNA, 21 bp, Artificial sequence
  SiRNA target sequence
cccaatttgataaaaacatat

SEQ ID NO: 183504 - DNA, 21 bp, Artificial sequence
  SiRNA target sequence
ccaatttgataaaaacatatc

SEQ ID NO: 183505 - DNA, 21 bp, Artificial sequence
  SiRNA target sequence
caatttgataaaaacatatcc

SEQ ID NO: 183506 - DNA, 21 bp, Artificial sequence
  SiRNA target sequence
aatttgataaaaacatatcca

SEQ ID NO: 183507 - DNA, 21 bp, Artificial sequence
  SiRNA target sequence
atttgataaaaacatatccaa

SEQ ID NO: 183508 - DNA, 21 bp, Artificial sequence
  SiRNA target sequence
tttgataaaaacatatccaaa

SEQ ID NO: 183509 - DNA, 21 bp, Artificial sequence
  SiRNA target sequence
ttgataaaaacatatccaaat

SEQ ID NO: 183510 - DNA, 21 bp, Artificial sequence
  SiRNA target sequence
tgataaaaacatatccaaatt

SEQ ID NO: 183511 - DNA, 21 bp, Artificial sequence
  SiRNA target sequence
gataaaaacatatccaaattt

SEQ ID NO: 183512 - DNA, 21 bp, Artificial sequence
  SiRNA target sequence
ataaaaacatatccaaatttt

SEQ ID NO: 183513 - DNA, 21 bp, Artificial sequence
  SiRNA target sequence
taaaaacatatccaaatttta

SEQ ID NO: 183514 - DNA, 21 bp, Artificial sequence
  SiRNA target sequence
aaaaacatatccaaattttac

SEQ ID NO: 183515 - DNA, 21 bp, Artificial sequence
  SiRNA target sequence
aaaacatatccaaattttacg

SEQ ID NO: 183516 - DNA, 21 bp, Artificial sequence
  SiRNA target sequence
aaacatatccaaattttacgc

SEQ ID NO: 183517 - DNA, 21 bp, Artificial sequence
  SiRNA target sequence
aacatatccaaattttacgct

SEQ ID NO: 183518 - DNA, 21 bp, Artificial sequence
  SiRNA target sequence
acatatccaaattttacgctt

SEQ ID NO: 183519 - DNA, 21 bp, Artificial sequence
  SiRNA target sequence
catatccaaattttacgctta

SEQ ID NO: 183520 - DNA, 21 bp, Artificial sequence
  SiRNA target sequence
atatccaaattttacgcttaa

SEQ ID NO: 183521 - DNA, 21 bp, Artificial sequence
  SiRNA target sequence
tatccaaattttacgcttaaa

SEQ ID NO: 183522 - DNA, 21 bp, Artificial sequence
  SiRNA target sequence
atccaaattttacgcttaaag

SEQ ID NO: 183523 - DNA, 21 bp, Artificial sequence
  SiRNA target sequence
tccaaattttacgcttaaagt

SEQ ID NO: 183524 - DNA, 21 bp, Artificial sequence
  SiRNA target sequence
ccaaattttacgcttaaagtt

SEQ ID NO: 183525 - DNA, 21 bp, Artificial sequence
  SiRNA target sequence
caaattttacgcttaaagttg

SEQ ID NO: 183526 - DNA, 21 bp, Artificial sequence
  SiRNA target sequence
aaattttacgcttaaagttga

SEQ ID NO: 183527 - DNA, 21 bp, Artificial sequence
  SiRNA target sequence
aattttacgcttaaagttgaa

SEQ ID NO: 183528 - DNA, 21 bp, Artificial sequence
  SiRNA target sequence
attttacgcttaaagttgaag

SEQ ID NO: 183529 - DNA, 21 bp, Artificial sequence
  SiRNA target sequence
ttttacgcttaaagttgaagg

SEQ ID NO: 183530 - DNA, 21 bp, Artificial sequence
  SiRNA target sequence
tttacgcttaaagttgaaggc

SEQ ID NO: 183531 - DNA, 21 bp, Artificial sequence
  SiRNA target sequence
ttacgcttaaagttgaaggcg

SEQ ID NO: 183532 - DNA, 21 bp, Artificial sequence
  SiRNA target sequence
tacgcttaaagttgaaggcgg

SEQ ID NO: 183533 - DNA, 21 bp, Artificial sequence
  SiRNA target sequence
acgcttaaagttgaaggcggt

SEQ ID NO: 183534 - DNA, 21 bp, Artificial sequence
  SiRNA target sequence
cgcttaaagttgaaggcggta

SEQ ID NO: 183535 - DNA, 21 bp, Artificial sequence
  SiRNA target sequence
gcttaaagttgaaggcggtaa

SEQ ID NO: 183536 - DNA, 21 bp, Artificial sequence
  SiRNA target sequence
cttaaagttgaaggcggtaac

SEQ ID NO: 183537 - DNA, 21 bp, Artificial sequence
  SiRNA target sequence
ttaaagttgaaggcggtaact

SEQ ID NO: 183538 - DNA, 21 bp, Artificial sequence
  SiRNA target sequence
taaagttgaaggcggtaactt

SEQ ID NO: 183539 - DNA, 21 bp, Artificial sequence
  SiRNA target sequence
aaagttgaaggcggtaacttt

SEQ ID NO: 183540 - DNA, 21 bp, Artificial sequence
  SiRNA target sequence
aagttgaaggcggtaactttt

SEQ ID NO: 183541 - DNA, 21 bp, Artificial sequence
  SiRNA target sequence
agttgaaggcggtaacttttc

SEQ ID NO: 183542 - DNA, 21 bp, Artificial sequence
  SiRNA target sequence
gttgaaggcggtaacttttca

SEQ ID NO: 183543 - DNA, 21 bp, Artificial sequence
  SiRNA target sequence
ttgaaggcggtaacttttcag

SEQ ID NO: 183544 - DNA, 21 bp, Artificial sequence
  SiRNA target sequence
tgaaggcggtaacttttcaga

SEQ ID NO: 183545 - DNA, 21 bp, Artificial sequence
  SiRNA target sequence
gaaggcggtaacttttcagat

SEQ ID NO: 183546 - DNA, 21 bp, Artificial sequence
  SiRNA target sequence
aaggcggtaacttttcagatt

SEQ ID NO: 183547 - DNA, 21 bp, Artificial sequence
  SiRNA target sequence
aggcggtaacttttcagattc

SEQ ID NO: 183548 - DNA, 21 bp, Artificial sequence
  SiRNA target sequence
ggcggtaacttttcagattct

SEQ ID NO: 183549 - DNA, 21 bp, Artificial sequence
  SiRNA target sequence
gcggtaacttttcagattctg

SEQ ID NO: 183550 - DNA, 21 bp, Artificial sequence
  SiRNA target sequence
cggtaacttttcagattctga

SEQ ID NO: 183551 - DNA, 21 bp, Artificial sequence
  SiRNA target sequence
ggtaacttttcagattctgaa

SEQ ID NO: 183552 - DNA, 21 bp, Artificial sequence
  SiRNA target sequence
gtaacttttcagattctgaaa

SEQ ID NO: 183553 - DNA, 21 bp, Artificial sequence
  SiRNA target sequence
taacttttcagattctgaaat

SEQ ID NO: 183554 - DNA, 21 bp, Artificial sequence
  SiRNA target sequence
aacttttcagattctgaaatt

SEQ ID NO: 183555 - DNA, 21 bp, Artificial sequence
  SiRNA target sequence
acttttcagattctgaaattg

SEQ ID NO: 183556 - DNA, 21 bp, Artificial sequence
  SiRNA target sequence
cttttcagattctgaaattgt

SEQ ID NO: 183557 - DNA, 21 bp, Artificial sequence
  SiRNA target sequence
ttttcagattctgaaattgtt

SEQ ID NO: 183558 - DNA, 21 bp, Artificial sequence
  SiRNA target sequence
tttcagattctgaaattgttg

SEQ ID NO: 183559 - DNA, 21 bp, Artificial sequence
  SiRNA target sequence
ttcagattctgaaattgttgt

SEQ ID NO: 183560 - DNA, 21 bp, Artificial sequence
  SiRNA target sequence
tcagattctgaaattgttgta

SEQ ID NO: 183561 - DNA, 21 bp, Artificial sequence
  SiRNA target sequence
cagattctgaaattgttgtat

SEQ ID NO: 183562 - DNA, 21 bp, Artificial sequence
  SiRNA target sequence
agattctgaaattgttgtatt

SEQ ID NO: 183563 - DNA, 21 bp, Artificial sequence
  SiRNA target sequence
gattctgaaattgttgtattt

SEQ ID NO: 183564 - DNA, 21 bp, Artificial sequence
  SiRNA target sequence
attctgaaattgttgtatttc

SEQ ID NO: 183565 - DNA, 21 bp, Artificial sequence
  SiRNA target sequence
ttctgaaattgttgtatttct

SEQ ID NO: 183566 - DNA, 21 bp, Artificial sequence
  SiRNA target sequence
tctgaaattgttgtatttctt

SEQ ID NO: 183567 - DNA, 21 bp, Artificial sequence
  SiRNA target sequence
ctgaaattgttgtatttcttg

SEQ ID NO: 183568 - DNA, 21 bp, Artificial sequence
  SiRNA target sequence
tgaaattgttgtatttcttgg

SEQ ID NO: 183569 - DNA, 21 bp, Artificial sequence
  SiRNA target sequence
gaaattgttgtatttcttggt

SEQ ID NO: 183570 - DNA, 21 bp, Artificial sequence
  SiRNA target sequence
aaattgttgtatttcttggtg

SEQ ID NO: 183571 - DNA, 21 bp, Artificial sequence
  SiRNA target sequence
aattgttgtatttcttggtga

SEQ ID NO: 183572 - DNA, 21 bp, Artificial sequence
  SiRNA target sequence
attgttgtatttcttggtgaa

SEQ ID NO: 183573 - DNA, 21 bp, Artificial sequence
  SiRNA target sequence
ttgttgtatttcttggtgaaa

SEQ ID NO: 183574 - DNA, 21 bp, Artificial sequence
  SiRNA target sequence
tgttgtatttcttggtgaaaa

SEQ ID NO: 183575 - DNA, 21 bp, Artificial sequence
  SiRNA target sequence
gttgtatttcttggtgaaaat

SEQ ID NO: 183576 - DNA, 21 bp, Artificial sequence
  SiRNA target sequence
ttgtatttcttggtgaaaatg

SEQ ID NO: 183577 - DNA, 21 bp, Artificial sequence
  SiRNA target sequence
tgtatttcttggtgaaaatgg

SEQ ID NO: 183578 - DNA, 21 bp, Artificial sequence
  SiRNA target sequence
gtatttcttggtgaaaatgga

SEQ ID NO: 183579 - DNA, 21 bp, Artificial sequence
  SiRNA target sequence
tatttcttggtgaaaatggaa

SEQ ID NO: 183580 - DNA, 21 bp, Artificial sequence
  SiRNA target sequence
atttcttggtgaaaatggaat

SEQ ID NO: 183581 - DNA, 21 bp, Artificial sequence
  SiRNA target sequence
tttcttggtgaaaatggaatg

SEQ ID NO: 183582 - DNA, 21 bp, Artificial sequence
  SiRNA target sequence
ttcttggtgaaaatggaatgg

SEQ ID NO: 183583 - DNA, 21 bp, Artificial sequence
  SiRNA target sequence
tcttggtgaaaatggaatggg

SEQ ID NO: 183584 - DNA, 21 bp, Artificial sequence
  SiRNA target sequence
cttggtgaaaatggaatgggc

SEQ ID NO: 183585 - DNA, 21 bp, Artificial sequence
  SiRNA target sequence
ttggtgaaaatggaatgggca

SEQ ID NO: 183586 - DNA, 21 bp, Artificial sequence
  SiRNA target sequence
tggtgaaaatggaatgggcaa

SEQ ID NO: 183587 - DNA, 21 bp, Artificial sequence
  SiRNA target sequence
ggtgaaaatggaatgggcaaa

SEQ ID NO: 183588 - DNA, 21 bp, Artificial sequence
  SiRNA target sequence
gtgaaaatggaatgggcaaaa

SEQ ID NO: 183589 - DNA, 21 bp, Artificial sequence
  SiRNA target sequence
tgaaaatggaatgggcaaaac

SEQ ID NO: 183590 - DNA, 21 bp, Artificial sequence
  SiRNA target sequence
gaaaatggaatgggcaaaact

SEQ ID NO: 183591 - DNA, 21 bp, Artificial sequence
  SiRNA target sequence
aaaatggaatgggcaaaacta

SEQ ID NO: 183592 - DNA, 21 bp, Artificial sequence
  SiRNA target sequence
aaatggaatgggcaaaactac

SEQ ID NO: 183593 - DNA, 21 bp, Artificial sequence
  SiRNA target sequence
aatggaatgggcaaaactact

SEQ ID NO: 183594 - DNA, 21 bp, Artificial sequence
  SiRNA target sequence
atggaatgggcaaaactactt

SEQ ID NO: 183595 - DNA, 21 bp, Artificial sequence
  SiRNA target sequence
tggaatgggcaaaactacttt

SEQ ID NO: 183596 - DNA, 21 bp, Artificial sequence
  SiRNA target sequence
ggaatgggcaaaactacttta

SEQ ID NO: 183597 - DNA, 21 bp, Artificial sequence
  SiRNA target sequence
gaatgggcaaaactactttag

SEQ ID NO: 183598 - DNA, 21 bp, Artificial sequence
  SiRNA target sequence
aatgggcaaaactactttagt

SEQ ID NO: 183599 - DNA, 21 bp, Artificial sequence
  SiRNA target sequence
atgggcaaaactactttagta

SEQ ID NO: 183600 - DNA, 21 bp, Artificial sequence
  SiRNA target sequence
tgggcaaaactactttagtag

SEQ ID NO: 183601 - DNA, 21 bp, Artificial sequence
  SiRNA target sequence
gggcaaaactactttagtagg

SEQ ID NO: 183602 - DNA, 21 bp, Artificial sequence
  SiRNA target sequence
ggcaaaactactttagtaggt

SEQ ID NO: 183603 - DNA, 21 bp, Artificial sequence
  SiRNA target sequence
gcaaaactactttagtaggtt

SEQ ID NO: 183604 - DNA, 21 bp, Artificial sequence
  SiRNA target sequence
caaaactactttagtaggttt

SEQ ID NO: 183605 - DNA, 21 bp, Artificial sequence
  SiRNA target sequence
aaaactactttagtaggtttg

SEQ ID NO: 183606 - DNA, 21 bp, Artificial sequence
  SiRNA target sequence
aaactactttagtaggtttga

SEQ ID NO: 183607 - DNA, 21 bp, Artificial sequence
  SiRNA target sequence
aactactttagtaggtttgat

SEQ ID NO: 183608 - DNA, 21 bp, Artificial sequence
  SiRNA target sequence
actactttagtaggtttgatt

SEQ ID NO: 183609 - DNA, 21 bp, Artificial sequence
  SiRNA target sequence
ctactttagtaggtttgattt

SEQ ID NO: 183610 - DNA, 21 bp, Artificial sequence
  SiRNA target sequence
tactttagtaggtttgatttc

SEQ ID NO: 183611 - DNA, 21 bp, Artificial sequence
  SiRNA target sequence
actttagtaggtttgatttcg

SEQ ID NO: 183612 - DNA, 21 bp, Artificial sequence
  SiRNA target sequence
ctttagtaggtttgatttcgg

SEQ ID NO: 183613 - DNA, 21 bp, Artificial sequence
  SiRNA target sequence
tttagtaggtttgatttcggg

SEQ ID NO: 183614 - DNA, 21 bp, Artificial sequence
  SiRNA target sequence
ttagtaggtttgatttcgggg

SEQ ID NO: 183615 - DNA, 21 bp, Artificial sequence
  SiRNA target sequence
tagtaggtttgatttcggggt

SEQ ID NO: 183616 - DNA, 21 bp, Artificial sequence
  SiRNA target sequence
agtaggtttgatttcggggtt

SEQ ID NO: 183617 - DNA, 21 bp, Artificial sequence
  SiRNA target sequence
gtaggtttgatttcggggtta

SEQ ID NO: 183618 - DNA, 21 bp, Artificial sequence
  SiRNA target sequence
taggtttgatttcggggttaa

SEQ ID NO: 183619 - DNA, 21 bp, Artificial sequence
  SiRNA target sequence
aggtttgatttcggggttaat

SEQ ID NO: 183620 - DNA, 21 bp, Artificial sequence
  SiRNA target sequence
ggtttgatttcggggttaatt

SEQ ID NO: 183621 - DNA, 21 bp, Artificial sequence
  SiRNA target sequence
gtttgatttcggggttaatta

SEQ ID NO: 183622 - DNA, 21 bp, Artificial sequence
  SiRNA target sequence
tttgatttcggggttaattaa

SEQ ID NO: 183623 - DNA, 21 bp, Artificial sequence
  SiRNA target sequence
ttgatttcggggttaattaaa

SEQ ID NO: 183624 - DNA, 21 bp, Artificial sequence
  SiRNA target sequence
tgatttcggggttaattaaag

SEQ ID NO: 183625 - DNA, 21 bp, Artificial sequence
  SiRNA target sequence
gatttcggggttaattaaaga

SEQ ID NO: 183626 - DNA, 21 bp, Artificial sequence
  SiRNA target sequence
atttcggggttaattaaagat

SEQ ID NO: 183627 - DNA, 21 bp, Artificial sequence
  SiRNA target sequence
tttcggggttaattaaagatg

SEQ ID NO: 183628 - DNA, 21 bp, Artificial sequence
  SiRNA target sequence
ttcggggttaattaaagatga

SEQ ID NO: 183629 - DNA, 21 bp, Artificial sequence
  SiRNA target sequence
tcggggttaattaaagatgat

SEQ ID NO: 183630 - DNA, 21 bp, Artificial sequence
  SiRNA target sequence
cggggttaattaaagatgata

SEQ ID NO: 183631 - DNA, 21 bp, Artificial sequence
  SiRNA target sequence
ggggttaattaaagatgataa

SEQ ID NO: 183632 - DNA, 21 bp, Artificial sequence
  SiRNA target sequence
gggttaattaaagatgataac

SEQ ID NO: 183633 - DNA, 21 bp, Artificial sequence
  SiRNA target sequence
ggttaattaaagatgataacg

SEQ ID NO: 183634 - DNA, 21 bp, Artificial sequence
  SiRNA target sequence
gttaattaaagatgataacgg

SEQ ID NO: 183635 - DNA, 21 bp, Artificial sequence
  SiRNA target sequence
ttaattaaagatgataacggg

SEQ ID NO: 183636 - DNA, 21 bp, Artificial sequence
  SiRNA target sequence
taattaaagatgataacgggg

SEQ ID NO: 183637 - DNA, 21 bp, Artificial sequence
  SiRNA target sequence
aattaaagatgataacgggga

SEQ ID NO: 183638 - DNA, 21 bp, Artificial sequence
  SiRNA target sequence
attaaagatgataacggggaa

SEQ ID NO: 183639 - DNA, 21 bp, Artificial sequence
  SiRNA target sequence
ttaaagatgataacggggaag

SEQ ID NO: 183640 - DNA, 21 bp, Artificial sequence
  SiRNA target sequence
taaagatgataacggggaaga

SEQ ID NO: 183641 - DNA, 21 bp, Artificial sequence
  SiRNA target sequence
aaagatgataacggggaagag

SEQ ID NO: 183642 - DNA, 21 bp, Artificial sequence
  SiRNA target sequence
aagatgataacggggaagagt

SEQ ID NO: 183643 - DNA, 21 bp, Artificial sequence
  SiRNA target sequence
agatgataacggggaagagtt

SEQ ID NO: 183644 - DNA, 21 bp, Artificial sequence
  SiRNA target sequence
gatgataacggggaagagttc

SEQ ID NO: 183645 - DNA, 21 bp, Artificial sequence
  SiRNA target sequence
atgataacggggaagagttcg

SEQ ID NO: 183646 - DNA, 21 bp, Artificial sequence
  SiRNA target sequence
tgataacggggaagagttcgg

SEQ ID NO: 183647 - DNA, 21 bp, Artificial sequence
  SiRNA target sequence
gataacggggaagagttcggt

SEQ ID NO: 183648 - DNA, 21 bp, Artificial sequence
  SiRNA target sequence
ataacggggaagagttcggtt

SEQ ID NO: 183649 - DNA, 21 bp, Artificial sequence
  SiRNA target sequence
taacggggaagagttcggttt

SEQ ID NO: 183650 - DNA, 21 bp, Artificial sequence
  SiRNA target sequence
aacggggaagagttcggtttg

SEQ ID NO: 183651 - DNA, 21 bp, Artificial sequence
  SiRNA target sequence
acggggaagagttcggtttgt

SEQ ID NO: 183652 - DNA, 21 bp, Artificial sequence
  SiRNA target sequence
cggggaagagttcggtttgtt

SEQ ID NO: 183653 - DNA, 21 bp, Artificial sequence
  SiRNA target sequence
ggggaagagttcggtttgttg

SEQ ID NO: 183654 - DNA, 21 bp, Artificial sequence
  SiRNA target sequence
gggaagagttcggtttgttgt

SEQ ID NO: 183655 - DNA, 21 bp, Artificial sequence
  SiRNA target sequence
ggaagagttcggtttgttgtc

SEQ ID NO: 183656 - DNA, 21 bp, Artificial sequence
  SiRNA target sequence
gaagagttcggtttgttgtca

SEQ ID NO: 183657 - DNA, 21 bp, Artificial sequence
  SiRNA target sequence
aagagttcggtttgttgtcat

SEQ ID NO: 183658 - DNA, 21 bp, Artificial sequence
  SiRNA target sequence
agagttcggtttgttgtcata

SEQ ID NO: 183659 - DNA, 21 bp, Artificial sequence
  SiRNA target sequence
gagttcggtttgttgtcatat

SEQ ID NO: 183660 - DNA, 21 bp, Artificial sequence
  SiRNA target sequence
agttcggtttgttgtcatata

SEQ ID NO: 183661 - DNA, 21 bp, Artificial sequence
  SiRNA target sequence
gttcggtttgttgtcatatag

SEQ ID NO: 183662 - DNA, 21 bp, Artificial sequence
  SiRNA target sequence
ttcggtttgttgtcatatagt

SEQ ID NO: 183663 - DNA, 21 bp, Artificial sequence
  SiRNA target sequence
tcggtttgttgtcatatagtc

SEQ ID NO: 183664 - DNA, 21 bp, Artificial sequence
  SiRNA target sequence
cggtttgttgtcatatagtct

SEQ ID NO: 183665 - DNA, 21 bp, Artificial sequence
  SiRNA target sequence
ggtttgttgtcatatagtctt

SEQ ID NO: 183666 - DNA, 21 bp, Artificial sequence
  SiRNA target sequence
gtttgttgtcatatagtctta

SEQ ID NO: 183667 - DNA, 21 bp, Artificial sequence
  SiRNA target sequence
tttgttgtcatatagtcttaa

SEQ ID NO: 183668 - DNA, 21 bp, Artificial sequence
  SiRNA target sequence
ttgttgtcatatagtcttaaa

SEQ ID NO: 183669 - DNA, 21 bp, Artificial sequence
  SiRNA target sequence
tgttgtcatatagtcttaaac

SEQ ID NO: 183670 - DNA, 21 bp, Artificial sequence
  SiRNA target sequence
gttgtcatatagtcttaaacc

SEQ ID NO: 183671 - DNA, 21 bp, Artificial sequence
  SiRNA target sequence
ttgtcatatagtcttaaaccg

SEQ ID NO: 183672 - DNA, 21 bp, Artificial sequence
  SiRNA target sequence
tgtcatatagtcttaaaccgc

SEQ ID NO: 183673 - DNA, 21 bp, Artificial sequence
  SiRNA target sequence
gtcatatagtcttaaaccgca

SEQ ID NO: 183674 - DNA, 21 bp, Artificial sequence
  SiRNA target sequence
tcatatagtcttaaaccgcaa

SEQ ID NO: 183675 - DNA, 21 bp, Artificial sequence
  SiRNA target sequence
catatagtcttaaaccgcaaa

SEQ ID NO: 183676 - DNA, 21 bp, Artificial sequence
  SiRNA target sequence
atatagtcttaaaccgcaaaa

SEQ ID NO: 183677 - DNA, 21 bp, Artificial sequence
  SiRNA target sequence
tatagtcttaaaccgcaaaaa

SEQ ID NO: 183678 - DNA, 21 bp, Artificial sequence
  SiRNA target sequence
atagtcttaaaccgcaaaaaa

SEQ ID NO: 183679 - DNA, 21 bp, Artificial sequence
  SiRNA target sequence
tagtcttaaaccgcaaaaaat

SEQ ID NO: 183680 - DNA, 21 bp, Artificial sequence
  SiRNA target sequence
agtcttaaaccgcaaaaaatc

SEQ ID NO: 183681 - DNA, 21 bp, Artificial sequence
  SiRNA target sequence
gtcttaaaccgcaaaaaatca

SEQ ID NO: 183682 - DNA, 21 bp, Artificial sequence
  SiRNA target sequence
tcttaaaccgcaaaaaatcat

SEQ ID NO: 183683 - DNA, 21 bp, Artificial sequence
  SiRNA target sequence
cttaaaccgcaaaaaatcata

SEQ ID NO: 183684 - DNA, 21 bp, Artificial sequence
  SiRNA target sequence
ttaaaccgcaaaaaatcatac

SEQ ID NO: 183685 - DNA, 21 bp, Artificial sequence
  SiRNA target sequence
taaaccgcaaaaaatcatacc

SEQ ID NO: 183686 - DNA, 21 bp, Artificial sequence
  SiRNA target sequence
aaaccgcaaaaaatcataccg

SEQ ID NO: 183687 - DNA, 21 bp, Artificial sequence
  SiRNA target sequence
aaccgcaaaaaatcataccga

SEQ ID NO: 183688 - DNA, 21 bp, Artificial sequence
  SiRNA target sequence
accgcaaaaaatcataccgaa

SEQ ID NO: 183689 - DNA, 21 bp, Artificial sequence
  SiRNA target sequence
ccgcaaaaaatcataccgaaa

SEQ ID NO: 183690 - DNA, 21 bp, Artificial sequence
  SiRNA target sequence
cgcaaaaaatcataccgaaat

SEQ ID NO: 183691 - DNA, 21 bp, Artificial sequence
  SiRNA target sequence
gcaaaaaatcataccgaaata

SEQ ID NO: 183692 - DNA, 21 bp, Artificial sequence
  SiRNA target sequence
caaaaaatcataccgaaatac

SEQ ID NO: 183693 - DNA, 21 bp, Artificial sequence
  SiRNA target sequence
aaaaaatcataccgaaataca

SEQ ID NO: 183694 - DNA, 21 bp, Artificial sequence
  SiRNA target sequence
aaaaatcataccgaaatacaa

SEQ ID NO: 183695 - DNA, 21 bp, Artificial sequence
  SiRNA target sequence
aaaatcataccgaaatacaaa

SEQ ID NO: 183696 - DNA, 21 bp, Artificial sequence
  SiRNA target sequence
aaatcataccgaaatacaaag

SEQ ID NO: 183697 - DNA, 21 bp, Artificial sequence
  SiRNA target sequence
aatcataccgaaatacaaagg

SEQ ID NO: 183698 - DNA, 21 bp, Artificial sequence
  SiRNA target sequence
atcataccgaaatacaaagga

SEQ ID NO: 183699 - DNA, 21 bp, Artificial sequence
  SiRNA target sequence
tcataccgaaatacaaaggaa

SEQ ID NO: 183700 - DNA, 21 bp, Artificial sequence
  SiRNA target sequence
cataccgaaatacaaaggaac

SEQ ID NO: 183701 - DNA, 21 bp, Artificial sequence
  SiRNA target sequence
ataccgaaatacaaaggaaca

SEQ ID NO: 183702 - DNA, 21 bp, Artificial sequence
  SiRNA target sequence
taccgaaatacaaaggaacag

SEQ ID NO: 183703 - DNA, 21 bp, Artificial sequence
  SiRNA target sequence
accgaaatacaaaggaacagt

SEQ ID NO: 183704 - DNA, 21 bp, Artificial sequence
  SiRNA target sequence
ccgaaatacaaaggaacagtt

SEQ ID NO: 183705 - DNA, 21 bp, Artificial sequence
  SiRNA target sequence
cgaaatacaaaggaacagtta

SEQ ID NO: 183706 - DNA, 21 bp, Artificial sequence
  SiRNA target sequence
gaaatacaaaggaacagttag

SEQ ID NO: 183707 - DNA, 21 bp, Artificial sequence
  SiRNA target sequence
aaatacaaaggaacagttaga

SEQ ID NO: 183708 - DNA, 21 bp, Artificial sequence
  SiRNA target sequence
aatacaaaggaacagttagag

SEQ ID NO: 183709 - DNA, 21 bp, Artificial sequence
  SiRNA target sequence
atacaaaggaacagttagaga

SEQ ID NO: 183710 - DNA, 21 bp, Artificial sequence
  SiRNA target sequence
tacaaaggaacagttagagat

SEQ ID NO: 183711 - DNA, 21 bp, Artificial sequence
  SiRNA target sequence
acaaaggaacagttagagatc

SEQ ID NO: 183712 - DNA, 21 bp, Artificial sequence
  SiRNA target sequence
caaaggaacagttagagatct

SEQ ID NO: 183713 - DNA, 21 bp, Artificial sequence
  SiRNA target sequence
aaaggaacagttagagatctt

SEQ ID NO: 183714 - DNA, 21 bp, Artificial sequence
  SiRNA target sequence
aaggaacagttagagatcttt

SEQ ID NO: 183715 - DNA, 21 bp, Artificial sequence
  SiRNA target sequence
aggaacagttagagatctttt

SEQ ID NO: 183716 - DNA, 21 bp, Artificial sequence
  SiRNA target sequence
ggaacagttagagatcttttt

SEQ ID NO: 183717 - DNA, 21 bp, Artificial sequence
  SiRNA target sequence
gaacagttagagatcttttta

SEQ ID NO: 183718 - DNA, 21 bp, Artificial sequence
  SiRNA target sequence
aacagttagagatctttttat

SEQ ID NO: 183719 - DNA, 21 bp, Artificial sequence
  SiRNA target sequence
acagttagagatctttttatg

SEQ ID NO: 183720 - DNA, 21 bp, Artificial sequence
  SiRNA target sequence
cagttagagatctttttatgt

SEQ ID NO: 183721 - DNA, 21 bp, Artificial sequence
  SiRNA target sequence
agttagagatctttttatgtc

SEQ ID NO: 183722 - DNA, 21 bp, Artificial sequence
  SiRNA target sequence
gttagagatctttttatgtca

SEQ ID NO: 183723 - DNA, 21 bp, Artificial sequence
  SiRNA target sequence
ttagagatctttttatgtcaa

SEQ ID NO: 183724 - DNA, 21 bp, Artificial sequence
  SiRNA target sequence
tagagatctttttatgtcaaa

SEQ ID NO: 183725 - DNA, 21 bp, Artificial sequence
  SiRNA target sequence
agagatctttttatgtcaaaa

SEQ ID NO: 183726 - DNA, 21 bp, Artificial sequence
  SiRNA target sequence
gagatctttttatgtcaaaaa

SEQ ID NO: 183727 - DNA, 21 bp, Artificial sequence
  SiRNA target sequence
agatctttttatgtcaaaaat

SEQ ID NO: 183728 - DNA, 21 bp, Artificial sequence
  SiRNA target sequence
gatctttttatgtcaaaaatt

SEQ ID NO: 183729 - DNA, 21 bp, Artificial sequence
  SiRNA target sequence
atctttttatgtcaaaaattc

SEQ ID NO: 183730 - DNA, 21 bp, Artificial sequence
  SiRNA target sequence
tctttttatgtcaaaaattcg

SEQ ID NO: 183731 - DNA, 21 bp, Artificial sequence
  SiRNA target sequence
ctttttatgtcaaaaattcgt

SEQ ID NO: 183732 - DNA, 21 bp, Artificial sequence
  SiRNA target sequence
tttttatgtcaaaaattcgtt

SEQ ID NO: 183733 - DNA, 21 bp, Artificial sequence
  SiRNA target sequence
ttttatgtcaaaaattcgttc

SEQ ID NO: 183734 - DNA, 21 bp, Artificial sequence
  SiRNA target sequence
tttatgtcaaaaattcgttct

SEQ ID NO: 183735 - DNA, 21 bp, Artificial sequence
  SiRNA target sequence
ttatgtcaaaaattcgttctt

SEQ ID NO: 183736 - DNA, 21 bp, Artificial sequence
  SiRNA target sequence
tatgtcaaaaattcgttcttc

SEQ ID NO: 183737 - DNA, 21 bp, Artificial sequence
  SiRNA target sequence
atgtcaaaaattcgttcttcc

SEQ ID NO: 183738 - DNA, 21 bp, Artificial sequence
  SiRNA target sequence
tgtcaaaaattcgttcttcct

SEQ ID NO: 183739 - DNA, 21 bp, Artificial sequence
  SiRNA target sequence
gtcaaaaattcgttcttcctt

SEQ ID NO: 183740 - DNA, 21 bp, Artificial sequence
  SiRNA target sequence
tcaaaaattcgttcttccttt

SEQ ID NO: 183741 - DNA, 21 bp, Artificial sequence
  SiRNA target sequence
caaaaattcgttcttcctttt

SEQ ID NO: 183742 - DNA, 21 bp, Artificial sequence
  SiRNA target sequence
aaaaattcgttcttccttttt

SEQ ID NO: 183743 - DNA, 21 bp, Artificial sequence
  SiRNA target sequence
aaaattcgttcttccttttta

SEQ ID NO: 183744 - DNA, 21 bp, Artificial sequence
  SiRNA target sequence
aaattcgttcttcctttttag

SEQ ID NO: 183745 - DNA, 21 bp, Artificial sequence
  SiRNA target sequence
aattcgttcttcctttttaga

SEQ ID NO: 183746 - DNA, 21 bp, Artificial sequence
  SiRNA target sequence
attcgttcttcctttttagac

SEQ ID NO: 183747 - DNA, 21 bp, Artificial sequence
  SiRNA target sequence
ttcgttcttcctttttagacg

SEQ ID NO: 183748 - DNA, 21 bp, Artificial sequence
  SiRNA target sequence
tcgttcttcctttttagacgc

SEQ ID NO: 183749 - DNA, 21 bp, Artificial sequence
  SiRNA target sequence
cgttcttcctttttagacgct

SEQ ID NO: 183750 - DNA, 21 bp, Artificial sequence
  SiRNA target sequence
gttcttcctttttagacgcta

SEQ ID NO: 183751 - DNA, 21 bp, Artificial sequence
  SiRNA target sequence
ttcttcctttttagacgctaa

SEQ ID NO: 183752 - DNA, 21 bp, Artificial sequence
  SiRNA target sequence
tcttcctttttagacgctaat

SEQ ID NO: 183753 - DNA, 21 bp, Artificial sequence
  SiRNA target sequence
cttcctttttagacgctaatt

SEQ ID NO: 183754 - DNA, 21 bp, Artificial sequence
  SiRNA target sequence
ttcctttttagacgctaattt

SEQ ID NO: 183755 - DNA, 21 bp, Artificial sequence
  SiRNA target sequence
tcctttttagacgctaatttt

SEQ ID NO: 183756 - DNA, 21 bp, Artificial sequence
  SiRNA target sequence
cctttttagacgctaattttg

SEQ ID NO: 183757 - DNA, 21 bp, Artificial sequence
  SiRNA target sequence
ctttttagacgctaattttgt

SEQ ID NO: 183758 - DNA, 21 bp, Artificial sequence
  SiRNA target sequence
tttttagacgctaattttgtt

SEQ ID NO: 183759 - DNA, 21 bp, Artificial sequence
  SiRNA target sequence
ttttagacgctaattttgtta

SEQ ID NO: 183760 - DNA, 21 bp, Artificial sequence
  SiRNA target sequence
tttagacgctaattttgttaa

SEQ ID NO: 183761 - DNA, 21 bp, Artificial sequence
  SiRNA target sequence
ttagacgctaattttgttaat

SEQ ID NO: 183762 - DNA, 21 bp, Artificial sequence
  SiRNA target sequence
tagacgctaattttgttaatg

SEQ ID NO: 183763 - DNA, 21 bp, Artificial sequence
  SiRNA target sequence
agacgctaattttgttaatga

SEQ ID NO: 183764 - DNA, 21 bp, Artificial sequence
  SiRNA target sequence
gacgctaattttgttaatgaa

SEQ ID NO: 183765 - DNA, 21 bp, Artificial sequence
  SiRNA target sequence
acgctaattttgttaatgaag

SEQ ID NO: 183766 - DNA, 21 bp, Artificial sequence
  SiRNA target sequence
cgctaattttgttaatgaagc

SEQ ID NO: 183767 - DNA, 21 bp, Artificial sequence
  SiRNA target sequence
gctaattttgttaatgaagct

SEQ ID NO: 183768 - DNA, 21 bp, Artificial sequence
  SiRNA target sequence
ctaattttgttaatgaagcta

SEQ ID NO: 183769 - DNA, 21 bp, Artificial sequence
  SiRNA target sequence
taattttgttaatgaagctat

SEQ ID NO: 183770 - DNA, 21 bp, Artificial sequence
  SiRNA target sequence
aattttgttaatgaagctatt

SEQ ID NO: 183771 - DNA, 21 bp, Artificial sequence
  SiRNA target sequence
attttgttaatgaagctatta

SEQ ID NO: 183772 - DNA, 21 bp, Artificial sequence
  SiRNA target sequence
ttttgttaatgaagctattaa

SEQ ID NO: 183773 - DNA, 21 bp, Artificial sequence
  SiRNA target sequence
tttgttaatgaagctattaaa

SEQ ID NO: 183774 - DNA, 21 bp, Artificial sequence
  SiRNA target sequence
ttgttaatgaagctattaaac

SEQ ID NO: 183775 - DNA, 21 bp, Artificial sequence
  SiRNA target sequence
tgttaatgaagctattaaacc

SEQ ID NO: 183776 - DNA, 21 bp, Artificial sequence
  SiRNA target sequence
gttaatgaagctattaaacct

SEQ ID NO: 183777 - DNA, 21 bp, Artificial sequence
  SiRNA target sequence
ttaatgaagctattaaacctt

SEQ ID NO: 183778 - DNA, 21 bp, Artificial sequence
  SiRNA target sequence
taatgaagctattaaaccttt

SEQ ID NO: 183779 - DNA, 21 bp, Artificial sequence
  SiRNA target sequence
aatgaagctattaaaccttta

SEQ ID NO: 183780 - DNA, 21 bp, Artificial sequence
  SiRNA target sequence
atgaagctattaaacctttag

SEQ ID NO: 183781 - DNA, 21 bp, Artificial sequence
  SiRNA target sequence
tgaagctattaaacctttaga

SEQ ID NO: 183782 - DNA, 21 bp, Artificial sequence
  SiRNA target sequence
gaagctattaaacctttagat

SEQ ID NO: 183783 - DNA, 21 bp, Artificial sequence
  SiRNA target sequence
aagctattaaacctttagata

SEQ ID NO: 183784 - DNA, 21 bp, Artificial sequence
  SiRNA target sequence
agctattaaacctttagatat

SEQ ID NO: 183785 - DNA, 21 bp, Artificial sequence
  SiRNA target sequence
gctattaaacctttagatatt

SEQ ID NO: 183786 - DNA, 21 bp, Artificial sequence
  SiRNA target sequence
ctattaaacctttagatattc

SEQ ID NO: 183787 - DNA, 21 bp, Artificial sequence
  SiRNA target sequence
tattaaacctttagatattca

SEQ ID NO: 183788 - DNA, 21 bp, Artificial sequence
  SiRNA target sequence
attaaacctttagatattcat

SEQ ID NO: 183789 - DNA, 21 bp, Artificial sequence
  SiRNA target sequence
ttaaacctttagatattcatc

SEQ ID NO: 183790 - DNA, 21 bp, Artificial sequence
  SiRNA target sequence
taaacctttagatattcatca

SEQ ID NO: 183791 - DNA, 21 bp, Artificial sequence
  SiRNA target sequence
aaacctttagatattcatcat

SEQ ID NO: 183792 - DNA, 21 bp, Artificial sequence
  SiRNA target sequence
aacctttagatattcatcatt

SEQ ID NO: 183793 - DNA, 21 bp, Artificial sequence
  SiRNA target sequence
acctttagatattcatcattt

SEQ ID NO: 183794 - DNA, 21 bp, Artificial sequence
  SiRNA target sequence
cctttagatattcatcattta

SEQ ID NO: 183795 - DNA, 21 bp, Artificial sequence
  SiRNA target sequence
ctttagatattcatcatttat

SEQ ID NO: 183796 - DNA, 21 bp, Artificial sequence
  SiRNA target sequence
tttagatattcatcatttata

SEQ ID NO: 183797 - DNA, 21 bp, Artificial sequence
  SiRNA target sequence
ttagatattcatcatttatac

SEQ ID NO: 183798 - DNA, 21 bp, Artificial sequence
  SiRNA target sequence
tagatattcatcatttatacg

SEQ ID NO: 183799 - DNA, 21 bp, Artificial sequence
  SiRNA target sequence
agatattcatcatttatacga

SEQ ID NO: 183800 - DNA, 21 bp, Artificial sequence
  SiRNA target sequence
gatattcatcatttatacgac

SEQ ID NO: 183801 - DNA, 21 bp, Artificial sequence
  SiRNA target sequence
atattcatcatttatacgacc

SEQ ID NO: 183802 - DNA, 21 bp, Artificial sequence
  SiRNA target sequence
tattcatcatttatacgacca

SEQ ID NO: 183803 - DNA, 21 bp, Artificial sequence
  SiRNA target sequence
attcatcatttatacgaccaa

SEQ ID NO: 183804 - DNA, 21 bp, Artificial sequence
  SiRNA target sequence
ttcatcatttatacgaccaac

SEQ ID NO: 183805 - DNA, 21 bp, Artificial sequence
  SiRNA target sequence
tcatcatttatacgaccaact

SEQ ID NO: 183806 - DNA, 21 bp, Artificial sequence
  SiRNA target sequence
catcatttatacgaccaactt

SEQ ID NO: 183807 - DNA, 21 bp, Artificial sequence
  SiRNA target sequence
atcatttatacgaccaacttg

SEQ ID NO: 183808 - DNA, 21 bp, Artificial sequence
  SiRNA target sequence
tcatttatacgaccaacttgt

SEQ ID NO: 183809 - DNA, 21 bp, Artificial sequence
  SiRNA target sequence
catttatacgaccaacttgta

SEQ ID NO: 183810 - DNA, 21 bp, Artificial sequence
  SiRNA target sequence
atttatacgaccaacttgtag

SEQ ID NO: 183811 - DNA, 21 bp, Artificial sequence
  SiRNA target sequence
tttatacgaccaacttgtaga

SEQ ID NO: 183812 - DNA, 21 bp, Artificial sequence
  SiRNA target sequence
ttatacgaccaacttgtagaa

SEQ ID NO: 183813 - DNA, 21 bp, Artificial sequence
  SiRNA target sequence
tatacgaccaacttgtagaaa

SEQ ID NO: 183814 - DNA, 21 bp, Artificial sequence
  SiRNA target sequence
atacgaccaacttgtagaaaa

SEQ ID NO: 183815 - DNA, 21 bp, Artificial sequence
  SiRNA target sequence
tacgaccaacttgtagaaaac

SEQ ID NO: 183816 - DNA, 21 bp, Artificial sequence
  SiRNA target sequence
acgaccaacttgtagaaaact

SEQ ID NO: 183817 - DNA, 21 bp, Artificial sequence
  SiRNA target sequence
cgaccaacttgtagaaaactt

SEQ ID NO: 183818 - DNA, 21 bp, Artificial sequence
  SiRNA target sequence
gaccaacttgtagaaaacttg

SEQ ID NO: 183819 - DNA, 21 bp, Artificial sequence
  SiRNA target sequence
accaacttgtagaaaacttga

SEQ ID NO: 183820 - DNA, 21 bp, Artificial sequence
  SiRNA target sequence
ccaacttgtagaaaacttgag

SEQ ID NO: 183821 - DNA, 21 bp, Artificial sequence
  SiRNA target sequence
caacttgtagaaaacttgagt

SEQ ID NO: 183822 - DNA, 21 bp, Artificial sequence
  SiRNA target sequence
aacttgtagaaaacttgagtg

SEQ ID NO: 183823 - DNA, 21 bp, Artificial sequence
  SiRNA target sequence
acttgtagaaaacttgagtgg

SEQ ID NO: 183824 - DNA, 21 bp, Artificial sequence
  SiRNA target sequence
cttgtagaaaacttgagtggt

SEQ ID NO: 183825 - DNA, 21 bp, Artificial sequence
  SiRNA target sequence
ttgtagaaaacttgagtggtg

SEQ ID NO: 183826 - DNA, 21 bp, Artificial sequence
  SiRNA target sequence
tgtagaaaacttgagtggtgg

SEQ ID NO: 183827 - DNA, 21 bp, Artificial sequence
  SiRNA target sequence
gtagaaaacttgagtggtgga

SEQ ID NO: 183828 - DNA, 21 bp, Artificial sequence
  SiRNA target sequence
tagaaaacttgagtggtggag

SEQ ID NO: 183829 - DNA, 21 bp, Artificial sequence
  SiRNA target sequence
agaaaacttgagtggtggaga

SEQ ID NO: 183830 - DNA, 21 bp, Artificial sequence
  SiRNA target sequence
gaaaacttgagtggtggagaa

SEQ ID NO: 183831 - DNA, 21 bp, Artificial sequence
  SiRNA target sequence
aaaacttgagtggtggagaat

SEQ ID NO: 183832 - DNA, 21 bp, Artificial sequence
  SiRNA target sequence
aaacttgagtggtggagaatt

SEQ ID NO: 183833 - DNA, 21 bp, Artificial sequence
  SiRNA target sequence
aacttgagtggtggagaatta

SEQ ID NO: 183834 - DNA, 21 bp, Artificial sequence
  SiRNA target sequence
acttgagtggtggagaattac

SEQ ID NO: 183835 - DNA, 21 bp, Artificial sequence
  SiRNA target sequence
cttgagtggtggagaattaca

SEQ ID NO: 183836 - DNA, 21 bp, Artificial sequence
  SiRNA target sequence
ttgagtggtggagaattacaa

SEQ ID NO: 183837 - DNA, 21 bp, Artificial sequence
  SiRNA target sequence
tgagtggtggagaattacaaa

SEQ ID NO: 183838 - DNA, 21 bp, Artificial sequence
  SiRNA target sequence
gagtggtggagaattacaaag

SEQ ID NO: 183839 - DNA, 21 bp, Artificial sequence
  SiRNA target sequence
agtggtggagaattacaaaga

SEQ ID NO: 183840 - DNA, 21 bp, Artificial sequence
  SiRNA target sequence
gtggtggagaattacaaagaa

SEQ ID NO: 183841 - DNA, 21 bp, Artificial sequence
  SiRNA target sequence
tggtggagaattacaaagaat

SEQ ID NO: 183842 - DNA, 21 bp, Artificial sequence
  SiRNA target sequence
ggtggagaattacaaagaatt

SEQ ID NO: 183843 - DNA, 21 bp, Artificial sequence
  SiRNA target sequence
gtggagaattacaaagaattg

SEQ ID NO: 183844 - DNA, 21 bp, Artificial sequence
  SiRNA target sequence
tggagaattacaaagaattgc

SEQ ID NO: 183845 - DNA, 21 bp, Artificial sequence
  SiRNA target sequence
ggagaattacaaagaattgca

SEQ ID NO: 183846 - DNA, 21 bp, Artificial sequence
  SiRNA target sequence
gagaattacaaagaattgcaa

SEQ ID NO: 183847 - DNA, 21 bp, Artificial sequence
  SiRNA target sequence
agaattacaaagaattgcaat

SEQ ID NO: 183848 - DNA, 21 bp, Artificial sequence
  SiRNA target sequence
gaattacaaagaattgcaata

SEQ ID NO: 183849 - DNA, 21 bp, Artificial sequence
  SiRNA target sequence
aattacaaagaattgcaataa

SEQ ID NO: 183850 - DNA, 21 bp, Artificial sequence
  SiRNA target sequence
attacaaagaattgcaataat

SEQ ID NO: 183851 - DNA, 21 bp, Artificial sequence
  SiRNA target sequence
ttacaaagaattgcaataata

SEQ ID NO: 183852 - DNA, 21 bp, Artificial sequence
  SiRNA target sequence
tacaaagaattgcaataataa

SEQ ID NO: 183853 - DNA, 21 bp, Artificial sequence
  SiRNA target sequence
acaaagaattgcaataataat

SEQ ID NO: 183854 - DNA, 21 bp, Artificial sequence
  SiRNA target sequence
caaagaattgcaataataata

SEQ ID NO: 183855 - DNA, 21 bp, Artificial sequence
  SiRNA target sequence
aaagaattgcaataataatat

SEQ ID NO: 183856 - DNA, 21 bp, Artificial sequence
  SiRNA target sequence
aagaattgcaataataatatg

SEQ ID NO: 183857 - DNA, 21 bp, Artificial sequence
  SiRNA target sequence
agaattgcaataataatatgt

SEQ ID NO: 183858 - DNA, 21 bp, Artificial sequence
  SiRNA target sequence
gaattgcaataataatatgtt

SEQ ID NO: 183859 - DNA, 21 bp, Artificial sequence
  SiRNA target sequence
aattgcaataataatatgttt

SEQ ID NO: 183860 - DNA, 21 bp, Artificial sequence
  SiRNA target sequence
attgcaataataatatgttta

SEQ ID NO: 183861 - DNA, 21 bp, Artificial sequence
  SiRNA target sequence
ttgcaataataatatgtttag

SEQ ID NO: 183862 - DNA, 21 bp, Artificial sequence
  SiRNA target sequence
tgcaataataatatgtttagg

SEQ ID NO: 183863 - DNA, 21 bp, Artificial sequence
  SiRNA target sequence
gcaataataatatgtttagga

SEQ ID NO: 183864 - DNA, 21 bp, Artificial sequence
  SiRNA target sequence
caataataatatgtttaggaa

SEQ ID NO: 183865 - DNA, 21 bp, Artificial sequence
  SiRNA target sequence
aataataatatgtttaggaaa

SEQ ID NO: 183866 - DNA, 21 bp, Artificial sequence
  SiRNA target sequence
ataataatatgtttaggaaaa

SEQ ID NO: 183867 - DNA, 21 bp, Artificial sequence
  SiRNA target sequence
taataatatgtttaggaaaag

SEQ ID NO: 183868 - DNA, 21 bp, Artificial sequence
  SiRNA target sequence
aataatatgtttaggaaaaga

SEQ ID NO: 183869 - DNA, 21 bp, Artificial sequence
  SiRNA target sequence
ataatatgtttaggaaaagat

SEQ ID NO: 183870 - DNA, 21 bp, Artificial sequence
  SiRNA target sequence
taatatgtttaggaaaagatg

SEQ ID NO: 183871 - DNA, 21 bp, Artificial sequence
  SiRNA target sequence
aatatgtttaggaaaagatgc

SEQ ID NO: 183872 - DNA, 21 bp, Artificial sequence
  SiRNA target sequence
atatgtttaggaaaagatgct

SEQ ID NO: 183873 - DNA, 21 bp, Artificial sequence
  SiRNA target sequence
tatgtttaggaaaagatgcta

SEQ ID NO: 183874 - DNA, 21 bp, Artificial sequence
  SiRNA target sequence
atgtttaggaaaagatgctaa

SEQ ID NO: 183875 - DNA, 21 bp, Artificial sequence
  SiRNA target sequence
tgtttaggaaaagatgctaac

SEQ ID NO: 183876 - DNA, 21 bp, Artificial sequence
  SiRNA target sequence
gtttaggaaaagatgctaacc

SEQ ID NO: 183877 - DNA, 21 bp, Artificial sequence
  SiRNA target sequence
tttaggaaaagatgctaacct

SEQ ID NO: 183878 - DNA, 21 bp, Artificial sequence
  SiRNA target sequence
ttaggaaaagatgctaacctt

SEQ ID NO: 183879 - DNA, 21 bp, Artificial sequence
  SiRNA target sequence
taggaaaagatgctaaccttt

SEQ ID NO: 183880 - DNA, 21 bp, Artificial sequence
  SiRNA target sequence
aggaaaagatgctaaccttta

SEQ ID NO: 183881 - DNA, 21 bp, Artificial sequence
  SiRNA target sequence
ggaaaagatgctaacctttat

SEQ ID NO: 183882 - DNA, 21 bp, Artificial sequence
  SiRNA target sequence
gaaaagatgctaacctttatt

SEQ ID NO: 183883 - DNA, 21 bp, Artificial sequence
  SiRNA target sequence
aaaagatgctaacctttattt

SEQ ID NO: 183884 - DNA, 21 bp, Artificial sequence
  SiRNA target sequence
aaagatgctaacctttattta

SEQ ID NO: 183885 - DNA, 21 bp, Artificial sequence
  SiRNA target sequence
aagatgctaacctttatttat

SEQ ID NO: 183886 - DNA, 21 bp, Artificial sequence
  SiRNA target sequence
agatgctaacctttatttatt

SEQ ID NO: 183887 - DNA, 21 bp, Artificial sequence
  SiRNA target sequence
gatgctaacctttatttatta

SEQ ID NO: 183888 - DNA, 21 bp, Artificial sequence
  SiRNA target sequence
atgctaacctttatttattag

SEQ ID NO: 183889 - DNA, 21 bp, Artificial sequence
  SiRNA target sequence
tgctaacctttatttattaga

SEQ ID NO: 183890 - DNA, 21 bp, Artificial sequence
  SiRNA target sequence
gctaacctttatttattagat

SEQ ID NO: 183891 - DNA, 21 bp, Artificial sequence
  SiRNA target sequence
ctaacctttatttattagatg

SEQ ID NO: 183892 - DNA, 21 bp, Artificial sequence
  SiRNA target sequence
taacctttatttattagatga

SEQ ID NO: 183893 - DNA, 21 bp, Artificial sequence
  SiRNA target sequence
aacctttatttattagatgaa

SEQ ID NO: 183894 - DNA, 21 bp, Artificial sequence
  SiRNA target sequence
acctttatttattagatgaac

SEQ ID NO: 183895 - DNA, 21 bp, Artificial sequence
  SiRNA target sequence
cctttatttattagatgaacc

SEQ ID NO: 183896 - DNA, 21 bp, Artificial sequence
  SiRNA target sequence
ctttatttattagatgaacct

SEQ ID NO: 183897 - DNA, 21 bp, Artificial sequence
  SiRNA target sequence
tttatttattagatgaacctt

SEQ ID NO: 183898 - DNA, 21 bp, Artificial sequence
  SiRNA target sequence
ttatttattagatgaaccttc

SEQ ID NO: 183899 - DNA, 21 bp, Artificial sequence
  SiRNA target sequence
tatttattagatgaaccttct

SEQ ID NO: 183900 - DNA, 21 bp, Artificial sequence
  SiRNA target sequence
atttattagatgaaccttctg

SEQ ID NO: 183901 - DNA, 21 bp, Artificial sequence
  SiRNA target sequence
tttattagatgaaccttctgc

SEQ ID NO: 183902 - DNA, 21 bp, Artificial sequence
  SiRNA target sequence
ttattagatgaaccttctgcg

SEQ ID NO: 183903 - DNA, 21 bp, Artificial sequence
  SiRNA target sequence
tattagatgaaccttctgcgt

SEQ ID NO: 183904 - DNA, 21 bp, Artificial sequence
  SiRNA target sequence
attagatgaaccttctgcgta

SEQ ID NO: 183905 - DNA, 21 bp, Artificial sequence
  SiRNA target sequence
ttagatgaaccttctgcgtat

SEQ ID NO: 183906 - DNA, 21 bp, Artificial sequence
  SiRNA target sequence
tagatgaaccttctgcgtatc

SEQ ID NO: 183907 - DNA, 21 bp, Artificial sequence
  SiRNA target sequence
agatgaaccttctgcgtatct

SEQ ID NO: 183908 - DNA, 21 bp, Artificial sequence
  SiRNA target sequence
gatgaaccttctgcgtatcta

SEQ ID NO: 183909 - DNA, 21 bp, Artificial sequence
  SiRNA target sequence
atgaaccttctgcgtatctag

SEQ ID NO: 183910 - DNA, 21 bp, Artificial sequence
  SiRNA target sequence
tgaaccttctgcgtatctaga

SEQ ID NO: 183911 - DNA, 21 bp, Artificial sequence
  SiRNA target sequence
gaaccttctgcgtatctagat

SEQ ID NO: 183912 - DNA, 21 bp, Artificial sequence
  SiRNA target sequence
aaccttctgcgtatctagatt

SEQ ID NO: 183913 - DNA, 21 bp, Artificial sequence
  SiRNA target sequence
accttctgcgtatctagattc

SEQ ID NO: 183914 - DNA, 21 bp, Artificial sequence
  SiRNA target sequence
ccttctgcgtatctagattca

SEQ ID NO: 183915 - DNA, 21 bp, Artificial sequence
  SiRNA target sequence
cttctgcgtatctagattcag

SEQ ID NO: 183916 - DNA, 21 bp, Artificial sequence
  SiRNA target sequence
ttctgcgtatctagattcaga

SEQ ID NO: 183917 - DNA, 21 bp, Artificial sequence
  SiRNA target sequence
tctgcgtatctagattcagat

SEQ ID NO: 183918 - DNA, 21 bp, Artificial sequence
  SiRNA target sequence
ctgcgtatctagattcagatc

SEQ ID NO: 183919 - DNA, 21 bp, Artificial sequence
  SiRNA target sequence
tgcgtatctagattcagatca

SEQ ID NO: 183920 - DNA, 21 bp, Artificial sequence
  SiRNA target sequence
gcgtatctagattcagatcag

SEQ ID NO: 183921 - DNA, 21 bp, Artificial sequence
  SiRNA target sequence
cgtatctagattcagatcaga

SEQ ID NO: 183922 - DNA, 21 bp, Artificial sequence
  SiRNA target sequence
gtatctagattcagatcagag

SEQ ID NO: 183923 - DNA, 21 bp, Artificial sequence
  SiRNA target sequence
tatctagattcagatcagaga

SEQ ID NO: 183924 - DNA, 21 bp, Artificial sequence
  SiRNA target sequence
atctagattcagatcagagaa

SEQ ID NO: 183925 - DNA, 21 bp, Artificial sequence
  SiRNA target sequence
tctagattcagatcagagaat

SEQ ID NO: 183926 - DNA, 21 bp, Artificial sequence
  SiRNA target sequence
ctagattcagatcagagaata

SEQ ID NO: 183927 - DNA, 21 bp, Artificial sequence
  SiRNA target sequence
tagattcagatcagagaatag

SEQ ID NO: 183928 - DNA, 21 bp, Artificial sequence
  SiRNA target sequence
agattcagatcagagaatagc

SEQ ID NO: 183929 - DNA, 21 bp, Artificial sequence
  SiRNA target sequence
gattcagatcagagaatagcg

SEQ ID NO: 183930 - DNA, 21 bp, Artificial sequence
  SiRNA target sequence
attcagatcagagaatagcga

SEQ ID NO: 183931 - DNA, 21 bp, Artificial sequence
  SiRNA target sequence
ttcagatcagagaatagcgat

SEQ ID NO: 183932 - DNA, 21 bp, Artificial sequence
  SiRNA target sequence
tcagatcagagaatagcgatt

SEQ ID NO: 183933 - DNA, 21 bp, Artificial sequence
  SiRNA target sequence
cagatcagagaatagcgattt

SEQ ID NO: 183934 - DNA, 21 bp, Artificial sequence
  SiRNA target sequence
agatcagagaatagcgatttc

SEQ ID NO: 183935 - DNA, 21 bp, Artificial sequence
  SiRNA target sequence
gatcagagaatagcgatttca

SEQ ID NO: 183936 - DNA, 21 bp, Artificial sequence
  SiRNA target sequence
atcagagaatagcgatttcaa

SEQ ID NO: 183937 - DNA, 21 bp, Artificial sequence
  SiRNA target sequence
tcagagaatagcgatttcaaa

SEQ ID NO: 183938 - DNA, 21 bp, Artificial sequence
  SiRNA target sequence
cagagaatagcgatttcaaaa

SEQ ID NO: 183939 - DNA, 21 bp, Artificial sequence
  SiRNA target sequence
agagaatagcgatttcaaaag

SEQ ID NO: 183940 - DNA, 21 bp, Artificial sequence
  SiRNA target sequence
gagaatagcgatttcaaaagt

SEQ ID NO: 183941 - DNA, 21 bp, Artificial sequence
  SiRNA target sequence
agaatagcgatttcaaaagtt

SEQ ID NO: 183942 - DNA, 21 bp, Artificial sequence
  SiRNA target sequence
gaatagcgatttcaaaagtta

SEQ ID NO: 183943 - DNA, 21 bp, Artificial sequence
  SiRNA target sequence
aatagcgatttcaaaagttat

SEQ ID NO: 183944 - DNA, 21 bp, Artificial sequence
  SiRNA target sequence
atagcgatttcaaaagttata

SEQ ID NO: 183945 - DNA, 21 bp, Artificial sequence
  SiRNA target sequence
tagcgatttcaaaagttataa

SEQ ID NO: 183946 - DNA, 21 bp, Artificial sequence
  SiRNA target sequence
agcgatttcaaaagttataaa

SEQ ID NO: 183947 - DNA, 21 bp, Artificial sequence
  SiRNA target sequence
gcgatttcaaaagttataaaa

SEQ ID NO: 183948 - DNA, 21 bp, Artificial sequence
  SiRNA target sequence
cgatttcaaaagttataaaaa

SEQ ID NO: 183949 - DNA, 21 bp, Artificial sequence
  SiRNA target sequence
gatttcaaaagttataaaaag

SEQ ID NO: 183950 - DNA, 21 bp, Artificial sequence
  SiRNA target sequence
atttcaaaagttataaaaagg

SEQ ID NO: 183951 - DNA, 21 bp, Artificial sequence
  SiRNA target sequence
tttcaaaagttataaaaaggt

SEQ ID NO: 183952 - DNA, 21 bp, Artificial sequence
  SiRNA target sequence
ttcaaaagttataaaaaggtt

SEQ ID NO: 183953 - DNA, 21 bp, Artificial sequence
  SiRNA target sequence
tcaaaagttataaaaaggttt

SEQ ID NO: 183954 - DNA, 21 bp, Artificial sequence
  SiRNA target sequence
caaaagttataaaaaggttta

SEQ ID NO: 183955 - DNA, 21 bp, Artificial sequence
  SiRNA target sequence
aaaagttataaaaaggtttat

SEQ ID NO: 183956 - DNA, 21 bp, Artificial sequence
  SiRNA target sequence
aaagttataaaaaggtttatt

SEQ ID NO: 183957 - DNA, 21 bp, Artificial sequence
  SiRNA target sequence
aagttataaaaaggtttattt

SEQ ID NO: 183958 - DNA, 21 bp, Artificial sequence
  SiRNA target sequence
agttataaaaaggtttattta

SEQ ID NO: 183959 - DNA, 21 bp, Artificial sequence
  SiRNA target sequence
gttataaaaaggtttatttat

SEQ ID NO: 183960 - DNA, 21 bp, Artificial sequence
  SiRNA target sequence
ttataaaaaggtttatttatg

SEQ ID NO: 183961 - DNA, 21 bp, Artificial sequence
  SiRNA target sequence
tataaaaaggtttatttatgg

SEQ ID NO: 183962 - DNA, 21 bp, Artificial sequence
  SiRNA target sequence
ataaaaaggtttatttatggg

SEQ ID NO: 183963 - DNA, 21 bp, Artificial sequence
  SiRNA target sequence
taaaaaggtttatttatggga

SEQ ID NO: 183964 - DNA, 21 bp, Artificial sequence
  SiRNA target sequence
aaaaaggtttatttatgggaa

SEQ ID NO: 183965 - DNA, 21 bp, Artificial sequence
  SiRNA target sequence
aaaaggtttatttatgggaag

SEQ ID NO: 183966 - DNA, 21 bp, Artificial sequence
  SiRNA target sequence
aaaggtttatttatgggaaga

SEQ ID NO: 183967 - DNA, 21 bp, Artificial sequence
  SiRNA target sequence
aaggtttatttatgggaagaa

SEQ ID NO: 183968 - DNA, 21 bp, Artificial sequence
  SiRNA target sequence
aggtttatttatgggaagaag

SEQ ID NO: 183969 - DNA, 21 bp, Artificial sequence
  SiRNA target sequence
ggtttatttatgggaagaagc

SEQ ID NO: 183970 - DNA, 21 bp, Artificial sequence
  SiRNA target sequence
gtttatttatgggaagaagcg

SEQ ID NO: 183971 - DNA, 21 bp, Artificial sequence
  SiRNA target sequence
tttatttatgggaagaagcga

SEQ ID NO: 183972 - DNA, 21 bp, Artificial sequence
  SiRNA target sequence
ttatttatgggaagaagcgaa

SEQ ID NO: 183973 - DNA, 21 bp, Artificial sequence
  SiRNA target sequence
tatttatgggaagaagcgaac

SEQ ID NO: 183974 - DNA, 21 bp, Artificial sequence
  SiRNA target sequence
atttatgggaagaagcgaaca

SEQ ID NO: 183975 - DNA, 21 bp, Artificial sequence
  SiRNA target sequence
tttatgggaagaagcgaacag

SEQ ID NO: 183976 - DNA, 21 bp, Artificial sequence
  SiRNA target sequence
ttatgggaagaagcgaacagc

SEQ ID NO: 183977 - DNA, 21 bp, Artificial sequence
  SiRNA target sequence
tatgggaagaagcgaacagcc

SEQ ID NO: 183978 - DNA, 21 bp, Artificial sequence
  SiRNA target sequence
atgggaagaagcgaacagcct

SEQ ID NO: 183979 - DNA, 21 bp, Artificial sequence
  SiRNA target sequence
tgggaagaagcgaacagcctt

SEQ ID NO: 183980 - DNA, 21 bp, Artificial sequence
  SiRNA target sequence
gggaagaagcgaacagccttt

SEQ ID NO: 183981 - DNA, 21 bp, Artificial sequence
  SiRNA target sequence
ggaagaagcgaacagcctttg

SEQ ID NO: 183982 - DNA, 21 bp, Artificial sequence
  SiRNA target sequence
gaagaagcgaacagcctttgt

SEQ ID NO: 183983 - DNA, 21 bp, Artificial sequence
  SiRNA target sequence
aagaagcgaacagcctttgtg

SEQ ID NO: 183984 - DNA, 21 bp, Artificial sequence
  SiRNA target sequence
agaagcgaacagcctttgtgg

SEQ ID NO: 183985 - DNA, 21 bp, Artificial sequence
  SiRNA target sequence
gaagcgaacagcctttgtggt

SEQ ID NO: 183986 - DNA, 21 bp, Artificial sequence
  SiRNA target sequence
aagcgaacagcctttgtggtt

SEQ ID NO: 183987 - DNA, 21 bp, Artificial sequence
  SiRNA target sequence
agcgaacagcctttgtggttg

SEQ ID NO: 183988 - DNA, 21 bp, Artificial sequence
  SiRNA target sequence
gcgaacagcctttgtggttga

SEQ ID NO: 183989 - DNA, 21 bp, Artificial sequence
  SiRNA target sequence
cgaacagcctttgtggttgaa

SEQ ID NO: 183990 - DNA, 21 bp, Artificial sequence
  SiRNA target sequence
gaacagcctttgtggttgaac

SEQ ID NO: 183991 - DNA, 21 bp, Artificial sequence
  SiRNA target sequence
aacagcctttgtggttgaaca

SEQ ID NO: 183992 - DNA, 21 bp, Artificial sequence
  SiRNA target sequence
acagcctttgtggttgaacat

SEQ ID NO: 183993 - DNA, 21 bp, Artificial sequence
  SiRNA target sequence
cagcctttgtggttgaacatg

SEQ ID NO: 183994 - DNA, 21 bp, Artificial sequence
  SiRNA target sequence
agcctttgtggttgaacatga

SEQ ID NO: 183995 - DNA, 21 bp, Artificial sequence
  SiRNA target sequence
gcctttgtggttgaacatgat

SEQ ID NO: 183996 - DNA, 21 bp, Artificial sequence
  SiRNA target sequence
cctttgtggttgaacatgatt

SEQ ID NO: 183997 - DNA, 21 bp, Artificial sequence
  SiRNA target sequence
ctttgtggttgaacatgattt

SEQ ID NO: 183998 - DNA, 21 bp, Artificial sequence
  SiRNA target sequence
tttgtggttgaacatgattta

SEQ ID NO: 183999 - DNA, 21 bp, Artificial sequence
  SiRNA target sequence
ttgtggttgaacatgatttaa

SEQ ID NO: 184000 - DNA, 21 bp, Artificial sequence
  SiRNA target sequence
tgtggttgaacatgatttaat

SEQ ID NO: 184001 - DNA, 21 bp, Artificial sequence
  SiRNA target sequence
gtggttgaacatgatttaatt

SEQ ID NO: 184002 - DNA, 21 bp, Artificial sequence
  SiRNA target sequence
tggttgaacatgatttaattg

SEQ ID NO: 184003 - DNA, 21 bp, Artificial sequence
  SiRNA target sequence
ggttgaacatgatttaattgt

SEQ ID NO: 184004 - DNA, 21 bp, Artificial sequence
  SiRNA target sequence
gttgaacatgatttaattgta

SEQ ID NO: 184005 - DNA, 21 bp, Artificial sequence
  SiRNA target sequence
ttgaacatgatttaattgtag

SEQ ID NO: 184006 - DNA, 21 bp, Artificial sequence
  SiRNA target sequence
tgaacatgatttaattgtagg

SEQ ID NO: 184007 - DNA, 21 bp, Artificial sequence
  SiRNA target sequence
gaacatgatttaattgtaggt

SEQ ID NO: 184008 - DNA, 21 bp, Artificial sequence
  SiRNA target sequence
aacatgatttaattgtaggta

SEQ ID NO: 184009 - DNA, 21 bp, Artificial sequence
  SiRNA target sequence
acatgatttaattgtaggtac

SEQ ID NO: 184010 - DNA, 21 bp, Artificial sequence
  SiRNA target sequence
catgatttaattgtaggtaca

SEQ ID NO: 184011 - DNA, 21 bp, Artificial sequence
  SiRNA target sequence
atgatttaattgtaggtacat

SEQ ID NO: 184012 - DNA, 21 bp, Artificial sequence
  SiRNA target sequence
tgatttaattgtaggtacata

SEQ ID NO: 184013 - DNA, 21 bp, Artificial sequence
  SiRNA target sequence
gatttaattgtaggtacatat

SEQ ID NO: 184014 - DNA, 21 bp, Artificial sequence
  SiRNA target sequence
atttaattgtaggtacatatt

SEQ ID NO: 184015 - DNA, 21 bp, Artificial sequence
  SiRNA target sequence
tttaattgtaggtacatattt

SEQ ID NO: 184016 - DNA, 21 bp, Artificial sequence
  SiRNA target sequence
ttaattgtaggtacatatttg

SEQ ID NO: 184017 - DNA, 21 bp, Artificial sequence
  SiRNA target sequence
taattgtaggtacatatttgg

SEQ ID NO: 184018 - DNA, 21 bp, Artificial sequence
  SiRNA target sequence
aattgtaggtacatatttggc

SEQ ID NO: 184019 - DNA, 21 bp, Artificial sequence
  SiRNA target sequence
attgtaggtacatatttggct

SEQ ID NO: 184020 - DNA, 21 bp, Artificial sequence
  SiRNA target sequence
ttgtaggtacatatttggctg

SEQ ID NO: 184021 - DNA, 21 bp, Artificial sequence
  SiRNA target sequence
tgtaggtacatatttggctga

SEQ ID NO: 184022 - DNA, 21 bp, Artificial sequence
  SiRNA target sequence
gtaggtacatatttggctgat

SEQ ID NO: 184023 - DNA, 21 bp, Artificial sequence
  SiRNA target sequence
taggtacatatttggctgata

SEQ ID NO: 184024 - DNA, 21 bp, Artificial sequence
  SiRNA target sequence
aggtacatatttggctgataa

SEQ ID NO: 184025 - DNA, 21 bp, Artificial sequence
  SiRNA target sequence
ggtacatatttggctgataaa

SEQ ID NO: 184026 - DNA, 21 bp, Artificial sequence
  SiRNA target sequence
gtacatatttggctgataaag

SEQ ID NO: 184027 - DNA, 21 bp, Artificial sequence
  SiRNA target sequence
tacatatttggctgataaagt

SEQ ID NO: 184028 - DNA, 21 bp, Artificial sequence
  SiRNA target sequence
acatatttggctgataaagtt

SEQ ID NO: 184029 - DNA, 21 bp, Artificial sequence
  SiRNA target sequence
catatttggctgataaagttg

SEQ ID NO: 184030 - DNA, 21 bp, Artificial sequence
  SiRNA target sequence
atatttggctgataaagttgt

SEQ ID NO: 184031 - DNA, 21 bp, Artificial sequence
  SiRNA target sequence
tatttggctgataaagttgtt

SEQ ID NO: 184032 - DNA, 21 bp, Artificial sequence
  SiRNA target sequence
atttggctgataaagttgttg

SEQ ID NO: 184033 - DNA, 21 bp, Artificial sequence
  SiRNA target sequence
tttggctgataaagttgttgt

SEQ ID NO: 184034 - DNA, 21 bp, Artificial sequence
  SiRNA target sequence
ttggctgataaagttgttgtt

SEQ ID NO: 184035 - DNA, 21 bp, Artificial sequence
  SiRNA target sequence
tggctgataaagttgttgttt

SEQ ID NO: 184036 - DNA, 21 bp, Artificial sequence
  SiRNA target sequence
ggctgataaagttgttgtttt

SEQ ID NO: 184037 - DNA, 21 bp, Artificial sequence
  SiRNA target sequence
gctgataaagttgttgttttt

SEQ ID NO: 184038 - DNA, 21 bp, Artificial sequence
  SiRNA target sequence
ctgataaagttgttgtttttg

SEQ ID NO: 184039 - DNA, 21 bp, Artificial sequence
  SiRNA target sequence
tgataaagttgttgtttttga

SEQ ID NO: 184040 - DNA, 21 bp, Artificial sequence
  SiRNA target sequence
gataaagttgttgtttttgag

SEQ ID NO: 184041 - DNA, 21 bp, Artificial sequence
  SiRNA target sequence
ataaagttgttgtttttgagg

SEQ ID NO: 184042 - DNA, 21 bp, Artificial sequence
  SiRNA target sequence
taaagttgttgtttttgaggg

SEQ ID NO: 184043 - DNA, 21 bp, Artificial sequence
  SiRNA target sequence
aaagttgttgtttttgaggga

SEQ ID NO: 184044 - DNA, 21 bp, Artificial sequence
  SiRNA target sequence
aagttgttgtttttgagggaa

SEQ ID NO: 184045 - DNA, 21 bp, Artificial sequence
  SiRNA target sequence
agttgttgtttttgagggaag

SEQ ID NO: 184046 - DNA, 21 bp, Artificial sequence
  SiRNA target sequence
gttgttgtttttgagggaagc

SEQ ID NO: 184047 - DNA, 21 bp, Artificial sequence
  SiRNA target sequence
ttgttgtttttgagggaagcc

SEQ ID NO: 184048 - DNA, 21 bp, Artificial sequence
  SiRNA target sequence
tgttgtttttgagggaagccc

SEQ ID NO: 184049 - DNA, 21 bp, Artificial sequence
  SiRNA target sequence
gttgtttttgagggaagccct

SEQ ID NO: 184050 - DNA, 21 bp, Artificial sequence
  SiRNA target sequence
ttgtttttgagggaagcccta

SEQ ID NO: 184051 - DNA, 21 bp, Artificial sequence
  SiRNA target sequence
tgtttttgagggaagccctag

SEQ ID NO: 184052 - DNA, 21 bp, Artificial sequence
  SiRNA target sequence
gtttttgagggaagccctagt

SEQ ID NO: 184053 - DNA, 21 bp, Artificial sequence
  SiRNA target sequence
tttttgagggaagccctagtg

SEQ ID NO: 184054 - DNA, 21 bp, Artificial sequence
  SiRNA target sequence
ttttgagggaagccctagtgt

SEQ ID NO: 184055 - DNA, 21 bp, Artificial sequence
  SiRNA target sequence
tttgagggaagccctagtgtt

SEQ ID NO: 184056 - DNA, 21 bp, Artificial sequence
  SiRNA target sequence
ttgagggaagccctagtgttc

SEQ ID NO: 184057 - DNA, 21 bp, Artificial sequence
  SiRNA target sequence
tgagggaagccctagtgttca

SEQ ID NO: 184058 - DNA, 21 bp, Artificial sequence
  SiRNA target sequence
gagggaagccctagtgttcat

SEQ ID NO: 184059 - DNA, 21 bp, Artificial sequence
  SiRNA target sequence
agggaagccctagtgttcata

SEQ ID NO: 184060 - DNA, 21 bp, Artificial sequence
  SiRNA target sequence
gggaagccctagtgttcatag

SEQ ID NO: 184061 - DNA, 21 bp, Artificial sequence
  SiRNA target sequence
ggaagccctagtgttcatagc

SEQ ID NO: 184062 - DNA, 21 bp, Artificial sequence
  SiRNA target sequence
gaagccctagtgttcatagca

SEQ ID NO: 184063 - DNA, 21 bp, Artificial sequence
  SiRNA target sequence
aagccctagtgttcatagcac

SEQ ID NO: 184064 - DNA, 21 bp, Artificial sequence
  SiRNA target sequence
agccctagtgttcatagcact

SEQ ID NO: 184065 - DNA, 21 bp, Artificial sequence
  SiRNA target sequence
gccctagtgttcatagcactg

SEQ ID NO: 184066 - DNA, 21 bp, Artificial sequence
  SiRNA target sequence
ccctagtgttcatagcactgc

SEQ ID NO: 184067 - DNA, 21 bp, Artificial sequence
  SiRNA target sequence
cctagtgttcatagcactgct

SEQ ID NO: 184068 - DNA, 21 bp, Artificial sequence
  SiRNA target sequence
ctagtgttcatagcactgctc

SEQ ID NO: 184069 - DNA, 21 bp, Artificial sequence
  SiRNA target sequence
tagtgttcatagcactgctca

SEQ ID NO: 184070 - DNA, 21 bp, Artificial sequence
  SiRNA target sequence
agtgttcatagcactgctcat

SEQ ID NO: 184071 - DNA, 21 bp, Artificial sequence
  SiRNA target sequence
gtgttcatagcactgctcata

SEQ ID NO: 184072 - DNA, 21 bp, Artificial sequence
  SiRNA target sequence
tgttcatagcactgctcataa

SEQ ID NO: 184073 - DNA, 21 bp, Artificial sequence
  SiRNA target sequence
gttcatagcactgctcataaa

SEQ ID NO: 184074 - DNA, 21 bp, Artificial sequence
  SiRNA target sequence
ttcatagcactgctcataaac

SEQ ID NO: 184075 - DNA, 21 bp, Artificial sequence
  SiRNA target sequence
tcatagcactgctcataaacc

SEQ ID NO: 184076 - DNA, 21 bp, Artificial sequence
  SiRNA target sequence
catagcactgctcataaaccg

SEQ ID NO: 184077 - DNA, 21 bp, Artificial sequence
  SiRNA target sequence
atagcactgctcataaaccga

SEQ ID NO: 184078 - DNA, 21 bp, Artificial sequence
  SiRNA target sequence
tagcactgctcataaaccgat

SEQ ID NO: 184079 - DNA, 21 bp, Artificial sequence
  SiRNA target sequence
agcactgctcataaaccgatg

SEQ ID NO: 184080 - DNA, 21 bp, Artificial sequence
  SiRNA target sequence
gcactgctcataaaccgatgg

SEQ ID NO: 184081 - DNA, 21 bp, Artificial sequence
  SiRNA target sequence
cactgctcataaaccgatgga

SEQ ID NO: 184082 - DNA, 21 bp, Artificial sequence
  SiRNA target sequence
actgctcataaaccgatggat

SEQ ID NO: 184083 - DNA, 21 bp, Artificial sequence
  SiRNA target sequence
ctgctcataaaccgatggatt

SEQ ID NO: 184084 - DNA, 21 bp, Artificial sequence
  SiRNA target sequence
tgctcataaaccgatggattt

SEQ ID NO: 184085 - DNA, 21 bp, Artificial sequence
  SiRNA target sequence
gctcataaaccgatggatttg

SEQ ID NO: 184086 - DNA, 21 bp, Artificial sequence
  SiRNA target sequence
ctcataaaccgatggatttgc

SEQ ID NO: 184087 - DNA, 21 bp, Artificial sequence
  SiRNA target sequence
tcataaaccgatggatttgca

SEQ ID NO: 184088 - DNA, 21 bp, Artificial sequence
  SiRNA target sequence
cataaaccgatggatttgcat

SEQ ID NO: 184089 - DNA, 21 bp, Artificial sequence
  SiRNA target sequence
ataaaccgatggatttgcata

SEQ ID NO: 184090 - DNA, 21 bp, Artificial sequence
  SiRNA target sequence
taaaccgatggatttgcatag

SEQ ID NO: 184091 - DNA, 21 bp, Artificial sequence
  SiRNA target sequence
aaaccgatggatttgcatagt

SEQ ID NO: 184092 - DNA, 21 bp, Artificial sequence
  SiRNA target sequence
aaccgatggatttgcatagtg

SEQ ID NO: 184093 - DNA, 21 bp, Artificial sequence
  SiRNA target sequence
accgatggatttgcatagtgg

SEQ ID NO: 184094 - DNA, 21 bp, Artificial sequence
  SiRNA target sequence
ccgatggatttgcatagtgga

SEQ ID NO: 184095 - DNA, 21 bp, Artificial sequence
  SiRNA target sequence
cgatggatttgcatagtggaa

SEQ ID NO: 184096 - DNA, 21 bp, Artificial sequence
  SiRNA target sequence
gatggatttgcatagtggaat

SEQ ID NO: 184097 - DNA, 21 bp, Artificial sequence
  SiRNA target sequence
atggatttgcatagtggaatg

SEQ ID NO: 184098 - DNA, 21 bp, Artificial sequence
  SiRNA target sequence
tggatttgcatagtggaatga

SEQ ID NO: 184099 - DNA, 21 bp, Artificial sequence
  SiRNA target sequence
ggatttgcatagtggaatgaa

SEQ ID NO: 184100 - DNA, 21 bp, Artificial sequence
  SiRNA target sequence
gatttgcatagtggaatgaat

SEQ ID NO: 184101 - DNA, 21 bp, Artificial sequence
  SiRNA target sequence
atttgcatagtggaatgaata

SEQ ID NO: 184102 - DNA, 21 bp, Artificial sequence
  SiRNA target sequence
tttgcatagtggaatgaatat

SEQ ID NO: 184103 - DNA, 21 bp, Artificial sequence
  SiRNA target sequence
ttgcatagtggaatgaatatt

SEQ ID NO: 184104 - DNA, 21 bp, Artificial sequence
  SiRNA target sequence
tgcatagtggaatgaatattt

SEQ ID NO: 184105 - DNA, 21 bp, Artificial sequence
  SiRNA target sequence
gcatagtggaatgaatatttt

SEQ ID NO: 184106 - DNA, 21 bp, Artificial sequence
  SiRNA target sequence
catagtggaatgaatattttt

SEQ ID NO: 184107 - DNA, 21 bp, Artificial sequence
  SiRNA target sequence
atagtggaatgaatatttttt

SEQ ID NO: 184108 - DNA, 21 bp, Artificial sequence
  SiRNA target sequence
tagtggaatgaatattttttt

SEQ ID NO: 184109 - DNA, 21 bp, Artificial sequence
  SiRNA target sequence
agtggaatgaatattttttta

SEQ ID NO: 184110 - DNA, 21 bp, Artificial sequence
  SiRNA target sequence
gtggaatgaatatttttttaa

SEQ ID NO: 184111 - DNA, 21 bp, Artificial sequence
  SiRNA target sequence
tggaatgaatatttttttaaa

SEQ ID NO: 184112 - DNA, 21 bp, Artificial sequence
  SiRNA target sequence
ggaatgaatatttttttaaag

SEQ ID NO: 184113 - DNA, 21 bp, Artificial sequence
  SiRNA target sequence
gaatgaatatttttttaaaga

SEQ ID NO: 184114 - DNA, 21 bp, Artificial sequence
  SiRNA target sequence
aatgaatatttttttaaagaa

SEQ ID NO: 184115 - DNA, 21 bp, Artificial sequence
  SiRNA target sequence
atgaatatttttttaaagaat

SEQ ID NO: 184116 - DNA, 21 bp, Artificial sequence
  SiRNA target sequence
tgaatatttttttaaagaatc

SEQ ID NO: 184117 - DNA, 21 bp, Artificial sequence
  SiRNA target sequence
gaatatttttttaaagaatct

SEQ ID NO: 184118 - DNA, 21 bp, Artificial sequence
  SiRNA target sequence
aatatttttttaaagaatctt

SEQ ID NO: 184119 - DNA, 21 bp, Artificial sequence
  SiRNA target sequence
atatttttttaaagaatcttg

SEQ ID NO: 184120 - DNA, 21 bp, Artificial sequence
  SiRNA target sequence
tatttttttaaagaatcttga

SEQ ID NO: 184121 - DNA, 21 bp, Artificial sequence
  SiRNA target sequence
atttttttaaagaatcttgat

SEQ ID NO: 184122 - DNA, 21 bp, Artificial sequence
  SiRNA target sequence
tttttttaaagaatcttgata

SEQ ID NO: 184123 - DNA, 21 bp, Artificial sequence
  SiRNA target sequence
ttttttaaagaatcttgatat

SEQ ID NO: 184124 - DNA, 21 bp, Artificial sequence
  SiRNA target sequence
tttttaaagaatcttgatatt

SEQ ID NO: 184125 - DNA, 21 bp, Artificial sequence
  SiRNA target sequence
ttttaaagaatcttgatatta

SEQ ID NO: 184126 - DNA, 21 bp, Artificial sequence
  SiRNA target sequence
tttaaagaatcttgatattac

SEQ ID NO: 184127 - DNA, 21 bp, Artificial sequence
  SiRNA target sequence
ttaaagaatcttgatattact

SEQ ID NO: 184128 - DNA, 21 bp, Artificial sequence
  SiRNA target sequence
taaagaatcttgatattactt

SEQ ID NO: 184129 - DNA, 21 bp, Artificial sequence
  SiRNA target sequence
aaagaatcttgatattacttt

SEQ ID NO: 184130 - DNA, 21 bp, Artificial sequence
  SiRNA target sequence
aagaatcttgatattactttt

SEQ ID NO: 184131 - DNA, 21 bp, Artificial sequence
  SiRNA target sequence
agaatcttgatattactttta

SEQ ID NO: 184132 - DNA, 21 bp, Artificial sequence
  SiRNA target sequence
gaatcttgatattacttttag

SEQ ID NO: 184133 - DNA, 21 bp, Artificial sequence
  SiRNA target sequence
aatcttgatattacttttaga

SEQ ID NO: 184134 - DNA, 21 bp, Artificial sequence
  SiRNA target sequence
atcttgatattacttttagaa

SEQ ID NO: 184135 - DNA, 21 bp, Artificial sequence
  SiRNA target sequence
tcttgatattacttttagaag

SEQ ID NO: 184136 - DNA, 21 bp, Artificial sequence
  SiRNA target sequence
cttgatattacttttagaaga

SEQ ID NO: 184137 - DNA, 21 bp, Artificial sequence
  SiRNA target sequence
ttgatattacttttagaagag

SEQ ID NO: 184138 - DNA, 21 bp, Artificial sequence
  SiRNA target sequence
tgatattacttttagaagaga

SEQ ID NO: 184139 - DNA, 21 bp, Artificial sequence
  SiRNA target sequence
gatattacttttagaagagac

SEQ ID NO: 184140 - DNA, 21 bp, Artificial sequence
  SiRNA target sequence
atattacttttagaagagact

SEQ ID NO: 184141 - DNA, 21 bp, Artificial sequence
  SiRNA target sequence
tattacttttagaagagactc

SEQ ID NO: 184142 - DNA, 21 bp, Artificial sequence
  SiRNA target sequence
attacttttagaagagactct

SEQ ID NO: 184143 - DNA, 21 bp, Artificial sequence
  SiRNA target sequence
ttacttttagaagagactctt

SEQ ID NO: 184144 - DNA, 21 bp, Artificial sequence
  SiRNA target sequence
tacttttagaagagactcttc

SEQ ID NO: 184145 - DNA, 21 bp, Artificial sequence
  SiRNA target sequence
acttttagaagagactcttcc

SEQ ID NO: 184146 - DNA, 21 bp, Artificial sequence
  SiRNA target sequence
cttttagaagagactcttcca

SEQ ID NO: 184147 - DNA, 21 bp, Artificial sequence
  SiRNA target sequence
ttttagaagagactcttccaa

SEQ ID NO: 184148 - DNA, 21 bp, Artificial sequence
  SiRNA target sequence
tttagaagagactcttccaat

SEQ ID NO: 184149 - DNA, 21 bp, Artificial sequence
  SiRNA target sequence
ttagaagagactcttccaatt

SEQ ID NO: 184150 - DNA, 21 bp, Artificial sequence
  SiRNA target sequence
tagaagagactcttccaattt

SEQ ID NO: 184151 - DNA, 21 bp, Artificial sequence
  SiRNA target sequence
agaagagactcttccaatttt

SEQ ID NO: 184152 - DNA, 21 bp, Artificial sequence
  SiRNA target sequence
gaagagactcttccaatttta

SEQ ID NO: 184153 - DNA, 21 bp, Artificial sequence
  SiRNA target sequence
aagagactcttccaattttag

SEQ ID NO: 184154 - DNA, 21 bp, Artificial sequence
  SiRNA target sequence
agagactcttccaattttaga

SEQ ID NO: 184155 - DNA, 21 bp, Artificial sequence
  SiRNA target sequence
gagactcttccaattttagac

SEQ ID NO: 184156 - DNA, 21 bp, Artificial sequence
  SiRNA target sequence
agactcttccaattttagacc

SEQ ID NO: 184157 - DNA, 21 bp, Artificial sequence
  SiRNA target sequence
gactcttccaattttagacca

SEQ ID NO: 184158 - DNA, 21 bp, Artificial sequence
  SiRNA target sequence
actcttccaattttagaccaa

SEQ ID NO: 184159 - DNA, 21 bp, Artificial sequence
  SiRNA target sequence
ctcttccaattttagaccaag

SEQ ID NO: 184160 - DNA, 21 bp, Artificial sequence
  SiRNA target sequence
tcttccaattttagaccaaga

SEQ ID NO: 184161 - DNA, 21 bp, Artificial sequence
  SiRNA target sequence
cttccaattttagaccaagag

SEQ ID NO: 184162 - DNA, 21 bp, Artificial sequence
  SiRNA target sequence
ttccaattttagaccaagagt

SEQ ID NO: 184163 - DNA, 21 bp, Artificial sequence
  SiRNA target sequence
tccaattttagaccaagagtt

SEQ ID NO: 184164 - DNA, 21 bp, Artificial sequence
  SiRNA target sequence
ccaattttagaccaagagtta

SEQ ID NO: 184165 - DNA, 21 bp, Artificial sequence
  SiRNA target sequence
caattttagaccaagagttaa

SEQ ID NO: 184166 - DNA, 21 bp, Artificial sequence
  SiRNA target sequence
aattttagaccaagagttaat

SEQ ID NO: 184167 - DNA, 21 bp, Artificial sequence
  SiRNA target sequence
attttagaccaagagttaata

SEQ ID NO: 184168 - DNA, 21 bp, Artificial sequence
  SiRNA target sequence
ttttagaccaagagttaataa

SEQ ID NO: 184169 - DNA, 21 bp, Artificial sequence
  SiRNA target sequence
tttagaccaagagttaataag

SEQ ID NO: 184170 - DNA, 21 bp, Artificial sequence
  SiRNA target sequence
ttagaccaagagttaataagc

SEQ ID NO: 184171 - DNA, 21 bp, Artificial sequence
  SiRNA target sequence
tagaccaagagttaataagcc

SEQ ID NO: 184172 - DNA, 21 bp, Artificial sequence
  SiRNA target sequence
agaccaagagttaataagccg

SEQ ID NO: 184173 - DNA, 21 bp, Artificial sequence
  SiRNA target sequence
gaccaagagttaataagccga

SEQ ID NO: 184174 - DNA, 21 bp, Artificial sequence
  SiRNA target sequence
accaagagttaataagccgaa

SEQ ID NO: 184175 - DNA, 21 bp, Artificial sequence
  SiRNA target sequence
ccaagagttaataagccgaat

SEQ ID NO: 184176 - DNA, 21 bp, Artificial sequence
  SiRNA target sequence
caagagttaataagccgaatt

SEQ ID NO: 184177 - DNA, 21 bp, Artificial sequence
  SiRNA target sequence
aagagttaataagccgaattc

SEQ ID NO: 184178 - DNA, 21 bp, Artificial sequence
  SiRNA target sequence
agagttaataagccgaattcc

SEQ ID NO: 184179 - DNA, 21 bp, Artificial sequence
  SiRNA target sequence
gagttaataagccgaattccg

SEQ ID NO: 184180 - DNA, 21 bp, Artificial sequence
  SiRNA target sequence
agttaataagccgaattccgc

SEQ ID NO: 184181 - DNA, 21 bp, Artificial sequence
  SiRNA target sequence
gttaataagccgaattccgca

SEQ ID NO: 184182 - DNA, 21 bp, Artificial sequence
  SiRNA target sequence
ttaataagccgaattccgcaa

SEQ ID NO: 184183 - DNA, 21 bp, Artificial sequence
  SiRNA target sequence
taataagccgaattccgcaaa

SEQ ID NO: 184184 - DNA, 21 bp, Artificial sequence
  SiRNA target sequence
aataagccgaattccgcaaaa

SEQ ID NO: 184185 - DNA, 21 bp, Artificial sequence
  SiRNA target sequence
ataagccgaattccgcaaaag

SEQ ID NO: 184186 - DNA, 21 bp, Artificial sequence
  SiRNA target sequence
taagccgaattccgcaaaaga

SEQ ID NO: 184187 - DNA, 21 bp, Artificial sequence
  SiRNA target sequence
aagccgaattccgcaaaagac

SEQ ID NO: 184188 - DNA, 21 bp, Artificial sequence
  SiRNA target sequence
agccgaattccgcaaaagaca

SEQ ID NO: 184189 - DNA, 21 bp, Artificial sequence
  SiRNA target sequence
gccgaattccgcaaaagacag

SEQ ID NO: 184190 - DNA, 21 bp, Artificial sequence
  SiRNA target sequence
ccgaattccgcaaaagacaga

SEQ ID NO: 184191 - DNA, 21 bp, Artificial sequence
  SiRNA target sequence
cgaattccgcaaaagacagaa

SEQ ID NO: 184192 - DNA, 21 bp, Artificial sequence
  SiRNA target sequence
gaattccgcaaaagacagaac

SEQ ID NO: 184193 - DNA, 21 bp, Artificial sequence
  SiRNA target sequence
aattccgcaaaagacagaact

SEQ ID NO: 184194 - DNA, 21 bp, Artificial sequence
  SiRNA target sequence
attccgcaaaagacagaactc

SEQ ID NO: 184195 - DNA, 21 bp, Artificial sequence
  SiRNA target sequence
ttccgcaaaagacagaactca

SEQ ID NO: 184196 - DNA, 21 bp, Artificial sequence
  SiRNA target sequence
tccgcaaaagacagaactcag

SEQ ID NO: 184197 - DNA, 21 bp, Artificial sequence
  SiRNA target sequence
ccgcaaaagacagaactcaga

SEQ ID NO: 184198 - DNA, 21 bp, Artificial sequence
  SiRNA target sequence
cgcaaaagacagaactcagaa

SEQ ID NO: 184199 - DNA, 21 bp, Artificial sequence
  SiRNA target sequence
gcaaaagacagaactcagaaa

SEQ ID NO: 184200 - DNA, 21 bp, Artificial sequence
  SiRNA target sequence
caaaagacagaactcagaaag

SEQ ID NO: 184201 - DNA, 21 bp, Artificial sequence
  SiRNA target sequence
aaaagacagaactcagaaaga

SEQ ID NO: 184202 - DNA, 21 bp, Artificial sequence
  SiRNA target sequence
aaagacagaactcagaaagaa

SEQ ID NO: 184203 - DNA, 21 bp, Artificial sequence
  SiRNA target sequence
aagacagaactcagaaagaag

SEQ ID NO: 184204 - DNA, 21 bp, Artificial sequence
  SiRNA target sequence
agacagaactcagaaagaaga

SEQ ID NO: 184205 - DNA, 21 bp, Artificial sequence
  SiRNA target sequence
gacagaactcagaaagaagag

SEQ ID NO: 184206 - DNA, 21 bp, Artificial sequence
  SiRNA target sequence
acagaactcagaaagaagaga

SEQ ID NO: 184207 - DNA, 21 bp, Artificial sequence
  SiRNA target sequence
cagaactcagaaagaagagaa

SEQ ID NO: 184208 - DNA, 21 bp, Artificial sequence
  SiRNA target sequence
agaactcagaaagaagagaat

SEQ ID NO: 184209 - DNA, 21 bp, Artificial sequence
  SiRNA target sequence
gaactcagaaagaagagaata

SEQ ID NO: 184210 - DNA, 21 bp, Artificial sequence
  SiRNA target sequence
aactcagaaagaagagaataa

SEQ ID NO: 184211 - DNA, 21 bp, Artificial sequence
  SiRNA target sequence
actcagaaagaagagaataaa

SEQ ID NO: 184212 - DNA, 21 bp, Artificial sequence
  SiRNA target sequence
ctcagaaagaagagaataaat

SEQ ID NO: 184213 - DNA, 21 bp, Artificial sequence
  SiRNA target sequence
tcagaaagaagagaataaata

SEQ ID NO: 184214 - DNA, 21 bp, Artificial sequence
  SiRNA target sequence
cagaaagaagagaataaatat

SEQ ID NO: 184215 - DNA, 21 bp, Artificial sequence
  SiRNA target sequence
agaaagaagagaataaatatt

SEQ ID NO: 184216 - DNA, 21 bp, Artificial sequence
  SiRNA target sequence
gaaagaagagaataaatattt

SEQ ID NO: 184217 - DNA, 21 bp, Artificial sequence
  SiRNA target sequence
aaagaagagaataaatatttt

SEQ ID NO: 184218 - DNA, 21 bp, Artificial sequence
  SiRNA target sequence
aagaagagaataaatattttt

SEQ ID NO: 184219 - DNA, 21 bp, Artificial sequence
  SiRNA target sequence
agaagagaataaatatttttt

SEQ ID NO: 184220 - DNA, 21 bp, Artificial sequence
  SiRNA target sequence
gaagagaataaatattttttt

SEQ ID NO: 184221 - DNA, 21 bp, Artificial sequence
  SiRNA target sequence
aagagaataaatatttttttt

SEQ ID NO: 184222 - DNA, 21 bp, Artificial sequence
  SiRNA target sequence
agagaataaatattttttttg

SEQ ID NO: 184223 - DNA, 21 bp, Artificial sequence
  SiRNA target sequence
gagaataaatattttttttga

SEQ ID NO: 184224 - DNA, 22 bp, Artificial sequence
  SiRNA target sequence
atggccaagaatgaatctaata

SEQ ID NO: 184225 - DNA, 22 bp, Artificial sequence
  SiRNA target sequence
tggccaagaatgaatctaataa

SEQ ID NO: 184226 - DNA, 22 bp, Artificial sequence
  SiRNA target sequence
ggccaagaatgaatctaataaa

SEQ ID NO: 184227 - DNA, 22 bp, Artificial sequence
  SiRNA target sequence
gccaagaatgaatctaataaaa

SEQ ID NO: 184228 - DNA, 22 bp, Artificial sequence
  SiRNA target sequence
ccaagaatgaatctaataaaat

SEQ ID NO: 184229 - DNA, 22 bp, Artificial sequence
  SiRNA target sequence
caagaatgaatctaataaaata

SEQ ID NO: 184230 - DNA, 22 bp, Artificial sequence
  SiRNA target sequence
aagaatgaatctaataaaataa

SEQ ID NO: 184231 - DNA, 22 bp, Artificial sequence
  SiRNA target sequence
agaatgaatctaataaaataac

SEQ ID NO: 184232 - DNA, 22 bp, Artificial sequence
  SiRNA target sequence
gaatgaatctaataaaataacg

SEQ ID NO: 184233 - DNA, 22 bp, Artificial sequence
  SiRNA target sequence
aatgaatctaataaaataacga

SEQ ID NO: 184234 - DNA, 22 bp, Artificial sequence
  SiRNA target sequence
atgaatctaataaaataacgag

SEQ ID NO: 184235 - DNA, 22 bp, Artificial sequence
  SiRNA target sequence
tgaatctaataaaataacgaga

SEQ ID NO: 184236 - DNA, 22 bp, Artificial sequence
  SiRNA target sequence
gaatctaataaaataacgagac

SEQ ID NO: 184237 - DNA, 22 bp, Artificial sequence
  SiRNA target sequence
aatctaataaaataacgagact

SEQ ID NO: 184238 - DNA, 22 bp, Artificial sequence
  SiRNA target sequence
atctaataaaataacgagactg

SEQ ID NO: 184239 - DNA, 22 bp, Artificial sequence
  SiRNA target sequence
tctaataaaataacgagactgg

SEQ ID NO: 184240 - DNA, 22 bp, Artificial sequence
  SiRNA target sequence
ctaataaaataacgagactggc

SEQ ID NO: 184241 - DNA, 22 bp, Artificial sequence
  SiRNA target sequence
taataaaataacgagactggca

SEQ ID NO: 184242 - DNA, 22 bp, Artificial sequence
  SiRNA target sequence
aataaaataacgagactggcaa

SEQ ID NO: 184243 - DNA, 22 bp, Artificial sequence
  SiRNA target sequence
ataaaataacgagactggcaat

SEQ ID NO: 184244 - DNA, 22 bp, Artificial sequence
  SiRNA target sequence
taaaataacgagactggcaatt

SEQ ID NO: 184245 - DNA, 22 bp, Artificial sequence
  SiRNA target sequence
aaaataacgagactggcaattg

SEQ ID NO: 184246 - DNA, 22 bp, Artificial sequence
  SiRNA target sequence
aaataacgagactggcaattgt

SEQ ID NO: 184247 - DNA, 22 bp, Artificial sequence
  SiRNA target sequence
aataacgagactggcaattgtt

SEQ ID NO: 184248 - DNA, 22 bp, Artificial sequence
  SiRNA target sequence
ataacgagactggcaattgtta

SEQ ID NO: 184249 - DNA, 22 bp, Artificial sequence
  SiRNA target sequence
taacgagactggcaattgttaa

SEQ ID NO: 184250 - DNA, 22 bp, Artificial sequence
  SiRNA target sequence
aacgagactggcaattgttaat

SEQ ID NO: 184251 - DNA, 22 bp, Artificial sequence
  SiRNA target sequence
acgagactggcaattgttaatt

SEQ ID NO: 184252 - DNA, 22 bp, Artificial sequence
  SiRNA target sequence
cgagactggcaattgttaatta

SEQ ID NO: 184253 - DNA, 22 bp, Artificial sequence
  SiRNA target sequence
gagactggcaattgttaattat

SEQ ID NO: 184254 - DNA, 22 bp, Artificial sequence
  SiRNA target sequence
agactggcaattgttaattatg

SEQ ID NO: 184255 - DNA, 22 bp, Artificial sequence
  SiRNA target sequence
gactggcaattgttaattatga

SEQ ID NO: 184256 - DNA, 22 bp, Artificial sequence
  SiRNA target sequence
actggcaattgttaattatgaa

SEQ ID NO: 184257 - DNA, 22 bp, Artificial sequence
  SiRNA target sequence
ctggcaattgttaattatgaac

SEQ ID NO: 184258 - DNA, 22 bp, Artificial sequence
  SiRNA target sequence
tggcaattgttaattatgaact

SEQ ID NO: 184259 - DNA, 22 bp, Artificial sequence
  SiRNA target sequence
ggcaattgttaattatgaacta

SEQ ID NO: 184260 - DNA, 22 bp, Artificial sequence
  SiRNA target sequence
gcaattgttaattatgaactat

SEQ ID NO: 184261 - DNA, 22 bp, Artificial sequence
  SiRNA target sequence
caattgttaattatgaactatg

SEQ ID NO: 184262 - DNA, 22 bp, Artificial sequence
  SiRNA target sequence
aattgttaattatgaactatgt

SEQ ID NO: 184263 - DNA, 22 bp, Artificial sequence
  SiRNA target sequence
attgttaattatgaactatgta

SEQ ID NO: 184264 - DNA, 22 bp, Artificial sequence
  SiRNA target sequence
ttgttaattatgaactatgtaa

SEQ ID NO: 184265 - DNA, 22 bp, Artificial sequence
  SiRNA target sequence
tgttaattatgaactatgtaaa

SEQ ID NO: 184266 - DNA, 22 bp, Artificial sequence
  SiRNA target sequence
gttaattatgaactatgtaaac

SEQ ID NO: 184267 - DNA, 22 bp, Artificial sequence
  SiRNA target sequence
ttaattatgaactatgtaaacc

SEQ ID NO: 184268 - DNA, 22 bp, Artificial sequence
  SiRNA target sequence
taattatgaactatgtaaaccg

SEQ ID NO: 184269 - DNA, 22 bp, Artificial sequence
  SiRNA target sequence
aattatgaactatgtaaaccga

SEQ ID NO: 184270 - DNA, 22 bp, Artificial sequence
  SiRNA target sequence
attatgaactatgtaaaccgaa

SEQ ID NO: 184271 - DNA, 22 bp, Artificial sequence
  SiRNA target sequence
ttatgaactatgtaaaccgaag

SEQ ID NO: 184272 - DNA, 22 bp, Artificial sequence
  SiRNA target sequence
tatgaactatgtaaaccgaagg

SEQ ID NO: 184273 - DNA, 22 bp, Artificial sequence
  SiRNA target sequence
atgaactatgtaaaccgaagga

SEQ ID NO: 184274 - DNA, 22 bp, Artificial sequence
  SiRNA target sequence
tgaactatgtaaaccgaaggaa

SEQ ID NO: 184275 - DNA, 22 bp, Artificial sequence
  SiRNA target sequence
gaactatgtaaaccgaaggaat

SEQ ID NO: 184276 - DNA, 22 bp, Artificial sequence
  SiRNA target sequence
aactatgtaaaccgaaggaatg

SEQ ID NO: 184277 - DNA, 22 bp, Artificial sequence
  SiRNA target sequence
actatgtaaaccgaaggaatgt

SEQ ID NO: 184278 - DNA, 22 bp, Artificial sequence
  SiRNA target sequence
ctatgtaaaccgaaggaatgta

SEQ ID NO: 184279 - DNA, 22 bp, Artificial sequence
  SiRNA target sequence
tatgtaaaccgaaggaatgtat

SEQ ID NO: 184280 - DNA, 22 bp, Artificial sequence
  SiRNA target sequence
atgtaaaccgaaggaatgtatg

SEQ ID NO: 184281 - DNA, 22 bp, Artificial sequence
  SiRNA target sequence
tgtaaaccgaaggaatgtatgt

SEQ ID NO: 184282 - DNA, 22 bp, Artificial sequence
  SiRNA target sequence
gtaaaccgaaggaatgtatgtc

SEQ ID NO: 184283 - DNA, 22 bp, Artificial sequence
  SiRNA target sequence
taaaccgaaggaatgtatgtca

SEQ ID NO: 184284 - DNA, 22 bp, Artificial sequence
  SiRNA target sequence
aaaccgaaggaatgtatgtcag

SEQ ID NO: 184285 - DNA, 22 bp, Artificial sequence
  SiRNA target sequence
aaccgaaggaatgtatgtcaga

SEQ ID NO: 184286 - DNA, 22 bp, Artificial sequence
  SiRNA target sequence
accgaaggaatgtatgtcagaa

SEQ ID NO: 184287 - DNA, 22 bp, Artificial sequence
  SiRNA target sequence
ccgaaggaatgtatgtcagaat

SEQ ID NO: 184288 - DNA, 22 bp, Artificial sequence
  SiRNA target sequence
cgaaggaatgtatgtcagaatg

SEQ ID NO: 184289 - DNA, 22 bp, Artificial sequence
  SiRNA target sequence
gaaggaatgtatgtcagaatgt

SEQ ID NO: 184290 - DNA, 22 bp, Artificial sequence
  SiRNA target sequence
aaggaatgtatgtcagaatgta

SEQ ID NO: 184291 - DNA, 22 bp, Artificial sequence
  SiRNA target sequence
aggaatgtatgtcagaatgtaa

SEQ ID NO: 184292 - DNA, 22 bp, Artificial sequence
  SiRNA target sequence
ggaatgtatgtcagaatgtaaa

SEQ ID NO: 184293 - DNA, 22 bp, Artificial sequence
  SiRNA target sequence
gaatgtatgtcagaatgtaaaa

SEQ ID NO: 184294 - DNA, 22 bp, Artificial sequence
  SiRNA target sequence
aatgtatgtcagaatgtaaaaa

SEQ ID NO: 184295 - DNA, 22 bp, Artificial sequence
  SiRNA target sequence
atgtatgtcagaatgtaaaaag

SEQ ID NO: 184296 - DNA, 22 bp, Artificial sequence
  SiRNA target sequence
tgtatgtcagaatgtaaaaagg

SEQ ID NO: 184297 - DNA, 22 bp, Artificial sequence
  SiRNA target sequence
gtatgtcagaatgtaaaaaggc

SEQ ID NO: 184298 - DNA, 22 bp, Artificial sequence
  SiRNA target sequence
tatgtcagaatgtaaaaaggcg

SEQ ID NO: 184299 - DNA, 22 bp, Artificial sequence
  SiRNA target sequence
atgtcagaatgtaaaaaggcgt

SEQ ID NO: 184300 - DNA, 22 bp, Artificial sequence
  SiRNA target sequence
tgtcagaatgtaaaaaggcgtg

SEQ ID NO: 184301 - DNA, 22 bp, Artificial sequence
  SiRNA target sequence
gtcagaatgtaaaaaggcgtgt

SEQ ID NO: 184302 - DNA, 22 bp, Artificial sequence
  SiRNA target sequence
tcagaatgtaaaaaggcgtgtc

SEQ ID NO: 184303 - DNA, 22 bp, Artificial sequence
  SiRNA target sequence
cagaatgtaaaaaggcgtgtcc

SEQ ID NO: 184304 - DNA, 22 bp, Artificial sequence
  SiRNA target sequence
agaatgtaaaaaggcgtgtcct

SEQ ID NO: 184305 - DNA, 22 bp, Artificial sequence
  SiRNA target sequence
gaatgtaaaaaggcgtgtcctg

SEQ ID NO: 184306 - DNA, 22 bp, Artificial sequence
  SiRNA target sequence
aatgtaaaaaggcgtgtcctgt

SEQ ID NO: 184307 - DNA, 22 bp, Artificial sequence
  SiRNA target sequence
atgtaaaaaggcgtgtcctgtt

SEQ ID NO: 184308 - DNA, 22 bp, Artificial sequence
  SiRNA target sequence
tgtaaaaaggcgtgtcctgtta

SEQ ID NO: 184309 - DNA, 22 bp, Artificial sequence
  SiRNA target sequence
gtaaaaaggcgtgtcctgttaa

SEQ ID NO: 184310 - DNA, 22 bp, Artificial sequence
  SiRNA target sequence
taaaaaggcgtgtcctgttaat

SEQ ID NO: 184311 - DNA, 22 bp, Artificial sequence
  SiRNA target sequence
aaaaaggcgtgtcctgttaata

SEQ ID NO: 184312 - DNA, 22 bp, Artificial sequence
  SiRNA target sequence
aaaaggcgtgtcctgttaataa

SEQ ID NO: 184313 - DNA, 22 bp, Artificial sequence
  SiRNA target sequence
aaaggcgtgtcctgttaataaa

SEQ ID NO: 184314 - DNA, 22 bp, Artificial sequence
  SiRNA target sequence
aaggcgtgtcctgttaataaaa

SEQ ID NO: 184315 - DNA, 22 bp, Artificial sequence
  SiRNA target sequence
aggcgtgtcctgttaataaaac

SEQ ID NO: 184316 - DNA, 22 bp, Artificial sequence
  SiRNA target sequence
ggcgtgtcctgttaataaaaca

SEQ ID NO: 184317 - DNA, 22 bp, Artificial sequence
  SiRNA target sequence
gcgtgtcctgttaataaaacag

SEQ ID NO: 184318 - DNA, 22 bp, Artificial sequence
  SiRNA target sequence
cgtgtcctgttaataaaacagg

SEQ ID NO: 184319 - DNA, 22 bp, Artificial sequence
  SiRNA target sequence
gtgtcctgttaataaaacagga

SEQ ID NO: 184320 - DNA, 22 bp, Artificial sequence
  SiRNA target sequence
tgtcctgttaataaaacaggaa

SEQ ID NO: 184321 - DNA, 22 bp, Artificial sequence
  SiRNA target sequence
gtcctgttaataaaacaggaaa

SEQ ID NO: 184322 - DNA, 22 bp, Artificial sequence
  SiRNA target sequence
tcctgttaataaaacaggaaag

SEQ ID NO: 184323 - DNA, 22 bp, Artificial sequence
  SiRNA target sequence
cctgttaataaaacaggaaagg

SEQ ID NO: 184324 - DNA, 22 bp, Artificial sequence
  SiRNA target sequence
ctgttaataaaacaggaaagga

SEQ ID NO: 184325 - DNA, 22 bp, Artificial sequence
  SiRNA target sequence
tgttaataaaacaggaaaggag

SEQ ID NO: 184326 - DNA, 22 bp, Artificial sequence
  SiRNA target sequence
gttaataaaacaggaaaggagt

SEQ ID NO: 184327 - DNA, 22 bp, Artificial sequence
  SiRNA target sequence
ttaataaaacaggaaaggagtg

SEQ ID NO: 184328 - DNA, 22 bp, Artificial sequence
  SiRNA target sequence
taataaaacaggaaaggagtgt

SEQ ID NO: 184329 - DNA, 22 bp, Artificial sequence
  SiRNA target sequence
aataaaacaggaaaggagtgta

SEQ ID NO: 184330 - DNA, 22 bp, Artificial sequence
  SiRNA target sequence
ataaaacaggaaaggagtgtat

SEQ ID NO: 184331 - DNA, 22 bp, Artificial sequence
  SiRNA target sequence
taaaacaggaaaggagtgtatt

SEQ ID NO: 184332 - DNA, 22 bp, Artificial sequence
  SiRNA target sequence
aaaacaggaaaggagtgtatta

SEQ ID NO: 184333 - DNA, 22 bp, Artificial sequence
  SiRNA target sequence
aaacaggaaaggagtgtattac

SEQ ID NO: 184334 - DNA, 22 bp, Artificial sequence
  SiRNA target sequence
aacaggaaaggagtgtattaca

SEQ ID NO: 184335 - DNA, 22 bp, Artificial sequence
  SiRNA target sequence
acaggaaaggagtgtattacaa

SEQ ID NO: 184336 - DNA, 22 bp, Artificial sequence
  SiRNA target sequence
caggaaaggagtgtattacaat

SEQ ID NO: 184337 - DNA, 22 bp, Artificial sequence
  SiRNA target sequence
aggaaaggagtgtattacaatt

SEQ ID NO: 184338 - DNA, 22 bp, Artificial sequence
  SiRNA target sequence
ggaaaggagtgtattacaattg

SEQ ID NO: 184339 - DNA, 22 bp, Artificial sequence
  SiRNA target sequence
gaaaggagtgtattacaattga

SEQ ID NO: 184340 - DNA, 22 bp, Artificial sequence
  SiRNA target sequence
aaaggagtgtattacaattgat

SEQ ID NO: 184341 - DNA, 22 bp, Artificial sequence
  SiRNA target sequence
aaggagtgtattacaattgata

SEQ ID NO: 184342 - DNA, 22 bp, Artificial sequence
  SiRNA target sequence
aggagtgtattacaattgatac

SEQ ID NO: 184343 - DNA, 22 bp, Artificial sequence
  SiRNA target sequence
ggagtgtattacaattgatact

SEQ ID NO: 184344 - DNA, 22 bp, Artificial sequence
  SiRNA target sequence
gagtgtattacaattgatacta

SEQ ID NO: 184345 - DNA, 22 bp, Artificial sequence
  SiRNA target sequence
agtgtattacaattgatactaa

SEQ ID NO: 184346 - DNA, 22 bp, Artificial sequence
  SiRNA target sequence
gtgtattacaattgatactaaa

SEQ ID NO: 184347 - DNA, 22 bp, Artificial sequence
  SiRNA target sequence
tgtattacaattgatactaaat

SEQ ID NO: 184348 - DNA, 22 bp, Artificial sequence
  SiRNA target sequence
gtattacaattgatactaaatc

SEQ ID NO: 184349 - DNA, 22 bp, Artificial sequence
  SiRNA target sequence
tattacaattgatactaaatca

SEQ ID NO: 184350 - DNA, 22 bp, Artificial sequence
  SiRNA target sequence
attacaattgatactaaatcac

SEQ ID NO: 184351 - DNA, 22 bp, Artificial sequence
  SiRNA target sequence
ttacaattgatactaaatcaca

SEQ ID NO: 184352 - DNA, 22 bp, Artificial sequence
  SiRNA target sequence
tacaattgatactaaatcacat

SEQ ID NO: 184353 - DNA, 22 bp, Artificial sequence
  SiRNA target sequence
acaattgatactaaatcacata

SEQ ID NO: 184354 - DNA, 22 bp, Artificial sequence
  SiRNA target sequence
caattgatactaaatcacatat

SEQ ID NO: 184355 - DNA, 22 bp, Artificial sequence
  SiRNA target sequence
aattgatactaaatcacatatc

SEQ ID NO: 184356 - DNA, 22 bp, Artificial sequence
  SiRNA target sequence
attgatactaaatcacatatct

SEQ ID NO: 184357 - DNA, 22 bp, Artificial sequence
  SiRNA target sequence
ttgatactaaatcacatatctc

SEQ ID NO: 184358 - DNA, 22 bp, Artificial sequence
  SiRNA target sequence
tgatactaaatcacatatctca

SEQ ID NO: 184359 - DNA, 22 bp, Artificial sequence
  SiRNA target sequence
gatactaaatcacatatctcag

SEQ ID NO: 184360 - DNA, 22 bp, Artificial sequence
  SiRNA target sequence
atactaaatcacatatctcaga

SEQ ID NO: 184361 - DNA, 22 bp, Artificial sequence
  SiRNA target sequence
tactaaatcacatatctcagaa

SEQ ID NO: 184362 - DNA, 22 bp, Artificial sequence
  SiRNA target sequence
actaaatcacatatctcagaaa

SEQ ID NO: 184363 - DNA, 22 bp, Artificial sequence
  SiRNA target sequence
ctaaatcacatatctcagaaat

SEQ ID NO: 184364 - DNA, 22 bp, Artificial sequence
  SiRNA target sequence
taaatcacatatctcagaaatt

SEQ ID NO: 184365 - DNA, 22 bp, Artificial sequence
  SiRNA target sequence
aaatcacatatctcagaaattc

SEQ ID NO: 184366 - DNA, 22 bp, Artificial sequence
  SiRNA target sequence
aatcacatatctcagaaattct

SEQ ID NO: 184367 - DNA, 22 bp, Artificial sequence
  SiRNA target sequence
atcacatatctcagaaattctg

SEQ ID NO: 184368 - DNA, 22 bp, Artificial sequence
  SiRNA target sequence
tcacatatctcagaaattctgt

SEQ ID NO: 184369 - DNA, 22 bp, Artificial sequence
  SiRNA target sequence
cacatatctcagaaattctgtg

SEQ ID NO: 184370 - DNA, 22 bp, Artificial sequence
  SiRNA target sequence
acatatctcagaaattctgtgt

SEQ ID NO: 184371 - DNA, 22 bp, Artificial sequence
  SiRNA target sequence
catatctcagaaattctgtgta

SEQ ID NO: 184372 - DNA, 22 bp, Artificial sequence
  SiRNA target sequence
atatctcagaaattctgtgtat

SEQ ID NO: 184373 - DNA, 22 bp, Artificial sequence
  SiRNA target sequence
tatctcagaaattctgtgtata

SEQ ID NO: 184374 - DNA, 22 bp, Artificial sequence
  SiRNA target sequence
atctcagaaattctgtgtatag

SEQ ID NO: 184375 - DNA, 22 bp, Artificial sequence
  SiRNA target sequence
tctcagaaattctgtgtatagg

SEQ ID NO: 184376 - DNA, 22 bp, Artificial sequence
  SiRNA target sequence
ctcagaaattctgtgtatagga

SEQ ID NO: 184377 - DNA, 22 bp, Artificial sequence
  SiRNA target sequence
tcagaaattctgtgtataggat

SEQ ID NO: 184378 - DNA, 22 bp, Artificial sequence
  SiRNA target sequence
cagaaattctgtgtataggatg

SEQ ID NO: 184379 - DNA, 22 bp, Artificial sequence
  SiRNA target sequence
agaaattctgtgtataggatgt

SEQ ID NO: 184380 - DNA, 22 bp, Artificial sequence
  SiRNA target sequence
gaaattctgtgtataggatgtt

SEQ ID NO: 184381 - DNA, 22 bp, Artificial sequence
  SiRNA target sequence
aaattctgtgtataggatgttc

SEQ ID NO: 184382 - DNA, 22 bp, Artificial sequence
  SiRNA target sequence
aattctgtgtataggatgttct

SEQ ID NO: 184383 - DNA, 22 bp, Artificial sequence
  SiRNA target sequence
attctgtgtataggatgttctg

SEQ ID NO: 184384 - DNA, 22 bp, Artificial sequence
  SiRNA target sequence
ttctgtgtataggatgttctgc

SEQ ID NO: 184385 - DNA, 22 bp, Artificial sequence
  SiRNA target sequence
tctgtgtataggatgttctgcg

SEQ ID NO: 184386 - DNA, 22 bp, Artificial sequence
  SiRNA target sequence
ctgtgtataggatgttctgcgt

SEQ ID NO: 184387 - DNA, 22 bp, Artificial sequence
  SiRNA target sequence
tgtgtataggatgttctgcgtg

SEQ ID NO: 184388 - DNA, 22 bp, Artificial sequence
  SiRNA target sequence
gtgtataggatgttctgcgtgt

SEQ ID NO: 184389 - DNA, 22 bp, Artificial sequence
  SiRNA target sequence
tgtataggatgttctgcgtgtc

SEQ ID NO: 184390 - DNA, 22 bp, Artificial sequence
  SiRNA target sequence
gtataggatgttctgcgtgtca

SEQ ID NO: 184391 - DNA, 22 bp, Artificial sequence
  SiRNA target sequence
tataggatgttctgcgtgtcaa

SEQ ID NO: 184392 - DNA, 22 bp, Artificial sequence
  SiRNA target sequence
ataggatgttctgcgtgtcaaa

SEQ ID NO: 184393 - DNA, 22 bp, Artificial sequence
  SiRNA target sequence
taggatgttctgcgtgtcaaaa

SEQ ID NO: 184394 - DNA, 22 bp, Artificial sequence
  SiRNA target sequence
aggatgttctgcgtgtcaaaag

SEQ ID NO: 184395 - DNA, 22 bp, Artificial sequence
  SiRNA target sequence
ggatgttctgcgtgtcaaaaga

SEQ ID NO: 184396 - DNA, 22 bp, Artificial sequence
  SiRNA target sequence
gatgttctgcgtgtcaaaagaa

SEQ ID NO: 184397 - DNA, 22 bp, Artificial sequence
  SiRNA target sequence
atgttctgcgtgtcaaaagaaa

SEQ ID NO: 184398 - DNA, 22 bp, Artificial sequence
  SiRNA target sequence
tgttctgcgtgtcaaaagaaat

SEQ ID NO: 184399 - DNA, 22 bp, Artificial sequence
  SiRNA target sequence
gttctgcgtgtcaaaagaaatg

SEQ ID NO: 184400 - DNA, 22 bp, Artificial sequence
  SiRNA target sequence
ttctgcgtgtcaaaagaaatgt

SEQ ID NO: 184401 - DNA, 22 bp, Artificial sequence
  SiRNA target sequence
tctgcgtgtcaaaagaaatgtc

SEQ ID NO: 184402 - DNA, 22 bp, Artificial sequence
  SiRNA target sequence
ctgcgtgtcaaaagaaatgtcc

SEQ ID NO: 184403 - DNA, 22 bp, Artificial sequence
  SiRNA target sequence
tgcgtgtcaaaagaaatgtcct

SEQ ID NO: 184404 - DNA, 22 bp, Artificial sequence
  SiRNA target sequence
gcgtgtcaaaagaaatgtcctt

SEQ ID NO: 184405 - DNA, 22 bp, Artificial sequence
  SiRNA target sequence
cgtgtcaaaagaaatgtccttt

SEQ ID NO: 184406 - DNA, 22 bp, Artificial sequence
  SiRNA target sequence
gtgtcaaaagaaatgtcctttt

SEQ ID NO: 184407 - DNA, 22 bp, Artificial sequence
  SiRNA target sequence
tgtcaaaagaaatgtcctttta

SEQ ID NO: 184408 - DNA, 22 bp, Artificial sequence
  SiRNA target sequence
gtcaaaagaaatgtccttttaa

SEQ ID NO: 184409 - DNA, 22 bp, Artificial sequence
  SiRNA target sequence
tcaaaagaaatgtccttttaag

SEQ ID NO: 184410 - DNA, 22 bp, Artificial sequence
  SiRNA target sequence
caaaagaaatgtccttttaagg

SEQ ID NO: 184411 - DNA, 22 bp, Artificial sequence
  SiRNA target sequence
aaaagaaatgtccttttaaggc

SEQ ID NO: 184412 - DNA, 22 bp, Artificial sequence
  SiRNA target sequence
aaagaaatgtccttttaaggcg

SEQ ID NO: 184413 - DNA, 22 bp, Artificial sequence
  SiRNA target sequence
aagaaatgtccttttaaggcga

SEQ ID NO: 184414 - DNA, 22 bp, Artificial sequence
  SiRNA target sequence
agaaatgtccttttaaggcgat

SEQ ID NO: 184415 - DNA, 22 bp, Artificial sequence
  SiRNA target sequence
gaaatgtccttttaaggcgatt

SEQ ID NO: 184416 - DNA, 22 bp, Artificial sequence
  SiRNA target sequence
aaatgtccttttaaggcgatta

SEQ ID NO: 184417 - DNA, 22 bp, Artificial sequence
  SiRNA target sequence
aatgtccttttaaggcgattac

SEQ ID NO: 184418 - DNA, 22 bp, Artificial sequence
  SiRNA target sequence
atgtccttttaaggcgattaca

SEQ ID NO: 184419 - DNA, 22 bp, Artificial sequence
  SiRNA target sequence
tgtccttttaaggcgattacaa

SEQ ID NO: 184420 - DNA, 22 bp, Artificial sequence
  SiRNA target sequence
gtccttttaaggcgattacaat

SEQ ID NO: 184421 - DNA, 22 bp, Artificial sequence
  SiRNA target sequence
tccttttaaggcgattacaatt

SEQ ID NO: 184422 - DNA, 22 bp, Artificial sequence
  SiRNA target sequence
ccttttaaggcgattacaattg

SEQ ID NO: 184423 - DNA, 22 bp, Artificial sequence
  SiRNA target sequence
cttttaaggcgattacaattgt

SEQ ID NO: 184424 - DNA, 22 bp, Artificial sequence
  SiRNA target sequence
ttttaaggcgattacaattgta

SEQ ID NO: 184425 - DNA, 22 bp, Artificial sequence
  SiRNA target sequence
tttaaggcgattacaattgtaa

SEQ ID NO: 184426 - DNA, 22 bp, Artificial sequence
  SiRNA target sequence
ttaaggcgattacaattgtaaa

SEQ ID NO: 184427 - DNA, 22 bp, Artificial sequence
  SiRNA target sequence
taaggcgattacaattgtaaat

SEQ ID NO: 184428 - DNA, 22 bp, Artificial sequence
  SiRNA target sequence
aaggcgattacaattgtaaatt

SEQ ID NO: 184429 - DNA, 22 bp, Artificial sequence
  SiRNA target sequence
aggcgattacaattgtaaattt

SEQ ID NO: 184430 - DNA, 22 bp, Artificial sequence
  SiRNA target sequence
ggcgattacaattgtaaattta

SEQ ID NO: 184431 - DNA, 22 bp, Artificial sequence
  SiRNA target sequence
gcgattacaattgtaaatttac

SEQ ID NO: 184432 - DNA, 22 bp, Artificial sequence
  SiRNA target sequence
cgattacaattgtaaatttacc

SEQ ID NO: 184433 - DNA, 22 bp, Artificial sequence
  SiRNA target sequence
gattacaattgtaaatttacct

SEQ ID NO: 184434 - DNA, 22 bp, Artificial sequence
  SiRNA target sequence
attacaattgtaaatttaccta

SEQ ID NO: 184435 - DNA, 22 bp, Artificial sequence
  SiRNA target sequence
ttacaattgtaaatttacctac

SEQ ID NO: 184436 - DNA, 22 bp, Artificial sequence
  SiRNA target sequence
tacaattgtaaatttacctaca

SEQ ID NO: 184437 - DNA, 22 bp, Artificial sequence
  SiRNA target sequence
acaattgtaaatttacctacaa

SEQ ID NO: 184438 - DNA, 22 bp, Artificial sequence
  SiRNA target sequence
caattgtaaatttacctacaaa

SEQ ID NO: 184439 - DNA, 22 bp, Artificial sequence
  SiRNA target sequence
aattgtaaatttacctacaaat

SEQ ID NO: 184440 - DNA, 22 bp, Artificial sequence
  SiRNA target sequence
attgtaaatttacctacaaatc

SEQ ID NO: 184441 - DNA, 22 bp, Artificial sequence
  SiRNA target sequence
ttgtaaatttacctacaaatct

SEQ ID NO: 184442 - DNA, 22 bp, Artificial sequence
  SiRNA target sequence
tgtaaatttacctacaaatcta

SEQ ID NO: 184443 - DNA, 22 bp, Artificial sequence
  SiRNA target sequence
gtaaatttacctacaaatctag

SEQ ID NO: 184444 - DNA, 22 bp, Artificial sequence
  SiRNA target sequence
taaatttacctacaaatctaga

SEQ ID NO: 184445 - DNA, 22 bp, Artificial sequence
  SiRNA target sequence
aaatttacctacaaatctagat

SEQ ID NO: 184446 - DNA, 22 bp, Artificial sequence
  SiRNA target sequence
aatttacctacaaatctagata

SEQ ID NO: 184447 - DNA, 22 bp, Artificial sequence
  SiRNA target sequence
atttacctacaaatctagataa

SEQ ID NO: 184448 - DNA, 22 bp, Artificial sequence
  SiRNA target sequence
tttacctacaaatctagataaa

SEQ ID NO: 184449 - DNA, 22 bp, Artificial sequence
  SiRNA target sequence
ttacctacaaatctagataaag

SEQ ID NO: 184450 - DNA, 22 bp, Artificial sequence
  SiRNA target sequence
tacctacaaatctagataaaga

SEQ ID NO: 184451 - DNA, 22 bp, Artificial sequence
  SiRNA target sequence
acctacaaatctagataaagac

SEQ ID NO: 184452 - DNA, 22 bp, Artificial sequence
  SiRNA target sequence
cctacaaatctagataaagaca

SEQ ID NO: 184453 - DNA, 22 bp, Artificial sequence
  SiRNA target sequence
ctacaaatctagataaagacat

SEQ ID NO: 184454 - DNA, 22 bp, Artificial sequence
  SiRNA target sequence
tacaaatctagataaagacatt

SEQ ID NO: 184455 - DNA, 22 bp, Artificial sequence
  SiRNA target sequence
acaaatctagataaagacattt

SEQ ID NO: 184456 - DNA, 22 bp, Artificial sequence
  SiRNA target sequence
caaatctagataaagacatttc

SEQ ID NO: 184457 - DNA, 22 bp, Artificial sequence
  SiRNA target sequence
aaatctagataaagacatttca

SEQ ID NO: 184458 - DNA, 22 bp, Artificial sequence
  SiRNA target sequence
aatctagataaagacatttcac

SEQ ID NO: 184459 - DNA, 22 bp, Artificial sequence
  SiRNA target sequence
atctagataaagacatttcaca

SEQ ID NO: 184460 - DNA, 22 bp, Artificial sequence
  SiRNA target sequence
tctagataaagacatttcacat

SEQ ID NO: 184461 - DNA, 22 bp, Artificial sequence
  SiRNA target sequence
ctagataaagacatttcacata

SEQ ID NO: 184462 - DNA, 22 bp, Artificial sequence
  SiRNA target sequence
tagataaagacatttcacatag

SEQ ID NO: 184463 - DNA, 22 bp, Artificial sequence
  SiRNA target sequence
agataaagacatttcacataga

SEQ ID NO: 184464 - DNA, 22 bp, Artificial sequence
  SiRNA target sequence
gataaagacatttcacatagat

SEQ ID NO: 184465 - DNA, 22 bp, Artificial sequence
  SiRNA target sequence
ataaagacatttcacatagata

SEQ ID NO: 184466 - DNA, 22 bp, Artificial sequence
  SiRNA target sequence
taaagacatttcacatagatat

SEQ ID NO: 184467 - DNA, 22 bp, Artificial sequence
  SiRNA target sequence
aaagacatttcacatagatatt

SEQ ID NO: 184468 - DNA, 22 bp, Artificial sequence
  SiRNA target sequence
aagacatttcacatagatattc

SEQ ID NO: 184469 - DNA, 22 bp, Artificial sequence
  SiRNA target sequence
agacatttcacatagatattcg

SEQ ID NO: 184470 - DNA, 22 bp, Artificial sequence
  SiRNA target sequence
gacatttcacatagatattcgg

SEQ ID NO: 184471 - DNA, 22 bp, Artificial sequence
  SiRNA target sequence
acatttcacatagatattcggc

SEQ ID NO: 184472 - DNA, 22 bp, Artificial sequence
  SiRNA target sequence
catttcacatagatattcggca

SEQ ID NO: 184473 - DNA, 22 bp, Artificial sequence
  SiRNA target sequence
atttcacatagatattcggcaa

SEQ ID NO: 184474 - DNA, 22 bp, Artificial sequence
  SiRNA target sequence
tttcacatagatattcggcaaa

SEQ ID NO: 184475 - DNA, 22 bp, Artificial sequence
  SiRNA target sequence
ttcacatagatattcggcaaat

SEQ ID NO: 184476 - DNA, 22 bp, Artificial sequence
  SiRNA target sequence
tcacatagatattcggcaaatg

SEQ ID NO: 184477 - DNA, 22 bp, Artificial sequence
  SiRNA target sequence
cacatagatattcggcaaatgg

SEQ ID NO: 184478 - DNA, 22 bp, Artificial sequence
  SiRNA target sequence
acatagatattcggcaaatggt

SEQ ID NO: 184479 - DNA, 22 bp, Artificial sequence
  SiRNA target sequence
catagatattcggcaaatggtt

SEQ ID NO: 184480 - DNA, 22 bp, Artificial sequence
  SiRNA target sequence
atagatattcggcaaatggttt

SEQ ID NO: 184481 - DNA, 22 bp, Artificial sequence
  SiRNA target sequence
tagatattcggcaaatggtttt

SEQ ID NO: 184482 - DNA, 22 bp, Artificial sequence
  SiRNA target sequence
agatattcggcaaatggtttta

SEQ ID NO: 184483 - DNA, 22 bp, Artificial sequence
  SiRNA target sequence
gatattcggcaaatggttttaa

SEQ ID NO: 184484 - DNA, 22 bp, Artificial sequence
  SiRNA target sequence
atattcggcaaatggttttaaa

SEQ ID NO: 184485 - DNA, 22 bp, Artificial sequence
  SiRNA target sequence
tattcggcaaatggttttaaac

SEQ ID NO: 184486 - DNA, 22 bp, Artificial sequence
  SiRNA target sequence
attcggcaaatggttttaaact

SEQ ID NO: 184487 - DNA, 22 bp, Artificial sequence
  SiRNA target sequence
ttcggcaaatggttttaaactt

SEQ ID NO: 184488 - DNA, 22 bp, Artificial sequence
  SiRNA target sequence
tcggcaaatggttttaaacttc

SEQ ID NO: 184489 - DNA, 22 bp, Artificial sequence
  SiRNA target sequence
cggcaaatggttttaaacttca

SEQ ID NO: 184490 - DNA, 22 bp, Artificial sequence
  SiRNA target sequence
ggcaaatggttttaaacttcac

SEQ ID NO: 184491 - DNA, 22 bp, Artificial sequence
  SiRNA target sequence
gcaaatggttttaaacttcaca

SEQ ID NO: 184492 - DNA, 22 bp, Artificial sequence
  SiRNA target sequence
caaatggttttaaacttcacag

SEQ ID NO: 184493 - DNA, 22 bp, Artificial sequence
  SiRNA target sequence
aaatggttttaaacttcacaga

SEQ ID NO: 184494 - DNA, 22 bp, Artificial sequence
  SiRNA target sequence
aatggttttaaacttcacagat

SEQ ID NO: 184495 - DNA, 22 bp, Artificial sequence
  SiRNA target sequence
atggttttaaacttcacagatt

SEQ ID NO: 184496 - DNA, 22 bp, Artificial sequence
  SiRNA target sequence
tggttttaaacttcacagatta

SEQ ID NO: 184497 - DNA, 22 bp, Artificial sequence
  SiRNA target sequence
ggttttaaacttcacagattac

SEQ ID NO: 184498 - DNA, 22 bp, Artificial sequence
  SiRNA target sequence
gttttaaacttcacagattacc

SEQ ID NO: 184499 - DNA, 22 bp, Artificial sequence
  SiRNA target sequence
ttttaaacttcacagattacca

SEQ ID NO: 184500 - DNA, 22 bp, Artificial sequence
  SiRNA target sequence
tttaaacttcacagattaccaa

SEQ ID NO: 184501 - DNA, 22 bp, Artificial sequence
  SiRNA target sequence
ttaaacttcacagattaccaat

SEQ ID NO: 184502 - DNA, 22 bp, Artificial sequence
  SiRNA target sequence
taaacttcacagattaccaatc

SEQ ID NO: 184503 - DNA, 22 bp, Artificial sequence
  SiRNA target sequence
aaacttcacagattaccaatcc

SEQ ID NO: 184504 - DNA, 22 bp, Artificial sequence
  SiRNA target sequence
aacttcacagattaccaatccc

SEQ ID NO: 184505 - DNA, 22 bp, Artificial sequence
  SiRNA target sequence
acttcacagattaccaatccct

SEQ ID NO: 184506 - DNA, 22 bp, Artificial sequence
  SiRNA target sequence
cttcacagattaccaatcccta

SEQ ID NO: 184507 - DNA, 22 bp, Artificial sequence
  SiRNA target sequence
ttcacagattaccaatccctaa

SEQ ID NO: 184508 - DNA, 22 bp, Artificial sequence
  SiRNA target sequence
tcacagattaccaatccctaaa

SEQ ID NO: 184509 - DNA, 22 bp, Artificial sequence
  SiRNA target sequence
cacagattaccaatccctaaat

SEQ ID NO: 184510 - DNA, 22 bp, Artificial sequence
  SiRNA target sequence
acagattaccaatccctaaata

SEQ ID NO: 184511 - DNA, 22 bp, Artificial sequence
  SiRNA target sequence
cagattaccaatccctaaatat

SEQ ID NO: 184512 - DNA, 22 bp, Artificial sequence
  SiRNA target sequence
agattaccaatccctaaatatg

SEQ ID NO: 184513 - DNA, 22 bp, Artificial sequence
  SiRNA target sequence
gattaccaatccctaaatatgg

SEQ ID NO: 184514 - DNA, 22 bp, Artificial sequence
  SiRNA target sequence
attaccaatccctaaatatggt

SEQ ID NO: 184515 - DNA, 22 bp, Artificial sequence
  SiRNA target sequence
ttaccaatccctaaatatggta

SEQ ID NO: 184516 - DNA, 22 bp, Artificial sequence
  SiRNA target sequence
taccaatccctaaatatggtaa

SEQ ID NO: 184517 - DNA, 22 bp, Artificial sequence
  SiRNA target sequence
accaatccctaaatatggtaag

SEQ ID NO: 184518 - DNA, 22 bp, Artificial sequence
  SiRNA target sequence
ccaatccctaaatatggtaagg

SEQ ID NO: 184519 - DNA, 22 bp, Artificial sequence
  SiRNA target sequence
caatccctaaatatggtaaggt

SEQ ID NO: 184520 - DNA, 22 bp, Artificial sequence
  SiRNA target sequence
aatccctaaatatggtaaggtt

SEQ ID NO: 184521 - DNA, 22 bp, Artificial sequence
  SiRNA target sequence
atccctaaatatggtaaggttt

SEQ ID NO: 184522 - DNA, 22 bp, Artificial sequence
  SiRNA target sequence
tccctaaatatggtaaggtttt

SEQ ID NO: 184523 - DNA, 22 bp, Artificial sequence
  SiRNA target sequence
ccctaaatatggtaaggtttta

SEQ ID NO: 184524 - DNA, 22 bp, Artificial sequence
  SiRNA target sequence
cctaaatatggtaaggttttag

SEQ ID NO: 184525 - DNA, 22 bp, Artificial sequence
  SiRNA target sequence
ctaaatatggtaaggttttagg

SEQ ID NO: 184526 - DNA, 22 bp, Artificial sequence
  SiRNA target sequence
taaatatggtaaggttttaggg

SEQ ID NO: 184527 - DNA, 22 bp, Artificial sequence
  SiRNA target sequence
aaatatggtaaggttttagggc

SEQ ID NO: 184528 - DNA, 22 bp, Artificial sequence
  SiRNA target sequence
aatatggtaaggttttagggct

SEQ ID NO: 184529 - DNA, 22 bp, Artificial sequence
  SiRNA target sequence
atatggtaaggttttagggcta

SEQ ID NO: 184530 - DNA, 22 bp, Artificial sequence
  SiRNA target sequence
tatggtaaggttttagggctag

SEQ ID NO: 184531 - DNA, 22 bp, Artificial sequence
  SiRNA target sequence
atggtaaggttttagggctagt

SEQ ID NO: 184532 - DNA, 22 bp, Artificial sequence
  SiRNA target sequence
tggtaaggttttagggctagta

SEQ ID NO: 184533 - DNA, 22 bp, Artificial sequence
  SiRNA target sequence
ggtaaggttttagggctagtag

SEQ ID NO: 184534 - DNA, 22 bp, Artificial sequence
  SiRNA target sequence
gtaaggttttagggctagtagg

SEQ ID NO: 184535 - DNA, 22 bp, Artificial sequence
  SiRNA target sequence
taaggttttagggctagtaggc

SEQ ID NO: 184536 - DNA, 22 bp, Artificial sequence
  SiRNA target sequence
aaggttttagggctagtaggca

SEQ ID NO: 184537 - DNA, 22 bp, Artificial sequence
  SiRNA target sequence
aggttttagggctagtaggcac

SEQ ID NO: 184538 - DNA, 22 bp, Artificial sequence
  SiRNA target sequence
ggttttagggctagtaggcact

SEQ ID NO: 184539 - DNA, 22 bp, Artificial sequence
  SiRNA target sequence
gttttagggctagtaggcacta

SEQ ID NO: 184540 - DNA, 22 bp, Artificial sequence
  SiRNA target sequence
ttttagggctagtaggcactaa

SEQ ID NO: 184541 - DNA, 22 bp, Artificial sequence
  SiRNA target sequence
tttagggctagtaggcactaat

SEQ ID NO: 184542 - DNA, 22 bp, Artificial sequence
  SiRNA target sequence
ttagggctagtaggcactaatg

SEQ ID NO: 184543 - DNA, 22 bp, Artificial sequence
  SiRNA target sequence
tagggctagtaggcactaatgg

SEQ ID NO: 184544 - DNA, 22 bp, Artificial sequence
  SiRNA target sequence
agggctagtaggcactaatggt

SEQ ID NO: 184545 - DNA, 22 bp, Artificial sequence
  SiRNA target sequence
gggctagtaggcactaatggta

SEQ ID NO: 184546 - DNA, 22 bp, Artificial sequence
  SiRNA target sequence
ggctagtaggcactaatggtat

SEQ ID NO: 184547 - DNA, 22 bp, Artificial sequence
  SiRNA target sequence
gctagtaggcactaatggtata

SEQ ID NO: 184548 - DNA, 22 bp, Artificial sequence
  SiRNA target sequence
ctagtaggcactaatggtatag

SEQ ID NO: 184549 - DNA, 22 bp, Artificial sequence
  SiRNA target sequence
tagtaggcactaatggtatagg

SEQ ID NO: 184550 - DNA, 22 bp, Artificial sequence
  SiRNA target sequence
agtaggcactaatggtatagga

SEQ ID NO: 184551 - DNA, 22 bp, Artificial sequence
  SiRNA target sequence
gtaggcactaatggtataggaa

SEQ ID NO: 184552 - DNA, 22 bp, Artificial sequence
  SiRNA target sequence
taggcactaatggtataggaaa

SEQ ID NO: 184553 - DNA, 22 bp, Artificial sequence
  SiRNA target sequence
aggcactaatggtataggaaaa

SEQ ID NO: 184554 - DNA, 22 bp, Artificial sequence
  SiRNA target sequence
ggcactaatggtataggaaaaa

SEQ ID NO: 184555 - DNA, 22 bp, Artificial sequence
  SiRNA target sequence
gcactaatggtataggaaaaag

SEQ ID NO: 184556 - DNA, 22 bp, Artificial sequence
  SiRNA target sequence
cactaatggtataggaaaaagt

SEQ ID NO: 184557 - DNA, 22 bp, Artificial sequence
  SiRNA target sequence
actaatggtataggaaaaagta

SEQ ID NO: 184558 - DNA, 22 bp, Artificial sequence
  SiRNA target sequence
ctaatggtataggaaaaagtac

SEQ ID NO: 184559 - DNA, 22 bp, Artificial sequence
  SiRNA target sequence
taatggtataggaaaaagtact

SEQ ID NO: 184560 - DNA, 22 bp, Artificial sequence
  SiRNA target sequence
aatggtataggaaaaagtactg

SEQ ID NO: 184561 - DNA, 22 bp, Artificial sequence
  SiRNA target sequence
atggtataggaaaaagtactgc

SEQ ID NO: 184562 - DNA, 22 bp, Artificial sequence
  SiRNA target sequence
tggtataggaaaaagtactgca

SEQ ID NO: 184563 - DNA, 22 bp, Artificial sequence
  SiRNA target sequence
ggtataggaaaaagtactgcac

SEQ ID NO: 184564 - DNA, 22 bp, Artificial sequence
  SiRNA target sequence
gtataggaaaaagtactgcact

SEQ ID NO: 184565 - DNA, 22 bp, Artificial sequence
  SiRNA target sequence
tataggaaaaagtactgcactt

SEQ ID NO: 184566 - DNA, 22 bp, Artificial sequence
  SiRNA target sequence
ataggaaaaagtactgcactta

SEQ ID NO: 184567 - DNA, 22 bp, Artificial sequence
  SiRNA target sequence
taggaaaaagtactgcacttaa

SEQ ID NO: 184568 - DNA, 22 bp, Artificial sequence
  SiRNA target sequence
aggaaaaagtactgcacttaaa

SEQ ID NO: 184569 - DNA, 22 bp, Artificial sequence
  SiRNA target sequence
ggaaaaagtactgcacttaaaa

SEQ ID NO: 184570 - DNA, 22 bp, Artificial sequence
  SiRNA target sequence
gaaaaagtactgcacttaaaat

SEQ ID NO: 184571 - DNA, 22 bp, Artificial sequence
  SiRNA target sequence
aaaaagtactgcacttaaaata

SEQ ID NO: 184572 - DNA, 22 bp, Artificial sequence
  SiRNA target sequence
aaaagtactgcacttaaaatat

SEQ ID NO: 184573 - DNA, 22 bp, Artificial sequence
  SiRNA target sequence
aaagtactgcacttaaaatatt

SEQ ID NO: 184574 - DNA, 22 bp, Artificial sequence
  SiRNA target sequence
aagtactgcacttaaaatatta

SEQ ID NO: 184575 - DNA, 22 bp, Artificial sequence
  SiRNA target sequence
agtactgcacttaaaatattat

SEQ ID NO: 184576 - DNA, 22 bp, Artificial sequence
  SiRNA target sequence
gtactgcacttaaaatattatc

SEQ ID NO: 184577 - DNA, 22 bp, Artificial sequence
  SiRNA target sequence
tactgcacttaaaatattatcg

SEQ ID NO: 184578 - DNA, 22 bp, Artificial sequence
  SiRNA target sequence
actgcacttaaaatattatcgg

SEQ ID NO: 184579 - DNA, 22 bp, Artificial sequence
  SiRNA target sequence
ctgcacttaaaatattatcggg

SEQ ID NO: 184580 - DNA, 22 bp, Artificial sequence
  SiRNA target sequence
tgcacttaaaatattatcgggc

SEQ ID NO: 184581 - DNA, 22 bp, Artificial sequence
  SiRNA target sequence
gcacttaaaatattatcgggca

SEQ ID NO: 184582 - DNA, 22 bp, Artificial sequence
  SiRNA target sequence
cacttaaaatattatcgggcaa

SEQ ID NO: 184583 - DNA, 22 bp, Artificial sequence
  SiRNA target sequence
acttaaaatattatcgggcaat

SEQ ID NO: 184584 - DNA, 22 bp, Artificial sequence
  SiRNA target sequence
cttaaaatattatcgggcaatc

SEQ ID NO: 184585 - DNA, 22 bp, Artificial sequence
  SiRNA target sequence
ttaaaatattatcgggcaatct

SEQ ID NO: 184586 - DNA, 22 bp, Artificial sequence
  SiRNA target sequence
taaaatattatcgggcaatctt

SEQ ID NO: 184587 - DNA, 22 bp, Artificial sequence
  SiRNA target sequence
aaaatattatcgggcaatctta

SEQ ID NO: 184588 - DNA, 22 bp, Artificial sequence
  SiRNA target sequence
aaatattatcgggcaatcttaa

SEQ ID NO: 184589 - DNA, 22 bp, Artificial sequence
  SiRNA target sequence
aatattatcgggcaatcttaaa

SEQ ID NO: 184590 - DNA, 22 bp, Artificial sequence
  SiRNA target sequence
atattatcgggcaatcttaaac

SEQ ID NO: 184591 - DNA, 22 bp, Artificial sequence
  SiRNA target sequence
tattatcgggcaatcttaaacc

SEQ ID NO: 184592 - DNA, 22 bp, Artificial sequence
  SiRNA target sequence
attatcgggcaatcttaaacca

SEQ ID NO: 184593 - DNA, 22 bp, Artificial sequence
  SiRNA target sequence
ttatcgggcaatcttaaaccaa

SEQ ID NO: 184594 - DNA, 22 bp, Artificial sequence
  SiRNA target sequence
tatcgggcaatcttaaaccaaa

SEQ ID NO: 184595 - DNA, 22 bp, Artificial sequence
  SiRNA target sequence
atcgggcaatcttaaaccaaac

SEQ ID NO: 184596 - DNA, 22 bp, Artificial sequence
  SiRNA target sequence
tcgggcaatcttaaaccaaact

SEQ ID NO: 184597 - DNA, 22 bp, Artificial sequence
  SiRNA target sequence
cgggcaatcttaaaccaaactt

SEQ ID NO: 184598 - DNA, 22 bp, Artificial sequence
  SiRNA target sequence
gggcaatcttaaaccaaactta

SEQ ID NO: 184599 - DNA, 22 bp, Artificial sequence
  SiRNA target sequence
ggcaatcttaaaccaaacttag

SEQ ID NO: 184600 - DNA, 22 bp, Artificial sequence
  SiRNA target sequence
gcaatcttaaaccaaacttagg

SEQ ID NO: 184601 - DNA, 22 bp, Artificial sequence
  SiRNA target sequence
caatcttaaaccaaacttagga

SEQ ID NO: 184602 - DNA, 22 bp, Artificial sequence
  SiRNA target sequence
aatcttaaaccaaacttaggaa

SEQ ID NO: 184603 - DNA, 22 bp, Artificial sequence
  SiRNA target sequence
atcttaaaccaaacttaggaaa

SEQ ID NO: 184604 - DNA, 22 bp, Artificial sequence
  SiRNA target sequence
tcttaaaccaaacttaggaaag

SEQ ID NO: 184605 - DNA, 22 bp, Artificial sequence
  SiRNA target sequence
cttaaaccaaacttaggaaagt

SEQ ID NO: 184606 - DNA, 22 bp, Artificial sequence
  SiRNA target sequence
ttaaaccaaacttaggaaagtt

SEQ ID NO: 184607 - DNA, 22 bp, Artificial sequence
  SiRNA target sequence
taaaccaaacttaggaaagttc

SEQ ID NO: 184608 - DNA, 22 bp, Artificial sequence
  SiRNA target sequence
aaaccaaacttaggaaagttcg

SEQ ID NO: 184609 - DNA, 22 bp, Artificial sequence
  SiRNA target sequence
aaccaaacttaggaaagttcga

SEQ ID NO: 184610 - DNA, 22 bp, Artificial sequence
  SiRNA target sequence
accaaacttaggaaagttcgac

SEQ ID NO: 184611 - DNA, 22 bp, Artificial sequence
  SiRNA target sequence
ccaaacttaggaaagttcgacg

SEQ ID NO: 184612 - DNA, 22 bp, Artificial sequence
  SiRNA target sequence
caaacttaggaaagttcgacgt

SEQ ID NO: 184613 - DNA, 22 bp, Artificial sequence
  SiRNA target sequence
aaacttaggaaagttcgacgtt

SEQ ID NO: 184614 - DNA, 22 bp, Artificial sequence
  SiRNA target sequence
aacttaggaaagttcgacgtta

SEQ ID NO: 184615 - DNA, 22 bp, Artificial sequence
  SiRNA target sequence
acttaggaaagttcgacgttac

SEQ ID NO: 184616 - DNA, 22 bp, Artificial sequence
  SiRNA target sequence
cttaggaaagttcgacgttacg

SEQ ID NO: 184617 - DNA, 22 bp, Artificial sequence
  SiRNA target sequence
ttaggaaagttcgacgttacgc

SEQ ID NO: 184618 - DNA, 22 bp, Artificial sequence
  SiRNA target sequence
taggaaagttcgacgttacgcc

SEQ ID NO: 184619 - DNA, 22 bp, Artificial sequence
  SiRNA target sequence
aggaaagttcgacgttacgccc

SEQ ID NO: 184620 - DNA, 22 bp, Artificial sequence
  SiRNA target sequence
ggaaagttcgacgttacgcccg

SEQ ID NO: 184621 - DNA, 22 bp, Artificial sequence
  SiRNA target sequence
gaaagttcgacgttacgcccga

SEQ ID NO: 184622 - DNA, 22 bp, Artificial sequence
  SiRNA target sequence
aaagttcgacgttacgcccgac

SEQ ID NO: 184623 - DNA, 22 bp, Artificial sequence
  SiRNA target sequence
aagttcgacgttacgcccgact

SEQ ID NO: 184624 - DNA, 22 bp, Artificial sequence
  SiRNA target sequence
agttcgacgttacgcccgactg

SEQ ID NO: 184625 - DNA, 22 bp, Artificial sequence
  SiRNA target sequence
gttcgacgttacgcccgactgg

SEQ ID NO: 184626 - DNA, 22 bp, Artificial sequence
  SiRNA target sequence
ttcgacgttacgcccgactggg

SEQ ID NO: 184627 - DNA, 22 bp, Artificial sequence
  SiRNA target sequence
tcgacgttacgcccgactgggc

SEQ ID NO: 184628 - DNA, 22 bp, Artificial sequence
  SiRNA target sequence
cgacgttacgcccgactgggca

SEQ ID NO: 184629 - DNA, 22 bp, Artificial sequence
  SiRNA target sequence
gacgttacgcccgactgggcag

SEQ ID NO: 184630 - DNA, 22 bp, Artificial sequence
  SiRNA target sequence
acgttacgcccgactgggcagc

SEQ ID NO: 184631 - DNA, 22 bp, Artificial sequence
  SiRNA target sequence
cgttacgcccgactgggcagca

SEQ ID NO: 184632 - DNA, 22 bp, Artificial sequence
  SiRNA target sequence
gttacgcccgactgggcagcaa

SEQ ID NO: 184633 - DNA, 22 bp, Artificial sequence
  SiRNA target sequence
ttacgcccgactgggcagcaat

SEQ ID NO: 184634 - DNA, 22 bp, Artificial sequence
  SiRNA target sequence
tacgcccgactgggcagcaatt

SEQ ID NO: 184635 - DNA, 22 bp, Artificial sequence
  SiRNA target sequence
acgcccgactgggcagcaattc

SEQ ID NO: 184636 - DNA, 22 bp, Artificial sequence
  SiRNA target sequence
cgcccgactgggcagcaattct

SEQ ID NO: 184637 - DNA, 22 bp, Artificial sequence
  SiRNA target sequence
gcccgactgggcagcaattcta

SEQ ID NO: 184638 - DNA, 22 bp, Artificial sequence
  SiRNA target sequence
cccgactgggcagcaattctaa

SEQ ID NO: 184639 - DNA, 22 bp, Artificial sequence
  SiRNA target sequence
ccgactgggcagcaattctaaa

SEQ ID NO: 184640 - DNA, 22 bp, Artificial sequence
  SiRNA target sequence
cgactgggcagcaattctaaat

SEQ ID NO: 184641 - DNA, 22 bp, Artificial sequence
  SiRNA target sequence
gactgggcagcaattctaaata

SEQ ID NO: 184642 - DNA, 22 bp, Artificial sequence
  SiRNA target sequence
actgggcagcaattctaaataa

SEQ ID NO: 184643 - DNA, 22 bp, Artificial sequence
  SiRNA target sequence
ctgggcagcaattctaaataat

SEQ ID NO: 184644 - DNA, 22 bp, Artificial sequence
  SiRNA target sequence
tgggcagcaattctaaataatt

SEQ ID NO: 184645 - DNA, 22 bp, Artificial sequence
  SiRNA target sequence
gggcagcaattctaaataatta

SEQ ID NO: 184646 - DNA, 22 bp, Artificial sequence
  SiRNA target sequence
ggcagcaattctaaataattat

SEQ ID NO: 184647 - DNA, 22 bp, Artificial sequence
  SiRNA target sequence
gcagcaattctaaataattata

SEQ ID NO: 184648 - DNA, 22 bp, Artificial sequence
  SiRNA target sequence
cagcaattctaaataattataa

SEQ ID NO: 184649 - DNA, 22 bp, Artificial sequence
  SiRNA target sequence
agcaattctaaataattataaa

SEQ ID NO: 184650 - DNA, 22 bp, Artificial sequence
  SiRNA target sequence
gcaattctaaataattataaag

SEQ ID NO: 184651 - DNA, 22 bp, Artificial sequence
  SiRNA target sequence
caattctaaataattataaagg

SEQ ID NO: 184652 - DNA, 22 bp, Artificial sequence
  SiRNA target sequence
aattctaaataattataaagga

SEQ ID NO: 184653 - DNA, 22 bp, Artificial sequence
  SiRNA target sequence
attctaaataattataaaggat

SEQ ID NO: 184654 - DNA, 22 bp, Artificial sequence
  SiRNA target sequence
ttctaaataattataaaggatc

SEQ ID NO: 184655 - DNA, 22 bp, Artificial sequence
  SiRNA target sequence
tctaaataattataaaggatct

SEQ ID NO: 184656 - DNA, 22 bp, Artificial sequence
  SiRNA target sequence
ctaaataattataaaggatctg

SEQ ID NO: 184657 - DNA, 22 bp, Artificial sequence
  SiRNA target sequence
taaataattataaaggatctga

SEQ ID NO: 184658 - DNA, 22 bp, Artificial sequence
  SiRNA target sequence
aaataattataaaggatctgaa

SEQ ID NO: 184659 - DNA, 22 bp, Artificial sequence
  SiRNA target sequence
aataattataaaggatctgaac

SEQ ID NO: 184660 - DNA, 22 bp, Artificial sequence
  SiRNA target sequence
ataattataaaggatctgaact

SEQ ID NO: 184661 - DNA, 22 bp, Artificial sequence
  SiRNA target sequence
taattataaaggatctgaactt

SEQ ID NO: 184662 - DNA, 22 bp, Artificial sequence
  SiRNA target sequence
aattataaaggatctgaacttc

SEQ ID NO: 184663 - DNA, 22 bp, Artificial sequence
  SiRNA target sequence
attataaaggatctgaacttca

SEQ ID NO: 184664 - DNA, 22 bp, Artificial sequence
  SiRNA target sequence
ttataaaggatctgaacttcat

SEQ ID NO: 184665 - DNA, 22 bp, Artificial sequence
  SiRNA target sequence
tataaaggatctgaacttcatg

SEQ ID NO: 184666 - DNA, 22 bp, Artificial sequence
  SiRNA target sequence
ataaaggatctgaacttcatgg

SEQ ID NO: 184667 - DNA, 22 bp, Artificial sequence
  SiRNA target sequence
taaaggatctgaacttcatgga

SEQ ID NO: 184668 - DNA, 22 bp, Artificial sequence
  SiRNA target sequence
aaaggatctgaacttcatggat

SEQ ID NO: 184669 - DNA, 22 bp, Artificial sequence
  SiRNA target sequence
aaggatctgaacttcatggatt

SEQ ID NO: 184670 - DNA, 22 bp, Artificial sequence
  SiRNA target sequence
aggatctgaacttcatggattt

SEQ ID NO: 184671 - DNA, 22 bp, Artificial sequence
  SiRNA target sequence
ggatctgaacttcatggatttt

SEQ ID NO: 184672 - DNA, 22 bp, Artificial sequence
  SiRNA target sequence
gatctgaacttcatggattttt

SEQ ID NO: 184673 - DNA, 22 bp, Artificial sequence
  SiRNA target sequence
atctgaacttcatggatttttt

SEQ ID NO: 184674 - DNA, 22 bp, Artificial sequence
  SiRNA target sequence
tctgaacttcatggatttttta

SEQ ID NO: 184675 - DNA, 22 bp, Artificial sequence
  SiRNA target sequence
ctgaacttcatggattttttac

SEQ ID NO: 184676 - DNA, 22 bp, Artificial sequence
  SiRNA target sequence
tgaacttcatggattttttact

SEQ ID NO: 184677 - DNA, 22 bp, Artificial sequence
  SiRNA target sequence
gaacttcatggattttttacta

SEQ ID NO: 184678 - DNA, 22 bp, Artificial sequence
  SiRNA target sequence
aacttcatggattttttactaa

SEQ ID NO: 184679 - DNA, 22 bp, Artificial sequence
  SiRNA target sequence
acttcatggattttttactaaa

SEQ ID NO: 184680 - DNA, 22 bp, Artificial sequence
  SiRNA target sequence
cttcatggattttttactaaaa

SEQ ID NO: 184681 - DNA, 22 bp, Artificial sequence
  SiRNA target sequence
ttcatggattttttactaaaat

SEQ ID NO: 184682 - DNA, 22 bp, Artificial sequence
  SiRNA target sequence
tcatggattttttactaaaatt

SEQ ID NO: 184683 - DNA, 22 bp, Artificial sequence
  SiRNA target sequence
catggattttttactaaaattt

SEQ ID NO: 184684 - DNA, 22 bp, Artificial sequence
  SiRNA target sequence
atggattttttactaaaatttt

SEQ ID NO: 184685 - DNA, 22 bp, Artificial sequence
  SiRNA target sequence
tggattttttactaaaatttta

SEQ ID NO: 184686 - DNA, 22 bp, Artificial sequence
  SiRNA target sequence
ggattttttactaaaattttag

SEQ ID NO: 184687 - DNA, 22 bp, Artificial sequence
  SiRNA target sequence
gattttttactaaaattttaga

SEQ ID NO: 184688 - DNA, 22 bp, Artificial sequence
  SiRNA target sequence
attttttactaaaattttagaa

SEQ ID NO: 184689 - DNA, 22 bp, Artificial sequence
  SiRNA target sequence
ttttttactaaaattttagaag

SEQ ID NO: 184690 - DNA, 22 bp, Artificial sequence
  SiRNA target sequence
tttttactaaaattttagaagg

SEQ ID NO: 184691 - DNA, 22 bp, Artificial sequence
  SiRNA target sequence
ttttactaaaattttagaaggg

SEQ ID NO: 184692 - DNA, 22 bp, Artificial sequence
  SiRNA target sequence
tttactaaaattttagaagggt

SEQ ID NO: 184693 - DNA, 22 bp, Artificial sequence
  SiRNA target sequence
ttactaaaattttagaagggtc

SEQ ID NO: 184694 - DNA, 22 bp, Artificial sequence
  SiRNA target sequence
tactaaaattttagaagggtct

SEQ ID NO: 184695 - DNA, 22 bp, Artificial sequence
  SiRNA target sequence
actaaaattttagaagggtcta

SEQ ID NO: 184696 - DNA, 22 bp, Artificial sequence
  SiRNA target sequence
ctaaaattttagaagggtctat

SEQ ID NO: 184697 - DNA, 22 bp, Artificial sequence
  SiRNA target sequence
taaaattttagaagggtctatt

SEQ ID NO: 184698 - DNA, 22 bp, Artificial sequence
  SiRNA target sequence
aaaattttagaagggtctatta

SEQ ID NO: 184699 - DNA, 22 bp, Artificial sequence
  SiRNA target sequence
aaattttagaagggtctattaa

SEQ ID NO: 184700 - DNA, 22 bp, Artificial sequence
  SiRNA target sequence
aattttagaagggtctattaaa

SEQ ID NO: 184701 - DNA, 22 bp, Artificial sequence
  SiRNA target sequence
attttagaagggtctattaaag

SEQ ID NO: 184702 - DNA, 22 bp, Artificial sequence
  SiRNA target sequence
ttttagaagggtctattaaagc

SEQ ID NO: 184703 - DNA, 22 bp, Artificial sequence
  SiRNA target sequence
tttagaagggtctattaaagct

SEQ ID NO: 184704 - DNA, 22 bp, Artificial sequence
  SiRNA target sequence
ttagaagggtctattaaagcta

SEQ ID NO: 184705 - DNA, 22 bp, Artificial sequence
  SiRNA target sequence
tagaagggtctattaaagctat

SEQ ID NO: 184706 - DNA, 22 bp, Artificial sequence
  SiRNA target sequence
agaagggtctattaaagctatt

SEQ ID NO: 184707 - DNA, 22 bp, Artificial sequence
  SiRNA target sequence
gaagggtctattaaagctattt

SEQ ID NO: 184708 - DNA, 22 bp, Artificial sequence
  SiRNA target sequence
aagggtctattaaagctatttc

SEQ ID NO: 184709 - DNA, 22 bp, Artificial sequence
  SiRNA target sequence
agggtctattaaagctatttct

SEQ ID NO: 184710 - DNA, 22 bp, Artificial sequence
  SiRNA target sequence
gggtctattaaagctatttcta

SEQ ID NO: 184711 - DNA, 22 bp, Artificial sequence
  SiRNA target sequence
ggtctattaaagctatttctaa

SEQ ID NO: 184712 - DNA, 22 bp, Artificial sequence
  SiRNA target sequence
gtctattaaagctatttctaag

SEQ ID NO: 184713 - DNA, 22 bp, Artificial sequence
  SiRNA target sequence
tctattaaagctatttctaaga

SEQ ID NO: 184714 - DNA, 22 bp, Artificial sequence
  SiRNA target sequence
ctattaaagctatttctaagat

SEQ ID NO: 184715 - DNA, 22 bp, Artificial sequence
  SiRNA target sequence
tattaaagctatttctaagata

SEQ ID NO: 184716 - DNA, 22 bp, Artificial sequence
  SiRNA target sequence
attaaagctatttctaagatac

SEQ ID NO: 184717 - DNA, 22 bp, Artificial sequence
  SiRNA target sequence
ttaaagctatttctaagataca

SEQ ID NO: 184718 - DNA, 22 bp, Artificial sequence
  SiRNA target sequence
taaagctatttctaagatacag

SEQ ID NO: 184719 - DNA, 22 bp, Artificial sequence
  SiRNA target sequence
aaagctatttctaagatacagt

SEQ ID NO: 184720 - DNA, 22 bp, Artificial sequence
  SiRNA target sequence
aagctatttctaagatacagta

SEQ ID NO: 184721 - DNA, 22 bp, Artificial sequence
  SiRNA target sequence
agctatttctaagatacagtat

SEQ ID NO: 184722 - DNA, 22 bp, Artificial sequence
  SiRNA target sequence
gctatttctaagatacagtata

SEQ ID NO: 184723 - DNA, 22 bp, Artificial sequence
  SiRNA target sequence
ctatttctaagatacagtatat

SEQ ID NO: 184724 - DNA, 22 bp, Artificial sequence
  SiRNA target sequence
tatttctaagatacagtatata

SEQ ID NO: 184725 - DNA, 22 bp, Artificial sequence
  SiRNA target sequence
atttctaagatacagtatatag

SEQ ID NO: 184726 - DNA, 22 bp, Artificial sequence
  SiRNA target sequence
tttctaagatacagtatataga

SEQ ID NO: 184727 - DNA, 22 bp, Artificial sequence
  SiRNA target sequence
ttctaagatacagtatatagat

SEQ ID NO: 184728 - DNA, 22 bp, Artificial sequence
  SiRNA target sequence
tctaagatacagtatatagata

SEQ ID NO: 184729 - DNA, 22 bp, Artificial sequence
  SiRNA target sequence
ctaagatacagtatatagataa

SEQ ID NO: 184730 - DNA, 22 bp, Artificial sequence
  SiRNA target sequence
taagatacagtatatagataaa

SEQ ID NO: 184731 - DNA, 22 bp, Artificial sequence
  SiRNA target sequence
aagatacagtatatagataaaa

SEQ ID NO: 184732 - DNA, 22 bp, Artificial sequence
  SiRNA target sequence
agatacagtatatagataaaat

SEQ ID NO: 184733 - DNA, 22 bp, Artificial sequence
  SiRNA target sequence
gatacagtatatagataaaatg

SEQ ID NO: 184734 - DNA, 22 bp, Artificial sequence
  SiRNA target sequence
atacagtatatagataaaatgc

SEQ ID NO: 184735 - DNA, 22 bp, Artificial sequence
  SiRNA target sequence
tacagtatatagataaaatgcc

SEQ ID NO: 184736 - DNA, 22 bp, Artificial sequence
  SiRNA target sequence
acagtatatagataaaatgcct

SEQ ID NO: 184737 - DNA, 22 bp, Artificial sequence
  SiRNA target sequence
cagtatatagataaaatgccta

SEQ ID NO: 184738 - DNA, 22 bp, Artificial sequence
  SiRNA target sequence
agtatatagataaaatgcctaa

SEQ ID NO: 184739 - DNA, 22 bp, Artificial sequence
  SiRNA target sequence
gtatatagataaaatgcctaaa

SEQ ID NO: 184740 - DNA, 22 bp, Artificial sequence
  SiRNA target sequence
tatatagataaaatgcctaaat

SEQ ID NO: 184741 - DNA, 22 bp, Artificial sequence
  SiRNA target sequence
atatagataaaatgcctaaatt

SEQ ID NO: 184742 - DNA, 22 bp, Artificial sequence
  SiRNA target sequence
tatagataaaatgcctaaattt

SEQ ID NO: 184743 - DNA, 22 bp, Artificial sequence
  SiRNA target sequence
atagataaaatgcctaaatttt

SEQ ID NO: 184744 - DNA, 22 bp, Artificial sequence
  SiRNA target sequence
tagataaaatgcctaaattttt

SEQ ID NO: 184745 - DNA, 22 bp, Artificial sequence
  SiRNA target sequence
agataaaatgcctaaattttta

SEQ ID NO: 184746 - DNA, 22 bp, Artificial sequence
  SiRNA target sequence
gataaaatgcctaaatttttaa

SEQ ID NO: 184747 - DNA, 22 bp, Artificial sequence
  SiRNA target sequence
ataaaatgcctaaatttttaaa

SEQ ID NO: 184748 - DNA, 22 bp, Artificial sequence
  SiRNA target sequence
taaaatgcctaaatttttaaaa

SEQ ID NO: 184749 - DNA, 22 bp, Artificial sequence
  SiRNA target sequence
aaaatgcctaaatttttaaaag

SEQ ID NO: 184750 - DNA, 22 bp, Artificial sequence
  SiRNA target sequence
aaatgcctaaatttttaaaagg

SEQ ID NO: 184751 - DNA, 22 bp, Artificial sequence
  SiRNA target sequence
aatgcctaaatttttaaaagga

SEQ ID NO: 184752 - DNA, 22 bp, Artificial sequence
  SiRNA target sequence
atgcctaaatttttaaaaggac

SEQ ID NO: 184753 - DNA, 22 bp, Artificial sequence
  SiRNA target sequence
tgcctaaatttttaaaaggacg

SEQ ID NO: 184754 - DNA, 22 bp, Artificial sequence
  SiRNA target sequence
gcctaaatttttaaaaggacgc

SEQ ID NO: 184755 - DNA, 22 bp, Artificial sequence
  SiRNA target sequence
cctaaatttttaaaaggacgct

SEQ ID NO: 184756 - DNA, 22 bp, Artificial sequence
  SiRNA target sequence
ctaaatttttaaaaggacgcta

SEQ ID NO: 184757 - DNA, 22 bp, Artificial sequence
  SiRNA target sequence
taaatttttaaaaggacgctat

SEQ ID NO: 184758 - DNA, 22 bp, Artificial sequence
  SiRNA target sequence
aaatttttaaaaggacgctata

SEQ ID NO: 184759 - DNA, 22 bp, Artificial sequence
  SiRNA target sequence
aatttttaaaaggacgctataa

SEQ ID NO: 184760 - DNA, 22 bp, Artificial sequence
  SiRNA target sequence
atttttaaaaggacgctataag

SEQ ID NO: 184761 - DNA, 22 bp, Artificial sequence
  SiRNA target sequence
tttttaaaaggacgctataagt

SEQ ID NO: 184762 - DNA, 22 bp, Artificial sequence
  SiRNA target sequence
ttttaaaaggacgctataagtc

SEQ ID NO: 184763 - DNA, 22 bp, Artificial sequence
  SiRNA target sequence
tttaaaaggacgctataagtca

SEQ ID NO: 184764 - DNA, 22 bp, Artificial sequence
  SiRNA target sequence
ttaaaaggacgctataagtcag

SEQ ID NO: 184765 - DNA, 22 bp, Artificial sequence
  SiRNA target sequence
taaaaggacgctataagtcaga

SEQ ID NO: 184766 - DNA, 22 bp, Artificial sequence
  SiRNA target sequence
aaaaggacgctataagtcagaa

SEQ ID NO: 184767 - DNA, 22 bp, Artificial sequence
  SiRNA target sequence
aaaggacgctataagtcagaaa

SEQ ID NO: 184768 - DNA, 22 bp, Artificial sequence
  SiRNA target sequence
aaggacgctataagtcagaaat

SEQ ID NO: 184769 - DNA, 22 bp, Artificial sequence
  SiRNA target sequence
aggacgctataagtcagaaatc

SEQ ID NO: 184770 - DNA, 22 bp, Artificial sequence
  SiRNA target sequence
ggacgctataagtcagaaatcg

SEQ ID NO: 184771 - DNA, 22 bp, Artificial sequence
  SiRNA target sequence
gacgctataagtcagaaatcgc

SEQ ID NO: 184772 - DNA, 22 bp, Artificial sequence
  SiRNA target sequence
acgctataagtcagaaatcgcc

SEQ ID NO: 184773 - DNA, 22 bp, Artificial sequence
  SiRNA target sequence
cgctataagtcagaaatcgcct

SEQ ID NO: 184774 - DNA, 22 bp, Artificial sequence
  SiRNA target sequence
gctataagtcagaaatcgcctc

SEQ ID NO: 184775 - DNA, 22 bp, Artificial sequence
  SiRNA target sequence
ctataagtcagaaatcgcctcc

SEQ ID NO: 184776 - DNA, 22 bp, Artificial sequence
  SiRNA target sequence
tataagtcagaaatcgcctccg

SEQ ID NO: 184777 - DNA, 22 bp, Artificial sequence
  SiRNA target sequence
ataagtcagaaatcgcctccgg

SEQ ID NO: 184778 - DNA, 22 bp, Artificial sequence
  SiRNA target sequence
taagtcagaaatcgcctccgga

SEQ ID NO: 184779 - DNA, 22 bp, Artificial sequence
  SiRNA target sequence
aagtcagaaatcgcctccggaa

SEQ ID NO: 184780 - DNA, 22 bp, Artificial sequence
  SiRNA target sequence
agtcagaaatcgcctccggaaa

SEQ ID NO: 184781 - DNA, 22 bp, Artificial sequence
  SiRNA target sequence
gtcagaaatcgcctccggaaaa

SEQ ID NO: 184782 - DNA, 22 bp, Artificial sequence
  SiRNA target sequence
tcagaaatcgcctccggaaaaa

SEQ ID NO: 184783 - DNA, 22 bp, Artificial sequence
  SiRNA target sequence
cagaaatcgcctccggaaaaat

SEQ ID NO: 184784 - DNA, 22 bp, Artificial sequence
  SiRNA target sequence
agaaatcgcctccggaaaaatg

SEQ ID NO: 184785 - DNA, 22 bp, Artificial sequence
  SiRNA target sequence
gaaatcgcctccggaaaaatgt

SEQ ID NO: 184786 - DNA, 22 bp, Artificial sequence
  SiRNA target sequence
aaatcgcctccggaaaaatgtt

SEQ ID NO: 184787 - DNA, 22 bp, Artificial sequence
  SiRNA target sequence
aatcgcctccggaaaaatgttg

SEQ ID NO: 184788 - DNA, 22 bp, Artificial sequence
  SiRNA target sequence
atcgcctccggaaaaatgttgt

SEQ ID NO: 184789 - DNA, 22 bp, Artificial sequence
  SiRNA target sequence
tcgcctccggaaaaatgttgtt

SEQ ID NO: 184790 - DNA, 22 bp, Artificial sequence
  SiRNA target sequence
cgcctccggaaaaatgttgttt

SEQ ID NO: 184791 - DNA, 22 bp, Artificial sequence
  SiRNA target sequence
gcctccggaaaaatgttgttta

SEQ ID NO: 184792 - DNA, 22 bp, Artificial sequence
  SiRNA target sequence
cctccggaaaaatgttgtttac

SEQ ID NO: 184793 - DNA, 22 bp, Artificial sequence
  SiRNA target sequence
ctccggaaaaatgttgtttact

SEQ ID NO: 184794 - DNA, 22 bp, Artificial sequence
  SiRNA target sequence
tccggaaaaatgttgtttactg

SEQ ID NO: 184795 - DNA, 22 bp, Artificial sequence
  SiRNA target sequence
ccggaaaaatgttgtttactgt

SEQ ID NO: 184796 - DNA, 22 bp, Artificial sequence
  SiRNA target sequence
cggaaaaatgttgtttactgtt

SEQ ID NO: 184797 - DNA, 22 bp, Artificial sequence
  SiRNA target sequence
ggaaaaatgttgtttactgtta

SEQ ID NO: 184798 - DNA, 22 bp, Artificial sequence
  SiRNA target sequence
gaaaaatgttgtttactgttaa

SEQ ID NO: 184799 - DNA, 22 bp, Artificial sequence
  SiRNA target sequence
aaaaatgttgtttactgttaat

SEQ ID NO: 184800 - DNA, 22 bp, Artificial sequence
  SiRNA target sequence
aaaatgttgtttactgttaatg

SEQ ID NO: 184801 - DNA, 22 bp, Artificial sequence
  SiRNA target sequence
aaatgttgtttactgttaatga

SEQ ID NO: 184802 - DNA, 22 bp, Artificial sequence
  SiRNA target sequence
aatgttgtttactgttaatgat

SEQ ID NO: 184803 - DNA, 22 bp, Artificial sequence
  SiRNA target sequence
atgttgtttactgttaatgata

SEQ ID NO: 184804 - DNA, 22 bp, Artificial sequence
  SiRNA target sequence
tgttgtttactgttaatgatat

SEQ ID NO: 184805 - DNA, 22 bp, Artificial sequence
  SiRNA target sequence
gttgtttactgttaatgatata

SEQ ID NO: 184806 - DNA, 22 bp, Artificial sequence
  SiRNA target sequence
ttgtttactgttaatgatatat

SEQ ID NO: 184807 - DNA, 22 bp, Artificial sequence
  SiRNA target sequence
tgtttactgttaatgatatatt

SEQ ID NO: 184808 - DNA, 22 bp, Artificial sequence
  SiRNA target sequence
gtttactgttaatgatatatta

SEQ ID NO: 184809 - DNA, 22 bp, Artificial sequence
  SiRNA target sequence
tttactgttaatgatatattaa

SEQ ID NO: 184810 - DNA, 22 bp, Artificial sequence
  SiRNA target sequence
ttactgttaatgatatattaaa

SEQ ID NO: 184811 - DNA, 22 bp, Artificial sequence
  SiRNA target sequence
tactgttaatgatatattaaaa

SEQ ID NO: 184812 - DNA, 22 bp, Artificial sequence
  SiRNA target sequence
actgttaatgatatattaaaaa

SEQ ID NO: 184813 - DNA, 22 bp, Artificial sequence
  SiRNA target sequence
ctgttaatgatatattaaaaaa

SEQ ID NO: 184814 - DNA, 22 bp, Artificial sequence
  SiRNA target sequence
tgttaatgatatattaaaaaaa

SEQ ID NO: 184815 - DNA, 22 bp, Artificial sequence
  SiRNA target sequence
gttaatgatatattaaaaaaag

SEQ ID NO: 184816 - DNA, 22 bp, Artificial sequence
  SiRNA target sequence
ttaatgatatattaaaaaaagt

SEQ ID NO: 184817 - DNA, 22 bp, Artificial sequence
  SiRNA target sequence
taatgatatattaaaaaaagtt

SEQ ID NO: 184818 - DNA, 22 bp, Artificial sequence
  SiRNA target sequence
aatgatatattaaaaaaagttg

SEQ ID NO: 184819 - DNA, 22 bp, Artificial sequence
  SiRNA target sequence
atgatatattaaaaaaagttga

SEQ ID NO: 184820 - DNA, 22 bp, Artificial sequence
  SiRNA target sequence
tgatatattaaaaaaagttgat

SEQ ID NO: 184821 - DNA, 22 bp, Artificial sequence
  SiRNA target sequence
gatatattaaaaaaagttgatg

SEQ ID NO: 184822 - DNA, 22 bp, Artificial sequence
  SiRNA target sequence
atatattaaaaaaagttgatga

SEQ ID NO: 184823 - DNA, 22 bp, Artificial sequence
  SiRNA target sequence
tatattaaaaaaagttgatgaa

SEQ ID NO: 184824 - DNA, 22 bp, Artificial sequence
  SiRNA target sequence
atattaaaaaaagttgatgaaa

SEQ ID NO: 184825 - DNA, 22 bp, Artificial sequence
  SiRNA target sequence
tattaaaaaaagttgatgaaaa

SEQ ID NO: 184826 - DNA, 22 bp, Artificial sequence
  SiRNA target sequence
attaaaaaaagttgatgaaaaa

SEQ ID NO: 184827 - DNA, 22 bp, Artificial sequence
  SiRNA target sequence
ttaaaaaaagttgatgaaaaaa

SEQ ID NO: 184828 - DNA, 22 bp, Artificial sequence
  SiRNA target sequence
taaaaaaagttgatgaaaaaaa

SEQ ID NO: 184829 - DNA, 22 bp, Artificial sequence
  SiRNA target sequence
aaaaaaagttgatgaaaaaaat

SEQ ID NO: 184830 - DNA, 22 bp, Artificial sequence
  SiRNA target sequence
aaaaaagttgatgaaaaaaata

SEQ ID NO: 184831 - DNA, 22 bp, Artificial sequence
  SiRNA target sequence
aaaaagttgatgaaaaaaataa

SEQ ID NO: 184832 - DNA, 22 bp, Artificial sequence
  SiRNA target sequence
aaaagttgatgaaaaaaataaa

SEQ ID NO: 184833 - DNA, 22 bp, Artificial sequence
  SiRNA target sequence
aaagttgatgaaaaaaataaat

SEQ ID NO: 184834 - DNA, 22 bp, Artificial sequence
  SiRNA target sequence
aagttgatgaaaaaaataaatt

SEQ ID NO: 184835 - DNA, 22 bp, Artificial sequence
  SiRNA target sequence
agttgatgaaaaaaataaattt

SEQ ID NO: 184836 - DNA, 22 bp, Artificial sequence
  SiRNA target sequence
gttgatgaaaaaaataaatttg

SEQ ID NO: 184837 - DNA, 22 bp, Artificial sequence
  SiRNA target sequence
ttgatgaaaaaaataaatttga

SEQ ID NO: 184838 - DNA, 22 bp, Artificial sequence
  SiRNA target sequence
tgatgaaaaaaataaatttgac

SEQ ID NO: 184839 - DNA, 22 bp, Artificial sequence
  SiRNA target sequence
gatgaaaaaaataaatttgact

SEQ ID NO: 184840 - DNA, 22 bp, Artificial sequence
  SiRNA target sequence
atgaaaaaaataaatttgacta

SEQ ID NO: 184841 - DNA, 22 bp, Artificial sequence
  SiRNA target sequence
tgaaaaaaataaatttgactat

SEQ ID NO: 184842 - DNA, 22 bp, Artificial sequence
  SiRNA target sequence
gaaaaaaataaatttgactatt

SEQ ID NO: 184843 - DNA, 22 bp, Artificial sequence
  SiRNA target sequence
aaaaaaataaatttgactatta

SEQ ID NO: 184844 - DNA, 22 bp, Artificial sequence
  SiRNA target sequence
aaaaaataaatttgactattac

SEQ ID NO: 184845 - DNA, 22 bp, Artificial sequence
  SiRNA target sequence
aaaaataaatttgactattacg

SEQ ID NO: 184846 - DNA, 22 bp, Artificial sequence
  SiRNA target sequence
aaaataaatttgactattacgt

SEQ ID NO: 184847 - DNA, 22 bp, Artificial sequence
  SiRNA target sequence
aaataaatttgactattacgta

SEQ ID NO: 184848 - DNA, 22 bp, Artificial sequence
  SiRNA target sequence
aataaatttgactattacgtag

SEQ ID NO: 184849 - DNA, 22 bp, Artificial sequence
  SiRNA target sequence
ataaatttgactattacgtaga

SEQ ID NO: 184850 - DNA, 22 bp, Artificial sequence
  SiRNA target sequence
taaatttgactattacgtagat

SEQ ID NO: 184851 - DNA, 22 bp, Artificial sequence
  SiRNA target sequence
aaatttgactattacgtagata

SEQ ID NO: 184852 - DNA, 22 bp, Artificial sequence
  SiRNA target sequence
aatttgactattacgtagataa

SEQ ID NO: 184853 - DNA, 22 bp, Artificial sequence
  SiRNA target sequence
atttgactattacgtagataaa

SEQ ID NO: 184854 - DNA, 22 bp, Artificial sequence
  SiRNA target sequence
tttgactattacgtagataaaa

SEQ ID NO: 184855 - DNA, 22 bp, Artificial sequence
  SiRNA target sequence
ttgactattacgtagataaaat

SEQ ID NO: 184856 - DNA, 22 bp, Artificial sequence
  SiRNA target sequence
tgactattacgtagataaaatg

SEQ ID NO: 184857 - DNA, 22 bp, Artificial sequence
  SiRNA target sequence
gactattacgtagataaaatgg

SEQ ID NO: 184858 - DNA, 22 bp, Artificial sequence
  SiRNA target sequence
actattacgtagataaaatggc

SEQ ID NO: 184859 - DNA, 22 bp, Artificial sequence
  SiRNA target sequence
ctattacgtagataaaatggca

SEQ ID NO: 184860 - DNA, 22 bp, Artificial sequence
  SiRNA target sequence
tattacgtagataaaatggcac

SEQ ID NO: 184861 - DNA, 22 bp, Artificial sequence
  SiRNA target sequence
attacgtagataaaatggcact

SEQ ID NO: 184862 - DNA, 22 bp, Artificial sequence
  SiRNA target sequence
ttacgtagataaaatggcactt

SEQ ID NO: 184863 - DNA, 22 bp, Artificial sequence
  SiRNA target sequence
tacgtagataaaatggcactta

SEQ ID NO: 184864 - DNA, 22 bp, Artificial sequence
  SiRNA target sequence
acgtagataaaatggcacttaa

SEQ ID NO: 184865 - DNA, 22 bp, Artificial sequence
  SiRNA target sequence
cgtagataaaatggcacttaaa

SEQ ID NO: 184866 - DNA, 22 bp, Artificial sequence
  SiRNA target sequence
gtagataaaatggcacttaaaa

SEQ ID NO: 184867 - DNA, 22 bp, Artificial sequence
  SiRNA target sequence
tagataaaatggcacttaaaaa

SEQ ID NO: 184868 - DNA, 22 bp, Artificial sequence
  SiRNA target sequence
agataaaatggcacttaaaaat

SEQ ID NO: 184869 - DNA, 22 bp, Artificial sequence
  SiRNA target sequence
gataaaatggcacttaaaaatg

SEQ ID NO: 184870 - DNA, 22 bp, Artificial sequence
  SiRNA target sequence
ataaaatggcacttaaaaatgt

SEQ ID NO: 184871 - DNA, 22 bp, Artificial sequence
  SiRNA target sequence
taaaatggcacttaaaaatgta

SEQ ID NO: 184872 - DNA, 22 bp, Artificial sequence
  SiRNA target sequence
aaaatggcacttaaaaatgtat

SEQ ID NO: 184873 - DNA, 22 bp, Artificial sequence
  SiRNA target sequence
aaatggcacttaaaaatgtatt

SEQ ID NO: 184874 - DNA, 22 bp, Artificial sequence
  SiRNA target sequence
aatggcacttaaaaatgtatta

SEQ ID NO: 184875 - DNA, 22 bp, Artificial sequence
  SiRNA target sequence
atggcacttaaaaatgtattaa

SEQ ID NO: 184876 - DNA, 22 bp, Artificial sequence
  SiRNA target sequence
tggcacttaaaaatgtattaac

SEQ ID NO: 184877 - DNA, 22 bp, Artificial sequence
  SiRNA target sequence
ggcacttaaaaatgtattaaca

SEQ ID NO: 184878 - DNA, 22 bp, Artificial sequence
  SiRNA target sequence
gcacttaaaaatgtattaacaa

SEQ ID NO: 184879 - DNA, 22 bp, Artificial sequence
  SiRNA target sequence
cacttaaaaatgtattaacaag

SEQ ID NO: 184880 - DNA, 22 bp, Artificial sequence
  SiRNA target sequence
acttaaaaatgtattaacaaga

SEQ ID NO: 184881 - DNA, 22 bp, Artificial sequence
  SiRNA target sequence
cttaaaaatgtattaacaagag

SEQ ID NO: 184882 - DNA, 22 bp, Artificial sequence
  SiRNA target sequence
ttaaaaatgtattaacaagaga

SEQ ID NO: 184883 - DNA, 22 bp, Artificial sequence
  SiRNA target sequence
taaaaatgtattaacaagagaa

SEQ ID NO: 184884 - DNA, 22 bp, Artificial sequence
  SiRNA target sequence
aaaaatgtattaacaagagaat

SEQ ID NO: 184885 - DNA, 22 bp, Artificial sequence
  SiRNA target sequence
aaaatgtattaacaagagaatt

SEQ ID NO: 184886 - DNA, 22 bp, Artificial sequence
  SiRNA target sequence
aaatgtattaacaagagaatta

SEQ ID NO: 184887 - DNA, 22 bp, Artificial sequence
  SiRNA target sequence
aatgtattaacaagagaattag

SEQ ID NO: 184888 - DNA, 22 bp, Artificial sequence
  SiRNA target sequence
atgtattaacaagagaattaga

SEQ ID NO: 184889 - DNA, 22 bp, Artificial sequence
  SiRNA target sequence
tgtattaacaagagaattagag

SEQ ID NO: 184890 - DNA, 22 bp, Artificial sequence
  SiRNA target sequence
gtattaacaagagaattagagc

SEQ ID NO: 184891 - DNA, 22 bp, Artificial sequence
  SiRNA target sequence
tattaacaagagaattagagca

SEQ ID NO: 184892 - DNA, 22 bp, Artificial sequence
  SiRNA target sequence
attaacaagagaattagagcaa

SEQ ID NO: 184893 - DNA, 22 bp, Artificial sequence
  SiRNA target sequence
ttaacaagagaattagagcaat

SEQ ID NO: 184894 - DNA, 22 bp, Artificial sequence
  SiRNA target sequence
taacaagagaattagagcaatt

SEQ ID NO: 184895 - DNA, 22 bp, Artificial sequence
  SiRNA target sequence
aacaagagaattagagcaatta

SEQ ID NO: 184896 - DNA, 22 bp, Artificial sequence
  SiRNA target sequence
acaagagaattagagcaattaa

SEQ ID NO: 184897 - DNA, 22 bp, Artificial sequence
  SiRNA target sequence
caagagaattagagcaattaag

SEQ ID NO: 184898 - DNA, 22 bp, Artificial sequence
  SiRNA target sequence
aagagaattagagcaattaagt

SEQ ID NO: 184899 - DNA, 22 bp, Artificial sequence
  SiRNA target sequence
agagaattagagcaattaagtg

SEQ ID NO: 184900 - DNA, 22 bp, Artificial sequence
  SiRNA target sequence
gagaattagagcaattaagtgg

SEQ ID NO: 184901 - DNA, 22 bp, Artificial sequence
  SiRNA target sequence
agaattagagcaattaagtggt

SEQ ID NO: 184902 - DNA, 22 bp, Artificial sequence
  SiRNA target sequence
gaattagagcaattaagtggtg

SEQ ID NO: 184903 - DNA, 22 bp, Artificial sequence
  SiRNA target sequence
aattagagcaattaagtggtgg

SEQ ID NO: 184904 - DNA, 22 bp, Artificial sequence
  SiRNA target sequence
attagagcaattaagtggtggt

SEQ ID NO: 184905 - DNA, 22 bp, Artificial sequence
  SiRNA target sequence
ttagagcaattaagtggtggtg

SEQ ID NO: 184906 - DNA, 22 bp, Artificial sequence
  SiRNA target sequence
tagagcaattaagtggtggtga

SEQ ID NO: 184907 - DNA, 22 bp, Artificial sequence
  SiRNA target sequence
agagcaattaagtggtggtgaa

SEQ ID NO: 184908 - DNA, 22 bp, Artificial sequence
  SiRNA target sequence
gagcaattaagtggtggtgaac

SEQ ID NO: 184909 - DNA, 22 bp, Artificial sequence
  SiRNA target sequence
agcaattaagtggtggtgaact

SEQ ID NO: 184910 - DNA, 22 bp, Artificial sequence
  SiRNA target sequence
gcaattaagtggtggtgaactt

SEQ ID NO: 184911 - DNA, 22 bp, Artificial sequence
  SiRNA target sequence
caattaagtggtggtgaacttc

SEQ ID NO: 184912 - DNA, 22 bp, Artificial sequence
  SiRNA target sequence
aattaagtggtggtgaacttca

SEQ ID NO: 184913 - DNA, 22 bp, Artificial sequence
  SiRNA target sequence
attaagtggtggtgaacttcaa

SEQ ID NO: 184914 - DNA, 22 bp, Artificial sequence
  SiRNA target sequence
ttaagtggtggtgaacttcaaa

SEQ ID NO: 184915 - DNA, 22 bp, Artificial sequence
  SiRNA target sequence
taagtggtggtgaacttcaaag

SEQ ID NO: 184916 - DNA, 22 bp, Artificial sequence
  SiRNA target sequence
aagtggtggtgaacttcaaaga

SEQ ID NO: 184917 - DNA, 22 bp, Artificial sequence
  SiRNA target sequence
agtggtggtgaacttcaaagat

SEQ ID NO: 184918 - DNA, 22 bp, Artificial sequence
  SiRNA target sequence
gtggtggtgaacttcaaagatt

SEQ ID NO: 184919 - DNA, 22 bp, Artificial sequence
  SiRNA target sequence
tggtggtgaacttcaaagattt

SEQ ID NO: 184920 - DNA, 22 bp, Artificial sequence
  SiRNA target sequence
ggtggtgaacttcaaagatttt

SEQ ID NO: 184921 - DNA, 22 bp, Artificial sequence
  SiRNA target sequence
gtggtgaacttcaaagattttg

SEQ ID NO: 184922 - DNA, 22 bp, Artificial sequence
  SiRNA target sequence
tggtgaacttcaaagattttgt

SEQ ID NO: 184923 - DNA, 22 bp, Artificial sequence
  SiRNA target sequence
ggtgaacttcaaagattttgta

SEQ ID NO: 184924 - DNA, 22 bp, Artificial sequence
  SiRNA target sequence
gtgaacttcaaagattttgtat

SEQ ID NO: 184925 - DNA, 22 bp, Artificial sequence
  SiRNA target sequence
tgaacttcaaagattttgtatt

SEQ ID NO: 184926 - DNA, 22 bp, Artificial sequence
  SiRNA target sequence
gaacttcaaagattttgtattg

SEQ ID NO: 184927 - DNA, 22 bp, Artificial sequence
  SiRNA target sequence
aacttcaaagattttgtattgc

SEQ ID NO: 184928 - DNA, 22 bp, Artificial sequence
  SiRNA target sequence
acttcaaagattttgtattgca

SEQ ID NO: 184929 - DNA, 22 bp, Artificial sequence
  SiRNA target sequence
cttcaaagattttgtattgcat

SEQ ID NO: 184930 - DNA, 22 bp, Artificial sequence
  SiRNA target sequence
ttcaaagattttgtattgcata

SEQ ID NO: 184931 - DNA, 22 bp, Artificial sequence
  SiRNA target sequence
tcaaagattttgtattgcatac

SEQ ID NO: 184932 - DNA, 22 bp, Artificial sequence
  SiRNA target sequence
caaagattttgtattgcataca

SEQ ID NO: 184933 - DNA, 22 bp, Artificial sequence
  SiRNA target sequence
aaagattttgtattgcatacac

SEQ ID NO: 184934 - DNA, 22 bp, Artificial sequence
  SiRNA target sequence
aagattttgtattgcatacaca

SEQ ID NO: 184935 - DNA, 22 bp, Artificial sequence
  SiRNA target sequence
agattttgtattgcatacacat

SEQ ID NO: 184936 - DNA, 22 bp, Artificial sequence
  SiRNA target sequence
gattttgtattgcatacacatg

SEQ ID NO: 184937 - DNA, 22 bp, Artificial sequence
  SiRNA target sequence
attttgtattgcatacacatgt

SEQ ID NO: 184938 - DNA, 22 bp, Artificial sequence
  SiRNA target sequence
ttttgtattgcatacacatgtt

SEQ ID NO: 184939 - DNA, 22 bp, Artificial sequence
  SiRNA target sequence
tttgtattgcatacacatgttt

SEQ ID NO: 184940 - DNA, 22 bp, Artificial sequence
  SiRNA target sequence
ttgtattgcatacacatgttta

SEQ ID NO: 184941 - DNA, 22 bp, Artificial sequence
  SiRNA target sequence
tgtattgcatacacatgtttac

SEQ ID NO: 184942 - DNA, 22 bp, Artificial sequence
  SiRNA target sequence
gtattgcatacacatgtttaca

SEQ ID NO: 184943 - DNA, 22 bp, Artificial sequence
  SiRNA target sequence
tattgcatacacatgtttacaa

SEQ ID NO: 184944 - DNA, 22 bp, Artificial sequence
  SiRNA target sequence
attgcatacacatgtttacaag

SEQ ID NO: 184945 - DNA, 22 bp, Artificial sequence
  SiRNA target sequence
ttgcatacacatgtttacaaga

SEQ ID NO: 184946 - DNA, 22 bp, Artificial sequence
  SiRNA target sequence
tgcatacacatgtttacaagaa

SEQ ID NO: 184947 - DNA, 22 bp, Artificial sequence
  SiRNA target sequence
gcatacacatgtttacaagaag

SEQ ID NO: 184948 - DNA, 22 bp, Artificial sequence
  SiRNA target sequence
catacacatgtttacaagaagg

SEQ ID NO: 184949 - DNA, 22 bp, Artificial sequence
  SiRNA target sequence
atacacatgtttacaagaagga

SEQ ID NO: 184950 - DNA, 22 bp, Artificial sequence
  SiRNA target sequence
tacacatgtttacaagaaggaa

SEQ ID NO: 184951 - DNA, 22 bp, Artificial sequence
  SiRNA target sequence
acacatgtttacaagaaggaaa

SEQ ID NO: 184952 - DNA, 22 bp, Artificial sequence
  SiRNA target sequence
cacatgtttacaagaaggaaat

SEQ ID NO: 184953 - DNA, 22 bp, Artificial sequence
  SiRNA target sequence
acatgtttacaagaaggaaatg

SEQ ID NO: 184954 - DNA, 22 bp, Artificial sequence
  SiRNA target sequence
catgtttacaagaaggaaatgt

SEQ ID NO: 184955 - DNA, 22 bp, Artificial sequence
  SiRNA target sequence
atgtttacaagaaggaaatgtt

SEQ ID NO: 184956 - DNA, 22 bp, Artificial sequence
  SiRNA target sequence
tgtttacaagaaggaaatgttt

SEQ ID NO: 184957 - DNA, 22 bp, Artificial sequence
  SiRNA target sequence
gtttacaagaaggaaatgttta

SEQ ID NO: 184958 - DNA, 22 bp, Artificial sequence
  SiRNA target sequence
tttacaagaaggaaatgtttat

SEQ ID NO: 184959 - DNA, 22 bp, Artificial sequence
  SiRNA target sequence
ttacaagaaggaaatgtttata

SEQ ID NO: 184960 - DNA, 22 bp, Artificial sequence
  SiRNA target sequence
tacaagaaggaaatgtttatat

SEQ ID NO: 184961 - DNA, 22 bp, Artificial sequence
  SiRNA target sequence
acaagaaggaaatgtttatatt

SEQ ID NO: 184962 - DNA, 22 bp, Artificial sequence
  SiRNA target sequence
caagaaggaaatgtttatattt

SEQ ID NO: 184963 - DNA, 22 bp, Artificial sequence
  SiRNA target sequence
aagaaggaaatgtttatatttt

SEQ ID NO: 184964 - DNA, 22 bp, Artificial sequence
  SiRNA target sequence
agaaggaaatgtttatattttt

SEQ ID NO: 184965 - DNA, 22 bp, Artificial sequence
  SiRNA target sequence
gaaggaaatgtttatatttttg

SEQ ID NO: 184966 - DNA, 22 bp, Artificial sequence
  SiRNA target sequence
aaggaaatgtttatatttttga

SEQ ID NO: 184967 - DNA, 22 bp, Artificial sequence
  SiRNA target sequence
aggaaatgtttatatttttgat

SEQ ID NO: 184968 - DNA, 22 bp, Artificial sequence
  SiRNA target sequence
ggaaatgtttatatttttgatg

SEQ ID NO: 184969 - DNA, 22 bp, Artificial sequence
  SiRNA target sequence
gaaatgtttatatttttgatga

SEQ ID NO: 184970 - DNA, 22 bp, Artificial sequence
  SiRNA target sequence
aaatgtttatatttttgatgaa

SEQ ID NO: 184971 - DNA, 22 bp, Artificial sequence
  SiRNA target sequence
aatgtttatatttttgatgaac

SEQ ID NO: 184972 - DNA, 22 bp, Artificial sequence
  SiRNA target sequence
atgtttatatttttgatgaacc

SEQ ID NO: 184973 - DNA, 22 bp, Artificial sequence
  SiRNA target sequence
tgtttatatttttgatgaaccc

SEQ ID NO: 184974 - DNA, 22 bp, Artificial sequence
  SiRNA target sequence
gtttatatttttgatgaaccca

SEQ ID NO: 184975 - DNA, 22 bp, Artificial sequence
  SiRNA target sequence
tttatatttttgatgaacccac

SEQ ID NO: 184976 - DNA, 22 bp, Artificial sequence
  SiRNA target sequence
ttatatttttgatgaacccact

SEQ ID NO: 184977 - DNA, 22 bp, Artificial sequence
  SiRNA target sequence
tatatttttgatgaacccacta

SEQ ID NO: 184978 - DNA, 22 bp, Artificial sequence
  SiRNA target sequence
atatttttgatgaacccactag

SEQ ID NO: 184979 - DNA, 22 bp, Artificial sequence
  SiRNA target sequence
tatttttgatgaacccactagt

SEQ ID NO: 184980 - DNA, 22 bp, Artificial sequence
  SiRNA target sequence
atttttgatgaacccactagtt

SEQ ID NO: 184981 - DNA, 22 bp, Artificial sequence
  SiRNA target sequence
tttttgatgaacccactagttt

SEQ ID NO: 184982 - DNA, 22 bp, Artificial sequence
  SiRNA target sequence
ttttgatgaacccactagtttt

SEQ ID NO: 184983 - DNA, 22 bp, Artificial sequence
  SiRNA target sequence
tttgatgaacccactagttttt

SEQ ID NO: 184984 - DNA, 22 bp, Artificial sequence
  SiRNA target sequence
ttgatgaacccactagtttttt

SEQ ID NO: 184985 - DNA, 22 bp, Artificial sequence
  SiRNA target sequence
tgatgaacccactagttttttg

SEQ ID NO: 184986 - DNA, 22 bp, Artificial sequence
  SiRNA target sequence
gatgaacccactagttttttgg

SEQ ID NO: 184987 - DNA, 22 bp, Artificial sequence
  SiRNA target sequence
atgaacccactagttttttgga

SEQ ID NO: 184988 - DNA, 22 bp, Artificial sequence
  SiRNA target sequence
tgaacccactagttttttggat

SEQ ID NO: 184989 - DNA, 22 bp, Artificial sequence
  SiRNA target sequence
gaacccactagttttttggatg

SEQ ID NO: 184990 - DNA, 22 bp, Artificial sequence
  SiRNA target sequence
aacccactagttttttggatgt

SEQ ID NO: 184991 - DNA, 22 bp, Artificial sequence
  SiRNA target sequence
acccactagttttttggatgtt

SEQ ID NO: 184992 - DNA, 22 bp, Artificial sequence
  SiRNA target sequence
cccactagttttttggatgtta

SEQ ID NO: 184993 - DNA, 22 bp, Artificial sequence
  SiRNA target sequence
ccactagttttttggatgttaa

SEQ ID NO: 184994 - DNA, 22 bp, Artificial sequence
  SiRNA target sequence
cactagttttttggatgttaag

SEQ ID NO: 184995 - DNA, 22 bp, Artificial sequence
  SiRNA target sequence
actagttttttggatgttaagc

SEQ ID NO: 184996 - DNA, 22 bp, Artificial sequence
  SiRNA target sequence
ctagttttttggatgttaagca

SEQ ID NO: 184997 - DNA, 22 bp, Artificial sequence
  SiRNA target sequence
tagttttttggatgttaagcag

SEQ ID NO: 184998 - DNA, 22 bp, Artificial sequence
  SiRNA target sequence
agttttttggatgttaagcagc

SEQ ID NO: 184999 - DNA, 22 bp, Artificial sequence
  SiRNA target sequence
gttttttggatgttaagcagcg

SEQ ID NO: 185000 - DNA, 22 bp, Artificial sequence
  SiRNA target sequence
ttttttggatgttaagcagcga

SEQ ID NO: 185001 - DNA, 22 bp, Artificial sequence
  SiRNA target sequence
tttttggatgttaagcagcgac

SEQ ID NO: 185002 - DNA, 22 bp, Artificial sequence
  SiRNA target sequence
ttttggatgttaagcagcgact

SEQ ID NO: 185003 - DNA, 22 bp, Artificial sequence
  SiRNA target sequence
tttggatgttaagcagcgacta

SEQ ID NO: 185004 - DNA, 22 bp, Artificial sequence
  SiRNA target sequence
ttggatgttaagcagcgactag

SEQ ID NO: 185005 - DNA, 22 bp, Artificial sequence
  SiRNA target sequence
tggatgttaagcagcgactagc

SEQ ID NO: 185006 - DNA, 22 bp, Artificial sequence
  SiRNA target sequence
ggatgttaagcagcgactagca

SEQ ID NO: 185007 - DNA, 22 bp, Artificial sequence
  SiRNA target sequence
gatgttaagcagcgactagcag

SEQ ID NO: 185008 - DNA, 22 bp, Artificial sequence
  SiRNA target sequence
atgttaagcagcgactagcagc

SEQ ID NO: 185009 - DNA, 22 bp, Artificial sequence
  SiRNA target sequence
tgttaagcagcgactagcagct

SEQ ID NO: 185010 - DNA, 22 bp, Artificial sequence
  SiRNA target sequence
gttaagcagcgactagcagctg

SEQ ID NO: 185011 - DNA, 22 bp, Artificial sequence
  SiRNA target sequence
ttaagcagcgactagcagctgc

SEQ ID NO: 185012 - DNA, 22 bp, Artificial sequence
  SiRNA target sequence
taagcagcgactagcagctgct

SEQ ID NO: 185013 - DNA, 22 bp, Artificial sequence
  SiRNA target sequence
aagcagcgactagcagctgcta

SEQ ID NO: 185014 - DNA, 22 bp, Artificial sequence
  SiRNA target sequence
agcagcgactagcagctgctaa

SEQ ID NO: 185015 - DNA, 22 bp, Artificial sequence
  SiRNA target sequence
gcagcgactagcagctgctaag

SEQ ID NO: 185016 - DNA, 22 bp, Artificial sequence
  SiRNA target sequence
cagcgactagcagctgctaagg

SEQ ID NO: 185017 - DNA, 22 bp, Artificial sequence
  SiRNA target sequence
agcgactagcagctgctaagga

SEQ ID NO: 185018 - DNA, 22 bp, Artificial sequence
  SiRNA target sequence
gcgactagcagctgctaaggaa

SEQ ID NO: 185019 - DNA, 22 bp, Artificial sequence
  SiRNA target sequence
cgactagcagctgctaaggaaa

SEQ ID NO: 185020 - DNA, 22 bp, Artificial sequence
  SiRNA target sequence
gactagcagctgctaaggaaat

SEQ ID NO: 185021 - DNA, 22 bp, Artificial sequence
  SiRNA target sequence
actagcagctgctaaggaaata

SEQ ID NO: 185022 - DNA, 22 bp, Artificial sequence
  SiRNA target sequence
ctagcagctgctaaggaaataa

SEQ ID NO: 185023 - DNA, 22 bp, Artificial sequence
  SiRNA target sequence
tagcagctgctaaggaaataag

SEQ ID NO: 185024 - DNA, 22 bp, Artificial sequence
  SiRNA target sequence
agcagctgctaaggaaataaga

SEQ ID NO: 185025 - DNA, 22 bp, Artificial sequence
  SiRNA target sequence
gcagctgctaaggaaataagaa

SEQ ID NO: 185026 - DNA, 22 bp, Artificial sequence
  SiRNA target sequence
cagctgctaaggaaataagaaa

SEQ ID NO: 185027 - DNA, 22 bp, Artificial sequence
  SiRNA target sequence
agctgctaaggaaataagaaat

SEQ ID NO: 185028 - DNA, 22 bp, Artificial sequence
  SiRNA target sequence
gctgctaaggaaataagaaatt

SEQ ID NO: 185029 - DNA, 22 bp, Artificial sequence
  SiRNA target sequence
ctgctaaggaaataagaaattt

SEQ ID NO: 185030 - DNA, 22 bp, Artificial sequence
  SiRNA target sequence
tgctaaggaaataagaaatttg

SEQ ID NO: 185031 - DNA, 22 bp, Artificial sequence
  SiRNA target sequence
gctaaggaaataagaaatttgt

SEQ ID NO: 185032 - DNA, 22 bp, Artificial sequence
  SiRNA target sequence
ctaaggaaataagaaatttgtg

SEQ ID NO: 185033 - DNA, 22 bp, Artificial sequence
  SiRNA target sequence
taaggaaataagaaatttgtgt

SEQ ID NO: 185034 - DNA, 22 bp, Artificial sequence
  SiRNA target sequence
aaggaaataagaaatttgtgtg

SEQ ID NO: 185035 - DNA, 22 bp, Artificial sequence
  SiRNA target sequence
aggaaataagaaatttgtgtga

SEQ ID NO: 185036 - DNA, 22 bp, Artificial sequence
  SiRNA target sequence
ggaaataagaaatttgtgtgaa

SEQ ID NO: 185037 - DNA, 22 bp, Artificial sequence
  SiRNA target sequence
gaaataagaaatttgtgtgaag

SEQ ID NO: 185038 - DNA, 22 bp, Artificial sequence
  SiRNA target sequence
aaataagaaatttgtgtgaaga

SEQ ID NO: 185039 - DNA, 22 bp, Artificial sequence
  SiRNA target sequence
aataagaaatttgtgtgaagaa

SEQ ID NO: 185040 - DNA, 22 bp, Artificial sequence
  SiRNA target sequence
ataagaaatttgtgtgaagaaa

SEQ ID NO: 185041 - DNA, 22 bp, Artificial sequence
  SiRNA target sequence
taagaaatttgtgtgaagaaaa

SEQ ID NO: 185042 - DNA, 22 bp, Artificial sequence
  SiRNA target sequence
aagaaatttgtgtgaagaaaat

SEQ ID NO: 185043 - DNA, 22 bp, Artificial sequence
  SiRNA target sequence
agaaatttgtgtgaagaaaata

SEQ ID NO: 185044 - DNA, 22 bp, Artificial sequence
  SiRNA target sequence
gaaatttgtgtgaagaaaataa

SEQ ID NO: 185045 - DNA, 22 bp, Artificial sequence
  SiRNA target sequence
aaatttgtgtgaagaaaataaa

SEQ ID NO: 185046 - DNA, 22 bp, Artificial sequence
  SiRNA target sequence
aatttgtgtgaagaaaataaat

SEQ ID NO: 185047 - DNA, 22 bp, Artificial sequence
  SiRNA target sequence
atttgtgtgaagaaaataaata

SEQ ID NO: 185048 - DNA, 22 bp, Artificial sequence
  SiRNA target sequence
tttgtgtgaagaaaataaatat

SEQ ID NO: 185049 - DNA, 22 bp, Artificial sequence
  SiRNA target sequence
ttgtgtgaagaaaataaatatg

SEQ ID NO: 185050 - DNA, 22 bp, Artificial sequence
  SiRNA target sequence
tgtgtgaagaaaataaatatgt

SEQ ID NO: 185051 - DNA, 22 bp, Artificial sequence
  SiRNA target sequence
gtgtgaagaaaataaatatgtt

SEQ ID NO: 185052 - DNA, 22 bp, Artificial sequence
  SiRNA target sequence
tgtgaagaaaataaatatgttg

SEQ ID NO: 185053 - DNA, 22 bp, Artificial sequence
  SiRNA target sequence
gtgaagaaaataaatatgttgt

SEQ ID NO: 185054 - DNA, 22 bp, Artificial sequence
  SiRNA target sequence
tgaagaaaataaatatgttgta

SEQ ID NO: 185055 - DNA, 22 bp, Artificial sequence
  SiRNA target sequence
gaagaaaataaatatgttgtag

SEQ ID NO: 185056 - DNA, 22 bp, Artificial sequence
  SiRNA target sequence
aagaaaataaatatgttgtagt

SEQ ID NO: 185057 - DNA, 22 bp, Artificial sequence
  SiRNA target sequence
agaaaataaatatgttgtagtt

SEQ ID NO: 185058 - DNA, 22 bp, Artificial sequence
  SiRNA target sequence
gaaaataaatatgttgtagttg

SEQ ID NO: 185059 - DNA, 22 bp, Artificial sequence
  SiRNA target sequence
aaaataaatatgttgtagttgt

SEQ ID NO: 185060 - DNA, 22 bp, Artificial sequence
  SiRNA target sequence
aaataaatatgttgtagttgtc

SEQ ID NO: 185061 - DNA, 22 bp, Artificial sequence
  SiRNA target sequence
aataaatatgttgtagttgtcg

SEQ ID NO: 185062 - DNA, 22 bp, Artificial sequence
  SiRNA target sequence
ataaatatgttgtagttgtcga

SEQ ID NO: 185063 - DNA, 22 bp, Artificial sequence
  SiRNA target sequence
taaatatgttgtagttgtcgaa

SEQ ID NO: 185064 - DNA, 22 bp, Artificial sequence
  SiRNA target sequence
aaatatgttgtagttgtcgaac

SEQ ID NO: 185065 - DNA, 22 bp, Artificial sequence
  SiRNA target sequence
aatatgttgtagttgtcgaaca

SEQ ID NO: 185066 - DNA, 22 bp, Artificial sequence
  SiRNA target sequence
atatgttgtagttgtcgaacac

SEQ ID NO: 185067 - DNA, 22 bp, Artificial sequence
  SiRNA target sequence
tatgttgtagttgtcgaacacg

SEQ ID NO: 185068 - DNA, 22 bp, Artificial sequence
  SiRNA target sequence
atgttgtagttgtcgaacacga

SEQ ID NO: 185069 - DNA, 22 bp, Artificial sequence
  SiRNA target sequence
tgttgtagttgtcgaacacgat

SEQ ID NO: 185070 - DNA, 22 bp, Artificial sequence
  SiRNA target sequence
gttgtagttgtcgaacacgatt

SEQ ID NO: 185071 - DNA, 22 bp, Artificial sequence
  SiRNA target sequence
ttgtagttgtcgaacacgattt

SEQ ID NO: 185072 - DNA, 22 bp, Artificial sequence
  SiRNA target sequence
tgtagttgtcgaacacgattta

SEQ ID NO: 185073 - DNA, 22 bp, Artificial sequence
  SiRNA target sequence
gtagttgtcgaacacgatttag

SEQ ID NO: 185074 - DNA, 22 bp, Artificial sequence
  SiRNA target sequence
tagttgtcgaacacgatttagc

SEQ ID NO: 185075 - DNA, 22 bp, Artificial sequence
  SiRNA target sequence
agttgtcgaacacgatttagcc

SEQ ID NO: 185076 - DNA, 22 bp, Artificial sequence
  SiRNA target sequence
gttgtcgaacacgatttagcca

SEQ ID NO: 185077 - DNA, 22 bp, Artificial sequence
  SiRNA target sequence
ttgtcgaacacgatttagccat

SEQ ID NO: 185078 - DNA, 22 bp, Artificial sequence
  SiRNA target sequence
tgtcgaacacgatttagccatt

SEQ ID NO: 185079 - DNA, 22 bp, Artificial sequence
  SiRNA target sequence
gtcgaacacgatttagccattt

SEQ ID NO: 185080 - DNA, 22 bp, Artificial sequence
  SiRNA target sequence
tcgaacacgatttagccatttt

SEQ ID NO: 185081 - DNA, 22 bp, Artificial sequence
  SiRNA target sequence
cgaacacgatttagccatttta

SEQ ID NO: 185082 - DNA, 22 bp, Artificial sequence
  SiRNA target sequence
gaacacgatttagccattttag

SEQ ID NO: 185083 - DNA, 22 bp, Artificial sequence
  SiRNA target sequence
aacacgatttagccattttaga

SEQ ID NO: 185084 - DNA, 22 bp, Artificial sequence
  SiRNA target sequence
acacgatttagccattttagat

SEQ ID NO: 185085 - DNA, 22 bp, Artificial sequence
  SiRNA target sequence
cacgatttagccattttagatt

SEQ ID NO: 185086 - DNA, 22 bp, Artificial sequence
  SiRNA target sequence
acgatttagccattttagattt

SEQ ID NO: 185087 - DNA, 22 bp, Artificial sequence
  SiRNA target sequence
cgatttagccattttagatttg

SEQ ID NO: 185088 - DNA, 22 bp, Artificial sequence
  SiRNA target sequence
gatttagccattttagatttga

SEQ ID NO: 185089 - DNA, 22 bp, Artificial sequence
  SiRNA target sequence
atttagccattttagatttgat

SEQ ID NO: 185090 - DNA, 22 bp, Artificial sequence
  SiRNA target sequence
tttagccattttagatttgatg

SEQ ID NO: 185091 - DNA, 22 bp, Artificial sequence
  SiRNA target sequence
ttagccattttagatttgatgt

SEQ ID NO: 185092 - DNA, 22 bp, Artificial sequence
  SiRNA target sequence
tagccattttagatttgatgtg

SEQ ID NO: 185093 - DNA, 22 bp, Artificial sequence
  SiRNA target sequence
agccattttagatttgatgtgt

SEQ ID NO: 185094 - DNA, 22 bp, Artificial sequence
  SiRNA target sequence
gccattttagatttgatgtgtg

SEQ ID NO: 185095 - DNA, 22 bp, Artificial sequence
  SiRNA target sequence
ccattttagatttgatgtgtga

SEQ ID NO: 185096 - DNA, 22 bp, Artificial sequence
  SiRNA target sequence
cattttagatttgatgtgtgat

SEQ ID NO: 185097 - DNA, 22 bp, Artificial sequence
  SiRNA target sequence
attttagatttgatgtgtgatt

SEQ ID NO: 185098 - DNA, 22 bp, Artificial sequence
  SiRNA target sequence
ttttagatttgatgtgtgattt

SEQ ID NO: 185099 - DNA, 22 bp, Artificial sequence
  SiRNA target sequence
tttagatttgatgtgtgatttt

SEQ ID NO: 185100 - DNA, 22 bp, Artificial sequence
  SiRNA target sequence
ttagatttgatgtgtgattttg

SEQ ID NO: 185101 - DNA, 22 bp, Artificial sequence
  SiRNA target sequence
tagatttgatgtgtgattttgg

SEQ ID NO: 185102 - DNA, 22 bp, Artificial sequence
  SiRNA target sequence
agatttgatgtgtgattttgga

SEQ ID NO: 185103 - DNA, 22 bp, Artificial sequence
  SiRNA target sequence
gatttgatgtgtgattttggat

SEQ ID NO: 185104 - DNA, 22 bp, Artificial sequence
  SiRNA target sequence
atttgatgtgtgattttggatg

SEQ ID NO: 185105 - DNA, 22 bp, Artificial sequence
  SiRNA target sequence
tttgatgtgtgattttggatgt

SEQ ID NO: 185106 - DNA, 22 bp, Artificial sequence
  SiRNA target sequence
ttgatgtgtgattttggatgtg

SEQ ID NO: 185107 - DNA, 22 bp, Artificial sequence
  SiRNA target sequence
tgatgtgtgattttggatgtgt

SEQ ID NO: 185108 - DNA, 22 bp, Artificial sequence
  SiRNA target sequence
gatgtgtgattttggatgtgtt

SEQ ID NO: 185109 - DNA, 22 bp, Artificial sequence
  SiRNA target sequence
atgtgtgattttggatgtgttc

SEQ ID NO: 185110 - DNA, 22 bp, Artificial sequence
  SiRNA target sequence
tgtgtgattttggatgtgttct

SEQ ID NO: 185111 - DNA, 22 bp, Artificial sequence
  SiRNA target sequence
gtgtgattttggatgtgttcta

SEQ ID NO: 185112 - DNA, 22 bp, Artificial sequence
  SiRNA target sequence
tgtgattttggatgtgttctat

SEQ ID NO: 185113 - DNA, 22 bp, Artificial sequence
  SiRNA target sequence
gtgattttggatgtgttctata

SEQ ID NO: 185114 - DNA, 22 bp, Artificial sequence
  SiRNA target sequence
tgattttggatgtgttctatac

SEQ ID NO: 185115 - DNA, 22 bp, Artificial sequence
  SiRNA target sequence
gattttggatgtgttctatacg

SEQ ID NO: 185116 - DNA, 22 bp, Artificial sequence
  SiRNA target sequence
attttggatgtgttctatacgg

SEQ ID NO: 185117 - DNA, 22 bp, Artificial sequence
  SiRNA target sequence
ttttggatgtgttctatacgga

SEQ ID NO: 185118 - DNA, 22 bp, Artificial sequence
  SiRNA target sequence
tttggatgtgttctatacggac

SEQ ID NO: 185119 - DNA, 22 bp, Artificial sequence
  SiRNA target sequence
ttggatgtgttctatacggaca

SEQ ID NO: 185120 - DNA, 22 bp, Artificial sequence
  SiRNA target sequence
tggatgtgttctatacggacaa

SEQ ID NO: 185121 - DNA, 22 bp, Artificial sequence
  SiRNA target sequence
ggatgtgttctatacggacaat

SEQ ID NO: 185122 - DNA, 22 bp, Artificial sequence
  SiRNA target sequence
gatgtgttctatacggacaatc

SEQ ID NO: 185123 - DNA, 22 bp, Artificial sequence
  SiRNA target sequence
atgtgttctatacggacaatct

SEQ ID NO: 185124 - DNA, 22 bp, Artificial sequence
  SiRNA target sequence
tgtgttctatacggacaatctg

SEQ ID NO: 185125 - DNA, 22 bp, Artificial sequence
  SiRNA target sequence
gtgttctatacggacaatctgg

SEQ ID NO: 185126 - DNA, 22 bp, Artificial sequence
  SiRNA target sequence
tgttctatacggacaatctggg

SEQ ID NO: 185127 - DNA, 22 bp, Artificial sequence
  SiRNA target sequence
gttctatacggacaatctgggg

SEQ ID NO: 185128 - DNA, 22 bp, Artificial sequence
  SiRNA target sequence
ttctatacggacaatctggggc

SEQ ID NO: 185129 - DNA, 22 bp, Artificial sequence
  SiRNA target sequence
tctatacggacaatctggggca

SEQ ID NO: 185130 - DNA, 22 bp, Artificial sequence
  SiRNA target sequence
ctatacggacaatctggggcat

SEQ ID NO: 185131 - DNA, 22 bp, Artificial sequence
  SiRNA target sequence
tatacggacaatctggggcata

SEQ ID NO: 185132 - DNA, 22 bp, Artificial sequence
  SiRNA target sequence
atacggacaatctggggcatac

SEQ ID NO: 185133 - DNA, 22 bp, Artificial sequence
  SiRNA target sequence
tacggacaatctggggcatacg

SEQ ID NO: 185134 - DNA, 22 bp, Artificial sequence
  SiRNA target sequence
acggacaatctggggcatacgg

SEQ ID NO: 185135 - DNA, 22 bp, Artificial sequence
  SiRNA target sequence
cggacaatctggggcatacggt

SEQ ID NO: 185136 - DNA, 22 bp, Artificial sequence
  SiRNA target sequence
ggacaatctggggcatacggtg

SEQ ID NO: 185137 - DNA, 22 bp, Artificial sequence
  SiRNA target sequence
gacaatctggggcatacggtgt

SEQ ID NO: 185138 - DNA, 22 bp, Artificial sequence
  SiRNA target sequence
acaatctggggcatacggtgta

SEQ ID NO: 185139 - DNA, 22 bp, Artificial sequence
  SiRNA target sequence
caatctggggcatacggtgtaa

SEQ ID NO: 185140 - DNA, 22 bp, Artificial sequence
  SiRNA target sequence
aatctggggcatacggtgtaat

SEQ ID NO: 185141 - DNA, 22 bp, Artificial sequence
  SiRNA target sequence
atctggggcatacggtgtaata

SEQ ID NO: 185142 - DNA, 22 bp, Artificial sequence
  SiRNA target sequence
tctggggcatacggtgtaataa

SEQ ID NO: 185143 - DNA, 22 bp, Artificial sequence
  SiRNA target sequence
ctggggcatacggtgtaataag

SEQ ID NO: 185144 - DNA, 22 bp, Artificial sequence
  SiRNA target sequence
tggggcatacggtgtaataagc

SEQ ID NO: 185145 - DNA, 22 bp, Artificial sequence
  SiRNA target sequence
ggggcatacggtgtaataagcg

SEQ ID NO: 185146 - DNA, 22 bp, Artificial sequence
  SiRNA target sequence
gggcatacggtgtaataagcgc

SEQ ID NO: 185147 - DNA, 22 bp, Artificial sequence
  SiRNA target sequence
ggcatacggtgtaataagcgca

SEQ ID NO: 185148 - DNA, 22 bp, Artificial sequence
  SiRNA target sequence
gcatacggtgtaataagcgcac

SEQ ID NO: 185149 - DNA, 22 bp, Artificial sequence
  SiRNA target sequence
catacggtgtaataagcgcacc

SEQ ID NO: 185150 - DNA, 22 bp, Artificial sequence
  SiRNA target sequence
atacggtgtaataagcgcacca

SEQ ID NO: 185151 - DNA, 22 bp, Artificial sequence
  SiRNA target sequence
tacggtgtaataagcgcaccat

SEQ ID NO: 185152 - DNA, 22 bp, Artificial sequence
  SiRNA target sequence
acggtgtaataagcgcaccata

SEQ ID NO: 185153 - DNA, 22 bp, Artificial sequence
  SiRNA target sequence
cggtgtaataagcgcaccatac

SEQ ID NO: 185154 - DNA, 22 bp, Artificial sequence
  SiRNA target sequence
ggtgtaataagcgcaccatacg

SEQ ID NO: 185155 - DNA, 22 bp, Artificial sequence
  SiRNA target sequence
gtgtaataagcgcaccatacgt

SEQ ID NO: 185156 - DNA, 22 bp, Artificial sequence
  SiRNA target sequence
tgtaataagcgcaccatacgtt

SEQ ID NO: 185157 - DNA, 22 bp, Artificial sequence
  SiRNA target sequence
gtaataagcgcaccatacgtta

SEQ ID NO: 185158 - DNA, 22 bp, Artificial sequence
  SiRNA target sequence
taataagcgcaccatacgttat

SEQ ID NO: 185159 - DNA, 22 bp, Artificial sequence
  SiRNA target sequence
aataagcgcaccatacgttatt

SEQ ID NO: 185160 - DNA, 22 bp, Artificial sequence
  SiRNA target sequence
ataagcgcaccatacgttatta

SEQ ID NO: 185161 - DNA, 22 bp, Artificial sequence
  SiRNA target sequence
taagcgcaccatacgttattaa

SEQ ID NO: 185162 - DNA, 22 bp, Artificial sequence
  SiRNA target sequence
aagcgcaccatacgttattaaa

SEQ ID NO: 185163 - DNA, 22 bp, Artificial sequence
  SiRNA target sequence
agcgcaccatacgttattaaat

SEQ ID NO: 185164 - DNA, 22 bp, Artificial sequence
  SiRNA target sequence
gcgcaccatacgttattaaatc

SEQ ID NO: 185165 - DNA, 22 bp, Artificial sequence
  SiRNA target sequence
cgcaccatacgttattaaatca

SEQ ID NO: 185166 - DNA, 22 bp, Artificial sequence
  SiRNA target sequence
gcaccatacgttattaaatcag

SEQ ID NO: 185167 - DNA, 22 bp, Artificial sequence
  SiRNA target sequence
caccatacgttattaaatcagc

SEQ ID NO: 185168 - DNA, 22 bp, Artificial sequence
  SiRNA target sequence
accatacgttattaaatcagca

SEQ ID NO: 185169 - DNA, 22 bp, Artificial sequence
  SiRNA target sequence
ccatacgttattaaatcagcaa

SEQ ID NO: 185170 - DNA, 22 bp, Artificial sequence
  SiRNA target sequence
catacgttattaaatcagcaat

SEQ ID NO: 185171 - DNA, 22 bp, Artificial sequence
  SiRNA target sequence
atacgttattaaatcagcaata

SEQ ID NO: 185172 - DNA, 22 bp, Artificial sequence
  SiRNA target sequence
tacgttattaaatcagcaataa

SEQ ID NO: 185173 - DNA, 22 bp, Artificial sequence
  SiRNA target sequence
acgttattaaatcagcaataaa

SEQ ID NO: 185174 - DNA, 22 bp, Artificial sequence
  SiRNA target sequence
cgttattaaatcagcaataaat

SEQ ID NO: 185175 - DNA, 22 bp, Artificial sequence
  SiRNA target sequence
gttattaaatcagcaataaata

SEQ ID NO: 185176 - DNA, 22 bp, Artificial sequence
  SiRNA target sequence
ttattaaatcagcaataaatat

SEQ ID NO: 185177 - DNA, 22 bp, Artificial sequence
  SiRNA target sequence
tattaaatcagcaataaatata

SEQ ID NO: 185178 - DNA, 22 bp, Artificial sequence
  SiRNA target sequence
attaaatcagcaataaatatat

SEQ ID NO: 185179 - DNA, 22 bp, Artificial sequence
  SiRNA target sequence
ttaaatcagcaataaatatatt

SEQ ID NO: 185180 - DNA, 22 bp, Artificial sequence
  SiRNA target sequence
taaatcagcaataaatatattt

SEQ ID NO: 185181 - DNA, 22 bp, Artificial sequence
  SiRNA target sequence
aaatcagcaataaatatatttc

SEQ ID NO: 185182 - DNA, 22 bp, Artificial sequence
  SiRNA target sequence
aatcagcaataaatatatttct

SEQ ID NO: 185183 - DNA, 22 bp, Artificial sequence
  SiRNA target sequence
atcagcaataaatatatttctt

SEQ ID NO: 185184 - DNA, 22 bp, Artificial sequence
  SiRNA target sequence
tcagcaataaatatatttcttg

SEQ ID NO: 185185 - DNA, 22 bp, Artificial sequence
  SiRNA target sequence
cagcaataaatatatttcttga

SEQ ID NO: 185186 - DNA, 22 bp, Artificial sequence
  SiRNA target sequence
agcaataaatatatttcttgat

SEQ ID NO: 185187 - DNA, 22 bp, Artificial sequence
  SiRNA target sequence
gcaataaatatatttcttgatg

SEQ ID NO: 185188 - DNA, 22 bp, Artificial sequence
  SiRNA target sequence
caataaatatatttcttgatgg

SEQ ID NO: 185189 - DNA, 22 bp, Artificial sequence
  SiRNA target sequence
aataaatatatttcttgatgga

SEQ ID NO: 185190 - DNA, 22 bp, Artificial sequence
  SiRNA target sequence
ataaatatatttcttgatggat

SEQ ID NO: 185191 - DNA, 22 bp, Artificial sequence
  SiRNA target sequence
taaatatatttcttgatggatt

SEQ ID NO: 185192 - DNA, 22 bp, Artificial sequence
  SiRNA target sequence
aaatatatttcttgatggattt

SEQ ID NO: 185193 - DNA, 22 bp, Artificial sequence
  SiRNA target sequence
aatatatttcttgatggatttt

SEQ ID NO: 185194 - DNA, 22 bp, Artificial sequence
  SiRNA target sequence
atatatttcttgatggattttt

SEQ ID NO: 185195 - DNA, 22 bp, Artificial sequence
  SiRNA target sequence
tatatttcttgatggatttttg

SEQ ID NO: 185196 - DNA, 22 bp, Artificial sequence
  SiRNA target sequence
atatttcttgatggatttttgc

SEQ ID NO: 185197 - DNA, 22 bp, Artificial sequence
  SiRNA target sequence
tatttcttgatggatttttgcc

SEQ ID NO: 185198 - DNA, 22 bp, Artificial sequence
  SiRNA target sequence
atttcttgatggatttttgcct

SEQ ID NO: 185199 - DNA, 22 bp, Artificial sequence
  SiRNA target sequence
tttcttgatggatttttgccta

SEQ ID NO: 185200 - DNA, 22 bp, Artificial sequence
  SiRNA target sequence
ttcttgatggatttttgcctac

SEQ ID NO: 185201 - DNA, 22 bp, Artificial sequence
  SiRNA target sequence
tcttgatggatttttgcctaca

SEQ ID NO: 185202 - DNA, 22 bp, Artificial sequence
  SiRNA target sequence
cttgatggatttttgcctacag

SEQ ID NO: 185203 - DNA, 22 bp, Artificial sequence
  SiRNA target sequence
ttgatggatttttgcctacaga

SEQ ID NO: 185204 - DNA, 22 bp, Artificial sequence
  SiRNA target sequence
tgatggatttttgcctacagaa

SEQ ID NO: 185205 - DNA, 22 bp, Artificial sequence
  SiRNA target sequence
gatggatttttgcctacagaaa

SEQ ID NO: 185206 - DNA, 22 bp, Artificial sequence
  SiRNA target sequence
atggatttttgcctacagaaaa

SEQ ID NO: 185207 - DNA, 22 bp, Artificial sequence
  SiRNA target sequence
tggatttttgcctacagaaaac

SEQ ID NO: 185208 - DNA, 22 bp, Artificial sequence
  SiRNA target sequence
ggatttttgcctacagaaaaca

SEQ ID NO: 185209 - DNA, 22 bp, Artificial sequence
  SiRNA target sequence
gatttttgcctacagaaaacat

SEQ ID NO: 185210 - DNA, 22 bp, Artificial sequence
  SiRNA target sequence
atttttgcctacagaaaacatg

SEQ ID NO: 185211 - DNA, 22 bp, Artificial sequence
  SiRNA target sequence
tttttgcctacagaaaacatga

SEQ ID NO: 185212 - DNA, 22 bp, Artificial sequence
  SiRNA target sequence
ttttgcctacagaaaacatgaa

SEQ ID NO: 185213 - DNA, 22 bp, Artificial sequence
  SiRNA target sequence
tttgcctacagaaaacatgaaa

SEQ ID NO: 185214 - DNA, 22 bp, Artificial sequence
  SiRNA target sequence
ttgcctacagaaaacatgaaat

SEQ ID NO: 185215 - DNA, 22 bp, Artificial sequence
  SiRNA target sequence
tgcctacagaaaacatgaaatt

SEQ ID NO: 185216 - DNA, 22 bp, Artificial sequence
  SiRNA target sequence
gcctacagaaaacatgaaattt

SEQ ID NO: 185217 - DNA, 22 bp, Artificial sequence
  SiRNA target sequence
cctacagaaaacatgaaattta

SEQ ID NO: 185218 - DNA, 22 bp, Artificial sequence
  SiRNA target sequence
ctacagaaaacatgaaatttag

SEQ ID NO: 185219 - DNA, 22 bp, Artificial sequence
  SiRNA target sequence
tacagaaaacatgaaatttaga

SEQ ID NO: 185220 - DNA, 22 bp, Artificial sequence
  SiRNA target sequence
acagaaaacatgaaatttagaa

SEQ ID NO: 185221 - DNA, 22 bp, Artificial sequence
  SiRNA target sequence
cagaaaacatgaaatttagaaa

SEQ ID NO: 185222 - DNA, 22 bp, Artificial sequence
  SiRNA target sequence
agaaaacatgaaatttagaaat

SEQ ID NO: 185223 - DNA, 22 bp, Artificial sequence
  SiRNA target sequence
gaaaacatgaaatttagaaatt

SEQ ID NO: 185224 - DNA, 22 bp, Artificial sequence
  SiRNA target sequence
aaaacatgaaatttagaaattc

SEQ ID NO: 185225 - DNA, 22 bp, Artificial sequence
  SiRNA target sequence
aaacatgaaatttagaaattca

SEQ ID NO: 185226 - DNA, 22 bp, Artificial sequence
  SiRNA target sequence
aacatgaaatttagaaattcag

SEQ ID NO: 185227 - DNA, 22 bp, Artificial sequence
  SiRNA target sequence
acatgaaatttagaaattcaga

SEQ ID NO: 185228 - DNA, 22 bp, Artificial sequence
  SiRNA target sequence
catgaaatttagaaattcagag

SEQ ID NO: 185229 - DNA, 22 bp, Artificial sequence
  SiRNA target sequence
atgaaatttagaaattcagagt

SEQ ID NO: 185230 - DNA, 22 bp, Artificial sequence
  SiRNA target sequence
tgaaatttagaaattcagagtt

SEQ ID NO: 185231 - DNA, 22 bp, Artificial sequence
  SiRNA target sequence
gaaatttagaaattcagagtta

SEQ ID NO: 185232 - DNA, 22 bp, Artificial sequence
  SiRNA target sequence
aaatttagaaattcagagttaa

SEQ ID NO: 185233 - DNA, 22 bp, Artificial sequence
  SiRNA target sequence
aatttagaaattcagagttaaa

SEQ ID NO: 185234 - DNA, 22 bp, Artificial sequence
  SiRNA target sequence
atttagaaattcagagttaaag

SEQ ID NO: 185235 - DNA, 22 bp, Artificial sequence
  SiRNA target sequence
tttagaaattcagagttaaagt

SEQ ID NO: 185236 - DNA, 22 bp, Artificial sequence
  SiRNA target sequence
ttagaaattcagagttaaagtt

SEQ ID NO: 185237 - DNA, 22 bp, Artificial sequence
  SiRNA target sequence
tagaaattcagagttaaagttt

SEQ ID NO: 185238 - DNA, 22 bp, Artificial sequence
  SiRNA target sequence
agaaattcagagttaaagttta

SEQ ID NO: 185239 - DNA, 22 bp, Artificial sequence
  SiRNA target sequence
gaaattcagagttaaagtttaa

SEQ ID NO: 185240 - DNA, 22 bp, Artificial sequence
  SiRNA target sequence
aaattcagagttaaagtttaat

SEQ ID NO: 185241 - DNA, 22 bp, Artificial sequence
  SiRNA target sequence
aattcagagttaaagtttaata

SEQ ID NO: 185242 - DNA, 22 bp, Artificial sequence
  SiRNA target sequence
attcagagttaaagtttaatat

SEQ ID NO: 185243 - DNA, 22 bp, Artificial sequence
  SiRNA target sequence
ttcagagttaaagtttaatatt

SEQ ID NO: 185244 - DNA, 22 bp, Artificial sequence
  SiRNA target sequence
tcagagttaaagtttaatattt

SEQ ID NO: 185245 - DNA, 22 bp, Artificial sequence
  SiRNA target sequence
cagagttaaagtttaatatttc

SEQ ID NO: 185246 - DNA, 22 bp, Artificial sequence
  SiRNA target sequence
agagttaaagtttaatatttcg

SEQ ID NO: 185247 - DNA, 22 bp, Artificial sequence
  SiRNA target sequence
gagttaaagtttaatatttcgg

SEQ ID NO: 185248 - DNA, 22 bp, Artificial sequence
  SiRNA target sequence
agttaaagtttaatatttcgga

SEQ ID NO: 185249 - DNA, 22 bp, Artificial sequence
  SiRNA target sequence
gttaaagtttaatatttcggaa

SEQ ID NO: 185250 - DNA, 22 bp, Artificial sequence
  SiRNA target sequence
ttaaagtttaatatttcggaaa

SEQ ID NO: 185251 - DNA, 22 bp, Artificial sequence
  SiRNA target sequence
taaagtttaatatttcggaaac

SEQ ID NO: 185252 - DNA, 22 bp, Artificial sequence
  SiRNA target sequence
aaagtttaatatttcggaaaca

SEQ ID NO: 185253 - DNA, 22 bp, Artificial sequence
  SiRNA target sequence
aagtttaatatttcggaaacac

SEQ ID NO: 185254 - DNA, 22 bp, Artificial sequence
  SiRNA target sequence
agtttaatatttcggaaacact

SEQ ID NO: 185255 - DNA, 22 bp, Artificial sequence
  SiRNA target sequence
gtttaatatttcggaaacactt

SEQ ID NO: 185256 - DNA, 22 bp, Artificial sequence
  SiRNA target sequence
tttaatatttcggaaacacttg

SEQ ID NO: 185257 - DNA, 22 bp, Artificial sequence
  SiRNA target sequence
ttaatatttcggaaacacttga

SEQ ID NO: 185258 - DNA, 22 bp, Artificial sequence
  SiRNA target sequence
taatatttcggaaacacttgat

SEQ ID NO: 185259 - DNA, 22 bp, Artificial sequence
  SiRNA target sequence
aatatttcggaaacacttgata

SEQ ID NO: 185260 - DNA, 22 bp, Artificial sequence
  SiRNA target sequence
atatttcggaaacacttgatag

SEQ ID NO: 185261 - DNA, 22 bp, Artificial sequence
  SiRNA target sequence
tatttcggaaacacttgatagt

SEQ ID NO: 185262 - DNA, 22 bp, Artificial sequence
  SiRNA target sequence
atttcggaaacacttgatagta

SEQ ID NO: 185263 - DNA, 22 bp, Artificial sequence
  SiRNA target sequence
tttcggaaacacttgatagtat

SEQ ID NO: 185264 - DNA, 22 bp, Artificial sequence
  SiRNA target sequence
ttcggaaacacttgatagtatt

SEQ ID NO: 185265 - DNA, 22 bp, Artificial sequence
  SiRNA target sequence
tcggaaacacttgatagtatta

SEQ ID NO: 185266 - DNA, 22 bp, Artificial sequence
  SiRNA target sequence
cggaaacacttgatagtattat

SEQ ID NO: 185267 - DNA, 22 bp, Artificial sequence
  SiRNA target sequence
ggaaacacttgatagtattata

SEQ ID NO: 185268 - DNA, 22 bp, Artificial sequence
  SiRNA target sequence
gaaacacttgatagtattatat

SEQ ID NO: 185269 - DNA, 22 bp, Artificial sequence
  SiRNA target sequence
aaacacttgatagtattatatc

SEQ ID NO: 185270 - DNA, 22 bp, Artificial sequence
  SiRNA target sequence
aacacttgatagtattatatct

SEQ ID NO: 185271 - DNA, 22 bp, Artificial sequence
  SiRNA target sequence
acacttgatagtattatatcta

SEQ ID NO: 185272 - DNA, 22 bp, Artificial sequence
  SiRNA target sequence
cacttgatagtattatatctac

SEQ ID NO: 185273 - DNA, 22 bp, Artificial sequence
  SiRNA target sequence
acttgatagtattatatctacc

SEQ ID NO: 185274 - DNA, 22 bp, Artificial sequence
  SiRNA target sequence
cttgatagtattatatctacca

SEQ ID NO: 185275 - DNA, 22 bp, Artificial sequence
  SiRNA target sequence
ttgatagtattatatctaccag

SEQ ID NO: 185276 - DNA, 22 bp, Artificial sequence
  SiRNA target sequence
tgatagtattatatctaccaga

SEQ ID NO: 185277 - DNA, 22 bp, Artificial sequence
  SiRNA target sequence
gatagtattatatctaccagag

SEQ ID NO: 185278 - DNA, 22 bp, Artificial sequence
  SiRNA target sequence
atagtattatatctaccagaga

SEQ ID NO: 185279 - DNA, 22 bp, Artificial sequence
  SiRNA target sequence
tagtattatatctaccagagac

SEQ ID NO: 185280 - DNA, 22 bp, Artificial sequence
  SiRNA target sequence
agtattatatctaccagagacc

SEQ ID NO: 185281 - DNA, 22 bp, Artificial sequence
  SiRNA target sequence
gtattatatctaccagagacca

SEQ ID NO: 185282 - DNA, 22 bp, Artificial sequence
  SiRNA target sequence
tattatatctaccagagaccag

SEQ ID NO: 185283 - DNA, 22 bp, Artificial sequence
  SiRNA target sequence
attatatctaccagagaccagt

SEQ ID NO: 185284 - DNA, 22 bp, Artificial sequence
  SiRNA target sequence
ttatatctaccagagaccagta

SEQ ID NO: 185285 - DNA, 22 bp, Artificial sequence
  SiRNA target sequence
tatatctaccagagaccagtat

SEQ ID NO: 185286 - DNA, 22 bp, Artificial sequence
  SiRNA target sequence
atatctaccagagaccagtatc

SEQ ID NO: 185287 - DNA, 22 bp, Artificial sequence
  SiRNA target sequence
tatctaccagagaccagtatca

SEQ ID NO: 185288 - DNA, 22 bp, Artificial sequence
  SiRNA target sequence
atctaccagagaccagtatcat

SEQ ID NO: 185289 - DNA, 22 bp, Artificial sequence
  SiRNA target sequence
tctaccagagaccagtatcatt

SEQ ID NO: 185290 - DNA, 22 bp, Artificial sequence
  SiRNA target sequence
ctaccagagaccagtatcatta

SEQ ID NO: 185291 - DNA, 22 bp, Artificial sequence
  SiRNA target sequence
taccagagaccagtatcattat

SEQ ID NO: 185292 - DNA, 22 bp, Artificial sequence
  SiRNA target sequence
accagagaccagtatcattatc

SEQ ID NO: 185293 - DNA, 22 bp, Artificial sequence
  SiRNA target sequence
ccagagaccagtatcattatcc

SEQ ID NO: 185294 - DNA, 22 bp, Artificial sequence
  SiRNA target sequence
cagagaccagtatcattatccc

SEQ ID NO: 185295 - DNA, 22 bp, Artificial sequence
  SiRNA target sequence
agagaccagtatcattatccca

SEQ ID NO: 185296 - DNA, 22 bp, Artificial sequence
  SiRNA target sequence
gagaccagtatcattatcccaa

SEQ ID NO: 185297 - DNA, 22 bp, Artificial sequence
  SiRNA target sequence
agaccagtatcattatcccaat

SEQ ID NO: 185298 - DNA, 22 bp, Artificial sequence
  SiRNA target sequence
gaccagtatcattatcccaatt

SEQ ID NO: 185299 - DNA, 22 bp, Artificial sequence
  SiRNA target sequence
accagtatcattatcccaattt

SEQ ID NO: 185300 - DNA, 22 bp, Artificial sequence
  SiRNA target sequence
ccagtatcattatcccaatttg

SEQ ID NO: 185301 - DNA, 22 bp, Artificial sequence
  SiRNA target sequence
cagtatcattatcccaatttga

SEQ ID NO: 185302 - DNA, 22 bp, Artificial sequence
  SiRNA target sequence
agtatcattatcccaatttgat

SEQ ID NO: 185303 - DNA, 22 bp, Artificial sequence
  SiRNA target sequence
gtatcattatcccaatttgata

SEQ ID NO: 185304 - DNA, 22 bp, Artificial sequence
  SiRNA target sequence
tatcattatcccaatttgataa

SEQ ID NO: 185305 - DNA, 22 bp, Artificial sequence
  SiRNA target sequence
atcattatcccaatttgataaa

SEQ ID NO: 185306 - DNA, 22 bp, Artificial sequence
  SiRNA target sequence
tcattatcccaatttgataaaa

SEQ ID NO: 185307 - DNA, 22 bp, Artificial sequence
  SiRNA target sequence
cattatcccaatttgataaaaa

SEQ ID NO: 185308 - DNA, 22 bp, Artificial sequence
  SiRNA target sequence
attatcccaatttgataaaaac

SEQ ID NO: 185309 - DNA, 22 bp, Artificial sequence
  SiRNA target sequence
ttatcccaatttgataaaaaca

SEQ ID NO: 185310 - DNA, 22 bp, Artificial sequence
  SiRNA target sequence
tatcccaatttgataaaaacat

SEQ ID NO: 185311 - DNA, 22 bp, Artificial sequence
  SiRNA target sequence
atcccaatttgataaaaacata

SEQ ID NO: 185312 - DNA, 22 bp, Artificial sequence
  SiRNA target sequence
tcccaatttgataaaaacatat

SEQ ID NO: 185313 - DNA, 22 bp, Artificial sequence
  SiRNA target sequence
cccaatttgataaaaacatatc

SEQ ID NO: 185314 - DNA, 22 bp, Artificial sequence
  SiRNA target sequence
ccaatttgataaaaacatatcc

SEQ ID NO: 185315 - DNA, 22 bp, Artificial sequence
  SiRNA target sequence
caatttgataaaaacatatcca

SEQ ID NO: 185316 - DNA, 22 bp, Artificial sequence
  SiRNA target sequence
aatttgataaaaacatatccaa

SEQ ID NO: 185317 - DNA, 22 bp, Artificial sequence
  SiRNA target sequence
atttgataaaaacatatccaaa

SEQ ID NO: 185318 - DNA, 22 bp, Artificial sequence
  SiRNA target sequence
tttgataaaaacatatccaaat

SEQ ID NO: 185319 - DNA, 22 bp, Artificial sequence
  SiRNA target sequence
ttgataaaaacatatccaaatt

SEQ ID NO: 185320 - DNA, 22 bp, Artificial sequence
  SiRNA target sequence
tgataaaaacatatccaaattt

SEQ ID NO: 185321 - DNA, 22 bp, Artificial sequence
  SiRNA target sequence
gataaaaacatatccaaatttt

SEQ ID NO: 185322 - DNA, 22 bp, Artificial sequence
  SiRNA target sequence
ataaaaacatatccaaatttta

SEQ ID NO: 185323 - DNA, 22 bp, Artificial sequence
  SiRNA target sequence
taaaaacatatccaaattttac

SEQ ID NO: 185324 - DNA, 22 bp, Artificial sequence
  SiRNA target sequence
aaaaacatatccaaattttacg

SEQ ID NO: 185325 - DNA, 22 bp, Artificial sequence
  SiRNA target sequence
aaaacatatccaaattttacgc

SEQ ID NO: 185326 - DNA, 22 bp, Artificial sequence
  SiRNA target sequence
aaacatatccaaattttacgct

SEQ ID NO: 185327 - DNA, 22 bp, Artificial sequence
  SiRNA target sequence
aacatatccaaattttacgctt

SEQ ID NO: 185328 - DNA, 22 bp, Artificial sequence
  SiRNA target sequence
acatatccaaattttacgctta

SEQ ID NO: 185329 - DNA, 22 bp, Artificial sequence
  SiRNA target sequence
catatccaaattttacgcttaa

SEQ ID NO: 185330 - DNA, 22 bp, Artificial sequence
  SiRNA target sequence
atatccaaattttacgcttaaa

SEQ ID NO: 185331 - DNA, 22 bp, Artificial sequence
  SiRNA target sequence
tatccaaattttacgcttaaag

SEQ ID NO: 185332 - DNA, 22 bp, Artificial sequence
  SiRNA target sequence
atccaaattttacgcttaaagt

SEQ ID NO: 185333 - DNA, 22 bp, Artificial sequence
  SiRNA target sequence
tccaaattttacgcttaaagtt

SEQ ID NO: 185334 - DNA, 22 bp, Artificial sequence
  SiRNA target sequence
ccaaattttacgcttaaagttg

SEQ ID NO: 185335 - DNA, 22 bp, Artificial sequence
  SiRNA target sequence
caaattttacgcttaaagttga

SEQ ID NO: 185336 - DNA, 22 bp, Artificial sequence
  SiRNA target sequence
aaattttacgcttaaagttgaa

SEQ ID NO: 185337 - DNA, 22 bp, Artificial sequence
  SiRNA target sequence
aattttacgcttaaagttgaag

SEQ ID NO: 185338 - DNA, 22 bp, Artificial sequence
  SiRNA target sequence
attttacgcttaaagttgaagg

SEQ ID NO: 185339 - DNA, 22 bp, Artificial sequence
  SiRNA target sequence
ttttacgcttaaagttgaaggc

SEQ ID NO: 185340 - DNA, 22 bp, Artificial sequence
  SiRNA target sequence
tttacgcttaaagttgaaggcg

SEQ ID NO: 185341 - DNA, 22 bp, Artificial sequence
  SiRNA target sequence
ttacgcttaaagttgaaggcgg

SEQ ID NO: 185342 - DNA, 22 bp, Artificial sequence
  SiRNA target sequence
tacgcttaaagttgaaggcggt

SEQ ID NO: 185343 - DNA, 22 bp, Artificial sequence
  SiRNA target sequence
acgcttaaagttgaaggcggta

SEQ ID NO: 185344 - DNA, 22 bp, Artificial sequence
  SiRNA target sequence
cgcttaaagttgaaggcggtaa

SEQ ID NO: 185345 - DNA, 22 bp, Artificial sequence
  SiRNA target sequence
gcttaaagttgaaggcggtaac

SEQ ID NO: 185346 - DNA, 22 bp, Artificial sequence
  SiRNA target sequence
cttaaagttgaaggcggtaact

SEQ ID NO: 185347 - DNA, 22 bp, Artificial sequence
  SiRNA target sequence
ttaaagttgaaggcggtaactt

SEQ ID NO: 185348 - DNA, 22 bp, Artificial sequence
  SiRNA target sequence
taaagttgaaggcggtaacttt

SEQ ID NO: 185349 - DNA, 22 bp, Artificial sequence
  SiRNA target sequence
aaagttgaaggcggtaactttt

SEQ ID NO: 185350 - DNA, 22 bp, Artificial sequence
  SiRNA target sequence
aagttgaaggcggtaacttttc

SEQ ID NO: 185351 - DNA, 22 bp, Artificial sequence
  SiRNA target sequence
agttgaaggcggtaacttttca

SEQ ID NO: 185352 - DNA, 22 bp, Artificial sequence
  SiRNA target sequence
gttgaaggcggtaacttttcag

SEQ ID NO: 185353 - DNA, 22 bp, Artificial sequence
  SiRNA target sequence
ttgaaggcggtaacttttcaga

SEQ ID NO: 185354 - DNA, 22 bp, Artificial sequence
  SiRNA target sequence
tgaaggcggtaacttttcagat

SEQ ID NO: 185355 - DNA, 22 bp, Artificial sequence
  SiRNA target sequence
gaaggcggtaacttttcagatt

SEQ ID NO: 185356 - DNA, 22 bp, Artificial sequence
  SiRNA target sequence
aaggcggtaacttttcagattc

SEQ ID NO: 185357 - DNA, 22 bp, Artificial sequence
  SiRNA target sequence
aggcggtaacttttcagattct

SEQ ID NO: 185358 - DNA, 22 bp, Artificial sequence
  SiRNA target sequence
ggcggtaacttttcagattctg

SEQ ID NO: 185359 - DNA, 22 bp, Artificial sequence
  SiRNA target sequence
gcggtaacttttcagattctga

SEQ ID NO: 185360 - DNA, 22 bp, Artificial sequence
  SiRNA target sequence
cggtaacttttcagattctgaa

SEQ ID NO: 185361 - DNA, 22 bp, Artificial sequence
  SiRNA target sequence
ggtaacttttcagattctgaaa

SEQ ID NO: 185362 - DNA, 22 bp, Artificial sequence
  SiRNA target sequence
gtaacttttcagattctgaaat

SEQ ID NO: 185363 - DNA, 22 bp, Artificial sequence
  SiRNA target sequence
taacttttcagattctgaaatt

SEQ ID NO: 185364 - DNA, 22 bp, Artificial sequence
  SiRNA target sequence
aacttttcagattctgaaattg

SEQ ID NO: 185365 - DNA, 22 bp, Artificial sequence
  SiRNA target sequence
acttttcagattctgaaattgt

SEQ ID NO: 185366 - DNA, 22 bp, Artificial sequence
  SiRNA target sequence
cttttcagattctgaaattgtt

SEQ ID NO: 185367 - DNA, 22 bp, Artificial sequence
  SiRNA target sequence
ttttcagattctgaaattgttg

SEQ ID NO: 185368 - DNA, 22 bp, Artificial sequence
  SiRNA target sequence
tttcagattctgaaattgttgt

SEQ ID NO: 185369 - DNA, 22 bp, Artificial sequence
  SiRNA target sequence
ttcagattctgaaattgttgta

SEQ ID NO: 185370 - DNA, 22 bp, Artificial sequence
  SiRNA target sequence
tcagattctgaaattgttgtat

SEQ ID NO: 185371 - DNA, 22 bp, Artificial sequence
  SiRNA target sequence
cagattctgaaattgttgtatt

SEQ ID NO: 185372 - DNA, 22 bp, Artificial sequence
  SiRNA target sequence
agattctgaaattgttgtattt

SEQ ID NO: 185373 - DNA, 22 bp, Artificial sequence
  SiRNA target sequence
gattctgaaattgttgtatttc

SEQ ID NO: 185374 - DNA, 22 bp, Artificial sequence
  SiRNA target sequence
attctgaaattgttgtatttct

SEQ ID NO: 185375 - DNA, 22 bp, Artificial sequence
  SiRNA target sequence
ttctgaaattgttgtatttctt

SEQ ID NO: 185376 - DNA, 22 bp, Artificial sequence
  SiRNA target sequence
tctgaaattgttgtatttcttg

SEQ ID NO: 185377 - DNA, 22 bp, Artificial sequence
  SiRNA target sequence
ctgaaattgttgtatttcttgg

SEQ ID NO: 185378 - DNA, 22 bp, Artificial sequence
  SiRNA target sequence
tgaaattgttgtatttcttggt

SEQ ID NO: 185379 - DNA, 22 bp, Artificial sequence
  SiRNA target sequence
gaaattgttgtatttcttggtg

SEQ ID NO: 185380 - DNA, 22 bp, Artificial sequence
  SiRNA target sequence
aaattgttgtatttcttggtga

SEQ ID NO: 185381 - DNA, 22 bp, Artificial sequence
  SiRNA target sequence
aattgttgtatttcttggtgaa

SEQ ID NO: 185382 - DNA, 22 bp, Artificial sequence
  SiRNA target sequence
attgttgtatttcttggtgaaa

SEQ ID NO: 185383 - DNA, 22 bp, Artificial sequence
  SiRNA target sequence
ttgttgtatttcttggtgaaaa

SEQ ID NO: 185384 - DNA, 22 bp, Artificial sequence
  SiRNA target sequence
tgttgtatttcttggtgaaaat

SEQ ID NO: 185385 - DNA, 22 bp, Artificial sequence
  SiRNA target sequence
gttgtatttcttggtgaaaatg

SEQ ID NO: 185386 - DNA, 22 bp, Artificial sequence
  SiRNA target sequence
ttgtatttcttggtgaaaatgg

SEQ ID NO: 185387 - DNA, 22 bp, Artificial sequence
  SiRNA target sequence
tgtatttcttggtgaaaatgga

SEQ ID NO: 185388 - DNA, 22 bp, Artificial sequence
  SiRNA target sequence
gtatttcttggtgaaaatggaa

SEQ ID NO: 185389 - DNA, 22 bp, Artificial sequence
  SiRNA target sequence
tatttcttggtgaaaatggaat

SEQ ID NO: 185390 - DNA, 22 bp, Artificial sequence
  SiRNA target sequence
atttcttggtgaaaatggaatg

SEQ ID NO: 185391 - DNA, 22 bp, Artificial sequence
  SiRNA target sequence
tttcttggtgaaaatggaatgg

SEQ ID NO: 185392 - DNA, 22 bp, Artificial sequence
  SiRNA target sequence
ttcttggtgaaaatggaatggg

SEQ ID NO: 185393 - DNA, 22 bp, Artificial sequence
  SiRNA target sequence
tcttggtgaaaatggaatgggc

SEQ ID NO: 185394 - DNA, 22 bp, Artificial sequence
  SiRNA target sequence
cttggtgaaaatggaatgggca

SEQ ID NO: 185395 - DNA, 22 bp, Artificial sequence
  SiRNA target sequence
ttggtgaaaatggaatgggcaa

SEQ ID NO: 185396 - DNA, 22 bp, Artificial sequence
  SiRNA target sequence
tggtgaaaatggaatgggcaaa

SEQ ID NO: 185397 - DNA, 22 bp, Artificial sequence
  SiRNA target sequence
ggtgaaaatggaatgggcaaaa

SEQ ID NO: 185398 - DNA, 22 bp, Artificial sequence
  SiRNA target sequence
gtgaaaatggaatgggcaaaac

SEQ ID NO: 185399 - DNA, 22 bp, Artificial sequence
  SiRNA target sequence
tgaaaatggaatgggcaaaact

SEQ ID NO: 185400 - DNA, 22 bp, Artificial sequence
  SiRNA target sequence
gaaaatggaatgggcaaaacta

SEQ ID NO: 185401 - DNA, 22 bp, Artificial sequence
  SiRNA target sequence
aaaatggaatgggcaaaactac

SEQ ID NO: 185402 - DNA, 22 bp, Artificial sequence
  SiRNA target sequence
aaatggaatgggcaaaactact

SEQ ID NO: 185403 - DNA, 22 bp, Artificial sequence
  SiRNA target sequence
aatggaatgggcaaaactactt

SEQ ID NO: 185404 - DNA, 22 bp, Artificial sequence
  SiRNA target sequence
atggaatgggcaaaactacttt

SEQ ID NO: 185405 - DNA, 22 bp, Artificial sequence
  SiRNA target sequence
tggaatgggcaaaactacttta

SEQ ID NO: 185406 - DNA, 22 bp, Artificial sequence
  SiRNA target sequence
ggaatgggcaaaactactttag

SEQ ID NO: 185407 - DNA, 22 bp, Artificial sequence
  SiRNA target sequence
gaatgggcaaaactactttagt

SEQ ID NO: 185408 - DNA, 22 bp, Artificial sequence
  SiRNA target sequence
aatgggcaaaactactttagta

SEQ ID NO: 185409 - DNA, 22 bp, Artificial sequence
  SiRNA target sequence
atgggcaaaactactttagtag

SEQ ID NO: 185410 - DNA, 22 bp, Artificial sequence
  SiRNA target sequence
tgggcaaaactactttagtagg

SEQ ID NO: 185411 - DNA, 22 bp, Artificial sequence
  SiRNA target sequence
gggcaaaactactttagtaggt

SEQ ID NO: 185412 - DNA, 22 bp, Artificial sequence
  SiRNA target sequence
ggcaaaactactttagtaggtt

SEQ ID NO: 185413 - DNA, 22 bp, Artificial sequence
  SiRNA target sequence
gcaaaactactttagtaggttt

SEQ ID NO: 185414 - DNA, 22 bp, Artificial sequence
  SiRNA target sequence
caaaactactttagtaggtttg

SEQ ID NO: 185415 - DNA, 22 bp, Artificial sequence
  SiRNA target sequence
aaaactactttagtaggtttga

SEQ ID NO: 185416 - DNA, 22 bp, Artificial sequence
  SiRNA target sequence
aaactactttagtaggtttgat

SEQ ID NO: 185417 - DNA, 22 bp, Artificial sequence
  SiRNA target sequence
aactactttagtaggtttgatt

SEQ ID NO: 185418 - DNA, 22 bp, Artificial sequence
  SiRNA target sequence
actactttagtaggtttgattt

SEQ ID NO: 185419 - DNA, 22 bp, Artificial sequence
  SiRNA target sequence
ctactttagtaggtttgatttc

SEQ ID NO: 185420 - DNA, 22 bp, Artificial sequence
  SiRNA target sequence
tactttagtaggtttgatttcg

SEQ ID NO: 185421 - DNA, 22 bp, Artificial sequence
  SiRNA target sequence
actttagtaggtttgatttcgg

SEQ ID NO: 185422 - DNA, 22 bp, Artificial sequence
  SiRNA target sequence
ctttagtaggtttgatttcggg

SEQ ID NO: 185423 - DNA, 22 bp, Artificial sequence
  SiRNA target sequence
tttagtaggtttgatttcgggg

SEQ ID NO: 185424 - DNA, 22 bp, Artificial sequence
  SiRNA target sequence
ttagtaggtttgatttcggggt

SEQ ID NO: 185425 - DNA, 22 bp, Artificial sequence
  SiRNA target sequence
tagtaggtttgatttcggggtt

SEQ ID NO: 185426 - DNA, 22 bp, Artificial sequence
  SiRNA target sequence
agtaggtttgatttcggggtta

SEQ ID NO: 185427 - DNA, 22 bp, Artificial sequence
  SiRNA target sequence
gtaggtttgatttcggggttaa

SEQ ID NO: 185428 - DNA, 22 bp, Artificial sequence
  SiRNA target sequence
taggtttgatttcggggttaat

SEQ ID NO: 185429 - DNA, 22 bp, Artificial sequence
  SiRNA target sequence
aggtttgatttcggggttaatt

SEQ ID NO: 185430 - DNA, 22 bp, Artificial sequence
  SiRNA target sequence
ggtttgatttcggggttaatta

SEQ ID NO: 185431 - DNA, 22 bp, Artificial sequence
  SiRNA target sequence
gtttgatttcggggttaattaa

SEQ ID NO: 185432 - DNA, 22 bp, Artificial sequence
  SiRNA target sequence
tttgatttcggggttaattaaa

SEQ ID NO: 185433 - DNA, 22 bp, Artificial sequence
  SiRNA target sequence
ttgatttcggggttaattaaag

SEQ ID NO: 185434 - DNA, 22 bp, Artificial sequence
  SiRNA target sequence
tgatttcggggttaattaaaga

SEQ ID NO: 185435 - DNA, 22 bp, Artificial sequence
  SiRNA target sequence
gatttcggggttaattaaagat

SEQ ID NO: 185436 - DNA, 22 bp, Artificial sequence
  SiRNA target sequence
atttcggggttaattaaagatg

SEQ ID NO: 185437 - DNA, 22 bp, Artificial sequence
  SiRNA target sequence
tttcggggttaattaaagatga

SEQ ID NO: 185438 - DNA, 22 bp, Artificial sequence
  SiRNA target sequence
ttcggggttaattaaagatgat

SEQ ID NO: 185439 - DNA, 22 bp, Artificial sequence
  SiRNA target sequence
tcggggttaattaaagatgata

SEQ ID NO: 185440 - DNA, 22 bp, Artificial sequence
  SiRNA target sequence
cggggttaattaaagatgataa

SEQ ID NO: 185441 - DNA, 22 bp, Artificial sequence
  SiRNA target sequence
ggggttaattaaagatgataac

SEQ ID NO: 185442 - DNA, 22 bp, Artificial sequence
  SiRNA target sequence
gggttaattaaagatgataacg

SEQ ID NO: 185443 - DNA, 22 bp, Artificial sequence
  SiRNA target sequence
ggttaattaaagatgataacgg

SEQ ID NO: 185444 - DNA, 22 bp, Artificial sequence
  SiRNA target sequence
gttaattaaagatgataacggg

SEQ ID NO: 185445 - DNA, 22 bp, Artificial sequence
  SiRNA target sequence
ttaattaaagatgataacgggg

SEQ ID NO: 185446 - DNA, 22 bp, Artificial sequence
  SiRNA target sequence
taattaaagatgataacgggga

SEQ ID NO: 185447 - DNA, 22 bp, Artificial sequence
  SiRNA target sequence
aattaaagatgataacggggaa

SEQ ID NO: 185448 - DNA, 22 bp, Artificial sequence
  SiRNA target sequence
attaaagatgataacggggaag

SEQ ID NO: 185449 - DNA, 22 bp, Artificial sequence
  SiRNA target sequence
ttaaagatgataacggggaaga

SEQ ID NO: 185450 - DNA, 22 bp, Artificial sequence
  SiRNA target sequence
taaagatgataacggggaagag

SEQ ID NO: 185451 - DNA, 22 bp, Artificial sequence
  SiRNA target sequence
aaagatgataacggggaagagt

SEQ ID NO: 185452 - DNA, 22 bp, Artificial sequence
  SiRNA target sequence
aagatgataacggggaagagtt

SEQ ID NO: 185453 - DNA, 22 bp, Artificial sequence
  SiRNA target sequence
agatgataacggggaagagttc

SEQ ID NO: 185454 - DNA, 22 bp, Artificial sequence
  SiRNA target sequence
gatgataacggggaagagttcg

SEQ ID NO: 185455 - DNA, 22 bp, Artificial sequence
  SiRNA target sequence
atgataacggggaagagttcgg

SEQ ID NO: 185456 - DNA, 22 bp, Artificial sequence
  SiRNA target sequence
tgataacggggaagagttcggt

SEQ ID NO: 185457 - DNA, 22 bp, Artificial sequence
  SiRNA target sequence
gataacggggaagagttcggtt

SEQ ID NO: 185458 - DNA, 22 bp, Artificial sequence
  SiRNA target sequence
ataacggggaagagttcggttt

SEQ ID NO: 185459 - DNA, 22 bp, Artificial sequence
  SiRNA target sequence
taacggggaagagttcggtttg

SEQ ID NO: 185460 - DNA, 22 bp, Artificial sequence
  SiRNA target sequence
aacggggaagagttcggtttgt

SEQ ID NO: 185461 - DNA, 22 bp, Artificial sequence
  SiRNA target sequence
acggggaagagttcggtttgtt

SEQ ID NO: 185462 - DNA, 22 bp, Artificial sequence
  SiRNA target sequence
cggggaagagttcggtttgttg

SEQ ID NO: 185463 - DNA, 22 bp, Artificial sequence
  SiRNA target sequence
ggggaagagttcggtttgttgt

SEQ ID NO: 185464 - DNA, 22 bp, Artificial sequence
  SiRNA target sequence
gggaagagttcggtttgttgtc

SEQ ID NO: 185465 - DNA, 22 bp, Artificial sequence
  SiRNA target sequence
ggaagagttcggtttgttgtca

SEQ ID NO: 185466 - DNA, 22 bp, Artificial sequence
  SiRNA target sequence
gaagagttcggtttgttgtcat

SEQ ID NO: 185467 - DNA, 22 bp, Artificial sequence
  SiRNA target sequence
aagagttcggtttgttgtcata

SEQ ID NO: 185468 - DNA, 22 bp, Artificial sequence
  SiRNA target sequence
agagttcggtttgttgtcatat

SEQ ID NO: 185469 - DNA, 22 bp, Artificial sequence
  SiRNA target sequence
gagttcggtttgttgtcatata

SEQ ID NO: 185470 - DNA, 22 bp, Artificial sequence
  SiRNA target sequence
agttcggtttgttgtcatatag

SEQ ID NO: 185471 - DNA, 22 bp, Artificial sequence
  SiRNA target sequence
gttcggtttgttgtcatatagt

SEQ ID NO: 185472 - DNA, 22 bp, Artificial sequence
  SiRNA target sequence
ttcggtttgttgtcatatagtc

SEQ ID NO: 185473 - DNA, 22 bp, Artificial sequence
  SiRNA target sequence
tcggtttgttgtcatatagtct

SEQ ID NO: 185474 - DNA, 22 bp, Artificial sequence
  SiRNA target sequence
cggtttgttgtcatatagtctt

SEQ ID NO: 185475 - DNA, 22 bp, Artificial sequence
  SiRNA target sequence
ggtttgttgtcatatagtctta

SEQ ID NO: 185476 - DNA, 22 bp, Artificial sequence
  SiRNA target sequence
gtttgttgtcatatagtcttaa

SEQ ID NO: 185477 - DNA, 22 bp, Artificial sequence
  SiRNA target sequence
tttgttgtcatatagtcttaaa

SEQ ID NO: 185478 - DNA, 22 bp, Artificial sequence
  SiRNA target sequence
ttgttgtcatatagtcttaaac

SEQ ID NO: 185479 - DNA, 22 bp, Artificial sequence
  SiRNA target sequence
tgttgtcatatagtcttaaacc

SEQ ID NO: 185480 - DNA, 22 bp, Artificial sequence
  SiRNA target sequence
gttgtcatatagtcttaaaccg

SEQ ID NO: 185481 - DNA, 22 bp, Artificial sequence
  SiRNA target sequence
ttgtcatatagtcttaaaccgc

SEQ ID NO: 185482 - DNA, 22 bp, Artificial sequence
  SiRNA target sequence
tgtcatatagtcttaaaccgca

SEQ ID NO: 185483 - DNA, 22 bp, Artificial sequence
  SiRNA target sequence
gtcatatagtcttaaaccgcaa

SEQ ID NO: 185484 - DNA, 22 bp, Artificial sequence
  SiRNA target sequence
tcatatagtcttaaaccgcaaa

SEQ ID NO: 185485 - DNA, 22 bp, Artificial sequence
  SiRNA target sequence
catatagtcttaaaccgcaaaa

SEQ ID NO: 185486 - DNA, 22 bp, Artificial sequence
  SiRNA target sequence
atatagtcttaaaccgcaaaaa

SEQ ID NO: 185487 - DNA, 22 bp, Artificial sequence
  SiRNA target sequence
tatagtcttaaaccgcaaaaaa

SEQ ID NO: 185488 - DNA, 22 bp, Artificial sequence
  SiRNA target sequence
atagtcttaaaccgcaaaaaat

SEQ ID NO: 185489 - DNA, 22 bp, Artificial sequence
  SiRNA target sequence
tagtcttaaaccgcaaaaaatc

SEQ ID NO: 185490 - DNA, 22 bp, Artificial sequence
  SiRNA target sequence
agtcttaaaccgcaaaaaatca

SEQ ID NO: 185491 - DNA, 22 bp, Artificial sequence
  SiRNA target sequence
gtcttaaaccgcaaaaaatcat

SEQ ID NO: 185492 - DNA, 22 bp, Artificial sequence
  SiRNA target sequence
tcttaaaccgcaaaaaatcata

SEQ ID NO: 185493 - DNA, 22 bp, Artificial sequence
  SiRNA target sequence
cttaaaccgcaaaaaatcatac

SEQ ID NO: 185494 - DNA, 22 bp, Artificial sequence
  SiRNA target sequence
ttaaaccgcaaaaaatcatacc

SEQ ID NO: 185495 - DNA, 22 bp, Artificial sequence
  SiRNA target sequence
taaaccgcaaaaaatcataccg

SEQ ID NO: 185496 - DNA, 22 bp, Artificial sequence
  SiRNA target sequence
aaaccgcaaaaaatcataccga

SEQ ID NO: 185497 - DNA, 22 bp, Artificial sequence
  SiRNA target sequence
aaccgcaaaaaatcataccgaa

SEQ ID NO: 185498 - DNA, 22 bp, Artificial sequence
  SiRNA target sequence
accgcaaaaaatcataccgaaa

SEQ ID NO: 185499 - DNA, 22 bp, Artificial sequence
  SiRNA target sequence
ccgcaaaaaatcataccgaaat

SEQ ID NO: 185500 - DNA, 22 bp, Artificial sequence
  SiRNA target sequence
cgcaaaaaatcataccgaaata

SEQ ID NO: 185501 - DNA, 22 bp, Artificial sequence
  SiRNA target sequence
gcaaaaaatcataccgaaatac

SEQ ID NO: 185502 - DNA, 22 bp, Artificial sequence
  SiRNA target sequence
caaaaaatcataccgaaataca

SEQ ID NO: 185503 - DNA, 22 bp, Artificial sequence
  SiRNA target sequence
aaaaaatcataccgaaatacaa

SEQ ID NO: 185504 - DNA, 22 bp, Artificial sequence
  SiRNA target sequence
aaaaatcataccgaaatacaaa

SEQ ID NO: 185505 - DNA, 22 bp, Artificial sequence
  SiRNA target sequence
aaaatcataccgaaatacaaag

SEQ ID NO: 185506 - DNA, 22 bp, Artificial sequence
  SiRNA target sequence
aaatcataccgaaatacaaagg

SEQ ID NO: 185507 - DNA, 22 bp, Artificial sequence
  SiRNA target sequence
aatcataccgaaatacaaagga

SEQ ID NO: 185508 - DNA, 22 bp, Artificial sequence
  SiRNA target sequence
atcataccgaaatacaaaggaa

SEQ ID NO: 185509 - DNA, 22 bp, Artificial sequence
  SiRNA target sequence
tcataccgaaatacaaaggaac

SEQ ID NO: 185510 - DNA, 22 bp, Artificial sequence
  SiRNA target sequence
cataccgaaatacaaaggaaca

SEQ ID NO: 185511 - DNA, 22 bp, Artificial sequence
  SiRNA target sequence
ataccgaaatacaaaggaacag

SEQ ID NO: 185512 - DNA, 22 bp, Artificial sequence
  SiRNA target sequence
taccgaaatacaaaggaacagt

SEQ ID NO: 185513 - DNA, 22 bp, Artificial sequence
  SiRNA target sequence
accgaaatacaaaggaacagtt

SEQ ID NO: 185514 - DNA, 22 bp, Artificial sequence
  SiRNA target sequence
ccgaaatacaaaggaacagtta

SEQ ID NO: 185515 - DNA, 22 bp, Artificial sequence
  SiRNA target sequence
cgaaatacaaaggaacagttag

SEQ ID NO: 185516 - DNA, 22 bp, Artificial sequence
  SiRNA target sequence
gaaatacaaaggaacagttaga

SEQ ID NO: 185517 - DNA, 22 bp, Artificial sequence
  SiRNA target sequence
aaatacaaaggaacagttagag

SEQ ID NO: 185518 - DNA, 22 bp, Artificial sequence
  SiRNA target sequence
aatacaaaggaacagttagaga

SEQ ID NO: 185519 - DNA, 22 bp, Artificial sequence
  SiRNA target sequence
atacaaaggaacagttagagat

SEQ ID NO: 185520 - DNA, 22 bp, Artificial sequence
  SiRNA target sequence
tacaaaggaacagttagagatc

SEQ ID NO: 185521 - DNA, 22 bp, Artificial sequence
  SiRNA target sequence
acaaaggaacagttagagatct

SEQ ID NO: 185522 - DNA, 22 bp, Artificial sequence
  SiRNA target sequence
caaaggaacagttagagatctt

SEQ ID NO: 185523 - DNA, 22 bp, Artificial sequence
  SiRNA target sequence
aaaggaacagttagagatcttt

SEQ ID NO: 185524 - DNA, 22 bp, Artificial sequence
  SiRNA target sequence
aaggaacagttagagatctttt

SEQ ID NO: 185525 - DNA, 22 bp, Artificial sequence
  SiRNA target sequence
aggaacagttagagatcttttt

SEQ ID NO: 185526 - DNA, 22 bp, Artificial sequence
  SiRNA target sequence
ggaacagttagagatcttttta

SEQ ID NO: 185527 - DNA, 22 bp, Artificial sequence
  SiRNA target sequence
gaacagttagagatctttttat

SEQ ID NO: 185528 - DNA, 22 bp, Artificial sequence
  SiRNA target sequence
aacagttagagatctttttatg

SEQ ID NO: 185529 - DNA, 22 bp, Artificial sequence
  SiRNA target sequence
acagttagagatctttttatgt

SEQ ID NO: 185530 - DNA, 22 bp, Artificial sequence
  SiRNA target sequence
cagttagagatctttttatgtc

SEQ ID NO: 185531 - DNA, 22 bp, Artificial sequence
  SiRNA target sequence
agttagagatctttttatgtca

SEQ ID NO: 185532 - DNA, 22 bp, Artificial sequence
  SiRNA target sequence
gttagagatctttttatgtcaa

SEQ ID NO: 185533 - DNA, 22 bp, Artificial sequence
  SiRNA target sequence
ttagagatctttttatgtcaaa

SEQ ID NO: 185534 - DNA, 22 bp, Artificial sequence
  SiRNA target sequence
tagagatctttttatgtcaaaa

SEQ ID NO: 185535 - DNA, 22 bp, Artificial sequence
  SiRNA target sequence
agagatctttttatgtcaaaaa

SEQ ID NO: 185536 - DNA, 22 bp, Artificial sequence
  SiRNA target sequence
gagatctttttatgtcaaaaat

SEQ ID NO: 185537 - DNA, 22 bp, Artificial sequence
  SiRNA target sequence
agatctttttatgtcaaaaatt

SEQ ID NO: 185538 - DNA, 22 bp, Artificial sequence
  SiRNA target sequence
gatctttttatgtcaaaaattc

SEQ ID NO: 185539 - DNA, 22 bp, Artificial sequence
  SiRNA target sequence
atctttttatgtcaaaaattcg

SEQ ID NO: 185540 - DNA, 22 bp, Artificial sequence
  SiRNA target sequence
tctttttatgtcaaaaattcgt

SEQ ID NO: 185541 - DNA, 22 bp, Artificial sequence
  SiRNA target sequence
ctttttatgtcaaaaattcgtt

SEQ ID NO: 185542 - DNA, 22 bp, Artificial sequence
  SiRNA target sequence
tttttatgtcaaaaattcgttc

SEQ ID NO: 185543 - DNA, 22 bp, Artificial sequence
  SiRNA target sequence
ttttatgtcaaaaattcgttct

SEQ ID NO: 185544 - DNA, 22 bp, Artificial sequence
  SiRNA target sequence
tttatgtcaaaaattcgttctt

SEQ ID NO: 185545 - DNA, 22 bp, Artificial sequence
  SiRNA target sequence
ttatgtcaaaaattcgttcttc

SEQ ID NO: 185546 - DNA, 22 bp, Artificial sequence
  SiRNA target sequence
tatgtcaaaaattcgttcttcc

SEQ ID NO: 185547 - DNA, 22 bp, Artificial sequence
  SiRNA target sequence
atgtcaaaaattcgttcttcct

SEQ ID NO: 185548 - DNA, 22 bp, Artificial sequence
  SiRNA target sequence
tgtcaaaaattcgttcttcctt

SEQ ID NO: 185549 - DNA, 22 bp, Artificial sequence
  SiRNA target sequence
gtcaaaaattcgttcttccttt

SEQ ID NO: 185550 - DNA, 22 bp, Artificial sequence
  SiRNA target sequence
tcaaaaattcgttcttcctttt

SEQ ID NO: 185551 - DNA, 22 bp, Artificial sequence
  SiRNA target sequence
caaaaattcgttcttccttttt

SEQ ID NO: 185552 - DNA, 22 bp, Artificial sequence
  SiRNA target sequence
aaaaattcgttcttccttttta

SEQ ID NO: 185553 - DNA, 22 bp, Artificial sequence
  SiRNA target sequence
aaaattcgttcttcctttttag

SEQ ID NO: 185554 - DNA, 22 bp, Artificial sequence
  SiRNA target sequence
aaattcgttcttcctttttaga

SEQ ID NO: 185555 - DNA, 22 bp, Artificial sequence
  SiRNA target sequence
aattcgttcttcctttttagac

SEQ ID NO: 185556 - DNA, 22 bp, Artificial sequence
  SiRNA target sequence
attcgttcttcctttttagacg

SEQ ID NO: 185557 - DNA, 22 bp, Artificial sequence
  SiRNA target sequence
ttcgttcttcctttttagacgc

SEQ ID NO: 185558 - DNA, 22 bp, Artificial sequence
  SiRNA target sequence
tcgttcttcctttttagacgct

SEQ ID NO: 185559 - DNA, 22 bp, Artificial sequence
  SiRNA target sequence
cgttcttcctttttagacgcta

SEQ ID NO: 185560 - DNA, 22 bp, Artificial sequence
  SiRNA target sequence
gttcttcctttttagacgctaa

SEQ ID NO: 185561 - DNA, 22 bp, Artificial sequence
  SiRNA target sequence
ttcttcctttttagacgctaat

SEQ ID NO: 185562 - DNA, 22 bp, Artificial sequence
  SiRNA target sequence
tcttcctttttagacgctaatt

SEQ ID NO: 185563 - DNA, 22 bp, Artificial sequence
  SiRNA target sequence
cttcctttttagacgctaattt

SEQ ID NO: 185564 - DNA, 22 bp, Artificial sequence
  SiRNA target sequence
ttcctttttagacgctaatttt

SEQ ID NO: 185565 - DNA, 22 bp, Artificial sequence
  SiRNA target sequence
tcctttttagacgctaattttg

SEQ ID NO: 185566 - DNA, 22 bp, Artificial sequence
  SiRNA target sequence
cctttttagacgctaattttgt

SEQ ID NO: 185567 - DNA, 22 bp, Artificial sequence
  SiRNA target sequence
ctttttagacgctaattttgtt

SEQ ID NO: 185568 - DNA, 22 bp, Artificial sequence
  SiRNA target sequence
tttttagacgctaattttgtta

SEQ ID NO: 185569 - DNA, 22 bp, Artificial sequence
  SiRNA target sequence
ttttagacgctaattttgttaa

SEQ ID NO: 185570 - DNA, 22 bp, Artificial sequence
  SiRNA target sequence
tttagacgctaattttgttaat

SEQ ID NO: 185571 - DNA, 22 bp, Artificial sequence
  SiRNA target sequence
ttagacgctaattttgttaatg

SEQ ID NO: 185572 - DNA, 22 bp, Artificial sequence
  SiRNA target sequence
tagacgctaattttgttaatga

SEQ ID NO: 185573 - DNA, 22 bp, Artificial sequence
  SiRNA target sequence
agacgctaattttgttaatgaa

SEQ ID NO: 185574 - DNA, 22 bp, Artificial sequence
  SiRNA target sequence
gacgctaattttgttaatgaag

SEQ ID NO: 185575 - DNA, 22 bp, Artificial sequence
  SiRNA target sequence
acgctaattttgttaatgaagc

SEQ ID NO: 185576 - DNA, 22 bp, Artificial sequence
  SiRNA target sequence
cgctaattttgttaatgaagct

SEQ ID NO: 185577 - DNA, 22 bp, Artificial sequence
  SiRNA target sequence
gctaattttgttaatgaagcta

SEQ ID NO: 185578 - DNA, 22 bp, Artificial sequence
  SiRNA target sequence
ctaattttgttaatgaagctat

SEQ ID NO: 185579 - DNA, 22 bp, Artificial sequence
  SiRNA target sequence
taattttgttaatgaagctatt

SEQ ID NO: 185580 - DNA, 22 bp, Artificial sequence
  SiRNA target sequence
aattttgttaatgaagctatta

SEQ ID NO: 185581 - DNA, 22 bp, Artificial sequence
  SiRNA target sequence
attttgttaatgaagctattaa

SEQ ID NO: 185582 - DNA, 22 bp, Artificial sequence
  SiRNA target sequence
ttttgttaatgaagctattaaa

SEQ ID NO: 185583 - DNA, 22 bp, Artificial sequence
  SiRNA target sequence
tttgttaatgaagctattaaac

SEQ ID NO: 185584 - DNA, 22 bp, Artificial sequence
  SiRNA target sequence
ttgttaatgaagctattaaacc

SEQ ID NO: 185585 - DNA, 22 bp, Artificial sequence
  SiRNA target sequence
tgttaatgaagctattaaacct

SEQ ID NO: 185586 - DNA, 22 bp, Artificial sequence
  SiRNA target sequence
gttaatgaagctattaaacctt

SEQ ID NO: 185587 - DNA, 22 bp, Artificial sequence
  SiRNA target sequence
ttaatgaagctattaaaccttt

SEQ ID NO: 185588 - DNA, 22 bp, Artificial sequence
  SiRNA target sequence
taatgaagctattaaaccttta

SEQ ID NO: 185589 - DNA, 22 bp, Artificial sequence
  SiRNA target sequence
aatgaagctattaaacctttag

SEQ ID NO: 185590 - DNA, 22 bp, Artificial sequence
  SiRNA target sequence
atgaagctattaaacctttaga

SEQ ID NO: 185591 - DNA, 22 bp, Artificial sequence
  SiRNA target sequence
tgaagctattaaacctttagat

SEQ ID NO: 185592 - DNA, 22 bp, Artificial sequence
  SiRNA target sequence
gaagctattaaacctttagata

SEQ ID NO: 185593 - DNA, 22 bp, Artificial sequence
  SiRNA target sequence
aagctattaaacctttagatat

SEQ ID NO: 185594 - DNA, 22 bp, Artificial sequence
  SiRNA target sequence
agctattaaacctttagatatt

SEQ ID NO: 185595 - DNA, 22 bp, Artificial sequence
  SiRNA target sequence
gctattaaacctttagatattc

SEQ ID NO: 185596 - DNA, 22 bp, Artificial sequence
  SiRNA target sequence
ctattaaacctttagatattca

SEQ ID NO: 185597 - DNA, 22 bp, Artificial sequence
  SiRNA target sequence
tattaaacctttagatattcat

SEQ ID NO: 185598 - DNA, 22 bp, Artificial sequence
  SiRNA target sequence
attaaacctttagatattcatc

SEQ ID NO: 185599 - DNA, 22 bp, Artificial sequence
  SiRNA target sequence
ttaaacctttagatattcatca

SEQ ID NO: 185600 - DNA, 22 bp, Artificial sequence
  SiRNA target sequence
taaacctttagatattcatcat

SEQ ID NO: 185601 - DNA, 22 bp, Artificial sequence
  SiRNA target sequence
aaacctttagatattcatcatt

SEQ ID NO: 185602 - DNA, 22 bp, Artificial sequence
  SiRNA target sequence
aacctttagatattcatcattt

SEQ ID NO: 185603 - DNA, 22 bp, Artificial sequence
  SiRNA target sequence
acctttagatattcatcattta

SEQ ID NO: 185604 - DNA, 22 bp, Artificial sequence
  SiRNA target sequence
cctttagatattcatcatttat

SEQ ID NO: 185605 - DNA, 22 bp, Artificial sequence
  SiRNA target sequence
ctttagatattcatcatttata

SEQ ID NO: 185606 - DNA, 22 bp, Artificial sequence
  SiRNA target sequence
tttagatattcatcatttatac

SEQ ID NO: 185607 - DNA, 22 bp, Artificial sequence
  SiRNA target sequence
ttagatattcatcatttatacg

SEQ ID NO: 185608 - DNA, 22 bp, Artificial sequence
  SiRNA target sequence
tagatattcatcatttatacga

SEQ ID NO: 185609 - DNA, 22 bp, Artificial sequence
  SiRNA target sequence
agatattcatcatttatacgac

SEQ ID NO: 185610 - DNA, 22 bp, Artificial sequence
  SiRNA target sequence
gatattcatcatttatacgacc

SEQ ID NO: 185611 - DNA, 22 bp, Artificial sequence
  SiRNA target sequence
atattcatcatttatacgacca

SEQ ID NO: 185612 - DNA, 22 bp, Artificial sequence
  SiRNA target sequence
tattcatcatttatacgaccaa

SEQ ID NO: 185613 - DNA, 22 bp, Artificial sequence
  SiRNA target sequence
attcatcatttatacgaccaac

SEQ ID NO: 185614 - DNA, 22 bp, Artificial sequence
  SiRNA target sequence
ttcatcatttatacgaccaact

SEQ ID NO: 185615 - DNA, 22 bp, Artificial sequence
  SiRNA target sequence
tcatcatttatacgaccaactt

SEQ ID NO: 185616 - DNA, 22 bp, Artificial sequence
  SiRNA target sequence
catcatttatacgaccaacttg

SEQ ID NO: 185617 - DNA, 22 bp, Artificial sequence
  SiRNA target sequence
atcatttatacgaccaacttgt

SEQ ID NO: 185618 - DNA, 22 bp, Artificial sequence
  SiRNA target sequence
tcatttatacgaccaacttgta

SEQ ID NO: 185619 - DNA, 22 bp, Artificial sequence
  SiRNA target sequence
catttatacgaccaacttgtag

SEQ ID NO: 185620 - DNA, 22 bp, Artificial sequence
  SiRNA target sequence
atttatacgaccaacttgtaga

SEQ ID NO: 185621 - DNA, 22 bp, Artificial sequence
  SiRNA target sequence
tttatacgaccaacttgtagaa

SEQ ID NO: 185622 - DNA, 22 bp, Artificial sequence
  SiRNA target sequence
ttatacgaccaacttgtagaaa

SEQ ID NO: 185623 - DNA, 22 bp, Artificial sequence
  SiRNA target sequence
tatacgaccaacttgtagaaaa

SEQ ID NO: 185624 - DNA, 22 bp, Artificial sequence
  SiRNA target sequence
atacgaccaacttgtagaaaac

SEQ ID NO: 185625 - DNA, 22 bp, Artificial sequence
  SiRNA target sequence
tacgaccaacttgtagaaaact

SEQ ID NO: 185626 - DNA, 22 bp, Artificial sequence
  SiRNA target sequence
acgaccaacttgtagaaaactt

SEQ ID NO: 185627 - DNA, 22 bp, Artificial sequence
  SiRNA target sequence
cgaccaacttgtagaaaacttg

SEQ ID NO: 185628 - DNA, 22 bp, Artificial sequence
  SiRNA target sequence
gaccaacttgtagaaaacttga

SEQ ID NO: 185629 - DNA, 22 bp, Artificial sequence
  SiRNA target sequence
accaacttgtagaaaacttgag

SEQ ID NO: 185630 - DNA, 22 bp, Artificial sequence
  SiRNA target sequence
ccaacttgtagaaaacttgagt

SEQ ID NO: 185631 - DNA, 22 bp, Artificial sequence
  SiRNA target sequence
caacttgtagaaaacttgagtg

SEQ ID NO: 185632 - DNA, 22 bp, Artificial sequence
  SiRNA target sequence
aacttgtagaaaacttgagtgg

SEQ ID NO: 185633 - DNA, 22 bp, Artificial sequence
  SiRNA target sequence
acttgtagaaaacttgagtggt

SEQ ID NO: 185634 - DNA, 22 bp, Artificial sequence
  SiRNA target sequence
cttgtagaaaacttgagtggtg

SEQ ID NO: 185635 - DNA, 22 bp, Artificial sequence
  SiRNA target sequence
ttgtagaaaacttgagtggtgg

SEQ ID NO: 185636 - DNA, 22 bp, Artificial sequence
  SiRNA target sequence
tgtagaaaacttgagtggtgga

SEQ ID NO: 185637 - DNA, 22 bp, Artificial sequence
  SiRNA target sequence
gtagaaaacttgagtggtggag

SEQ ID NO: 185638 - DNA, 22 bp, Artificial sequence
  SiRNA target sequence
tagaaaacttgagtggtggaga

SEQ ID NO: 185639 - DNA, 22 bp, Artificial sequence
  SiRNA target sequence
agaaaacttgagtggtggagaa

SEQ ID NO: 185640 - DNA, 22 bp, Artificial sequence
  SiRNA target sequence
gaaaacttgagtggtggagaat

SEQ ID NO: 185641 - DNA, 22 bp, Artificial sequence
  SiRNA target sequence
aaaacttgagtggtggagaatt

SEQ ID NO: 185642 - DNA, 22 bp, Artificial sequence
  SiRNA target sequence
aaacttgagtggtggagaatta

SEQ ID NO: 185643 - DNA, 22 bp, Artificial sequence
  SiRNA target sequence
aacttgagtggtggagaattac

SEQ ID NO: 185644 - DNA, 22 bp, Artificial sequence
  SiRNA target sequence
acttgagtggtggagaattaca

SEQ ID NO: 185645 - DNA, 22 bp, Artificial sequence
  SiRNA target sequence
cttgagtggtggagaattacaa

SEQ ID NO: 185646 - DNA, 22 bp, Artificial sequence
  SiRNA target sequence
ttgagtggtggagaattacaaa

SEQ ID NO: 185647 - DNA, 22 bp, Artificial sequence
  SiRNA target sequence
tgagtggtggagaattacaaag

SEQ ID NO: 185648 - DNA, 22 bp, Artificial sequence
  SiRNA target sequence
gagtggtggagaattacaaaga

SEQ ID NO: 185649 - DNA, 22 bp, Artificial sequence
  SiRNA target sequence
agtggtggagaattacaaagaa

SEQ ID NO: 185650 - DNA, 22 bp, Artificial sequence
  SiRNA target sequence
gtggtggagaattacaaagaat

SEQ ID NO: 185651 - DNA, 22 bp, Artificial sequence
  SiRNA target sequence
tggtggagaattacaaagaatt

SEQ ID NO: 185652 - DNA, 22 bp, Artificial sequence
  SiRNA target sequence
ggtggagaattacaaagaattg

SEQ ID NO: 185653 - DNA, 22 bp, Artificial sequence
  SiRNA target sequence
gtggagaattacaaagaattgc

SEQ ID NO: 185654 - DNA, 22 bp, Artificial sequence
  SiRNA target sequence
tggagaattacaaagaattgca

SEQ ID NO: 185655 - DNA, 22 bp, Artificial sequence
  SiRNA target sequence
ggagaattacaaagaattgcaa

SEQ ID NO: 185656 - DNA, 22 bp, Artificial sequence
  SiRNA target sequence
gagaattacaaagaattgcaat

SEQ ID NO: 185657 - DNA, 22 bp, Artificial sequence
  SiRNA target sequence
agaattacaaagaattgcaata

SEQ ID NO: 185658 - DNA, 22 bp, Artificial sequence
  SiRNA target sequence
gaattacaaagaattgcaataa

SEQ ID NO: 185659 - DNA, 22 bp, Artificial sequence
  SiRNA target sequence
aattacaaagaattgcaataat

SEQ ID NO: 185660 - DNA, 22 bp, Artificial sequence
  SiRNA target sequence
attacaaagaattgcaataata

SEQ ID NO: 185661 - DNA, 22 bp, Artificial sequence
  SiRNA target sequence
ttacaaagaattgcaataataa

SEQ ID NO: 185662 - DNA, 22 bp, Artificial sequence
  SiRNA target sequence
tacaaagaattgcaataataat

SEQ ID NO: 185663 - DNA, 22 bp, Artificial sequence
  SiRNA target sequence
acaaagaattgcaataataata

SEQ ID NO: 185664 - DNA, 22 bp, Artificial sequence
  SiRNA target sequence
caaagaattgcaataataatat

SEQ ID NO: 185665 - DNA, 22 bp, Artificial sequence
  SiRNA target sequence
aaagaattgcaataataatatg

SEQ ID NO: 185666 - DNA, 22 bp, Artificial sequence
  SiRNA target sequence
aagaattgcaataataatatgt

SEQ ID NO: 185667 - DNA, 22 bp, Artificial sequence
  SiRNA target sequence
agaattgcaataataatatgtt

SEQ ID NO: 185668 - DNA, 22 bp, Artificial sequence
  SiRNA target sequence
gaattgcaataataatatgttt

SEQ ID NO: 185669 - DNA, 22 bp, Artificial sequence
  SiRNA target sequence
aattgcaataataatatgttta

SEQ ID NO: 185670 - DNA, 22 bp, Artificial sequence
  SiRNA target sequence
attgcaataataatatgtttag

SEQ ID NO: 185671 - DNA, 22 bp, Artificial sequence
  SiRNA target sequence
ttgcaataataatatgtttagg

SEQ ID NO: 185672 - DNA, 22 bp, Artificial sequence
  SiRNA target sequence
tgcaataataatatgtttagga

SEQ ID NO: 185673 - DNA, 22 bp, Artificial sequence
  SiRNA target sequence
gcaataataatatgtttaggaa

SEQ ID NO: 185674 - DNA, 22 bp, Artificial sequence
  SiRNA target sequence
caataataatatgtttaggaaa

SEQ ID NO: 185675 - DNA, 22 bp, Artificial sequence
  SiRNA target sequence
aataataatatgtttaggaaaa

SEQ ID NO: 185676 - DNA, 22 bp, Artificial sequence
  SiRNA target sequence
ataataatatgtttaggaaaag

SEQ ID NO: 185677 - DNA, 22 bp, Artificial sequence
  SiRNA target sequence
taataatatgtttaggaaaaga

SEQ ID NO: 185678 - DNA, 22 bp, Artificial sequence
  SiRNA target sequence
aataatatgtttaggaaaagat

SEQ ID NO: 185679 - DNA, 22 bp, Artificial sequence
  SiRNA target sequence
ataatatgtttaggaaaagatg

SEQ ID NO: 185680 - DNA, 22 bp, Artificial sequence
  SiRNA target sequence
taatatgtttaggaaaagatgc

SEQ ID NO: 185681 - DNA, 22 bp, Artificial sequence
  SiRNA target sequence
aatatgtttaggaaaagatgct

SEQ ID NO: 185682 - DNA, 22 bp, Artificial sequence
  SiRNA target sequence
atatgtttaggaaaagatgcta

SEQ ID NO: 185683 - DNA, 22 bp, Artificial sequence
  SiRNA target sequence
tatgtttaggaaaagatgctaa

SEQ ID NO: 185684 - DNA, 22 bp, Artificial sequence
  SiRNA target sequence
atgtttaggaaaagatgctaac

SEQ ID NO: 185685 - DNA, 22 bp, Artificial sequence
  SiRNA target sequence
tgtttaggaaaagatgctaacc

SEQ ID NO: 185686 - DNA, 22 bp, Artificial sequence
  SiRNA target sequence
gtttaggaaaagatgctaacct

SEQ ID NO: 185687 - DNA, 22 bp, Artificial sequence
  SiRNA target sequence
tttaggaaaagatgctaacctt

SEQ ID NO: 185688 - DNA, 22 bp, Artificial sequence
  SiRNA target sequence
ttaggaaaagatgctaaccttt

SEQ ID NO: 185689 - DNA, 22 bp, Artificial sequence
  SiRNA target sequence
taggaaaagatgctaaccttta

SEQ ID NO: 185690 - DNA, 22 bp, Artificial sequence
  SiRNA target sequence
aggaaaagatgctaacctttat

SEQ ID NO: 185691 - DNA, 22 bp, Artificial sequence
  SiRNA target sequence
ggaaaagatgctaacctttatt

SEQ ID NO: 185692 - DNA, 22 bp, Artificial sequence
  SiRNA target sequence
gaaaagatgctaacctttattt

SEQ ID NO: 185693 - DNA, 22 bp, Artificial sequence
  SiRNA target sequence
aaaagatgctaacctttattta

SEQ ID NO: 185694 - DNA, 22 bp, Artificial sequence
  SiRNA target sequence
aaagatgctaacctttatttat

SEQ ID NO: 185695 - DNA, 22 bp, Artificial sequence
  SiRNA target sequence
aagatgctaacctttatttatt

SEQ ID NO: 185696 - DNA, 22 bp, Artificial sequence
  SiRNA target sequence
agatgctaacctttatttatta

SEQ ID NO: 185697 - DNA, 22 bp, Artificial sequence
  SiRNA target sequence
gatgctaacctttatttattag

SEQ ID NO: 185698 - DNA, 22 bp, Artificial sequence
  SiRNA target sequence
atgctaacctttatttattaga

SEQ ID NO: 185699 - DNA, 22 bp, Artificial sequence
  SiRNA target sequence
tgctaacctttatttattagat

SEQ ID NO: 185700 - DNA, 22 bp, Artificial sequence
  SiRNA target sequence
gctaacctttatttattagatg

SEQ ID NO: 185701 - DNA, 22 bp, Artificial sequence
  SiRNA target sequence
ctaacctttatttattagatga

SEQ ID NO: 185702 - DNA, 22 bp, Artificial sequence
  SiRNA target sequence
taacctttatttattagatgaa

SEQ ID NO: 185703 - DNA, 22 bp, Artificial sequence
  SiRNA target sequence
aacctttatttattagatgaac

SEQ ID NO: 185704 - DNA, 22 bp, Artificial sequence
  SiRNA target sequence
acctttatttattagatgaacc

SEQ ID NO: 185705 - DNA, 22 bp, Artificial sequence
  SiRNA target sequence
cctttatttattagatgaacct

SEQ ID NO: 185706 - DNA, 22 bp, Artificial sequence
  SiRNA target sequence
ctttatttattagatgaacctt

SEQ ID NO: 185707 - DNA, 22 bp, Artificial sequence
  SiRNA target sequence
tttatttattagatgaaccttc

SEQ ID NO: 185708 - DNA, 22 bp, Artificial sequence
  SiRNA target sequence
ttatttattagatgaaccttct

SEQ ID NO: 185709 - DNA, 22 bp, Artificial sequence
  SiRNA target sequence
tatttattagatgaaccttctg

SEQ ID NO: 185710 - DNA, 22 bp, Artificial sequence
  SiRNA target sequence
atttattagatgaaccttctgc

SEQ ID NO: 185711 - DNA, 22 bp, Artificial sequence
  SiRNA target sequence
tttattagatgaaccttctgcg

SEQ ID NO: 185712 - DNA, 22 bp, Artificial sequence
  SiRNA target sequence
ttattagatgaaccttctgcgt

SEQ ID NO: 185713 - DNA, 22 bp, Artificial sequence
  SiRNA target sequence
tattagatgaaccttctgcgta

SEQ ID NO: 185714 - DNA, 22 bp, Artificial sequence
  SiRNA target sequence
attagatgaaccttctgcgtat

SEQ ID NO: 185715 - DNA, 22 bp, Artificial sequence
  SiRNA target sequence
ttagatgaaccttctgcgtatc

SEQ ID NO: 185716 - DNA, 22 bp, Artificial sequence
  SiRNA target sequence
tagatgaaccttctgcgtatct

SEQ ID NO: 185717 - DNA, 22 bp, Artificial sequence
  SiRNA target sequence
agatgaaccttctgcgtatcta

SEQ ID NO: 185718 - DNA, 22 bp, Artificial sequence
  SiRNA target sequence
gatgaaccttctgcgtatctag

SEQ ID NO: 185719 - DNA, 22 bp, Artificial sequence
  SiRNA target sequence
atgaaccttctgcgtatctaga

SEQ ID NO: 185720 - DNA, 22 bp, Artificial sequence
  SiRNA target sequence
tgaaccttctgcgtatctagat

SEQ ID NO: 185721 - DNA, 22 bp, Artificial sequence
  SiRNA target sequence
gaaccttctgcgtatctagatt

SEQ ID NO: 185722 - DNA, 22 bp, Artificial sequence
  SiRNA target sequence
aaccttctgcgtatctagattc

SEQ ID NO: 185723 - DNA, 22 bp, Artificial sequence
  SiRNA target sequence
accttctgcgtatctagattca

SEQ ID NO: 185724 - DNA, 22 bp, Artificial sequence
  SiRNA target sequence
ccttctgcgtatctagattcag

SEQ ID NO: 185725 - DNA, 22 bp, Artificial sequence
  SiRNA target sequence
cttctgcgtatctagattcaga

SEQ ID NO: 185726 - DNA, 22 bp, Artificial sequence
  SiRNA target sequence
ttctgcgtatctagattcagat

SEQ ID NO: 185727 - DNA, 22 bp, Artificial sequence
  SiRNA target sequence
tctgcgtatctagattcagatc

SEQ ID NO: 185728 - DNA, 22 bp, Artificial sequence
  SiRNA target sequence
ctgcgtatctagattcagatca

SEQ ID NO: 185729 - DNA, 22 bp, Artificial sequence
  SiRNA target sequence
tgcgtatctagattcagatcag

SEQ ID NO: 185730 - DNA, 22 bp, Artificial sequence
  SiRNA target sequence
gcgtatctagattcagatcaga

SEQ ID NO: 185731 - DNA, 22 bp, Artificial sequence
  SiRNA target sequence
cgtatctagattcagatcagag

SEQ ID NO: 185732 - DNA, 22 bp, Artificial sequence
  SiRNA target sequence
gtatctagattcagatcagaga

SEQ ID NO: 185733 - DNA, 22 bp, Artificial sequence
  SiRNA target sequence
tatctagattcagatcagagaa

SEQ ID NO: 185734 - DNA, 22 bp, Artificial sequence
  SiRNA target sequence
atctagattcagatcagagaat

SEQ ID NO: 185735 - DNA, 22 bp, Artificial sequence
  SiRNA target sequence
tctagattcagatcagagaata

SEQ ID NO: 185736 - DNA, 22 bp, Artificial sequence
  SiRNA target sequence
ctagattcagatcagagaatag

SEQ ID NO: 185737 - DNA, 22 bp, Artificial sequence
  SiRNA target sequence
tagattcagatcagagaatagc

SEQ ID NO: 185738 - DNA, 22 bp, Artificial sequence
  SiRNA target sequence
agattcagatcagagaatagcg

SEQ ID NO: 185739 - DNA, 22 bp, Artificial sequence
  SiRNA target sequence
gattcagatcagagaatagcga

SEQ ID NO: 185740 - DNA, 22 bp, Artificial sequence
  SiRNA target sequence
attcagatcagagaatagcgat

SEQ ID NO: 185741 - DNA, 22 bp, Artificial sequence
  SiRNA target sequence
ttcagatcagagaatagcgatt

SEQ ID NO: 185742 - DNA, 22 bp, Artificial sequence
  SiRNA target sequence
tcagatcagagaatagcgattt

SEQ ID NO: 185743 - DNA, 22 bp, Artificial sequence
  SiRNA target sequence
cagatcagagaatagcgatttc

SEQ ID NO: 185744 - DNA, 22 bp, Artificial sequence
  SiRNA target sequence
agatcagagaatagcgatttca

SEQ ID NO: 185745 - DNA, 22 bp, Artificial sequence
  SiRNA target sequence
gatcagagaatagcgatttcaa

SEQ ID NO: 185746 - DNA, 22 bp, Artificial sequence
  SiRNA target sequence
atcagagaatagcgatttcaaa

SEQ ID NO: 185747 - DNA, 22 bp, Artificial sequence
  SiRNA target sequence
tcagagaatagcgatttcaaaa

SEQ ID NO: 185748 - DNA, 22 bp, Artificial sequence
  SiRNA target sequence
cagagaatagcgatttcaaaag

SEQ ID NO: 185749 - DNA, 22 bp, Artificial sequence
  SiRNA target sequence
agagaatagcgatttcaaaagt

SEQ ID NO: 185750 - DNA, 22 bp, Artificial sequence
  SiRNA target sequence
gagaatagcgatttcaaaagtt

SEQ ID NO: 185751 - DNA, 22 bp, Artificial sequence
  SiRNA target sequence
agaatagcgatttcaaaagtta

SEQ ID NO: 185752 - DNA, 22 bp, Artificial sequence
  SiRNA target sequence
gaatagcgatttcaaaagttat

SEQ ID NO: 185753 - DNA, 22 bp, Artificial sequence
  SiRNA target sequence
aatagcgatttcaaaagttata

SEQ ID NO: 185754 - DNA, 22 bp, Artificial sequence
  SiRNA target sequence
atagcgatttcaaaagttataa

SEQ ID NO: 185755 - DNA, 22 bp, Artificial sequence
  SiRNA target sequence
tagcgatttcaaaagttataaa

SEQ ID NO: 185756 - DNA, 22 bp, Artificial sequence
  SiRNA target sequence
agcgatttcaaaagttataaaa

SEQ ID NO: 185757 - DNA, 22 bp, Artificial sequence
  SiRNA target sequence
gcgatttcaaaagttataaaaa

SEQ ID NO: 185758 - DNA, 22 bp, Artificial sequence
  SiRNA target sequence
cgatttcaaaagttataaaaag

SEQ ID NO: 185759 - DNA, 22 bp, Artificial sequence
  SiRNA target sequence
gatttcaaaagttataaaaagg

SEQ ID NO: 185760 - DNA, 22 bp, Artificial sequence
  SiRNA target sequence
atttcaaaagttataaaaaggt

SEQ ID NO: 185761 - DNA, 22 bp, Artificial sequence
  SiRNA target sequence
tttcaaaagttataaaaaggtt

SEQ ID NO: 185762 - DNA, 22 bp, Artificial sequence
  SiRNA target sequence
ttcaaaagttataaaaaggttt

SEQ ID NO: 185763 - DNA, 22 bp, Artificial sequence
  SiRNA target sequence
tcaaaagttataaaaaggttta

SEQ ID NO: 185764 - DNA, 22 bp, Artificial sequence
  SiRNA target sequence
caaaagttataaaaaggtttat

SEQ ID NO: 185765 - DNA, 22 bp, Artificial sequence
  SiRNA target sequence
aaaagttataaaaaggtttatt

SEQ ID NO: 185766 - DNA, 22 bp, Artificial sequence
  SiRNA target sequence
aaagttataaaaaggtttattt

SEQ ID NO: 185767 - DNA, 22 bp, Artificial sequence
  SiRNA target sequence
aagttataaaaaggtttattta

SEQ ID NO: 185768 - DNA, 22 bp, Artificial sequence
  SiRNA target sequence
agttataaaaaggtttatttat

SEQ ID NO: 185769 - DNA, 22 bp, Artificial sequence
  SiRNA target sequence
gttataaaaaggtttatttatg

SEQ ID NO: 185770 - DNA, 22 bp, Artificial sequence
  SiRNA target sequence
ttataaaaaggtttatttatgg

SEQ ID NO: 185771 - DNA, 22 bp, Artificial sequence
  SiRNA target sequence
tataaaaaggtttatttatggg

SEQ ID NO: 185772 - DNA, 22 bp, Artificial sequence
  SiRNA target sequence
ataaaaaggtttatttatggga

SEQ ID NO: 185773 - DNA, 22 bp, Artificial sequence
  SiRNA target sequence
taaaaaggtttatttatgggaa

SEQ ID NO: 185774 - DNA, 22 bp, Artificial sequence
  SiRNA target sequence
aaaaaggtttatttatgggaag

SEQ ID NO: 185775 - DNA, 22 bp, Artificial sequence
  SiRNA target sequence
aaaaggtttatttatgggaaga

SEQ ID NO: 185776 - DNA, 22 bp, Artificial sequence
  SiRNA target sequence
aaaggtttatttatgggaagaa

SEQ ID NO: 185777 - DNA, 22 bp, Artificial sequence
  SiRNA target sequence
aaggtttatttatgggaagaag

SEQ ID NO: 185778 - DNA, 22 bp, Artificial sequence
  SiRNA target sequence
aggtttatttatgggaagaagc

SEQ ID NO: 185779 - DNA, 22 bp, Artificial sequence
  SiRNA target sequence
ggtttatttatgggaagaagcg

SEQ ID NO: 185780 - DNA, 22 bp, Artificial sequence
  SiRNA target sequence
gtttatttatgggaagaagcga

SEQ ID NO: 185781 - DNA, 22 bp, Artificial sequence
  SiRNA target sequence
tttatttatgggaagaagcgaa

SEQ ID NO: 185782 - DNA, 22 bp, Artificial sequence
  SiRNA target sequence
ttatttatgggaagaagcgaac

SEQ ID NO: 185783 - DNA, 22 bp, Artificial sequence
  SiRNA target sequence
tatttatgggaagaagcgaaca

SEQ ID NO: 185784 - DNA, 22 bp, Artificial sequence
  SiRNA target sequence
atttatgggaagaagcgaacag

SEQ ID NO: 185785 - DNA, 22 bp, Artificial sequence
  SiRNA target sequence
tttatgggaagaagcgaacagc

SEQ ID NO: 185786 - DNA, 22 bp, Artificial sequence
  SiRNA target sequence
ttatgggaagaagcgaacagcc

SEQ ID NO: 185787 - DNA, 22 bp, Artificial sequence
  SiRNA target sequence
tatgggaagaagcgaacagcct

SEQ ID NO: 185788 - DNA, 22 bp, Artificial sequence
  SiRNA target sequence
atgggaagaagcgaacagcctt

SEQ ID NO: 185789 - DNA, 22 bp, Artificial sequence
  SiRNA target sequence
tgggaagaagcgaacagccttt

SEQ ID NO: 185790 - DNA, 22 bp, Artificial sequence
  SiRNA target sequence
gggaagaagcgaacagcctttg

SEQ ID NO: 185791 - DNA, 22 bp, Artificial sequence
  SiRNA target sequence
ggaagaagcgaacagcctttgt

SEQ ID NO: 185792 - DNA, 22 bp, Artificial sequence
  SiRNA target sequence
gaagaagcgaacagcctttgtg

SEQ ID NO: 185793 - DNA, 22 bp, Artificial sequence
  SiRNA target sequence
aagaagcgaacagcctttgtgg

SEQ ID NO: 185794 - DNA, 22 bp, Artificial sequence
  SiRNA target sequence
agaagcgaacagcctttgtggt

SEQ ID NO: 185795 - DNA, 22 bp, Artificial sequence
  SiRNA target sequence
gaagcgaacagcctttgtggtt

SEQ ID NO: 185796 - DNA, 22 bp, Artificial sequence
  SiRNA target sequence
aagcgaacagcctttgtggttg

SEQ ID NO: 185797 - DNA, 22 bp, Artificial sequence
  SiRNA target sequence
agcgaacagcctttgtggttga

SEQ ID NO: 185798 - DNA, 22 bp, Artificial sequence
  SiRNA target sequence
gcgaacagcctttgtggttgaa

SEQ ID NO: 185799 - DNA, 22 bp, Artificial sequence
  SiRNA target sequence
cgaacagcctttgtggttgaac

SEQ ID NO: 185800 - DNA, 22 bp, Artificial sequence
  SiRNA target sequence
gaacagcctttgtggttgaaca

SEQ ID NO: 185801 - DNA, 22 bp, Artificial sequence
  SiRNA target sequence
aacagcctttgtggttgaacat

SEQ ID NO: 185802 - DNA, 22 bp, Artificial sequence
  SiRNA target sequence
acagcctttgtggttgaacatg

SEQ ID NO: 185803 - DNA, 22 bp, Artificial sequence
  SiRNA target sequence
cagcctttgtggttgaacatga

SEQ ID NO: 185804 - DNA, 22 bp, Artificial sequence
  SiRNA target sequence
agcctttgtggttgaacatgat

SEQ ID NO: 185805 - DNA, 22 bp, Artificial sequence
  SiRNA target sequence
gcctttgtggttgaacatgatt

SEQ ID NO: 185806 - DNA, 22 bp, Artificial sequence
  SiRNA target sequence
cctttgtggttgaacatgattt

SEQ ID NO: 185807 - DNA, 22 bp, Artificial sequence
  SiRNA target sequence
ctttgtggttgaacatgattta

SEQ ID NO: 185808 - DNA, 22 bp, Artificial sequence
  SiRNA target sequence
tttgtggttgaacatgatttaa

SEQ ID NO: 185809 - DNA, 22 bp, Artificial sequence
  SiRNA target sequence
ttgtggttgaacatgatttaat

SEQ ID NO: 185810 - DNA, 22 bp, Artificial sequence
  SiRNA target sequence
tgtggttgaacatgatttaatt

SEQ ID NO: 185811 - DNA, 22 bp, Artificial sequence
  SiRNA target sequence
gtggttgaacatgatttaattg

SEQ ID NO: 185812 - DNA, 22 bp, Artificial sequence
  SiRNA target sequence
tggttgaacatgatttaattgt

SEQ ID NO: 185813 - DNA, 22 bp, Artificial sequence
  SiRNA target sequence
ggttgaacatgatttaattgta

SEQ ID NO: 185814 - DNA, 22 bp, Artificial sequence
  SiRNA target sequence
gttgaacatgatttaattgtag

SEQ ID NO: 185815 - DNA, 22 bp, Artificial sequence
  SiRNA target sequence
ttgaacatgatttaattgtagg

SEQ ID NO: 185816 - DNA, 22 bp, Artificial sequence
  SiRNA target sequence
tgaacatgatttaattgtaggt

SEQ ID NO: 185817 - DNA, 22 bp, Artificial sequence
  SiRNA target sequence
gaacatgatttaattgtaggta

SEQ ID NO: 185818 - DNA, 22 bp, Artificial sequence
  SiRNA target sequence
aacatgatttaattgtaggtac

SEQ ID NO: 185819 - DNA, 22 bp, Artificial sequence
  SiRNA target sequence
acatgatttaattgtaggtaca

SEQ ID NO: 185820 - DNA, 22 bp, Artificial sequence
  SiRNA target sequence
catgatttaattgtaggtacat

SEQ ID NO: 185821 - DNA, 22 bp, Artificial sequence
  SiRNA target sequence
atgatttaattgtaggtacata

SEQ ID NO: 185822 - DNA, 22 bp, Artificial sequence
  SiRNA target sequence
tgatttaattgtaggtacatat

SEQ ID NO: 185823 - DNA, 22 bp, Artificial sequence
  SiRNA target sequence
gatttaattgtaggtacatatt

SEQ ID NO: 185824 - DNA, 22 bp, Artificial sequence
  SiRNA target sequence
atttaattgtaggtacatattt

SEQ ID NO: 185825 - DNA, 22 bp, Artificial sequence
  SiRNA target sequence
tttaattgtaggtacatatttg

SEQ ID NO: 185826 - DNA, 22 bp, Artificial sequence
  SiRNA target sequence
ttaattgtaggtacatatttgg

SEQ ID NO: 185827 - DNA, 22 bp, Artificial sequence
  SiRNA target sequence
taattgtaggtacatatttggc

SEQ ID NO: 185828 - DNA, 22 bp, Artificial sequence
  SiRNA target sequence
aattgtaggtacatatttggct

SEQ ID NO: 185829 - DNA, 22 bp, Artificial sequence
  SiRNA target sequence
attgtaggtacatatttggctg

SEQ ID NO: 185830 - DNA, 22 bp, Artificial sequence
  SiRNA target sequence
ttgtaggtacatatttggctga

SEQ ID NO: 185831 - DNA, 22 bp, Artificial sequence
  SiRNA target sequence
tgtaggtacatatttggctgat

SEQ ID NO: 185832 - DNA, 22 bp, Artificial sequence
  SiRNA target sequence
gtaggtacatatttggctgata

SEQ ID NO: 185833 - DNA, 22 bp, Artificial sequence
  SiRNA target sequence
taggtacatatttggctgataa

SEQ ID NO: 185834 - DNA, 22 bp, Artificial sequence
  SiRNA target sequence
aggtacatatttggctgataaa

SEQ ID NO: 185835 - DNA, 22 bp, Artificial sequence
  SiRNA target sequence
ggtacatatttggctgataaag

SEQ ID NO: 185836 - DNA, 22 bp, Artificial sequence
  SiRNA target sequence
gtacatatttggctgataaagt

SEQ ID NO: 185837 - DNA, 22 bp, Artificial sequence
  SiRNA target sequence
tacatatttggctgataaagtt

SEQ ID NO: 185838 - DNA, 22 bp, Artificial sequence
  SiRNA target sequence
acatatttggctgataaagttg

SEQ ID NO: 185839 - DNA, 22 bp, Artificial sequence
  SiRNA target sequence
catatttggctgataaagttgt

SEQ ID NO: 185840 - DNA, 22 bp, Artificial sequence
  SiRNA target sequence
atatttggctgataaagttgtt

SEQ ID NO: 185841 - DNA, 22 bp, Artificial sequence
  SiRNA target sequence
tatttggctgataaagttgttg

SEQ ID NO: 185842 - DNA, 22 bp, Artificial sequence
  SiRNA target sequence
atttggctgataaagttgttgt

SEQ ID NO: 185843 - DNA, 22 bp, Artificial sequence
  SiRNA target sequence
tttggctgataaagttgttgtt

SEQ ID NO: 185844 - DNA, 22 bp, Artificial sequence
  SiRNA target sequence
ttggctgataaagttgttgttt

SEQ ID NO: 185845 - DNA, 22 bp, Artificial sequence
  SiRNA target sequence
tggctgataaagttgttgtttt

SEQ ID NO: 185846 - DNA, 22 bp, Artificial sequence
  SiRNA target sequence
ggctgataaagttgttgttttt

SEQ ID NO: 185847 - DNA, 22 bp, Artificial sequence
  SiRNA target sequence
gctgataaagttgttgtttttg

SEQ ID NO: 185848 - DNA, 22 bp, Artificial sequence
  SiRNA target sequence
ctgataaagttgttgtttttga

SEQ ID NO: 185849 - DNA, 22 bp, Artificial sequence
  SiRNA target sequence
tgataaagttgttgtttttgag

SEQ ID NO: 185850 - DNA, 22 bp, Artificial sequence
  SiRNA target sequence
gataaagttgttgtttttgagg

SEQ ID NO: 185851 - DNA, 22 bp, Artificial sequence
  SiRNA target sequence
ataaagttgttgtttttgaggg

SEQ ID NO: 185852 - DNA, 22 bp, Artificial sequence
  SiRNA target sequence
taaagttgttgtttttgaggga

SEQ ID NO: 185853 - DNA, 22 bp, Artificial sequence
  SiRNA target sequence
aaagttgttgtttttgagggaa

SEQ ID NO: 185854 - DNA, 22 bp, Artificial sequence
  SiRNA target sequence
aagttgttgtttttgagggaag

SEQ ID NO: 185855 - DNA, 22 bp, Artificial sequence
  SiRNA target sequence
agttgttgtttttgagggaagc

SEQ ID NO: 185856 - DNA, 22 bp, Artificial sequence
  SiRNA target sequence
gttgttgtttttgagggaagcc

SEQ ID NO: 185857 - DNA, 22 bp, Artificial sequence
  SiRNA target sequence
ttgttgtttttgagggaagccc

SEQ ID NO: 185858 - DNA, 22 bp, Artificial sequence
  SiRNA target sequence
tgttgtttttgagggaagccct

SEQ ID NO: 185859 - DNA, 22 bp, Artificial sequence
  SiRNA target sequence
gttgtttttgagggaagcccta

SEQ ID NO: 185860 - DNA, 22 bp, Artificial sequence
  SiRNA target sequence
ttgtttttgagggaagccctag

SEQ ID NO: 185861 - DNA, 22 bp, Artificial sequence
  SiRNA target sequence
tgtttttgagggaagccctagt

SEQ ID NO: 185862 - DNA, 22 bp, Artificial sequence
  SiRNA target sequence
gtttttgagggaagccctagtg

SEQ ID NO: 185863 - DNA, 22 bp, Artificial sequence
  SiRNA target sequence
tttttgagggaagccctagtgt

SEQ ID NO: 185864 - DNA, 22 bp, Artificial sequence
  SiRNA target sequence
ttttgagggaagccctagtgtt

SEQ ID NO: 185865 - DNA, 22 bp, Artificial sequence
  SiRNA target sequence
tttgagggaagccctagtgttc

SEQ ID NO: 185866 - DNA, 22 bp, Artificial sequence
  SiRNA target sequence
ttgagggaagccctagtgttca

SEQ ID NO: 185867 - DNA, 22 bp, Artificial sequence
  SiRNA target sequence
tgagggaagccctagtgttcat

SEQ ID NO: 185868 - DNA, 22 bp, Artificial sequence
  SiRNA target sequence
gagggaagccctagtgttcata

SEQ ID NO: 185869 - DNA, 22 bp, Artificial sequence
  SiRNA target sequence
agggaagccctagtgttcatag

SEQ ID NO: 185870 - DNA, 22 bp, Artificial sequence
  SiRNA target sequence
gggaagccctagtgttcatagc

SEQ ID NO: 185871 - DNA, 22 bp, Artificial sequence
  SiRNA target sequence
ggaagccctagtgttcatagca

SEQ ID NO: 185872 - DNA, 22 bp, Artificial sequence
  SiRNA target sequence
gaagccctagtgttcatagcac

SEQ ID NO: 185873 - DNA, 22 bp, Artificial sequence
  SiRNA target sequence
aagccctagtgttcatagcact

SEQ ID NO: 185874 - DNA, 22 bp, Artificial sequence
  SiRNA target sequence
agccctagtgttcatagcactg

SEQ ID NO: 185875 - DNA, 22 bp, Artificial sequence
  SiRNA target sequence
gccctagtgttcatagcactgc

SEQ ID NO: 185876 - DNA, 22 bp, Artificial sequence
  SiRNA target sequence
ccctagtgttcatagcactgct

SEQ ID NO: 185877 - DNA, 22 bp, Artificial sequence
  SiRNA target sequence
cctagtgttcatagcactgctc

SEQ ID NO: 185878 - DNA, 22 bp, Artificial sequence
  SiRNA target sequence
ctagtgttcatagcactgctca

SEQ ID NO: 185879 - DNA, 22 bp, Artificial sequence
  SiRNA target sequence
tagtgttcatagcactgctcat

SEQ ID NO: 185880 - DNA, 22 bp, Artificial sequence
  SiRNA target sequence
agtgttcatagcactgctcata

SEQ ID NO: 185881 - DNA, 22 bp, Artificial sequence
  SiRNA target sequence
gtgttcatagcactgctcataa

SEQ ID NO: 185882 - DNA, 22 bp, Artificial sequence
  SiRNA target sequence
tgttcatagcactgctcataaa

SEQ ID NO: 185883 - DNA, 22 bp, Artificial sequence
  SiRNA target sequence
gttcatagcactgctcataaac

SEQ ID NO: 185884 - DNA, 22 bp, Artificial sequence
  SiRNA target sequence
ttcatagcactgctcataaacc

SEQ ID NO: 185885 - DNA, 22 bp, Artificial sequence
  SiRNA target sequence
tcatagcactgctcataaaccg

SEQ ID NO: 185886 - DNA, 22 bp, Artificial sequence
  SiRNA target sequence
catagcactgctcataaaccga

SEQ ID NO: 185887 - DNA, 22 bp, Artificial sequence
  SiRNA target sequence
atagcactgctcataaaccgat

SEQ ID NO: 185888 - DNA, 22 bp, Artificial sequence
  SiRNA target sequence
tagcactgctcataaaccgatg

SEQ ID NO: 185889 - DNA, 22 bp, Artificial sequence
  SiRNA target sequence
agcactgctcataaaccgatgg

SEQ ID NO: 185890 - DNA, 22 bp, Artificial sequence
  SiRNA target sequence
gcactgctcataaaccgatgga

SEQ ID NO: 185891 - DNA, 22 bp, Artificial sequence
  SiRNA target sequence
cactgctcataaaccgatggat

SEQ ID NO: 185892 - DNA, 22 bp, Artificial sequence
  SiRNA target sequence
actgctcataaaccgatggatt

SEQ ID NO: 185893 - DNA, 22 bp, Artificial sequence
  SiRNA target sequence
ctgctcataaaccgatggattt

SEQ ID NO: 185894 - DNA, 22 bp, Artificial sequence
  SiRNA target sequence
tgctcataaaccgatggatttg

SEQ ID NO: 185895 - DNA, 22 bp, Artificial sequence
  SiRNA target sequence
gctcataaaccgatggatttgc

SEQ ID NO: 185896 - DNA, 22 bp, Artificial sequence
  SiRNA target sequence
ctcataaaccgatggatttgca

SEQ ID NO: 185897 - DNA, 22 bp, Artificial sequence
  SiRNA target sequence
tcataaaccgatggatttgcat

SEQ ID NO: 185898 - DNA, 22 bp, Artificial sequence
  SiRNA target sequence
cataaaccgatggatttgcata

SEQ ID NO: 185899 - DNA, 22 bp, Artificial sequence
  SiRNA target sequence
ataaaccgatggatttgcatag

SEQ ID NO: 185900 - DNA, 22 bp, Artificial sequence
  SiRNA target sequence
taaaccgatggatttgcatagt

SEQ ID NO: 185901 - DNA, 22 bp, Artificial sequence
  SiRNA target sequence
aaaccgatggatttgcatagtg

SEQ ID NO: 185902 - DNA, 22 bp, Artificial sequence
  SiRNA target sequence
aaccgatggatttgcatagtgg

SEQ ID NO: 185903 - DNA, 22 bp, Artificial sequence
  SiRNA target sequence
accgatggatttgcatagtgga

SEQ ID NO: 185904 - DNA, 22 bp, Artificial sequence
  SiRNA target sequence
ccgatggatttgcatagtggaa

SEQ ID NO: 185905 - DNA, 22 bp, Artificial sequence
  SiRNA target sequence
cgatggatttgcatagtggaat

SEQ ID NO: 185906 - DNA, 22 bp, Artificial sequence
  SiRNA target sequence
gatggatttgcatagtggaatg

SEQ ID NO: 185907 - DNA, 22 bp, Artificial sequence
  SiRNA target sequence
atggatttgcatagtggaatga

SEQ ID NO: 185908 - DNA, 22 bp, Artificial sequence
  SiRNA target sequence
tggatttgcatagtggaatgaa

SEQ ID NO: 185909 - DNA, 22 bp, Artificial sequence
  SiRNA target sequence
ggatttgcatagtggaatgaat

SEQ ID NO: 185910 - DNA, 22 bp, Artificial sequence
  SiRNA target sequence
gatttgcatagtggaatgaata

SEQ ID NO: 185911 - DNA, 22 bp, Artificial sequence
  SiRNA target sequence
atttgcatagtggaatgaatat

SEQ ID NO: 185912 - DNA, 22 bp, Artificial sequence
  SiRNA target sequence
tttgcatagtggaatgaatatt

SEQ ID NO: 185913 - DNA, 22 bp, Artificial sequence
  SiRNA target sequence
ttgcatagtggaatgaatattt

SEQ ID NO: 185914 - DNA, 22 bp, Artificial sequence
  SiRNA target sequence
tgcatagtggaatgaatatttt

SEQ ID NO: 185915 - DNA, 22 bp, Artificial sequence
  SiRNA target sequence
gcatagtggaatgaatattttt

SEQ ID NO: 185916 - DNA, 22 bp, Artificial sequence
  SiRNA target sequence
catagtggaatgaatatttttt

SEQ ID NO: 185917 - DNA, 22 bp, Artificial sequence
  SiRNA target sequence
atagtggaatgaatattttttt

SEQ ID NO: 185918 - DNA, 22 bp, Artificial sequence
  SiRNA target sequence
tagtggaatgaatattttttta

SEQ ID NO: 185919 - DNA, 22 bp, Artificial sequence
  SiRNA target sequence
agtggaatgaatatttttttaa

SEQ ID NO: 185920 - DNA, 22 bp, Artificial sequence
  SiRNA target sequence
gtggaatgaatatttttttaaa

SEQ ID NO: 185921 - DNA, 22 bp, Artificial sequence
  SiRNA target sequence
tggaatgaatatttttttaaag

SEQ ID NO: 185922 - DNA, 22 bp, Artificial sequence
  SiRNA target sequence
ggaatgaatatttttttaaaga

SEQ ID NO: 185923 - DNA, 22 bp, Artificial sequence
  SiRNA target sequence
gaatgaatatttttttaaagaa

SEQ ID NO: 185924 - DNA, 22 bp, Artificial sequence
  SiRNA target sequence
aatgaatatttttttaaagaat

SEQ ID NO: 185925 - DNA, 22 bp, Artificial sequence
  SiRNA target sequence
atgaatatttttttaaagaatc

SEQ ID NO: 185926 - DNA, 22 bp, Artificial sequence
  SiRNA target sequence
tgaatatttttttaaagaatct

SEQ ID NO: 185927 - DNA, 22 bp, Artificial sequence
  SiRNA target sequence
gaatatttttttaaagaatctt

SEQ ID NO: 185928 - DNA, 22 bp, Artificial sequence
  SiRNA target sequence
aatatttttttaaagaatcttg

SEQ ID NO: 185929 - DNA, 22 bp, Artificial sequence
  SiRNA target sequence
atatttttttaaagaatcttga

SEQ ID NO: 185930 - DNA, 22 bp, Artificial sequence
  SiRNA target sequence
tatttttttaaagaatcttgat

SEQ ID NO: 185931 - DNA, 22 bp, Artificial sequence
  SiRNA target sequence
atttttttaaagaatcttgata

SEQ ID NO: 185932 - DNA, 22 bp, Artificial sequence
  SiRNA target sequence
tttttttaaagaatcttgatat

SEQ ID NO: 185933 - DNA, 22 bp, Artificial sequence
  SiRNA target sequence
ttttttaaagaatcttgatatt

SEQ ID NO: 185934 - DNA, 22 bp, Artificial sequence
  SiRNA target sequence
tttttaaagaatcttgatatta

SEQ ID NO: 185935 - DNA, 22 bp, Artificial sequence
  SiRNA target sequence
ttttaaagaatcttgatattac

SEQ ID NO: 185936 - DNA, 22 bp, Artificial sequence
  SiRNA target sequence
tttaaagaatcttgatattact

SEQ ID NO: 185937 - DNA, 22 bp, Artificial sequence
  SiRNA target sequence
ttaaagaatcttgatattactt

SEQ ID NO: 185938 - DNA, 22 bp, Artificial sequence
  SiRNA target sequence
taaagaatcttgatattacttt

SEQ ID NO: 185939 - DNA, 22 bp, Artificial sequence
  SiRNA target sequence
aaagaatcttgatattactttt

SEQ ID NO: 185940 - DNA, 22 bp, Artificial sequence
  SiRNA target sequence
aagaatcttgatattactttta

SEQ ID NO: 185941 - DNA, 22 bp, Artificial sequence
  SiRNA target sequence
agaatcttgatattacttttag

SEQ ID NO: 185942 - DNA, 22 bp, Artificial sequence
  SiRNA target sequence
gaatcttgatattacttttaga

SEQ ID NO: 185943 - DNA, 22 bp, Artificial sequence
  SiRNA target sequence
aatcttgatattacttttagaa

SEQ ID NO: 185944 - DNA, 22 bp, Artificial sequence
  SiRNA target sequence
atcttgatattacttttagaag

SEQ ID NO: 185945 - DNA, 22 bp, Artificial sequence
  SiRNA target sequence
tcttgatattacttttagaaga

SEQ ID NO: 185946 - DNA, 22 bp, Artificial sequence
  SiRNA target sequence
cttgatattacttttagaagag

SEQ ID NO: 185947 - DNA, 22 bp, Artificial sequence
  SiRNA target sequence
ttgatattacttttagaagaga

SEQ ID NO: 185948 - DNA, 22 bp, Artificial sequence
  SiRNA target sequence
tgatattacttttagaagagac

SEQ ID NO: 185949 - DNA, 22 bp, Artificial sequence
  SiRNA target sequence
gatattacttttagaagagact

SEQ ID NO: 185950 - DNA, 22 bp, Artificial sequence
  SiRNA target sequence
atattacttttagaagagactc

SEQ ID NO: 185951 - DNA, 22 bp, Artificial sequence
  SiRNA target sequence
tattacttttagaagagactct

SEQ ID NO: 185952 - DNA, 22 bp, Artificial sequence
  SiRNA target sequence
attacttttagaagagactctt

SEQ ID NO: 185953 - DNA, 22 bp, Artificial sequence
  SiRNA target sequence
ttacttttagaagagactcttc

SEQ ID NO: 185954 - DNA, 22 bp, Artificial sequence
  SiRNA target sequence
tacttttagaagagactcttcc

SEQ ID NO: 185955 - DNA, 22 bp, Artificial sequence
  SiRNA target sequence
acttttagaagagactcttcca

SEQ ID NO: 185956 - DNA, 22 bp, Artificial sequence
  SiRNA target sequence
cttttagaagagactcttccaa

SEQ ID NO: 185957 - DNA, 22 bp, Artificial sequence
  SiRNA target sequence
ttttagaagagactcttccaat

SEQ ID NO: 185958 - DNA, 22 bp, Artificial sequence
  SiRNA target sequence
tttagaagagactcttccaatt

SEQ ID NO: 185959 - DNA, 22 bp, Artificial sequence
  SiRNA target sequence
ttagaagagactcttccaattt

SEQ ID NO: 185960 - DNA, 22 bp, Artificial sequence
  SiRNA target sequence
tagaagagactcttccaatttt

SEQ ID NO: 185961 - DNA, 22 bp, Artificial sequence
  SiRNA target sequence
agaagagactcttccaatttta

SEQ ID NO: 185962 - DNA, 22 bp, Artificial sequence
  SiRNA target sequence
gaagagactcttccaattttag

SEQ ID NO: 185963 - DNA, 22 bp, Artificial sequence
  SiRNA target sequence
aagagactcttccaattttaga

SEQ ID NO: 185964 - DNA, 22 bp, Artificial sequence
  SiRNA target sequence
agagactcttccaattttagac

SEQ ID NO: 185965 - DNA, 22 bp, Artificial sequence
  SiRNA target sequence
gagactcttccaattttagacc

SEQ ID NO: 185966 - DNA, 22 bp, Artificial sequence
  SiRNA target sequence
agactcttccaattttagacca

SEQ ID NO: 185967 - DNA, 22 bp, Artificial sequence
  SiRNA target sequence
gactcttccaattttagaccaa

SEQ ID NO: 185968 - DNA, 22 bp, Artificial sequence
  SiRNA target sequence
actcttccaattttagaccaag

SEQ ID NO: 185969 - DNA, 22 bp, Artificial sequence
  SiRNA target sequence
ctcttccaattttagaccaaga

SEQ ID NO: 185970 - DNA, 22 bp, Artificial sequence
  SiRNA target sequence
tcttccaattttagaccaagag

SEQ ID NO: 185971 - DNA, 22 bp, Artificial sequence
  SiRNA target sequence
cttccaattttagaccaagagt

SEQ ID NO: 185972 - DNA, 22 bp, Artificial sequence
  SiRNA target sequence
ttccaattttagaccaagagtt

SEQ ID NO: 185973 - DNA, 22 bp, Artificial sequence
  SiRNA target sequence
tccaattttagaccaagagtta

SEQ ID NO: 185974 - DNA, 22 bp, Artificial sequence
  SiRNA target sequence
ccaattttagaccaagagttaa

SEQ ID NO: 185975 - DNA, 22 bp, Artificial sequence
  SiRNA target sequence
caattttagaccaagagttaat

SEQ ID NO: 185976 - DNA, 22 bp, Artificial sequence
  SiRNA target sequence
aattttagaccaagagttaata

SEQ ID NO: 185977 - DNA, 22 bp, Artificial sequence
  SiRNA target sequence
attttagaccaagagttaataa

SEQ ID NO: 185978 - DNA, 22 bp, Artificial sequence
  SiRNA target sequence
ttttagaccaagagttaataag

SEQ ID NO: 185979 - DNA, 22 bp, Artificial sequence
  SiRNA target sequence
tttagaccaagagttaataagc

SEQ ID NO: 185980 - DNA, 22 bp, Artificial sequence
  SiRNA target sequence
ttagaccaagagttaataagcc

SEQ ID NO: 185981 - DNA, 22 bp, Artificial sequence
  SiRNA target sequence
tagaccaagagttaataagccg

SEQ ID NO: 185982 - DNA, 22 bp, Artificial sequence
  SiRNA target sequence
agaccaagagttaataagccga

SEQ ID NO: 185983 - DNA, 22 bp, Artificial sequence
  SiRNA target sequence
gaccaagagttaataagccgaa

SEQ ID NO: 185984 - DNA, 22 bp, Artificial sequence
  SiRNA target sequence
accaagagttaataagccgaat

SEQ ID NO: 185985 - DNA, 22 bp, Artificial sequence
  SiRNA target sequence
ccaagagttaataagccgaatt

SEQ ID NO: 185986 - DNA, 22 bp, Artificial sequence
  SiRNA target sequence
caagagttaataagccgaattc

SEQ ID NO: 185987 - DNA, 22 bp, Artificial sequence
  SiRNA target sequence
aagagttaataagccgaattcc

SEQ ID NO: 185988 - DNA, 22 bp, Artificial sequence
  SiRNA target sequence
agagttaataagccgaattccg

SEQ ID NO: 185989 - DNA, 22 bp, Artificial sequence
  SiRNA target sequence
gagttaataagccgaattccgc

SEQ ID NO: 185990 - DNA, 22 bp, Artificial sequence
  SiRNA target sequence
agttaataagccgaattccgca

SEQ ID NO: 185991 - DNA, 22 bp, Artificial sequence
  SiRNA target sequence
gttaataagccgaattccgcaa

SEQ ID NO: 185992 - DNA, 22 bp, Artificial sequence
  SiRNA target sequence
ttaataagccgaattccgcaaa

SEQ ID NO: 185993 - DNA, 22 bp, Artificial sequence
  SiRNA target sequence
taataagccgaattccgcaaaa

SEQ ID NO: 185994 - DNA, 22 bp, Artificial sequence
  SiRNA target sequence
aataagccgaattccgcaaaag

SEQ ID NO: 185995 - DNA, 22 bp, Artificial sequence
  SiRNA target sequence
ataagccgaattccgcaaaaga

SEQ ID NO: 185996 - DNA, 22 bp, Artificial sequence
  SiRNA target sequence
taagccgaattccgcaaaagac

SEQ ID NO: 185997 - DNA, 22 bp, Artificial sequence
  SiRNA target sequence
aagccgaattccgcaaaagaca

SEQ ID NO: 185998 - DNA, 22 bp, Artificial sequence
  SiRNA target sequence
agccgaattccgcaaaagacag

SEQ ID NO: 185999 - DNA, 22 bp, Artificial sequence
  SiRNA target sequence
gccgaattccgcaaaagacaga

SEQ ID NO: 186000 - DNA, 22 bp, Artificial sequence
  SiRNA target sequence
ccgaattccgcaaaagacagaa

SEQ ID NO: 186001 - DNA, 22 bp, Artificial sequence
  SiRNA target sequence
cgaattccgcaaaagacagaac

SEQ ID NO: 186002 - DNA, 22 bp, Artificial sequence
  SiRNA target sequence
gaattccgcaaaagacagaact

SEQ ID NO: 186003 - DNA, 22 bp, Artificial sequence
  SiRNA target sequence
aattccgcaaaagacagaactc

SEQ ID NO: 186004 - DNA, 22 bp, Artificial sequence
  SiRNA target sequence
attccgcaaaagacagaactca

SEQ ID NO: 186005 - DNA, 22 bp, Artificial sequence
  SiRNA target sequence
ttccgcaaaagacagaactcag

SEQ ID NO: 186006 - DNA, 22 bp, Artificial sequence
  SiRNA target sequence
tccgcaaaagacagaactcaga

SEQ ID NO: 186007 - DNA, 22 bp, Artificial sequence
  SiRNA target sequence
ccgcaaaagacagaactcagaa

SEQ ID NO: 186008 - DNA, 22 bp, Artificial sequence
  SiRNA target sequence
cgcaaaagacagaactcagaaa

SEQ ID NO: 186009 - DNA, 22 bp, Artificial sequence
  SiRNA target sequence
gcaaaagacagaactcagaaag

SEQ ID NO: 186010 - DNA, 22 bp, Artificial sequence
  SiRNA target sequence
caaaagacagaactcagaaaga

SEQ ID NO: 186011 - DNA, 22 bp, Artificial sequence
  SiRNA target sequence
aaaagacagaactcagaaagaa

SEQ ID NO: 186012 - DNA, 22 bp, Artificial sequence
  SiRNA target sequence
aaagacagaactcagaaagaag

SEQ ID NO: 186013 - DNA, 22 bp, Artificial sequence
  SiRNA target sequence
aagacagaactcagaaagaaga

SEQ ID NO: 186014 - DNA, 22 bp, Artificial sequence
  SiRNA target sequence
agacagaactcagaaagaagag

SEQ ID NO: 186015 - DNA, 22 bp, Artificial sequence
  SiRNA target sequence
gacagaactcagaaagaagaga

SEQ ID NO: 186016 - DNA, 22 bp, Artificial sequence
  SiRNA target sequence
acagaactcagaaagaagagaa

SEQ ID NO: 186017 - DNA, 22 bp, Artificial sequence
  SiRNA target sequence
cagaactcagaaagaagagaat

SEQ ID NO: 186018 - DNA, 22 bp, Artificial sequence
  SiRNA target sequence
agaactcagaaagaagagaata

SEQ ID NO: 186019 - DNA, 22 bp, Artificial sequence
  SiRNA target sequence
gaactcagaaagaagagaataa

SEQ ID NO: 186020 - DNA, 22 bp, Artificial sequence
  SiRNA target sequence
aactcagaaagaagagaataaa

SEQ ID NO: 186021 - DNA, 22 bp, Artificial sequence
  SiRNA target sequence
actcagaaagaagagaataaat

SEQ ID NO: 186022 - DNA, 22 bp, Artificial sequence
  SiRNA target sequence
ctcagaaagaagagaataaata

SEQ ID NO: 186023 - DNA, 22 bp, Artificial sequence
  SiRNA target sequence
tcagaaagaagagaataaatat

SEQ ID NO: 186024 - DNA, 22 bp, Artificial sequence
  SiRNA target sequence
cagaaagaagagaataaatatt

SEQ ID NO: 186025 - DNA, 22 bp, Artificial sequence
  SiRNA target sequence
agaaagaagagaataaatattt

SEQ ID NO: 186026 - DNA, 22 bp, Artificial sequence
  SiRNA target sequence
gaaagaagagaataaatatttt

SEQ ID NO: 186027 - DNA, 22 bp, Artificial sequence
  SiRNA target sequence
aaagaagagaataaatattttt

SEQ ID NO: 186028 - DNA, 22 bp, Artificial sequence
  SiRNA target sequence
aagaagagaataaatatttttt

SEQ ID NO: 186029 - DNA, 22 bp, Artificial sequence
  SiRNA target sequence
agaagagaataaatattttttt

SEQ ID NO: 186030 - DNA, 22 bp, Artificial sequence
  SiRNA target sequence
gaagagaataaatatttttttt

SEQ ID NO: 186031 - DNA, 22 bp, Artificial sequence
  SiRNA target sequence
aagagaataaatattttttttg

SEQ ID NO: 186032 - DNA, 22 bp, Artificial sequence
  SiRNA target sequence
agagaataaatattttttttga

SEQ ID NO: 186033 - DNA, 23 bp, Artificial sequence
  SiRNA target sequence
atggccaagaatgaatctaataa

SEQ ID NO: 186034 - DNA, 23 bp, Artificial sequence
  SiRNA target sequence
tggccaagaatgaatctaataaa

SEQ ID NO: 186035 - DNA, 23 bp, Artificial sequence
  SiRNA target sequence
ggccaagaatgaatctaataaaa

SEQ ID NO: 186036 - DNA, 23 bp, Artificial sequence
  SiRNA target sequence
gccaagaatgaatctaataaaat

SEQ ID NO: 186037 - DNA, 23 bp, Artificial sequence
  SiRNA target sequence
ccaagaatgaatctaataaaata

SEQ ID NO: 186038 - DNA, 23 bp, Artificial sequence
  SiRNA target sequence
caagaatgaatctaataaaataa

SEQ ID NO: 186039 - DNA, 23 bp, Artificial sequence
  SiRNA target sequence
aagaatgaatctaataaaataac

SEQ ID NO: 186040 - DNA, 23 bp, Artificial sequence
  SiRNA target sequence
agaatgaatctaataaaataacg

SEQ ID NO: 186041 - DNA, 23 bp, Artificial sequence
  SiRNA target sequence
gaatgaatctaataaaataacga

SEQ ID NO: 186042 - DNA, 23 bp, Artificial sequence
  SiRNA target sequence
aatgaatctaataaaataacgag

SEQ ID NO: 186043 - DNA, 23 bp, Artificial sequence
  SiRNA target sequence
atgaatctaataaaataacgaga

SEQ ID NO: 186044 - DNA, 23 bp, Artificial sequence
  SiRNA target sequence
tgaatctaataaaataacgagac

SEQ ID NO: 186045 - DNA, 23 bp, Artificial sequence
  SiRNA target sequence
gaatctaataaaataacgagact

SEQ ID NO: 186046 - DNA, 23 bp, Artificial sequence
  SiRNA target sequence
aatctaataaaataacgagactg

SEQ ID NO: 186047 - DNA, 23 bp, Artificial sequence
  SiRNA target sequence
atctaataaaataacgagactgg

SEQ ID NO: 186048 - DNA, 23 bp, Artificial sequence
  SiRNA target sequence
tctaataaaataacgagactggc

SEQ ID NO: 186049 - DNA, 23 bp, Artificial sequence
  SiRNA target sequence
ctaataaaataacgagactggca

SEQ ID NO: 186050 - DNA, 23 bp, Artificial sequence
  SiRNA target sequence
taataaaataacgagactggcaa

SEQ ID NO: 186051 - DNA, 23 bp, Artificial sequence
  SiRNA target sequence
aataaaataacgagactggcaat

SEQ ID NO: 186052 - DNA, 23 bp, Artificial sequence
  SiRNA target sequence
ataaaataacgagactggcaatt

SEQ ID NO: 186053 - DNA, 23 bp, Artificial sequence
  SiRNA target sequence
taaaataacgagactggcaattg

SEQ ID NO: 186054 - DNA, 23 bp, Artificial sequence
  SiRNA target sequence
aaaataacgagactggcaattgt

SEQ ID NO: 186055 - DNA, 23 bp, Artificial sequence
  SiRNA target sequence
aaataacgagactggcaattgtt

SEQ ID NO: 186056 - DNA, 23 bp, Artificial sequence
  SiRNA target sequence
aataacgagactggcaattgtta

SEQ ID NO: 186057 - DNA, 23 bp, Artificial sequence
  SiRNA target sequence
ataacgagactggcaattgttaa

SEQ ID NO: 186058 - DNA, 23 bp, Artificial sequence
  SiRNA target sequence
taacgagactggcaattgttaat

SEQ ID NO: 186059 - DNA, 23 bp, Artificial sequence
  SiRNA target sequence
aacgagactggcaattgttaatt

SEQ ID NO: 186060 - DNA, 23 bp, Artificial sequence
  SiRNA target sequence
acgagactggcaattgttaatta

SEQ ID NO: 186061 - DNA, 23 bp, Artificial sequence
  SiRNA target sequence
cgagactggcaattgttaattat

SEQ ID NO: 186062 - DNA, 23 bp, Artificial sequence
  SiRNA target sequence
gagactggcaattgttaattatg

SEQ ID NO: 186063 - DNA, 23 bp, Artificial sequence
  SiRNA target sequence
agactggcaattgttaattatga

SEQ ID NO: 186064 - DNA, 23 bp, Artificial sequence
  SiRNA target sequence
gactggcaattgttaattatgaa

SEQ ID NO: 186065 - DNA, 23 bp, Artificial sequence
  SiRNA target sequence
actggcaattgttaattatgaac

SEQ ID NO: 186066 - DNA, 23 bp, Artificial sequence
  SiRNA target sequence
ctggcaattgttaattatgaact

SEQ ID NO: 186067 - DNA, 23 bp, Artificial sequence
  SiRNA target sequence
tggcaattgttaattatgaacta

SEQ ID NO: 186068 - DNA, 23 bp, Artificial sequence
  SiRNA target sequence
ggcaattgttaattatgaactat

SEQ ID NO: 186069 - DNA, 23 bp, Artificial sequence
  SiRNA target sequence
gcaattgttaattatgaactatg

SEQ ID NO: 186070 - DNA, 23 bp, Artificial sequence
  SiRNA target sequence
caattgttaattatgaactatgt

SEQ ID NO: 186071 - DNA, 23 bp, Artificial sequence
  SiRNA target sequence
aattgttaattatgaactatgta

SEQ ID NO: 186072 - DNA, 23 bp, Artificial sequence
  SiRNA target sequence
attgttaattatgaactatgtaa

SEQ ID NO: 186073 - DNA, 23 bp, Artificial sequence
  SiRNA target sequence
ttgttaattatgaactatgtaaa

SEQ ID NO: 186074 - DNA, 23 bp, Artificial sequence
  SiRNA target sequence
tgttaattatgaactatgtaaac

SEQ ID NO: 186075 - DNA, 23 bp, Artificial sequence
  SiRNA target sequence
gttaattatgaactatgtaaacc

SEQ ID NO: 186076 - DNA, 23 bp, Artificial sequence
  SiRNA target sequence
ttaattatgaactatgtaaaccg

SEQ ID NO: 186077 - DNA, 23 bp, Artificial sequence
  SiRNA target sequence
taattatgaactatgtaaaccga

SEQ ID NO: 186078 - DNA, 23 bp, Artificial sequence
  SiRNA target sequence
aattatgaactatgtaaaccgaa

SEQ ID NO: 186079 - DNA, 23 bp, Artificial sequence
  SiRNA target sequence
attatgaactatgtaaaccgaag

SEQ ID NO: 186080 - DNA, 23 bp, Artificial sequence
  SiRNA target sequence
ttatgaactatgtaaaccgaagg

SEQ ID NO: 186081 - DNA, 23 bp, Artificial sequence
  SiRNA target sequence
tatgaactatgtaaaccgaagga

SEQ ID NO: 186082 - DNA, 23 bp, Artificial sequence
  SiRNA target sequence
atgaactatgtaaaccgaaggaa

SEQ ID NO: 186083 - DNA, 23 bp, Artificial sequence
  SiRNA target sequence
tgaactatgtaaaccgaaggaat

SEQ ID NO: 186084 - DNA, 23 bp, Artificial sequence
  SiRNA target sequence
gaactatgtaaaccgaaggaatg

SEQ ID NO: 186085 - DNA, 23 bp, Artificial sequence
  SiRNA target sequence
aactatgtaaaccgaaggaatgt

SEQ ID NO: 186086 - DNA, 23 bp, Artificial sequence
  SiRNA target sequence
actatgtaaaccgaaggaatgta

SEQ ID NO: 186087 - DNA, 23 bp, Artificial sequence
  SiRNA target sequence
ctatgtaaaccgaaggaatgtat

SEQ ID NO: 186088 - DNA, 23 bp, Artificial sequence
  SiRNA target sequence
tatgtaaaccgaaggaatgtatg

SEQ ID NO: 186089 - DNA, 23 bp, Artificial sequence
  SiRNA target sequence
atgtaaaccgaaggaatgtatgt

SEQ ID NO: 186090 - DNA, 23 bp, Artificial sequence
  SiRNA target sequence
tgtaaaccgaaggaatgtatgtc

SEQ ID NO: 186091 - DNA, 23 bp, Artificial sequence
  SiRNA target sequence
gtaaaccgaaggaatgtatgtca

SEQ ID NO: 186092 - DNA, 23 bp, Artificial sequence
  SiRNA target sequence
taaaccgaaggaatgtatgtcag

SEQ ID NO: 186093 - DNA, 23 bp, Artificial sequence
  SiRNA target sequence
aaaccgaaggaatgtatgtcaga

SEQ ID NO: 186094 - DNA, 23 bp, Artificial sequence
  SiRNA target sequence
aaccgaaggaatgtatgtcagaa

SEQ ID NO: 186095 - DNA, 23 bp, Artificial sequence
  SiRNA target sequence
accgaaggaatgtatgtcagaat

SEQ ID NO: 186096 - DNA, 23 bp, Artificial sequence
  SiRNA target sequence
ccgaaggaatgtatgtcagaatg

SEQ ID NO: 186097 - DNA, 23 bp, Artificial sequence
  SiRNA target sequence
cgaaggaatgtatgtcagaatgt

SEQ ID NO: 186098 - DNA, 23 bp, Artificial sequence
  SiRNA target sequence
gaaggaatgtatgtcagaatgta

SEQ ID NO: 186099 - DNA, 23 bp, Artificial sequence
  SiRNA target sequence
aaggaatgtatgtcagaatgtaa

SEQ ID NO: 186100 - DNA, 23 bp, Artificial sequence
  SiRNA target sequence
aggaatgtatgtcagaatgtaaa

SEQ ID NO: 186101 - DNA, 23 bp, Artificial sequence
  SiRNA target sequence
ggaatgtatgtcagaatgtaaaa

SEQ ID NO: 186102 - DNA, 23 bp, Artificial sequence
  SiRNA target sequence
gaatgtatgtcagaatgtaaaaa

SEQ ID NO: 186103 - DNA, 23 bp, Artificial sequence
  SiRNA target sequence
aatgtatgtcagaatgtaaaaag

SEQ ID NO: 186104 - DNA, 23 bp, Artificial sequence
  SiRNA target sequence
atgtatgtcagaatgtaaaaagg

SEQ ID NO: 186105 - DNA, 23 bp, Artificial sequence
  SiRNA target sequence
tgtatgtcagaatgtaaaaaggc

SEQ ID NO: 186106 - DNA, 23 bp, Artificial sequence
  SiRNA target sequence
gtatgtcagaatgtaaaaaggcg

SEQ ID NO: 186107 - DNA, 23 bp, Artificial sequence
  SiRNA target sequence
tatgtcagaatgtaaaaaggcgt

SEQ ID NO: 186108 - DNA, 23 bp, Artificial sequence
  SiRNA target sequence
atgtcagaatgtaaaaaggcgtg

SEQ ID NO: 186109 - DNA, 23 bp, Artificial sequence
  SiRNA target sequence
tgtcagaatgtaaaaaggcgtgt

SEQ ID NO: 186110 - DNA, 23 bp, Artificial sequence
  SiRNA target sequence
gtcagaatgtaaaaaggcgtgtc

SEQ ID NO: 186111 - DNA, 23 bp, Artificial sequence
  SiRNA target sequence
tcagaatgtaaaaaggcgtgtcc

SEQ ID NO: 186112 - DNA, 23 bp, Artificial sequence
  SiRNA target sequence
cagaatgtaaaaaggcgtgtcct

SEQ ID NO: 186113 - DNA, 23 bp, Artificial sequence
  SiRNA target sequence
agaatgtaaaaaggcgtgtcctg

SEQ ID NO: 186114 - DNA, 23 bp, Artificial sequence
  SiRNA target sequence
gaatgtaaaaaggcgtgtcctgt

SEQ ID NO: 186115 - DNA, 23 bp, Artificial sequence
  SiRNA target sequence
aatgtaaaaaggcgtgtcctgtt

SEQ ID NO: 186116 - DNA, 23 bp, Artificial sequence
  SiRNA target sequence
atgtaaaaaggcgtgtcctgtta

SEQ ID NO: 186117 - DNA, 23 bp, Artificial sequence
  SiRNA target sequence
tgtaaaaaggcgtgtcctgttaa

SEQ ID NO: 186118 - DNA, 23 bp, Artificial sequence
  SiRNA target sequence
gtaaaaaggcgtgtcctgttaat

SEQ ID NO: 186119 - DNA, 23 bp, Artificial sequence
  SiRNA target sequence
taaaaaggcgtgtcctgttaata

SEQ ID NO: 186120 - DNA, 23 bp, Artificial sequence
  SiRNA target sequence
aaaaaggcgtgtcctgttaataa

SEQ ID NO: 186121 - DNA, 23 bp, Artificial sequence
  SiRNA target sequence
aaaaggcgtgtcctgttaataaa

SEQ ID NO: 186122 - DNA, 23 bp, Artificial sequence
  SiRNA target sequence
aaaggcgtgtcctgttaataaaa

SEQ ID NO: 186123 - DNA, 23 bp, Artificial sequence
  SiRNA target sequence
aaggcgtgtcctgttaataaaac

SEQ ID NO: 186124 - DNA, 23 bp, Artificial sequence
  SiRNA target sequence
aggcgtgtcctgttaataaaaca

SEQ ID NO: 186125 - DNA, 23 bp, Artificial sequence
  SiRNA target sequence
ggcgtgtcctgttaataaaacag

SEQ ID NO: 186126 - DNA, 23 bp, Artificial sequence
  SiRNA target sequence
gcgtgtcctgttaataaaacagg

SEQ ID NO: 186127 - DNA, 23 bp, Artificial sequence
  SiRNA target sequence
cgtgtcctgttaataaaacagga

SEQ ID NO: 186128 - DNA, 23 bp, Artificial sequence
  SiRNA target sequence
gtgtcctgttaataaaacaggaa

SEQ ID NO: 186129 - DNA, 23 bp, Artificial sequence
  SiRNA target sequence
tgtcctgttaataaaacaggaaa

SEQ ID NO: 186130 - DNA, 23 bp, Artificial sequence
  SiRNA target sequence
gtcctgttaataaaacaggaaag

SEQ ID NO: 186131 - DNA, 23 bp, Artificial sequence
  SiRNA target sequence
tcctgttaataaaacaggaaagg

SEQ ID NO: 186132 - DNA, 23 bp, Artificial sequence
  SiRNA target sequence
cctgttaataaaacaggaaagga

SEQ ID NO: 186133 - DNA, 23 bp, Artificial sequence
  SiRNA target sequence
ctgttaataaaacaggaaaggag

SEQ ID NO: 186134 - DNA, 23 bp, Artificial sequence
  SiRNA target sequence
tgttaataaaacaggaaaggagt

SEQ ID NO: 186135 - DNA, 23 bp, Artificial sequence
  SiRNA target sequence
gttaataaaacaggaaaggagtg

SEQ ID NO: 186136 - DNA, 23 bp, Artificial sequence
  SiRNA target sequence
ttaataaaacaggaaaggagtgt

SEQ ID NO: 186137 - DNA, 23 bp, Artificial sequence
  SiRNA target sequence
taataaaacaggaaaggagtgta

SEQ ID NO: 186138 - DNA, 23 bp, Artificial sequence
  SiRNA target sequence
aataaaacaggaaaggagtgtat

SEQ ID NO: 186139 - DNA, 23 bp, Artificial sequence
  SiRNA target sequence
ataaaacaggaaaggagtgtatt

SEQ ID NO: 186140 - DNA, 23 bp, Artificial sequence
  SiRNA target sequence
taaaacaggaaaggagtgtatta

SEQ ID NO: 186141 - DNA, 23 bp, Artificial sequence
  SiRNA target sequence
aaaacaggaaaggagtgtattac

SEQ ID NO: 186142 - DNA, 23 bp, Artificial sequence
  SiRNA target sequence
aaacaggaaaggagtgtattaca

SEQ ID NO: 186143 - DNA, 23 bp, Artificial sequence
  SiRNA target sequence
aacaggaaaggagtgtattacaa

SEQ ID NO: 186144 - DNA, 23 bp, Artificial sequence
  SiRNA target sequence
acaggaaaggagtgtattacaat

SEQ ID NO: 186145 - DNA, 23 bp, Artificial sequence
  SiRNA target sequence
caggaaaggagtgtattacaatt

SEQ ID NO: 186146 - DNA, 23 bp, Artificial sequence
  SiRNA target sequence
aggaaaggagtgtattacaattg

SEQ ID NO: 186147 - DNA, 23 bp, Artificial sequence
  SiRNA target sequence
ggaaaggagtgtattacaattga

SEQ ID NO: 186148 - DNA, 23 bp, Artificial sequence
  SiRNA target sequence
gaaaggagtgtattacaattgat

SEQ ID NO: 186149 - DNA, 23 bp, Artificial sequence
  SiRNA target sequence
aaaggagtgtattacaattgata

SEQ ID NO: 186150 - DNA, 23 bp, Artificial sequence
  SiRNA target sequence
aaggagtgtattacaattgatac

SEQ ID NO: 186151 - DNA, 23 bp, Artificial sequence
  SiRNA target sequence
aggagtgtattacaattgatact

SEQ ID NO: 186152 - DNA, 23 bp, Artificial sequence
  SiRNA target sequence
ggagtgtattacaattgatacta

SEQ ID NO: 186153 - DNA, 23 bp, Artificial sequence
  SiRNA target sequence
gagtgtattacaattgatactaa

SEQ ID NO: 186154 - DNA, 23 bp, Artificial sequence
  SiRNA target sequence
agtgtattacaattgatactaaa

SEQ ID NO: 186155 - DNA, 23 bp, Artificial sequence
  SiRNA target sequence
gtgtattacaattgatactaaat

SEQ ID NO: 186156 - DNA, 23 bp, Artificial sequence
  SiRNA target sequence
tgtattacaattgatactaaatc

SEQ ID NO: 186157 - DNA, 23 bp, Artificial sequence
  SiRNA target sequence
gtattacaattgatactaaatca

SEQ ID NO: 186158 - DNA, 23 bp, Artificial sequence
  SiRNA target sequence
tattacaattgatactaaatcac

SEQ ID NO: 186159 - DNA, 23 bp, Artificial sequence
  SiRNA target sequence
attacaattgatactaaatcaca

SEQ ID NO: 186160 - DNA, 23 bp, Artificial sequence
  SiRNA target sequence
ttacaattgatactaaatcacat

SEQ ID NO: 186161 - DNA, 23 bp, Artificial sequence
  SiRNA target sequence
tacaattgatactaaatcacata

SEQ ID NO: 186162 - DNA, 23 bp, Artificial sequence
  SiRNA target sequence
acaattgatactaaatcacatat

SEQ ID NO: 186163 - DNA, 23 bp, Artificial sequence
  SiRNA target sequence
caattgatactaaatcacatatc

SEQ ID NO: 186164 - DNA, 23 bp, Artificial sequence
  SiRNA target sequence
aattgatactaaatcacatatct

SEQ ID NO: 186165 - DNA, 23 bp, Artificial sequence
  SiRNA target sequence
attgatactaaatcacatatctc

SEQ ID NO: 186166 - DNA, 23 bp, Artificial sequence
  SiRNA target sequence
ttgatactaaatcacatatctca

SEQ ID NO: 186167 - DNA, 23 bp, Artificial sequence
  SiRNA target sequence
tgatactaaatcacatatctcag

SEQ ID NO: 186168 - DNA, 23 bp, Artificial sequence
  SiRNA target sequence
gatactaaatcacatatctcaga

SEQ ID NO: 186169 - DNA, 23 bp, Artificial sequence
  SiRNA target sequence
atactaaatcacatatctcagaa

SEQ ID NO: 186170 - DNA, 23 bp, Artificial sequence
  SiRNA target sequence
tactaaatcacatatctcagaaa

SEQ ID NO: 186171 - DNA, 23 bp, Artificial sequence
  SiRNA target sequence
actaaatcacatatctcagaaat

SEQ ID NO: 186172 - DNA, 23 bp, Artificial sequence
  SiRNA target sequence
ctaaatcacatatctcagaaatt

SEQ ID NO: 186173 - DNA, 23 bp, Artificial sequence
  SiRNA target sequence
taaatcacatatctcagaaattc

SEQ ID NO: 186174 - DNA, 23 bp, Artificial sequence
  SiRNA target sequence
aaatcacatatctcagaaattct

SEQ ID NO: 186175 - DNA, 23 bp, Artificial sequence
  SiRNA target sequence
aatcacatatctcagaaattctg

SEQ ID NO: 186176 - DNA, 23 bp, Artificial sequence
  SiRNA target sequence
atcacatatctcagaaattctgt

SEQ ID NO: 186177 - DNA, 23 bp, Artificial sequence
  SiRNA target sequence
tcacatatctcagaaattctgtg

SEQ ID NO: 186178 - DNA, 23 bp, Artificial sequence
  SiRNA target sequence
cacatatctcagaaattctgtgt

SEQ ID NO: 186179 - DNA, 23 bp, Artificial sequence
  SiRNA target sequence
acatatctcagaaattctgtgta

SEQ ID NO: 186180 - DNA, 23 bp, Artificial sequence
  SiRNA target sequence
catatctcagaaattctgtgtat

SEQ ID NO: 186181 - DNA, 23 bp, Artificial sequence
  SiRNA target sequence
atatctcagaaattctgtgtata

SEQ ID NO: 186182 - DNA, 23 bp, Artificial sequence
  SiRNA target sequence
tatctcagaaattctgtgtatag

SEQ ID NO: 186183 - DNA, 23 bp, Artificial sequence
  SiRNA target sequence
atctcagaaattctgtgtatagg

SEQ ID NO: 186184 - DNA, 23 bp, Artificial sequence
  SiRNA target sequence
tctcagaaattctgtgtatagga

SEQ ID NO: 186185 - DNA, 23 bp, Artificial sequence
  SiRNA target sequence
ctcagaaattctgtgtataggat

SEQ ID NO: 186186 - DNA, 23 bp, Artificial sequence
  SiRNA target sequence
tcagaaattctgtgtataggatg

SEQ ID NO: 186187 - DNA, 23 bp, Artificial sequence
  SiRNA target sequence
cagaaattctgtgtataggatgt

SEQ ID NO: 186188 - DNA, 23 bp, Artificial sequence
  SiRNA target sequence
agaaattctgtgtataggatgtt

SEQ ID NO: 186189 - DNA, 23 bp, Artificial sequence
  SiRNA target sequence
gaaattctgtgtataggatgttc

SEQ ID NO: 186190 - DNA, 23 bp, Artificial sequence
  SiRNA target sequence
aaattctgtgtataggatgttct

SEQ ID NO: 186191 - DNA, 23 bp, Artificial sequence
  SiRNA target sequence
aattctgtgtataggatgttctg

SEQ ID NO: 186192 - DNA, 23 bp, Artificial sequence
  SiRNA target sequence
attctgtgtataggatgttctgc

SEQ ID NO: 186193 - DNA, 23 bp, Artificial sequence
  SiRNA target sequence
ttctgtgtataggatgttctgcg

SEQ ID NO: 186194 - DNA, 23 bp, Artificial sequence
  SiRNA target sequence
tctgtgtataggatgttctgcgt

SEQ ID NO: 186195 - DNA, 23 bp, Artificial sequence
  SiRNA target sequence
ctgtgtataggatgttctgcgtg

SEQ ID NO: 186196 - DNA, 23 bp, Artificial sequence
  SiRNA target sequence
tgtgtataggatgttctgcgtgt

SEQ ID NO: 186197 - DNA, 23 bp, Artificial sequence
  SiRNA target sequence
gtgtataggatgttctgcgtgtc

SEQ ID NO: 186198 - DNA, 23 bp, Artificial sequence
  SiRNA target sequence
tgtataggatgttctgcgtgtca

SEQ ID NO: 186199 - DNA, 23 bp, Artificial sequence
  SiRNA target sequence
gtataggatgttctgcgtgtcaa

SEQ ID NO: 186200 - DNA, 23 bp, Artificial sequence
  SiRNA target sequence
tataggatgttctgcgtgtcaaa

SEQ ID NO: 186201 - DNA, 23 bp, Artificial sequence
  SiRNA target sequence
ataggatgttctgcgtgtcaaaa

SEQ ID NO: 186202 - DNA, 23 bp, Artificial sequence
  SiRNA target sequence
taggatgttctgcgtgtcaaaag

SEQ ID NO: 186203 - DNA, 23 bp, Artificial sequence
  SiRNA target sequence
aggatgttctgcgtgtcaaaaga

SEQ ID NO: 186204 - DNA, 23 bp, Artificial sequence
  SiRNA target sequence
ggatgttctgcgtgtcaaaagaa

SEQ ID NO: 186205 - DNA, 23 bp, Artificial sequence
  SiRNA target sequence
gatgttctgcgtgtcaaaagaaa

SEQ ID NO: 186206 - DNA, 23 bp, Artificial sequence
  SiRNA target sequence
atgttctgcgtgtcaaaagaaat

SEQ ID NO: 186207 - DNA, 23 bp, Artificial sequence
  SiRNA target sequence
tgttctgcgtgtcaaaagaaatg

SEQ ID NO: 186208 - DNA, 23 bp, Artificial sequence
  SiRNA target sequence
gttctgcgtgtcaaaagaaatgt

SEQ ID NO: 186209 - DNA, 23 bp, Artificial sequence
  SiRNA target sequence
ttctgcgtgtcaaaagaaatgtc

SEQ ID NO: 186210 - DNA, 23 bp, Artificial sequence
  SiRNA target sequence
tctgcgtgtcaaaagaaatgtcc

SEQ ID NO: 186211 - DNA, 23 bp, Artificial sequence
  SiRNA target sequence
ctgcgtgtcaaaagaaatgtcct

SEQ ID NO: 186212 - DNA, 23 bp, Artificial sequence
  SiRNA target sequence
tgcgtgtcaaaagaaatgtcctt

SEQ ID NO: 186213 - DNA, 23 bp, Artificial sequence
  SiRNA target sequence
gcgtgtcaaaagaaatgtccttt

SEQ ID NO: 186214 - DNA, 23 bp, Artificial sequence
  SiRNA target sequence
cgtgtcaaaagaaatgtcctttt

SEQ ID NO: 186215 - DNA, 23 bp, Artificial sequence
  SiRNA target sequence
gtgtcaaaagaaatgtcctttta

SEQ ID NO: 186216 - DNA, 23 bp, Artificial sequence
  SiRNA target sequence
tgtcaaaagaaatgtccttttaa

SEQ ID NO: 186217 - DNA, 23 bp, Artificial sequence
  SiRNA target sequence
gtcaaaagaaatgtccttttaag

SEQ ID NO: 186218 - DNA, 23 bp, Artificial sequence
  SiRNA target sequence
tcaaaagaaatgtccttttaagg

SEQ ID NO: 186219 - DNA, 23 bp, Artificial sequence
  SiRNA target sequence
caaaagaaatgtccttttaaggc

SEQ ID NO: 186220 - DNA, 23 bp, Artificial sequence
  SiRNA target sequence
aaaagaaatgtccttttaaggcg

SEQ ID NO: 186221 - DNA, 23 bp, Artificial sequence
  SiRNA target sequence
aaagaaatgtccttttaaggcga

SEQ ID NO: 186222 - DNA, 23 bp, Artificial sequence
  SiRNA target sequence
aagaaatgtccttttaaggcgat

SEQ ID NO: 186223 - DNA, 23 bp, Artificial sequence
  SiRNA target sequence
agaaatgtccttttaaggcgatt

SEQ ID NO: 186224 - DNA, 23 bp, Artificial sequence
  SiRNA target sequence
gaaatgtccttttaaggcgatta

SEQ ID NO: 186225 - DNA, 23 bp, Artificial sequence
  SiRNA target sequence
aaatgtccttttaaggcgattac

SEQ ID NO: 186226 - DNA, 23 bp, Artificial sequence
  SiRNA target sequence
aatgtccttttaaggcgattaca

SEQ ID NO: 186227 - DNA, 23 bp, Artificial sequence
  SiRNA target sequence
atgtccttttaaggcgattacaa

SEQ ID NO: 186228 - DNA, 23 bp, Artificial sequence
  SiRNA target sequence
tgtccttttaaggcgattacaat

SEQ ID NO: 186229 - DNA, 23 bp, Artificial sequence
  SiRNA target sequence
gtccttttaaggcgattacaatt

SEQ ID NO: 186230 - DNA, 23 bp, Artificial sequence
  SiRNA target sequence
tccttttaaggcgattacaattg

SEQ ID NO: 186231 - DNA, 23 bp, Artificial sequence
  SiRNA target sequence
ccttttaaggcgattacaattgt

SEQ ID NO: 186232 - DNA, 23 bp, Artificial sequence
  SiRNA target sequence
cttttaaggcgattacaattgta

SEQ ID NO: 186233 - DNA, 23 bp, Artificial sequence
  SiRNA target sequence
ttttaaggcgattacaattgtaa

SEQ ID NO: 186234 - DNA, 23 bp, Artificial sequence
  SiRNA target sequence
tttaaggcgattacaattgtaaa

SEQ ID NO: 186235 - DNA, 23 bp, Artificial sequence
  SiRNA target sequence
ttaaggcgattacaattgtaaat

SEQ ID NO: 186236 - DNA, 23 bp, Artificial sequence
  SiRNA target sequence
taaggcgattacaattgtaaatt

SEQ ID NO: 186237 - DNA, 23 bp, Artificial sequence
  SiRNA target sequence
aaggcgattacaattgtaaattt

SEQ ID NO: 186238 - DNA, 23 bp, Artificial sequence
  SiRNA target sequence
aggcgattacaattgtaaattta

SEQ ID NO: 186239 - DNA, 23 bp, Artificial sequence
  SiRNA target sequence
ggcgattacaattgtaaatttac

SEQ ID NO: 186240 - DNA, 23 bp, Artificial sequence
  SiRNA target sequence
gcgattacaattgtaaatttacc

SEQ ID NO: 186241 - DNA, 23 bp, Artificial sequence
  SiRNA target sequence
cgattacaattgtaaatttacct

SEQ ID NO: 186242 - DNA, 23 bp, Artificial sequence
  SiRNA target sequence
gattacaattgtaaatttaccta

SEQ ID NO: 186243 - DNA, 23 bp, Artificial sequence
  SiRNA target sequence
attacaattgtaaatttacctac

SEQ ID NO: 186244 - DNA, 23 bp, Artificial sequence
  SiRNA target sequence
ttacaattgtaaatttacctaca

SEQ ID NO: 186245 - DNA, 23 bp, Artificial sequence
  SiRNA target sequence
tacaattgtaaatttacctacaa

SEQ ID NO: 186246 - DNA, 23 bp, Artificial sequence
  SiRNA target sequence
acaattgtaaatttacctacaaa

SEQ ID NO: 186247 - DNA, 23 bp, Artificial sequence
  SiRNA target sequence
caattgtaaatttacctacaaat

SEQ ID NO: 186248 - DNA, 23 bp, Artificial sequence
  SiRNA target sequence
aattgtaaatttacctacaaatc

SEQ ID NO: 186249 - DNA, 23 bp, Artificial sequence
  SiRNA target sequence
attgtaaatttacctacaaatct

SEQ ID NO: 186250 - DNA, 23 bp, Artificial sequence
  SiRNA target sequence
ttgtaaatttacctacaaatcta

SEQ ID NO: 186251 - DNA, 23 bp, Artificial sequence
  SiRNA target sequence
tgtaaatttacctacaaatctag

SEQ ID NO: 186252 - DNA, 23 bp, Artificial sequence
  SiRNA target sequence
gtaaatttacctacaaatctaga

SEQ ID NO: 186253 - DNA, 23 bp, Artificial sequence
  SiRNA target sequence
taaatttacctacaaatctagat

SEQ ID NO: 186254 - DNA, 23 bp, Artificial sequence
  SiRNA target sequence
aaatttacctacaaatctagata

SEQ ID NO: 186255 - DNA, 23 bp, Artificial sequence
  SiRNA target sequence
aatttacctacaaatctagataa

SEQ ID NO: 186256 - DNA, 23 bp, Artificial sequence
  SiRNA target sequence
atttacctacaaatctagataaa

SEQ ID NO: 186257 - DNA, 23 bp, Artificial sequence
  SiRNA target sequence
tttacctacaaatctagataaag

SEQ ID NO: 186258 - DNA, 23 bp, Artificial sequence
  SiRNA target sequence
ttacctacaaatctagataaaga

SEQ ID NO: 186259 - DNA, 23 bp, Artificial sequence
  SiRNA target sequence
tacctacaaatctagataaagac

SEQ ID NO: 186260 - DNA, 23 bp, Artificial sequence
  SiRNA target sequence
acctacaaatctagataaagaca

SEQ ID NO: 186261 - DNA, 23 bp, Artificial sequence
  SiRNA target sequence
cctacaaatctagataaagacat

SEQ ID NO: 186262 - DNA, 23 bp, Artificial sequence
  SiRNA target sequence
ctacaaatctagataaagacatt

SEQ ID NO: 186263 - DNA, 23 bp, Artificial sequence
  SiRNA target sequence
tacaaatctagataaagacattt

SEQ ID NO: 186264 - DNA, 23 bp, Artificial sequence
  SiRNA target sequence
acaaatctagataaagacatttc

SEQ ID NO: 186265 - DNA, 23 bp, Artificial sequence
  SiRNA target sequence
caaatctagataaagacatttca

SEQ ID NO: 186266 - DNA, 23 bp, Artificial sequence
  SiRNA target sequence
aaatctagataaagacatttcac

SEQ ID NO: 186267 - DNA, 23 bp, Artificial sequence
  SiRNA target sequence
aatctagataaagacatttcaca

SEQ ID NO: 186268 - DNA, 23 bp, Artificial sequence
  SiRNA target sequence
atctagataaagacatttcacat

SEQ ID NO: 186269 - DNA, 23 bp, Artificial sequence
  SiRNA target sequence
tctagataaagacatttcacata

SEQ ID NO: 186270 - DNA, 23 bp, Artificial sequence
  SiRNA target sequence
ctagataaagacatttcacatag

SEQ ID NO: 186271 - DNA, 23 bp, Artificial sequence
  SiRNA target sequence
tagataaagacatttcacataga

SEQ ID NO: 186272 - DNA, 23 bp, Artificial sequence
  SiRNA target sequence
agataaagacatttcacatagat

SEQ ID NO: 186273 - DNA, 23 bp, Artificial sequence
  SiRNA target sequence
gataaagacatttcacatagata

SEQ ID NO: 186274 - DNA, 23 bp, Artificial sequence
  SiRNA target sequence
ataaagacatttcacatagatat

SEQ ID NO: 186275 - DNA, 23 bp, Artificial sequence
  SiRNA target sequence
taaagacatttcacatagatatt

SEQ ID NO: 186276 - DNA, 23 bp, Artificial sequence
  SiRNA target sequence
aaagacatttcacatagatattc

SEQ ID NO: 186277 - DNA, 23 bp, Artificial sequence
  SiRNA target sequence
aagacatttcacatagatattcg

SEQ ID NO: 186278 - DNA, 23 bp, Artificial sequence
  SiRNA target sequence
agacatttcacatagatattcgg

SEQ ID NO: 186279 - DNA, 23 bp, Artificial sequence
  SiRNA target sequence
gacatttcacatagatattcggc

SEQ ID NO: 186280 - DNA, 23 bp, Artificial sequence
  SiRNA target sequence
acatttcacatagatattcggca

SEQ ID NO: 186281 - DNA, 23 bp, Artificial sequence
  SiRNA target sequence
catttcacatagatattcggcaa

SEQ ID NO: 186282 - DNA, 23 bp, Artificial sequence
  SiRNA target sequence
atttcacatagatattcggcaaa

SEQ ID NO: 186283 - DNA, 23 bp, Artificial sequence
  SiRNA target sequence
tttcacatagatattcggcaaat

SEQ ID NO: 186284 - DNA, 23 bp, Artificial sequence
  SiRNA target sequence
ttcacatagatattcggcaaatg

SEQ ID NO: 186285 - DNA, 23 bp, Artificial sequence
  SiRNA target sequence
tcacatagatattcggcaaatgg

SEQ ID NO: 186286 - DNA, 23 bp, Artificial sequence
  SiRNA target sequence
cacatagatattcggcaaatggt

SEQ ID NO: 186287 - DNA, 23 bp, Artificial sequence
  SiRNA target sequence
acatagatattcggcaaatggtt

SEQ ID NO: 186288 - DNA, 23 bp, Artificial sequence
  SiRNA target sequence
catagatattcggcaaatggttt

SEQ ID NO: 186289 - DNA, 23 bp, Artificial sequence
  SiRNA target sequence
atagatattcggcaaatggtttt

SEQ ID NO: 186290 - DNA, 23 bp, Artificial sequence
  SiRNA target sequence
tagatattcggcaaatggtttta

SEQ ID NO: 186291 - DNA, 23 bp, Artificial sequence
  SiRNA target sequence
agatattcggcaaatggttttaa

SEQ ID NO: 186292 - DNA, 23 bp, Artificial sequence
  SiRNA target sequence
gatattcggcaaatggttttaaa

SEQ ID NO: 186293 - DNA, 23 bp, Artificial sequence
  SiRNA target sequence
atattcggcaaatggttttaaac

SEQ ID NO: 186294 - DNA, 23 bp, Artificial sequence
  SiRNA target sequence
tattcggcaaatggttttaaact

SEQ ID NO: 186295 - DNA, 23 bp, Artificial sequence
  SiRNA target sequence
attcggcaaatggttttaaactt

SEQ ID NO: 186296 - DNA, 23 bp, Artificial sequence
  SiRNA target sequence
ttcggcaaatggttttaaacttc

SEQ ID NO: 186297 - DNA, 23 bp, Artificial sequence
  SiRNA target sequence
tcggcaaatggttttaaacttca

SEQ ID NO: 186298 - DNA, 23 bp, Artificial sequence
  SiRNA target sequence
cggcaaatggttttaaacttcac

SEQ ID NO: 186299 - DNA, 23 bp, Artificial sequence
  SiRNA target sequence
ggcaaatggttttaaacttcaca

SEQ ID NO: 186300 - DNA, 23 bp, Artificial sequence
  SiRNA target sequence
gcaaatggttttaaacttcacag

SEQ ID NO: 186301 - DNA, 23 bp, Artificial sequence
  SiRNA target sequence
caaatggttttaaacttcacaga

SEQ ID NO: 186302 - DNA, 23 bp, Artificial sequence
  SiRNA target sequence
aaatggttttaaacttcacagat

SEQ ID NO: 186303 - DNA, 23 bp, Artificial sequence
  SiRNA target sequence
aatggttttaaacttcacagatt

SEQ ID NO: 186304 - DNA, 23 bp, Artificial sequence
  SiRNA target sequence
atggttttaaacttcacagatta

SEQ ID NO: 186305 - DNA, 23 bp, Artificial sequence
  SiRNA target sequence
tggttttaaacttcacagattac

SEQ ID NO: 186306 - DNA, 23 bp, Artificial sequence
  SiRNA target sequence
ggttttaaacttcacagattacc

SEQ ID NO: 186307 - DNA, 23 bp, Artificial sequence
  SiRNA target sequence
gttttaaacttcacagattacca

SEQ ID NO: 186308 - DNA, 23 bp, Artificial sequence
  SiRNA target sequence
ttttaaacttcacagattaccaa

SEQ ID NO: 186309 - DNA, 23 bp, Artificial sequence
  SiRNA target sequence
tttaaacttcacagattaccaat

SEQ ID NO: 186310 - DNA, 23 bp, Artificial sequence
  SiRNA target sequence
ttaaacttcacagattaccaatc

SEQ ID NO: 186311 - DNA, 23 bp, Artificial sequence
  SiRNA target sequence
taaacttcacagattaccaatcc

SEQ ID NO: 186312 - DNA, 23 bp, Artificial sequence
  SiRNA target sequence
aaacttcacagattaccaatccc

SEQ ID NO: 186313 - DNA, 23 bp, Artificial sequence
  SiRNA target sequence
aacttcacagattaccaatccct

SEQ ID NO: 186314 - DNA, 23 bp, Artificial sequence
  SiRNA target sequence
acttcacagattaccaatcccta

SEQ ID NO: 186315 - DNA, 23 bp, Artificial sequence
  SiRNA target sequence
cttcacagattaccaatccctaa

SEQ ID NO: 186316 - DNA, 23 bp, Artificial sequence
  SiRNA target sequence
ttcacagattaccaatccctaaa

SEQ ID NO: 186317 - DNA, 23 bp, Artificial sequence
  SiRNA target sequence
tcacagattaccaatccctaaat

SEQ ID NO: 186318 - DNA, 23 bp, Artificial sequence
  SiRNA target sequence
cacagattaccaatccctaaata

SEQ ID NO: 186319 - DNA, 23 bp, Artificial sequence
  SiRNA target sequence
acagattaccaatccctaaatat

SEQ ID NO: 186320 - DNA, 23 bp, Artificial sequence
  SiRNA target sequence
cagattaccaatccctaaatatg

SEQ ID NO: 186321 - DNA, 23 bp, Artificial sequence
  SiRNA target sequence
agattaccaatccctaaatatgg

SEQ ID NO: 186322 - DNA, 23 bp, Artificial sequence
  SiRNA target sequence
gattaccaatccctaaatatggt

SEQ ID NO: 186323 - DNA, 23 bp, Artificial sequence
  SiRNA target sequence
attaccaatccctaaatatggta

SEQ ID NO: 186324 - DNA, 23 bp, Artificial sequence
  SiRNA target sequence
ttaccaatccctaaatatggtaa

SEQ ID NO: 186325 - DNA, 23 bp, Artificial sequence
  SiRNA target sequence
taccaatccctaaatatggtaag

SEQ ID NO: 186326 - DNA, 23 bp, Artificial sequence
  SiRNA target sequence
accaatccctaaatatggtaagg

SEQ ID NO: 186327 - DNA, 23 bp, Artificial sequence
  SiRNA target sequence
ccaatccctaaatatggtaaggt

SEQ ID NO: 186328 - DNA, 23 bp, Artificial sequence
  SiRNA target sequence
caatccctaaatatggtaaggtt

SEQ ID NO: 186329 - DNA, 23 bp, Artificial sequence
  SiRNA target sequence
aatccctaaatatggtaaggttt

SEQ ID NO: 186330 - DNA, 23 bp, Artificial sequence
  SiRNA target sequence
atccctaaatatggtaaggtttt

SEQ ID NO: 186331 - DNA, 23 bp, Artificial sequence
  SiRNA target sequence
tccctaaatatggtaaggtttta

SEQ ID NO: 186332 - DNA, 23 bp, Artificial sequence
  SiRNA target sequence
ccctaaatatggtaaggttttag

SEQ ID NO: 186333 - DNA, 23 bp, Artificial sequence
  SiRNA target sequence
cctaaatatggtaaggttttagg

SEQ ID NO: 186334 - DNA, 23 bp, Artificial sequence
  SiRNA target sequence
ctaaatatggtaaggttttaggg

SEQ ID NO: 186335 - DNA, 23 bp, Artificial sequence
  SiRNA target sequence
taaatatggtaaggttttagggc

SEQ ID NO: 186336 - DNA, 23 bp, Artificial sequence
  SiRNA target sequence
aaatatggtaaggttttagggct

SEQ ID NO: 186337 - DNA, 23 bp, Artificial sequence
  SiRNA target sequence
aatatggtaaggttttagggcta

SEQ ID NO: 186338 - DNA, 23 bp, Artificial sequence
  SiRNA target sequence
atatggtaaggttttagggctag

SEQ ID NO: 186339 - DNA, 23 bp, Artificial sequence
  SiRNA target sequence
tatggtaaggttttagggctagt

SEQ ID NO: 186340 - DNA, 23 bp, Artificial sequence
  SiRNA target sequence
atggtaaggttttagggctagta

SEQ ID NO: 186341 - DNA, 23 bp, Artificial sequence
  SiRNA target sequence
tggtaaggttttagggctagtag

SEQ ID NO: 186342 - DNA, 23 bp, Artificial sequence
  SiRNA target sequence
ggtaaggttttagggctagtagg

SEQ ID NO: 186343 - DNA, 23 bp, Artificial sequence
  SiRNA target sequence
gtaaggttttagggctagtaggc

SEQ ID NO: 186344 - DNA, 23 bp, Artificial sequence
  SiRNA target sequence
taaggttttagggctagtaggca

SEQ ID NO: 186345 - DNA, 23 bp, Artificial sequence
  SiRNA target sequence
aaggttttagggctagtaggcac

SEQ ID NO: 186346 - DNA, 23 bp, Artificial sequence
  SiRNA target sequence
aggttttagggctagtaggcact

SEQ ID NO: 186347 - DNA, 23 bp, Artificial sequence
  SiRNA target sequence
ggttttagggctagtaggcacta

SEQ ID NO: 186348 - DNA, 23 bp, Artificial sequence
  SiRNA target sequence
gttttagggctagtaggcactaa

SEQ ID NO: 186349 - DNA, 23 bp, Artificial sequence
  SiRNA target sequence
ttttagggctagtaggcactaat

SEQ ID NO: 186350 - DNA, 23 bp, Artificial sequence
  SiRNA target sequence
tttagggctagtaggcactaatg

SEQ ID NO: 186351 - DNA, 23 bp, Artificial sequence
  SiRNA target sequence
ttagggctagtaggcactaatgg

SEQ ID NO: 186352 - DNA, 23 bp, Artificial sequence
  SiRNA target sequence
tagggctagtaggcactaatggt

SEQ ID NO: 186353 - DNA, 23 bp, Artificial sequence
  SiRNA target sequence
agggctagtaggcactaatggta

SEQ ID NO: 186354 - DNA, 23 bp, Artificial sequence
  SiRNA target sequence
gggctagtaggcactaatggtat

SEQ ID NO: 186355 - DNA, 23 bp, Artificial sequence
  SiRNA target sequence
ggctagtaggcactaatggtata

SEQ ID NO: 186356 - DNA, 23 bp, Artificial sequence
  SiRNA target sequence
gctagtaggcactaatggtatag

SEQ ID NO: 186357 - DNA, 23 bp, Artificial sequence
  SiRNA target sequence
ctagtaggcactaatggtatagg

SEQ ID NO: 186358 - DNA, 23 bp, Artificial sequence
  SiRNA target sequence
tagtaggcactaatggtatagga

SEQ ID NO: 186359 - DNA, 23 bp, Artificial sequence
  SiRNA target sequence
agtaggcactaatggtataggaa

SEQ ID NO: 186360 - DNA, 23 bp, Artificial sequence
  SiRNA target sequence
gtaggcactaatggtataggaaa

SEQ ID NO: 186361 - DNA, 23 bp, Artificial sequence
  SiRNA target sequence
taggcactaatggtataggaaaa

SEQ ID NO: 186362 - DNA, 23 bp, Artificial sequence
  SiRNA target sequence
aggcactaatggtataggaaaaa

SEQ ID NO: 186363 - DNA, 23 bp, Artificial sequence
  SiRNA target sequence
ggcactaatggtataggaaaaag

SEQ ID NO: 186364 - DNA, 23 bp, Artificial sequence
  SiRNA target sequence
gcactaatggtataggaaaaagt

SEQ ID NO: 186365 - DNA, 23 bp, Artificial sequence
  SiRNA target sequence
cactaatggtataggaaaaagta

SEQ ID NO: 186366 - DNA, 23 bp, Artificial sequence
  SiRNA target sequence
actaatggtataggaaaaagtac

SEQ ID NO: 186367 - DNA, 23 bp, Artificial sequence
  SiRNA target sequence
ctaatggtataggaaaaagtact

SEQ ID NO: 186368 - DNA, 23 bp, Artificial sequence
  SiRNA target sequence
taatggtataggaaaaagtactg

SEQ ID NO: 186369 - DNA, 23 bp, Artificial sequence
  SiRNA target sequence
aatggtataggaaaaagtactgc

SEQ ID NO: 186370 - DNA, 23 bp, Artificial sequence
  SiRNA target sequence
atggtataggaaaaagtactgca

SEQ ID NO: 186371 - DNA, 23 bp, Artificial sequence
  SiRNA target sequence
tggtataggaaaaagtactgcac

SEQ ID NO: 186372 - DNA, 23 bp, Artificial sequence
  SiRNA target sequence
ggtataggaaaaagtactgcact

SEQ ID NO: 186373 - DNA, 23 bp, Artificial sequence
  SiRNA target sequence
gtataggaaaaagtactgcactt

SEQ ID NO: 186374 - DNA, 23 bp, Artificial sequence
  SiRNA target sequence
tataggaaaaagtactgcactta

SEQ ID NO: 186375 - DNA, 23 bp, Artificial sequence
  SiRNA target sequence
ataggaaaaagtactgcacttaa

SEQ ID NO: 186376 - DNA, 23 bp, Artificial sequence
  SiRNA target sequence
taggaaaaagtactgcacttaaa

SEQ ID NO: 186377 - DNA, 23 bp, Artificial sequence
  SiRNA target sequence
aggaaaaagtactgcacttaaaa

SEQ ID NO: 186378 - DNA, 23 bp, Artificial sequence
  SiRNA target sequence
ggaaaaagtactgcacttaaaat

SEQ ID NO: 186379 - DNA, 23 bp, Artificial sequence
  SiRNA target sequence
gaaaaagtactgcacttaaaata

SEQ ID NO: 186380 - DNA, 23 bp, Artificial sequence
  SiRNA target sequence
aaaaagtactgcacttaaaatat

SEQ ID NO: 186381 - DNA, 23 bp, Artificial sequence
  SiRNA target sequence
aaaagtactgcacttaaaatatt

SEQ ID NO: 186382 - DNA, 23 bp, Artificial sequence
  SiRNA target sequence
aaagtactgcacttaaaatatta

SEQ ID NO: 186383 - DNA, 23 bp, Artificial sequence
  SiRNA target sequence
aagtactgcacttaaaatattat

SEQ ID NO: 186384 - DNA, 23 bp, Artificial sequence
  SiRNA target sequence
agtactgcacttaaaatattatc

SEQ ID NO: 186385 - DNA, 23 bp, Artificial sequence
  SiRNA target sequence
gtactgcacttaaaatattatcg

SEQ ID NO: 186386 - DNA, 23 bp, Artificial sequence
  SiRNA target sequence
tactgcacttaaaatattatcgg

SEQ ID NO: 186387 - DNA, 23 bp, Artificial sequence
  SiRNA target sequence
actgcacttaaaatattatcggg

SEQ ID NO: 186388 - DNA, 23 bp, Artificial sequence
  SiRNA target sequence
ctgcacttaaaatattatcgggc

SEQ ID NO: 186389 - DNA, 23 bp, Artificial sequence
  SiRNA target sequence
tgcacttaaaatattatcgggca

SEQ ID NO: 186390 - DNA, 23 bp, Artificial sequence
  SiRNA target sequence
gcacttaaaatattatcgggcaa

SEQ ID NO: 186391 - DNA, 23 bp, Artificial sequence
  SiRNA target sequence
cacttaaaatattatcgggcaat

SEQ ID NO: 186392 - DNA, 23 bp, Artificial sequence
  SiRNA target sequence
acttaaaatattatcgggcaatc

SEQ ID NO: 186393 - DNA, 23 bp, Artificial sequence
  SiRNA target sequence
cttaaaatattatcgggcaatct

SEQ ID NO: 186394 - DNA, 23 bp, Artificial sequence
  SiRNA target sequence
ttaaaatattatcgggcaatctt

SEQ ID NO: 186395 - DNA, 23 bp, Artificial sequence
  SiRNA target sequence
taaaatattatcgggcaatctta

SEQ ID NO: 186396 - DNA, 23 bp, Artificial sequence
  SiRNA target sequence
aaaatattatcgggcaatcttaa

SEQ ID NO: 186397 - DNA, 23 bp, Artificial sequence
  SiRNA target sequence
aaatattatcgggcaatcttaaa

SEQ ID NO: 186398 - DNA, 23 bp, Artificial sequence
  SiRNA target sequence
aatattatcgggcaatcttaaac

SEQ ID NO: 186399 - DNA, 23 bp, Artificial sequence
  SiRNA target sequence
atattatcgggcaatcttaaacc

SEQ ID NO: 186400 - DNA, 23 bp, Artificial sequence
  SiRNA target sequence
tattatcgggcaatcttaaacca

SEQ ID NO: 186401 - DNA, 23 bp, Artificial sequence
  SiRNA target sequence
attatcgggcaatcttaaaccaa

SEQ ID NO: 186402 - DNA, 23 bp, Artificial sequence
  SiRNA target sequence
ttatcgggcaatcttaaaccaaa

SEQ ID NO: 186403 - DNA, 23 bp, Artificial sequence
  SiRNA target sequence
tatcgggcaatcttaaaccaaac

SEQ ID NO: 186404 - DNA, 23 bp, Artificial sequence
  SiRNA target sequence
atcgggcaatcttaaaccaaact

SEQ ID NO: 186405 - DNA, 23 bp, Artificial sequence
  SiRNA target sequence
tcgggcaatcttaaaccaaactt

SEQ ID NO: 186406 - DNA, 23 bp, Artificial sequence
  SiRNA target sequence
cgggcaatcttaaaccaaactta

SEQ ID NO: 186407 - DNA, 23 bp, Artificial sequence
  SiRNA target sequence
gggcaatcttaaaccaaacttag

SEQ ID NO: 186408 - DNA, 23 bp, Artificial sequence
  SiRNA target sequence
ggcaatcttaaaccaaacttagg

SEQ ID NO: 186409 - DNA, 23 bp, Artificial sequence
  SiRNA target sequence
gcaatcttaaaccaaacttagga

SEQ ID NO: 186410 - DNA, 23 bp, Artificial sequence
  SiRNA target sequence
caatcttaaaccaaacttaggaa

SEQ ID NO: 186411 - DNA, 23 bp, Artificial sequence
  SiRNA target sequence
aatcttaaaccaaacttaggaaa

SEQ ID NO: 186412 - DNA, 23 bp, Artificial sequence
  SiRNA target sequence
atcttaaaccaaacttaggaaag

SEQ ID NO: 186413 - DNA, 23 bp, Artificial sequence
  SiRNA target sequence
tcttaaaccaaacttaggaaagt

SEQ ID NO: 186414 - DNA, 23 bp, Artificial sequence
  SiRNA target sequence
cttaaaccaaacttaggaaagtt

SEQ ID NO: 186415 - DNA, 23 bp, Artificial sequence
  SiRNA target sequence
ttaaaccaaacttaggaaagttc

SEQ ID NO: 186416 - DNA, 23 bp, Artificial sequence
  SiRNA target sequence
taaaccaaacttaggaaagttcg

SEQ ID NO: 186417 - DNA, 23 bp, Artificial sequence
  SiRNA target sequence
aaaccaaacttaggaaagttcga

SEQ ID NO: 186418 - DNA, 23 bp, Artificial sequence
  SiRNA target sequence
aaccaaacttaggaaagttcgac

SEQ ID NO: 186419 - DNA, 23 bp, Artificial sequence
  SiRNA target sequence
accaaacttaggaaagttcgacg

SEQ ID NO: 186420 - DNA, 23 bp, Artificial sequence
  SiRNA target sequence
ccaaacttaggaaagttcgacgt

SEQ ID NO: 186421 - DNA, 23 bp, Artificial sequence
  SiRNA target sequence
caaacttaggaaagttcgacgtt

SEQ ID NO: 186422 - DNA, 23 bp, Artificial sequence
  SiRNA target sequence
aaacttaggaaagttcgacgtta

SEQ ID NO: 186423 - DNA, 23 bp, Artificial sequence
  SiRNA target sequence
aacttaggaaagttcgacgttac

SEQ ID NO: 186424 - DNA, 23 bp, Artificial sequence
  SiRNA target sequence
acttaggaaagttcgacgttacg

SEQ ID NO: 186425 - DNA, 23 bp, Artificial sequence
  SiRNA target sequence
cttaggaaagttcgacgttacgc

SEQ ID NO: 186426 - DNA, 23 bp, Artificial sequence
  SiRNA target sequence
ttaggaaagttcgacgttacgcc

SEQ ID NO: 186427 - DNA, 23 bp, Artificial sequence
  SiRNA target sequence
taggaaagttcgacgttacgccc

SEQ ID NO: 186428 - DNA, 23 bp, Artificial sequence
  SiRNA target sequence
aggaaagttcgacgttacgcccg

SEQ ID NO: 186429 - DNA, 23 bp, Artificial sequence
  SiRNA target sequence
ggaaagttcgacgttacgcccga

SEQ ID NO: 186430 - DNA, 23 bp, Artificial sequence
  SiRNA target sequence
gaaagttcgacgttacgcccgac

SEQ ID NO: 186431 - DNA, 23 bp, Artificial sequence
  SiRNA target sequence
aaagttcgacgttacgcccgact

SEQ ID NO: 186432 - DNA, 23 bp, Artificial sequence
  SiRNA target sequence
aagttcgacgttacgcccgactg

SEQ ID NO: 186433 - DNA, 23 bp, Artificial sequence
  SiRNA target sequence
agttcgacgttacgcccgactgg

SEQ ID NO: 186434 - DNA, 23 bp, Artificial sequence
  SiRNA target sequence
gttcgacgttacgcccgactggg

SEQ ID NO: 186435 - DNA, 23 bp, Artificial sequence
  SiRNA target sequence
ttcgacgttacgcccgactgggc

SEQ ID NO: 186436 - DNA, 23 bp, Artificial sequence
  SiRNA target sequence
tcgacgttacgcccgactgggca

SEQ ID NO: 186437 - DNA, 23 bp, Artificial sequence
  SiRNA target sequence
cgacgttacgcccgactgggcag

SEQ ID NO: 186438 - DNA, 23 bp, Artificial sequence
  SiRNA target sequence
gacgttacgcccgactgggcagc

SEQ ID NO: 186439 - DNA, 23 bp, Artificial sequence
  SiRNA target sequence
acgttacgcccgactgggcagca

SEQ ID NO: 186440 - DNA, 23 bp, Artificial sequence
  SiRNA target sequence
cgttacgcccgactgggcagcaa

SEQ ID NO: 186441 - DNA, 23 bp, Artificial sequence
  SiRNA target sequence
gttacgcccgactgggcagcaat

SEQ ID NO: 186442 - DNA, 23 bp, Artificial sequence
  SiRNA target sequence
ttacgcccgactgggcagcaatt

SEQ ID NO: 186443 - DNA, 23 bp, Artificial sequence
  SiRNA target sequence
tacgcccgactgggcagcaattc

SEQ ID NO: 186444 - DNA, 23 bp, Artificial sequence
  SiRNA target sequence
acgcccgactgggcagcaattct

SEQ ID NO: 186445 - DNA, 23 bp, Artificial sequence
  SiRNA target sequence
cgcccgactgggcagcaattcta

SEQ ID NO: 186446 - DNA, 23 bp, Artificial sequence
  SiRNA target sequence
gcccgactgggcagcaattctaa

SEQ ID NO: 186447 - DNA, 23 bp, Artificial sequence
  SiRNA target sequence
cccgactgggcagcaattctaaa

SEQ ID NO: 186448 - DNA, 23 bp, Artificial sequence
  SiRNA target sequence
ccgactgggcagcaattctaaat

SEQ ID NO: 186449 - DNA, 23 bp, Artificial sequence
  SiRNA target sequence
cgactgggcagcaattctaaata

SEQ ID NO: 186450 - DNA, 23 bp, Artificial sequence
  SiRNA target sequence
gactgggcagcaattctaaataa

SEQ ID NO: 186451 - DNA, 23 bp, Artificial sequence
  SiRNA target sequence
actgggcagcaattctaaataat

SEQ ID NO: 186452 - DNA, 23 bp, Artificial sequence
  SiRNA target sequence
ctgggcagcaattctaaataatt

SEQ ID NO: 186453 - DNA, 23 bp, Artificial sequence
  SiRNA target sequence
tgggcagcaattctaaataatta

SEQ ID NO: 186454 - DNA, 23 bp, Artificial sequence
  SiRNA target sequence
gggcagcaattctaaataattat

SEQ ID NO: 186455 - DNA, 23 bp, Artificial sequence
  SiRNA target sequence
ggcagcaattctaaataattata

SEQ ID NO: 186456 - DNA, 23 bp, Artificial sequence
  SiRNA target sequence
gcagcaattctaaataattataa

SEQ ID NO: 186457 - DNA, 23 bp, Artificial sequence
  SiRNA target sequence
cagcaattctaaataattataaa

SEQ ID NO: 186458 - DNA, 23 bp, Artificial sequence
  SiRNA target sequence
agcaattctaaataattataaag

SEQ ID NO: 186459 - DNA, 23 bp, Artificial sequence
  SiRNA target sequence
gcaattctaaataattataaagg

SEQ ID NO: 186460 - DNA, 23 bp, Artificial sequence
  SiRNA target sequence
caattctaaataattataaagga

SEQ ID NO: 186461 - DNA, 23 bp, Artificial sequence
  SiRNA target sequence
aattctaaataattataaaggat

SEQ ID NO: 186462 - DNA, 23 bp, Artificial sequence
  SiRNA target sequence
attctaaataattataaaggatc

SEQ ID NO: 186463 - DNA, 23 bp, Artificial sequence
  SiRNA target sequence
ttctaaataattataaaggatct

SEQ ID NO: 186464 - DNA, 23 bp, Artificial sequence
  SiRNA target sequence
tctaaataattataaaggatctg

SEQ ID NO: 186465 - DNA, 23 bp, Artificial sequence
  SiRNA target sequence
ctaaataattataaaggatctga

SEQ ID NO: 186466 - DNA, 23 bp, Artificial sequence
  SiRNA target sequence
taaataattataaaggatctgaa

SEQ ID NO: 186467 - DNA, 23 bp, Artificial sequence
  SiRNA target sequence
aaataattataaaggatctgaac

SEQ ID NO: 186468 - DNA, 23 bp, Artificial sequence
  SiRNA target sequence
aataattataaaggatctgaact

SEQ ID NO: 186469 - DNA, 23 bp, Artificial sequence
  SiRNA target sequence
ataattataaaggatctgaactt

SEQ ID NO: 186470 - DNA, 23 bp, Artificial sequence
  SiRNA target sequence
taattataaaggatctgaacttc

SEQ ID NO: 186471 - DNA, 23 bp, Artificial sequence
  SiRNA target sequence
aattataaaggatctgaacttca

SEQ ID NO: 186472 - DNA, 23 bp, Artificial sequence
  SiRNA target sequence
attataaaggatctgaacttcat

SEQ ID NO: 186473 - DNA, 23 bp, Artificial sequence
  SiRNA target sequence
ttataaaggatctgaacttcatg

SEQ ID NO: 186474 - DNA, 23 bp, Artificial sequence
  SiRNA target sequence
tataaaggatctgaacttcatgg

SEQ ID NO: 186475 - DNA, 23 bp, Artificial sequence
  SiRNA target sequence
ataaaggatctgaacttcatgga

SEQ ID NO: 186476 - DNA, 23 bp, Artificial sequence
  SiRNA target sequence
taaaggatctgaacttcatggat

SEQ ID NO: 186477 - DNA, 23 bp, Artificial sequence
  SiRNA target sequence
aaaggatctgaacttcatggatt

SEQ ID NO: 186478 - DNA, 23 bp, Artificial sequence
  SiRNA target sequence
aaggatctgaacttcatggattt

SEQ ID NO: 186479 - DNA, 23 bp, Artificial sequence
  SiRNA target sequence
aggatctgaacttcatggatttt

SEQ ID NO: 186480 - DNA, 23 bp, Artificial sequence
  SiRNA target sequence
ggatctgaacttcatggattttt

SEQ ID NO: 186481 - DNA, 23 bp, Artificial sequence
  SiRNA target sequence
gatctgaacttcatggatttttt

SEQ ID NO: 186482 - DNA, 23 bp, Artificial sequence
  SiRNA target sequence
atctgaacttcatggatttttta

SEQ ID NO: 186483 - DNA, 23 bp, Artificial sequence
  SiRNA target sequence
tctgaacttcatggattttttac

SEQ ID NO: 186484 - DNA, 23 bp, Artificial sequence
  SiRNA target sequence
ctgaacttcatggattttttact

SEQ ID NO: 186485 - DNA, 23 bp, Artificial sequence
  SiRNA target sequence
tgaacttcatggattttttacta

SEQ ID NO: 186486 - DNA, 23 bp, Artificial sequence
  SiRNA target sequence
gaacttcatggattttttactaa

SEQ ID NO: 186487 - DNA, 23 bp, Artificial sequence
  SiRNA target sequence
aacttcatggattttttactaaa

SEQ ID NO: 186488 - DNA, 23 bp, Artificial sequence
  SiRNA target sequence
acttcatggattttttactaaaa

SEQ ID NO: 186489 - DNA, 23 bp, Artificial sequence
  SiRNA target sequence
cttcatggattttttactaaaat

SEQ ID NO: 186490 - DNA, 23 bp, Artificial sequence
  SiRNA target sequence
ttcatggattttttactaaaatt

SEQ ID NO: 186491 - DNA, 23 bp, Artificial sequence
  SiRNA target sequence
tcatggattttttactaaaattt

SEQ ID NO: 186492 - DNA, 23 bp, Artificial sequence
  SiRNA target sequence
catggattttttactaaaatttt

SEQ ID NO: 186493 - DNA, 23 bp, Artificial sequence
  SiRNA target sequence
atggattttttactaaaatttta

SEQ ID NO: 186494 - DNA, 23 bp, Artificial sequence
  SiRNA target sequence
tggattttttactaaaattttag

SEQ ID NO: 186495 - DNA, 23 bp, Artificial sequence
  SiRNA target sequence
ggattttttactaaaattttaga

SEQ ID NO: 186496 - DNA, 23 bp, Artificial sequence
  SiRNA target sequence
gattttttactaaaattttagaa

SEQ ID NO: 186497 - DNA, 23 bp, Artificial sequence
  SiRNA target sequence
attttttactaaaattttagaag

SEQ ID NO: 186498 - DNA, 23 bp, Artificial sequence
  SiRNA target sequence
ttttttactaaaattttagaagg

SEQ ID NO: 186499 - DNA, 23 bp, Artificial sequence
  SiRNA target sequence
tttttactaaaattttagaaggg

SEQ ID NO: 186500 - DNA, 23 bp, Artificial sequence
  SiRNA target sequence
ttttactaaaattttagaagggt

SEQ ID NO: 186501 - DNA, 23 bp, Artificial sequence
  SiRNA target sequence
tttactaaaattttagaagggtc

SEQ ID NO: 186502 - DNA, 23 bp, Artificial sequence
  SiRNA target sequence
ttactaaaattttagaagggtct

SEQ ID NO: 186503 - DNA, 23 bp, Artificial sequence
  SiRNA target sequence
tactaaaattttagaagggtcta

SEQ ID NO: 186504 - DNA, 23 bp, Artificial sequence
  SiRNA target sequence
actaaaattttagaagggtctat

SEQ ID NO: 186505 - DNA, 23 bp, Artificial sequence
  SiRNA target sequence
ctaaaattttagaagggtctatt

SEQ ID NO: 186506 - DNA, 23 bp, Artificial sequence
  SiRNA target sequence
taaaattttagaagggtctatta

SEQ ID NO: 186507 - DNA, 23 bp, Artificial sequence
  SiRNA target sequence
aaaattttagaagggtctattaa

SEQ ID NO: 186508 - DNA, 23 bp, Artificial sequence
  SiRNA target sequence
aaattttagaagggtctattaaa

SEQ ID NO: 186509 - DNA, 23 bp, Artificial sequence
  SiRNA target sequence
aattttagaagggtctattaaag

SEQ ID NO: 186510 - DNA, 23 bp, Artificial sequence
  SiRNA target sequence
attttagaagggtctattaaagc

SEQ ID NO: 186511 - DNA, 23 bp, Artificial sequence
  SiRNA target sequence
ttttagaagggtctattaaagct

SEQ ID NO: 186512 - DNA, 23 bp, Artificial sequence
  SiRNA target sequence
tttagaagggtctattaaagcta

SEQ ID NO: 186513 - DNA, 23 bp, Artificial sequence
  SiRNA target sequence
ttagaagggtctattaaagctat

SEQ ID NO: 186514 - DNA, 23 bp, Artificial sequence
  SiRNA target sequence
tagaagggtctattaaagctatt

SEQ ID NO: 186515 - DNA, 23 bp, Artificial sequence
  SiRNA target sequence
agaagggtctattaaagctattt

SEQ ID NO: 186516 - DNA, 23 bp, Artificial sequence
  SiRNA target sequence
gaagggtctattaaagctatttc

SEQ ID NO: 186517 - DNA, 23 bp, Artificial sequence
  SiRNA target sequence
aagggtctattaaagctatttct

SEQ ID NO: 186518 - DNA, 23 bp, Artificial sequence
  SiRNA target sequence
agggtctattaaagctatttcta

SEQ ID NO: 186519 - DNA, 23 bp, Artificial sequence
  SiRNA target sequence
gggtctattaaagctatttctaa

SEQ ID NO: 186520 - DNA, 23 bp, Artificial sequence
  SiRNA target sequence
ggtctattaaagctatttctaag

SEQ ID NO: 186521 - DNA, 23 bp, Artificial sequence
  SiRNA target sequence
gtctattaaagctatttctaaga

SEQ ID NO: 186522 - DNA, 23 bp, Artificial sequence
  SiRNA target sequence
tctattaaagctatttctaagat

SEQ ID NO: 186523 - DNA, 23 bp, Artificial sequence
  SiRNA target sequence
ctattaaagctatttctaagata

SEQ ID NO: 186524 - DNA, 23 bp, Artificial sequence
  SiRNA target sequence
tattaaagctatttctaagatac

SEQ ID NO: 186525 - DNA, 23 bp, Artificial sequence
  SiRNA target sequence
attaaagctatttctaagataca

SEQ ID NO: 186526 - DNA, 23 bp, Artificial sequence
  SiRNA target sequence
ttaaagctatttctaagatacag

SEQ ID NO: 186527 - DNA, 23 bp, Artificial sequence
  SiRNA target sequence
taaagctatttctaagatacagt

SEQ ID NO: 186528 - DNA, 23 bp, Artificial sequence
  SiRNA target sequence
aaagctatttctaagatacagta

SEQ ID NO: 186529 - DNA, 23 bp, Artificial sequence
  SiRNA target sequence
aagctatttctaagatacagtat

SEQ ID NO: 186530 - DNA, 23 bp, Artificial sequence
  SiRNA target sequence
agctatttctaagatacagtata

SEQ ID NO: 186531 - DNA, 23 bp, Artificial sequence
  SiRNA target sequence
gctatttctaagatacagtatat

SEQ ID NO: 186532 - DNA, 23 bp, Artificial sequence
  SiRNA target sequence
ctatttctaagatacagtatata

SEQ ID NO: 186533 - DNA, 23 bp, Artificial sequence
  SiRNA target sequence
tatttctaagatacagtatatag

SEQ ID NO: 186534 - DNA, 23 bp, Artificial sequence
  SiRNA target sequence
atttctaagatacagtatataga

SEQ ID NO: 186535 - DNA, 23 bp, Artificial sequence
  SiRNA target sequence
tttctaagatacagtatatagat

SEQ ID NO: 186536 - DNA, 23 bp, Artificial sequence
  SiRNA target sequence
ttctaagatacagtatatagata

SEQ ID NO: 186537 - DNA, 23 bp, Artificial sequence
  SiRNA target sequence
tctaagatacagtatatagataa

SEQ ID NO: 186538 - DNA, 23 bp, Artificial sequence
  SiRNA target sequence
ctaagatacagtatatagataaa

SEQ ID NO: 186539 - DNA, 23 bp, Artificial sequence
  SiRNA target sequence
taagatacagtatatagataaaa

SEQ ID NO: 186540 - DNA, 23 bp, Artificial sequence
  SiRNA target sequence
aagatacagtatatagataaaat

SEQ ID NO: 186541 - DNA, 23 bp, Artificial sequence
  SiRNA target sequence
agatacagtatatagataaaatg

SEQ ID NO: 186542 - DNA, 23 bp, Artificial sequence
  SiRNA target sequence
gatacagtatatagataaaatgc

SEQ ID NO: 186543 - DNA, 23 bp, Artificial sequence
  SiRNA target sequence
atacagtatatagataaaatgcc

SEQ ID NO: 186544 - DNA, 23 bp, Artificial sequence
  SiRNA target sequence
tacagtatatagataaaatgcct

SEQ ID NO: 186545 - DNA, 23 bp, Artificial sequence
  SiRNA target sequence
acagtatatagataaaatgccta

SEQ ID NO: 186546 - DNA, 23 bp, Artificial sequence
  SiRNA target sequence
cagtatatagataaaatgcctaa

SEQ ID NO: 186547 - DNA, 23 bp, Artificial sequence
  SiRNA target sequence
agtatatagataaaatgcctaaa

SEQ ID NO: 186548 - DNA, 23 bp, Artificial sequence
  SiRNA target sequence
gtatatagataaaatgcctaaat

SEQ ID NO: 186549 - DNA, 23 bp, Artificial sequence
  SiRNA target sequence
tatatagataaaatgcctaaatt

SEQ ID NO: 186550 - DNA, 23 bp, Artificial sequence
  SiRNA target sequence
atatagataaaatgcctaaattt

SEQ ID NO: 186551 - DNA, 23 bp, Artificial sequence
  SiRNA target sequence
tatagataaaatgcctaaatttt

SEQ ID NO: 186552 - DNA, 23 bp, Artificial sequence
  SiRNA target sequence
atagataaaatgcctaaattttt

SEQ ID NO: 186553 - DNA, 23 bp, Artificial sequence
  SiRNA target sequence
tagataaaatgcctaaattttta

SEQ ID NO: 186554 - DNA, 23 bp, Artificial sequence
  SiRNA target sequence
agataaaatgcctaaatttttaa

SEQ ID NO: 186555 - DNA, 23 bp, Artificial sequence
  SiRNA target sequence
gataaaatgcctaaatttttaaa

SEQ ID NO: 186556 - DNA, 23 bp, Artificial sequence
  SiRNA target sequence
ataaaatgcctaaatttttaaaa

SEQ ID NO: 186557 - DNA, 23 bp, Artificial sequence
  SiRNA target sequence
taaaatgcctaaatttttaaaag

SEQ ID NO: 186558 - DNA, 23 bp, Artificial sequence
  SiRNA target sequence
aaaatgcctaaatttttaaaagg

SEQ ID NO: 186559 - DNA, 23 bp, Artificial sequence
  SiRNA target sequence
aaatgcctaaatttttaaaagga

SEQ ID NO: 186560 - DNA, 23 bp, Artificial sequence
  SiRNA target sequence
aatgcctaaatttttaaaaggac

SEQ ID NO: 186561 - DNA, 23 bp, Artificial sequence
  SiRNA target sequence
atgcctaaatttttaaaaggacg

SEQ ID NO: 186562 - DNA, 23 bp, Artificial sequence
  SiRNA target sequence
tgcctaaatttttaaaaggacgc

SEQ ID NO: 186563 - DNA, 23 bp, Artificial sequence
  SiRNA target sequence
gcctaaatttttaaaaggacgct

SEQ ID NO: 186564 - DNA, 23 bp, Artificial sequence
  SiRNA target sequence
cctaaatttttaaaaggacgcta

SEQ ID NO: 186565 - DNA, 23 bp, Artificial sequence
  SiRNA target sequence
ctaaatttttaaaaggacgctat

SEQ ID NO: 186566 - DNA, 23 bp, Artificial sequence
  SiRNA target sequence
taaatttttaaaaggacgctata

SEQ ID NO: 186567 - DNA, 23 bp, Artificial sequence
  SiRNA target sequence
aaatttttaaaaggacgctataa

SEQ ID NO: 186568 - DNA, 23 bp, Artificial sequence
  SiRNA target sequence
aatttttaaaaggacgctataag

SEQ ID NO: 186569 - DNA, 23 bp, Artificial sequence
  SiRNA target sequence
atttttaaaaggacgctataagt

SEQ ID NO: 186570 - DNA, 23 bp, Artificial sequence
  SiRNA target sequence
tttttaaaaggacgctataagtc

SEQ ID NO: 186571 - DNA, 23 bp, Artificial sequence
  SiRNA target sequence
ttttaaaaggacgctataagtca

SEQ ID NO: 186572 - DNA, 23 bp, Artificial sequence
  SiRNA target sequence
tttaaaaggacgctataagtcag

SEQ ID NO: 186573 - DNA, 23 bp, Artificial sequence
  SiRNA target sequence
ttaaaaggacgctataagtcaga

SEQ ID NO: 186574 - DNA, 23 bp, Artificial sequence
  SiRNA target sequence
taaaaggacgctataagtcagaa

SEQ ID NO: 186575 - DNA, 23 bp, Artificial sequence
  SiRNA target sequence
aaaaggacgctataagtcagaaa

SEQ ID NO: 186576 - DNA, 23 bp, Artificial sequence
  SiRNA target sequence
aaaggacgctataagtcagaaat

SEQ ID NO: 186577 - DNA, 23 bp, Artificial sequence
  SiRNA target sequence
aaggacgctataagtcagaaatc

SEQ ID NO: 186578 - DNA, 23 bp, Artificial sequence
  SiRNA target sequence
aggacgctataagtcagaaatcg

SEQ ID NO: 186579 - DNA, 23 bp, Artificial sequence
  SiRNA target sequence
ggacgctataagtcagaaatcgc

SEQ ID NO: 186580 - DNA, 23 bp, Artificial sequence
  SiRNA target sequence
gacgctataagtcagaaatcgcc

SEQ ID NO: 186581 - DNA, 23 bp, Artificial sequence
  SiRNA target sequence
acgctataagtcagaaatcgcct

SEQ ID NO: 186582 - DNA, 23 bp, Artificial sequence
  SiRNA target sequence
cgctataagtcagaaatcgcctc

SEQ ID NO: 186583 - DNA, 23 bp, Artificial sequence
  SiRNA target sequence
gctataagtcagaaatcgcctcc

SEQ ID NO: 186584 - DNA, 23 bp, Artificial sequence
  SiRNA target sequence
ctataagtcagaaatcgcctccg

SEQ ID NO: 186585 - DNA, 23 bp, Artificial sequence
  SiRNA target sequence
tataagtcagaaatcgcctccgg

SEQ ID NO: 186586 - DNA, 23 bp, Artificial sequence
  SiRNA target sequence
ataagtcagaaatcgcctccgga

SEQ ID NO: 186587 - DNA, 23 bp, Artificial sequence
  SiRNA target sequence
taagtcagaaatcgcctccggaa

SEQ ID NO: 186588 - DNA, 23 bp, Artificial sequence
  SiRNA target sequence
aagtcagaaatcgcctccggaaa

SEQ ID NO: 186589 - DNA, 23 bp, Artificial sequence
  SiRNA target sequence
agtcagaaatcgcctccggaaaa

SEQ ID NO: 186590 - DNA, 23 bp, Artificial sequence
  SiRNA target sequence
gtcagaaatcgcctccggaaaaa

SEQ ID NO: 186591 - DNA, 23 bp, Artificial sequence
  SiRNA target sequence
tcagaaatcgcctccggaaaaat

SEQ ID NO: 186592 - DNA, 23 bp, Artificial sequence
  SiRNA target sequence
cagaaatcgcctccggaaaaatg

SEQ ID NO: 186593 - DNA, 23 bp, Artificial sequence
  SiRNA target sequence
agaaatcgcctccggaaaaatgt

SEQ ID NO: 186594 - DNA, 23 bp, Artificial sequence
  SiRNA target sequence
gaaatcgcctccggaaaaatgtt

SEQ ID NO: 186595 - DNA, 23 bp, Artificial sequence
  SiRNA target sequence
aaatcgcctccggaaaaatgttg

SEQ ID NO: 186596 - DNA, 23 bp, Artificial sequence
  SiRNA target sequence
aatcgcctccggaaaaatgttgt

SEQ ID NO: 186597 - DNA, 23 bp, Artificial sequence
  SiRNA target sequence
atcgcctccggaaaaatgttgtt

SEQ ID NO: 186598 - DNA, 23 bp, Artificial sequence
  SiRNA target sequence
tcgcctccggaaaaatgttgttt

SEQ ID NO: 186599 - DNA, 23 bp, Artificial sequence
  SiRNA target sequence
cgcctccggaaaaatgttgttta

SEQ ID NO: 186600 - DNA, 23 bp, Artificial sequence
  SiRNA target sequence
gcctccggaaaaatgttgtttac

SEQ ID NO: 186601 - DNA, 23 bp, Artificial sequence
  SiRNA target sequence
cctccggaaaaatgttgtttact

SEQ ID NO: 186602 - DNA, 23 bp, Artificial sequence
  SiRNA target sequence
ctccggaaaaatgttgtttactg

SEQ ID NO: 186603 - DNA, 23 bp, Artificial sequence
  SiRNA target sequence
tccggaaaaatgttgtttactgt

SEQ ID NO: 186604 - DNA, 23 bp, Artificial sequence
  SiRNA target sequence
ccggaaaaatgttgtttactgtt

SEQ ID NO: 186605 - DNA, 23 bp, Artificial sequence
  SiRNA target sequence
cggaaaaatgttgtttactgtta

SEQ ID NO: 186606 - DNA, 23 bp, Artificial sequence
  SiRNA target sequence
ggaaaaatgttgtttactgttaa

SEQ ID NO: 186607 - DNA, 23 bp, Artificial sequence
  SiRNA target sequence
gaaaaatgttgtttactgttaat

SEQ ID NO: 186608 - DNA, 23 bp, Artificial sequence
  SiRNA target sequence
aaaaatgttgtttactgttaatg

SEQ ID NO: 186609 - DNA, 23 bp, Artificial sequence
  SiRNA target sequence
aaaatgttgtttactgttaatga

SEQ ID NO: 186610 - DNA, 23 bp, Artificial sequence
  SiRNA target sequence
aaatgttgtttactgttaatgat

SEQ ID NO: 186611 - DNA, 23 bp, Artificial sequence
  SiRNA target sequence
aatgttgtttactgttaatgata

SEQ ID NO: 186612 - DNA, 23 bp, Artificial sequence
  SiRNA target sequence
atgttgtttactgttaatgatat

SEQ ID NO: 186613 - DNA, 23 bp, Artificial sequence
  SiRNA target sequence
tgttgtttactgttaatgatata

SEQ ID NO: 186614 - DNA, 23 bp, Artificial sequence
  SiRNA target sequence
gttgtttactgttaatgatatat

SEQ ID NO: 186615 - DNA, 23 bp, Artificial sequence
  SiRNA target sequence
ttgtttactgttaatgatatatt

SEQ ID NO: 186616 - DNA, 23 bp, Artificial sequence
  SiRNA target sequence
tgtttactgttaatgatatatta

SEQ ID NO: 186617 - DNA, 23 bp, Artificial sequence
  SiRNA target sequence
gtttactgttaatgatatattaa

SEQ ID NO: 186618 - DNA, 23 bp, Artificial sequence
  SiRNA target sequence
tttactgttaatgatatattaaa

SEQ ID NO: 186619 - DNA, 23 bp, Artificial sequence
  SiRNA target sequence
ttactgttaatgatatattaaaa

SEQ ID NO: 186620 - DNA, 23 bp, Artificial sequence
  SiRNA target sequence
tactgttaatgatatattaaaaa

SEQ ID NO: 186621 - DNA, 23 bp, Artificial sequence
  SiRNA target sequence
actgttaatgatatattaaaaaa

SEQ ID NO: 186622 - DNA, 23 bp, Artificial sequence
  SiRNA target sequence
ctgttaatgatatattaaaaaaa

SEQ ID NO: 186623 - DNA, 23 bp, Artificial sequence
  SiRNA target sequence
tgttaatgatatattaaaaaaag

SEQ ID NO: 186624 - DNA, 23 bp, Artificial sequence
  SiRNA target sequence
gttaatgatatattaaaaaaagt

SEQ ID NO: 186625 - DNA, 23 bp, Artificial sequence
  SiRNA target sequence
ttaatgatatattaaaaaaagtt

SEQ ID NO: 186626 - DNA, 23 bp, Artificial sequence
  SiRNA target sequence
taatgatatattaaaaaaagttg

SEQ ID NO: 186627 - DNA, 23 bp, Artificial sequence
  SiRNA target sequence
aatgatatattaaaaaaagttga

SEQ ID NO: 186628 - DNA, 23 bp, Artificial sequence
  SiRNA target sequence
atgatatattaaaaaaagttgat

SEQ ID NO: 186629 - DNA, 23 bp, Artificial sequence
  SiRNA target sequence
tgatatattaaaaaaagttgatg

SEQ ID NO: 186630 - DNA, 23 bp, Artificial sequence
  SiRNA target sequence
gatatattaaaaaaagttgatga

SEQ ID NO: 186631 - DNA, 23 bp, Artificial sequence
  SiRNA target sequence
atatattaaaaaaagttgatgaa

SEQ ID NO: 186632 - DNA, 23 bp, Artificial sequence
  SiRNA target sequence
tatattaaaaaaagttgatgaaa

SEQ ID NO: 186633 - DNA, 23 bp, Artificial sequence
  SiRNA target sequence
atattaaaaaaagttgatgaaaa

SEQ ID NO: 186634 - DNA, 23 bp, Artificial sequence
  SiRNA target sequence
tattaaaaaaagttgatgaaaaa

SEQ ID NO: 186635 - DNA, 23 bp, Artificial sequence
  SiRNA target sequence
attaaaaaaagttgatgaaaaaa

SEQ ID NO: 186636 - DNA, 23 bp, Artificial sequence
  SiRNA target sequence
ttaaaaaaagttgatgaaaaaaa

SEQ ID NO: 186637 - DNA, 23 bp, Artificial sequence
  SiRNA target sequence
taaaaaaagttgatgaaaaaaat

SEQ ID NO: 186638 - DNA, 23 bp, Artificial sequence
  SiRNA target sequence
aaaaaaagttgatgaaaaaaata

SEQ ID NO: 186639 - DNA, 23 bp, Artificial sequence
  SiRNA target sequence
aaaaaagttgatgaaaaaaataa

SEQ ID NO: 186640 - DNA, 23 bp, Artificial sequence
  SiRNA target sequence
aaaaagttgatgaaaaaaataaa

SEQ ID NO: 186641 - DNA, 23 bp, Artificial sequence
  SiRNA target sequence
aaaagttgatgaaaaaaataaat

SEQ ID NO: 186642 - DNA, 23 bp, Artificial sequence
  SiRNA target sequence
aaagttgatgaaaaaaataaatt

SEQ ID NO: 186643 - DNA, 23 bp, Artificial sequence
  SiRNA target sequence
aagttgatgaaaaaaataaattt

SEQ ID NO: 186644 - DNA, 23 bp, Artificial sequence
  SiRNA target sequence
agttgatgaaaaaaataaatttg

SEQ ID NO: 186645 - DNA, 23 bp, Artificial sequence
  SiRNA target sequence
gttgatgaaaaaaataaatttga

SEQ ID NO: 186646 - DNA, 23 bp, Artificial sequence
  SiRNA target sequence
ttgatgaaaaaaataaatttgac

SEQ ID NO: 186647 - DNA, 23 bp, Artificial sequence
  SiRNA target sequence
tgatgaaaaaaataaatttgact

SEQ ID NO: 186648 - DNA, 23 bp, Artificial sequence
  SiRNA target sequence
gatgaaaaaaataaatttgacta

SEQ ID NO: 186649 - DNA, 23 bp, Artificial sequence
  SiRNA target sequence
atgaaaaaaataaatttgactat

SEQ ID NO: 186650 - DNA, 23 bp, Artificial sequence
  SiRNA target sequence
tgaaaaaaataaatttgactatt

SEQ ID NO: 186651 - DNA, 23 bp, Artificial sequence
  SiRNA target sequence
gaaaaaaataaatttgactatta

SEQ ID NO: 186652 - DNA, 23 bp, Artificial sequence
  SiRNA target sequence
aaaaaaataaatttgactattac

SEQ ID NO: 186653 - DNA, 23 bp, Artificial sequence
  SiRNA target sequence
aaaaaataaatttgactattacg

SEQ ID NO: 186654 - DNA, 23 bp, Artificial sequence
  SiRNA target sequence
aaaaataaatttgactattacgt

SEQ ID NO: 186655 - DNA, 23 bp, Artificial sequence
  SiRNA target sequence
aaaataaatttgactattacgta

SEQ ID NO: 186656 - DNA, 23 bp, Artificial sequence
  SiRNA target sequence
aaataaatttgactattacgtag

SEQ ID NO: 186657 - DNA, 23 bp, Artificial sequence
  SiRNA target sequence
aataaatttgactattacgtaga

SEQ ID NO: 186658 - DNA, 23 bp, Artificial sequence
  SiRNA target sequence
ataaatttgactattacgtagat

SEQ ID NO: 186659 - DNA, 23 bp, Artificial sequence
  SiRNA target sequence
taaatttgactattacgtagata

SEQ ID NO: 186660 - DNA, 23 bp, Artificial sequence
  SiRNA target sequence
aaatttgactattacgtagataa

SEQ ID NO: 186661 - DNA, 23 bp, Artificial sequence
  SiRNA target sequence
aatttgactattacgtagataaa

SEQ ID NO: 186662 - DNA, 23 bp, Artificial sequence
  SiRNA target sequence
atttgactattacgtagataaaa

SEQ ID NO: 186663 - DNA, 23 bp, Artificial sequence
  SiRNA target sequence
tttgactattacgtagataaaat

SEQ ID NO: 186664 - DNA, 23 bp, Artificial sequence
  SiRNA target sequence
ttgactattacgtagataaaatg

SEQ ID NO: 186665 - DNA, 23 bp, Artificial sequence
  SiRNA target sequence
tgactattacgtagataaaatgg

SEQ ID NO: 186666 - DNA, 23 bp, Artificial sequence
  SiRNA target sequence
gactattacgtagataaaatggc

SEQ ID NO: 186667 - DNA, 23 bp, Artificial sequence
  SiRNA target sequence
actattacgtagataaaatggca

SEQ ID NO: 186668 - DNA, 23 bp, Artificial sequence
  SiRNA target sequence
ctattacgtagataaaatggcac

SEQ ID NO: 186669 - DNA, 23 bp, Artificial sequence
  SiRNA target sequence
tattacgtagataaaatggcact

SEQ ID NO: 186670 - DNA, 23 bp, Artificial sequence
  SiRNA target sequence
attacgtagataaaatggcactt

SEQ ID NO: 186671 - DNA, 23 bp, Artificial sequence
  SiRNA target sequence
ttacgtagataaaatggcactta

SEQ ID NO: 186672 - DNA, 23 bp, Artificial sequence
  SiRNA target sequence
tacgtagataaaatggcacttaa

SEQ ID NO: 186673 - DNA, 23 bp, Artificial sequence
  SiRNA target sequence
acgtagataaaatggcacttaaa

SEQ ID NO: 186674 - DNA, 23 bp, Artificial sequence
  SiRNA target sequence
cgtagataaaatggcacttaaaa

SEQ ID NO: 186675 - DNA, 23 bp, Artificial sequence
  SiRNA target sequence
gtagataaaatggcacttaaaaa

SEQ ID NO: 186676 - DNA, 23 bp, Artificial sequence
  SiRNA target sequence
tagataaaatggcacttaaaaat

SEQ ID NO: 186677 - DNA, 23 bp, Artificial sequence
  SiRNA target sequence
agataaaatggcacttaaaaatg

SEQ ID NO: 186678 - DNA, 23 bp, Artificial sequence
  SiRNA target sequence
gataaaatggcacttaaaaatgt

SEQ ID NO: 186679 - DNA, 23 bp, Artificial sequence
  SiRNA target sequence
ataaaatggcacttaaaaatgta

SEQ ID NO: 186680 - DNA, 23 bp, Artificial sequence
  SiRNA target sequence
taaaatggcacttaaaaatgtat

SEQ ID NO: 186681 - DNA, 23 bp, Artificial sequence
  SiRNA target sequence
aaaatggcacttaaaaatgtatt

SEQ ID NO: 186682 - DNA, 23 bp, Artificial sequence
  SiRNA target sequence
aaatggcacttaaaaatgtatta

SEQ ID NO: 186683 - DNA, 23 bp, Artificial sequence
  SiRNA target sequence
aatggcacttaaaaatgtattaa

SEQ ID NO: 186684 - DNA, 23 bp, Artificial sequence
  SiRNA target sequence
atggcacttaaaaatgtattaac

SEQ ID NO: 186685 - DNA, 23 bp, Artificial sequence
  SiRNA target sequence
tggcacttaaaaatgtattaaca

SEQ ID NO: 186686 - DNA, 23 bp, Artificial sequence
  SiRNA target sequence
ggcacttaaaaatgtattaacaa

SEQ ID NO: 186687 - DNA, 23 bp, Artificial sequence
  SiRNA target sequence
gcacttaaaaatgtattaacaag

SEQ ID NO: 186688 - DNA, 23 bp, Artificial sequence
  SiRNA target sequence
cacttaaaaatgtattaacaaga

SEQ ID NO: 186689 - DNA, 23 bp, Artificial sequence
  SiRNA target sequence
acttaaaaatgtattaacaagag

SEQ ID NO: 186690 - DNA, 23 bp, Artificial sequence
  SiRNA target sequence
cttaaaaatgtattaacaagaga

SEQ ID NO: 186691 - DNA, 23 bp, Artificial sequence
  SiRNA target sequence
ttaaaaatgtattaacaagagaa

SEQ ID NO: 186692 - DNA, 23 bp, Artificial sequence
  SiRNA target sequence
taaaaatgtattaacaagagaat

SEQ ID NO: 186693 - DNA, 23 bp, Artificial sequence
  SiRNA target sequence
aaaaatgtattaacaagagaatt

SEQ ID NO: 186694 - DNA, 23 bp, Artificial sequence
  SiRNA target sequence
aaaatgtattaacaagagaatta

SEQ ID NO: 186695 - DNA, 23 bp, Artificial sequence
  SiRNA target sequence
aaatgtattaacaagagaattag

SEQ ID NO: 186696 - DNA, 23 bp, Artificial sequence
  SiRNA target sequence
aatgtattaacaagagaattaga

SEQ ID NO: 186697 - DNA, 23 bp, Artificial sequence
  SiRNA target sequence
atgtattaacaagagaattagag

SEQ ID NO: 186698 - DNA, 23 bp, Artificial sequence
  SiRNA target sequence
tgtattaacaagagaattagagc

SEQ ID NO: 186699 - DNA, 23 bp, Artificial sequence
  SiRNA target sequence
gtattaacaagagaattagagca

SEQ ID NO: 186700 - DNA, 23 bp, Artificial sequence
  SiRNA target sequence
tattaacaagagaattagagcaa

SEQ ID NO: 186701 - DNA, 23 bp, Artificial sequence
  SiRNA target sequence
attaacaagagaattagagcaat

SEQ ID NO: 186702 - DNA, 23 bp, Artificial sequence
  SiRNA target sequence
ttaacaagagaattagagcaatt

SEQ ID NO: 186703 - DNA, 23 bp, Artificial sequence
  SiRNA target sequence
taacaagagaattagagcaatta

SEQ ID NO: 186704 - DNA, 23 bp, Artificial sequence
  SiRNA target sequence
aacaagagaattagagcaattaa

SEQ ID NO: 186705 - DNA, 23 bp, Artificial sequence
  SiRNA target sequence
acaagagaattagagcaattaag

SEQ ID NO: 186706 - DNA, 23 bp, Artificial sequence
  SiRNA target sequence
caagagaattagagcaattaagt

SEQ ID NO: 186707 - DNA, 23 bp, Artificial sequence
  SiRNA target sequence
aagagaattagagcaattaagtg

SEQ ID NO: 186708 - DNA, 23 bp, Artificial sequence
  SiRNA target sequence
agagaattagagcaattaagtgg

SEQ ID NO: 186709 - DNA, 23 bp, Artificial sequence
  SiRNA target sequence
gagaattagagcaattaagtggt

SEQ ID NO: 186710 - DNA, 23 bp, Artificial sequence
  SiRNA target sequence
agaattagagcaattaagtggtg

SEQ ID NO: 186711 - DNA, 23 bp, Artificial sequence
  SiRNA target sequence
gaattagagcaattaagtggtgg

SEQ ID NO: 186712 - DNA, 23 bp, Artificial sequence
  SiRNA target sequence
aattagagcaattaagtggtggt

SEQ ID NO: 186713 - DNA, 23 bp, Artificial sequence
  SiRNA target sequence
attagagcaattaagtggtggtg

SEQ ID NO: 186714 - DNA, 23 bp, Artificial sequence
  SiRNA target sequence
ttagagcaattaagtggtggtga

SEQ ID NO: 186715 - DNA, 23 bp, Artificial sequence
  SiRNA target sequence
tagagcaattaagtggtggtgaa

SEQ ID NO: 186716 - DNA, 23 bp, Artificial sequence
  SiRNA target sequence
agagcaattaagtggtggtgaac

SEQ ID NO: 186717 - DNA, 23 bp, Artificial sequence
  SiRNA target sequence
gagcaattaagtggtggtgaact

SEQ ID NO: 186718 - DNA, 23 bp, Artificial sequence
  SiRNA target sequence
agcaattaagtggtggtgaactt

SEQ ID NO: 186719 - DNA, 23 bp, Artificial sequence
  SiRNA target sequence
gcaattaagtggtggtgaacttc

SEQ ID NO: 186720 - DNA, 23 bp, Artificial sequence
  SiRNA target sequence
caattaagtggtggtgaacttca

SEQ ID NO: 186721 - DNA, 23 bp, Artificial sequence
  SiRNA target sequence
aattaagtggtggtgaacttcaa

SEQ ID NO: 186722 - DNA, 23 bp, Artificial sequence
  SiRNA target sequence
attaagtggtggtgaacttcaaa

SEQ ID NO: 186723 - DNA, 23 bp, Artificial sequence
  SiRNA target sequence
ttaagtggtggtgaacttcaaag

SEQ ID NO: 186724 - DNA, 23 bp, Artificial sequence
  SiRNA target sequence
taagtggtggtgaacttcaaaga

SEQ ID NO: 186725 - DNA, 23 bp, Artificial sequence
  SiRNA target sequence
aagtggtggtgaacttcaaagat

SEQ ID NO: 186726 - DNA, 23 bp, Artificial sequence
  SiRNA target sequence
agtggtggtgaacttcaaagatt

SEQ ID NO: 186727 - DNA, 23 bp, Artificial sequence
  SiRNA target sequence
gtggtggtgaacttcaaagattt

SEQ ID NO: 186728 - DNA, 23 bp, Artificial sequence
  SiRNA target sequence
tggtggtgaacttcaaagatttt

SEQ ID NO: 186729 - DNA, 23 bp, Artificial sequence
  SiRNA target sequence
ggtggtgaacttcaaagattttg

SEQ ID NO: 186730 - DNA, 23 bp, Artificial sequence
  SiRNA target sequence
gtggtgaacttcaaagattttgt

SEQ ID NO: 186731 - DNA, 23 bp, Artificial sequence
  SiRNA target sequence
tggtgaacttcaaagattttgta

SEQ ID NO: 186732 - DNA, 23 bp, Artificial sequence
  SiRNA target sequence
ggtgaacttcaaagattttgtat

SEQ ID NO: 186733 - DNA, 23 bp, Artificial sequence
  SiRNA target sequence
gtgaacttcaaagattttgtatt

SEQ ID NO: 186734 - DNA, 23 bp, Artificial sequence
  SiRNA target sequence
tgaacttcaaagattttgtattg

SEQ ID NO: 186735 - DNA, 23 bp, Artificial sequence
  SiRNA target sequence
gaacttcaaagattttgtattgc

SEQ ID NO: 186736 - DNA, 23 bp, Artificial sequence
  SiRNA target sequence
aacttcaaagattttgtattgca

SEQ ID NO: 186737 - DNA, 23 bp, Artificial sequence
  SiRNA target sequence
acttcaaagattttgtattgcat

SEQ ID NO: 186738 - DNA, 23 bp, Artificial sequence
  SiRNA target sequence
cttcaaagattttgtattgcata

SEQ ID NO: 186739 - DNA, 23 bp, Artificial sequence
  SiRNA target sequence
ttcaaagattttgtattgcatac

SEQ ID NO: 186740 - DNA, 23 bp, Artificial sequence
  SiRNA target sequence
tcaaagattttgtattgcataca

SEQ ID NO: 186741 - DNA, 23 bp, Artificial sequence
  SiRNA target sequence
caaagattttgtattgcatacac

SEQ ID NO: 186742 - DNA, 23 bp, Artificial sequence
  SiRNA target sequence
aaagattttgtattgcatacaca

SEQ ID NO: 186743 - DNA, 23 bp, Artificial sequence
  SiRNA target sequence
aagattttgtattgcatacacat

SEQ ID NO: 186744 - DNA, 23 bp, Artificial sequence
  SiRNA target sequence
agattttgtattgcatacacatg

SEQ ID NO: 186745 - DNA, 23 bp, Artificial sequence
  SiRNA target sequence
gattttgtattgcatacacatgt

SEQ ID NO: 186746 - DNA, 23 bp, Artificial sequence
  SiRNA target sequence
attttgtattgcatacacatgtt

SEQ ID NO: 186747 - DNA, 23 bp, Artificial sequence
  SiRNA target sequence
ttttgtattgcatacacatgttt

SEQ ID NO: 186748 - DNA, 23 bp, Artificial sequence
  SiRNA target sequence
tttgtattgcatacacatgttta

SEQ ID NO: 186749 - DNA, 23 bp, Artificial sequence
  SiRNA target sequence
ttgtattgcatacacatgtttac

SEQ ID NO: 186750 - DNA, 23 bp, Artificial sequence
  SiRNA target sequence
tgtattgcatacacatgtttaca

SEQ ID NO: 186751 - DNA, 23 bp, Artificial sequence
  SiRNA target sequence
gtattgcatacacatgtttacaa

SEQ ID NO: 186752 - DNA, 23 bp, Artificial sequence
  SiRNA target sequence
tattgcatacacatgtttacaag

SEQ ID NO: 186753 - DNA, 23 bp, Artificial sequence
  SiRNA target sequence
attgcatacacatgtttacaaga

SEQ ID NO: 186754 - DNA, 23 bp, Artificial sequence
  SiRNA target sequence
ttgcatacacatgtttacaagaa

SEQ ID NO: 186755 - DNA, 23 bp, Artificial sequence
  SiRNA target sequence
tgcatacacatgtttacaagaag

SEQ ID NO: 186756 - DNA, 23 bp, Artificial sequence
  SiRNA target sequence
gcatacacatgtttacaagaagg

SEQ ID NO: 186757 - DNA, 23 bp, Artificial sequence
  SiRNA target sequence
catacacatgtttacaagaagga

SEQ ID NO: 186758 - DNA, 23 bp, Artificial sequence
  SiRNA target sequence
atacacatgtttacaagaaggaa

SEQ ID NO: 186759 - DNA, 23 bp, Artificial sequence
  SiRNA target sequence
tacacatgtttacaagaaggaaa

SEQ ID NO: 186760 - DNA, 23 bp, Artificial sequence
  SiRNA target sequence
acacatgtttacaagaaggaaat

SEQ ID NO: 186761 - DNA, 23 bp, Artificial sequence
  SiRNA target sequence
cacatgtttacaagaaggaaatg

SEQ ID NO: 186762 - DNA, 23 bp, Artificial sequence
  SiRNA target sequence
acatgtttacaagaaggaaatgt

SEQ ID NO: 186763 - DNA, 23 bp, Artificial sequence
  SiRNA target sequence
catgtttacaagaaggaaatgtt

SEQ ID NO: 186764 - DNA, 23 bp, Artificial sequence
  SiRNA target sequence
atgtttacaagaaggaaatgttt

SEQ ID NO: 186765 - DNA, 23 bp, Artificial sequence
  SiRNA target sequence
tgtttacaagaaggaaatgttta

SEQ ID NO: 186766 - DNA, 23 bp, Artificial sequence
  SiRNA target sequence
gtttacaagaaggaaatgtttat

SEQ ID NO: 186767 - DNA, 23 bp, Artificial sequence
  SiRNA target sequence
tttacaagaaggaaatgtttata

SEQ ID NO: 186768 - DNA, 23 bp, Artificial sequence
  SiRNA target sequence
ttacaagaaggaaatgtttatat

SEQ ID NO: 186769 - DNA, 23 bp, Artificial sequence
  SiRNA target sequence
tacaagaaggaaatgtttatatt

SEQ ID NO: 186770 - DNA, 23 bp, Artificial sequence
  SiRNA target sequence
acaagaaggaaatgtttatattt

SEQ ID NO: 186771 - DNA, 23 bp, Artificial sequence
  SiRNA target sequence
caagaaggaaatgtttatatttt

SEQ ID NO: 186772 - DNA, 23 bp, Artificial sequence
  SiRNA target sequence
aagaaggaaatgtttatattttt

SEQ ID NO: 186773 - DNA, 23 bp, Artificial sequence
  SiRNA target sequence
agaaggaaatgtttatatttttg

SEQ ID NO: 186774 - DNA, 23 bp, Artificial sequence
  SiRNA target sequence
gaaggaaatgtttatatttttga

SEQ ID NO: 186775 - DNA, 23 bp, Artificial sequence
  SiRNA target sequence
aaggaaatgtttatatttttgat

SEQ ID NO: 186776 - DNA, 23 bp, Artificial sequence
  SiRNA target sequence
aggaaatgtttatatttttgatg

SEQ ID NO: 186777 - DNA, 23 bp, Artificial sequence
  SiRNA target sequence
ggaaatgtttatatttttgatga

SEQ ID NO: 186778 - DNA, 23 bp, Artificial sequence
  SiRNA target sequence
gaaatgtttatatttttgatgaa

SEQ ID NO: 186779 - DNA, 23 bp, Artificial sequence
  SiRNA target sequence
aaatgtttatatttttgatgaac

SEQ ID NO: 186780 - DNA, 23 bp, Artificial sequence
  SiRNA target sequence
aatgtttatatttttgatgaacc

SEQ ID NO: 186781 - DNA, 23 bp, Artificial sequence
  SiRNA target sequence
atgtttatatttttgatgaaccc

SEQ ID NO: 186782 - DNA, 23 bp, Artificial sequence
  SiRNA target sequence
tgtttatatttttgatgaaccca

SEQ ID NO: 186783 - DNA, 23 bp, Artificial sequence
  SiRNA target sequence
gtttatatttttgatgaacccac

SEQ ID NO: 186784 - DNA, 23 bp, Artificial sequence
  SiRNA target sequence
tttatatttttgatgaacccact

SEQ ID NO: 186785 - DNA, 23 bp, Artificial sequence
  SiRNA target sequence
ttatatttttgatgaacccacta

SEQ ID NO: 186786 - DNA, 23 bp, Artificial sequence
  SiRNA target sequence
tatatttttgatgaacccactag

SEQ ID NO: 186787 - DNA, 23 bp, Artificial sequence
  SiRNA target sequence
atatttttgatgaacccactagt

SEQ ID NO: 186788 - DNA, 23 bp, Artificial sequence
  SiRNA target sequence
tatttttgatgaacccactagtt

SEQ ID NO: 186789 - DNA, 23 bp, Artificial sequence
  SiRNA target sequence
atttttgatgaacccactagttt

SEQ ID NO: 186790 - DNA, 23 bp, Artificial sequence
  SiRNA target sequence
tttttgatgaacccactagtttt

SEQ ID NO: 186791 - DNA, 23 bp, Artificial sequence
  SiRNA target sequence
ttttgatgaacccactagttttt

SEQ ID NO: 186792 - DNA, 23 bp, Artificial sequence
  SiRNA target sequence
tttgatgaacccactagtttttt

SEQ ID NO: 186793 - DNA, 23 bp, Artificial sequence
  SiRNA target sequence
ttgatgaacccactagttttttg

SEQ ID NO: 186794 - DNA, 23 bp, Artificial sequence
  SiRNA target sequence
tgatgaacccactagttttttgg

SEQ ID NO: 186795 - DNA, 23 bp, Artificial sequence
  SiRNA target sequence
gatgaacccactagttttttgga

SEQ ID NO: 186796 - DNA, 23 bp, Artificial sequence
  SiRNA target sequence
atgaacccactagttttttggat

SEQ ID NO: 186797 - DNA, 23 bp, Artificial sequence
  SiRNA target sequence
tgaacccactagttttttggatg

SEQ ID NO: 186798 - DNA, 23 bp, Artificial sequence
  SiRNA target sequence
gaacccactagttttttggatgt

SEQ ID NO: 186799 - DNA, 23 bp, Artificial sequence
  SiRNA target sequence
aacccactagttttttggatgtt

SEQ ID NO: 186800 - DNA, 23 bp, Artificial sequence
  SiRNA target sequence
acccactagttttttggatgtta

SEQ ID NO: 186801 - DNA, 23 bp, Artificial sequence
  SiRNA target sequence
cccactagttttttggatgttaa

SEQ ID NO: 186802 - DNA, 23 bp, Artificial sequence
  SiRNA target sequence
ccactagttttttggatgttaag

SEQ ID NO: 186803 - DNA, 23 bp, Artificial sequence
  SiRNA target sequence
cactagttttttggatgttaagc

SEQ ID NO: 186804 - DNA, 23 bp, Artificial sequence
  SiRNA target sequence
actagttttttggatgttaagca

SEQ ID NO: 186805 - DNA, 23 bp, Artificial sequence
  SiRNA target sequence
ctagttttttggatgttaagcag

SEQ ID NO: 186806 - DNA, 23 bp, Artificial sequence
  SiRNA target sequence
tagttttttggatgttaagcagc

SEQ ID NO: 186807 - DNA, 23 bp, Artificial sequence
  SiRNA target sequence
agttttttggatgttaagcagcg

SEQ ID NO: 186808 - DNA, 23 bp, Artificial sequence
  SiRNA target sequence
gttttttggatgttaagcagcga

SEQ ID NO: 186809 - DNA, 23 bp, Artificial sequence
  SiRNA target sequence
ttttttggatgttaagcagcgac

SEQ ID NO: 186810 - DNA, 23 bp, Artificial sequence
  SiRNA target sequence
tttttggatgttaagcagcgact

SEQ ID NO: 186811 - DNA, 23 bp, Artificial sequence
  SiRNA target sequence
ttttggatgttaagcagcgacta

SEQ ID NO: 186812 - DNA, 23 bp, Artificial sequence
  SiRNA target sequence
tttggatgttaagcagcgactag

SEQ ID NO: 186813 - DNA, 23 bp, Artificial sequence
  SiRNA target sequence
ttggatgttaagcagcgactagc

SEQ ID NO: 186814 - DNA, 23 bp, Artificial sequence
  SiRNA target sequence
tggatgttaagcagcgactagca

SEQ ID NO: 186815 - DNA, 23 bp, Artificial sequence
  SiRNA target sequence
ggatgttaagcagcgactagcag

SEQ ID NO: 186816 - DNA, 23 bp, Artificial sequence
  SiRNA target sequence
gatgttaagcagcgactagcagc

SEQ ID NO: 186817 - DNA, 23 bp, Artificial sequence
  SiRNA target sequence
atgttaagcagcgactagcagct

SEQ ID NO: 186818 - DNA, 23 bp, Artificial sequence
  SiRNA target sequence
tgttaagcagcgactagcagctg

SEQ ID NO: 186819 - DNA, 23 bp, Artificial sequence
  SiRNA target sequence
gttaagcagcgactagcagctgc

SEQ ID NO: 186820 - DNA, 23 bp, Artificial sequence
  SiRNA target sequence
ttaagcagcgactagcagctgct

SEQ ID NO: 186821 - DNA, 23 bp, Artificial sequence
  SiRNA target sequence
taagcagcgactagcagctgcta

SEQ ID NO: 186822 - DNA, 23 bp, Artificial sequence
  SiRNA target sequence
aagcagcgactagcagctgctaa

SEQ ID NO: 186823 - DNA, 23 bp, Artificial sequence
  SiRNA target sequence
agcagcgactagcagctgctaag

SEQ ID NO: 186824 - DNA, 23 bp, Artificial sequence
  SiRNA target sequence
gcagcgactagcagctgctaagg

SEQ ID NO: 186825 - DNA, 23 bp, Artificial sequence
  SiRNA target sequence
cagcgactagcagctgctaagga

SEQ ID NO: 186826 - DNA, 23 bp, Artificial sequence
  SiRNA target sequence
agcgactagcagctgctaaggaa

SEQ ID NO: 186827 - DNA, 23 bp, Artificial sequence
  SiRNA target sequence
gcgactagcagctgctaaggaaa

SEQ ID NO: 186828 - DNA, 23 bp, Artificial sequence
  SiRNA target sequence
cgactagcagctgctaaggaaat

SEQ ID NO: 186829 - DNA, 23 bp, Artificial sequence
  SiRNA target sequence
gactagcagctgctaaggaaata

SEQ ID NO: 186830 - DNA, 23 bp, Artificial sequence
  SiRNA target sequence
actagcagctgctaaggaaataa

SEQ ID NO: 186831 - DNA, 23 bp, Artificial sequence
  SiRNA target sequence
ctagcagctgctaaggaaataag

SEQ ID NO: 186832 - DNA, 23 bp, Artificial sequence
  SiRNA target sequence
tagcagctgctaaggaaataaga

SEQ ID NO: 186833 - DNA, 23 bp, Artificial sequence
  SiRNA target sequence
agcagctgctaaggaaataagaa

SEQ ID NO: 186834 - DNA, 23 bp, Artificial sequence
  SiRNA target sequence
gcagctgctaaggaaataagaaa

SEQ ID NO: 186835 - DNA, 23 bp, Artificial sequence
  SiRNA target sequence
cagctgctaaggaaataagaaat

SEQ ID NO: 186836 - DNA, 23 bp, Artificial sequence
  SiRNA target sequence
agctgctaaggaaataagaaatt

SEQ ID NO: 186837 - DNA, 23 bp, Artificial sequence
  SiRNA target sequence
gctgctaaggaaataagaaattt

SEQ ID NO: 186838 - DNA, 23 bp, Artificial sequence
  SiRNA target sequence
ctgctaaggaaataagaaatttg

SEQ ID NO: 186839 - DNA, 23 bp, Artificial sequence
  SiRNA target sequence
tgctaaggaaataagaaatttgt

SEQ ID NO: 186840 - DNA, 23 bp, Artificial sequence
  SiRNA target sequence
gctaaggaaataagaaatttgtg

SEQ ID NO: 186841 - DNA, 23 bp, Artificial sequence
  SiRNA target sequence
ctaaggaaataagaaatttgtgt

SEQ ID NO: 186842 - DNA, 23 bp, Artificial sequence
  SiRNA target sequence
taaggaaataagaaatttgtgtg

SEQ ID NO: 186843 - DNA, 23 bp, Artificial sequence
  SiRNA target sequence
aaggaaataagaaatttgtgtga

SEQ ID NO: 186844 - DNA, 23 bp, Artificial sequence
  SiRNA target sequence
aggaaataagaaatttgtgtgaa

SEQ ID NO: 186845 - DNA, 23 bp, Artificial sequence
  SiRNA target sequence
ggaaataagaaatttgtgtgaag

SEQ ID NO: 186846 - DNA, 23 bp, Artificial sequence
  SiRNA target sequence
gaaataagaaatttgtgtgaaga

SEQ ID NO: 186847 - DNA, 23 bp, Artificial sequence
  SiRNA target sequence
aaataagaaatttgtgtgaagaa

SEQ ID NO: 186848 - DNA, 23 bp, Artificial sequence
  SiRNA target sequence
aataagaaatttgtgtgaagaaa

SEQ ID NO: 186849 - DNA, 23 bp, Artificial sequence
  SiRNA target sequence
ataagaaatttgtgtgaagaaaa

SEQ ID NO: 186850 - DNA, 23 bp, Artificial sequence
  SiRNA target sequence
taagaaatttgtgtgaagaaaat

SEQ ID NO: 186851 - DNA, 23 bp, Artificial sequence
  SiRNA target sequence
aagaaatttgtgtgaagaaaata

SEQ ID NO: 186852 - DNA, 23 bp, Artificial sequence
  SiRNA target sequence
agaaatttgtgtgaagaaaataa

SEQ ID NO: 186853 - DNA, 23 bp, Artificial sequence
  SiRNA target sequence
gaaatttgtgtgaagaaaataaa

SEQ ID NO: 186854 - DNA, 23 bp, Artificial sequence
  SiRNA target sequence
aaatttgtgtgaagaaaataaat

SEQ ID NO: 186855 - DNA, 23 bp, Artificial sequence
  SiRNA target sequence
aatttgtgtgaagaaaataaata

SEQ ID NO: 186856 - DNA, 23 bp, Artificial sequence
  SiRNA target sequence
atttgtgtgaagaaaataaatat

SEQ ID NO: 186857 - DNA, 23 bp, Artificial sequence
  SiRNA target sequence
tttgtgtgaagaaaataaatatg

SEQ ID NO: 186858 - DNA, 23 bp, Artificial sequence
  SiRNA target sequence
ttgtgtgaagaaaataaatatgt

SEQ ID NO: 186859 - DNA, 23 bp, Artificial sequence
  SiRNA target sequence
tgtgtgaagaaaataaatatgtt

SEQ ID NO: 186860 - DNA, 23 bp, Artificial sequence
  SiRNA target sequence
gtgtgaagaaaataaatatgttg

SEQ ID NO: 186861 - DNA, 23 bp, Artificial sequence
  SiRNA target sequence
tgtgaagaaaataaatatgttgt

SEQ ID NO: 186862 - DNA, 23 bp, Artificial sequence
  SiRNA target sequence
gtgaagaaaataaatatgttgta

SEQ ID NO: 186863 - DNA, 23 bp, Artificial sequence
  SiRNA target sequence
tgaagaaaataaatatgttgtag

SEQ ID NO: 186864 - DNA, 23 bp, Artificial sequence
  SiRNA target sequence
gaagaaaataaatatgttgtagt

SEQ ID NO: 186865 - DNA, 23 bp, Artificial sequence
  SiRNA target sequence
aagaaaataaatatgttgtagtt

SEQ ID NO: 186866 - DNA, 23 bp, Artificial sequence
  SiRNA target sequence
agaaaataaatatgttgtagttg

SEQ ID NO: 186867 - DNA, 23 bp, Artificial sequence
  SiRNA target sequence
gaaaataaatatgttgtagttgt

SEQ ID NO: 186868 - DNA, 23 bp, Artificial sequence
  SiRNA target sequence
aaaataaatatgttgtagttgtc

SEQ ID NO: 186869 - DNA, 23 bp, Artificial sequence
  SiRNA target sequence
aaataaatatgttgtagttgtcg

SEQ ID NO: 186870 - DNA, 23 bp, Artificial sequence
  SiRNA target sequence
aataaatatgttgtagttgtcga

SEQ ID NO: 186871 - DNA, 23 bp, Artificial sequence
  SiRNA target sequence
ataaatatgttgtagttgtcgaa

SEQ ID NO: 186872 - DNA, 23 bp, Artificial sequence
  SiRNA target sequence
taaatatgttgtagttgtcgaac

SEQ ID NO: 186873 - DNA, 23 bp, Artificial sequence
  SiRNA target sequence
aaatatgttgtagttgtcgaaca

SEQ ID NO: 186874 - DNA, 23 bp, Artificial sequence
  SiRNA target sequence
aatatgttgtagttgtcgaacac

SEQ ID NO: 186875 - DNA, 23 bp, Artificial sequence
  SiRNA target sequence
atatgttgtagttgtcgaacacg

SEQ ID NO: 186876 - DNA, 23 bp, Artificial sequence
  SiRNA target sequence
tatgttgtagttgtcgaacacga

SEQ ID NO: 186877 - DNA, 23 bp, Artificial sequence
  SiRNA target sequence
atgttgtagttgtcgaacacgat

SEQ ID NO: 186878 - DNA, 23 bp, Artificial sequence
  SiRNA target sequence
tgttgtagttgtcgaacacgatt

SEQ ID NO: 186879 - DNA, 23 bp, Artificial sequence
  SiRNA target sequence
gttgtagttgtcgaacacgattt

SEQ ID NO: 186880 - DNA, 23 bp, Artificial sequence
  SiRNA target sequence
ttgtagttgtcgaacacgattta

SEQ ID NO: 186881 - DNA, 23 bp, Artificial sequence
  SiRNA target sequence
tgtagttgtcgaacacgatttag

SEQ ID NO: 186882 - DNA, 23 bp, Artificial sequence
  SiRNA target sequence
gtagttgtcgaacacgatttagc

SEQ ID NO: 186883 - DNA, 23 bp, Artificial sequence
  SiRNA target sequence
tagttgtcgaacacgatttagcc

SEQ ID NO: 186884 - DNA, 23 bp, Artificial sequence
  SiRNA target sequence
agttgtcgaacacgatttagcca

SEQ ID NO: 186885 - DNA, 23 bp, Artificial sequence
  SiRNA target sequence
gttgtcgaacacgatttagccat

SEQ ID NO: 186886 - DNA, 23 bp, Artificial sequence
  SiRNA target sequence
ttgtcgaacacgatttagccatt

SEQ ID NO: 186887 - DNA, 23 bp, Artificial sequence
  SiRNA target sequence
tgtcgaacacgatttagccattt

SEQ ID NO: 186888 - DNA, 23 bp, Artificial sequence
  SiRNA target sequence
gtcgaacacgatttagccatttt

SEQ ID NO: 186889 - DNA, 23 bp, Artificial sequence
  SiRNA target sequence
tcgaacacgatttagccatttta

SEQ ID NO: 186890 - DNA, 23 bp, Artificial sequence
  SiRNA target sequence
cgaacacgatttagccattttag

SEQ ID NO: 186891 - DNA, 23 bp, Artificial sequence
  SiRNA target sequence
gaacacgatttagccattttaga

SEQ ID NO: 186892 - DNA, 23 bp, Artificial sequence
  SiRNA target sequence
aacacgatttagccattttagat

SEQ ID NO: 186893 - DNA, 23 bp, Artificial sequence
  SiRNA target sequence
acacgatttagccattttagatt

SEQ ID NO: 186894 - DNA, 23 bp, Artificial sequence
  SiRNA target sequence
cacgatttagccattttagattt

SEQ ID NO: 186895 - DNA, 23 bp, Artificial sequence
  SiRNA target sequence
acgatttagccattttagatttg

SEQ ID NO: 186896 - DNA, 23 bp, Artificial sequence
  SiRNA target sequence
cgatttagccattttagatttga

SEQ ID NO: 186897 - DNA, 23 bp, Artificial sequence
  SiRNA target sequence
gatttagccattttagatttgat

SEQ ID NO: 186898 - DNA, 23 bp, Artificial sequence
  SiRNA target sequence
atttagccattttagatttgatg

SEQ ID NO: 186899 - DNA, 23 bp, Artificial sequence
  SiRNA target sequence
tttagccattttagatttgatgt

SEQ ID NO: 186900 - DNA, 23 bp, Artificial sequence
  SiRNA target sequence
ttagccattttagatttgatgtg

SEQ ID NO: 186901 - DNA, 23 bp, Artificial sequence
  SiRNA target sequence
tagccattttagatttgatgtgt

SEQ ID NO: 186902 - DNA, 23 bp, Artificial sequence
  SiRNA target sequence
agccattttagatttgatgtgtg

SEQ ID NO: 186903 - DNA, 23 bp, Artificial sequence
  SiRNA target sequence
gccattttagatttgatgtgtga

SEQ ID NO: 186904 - DNA, 23 bp, Artificial sequence
  SiRNA target sequence
ccattttagatttgatgtgtgat

SEQ ID NO: 186905 - DNA, 23 bp, Artificial sequence
  SiRNA target sequence
cattttagatttgatgtgtgatt

SEQ ID NO: 186906 - DNA, 23 bp, Artificial sequence
  SiRNA target sequence
attttagatttgatgtgtgattt

SEQ ID NO: 186907 - DNA, 23 bp, Artificial sequence
  SiRNA target sequence
ttttagatttgatgtgtgatttt

SEQ ID NO: 186908 - DNA, 23 bp, Artificial sequence
  SiRNA target sequence
tttagatttgatgtgtgattttg

SEQ ID NO: 186909 - DNA, 23 bp, Artificial sequence
  SiRNA target sequence
ttagatttgatgtgtgattttgg

SEQ ID NO: 186910 - DNA, 23 bp, Artificial sequence
  SiRNA target sequence
tagatttgatgtgtgattttgga

SEQ ID NO: 186911 - DNA, 23 bp, Artificial sequence
  SiRNA target sequence
agatttgatgtgtgattttggat

SEQ ID NO: 186912 - DNA, 23 bp, Artificial sequence
  SiRNA target sequence
gatttgatgtgtgattttggatg

SEQ ID NO: 186913 - DNA, 23 bp, Artificial sequence
  SiRNA target sequence
atttgatgtgtgattttggatgt

SEQ ID NO: 186914 - DNA, 23 bp, Artificial sequence
  SiRNA target sequence
tttgatgtgtgattttggatgtg

SEQ ID NO: 186915 - DNA, 23 bp, Artificial sequence
  SiRNA target sequence
ttgatgtgtgattttggatgtgt

SEQ ID NO: 186916 - DNA, 23 bp, Artificial sequence
  SiRNA target sequence
tgatgtgtgattttggatgtgtt

SEQ ID NO: 186917 - DNA, 23 bp, Artificial sequence
  SiRNA target sequence
gatgtgtgattttggatgtgttc

SEQ ID NO: 186918 - DNA, 23 bp, Artificial sequence
  SiRNA target sequence
atgtgtgattttggatgtgttct

SEQ ID NO: 186919 - DNA, 23 bp, Artificial sequence
  SiRNA target sequence
tgtgtgattttggatgtgttcta

SEQ ID NO: 186920 - DNA, 23 bp, Artificial sequence
  SiRNA target sequence
gtgtgattttggatgtgttctat

SEQ ID NO: 186921 - DNA, 23 bp, Artificial sequence
  SiRNA target sequence
tgtgattttggatgtgttctata

SEQ ID NO: 186922 - DNA, 23 bp, Artificial sequence
  SiRNA target sequence
gtgattttggatgtgttctatac

SEQ ID NO: 186923 - DNA, 23 bp, Artificial sequence
  SiRNA target sequence
tgattttggatgtgttctatacg

SEQ ID NO: 186924 - DNA, 23 bp, Artificial sequence
  SiRNA target sequence
gattttggatgtgttctatacgg

SEQ ID NO: 186925 - DNA, 23 bp, Artificial sequence
  SiRNA target sequence
attttggatgtgttctatacgga

SEQ ID NO: 186926 - DNA, 23 bp, Artificial sequence
  SiRNA target sequence
ttttggatgtgttctatacggac

SEQ ID NO: 186927 - DNA, 23 bp, Artificial sequence
  SiRNA target sequence
tttggatgtgttctatacggaca

SEQ ID NO: 186928 - DNA, 23 bp, Artificial sequence
  SiRNA target sequence
ttggatgtgttctatacggacaa

SEQ ID NO: 186929 - DNA, 23 bp, Artificial sequence
  SiRNA target sequence
tggatgtgttctatacggacaat

SEQ ID NO: 186930 - DNA, 23 bp, Artificial sequence
  SiRNA target sequence
ggatgtgttctatacggacaatc

SEQ ID NO: 186931 - DNA, 23 bp, Artificial sequence
  SiRNA target sequence
gatgtgttctatacggacaatct

SEQ ID NO: 186932 - DNA, 23 bp, Artificial sequence
  SiRNA target sequence
atgtgttctatacggacaatctg

SEQ ID NO: 186933 - DNA, 23 bp, Artificial sequence
  SiRNA target sequence
tgtgttctatacggacaatctgg

SEQ ID NO: 186934 - DNA, 23 bp, Artificial sequence
  SiRNA target sequence
gtgttctatacggacaatctggg

SEQ ID NO: 186935 - DNA, 23 bp, Artificial sequence
  SiRNA target sequence
tgttctatacggacaatctgggg

SEQ ID NO: 186936 - DNA, 23 bp, Artificial sequence
  SiRNA target sequence
gttctatacggacaatctggggc

SEQ ID NO: 186937 - DNA, 23 bp, Artificial sequence
  SiRNA target sequence
ttctatacggacaatctggggca

SEQ ID NO: 186938 - DNA, 23 bp, Artificial sequence
  SiRNA target sequence
tctatacggacaatctggggcat

SEQ ID NO: 186939 - DNA, 23 bp, Artificial sequence
  SiRNA target sequence
ctatacggacaatctggggcata

SEQ ID NO: 186940 - DNA, 23 bp, Artificial sequence
  SiRNA target sequence
tatacggacaatctggggcatac

SEQ ID NO: 186941 - DNA, 23 bp, Artificial sequence
  SiRNA target sequence
atacggacaatctggggcatacg

SEQ ID NO: 186942 - DNA, 23 bp, Artificial sequence
  SiRNA target sequence
tacggacaatctggggcatacgg

SEQ ID NO: 186943 - DNA, 23 bp, Artificial sequence
  SiRNA target sequence
acggacaatctggggcatacggt

SEQ ID NO: 186944 - DNA, 23 bp, Artificial sequence
  SiRNA target sequence
cggacaatctggggcatacggtg

SEQ ID NO: 186945 - DNA, 23 bp, Artificial sequence
  SiRNA target sequence
ggacaatctggggcatacggtgt

SEQ ID NO: 186946 - DNA, 23 bp, Artificial sequence
  SiRNA target sequence
gacaatctggggcatacggtgta

SEQ ID NO: 186947 - DNA, 23 bp, Artificial sequence
  SiRNA target sequence
acaatctggggcatacggtgtaa

SEQ ID NO: 186948 - DNA, 23 bp, Artificial sequence
  SiRNA target sequence
caatctggggcatacggtgtaat

SEQ ID NO: 186949 - DNA, 23 bp, Artificial sequence
  SiRNA target sequence
aatctggggcatacggtgtaata

SEQ ID NO: 186950 - DNA, 23 bp, Artificial sequence
  SiRNA target sequence
atctggggcatacggtgtaataa

SEQ ID NO: 186951 - DNA, 23 bp, Artificial sequence
  SiRNA target sequence
tctggggcatacggtgtaataag

SEQ ID NO: 186952 - DNA, 23 bp, Artificial sequence
  SiRNA target sequence
ctggggcatacggtgtaataagc

SEQ ID NO: 186953 - DNA, 23 bp, Artificial sequence
  SiRNA target sequence
tggggcatacggtgtaataagcg

SEQ ID NO: 186954 - DNA, 23 bp, Artificial sequence
  SiRNA target sequence
ggggcatacggtgtaataagcgc

SEQ ID NO: 186955 - DNA, 23 bp, Artificial sequence
  SiRNA target sequence
gggcatacggtgtaataagcgca

SEQ ID NO: 186956 - DNA, 23 bp, Artificial sequence
  SiRNA target sequence
ggcatacggtgtaataagcgcac

SEQ ID NO: 186957 - DNA, 23 bp, Artificial sequence
  SiRNA target sequence
gcatacggtgtaataagcgcacc

SEQ ID NO: 186958 - DNA, 23 bp, Artificial sequence
  SiRNA target sequence
catacggtgtaataagcgcacca

SEQ ID NO: 186959 - DNA, 23 bp, Artificial sequence
  SiRNA target sequence
atacggtgtaataagcgcaccat

SEQ ID NO: 186960 - DNA, 23 bp, Artificial sequence
  SiRNA target sequence
tacggtgtaataagcgcaccata

SEQ ID NO: 186961 - DNA, 23 bp, Artificial sequence
  SiRNA target sequence
acggtgtaataagcgcaccatac

SEQ ID NO: 186962 - DNA, 23 bp, Artificial sequence
  SiRNA target sequence
cggtgtaataagcgcaccatacg

SEQ ID NO: 186963 - DNA, 23 bp, Artificial sequence
  SiRNA target sequence
ggtgtaataagcgcaccatacgt

SEQ ID NO: 186964 - DNA, 23 bp, Artificial sequence
  SiRNA target sequence
gtgtaataagcgcaccatacgtt

SEQ ID NO: 186965 - DNA, 23 bp, Artificial sequence
  SiRNA target sequence
tgtaataagcgcaccatacgtta

SEQ ID NO: 186966 - DNA, 23 bp, Artificial sequence
  SiRNA target sequence
gtaataagcgcaccatacgttat

SEQ ID NO: 186967 - DNA, 23 bp, Artificial sequence
  SiRNA target sequence
taataagcgcaccatacgttatt

SEQ ID NO: 186968 - DNA, 23 bp, Artificial sequence
  SiRNA target sequence
aataagcgcaccatacgttatta

SEQ ID NO: 186969 - DNA, 23 bp, Artificial sequence
  SiRNA target sequence
ataagcgcaccatacgttattaa

SEQ ID NO: 186970 - DNA, 23 bp, Artificial sequence
  SiRNA target sequence
taagcgcaccatacgttattaaa

SEQ ID NO: 186971 - DNA, 23 bp, Artificial sequence
  SiRNA target sequence
aagcgcaccatacgttattaaat

SEQ ID NO: 186972 - DNA, 23 bp, Artificial sequence
  SiRNA target sequence
agcgcaccatacgttattaaatc

SEQ ID NO: 186973 - DNA, 23 bp, Artificial sequence
  SiRNA target sequence
gcgcaccatacgttattaaatca

SEQ ID NO: 186974 - DNA, 23 bp, Artificial sequence
  SiRNA target sequence
cgcaccatacgttattaaatcag

SEQ ID NO: 186975 - DNA, 23 bp, Artificial sequence
  SiRNA target sequence
gcaccatacgttattaaatcagc

SEQ ID NO: 186976 - DNA, 23 bp, Artificial sequence
  SiRNA target sequence
caccatacgttattaaatcagca

SEQ ID NO: 186977 - DNA, 23 bp, Artificial sequence
  SiRNA target sequence
accatacgttattaaatcagcaa

SEQ ID NO: 186978 - DNA, 23 bp, Artificial sequence
  SiRNA target sequence
ccatacgttattaaatcagcaat

SEQ ID NO: 186979 - DNA, 23 bp, Artificial sequence
  SiRNA target sequence
catacgttattaaatcagcaata

SEQ ID NO: 186980 - DNA, 23 bp, Artificial sequence
  SiRNA target sequence
atacgttattaaatcagcaataa

SEQ ID NO: 186981 - DNA, 23 bp, Artificial sequence
  SiRNA target sequence
tacgttattaaatcagcaataaa

SEQ ID NO: 186982 - DNA, 23 bp, Artificial sequence
  SiRNA target sequence
acgttattaaatcagcaataaat

SEQ ID NO: 186983 - DNA, 23 bp, Artificial sequence
  SiRNA target sequence
cgttattaaatcagcaataaata

SEQ ID NO: 186984 - DNA, 23 bp, Artificial sequence
  SiRNA target sequence
gttattaaatcagcaataaatat

SEQ ID NO: 186985 - DNA, 23 bp, Artificial sequence
  SiRNA target sequence
ttattaaatcagcaataaatata

SEQ ID NO: 186986 - DNA, 23 bp, Artificial sequence
  SiRNA target sequence
tattaaatcagcaataaatatat

SEQ ID NO: 186987 - DNA, 23 bp, Artificial sequence
  SiRNA target sequence
attaaatcagcaataaatatatt

SEQ ID NO: 186988 - DNA, 23 bp, Artificial sequence
  SiRNA target sequence
ttaaatcagcaataaatatattt

SEQ ID NO: 186989 - DNA, 23 bp, Artificial sequence
  SiRNA target sequence
taaatcagcaataaatatatttc

SEQ ID NO: 186990 - DNA, 23 bp, Artificial sequence
  SiRNA target sequence
aaatcagcaataaatatatttct

SEQ ID NO: 186991 - DNA, 23 bp, Artificial sequence
  SiRNA target sequence
aatcagcaataaatatatttctt

SEQ ID NO: 186992 - DNA, 23 bp, Artificial sequence
  SiRNA target sequence
atcagcaataaatatatttcttg

SEQ ID NO: 186993 - DNA, 23 bp, Artificial sequence
  SiRNA target sequence
tcagcaataaatatatttcttga

SEQ ID NO: 186994 - DNA, 23 bp, Artificial sequence
  SiRNA target sequence
cagcaataaatatatttcttgat

SEQ ID NO: 186995 - DNA, 23 bp, Artificial sequence
  SiRNA target sequence
agcaataaatatatttcttgatg

SEQ ID NO: 186996 - DNA, 23 bp, Artificial sequence
  SiRNA target sequence
gcaataaatatatttcttgatgg

SEQ ID NO: 186997 - DNA, 23 bp, Artificial sequence
  SiRNA target sequence
caataaatatatttcttgatgga

SEQ ID NO: 186998 - DNA, 23 bp, Artificial sequence
  SiRNA target sequence
aataaatatatttcttgatggat

SEQ ID NO: 186999 - DNA, 23 bp, Artificial sequence
  SiRNA target sequence
ataaatatatttcttgatggatt

SEQ ID NO: 187000 - DNA, 23 bp, Artificial sequence
  SiRNA target sequence
taaatatatttcttgatggattt

SEQ ID NO: 187001 - DNA, 23 bp, Artificial sequence
  SiRNA target sequence
aaatatatttcttgatggatttt

SEQ ID NO: 187002 - DNA, 23 bp, Artificial sequence
  SiRNA target sequence
aatatatttcttgatggattttt

SEQ ID NO: 187003 - DNA, 23 bp, Artificial sequence
  SiRNA target sequence
atatatttcttgatggatttttg

SEQ ID NO: 187004 - DNA, 23 bp, Artificial sequence
  SiRNA target sequence
tatatttcttgatggatttttgc

SEQ ID NO: 187005 - DNA, 23 bp, Artificial sequence
  SiRNA target sequence
atatttcttgatggatttttgcc

SEQ ID NO: 187006 - DNA, 23 bp, Artificial sequence
  SiRNA target sequence
tatttcttgatggatttttgcct

SEQ ID NO: 187007 - DNA, 23 bp, Artificial sequence
  SiRNA target sequence
atttcttgatggatttttgccta

SEQ ID NO: 187008 - DNA, 23 bp, Artificial sequence
  SiRNA target sequence
tttcttgatggatttttgcctac

SEQ ID NO: 187009 - DNA, 23 bp, Artificial sequence
  SiRNA target sequence
ttcttgatggatttttgcctaca

SEQ ID NO: 187010 - DNA, 23 bp, Artificial sequence
  SiRNA target sequence
tcttgatggatttttgcctacag

SEQ ID NO: 187011 - DNA, 23 bp, Artificial sequence
  SiRNA target sequence
cttgatggatttttgcctacaga

SEQ ID NO: 187012 - DNA, 23 bp, Artificial sequence
  SiRNA target sequence
ttgatggatttttgcctacagaa

SEQ ID NO: 187013 - DNA, 23 bp, Artificial sequence
  SiRNA target sequence
tgatggatttttgcctacagaaa

SEQ ID NO: 187014 - DNA, 23 bp, Artificial sequence
  SiRNA target sequence
gatggatttttgcctacagaaaa

SEQ ID NO: 187015 - DNA, 23 bp, Artificial sequence
  SiRNA target sequence
atggatttttgcctacagaaaac

SEQ ID NO: 187016 - DNA, 23 bp, Artificial sequence
  SiRNA target sequence
tggatttttgcctacagaaaaca

SEQ ID NO: 187017 - DNA, 23 bp, Artificial sequence
  SiRNA target sequence
ggatttttgcctacagaaaacat

SEQ ID NO: 187018 - DNA, 23 bp, Artificial sequence
  SiRNA target sequence
gatttttgcctacagaaaacatg

SEQ ID NO: 187019 - DNA, 23 bp, Artificial sequence
  SiRNA target sequence
atttttgcctacagaaaacatga

SEQ ID NO: 187020 - DNA, 23 bp, Artificial sequence
  SiRNA target sequence
tttttgcctacagaaaacatgaa

SEQ ID NO: 187021 - DNA, 23 bp, Artificial sequence
  SiRNA target sequence
ttttgcctacagaaaacatgaaa

SEQ ID NO: 187022 - DNA, 23 bp, Artificial sequence
  SiRNA target sequence
tttgcctacagaaaacatgaaat

SEQ ID NO: 187023 - DNA, 23 bp, Artificial sequence
  SiRNA target sequence
ttgcctacagaaaacatgaaatt

SEQ ID NO: 187024 - DNA, 23 bp, Artificial sequence
  SiRNA target sequence
tgcctacagaaaacatgaaattt

SEQ ID NO: 187025 - DNA, 23 bp, Artificial sequence
  SiRNA target sequence
gcctacagaaaacatgaaattta

SEQ ID NO: 187026 - DNA, 23 bp, Artificial sequence
  SiRNA target sequence
cctacagaaaacatgaaatttag

SEQ ID NO: 187027 - DNA, 23 bp, Artificial sequence
  SiRNA target sequence
ctacagaaaacatgaaatttaga

SEQ ID NO: 187028 - DNA, 23 bp, Artificial sequence
  SiRNA target sequence
tacagaaaacatgaaatttagaa

SEQ ID NO: 187029 - DNA, 23 bp, Artificial sequence
  SiRNA target sequence
acagaaaacatgaaatttagaaa

SEQ ID NO: 187030 - DNA, 23 bp, Artificial sequence
  SiRNA target sequence
cagaaaacatgaaatttagaaat

SEQ ID NO: 187031 - DNA, 23 bp, Artificial sequence
  SiRNA target sequence
agaaaacatgaaatttagaaatt

SEQ ID NO: 187032 - DNA, 23 bp, Artificial sequence
  SiRNA target sequence
gaaaacatgaaatttagaaattc

SEQ ID NO: 187033 - DNA, 23 bp, Artificial sequence
  SiRNA target sequence
aaaacatgaaatttagaaattca

SEQ ID NO: 187034 - DNA, 23 bp, Artificial sequence
  SiRNA target sequence
aaacatgaaatttagaaattcag

SEQ ID NO: 187035 - DNA, 23 bp, Artificial sequence
  SiRNA target sequence
aacatgaaatttagaaattcaga

SEQ ID NO: 187036 - DNA, 23 bp, Artificial sequence
  SiRNA target sequence
acatgaaatttagaaattcagag

SEQ ID NO: 187037 - DNA, 23 bp, Artificial sequence
  SiRNA target sequence
catgaaatttagaaattcagagt

SEQ ID NO: 187038 - DNA, 23 bp, Artificial sequence
  SiRNA target sequence
atgaaatttagaaattcagagtt

SEQ ID NO: 187039 - DNA, 23 bp, Artificial sequence
  SiRNA target sequence
tgaaatttagaaattcagagtta

SEQ ID NO: 187040 - DNA, 23 bp, Artificial sequence
  SiRNA target sequence
gaaatttagaaattcagagttaa

SEQ ID NO: 187041 - DNA, 23 bp, Artificial sequence
  SiRNA target sequence
aaatttagaaattcagagttaaa

SEQ ID NO: 187042 - DNA, 23 bp, Artificial sequence
  SiRNA target sequence
aatttagaaattcagagttaaag

SEQ ID NO: 187043 - DNA, 23 bp, Artificial sequence
  SiRNA target sequence
atttagaaattcagagttaaagt

SEQ ID NO: 187044 - DNA, 23 bp, Artificial sequence
  SiRNA target sequence
tttagaaattcagagttaaagtt

SEQ ID NO: 187045 - DNA, 23 bp, Artificial sequence
  SiRNA target sequence
ttagaaattcagagttaaagttt

SEQ ID NO: 187046 - DNA, 23 bp, Artificial sequence
  SiRNA target sequence
tagaaattcagagttaaagttta

SEQ ID NO: 187047 - DNA, 23 bp, Artificial sequence
  SiRNA target sequence
agaaattcagagttaaagtttaa

SEQ ID NO: 187048 - DNA, 23 bp, Artificial sequence
  SiRNA target sequence
gaaattcagagttaaagtttaat

SEQ ID NO: 187049 - DNA, 23 bp, Artificial sequence
  SiRNA target sequence
aaattcagagttaaagtttaata

SEQ ID NO: 187050 - DNA, 23 bp, Artificial sequence
  SiRNA target sequence
aattcagagttaaagtttaatat

SEQ ID NO: 187051 - DNA, 23 bp, Artificial sequence
  SiRNA target sequence
attcagagttaaagtttaatatt

SEQ ID NO: 187052 - DNA, 23 bp, Artificial sequence
  SiRNA target sequence
ttcagagttaaagtttaatattt

SEQ ID NO: 187053 - DNA, 23 bp, Artificial sequence
  SiRNA target sequence
tcagagttaaagtttaatatttc

SEQ ID NO: 187054 - DNA, 23 bp, Artificial sequence
  SiRNA target sequence
cagagttaaagtttaatatttcg

SEQ ID NO: 187055 - DNA, 23 bp, Artificial sequence
  SiRNA target sequence
agagttaaagtttaatatttcgg

SEQ ID NO: 187056 - DNA, 23 bp, Artificial sequence
  SiRNA target sequence
gagttaaagtttaatatttcgga

SEQ ID NO: 187057 - DNA, 23 bp, Artificial sequence
  SiRNA target sequence
agttaaagtttaatatttcggaa

SEQ ID NO: 187058 - DNA, 23 bp, Artificial sequence
  SiRNA target sequence
gttaaagtttaatatttcggaaa

SEQ ID NO: 187059 - DNA, 23 bp, Artificial sequence
  SiRNA target sequence
ttaaagtttaatatttcggaaac

SEQ ID NO: 187060 - DNA, 23 bp, Artificial sequence
  SiRNA target sequence
taaagtttaatatttcggaaaca

SEQ ID NO: 187061 - DNA, 23 bp, Artificial sequence
  SiRNA target sequence
aaagtttaatatttcggaaacac

SEQ ID NO: 187062 - DNA, 23 bp, Artificial sequence
  SiRNA target sequence
aagtttaatatttcggaaacact

SEQ ID NO: 187063 - DNA, 23 bp, Artificial sequence
  SiRNA target sequence
agtttaatatttcggaaacactt

SEQ ID NO: 187064 - DNA, 23 bp, Artificial sequence
  SiRNA target sequence
gtttaatatttcggaaacacttg

SEQ ID NO: 187065 - DNA, 23 bp, Artificial sequence
  SiRNA target sequence
tttaatatttcggaaacacttga

SEQ ID NO: 187066 - DNA, 23 bp, Artificial sequence
  SiRNA target sequence
ttaatatttcggaaacacttgat

SEQ ID NO: 187067 - DNA, 23 bp, Artificial sequence
  SiRNA target sequence
taatatttcggaaacacttgata

SEQ ID NO: 187068 - DNA, 23 bp, Artificial sequence
  SiRNA target sequence
aatatttcggaaacacttgatag

SEQ ID NO: 187069 - DNA, 23 bp, Artificial sequence
  SiRNA target sequence
atatttcggaaacacttgatagt

SEQ ID NO: 187070 - DNA, 23 bp, Artificial sequence
  SiRNA target sequence
tatttcggaaacacttgatagta

SEQ ID NO: 187071 - DNA, 23 bp, Artificial sequence
  SiRNA target sequence
atttcggaaacacttgatagtat

SEQ ID NO: 187072 - DNA, 23 bp, Artificial sequence
  SiRNA target sequence
tttcggaaacacttgatagtatt

SEQ ID NO: 187073 - DNA, 23 bp, Artificial sequence
  SiRNA target sequence
ttcggaaacacttgatagtatta

SEQ ID NO: 187074 - DNA, 23 bp, Artificial sequence
  SiRNA target sequence
tcggaaacacttgatagtattat

SEQ ID NO: 187075 - DNA, 23 bp, Artificial sequence
  SiRNA target sequence
cggaaacacttgatagtattata

SEQ ID NO: 187076 - DNA, 23 bp, Artificial sequence
  SiRNA target sequence
ggaaacacttgatagtattatat

SEQ ID NO: 187077 - DNA, 23 bp, Artificial sequence
  SiRNA target sequence
gaaacacttgatagtattatatc

SEQ ID NO: 187078 - DNA, 23 bp, Artificial sequence
  SiRNA target sequence
aaacacttgatagtattatatct

SEQ ID NO: 187079 - DNA, 23 bp, Artificial sequence
  SiRNA target sequence
aacacttgatagtattatatcta

SEQ ID NO: 187080 - DNA, 23 bp, Artificial sequence
  SiRNA target sequence
acacttgatagtattatatctac

SEQ ID NO: 187081 - DNA, 23 bp, Artificial sequence
  SiRNA target sequence
cacttgatagtattatatctacc

SEQ ID NO: 187082 - DNA, 23 bp, Artificial sequence
  SiRNA target sequence
acttgatagtattatatctacca

SEQ ID NO: 187083 - DNA, 23 bp, Artificial sequence
  SiRNA target sequence
cttgatagtattatatctaccag

SEQ ID NO: 187084 - DNA, 23 bp, Artificial sequence
  SiRNA target sequence
ttgatagtattatatctaccaga

SEQ ID NO: 187085 - DNA, 23 bp, Artificial sequence
  SiRNA target sequence
tgatagtattatatctaccagag

SEQ ID NO: 187086 - DNA, 23 bp, Artificial sequence
  SiRNA target sequence
gatagtattatatctaccagaga

SEQ ID NO: 187087 - DNA, 23 bp, Artificial sequence
  SiRNA target sequence
atagtattatatctaccagagac

SEQ ID NO: 187088 - DNA, 23 bp, Artificial sequence
  SiRNA target sequence
tagtattatatctaccagagacc

SEQ ID NO: 187089 - DNA, 23 bp, Artificial sequence
  SiRNA target sequence
agtattatatctaccagagacca

SEQ ID NO: 187090 - DNA, 23 bp, Artificial sequence
  SiRNA target sequence
gtattatatctaccagagaccag

SEQ ID NO: 187091 - DNA, 23 bp, Artificial sequence
  SiRNA target sequence
tattatatctaccagagaccagt

SEQ ID NO: 187092 - DNA, 23 bp, Artificial sequence
  SiRNA target sequence
attatatctaccagagaccagta

SEQ ID NO: 187093 - DNA, 23 bp, Artificial sequence
  SiRNA target sequence
ttatatctaccagagaccagtat

SEQ ID NO: 187094 - DNA, 23 bp, Artificial sequence
  SiRNA target sequence
tatatctaccagagaccagtatc

SEQ ID NO: 187095 - DNA, 23 bp, Artificial sequence
  SiRNA target sequence
atatctaccagagaccagtatca

SEQ ID NO: 187096 - DNA, 23 bp, Artificial sequence
  SiRNA target sequence
tatctaccagagaccagtatcat

SEQ ID NO: 187097 - DNA, 23 bp, Artificial sequence
  SiRNA target sequence
atctaccagagaccagtatcatt

SEQ ID NO: 187098 - DNA, 23 bp, Artificial sequence
  SiRNA target sequence
tctaccagagaccagtatcatta

SEQ ID NO: 187099 - DNA, 23 bp, Artificial sequence
  SiRNA target sequence
ctaccagagaccagtatcattat

SEQ ID NO: 187100 - DNA, 23 bp, Artificial sequence
  SiRNA target sequence
taccagagaccagtatcattatc

SEQ ID NO: 187101 - DNA, 23 bp, Artificial sequence
  SiRNA target sequence
accagagaccagtatcattatcc

SEQ ID NO: 187102 - DNA, 23 bp, Artificial sequence
  SiRNA target sequence
ccagagaccagtatcattatccc

SEQ ID NO: 187103 - DNA, 23 bp, Artificial sequence
  SiRNA target sequence
cagagaccagtatcattatccca

SEQ ID NO: 187104 - DNA, 23 bp, Artificial sequence
  SiRNA target sequence
agagaccagtatcattatcccaa

SEQ ID NO: 187105 - DNA, 23 bp, Artificial sequence
  SiRNA target sequence
gagaccagtatcattatcccaat

SEQ ID NO: 187106 - DNA, 23 bp, Artificial sequence
  SiRNA target sequence
agaccagtatcattatcccaatt

SEQ ID NO: 187107 - DNA, 23 bp, Artificial sequence
  SiRNA target sequence
gaccagtatcattatcccaattt

SEQ ID NO: 187108 - DNA, 23 bp, Artificial sequence
  SiRNA target sequence
accagtatcattatcccaatttg

SEQ ID NO: 187109 - DNA, 23 bp, Artificial sequence
  SiRNA target sequence
ccagtatcattatcccaatttga

SEQ ID NO: 187110 - DNA, 23 bp, Artificial sequence
  SiRNA target sequence
cagtatcattatcccaatttgat

SEQ ID NO: 187111 - DNA, 23 bp, Artificial sequence
  SiRNA target sequence
agtatcattatcccaatttgata

SEQ ID NO: 187112 - DNA, 23 bp, Artificial sequence
  SiRNA target sequence
gtatcattatcccaatttgataa

SEQ ID NO: 187113 - DNA, 23 bp, Artificial sequence
  SiRNA target sequence
tatcattatcccaatttgataaa

SEQ ID NO: 187114 - DNA, 23 bp, Artificial sequence
  SiRNA target sequence
atcattatcccaatttgataaaa

SEQ ID NO: 187115 - DNA, 23 bp, Artificial sequence
  SiRNA target sequence
tcattatcccaatttgataaaaa

SEQ ID NO: 187116 - DNA, 23 bp, Artificial sequence
  SiRNA target sequence
cattatcccaatttgataaaaac

SEQ ID NO: 187117 - DNA, 23 bp, Artificial sequence
  SiRNA target sequence
attatcccaatttgataaaaaca

SEQ ID NO: 187118 - DNA, 23 bp, Artificial sequence
  SiRNA target sequence
ttatcccaatttgataaaaacat

SEQ ID NO: 187119 - DNA, 23 bp, Artificial sequence
  SiRNA target sequence
tatcccaatttgataaaaacata

SEQ ID NO: 187120 - DNA, 23 bp, Artificial sequence
  SiRNA target sequence
atcccaatttgataaaaacatat

SEQ ID NO: 187121 - DNA, 23 bp, Artificial sequence
  SiRNA target sequence
tcccaatttgataaaaacatatc

SEQ ID NO: 187122 - DNA, 23 bp, Artificial sequence
  SiRNA target sequence
cccaatttgataaaaacatatcc

SEQ ID NO: 187123 - DNA, 23 bp, Artificial sequence
  SiRNA target sequence
ccaatttgataaaaacatatcca

SEQ ID NO: 187124 - DNA, 23 bp, Artificial sequence
  SiRNA target sequence
caatttgataaaaacatatccaa

SEQ ID NO: 187125 - DNA, 23 bp, Artificial sequence
  SiRNA target sequence
aatttgataaaaacatatccaaa

SEQ ID NO: 187126 - DNA, 23 bp, Artificial sequence
  SiRNA target sequence
atttgataaaaacatatccaaat

SEQ ID NO: 187127 - DNA, 23 bp, Artificial sequence
  SiRNA target sequence
tttgataaaaacatatccaaatt

SEQ ID NO: 187128 - DNA, 23 bp, Artificial sequence
  SiRNA target sequence
ttgataaaaacatatccaaattt

SEQ ID NO: 187129 - DNA, 23 bp, Artificial sequence
  SiRNA target sequence
tgataaaaacatatccaaatttt

SEQ ID NO: 187130 - DNA, 23 bp, Artificial sequence
  SiRNA target sequence
gataaaaacatatccaaatttta

SEQ ID NO: 187131 - DNA, 23 bp, Artificial sequence
  SiRNA target sequence
ataaaaacatatccaaattttac

SEQ ID NO: 187132 - DNA, 23 bp, Artificial sequence
  SiRNA target sequence
taaaaacatatccaaattttacg

SEQ ID NO: 187133 - DNA, 23 bp, Artificial sequence
  SiRNA target sequence
aaaaacatatccaaattttacgc

SEQ ID NO: 187134 - DNA, 23 bp, Artificial sequence
  SiRNA target sequence
aaaacatatccaaattttacgct

SEQ ID NO: 187135 - DNA, 23 bp, Artificial sequence
  SiRNA target sequence
aaacatatccaaattttacgctt

SEQ ID NO: 187136 - DNA, 23 bp, Artificial sequence
  SiRNA target sequence
aacatatccaaattttacgctta

SEQ ID NO: 187137 - DNA, 23 bp, Artificial sequence
  SiRNA target sequence
acatatccaaattttacgcttaa

SEQ ID NO: 187138 - DNA, 23 bp, Artificial sequence
  SiRNA target sequence
catatccaaattttacgcttaaa

SEQ ID NO: 187139 - DNA, 23 bp, Artificial sequence
  SiRNA target sequence
atatccaaattttacgcttaaag

SEQ ID NO: 187140 - DNA, 23 bp, Artificial sequence
  SiRNA target sequence
tatccaaattttacgcttaaagt

SEQ ID NO: 187141 - DNA, 23 bp, Artificial sequence
  SiRNA target sequence
atccaaattttacgcttaaagtt

SEQ ID NO: 187142 - DNA, 23 bp, Artificial sequence
  SiRNA target sequence
tccaaattttacgcttaaagttg

SEQ ID NO: 187143 - DNA, 23 bp, Artificial sequence
  SiRNA target sequence
ccaaattttacgcttaaagttga

SEQ ID NO: 187144 - DNA, 23 bp, Artificial sequence
  SiRNA target sequence
caaattttacgcttaaagttgaa

SEQ ID NO: 187145 - DNA, 23 bp, Artificial sequence
  SiRNA target sequence
aaattttacgcttaaagttgaag

SEQ ID NO: 187146 - DNA, 23 bp, Artificial sequence
  SiRNA target sequence
aattttacgcttaaagttgaagg

SEQ ID NO: 187147 - DNA, 23 bp, Artificial sequence
  SiRNA target sequence
attttacgcttaaagttgaaggc

SEQ ID NO: 187148 - DNA, 23 bp, Artificial sequence
  SiRNA target sequence
ttttacgcttaaagttgaaggcg

SEQ ID NO: 187149 - DNA, 23 bp, Artificial sequence
  SiRNA target sequence
tttacgcttaaagttgaaggcgg

SEQ ID NO: 187150 - DNA, 23 bp, Artificial sequence
  SiRNA target sequence
ttacgcttaaagttgaaggcggt

SEQ ID NO: 187151 - DNA, 23 bp, Artificial sequence
  SiRNA target sequence
tacgcttaaagttgaaggcggta

SEQ ID NO: 187152 - DNA, 23 bp, Artificial sequence
  SiRNA target sequence
acgcttaaagttgaaggcggtaa

SEQ ID NO: 187153 - DNA, 23 bp, Artificial sequence
  SiRNA target sequence
cgcttaaagttgaaggcggtaac

SEQ ID NO: 187154 - DNA, 23 bp, Artificial sequence
  SiRNA target sequence
gcttaaagttgaaggcggtaact

SEQ ID NO: 187155 - DNA, 23 bp, Artificial sequence
  SiRNA target sequence
cttaaagttgaaggcggtaactt

SEQ ID NO: 187156 - DNA, 23 bp, Artificial sequence
  SiRNA target sequence
ttaaagttgaaggcggtaacttt

SEQ ID NO: 187157 - DNA, 23 bp, Artificial sequence
  SiRNA target sequence
taaagttgaaggcggtaactttt

SEQ ID NO: 187158 - DNA, 23 bp, Artificial sequence
  SiRNA target sequence
aaagttgaaggcggtaacttttc

SEQ ID NO: 187159 - DNA, 23 bp, Artificial sequence
  SiRNA target sequence
aagttgaaggcggtaacttttca

SEQ ID NO: 187160 - DNA, 23 bp, Artificial sequence
  SiRNA target sequence
agttgaaggcggtaacttttcag

SEQ ID NO: 187161 - DNA, 23 bp, Artificial sequence
  SiRNA target sequence
gttgaaggcggtaacttttcaga

SEQ ID NO: 187162 - DNA, 23 bp, Artificial sequence
  SiRNA target sequence
ttgaaggcggtaacttttcagat

SEQ ID NO: 187163 - DNA, 23 bp, Artificial sequence
  SiRNA target sequence
tgaaggcggtaacttttcagatt

SEQ ID NO: 187164 - DNA, 23 bp, Artificial sequence
  SiRNA target sequence
gaaggcggtaacttttcagattc

SEQ ID NO: 187165 - DNA, 23 bp, Artificial sequence
  SiRNA target sequence
aaggcggtaacttttcagattct

SEQ ID NO: 187166 - DNA, 23 bp, Artificial sequence
  SiRNA target sequence
aggcggtaacttttcagattctg

SEQ ID NO: 187167 - DNA, 23 bp, Artificial sequence
  SiRNA target sequence
ggcggtaacttttcagattctga

SEQ ID NO: 187168 - DNA, 23 bp, Artificial sequence
  SiRNA target sequence
gcggtaacttttcagattctgaa

SEQ ID NO: 187169 - DNA, 23 bp, Artificial sequence
  SiRNA target sequence
cggtaacttttcagattctgaaa

SEQ ID NO: 187170 - DNA, 23 bp, Artificial sequence
  SiRNA target sequence
ggtaacttttcagattctgaaat

SEQ ID NO: 187171 - DNA, 23 bp, Artificial sequence
  SiRNA target sequence
gtaacttttcagattctgaaatt

SEQ ID NO: 187172 - DNA, 23 bp, Artificial sequence
  SiRNA target sequence
taacttttcagattctgaaattg

SEQ ID NO: 187173 - DNA, 23 bp, Artificial sequence
  SiRNA target sequence
aacttttcagattctgaaattgt

SEQ ID NO: 187174 - DNA, 23 bp, Artificial sequence
  SiRNA target sequence
acttttcagattctgaaattgtt

SEQ ID NO: 187175 - DNA, 23 bp, Artificial sequence
  SiRNA target sequence
cttttcagattctgaaattgttg

SEQ ID NO: 187176 - DNA, 23 bp, Artificial sequence
  SiRNA target sequence
ttttcagattctgaaattgttgt

SEQ ID NO: 187177 - DNA, 23 bp, Artificial sequence
  SiRNA target sequence
tttcagattctgaaattgttgta

SEQ ID NO: 187178 - DNA, 23 bp, Artificial sequence
  SiRNA target sequence
ttcagattctgaaattgttgtat

SEQ ID NO: 187179 - DNA, 23 bp, Artificial sequence
  SiRNA target sequence
tcagattctgaaattgttgtatt

SEQ ID NO: 187180 - DNA, 23 bp, Artificial sequence
  SiRNA target sequence
cagattctgaaattgttgtattt

SEQ ID NO: 187181 - DNA, 23 bp, Artificial sequence
  SiRNA target sequence
agattctgaaattgttgtatttc

SEQ ID NO: 187182 - DNA, 23 bp, Artificial sequence
  SiRNA target sequence
gattctgaaattgttgtatttct

SEQ ID NO: 187183 - DNA, 23 bp, Artificial sequence
  SiRNA target sequence
attctgaaattgttgtatttctt

SEQ ID NO: 187184 - DNA, 23 bp, Artificial sequence
  SiRNA target sequence
ttctgaaattgttgtatttcttg

SEQ ID NO: 187185 - DNA, 23 bp, Artificial sequence
  SiRNA target sequence
tctgaaattgttgtatttcttgg

SEQ ID NO: 187186 - DNA, 23 bp, Artificial sequence
  SiRNA target sequence
ctgaaattgttgtatttcttggt

SEQ ID NO: 187187 - DNA, 23 bp, Artificial sequence
  SiRNA target sequence
tgaaattgttgtatttcttggtg

SEQ ID NO: 187188 - DNA, 23 bp, Artificial sequence
  SiRNA target sequence
gaaattgttgtatttcttggtga

SEQ ID NO: 187189 - DNA, 23 bp, Artificial sequence
  SiRNA target sequence
aaattgttgtatttcttggtgaa

SEQ ID NO: 187190 - DNA, 23 bp, Artificial sequence
  SiRNA target sequence
aattgttgtatttcttggtgaaa

SEQ ID NO: 187191 - DNA, 23 bp, Artificial sequence
  SiRNA target sequence
attgttgtatttcttggtgaaaa

SEQ ID NO: 187192 - DNA, 23 bp, Artificial sequence
  SiRNA target sequence
ttgttgtatttcttggtgaaaat

SEQ ID NO: 187193 - DNA, 23 bp, Artificial sequence
  SiRNA target sequence
tgttgtatttcttggtgaaaatg

SEQ ID NO: 187194 - DNA, 23 bp, Artificial sequence
  SiRNA target sequence
gttgtatttcttggtgaaaatgg

SEQ ID NO: 187195 - DNA, 23 bp, Artificial sequence
  SiRNA target sequence
ttgtatttcttggtgaaaatgga

SEQ ID NO: 187196 - DNA, 23 bp, Artificial sequence
  SiRNA target sequence
tgtatttcttggtgaaaatggaa

SEQ ID NO: 187197 - DNA, 23 bp, Artificial sequence
  SiRNA target sequence
gtatttcttggtgaaaatggaat

SEQ ID NO: 187198 - DNA, 23 bp, Artificial sequence
  SiRNA target sequence
tatttcttggtgaaaatggaatg

SEQ ID NO: 187199 - DNA, 23 bp, Artificial sequence
  SiRNA target sequence
atttcttggtgaaaatggaatgg

SEQ ID NO: 187200 - DNA, 23 bp, Artificial sequence
  SiRNA target sequence
tttcttggtgaaaatggaatggg

SEQ ID NO: 187201 - DNA, 23 bp, Artificial sequence
  SiRNA target sequence
ttcttggtgaaaatggaatgggc

SEQ ID NO: 187202 - DNA, 23 bp, Artificial sequence
  SiRNA target sequence
tcttggtgaaaatggaatgggca

SEQ ID NO: 187203 - DNA, 23 bp, Artificial sequence
  SiRNA target sequence
cttggtgaaaatggaatgggcaa

SEQ ID NO: 187204 - DNA, 23 bp, Artificial sequence
  SiRNA target sequence
ttggtgaaaatggaatgggcaaa

SEQ ID NO: 187205 - DNA, 23 bp, Artificial sequence
  SiRNA target sequence
tggtgaaaatggaatgggcaaaa

SEQ ID NO: 187206 - DNA, 23 bp, Artificial sequence
  SiRNA target sequence
ggtgaaaatggaatgggcaaaac

SEQ ID NO: 187207 - DNA, 23 bp, Artificial sequence
  SiRNA target sequence
gtgaaaatggaatgggcaaaact

SEQ ID NO: 187208 - DNA, 23 bp, Artificial sequence
  SiRNA target sequence
tgaaaatggaatgggcaaaacta

SEQ ID NO: 187209 - DNA, 23 bp, Artificial sequence
  SiRNA target sequence
gaaaatggaatgggcaaaactac

SEQ ID NO: 187210 - DNA, 23 bp, Artificial sequence
  SiRNA target sequence
aaaatggaatgggcaaaactact

SEQ ID NO: 187211 - DNA, 23 bp, Artificial sequence
  SiRNA target sequence
aaatggaatgggcaaaactactt

SEQ ID NO: 187212 - DNA, 23 bp, Artificial sequence
  SiRNA target sequence
aatggaatgggcaaaactacttt

SEQ ID NO: 187213 - DNA, 23 bp, Artificial sequence
  SiRNA target sequence
atggaatgggcaaaactacttta

SEQ ID NO: 187214 - DNA, 23 bp, Artificial sequence
  SiRNA target sequence
tggaatgggcaaaactactttag

SEQ ID NO: 187215 - DNA, 23 bp, Artificial sequence
  SiRNA target sequence
ggaatgggcaaaactactttagt

SEQ ID NO: 187216 - DNA, 23 bp, Artificial sequence
  SiRNA target sequence
gaatgggcaaaactactttagta

SEQ ID NO: 187217 - DNA, 23 bp, Artificial sequence
  SiRNA target sequence
aatgggcaaaactactttagtag

SEQ ID NO: 187218 - DNA, 23 bp, Artificial sequence
  SiRNA target sequence
atgggcaaaactactttagtagg

SEQ ID NO: 187219 - DNA, 23 bp, Artificial sequence
  SiRNA target sequence
tgggcaaaactactttagtaggt

SEQ ID NO: 187220 - DNA, 23 bp, Artificial sequence
  SiRNA target sequence
gggcaaaactactttagtaggtt

SEQ ID NO: 187221 - DNA, 23 bp, Artificial sequence
  SiRNA target sequence
ggcaaaactactttagtaggttt

SEQ ID NO: 187222 - DNA, 23 bp, Artificial sequence
  SiRNA target sequence
gcaaaactactttagtaggtttg

SEQ ID NO: 187223 - DNA, 23 bp, Artificial sequence
  SiRNA target sequence
caaaactactttagtaggtttga

SEQ ID NO: 187224 - DNA, 23 bp, Artificial sequence
  SiRNA target sequence
aaaactactttagtaggtttgat

SEQ ID NO: 187225 - DNA, 23 bp, Artificial sequence
  SiRNA target sequence
aaactactttagtaggtttgatt

SEQ ID NO: 187226 - DNA, 23 bp, Artificial sequence
  SiRNA target sequence
aactactttagtaggtttgattt

SEQ ID NO: 187227 - DNA, 23 bp, Artificial sequence
  SiRNA target sequence
actactttagtaggtttgatttc

SEQ ID NO: 187228 - DNA, 23 bp, Artificial sequence
  SiRNA target sequence
ctactttagtaggtttgatttcg

SEQ ID NO: 187229 - DNA, 23 bp, Artificial sequence
  SiRNA target sequence
tactttagtaggtttgatttcgg

SEQ ID NO: 187230 - DNA, 23 bp, Artificial sequence
  SiRNA target sequence
actttagtaggtttgatttcggg

SEQ ID NO: 187231 - DNA, 23 bp, Artificial sequence
  SiRNA target sequence
ctttagtaggtttgatttcgggg

SEQ ID NO: 187232 - DNA, 23 bp, Artificial sequence
  SiRNA target sequence
tttagtaggtttgatttcggggt

SEQ ID NO: 187233 - DNA, 23 bp, Artificial sequence
  SiRNA target sequence
ttagtaggtttgatttcggggtt

SEQ ID NO: 187234 - DNA, 23 bp, Artificial sequence
  SiRNA target sequence
tagtaggtttgatttcggggtta

SEQ ID NO: 187235 - DNA, 23 bp, Artificial sequence
  SiRNA target sequence
agtaggtttgatttcggggttaa

SEQ ID NO: 187236 - DNA, 23 bp, Artificial sequence
  SiRNA target sequence
gtaggtttgatttcggggttaat

SEQ ID NO: 187237 - DNA, 23 bp, Artificial sequence
  SiRNA target sequence
taggtttgatttcggggttaatt

SEQ ID NO: 187238 - DNA, 23 bp, Artificial sequence
  SiRNA target sequence
aggtttgatttcggggttaatta

SEQ ID NO: 187239 - DNA, 23 bp, Artificial sequence
  SiRNA target sequence
ggtttgatttcggggttaattaa

SEQ ID NO: 187240 - DNA, 23 bp, Artificial sequence
  SiRNA target sequence
gtttgatttcggggttaattaaa

SEQ ID NO: 187241 - DNA, 23 bp, Artificial sequence
  SiRNA target sequence
tttgatttcggggttaattaaag

SEQ ID NO: 187242 - DNA, 23 bp, Artificial sequence
  SiRNA target sequence
ttgatttcggggttaattaaaga

SEQ ID NO: 187243 - DNA, 23 bp, Artificial sequence
  SiRNA target sequence
tgatttcggggttaattaaagat

SEQ ID NO: 187244 - DNA, 23 bp, Artificial sequence
  SiRNA target sequence
gatttcggggttaattaaagatg

SEQ ID NO: 187245 - DNA, 23 bp, Artificial sequence
  SiRNA target sequence
atttcggggttaattaaagatga

SEQ ID NO: 187246 - DNA, 23 bp, Artificial sequence
  SiRNA target sequence
tttcggggttaattaaagatgat

SEQ ID NO: 187247 - DNA, 23 bp, Artificial sequence
  SiRNA target sequence
ttcggggttaattaaagatgata

SEQ ID NO: 187248 - DNA, 23 bp, Artificial sequence
  SiRNA target sequence
tcggggttaattaaagatgataa

SEQ ID NO: 187249 - DNA, 23 bp, Artificial sequence
  SiRNA target sequence
cggggttaattaaagatgataac

SEQ ID NO: 187250 - DNA, 23 bp, Artificial sequence
  SiRNA target sequence
ggggttaattaaagatgataacg

SEQ ID NO: 187251 - DNA, 23 bp, Artificial sequence
  SiRNA target sequence
gggttaattaaagatgataacgg

SEQ ID NO: 187252 - DNA, 23 bp, Artificial sequence
  SiRNA target sequence
ggttaattaaagatgataacggg

SEQ ID NO: 187253 - DNA, 23 bp, Artificial sequence
  SiRNA target sequence
gttaattaaagatgataacgggg

SEQ ID NO: 187254 - DNA, 23 bp, Artificial sequence
  SiRNA target sequence
ttaattaaagatgataacgggga

SEQ ID NO: 187255 - DNA, 23 bp, Artificial sequence
  SiRNA target sequence
taattaaagatgataacggggaa

SEQ ID NO: 187256 - DNA, 23 bp, Artificial sequence
  SiRNA target sequence
aattaaagatgataacggggaag

SEQ ID NO: 187257 - DNA, 23 bp, Artificial sequence
  SiRNA target sequence
attaaagatgataacggggaaga

SEQ ID NO: 187258 - DNA, 23 bp, Artificial sequence
  SiRNA target sequence
ttaaagatgataacggggaagag

SEQ ID NO: 187259 - DNA, 23 bp, Artificial sequence
  SiRNA target sequence
taaagatgataacggggaagagt

SEQ ID NO: 187260 - DNA, 23 bp, Artificial sequence
  SiRNA target sequence
aaagatgataacggggaagagtt

SEQ ID NO: 187261 - DNA, 23 bp, Artificial sequence
  SiRNA target sequence
aagatgataacggggaagagttc

SEQ ID NO: 187262 - DNA, 23 bp, Artificial sequence
  SiRNA target sequence
agatgataacggggaagagttcg

SEQ ID NO: 187263 - DNA, 23 bp, Artificial sequence
  SiRNA target sequence
gatgataacggggaagagttcgg

SEQ ID NO: 187264 - DNA, 23 bp, Artificial sequence
  SiRNA target sequence
atgataacggggaagagttcggt

SEQ ID NO: 187265 - DNA, 23 bp, Artificial sequence
  SiRNA target sequence
tgataacggggaagagttcggtt

SEQ ID NO: 187266 - DNA, 23 bp, Artificial sequence
  SiRNA target sequence
gataacggggaagagttcggttt

SEQ ID NO: 187267 - DNA, 23 bp, Artificial sequence
  SiRNA target sequence
ataacggggaagagttcggtttg

SEQ ID NO: 187268 - DNA, 23 bp, Artificial sequence
  SiRNA target sequence
taacggggaagagttcggtttgt

SEQ ID NO: 187269 - DNA, 23 bp, Artificial sequence
  SiRNA target sequence
aacggggaagagttcggtttgtt

SEQ ID NO: 187270 - DNA, 23 bp, Artificial sequence
  SiRNA target sequence
acggggaagagttcggtttgttg

SEQ ID NO: 187271 - DNA, 23 bp, Artificial sequence
  SiRNA target sequence
cggggaagagttcggtttgttgt

SEQ ID NO: 187272 - DNA, 23 bp, Artificial sequence
  SiRNA target sequence
ggggaagagttcggtttgttgtc

SEQ ID NO: 187273 - DNA, 23 bp, Artificial sequence
  SiRNA target sequence
gggaagagttcggtttgttgtca

SEQ ID NO: 187274 - DNA, 23 bp, Artificial sequence
  SiRNA target sequence
ggaagagttcggtttgttgtcat

SEQ ID NO: 187275 - DNA, 23 bp, Artificial sequence
  SiRNA target sequence
gaagagttcggtttgttgtcata

SEQ ID NO: 187276 - DNA, 23 bp, Artificial sequence
  SiRNA target sequence
aagagttcggtttgttgtcatat

SEQ ID NO: 187277 - DNA, 23 bp, Artificial sequence
  SiRNA target sequence
agagttcggtttgttgtcatata

SEQ ID NO: 187278 - DNA, 23 bp, Artificial sequence
  SiRNA target sequence
gagttcggtttgttgtcatatag

SEQ ID NO: 187279 - DNA, 23 bp, Artificial sequence
  SiRNA target sequence
agttcggtttgttgtcatatagt

SEQ ID NO: 187280 - DNA, 23 bp, Artificial sequence
  SiRNA target sequence
gttcggtttgttgtcatatagtc

SEQ ID NO: 187281 - DNA, 23 bp, Artificial sequence
  SiRNA target sequence
ttcggtttgttgtcatatagtct

SEQ ID NO: 187282 - DNA, 23 bp, Artificial sequence
  SiRNA target sequence
tcggtttgttgtcatatagtctt

SEQ ID NO: 187283 - DNA, 23 bp, Artificial sequence
  SiRNA target sequence
cggtttgttgtcatatagtctta

SEQ ID NO: 187284 - DNA, 23 bp, Artificial sequence
  SiRNA target sequence
ggtttgttgtcatatagtcttaa

SEQ ID NO: 187285 - DNA, 23 bp, Artificial sequence
  SiRNA target sequence
gtttgttgtcatatagtcttaaa

SEQ ID NO: 187286 - DNA, 23 bp, Artificial sequence
  SiRNA target sequence
tttgttgtcatatagtcttaaac

SEQ ID NO: 187287 - DNA, 23 bp, Artificial sequence
  SiRNA target sequence
ttgttgtcatatagtcttaaacc

SEQ ID NO: 187288 - DNA, 23 bp, Artificial sequence
  SiRNA target sequence
tgttgtcatatagtcttaaaccg

SEQ ID NO: 187289 - DNA, 23 bp, Artificial sequence
  SiRNA target sequence
gttgtcatatagtcttaaaccgc

SEQ ID NO: 187290 - DNA, 23 bp, Artificial sequence
  SiRNA target sequence
ttgtcatatagtcttaaaccgca

SEQ ID NO: 187291 - DNA, 23 bp, Artificial sequence
  SiRNA target sequence
tgtcatatagtcttaaaccgcaa

SEQ ID NO: 187292 - DNA, 23 bp, Artificial sequence
  SiRNA target sequence
gtcatatagtcttaaaccgcaaa

SEQ ID NO: 187293 - DNA, 23 bp, Artificial sequence
  SiRNA target sequence
tcatatagtcttaaaccgcaaaa

SEQ ID NO: 187294 - DNA, 23 bp, Artificial sequence
  SiRNA target sequence
catatagtcttaaaccgcaaaaa

SEQ ID NO: 187295 - DNA, 23 bp, Artificial sequence
  SiRNA target sequence
atatagtcttaaaccgcaaaaaa

SEQ ID NO: 187296 - DNA, 23 bp, Artificial sequence
  SiRNA target sequence
tatagtcttaaaccgcaaaaaat

SEQ ID NO: 187297 - DNA, 23 bp, Artificial sequence
  SiRNA target sequence
atagtcttaaaccgcaaaaaatc

SEQ ID NO: 187298 - DNA, 23 bp, Artificial sequence
  SiRNA target sequence
tagtcttaaaccgcaaaaaatca

SEQ ID NO: 187299 - DNA, 23 bp, Artificial sequence
  SiRNA target sequence
agtcttaaaccgcaaaaaatcat

SEQ ID NO: 187300 - DNA, 23 bp, Artificial sequence
  SiRNA target sequence
gtcttaaaccgcaaaaaatcata

SEQ ID NO: 187301 - DNA, 23 bp, Artificial sequence
  SiRNA target sequence
tcttaaaccgcaaaaaatcatac

SEQ ID NO: 187302 - DNA, 23 bp, Artificial sequence
  SiRNA target sequence
cttaaaccgcaaaaaatcatacc

SEQ ID NO: 187303 - DNA, 23 bp, Artificial sequence
  SiRNA target sequence
ttaaaccgcaaaaaatcataccg

SEQ ID NO: 187304 - DNA, 23 bp, Artificial sequence
  SiRNA target sequence
taaaccgcaaaaaatcataccga

SEQ ID NO: 187305 - DNA, 23 bp, Artificial sequence
  SiRNA target sequence
aaaccgcaaaaaatcataccgaa

SEQ ID NO: 187306 - DNA, 23 bp, Artificial sequence
  SiRNA target sequence
aaccgcaaaaaatcataccgaaa

SEQ ID NO: 187307 - DNA, 23 bp, Artificial sequence
  SiRNA target sequence
accgcaaaaaatcataccgaaat

SEQ ID NO: 187308 - DNA, 23 bp, Artificial sequence
  SiRNA target sequence
ccgcaaaaaatcataccgaaata

SEQ ID NO: 187309 - DNA, 23 bp, Artificial sequence
  SiRNA target sequence
cgcaaaaaatcataccgaaatac

SEQ ID NO: 187310 - DNA, 23 bp, Artificial sequence
  SiRNA target sequence
gcaaaaaatcataccgaaataca

SEQ ID NO: 187311 - DNA, 23 bp, Artificial sequence
  SiRNA target sequence
caaaaaatcataccgaaatacaa

SEQ ID NO: 187312 - DNA, 23 bp, Artificial sequence
  SiRNA target sequence
aaaaaatcataccgaaatacaaa

SEQ ID NO: 187313 - DNA, 23 bp, Artificial sequence
  SiRNA target sequence
aaaaatcataccgaaatacaaag

SEQ ID NO: 187314 - DNA, 23 bp, Artificial sequence
  SiRNA target sequence
aaaatcataccgaaatacaaagg

SEQ ID NO: 187315 - DNA, 23 bp, Artificial sequence
  SiRNA target sequence
aaatcataccgaaatacaaagga

SEQ ID NO: 187316 - DNA, 23 bp, Artificial sequence
  SiRNA target sequence
aatcataccgaaatacaaaggaa

SEQ ID NO: 187317 - DNA, 23 bp, Artificial sequence
  SiRNA target sequence
atcataccgaaatacaaaggaac

SEQ ID NO: 187318 - DNA, 23 bp, Artificial sequence
  SiRNA target sequence
tcataccgaaatacaaaggaaca

SEQ ID NO: 187319 - DNA, 23 bp, Artificial sequence
  SiRNA target sequence
cataccgaaatacaaaggaacag

SEQ ID NO: 187320 - DNA, 23 bp, Artificial sequence
  SiRNA target sequence
ataccgaaatacaaaggaacagt

SEQ ID NO: 187321 - DNA, 23 bp, Artificial sequence
  SiRNA target sequence
taccgaaatacaaaggaacagtt

SEQ ID NO: 187322 - DNA, 23 bp, Artificial sequence
  SiRNA target sequence
accgaaatacaaaggaacagtta

SEQ ID NO: 187323 - DNA, 23 bp, Artificial sequence
  SiRNA target sequence
ccgaaatacaaaggaacagttag

SEQ ID NO: 187324 - DNA, 23 bp, Artificial sequence
  SiRNA target sequence
cgaaatacaaaggaacagttaga

SEQ ID NO: 187325 - DNA, 23 bp, Artificial sequence
  SiRNA target sequence
gaaatacaaaggaacagttagag

SEQ ID NO: 187326 - DNA, 23 bp, Artificial sequence
  SiRNA target sequence
aaatacaaaggaacagttagaga

SEQ ID NO: 187327 - DNA, 23 bp, Artificial sequence
  SiRNA target sequence
aatacaaaggaacagttagagat

SEQ ID NO: 187328 - DNA, 23 bp, Artificial sequence
  SiRNA target sequence
atacaaaggaacagttagagatc

SEQ ID NO: 187329 - DNA, 23 bp, Artificial sequence
  SiRNA target sequence
tacaaaggaacagttagagatct

SEQ ID NO: 187330 - DNA, 23 bp, Artificial sequence
  SiRNA target sequence
acaaaggaacagttagagatctt

SEQ ID NO: 187331 - DNA, 23 bp, Artificial sequence
  SiRNA target sequence
caaaggaacagttagagatcttt

SEQ ID NO: 187332 - DNA, 23 bp, Artificial sequence
  SiRNA target sequence
aaaggaacagttagagatctttt

SEQ ID NO: 187333 - DNA, 23 bp, Artificial sequence
  SiRNA target sequence
aaggaacagttagagatcttttt

SEQ ID NO: 187334 - DNA, 23 bp, Artificial sequence
  SiRNA target sequence
aggaacagttagagatcttttta

SEQ ID NO: 187335 - DNA, 23 bp, Artificial sequence
  SiRNA target sequence
ggaacagttagagatctttttat

SEQ ID NO: 187336 - DNA, 23 bp, Artificial sequence
  SiRNA target sequence
gaacagttagagatctttttatg

SEQ ID NO: 187337 - DNA, 23 bp, Artificial sequence
  SiRNA target sequence
aacagttagagatctttttatgt

SEQ ID NO: 187338 - DNA, 23 bp, Artificial sequence
  SiRNA target sequence
acagttagagatctttttatgtc

SEQ ID NO: 187339 - DNA, 23 bp, Artificial sequence
  SiRNA target sequence
cagttagagatctttttatgtca

SEQ ID NO: 187340 - DNA, 23 bp, Artificial sequence
  SiRNA target sequence
agttagagatctttttatgtcaa

SEQ ID NO: 187341 - DNA, 23 bp, Artificial sequence
  SiRNA target sequence
gttagagatctttttatgtcaaa

SEQ ID NO: 187342 - DNA, 23 bp, Artificial sequence
  SiRNA target sequence
ttagagatctttttatgtcaaaa

SEQ ID NO: 187343 - DNA, 23 bp, Artificial sequence
  SiRNA target sequence
tagagatctttttatgtcaaaaa

SEQ ID NO: 187344 - DNA, 23 bp, Artificial sequence
  SiRNA target sequence
agagatctttttatgtcaaaaat

SEQ ID NO: 187345 - DNA, 23 bp, Artificial sequence
  SiRNA target sequence
gagatctttttatgtcaaaaatt

SEQ ID NO: 187346 - DNA, 23 bp, Artificial sequence
  SiRNA target sequence
agatctttttatgtcaaaaattc

SEQ ID NO: 187347 - DNA, 23 bp, Artificial sequence
  SiRNA target sequence
gatctttttatgtcaaaaattcg

SEQ ID NO: 187348 - DNA, 23 bp, Artificial sequence
  SiRNA target sequence
atctttttatgtcaaaaattcgt

SEQ ID NO: 187349 - DNA, 23 bp, Artificial sequence
  SiRNA target sequence
tctttttatgtcaaaaattcgtt

SEQ ID NO: 187350 - DNA, 23 bp, Artificial sequence
  SiRNA target sequence
ctttttatgtcaaaaattcgttc

SEQ ID NO: 187351 - DNA, 23 bp, Artificial sequence
  SiRNA target sequence
tttttatgtcaaaaattcgttct

SEQ ID NO: 187352 - DNA, 23 bp, Artificial sequence
  SiRNA target sequence
ttttatgtcaaaaattcgttctt

SEQ ID NO: 187353 - DNA, 23 bp, Artificial sequence
  SiRNA target sequence
tttatgtcaaaaattcgttcttc

SEQ ID NO: 187354 - DNA, 23 bp, Artificial sequence
  SiRNA target sequence
ttatgtcaaaaattcgttcttcc

SEQ ID NO: 187355 - DNA, 23 bp, Artificial sequence
  SiRNA target sequence
tatgtcaaaaattcgttcttcct

SEQ ID NO: 187356 - DNA, 23 bp, Artificial sequence
  SiRNA target sequence
atgtcaaaaattcgttcttcctt

SEQ ID NO: 187357 - DNA, 23 bp, Artificial sequence
  SiRNA target sequence
tgtcaaaaattcgttcttccttt

SEQ ID NO: 187358 - DNA, 23 bp, Artificial sequence
  SiRNA target sequence
gtcaaaaattcgttcttcctttt

SEQ ID NO: 187359 - DNA, 23 bp, Artificial sequence
  SiRNA target sequence
tcaaaaattcgttcttccttttt

SEQ ID NO: 187360 - DNA, 23 bp, Artificial sequence
  SiRNA target sequence
caaaaattcgttcttccttttta

SEQ ID NO: 187361 - DNA, 23 bp, Artificial sequence
  SiRNA target sequence
aaaaattcgttcttcctttttag

SEQ ID NO: 187362 - DNA, 23 bp, Artificial sequence
  SiRNA target sequence
aaaattcgttcttcctttttaga

SEQ ID NO: 187363 - DNA, 23 bp, Artificial sequence
  SiRNA target sequence
aaattcgttcttcctttttagac

SEQ ID NO: 187364 - DNA, 23 bp, Artificial sequence
  SiRNA target sequence
aattcgttcttcctttttagacg

SEQ ID NO: 187365 - DNA, 23 bp, Artificial sequence
  SiRNA target sequence
attcgttcttcctttttagacgc

SEQ ID NO: 187366 - DNA, 23 bp, Artificial sequence
  SiRNA target sequence
ttcgttcttcctttttagacgct

SEQ ID NO: 187367 - DNA, 23 bp, Artificial sequence
  SiRNA target sequence
tcgttcttcctttttagacgcta

SEQ ID NO: 187368 - DNA, 23 bp, Artificial sequence
  SiRNA target sequence
cgttcttcctttttagacgctaa

SEQ ID NO: 187369 - DNA, 23 bp, Artificial sequence
  SiRNA target sequence
gttcttcctttttagacgctaat

SEQ ID NO: 187370 - DNA, 23 bp, Artificial sequence
  SiRNA target sequence
ttcttcctttttagacgctaatt

SEQ ID NO: 187371 - DNA, 23 bp, Artificial sequence
  SiRNA target sequence
tcttcctttttagacgctaattt

SEQ ID NO: 187372 - DNA, 23 bp, Artificial sequence
  SiRNA target sequence
cttcctttttagacgctaatttt

SEQ ID NO: 187373 - DNA, 23 bp, Artificial sequence
  SiRNA target sequence
ttcctttttagacgctaattttg

SEQ ID NO: 187374 - DNA, 23 bp, Artificial sequence
  SiRNA target sequence
tcctttttagacgctaattttgt

SEQ ID NO: 187375 - DNA, 23 bp, Artificial sequence
  SiRNA target sequence
cctttttagacgctaattttgtt

SEQ ID NO: 187376 - DNA, 23 bp, Artificial sequence
  SiRNA target sequence
ctttttagacgctaattttgtta

SEQ ID NO: 187377 - DNA, 23 bp, Artificial sequence
  SiRNA target sequence
tttttagacgctaattttgttaa

SEQ ID NO: 187378 - DNA, 23 bp, Artificial sequence
  SiRNA target sequence
ttttagacgctaattttgttaat

SEQ ID NO: 187379 - DNA, 23 bp, Artificial sequence
  SiRNA target sequence
tttagacgctaattttgttaatg

SEQ ID NO: 187380 - DNA, 23 bp, Artificial sequence
  SiRNA target sequence
ttagacgctaattttgttaatga

SEQ ID NO: 187381 - DNA, 23 bp, Artificial sequence
  SiRNA target sequence
tagacgctaattttgttaatgaa

SEQ ID NO: 187382 - DNA, 23 bp, Artificial sequence
  SiRNA target sequence
agacgctaattttgttaatgaag

SEQ ID NO: 187383 - DNA, 23 bp, Artificial sequence
  SiRNA target sequence
gacgctaattttgttaatgaagc

SEQ ID NO: 187384 - DNA, 23 bp, Artificial sequence
  SiRNA target sequence
acgctaattttgttaatgaagct

SEQ ID NO: 187385 - DNA, 23 bp, Artificial sequence
  SiRNA target sequence
cgctaattttgttaatgaagcta

SEQ ID NO: 187386 - DNA, 23 bp, Artificial sequence
  SiRNA target sequence
gctaattttgttaatgaagctat

SEQ ID NO: 187387 - DNA, 23 bp, Artificial sequence
  SiRNA target sequence
ctaattttgttaatgaagctatt

SEQ ID NO: 187388 - DNA, 23 bp, Artificial sequence
  SiRNA target sequence
taattttgttaatgaagctatta

SEQ ID NO: 187389 - DNA, 23 bp, Artificial sequence
  SiRNA target sequence
aattttgttaatgaagctattaa

SEQ ID NO: 187390 - DNA, 23 bp, Artificial sequence
  SiRNA target sequence
attttgttaatgaagctattaaa

SEQ ID NO: 187391 - DNA, 23 bp, Artificial sequence
  SiRNA target sequence
ttttgttaatgaagctattaaac

SEQ ID NO: 187392 - DNA, 23 bp, Artificial sequence
  SiRNA target sequence
tttgttaatgaagctattaaacc

SEQ ID NO: 187393 - DNA, 23 bp, Artificial sequence
  SiRNA target sequence
ttgttaatgaagctattaaacct

SEQ ID NO: 187394 - DNA, 23 bp, Artificial sequence
  SiRNA target sequence
tgttaatgaagctattaaacctt

SEQ ID NO: 187395 - DNA, 23 bp, Artificial sequence
  SiRNA target sequence
gttaatgaagctattaaaccttt

SEQ ID NO: 187396 - DNA, 23 bp, Artificial sequence
  SiRNA target sequence
ttaatgaagctattaaaccttta

SEQ ID NO: 187397 - DNA, 23 bp, Artificial sequence
  SiRNA target sequence
taatgaagctattaaacctttag

SEQ ID NO: 187398 - DNA, 23 bp, Artificial sequence
  SiRNA target sequence
aatgaagctattaaacctttaga

SEQ ID NO: 187399 - DNA, 23 bp, Artificial sequence
  SiRNA target sequence
atgaagctattaaacctttagat

SEQ ID NO: 187400 - DNA, 23 bp, Artificial sequence
  SiRNA target sequence
tgaagctattaaacctttagata

SEQ ID NO: 187401 - DNA, 23 bp, Artificial sequence
  SiRNA target sequence
gaagctattaaacctttagatat

SEQ ID NO: 187402 - DNA, 23 bp, Artificial sequence
  SiRNA target sequence
aagctattaaacctttagatatt

SEQ ID NO: 187403 - DNA, 23 bp, Artificial sequence
  SiRNA target sequence
agctattaaacctttagatattc

SEQ ID NO: 187404 - DNA, 23 bp, Artificial sequence
  SiRNA target sequence
gctattaaacctttagatattca

SEQ ID NO: 187405 - DNA, 23 bp, Artificial sequence
  SiRNA target sequence
ctattaaacctttagatattcat

SEQ ID NO: 187406 - DNA, 23 bp, Artificial sequence
  SiRNA target sequence
tattaaacctttagatattcatc

SEQ ID NO: 187407 - DNA, 23 bp, Artificial sequence
  SiRNA target sequence
attaaacctttagatattcatca

SEQ ID NO: 187408 - DNA, 23 bp, Artificial sequence
  SiRNA target sequence
ttaaacctttagatattcatcat

SEQ ID NO: 187409 - DNA, 23 bp, Artificial sequence
  SiRNA target sequence
taaacctttagatattcatcatt

SEQ ID NO: 187410 - DNA, 23 bp, Artificial sequence
  SiRNA target sequence
aaacctttagatattcatcattt

SEQ ID NO: 187411 - DNA, 23 bp, Artificial sequence
  SiRNA target sequence
aacctttagatattcatcattta

SEQ ID NO: 187412 - DNA, 23 bp, Artificial sequence
  SiRNA target sequence
acctttagatattcatcatttat

SEQ ID NO: 187413 - DNA, 23 bp, Artificial sequence
  SiRNA target sequence
cctttagatattcatcatttata

SEQ ID NO: 187414 - DNA, 23 bp, Artificial sequence
  SiRNA target sequence
ctttagatattcatcatttatac

SEQ ID NO: 187415 - DNA, 23 bp, Artificial sequence
  SiRNA target sequence
tttagatattcatcatttatacg

SEQ ID NO: 187416 - DNA, 23 bp, Artificial sequence
  SiRNA target sequence
ttagatattcatcatttatacga

SEQ ID NO: 187417 - DNA, 23 bp, Artificial sequence
  SiRNA target sequence
tagatattcatcatttatacgac

SEQ ID NO: 187418 - DNA, 23 bp, Artificial sequence
  SiRNA target sequence
agatattcatcatttatacgacc

SEQ ID NO: 187419 - DNA, 23 bp, Artificial sequence
  SiRNA target sequence
gatattcatcatttatacgacca

SEQ ID NO: 187420 - DNA, 23 bp, Artificial sequence
  SiRNA target sequence
atattcatcatttatacgaccaa

SEQ ID NO: 187421 - DNA, 23 bp, Artificial sequence
  SiRNA target sequence
tattcatcatttatacgaccaac

SEQ ID NO: 187422 - DNA, 23 bp, Artificial sequence
  SiRNA target sequence
attcatcatttatacgaccaact

SEQ ID NO: 187423 - DNA, 23 bp, Artificial sequence
  SiRNA target sequence
ttcatcatttatacgaccaactt

SEQ ID NO: 187424 - DNA, 23 bp, Artificial sequence
  SiRNA target sequence
tcatcatttatacgaccaacttg

SEQ ID NO: 187425 - DNA, 23 bp, Artificial sequence
  SiRNA target sequence
catcatttatacgaccaacttgt

SEQ ID NO: 187426 - DNA, 23 bp, Artificial sequence
  SiRNA target sequence
atcatttatacgaccaacttgta

SEQ ID NO: 187427 - DNA, 23 bp, Artificial sequence
  SiRNA target sequence
tcatttatacgaccaacttgtag

SEQ ID NO: 187428 - DNA, 23 bp, Artificial sequence
  SiRNA target sequence
catttatacgaccaacttgtaga

SEQ ID NO: 187429 - DNA, 23 bp, Artificial sequence
  SiRNA target sequence
atttatacgaccaacttgtagaa

SEQ ID NO: 187430 - DNA, 23 bp, Artificial sequence
  SiRNA target sequence
tttatacgaccaacttgtagaaa

SEQ ID NO: 187431 - DNA, 23 bp, Artificial sequence
  SiRNA target sequence
ttatacgaccaacttgtagaaaa

SEQ ID NO: 187432 - DNA, 23 bp, Artificial sequence
  SiRNA target sequence
tatacgaccaacttgtagaaaac

SEQ ID NO: 187433 - DNA, 23 bp, Artificial sequence
  SiRNA target sequence
atacgaccaacttgtagaaaact

SEQ ID NO: 187434 - DNA, 23 bp, Artificial sequence
  SiRNA target sequence
tacgaccaacttgtagaaaactt

SEQ ID NO: 187435 - DNA, 23 bp, Artificial sequence
  SiRNA target sequence
acgaccaacttgtagaaaacttg

SEQ ID NO: 187436 - DNA, 23 bp, Artificial sequence
  SiRNA target sequence
cgaccaacttgtagaaaacttga

SEQ ID NO: 187437 - DNA, 23 bp, Artificial sequence
  SiRNA target sequence
gaccaacttgtagaaaacttgag

SEQ ID NO: 187438 - DNA, 23 bp, Artificial sequence
  SiRNA target sequence
accaacttgtagaaaacttgagt

SEQ ID NO: 187439 - DNA, 23 bp, Artificial sequence
  SiRNA target sequence
ccaacttgtagaaaacttgagtg

SEQ ID NO: 187440 - DNA, 23 bp, Artificial sequence
  SiRNA target sequence
caacttgtagaaaacttgagtgg

SEQ ID NO: 187441 - DNA, 23 bp, Artificial sequence
  SiRNA target sequence
aacttgtagaaaacttgagtggt

SEQ ID NO: 187442 - DNA, 23 bp, Artificial sequence
  SiRNA target sequence
acttgtagaaaacttgagtggtg

SEQ ID NO: 187443 - DNA, 23 bp, Artificial sequence
  SiRNA target sequence
cttgtagaaaacttgagtggtgg

SEQ ID NO: 187444 - DNA, 23 bp, Artificial sequence
  SiRNA target sequence
ttgtagaaaacttgagtggtgga

SEQ ID NO: 187445 - DNA, 23 bp, Artificial sequence
  SiRNA target sequence
tgtagaaaacttgagtggtggag

SEQ ID NO: 187446 - DNA, 23 bp, Artificial sequence
  SiRNA target sequence
gtagaaaacttgagtggtggaga

SEQ ID NO: 187447 - DNA, 23 bp, Artificial sequence
  SiRNA target sequence
tagaaaacttgagtggtggagaa

SEQ ID NO: 187448 - DNA, 23 bp, Artificial sequence
  SiRNA target sequence
agaaaacttgagtggtggagaat

SEQ ID NO: 187449 - DNA, 23 bp, Artificial sequence
  SiRNA target sequence
gaaaacttgagtggtggagaatt

SEQ ID NO: 187450 - DNA, 23 bp, Artificial sequence
  SiRNA target sequence
aaaacttgagtggtggagaatta

SEQ ID NO: 187451 - DNA, 23 bp, Artificial sequence
  SiRNA target sequence
aaacttgagtggtggagaattac

SEQ ID NO: 187452 - DNA, 23 bp, Artificial sequence
  SiRNA target sequence
aacttgagtggtggagaattaca

SEQ ID NO: 187453 - DNA, 23 bp, Artificial sequence
  SiRNA target sequence
acttgagtggtggagaattacaa

SEQ ID NO: 187454 - DNA, 23 bp, Artificial sequence
  SiRNA target sequence
cttgagtggtggagaattacaaa

SEQ ID NO: 187455 - DNA, 23 bp, Artificial sequence
  SiRNA target sequence
ttgagtggtggagaattacaaag

SEQ ID NO: 187456 - DNA, 23 bp, Artificial sequence
  SiRNA target sequence
tgagtggtggagaattacaaaga

SEQ ID NO: 187457 - DNA, 23 bp, Artificial sequence
  SiRNA target sequence
gagtggtggagaattacaaagaa

SEQ ID NO: 187458 - DNA, 23 bp, Artificial sequence
  SiRNA target sequence
agtggtggagaattacaaagaat

SEQ ID NO: 187459 - DNA, 23 bp, Artificial sequence
  SiRNA target sequence
gtggtggagaattacaaagaatt

SEQ ID NO: 187460 - DNA, 23 bp, Artificial sequence
  SiRNA target sequence
tggtggagaattacaaagaattg

SEQ ID NO: 187461 - DNA, 23 bp, Artificial sequence
  SiRNA target sequence
ggtggagaattacaaagaattgc

SEQ ID NO: 187462 - DNA, 23 bp, Artificial sequence
  SiRNA target sequence
gtggagaattacaaagaattgca

SEQ ID NO: 187463 - DNA, 23 bp, Artificial sequence
  SiRNA target sequence
tggagaattacaaagaattgcaa

SEQ ID NO: 187464 - DNA, 23 bp, Artificial sequence
  SiRNA target sequence
ggagaattacaaagaattgcaat

SEQ ID NO: 187465 - DNA, 23 bp, Artificial sequence
  SiRNA target sequence
gagaattacaaagaattgcaata

SEQ ID NO: 187466 - DNA, 23 bp, Artificial sequence
  SiRNA target sequence
agaattacaaagaattgcaataa

SEQ ID NO: 187467 - DNA, 23 bp, Artificial sequence
  SiRNA target sequence
gaattacaaagaattgcaataat

SEQ ID NO: 187468 - DNA, 23 bp, Artificial sequence
  SiRNA target sequence
aattacaaagaattgcaataata

SEQ ID NO: 187469 - DNA, 23 bp, Artificial sequence
  SiRNA target sequence
attacaaagaattgcaataataa

SEQ ID NO: 187470 - DNA, 23 bp, Artificial sequence
  SiRNA target sequence
ttacaaagaattgcaataataat

SEQ ID NO: 187471 - DNA, 23 bp, Artificial sequence
  SiRNA target sequence
tacaaagaattgcaataataata

SEQ ID NO: 187472 - DNA, 23 bp, Artificial sequence
  SiRNA target sequence
acaaagaattgcaataataatat

SEQ ID NO: 187473 - DNA, 23 bp, Artificial sequence
  SiRNA target sequence
caaagaattgcaataataatatg

SEQ ID NO: 187474 - DNA, 23 bp, Artificial sequence
  SiRNA target sequence
aaagaattgcaataataatatgt

SEQ ID NO: 187475 - DNA, 23 bp, Artificial sequence
  SiRNA target sequence
aagaattgcaataataatatgtt

SEQ ID NO: 187476 - DNA, 23 bp, Artificial sequence
  SiRNA target sequence
agaattgcaataataatatgttt

SEQ ID NO: 187477 - DNA, 23 bp, Artificial sequence
  SiRNA target sequence
gaattgcaataataatatgttta

SEQ ID NO: 187478 - DNA, 23 bp, Artificial sequence
  SiRNA target sequence
aattgcaataataatatgtttag

SEQ ID NO: 187479 - DNA, 23 bp, Artificial sequence
  SiRNA target sequence
attgcaataataatatgtttagg

SEQ ID NO: 187480 - DNA, 23 bp, Artificial sequence
  SiRNA target sequence
ttgcaataataatatgtttagga

SEQ ID NO: 187481 - DNA, 23 bp, Artificial sequence
  SiRNA target sequence
tgcaataataatatgtttaggaa

SEQ ID NO: 187482 - DNA, 23 bp, Artificial sequence
  SiRNA target sequence
gcaataataatatgtttaggaaa

SEQ ID NO: 187483 - DNA, 23 bp, Artificial sequence
  SiRNA target sequence
caataataatatgtttaggaaaa

SEQ ID NO: 187484 - DNA, 23 bp, Artificial sequence
  SiRNA target sequence
aataataatatgtttaggaaaag

SEQ ID NO: 187485 - DNA, 23 bp, Artificial sequence
  SiRNA target sequence
ataataatatgtttaggaaaaga

SEQ ID NO: 187486 - DNA, 23 bp, Artificial sequence
  SiRNA target sequence
taataatatgtttaggaaaagat

SEQ ID NO: 187487 - DNA, 23 bp, Artificial sequence
  SiRNA target sequence
aataatatgtttaggaaaagatg

SEQ ID NO: 187488 - DNA, 23 bp, Artificial sequence
  SiRNA target sequence
ataatatgtttaggaaaagatgc

SEQ ID NO: 187489 - DNA, 23 bp, Artificial sequence
  SiRNA target sequence
taatatgtttaggaaaagatgct

SEQ ID NO: 187490 - DNA, 23 bp, Artificial sequence
  SiRNA target sequence
aatatgtttaggaaaagatgcta

SEQ ID NO: 187491 - DNA, 23 bp, Artificial sequence
  SiRNA target sequence
atatgtttaggaaaagatgctaa

SEQ ID NO: 187492 - DNA, 23 bp, Artificial sequence
  SiRNA target sequence
tatgtttaggaaaagatgctaac

SEQ ID NO: 187493 - DNA, 23 bp, Artificial sequence
  SiRNA target sequence
atgtttaggaaaagatgctaacc

SEQ ID NO: 187494 - DNA, 23 bp, Artificial sequence
  SiRNA target sequence
tgtttaggaaaagatgctaacct

SEQ ID NO: 187495 - DNA, 23 bp, Artificial sequence
  SiRNA target sequence
gtttaggaaaagatgctaacctt

SEQ ID NO: 187496 - DNA, 23 bp, Artificial sequence
  SiRNA target sequence
tttaggaaaagatgctaaccttt

SEQ ID NO: 187497 - DNA, 23 bp, Artificial sequence
  SiRNA target sequence
ttaggaaaagatgctaaccttta

SEQ ID NO: 187498 - DNA, 23 bp, Artificial sequence
  SiRNA target sequence
taggaaaagatgctaacctttat

SEQ ID NO: 187499 - DNA, 23 bp, Artificial sequence
  SiRNA target sequence
aggaaaagatgctaacctttatt

SEQ ID NO: 187500 - DNA, 23 bp, Artificial sequence
  SiRNA target sequence
ggaaaagatgctaacctttattt

SEQ ID NO: 187501 - DNA, 23 bp, Artificial sequence
  SiRNA target sequence
gaaaagatgctaacctttattta

SEQ ID NO: 187502 - DNA, 23 bp, Artificial sequence
  SiRNA target sequence
aaaagatgctaacctttatttat

SEQ ID NO: 187503 - DNA, 23 bp, Artificial sequence
  SiRNA target sequence
aaagatgctaacctttatttatt

SEQ ID NO: 187504 - DNA, 23 bp, Artificial sequence
  SiRNA target sequence
aagatgctaacctttatttatta

SEQ ID NO: 187505 - DNA, 23 bp, Artificial sequence
  SiRNA target sequence
agatgctaacctttatttattag

SEQ ID NO: 187506 - DNA, 23 bp, Artificial sequence
  SiRNA target sequence
gatgctaacctttatttattaga

SEQ ID NO: 187507 - DNA, 23 bp, Artificial sequence
  SiRNA target sequence
atgctaacctttatttattagat

SEQ ID NO: 187508 - DNA, 23 bp, Artificial sequence
  SiRNA target sequence
tgctaacctttatttattagatg

SEQ ID NO: 187509 - DNA, 23 bp, Artificial sequence
  SiRNA target sequence
gctaacctttatttattagatga

SEQ ID NO: 187510 - DNA, 23 bp, Artificial sequence
  SiRNA target sequence
ctaacctttatttattagatgaa

SEQ ID NO: 187511 - DNA, 23 bp, Artificial sequence
  SiRNA target sequence
taacctttatttattagatgaac

SEQ ID NO: 187512 - DNA, 23 bp, Artificial sequence
  SiRNA target sequence
aacctttatttattagatgaacc

SEQ ID NO: 187513 - DNA, 23 bp, Artificial sequence
  SiRNA target sequence
acctttatttattagatgaacct

SEQ ID NO: 187514 - DNA, 23 bp, Artificial sequence
  SiRNA target sequence
cctttatttattagatgaacctt

SEQ ID NO: 187515 - DNA, 23 bp, Artificial sequence
  SiRNA target sequence
ctttatttattagatgaaccttc

SEQ ID NO: 187516 - DNA, 23 bp, Artificial sequence
  SiRNA target sequence
tttatttattagatgaaccttct

SEQ ID NO: 187517 - DNA, 23 bp, Artificial sequence
  SiRNA target sequence
ttatttattagatgaaccttctg

SEQ ID NO: 187518 - DNA, 23 bp, Artificial sequence
  SiRNA target sequence
tatttattagatgaaccttctgc

SEQ ID NO: 187519 - DNA, 23 bp, Artificial sequence
  SiRNA target sequence
atttattagatgaaccttctgcg

SEQ ID NO: 187520 - DNA, 23 bp, Artificial sequence
  SiRNA target sequence
tttattagatgaaccttctgcgt

SEQ ID NO: 187521 - DNA, 23 bp, Artificial sequence
  SiRNA target sequence
ttattagatgaaccttctgcgta

SEQ ID NO: 187522 - DNA, 23 bp, Artificial sequence
  SiRNA target sequence
tattagatgaaccttctgcgtat

SEQ ID NO: 187523 - DNA, 23 bp, Artificial sequence
  SiRNA target sequence
attagatgaaccttctgcgtatc

SEQ ID NO: 187524 - DNA, 23 bp, Artificial sequence
  SiRNA target sequence
ttagatgaaccttctgcgtatct

SEQ ID NO: 187525 - DNA, 23 bp, Artificial sequence
  SiRNA target sequence
tagatgaaccttctgcgtatcta

SEQ ID NO: 187526 - DNA, 23 bp, Artificial sequence
  SiRNA target sequence
agatgaaccttctgcgtatctag

SEQ ID NO: 187527 - DNA, 23 bp, Artificial sequence
  SiRNA target sequence
gatgaaccttctgcgtatctaga

SEQ ID NO: 187528 - DNA, 23 bp, Artificial sequence
  SiRNA target sequence
atgaaccttctgcgtatctagat

SEQ ID NO: 187529 - DNA, 23 bp, Artificial sequence
  SiRNA target sequence
tgaaccttctgcgtatctagatt

SEQ ID NO: 187530 - DNA, 23 bp, Artificial sequence
  SiRNA target sequence
gaaccttctgcgtatctagattc

SEQ ID NO: 187531 - DNA, 23 bp, Artificial sequence
  SiRNA target sequence
aaccttctgcgtatctagattca

SEQ ID NO: 187532 - DNA, 23 bp, Artificial sequence
  SiRNA target sequence
accttctgcgtatctagattcag

SEQ ID NO: 187533 - DNA, 23 bp, Artificial sequence
  SiRNA target sequence
ccttctgcgtatctagattcaga

SEQ ID NO: 187534 - DNA, 23 bp, Artificial sequence
  SiRNA target sequence
cttctgcgtatctagattcagat

SEQ ID NO: 187535 - DNA, 23 bp, Artificial sequence
  SiRNA target sequence
ttctgcgtatctagattcagatc

SEQ ID NO: 187536 - DNA, 23 bp, Artificial sequence
  SiRNA target sequence
tctgcgtatctagattcagatca

SEQ ID NO: 187537 - DNA, 23 bp, Artificial sequence
  SiRNA target sequence
ctgcgtatctagattcagatcag

SEQ ID NO: 187538 - DNA, 23 bp, Artificial sequence
  SiRNA target sequence
tgcgtatctagattcagatcaga

SEQ ID NO: 187539 - DNA, 23 bp, Artificial sequence
  SiRNA target sequence
gcgtatctagattcagatcagag

SEQ ID NO: 187540 - DNA, 23 bp, Artificial sequence
  SiRNA target sequence
cgtatctagattcagatcagaga

SEQ ID NO: 187541 - DNA, 23 bp, Artificial sequence
  SiRNA target sequence
gtatctagattcagatcagagaa

SEQ ID NO: 187542 - DNA, 23 bp, Artificial sequence
  SiRNA target sequence
tatctagattcagatcagagaat

SEQ ID NO: 187543 - DNA, 23 bp, Artificial sequence
  SiRNA target sequence
atctagattcagatcagagaata

SEQ ID NO: 187544 - DNA, 23 bp, Artificial sequence
  SiRNA target sequence
tctagattcagatcagagaatag

SEQ ID NO: 187545 - DNA, 23 bp, Artificial sequence
  SiRNA target sequence
ctagattcagatcagagaatagc

SEQ ID NO: 187546 - DNA, 23 bp, Artificial sequence
  SiRNA target sequence
tagattcagatcagagaatagcg

SEQ ID NO: 187547 - DNA, 23 bp, Artificial sequence
  SiRNA target sequence
agattcagatcagagaatagcga

SEQ ID NO: 187548 - DNA, 23 bp, Artificial sequence
  SiRNA target sequence
gattcagatcagagaatagcgat

SEQ ID NO: 187549 - DNA, 23 bp, Artificial sequence
  SiRNA target sequence
attcagatcagagaatagcgatt

SEQ ID NO: 187550 - DNA, 23 bp, Artificial sequence
  SiRNA target sequence
ttcagatcagagaatagcgattt

SEQ ID NO: 187551 - DNA, 23 bp, Artificial sequence
  SiRNA target sequence
tcagatcagagaatagcgatttc

SEQ ID NO: 187552 - DNA, 23 bp, Artificial sequence
  SiRNA target sequence
cagatcagagaatagcgatttca

SEQ ID NO: 187553 - DNA, 23 bp, Artificial sequence
  SiRNA target sequence
agatcagagaatagcgatttcaa

SEQ ID NO: 187554 - DNA, 23 bp, Artificial sequence
  SiRNA target sequence
gatcagagaatagcgatttcaaa

SEQ ID NO: 187555 - DNA, 23 bp, Artificial sequence
  SiRNA target sequence
atcagagaatagcgatttcaaaa

SEQ ID NO: 187556 - DNA, 23 bp, Artificial sequence
  SiRNA target sequence
tcagagaatagcgatttcaaaag

SEQ ID NO: 187557 - DNA, 23 bp, Artificial sequence
  SiRNA target sequence
cagagaatagcgatttcaaaagt

SEQ ID NO: 187558 - DNA, 23 bp, Artificial sequence
  SiRNA target sequence
agagaatagcgatttcaaaagtt

SEQ ID NO: 187559 - DNA, 23 bp, Artificial sequence
  SiRNA target sequence
gagaatagcgatttcaaaagtta

SEQ ID NO: 187560 - DNA, 23 bp, Artificial sequence
  SiRNA target sequence
agaatagcgatttcaaaagttat

SEQ ID NO: 187561 - DNA, 23 bp, Artificial sequence
  SiRNA target sequence
gaatagcgatttcaaaagttata

SEQ ID NO: 187562 - DNA, 23 bp, Artificial sequence
  SiRNA target sequence
aatagcgatttcaaaagttataa

SEQ ID NO: 187563 - DNA, 23 bp, Artificial sequence
  SiRNA target sequence
atagcgatttcaaaagttataaa

SEQ ID NO: 187564 - DNA, 23 bp, Artificial sequence
  SiRNA target sequence
tagcgatttcaaaagttataaaa

SEQ ID NO: 187565 - DNA, 23 bp, Artificial sequence
  SiRNA target sequence
agcgatttcaaaagttataaaaa

SEQ ID NO: 187566 - DNA, 23 bp, Artificial sequence
  SiRNA target sequence
gcgatttcaaaagttataaaaag

SEQ ID NO: 187567 - DNA, 23 bp, Artificial sequence
  SiRNA target sequence
cgatttcaaaagttataaaaagg

SEQ ID NO: 187568 - DNA, 23 bp, Artificial sequence
  SiRNA target sequence
gatttcaaaagttataaaaaggt

SEQ ID NO: 187569 - DNA, 23 bp, Artificial sequence
  SiRNA target sequence
atttcaaaagttataaaaaggtt

SEQ ID NO: 187570 - DNA, 23 bp, Artificial sequence
  SiRNA target sequence
tttcaaaagttataaaaaggttt

SEQ ID NO: 187571 - DNA, 23 bp, Artificial sequence
  SiRNA target sequence
ttcaaaagttataaaaaggttta

SEQ ID NO: 187572 - DNA, 23 bp, Artificial sequence
  SiRNA target sequence
tcaaaagttataaaaaggtttat

SEQ ID NO: 187573 - DNA, 23 bp, Artificial sequence
  SiRNA target sequence
caaaagttataaaaaggtttatt

SEQ ID NO: 187574 - DNA, 23 bp, Artificial sequence
  SiRNA target sequence
aaaagttataaaaaggtttattt

SEQ ID NO: 187575 - DNA, 23 bp, Artificial sequence
  SiRNA target sequence
aaagttataaaaaggtttattta

SEQ ID NO: 187576 - DNA, 23 bp, Artificial sequence
  SiRNA target sequence
aagttataaaaaggtttatttat

SEQ ID NO: 187577 - DNA, 23 bp, Artificial sequence
  SiRNA target sequence
agttataaaaaggtttatttatg

SEQ ID NO: 187578 - DNA, 23 bp, Artificial sequence
  SiRNA target sequence
gttataaaaaggtttatttatgg

SEQ ID NO: 187579 - DNA, 23 bp, Artificial sequence
  SiRNA target sequence
ttataaaaaggtttatttatggg

SEQ ID NO: 187580 - DNA, 23 bp, Artificial sequence
  SiRNA target sequence
tataaaaaggtttatttatggga

SEQ ID NO: 187581 - DNA, 23 bp, Artificial sequence
  SiRNA target sequence
ataaaaaggtttatttatgggaa

SEQ ID NO: 187582 - DNA, 23 bp, Artificial sequence
  SiRNA target sequence
taaaaaggtttatttatgggaag

SEQ ID NO: 187583 - DNA, 23 bp, Artificial sequence
  SiRNA target sequence
aaaaaggtttatttatgggaaga

SEQ ID NO: 187584 - DNA, 23 bp, Artificial sequence
  SiRNA target sequence
aaaaggtttatttatgggaagaa

SEQ ID NO: 187585 - DNA, 23 bp, Artificial sequence
  SiRNA target sequence
aaaggtttatttatgggaagaag

SEQ ID NO: 187586 - DNA, 23 bp, Artificial sequence
  SiRNA target sequence
aaggtttatttatgggaagaagc

SEQ ID NO: 187587 - DNA, 23 bp, Artificial sequence
  SiRNA target sequence
aggtttatttatgggaagaagcg

SEQ ID NO: 187588 - DNA, 23 bp, Artificial sequence
  SiRNA target sequence
ggtttatttatgggaagaagcga

SEQ ID NO: 187589 - DNA, 23 bp, Artificial sequence
  SiRNA target sequence
gtttatttatgggaagaagcgaa

SEQ ID NO: 187590 - DNA, 23 bp, Artificial sequence
  SiRNA target sequence
tttatttatgggaagaagcgaac

SEQ ID NO: 187591 - DNA, 23 bp, Artificial sequence
  SiRNA target sequence
ttatttatgggaagaagcgaaca

SEQ ID NO: 187592 - DNA, 23 bp, Artificial sequence
  SiRNA target sequence
tatttatgggaagaagcgaacag

SEQ ID NO: 187593 - DNA, 23 bp, Artificial sequence
  SiRNA target sequence
atttatgggaagaagcgaacagc

SEQ ID NO: 187594 - DNA, 23 bp, Artificial sequence
  SiRNA target sequence
tttatgggaagaagcgaacagcc

SEQ ID NO: 187595 - DNA, 23 bp, Artificial sequence
  SiRNA target sequence
ttatgggaagaagcgaacagcct

SEQ ID NO: 187596 - DNA, 23 bp, Artificial sequence
  SiRNA target sequence
tatgggaagaagcgaacagcctt

SEQ ID NO: 187597 - DNA, 23 bp, Artificial sequence
  SiRNA target sequence
atgggaagaagcgaacagccttt

SEQ ID NO: 187598 - DNA, 23 bp, Artificial sequence
  SiRNA target sequence
tgggaagaagcgaacagcctttg

SEQ ID NO: 187599 - DNA, 23 bp, Artificial sequence
  SiRNA target sequence
gggaagaagcgaacagcctttgt

SEQ ID NO: 187600 - DNA, 23 bp, Artificial sequence
  SiRNA target sequence
ggaagaagcgaacagcctttgtg

SEQ ID NO: 187601 - DNA, 23 bp, Artificial sequence
  SiRNA target sequence
gaagaagcgaacagcctttgtgg

SEQ ID NO: 187602 - DNA, 23 bp, Artificial sequence
  SiRNA target sequence
aagaagcgaacagcctttgtggt

SEQ ID NO: 187603 - DNA, 23 bp, Artificial sequence
  SiRNA target sequence
agaagcgaacagcctttgtggtt

SEQ ID NO: 187604 - DNA, 23 bp, Artificial sequence
  SiRNA target sequence
gaagcgaacagcctttgtggttg

SEQ ID NO: 187605 - DNA, 23 bp, Artificial sequence
  SiRNA target sequence
aagcgaacagcctttgtggttga

SEQ ID NO: 187606 - DNA, 23 bp, Artificial sequence
  SiRNA target sequence
agcgaacagcctttgtggttgaa

SEQ ID NO: 187607 - DNA, 23 bp, Artificial sequence
  SiRNA target sequence
gcgaacagcctttgtggttgaac

SEQ ID NO: 187608 - DNA, 23 bp, Artificial sequence
  SiRNA target sequence
cgaacagcctttgtggttgaaca

SEQ ID NO: 187609 - DNA, 23 bp, Artificial sequence
  SiRNA target sequence
gaacagcctttgtggttgaacat

SEQ ID NO: 187610 - DNA, 23 bp, Artificial sequence
  SiRNA target sequence
aacagcctttgtggttgaacatg

SEQ ID NO: 187611 - DNA, 23 bp, Artificial sequence
  SiRNA target sequence
acagcctttgtggttgaacatga

SEQ ID NO: 187612 - DNA, 23 bp, Artificial sequence
  SiRNA target sequence
cagcctttgtggttgaacatgat

SEQ ID NO: 187613 - DNA, 23 bp, Artificial sequence
  SiRNA target sequence
agcctttgtggttgaacatgatt

SEQ ID NO: 187614 - DNA, 23 bp, Artificial sequence
  SiRNA target sequence
gcctttgtggttgaacatgattt

SEQ ID NO: 187615 - DNA, 23 bp, Artificial sequence
  SiRNA target sequence
cctttgtggttgaacatgattta

SEQ ID NO: 187616 - DNA, 23 bp, Artificial sequence
  SiRNA target sequence
ctttgtggttgaacatgatttaa

SEQ ID NO: 187617 - DNA, 23 bp, Artificial sequence
  SiRNA target sequence
tttgtggttgaacatgatttaat

SEQ ID NO: 187618 - DNA, 23 bp, Artificial sequence
  SiRNA target sequence
ttgtggttgaacatgatttaatt

SEQ ID NO: 187619 - DNA, 23 bp, Artificial sequence
  SiRNA target sequence
tgtggttgaacatgatttaattg

SEQ ID NO: 187620 - DNA, 23 bp, Artificial sequence
  SiRNA target sequence
gtggttgaacatgatttaattgt

SEQ ID NO: 187621 - DNA, 23 bp, Artificial sequence
  SiRNA target sequence
tggttgaacatgatttaattgta

SEQ ID NO: 187622 - DNA, 23 bp, Artificial sequence
  SiRNA target sequence
ggttgaacatgatttaattgtag

SEQ ID NO: 187623 - DNA, 23 bp, Artificial sequence
  SiRNA target sequence
gttgaacatgatttaattgtagg

SEQ ID NO: 187624 - DNA, 23 bp, Artificial sequence
  SiRNA target sequence
ttgaacatgatttaattgtaggt

SEQ ID NO: 187625 - DNA, 23 bp, Artificial sequence
  SiRNA target sequence
tgaacatgatttaattgtaggta

SEQ ID NO: 187626 - DNA, 23 bp, Artificial sequence
  SiRNA target sequence
gaacatgatttaattgtaggtac

SEQ ID NO: 187627 - DNA, 23 bp, Artificial sequence
  SiRNA target sequence
aacatgatttaattgtaggtaca

SEQ ID NO: 187628 - DNA, 23 bp, Artificial sequence
  SiRNA target sequence
acatgatttaattgtaggtacat

SEQ ID NO: 187629 - DNA, 23 bp, Artificial sequence
  SiRNA target sequence
catgatttaattgtaggtacata

SEQ ID NO: 187630 - DNA, 23 bp, Artificial sequence
  SiRNA target sequence
atgatttaattgtaggtacatat

SEQ ID NO: 187631 - DNA, 23 bp, Artificial sequence
  SiRNA target sequence
tgatttaattgtaggtacatatt

SEQ ID NO: 187632 - DNA, 23 bp, Artificial sequence
  SiRNA target sequence
gatttaattgtaggtacatattt

SEQ ID NO: 187633 - DNA, 23 bp, Artificial sequence
  SiRNA target sequence
atttaattgtaggtacatatttg

SEQ ID NO: 187634 - DNA, 23 bp, Artificial sequence
  SiRNA target sequence
tttaattgtaggtacatatttgg

SEQ ID NO: 187635 - DNA, 23 bp, Artificial sequence
  SiRNA target sequence
ttaattgtaggtacatatttggc

SEQ ID NO: 187636 - DNA, 23 bp, Artificial sequence
  SiRNA target sequence
taattgtaggtacatatttggct

SEQ ID NO: 187637 - DNA, 23 bp, Artificial sequence
  SiRNA target sequence
aattgtaggtacatatttggctg

SEQ ID NO: 187638 - DNA, 23 bp, Artificial sequence
  SiRNA target sequence
attgtaggtacatatttggctga

SEQ ID NO: 187639 - DNA, 23 bp, Artificial sequence
  SiRNA target sequence
ttgtaggtacatatttggctgat

SEQ ID NO: 187640 - DNA, 23 bp, Artificial sequence
  SiRNA target sequence
tgtaggtacatatttggctgata

SEQ ID NO: 187641 - DNA, 23 bp, Artificial sequence
  SiRNA target sequence
gtaggtacatatttggctgataa

SEQ ID NO: 187642 - DNA, 23 bp, Artificial sequence
  SiRNA target sequence
taggtacatatttggctgataaa

SEQ ID NO: 187643 - DNA, 23 bp, Artificial sequence
  SiRNA target sequence
aggtacatatttggctgataaag

SEQ ID NO: 187644 - DNA, 23 bp, Artificial sequence
  SiRNA target sequence
ggtacatatttggctgataaagt

SEQ ID NO: 187645 - DNA, 23 bp, Artificial sequence
  SiRNA target sequence
gtacatatttggctgataaagtt

SEQ ID NO: 187646 - DNA, 23 bp, Artificial sequence
  SiRNA target sequence
tacatatttggctgataaagttg

SEQ ID NO: 187647 - DNA, 23 bp, Artificial sequence
  SiRNA target sequence
acatatttggctgataaagttgt

SEQ ID NO: 187648 - DNA, 23 bp, Artificial sequence
  SiRNA target sequence
catatttggctgataaagttgtt

SEQ ID NO: 187649 - DNA, 23 bp, Artificial sequence
  SiRNA target sequence
atatttggctgataaagttgttg

SEQ ID NO: 187650 - DNA, 23 bp, Artificial sequence
  SiRNA target sequence
tatttggctgataaagttgttgt

SEQ ID NO: 187651 - DNA, 23 bp, Artificial sequence
  SiRNA target sequence
atttggctgataaagttgttgtt

SEQ ID NO: 187652 - DNA, 23 bp, Artificial sequence
  SiRNA target sequence
tttggctgataaagttgttgttt

SEQ ID NO: 187653 - DNA, 23 bp, Artificial sequence
  SiRNA target sequence
ttggctgataaagttgttgtttt

SEQ ID NO: 187654 - DNA, 23 bp, Artificial sequence
  SiRNA target sequence
tggctgataaagttgttgttttt

SEQ ID NO: 187655 - DNA, 23 bp, Artificial sequence
  SiRNA target sequence
ggctgataaagttgttgtttttg

SEQ ID NO: 187656 - DNA, 23 bp, Artificial sequence
  SiRNA target sequence
gctgataaagttgttgtttttga

SEQ ID NO: 187657 - DNA, 23 bp, Artificial sequence
  SiRNA target sequence
ctgataaagttgttgtttttgag

SEQ ID NO: 187658 - DNA, 23 bp, Artificial sequence
  SiRNA target sequence
tgataaagttgttgtttttgagg

SEQ ID NO: 187659 - DNA, 23 bp, Artificial sequence
  SiRNA target sequence
gataaagttgttgtttttgaggg

SEQ ID NO: 187660 - DNA, 23 bp, Artificial sequence
  SiRNA target sequence
ataaagttgttgtttttgaggga

SEQ ID NO: 187661 - DNA, 23 bp, Artificial sequence
  SiRNA target sequence
taaagttgttgtttttgagggaa

SEQ ID NO: 187662 - DNA, 23 bp, Artificial sequence
  SiRNA target sequence
aaagttgttgtttttgagggaag

SEQ ID NO: 187663 - DNA, 23 bp, Artificial sequence
  SiRNA target sequence
aagttgttgtttttgagggaagc

SEQ ID NO: 187664 - DNA, 23 bp, Artificial sequence
  SiRNA target sequence
agttgttgtttttgagggaagcc

SEQ ID NO: 187665 - DNA, 23 bp, Artificial sequence
  SiRNA target sequence
gttgttgtttttgagggaagccc

SEQ ID NO: 187666 - DNA, 23 bp, Artificial sequence
  SiRNA target sequence
ttgttgtttttgagggaagccct

SEQ ID NO: 187667 - DNA, 23 bp, Artificial sequence
  SiRNA target sequence
tgttgtttttgagggaagcccta

SEQ ID NO: 187668 - DNA, 23 bp, Artificial sequence
  SiRNA target sequence
gttgtttttgagggaagccctag

SEQ ID NO: 187669 - DNA, 23 bp, Artificial sequence
  SiRNA target sequence
ttgtttttgagggaagccctagt

SEQ ID NO: 187670 - DNA, 23 bp, Artificial sequence
  SiRNA target sequence
tgtttttgagggaagccctagtg

SEQ ID NO: 187671 - DNA, 23 bp, Artificial sequence
  SiRNA target sequence
gtttttgagggaagccctagtgt

SEQ ID NO: 187672 - DNA, 23 bp, Artificial sequence
  SiRNA target sequence
tttttgagggaagccctagtgtt

SEQ ID NO: 187673 - DNA, 23 bp, Artificial sequence
  SiRNA target sequence
ttttgagggaagccctagtgttc

SEQ ID NO: 187674 - DNA, 23 bp, Artificial sequence
  SiRNA target sequence
tttgagggaagccctagtgttca

SEQ ID NO: 187675 - DNA, 23 bp, Artificial sequence
  SiRNA target sequence
ttgagggaagccctagtgttcat

SEQ ID NO: 187676 - DNA, 23 bp, Artificial sequence
  SiRNA target sequence
tgagggaagccctagtgttcata

SEQ ID NO: 187677 - DNA, 23 bp, Artificial sequence
  SiRNA target sequence
gagggaagccctagtgttcatag

SEQ ID NO: 187678 - DNA, 23 bp, Artificial sequence
  SiRNA target sequence
agggaagccctagtgttcatagc

SEQ ID NO: 187679 - DNA, 23 bp, Artificial sequence
  SiRNA target sequence
gggaagccctagtgttcatagca

SEQ ID NO: 187680 - DNA, 23 bp, Artificial sequence
  SiRNA target sequence
ggaagccctagtgttcatagcac

SEQ ID NO: 187681 - DNA, 23 bp, Artificial sequence
  SiRNA target sequence
gaagccctagtgttcatagcact

SEQ ID NO: 187682 - DNA, 23 bp, Artificial sequence
  SiRNA target sequence
aagccctagtgttcatagcactg

SEQ ID NO: 187683 - DNA, 23 bp, Artificial sequence
  SiRNA target sequence
agccctagtgttcatagcactgc

SEQ ID NO: 187684 - DNA, 23 bp, Artificial sequence
  SiRNA target sequence
gccctagtgttcatagcactgct

SEQ ID NO: 187685 - DNA, 23 bp, Artificial sequence
  SiRNA target sequence
ccctagtgttcatagcactgctc

SEQ ID NO: 187686 - DNA, 23 bp, Artificial sequence
  SiRNA target sequence
cctagtgttcatagcactgctca

SEQ ID NO: 187687 - DNA, 23 bp, Artificial sequence
  SiRNA target sequence
ctagtgttcatagcactgctcat

SEQ ID NO: 187688 - DNA, 23 bp, Artificial sequence
  SiRNA target sequence
tagtgttcatagcactgctcata

SEQ ID NO: 187689 - DNA, 23 bp, Artificial sequence
  SiRNA target sequence
agtgttcatagcactgctcataa

SEQ ID NO: 187690 - DNA, 23 bp, Artificial sequence
  SiRNA target sequence
gtgttcatagcactgctcataaa

SEQ ID NO: 187691 - DNA, 23 bp, Artificial sequence
  SiRNA target sequence
tgttcatagcactgctcataaac

SEQ ID NO: 187692 - DNA, 23 bp, Artificial sequence
  SiRNA target sequence
gttcatagcactgctcataaacc

SEQ ID NO: 187693 - DNA, 23 bp, Artificial sequence
  SiRNA target sequence
ttcatagcactgctcataaaccg

SEQ ID NO: 187694 - DNA, 23 bp, Artificial sequence
  SiRNA target sequence
tcatagcactgctcataaaccga

SEQ ID NO: 187695 - DNA, 23 bp, Artificial sequence
  SiRNA target sequence
catagcactgctcataaaccgat

SEQ ID NO: 187696 - DNA, 23 bp, Artificial sequence
  SiRNA target sequence
atagcactgctcataaaccgatg

SEQ ID NO: 187697 - DNA, 23 bp, Artificial sequence
  SiRNA target sequence
tagcactgctcataaaccgatgg

SEQ ID NO: 187698 - DNA, 23 bp, Artificial sequence
  SiRNA target sequence
agcactgctcataaaccgatgga

SEQ ID NO: 187699 - DNA, 23 bp, Artificial sequence
  SiRNA target sequence
gcactgctcataaaccgatggat

SEQ ID NO: 187700 - DNA, 23 bp, Artificial sequence
  SiRNA target sequence
cactgctcataaaccgatggatt

SEQ ID NO: 187701 - DNA, 23 bp, Artificial sequence
  SiRNA target sequence
actgctcataaaccgatggattt

SEQ ID NO: 187702 - DNA, 23 bp, Artificial sequence
  SiRNA target sequence
ctgctcataaaccgatggatttg

SEQ ID NO: 187703 - DNA, 23 bp, Artificial sequence
  SiRNA target sequence
tgctcataaaccgatggatttgc

SEQ ID NO: 187704 - DNA, 23 bp, Artificial sequence
  SiRNA target sequence
gctcataaaccgatggatttgca

SEQ ID NO: 187705 - DNA, 23 bp, Artificial sequence
  SiRNA target sequence
ctcataaaccgatggatttgcat

SEQ ID NO: 187706 - DNA, 23 bp, Artificial sequence
  SiRNA target sequence
tcataaaccgatggatttgcata

SEQ ID NO: 187707 - DNA, 23 bp, Artificial sequence
  SiRNA target sequence
cataaaccgatggatttgcatag

SEQ ID NO: 187708 - DNA, 23 bp, Artificial sequence
  SiRNA target sequence
ataaaccgatggatttgcatagt

SEQ ID NO: 187709 - DNA, 23 bp, Artificial sequence
  SiRNA target sequence
taaaccgatggatttgcatagtg

SEQ ID NO: 187710 - DNA, 23 bp, Artificial sequence
  SiRNA target sequence
aaaccgatggatttgcatagtgg

SEQ ID NO: 187711 - DNA, 23 bp, Artificial sequence
  SiRNA target sequence
aaccgatggatttgcatagtgga

SEQ ID NO: 187712 - DNA, 23 bp, Artificial sequence
  SiRNA target sequence
accgatggatttgcatagtggaa

SEQ ID NO: 187713 - DNA, 23 bp, Artificial sequence
  SiRNA target sequence
ccgatggatttgcatagtggaat

SEQ ID NO: 187714 - DNA, 23 bp, Artificial sequence
  SiRNA target sequence
cgatggatttgcatagtggaatg

SEQ ID NO: 187715 - DNA, 23 bp, Artificial sequence
  SiRNA target sequence
gatggatttgcatagtggaatga

SEQ ID NO: 187716 - DNA, 23 bp, Artificial sequence
  SiRNA target sequence
atggatttgcatagtggaatgaa

SEQ ID NO: 187717 - DNA, 23 bp, Artificial sequence
  SiRNA target sequence
tggatttgcatagtggaatgaat

SEQ ID NO: 187718 - DNA, 23 bp, Artificial sequence
  SiRNA target sequence
ggatttgcatagtggaatgaata

SEQ ID NO: 187719 - DNA, 23 bp, Artificial sequence
  SiRNA target sequence
gatttgcatagtggaatgaatat

SEQ ID NO: 187720 - DNA, 23 bp, Artificial sequence
  SiRNA target sequence
atttgcatagtggaatgaatatt

SEQ ID NO: 187721 - DNA, 23 bp, Artificial sequence
  SiRNA target sequence
tttgcatagtggaatgaatattt

SEQ ID NO: 187722 - DNA, 23 bp, Artificial sequence
  SiRNA target sequence
ttgcatagtggaatgaatatttt

SEQ ID NO: 187723 - DNA, 23 bp, Artificial sequence
  SiRNA target sequence
tgcatagtggaatgaatattttt

SEQ ID NO: 187724 - DNA, 23 bp, Artificial sequence
  SiRNA target sequence
gcatagtggaatgaatatttttt

SEQ ID NO: 187725 - DNA, 23 bp, Artificial sequence
  SiRNA target sequence
catagtggaatgaatattttttt

SEQ ID NO: 187726 - DNA, 23 bp, Artificial sequence
  SiRNA target sequence
atagtggaatgaatattttttta

SEQ ID NO: 187727 - DNA, 23 bp, Artificial sequence
  SiRNA target sequence
tagtggaatgaatatttttttaa

SEQ ID NO: 187728 - DNA, 23 bp, Artificial sequence
  SiRNA target sequence
agtggaatgaatatttttttaaa

SEQ ID NO: 187729 - DNA, 23 bp, Artificial sequence
  SiRNA target sequence
gtggaatgaatatttttttaaag

SEQ ID NO: 187730 - DNA, 23 bp, Artificial sequence
  SiRNA target sequence
tggaatgaatatttttttaaaga

SEQ ID NO: 187731 - DNA, 23 bp, Artificial sequence
  SiRNA target sequence
ggaatgaatatttttttaaagaa

SEQ ID NO: 187732 - DNA, 23 bp, Artificial sequence
  SiRNA target sequence
gaatgaatatttttttaaagaat

SEQ ID NO: 187733 - DNA, 23 bp, Artificial sequence
  SiRNA target sequence
aatgaatatttttttaaagaatc

SEQ ID NO: 187734 - DNA, 23 bp, Artificial sequence
  SiRNA target sequence
atgaatatttttttaaagaatct

SEQ ID NO: 187735 - DNA, 23 bp, Artificial sequence
  SiRNA target sequence
tgaatatttttttaaagaatctt

SEQ ID NO: 187736 - DNA, 23 bp, Artificial sequence
  SiRNA target sequence
gaatatttttttaaagaatcttg

SEQ ID NO: 187737 - DNA, 23 bp, Artificial sequence
  SiRNA target sequence
aatatttttttaaagaatcttga

SEQ ID NO: 187738 - DNA, 23 bp, Artificial sequence
  SiRNA target sequence
atatttttttaaagaatcttgat

SEQ ID NO: 187739 - DNA, 23 bp, Artificial sequence
  SiRNA target sequence
tatttttttaaagaatcttgata

SEQ ID NO: 187740 - DNA, 23 bp, Artificial sequence
  SiRNA target sequence
atttttttaaagaatcttgatat

SEQ ID NO: 187741 - DNA, 23 bp, Artificial sequence
  SiRNA target sequence
tttttttaaagaatcttgatatt

SEQ ID NO: 187742 - DNA, 23 bp, Artificial sequence
  SiRNA target sequence
ttttttaaagaatcttgatatta

SEQ ID NO: 187743 - DNA, 23 bp, Artificial sequence
  SiRNA target sequence
tttttaaagaatcttgatattac

SEQ ID NO: 187744 - DNA, 23 bp, Artificial sequence
  SiRNA target sequence
ttttaaagaatcttgatattact

SEQ ID NO: 187745 - DNA, 23 bp, Artificial sequence
  SiRNA target sequence
tttaaagaatcttgatattactt

SEQ ID NO: 187746 - DNA, 23 bp, Artificial sequence
  SiRNA target sequence
ttaaagaatcttgatattacttt

SEQ ID NO: 187747 - DNA, 23 bp, Artificial sequence
  SiRNA target sequence
taaagaatcttgatattactttt

SEQ ID NO: 187748 - DNA, 23 bp, Artificial sequence
  SiRNA target sequence
aaagaatcttgatattactttta

SEQ ID NO: 187749 - DNA, 23 bp, Artificial sequence
  SiRNA target sequence
aagaatcttgatattacttttag

SEQ ID NO: 187750 - DNA, 23 bp, Artificial sequence
  SiRNA target sequence
agaatcttgatattacttttaga

SEQ ID NO: 187751 - DNA, 23 bp, Artificial sequence
  SiRNA target sequence
gaatcttgatattacttttagaa

SEQ ID NO: 187752 - DNA, 23 bp, Artificial sequence
  SiRNA target sequence
aatcttgatattacttttagaag

SEQ ID NO: 187753 - DNA, 23 bp, Artificial sequence
  SiRNA target sequence
atcttgatattacttttagaaga

SEQ ID NO: 187754 - DNA, 23 bp, Artificial sequence
  SiRNA target sequence
tcttgatattacttttagaagag

SEQ ID NO: 187755 - DNA, 23 bp, Artificial sequence
  SiRNA target sequence
cttgatattacttttagaagaga

SEQ ID NO: 187756 - DNA, 23 bp, Artificial sequence
  SiRNA target sequence
ttgatattacttttagaagagac

SEQ ID NO: 187757 - DNA, 23 bp, Artificial sequence
  SiRNA target sequence
tgatattacttttagaagagact

SEQ ID NO: 187758 - DNA, 23 bp, Artificial sequence
  SiRNA target sequence
gatattacttttagaagagactc

SEQ ID NO: 187759 - DNA, 23 bp, Artificial sequence
  SiRNA target sequence
atattacttttagaagagactct

SEQ ID NO: 187760 - DNA, 23 bp, Artificial sequence
  SiRNA target sequence
tattacttttagaagagactctt

SEQ ID NO: 187761 - DNA, 23 bp, Artificial sequence
  SiRNA target sequence
attacttttagaagagactcttc

SEQ ID NO: 187762 - DNA, 23 bp, Artificial sequence
  SiRNA target sequence
ttacttttagaagagactcttcc

SEQ ID NO: 187763 - DNA, 23 bp, Artificial sequence
  SiRNA target sequence
tacttttagaagagactcttcca

SEQ ID NO: 187764 - DNA, 23 bp, Artificial sequence
  SiRNA target sequence
acttttagaagagactcttccaa

SEQ ID NO: 187765 - DNA, 23 bp, Artificial sequence
  SiRNA target sequence
cttttagaagagactcttccaat

SEQ ID NO: 187766 - DNA, 23 bp, Artificial sequence
  SiRNA target sequence
ttttagaagagactcttccaatt

SEQ ID NO: 187767 - DNA, 23 bp, Artificial sequence
  SiRNA target sequence
tttagaagagactcttccaattt

SEQ ID NO: 187768 - DNA, 23 bp, Artificial sequence
  SiRNA target sequence
ttagaagagactcttccaatttt

SEQ ID NO: 187769 - DNA, 23 bp, Artificial sequence
  SiRNA target sequence
tagaagagactcttccaatttta

SEQ ID NO: 187770 - DNA, 23 bp, Artificial sequence
  SiRNA target sequence
agaagagactcttccaattttag

SEQ ID NO: 187771 - DNA, 23 bp, Artificial sequence
  SiRNA target sequence
gaagagactcttccaattttaga

SEQ ID NO: 187772 - DNA, 23 bp, Artificial sequence
  SiRNA target sequence
aagagactcttccaattttagac

SEQ ID NO: 187773 - DNA, 23 bp, Artificial sequence
  SiRNA target sequence
agagactcttccaattttagacc

SEQ ID NO: 187774 - DNA, 23 bp, Artificial sequence
  SiRNA target sequence
gagactcttccaattttagacca

SEQ ID NO: 187775 - DNA, 23 bp, Artificial sequence
  SiRNA target sequence
agactcttccaattttagaccaa

SEQ ID NO: 187776 - DNA, 23 bp, Artificial sequence
  SiRNA target sequence
gactcttccaattttagaccaag

SEQ ID NO: 187777 - DNA, 23 bp, Artificial sequence
  SiRNA target sequence
actcttccaattttagaccaaga

SEQ ID NO: 187778 - DNA, 23 bp, Artificial sequence
  SiRNA target sequence
ctcttccaattttagaccaagag

SEQ ID NO: 187779 - DNA, 23 bp, Artificial sequence
  SiRNA target sequence
tcttccaattttagaccaagagt

SEQ ID NO: 187780 - DNA, 23 bp, Artificial sequence
  SiRNA target sequence
cttccaattttagaccaagagtt

SEQ ID NO: 187781 - DNA, 23 bp, Artificial sequence
  SiRNA target sequence
ttccaattttagaccaagagtta

SEQ ID NO: 187782 - DNA, 23 bp, Artificial sequence
  SiRNA target sequence
tccaattttagaccaagagttaa

SEQ ID NO: 187783 - DNA, 23 bp, Artificial sequence
  SiRNA target sequence
ccaattttagaccaagagttaat

SEQ ID NO: 187784 - DNA, 23 bp, Artificial sequence
  SiRNA target sequence
caattttagaccaagagttaata

SEQ ID NO: 187785 - DNA, 23 bp, Artificial sequence
  SiRNA target sequence
aattttagaccaagagttaataa

SEQ ID NO: 187786 - DNA, 23 bp, Artificial sequence
  SiRNA target sequence
attttagaccaagagttaataag

SEQ ID NO: 187787 - DNA, 23 bp, Artificial sequence
  SiRNA target sequence
ttttagaccaagagttaataagc

SEQ ID NO: 187788 - DNA, 23 bp, Artificial sequence
  SiRNA target sequence
tttagaccaagagttaataagcc

SEQ ID NO: 187789 - DNA, 23 bp, Artificial sequence
  SiRNA target sequence
ttagaccaagagttaataagccg

SEQ ID NO: 187790 - DNA, 23 bp, Artificial sequence
  SiRNA target sequence
tagaccaagagttaataagccga

SEQ ID NO: 187791 - DNA, 23 bp, Artificial sequence
  SiRNA target sequence
agaccaagagttaataagccgaa

SEQ ID NO: 187792 - DNA, 23 bp, Artificial sequence
  SiRNA target sequence
gaccaagagttaataagccgaat

SEQ ID NO: 187793 - DNA, 23 bp, Artificial sequence
  SiRNA target sequence
accaagagttaataagccgaatt

SEQ ID NO: 187794 - DNA, 23 bp, Artificial sequence
  SiRNA target sequence
ccaagagttaataagccgaattc

SEQ ID NO: 187795 - DNA, 23 bp, Artificial sequence
  SiRNA target sequence
caagagttaataagccgaattcc

SEQ ID NO: 187796 - DNA, 23 bp, Artificial sequence
  SiRNA target sequence
aagagttaataagccgaattccg

SEQ ID NO: 187797 - DNA, 23 bp, Artificial sequence
  SiRNA target sequence
agagttaataagccgaattccgc

SEQ ID NO: 187798 - DNA, 23 bp, Artificial sequence
  SiRNA target sequence
gagttaataagccgaattccgca

SEQ ID NO: 187799 - DNA, 23 bp, Artificial sequence
  SiRNA target sequence
agttaataagccgaattccgcaa

SEQ ID NO: 187800 - DNA, 23 bp, Artificial sequence
  SiRNA target sequence
gttaataagccgaattccgcaaa

SEQ ID NO: 187801 - DNA, 23 bp, Artificial sequence
  SiRNA target sequence
ttaataagccgaattccgcaaaa

SEQ ID NO: 187802 - DNA, 23 bp, Artificial sequence
  SiRNA target sequence
taataagccgaattccgcaaaag

SEQ ID NO: 187803 - DNA, 23 bp, Artificial sequence
  SiRNA target sequence
aataagccgaattccgcaaaaga

SEQ ID NO: 187804 - DNA, 23 bp, Artificial sequence
  SiRNA target sequence
ataagccgaattccgcaaaagac

SEQ ID NO: 187805 - DNA, 23 bp, Artificial sequence
  SiRNA target sequence
taagccgaattccgcaaaagaca

SEQ ID NO: 187806 - DNA, 23 bp, Artificial sequence
  SiRNA target sequence
aagccgaattccgcaaaagacag

SEQ ID NO: 187807 - DNA, 23 bp, Artificial sequence
  SiRNA target sequence
agccgaattccgcaaaagacaga

SEQ ID NO: 187808 - DNA, 23 bp, Artificial sequence
  SiRNA target sequence
gccgaattccgcaaaagacagaa

SEQ ID NO: 187809 - DNA, 23 bp, Artificial sequence
  SiRNA target sequence
ccgaattccgcaaaagacagaac

SEQ ID NO: 187810 - DNA, 23 bp, Artificial sequence
  SiRNA target sequence
cgaattccgcaaaagacagaact

SEQ ID NO: 187811 - DNA, 23 bp, Artificial sequence
  SiRNA target sequence
gaattccgcaaaagacagaactc

SEQ ID NO: 187812 - DNA, 23 bp, Artificial sequence
  SiRNA target sequence
aattccgcaaaagacagaactca

SEQ ID NO: 187813 - DNA, 23 bp, Artificial sequence
  SiRNA target sequence
attccgcaaaagacagaactcag

SEQ ID NO: 187814 - DNA, 23 bp, Artificial sequence
  SiRNA target sequence
ttccgcaaaagacagaactcaga

SEQ ID NO: 187815 - DNA, 23 bp, Artificial sequence
  SiRNA target sequence
tccgcaaaagacagaactcagaa

SEQ ID NO: 187816 - DNA, 23 bp, Artificial sequence
  SiRNA target sequence
ccgcaaaagacagaactcagaaa

SEQ ID NO: 187817 - DNA, 23 bp, Artificial sequence
  SiRNA target sequence
cgcaaaagacagaactcagaaag

SEQ ID NO: 187818 - DNA, 23 bp, Artificial sequence
  SiRNA target sequence
gcaaaagacagaactcagaaaga

SEQ ID NO: 187819 - DNA, 23 bp, Artificial sequence
  SiRNA target sequence
caaaagacagaactcagaaagaa

SEQ ID NO: 187820 - DNA, 23 bp, Artificial sequence
  SiRNA target sequence
aaaagacagaactcagaaagaag

SEQ ID NO: 187821 - DNA, 23 bp, Artificial sequence
  SiRNA target sequence
aaagacagaactcagaaagaaga

SEQ ID NO: 187822 - DNA, 23 bp, Artificial sequence
  SiRNA target sequence
aagacagaactcagaaagaagag

SEQ ID NO: 187823 - DNA, 23 bp, Artificial sequence
  SiRNA target sequence
agacagaactcagaaagaagaga

SEQ ID NO: 187824 - DNA, 23 bp, Artificial sequence
  SiRNA target sequence
gacagaactcagaaagaagagaa

SEQ ID NO: 187825 - DNA, 23 bp, Artificial sequence
  SiRNA target sequence
acagaactcagaaagaagagaat

SEQ ID NO: 187826 - DNA, 23 bp, Artificial sequence
  SiRNA target sequence
cagaactcagaaagaagagaata

SEQ ID NO: 187827 - DNA, 23 bp, Artificial sequence
  SiRNA target sequence
agaactcagaaagaagagaataa

SEQ ID NO: 187828 - DNA, 23 bp, Artificial sequence
  SiRNA target sequence
gaactcagaaagaagagaataaa

SEQ ID NO: 187829 - DNA, 23 bp, Artificial sequence
  SiRNA target sequence
aactcagaaagaagagaataaat

SEQ ID NO: 187830 - DNA, 23 bp, Artificial sequence
  SiRNA target sequence
actcagaaagaagagaataaata

SEQ ID NO: 187831 - DNA, 23 bp, Artificial sequence
  SiRNA target sequence
ctcagaaagaagagaataaatat

SEQ ID NO: 187832 - DNA, 23 bp, Artificial sequence
  SiRNA target sequence
tcagaaagaagagaataaatatt

SEQ ID NO: 187833 - DNA, 23 bp, Artificial sequence
  SiRNA target sequence
cagaaagaagagaataaatattt

SEQ ID NO: 187834 - DNA, 23 bp, Artificial sequence
  SiRNA target sequence
agaaagaagagaataaatatttt

SEQ ID NO: 187835 - DNA, 23 bp, Artificial sequence
  SiRNA target sequence
gaaagaagagaataaatattttt

SEQ ID NO: 187836 - DNA, 23 bp, Artificial sequence
  SiRNA target sequence
aaagaagagaataaatatttttt

SEQ ID NO: 187837 - DNA, 23 bp, Artificial sequence
  SiRNA target sequence
aagaagagaataaatattttttt

SEQ ID NO: 187838 - DNA, 23 bp, Artificial sequence
  SiRNA target sequence
agaagagaataaatatttttttt

SEQ ID NO: 187839 - DNA, 23 bp, Artificial sequence
  SiRNA target sequence
gaagagaataaatattttttttg

SEQ ID NO: 187840 - DNA, 23 bp, Artificial sequence
  SiRNA target sequence
aagagaataaatattttttttga

SEQ ID NO: 187841 - DNA, 24 bp, Artificial sequence
  SiRNA target sequence
atggccaagaatgaatctaataaa

SEQ ID NO: 187842 - DNA, 24 bp, Artificial sequence
  SiRNA target sequence
tggccaagaatgaatctaataaaa

SEQ ID NO: 187843 - DNA, 24 bp, Artificial sequence
  SiRNA target sequence
ggccaagaatgaatctaataaaat

SEQ ID NO: 187844 - DNA, 24 bp, Artificial sequence
  SiRNA target sequence
gccaagaatgaatctaataaaata

SEQ ID NO: 187845 - DNA, 24 bp, Artificial sequence
  SiRNA target sequence
ccaagaatgaatctaataaaataa

SEQ ID NO: 187846 - DNA, 24 bp, Artificial sequence
  SiRNA target sequence
caagaatgaatctaataaaataac

SEQ ID NO: 187847 - DNA, 24 bp, Artificial sequence
  SiRNA target sequence
aagaatgaatctaataaaataacg

SEQ ID NO: 187848 - DNA, 24 bp, Artificial sequence
  SiRNA target sequence
agaatgaatctaataaaataacga

SEQ ID NO: 187849 - DNA, 24 bp, Artificial sequence
  SiRNA target sequence
gaatgaatctaataaaataacgag

SEQ ID NO: 187850 - DNA, 24 bp, Artificial sequence
  SiRNA target sequence
aatgaatctaataaaataacgaga

SEQ ID NO: 187851 - DNA, 24 bp, Artificial sequence
  SiRNA target sequence
atgaatctaataaaataacgagac

SEQ ID NO: 187852 - DNA, 24 bp, Artificial sequence
  SiRNA target sequence
tgaatctaataaaataacgagact

SEQ ID NO: 187853 - DNA, 24 bp, Artificial sequence
  SiRNA target sequence
gaatctaataaaataacgagactg

SEQ ID NO: 187854 - DNA, 24 bp, Artificial sequence
  SiRNA target sequence
aatctaataaaataacgagactgg

SEQ ID NO: 187855 - DNA, 24 bp, Artificial sequence
  SiRNA target sequence
atctaataaaataacgagactggc

SEQ ID NO: 187856 - DNA, 24 bp, Artificial sequence
  SiRNA target sequence
tctaataaaataacgagactggca

SEQ ID NO: 187857 - DNA, 24 bp, Artificial sequence
  SiRNA target sequence
ctaataaaataacgagactggcaa

SEQ ID NO: 187858 - DNA, 24 bp, Artificial sequence
  SiRNA target sequence
taataaaataacgagactggcaat

SEQ ID NO: 187859 - DNA, 24 bp, Artificial sequence
  SiRNA target sequence
aataaaataacgagactggcaatt

SEQ ID NO: 187860 - DNA, 24 bp, Artificial sequence
  SiRNA target sequence
ataaaataacgagactggcaattg

SEQ ID NO: 187861 - DNA, 24 bp, Artificial sequence
  SiRNA target sequence
taaaataacgagactggcaattgt

SEQ ID NO: 187862 - DNA, 24 bp, Artificial sequence
  SiRNA target sequence
aaaataacgagactggcaattgtt

SEQ ID NO: 187863 - DNA, 24 bp, Artificial sequence
  SiRNA target sequence
aaataacgagactggcaattgtta

SEQ ID NO: 187864 - DNA, 24 bp, Artificial sequence
  SiRNA target sequence
aataacgagactggcaattgttaa

SEQ ID NO: 187865 - DNA, 24 bp, Artificial sequence
  SiRNA target sequence
ataacgagactggcaattgttaat

SEQ ID NO: 187866 - DNA, 24 bp, Artificial sequence
  SiRNA target sequence
taacgagactggcaattgttaatt

SEQ ID NO: 187867 - DNA, 24 bp, Artificial sequence
  SiRNA target sequence
aacgagactggcaattgttaatta

SEQ ID NO: 187868 - DNA, 24 bp, Artificial sequence
  SiRNA target sequence
acgagactggcaattgttaattat

SEQ ID NO: 187869 - DNA, 24 bp, Artificial sequence
  SiRNA target sequence
cgagactggcaattgttaattatg

SEQ ID NO: 187870 - DNA, 24 bp, Artificial sequence
  SiRNA target sequence
gagactggcaattgttaattatga

SEQ ID NO: 187871 - DNA, 24 bp, Artificial sequence
  SiRNA target sequence
agactggcaattgttaattatgaa

SEQ ID NO: 187872 - DNA, 24 bp, Artificial sequence
  SiRNA target sequence
gactggcaattgttaattatgaac

SEQ ID NO: 187873 - DNA, 24 bp, Artificial sequence
  SiRNA target sequence
actggcaattgttaattatgaact

SEQ ID NO: 187874 - DNA, 24 bp, Artificial sequence
  SiRNA target sequence
ctggcaattgttaattatgaacta

SEQ ID NO: 187875 - DNA, 24 bp, Artificial sequence
  SiRNA target sequence
tggcaattgttaattatgaactat

SEQ ID NO: 187876 - DNA, 24 bp, Artificial sequence
  SiRNA target sequence
ggcaattgttaattatgaactatg

SEQ ID NO: 187877 - DNA, 24 bp, Artificial sequence
  SiRNA target sequence
gcaattgttaattatgaactatgt

SEQ ID NO: 187878 - DNA, 24 bp, Artificial sequence
  SiRNA target sequence
caattgttaattatgaactatgta

SEQ ID NO: 187879 - DNA, 24 bp, Artificial sequence
  SiRNA target sequence
aattgttaattatgaactatgtaa

SEQ ID NO: 187880 - DNA, 24 bp, Artificial sequence
  SiRNA target sequence
attgttaattatgaactatgtaaa

SEQ ID NO: 187881 - DNA, 24 bp, Artificial sequence
  SiRNA target sequence
ttgttaattatgaactatgtaaac

SEQ ID NO: 187882 - DNA, 24 bp, Artificial sequence
  SiRNA target sequence
tgttaattatgaactatgtaaacc

SEQ ID NO: 187883 - DNA, 24 bp, Artificial sequence
  SiRNA target sequence
gttaattatgaactatgtaaaccg

SEQ ID NO: 187884 - DNA, 24 bp, Artificial sequence
  SiRNA target sequence
ttaattatgaactatgtaaaccga

SEQ ID NO: 187885 - DNA, 24 bp, Artificial sequence
  SiRNA target sequence
taattatgaactatgtaaaccgaa

SEQ ID NO: 187886 - DNA, 24 bp, Artificial sequence
  SiRNA target sequence
aattatgaactatgtaaaccgaag

SEQ ID NO: 187887 - DNA, 24 bp, Artificial sequence
  SiRNA target sequence
attatgaactatgtaaaccgaagg

SEQ ID NO: 187888 - DNA, 24 bp, Artificial sequence
  SiRNA target sequence
ttatgaactatgtaaaccgaagga

SEQ ID NO: 187889 - DNA, 24 bp, Artificial sequence
  SiRNA target sequence
tatgaactatgtaaaccgaaggaa

SEQ ID NO: 187890 - DNA, 24 bp, Artificial sequence
  SiRNA target sequence
atgaactatgtaaaccgaaggaat

SEQ ID NO: 187891 - DNA, 24 bp, Artificial sequence
  SiRNA target sequence
tgaactatgtaaaccgaaggaatg

SEQ ID NO: 187892 - DNA, 24 bp, Artificial sequence
  SiRNA target sequence
gaactatgtaaaccgaaggaatgt

SEQ ID NO: 187893 - DNA, 24 bp, Artificial sequence
  SiRNA target sequence
aactatgtaaaccgaaggaatgta

SEQ ID NO: 187894 - DNA, 24 bp, Artificial sequence
  SiRNA target sequence
actatgtaaaccgaaggaatgtat

SEQ ID NO: 187895 - DNA, 24 bp, Artificial sequence
  SiRNA target sequence
ctatgtaaaccgaaggaatgtatg

SEQ ID NO: 187896 - DNA, 24 bp, Artificial sequence
  SiRNA target sequence
tatgtaaaccgaaggaatgtatgt

SEQ ID NO: 187897 - DNA, 24 bp, Artificial sequence
  SiRNA target sequence
atgtaaaccgaaggaatgtatgtc

SEQ ID NO: 187898 - DNA, 24 bp, Artificial sequence
  SiRNA target sequence
tgtaaaccgaaggaatgtatgtca

SEQ ID NO: 187899 - DNA, 24 bp, Artificial sequence
  SiRNA target sequence
gtaaaccgaaggaatgtatgtcag

SEQ ID NO: 187900 - DNA, 24 bp, Artificial sequence
  SiRNA target sequence
taaaccgaaggaatgtatgtcaga

SEQ ID NO: 187901 - DNA, 24 bp, Artificial sequence
  SiRNA target sequence
aaaccgaaggaatgtatgtcagaa

SEQ ID NO: 187902 - DNA, 24 bp, Artificial sequence
  SiRNA target sequence
aaccgaaggaatgtatgtcagaat

SEQ ID NO: 187903 - DNA, 24 bp, Artificial sequence
  SiRNA target sequence
accgaaggaatgtatgtcagaatg

SEQ ID NO: 187904 - DNA, 24 bp, Artificial sequence
  SiRNA target sequence
ccgaaggaatgtatgtcagaatgt

SEQ ID NO: 187905 - DNA, 24 bp, Artificial sequence
  SiRNA target sequence
cgaaggaatgtatgtcagaatgta

SEQ ID NO: 187906 - DNA, 24 bp, Artificial sequence
  SiRNA target sequence
gaaggaatgtatgtcagaatgtaa

SEQ ID NO: 187907 - DNA, 24 bp, Artificial sequence
  SiRNA target sequence
aaggaatgtatgtcagaatgtaaa

SEQ ID NO: 187908 - DNA, 24 bp, Artificial sequence
  SiRNA target sequence
aggaatgtatgtcagaatgtaaaa

SEQ ID NO: 187909 - DNA, 24 bp, Artificial sequence
  SiRNA target sequence
ggaatgtatgtcagaatgtaaaaa

SEQ ID NO: 187910 - DNA, 24 bp, Artificial sequence
  SiRNA target sequence
gaatgtatgtcagaatgtaaaaag

SEQ ID NO: 187911 - DNA, 24 bp, Artificial sequence
  SiRNA target sequence
aatgtatgtcagaatgtaaaaagg

SEQ ID NO: 187912 - DNA, 24 bp, Artificial sequence
  SiRNA target sequence
atgtatgtcagaatgtaaaaaggc

SEQ ID NO: 187913 - DNA, 24 bp, Artificial sequence
  SiRNA target sequence
tgtatgtcagaatgtaaaaaggcg

SEQ ID NO: 187914 - DNA, 24 bp, Artificial sequence
  SiRNA target sequence
gtatgtcagaatgtaaaaaggcgt

SEQ ID NO: 187915 - DNA, 24 bp, Artificial sequence
  SiRNA target sequence
tatgtcagaatgtaaaaaggcgtg

SEQ ID NO: 187916 - DNA, 24 bp, Artificial sequence
  SiRNA target sequence
atgtcagaatgtaaaaaggcgtgt

SEQ ID NO: 187917 - DNA, 24 bp, Artificial sequence
  SiRNA target sequence
tgtcagaatgtaaaaaggcgtgtc

SEQ ID NO: 187918 - DNA, 24 bp, Artificial sequence
  SiRNA target sequence
gtcagaatgtaaaaaggcgtgtcc

SEQ ID NO: 187919 - DNA, 24 bp, Artificial sequence
  SiRNA target sequence
tcagaatgtaaaaaggcgtgtcct

SEQ ID NO: 187920 - DNA, 24 bp, Artificial sequence
  SiRNA target sequence
cagaatgtaaaaaggcgtgtcctg

SEQ ID NO: 187921 - DNA, 24 bp, Artificial sequence
  SiRNA target sequence
agaatgtaaaaaggcgtgtcctgt

SEQ ID NO: 187922 - DNA, 24 bp, Artificial sequence
  SiRNA target sequence
gaatgtaaaaaggcgtgtcctgtt

SEQ ID NO: 187923 - DNA, 24 bp, Artificial sequence
  SiRNA target sequence
aatgtaaaaaggcgtgtcctgtta

SEQ ID NO: 187924 - DNA, 24 bp, Artificial sequence
  SiRNA target sequence
atgtaaaaaggcgtgtcctgttaa

SEQ ID NO: 187925 - DNA, 24 bp, Artificial sequence
  SiRNA target sequence
tgtaaaaaggcgtgtcctgttaat

SEQ ID NO: 187926 - DNA, 24 bp, Artificial sequence
  SiRNA target sequence
gtaaaaaggcgtgtcctgttaata

SEQ ID NO: 187927 - DNA, 24 bp, Artificial sequence
  SiRNA target sequence
taaaaaggcgtgtcctgttaataa

SEQ ID NO: 187928 - DNA, 24 bp, Artificial sequence
  SiRNA target sequence
aaaaaggcgtgtcctgttaataaa

SEQ ID NO: 187929 - DNA, 24 bp, Artificial sequence
  SiRNA target sequence
aaaaggcgtgtcctgttaataaaa

SEQ ID NO: 187930 - DNA, 24 bp, Artificial sequence
  SiRNA target sequence
aaaggcgtgtcctgttaataaaac

SEQ ID NO: 187931 - DNA, 24 bp, Artificial sequence
  SiRNA target sequence
aaggcgtgtcctgttaataaaaca

SEQ ID NO: 187932 - DNA, 24 bp, Artificial sequence
  SiRNA target sequence
aggcgtgtcctgttaataaaacag

SEQ ID NO: 187933 - DNA, 24 bp, Artificial sequence
  SiRNA target sequence
ggcgtgtcctgttaataaaacagg

SEQ ID NO: 187934 - DNA, 24 bp, Artificial sequence
  SiRNA target sequence
gcgtgtcctgttaataaaacagga

SEQ ID NO: 187935 - DNA, 24 bp, Artificial sequence
  SiRNA target sequence
cgtgtcctgttaataaaacaggaa

SEQ ID NO: 187936 - DNA, 24 bp, Artificial sequence
  SiRNA target sequence
gtgtcctgttaataaaacaggaaa

SEQ ID NO: 187937 - DNA, 24 bp, Artificial sequence
  SiRNA target sequence
tgtcctgttaataaaacaggaaag

SEQ ID NO: 187938 - DNA, 24 bp, Artificial sequence
  SiRNA target sequence
gtcctgttaataaaacaggaaagg

SEQ ID NO: 187939 - DNA, 24 bp, Artificial sequence
  SiRNA target sequence
tcctgttaataaaacaggaaagga

SEQ ID NO: 187940 - DNA, 24 bp, Artificial sequence
  SiRNA target sequence
cctgttaataaaacaggaaaggag

SEQ ID NO: 187941 - DNA, 24 bp, Artificial sequence
  SiRNA target sequence
ctgttaataaaacaggaaaggagt

SEQ ID NO: 187942 - DNA, 24 bp, Artificial sequence
  SiRNA target sequence
tgttaataaaacaggaaaggagtg

SEQ ID NO: 187943 - DNA, 24 bp, Artificial sequence
  SiRNA target sequence
gttaataaaacaggaaaggagtgt

SEQ ID NO: 187944 - DNA, 24 bp, Artificial sequence
  SiRNA target sequence
ttaataaaacaggaaaggagtgta

SEQ ID NO: 187945 - DNA, 24 bp, Artificial sequence
  SiRNA target sequence
taataaaacaggaaaggagtgtat

SEQ ID NO: 187946 - DNA, 24 bp, Artificial sequence
  SiRNA target sequence
aataaaacaggaaaggagtgtatt

SEQ ID NO: 187947 - DNA, 24 bp, Artificial sequence
  SiRNA target sequence
ataaaacaggaaaggagtgtatta

SEQ ID NO: 187948 - DNA, 24 bp, Artificial sequence
  SiRNA target sequence
taaaacaggaaaggagtgtattac

SEQ ID NO: 187949 - DNA, 24 bp, Artificial sequence
  SiRNA target sequence
aaaacaggaaaggagtgtattaca

SEQ ID NO: 187950 - DNA, 24 bp, Artificial sequence
  SiRNA target sequence
aaacaggaaaggagtgtattacaa

SEQ ID NO: 187951 - DNA, 24 bp, Artificial sequence
  SiRNA target sequence
aacaggaaaggagtgtattacaat

SEQ ID NO: 187952 - DNA, 24 bp, Artificial sequence
  SiRNA target sequence
acaggaaaggagtgtattacaatt

SEQ ID NO: 187953 - DNA, 24 bp, Artificial sequence
  SiRNA target sequence
caggaaaggagtgtattacaattg

SEQ ID NO: 187954 - DNA, 24 bp, Artificial sequence
  SiRNA target sequence
aggaaaggagtgtattacaattga

SEQ ID NO: 187955 - DNA, 24 bp, Artificial sequence
  SiRNA target sequence
ggaaaggagtgtattacaattgat

SEQ ID NO: 187956 - DNA, 24 bp, Artificial sequence
  SiRNA target sequence
gaaaggagtgtattacaattgata

SEQ ID NO: 187957 - DNA, 24 bp, Artificial sequence
  SiRNA target sequence
aaaggagtgtattacaattgatac

SEQ ID NO: 187958 - DNA, 24 bp, Artificial sequence
  SiRNA target sequence
aaggagtgtattacaattgatact

SEQ ID NO: 187959 - DNA, 24 bp, Artificial sequence
  SiRNA target sequence
aggagtgtattacaattgatacta

SEQ ID NO: 187960 - DNA, 24 bp, Artificial sequence
  SiRNA target sequence
ggagtgtattacaattgatactaa

SEQ ID NO: 187961 - DNA, 24 bp, Artificial sequence
  SiRNA target sequence
gagtgtattacaattgatactaaa

SEQ ID NO: 187962 - DNA, 24 bp, Artificial sequence
  SiRNA target sequence
agtgtattacaattgatactaaat

SEQ ID NO: 187963 - DNA, 24 bp, Artificial sequence
  SiRNA target sequence
gtgtattacaattgatactaaatc

SEQ ID NO: 187964 - DNA, 24 bp, Artificial sequence
  SiRNA target sequence
tgtattacaattgatactaaatca

SEQ ID NO: 187965 - DNA, 24 bp, Artificial sequence
  SiRNA target sequence
gtattacaattgatactaaatcac

SEQ ID NO: 187966 - DNA, 24 bp, Artificial sequence
  SiRNA target sequence
tattacaattgatactaaatcaca

SEQ ID NO: 187967 - DNA, 24 bp, Artificial sequence
  SiRNA target sequence
attacaattgatactaaatcacat

SEQ ID NO: 187968 - DNA, 24 bp, Artificial sequence
  SiRNA target sequence
ttacaattgatactaaatcacata

SEQ ID NO: 187969 - DNA, 24 bp, Artificial sequence
  SiRNA target sequence
tacaattgatactaaatcacatat

SEQ ID NO: 187970 - DNA, 24 bp, Artificial sequence
  SiRNA target sequence
acaattgatactaaatcacatatc

SEQ ID NO: 187971 - DNA, 24 bp, Artificial sequence
  SiRNA target sequence
caattgatactaaatcacatatct

SEQ ID NO: 187972 - DNA, 24 bp, Artificial sequence
  SiRNA target sequence
aattgatactaaatcacatatctc

SEQ ID NO: 187973 - DNA, 24 bp, Artificial sequence
  SiRNA target sequence
attgatactaaatcacatatctca

SEQ ID NO: 187974 - DNA, 24 bp, Artificial sequence
  SiRNA target sequence
ttgatactaaatcacatatctcag

SEQ ID NO: 187975 - DNA, 24 bp, Artificial sequence
  SiRNA target sequence
tgatactaaatcacatatctcaga

SEQ ID NO: 187976 - DNA, 24 bp, Artificial sequence
  SiRNA target sequence
gatactaaatcacatatctcagaa

SEQ ID NO: 187977 - DNA, 24 bp, Artificial sequence
  SiRNA target sequence
atactaaatcacatatctcagaaa

SEQ ID NO: 187978 - DNA, 24 bp, Artificial sequence
  SiRNA target sequence
tactaaatcacatatctcagaaat

SEQ ID NO: 187979 - DNA, 24 bp, Artificial sequence
  SiRNA target sequence
actaaatcacatatctcagaaatt

SEQ ID NO: 187980 - DNA, 24 bp, Artificial sequence
  SiRNA target sequence
ctaaatcacatatctcagaaattc

SEQ ID NO: 187981 - DNA, 24 bp, Artificial sequence
  SiRNA target sequence
taaatcacatatctcagaaattct

SEQ ID NO: 187982 - DNA, 24 bp, Artificial sequence
  SiRNA target sequence
aaatcacatatctcagaaattctg

SEQ ID NO: 187983 - DNA, 24 bp, Artificial sequence
  SiRNA target sequence
aatcacatatctcagaaattctgt

SEQ ID NO: 187984 - DNA, 24 bp, Artificial sequence
  SiRNA target sequence
atcacatatctcagaaattctgtg

SEQ ID NO: 187985 - DNA, 24 bp, Artificial sequence
  SiRNA target sequence
tcacatatctcagaaattctgtgt

SEQ ID NO: 187986 - DNA, 24 bp, Artificial sequence
  SiRNA target sequence
cacatatctcagaaattctgtgta

SEQ ID NO: 187987 - DNA, 24 bp, Artificial sequence
  SiRNA target sequence
acatatctcagaaattctgtgtat

SEQ ID NO: 187988 - DNA, 24 bp, Artificial sequence
  SiRNA target sequence
catatctcagaaattctgtgtata

SEQ ID NO: 187989 - DNA, 24 bp, Artificial sequence
  SiRNA target sequence
atatctcagaaattctgtgtatag

SEQ ID NO: 187990 - DNA, 24 bp, Artificial sequence
  SiRNA target sequence
tatctcagaaattctgtgtatagg

SEQ ID NO: 187991 - DNA, 24 bp, Artificial sequence
  SiRNA target sequence
atctcagaaattctgtgtatagga

SEQ ID NO: 187992 - DNA, 24 bp, Artificial sequence
  SiRNA target sequence
tctcagaaattctgtgtataggat

SEQ ID NO: 187993 - DNA, 24 bp, Artificial sequence
  SiRNA target sequence
ctcagaaattctgtgtataggatg

SEQ ID NO: 187994 - DNA, 24 bp, Artificial sequence
  SiRNA target sequence
tcagaaattctgtgtataggatgt

SEQ ID NO: 187995 - DNA, 24 bp, Artificial sequence
  SiRNA target sequence
cagaaattctgtgtataggatgtt

SEQ ID NO: 187996 - DNA, 24 bp, Artificial sequence
  SiRNA target sequence
agaaattctgtgtataggatgttc

SEQ ID NO: 187997 - DNA, 24 bp, Artificial sequence
  SiRNA target sequence
gaaattctgtgtataggatgttct

SEQ ID NO: 187998 - DNA, 24 bp, Artificial sequence
  SiRNA target sequence
aaattctgtgtataggatgttctg

SEQ ID NO: 187999 - DNA, 24 bp, Artificial sequence
  SiRNA target sequence
aattctgtgtataggatgttctgc

SEQ ID NO: 188000 - DNA, 24 bp, Artificial sequence
  SiRNA target sequence
attctgtgtataggatgttctgcg

SEQ ID NO: 188001 - DNA, 24 bp, Artificial sequence
  SiRNA target sequence
ttctgtgtataggatgttctgcgt

SEQ ID NO: 188002 - DNA, 24 bp, Artificial sequence
  SiRNA target sequence
tctgtgtataggatgttctgcgtg

SEQ ID NO: 188003 - DNA, 24 bp, Artificial sequence
  SiRNA target sequence
ctgtgtataggatgttctgcgtgt

SEQ ID NO: 188004 - DNA, 24 bp, Artificial sequence
  SiRNA target sequence
tgtgtataggatgttctgcgtgtc

SEQ ID NO: 188005 - DNA, 24 bp, Artificial sequence
  SiRNA target sequence
gtgtataggatgttctgcgtgtca

SEQ ID NO: 188006 - DNA, 24 bp, Artificial sequence
  SiRNA target sequence
tgtataggatgttctgcgtgtcaa

SEQ ID NO: 188007 - DNA, 24 bp, Artificial sequence
  SiRNA target sequence
gtataggatgttctgcgtgtcaaa

SEQ ID NO: 188008 - DNA, 24 bp, Artificial sequence
  SiRNA target sequence
tataggatgttctgcgtgtcaaaa

SEQ ID NO: 188009 - DNA, 24 bp, Artificial sequence
  SiRNA target sequence
ataggatgttctgcgtgtcaaaag

SEQ ID NO: 188010 - DNA, 24 bp, Artificial sequence
  SiRNA target sequence
taggatgttctgcgtgtcaaaaga

SEQ ID NO: 188011 - DNA, 24 bp, Artificial sequence
  SiRNA target sequence
aggatgttctgcgtgtcaaaagaa

SEQ ID NO: 188012 - DNA, 24 bp, Artificial sequence
  SiRNA target sequence
ggatgttctgcgtgtcaaaagaaa

SEQ ID NO: 188013 - DNA, 24 bp, Artificial sequence
  SiRNA target sequence
gatgttctgcgtgtcaaaagaaat

SEQ ID NO: 188014 - DNA, 24 bp, Artificial sequence
  SiRNA target sequence
atgttctgcgtgtcaaaagaaatg

SEQ ID NO: 188015 - DNA, 24 bp, Artificial sequence
  SiRNA target sequence
tgttctgcgtgtcaaaagaaatgt

SEQ ID NO: 188016 - DNA, 24 bp, Artificial sequence
  SiRNA target sequence
gttctgcgtgtcaaaagaaatgtc

SEQ ID NO: 188017 - DNA, 24 bp, Artificial sequence
  SiRNA target sequence
ttctgcgtgtcaaaagaaatgtcc

SEQ ID NO: 188018 - DNA, 24 bp, Artificial sequence
  SiRNA target sequence
tctgcgtgtcaaaagaaatgtcct

SEQ ID NO: 188019 - DNA, 24 bp, Artificial sequence
  SiRNA target sequence
ctgcgtgtcaaaagaaatgtcctt

SEQ ID NO: 188020 - DNA, 24 bp, Artificial sequence
  SiRNA target sequence
tgcgtgtcaaaagaaatgtccttt

SEQ ID NO: 188021 - DNA, 24 bp, Artificial sequence
  SiRNA target sequence
gcgtgtcaaaagaaatgtcctttt

SEQ ID NO: 188022 - DNA, 24 bp, Artificial sequence
  SiRNA target sequence
cgtgtcaaaagaaatgtcctttta

SEQ ID NO: 188023 - DNA, 24 bp, Artificial sequence
  SiRNA target sequence
gtgtcaaaagaaatgtccttttaa

SEQ ID NO: 188024 - DNA, 24 bp, Artificial sequence
  SiRNA target sequence
tgtcaaaagaaatgtccttttaag

SEQ ID NO: 188025 - DNA, 24 bp, Artificial sequence
  SiRNA target sequence
gtcaaaagaaatgtccttttaagg

SEQ ID NO: 188026 - DNA, 24 bp, Artificial sequence
  SiRNA target sequence
tcaaaagaaatgtccttttaaggc

SEQ ID NO: 188027 - DNA, 24 bp, Artificial sequence
  SiRNA target sequence
caaaagaaatgtccttttaaggcg

SEQ ID NO: 188028 - DNA, 24 bp, Artificial sequence
  SiRNA target sequence
aaaagaaatgtccttttaaggcga

SEQ ID NO: 188029 - DNA, 24 bp, Artificial sequence
  SiRNA target sequence
aaagaaatgtccttttaaggcgat

SEQ ID NO: 188030 - DNA, 24 bp, Artificial sequence
  SiRNA target sequence
aagaaatgtccttttaaggcgatt

SEQ ID NO: 188031 - DNA, 24 bp, Artificial sequence
  SiRNA target sequence
agaaatgtccttttaaggcgatta

SEQ ID NO: 188032 - DNA, 24 bp, Artificial sequence
  SiRNA target sequence
gaaatgtccttttaaggcgattac

SEQ ID NO: 188033 - DNA, 24 bp, Artificial sequence
  SiRNA target sequence
aaatgtccttttaaggcgattaca

SEQ ID NO: 188034 - DNA, 24 bp, Artificial sequence
  SiRNA target sequence
aatgtccttttaaggcgattacaa

SEQ ID NO: 188035 - DNA, 24 bp, Artificial sequence
  SiRNA target sequence
atgtccttttaaggcgattacaat

SEQ ID NO: 188036 - DNA, 24 bp, Artificial sequence
  SiRNA target sequence
tgtccttttaaggcgattacaatt

SEQ ID NO: 188037 - DNA, 24 bp, Artificial sequence
  SiRNA target sequence
gtccttttaaggcgattacaattg

SEQ ID NO: 188038 - DNA, 24 bp, Artificial sequence
  SiRNA target sequence
tccttttaaggcgattacaattgt

SEQ ID NO: 188039 - DNA, 24 bp, Artificial sequence
  SiRNA target sequence
ccttttaaggcgattacaattgta

SEQ ID NO: 188040 - DNA, 24 bp, Artificial sequence
  SiRNA target sequence
cttttaaggcgattacaattgtaa

SEQ ID NO: 188041 - DNA, 24 bp, Artificial sequence
  SiRNA target sequence
ttttaaggcgattacaattgtaaa

SEQ ID NO: 188042 - DNA, 24 bp, Artificial sequence
  SiRNA target sequence
tttaaggcgattacaattgtaaat

SEQ ID NO: 188043 - DNA, 24 bp, Artificial sequence
  SiRNA target sequence
ttaaggcgattacaattgtaaatt

SEQ ID NO: 188044 - DNA, 24 bp, Artificial sequence
  SiRNA target sequence
taaggcgattacaattgtaaattt

SEQ ID NO: 188045 - DNA, 24 bp, Artificial sequence
  SiRNA target sequence
aaggcgattacaattgtaaattta

SEQ ID NO: 188046 - DNA, 24 bp, Artificial sequence
  SiRNA target sequence
aggcgattacaattgtaaatttac

SEQ ID NO: 188047 - DNA, 24 bp, Artificial sequence
  SiRNA target sequence
ggcgattacaattgtaaatttacc

SEQ ID NO: 188048 - DNA, 24 bp, Artificial sequence
  SiRNA target sequence
gcgattacaattgtaaatttacct

SEQ ID NO: 188049 - DNA, 24 bp, Artificial sequence
  SiRNA target sequence
cgattacaattgtaaatttaccta

SEQ ID NO: 188050 - DNA, 24 bp, Artificial sequence
  SiRNA target sequence
gattacaattgtaaatttacctac

SEQ ID NO: 188051 - DNA, 24 bp, Artificial sequence
  SiRNA target sequence
attacaattgtaaatttacctaca

SEQ ID NO: 188052 - DNA, 24 bp, Artificial sequence
  SiRNA target sequence
ttacaattgtaaatttacctacaa

SEQ ID NO: 188053 - DNA, 24 bp, Artificial sequence
  SiRNA target sequence
tacaattgtaaatttacctacaaa

SEQ ID NO: 188054 - DNA, 24 bp, Artificial sequence
  SiRNA target sequence
acaattgtaaatttacctacaaat

SEQ ID NO: 188055 - DNA, 24 bp, Artificial sequence
  SiRNA target sequence
caattgtaaatttacctacaaatc

SEQ ID NO: 188056 - DNA, 24 bp, Artificial sequence
  SiRNA target sequence
aattgtaaatttacctacaaatct

SEQ ID NO: 188057 - DNA, 24 bp, Artificial sequence
  SiRNA target sequence
attgtaaatttacctacaaatcta

SEQ ID NO: 188058 - DNA, 24 bp, Artificial sequence
  SiRNA target sequence
ttgtaaatttacctacaaatctag

SEQ ID NO: 188059 - DNA, 24 bp, Artificial sequence
  SiRNA target sequence
tgtaaatttacctacaaatctaga

SEQ ID NO: 188060 - DNA, 24 bp, Artificial sequence
  SiRNA target sequence
gtaaatttacctacaaatctagat

SEQ ID NO: 188061 - DNA, 24 bp, Artificial sequence
  SiRNA target sequence
taaatttacctacaaatctagata

SEQ ID NO: 188062 - DNA, 24 bp, Artificial sequence
  SiRNA target sequence
aaatttacctacaaatctagataa

SEQ ID NO: 188063 - DNA, 24 bp, Artificial sequence
  SiRNA target sequence
aatttacctacaaatctagataaa

SEQ ID NO: 188064 - DNA, 24 bp, Artificial sequence
  SiRNA target sequence
atttacctacaaatctagataaag

SEQ ID NO: 188065 - DNA, 24 bp, Artificial sequence
  SiRNA target sequence
tttacctacaaatctagataaaga

SEQ ID NO: 188066 - DNA, 24 bp, Artificial sequence
  SiRNA target sequence
ttacctacaaatctagataaagac

SEQ ID NO: 188067 - DNA, 24 bp, Artificial sequence
  SiRNA target sequence
tacctacaaatctagataaagaca

SEQ ID NO: 188068 - DNA, 24 bp, Artificial sequence
  SiRNA target sequence
acctacaaatctagataaagacat

SEQ ID NO: 188069 - DNA, 24 bp, Artificial sequence
  SiRNA target sequence
cctacaaatctagataaagacatt

SEQ ID NO: 188070 - DNA, 24 bp, Artificial sequence
  SiRNA target sequence
ctacaaatctagataaagacattt

SEQ ID NO: 188071 - DNA, 24 bp, Artificial sequence
  SiRNA target sequence
tacaaatctagataaagacatttc

SEQ ID NO: 188072 - DNA, 24 bp, Artificial sequence
  SiRNA target sequence
acaaatctagataaagacatttca

SEQ ID NO: 188073 - DNA, 24 bp, Artificial sequence
  SiRNA target sequence
caaatctagataaagacatttcac

SEQ ID NO: 188074 - DNA, 24 bp, Artificial sequence
  SiRNA target sequence
aaatctagataaagacatttcaca

SEQ ID NO: 188075 - DNA, 24 bp, Artificial sequence
  SiRNA target sequence
aatctagataaagacatttcacat

SEQ ID NO: 188076 - DNA, 24 bp, Artificial sequence
  SiRNA target sequence
atctagataaagacatttcacata

SEQ ID NO: 188077 - DNA, 24 bp, Artificial sequence
  SiRNA target sequence
tctagataaagacatttcacatag

SEQ ID NO: 188078 - DNA, 24 bp, Artificial sequence
  SiRNA target sequence
ctagataaagacatttcacataga

SEQ ID NO: 188079 - DNA, 24 bp, Artificial sequence
  SiRNA target sequence
tagataaagacatttcacatagat

SEQ ID NO: 188080 - DNA, 24 bp, Artificial sequence
  SiRNA target sequence
agataaagacatttcacatagata

SEQ ID NO: 188081 - DNA, 24 bp, Artificial sequence
  SiRNA target sequence
gataaagacatttcacatagatat

SEQ ID NO: 188082 - DNA, 24 bp, Artificial sequence
  SiRNA target sequence
ataaagacatttcacatagatatt

SEQ ID NO: 188083 - DNA, 24 bp, Artificial sequence
  SiRNA target sequence
taaagacatttcacatagatattc

SEQ ID NO: 188084 - DNA, 24 bp, Artificial sequence
  SiRNA target sequence
aaagacatttcacatagatattcg

SEQ ID NO: 188085 - DNA, 24 bp, Artificial sequence
  SiRNA target sequence
aagacatttcacatagatattcgg

SEQ ID NO: 188086 - DNA, 24 bp, Artificial sequence
  SiRNA target sequence
agacatttcacatagatattcggc

SEQ ID NO: 188087 - DNA, 24 bp, Artificial sequence
  SiRNA target sequence
gacatttcacatagatattcggca

SEQ ID NO: 188088 - DNA, 24 bp, Artificial sequence
  SiRNA target sequence
acatttcacatagatattcggcaa

SEQ ID NO: 188089 - DNA, 24 bp, Artificial sequence
  SiRNA target sequence
catttcacatagatattcggcaaa

SEQ ID NO: 188090 - DNA, 24 bp, Artificial sequence
  SiRNA target sequence
atttcacatagatattcggcaaat

SEQ ID NO: 188091 - DNA, 24 bp, Artificial sequence
  SiRNA target sequence
tttcacatagatattcggcaaatg

SEQ ID NO: 188092 - DNA, 24 bp, Artificial sequence
  SiRNA target sequence
ttcacatagatattcggcaaatgg

SEQ ID NO: 188093 - DNA, 24 bp, Artificial sequence
  SiRNA target sequence
tcacatagatattcggcaaatggt

SEQ ID NO: 188094 - DNA, 24 bp, Artificial sequence
  SiRNA target sequence
cacatagatattcggcaaatggtt

SEQ ID NO: 188095 - DNA, 24 bp, Artificial sequence
  SiRNA target sequence
acatagatattcggcaaatggttt

SEQ ID NO: 188096 - DNA, 24 bp, Artificial sequence
  SiRNA target sequence
catagatattcggcaaatggtttt

SEQ ID NO: 188097 - DNA, 24 bp, Artificial sequence
  SiRNA target sequence
atagatattcggcaaatggtttta

SEQ ID NO: 188098 - DNA, 24 bp, Artificial sequence
  SiRNA target sequence
tagatattcggcaaatggttttaa

SEQ ID NO: 188099 - DNA, 24 bp, Artificial sequence
  SiRNA target sequence
agatattcggcaaatggttttaaa

SEQ ID NO: 188100 - DNA, 24 bp, Artificial sequence
  SiRNA target sequence
gatattcggcaaatggttttaaac

SEQ ID NO: 188101 - DNA, 24 bp, Artificial sequence
  SiRNA target sequence
atattcggcaaatggttttaaact

SEQ ID NO: 188102 - DNA, 24 bp, Artificial sequence
  SiRNA target sequence
tattcggcaaatggttttaaactt

SEQ ID NO: 188103 - DNA, 24 bp, Artificial sequence
  SiRNA target sequence
attcggcaaatggttttaaacttc

SEQ ID NO: 188104 - DNA, 24 bp, Artificial sequence
  SiRNA target sequence
ttcggcaaatggttttaaacttca

SEQ ID NO: 188105 - DNA, 24 bp, Artificial sequence
  SiRNA target sequence
tcggcaaatggttttaaacttcac

SEQ ID NO: 188106 - DNA, 24 bp, Artificial sequence
  SiRNA target sequence
cggcaaatggttttaaacttcaca

SEQ ID NO: 188107 - DNA, 24 bp, Artificial sequence
  SiRNA target sequence
ggcaaatggttttaaacttcacag

SEQ ID NO: 188108 - DNA, 24 bp, Artificial sequence
  SiRNA target sequence
gcaaatggttttaaacttcacaga

SEQ ID NO: 188109 - DNA, 24 bp, Artificial sequence
  SiRNA target sequence
caaatggttttaaacttcacagat

SEQ ID NO: 188110 - DNA, 24 bp, Artificial sequence
  SiRNA target sequence
aaatggttttaaacttcacagatt

SEQ ID NO: 188111 - DNA, 24 bp, Artificial sequence
  SiRNA target sequence
aatggttttaaacttcacagatta

SEQ ID NO: 188112 - DNA, 24 bp, Artificial sequence
  SiRNA target sequence
atggttttaaacttcacagattac

SEQ ID NO: 188113 - DNA, 24 bp, Artificial sequence
  SiRNA target sequence
tggttttaaacttcacagattacc

SEQ ID NO: 188114 - DNA, 24 bp, Artificial sequence
  SiRNA target sequence
ggttttaaacttcacagattacca

SEQ ID NO: 188115 - DNA, 24 bp, Artificial sequence
  SiRNA target sequence
gttttaaacttcacagattaccaa

SEQ ID NO: 188116 - DNA, 24 bp, Artificial sequence
  SiRNA target sequence
ttttaaacttcacagattaccaat

SEQ ID NO: 188117 - DNA, 24 bp, Artificial sequence
  SiRNA target sequence
tttaaacttcacagattaccaatc

SEQ ID NO: 188118 - DNA, 24 bp, Artificial sequence
  SiRNA target sequence
ttaaacttcacagattaccaatcc

SEQ ID NO: 188119 - DNA, 24 bp, Artificial sequence
  SiRNA target sequence
taaacttcacagattaccaatccc

SEQ ID NO: 188120 - DNA, 24 bp, Artificial sequence
  SiRNA target sequence
aaacttcacagattaccaatccct

SEQ ID NO: 188121 - DNA, 24 bp, Artificial sequence
  SiRNA target sequence
aacttcacagattaccaatcccta

SEQ ID NO: 188122 - DNA, 24 bp, Artificial sequence
  SiRNA target sequence
acttcacagattaccaatccctaa

SEQ ID NO: 188123 - DNA, 24 bp, Artificial sequence
  SiRNA target sequence
cttcacagattaccaatccctaaa

SEQ ID NO: 188124 - DNA, 24 bp, Artificial sequence
  SiRNA target sequence
ttcacagattaccaatccctaaat

SEQ ID NO: 188125 - DNA, 24 bp, Artificial sequence
  SiRNA target sequence
tcacagattaccaatccctaaata

SEQ ID NO: 188126 - DNA, 24 bp, Artificial sequence
  SiRNA target sequence
cacagattaccaatccctaaatat

SEQ ID NO: 188127 - DNA, 24 bp, Artificial sequence
  SiRNA target sequence
acagattaccaatccctaaatatg

SEQ ID NO: 188128 - DNA, 24 bp, Artificial sequence
  SiRNA target sequence
cagattaccaatccctaaatatgg

SEQ ID NO: 188129 - DNA, 24 bp, Artificial sequence
  SiRNA target sequence
agattaccaatccctaaatatggt

SEQ ID NO: 188130 - DNA, 24 bp, Artificial sequence
  SiRNA target sequence
gattaccaatccctaaatatggta

SEQ ID NO: 188131 - DNA, 24 bp, Artificial sequence
  SiRNA target sequence
attaccaatccctaaatatggtaa

SEQ ID NO: 188132 - DNA, 24 bp, Artificial sequence
  SiRNA target sequence
ttaccaatccctaaatatggtaag

SEQ ID NO: 188133 - DNA, 24 bp, Artificial sequence
  SiRNA target sequence
taccaatccctaaatatggtaagg

SEQ ID NO: 188134 - DNA, 24 bp, Artificial sequence
  SiRNA target sequence
accaatccctaaatatggtaaggt

SEQ ID NO: 188135 - DNA, 24 bp, Artificial sequence
  SiRNA target sequence
ccaatccctaaatatggtaaggtt

SEQ ID NO: 188136 - DNA, 24 bp, Artificial sequence
  SiRNA target sequence
caatccctaaatatggtaaggttt

SEQ ID NO: 188137 - DNA, 24 bp, Artificial sequence
  SiRNA target sequence
aatccctaaatatggtaaggtttt

SEQ ID NO: 188138 - DNA, 24 bp, Artificial sequence
  SiRNA target sequence
atccctaaatatggtaaggtttta

SEQ ID NO: 188139 - DNA, 24 bp, Artificial sequence
  SiRNA target sequence
tccctaaatatggtaaggttttag

SEQ ID NO: 188140 - DNA, 24 bp, Artificial sequence
  SiRNA target sequence
ccctaaatatggtaaggttttagg

SEQ ID NO: 188141 - DNA, 24 bp, Artificial sequence
  SiRNA target sequence
cctaaatatggtaaggttttaggg

SEQ ID NO: 188142 - DNA, 24 bp, Artificial sequence
  SiRNA target sequence
ctaaatatggtaaggttttagggc

SEQ ID NO: 188143 - DNA, 24 bp, Artificial sequence
  SiRNA target sequence
taaatatggtaaggttttagggct

SEQ ID NO: 188144 - DNA, 24 bp, Artificial sequence
  SiRNA target sequence
aaatatggtaaggttttagggcta

SEQ ID NO: 188145 - DNA, 24 bp, Artificial sequence
  SiRNA target sequence
aatatggtaaggttttagggctag

SEQ ID NO: 188146 - DNA, 24 bp, Artificial sequence
  SiRNA target sequence
atatggtaaggttttagggctagt

SEQ ID NO: 188147 - DNA, 24 bp, Artificial sequence
  SiRNA target sequence
tatggtaaggttttagggctagta

SEQ ID NO: 188148 - DNA, 24 bp, Artificial sequence
  SiRNA target sequence
atggtaaggttttagggctagtag

SEQ ID NO: 188149 - DNA, 24 bp, Artificial sequence
  SiRNA target sequence
tggtaaggttttagggctagtagg

SEQ ID NO: 188150 - DNA, 24 bp, Artificial sequence
  SiRNA target sequence
ggtaaggttttagggctagtaggc

SEQ ID NO: 188151 - DNA, 24 bp, Artificial sequence
  SiRNA target sequence
gtaaggttttagggctagtaggca

SEQ ID NO: 188152 - DNA, 24 bp, Artificial sequence
  SiRNA target sequence
taaggttttagggctagtaggcac

SEQ ID NO: 188153 - DNA, 24 bp, Artificial sequence
  SiRNA target sequence
aaggttttagggctagtaggcact

SEQ ID NO: 188154 - DNA, 24 bp, Artificial sequence
  SiRNA target sequence
aggttttagggctagtaggcacta

SEQ ID NO: 188155 - DNA, 24 bp, Artificial sequence
  SiRNA target sequence
ggttttagggctagtaggcactaa

SEQ ID NO: 188156 - DNA, 24 bp, Artificial sequence
  SiRNA target sequence
gttttagggctagtaggcactaat

SEQ ID NO: 188157 - DNA, 24 bp, Artificial sequence
  SiRNA target sequence
ttttagggctagtaggcactaatg

SEQ ID NO: 188158 - DNA, 24 bp, Artificial sequence
  SiRNA target sequence
tttagggctagtaggcactaatgg

SEQ ID NO: 188159 - DNA, 24 bp, Artificial sequence
  SiRNA target sequence
ttagggctagtaggcactaatggt

SEQ ID NO: 188160 - DNA, 24 bp, Artificial sequence
  SiRNA target sequence
tagggctagtaggcactaatggta

SEQ ID NO: 188161 - DNA, 24 bp, Artificial sequence
  SiRNA target sequence
agggctagtaggcactaatggtat

SEQ ID NO: 188162 - DNA, 24 bp, Artificial sequence
  SiRNA target sequence
gggctagtaggcactaatggtata

SEQ ID NO: 188163 - DNA, 24 bp, Artificial sequence
  SiRNA target sequence
ggctagtaggcactaatggtatag

SEQ ID NO: 188164 - DNA, 24 bp, Artificial sequence
  SiRNA target sequence
gctagtaggcactaatggtatagg

SEQ ID NO: 188165 - DNA, 24 bp, Artificial sequence
  SiRNA target sequence
ctagtaggcactaatggtatagga

SEQ ID NO: 188166 - DNA, 24 bp, Artificial sequence
  SiRNA target sequence
tagtaggcactaatggtataggaa

SEQ ID NO: 188167 - DNA, 24 bp, Artificial sequence
  SiRNA target sequence
agtaggcactaatggtataggaaa

SEQ ID NO: 188168 - DNA, 24 bp, Artificial sequence
  SiRNA target sequence
gtaggcactaatggtataggaaaa

SEQ ID NO: 188169 - DNA, 24 bp, Artificial sequence
  SiRNA target sequence
taggcactaatggtataggaaaaa

SEQ ID NO: 188170 - DNA, 24 bp, Artificial sequence
  SiRNA target sequence
aggcactaatggtataggaaaaag

SEQ ID NO: 188171 - DNA, 24 bp, Artificial sequence
  SiRNA target sequence
ggcactaatggtataggaaaaagt

SEQ ID NO: 188172 - DNA, 24 bp, Artificial sequence
  SiRNA target sequence
gcactaatggtataggaaaaagta

SEQ ID NO: 188173 - DNA, 24 bp, Artificial sequence
  SiRNA target sequence
cactaatggtataggaaaaagtac

SEQ ID NO: 188174 - DNA, 24 bp, Artificial sequence
  SiRNA target sequence
actaatggtataggaaaaagtact

SEQ ID NO: 188175 - DNA, 24 bp, Artificial sequence
  SiRNA target sequence
ctaatggtataggaaaaagtactg

SEQ ID NO: 188176 - DNA, 24 bp, Artificial sequence
  SiRNA target sequence
taatggtataggaaaaagtactgc

SEQ ID NO: 188177 - DNA, 24 bp, Artificial sequence
  SiRNA target sequence
aatggtataggaaaaagtactgca

SEQ ID NO: 188178 - DNA, 24 bp, Artificial sequence
  SiRNA target sequence
atggtataggaaaaagtactgcac

SEQ ID NO: 188179 - DNA, 24 bp, Artificial sequence
  SiRNA target sequence
tggtataggaaaaagtactgcact

SEQ ID NO: 188180 - DNA, 24 bp, Artificial sequence
  SiRNA target sequence
ggtataggaaaaagtactgcactt

SEQ ID NO: 188181 - DNA, 24 bp, Artificial sequence
  SiRNA target sequence
gtataggaaaaagtactgcactta

SEQ ID NO: 188182 - DNA, 24 bp, Artificial sequence
  SiRNA target sequence
tataggaaaaagtactgcacttaa

SEQ ID NO: 188183 - DNA, 24 bp, Artificial sequence
  SiRNA target sequence
ataggaaaaagtactgcacttaaa

SEQ ID NO: 188184 - DNA, 24 bp, Artificial sequence
  SiRNA target sequence
taggaaaaagtactgcacttaaaa

SEQ ID NO: 188185 - DNA, 24 bp, Artificial sequence
  SiRNA target sequence
aggaaaaagtactgcacttaaaat

SEQ ID NO: 188186 - DNA, 24 bp, Artificial sequence
  SiRNA target sequence
ggaaaaagtactgcacttaaaata

SEQ ID NO: 188187 - DNA, 24 bp, Artificial sequence
  SiRNA target sequence
gaaaaagtactgcacttaaaatat

SEQ ID NO: 188188 - DNA, 24 bp, Artificial sequence
  SiRNA target sequence
aaaaagtactgcacttaaaatatt

SEQ ID NO: 188189 - DNA, 24 bp, Artificial sequence
  SiRNA target sequence
aaaagtactgcacttaaaatatta

SEQ ID NO: 188190 - DNA, 24 bp, Artificial sequence
  SiRNA target sequence
aaagtactgcacttaaaatattat

SEQ ID NO: 188191 - DNA, 24 bp, Artificial sequence
  SiRNA target sequence
aagtactgcacttaaaatattatc

SEQ ID NO: 188192 - DNA, 24 bp, Artificial sequence
  SiRNA target sequence
agtactgcacttaaaatattatcg

SEQ ID NO: 188193 - DNA, 24 bp, Artificial sequence
  SiRNA target sequence
gtactgcacttaaaatattatcgg

SEQ ID NO: 188194 - DNA, 24 bp, Artificial sequence
  SiRNA target sequence
tactgcacttaaaatattatcggg

SEQ ID NO: 188195 - DNA, 24 bp, Artificial sequence
  SiRNA target sequence
actgcacttaaaatattatcgggc

SEQ ID NO: 188196 - DNA, 24 bp, Artificial sequence
  SiRNA target sequence
ctgcacttaaaatattatcgggca

SEQ ID NO: 188197 - DNA, 24 bp, Artificial sequence
  SiRNA target sequence
tgcacttaaaatattatcgggcaa

SEQ ID NO: 188198 - DNA, 24 bp, Artificial sequence
  SiRNA target sequence
gcacttaaaatattatcgggcaat

SEQ ID NO: 188199 - DNA, 24 bp, Artificial sequence
  SiRNA target sequence
cacttaaaatattatcgggcaatc

SEQ ID NO: 188200 - DNA, 24 bp, Artificial sequence
  SiRNA target sequence
acttaaaatattatcgggcaatct

SEQ ID NO: 188201 - DNA, 24 bp, Artificial sequence
  SiRNA target sequence
cttaaaatattatcgggcaatctt

SEQ ID NO: 188202 - DNA, 24 bp, Artificial sequence
  SiRNA target sequence
ttaaaatattatcgggcaatctta

SEQ ID NO: 188203 - DNA, 24 bp, Artificial sequence
  SiRNA target sequence
taaaatattatcgggcaatcttaa

SEQ ID NO: 188204 - DNA, 24 bp, Artificial sequence
  SiRNA target sequence
aaaatattatcgggcaatcttaaa

SEQ ID NO: 188205 - DNA, 24 bp, Artificial sequence
  SiRNA target sequence
aaatattatcgggcaatcttaaac

SEQ ID NO: 188206 - DNA, 24 bp, Artificial sequence
  SiRNA target sequence
aatattatcgggcaatcttaaacc

SEQ ID NO: 188207 - DNA, 24 bp, Artificial sequence
  SiRNA target sequence
atattatcgggcaatcttaaacca

SEQ ID NO: 188208 - DNA, 24 bp, Artificial sequence
  SiRNA target sequence
tattatcgggcaatcttaaaccaa

SEQ ID NO: 188209 - DNA, 24 bp, Artificial sequence
  SiRNA target sequence
attatcgggcaatcttaaaccaaa

SEQ ID NO: 188210 - DNA, 24 bp, Artificial sequence
  SiRNA target sequence
ttatcgggcaatcttaaaccaaac

SEQ ID NO: 188211 - DNA, 24 bp, Artificial sequence
  SiRNA target sequence
tatcgggcaatcttaaaccaaact

SEQ ID NO: 188212 - DNA, 24 bp, Artificial sequence
  SiRNA target sequence
atcgggcaatcttaaaccaaactt

SEQ ID NO: 188213 - DNA, 24 bp, Artificial sequence
  SiRNA target sequence
tcgggcaatcttaaaccaaactta

SEQ ID NO: 188214 - DNA, 24 bp, Artificial sequence
  SiRNA target sequence
cgggcaatcttaaaccaaacttag

SEQ ID NO: 188215 - DNA, 24 bp, Artificial sequence
  SiRNA target sequence
gggcaatcttaaaccaaacttagg

SEQ ID NO: 188216 - DNA, 24 bp, Artificial sequence
  SiRNA target sequence
ggcaatcttaaaccaaacttagga

SEQ ID NO: 188217 - DNA, 24 bp, Artificial sequence
  SiRNA target sequence
gcaatcttaaaccaaacttaggaa

SEQ ID NO: 188218 - DNA, 24 bp, Artificial sequence
  SiRNA target sequence
caatcttaaaccaaacttaggaaa

SEQ ID NO: 188219 - DNA, 24 bp, Artificial sequence
  SiRNA target sequence
aatcttaaaccaaacttaggaaag

SEQ ID NO: 188220 - DNA, 24 bp, Artificial sequence
  SiRNA target sequence
atcttaaaccaaacttaggaaagt

SEQ ID NO: 188221 - DNA, 24 bp, Artificial sequence
  SiRNA target sequence
tcttaaaccaaacttaggaaagtt

SEQ ID NO: 188222 - DNA, 24 bp, Artificial sequence
  SiRNA target sequence
cttaaaccaaacttaggaaagttc

SEQ ID NO: 188223 - DNA, 24 bp, Artificial sequence
  SiRNA target sequence
ttaaaccaaacttaggaaagttcg

SEQ ID NO: 188224 - DNA, 24 bp, Artificial sequence
  SiRNA target sequence
taaaccaaacttaggaaagttcga

SEQ ID NO: 188225 - DNA, 24 bp, Artificial sequence
  SiRNA target sequence
aaaccaaacttaggaaagttcgac

SEQ ID NO: 188226 - DNA, 24 bp, Artificial sequence
  SiRNA target sequence
aaccaaacttaggaaagttcgacg

SEQ ID NO: 188227 - DNA, 24 bp, Artificial sequence
  SiRNA target sequence
accaaacttaggaaagttcgacgt

SEQ ID NO: 188228 - DNA, 24 bp, Artificial sequence
  SiRNA target sequence
ccaaacttaggaaagttcgacgtt

SEQ ID NO: 188229 - DNA, 24 bp, Artificial sequence
  SiRNA target sequence
caaacttaggaaagttcgacgtta

SEQ ID NO: 188230 - DNA, 24 bp, Artificial sequence
  SiRNA target sequence
aaacttaggaaagttcgacgttac

SEQ ID NO: 188231 - DNA, 24 bp, Artificial sequence
  SiRNA target sequence
aacttaggaaagttcgacgttacg

SEQ ID NO: 188232 - DNA, 24 bp, Artificial sequence
  SiRNA target sequence
acttaggaaagttcgacgttacgc

SEQ ID NO: 188233 - DNA, 24 bp, Artificial sequence
  SiRNA target sequence
cttaggaaagttcgacgttacgcc

SEQ ID NO: 188234 - DNA, 24 bp, Artificial sequence
  SiRNA target sequence
ttaggaaagttcgacgttacgccc

SEQ ID NO: 188235 - DNA, 24 bp, Artificial sequence
  SiRNA target sequence
taggaaagttcgacgttacgcccg

SEQ ID NO: 188236 - DNA, 24 bp, Artificial sequence
  SiRNA target sequence
aggaaagttcgacgttacgcccga

SEQ ID NO: 188237 - DNA, 24 bp, Artificial sequence
  SiRNA target sequence
ggaaagttcgacgttacgcccgac

SEQ ID NO: 188238 - DNA, 24 bp, Artificial sequence
  SiRNA target sequence
gaaagttcgacgttacgcccgact

SEQ ID NO: 188239 - DNA, 24 bp, Artificial sequence
  SiRNA target sequence
aaagttcgacgttacgcccgactg

SEQ ID NO: 188240 - DNA, 24 bp, Artificial sequence
  SiRNA target sequence
aagttcgacgttacgcccgactgg

SEQ ID NO: 188241 - DNA, 24 bp, Artificial sequence
  SiRNA target sequence
agttcgacgttacgcccgactggg

SEQ ID NO: 188242 - DNA, 24 bp, Artificial sequence
  SiRNA target sequence
gttcgacgttacgcccgactgggc

SEQ ID NO: 188243 - DNA, 24 bp, Artificial sequence
  SiRNA target sequence
ttcgacgttacgcccgactgggca

SEQ ID NO: 188244 - DNA, 24 bp, Artificial sequence
  SiRNA target sequence
tcgacgttacgcccgactgggcag

SEQ ID NO: 188245 - DNA, 24 bp, Artificial sequence
  SiRNA target sequence
cgacgttacgcccgactgggcagc

SEQ ID NO: 188246 - DNA, 24 bp, Artificial sequence
  SiRNA target sequence
gacgttacgcccgactgggcagca

SEQ ID NO: 188247 - DNA, 24 bp, Artificial sequence
  SiRNA target sequence
acgttacgcccgactgggcagcaa

SEQ ID NO: 188248 - DNA, 24 bp, Artificial sequence
  SiRNA target sequence
cgttacgcccgactgggcagcaat

SEQ ID NO: 188249 - DNA, 24 bp, Artificial sequence
  SiRNA target sequence
gttacgcccgactgggcagcaatt

SEQ ID NO: 188250 - DNA, 24 bp, Artificial sequence
  SiRNA target sequence
ttacgcccgactgggcagcaattc

SEQ ID NO: 188251 - DNA, 24 bp, Artificial sequence
  SiRNA target sequence
tacgcccgactgggcagcaattct

SEQ ID NO: 188252 - DNA, 24 bp, Artificial sequence
  SiRNA target sequence
acgcccgactgggcagcaattcta

SEQ ID NO: 188253 - DNA, 24 bp, Artificial sequence
  SiRNA target sequence
cgcccgactgggcagcaattctaa

SEQ ID NO: 188254 - DNA, 24 bp, Artificial sequence
  SiRNA target sequence
gcccgactgggcagcaattctaaa

SEQ ID NO: 188255 - DNA, 24 bp, Artificial sequence
  SiRNA target sequence
cccgactgggcagcaattctaaat

SEQ ID NO: 188256 - DNA, 24 bp, Artificial sequence
  SiRNA target sequence
ccgactgggcagcaattctaaata

SEQ ID NO: 188257 - DNA, 24 bp, Artificial sequence
  SiRNA target sequence
cgactgggcagcaattctaaataa

SEQ ID NO: 188258 - DNA, 24 bp, Artificial sequence
  SiRNA target sequence
gactgggcagcaattctaaataat

SEQ ID NO: 188259 - DNA, 24 bp, Artificial sequence
  SiRNA target sequence
actgggcagcaattctaaataatt

SEQ ID NO: 188260 - DNA, 24 bp, Artificial sequence
  SiRNA target sequence
ctgggcagcaattctaaataatta

SEQ ID NO: 188261 - DNA, 24 bp, Artificial sequence
  SiRNA target sequence
tgggcagcaattctaaataattat

SEQ ID NO: 188262 - DNA, 24 bp, Artificial sequence
  SiRNA target sequence
gggcagcaattctaaataattata

SEQ ID NO: 188263 - DNA, 24 bp, Artificial sequence
  SiRNA target sequence
ggcagcaattctaaataattataa

SEQ ID NO: 188264 - DNA, 24 bp, Artificial sequence
  SiRNA target sequence
gcagcaattctaaataattataaa

SEQ ID NO: 188265 - DNA, 24 bp, Artificial sequence
  SiRNA target sequence
cagcaattctaaataattataaag

SEQ ID NO: 188266 - DNA, 24 bp, Artificial sequence
  SiRNA target sequence
agcaattctaaataattataaagg

SEQ ID NO: 188267 - DNA, 24 bp, Artificial sequence
  SiRNA target sequence
gcaattctaaataattataaagga

SEQ ID NO: 188268 - DNA, 24 bp, Artificial sequence
  SiRNA target sequence
caattctaaataattataaaggat

SEQ ID NO: 188269 - DNA, 24 bp, Artificial sequence
  SiRNA target sequence
aattctaaataattataaaggatc

SEQ ID NO: 188270 - DNA, 24 bp, Artificial sequence
  SiRNA target sequence
attctaaataattataaaggatct

SEQ ID NO: 188271 - DNA, 24 bp, Artificial sequence
  SiRNA target sequence
ttctaaataattataaaggatctg

SEQ ID NO: 188272 - DNA, 24 bp, Artificial sequence
  SiRNA target sequence
tctaaataattataaaggatctga

SEQ ID NO: 188273 - DNA, 24 bp, Artificial sequence
  SiRNA target sequence
ctaaataattataaaggatctgaa

SEQ ID NO: 188274 - DNA, 24 bp, Artificial sequence
  SiRNA target sequence
taaataattataaaggatctgaac

SEQ ID NO: 188275 - DNA, 24 bp, Artificial sequence
  SiRNA target sequence
aaataattataaaggatctgaact

SEQ ID NO: 188276 - DNA, 24 bp, Artificial sequence
  SiRNA target sequence
aataattataaaggatctgaactt

SEQ ID NO: 188277 - DNA, 24 bp, Artificial sequence
  SiRNA target sequence
ataattataaaggatctgaacttc

SEQ ID NO: 188278 - DNA, 24 bp, Artificial sequence
  SiRNA target sequence
taattataaaggatctgaacttca

SEQ ID NO: 188279 - DNA, 24 bp, Artificial sequence
  SiRNA target sequence
aattataaaggatctgaacttcat

SEQ ID NO: 188280 - DNA, 24 bp, Artificial sequence
  SiRNA target sequence
attataaaggatctgaacttcatg

SEQ ID NO: 188281 - DNA, 24 bp, Artificial sequence
  SiRNA target sequence
ttataaaggatctgaacttcatgg

SEQ ID NO: 188282 - DNA, 24 bp, Artificial sequence
  SiRNA target sequence
tataaaggatctgaacttcatgga

SEQ ID NO: 188283 - DNA, 24 bp, Artificial sequence
  SiRNA target sequence
ataaaggatctgaacttcatggat

SEQ ID NO: 188284 - DNA, 24 bp, Artificial sequence
  SiRNA target sequence
taaaggatctgaacttcatggatt

SEQ ID NO: 188285 - DNA, 24 bp, Artificial sequence
  SiRNA target sequence
aaaggatctgaacttcatggattt

SEQ ID NO: 188286 - DNA, 24 bp, Artificial sequence
  SiRNA target sequence
aaggatctgaacttcatggatttt

SEQ ID NO: 188287 - DNA, 24 bp, Artificial sequence
  SiRNA target sequence
aggatctgaacttcatggattttt

SEQ ID NO: 188288 - DNA, 24 bp, Artificial sequence
  SiRNA target sequence
ggatctgaacttcatggatttttt

SEQ ID NO: 188289 - DNA, 24 bp, Artificial sequence
  SiRNA target sequence
gatctgaacttcatggatttttta

SEQ ID NO: 188290 - DNA, 24 bp, Artificial sequence
  SiRNA target sequence
atctgaacttcatggattttttac

SEQ ID NO: 188291 - DNA, 24 bp, Artificial sequence
  SiRNA target sequence
tctgaacttcatggattttttact

SEQ ID NO: 188292 - DNA, 24 bp, Artificial sequence
  SiRNA target sequence
ctgaacttcatggattttttacta

SEQ ID NO: 188293 - DNA, 24 bp, Artificial sequence
  SiRNA target sequence
tgaacttcatggattttttactaa

SEQ ID NO: 188294 - DNA, 24 bp, Artificial sequence
  SiRNA target sequence
gaacttcatggattttttactaaa

SEQ ID NO: 188295 - DNA, 24 bp, Artificial sequence
  SiRNA target sequence
aacttcatggattttttactaaaa

SEQ ID NO: 188296 - DNA, 24 bp, Artificial sequence
  SiRNA target sequence
acttcatggattttttactaaaat

SEQ ID NO: 188297 - DNA, 24 bp, Artificial sequence
  SiRNA target sequence
cttcatggattttttactaaaatt

SEQ ID NO: 188298 - DNA, 24 bp, Artificial sequence
  SiRNA target sequence
ttcatggattttttactaaaattt

SEQ ID NO: 188299 - DNA, 24 bp, Artificial sequence
  SiRNA target sequence
tcatggattttttactaaaatttt

SEQ ID NO: 188300 - DNA, 24 bp, Artificial sequence
  SiRNA target sequence
catggattttttactaaaatttta

SEQ ID NO: 188301 - DNA, 24 bp, Artificial sequence
  SiRNA target sequence
atggattttttactaaaattttag

SEQ ID NO: 188302 - DNA, 24 bp, Artificial sequence
  SiRNA target sequence
tggattttttactaaaattttaga

SEQ ID NO: 188303 - DNA, 24 bp, Artificial sequence
  SiRNA target sequence
ggattttttactaaaattttagaa

SEQ ID NO: 188304 - DNA, 24 bp, Artificial sequence
  SiRNA target sequence
gattttttactaaaattttagaag

SEQ ID NO: 188305 - DNA, 24 bp, Artificial sequence
  SiRNA target sequence
attttttactaaaattttagaagg

SEQ ID NO: 188306 - DNA, 24 bp, Artificial sequence
  SiRNA target sequence
ttttttactaaaattttagaaggg

SEQ ID NO: 188307 - DNA, 24 bp, Artificial sequence
  SiRNA target sequence
tttttactaaaattttagaagggt

SEQ ID NO: 188308 - DNA, 24 bp, Artificial sequence
  SiRNA target sequence
ttttactaaaattttagaagggtc

SEQ ID NO: 188309 - DNA, 24 bp, Artificial sequence
  SiRNA target sequence
tttactaaaattttagaagggtct

SEQ ID NO: 188310 - DNA, 24 bp, Artificial sequence
  SiRNA target sequence
ttactaaaattttagaagggtcta

SEQ ID NO: 188311 - DNA, 24 bp, Artificial sequence
  SiRNA target sequence
tactaaaattttagaagggtctat

SEQ ID NO: 188312 - DNA, 24 bp, Artificial sequence
  SiRNA target sequence
actaaaattttagaagggtctatt

SEQ ID NO: 188313 - DNA, 24 bp, Artificial sequence
  SiRNA target sequence
ctaaaattttagaagggtctatta

SEQ ID NO: 188314 - DNA, 24 bp, Artificial sequence
  SiRNA target sequence
taaaattttagaagggtctattaa

SEQ ID NO: 188315 - DNA, 24 bp, Artificial sequence
  SiRNA target sequence
aaaattttagaagggtctattaaa

SEQ ID NO: 188316 - DNA, 24 bp, Artificial sequence
  SiRNA target sequence
aaattttagaagggtctattaaag

SEQ ID NO: 188317 - DNA, 24 bp, Artificial sequence
  SiRNA target sequence
aattttagaagggtctattaaagc

SEQ ID NO: 188318 - DNA, 24 bp, Artificial sequence
  SiRNA target sequence
attttagaagggtctattaaagct

SEQ ID NO: 188319 - DNA, 24 bp, Artificial sequence
  SiRNA target sequence
ttttagaagggtctattaaagcta

SEQ ID NO: 188320 - DNA, 24 bp, Artificial sequence
  SiRNA target sequence
tttagaagggtctattaaagctat

SEQ ID NO: 188321 - DNA, 24 bp, Artificial sequence
  SiRNA target sequence
ttagaagggtctattaaagctatt

SEQ ID NO: 188322 - DNA, 24 bp, Artificial sequence
  SiRNA target sequence
tagaagggtctattaaagctattt

SEQ ID NO: 188323 - DNA, 24 bp, Artificial sequence
  SiRNA target sequence
agaagggtctattaaagctatttc

SEQ ID NO: 188324 - DNA, 24 bp, Artificial sequence
  SiRNA target sequence
gaagggtctattaaagctatttct

SEQ ID NO: 188325 - DNA, 24 bp, Artificial sequence
  SiRNA target sequence
aagggtctattaaagctatttcta

SEQ ID NO: 188326 - DNA, 24 bp, Artificial sequence
  SiRNA target sequence
agggtctattaaagctatttctaa

SEQ ID NO: 188327 - DNA, 24 bp, Artificial sequence
  SiRNA target sequence
gggtctattaaagctatttctaag

SEQ ID NO: 188328 - DNA, 24 bp, Artificial sequence
  SiRNA target sequence
ggtctattaaagctatttctaaga

SEQ ID NO: 188329 - DNA, 24 bp, Artificial sequence
  SiRNA target sequence
gtctattaaagctatttctaagat

SEQ ID NO: 188330 - DNA, 24 bp, Artificial sequence
  SiRNA target sequence
tctattaaagctatttctaagata

SEQ ID NO: 188331 - DNA, 24 bp, Artificial sequence
  SiRNA target sequence
ctattaaagctatttctaagatac

SEQ ID NO: 188332 - DNA, 24 bp, Artificial sequence
  SiRNA target sequence
tattaaagctatttctaagataca

SEQ ID NO: 188333 - DNA, 24 bp, Artificial sequence
  SiRNA target sequence
attaaagctatttctaagatacag

SEQ ID NO: 188334 - DNA, 24 bp, Artificial sequence
  SiRNA target sequence
ttaaagctatttctaagatacagt

SEQ ID NO: 188335 - DNA, 24 bp, Artificial sequence
  SiRNA target sequence
taaagctatttctaagatacagta

SEQ ID NO: 188336 - DNA, 24 bp, Artificial sequence
  SiRNA target sequence
aaagctatttctaagatacagtat

SEQ ID NO: 188337 - DNA, 24 bp, Artificial sequence
  SiRNA target sequence
aagctatttctaagatacagtata

SEQ ID NO: 188338 - DNA, 24 bp, Artificial sequence
  SiRNA target sequence
agctatttctaagatacagtatat

SEQ ID NO: 188339 - DNA, 24 bp, Artificial sequence
  SiRNA target sequence
gctatttctaagatacagtatata

SEQ ID NO: 188340 - DNA, 24 bp, Artificial sequence
  SiRNA target sequence
ctatttctaagatacagtatatag

SEQ ID NO: 188341 - DNA, 24 bp, Artificial sequence
  SiRNA target sequence
tatttctaagatacagtatataga

SEQ ID NO: 188342 - DNA, 24 bp, Artificial sequence
  SiRNA target sequence
atttctaagatacagtatatagat

SEQ ID NO: 188343 - DNA, 24 bp, Artificial sequence
  SiRNA target sequence
tttctaagatacagtatatagata

SEQ ID NO: 188344 - DNA, 24 bp, Artificial sequence
  SiRNA target sequence
ttctaagatacagtatatagataa

SEQ ID NO: 188345 - DNA, 24 bp, Artificial sequence
  SiRNA target sequence
tctaagatacagtatatagataaa

SEQ ID NO: 188346 - DNA, 24 bp, Artificial sequence
  SiRNA target sequence
ctaagatacagtatatagataaaa

SEQ ID NO: 188347 - DNA, 24 bp, Artificial sequence
  SiRNA target sequence
taagatacagtatatagataaaat

SEQ ID NO: 188348 - DNA, 24 bp, Artificial sequence
  SiRNA target sequence
aagatacagtatatagataaaatg

SEQ ID NO: 188349 - DNA, 24 bp, Artificial sequence
  SiRNA target sequence
agatacagtatatagataaaatgc

SEQ ID NO: 188350 - DNA, 24 bp, Artificial sequence
  SiRNA target sequence
gatacagtatatagataaaatgcc

SEQ ID NO: 188351 - DNA, 24 bp, Artificial sequence
  SiRNA target sequence
atacagtatatagataaaatgcct

SEQ ID NO: 188352 - DNA, 24 bp, Artificial sequence
  SiRNA target sequence
tacagtatatagataaaatgccta

SEQ ID NO: 188353 - DNA, 24 bp, Artificial sequence
  SiRNA target sequence
acagtatatagataaaatgcctaa

SEQ ID NO: 188354 - DNA, 24 bp, Artificial sequence
  SiRNA target sequence
cagtatatagataaaatgcctaaa

SEQ ID NO: 188355 - DNA, 24 bp, Artificial sequence
  SiRNA target sequence
agtatatagataaaatgcctaaat

SEQ ID NO: 188356 - DNA, 24 bp, Artificial sequence
  SiRNA target sequence
gtatatagataaaatgcctaaatt

SEQ ID NO: 188357 - DNA, 24 bp, Artificial sequence
  SiRNA target sequence
tatatagataaaatgcctaaattt

SEQ ID NO: 188358 - DNA, 24 bp, Artificial sequence
  SiRNA target sequence
atatagataaaatgcctaaatttt

SEQ ID NO: 188359 - DNA, 24 bp, Artificial sequence
  SiRNA target sequence
tatagataaaatgcctaaattttt

SEQ ID NO: 188360 - DNA, 24 bp, Artificial sequence
  SiRNA target sequence
atagataaaatgcctaaattttta

SEQ ID NO: 188361 - DNA, 24 bp, Artificial sequence
  SiRNA target sequence
tagataaaatgcctaaatttttaa

SEQ ID NO: 188362 - DNA, 24 bp, Artificial sequence
  SiRNA target sequence
agataaaatgcctaaatttttaaa

SEQ ID NO: 188363 - DNA, 24 bp, Artificial sequence
  SiRNA target sequence
gataaaatgcctaaatttttaaaa

SEQ ID NO: 188364 - DNA, 24 bp, Artificial sequence
  SiRNA target sequence
ataaaatgcctaaatttttaaaag

SEQ ID NO: 188365 - DNA, 24 bp, Artificial sequence
  SiRNA target sequence
taaaatgcctaaatttttaaaagg

SEQ ID NO: 188366 - DNA, 24 bp, Artificial sequence
  SiRNA target sequence
aaaatgcctaaatttttaaaagga

SEQ ID NO: 188367 - DNA, 24 bp, Artificial sequence
  SiRNA target sequence
aaatgcctaaatttttaaaaggac

SEQ ID NO: 188368 - DNA, 24 bp, Artificial sequence
  SiRNA target sequence
aatgcctaaatttttaaaaggacg

SEQ ID NO: 188369 - DNA, 24 bp, Artificial sequence
  SiRNA target sequence
atgcctaaatttttaaaaggacgc

SEQ ID NO: 188370 - DNA, 24 bp, Artificial sequence
  SiRNA target sequence
tgcctaaatttttaaaaggacgct

SEQ ID NO: 188371 - DNA, 24 bp, Artificial sequence
  SiRNA target sequence
gcctaaatttttaaaaggacgcta

SEQ ID NO: 188372 - DNA, 24 bp, Artificial sequence
  SiRNA target sequence
cctaaatttttaaaaggacgctat

SEQ ID NO: 188373 - DNA, 24 bp, Artificial sequence
  SiRNA target sequence
ctaaatttttaaaaggacgctata

SEQ ID NO: 188374 - DNA, 24 bp, Artificial sequence
  SiRNA target sequence
taaatttttaaaaggacgctataa

SEQ ID NO: 188375 - DNA, 24 bp, Artificial sequence
  SiRNA target sequence
aaatttttaaaaggacgctataag

SEQ ID NO: 188376 - DNA, 24 bp, Artificial sequence
  SiRNA target sequence
aatttttaaaaggacgctataagt

SEQ ID NO: 188377 - DNA, 24 bp, Artificial sequence
  SiRNA target sequence
atttttaaaaggacgctataagtc

SEQ ID NO: 188378 - DNA, 24 bp, Artificial sequence
  SiRNA target sequence
tttttaaaaggacgctataagtca

SEQ ID NO: 188379 - DNA, 24 bp, Artificial sequence
  SiRNA target sequence
ttttaaaaggacgctataagtcag

SEQ ID NO: 188380 - DNA, 24 bp, Artificial sequence
  SiRNA target sequence
tttaaaaggacgctataagtcaga

SEQ ID NO: 188381 - DNA, 24 bp, Artificial sequence
  SiRNA target sequence
ttaaaaggacgctataagtcagaa

SEQ ID NO: 188382 - DNA, 24 bp, Artificial sequence
  SiRNA target sequence
taaaaggacgctataagtcagaaa

SEQ ID NO: 188383 - DNA, 24 bp, Artificial sequence
  SiRNA target sequence
aaaaggacgctataagtcagaaat

SEQ ID NO: 188384 - DNA, 24 bp, Artificial sequence
  SiRNA target sequence
aaaggacgctataagtcagaaatc

SEQ ID NO: 188385 - DNA, 24 bp, Artificial sequence
  SiRNA target sequence
aaggacgctataagtcagaaatcg

SEQ ID NO: 188386 - DNA, 24 bp, Artificial sequence
  SiRNA target sequence
aggacgctataagtcagaaatcgc

SEQ ID NO: 188387 - DNA, 24 bp, Artificial sequence
  SiRNA target sequence
ggacgctataagtcagaaatcgcc

SEQ ID NO: 188388 - DNA, 24 bp, Artificial sequence
  SiRNA target sequence
gacgctataagtcagaaatcgcct

SEQ ID NO: 188389 - DNA, 24 bp, Artificial sequence
  SiRNA target sequence
acgctataagtcagaaatcgcctc

SEQ ID NO: 188390 - DNA, 24 bp, Artificial sequence
  SiRNA target sequence
cgctataagtcagaaatcgcctcc

SEQ ID NO: 188391 - DNA, 24 bp, Artificial sequence
  SiRNA target sequence
gctataagtcagaaatcgcctccg

SEQ ID NO: 188392 - DNA, 24 bp, Artificial sequence
  SiRNA target sequence
ctataagtcagaaatcgcctccgg

SEQ ID NO: 188393 - DNA, 24 bp, Artificial sequence
  SiRNA target sequence
tataagtcagaaatcgcctccgga

SEQ ID NO: 188394 - DNA, 24 bp, Artificial sequence
  SiRNA target sequence
ataagtcagaaatcgcctccggaa

SEQ ID NO: 188395 - DNA, 24 bp, Artificial sequence
  SiRNA target sequence
taagtcagaaatcgcctccggaaa

SEQ ID NO: 188396 - DNA, 24 bp, Artificial sequence
  SiRNA target sequence
aagtcagaaatcgcctccggaaaa

SEQ ID NO: 188397 - DNA, 24 bp, Artificial sequence
  SiRNA target sequence
agtcagaaatcgcctccggaaaaa

SEQ ID NO: 188398 - DNA, 24 bp, Artificial sequence
  SiRNA target sequence
gtcagaaatcgcctccggaaaaat

SEQ ID NO: 188399 - DNA, 24 bp, Artificial sequence
  SiRNA target sequence
tcagaaatcgcctccggaaaaatg

SEQ ID NO: 188400 - DNA, 24 bp, Artificial sequence
  SiRNA target sequence
cagaaatcgcctccggaaaaatgt

SEQ ID NO: 188401 - DNA, 24 bp, Artificial sequence
  SiRNA target sequence
agaaatcgcctccggaaaaatgtt

SEQ ID NO: 188402 - DNA, 24 bp, Artificial sequence
  SiRNA target sequence
gaaatcgcctccggaaaaatgttg

SEQ ID NO: 188403 - DNA, 24 bp, Artificial sequence
  SiRNA target sequence
aaatcgcctccggaaaaatgttgt

SEQ ID NO: 188404 - DNA, 24 bp, Artificial sequence
  SiRNA target sequence
aatcgcctccggaaaaatgttgtt

SEQ ID NO: 188405 - DNA, 24 bp, Artificial sequence
  SiRNA target sequence
atcgcctccggaaaaatgttgttt

SEQ ID NO: 188406 - DNA, 24 bp, Artificial sequence
  SiRNA target sequence
tcgcctccggaaaaatgttgttta

SEQ ID NO: 188407 - DNA, 24 bp, Artificial sequence
  SiRNA target sequence
cgcctccggaaaaatgttgtttac

SEQ ID NO: 188408 - DNA, 24 bp, Artificial sequence
  SiRNA target sequence
gcctccggaaaaatgttgtttact

SEQ ID NO: 188409 - DNA, 24 bp, Artificial sequence
  SiRNA target sequence
cctccggaaaaatgttgtttactg

SEQ ID NO: 188410 - DNA, 24 bp, Artificial sequence
  SiRNA target sequence
ctccggaaaaatgttgtttactgt

SEQ ID NO: 188411 - DNA, 24 bp, Artificial sequence
  SiRNA target sequence
tccggaaaaatgttgtttactgtt

SEQ ID NO: 188412 - DNA, 24 bp, Artificial sequence
  SiRNA target sequence
ccggaaaaatgttgtttactgtta

SEQ ID NO: 188413 - DNA, 24 bp, Artificial sequence
  SiRNA target sequence
cggaaaaatgttgtttactgttaa

SEQ ID NO: 188414 - DNA, 24 bp, Artificial sequence
  SiRNA target sequence
ggaaaaatgttgtttactgttaat

SEQ ID NO: 188415 - DNA, 24 bp, Artificial sequence
  SiRNA target sequence
gaaaaatgttgtttactgttaatg

SEQ ID NO: 188416 - DNA, 24 bp, Artificial sequence
  SiRNA target sequence
aaaaatgttgtttactgttaatga

SEQ ID NO: 188417 - DNA, 24 bp, Artificial sequence
  SiRNA target sequence
aaaatgttgtttactgttaatgat

SEQ ID NO: 188418 - DNA, 24 bp, Artificial sequence
  SiRNA target sequence
aaatgttgtttactgttaatgata

SEQ ID NO: 188419 - DNA, 24 bp, Artificial sequence
  SiRNA target sequence
aatgttgtttactgttaatgatat

SEQ ID NO: 188420 - DNA, 24 bp, Artificial sequence
  SiRNA target sequence
atgttgtttactgttaatgatata

SEQ ID NO: 188421 - DNA, 24 bp, Artificial sequence
  SiRNA target sequence
tgttgtttactgttaatgatatat

SEQ ID NO: 188422 - DNA, 24 bp, Artificial sequence
  SiRNA target sequence
gttgtttactgttaatgatatatt

SEQ ID NO: 188423 - DNA, 24 bp, Artificial sequence
  SiRNA target sequence
ttgtttactgttaatgatatatta

SEQ ID NO: 188424 - DNA, 24 bp, Artificial sequence
  SiRNA target sequence
tgtttactgttaatgatatattaa

SEQ ID NO: 188425 - DNA, 24 bp, Artificial sequence
  SiRNA target sequence
gtttactgttaatgatatattaaa

SEQ ID NO: 188426 - DNA, 24 bp, Artificial sequence
  SiRNA target sequence
tttactgttaatgatatattaaaa

SEQ ID NO: 188427 - DNA, 24 bp, Artificial sequence
  SiRNA target sequence
ttactgttaatgatatattaaaaa

SEQ ID NO: 188428 - DNA, 24 bp, Artificial sequence
  SiRNA target sequence
tactgttaatgatatattaaaaaa

SEQ ID NO: 188429 - DNA, 24 bp, Artificial sequence
  SiRNA target sequence
actgttaatgatatattaaaaaaa

SEQ ID NO: 188430 - DNA, 24 bp, Artificial sequence
  SiRNA target sequence
ctgttaatgatatattaaaaaaag

SEQ ID NO: 188431 - DNA, 24 bp, Artificial sequence
  SiRNA target sequence
tgttaatgatatattaaaaaaagt

SEQ ID NO: 188432 - DNA, 24 bp, Artificial sequence
  SiRNA target sequence
gttaatgatatattaaaaaaagtt

SEQ ID NO: 188433 - DNA, 24 bp, Artificial sequence
  SiRNA target sequence
ttaatgatatattaaaaaaagttg

SEQ ID NO: 188434 - DNA, 24 bp, Artificial sequence
  SiRNA target sequence
taatgatatattaaaaaaagttga

SEQ ID NO: 188435 - DNA, 24 bp, Artificial sequence
  SiRNA target sequence
aatgatatattaaaaaaagttgat

SEQ ID NO: 188436 - DNA, 24 bp, Artificial sequence
  SiRNA target sequence
atgatatattaaaaaaagttgatg

SEQ ID NO: 188437 - DNA, 24 bp, Artificial sequence
  SiRNA target sequence
tgatatattaaaaaaagttgatga

SEQ ID NO: 188438 - DNA, 24 bp, Artificial sequence
  SiRNA target sequence
gatatattaaaaaaagttgatgaa

SEQ ID NO: 188439 - DNA, 24 bp, Artificial sequence
  SiRNA target sequence
atatattaaaaaaagttgatgaaa

SEQ ID NO: 188440 - DNA, 24 bp, Artificial sequence
  SiRNA target sequence
tatattaaaaaaagttgatgaaaa

SEQ ID NO: 188441 - DNA, 24 bp, Artificial sequence
  SiRNA target sequence
atattaaaaaaagttgatgaaaaa

SEQ ID NO: 188442 - DNA, 24 bp, Artificial sequence
  SiRNA target sequence
tattaaaaaaagttgatgaaaaaa

SEQ ID NO: 188443 - DNA, 24 bp, Artificial sequence
  SiRNA target sequence
attaaaaaaagttgatgaaaaaaa

SEQ ID NO: 188444 - DNA, 24 bp, Artificial sequence
  SiRNA target sequence
ttaaaaaaagttgatgaaaaaaat

SEQ ID NO: 188445 - DNA, 24 bp, Artificial sequence
  SiRNA target sequence
taaaaaaagttgatgaaaaaaata

SEQ ID NO: 188446 - DNA, 24 bp, Artificial sequence
  SiRNA target sequence
aaaaaaagttgatgaaaaaaataa

SEQ ID NO: 188447 - DNA, 24 bp, Artificial sequence
  SiRNA target sequence
aaaaaagttgatgaaaaaaataaa

SEQ ID NO: 188448 - DNA, 24 bp, Artificial sequence
  SiRNA target sequence
aaaaagttgatgaaaaaaataaat

SEQ ID NO: 188449 - DNA, 24 bp, Artificial sequence
  SiRNA target sequence
aaaagttgatgaaaaaaataaatt

SEQ ID NO: 188450 - DNA, 24 bp, Artificial sequence
  SiRNA target sequence
aaagttgatgaaaaaaataaattt

SEQ ID NO: 188451 - DNA, 24 bp, Artificial sequence
  SiRNA target sequence
aagttgatgaaaaaaataaatttg

SEQ ID NO: 188452 - DNA, 24 bp, Artificial sequence
  SiRNA target sequence
agttgatgaaaaaaataaatttga

SEQ ID NO: 188453 - DNA, 24 bp, Artificial sequence
  SiRNA target sequence
gttgatgaaaaaaataaatttgac

SEQ ID NO: 188454 - DNA, 24 bp, Artificial sequence
  SiRNA target sequence
ttgatgaaaaaaataaatttgact

SEQ ID NO: 188455 - DNA, 24 bp, Artificial sequence
  SiRNA target sequence
tgatgaaaaaaataaatttgacta

SEQ ID NO: 188456 - DNA, 24 bp, Artificial sequence
  SiRNA target sequence
gatgaaaaaaataaatttgactat

SEQ ID NO: 188457 - DNA, 24 bp, Artificial sequence
  SiRNA target sequence
atgaaaaaaataaatttgactatt

SEQ ID NO: 188458 - DNA, 24 bp, Artificial sequence
  SiRNA target sequence
tgaaaaaaataaatttgactatta

SEQ ID NO: 188459 - DNA, 24 bp, Artificial sequence
  SiRNA target sequence
gaaaaaaataaatttgactattac

SEQ ID NO: 188460 - DNA, 24 bp, Artificial sequence
  SiRNA target sequence
aaaaaaataaatttgactattacg

SEQ ID NO: 188461 - DNA, 24 bp, Artificial sequence
  SiRNA target sequence
aaaaaataaatttgactattacgt

SEQ ID NO: 188462 - DNA, 24 bp, Artificial sequence
  SiRNA target sequence
aaaaataaatttgactattacgta

SEQ ID NO: 188463 - DNA, 24 bp, Artificial sequence
  SiRNA target sequence
aaaataaatttgactattacgtag

SEQ ID NO: 188464 - DNA, 24 bp, Artificial sequence
  SiRNA target sequence
aaataaatttgactattacgtaga

SEQ ID NO: 188465 - DNA, 24 bp, Artificial sequence
  SiRNA target sequence
aataaatttgactattacgtagat

SEQ ID NO: 188466 - DNA, 24 bp, Artificial sequence
  SiRNA target sequence
ataaatttgactattacgtagata

SEQ ID NO: 188467 - DNA, 24 bp, Artificial sequence
  SiRNA target sequence
taaatttgactattacgtagataa

SEQ ID NO: 188468 - DNA, 24 bp, Artificial sequence
  SiRNA target sequence
aaatttgactattacgtagataaa

SEQ ID NO: 188469 - DNA, 24 bp, Artificial sequence
  SiRNA target sequence
aatttgactattacgtagataaaa

SEQ ID NO: 188470 - DNA, 24 bp, Artificial sequence
  SiRNA target sequence
atttgactattacgtagataaaat

SEQ ID NO: 188471 - DNA, 24 bp, Artificial sequence
  SiRNA target sequence
tttgactattacgtagataaaatg

SEQ ID NO: 188472 - DNA, 24 bp, Artificial sequence
  SiRNA target sequence
ttgactattacgtagataaaatgg

SEQ ID NO: 188473 - DNA, 24 bp, Artificial sequence
  SiRNA target sequence
tgactattacgtagataaaatggc

SEQ ID NO: 188474 - DNA, 24 bp, Artificial sequence
  SiRNA target sequence
gactattacgtagataaaatggca

SEQ ID NO: 188475 - DNA, 24 bp, Artificial sequence
  SiRNA target sequence
actattacgtagataaaatggcac

SEQ ID NO: 188476 - DNA, 24 bp, Artificial sequence
  SiRNA target sequence
ctattacgtagataaaatggcact

SEQ ID NO: 188477 - DNA, 24 bp, Artificial sequence
  SiRNA target sequence
tattacgtagataaaatggcactt

SEQ ID NO: 188478 - DNA, 24 bp, Artificial sequence
  SiRNA target sequence
attacgtagataaaatggcactta

SEQ ID NO: 188479 - DNA, 24 bp, Artificial sequence
  SiRNA target sequence
ttacgtagataaaatggcacttaa

SEQ ID NO: 188480 - DNA, 24 bp, Artificial sequence
  SiRNA target sequence
tacgtagataaaatggcacttaaa

SEQ ID NO: 188481 - DNA, 24 bp, Artificial sequence
  SiRNA target sequence
acgtagataaaatggcacttaaaa

SEQ ID NO: 188482 - DNA, 24 bp, Artificial sequence
  SiRNA target sequence
cgtagataaaatggcacttaaaaa

SEQ ID NO: 188483 - DNA, 24 bp, Artificial sequence
  SiRNA target sequence
gtagataaaatggcacttaaaaat

SEQ ID NO: 188484 - DNA, 24 bp, Artificial sequence
  SiRNA target sequence
tagataaaatggcacttaaaaatg

SEQ ID NO: 188485 - DNA, 24 bp, Artificial sequence
  SiRNA target sequence
agataaaatggcacttaaaaatgt

SEQ ID NO: 188486 - DNA, 24 bp, Artificial sequence
  SiRNA target sequence
gataaaatggcacttaaaaatgta

SEQ ID NO: 188487 - DNA, 24 bp, Artificial sequence
  SiRNA target sequence
ataaaatggcacttaaaaatgtat

SEQ ID NO: 188488 - DNA, 24 bp, Artificial sequence
  SiRNA target sequence
taaaatggcacttaaaaatgtatt

SEQ ID NO: 188489 - DNA, 24 bp, Artificial sequence
  SiRNA target sequence
aaaatggcacttaaaaatgtatta

SEQ ID NO: 188490 - DNA, 24 bp, Artificial sequence
  SiRNA target sequence
aaatggcacttaaaaatgtattaa

SEQ ID NO: 188491 - DNA, 24 bp, Artificial sequence
  SiRNA target sequence
aatggcacttaaaaatgtattaac

SEQ ID NO: 188492 - DNA, 24 bp, Artificial sequence
  SiRNA target sequence
atggcacttaaaaatgtattaaca

SEQ ID NO: 188493 - DNA, 24 bp, Artificial sequence
  SiRNA target sequence
tggcacttaaaaatgtattaacaa

SEQ ID NO: 188494 - DNA, 24 bp, Artificial sequence
  SiRNA target sequence
ggcacttaaaaatgtattaacaag

SEQ ID NO: 188495 - DNA, 24 bp, Artificial sequence
  SiRNA target sequence
gcacttaaaaatgtattaacaaga

SEQ ID NO: 188496 - DNA, 24 bp, Artificial sequence
  SiRNA target sequence
cacttaaaaatgtattaacaagag

SEQ ID NO: 188497 - DNA, 24 bp, Artificial sequence
  SiRNA target sequence
acttaaaaatgtattaacaagaga

SEQ ID NO: 188498 - DNA, 24 bp, Artificial sequence
  SiRNA target sequence
cttaaaaatgtattaacaagagaa

SEQ ID NO: 188499 - DNA, 24 bp, Artificial sequence
  SiRNA target sequence
ttaaaaatgtattaacaagagaat

SEQ ID NO: 188500 - DNA, 24 bp, Artificial sequence
  SiRNA target sequence
taaaaatgtattaacaagagaatt

SEQ ID NO: 188501 - DNA, 24 bp, Artificial sequence
  SiRNA target sequence
aaaaatgtattaacaagagaatta

SEQ ID NO: 188502 - DNA, 24 bp, Artificial sequence
  SiRNA target sequence
aaaatgtattaacaagagaattag

SEQ ID NO: 188503 - DNA, 24 bp, Artificial sequence
  SiRNA target sequence
aaatgtattaacaagagaattaga

SEQ ID NO: 188504 - DNA, 24 bp, Artificial sequence
  SiRNA target sequence
aatgtattaacaagagaattagag

SEQ ID NO: 188505 - DNA, 24 bp, Artificial sequence
  SiRNA target sequence
atgtattaacaagagaattagagc

SEQ ID NO: 188506 - DNA, 24 bp, Artificial sequence
  SiRNA target sequence
tgtattaacaagagaattagagca

SEQ ID NO: 188507 - DNA, 24 bp, Artificial sequence
  SiRNA target sequence
gtattaacaagagaattagagcaa

SEQ ID NO: 188508 - DNA, 24 bp, Artificial sequence
  SiRNA target sequence
tattaacaagagaattagagcaat

SEQ ID NO: 188509 - DNA, 24 bp, Artificial sequence
  SiRNA target sequence
attaacaagagaattagagcaatt

SEQ ID NO: 188510 - DNA, 24 bp, Artificial sequence
  SiRNA target sequence
ttaacaagagaattagagcaatta

SEQ ID NO: 188511 - DNA, 24 bp, Artificial sequence
  SiRNA target sequence
taacaagagaattagagcaattaa

SEQ ID NO: 188512 - DNA, 24 bp, Artificial sequence
  SiRNA target sequence
aacaagagaattagagcaattaag

SEQ ID NO: 188513 - DNA, 24 bp, Artificial sequence
  SiRNA target sequence
acaagagaattagagcaattaagt

SEQ ID NO: 188514 - DNA, 24 bp, Artificial sequence
  SiRNA target sequence
caagagaattagagcaattaagtg

SEQ ID NO: 188515 - DNA, 24 bp, Artificial sequence
  SiRNA target sequence
aagagaattagagcaattaagtgg

SEQ ID NO: 188516 - DNA, 24 bp, Artificial sequence
  SiRNA target sequence
agagaattagagcaattaagtggt

SEQ ID NO: 188517 - DNA, 24 bp, Artificial sequence
  SiRNA target sequence
gagaattagagcaattaagtggtg

SEQ ID NO: 188518 - DNA, 24 bp, Artificial sequence
  SiRNA target sequence
agaattagagcaattaagtggtgg

SEQ ID NO: 188519 - DNA, 24 bp, Artificial sequence
  SiRNA target sequence
gaattagagcaattaagtggtggt

SEQ ID NO: 188520 - DNA, 24 bp, Artificial sequence
  SiRNA target sequence
aattagagcaattaagtggtggtg

SEQ ID NO: 188521 - DNA, 24 bp, Artificial sequence
  SiRNA target sequence
attagagcaattaagtggtggtga

SEQ ID NO: 188522 - DNA, 24 bp, Artificial sequence
  SiRNA target sequence
ttagagcaattaagtggtggtgaa

SEQ ID NO: 188523 - DNA, 24 bp, Artificial sequence
  SiRNA target sequence
tagagcaattaagtggtggtgaac

SEQ ID NO: 188524 - DNA, 24 bp, Artificial sequence
  SiRNA target sequence
agagcaattaagtggtggtgaact

SEQ ID NO: 188525 - DNA, 24 bp, Artificial sequence
  SiRNA target sequence
gagcaattaagtggtggtgaactt

SEQ ID NO: 188526 - DNA, 24 bp, Artificial sequence
  SiRNA target sequence
agcaattaagtggtggtgaacttc

SEQ ID NO: 188527 - DNA, 24 bp, Artificial sequence
  SiRNA target sequence
gcaattaagtggtggtgaacttca

SEQ ID NO: 188528 - DNA, 24 bp, Artificial sequence
  SiRNA target sequence
caattaagtggtggtgaacttcaa

SEQ ID NO: 188529 - DNA, 24 bp, Artificial sequence
  SiRNA target sequence
aattaagtggtggtgaacttcaaa

SEQ ID NO: 188530 - DNA, 24 bp, Artificial sequence
  SiRNA target sequence
attaagtggtggtgaacttcaaag

SEQ ID NO: 188531 - DNA, 24 bp, Artificial sequence
  SiRNA target sequence
ttaagtggtggtgaacttcaaaga

SEQ ID NO: 188532 - DNA, 24 bp, Artificial sequence
  SiRNA target sequence
taagtggtggtgaacttcaaagat

SEQ ID NO: 188533 - DNA, 24 bp, Artificial sequence
  SiRNA target sequence
aagtggtggtgaacttcaaagatt

SEQ ID NO: 188534 - DNA, 24 bp, Artificial sequence
  SiRNA target sequence
agtggtggtgaacttcaaagattt

SEQ ID NO: 188535 - DNA, 24 bp, Artificial sequence
  SiRNA target sequence
gtggtggtgaacttcaaagatttt

SEQ ID NO: 188536 - DNA, 24 bp, Artificial sequence
  SiRNA target sequence
tggtggtgaacttcaaagattttg

SEQ ID NO: 188537 - DNA, 24 bp, Artificial sequence
  SiRNA target sequence
ggtggtgaacttcaaagattttgt

SEQ ID NO: 188538 - DNA, 24 bp, Artificial sequence
  SiRNA target sequence
gtggtgaacttcaaagattttgta

SEQ ID NO: 188539 - DNA, 24 bp, Artificial sequence
  SiRNA target sequence
tggtgaacttcaaagattttgtat

SEQ ID NO: 188540 - DNA, 24 bp, Artificial sequence
  SiRNA target sequence
ggtgaacttcaaagattttgtatt

SEQ ID NO: 188541 - DNA, 24 bp, Artificial sequence
  SiRNA target sequence
gtgaacttcaaagattttgtattg

SEQ ID NO: 188542 - DNA, 24 bp, Artificial sequence
  SiRNA target sequence
tgaacttcaaagattttgtattgc

SEQ ID NO: 188543 - DNA, 24 bp, Artificial sequence
  SiRNA target sequence
gaacttcaaagattttgtattgca

SEQ ID NO: 188544 - DNA, 24 bp, Artificial sequence
  SiRNA target sequence
aacttcaaagattttgtattgcat

SEQ ID NO: 188545 - DNA, 24 bp, Artificial sequence
  SiRNA target sequence
acttcaaagattttgtattgcata

SEQ ID NO: 188546 - DNA, 24 bp, Artificial sequence
  SiRNA target sequence
cttcaaagattttgtattgcatac

SEQ ID NO: 188547 - DNA, 24 bp, Artificial sequence
  SiRNA target sequence
ttcaaagattttgtattgcataca

SEQ ID NO: 188548 - DNA, 24 bp, Artificial sequence
  SiRNA target sequence
tcaaagattttgtattgcatacac

SEQ ID NO: 188549 - DNA, 24 bp, Artificial sequence
  SiRNA target sequence
caaagattttgtattgcatacaca

SEQ ID NO: 188550 - DNA, 24 bp, Artificial sequence
  SiRNA target sequence
aaagattttgtattgcatacacat

SEQ ID NO: 188551 - DNA, 24 bp, Artificial sequence
  SiRNA target sequence
aagattttgtattgcatacacatg

SEQ ID NO: 188552 - DNA, 24 bp, Artificial sequence
  SiRNA target sequence
agattttgtattgcatacacatgt

SEQ ID NO: 188553 - DNA, 24 bp, Artificial sequence
  SiRNA target sequence
gattttgtattgcatacacatgtt

SEQ ID NO: 188554 - DNA, 24 bp, Artificial sequence
  SiRNA target sequence
attttgtattgcatacacatgttt

SEQ ID NO: 188555 - DNA, 24 bp, Artificial sequence
  SiRNA target sequence
ttttgtattgcatacacatgttta

SEQ ID NO: 188556 - DNA, 24 bp, Artificial sequence
  SiRNA target sequence
tttgtattgcatacacatgtttac

SEQ ID NO: 188557 - DNA, 24 bp, Artificial sequence
  SiRNA target sequence
ttgtattgcatacacatgtttaca

SEQ ID NO: 188558 - DNA, 24 bp, Artificial sequence
  SiRNA target sequence
tgtattgcatacacatgtttacaa

SEQ ID NO: 188559 - DNA, 24 bp, Artificial sequence
  SiRNA target sequence
gtattgcatacacatgtttacaag

SEQ ID NO: 188560 - DNA, 24 bp, Artificial sequence
  SiRNA target sequence
tattgcatacacatgtttacaaga

SEQ ID NO: 188561 - DNA, 24 bp, Artificial sequence
  SiRNA target sequence
attgcatacacatgtttacaagaa

SEQ ID NO: 188562 - DNA, 24 bp, Artificial sequence
  SiRNA target sequence
ttgcatacacatgtttacaagaag

SEQ ID NO: 188563 - DNA, 24 bp, Artificial sequence
  SiRNA target sequence
tgcatacacatgtttacaagaagg

SEQ ID NO: 188564 - DNA, 24 bp, Artificial sequence
  SiRNA target sequence
gcatacacatgtttacaagaagga

SEQ ID NO: 188565 - DNA, 24 bp, Artificial sequence
  SiRNA target sequence
catacacatgtttacaagaaggaa

SEQ ID NO: 188566 - DNA, 24 bp, Artificial sequence
  SiRNA target sequence
atacacatgtttacaagaaggaaa

SEQ ID NO: 188567 - DNA, 24 bp, Artificial sequence
  SiRNA target sequence
tacacatgtttacaagaaggaaat

SEQ ID NO: 188568 - DNA, 24 bp, Artificial sequence
  SiRNA target sequence
acacatgtttacaagaaggaaatg

SEQ ID NO: 188569 - DNA, 24 bp, Artificial sequence
  SiRNA target sequence
cacatgtttacaagaaggaaatgt

SEQ ID NO: 188570 - DNA, 24 bp, Artificial sequence
  SiRNA target sequence
acatgtttacaagaaggaaatgtt

SEQ ID NO: 188571 - DNA, 24 bp, Artificial sequence
  SiRNA target sequence
catgtttacaagaaggaaatgttt

SEQ ID NO: 188572 - DNA, 24 bp, Artificial sequence
  SiRNA target sequence
atgtttacaagaaggaaatgttta

SEQ ID NO: 188573 - DNA, 24 bp, Artificial sequence
  SiRNA target sequence
tgtttacaagaaggaaatgtttat

SEQ ID NO: 188574 - DNA, 24 bp, Artificial sequence
  SiRNA target sequence
gtttacaagaaggaaatgtttata

SEQ ID NO: 188575 - DNA, 24 bp, Artificial sequence
  SiRNA target sequence
tttacaagaaggaaatgtttatat

SEQ ID NO: 188576 - DNA, 24 bp, Artificial sequence
  SiRNA target sequence
ttacaagaaggaaatgtttatatt

SEQ ID NO: 188577 - DNA, 24 bp, Artificial sequence
  SiRNA target sequence
tacaagaaggaaatgtttatattt

SEQ ID NO: 188578 - DNA, 24 bp, Artificial sequence
  SiRNA target sequence
acaagaaggaaatgtttatatttt

SEQ ID NO: 188579 - DNA, 24 bp, Artificial sequence
  SiRNA target sequence
caagaaggaaatgtttatattttt

SEQ ID NO: 188580 - DNA, 24 bp, Artificial sequence
  SiRNA target sequence
aagaaggaaatgtttatatttttg

SEQ ID NO: 188581 - DNA, 24 bp, Artificial sequence
  SiRNA target sequence
agaaggaaatgtttatatttttga

SEQ ID NO: 188582 - DNA, 24 bp, Artificial sequence
  SiRNA target sequence
gaaggaaatgtttatatttttgat

SEQ ID NO: 188583 - DNA, 24 bp, Artificial sequence
  SiRNA target sequence
aaggaaatgtttatatttttgatg

SEQ ID NO: 188584 - DNA, 24 bp, Artificial sequence
  SiRNA target sequence
aggaaatgtttatatttttgatga

SEQ ID NO: 188585 - DNA, 24 bp, Artificial sequence
  SiRNA target sequence
ggaaatgtttatatttttgatgaa

SEQ ID NO: 188586 - DNA, 24 bp, Artificial sequence
  SiRNA target sequence
gaaatgtttatatttttgatgaac

SEQ ID NO: 188587 - DNA, 24 bp, Artificial sequence
  SiRNA target sequence
aaatgtttatatttttgatgaacc

SEQ ID NO: 188588 - DNA, 24 bp, Artificial sequence
  SiRNA target sequence
aatgtttatatttttgatgaaccc

SEQ ID NO: 188589 - DNA, 24 bp, Artificial sequence
  SiRNA target sequence
atgtttatatttttgatgaaccca

SEQ ID NO: 188590 - DNA, 24 bp, Artificial sequence
  SiRNA target sequence
tgtttatatttttgatgaacccac

SEQ ID NO: 188591 - DNA, 24 bp, Artificial sequence
  SiRNA target sequence
gtttatatttttgatgaacccact

SEQ ID NO: 188592 - DNA, 24 bp, Artificial sequence
  SiRNA target sequence
tttatatttttgatgaacccacta

SEQ ID NO: 188593 - DNA, 24 bp, Artificial sequence
  SiRNA target sequence
ttatatttttgatgaacccactag

SEQ ID NO: 188594 - DNA, 24 bp, Artificial sequence
  SiRNA target sequence
tatatttttgatgaacccactagt

SEQ ID NO: 188595 - DNA, 24 bp, Artificial sequence
  SiRNA target sequence
atatttttgatgaacccactagtt

SEQ ID NO: 188596 - DNA, 24 bp, Artificial sequence
  SiRNA target sequence
tatttttgatgaacccactagttt

SEQ ID NO: 188597 - DNA, 24 bp, Artificial sequence
  SiRNA target sequence
atttttgatgaacccactagtttt

SEQ ID NO: 188598 - DNA, 24 bp, Artificial sequence
  SiRNA target sequence
tttttgatgaacccactagttttt

SEQ ID NO: 188599 - DNA, 24 bp, Artificial sequence
  SiRNA target sequence
ttttgatgaacccactagtttttt

SEQ ID NO: 188600 - DNA, 24 bp, Artificial sequence
  SiRNA target sequence
tttgatgaacccactagttttttg

SEQ ID NO: 188601 - DNA, 24 bp, Artificial sequence
  SiRNA target sequence
ttgatgaacccactagttttttgg

SEQ ID NO: 188602 - DNA, 24 bp, Artificial sequence
  SiRNA target sequence
tgatgaacccactagttttttgga

SEQ ID NO: 188603 - DNA, 24 bp, Artificial sequence
  SiRNA target sequence
gatgaacccactagttttttggat

SEQ ID NO: 188604 - DNA, 24 bp, Artificial sequence
  SiRNA target sequence
atgaacccactagttttttggatg

SEQ ID NO: 188605 - DNA, 24 bp, Artificial sequence
  SiRNA target sequence
tgaacccactagttttttggatgt

SEQ ID NO: 188606 - DNA, 24 bp, Artificial sequence
  SiRNA target sequence
gaacccactagttttttggatgtt

SEQ ID NO: 188607 - DNA, 24 bp, Artificial sequence
  SiRNA target sequence
aacccactagttttttggatgtta

SEQ ID NO: 188608 - DNA, 24 bp, Artificial sequence
  SiRNA target sequence
acccactagttttttggatgttaa

SEQ ID NO: 188609 - DNA, 24 bp, Artificial sequence
  SiRNA target sequence
cccactagttttttggatgttaag

SEQ ID NO: 188610 - DNA, 24 bp, Artificial sequence
  SiRNA target sequence
ccactagttttttggatgttaagc

SEQ ID NO: 188611 - DNA, 24 bp, Artificial sequence
  SiRNA target sequence
cactagttttttggatgttaagca

SEQ ID NO: 188612 - DNA, 24 bp, Artificial sequence
  SiRNA target sequence
actagttttttggatgttaagcag

SEQ ID NO: 188613 - DNA, 24 bp, Artificial sequence
  SiRNA target sequence
ctagttttttggatgttaagcagc

SEQ ID NO: 188614 - DNA, 24 bp, Artificial sequence
  SiRNA target sequence
tagttttttggatgttaagcagcg

SEQ ID NO: 188615 - DNA, 24 bp, Artificial sequence
  SiRNA target sequence
agttttttggatgttaagcagcga

SEQ ID NO: 188616 - DNA, 24 bp, Artificial sequence
  SiRNA target sequence
gttttttggatgttaagcagcgac

SEQ ID NO: 188617 - DNA, 24 bp, Artificial sequence
  SiRNA target sequence
ttttttggatgttaagcagcgact

SEQ ID NO: 188618 - DNA, 24 bp, Artificial sequence
  SiRNA target sequence
tttttggatgttaagcagcgacta

SEQ ID NO: 188619 - DNA, 24 bp, Artificial sequence
  SiRNA target sequence
ttttggatgttaagcagcgactag

SEQ ID NO: 188620 - DNA, 24 bp, Artificial sequence
  SiRNA target sequence
tttggatgttaagcagcgactagc

SEQ ID NO: 188621 - DNA, 24 bp, Artificial sequence
  SiRNA target sequence
ttggatgttaagcagcgactagca

SEQ ID NO: 188622 - DNA, 24 bp, Artificial sequence
  SiRNA target sequence
tggatgttaagcagcgactagcag

SEQ ID NO: 188623 - DNA, 24 bp, Artificial sequence
  SiRNA target sequence
ggatgttaagcagcgactagcagc

SEQ ID NO: 188624 - DNA, 24 bp, Artificial sequence
  SiRNA target sequence
gatgttaagcagcgactagcagct

SEQ ID NO: 188625 - DNA, 24 bp, Artificial sequence
  SiRNA target sequence
atgttaagcagcgactagcagctg

SEQ ID NO: 188626 - DNA, 24 bp, Artificial sequence
  SiRNA target sequence
tgttaagcagcgactagcagctgc

SEQ ID NO: 188627 - DNA, 24 bp, Artificial sequence
  SiRNA target sequence
gttaagcagcgactagcagctgct

SEQ ID NO: 188628 - DNA, 24 bp, Artificial sequence
  SiRNA target sequence
ttaagcagcgactagcagctgcta

SEQ ID NO: 188629 - DNA, 24 bp, Artificial sequence
  SiRNA target sequence
taagcagcgactagcagctgctaa

SEQ ID NO: 188630 - DNA, 24 bp, Artificial sequence
  SiRNA target sequence
aagcagcgactagcagctgctaag

SEQ ID NO: 188631 - DNA, 24 bp, Artificial sequence
  SiRNA target sequence
agcagcgactagcagctgctaagg

SEQ ID NO: 188632 - DNA, 24 bp, Artificial sequence
  SiRNA target sequence
gcagcgactagcagctgctaagga

SEQ ID NO: 188633 - DNA, 24 bp, Artificial sequence
  SiRNA target sequence
cagcgactagcagctgctaaggaa

SEQ ID NO: 188634 - DNA, 24 bp, Artificial sequence
  SiRNA target sequence
agcgactagcagctgctaaggaaa

SEQ ID NO: 188635 - DNA, 24 bp, Artificial sequence
  SiRNA target sequence
gcgactagcagctgctaaggaaat

SEQ ID NO: 188636 - DNA, 24 bp, Artificial sequence
  SiRNA target sequence
cgactagcagctgctaaggaaata

SEQ ID NO: 188637 - DNA, 24 bp, Artificial sequence
  SiRNA target sequence
gactagcagctgctaaggaaataa

SEQ ID NO: 188638 - DNA, 24 bp, Artificial sequence
  SiRNA target sequence
actagcagctgctaaggaaataag

SEQ ID NO: 188639 - DNA, 24 bp, Artificial sequence
  SiRNA target sequence
ctagcagctgctaaggaaataaga

SEQ ID NO: 188640 - DNA, 24 bp, Artificial sequence
  SiRNA target sequence
tagcagctgctaaggaaataagaa

SEQ ID NO: 188641 - DNA, 24 bp, Artificial sequence
  SiRNA target sequence
agcagctgctaaggaaataagaaa

SEQ ID NO: 188642 - DNA, 24 bp, Artificial sequence
  SiRNA target sequence
gcagctgctaaggaaataagaaat

SEQ ID NO: 188643 - DNA, 24 bp, Artificial sequence
  SiRNA target sequence
cagctgctaaggaaataagaaatt

SEQ ID NO: 188644 - DNA, 24 bp, Artificial sequence
  SiRNA target sequence
agctgctaaggaaataagaaattt

SEQ ID NO: 188645 - DNA, 24 bp, Artificial sequence
  SiRNA target sequence
gctgctaaggaaataagaaatttg

SEQ ID NO: 188646 - DNA, 24 bp, Artificial sequence
  SiRNA target sequence
ctgctaaggaaataagaaatttgt

SEQ ID NO: 188647 - DNA, 24 bp, Artificial sequence
  SiRNA target sequence
tgctaaggaaataagaaatttgtg

SEQ ID NO: 188648 - DNA, 24 bp, Artificial sequence
  SiRNA target sequence
gctaaggaaataagaaatttgtgt

SEQ ID NO: 188649 - DNA, 24 bp, Artificial sequence
  SiRNA target sequence
ctaaggaaataagaaatttgtgtg

SEQ ID NO: 188650 - DNA, 24 bp, Artificial sequence
  SiRNA target sequence
taaggaaataagaaatttgtgtga

SEQ ID NO: 188651 - DNA, 24 bp, Artificial sequence
  SiRNA target sequence
aaggaaataagaaatttgtgtgaa

SEQ ID NO: 188652 - DNA, 24 bp, Artificial sequence
  SiRNA target sequence
aggaaataagaaatttgtgtgaag

SEQ ID NO: 188653 - DNA, 24 bp, Artificial sequence
  SiRNA target sequence
ggaaataagaaatttgtgtgaaga

SEQ ID NO: 188654 - DNA, 24 bp, Artificial sequence
  SiRNA target sequence
gaaataagaaatttgtgtgaagaa

SEQ ID NO: 188655 - DNA, 24 bp, Artificial sequence
  SiRNA target sequence
aaataagaaatttgtgtgaagaaa

SEQ ID NO: 188656 - DNA, 24 bp, Artificial sequence
  SiRNA target sequence
aataagaaatttgtgtgaagaaaa

SEQ ID NO: 188657 - DNA, 24 bp, Artificial sequence
  SiRNA target sequence
ataagaaatttgtgtgaagaaaat

SEQ ID NO: 188658 - DNA, 24 bp, Artificial sequence
  SiRNA target sequence
taagaaatttgtgtgaagaaaata

SEQ ID NO: 188659 - DNA, 24 bp, Artificial sequence
  SiRNA target sequence
aagaaatttgtgtgaagaaaataa

SEQ ID NO: 188660 - DNA, 24 bp, Artificial sequence
  SiRNA target sequence
agaaatttgtgtgaagaaaataaa

SEQ ID NO: 188661 - DNA, 24 bp, Artificial sequence
  SiRNA target sequence
gaaatttgtgtgaagaaaataaat

SEQ ID NO: 188662 - DNA, 24 bp, Artificial sequence
  SiRNA target sequence
aaatttgtgtgaagaaaataaata

SEQ ID NO: 188663 - DNA, 24 bp, Artificial sequence
  SiRNA target sequence
aatttgtgtgaagaaaataaatat

SEQ ID NO: 188664 - DNA, 24 bp, Artificial sequence
  SiRNA target sequence
atttgtgtgaagaaaataaatatg

SEQ ID NO: 188665 - DNA, 24 bp, Artificial sequence
  SiRNA target sequence
tttgtgtgaagaaaataaatatgt

SEQ ID NO: 188666 - DNA, 24 bp, Artificial sequence
  SiRNA target sequence
ttgtgtgaagaaaataaatatgtt

SEQ ID NO: 188667 - DNA, 24 bp, Artificial sequence
  SiRNA target sequence
tgtgtgaagaaaataaatatgttg

SEQ ID NO: 188668 - DNA, 24 bp, Artificial sequence
  SiRNA target sequence
gtgtgaagaaaataaatatgttgt

SEQ ID NO: 188669 - DNA, 24 bp, Artificial sequence
  SiRNA target sequence
tgtgaagaaaataaatatgttgta

SEQ ID NO: 188670 - DNA, 24 bp, Artificial sequence
  SiRNA target sequence
gtgaagaaaataaatatgttgtag

SEQ ID NO: 188671 - DNA, 24 bp, Artificial sequence
  SiRNA target sequence
tgaagaaaataaatatgttgtagt

SEQ ID NO: 188672 - DNA, 24 bp, Artificial sequence
  SiRNA target sequence
gaagaaaataaatatgttgtagtt

SEQ ID NO: 188673 - DNA, 24 bp, Artificial sequence
  SiRNA target sequence
aagaaaataaatatgttgtagttg

SEQ ID NO: 188674 - DNA, 24 bp, Artificial sequence
  SiRNA target sequence
agaaaataaatatgttgtagttgt

SEQ ID NO: 188675 - DNA, 24 bp, Artificial sequence
  SiRNA target sequence
gaaaataaatatgttgtagttgtc

SEQ ID NO: 188676 - DNA, 24 bp, Artificial sequence
  SiRNA target sequence
aaaataaatatgttgtagttgtcg

SEQ ID NO: 188677 - DNA, 24 bp, Artificial sequence
  SiRNA target sequence
aaataaatatgttgtagttgtcga

SEQ ID NO: 188678 - DNA, 24 bp, Artificial sequence
  SiRNA target sequence
aataaatatgttgtagttgtcgaa

SEQ ID NO: 188679 - DNA, 24 bp, Artificial sequence
  SiRNA target sequence
ataaatatgttgtagttgtcgaac

SEQ ID NO: 188680 - DNA, 24 bp, Artificial sequence
  SiRNA target sequence
taaatatgttgtagttgtcgaaca

SEQ ID NO: 188681 - DNA, 24 bp, Artificial sequence
  SiRNA target sequence
aaatatgttgtagttgtcgaacac

SEQ ID NO: 188682 - DNA, 24 bp, Artificial sequence
  SiRNA target sequence
aatatgttgtagttgtcgaacacg

SEQ ID NO: 188683 - DNA, 24 bp, Artificial sequence
  SiRNA target sequence
atatgttgtagttgtcgaacacga

SEQ ID NO: 188684 - DNA, 24 bp, Artificial sequence
  SiRNA target sequence
tatgttgtagttgtcgaacacgat

SEQ ID NO: 188685 - DNA, 24 bp, Artificial sequence
  SiRNA target sequence
atgttgtagttgtcgaacacgatt

SEQ ID NO: 188686 - DNA, 24 bp, Artificial sequence
  SiRNA target sequence
tgttgtagttgtcgaacacgattt

SEQ ID NO: 188687 - DNA, 24 bp, Artificial sequence
  SiRNA target sequence
gttgtagttgtcgaacacgattta

SEQ ID NO: 188688 - DNA, 24 bp, Artificial sequence
  SiRNA target sequence
ttgtagttgtcgaacacgatttag

SEQ ID NO: 188689 - DNA, 24 bp, Artificial sequence
  SiRNA target sequence
tgtagttgtcgaacacgatttagc

SEQ ID NO: 188690 - DNA, 24 bp, Artificial sequence
  SiRNA target sequence
gtagttgtcgaacacgatttagcc

SEQ ID NO: 188691 - DNA, 24 bp, Artificial sequence
  SiRNA target sequence
tagttgtcgaacacgatttagcca

SEQ ID NO: 188692 - DNA, 24 bp, Artificial sequence
  SiRNA target sequence
agttgtcgaacacgatttagccat

SEQ ID NO: 188693 - DNA, 24 bp, Artificial sequence
  SiRNA target sequence
gttgtcgaacacgatttagccatt

SEQ ID NO: 188694 - DNA, 24 bp, Artificial sequence
  SiRNA target sequence
ttgtcgaacacgatttagccattt

SEQ ID NO: 188695 - DNA, 24 bp, Artificial sequence
  SiRNA target sequence
tgtcgaacacgatttagccatttt

SEQ ID NO: 188696 - DNA, 24 bp, Artificial sequence
  SiRNA target sequence
gtcgaacacgatttagccatttta

SEQ ID NO: 188697 - DNA, 24 bp, Artificial sequence
  SiRNA target sequence
tcgaacacgatttagccattttag

SEQ ID NO: 188698 - DNA, 24 bp, Artificial sequence
  SiRNA target sequence
cgaacacgatttagccattttaga

SEQ ID NO: 188699 - DNA, 24 bp, Artificial sequence
  SiRNA target sequence
gaacacgatttagccattttagat

SEQ ID NO: 188700 - DNA, 24 bp, Artificial sequence
  SiRNA target sequence
aacacgatttagccattttagatt

SEQ ID NO: 188701 - DNA, 24 bp, Artificial sequence
  SiRNA target sequence
acacgatttagccattttagattt

SEQ ID NO: 188702 - DNA, 24 bp, Artificial sequence
  SiRNA target sequence
cacgatttagccattttagatttg

SEQ ID NO: 188703 - DNA, 24 bp, Artificial sequence
  SiRNA target sequence
acgatttagccattttagatttga

SEQ ID NO: 188704 - DNA, 24 bp, Artificial sequence
  SiRNA target sequence
cgatttagccattttagatttgat

SEQ ID NO: 188705 - DNA, 24 bp, Artificial sequence
  SiRNA target sequence
gatttagccattttagatttgatg

SEQ ID NO: 188706 - DNA, 24 bp, Artificial sequence
  SiRNA target sequence
atttagccattttagatttgatgt

SEQ ID NO: 188707 - DNA, 24 bp, Artificial sequence
  SiRNA target sequence
tttagccattttagatttgatgtg

SEQ ID NO: 188708 - DNA, 24 bp, Artificial sequence
  SiRNA target sequence
ttagccattttagatttgatgtgt

SEQ ID NO: 188709 - DNA, 24 bp, Artificial sequence
  SiRNA target sequence
tagccattttagatttgatgtgtg

SEQ ID NO: 188710 - DNA, 24 bp, Artificial sequence
  SiRNA target sequence
agccattttagatttgatgtgtga

SEQ ID NO: 188711 - DNA, 24 bp, Artificial sequence
  SiRNA target sequence
gccattttagatttgatgtgtgat

SEQ ID NO: 188712 - DNA, 24 bp, Artificial sequence
  SiRNA target sequence
ccattttagatttgatgtgtgatt

SEQ ID NO: 188713 - DNA, 24 bp, Artificial sequence
  SiRNA target sequence
cattttagatttgatgtgtgattt

SEQ ID NO: 188714 - DNA, 24 bp, Artificial sequence
  SiRNA target sequence
attttagatttgatgtgtgatttt

SEQ ID NO: 188715 - DNA, 24 bp, Artificial sequence
  SiRNA target sequence
ttttagatttgatgtgtgattttg

SEQ ID NO: 188716 - DNA, 24 bp, Artificial sequence
  SiRNA target sequence
tttagatttgatgtgtgattttgg

SEQ ID NO: 188717 - DNA, 24 bp, Artificial sequence
  SiRNA target sequence
ttagatttgatgtgtgattttgga

SEQ ID NO: 188718 - DNA, 24 bp, Artificial sequence
  SiRNA target sequence
tagatttgatgtgtgattttggat

SEQ ID NO: 188719 - DNA, 24 bp, Artificial sequence
  SiRNA target sequence
agatttgatgtgtgattttggatg

SEQ ID NO: 188720 - DNA, 24 bp, Artificial sequence
  SiRNA target sequence
gatttgatgtgtgattttggatgt

SEQ ID NO: 188721 - DNA, 24 bp, Artificial sequence
  SiRNA target sequence
atttgatgtgtgattttggatgtg

SEQ ID NO: 188722 - DNA, 24 bp, Artificial sequence
  SiRNA target sequence
tttgatgtgtgattttggatgtgt

SEQ ID NO: 188723 - DNA, 24 bp, Artificial sequence
  SiRNA target sequence
ttgatgtgtgattttggatgtgtt

SEQ ID NO: 188724 - DNA, 24 bp, Artificial sequence
  SiRNA target sequence
tgatgtgtgattttggatgtgttc

SEQ ID NO: 188725 - DNA, 24 bp, Artificial sequence
  SiRNA target sequence
gatgtgtgattttggatgtgttct

SEQ ID NO: 188726 - DNA, 24 bp, Artificial sequence
  SiRNA target sequence
atgtgtgattttggatgtgttcta

SEQ ID NO: 188727 - DNA, 24 bp, Artificial sequence
  SiRNA target sequence
tgtgtgattttggatgtgttctat

SEQ ID NO: 188728 - DNA, 24 bp, Artificial sequence
  SiRNA target sequence
gtgtgattttggatgtgttctata

SEQ ID NO: 188729 - DNA, 24 bp, Artificial sequence
  SiRNA target sequence
tgtgattttggatgtgttctatac

SEQ ID NO: 188730 - DNA, 24 bp, Artificial sequence
  SiRNA target sequence
gtgattttggatgtgttctatacg

SEQ ID NO: 188731 - DNA, 24 bp, Artificial sequence
  SiRNA target sequence
tgattttggatgtgttctatacgg

SEQ ID NO: 188732 - DNA, 24 bp, Artificial sequence
  SiRNA target sequence
gattttggatgtgttctatacgga

SEQ ID NO: 188733 - DNA, 24 bp, Artificial sequence
  SiRNA target sequence
attttggatgtgttctatacggac

SEQ ID NO: 188734 - DNA, 24 bp, Artificial sequence
  SiRNA target sequence
ttttggatgtgttctatacggaca

SEQ ID NO: 188735 - DNA, 24 bp, Artificial sequence
  SiRNA target sequence
tttggatgtgttctatacggacaa

SEQ ID NO: 188736 - DNA, 24 bp, Artificial sequence
  SiRNA target sequence
ttggatgtgttctatacggacaat

SEQ ID NO: 188737 - DNA, 24 bp, Artificial sequence
  SiRNA target sequence
tggatgtgttctatacggacaatc

SEQ ID NO: 188738 - DNA, 24 bp, Artificial sequence
  SiRNA target sequence
ggatgtgttctatacggacaatct

SEQ ID NO: 188739 - DNA, 24 bp, Artificial sequence
  SiRNA target sequence
gatgtgttctatacggacaatctg

SEQ ID NO: 188740 - DNA, 24 bp, Artificial sequence
  SiRNA target sequence
atgtgttctatacggacaatctgg

SEQ ID NO: 188741 - DNA, 24 bp, Artificial sequence
  SiRNA target sequence
tgtgttctatacggacaatctggg

SEQ ID NO: 188742 - DNA, 24 bp, Artificial sequence
  SiRNA target sequence
gtgttctatacggacaatctgggg

SEQ ID NO: 188743 - DNA, 24 bp, Artificial sequence
  SiRNA target sequence
tgttctatacggacaatctggggc

SEQ ID NO: 188744 - DNA, 24 bp, Artificial sequence
  SiRNA target sequence
gttctatacggacaatctggggca

SEQ ID NO: 188745 - DNA, 24 bp, Artificial sequence
  SiRNA target sequence
ttctatacggacaatctggggcat

SEQ ID NO: 188746 - DNA, 24 bp, Artificial sequence
  SiRNA target sequence
tctatacggacaatctggggcata

SEQ ID NO: 188747 - DNA, 24 bp, Artificial sequence
  SiRNA target sequence
ctatacggacaatctggggcatac

SEQ ID NO: 188748 - DNA, 24 bp, Artificial sequence
  SiRNA target sequence
tatacggacaatctggggcatacg

SEQ ID NO: 188749 - DNA, 24 bp, Artificial sequence
  SiRNA target sequence
atacggacaatctggggcatacgg

SEQ ID NO: 188750 - DNA, 24 bp, Artificial sequence
  SiRNA target sequence
tacggacaatctggggcatacggt

SEQ ID NO: 188751 - DNA, 24 bp, Artificial sequence
  SiRNA target sequence
acggacaatctggggcatacggtg

SEQ ID NO: 188752 - DNA, 24 bp, Artificial sequence
  SiRNA target sequence
cggacaatctggggcatacggtgt

SEQ ID NO: 188753 - DNA, 24 bp, Artificial sequence
  SiRNA target sequence
ggacaatctggggcatacggtgta

SEQ ID NO: 188754 - DNA, 24 bp, Artificial sequence
  SiRNA target sequence
gacaatctggggcatacggtgtaa

SEQ ID NO: 188755 - DNA, 24 bp, Artificial sequence
  SiRNA target sequence
acaatctggggcatacggtgtaat

SEQ ID NO: 188756 - DNA, 24 bp, Artificial sequence
  SiRNA target sequence
caatctggggcatacggtgtaata

SEQ ID NO: 188757 - DNA, 24 bp, Artificial sequence
  SiRNA target sequence
aatctggggcatacggtgtaataa

SEQ ID NO: 188758 - DNA, 24 bp, Artificial sequence
  SiRNA target sequence
atctggggcatacggtgtaataag

SEQ ID NO: 188759 - DNA, 24 bp, Artificial sequence
  SiRNA target sequence
tctggggcatacggtgtaataagc

SEQ ID NO: 188760 - DNA, 24 bp, Artificial sequence
  SiRNA target sequence
ctggggcatacggtgtaataagcg

SEQ ID NO: 188761 - DNA, 24 bp, Artificial sequence
  SiRNA target sequence
tggggcatacggtgtaataagcgc

SEQ ID NO: 188762 - DNA, 24 bp, Artificial sequence
  SiRNA target sequence
ggggcatacggtgtaataagcgca

SEQ ID NO: 188763 - DNA, 24 bp, Artificial sequence
  SiRNA target sequence
gggcatacggtgtaataagcgcac

SEQ ID NO: 188764 - DNA, 24 bp, Artificial sequence
  SiRNA target sequence
ggcatacggtgtaataagcgcacc

SEQ ID NO: 188765 - DNA, 24 bp, Artificial sequence
  SiRNA target sequence
gcatacggtgtaataagcgcacca

SEQ ID NO: 188766 - DNA, 24 bp, Artificial sequence
  SiRNA target sequence
catacggtgtaataagcgcaccat

SEQ ID NO: 188767 - DNA, 24 bp, Artificial sequence
  SiRNA target sequence
atacggtgtaataagcgcaccata

SEQ ID NO: 188768 - DNA, 24 bp, Artificial sequence
  SiRNA target sequence
tacggtgtaataagcgcaccatac

SEQ ID NO: 188769 - DNA, 24 bp, Artificial sequence
  SiRNA target sequence
acggtgtaataagcgcaccatacg

SEQ ID NO: 188770 - DNA, 24 bp, Artificial sequence
  SiRNA target sequence
cggtgtaataagcgcaccatacgt

SEQ ID NO: 188771 - DNA, 24 bp, Artificial sequence
  SiRNA target sequence
ggtgtaataagcgcaccatacgtt

SEQ ID NO: 188772 - DNA, 24 bp, Artificial sequence
  SiRNA target sequence
gtgtaataagcgcaccatacgtta

SEQ ID NO: 188773 - DNA, 24 bp, Artificial sequence
  SiRNA target sequence
tgtaataagcgcaccatacgttat

SEQ ID NO: 188774 - DNA, 24 bp, Artificial sequence
  SiRNA target sequence
gtaataagcgcaccatacgttatt

SEQ ID NO: 188775 - DNA, 24 bp, Artificial sequence
  SiRNA target sequence
taataagcgcaccatacgttatta

SEQ ID NO: 188776 - DNA, 24 bp, Artificial sequence
  SiRNA target sequence
aataagcgcaccatacgttattaa

SEQ ID NO: 188777 - DNA, 24 bp, Artificial sequence
  SiRNA target sequence
ataagcgcaccatacgttattaaa

SEQ ID NO: 188778 - DNA, 24 bp, Artificial sequence
  SiRNA target sequence
taagcgcaccatacgttattaaat

SEQ ID NO: 188779 - DNA, 24 bp, Artificial sequence
  SiRNA target sequence
aagcgcaccatacgttattaaatc

SEQ ID NO: 188780 - DNA, 24 bp, Artificial sequence
  SiRNA target sequence
agcgcaccatacgttattaaatca

SEQ ID NO: 188781 - DNA, 24 bp, Artificial sequence
  SiRNA target sequence
gcgcaccatacgttattaaatcag

SEQ ID NO: 188782 - DNA, 24 bp, Artificial sequence
  SiRNA target sequence
cgcaccatacgttattaaatcagc

SEQ ID NO: 188783 - DNA, 24 bp, Artificial sequence
  SiRNA target sequence
gcaccatacgttattaaatcagca

SEQ ID NO: 188784 - DNA, 24 bp, Artificial sequence
  SiRNA target sequence
caccatacgttattaaatcagcaa

SEQ ID NO: 188785 - DNA, 24 bp, Artificial sequence
  SiRNA target sequence
accatacgttattaaatcagcaat

SEQ ID NO: 188786 - DNA, 24 bp, Artificial sequence
  SiRNA target sequence
ccatacgttattaaatcagcaata

SEQ ID NO: 188787 - DNA, 24 bp, Artificial sequence
  SiRNA target sequence
catacgttattaaatcagcaataa

SEQ ID NO: 188788 - DNA, 24 bp, Artificial sequence
  SiRNA target sequence
atacgttattaaatcagcaataaa

SEQ ID NO: 188789 - DNA, 24 bp, Artificial sequence
  SiRNA target sequence
tacgttattaaatcagcaataaat

SEQ ID NO: 188790 - DNA, 24 bp, Artificial sequence
  SiRNA target sequence
acgttattaaatcagcaataaata

SEQ ID NO: 188791 - DNA, 24 bp, Artificial sequence
  SiRNA target sequence
cgttattaaatcagcaataaatat

SEQ ID NO: 188792 - DNA, 24 bp, Artificial sequence
  SiRNA target sequence
gttattaaatcagcaataaatata

SEQ ID NO: 188793 - DNA, 24 bp, Artificial sequence
  SiRNA target sequence
ttattaaatcagcaataaatatat

SEQ ID NO: 188794 - DNA, 24 bp, Artificial sequence
  SiRNA target sequence
tattaaatcagcaataaatatatt

SEQ ID NO: 188795 - DNA, 24 bp, Artificial sequence
  SiRNA target sequence
attaaatcagcaataaatatattt

SEQ ID NO: 188796 - DNA, 24 bp, Artificial sequence
  SiRNA target sequence
ttaaatcagcaataaatatatttc

SEQ ID NO: 188797 - DNA, 24 bp, Artificial sequence
  SiRNA target sequence
taaatcagcaataaatatatttct

SEQ ID NO: 188798 - DNA, 24 bp, Artificial sequence
  SiRNA target sequence
aaatcagcaataaatatatttctt

SEQ ID NO: 188799 - DNA, 24 bp, Artificial sequence
  SiRNA target sequence
aatcagcaataaatatatttcttg

SEQ ID NO: 188800 - DNA, 24 bp, Artificial sequence
  SiRNA target sequence
atcagcaataaatatatttcttga

SEQ ID NO: 188801 - DNA, 24 bp, Artificial sequence
  SiRNA target sequence
tcagcaataaatatatttcttgat

SEQ ID NO: 188802 - DNA, 24 bp, Artificial sequence
  SiRNA target sequence
cagcaataaatatatttcttgatg

SEQ ID NO: 188803 - DNA, 24 bp, Artificial sequence
  SiRNA target sequence
agcaataaatatatttcttgatgg

SEQ ID NO: 188804 - DNA, 24 bp, Artificial sequence
  SiRNA target sequence
gcaataaatatatttcttgatgga

SEQ ID NO: 188805 - DNA, 24 bp, Artificial sequence
  SiRNA target sequence
caataaatatatttcttgatggat

SEQ ID NO: 188806 - DNA, 24 bp, Artificial sequence
  SiRNA target sequence
aataaatatatttcttgatggatt

SEQ ID NO: 188807 - DNA, 24 bp, Artificial sequence
  SiRNA target sequence
ataaatatatttcttgatggattt

SEQ ID NO: 188808 - DNA, 24 bp, Artificial sequence
  SiRNA target sequence
taaatatatttcttgatggatttt

SEQ ID NO: 188809 - DNA, 24 bp, Artificial sequence
  SiRNA target sequence
aaatatatttcttgatggattttt

SEQ ID NO: 188810 - DNA, 24 bp, Artificial sequence
  SiRNA target sequence
aatatatttcttgatggatttttg

SEQ ID NO: 188811 - DNA, 24 bp, Artificial sequence
  SiRNA target sequence
atatatttcttgatggatttttgc

SEQ ID NO: 188812 - DNA, 24 bp, Artificial sequence
  SiRNA target sequence
tatatttcttgatggatttttgcc

SEQ ID NO: 188813 - DNA, 24 bp, Artificial sequence
  SiRNA target sequence
atatttcttgatggatttttgcct

SEQ ID NO: 188814 - DNA, 24 bp, Artificial sequence
  SiRNA target sequence
tatttcttgatggatttttgccta

SEQ ID NO: 188815 - DNA, 24 bp, Artificial sequence
  SiRNA target sequence
atttcttgatggatttttgcctac

SEQ ID NO: 188816 - DNA, 24 bp, Artificial sequence
  SiRNA target sequence
tttcttgatggatttttgcctaca

SEQ ID NO: 188817 - DNA, 24 bp, Artificial sequence
  SiRNA target sequence
ttcttgatggatttttgcctacag

SEQ ID NO: 188818 - DNA, 24 bp, Artificial sequence
  SiRNA target sequence
tcttgatggatttttgcctacaga

SEQ ID NO: 188819 - DNA, 24 bp, Artificial sequence
  SiRNA target sequence
cttgatggatttttgcctacagaa

SEQ ID NO: 188820 - DNA, 24 bp, Artificial sequence
  SiRNA target sequence
ttgatggatttttgcctacagaaa

SEQ ID NO: 188821 - DNA, 24 bp, Artificial sequence
  SiRNA target sequence
tgatggatttttgcctacagaaaa

SEQ ID NO: 188822 - DNA, 24 bp, Artificial sequence
  SiRNA target sequence
gatggatttttgcctacagaaaac

SEQ ID NO: 188823 - DNA, 24 bp, Artificial sequence
  SiRNA target sequence
atggatttttgcctacagaaaaca

SEQ ID NO: 188824 - DNA, 24 bp, Artificial sequence
  SiRNA target sequence
tggatttttgcctacagaaaacat

SEQ ID NO: 188825 - DNA, 24 bp, Artificial sequence
  SiRNA target sequence
ggatttttgcctacagaaaacatg

SEQ ID NO: 188826 - DNA, 24 bp, Artificial sequence
  SiRNA target sequence
gatttttgcctacagaaaacatga

SEQ ID NO: 188827 - DNA, 24 bp, Artificial sequence
  SiRNA target sequence
atttttgcctacagaaaacatgaa

SEQ ID NO: 188828 - DNA, 24 bp, Artificial sequence
  SiRNA target sequence
tttttgcctacagaaaacatgaaa

SEQ ID NO: 188829 - DNA, 24 bp, Artificial sequence
  SiRNA target sequence
ttttgcctacagaaaacatgaaat

SEQ ID NO: 188830 - DNA, 24 bp, Artificial sequence
  SiRNA target sequence
tttgcctacagaaaacatgaaatt

SEQ ID NO: 188831 - DNA, 24 bp, Artificial sequence
  SiRNA target sequence
ttgcctacagaaaacatgaaattt

SEQ ID NO: 188832 - DNA, 24 bp, Artificial sequence
  SiRNA target sequence
tgcctacagaaaacatgaaattta

SEQ ID NO: 188833 - DNA, 24 bp, Artificial sequence
  SiRNA target sequence
gcctacagaaaacatgaaatttag

SEQ ID NO: 188834 - DNA, 24 bp, Artificial sequence
  SiRNA target sequence
cctacagaaaacatgaaatttaga

SEQ ID NO: 188835 - DNA, 24 bp, Artificial sequence
  SiRNA target sequence
ctacagaaaacatgaaatttagaa

SEQ ID NO: 188836 - DNA, 24 bp, Artificial sequence
  SiRNA target sequence
tacagaaaacatgaaatttagaaa

SEQ ID NO: 188837 - DNA, 24 bp, Artificial sequence
  SiRNA target sequence
acagaaaacatgaaatttagaaat

SEQ ID NO: 188838 - DNA, 24 bp, Artificial sequence
  SiRNA target sequence
cagaaaacatgaaatttagaaatt

SEQ ID NO: 188839 - DNA, 24 bp, Artificial sequence
  SiRNA target sequence
agaaaacatgaaatttagaaattc

SEQ ID NO: 188840 - DNA, 24 bp, Artificial sequence
  SiRNA target sequence
gaaaacatgaaatttagaaattca

SEQ ID NO: 188841 - DNA, 24 bp, Artificial sequence
  SiRNA target sequence
aaaacatgaaatttagaaattcag

SEQ ID NO: 188842 - DNA, 24 bp, Artificial sequence
  SiRNA target sequence
aaacatgaaatttagaaattcaga

SEQ ID NO: 188843 - DNA, 24 bp, Artificial sequence
  SiRNA target sequence
aacatgaaatttagaaattcagag

SEQ ID NO: 188844 - DNA, 24 bp, Artificial sequence
  SiRNA target sequence
acatgaaatttagaaattcagagt

SEQ ID NO: 188845 - DNA, 24 bp, Artificial sequence
  SiRNA target sequence
catgaaatttagaaattcagagtt

SEQ ID NO: 188846 - DNA, 24 bp, Artificial sequence
  SiRNA target sequence
atgaaatttagaaattcagagtta

SEQ ID NO: 188847 - DNA, 24 bp, Artificial sequence
  SiRNA target sequence
tgaaatttagaaattcagagttaa

SEQ ID NO: 188848 - DNA, 24 bp, Artificial sequence
  SiRNA target sequence
gaaatttagaaattcagagttaaa

SEQ ID NO: 188849 - DNA, 24 bp, Artificial sequence
  SiRNA target sequence
aaatttagaaattcagagttaaag

SEQ ID NO: 188850 - DNA, 24 bp, Artificial sequence
  SiRNA target sequence
aatttagaaattcagagttaaagt

SEQ ID NO: 188851 - DNA, 24 bp, Artificial sequence
  SiRNA target sequence
atttagaaattcagagttaaagtt

SEQ ID NO: 188852 - DNA, 24 bp, Artificial sequence
  SiRNA target sequence
tttagaaattcagagttaaagttt

SEQ ID NO: 188853 - DNA, 24 bp, Artificial sequence
  SiRNA target sequence
ttagaaattcagagttaaagttta

SEQ ID NO: 188854 - DNA, 24 bp, Artificial sequence
  SiRNA target sequence
tagaaattcagagttaaagtttaa

SEQ ID NO: 188855 - DNA, 24 bp, Artificial sequence
  SiRNA target sequence
agaaattcagagttaaagtttaat

SEQ ID NO: 188856 - DNA, 24 bp, Artificial sequence
  SiRNA target sequence
gaaattcagagttaaagtttaata

SEQ ID NO: 188857 - DNA, 24 bp, Artificial sequence
  SiRNA target sequence
aaattcagagttaaagtttaatat

SEQ ID NO: 188858 - DNA, 24 bp, Artificial sequence
  SiRNA target sequence
aattcagagttaaagtttaatatt

SEQ ID NO: 188859 - DNA, 24 bp, Artificial sequence
  SiRNA target sequence
attcagagttaaagtttaatattt

SEQ ID NO: 188860 - DNA, 24 bp, Artificial sequence
  SiRNA target sequence
ttcagagttaaagtttaatatttc

SEQ ID NO: 188861 - DNA, 24 bp, Artificial sequence
  SiRNA target sequence
tcagagttaaagtttaatatttcg

SEQ ID NO: 188862 - DNA, 24 bp, Artificial sequence
  SiRNA target sequence
cagagttaaagtttaatatttcgg

SEQ ID NO: 188863 - DNA, 24 bp, Artificial sequence
  SiRNA target sequence
agagttaaagtttaatatttcgga

SEQ ID NO: 188864 - DNA, 24 bp, Artificial sequence
  SiRNA target sequence
gagttaaagtttaatatttcggaa

SEQ ID NO: 188865 - DNA, 24 bp, Artificial sequence
  SiRNA target sequence
agttaaagtttaatatttcggaaa

SEQ ID NO: 188866 - DNA, 24 bp, Artificial sequence
  SiRNA target sequence
gttaaagtttaatatttcggaaac

SEQ ID NO: 188867 - DNA, 24 bp, Artificial sequence
  SiRNA target sequence
ttaaagtttaatatttcggaaaca

SEQ ID NO: 188868 - DNA, 24 bp, Artificial sequence
  SiRNA target sequence
taaagtttaatatttcggaaacac

SEQ ID NO: 188869 - DNA, 24 bp, Artificial sequence
  SiRNA target sequence
aaagtttaatatttcggaaacact

SEQ ID NO: 188870 - DNA, 24 bp, Artificial sequence
  SiRNA target sequence
aagtttaatatttcggaaacactt

SEQ ID NO: 188871 - DNA, 24 bp, Artificial sequence
  SiRNA target sequence
agtttaatatttcggaaacacttg

SEQ ID NO: 188872 - DNA, 24 bp, Artificial sequence
  SiRNA target sequence
gtttaatatttcggaaacacttga

SEQ ID NO: 188873 - DNA, 24 bp, Artificial sequence
  SiRNA target sequence
tttaatatttcggaaacacttgat

SEQ ID NO: 188874 - DNA, 24 bp, Artificial sequence
  SiRNA target sequence
ttaatatttcggaaacacttgata

SEQ ID NO: 188875 - DNA, 24 bp, Artificial sequence
  SiRNA target sequence
taatatttcggaaacacttgatag

SEQ ID NO: 188876 - DNA, 24 bp, Artificial sequence
  SiRNA target sequence
aatatttcggaaacacttgatagt

SEQ ID NO: 188877 - DNA, 24 bp, Artificial sequence
  SiRNA target sequence
atatttcggaaacacttgatagta

SEQ ID NO: 188878 - DNA, 24 bp, Artificial sequence
  SiRNA target sequence
tatttcggaaacacttgatagtat

SEQ ID NO: 188879 - DNA, 24 bp, Artificial sequence
  SiRNA target sequence
atttcggaaacacttgatagtatt

SEQ ID NO: 188880 - DNA, 24 bp, Artificial sequence
  SiRNA target sequence
tttcggaaacacttgatagtatta

SEQ ID NO: 188881 - DNA, 24 bp, Artificial sequence
  SiRNA target sequence
ttcggaaacacttgatagtattat

SEQ ID NO: 188882 - DNA, 24 bp, Artificial sequence
  SiRNA target sequence
tcggaaacacttgatagtattata

SEQ ID NO: 188883 - DNA, 24 bp, Artificial sequence
  SiRNA target sequence
cggaaacacttgatagtattatat

SEQ ID NO: 188884 - DNA, 24 bp, Artificial sequence
  SiRNA target sequence
ggaaacacttgatagtattatatc

SEQ ID NO: 188885 - DNA, 24 bp, Artificial sequence
  SiRNA target sequence
gaaacacttgatagtattatatct

SEQ ID NO: 188886 - DNA, 24 bp, Artificial sequence
  SiRNA target sequence
aaacacttgatagtattatatcta

SEQ ID NO: 188887 - DNA, 24 bp, Artificial sequence
  SiRNA target sequence
aacacttgatagtattatatctac

SEQ ID NO: 188888 - DNA, 24 bp, Artificial sequence
  SiRNA target sequence
acacttgatagtattatatctacc

SEQ ID NO: 188889 - DNA, 24 bp, Artificial sequence
  SiRNA target sequence
cacttgatagtattatatctacca

SEQ ID NO: 188890 - DNA, 24 bp, Artificial sequence
  SiRNA target sequence
acttgatagtattatatctaccag

SEQ ID NO: 188891 - DNA, 24 bp, Artificial sequence
  SiRNA target sequence
cttgatagtattatatctaccaga

SEQ ID NO: 188892 - DNA, 24 bp, Artificial sequence
  SiRNA target sequence
ttgatagtattatatctaccagag

SEQ ID NO: 188893 - DNA, 24 bp, Artificial sequence
  SiRNA target sequence
tgatagtattatatctaccagaga

SEQ ID NO: 188894 - DNA, 24 bp, Artificial sequence
  SiRNA target sequence
gatagtattatatctaccagagac

SEQ ID NO: 188895 - DNA, 24 bp, Artificial sequence
  SiRNA target sequence
atagtattatatctaccagagacc

SEQ ID NO: 188896 - DNA, 24 bp, Artificial sequence
  SiRNA target sequence
tagtattatatctaccagagacca

SEQ ID NO: 188897 - DNA, 24 bp, Artificial sequence
  SiRNA target sequence
agtattatatctaccagagaccag

SEQ ID NO: 188898 - DNA, 24 bp, Artificial sequence
  SiRNA target sequence
gtattatatctaccagagaccagt

SEQ ID NO: 188899 - DNA, 24 bp, Artificial sequence
  SiRNA target sequence
tattatatctaccagagaccagta

SEQ ID NO: 188900 - DNA, 24 bp, Artificial sequence
  SiRNA target sequence
attatatctaccagagaccagtat

SEQ ID NO: 188901 - DNA, 24 bp, Artificial sequence
  SiRNA target sequence
ttatatctaccagagaccagtatc

SEQ ID NO: 188902 - DNA, 24 bp, Artificial sequence
  SiRNA target sequence
tatatctaccagagaccagtatca

SEQ ID NO: 188903 - DNA, 24 bp, Artificial sequence
  SiRNA target sequence
atatctaccagagaccagtatcat

SEQ ID NO: 188904 - DNA, 24 bp, Artificial sequence
  SiRNA target sequence
tatctaccagagaccagtatcatt

SEQ ID NO: 188905 - DNA, 24 bp, Artificial sequence
  SiRNA target sequence
atctaccagagaccagtatcatta

SEQ ID NO: 188906 - DNA, 24 bp, Artificial sequence
  SiRNA target sequence
tctaccagagaccagtatcattat

SEQ ID NO: 188907 - DNA, 24 bp, Artificial sequence
  SiRNA target sequence
ctaccagagaccagtatcattatc

SEQ ID NO: 188908 - DNA, 24 bp, Artificial sequence
  SiRNA target sequence
taccagagaccagtatcattatcc

SEQ ID NO: 188909 - DNA, 24 bp, Artificial sequence
  SiRNA target sequence
accagagaccagtatcattatccc

SEQ ID NO: 188910 - DNA, 24 bp, Artificial sequence
  SiRNA target sequence
ccagagaccagtatcattatccca

SEQ ID NO: 188911 - DNA, 24 bp, Artificial sequence
  SiRNA target sequence
cagagaccagtatcattatcccaa

SEQ ID NO: 188912 - DNA, 24 bp, Artificial sequence
  SiRNA target sequence
agagaccagtatcattatcccaat

SEQ ID NO: 188913 - DNA, 24 bp, Artificial sequence
  SiRNA target sequence
gagaccagtatcattatcccaatt

SEQ ID NO: 188914 - DNA, 24 bp, Artificial sequence
  SiRNA target sequence
agaccagtatcattatcccaattt

SEQ ID NO: 188915 - DNA, 24 bp, Artificial sequence
  SiRNA target sequence
gaccagtatcattatcccaatttg

SEQ ID NO: 188916 - DNA, 24 bp, Artificial sequence
  SiRNA target sequence
accagtatcattatcccaatttga

SEQ ID NO: 188917 - DNA, 24 bp, Artificial sequence
  SiRNA target sequence
ccagtatcattatcccaatttgat

SEQ ID NO: 188918 - DNA, 24 bp, Artificial sequence
  SiRNA target sequence
cagtatcattatcccaatttgata

SEQ ID NO: 188919 - DNA, 24 bp, Artificial sequence
  SiRNA target sequence
agtatcattatcccaatttgataa

SEQ ID NO: 188920 - DNA, 24 bp, Artificial sequence
  SiRNA target sequence
gtatcattatcccaatttgataaa

SEQ ID NO: 188921 - DNA, 24 bp, Artificial sequence
  SiRNA target sequence
tatcattatcccaatttgataaaa

SEQ ID NO: 188922 - DNA, 24 bp, Artificial sequence
  SiRNA target sequence
atcattatcccaatttgataaaaa

SEQ ID NO: 188923 - DNA, 24 bp, Artificial sequence
  SiRNA target sequence
tcattatcccaatttgataaaaac

SEQ ID NO: 188924 - DNA, 24 bp, Artificial sequence
  SiRNA target sequence
cattatcccaatttgataaaaaca

SEQ ID NO: 188925 - DNA, 24 bp, Artificial sequence
  SiRNA target sequence
attatcccaatttgataaaaacat

SEQ ID NO: 188926 - DNA, 24 bp, Artificial sequence
  SiRNA target sequence
ttatcccaatttgataaaaacata

SEQ ID NO: 188927 - DNA, 24 bp, Artificial sequence
  SiRNA target sequence
tatcccaatttgataaaaacatat

SEQ ID NO: 188928 - DNA, 24 bp, Artificial sequence
  SiRNA target sequence
atcccaatttgataaaaacatatc

SEQ ID NO: 188929 - DNA, 24 bp, Artificial sequence
  SiRNA target sequence
tcccaatttgataaaaacatatcc

SEQ ID NO: 188930 - DNA, 24 bp, Artificial sequence
  SiRNA target sequence
cccaatttgataaaaacatatcca

SEQ ID NO: 188931 - DNA, 24 bp, Artificial sequence
  SiRNA target sequence
ccaatttgataaaaacatatccaa

SEQ ID NO: 188932 - DNA, 24 bp, Artificial sequence
  SiRNA target sequence
caatttgataaaaacatatccaaa

SEQ ID NO: 188933 - DNA, 24 bp, Artificial sequence
  SiRNA target sequence
aatttgataaaaacatatccaaat

SEQ ID NO: 188934 - DNA, 24 bp, Artificial sequence
  SiRNA target sequence
atttgataaaaacatatccaaatt

SEQ ID NO: 188935 - DNA, 24 bp, Artificial sequence
  SiRNA target sequence
tttgataaaaacatatccaaattt

SEQ ID NO: 188936 - DNA, 24 bp, Artificial sequence
  SiRNA target sequence
ttgataaaaacatatccaaatttt

SEQ ID NO: 188937 - DNA, 24 bp, Artificial sequence
  SiRNA target sequence
tgataaaaacatatccaaatttta

SEQ ID NO: 188938 - DNA, 24 bp, Artificial sequence
  SiRNA target sequence
gataaaaacatatccaaattttac

SEQ ID NO: 188939 - DNA, 24 bp, Artificial sequence
  SiRNA target sequence
ataaaaacatatccaaattttacg

SEQ ID NO: 188940 - DNA, 24 bp, Artificial sequence
  SiRNA target sequence
taaaaacatatccaaattttacgc

SEQ ID NO: 188941 - DNA, 24 bp, Artificial sequence
  SiRNA target sequence
aaaaacatatccaaattttacgct

SEQ ID NO: 188942 - DNA, 24 bp, Artificial sequence
  SiRNA target sequence
aaaacatatccaaattttacgctt

SEQ ID NO: 188943 - DNA, 24 bp, Artificial sequence
  SiRNA target sequence
aaacatatccaaattttacgctta

SEQ ID NO: 188944 - DNA, 24 bp, Artificial sequence
  SiRNA target sequence
aacatatccaaattttacgcttaa

SEQ ID NO: 188945 - DNA, 24 bp, Artificial sequence
  SiRNA target sequence
acatatccaaattttacgcttaaa

SEQ ID NO: 188946 - DNA, 24 bp, Artificial sequence
  SiRNA target sequence
catatccaaattttacgcttaaag

SEQ ID NO: 188947 - DNA, 24 bp, Artificial sequence
  SiRNA target sequence
atatccaaattttacgcttaaagt

SEQ ID NO: 188948 - DNA, 24 bp, Artificial sequence
  SiRNA target sequence
tatccaaattttacgcttaaagtt

SEQ ID NO: 188949 - DNA, 24 bp, Artificial sequence
  SiRNA target sequence
atccaaattttacgcttaaagttg

SEQ ID NO: 188950 - DNA, 24 bp, Artificial sequence
  SiRNA target sequence
tccaaattttacgcttaaagttga

SEQ ID NO: 188951 - DNA, 24 bp, Artificial sequence
  SiRNA target sequence
ccaaattttacgcttaaagttgaa

SEQ ID NO: 188952 - DNA, 24 bp, Artificial sequence
  SiRNA target sequence
caaattttacgcttaaagttgaag

SEQ ID NO: 188953 - DNA, 24 bp, Artificial sequence
  SiRNA target sequence
aaattttacgcttaaagttgaagg

SEQ ID NO: 188954 - DNA, 24 bp, Artificial sequence
  SiRNA target sequence
aattttacgcttaaagttgaaggc

SEQ ID NO: 188955 - DNA, 24 bp, Artificial sequence
  SiRNA target sequence
attttacgcttaaagttgaaggcg

SEQ ID NO: 188956 - DNA, 24 bp, Artificial sequence
  SiRNA target sequence
ttttacgcttaaagttgaaggcgg

SEQ ID NO: 188957 - DNA, 24 bp, Artificial sequence
  SiRNA target sequence
tttacgcttaaagttgaaggcggt

SEQ ID NO: 188958 - DNA, 24 bp, Artificial sequence
  SiRNA target sequence
ttacgcttaaagttgaaggcggta

SEQ ID NO: 188959 - DNA, 24 bp, Artificial sequence
  SiRNA target sequence
tacgcttaaagttgaaggcggtaa

SEQ ID NO: 188960 - DNA, 24 bp, Artificial sequence
  SiRNA target sequence
acgcttaaagttgaaggcggtaac

SEQ ID NO: 188961 - DNA, 24 bp, Artificial sequence
  SiRNA target sequence
cgcttaaagttgaaggcggtaact

SEQ ID NO: 188962 - DNA, 24 bp, Artificial sequence
  SiRNA target sequence
gcttaaagttgaaggcggtaactt

SEQ ID NO: 188963 - DNA, 24 bp, Artificial sequence
  SiRNA target sequence
cttaaagttgaaggcggtaacttt

SEQ ID NO: 188964 - DNA, 24 bp, Artificial sequence
  SiRNA target sequence
ttaaagttgaaggcggtaactttt

SEQ ID NO: 188965 - DNA, 24 bp, Artificial sequence
  SiRNA target sequence
taaagttgaaggcggtaacttttc

SEQ ID NO: 188966 - DNA, 24 bp, Artificial sequence
  SiRNA target sequence
aaagttgaaggcggtaacttttca

SEQ ID NO: 188967 - DNA, 24 bp, Artificial sequence
  SiRNA target sequence
aagttgaaggcggtaacttttcag

SEQ ID NO: 188968 - DNA, 24 bp, Artificial sequence
  SiRNA target sequence
agttgaaggcggtaacttttcaga

SEQ ID NO: 188969 - DNA, 24 bp, Artificial sequence
  SiRNA target sequence
gttgaaggcggtaacttttcagat

SEQ ID NO: 188970 - DNA, 24 bp, Artificial sequence
  SiRNA target sequence
ttgaaggcggtaacttttcagatt

SEQ ID NO: 188971 - DNA, 24 bp, Artificial sequence
  SiRNA target sequence
tgaaggcggtaacttttcagattc

SEQ ID NO: 188972 - DNA, 24 bp, Artificial sequence
  SiRNA target sequence
gaaggcggtaacttttcagattct

SEQ ID NO: 188973 - DNA, 24 bp, Artificial sequence
  SiRNA target sequence
aaggcggtaacttttcagattctg

SEQ ID NO: 188974 - DNA, 24 bp, Artificial sequence
  SiRNA target sequence
aggcggtaacttttcagattctga

SEQ ID NO: 188975 - DNA, 24 bp, Artificial sequence
  SiRNA target sequence
ggcggtaacttttcagattctgaa

SEQ ID NO: 188976 - DNA, 24 bp, Artificial sequence
  SiRNA target sequence
gcggtaacttttcagattctgaaa

SEQ ID NO: 188977 - DNA, 24 bp, Artificial sequence
  SiRNA target sequence
cggtaacttttcagattctgaaat

SEQ ID NO: 188978 - DNA, 24 bp, Artificial sequence
  SiRNA target sequence
ggtaacttttcagattctgaaatt

SEQ ID NO: 188979 - DNA, 24 bp, Artificial sequence
  SiRNA target sequence
gtaacttttcagattctgaaattg

SEQ ID NO: 188980 - DNA, 24 bp, Artificial sequence
  SiRNA target sequence
taacttttcagattctgaaattgt

SEQ ID NO: 188981 - DNA, 24 bp, Artificial sequence
  SiRNA target sequence
aacttttcagattctgaaattgtt

SEQ ID NO: 188982 - DNA, 24 bp, Artificial sequence
  SiRNA target sequence
acttttcagattctgaaattgttg

SEQ ID NO: 188983 - DNA, 24 bp, Artificial sequence
  SiRNA target sequence
cttttcagattctgaaattgttgt

SEQ ID NO: 188984 - DNA, 24 bp, Artificial sequence
  SiRNA target sequence
ttttcagattctgaaattgttgta

SEQ ID NO: 188985 - DNA, 24 bp, Artificial sequence
  SiRNA target sequence
tttcagattctgaaattgttgtat

SEQ ID NO: 188986 - DNA, 24 bp, Artificial sequence
  SiRNA target sequence
ttcagattctgaaattgttgtatt

SEQ ID NO: 188987 - DNA, 24 bp, Artificial sequence
  SiRNA target sequence
tcagattctgaaattgttgtattt

SEQ ID NO: 188988 - DNA, 24 bp, Artificial sequence
  SiRNA target sequence
cagattctgaaattgttgtatttc

SEQ ID NO: 188989 - DNA, 24 bp, Artificial sequence
  SiRNA target sequence
agattctgaaattgttgtatttct

SEQ ID NO: 188990 - DNA, 24 bp, Artificial sequence
  SiRNA target sequence
gattctgaaattgttgtatttctt

SEQ ID NO: 188991 - DNA, 24 bp, Artificial sequence
  SiRNA target sequence
attctgaaattgttgtatttcttg

SEQ ID NO: 188992 - DNA, 24 bp, Artificial sequence
  SiRNA target sequence
ttctgaaattgttgtatttcttgg

SEQ ID NO: 188993 - DNA, 24 bp, Artificial sequence
  SiRNA target sequence
tctgaaattgttgtatttcttggt

SEQ ID NO: 188994 - DNA, 24 bp, Artificial sequence
  SiRNA target sequence
ctgaaattgttgtatttcttggtg

SEQ ID NO: 188995 - DNA, 24 bp, Artificial sequence
  SiRNA target sequence
tgaaattgttgtatttcttggtga

SEQ ID NO: 188996 - DNA, 24 bp, Artificial sequence
  SiRNA target sequence
gaaattgttgtatttcttggtgaa

SEQ ID NO: 188997 - DNA, 24 bp, Artificial sequence
  SiRNA target sequence
aaattgttgtatttcttggtgaaa

SEQ ID NO: 188998 - DNA, 24 bp, Artificial sequence
  SiRNA target sequence
aattgttgtatttcttggtgaaaa

SEQ ID NO: 188999 - DNA, 24 bp, Artificial sequence
  SiRNA target sequence
attgttgtatttcttggtgaaaat

SEQ ID NO: 189000 - DNA, 24 bp, Artificial sequence
  SiRNA target sequence
ttgttgtatttcttggtgaaaatg

SEQ ID NO: 189001 - DNA, 24 bp, Artificial sequence
  SiRNA target sequence
tgttgtatttcttggtgaaaatgg

SEQ ID NO: 189002 - DNA, 24 bp, Artificial sequence
  SiRNA target sequence
gttgtatttcttggtgaaaatgga

SEQ ID NO: 189003 - DNA, 24 bp, Artificial sequence
  SiRNA target sequence
ttgtatttcttggtgaaaatggaa

SEQ ID NO: 189004 - DNA, 24 bp, Artificial sequence
  SiRNA target sequence
tgtatttcttggtgaaaatggaat

SEQ ID NO: 189005 - DNA, 24 bp, Artificial sequence
  SiRNA target sequence
gtatttcttggtgaaaatggaatg

SEQ ID NO: 189006 - DNA, 24 bp, Artificial sequence
  SiRNA target sequence
tatttcttggtgaaaatggaatgg

SEQ ID NO: 189007 - DNA, 24 bp, Artificial sequence
  SiRNA target sequence
atttcttggtgaaaatggaatggg

SEQ ID NO: 189008 - DNA, 24 bp, Artificial sequence
  SiRNA target sequence
tttcttggtgaaaatggaatgggc

SEQ ID NO: 189009 - DNA, 24 bp, Artificial sequence
  SiRNA target sequence
ttcttggtgaaaatggaatgggca

SEQ ID NO: 189010 - DNA, 24 bp, Artificial sequence
  SiRNA target sequence
tcttggtgaaaatggaatgggcaa

SEQ ID NO: 189011 - DNA, 24 bp, Artificial sequence
  SiRNA target sequence
cttggtgaaaatggaatgggcaaa

SEQ ID NO: 189012 - DNA, 24 bp, Artificial sequence
  SiRNA target sequence
ttggtgaaaatggaatgggcaaaa

SEQ ID NO: 189013 - DNA, 24 bp, Artificial sequence
  SiRNA target sequence
tggtgaaaatggaatgggcaaaac

SEQ ID NO: 189014 - DNA, 24 bp, Artificial sequence
  SiRNA target sequence
ggtgaaaatggaatgggcaaaact

SEQ ID NO: 189015 - DNA, 24 bp, Artificial sequence
  SiRNA target sequence
gtgaaaatggaatgggcaaaacta

SEQ ID NO: 189016 - DNA, 24 bp, Artificial sequence
  SiRNA target sequence
tgaaaatggaatgggcaaaactac

SEQ ID NO: 189017 - DNA, 24 bp, Artificial sequence
  SiRNA target sequence
gaaaatggaatgggcaaaactact

SEQ ID NO: 189018 - DNA, 24 bp, Artificial sequence
  SiRNA target sequence
aaaatggaatgggcaaaactactt

SEQ ID NO: 189019 - DNA, 24 bp, Artificial sequence
  SiRNA target sequence
aaatggaatgggcaaaactacttt

SEQ ID NO: 189020 - DNA, 24 bp, Artificial sequence
  SiRNA target sequence
aatggaatgggcaaaactacttta

SEQ ID NO: 189021 - DNA, 24 bp, Artificial sequence
  SiRNA target sequence
atggaatgggcaaaactactttag

SEQ ID NO: 189022 - DNA, 24 bp, Artificial sequence
  SiRNA target sequence
tggaatgggcaaaactactttagt

SEQ ID NO: 189023 - DNA, 24 bp, Artificial sequence
  SiRNA target sequence
ggaatgggcaaaactactttagta

SEQ ID NO: 189024 - DNA, 24 bp, Artificial sequence
  SiRNA target sequence
gaatgggcaaaactactttagtag

SEQ ID NO: 189025 - DNA, 24 bp, Artificial sequence
  SiRNA target sequence
aatgggcaaaactactttagtagg

SEQ ID NO: 189026 - DNA, 24 bp, Artificial sequence
  SiRNA target sequence
atgggcaaaactactttagtaggt

SEQ ID NO: 189027 - DNA, 24 bp, Artificial sequence
  SiRNA target sequence
tgggcaaaactactttagtaggtt

SEQ ID NO: 189028 - DNA, 24 bp, Artificial sequence
  SiRNA target sequence
gggcaaaactactttagtaggttt

SEQ ID NO: 189029 - DNA, 24 bp, Artificial sequence
  SiRNA target sequence
ggcaaaactactttagtaggtttg

SEQ ID NO: 189030 - DNA, 24 bp, Artificial sequence
  SiRNA target sequence
gcaaaactactttagtaggtttga

SEQ ID NO: 189031 - DNA, 24 bp, Artificial sequence
  SiRNA target sequence
caaaactactttagtaggtttgat

SEQ ID NO: 189032 - DNA, 24 bp, Artificial sequence
  SiRNA target sequence
aaaactactttagtaggtttgatt

SEQ ID NO: 189033 - DNA, 24 bp, Artificial sequence
  SiRNA target sequence
aaactactttagtaggtttgattt

SEQ ID NO: 189034 - DNA, 24 bp, Artificial sequence
  SiRNA target sequence
aactactttagtaggtttgatttc

SEQ ID NO: 189035 - DNA, 24 bp, Artificial sequence
  SiRNA target sequence
actactttagtaggtttgatttcg

SEQ ID NO: 189036 - DNA, 24 bp, Artificial sequence
  SiRNA target sequence
ctactttagtaggtttgatttcgg

SEQ ID NO: 189037 - DNA, 24 bp, Artificial sequence
  SiRNA target sequence
tactttagtaggtttgatttcggg

SEQ ID NO: 189038 - DNA, 24 bp, Artificial sequence
  SiRNA target sequence
actttagtaggtttgatttcgggg

SEQ ID NO: 189039 - DNA, 24 bp, Artificial sequence
  SiRNA target sequence
ctttagtaggtttgatttcggggt

SEQ ID NO: 189040 - DNA, 24 bp, Artificial sequence
  SiRNA target sequence
tttagtaggtttgatttcggggtt

SEQ ID NO: 189041 - DNA, 24 bp, Artificial sequence
  SiRNA target sequence
ttagtaggtttgatttcggggtta

SEQ ID NO: 189042 - DNA, 24 bp, Artificial sequence
  SiRNA target sequence
tagtaggtttgatttcggggttaa

SEQ ID NO: 189043 - DNA, 24 bp, Artificial sequence
  SiRNA target sequence
agtaggtttgatttcggggttaat

SEQ ID NO: 189044 - DNA, 24 bp, Artificial sequence
  SiRNA target sequence
gtaggtttgatttcggggttaatt

SEQ ID NO: 189045 - DNA, 24 bp, Artificial sequence
  SiRNA target sequence
taggtttgatttcggggttaatta

SEQ ID NO: 189046 - DNA, 24 bp, Artificial sequence
  SiRNA target sequence
aggtttgatttcggggttaattaa

SEQ ID NO: 189047 - DNA, 24 bp, Artificial sequence
  SiRNA target sequence
ggtttgatttcggggttaattaaa

SEQ ID NO: 189048 - DNA, 24 bp, Artificial sequence
  SiRNA target sequence
gtttgatttcggggttaattaaag

SEQ ID NO: 189049 - DNA, 24 bp, Artificial sequence
  SiRNA target sequence
tttgatttcggggttaattaaaga

SEQ ID NO: 189050 - DNA, 24 bp, Artificial sequence
  SiRNA target sequence
ttgatttcggggttaattaaagat

SEQ ID NO: 189051 - DNA, 24 bp, Artificial sequence
  SiRNA target sequence
tgatttcggggttaattaaagatg

SEQ ID NO: 189052 - DNA, 24 bp, Artificial sequence
  SiRNA target sequence
gatttcggggttaattaaagatga

SEQ ID NO: 189053 - DNA, 24 bp, Artificial sequence
  SiRNA target sequence
atttcggggttaattaaagatgat

SEQ ID NO: 189054 - DNA, 24 bp, Artificial sequence
  SiRNA target sequence
tttcggggttaattaaagatgata

SEQ ID NO: 189055 - DNA, 24 bp, Artificial sequence
  SiRNA target sequence
ttcggggttaattaaagatgataa

SEQ ID NO: 189056 - DNA, 24 bp, Artificial sequence
  SiRNA target sequence
tcggggttaattaaagatgataac

SEQ ID NO: 189057 - DNA, 24 bp, Artificial sequence
  SiRNA target sequence
cggggttaattaaagatgataacg

SEQ ID NO: 189058 - DNA, 24 bp, Artificial sequence
  SiRNA target sequence
ggggttaattaaagatgataacgg

SEQ ID NO: 189059 - DNA, 24 bp, Artificial sequence
  SiRNA target sequence
gggttaattaaagatgataacggg

SEQ ID NO: 189060 - DNA, 24 bp, Artificial sequence
  SiRNA target sequence
ggttaattaaagatgataacgggg

SEQ ID NO: 189061 - DNA, 24 bp, Artificial sequence
  SiRNA target sequence
gttaattaaagatgataacgggga

SEQ ID NO: 189062 - DNA, 24 bp, Artificial sequence
  SiRNA target sequence
ttaattaaagatgataacggggaa

SEQ ID NO: 189063 - DNA, 24 bp, Artificial sequence
  SiRNA target sequence
taattaaagatgataacggggaag

SEQ ID NO: 189064 - DNA, 24 bp, Artificial sequence
  SiRNA target sequence
aattaaagatgataacggggaaga

SEQ ID NO: 189065 - DNA, 24 bp, Artificial sequence
  SiRNA target sequence
attaaagatgataacggggaagag

SEQ ID NO: 189066 - DNA, 24 bp, Artificial sequence
  SiRNA target sequence
ttaaagatgataacggggaagagt

SEQ ID NO: 189067 - DNA, 24 bp, Artificial sequence
  SiRNA target sequence
taaagatgataacggggaagagtt

SEQ ID NO: 189068 - DNA, 24 bp, Artificial sequence
  SiRNA target sequence
aaagatgataacggggaagagttc

SEQ ID NO: 189069 - DNA, 24 bp, Artificial sequence
  SiRNA target sequence
aagatgataacggggaagagttcg

SEQ ID NO: 189070 - DNA, 24 bp, Artificial sequence
  SiRNA target sequence
agatgataacggggaagagttcgg

SEQ ID NO: 189071 - DNA, 24 bp, Artificial sequence
  SiRNA target sequence
gatgataacggggaagagttcggt

SEQ ID NO: 189072 - DNA, 24 bp, Artificial sequence
  SiRNA target sequence
atgataacggggaagagttcggtt

SEQ ID NO: 189073 - DNA, 24 bp, Artificial sequence
  SiRNA target sequence
tgataacggggaagagttcggttt

SEQ ID NO: 189074 - DNA, 24 bp, Artificial sequence
  SiRNA target sequence
gataacggggaagagttcggtttg

SEQ ID NO: 189075 - DNA, 24 bp, Artificial sequence
  SiRNA target sequence
ataacggggaagagttcggtttgt

SEQ ID NO: 189076 - DNA, 24 bp, Artificial sequence
  SiRNA target sequence
taacggggaagagttcggtttgtt

SEQ ID NO: 189077 - DNA, 24 bp, Artificial sequence
  SiRNA target sequence
aacggggaagagttcggtttgttg

SEQ ID NO: 189078 - DNA, 24 bp, Artificial sequence
  SiRNA target sequence
acggggaagagttcggtttgttgt

SEQ ID NO: 189079 - DNA, 24 bp, Artificial sequence
  SiRNA target sequence
cggggaagagttcggtttgttgtc

SEQ ID NO: 189080 - DNA, 24 bp, Artificial sequence
  SiRNA target sequence
ggggaagagttcggtttgttgtca

SEQ ID NO: 189081 - DNA, 24 bp, Artificial sequence
  SiRNA target sequence
gggaagagttcggtttgttgtcat

SEQ ID NO: 189082 - DNA, 24 bp, Artificial sequence
  SiRNA target sequence
ggaagagttcggtttgttgtcata

SEQ ID NO: 189083 - DNA, 24 bp, Artificial sequence
  SiRNA target sequence
gaagagttcggtttgttgtcatat

SEQ ID NO: 189084 - DNA, 24 bp, Artificial sequence
  SiRNA target sequence
aagagttcggtttgttgtcatata

SEQ ID NO: 189085 - DNA, 24 bp, Artificial sequence
  SiRNA target sequence
agagttcggtttgttgtcatatag

SEQ ID NO: 189086 - DNA, 24 bp, Artificial sequence
  SiRNA target sequence
gagttcggtttgttgtcatatagt

SEQ ID NO: 189087 - DNA, 24 bp, Artificial sequence
  SiRNA target sequence
agttcggtttgttgtcatatagtc

SEQ ID NO: 189088 - DNA, 24 bp, Artificial sequence
  SiRNA target sequence
gttcggtttgttgtcatatagtct

SEQ ID NO: 189089 - DNA, 24 bp, Artificial sequence
  SiRNA target sequence
ttcggtttgttgtcatatagtctt

SEQ ID NO: 189090 - DNA, 24 bp, Artificial sequence
  SiRNA target sequence
tcggtttgttgtcatatagtctta

SEQ ID NO: 189091 - DNA, 24 bp, Artificial sequence
  SiRNA target sequence
cggtttgttgtcatatagtcttaa

SEQ ID NO: 189092 - DNA, 24 bp, Artificial sequence
  SiRNA target sequence
ggtttgttgtcatatagtcttaaa

SEQ ID NO: 189093 - DNA, 24 bp, Artificial sequence
  SiRNA target sequence
gtttgttgtcatatagtcttaaac

SEQ ID NO: 189094 - DNA, 24 bp, Artificial sequence
  SiRNA target sequence
tttgttgtcatatagtcttaaacc

SEQ ID NO: 189095 - DNA, 24 bp, Artificial sequence
  SiRNA target sequence
ttgttgtcatatagtcttaaaccg

SEQ ID NO: 189096 - DNA, 24 bp, Artificial sequence
  SiRNA target sequence
tgttgtcatatagtcttaaaccgc

SEQ ID NO: 189097 - DNA, 24 bp, Artificial sequence
  SiRNA target sequence
gttgtcatatagtcttaaaccgca

SEQ ID NO: 189098 - DNA, 24 bp, Artificial sequence
  SiRNA target sequence
ttgtcatatagtcttaaaccgcaa

SEQ ID NO: 189099 - DNA, 24 bp, Artificial sequence
  SiRNA target sequence
tgtcatatagtcttaaaccgcaaa

SEQ ID NO: 189100 - DNA, 24 bp, Artificial sequence
  SiRNA target sequence
gtcatatagtcttaaaccgcaaaa

SEQ ID NO: 189101 - DNA, 24 bp, Artificial sequence
  SiRNA target sequence
tcatatagtcttaaaccgcaaaaa

SEQ ID NO: 189102 - DNA, 24 bp, Artificial sequence
  SiRNA target sequence
catatagtcttaaaccgcaaaaaa

SEQ ID NO: 189103 - DNA, 24 bp, Artificial sequence
  SiRNA target sequence
atatagtcttaaaccgcaaaaaat

SEQ ID NO: 189104 - DNA, 24 bp, Artificial sequence
  SiRNA target sequence
tatagtcttaaaccgcaaaaaatc

SEQ ID NO: 189105 - DNA, 24 bp, Artificial sequence
  SiRNA target sequence
atagtcttaaaccgcaaaaaatca

SEQ ID NO: 189106 - DNA, 24 bp, Artificial sequence
  SiRNA target sequence
tagtcttaaaccgcaaaaaatcat

SEQ ID NO: 189107 - DNA, 24 bp, Artificial sequence
  SiRNA target sequence
agtcttaaaccgcaaaaaatcata

SEQ ID NO: 189108 - DNA, 24 bp, Artificial sequence
  SiRNA target sequence
gtcttaaaccgcaaaaaatcatac

SEQ ID NO: 189109 - DNA, 24 bp, Artificial sequence
  SiRNA target sequence
tcttaaaccgcaaaaaatcatacc

SEQ ID NO: 189110 - DNA, 24 bp, Artificial sequence
  SiRNA target sequence
cttaaaccgcaaaaaatcataccg

SEQ ID NO: 189111 - DNA, 24 bp, Artificial sequence
  SiRNA target sequence
ttaaaccgcaaaaaatcataccga

SEQ ID NO: 189112 - DNA, 24 bp, Artificial sequence
  SiRNA target sequence
taaaccgcaaaaaatcataccgaa

SEQ ID NO: 189113 - DNA, 24 bp, Artificial sequence
  SiRNA target sequence
aaaccgcaaaaaatcataccgaaa

SEQ ID NO: 189114 - DNA, 24 bp, Artificial sequence
  SiRNA target sequence
aaccgcaaaaaatcataccgaaat

SEQ ID NO: 189115 - DNA, 24 bp, Artificial sequence
  SiRNA target sequence
accgcaaaaaatcataccgaaata

SEQ ID NO: 189116 - DNA, 24 bp, Artificial sequence
  SiRNA target sequence
ccgcaaaaaatcataccgaaatac

SEQ ID NO: 189117 - DNA, 24 bp, Artificial sequence
  SiRNA target sequence
cgcaaaaaatcataccgaaataca

SEQ ID NO: 189118 - DNA, 24 bp, Artificial sequence
  SiRNA target sequence
gcaaaaaatcataccgaaatacaa

SEQ ID NO: 189119 - DNA, 24 bp, Artificial sequence
  SiRNA target sequence
caaaaaatcataccgaaatacaaa

SEQ ID NO: 189120 - DNA, 24 bp, Artificial sequence
  SiRNA target sequence
aaaaaatcataccgaaatacaaag

SEQ ID NO: 189121 - DNA, 24 bp, Artificial sequence
  SiRNA target sequence
aaaaatcataccgaaatacaaagg

SEQ ID NO: 189122 - DNA, 24 bp, Artificial sequence
  SiRNA target sequence
aaaatcataccgaaatacaaagga

SEQ ID NO: 189123 - DNA, 24 bp, Artificial sequence
  SiRNA target sequence
aaatcataccgaaatacaaaggaa

SEQ ID NO: 189124 - DNA, 24 bp, Artificial sequence
  SiRNA target sequence
aatcataccgaaatacaaaggaac

SEQ ID NO: 189125 - DNA, 24 bp, Artificial sequence
  SiRNA target sequence
atcataccgaaatacaaaggaaca

SEQ ID NO: 189126 - DNA, 24 bp, Artificial sequence
  SiRNA target sequence
tcataccgaaatacaaaggaacag

SEQ ID NO: 189127 - DNA, 24 bp, Artificial sequence
  SiRNA target sequence
cataccgaaatacaaaggaacagt

SEQ ID NO: 189128 - DNA, 24 bp, Artificial sequence
  SiRNA target sequence
ataccgaaatacaaaggaacagtt

SEQ ID NO: 189129 - DNA, 24 bp, Artificial sequence
  SiRNA target sequence
taccgaaatacaaaggaacagtta

SEQ ID NO: 189130 - DNA, 24 bp, Artificial sequence
  SiRNA target sequence
accgaaatacaaaggaacagttag

SEQ ID NO: 189131 - DNA, 24 bp, Artificial sequence
  SiRNA target sequence
ccgaaatacaaaggaacagttaga

SEQ ID NO: 189132 - DNA, 24 bp, Artificial sequence
  SiRNA target sequence
cgaaatacaaaggaacagttagag

SEQ ID NO: 189133 - DNA, 24 bp, Artificial sequence
  SiRNA target sequence
gaaatacaaaggaacagttagaga

SEQ ID NO: 189134 - DNA, 24 bp, Artificial sequence
  SiRNA target sequence
aaatacaaaggaacagttagagat

SEQ ID NO: 189135 - DNA, 24 bp, Artificial sequence
  SiRNA target sequence
aatacaaaggaacagttagagatc

SEQ ID NO: 189136 - DNA, 24 bp, Artificial sequence
  SiRNA target sequence
atacaaaggaacagttagagatct

SEQ ID NO: 189137 - DNA, 24 bp, Artificial sequence
  SiRNA target sequence
tacaaaggaacagttagagatctt

SEQ ID NO: 189138 - DNA, 24 bp, Artificial sequence
  SiRNA target sequence
acaaaggaacagttagagatcttt

SEQ ID NO: 189139 - DNA, 24 bp, Artificial sequence
  SiRNA target sequence
caaaggaacagttagagatctttt

SEQ ID NO: 189140 - DNA, 24 bp, Artificial sequence
  SiRNA target sequence
aaaggaacagttagagatcttttt

SEQ ID NO: 189141 - DNA, 24 bp, Artificial sequence
  SiRNA target sequence
aaggaacagttagagatcttttta

SEQ ID NO: 189142 - DNA, 24 bp, Artificial sequence
  SiRNA target sequence
aggaacagttagagatctttttat

SEQ ID NO: 189143 - DNA, 24 bp, Artificial sequence
  SiRNA target sequence
ggaacagttagagatctttttatg

SEQ ID NO: 189144 - DNA, 24 bp, Artificial sequence
  SiRNA target sequence
gaacagttagagatctttttatgt

SEQ ID NO: 189145 - DNA, 24 bp, Artificial sequence
  SiRNA target sequence
aacagttagagatctttttatgtc

SEQ ID NO: 189146 - DNA, 24 bp, Artificial sequence
  SiRNA target sequence
acagttagagatctttttatgtca

SEQ ID NO: 189147 - DNA, 24 bp, Artificial sequence
  SiRNA target sequence
cagttagagatctttttatgtcaa

SEQ ID NO: 189148 - DNA, 24 bp, Artificial sequence
  SiRNA target sequence
agttagagatctttttatgtcaaa

SEQ ID NO: 189149 - DNA, 24 bp, Artificial sequence
  SiRNA target sequence
gttagagatctttttatgtcaaaa

SEQ ID NO: 189150 - DNA, 24 bp, Artificial sequence
  SiRNA target sequence
ttagagatctttttatgtcaaaaa

SEQ ID NO: 189151 - DNA, 24 bp, Artificial sequence
  SiRNA target sequence
tagagatctttttatgtcaaaaat

SEQ ID NO: 189152 - DNA, 24 bp, Artificial sequence
  SiRNA target sequence
agagatctttttatgtcaaaaatt

SEQ ID NO: 189153 - DNA, 24 bp, Artificial sequence
  SiRNA target sequence
gagatctttttatgtcaaaaattc

SEQ ID NO: 189154 - DNA, 24 bp, Artificial sequence
  SiRNA target sequence
agatctttttatgtcaaaaattcg

SEQ ID NO: 189155 - DNA, 24 bp, Artificial sequence
  SiRNA target sequence
gatctttttatgtcaaaaattcgt

SEQ ID NO: 189156 - DNA, 24 bp, Artificial sequence
  SiRNA target sequence
atctttttatgtcaaaaattcgtt

SEQ ID NO: 189157 - DNA, 24 bp, Artificial sequence
  SiRNA target sequence
tctttttatgtcaaaaattcgttc

SEQ ID NO: 189158 - DNA, 24 bp, Artificial sequence
  SiRNA target sequence
ctttttatgtcaaaaattcgttct

SEQ ID NO: 189159 - DNA, 24 bp, Artificial sequence
  SiRNA target sequence
tttttatgtcaaaaattcgttctt

SEQ ID NO: 189160 - DNA, 24 bp, Artificial sequence
  SiRNA target sequence
ttttatgtcaaaaattcgttcttc

SEQ ID NO: 189161 - DNA, 24 bp, Artificial sequence
  SiRNA target sequence
tttatgtcaaaaattcgttcttcc

SEQ ID NO: 189162 - DNA, 24 bp, Artificial sequence
  SiRNA target sequence
ttatgtcaaaaattcgttcttcct

SEQ ID NO: 189163 - DNA, 24 bp, Artificial sequence
  SiRNA target sequence
tatgtcaaaaattcgttcttcctt

SEQ ID NO: 189164 - DNA, 24 bp, Artificial sequence
  SiRNA target sequence
atgtcaaaaattcgttcttccttt

SEQ ID NO: 189165 - DNA, 24 bp, Artificial sequence
  SiRNA target sequence
tgtcaaaaattcgttcttcctttt

SEQ ID NO: 189166 - DNA, 24 bp, Artificial sequence
  SiRNA target sequence
gtcaaaaattcgttcttccttttt

SEQ ID NO: 189167 - DNA, 24 bp, Artificial sequence
  SiRNA target sequence
tcaaaaattcgttcttccttttta

SEQ ID NO: 189168 - DNA, 24 bp, Artificial sequence
  SiRNA target sequence
caaaaattcgttcttcctttttag

SEQ ID NO: 189169 - DNA, 24 bp, Artificial sequence
  SiRNA target sequence
aaaaattcgttcttcctttttaga

SEQ ID NO: 189170 - DNA, 24 bp, Artificial sequence
  SiRNA target sequence
aaaattcgttcttcctttttagac

SEQ ID NO: 189171 - DNA, 24 bp, Artificial sequence
  SiRNA target sequence
aaattcgttcttcctttttagacg

SEQ ID NO: 189172 - DNA, 24 bp, Artificial sequence
  SiRNA target sequence
aattcgttcttcctttttagacgc

SEQ ID NO: 189173 - DNA, 24 bp, Artificial sequence
  SiRNA target sequence
attcgttcttcctttttagacgct

SEQ ID NO: 189174 - DNA, 24 bp, Artificial sequence
  SiRNA target sequence
ttcgttcttcctttttagacgcta

SEQ ID NO: 189175 - DNA, 24 bp, Artificial sequence
  SiRNA target sequence
tcgttcttcctttttagacgctaa

SEQ ID NO: 189176 - DNA, 24 bp, Artificial sequence
  SiRNA target sequence
cgttcttcctttttagacgctaat

SEQ ID NO: 189177 - DNA, 24 bp, Artificial sequence
  SiRNA target sequence
gttcttcctttttagacgctaatt

SEQ ID NO: 189178 - DNA, 24 bp, Artificial sequence
  SiRNA target sequence
ttcttcctttttagacgctaattt

SEQ ID NO: 189179 - DNA, 24 bp, Artificial sequence
  SiRNA target sequence
tcttcctttttagacgctaatttt

SEQ ID NO: 189180 - DNA, 24 bp, Artificial sequence
  SiRNA target sequence
cttcctttttagacgctaattttg

SEQ ID NO: 189181 - DNA, 24 bp, Artificial sequence
  SiRNA target sequence
ttcctttttagacgctaattttgt

SEQ ID NO: 189182 - DNA, 24 bp, Artificial sequence
  SiRNA target sequence
tcctttttagacgctaattttgtt

SEQ ID NO: 189183 - DNA, 24 bp, Artificial sequence
  SiRNA target sequence
cctttttagacgctaattttgtta

SEQ ID NO: 189184 - DNA, 24 bp, Artificial sequence
  SiRNA target sequence
ctttttagacgctaattttgttaa

SEQ ID NO: 189185 - DNA, 24 bp, Artificial sequence
  SiRNA target sequence
tttttagacgctaattttgttaat

SEQ ID NO: 189186 - DNA, 24 bp, Artificial sequence
  SiRNA target sequence
ttttagacgctaattttgttaatg

SEQ ID NO: 189187 - DNA, 24 bp, Artificial sequence
  SiRNA target sequence
tttagacgctaattttgttaatga

SEQ ID NO: 189188 - DNA, 24 bp, Artificial sequence
  SiRNA target sequence
ttagacgctaattttgttaatgaa

SEQ ID NO: 189189 - DNA, 24 bp, Artificial sequence
  SiRNA target sequence
tagacgctaattttgttaatgaag

SEQ ID NO: 189190 - DNA, 24 bp, Artificial sequence
  SiRNA target sequence
agacgctaattttgttaatgaagc

SEQ ID NO: 189191 - DNA, 24 bp, Artificial sequence
  SiRNA target sequence
gacgctaattttgttaatgaagct

SEQ ID NO: 189192 - DNA, 24 bp, Artificial sequence
  SiRNA target sequence
acgctaattttgttaatgaagcta

SEQ ID NO: 189193 - DNA, 24 bp, Artificial sequence
  SiRNA target sequence
cgctaattttgttaatgaagctat

SEQ ID NO: 189194 - DNA, 24 bp, Artificial sequence
  SiRNA target sequence
gctaattttgttaatgaagctatt

SEQ ID NO: 189195 - DNA, 24 bp, Artificial sequence
  SiRNA target sequence
ctaattttgttaatgaagctatta

SEQ ID NO: 189196 - DNA, 24 bp, Artificial sequence
  SiRNA target sequence
taattttgttaatgaagctattaa

SEQ ID NO: 189197 - DNA, 24 bp, Artificial sequence
  SiRNA target sequence
aattttgttaatgaagctattaaa

SEQ ID NO: 189198 - DNA, 24 bp, Artificial sequence
  SiRNA target sequence
attttgttaatgaagctattaaac

SEQ ID NO: 189199 - DNA, 24 bp, Artificial sequence
  SiRNA target sequence
ttttgttaatgaagctattaaacc

SEQ ID NO: 189200 - DNA, 24 bp, Artificial sequence
  SiRNA target sequence
tttgttaatgaagctattaaacct

SEQ ID NO: 189201 - DNA, 24 bp, Artificial sequence
  SiRNA target sequence
ttgttaatgaagctattaaacctt

SEQ ID NO: 189202 - DNA, 24 bp, Artificial sequence
  SiRNA target sequence
tgttaatgaagctattaaaccttt

SEQ ID NO: 189203 - DNA, 24 bp, Artificial sequence
  SiRNA target sequence
gttaatgaagctattaaaccttta

SEQ ID NO: 189204 - DNA, 24 bp, Artificial sequence
  SiRNA target sequence
ttaatgaagctattaaacctttag

SEQ ID NO: 189205 - DNA, 24 bp, Artificial sequence
  SiRNA target sequence
taatgaagctattaaacctttaga

SEQ ID NO: 189206 - DNA, 24 bp, Artificial sequence
  SiRNA target sequence
aatgaagctattaaacctttagat

SEQ ID NO: 189207 - DNA, 24 bp, Artificial sequence
  SiRNA target sequence
atgaagctattaaacctttagata

SEQ ID NO: 189208 - DNA, 24 bp, Artificial sequence
  SiRNA target sequence
tgaagctattaaacctttagatat

SEQ ID NO: 189209 - DNA, 24 bp, Artificial sequence
  SiRNA target sequence
gaagctattaaacctttagatatt

SEQ ID NO: 189210 - DNA, 24 bp, Artificial sequence
  SiRNA target sequence
aagctattaaacctttagatattc

SEQ ID NO: 189211 - DNA, 24 bp, Artificial sequence
  SiRNA target sequence
agctattaaacctttagatattca

SEQ ID NO: 189212 - DNA, 24 bp, Artificial sequence
  SiRNA target sequence
gctattaaacctttagatattcat

SEQ ID NO: 189213 - DNA, 24 bp, Artificial sequence
  SiRNA target sequence
ctattaaacctttagatattcatc

SEQ ID NO: 189214 - DNA, 24 bp, Artificial sequence
  SiRNA target sequence
tattaaacctttagatattcatca

SEQ ID NO: 189215 - DNA, 24 bp, Artificial sequence
  SiRNA target sequence
attaaacctttagatattcatcat

SEQ ID NO: 189216 - DNA, 24 bp, Artificial sequence
  SiRNA target sequence
ttaaacctttagatattcatcatt

SEQ ID NO: 189217 - DNA, 24 bp, Artificial sequence
  SiRNA target sequence
taaacctttagatattcatcattt

SEQ ID NO: 189218 - DNA, 24 bp, Artificial sequence
  SiRNA target sequence
aaacctttagatattcatcattta

SEQ ID NO: 189219 - DNA, 24 bp, Artificial sequence
  SiRNA target sequence
aacctttagatattcatcatttat

SEQ ID NO: 189220 - DNA, 24 bp, Artificial sequence
  SiRNA target sequence
acctttagatattcatcatttata

SEQ ID NO: 189221 - DNA, 24 bp, Artificial sequence
  SiRNA target sequence
cctttagatattcatcatttatac

SEQ ID NO: 189222 - DNA, 24 bp, Artificial sequence
  SiRNA target sequence
ctttagatattcatcatttatacg

SEQ ID NO: 189223 - DNA, 24 bp, Artificial sequence
  SiRNA target sequence
tttagatattcatcatttatacga

SEQ ID NO: 189224 - DNA, 24 bp, Artificial sequence
  SiRNA target sequence
ttagatattcatcatttatacgac

SEQ ID NO: 189225 - DNA, 24 bp, Artificial sequence
  SiRNA target sequence
tagatattcatcatttatacgacc

SEQ ID NO: 189226 - DNA, 24 bp, Artificial sequence
  SiRNA target sequence
agatattcatcatttatacgacca

SEQ ID NO: 189227 - DNA, 24 bp, Artificial sequence
  SiRNA target sequence
gatattcatcatttatacgaccaa

SEQ ID NO: 189228 - DNA, 24 bp, Artificial sequence
  SiRNA target sequence
atattcatcatttatacgaccaac

SEQ ID NO: 189229 - DNA, 24 bp, Artificial sequence
  SiRNA target sequence
tattcatcatttatacgaccaact

SEQ ID NO: 189230 - DNA, 24 bp, Artificial sequence
  SiRNA target sequence
attcatcatttatacgaccaactt

SEQ ID NO: 189231 - DNA, 24 bp, Artificial sequence
  SiRNA target sequence
ttcatcatttatacgaccaacttg

SEQ ID NO: 189232 - DNA, 24 bp, Artificial sequence
  SiRNA target sequence
tcatcatttatacgaccaacttgt

SEQ ID NO: 189233 - DNA, 24 bp, Artificial sequence
  SiRNA target sequence
catcatttatacgaccaacttgta

SEQ ID NO: 189234 - DNA, 24 bp, Artificial sequence
  SiRNA target sequence
atcatttatacgaccaacttgtag

SEQ ID NO: 189235 - DNA, 24 bp, Artificial sequence
  SiRNA target sequence
tcatttatacgaccaacttgtaga

SEQ ID NO: 189236 - DNA, 24 bp, Artificial sequence
  SiRNA target sequence
catttatacgaccaacttgtagaa

SEQ ID NO: 189237 - DNA, 24 bp, Artificial sequence
  SiRNA target sequence
atttatacgaccaacttgtagaaa

SEQ ID NO: 189238 - DNA, 24 bp, Artificial sequence
  SiRNA target sequence
tttatacgaccaacttgtagaaaa

SEQ ID NO: 189239 - DNA, 24 bp, Artificial sequence
  SiRNA target sequence
ttatacgaccaacttgtagaaaac

SEQ ID NO: 189240 - DNA, 24 bp, Artificial sequence
  SiRNA target sequence
tatacgaccaacttgtagaaaact

SEQ ID NO: 189241 - DNA, 24 bp, Artificial sequence
  SiRNA target sequence
atacgaccaacttgtagaaaactt

SEQ ID NO: 189242 - DNA, 24 bp, Artificial sequence
  SiRNA target sequence
tacgaccaacttgtagaaaacttg

SEQ ID NO: 189243 - DNA, 24 bp, Artificial sequence
  SiRNA target sequence
acgaccaacttgtagaaaacttga

SEQ ID NO: 189244 - DNA, 24 bp, Artificial sequence
  SiRNA target sequence
cgaccaacttgtagaaaacttgag

SEQ ID NO: 189245 - DNA, 24 bp, Artificial sequence
  SiRNA target sequence
gaccaacttgtagaaaacttgagt

SEQ ID NO: 189246 - DNA, 24 bp, Artificial sequence
  SiRNA target sequence
accaacttgtagaaaacttgagtg

SEQ ID NO: 189247 - DNA, 24 bp, Artificial sequence
  SiRNA target sequence
ccaacttgtagaaaacttgagtgg

SEQ ID NO: 189248 - DNA, 24 bp, Artificial sequence
  SiRNA target sequence
caacttgtagaaaacttgagtggt

SEQ ID NO: 189249 - DNA, 24 bp, Artificial sequence
  SiRNA target sequence
aacttgtagaaaacttgagtggtg

SEQ ID NO: 189250 - DNA, 24 bp, Artificial sequence
  SiRNA target sequence
acttgtagaaaacttgagtggtgg

SEQ ID NO: 189251 - DNA, 24 bp, Artificial sequence
  SiRNA target sequence
cttgtagaaaacttgagtggtgga

SEQ ID NO: 189252 - DNA, 24 bp, Artificial sequence
  SiRNA target sequence
ttgtagaaaacttgagtggtggag

SEQ ID NO: 189253 - DNA, 24 bp, Artificial sequence
  SiRNA target sequence
tgtagaaaacttgagtggtggaga

SEQ ID NO: 189254 - DNA, 24 bp, Artificial sequence
  SiRNA target sequence
gtagaaaacttgagtggtggagaa

SEQ ID NO: 189255 - DNA, 24 bp, Artificial sequence
  SiRNA target sequence
tagaaaacttgagtggtggagaat

SEQ ID NO: 189256 - DNA, 24 bp, Artificial sequence
  SiRNA target sequence
agaaaacttgagtggtggagaatt

SEQ ID NO: 189257 - DNA, 24 bp, Artificial sequence
  SiRNA target sequence
gaaaacttgagtggtggagaatta

SEQ ID NO: 189258 - DNA, 24 bp, Artificial sequence
  SiRNA target sequence
aaaacttgagtggtggagaattac

SEQ ID NO: 189259 - DNA, 24 bp, Artificial sequence
  SiRNA target sequence
aaacttgagtggtggagaattaca

SEQ ID NO: 189260 - DNA, 24 bp, Artificial sequence
  SiRNA target sequence
aacttgagtggtggagaattacaa

SEQ ID NO: 189261 - DNA, 24 bp, Artificial sequence
  SiRNA target sequence
acttgagtggtggagaattacaaa

SEQ ID NO: 189262 - DNA, 24 bp, Artificial sequence
  SiRNA target sequence
cttgagtggtggagaattacaaag

SEQ ID NO: 189263 - DNA, 24 bp, Artificial sequence
  SiRNA target sequence
ttgagtggtggagaattacaaaga

SEQ ID NO: 189264 - DNA, 24 bp, Artificial sequence
  SiRNA target sequence
tgagtggtggagaattacaaagaa

SEQ ID NO: 189265 - DNA, 24 bp, Artificial sequence
  SiRNA target sequence
gagtggtggagaattacaaagaat

SEQ ID NO: 189266 - DNA, 24 bp, Artificial sequence
  SiRNA target sequence
agtggtggagaattacaaagaatt

SEQ ID NO: 189267 - DNA, 24 bp, Artificial sequence
  SiRNA target sequence
gtggtggagaattacaaagaattg

SEQ ID NO: 189268 - DNA, 24 bp, Artificial sequence
  SiRNA target sequence
tggtggagaattacaaagaattgc

SEQ ID NO: 189269 - DNA, 24 bp, Artificial sequence
  SiRNA target sequence
ggtggagaattacaaagaattgca

SEQ ID NO: 189270 - DNA, 24 bp, Artificial sequence
  SiRNA target sequence
gtggagaattacaaagaattgcaa

SEQ ID NO: 189271 - DNA, 24 bp, Artificial sequence
  SiRNA target sequence
tggagaattacaaagaattgcaat

SEQ ID NO: 189272 - DNA, 24 bp, Artificial sequence
  SiRNA target sequence
ggagaattacaaagaattgcaata

SEQ ID NO: 189273 - DNA, 24 bp, Artificial sequence
  SiRNA target sequence
gagaattacaaagaattgcaataa

SEQ ID NO: 189274 - DNA, 24 bp, Artificial sequence
  SiRNA target sequence
agaattacaaagaattgcaataat

SEQ ID NO: 189275 - DNA, 24 bp, Artificial sequence
  SiRNA target sequence
gaattacaaagaattgcaataata

SEQ ID NO: 189276 - DNA, 24 bp, Artificial sequence
  SiRNA target sequence
aattacaaagaattgcaataataa

SEQ ID NO: 189277 - DNA, 24 bp, Artificial sequence
  SiRNA target sequence
attacaaagaattgcaataataat

SEQ ID NO: 189278 - DNA, 24 bp, Artificial sequence
  SiRNA target sequence
ttacaaagaattgcaataataata

SEQ ID NO: 189279 - DNA, 24 bp, Artificial sequence
  SiRNA target sequence
tacaaagaattgcaataataatat

SEQ ID NO: 189280 - DNA, 24 bp, Artificial sequence
  SiRNA target sequence
acaaagaattgcaataataatatg

SEQ ID NO: 189281 - DNA, 24 bp, Artificial sequence
  SiRNA target sequence
caaagaattgcaataataatatgt

SEQ ID NO: 189282 - DNA, 24 bp, Artificial sequence
  SiRNA target sequence
aaagaattgcaataataatatgtt

SEQ ID NO: 189283 - DNA, 24 bp, Artificial sequence
  SiRNA target sequence
aagaattgcaataataatatgttt

SEQ ID NO: 189284 - DNA, 24 bp, Artificial sequence
  SiRNA target sequence
agaattgcaataataatatgttta

SEQ ID NO: 189285 - DNA, 24 bp, Artificial sequence
  SiRNA target sequence
gaattgcaataataatatgtttag

SEQ ID NO: 189286 - DNA, 24 bp, Artificial sequence
  SiRNA target sequence
aattgcaataataatatgtttagg

SEQ ID NO: 189287 - DNA, 24 bp, Artificial sequence
  SiRNA target sequence
attgcaataataatatgtttagga

SEQ ID NO: 189288 - DNA, 24 bp, Artificial sequence
  SiRNA target sequence
ttgcaataataatatgtttaggaa

SEQ ID NO: 189289 - DNA, 24 bp, Artificial sequence
  SiRNA target sequence
tgcaataataatatgtttaggaaa

SEQ ID NO: 189290 - DNA, 24 bp, Artificial sequence
  SiRNA target sequence
gcaataataatatgtttaggaaaa

SEQ ID NO: 189291 - DNA, 24 bp, Artificial sequence
  SiRNA target sequence
caataataatatgtttaggaaaag

SEQ ID NO: 189292 - DNA, 24 bp, Artificial sequence
  SiRNA target sequence
aataataatatgtttaggaaaaga

SEQ ID NO: 189293 - DNA, 24 bp, Artificial sequence
  SiRNA target sequence
ataataatatgtttaggaaaagat

SEQ ID NO: 189294 - DNA, 24 bp, Artificial sequence
  SiRNA target sequence
taataatatgtttaggaaaagatg

SEQ ID NO: 189295 - DNA, 24 bp, Artificial sequence
  SiRNA target sequence
aataatatgtttaggaaaagatgc

SEQ ID NO: 189296 - DNA, 24 bp, Artificial sequence
  SiRNA target sequence
ataatatgtttaggaaaagatgct

SEQ ID NO: 189297 - DNA, 24 bp, Artificial sequence
  SiRNA target sequence
taatatgtttaggaaaagatgcta

SEQ ID NO: 189298 - DNA, 24 bp, Artificial sequence
  SiRNA target sequence
aatatgtttaggaaaagatgctaa

SEQ ID NO: 189299 - DNA, 24 bp, Artificial sequence
  SiRNA target sequence
atatgtttaggaaaagatgctaac

SEQ ID NO: 189300 - DNA, 24 bp, Artificial sequence
  SiRNA target sequence
tatgtttaggaaaagatgctaacc

SEQ ID NO: 189301 - DNA, 24 bp, Artificial sequence
  SiRNA target sequence
atgtttaggaaaagatgctaacct

SEQ ID NO: 189302 - DNA, 24 bp, Artificial sequence
  SiRNA target sequence
tgtttaggaaaagatgctaacctt

SEQ ID NO: 189303 - DNA, 24 bp, Artificial sequence
  SiRNA target sequence
gtttaggaaaagatgctaaccttt

SEQ ID NO: 189304 - DNA, 24 bp, Artificial sequence
  SiRNA target sequence
tttaggaaaagatgctaaccttta

SEQ ID NO: 189305 - DNA, 24 bp, Artificial sequence
  SiRNA target sequence
ttaggaaaagatgctaacctttat

SEQ ID NO: 189306 - DNA, 24 bp, Artificial sequence
  SiRNA target sequence
taggaaaagatgctaacctttatt

SEQ ID NO: 189307 - DNA, 24 bp, Artificial sequence
  SiRNA target sequence
aggaaaagatgctaacctttattt

SEQ ID NO: 189308 - DNA, 24 bp, Artificial sequence
  SiRNA target sequence
ggaaaagatgctaacctttattta

SEQ ID NO: 189309 - DNA, 24 bp, Artificial sequence
  SiRNA target sequence
gaaaagatgctaacctttatttat

SEQ ID NO: 189310 - DNA, 24 bp, Artificial sequence
  SiRNA target sequence
aaaagatgctaacctttatttatt

SEQ ID NO: 189311 - DNA, 24 bp, Artificial sequence
  SiRNA target sequence
aaagatgctaacctttatttatta

SEQ ID NO: 189312 - DNA, 24 bp, Artificial sequence
  SiRNA target sequence
aagatgctaacctttatttattag

SEQ ID NO: 189313 - DNA, 24 bp, Artificial sequence
  SiRNA target sequence
agatgctaacctttatttattaga

SEQ ID NO: 189314 - DNA, 24 bp, Artificial sequence
  SiRNA target sequence
gatgctaacctttatttattagat

SEQ ID NO: 189315 - DNA, 24 bp, Artificial sequence
  SiRNA target sequence
atgctaacctttatttattagatg

SEQ ID NO: 189316 - DNA, 24 bp, Artificial sequence
  SiRNA target sequence
tgctaacctttatttattagatga

SEQ ID NO: 189317 - DNA, 24 bp, Artificial sequence
  SiRNA target sequence
gctaacctttatttattagatgaa

SEQ ID NO: 189318 - DNA, 24 bp, Artificial sequence
  SiRNA target sequence
ctaacctttatttattagatgaac

SEQ ID NO: 189319 - DNA, 24 bp, Artificial sequence
  SiRNA target sequence
taacctttatttattagatgaacc

SEQ ID NO: 189320 - DNA, 24 bp, Artificial sequence
  SiRNA target sequence
aacctttatttattagatgaacct

SEQ ID NO: 189321 - DNA, 24 bp, Artificial sequence
  SiRNA target sequence
acctttatttattagatgaacctt

SEQ ID NO: 189322 - DNA, 24 bp, Artificial sequence
  SiRNA target sequence
cctttatttattagatgaaccttc

SEQ ID NO: 189323 - DNA, 24 bp, Artificial sequence
  SiRNA target sequence
ctttatttattagatgaaccttct

SEQ ID NO: 189324 - DNA, 24 bp, Artificial sequence
  SiRNA target sequence
tttatttattagatgaaccttctg

SEQ ID NO: 189325 - DNA, 24 bp, Artificial sequence
  SiRNA target sequence
ttatttattagatgaaccttctgc

SEQ ID NO: 189326 - DNA, 24 bp, Artificial sequence
  SiRNA target sequence
tatttattagatgaaccttctgcg

SEQ ID NO: 189327 - DNA, 24 bp, Artificial sequence
  SiRNA target sequence
atttattagatgaaccttctgcgt

SEQ ID NO: 189328 - DNA, 24 bp, Artificial sequence
  SiRNA target sequence
tttattagatgaaccttctgcgta

SEQ ID NO: 189329 - DNA, 24 bp, Artificial sequence
  SiRNA target sequence
ttattagatgaaccttctgcgtat

SEQ ID NO: 189330 - DNA, 24 bp, Artificial sequence
  SiRNA target sequence
tattagatgaaccttctgcgtatc

SEQ ID NO: 189331 - DNA, 24 bp, Artificial sequence
  SiRNA target sequence
attagatgaaccttctgcgtatct

SEQ ID NO: 189332 - DNA, 24 bp, Artificial sequence
  SiRNA target sequence
ttagatgaaccttctgcgtatcta

SEQ ID NO: 189333 - DNA, 24 bp, Artificial sequence
  SiRNA target sequence
tagatgaaccttctgcgtatctag

SEQ ID NO: 189334 - DNA, 24 bp, Artificial sequence
  SiRNA target sequence
agatgaaccttctgcgtatctaga

SEQ ID NO: 189335 - DNA, 24 bp, Artificial sequence
  SiRNA target sequence
gatgaaccttctgcgtatctagat

SEQ ID NO: 189336 - DNA, 24 bp, Artificial sequence
  SiRNA target sequence
atgaaccttctgcgtatctagatt

SEQ ID NO: 189337 - DNA, 24 bp, Artificial sequence
  SiRNA target sequence
tgaaccttctgcgtatctagattc

SEQ ID NO: 189338 - DNA, 24 bp, Artificial sequence
  SiRNA target sequence
gaaccttctgcgtatctagattca

SEQ ID NO: 189339 - DNA, 24 bp, Artificial sequence
  SiRNA target sequence
aaccttctgcgtatctagattcag

SEQ ID NO: 189340 - DNA, 24 bp, Artificial sequence
  SiRNA target sequence
accttctgcgtatctagattcaga

SEQ ID NO: 189341 - DNA, 24 bp, Artificial sequence
  SiRNA target sequence
ccttctgcgtatctagattcagat

SEQ ID NO: 189342 - DNA, 24 bp, Artificial sequence
  SiRNA target sequence
cttctgcgtatctagattcagatc

SEQ ID NO: 189343 - DNA, 24 bp, Artificial sequence
  SiRNA target sequence
ttctgcgtatctagattcagatca

SEQ ID NO: 189344 - DNA, 24 bp, Artificial sequence
  SiRNA target sequence
tctgcgtatctagattcagatcag

SEQ ID NO: 189345 - DNA, 24 bp, Artificial sequence
  SiRNA target sequence
ctgcgtatctagattcagatcaga

SEQ ID NO: 189346 - DNA, 24 bp, Artificial sequence
  SiRNA target sequence
tgcgtatctagattcagatcagag

SEQ ID NO: 189347 - DNA, 24 bp, Artificial sequence
  SiRNA target sequence
gcgtatctagattcagatcagaga

SEQ ID NO: 189348 - DNA, 24 bp, Artificial sequence
  SiRNA target sequence
cgtatctagattcagatcagagaa

SEQ ID NO: 189349 - DNA, 24 bp, Artificial sequence
  SiRNA target sequence
gtatctagattcagatcagagaat

SEQ ID NO: 189350 - DNA, 24 bp, Artificial sequence
  SiRNA target sequence
tatctagattcagatcagagaata

SEQ ID NO: 189351 - DNA, 24 bp, Artificial sequence
  SiRNA target sequence
atctagattcagatcagagaatag

SEQ ID NO: 189352 - DNA, 24 bp, Artificial sequence
  SiRNA target sequence
tctagattcagatcagagaatagc

SEQ ID NO: 189353 - DNA, 24 bp, Artificial sequence
  SiRNA target sequence
ctagattcagatcagagaatagcg

SEQ ID NO: 189354 - DNA, 24 bp, Artificial sequence
  SiRNA target sequence
tagattcagatcagagaatagcga

SEQ ID NO: 189355 - DNA, 24 bp, Artificial sequence
  SiRNA target sequence
agattcagatcagagaatagcgat

SEQ ID NO: 189356 - DNA, 24 bp, Artificial sequence
  SiRNA target sequence
gattcagatcagagaatagcgatt

SEQ ID NO: 189357 - DNA, 24 bp, Artificial sequence
  SiRNA target sequence
attcagatcagagaatagcgattt

SEQ ID NO: 189358 - DNA, 24 bp, Artificial sequence
  SiRNA target sequence
ttcagatcagagaatagcgatttc

SEQ ID NO: 189359 - DNA, 24 bp, Artificial sequence
  SiRNA target sequence
tcagatcagagaatagcgatttca

SEQ ID NO: 189360 - DNA, 24 bp, Artificial sequence
  SiRNA target sequence
cagatcagagaatagcgatttcaa

SEQ ID NO: 189361 - DNA, 24 bp, Artificial sequence
  SiRNA target sequence
agatcagagaatagcgatttcaaa

SEQ ID NO: 189362 - DNA, 24 bp, Artificial sequence
  SiRNA target sequence
gatcagagaatagcgatttcaaaa

SEQ ID NO: 189363 - DNA, 24 bp, Artificial sequence
  SiRNA target sequence
atcagagaatagcgatttcaaaag

SEQ ID NO: 189364 - DNA, 24 bp, Artificial sequence
  SiRNA target sequence
tcagagaatagcgatttcaaaagt

SEQ ID NO: 189365 - DNA, 24 bp, Artificial sequence
  SiRNA target sequence
cagagaatagcgatttcaaaagtt

SEQ ID NO: 189366 - DNA, 24 bp, Artificial sequence
  SiRNA target sequence
agagaatagcgatttcaaaagtta

SEQ ID NO: 189367 - DNA, 24 bp, Artificial sequence
  SiRNA target sequence
gagaatagcgatttcaaaagttat

SEQ ID NO: 189368 - DNA, 24 bp, Artificial sequence
  SiRNA target sequence
agaatagcgatttcaaaagttata

SEQ ID NO: 189369 - DNA, 24 bp, Artificial sequence
  SiRNA target sequence
gaatagcgatttcaaaagttataa

SEQ ID NO: 189370 - DNA, 24 bp, Artificial sequence
  SiRNA target sequence
aatagcgatttcaaaagttataaa

SEQ ID NO: 189371 - DNA, 24 bp, Artificial sequence
  SiRNA target sequence
atagcgatttcaaaagttataaaa

SEQ ID NO: 189372 - DNA, 24 bp, Artificial sequence
  SiRNA target sequence
tagcgatttcaaaagttataaaaa

SEQ ID NO: 189373 - DNA, 24 bp, Artificial sequence
  SiRNA target sequence
agcgatttcaaaagttataaaaag

SEQ ID NO: 189374 - DNA, 24 bp, Artificial sequence
  SiRNA target sequence
gcgatttcaaaagttataaaaagg

SEQ ID NO: 189375 - DNA, 24 bp, Artificial sequence
  SiRNA target sequence
cgatttcaaaagttataaaaaggt

SEQ ID NO: 189376 - DNA, 24 bp, Artificial sequence
  SiRNA target sequence
gatttcaaaagttataaaaaggtt

SEQ ID NO: 189377 - DNA, 24 bp, Artificial sequence
  SiRNA target sequence
atttcaaaagttataaaaaggttt

SEQ ID NO: 189378 - DNA, 24 bp, Artificial sequence
  SiRNA target sequence
tttcaaaagttataaaaaggttta

SEQ ID NO: 189379 - DNA, 24 bp, Artificial sequence
  SiRNA target sequence
ttcaaaagttataaaaaggtttat

SEQ ID NO: 189380 - DNA, 24 bp, Artificial sequence
  SiRNA target sequence
tcaaaagttataaaaaggtttatt

SEQ ID NO: 189381 - DNA, 24 bp, Artificial sequence
  SiRNA target sequence
caaaagttataaaaaggtttattt

SEQ ID NO: 189382 - DNA, 24 bp, Artificial sequence
  SiRNA target sequence
aaaagttataaaaaggtttattta

SEQ ID NO: 189383 - DNA, 24 bp, Artificial sequence
  SiRNA target sequence
aaagttataaaaaggtttatttat

SEQ ID NO: 189384 - DNA, 24 bp, Artificial sequence
  SiRNA target sequence
aagttataaaaaggtttatttatg

SEQ ID NO: 189385 - DNA, 24 bp, Artificial sequence
  SiRNA target sequence
agttataaaaaggtttatttatgg

SEQ ID NO: 189386 - DNA, 24 bp, Artificial sequence
  SiRNA target sequence
gttataaaaaggtttatttatggg

SEQ ID NO: 189387 - DNA, 24 bp, Artificial sequence
  SiRNA target sequence
ttataaaaaggtttatttatggga

SEQ ID NO: 189388 - DNA, 24 bp, Artificial sequence
  SiRNA target sequence
tataaaaaggtttatttatgggaa

SEQ ID NO: 189389 - DNA, 24 bp, Artificial sequence
  SiRNA target sequence
ataaaaaggtttatttatgggaag

SEQ ID NO: 189390 - DNA, 24 bp, Artificial sequence
  SiRNA target sequence
taaaaaggtttatttatgggaaga

SEQ ID NO: 189391 - DNA, 24 bp, Artificial sequence
  SiRNA target sequence
aaaaaggtttatttatgggaagaa

SEQ ID NO: 189392 - DNA, 24 bp, Artificial sequence
  SiRNA target sequence
aaaaggtttatttatgggaagaag

SEQ ID NO: 189393 - DNA, 24 bp, Artificial sequence
  SiRNA target sequence
aaaggtttatttatgggaagaagc

SEQ ID NO: 189394 - DNA, 24 bp, Artificial sequence
  SiRNA target sequence
aaggtttatttatgggaagaagcg

SEQ ID NO: 189395 - DNA, 24 bp, Artificial sequence
  SiRNA target sequence
aggtttatttatgggaagaagcga

SEQ ID NO: 189396 - DNA, 24 bp, Artificial sequence
  SiRNA target sequence
ggtttatttatgggaagaagcgaa

SEQ ID NO: 189397 - DNA, 24 bp, Artificial sequence
  SiRNA target sequence
gtttatttatgggaagaagcgaac

SEQ ID NO: 189398 - DNA, 24 bp, Artificial sequence
  SiRNA target sequence
tttatttatgggaagaagcgaaca

SEQ ID NO: 189399 - DNA, 24 bp, Artificial sequence
  SiRNA target sequence
ttatttatgggaagaagcgaacag

SEQ ID NO: 189400 - DNA, 24 bp, Artificial sequence
  SiRNA target sequence
tatttatgggaagaagcgaacagc

SEQ ID NO: 189401 - DNA, 24 bp, Artificial sequence
  SiRNA target sequence
atttatgggaagaagcgaacagcc

SEQ ID NO: 189402 - DNA, 24 bp, Artificial sequence
  SiRNA target sequence
tttatgggaagaagcgaacagcct

SEQ ID NO: 189403 - DNA, 24 bp, Artificial sequence
  SiRNA target sequence
ttatgggaagaagcgaacagcctt

SEQ ID NO: 189404 - DNA, 24 bp, Artificial sequence
  SiRNA target sequence
tatgggaagaagcgaacagccttt

SEQ ID NO: 189405 - DNA, 24 bp, Artificial sequence
  SiRNA target sequence
atgggaagaagcgaacagcctttg

SEQ ID NO: 189406 - DNA, 24 bp, Artificial sequence
  SiRNA target sequence
tgggaagaagcgaacagcctttgt

SEQ ID NO: 189407 - DNA, 24 bp, Artificial sequence
  SiRNA target sequence
gggaagaagcgaacagcctttgtg

SEQ ID NO: 189408 - DNA, 24 bp, Artificial sequence
  SiRNA target sequence
ggaagaagcgaacagcctttgtgg

SEQ ID NO: 189409 - DNA, 24 bp, Artificial sequence
  SiRNA target sequence
gaagaagcgaacagcctttgtggt

SEQ ID NO: 189410 - DNA, 24 bp, Artificial sequence
  SiRNA target sequence
aagaagcgaacagcctttgtggtt

SEQ ID NO: 189411 - DNA, 24 bp, Artificial sequence
  SiRNA target sequence
agaagcgaacagcctttgtggttg

SEQ ID NO: 189412 - DNA, 24 bp, Artificial sequence
  SiRNA target sequence
gaagcgaacagcctttgtggttga

SEQ ID NO: 189413 - DNA, 24 bp, Artificial sequence
  SiRNA target sequence
aagcgaacagcctttgtggttgaa

SEQ ID NO: 189414 - DNA, 24 bp, Artificial sequence
  SiRNA target sequence
agcgaacagcctttgtggttgaac

SEQ ID NO: 189415 - DNA, 24 bp, Artificial sequence
  SiRNA target sequence
gcgaacagcctttgtggttgaaca

SEQ ID NO: 189416 - DNA, 24 bp, Artificial sequence
  SiRNA target sequence
cgaacagcctttgtggttgaacat

SEQ ID NO: 189417 - DNA, 24 bp, Artificial sequence
  SiRNA target sequence
gaacagcctttgtggttgaacatg

SEQ ID NO: 189418 - DNA, 24 bp, Artificial sequence
  SiRNA target sequence
aacagcctttgtggttgaacatga

SEQ ID NO: 189419 - DNA, 24 bp, Artificial sequence
  SiRNA target sequence
acagcctttgtggttgaacatgat

SEQ ID NO: 189420 - DNA, 24 bp, Artificial sequence
  SiRNA target sequence
cagcctttgtggttgaacatgatt

SEQ ID NO: 189421 - DNA, 24 bp, Artificial sequence
  SiRNA target sequence
agcctttgtggttgaacatgattt

SEQ ID NO: 189422 - DNA, 24 bp, Artificial sequence
  SiRNA target sequence
gcctttgtggttgaacatgattta

SEQ ID NO: 189423 - DNA, 24 bp, Artificial sequence
  SiRNA target sequence
cctttgtggttgaacatgatttaa

SEQ ID NO: 189424 - DNA, 24 bp, Artificial sequence
  SiRNA target sequence
ctttgtggttgaacatgatttaat

SEQ ID NO: 189425 - DNA, 24 bp, Artificial sequence
  SiRNA target sequence
tttgtggttgaacatgatttaatt

SEQ ID NO: 189426 - DNA, 24 bp, Artificial sequence
  SiRNA target sequence
ttgtggttgaacatgatttaattg

SEQ ID NO: 189427 - DNA, 24 bp, Artificial sequence
  SiRNA target sequence
tgtggttgaacatgatttaattgt

SEQ ID NO: 189428 - DNA, 24 bp, Artificial sequence
  SiRNA target sequence
gtggttgaacatgatttaattgta

SEQ ID NO: 189429 - DNA, 24 bp, Artificial sequence
  SiRNA target sequence
tggttgaacatgatttaattgtag

SEQ ID NO: 189430 - DNA, 24 bp, Artificial sequence
  SiRNA target sequence
ggttgaacatgatttaattgtagg

SEQ ID NO: 189431 - DNA, 24 bp, Artificial sequence
  SiRNA target sequence
gttgaacatgatttaattgtaggt

SEQ ID NO: 189432 - DNA, 24 bp, Artificial sequence
  SiRNA target sequence
ttgaacatgatttaattgtaggta

SEQ ID NO: 189433 - DNA, 24 bp, Artificial sequence
  SiRNA target sequence
tgaacatgatttaattgtaggtac

SEQ ID NO: 189434 - DNA, 24 bp, Artificial sequence
  SiRNA target sequence
gaacatgatttaattgtaggtaca

SEQ ID NO: 189435 - DNA, 24 bp, Artificial sequence
  SiRNA target sequence
aacatgatttaattgtaggtacat

SEQ ID NO: 189436 - DNA, 24 bp, Artificial sequence
  SiRNA target sequence
acatgatttaattgtaggtacata

SEQ ID NO: 189437 - DNA, 24 bp, Artificial sequence
  SiRNA target sequence
catgatttaattgtaggtacatat

SEQ ID NO: 189438 - DNA, 24 bp, Artificial sequence
  SiRNA target sequence
atgatttaattgtaggtacatatt

SEQ ID NO: 189439 - DNA, 24 bp, Artificial sequence
  SiRNA target sequence
tgatttaattgtaggtacatattt

SEQ ID NO: 189440 - DNA, 24 bp, Artificial sequence
  SiRNA target sequence
gatttaattgtaggtacatatttg

SEQ ID NO: 189441 - DNA, 24 bp, Artificial sequence
  SiRNA target sequence
atttaattgtaggtacatatttgg

SEQ ID NO: 189442 - DNA, 24 bp, Artificial sequence
  SiRNA target sequence
tttaattgtaggtacatatttggc

SEQ ID NO: 189443 - DNA, 24 bp, Artificial sequence
  SiRNA target sequence
ttaattgtaggtacatatttggct

SEQ ID NO: 189444 - DNA, 24 bp, Artificial sequence
  SiRNA target sequence
taattgtaggtacatatttggctg

SEQ ID NO: 189445 - DNA, 24 bp, Artificial sequence
  SiRNA target sequence
aattgtaggtacatatttggctga

SEQ ID NO: 189446 - DNA, 24 bp, Artificial sequence
  SiRNA target sequence
attgtaggtacatatttggctgat

SEQ ID NO: 189447 - DNA, 24 bp, Artificial sequence
  SiRNA target sequence
ttgtaggtacatatttggctgata

SEQ ID NO: 189448 - DNA, 24 bp, Artificial sequence
  SiRNA target sequence
tgtaggtacatatttggctgataa

SEQ ID NO: 189449 - DNA, 24 bp, Artificial sequence
  SiRNA target sequence
gtaggtacatatttggctgataaa

SEQ ID NO: 189450 - DNA, 24 bp, Artificial sequence
  SiRNA target sequence
taggtacatatttggctgataaag

SEQ ID NO: 189451 - DNA, 24 bp, Artificial sequence
  SiRNA target sequence
aggtacatatttggctgataaagt

SEQ ID NO: 189452 - DNA, 24 bp, Artificial sequence
  SiRNA target sequence
ggtacatatttggctgataaagtt

SEQ ID NO: 189453 - DNA, 24 bp, Artificial sequence
  SiRNA target sequence
gtacatatttggctgataaagttg

SEQ ID NO: 189454 - DNA, 24 bp, Artificial sequence
  SiRNA target sequence
tacatatttggctgataaagttgt

SEQ ID NO: 189455 - DNA, 24 bp, Artificial sequence
  SiRNA target sequence
acatatttggctgataaagttgtt

SEQ ID NO: 189456 - DNA, 24 bp, Artificial sequence
  SiRNA target sequence
catatttggctgataaagttgttg

SEQ ID NO: 189457 - DNA, 24 bp, Artificial sequence
  SiRNA target sequence
atatttggctgataaagttgttgt

SEQ ID NO: 189458 - DNA, 24 bp, Artificial sequence
  SiRNA target sequence
tatttggctgataaagttgttgtt

SEQ ID NO: 189459 - DNA, 24 bp, Artificial sequence
  SiRNA target sequence
atttggctgataaagttgttgttt

SEQ ID NO: 189460 - DNA, 24 bp, Artificial sequence
  SiRNA target sequence
tttggctgataaagttgttgtttt

SEQ ID NO: 189461 - DNA, 24 bp, Artificial sequence
  SiRNA target sequence
ttggctgataaagttgttgttttt

SEQ ID NO: 189462 - DNA, 24 bp, Artificial sequence
  SiRNA target sequence
tggctgataaagttgttgtttttg

SEQ ID NO: 189463 - DNA, 24 bp, Artificial sequence
  SiRNA target sequence
ggctgataaagttgttgtttttga

SEQ ID NO: 189464 - DNA, 24 bp, Artificial sequence
  SiRNA target sequence
gctgataaagttgttgtttttgag

SEQ ID NO: 189465 - DNA, 24 bp, Artificial sequence
  SiRNA target sequence
ctgataaagttgttgtttttgagg

SEQ ID NO: 189466 - DNA, 24 bp, Artificial sequence
  SiRNA target sequence
tgataaagttgttgtttttgaggg

SEQ ID NO: 189467 - DNA, 24 bp, Artificial sequence
  SiRNA target sequence
gataaagttgttgtttttgaggga

SEQ ID NO: 189468 - DNA, 24 bp, Artificial sequence
  SiRNA target sequence
ataaagttgttgtttttgagggaa

SEQ ID NO: 189469 - DNA, 24 bp, Artificial sequence
  SiRNA target sequence
taaagttgttgtttttgagggaag

SEQ ID NO: 189470 - DNA, 24 bp, Artificial sequence
  SiRNA target sequence
aaagttgttgtttttgagggaagc

SEQ ID NO: 189471 - DNA, 24 bp, Artificial sequence
  SiRNA target sequence
aagttgttgtttttgagggaagcc

SEQ ID NO: 189472 - DNA, 24 bp, Artificial sequence
  SiRNA target sequence
agttgttgtttttgagggaagccc

SEQ ID NO: 189473 - DNA, 24 bp, Artificial sequence
  SiRNA target sequence
gttgttgtttttgagggaagccct

SEQ ID NO: 189474 - DNA, 24 bp, Artificial sequence
  SiRNA target sequence
ttgttgtttttgagggaagcccta

SEQ ID NO: 189475 - DNA, 24 bp, Artificial sequence
  SiRNA target sequence
tgttgtttttgagggaagccctag

SEQ ID NO: 189476 - DNA, 24 bp, Artificial sequence
  SiRNA target sequence
gttgtttttgagggaagccctagt

SEQ ID NO: 189477 - DNA, 24 bp, Artificial sequence
  SiRNA target sequence
ttgtttttgagggaagccctagtg

SEQ ID NO: 189478 - DNA, 24 bp, Artificial sequence
  SiRNA target sequence
tgtttttgagggaagccctagtgt

SEQ ID NO: 189479 - DNA, 24 bp, Artificial sequence
  SiRNA target sequence
gtttttgagggaagccctagtgtt

SEQ ID NO: 189480 - DNA, 24 bp, Artificial sequence
  SiRNA target sequence
tttttgagggaagccctagtgttc

SEQ ID NO: 189481 - DNA, 24 bp, Artificial sequence
  SiRNA target sequence
ttttgagggaagccctagtgttca

SEQ ID NO: 189482 - DNA, 24 bp, Artificial sequence
  SiRNA target sequence
tttgagggaagccctagtgttcat

SEQ ID NO: 189483 - DNA, 24 bp, Artificial sequence
  SiRNA target sequence
ttgagggaagccctagtgttcata

SEQ ID NO: 189484 - DNA, 24 bp, Artificial sequence
  SiRNA target sequence
tgagggaagccctagtgttcatag

SEQ ID NO: 189485 - DNA, 24 bp, Artificial sequence
  SiRNA target sequence
gagggaagccctagtgttcatagc

SEQ ID NO: 189486 - DNA, 24 bp, Artificial sequence
  SiRNA target sequence
agggaagccctagtgttcatagca

SEQ ID NO: 189487 - DNA, 24 bp, Artificial sequence
  SiRNA target sequence
gggaagccctagtgttcatagcac

SEQ ID NO: 189488 - DNA, 24 bp, Artificial sequence
  SiRNA target sequence
ggaagccctagtgttcatagcact

SEQ ID NO: 189489 - DNA, 24 bp, Artificial sequence
  SiRNA target sequence
gaagccctagtgttcatagcactg

SEQ ID NO: 189490 - DNA, 24 bp, Artificial sequence
  SiRNA target sequence
aagccctagtgttcatagcactgc

SEQ ID NO: 189491 - DNA, 24 bp, Artificial sequence
  SiRNA target sequence
agccctagtgttcatagcactgct

SEQ ID NO: 189492 - DNA, 24 bp, Artificial sequence
  SiRNA target sequence
gccctagtgttcatagcactgctc

SEQ ID NO: 189493 - DNA, 24 bp, Artificial sequence
  SiRNA target sequence
ccctagtgttcatagcactgctca

SEQ ID NO: 189494 - DNA, 24 bp, Artificial sequence
  SiRNA target sequence
cctagtgttcatagcactgctcat

SEQ ID NO: 189495 - DNA, 24 bp, Artificial sequence
  SiRNA target sequence
ctagtgttcatagcactgctcata

SEQ ID NO: 189496 - DNA, 24 bp, Artificial sequence
  SiRNA target sequence
tagtgttcatagcactgctcataa

SEQ ID NO: 189497 - DNA, 24 bp, Artificial sequence
  SiRNA target sequence
agtgttcatagcactgctcataaa

SEQ ID NO: 189498 - DNA, 24 bp, Artificial sequence
  SiRNA target sequence
gtgttcatagcactgctcataaac

SEQ ID NO: 189499 - DNA, 24 bp, Artificial sequence
  SiRNA target sequence
tgttcatagcactgctcataaacc

SEQ ID NO: 189500 - DNA, 24 bp, Artificial sequence
  SiRNA target sequence
gttcatagcactgctcataaaccg

SEQ ID NO: 189501 - DNA, 24 bp, Artificial sequence
  SiRNA target sequence
ttcatagcactgctcataaaccga

SEQ ID NO: 189502 - DNA, 24 bp, Artificial sequence
  SiRNA target sequence
tcatagcactgctcataaaccgat

SEQ ID NO: 189503 - DNA, 24 bp, Artificial sequence
  SiRNA target sequence
catagcactgctcataaaccgatg

SEQ ID NO: 189504 - DNA, 24 bp, Artificial sequence
  SiRNA target sequence
atagcactgctcataaaccgatgg

SEQ ID NO: 189505 - DNA, 24 bp, Artificial sequence
  SiRNA target sequence
tagcactgctcataaaccgatgga

SEQ ID NO: 189506 - DNA, 24 bp, Artificial sequence
  SiRNA target sequence
agcactgctcataaaccgatggat

SEQ ID NO: 189507 - DNA, 24 bp, Artificial sequence
  SiRNA target sequence
gcactgctcataaaccgatggatt

SEQ ID NO: 189508 - DNA, 24 bp, Artificial sequence
  SiRNA target sequence
cactgctcataaaccgatggattt

SEQ ID NO: 189509 - DNA, 24 bp, Artificial sequence
  SiRNA target sequence
actgctcataaaccgatggatttg

SEQ ID NO: 189510 - DNA, 24 bp, Artificial sequence
  SiRNA target sequence
ctgctcataaaccgatggatttgc

SEQ ID NO: 189511 - DNA, 24 bp, Artificial sequence
  SiRNA target sequence
tgctcataaaccgatggatttgca

SEQ ID NO: 189512 - DNA, 24 bp, Artificial sequence
  SiRNA target sequence
gctcataaaccgatggatttgcat

SEQ ID NO: 189513 - DNA, 24 bp, Artificial sequence
  SiRNA target sequence
ctcataaaccgatggatttgcata

SEQ ID NO: 189514 - DNA, 24 bp, Artificial sequence
  SiRNA target sequence
tcataaaccgatggatttgcatag

SEQ ID NO: 189515 - DNA, 24 bp, Artificial sequence
  SiRNA target sequence
cataaaccgatggatttgcatagt

SEQ ID NO: 189516 - DNA, 24 bp, Artificial sequence
  SiRNA target sequence
ataaaccgatggatttgcatagtg

SEQ ID NO: 189517 - DNA, 24 bp, Artificial sequence
  SiRNA target sequence
taaaccgatggatttgcatagtgg

SEQ ID NO: 189518 - DNA, 24 bp, Artificial sequence
  SiRNA target sequence
aaaccgatggatttgcatagtgga

SEQ ID NO: 189519 - DNA, 24 bp, Artificial sequence
  SiRNA target sequence
aaccgatggatttgcatagtggaa

SEQ ID NO: 189520 - DNA, 24 bp, Artificial sequence
  SiRNA target sequence
accgatggatttgcatagtggaat

SEQ ID NO: 189521 - DNA, 24 bp, Artificial sequence
  SiRNA target sequence
ccgatggatttgcatagtggaatg

SEQ ID NO: 189522 - DNA, 24 bp, Artificial sequence
  SiRNA target sequence
cgatggatttgcatagtggaatga

SEQ ID NO: 189523 - DNA, 24 bp, Artificial sequence
  SiRNA target sequence
gatggatttgcatagtggaatgaa

SEQ ID NO: 189524 - DNA, 24 bp, Artificial sequence
  SiRNA target sequence
atggatttgcatagtggaatgaat

SEQ ID NO: 189525 - DNA, 24 bp, Artificial sequence
  SiRNA target sequence
tggatttgcatagtggaatgaata

SEQ ID NO: 189526 - DNA, 24 bp, Artificial sequence
  SiRNA target sequence
ggatttgcatagtggaatgaatat

SEQ ID NO: 189527 - DNA, 24 bp, Artificial sequence
  SiRNA target sequence
gatttgcatagtggaatgaatatt

SEQ ID NO: 189528 - DNA, 24 bp, Artificial sequence
  SiRNA target sequence
atttgcatagtggaatgaatattt

SEQ ID NO: 189529 - DNA, 24 bp, Artificial sequence
  SiRNA target sequence
tttgcatagtggaatgaatatttt

SEQ ID NO: 189530 - DNA, 24 bp, Artificial sequence
  SiRNA target sequence
ttgcatagtggaatgaatattttt

SEQ ID NO: 189531 - DNA, 24 bp, Artificial sequence
  SiRNA target sequence
tgcatagtggaatgaatatttttt

SEQ ID NO: 189532 - DNA, 24 bp, Artificial sequence
  SiRNA target sequence
gcatagtggaatgaatattttttt

SEQ ID NO: 189533 - DNA, 24 bp, Artificial sequence
  SiRNA target sequence
catagtggaatgaatattttttta

SEQ ID NO: 189534 - DNA, 24 bp, Artificial sequence
  SiRNA target sequence
atagtggaatgaatatttttttaa

SEQ ID NO: 189535 - DNA, 24 bp, Artificial sequence
  SiRNA target sequence
tagtggaatgaatatttttttaaa

SEQ ID NO: 189536 - DNA, 24 bp, Artificial sequence
  SiRNA target sequence
agtggaatgaatatttttttaaag

SEQ ID NO: 189537 - DNA, 24 bp, Artificial sequence
  SiRNA target sequence
gtggaatgaatatttttttaaaga

SEQ ID NO: 189538 - DNA, 24 bp, Artificial sequence
  SiRNA target sequence
tggaatgaatatttttttaaagaa

SEQ ID NO: 189539 - DNA, 24 bp, Artificial sequence
  SiRNA target sequence
ggaatgaatatttttttaaagaat

SEQ ID NO: 189540 - DNA, 24 bp, Artificial sequence
  SiRNA target sequence
gaatgaatatttttttaaagaatc

SEQ ID NO: 189541 - DNA, 24 bp, Artificial sequence
  SiRNA target sequence
aatgaatatttttttaaagaatct

SEQ ID NO: 189542 - DNA, 24 bp, Artificial sequence
  SiRNA target sequence
atgaatatttttttaaagaatctt

SEQ ID NO: 189543 - DNA, 24 bp, Artificial sequence
  SiRNA target sequence
tgaatatttttttaaagaatcttg

SEQ ID NO: 189544 - DNA, 24 bp, Artificial sequence
  SiRNA target sequence
gaatatttttttaaagaatcttga

SEQ ID NO: 189545 - DNA, 24 bp, Artificial sequence
  SiRNA target sequence
aatatttttttaaagaatcttgat

SEQ ID NO: 189546 - DNA, 24 bp, Artificial sequence
  SiRNA target sequence
atatttttttaaagaatcttgata

SEQ ID NO: 189547 - DNA, 24 bp, Artificial sequence
  SiRNA target sequence
tatttttttaaagaatcttgatat

SEQ ID NO: 189548 - DNA, 24 bp, Artificial sequence
  SiRNA target sequence
atttttttaaagaatcttgatatt

SEQ ID NO: 189549 - DNA, 24 bp, Artificial sequence
  SiRNA target sequence
tttttttaaagaatcttgatatta

SEQ ID NO: 189550 - DNA, 24 bp, Artificial sequence
  SiRNA target sequence
ttttttaaagaatcttgatattac

SEQ ID NO: 189551 - DNA, 24 bp, Artificial sequence
  SiRNA target sequence
tttttaaagaatcttgatattact

SEQ ID NO: 189552 - DNA, 24 bp, Artificial sequence
  SiRNA target sequence
ttttaaagaatcttgatattactt

SEQ ID NO: 189553 - DNA, 24 bp, Artificial sequence
  SiRNA target sequence
tttaaagaatcttgatattacttt

SEQ ID NO: 189554 - DNA, 24 bp, Artificial sequence
  SiRNA target sequence
ttaaagaatcttgatattactttt

SEQ ID NO: 189555 - DNA, 24 bp, Artificial sequence
  SiRNA target sequence
taaagaatcttgatattactttta

SEQ ID NO: 189556 - DNA, 24 bp, Artificial sequence
  SiRNA target sequence
aaagaatcttgatattacttttag

SEQ ID NO: 189557 - DNA, 24 bp, Artificial sequence
  SiRNA target sequence
aagaatcttgatattacttttaga

SEQ ID NO: 189558 - DNA, 24 bp, Artificial sequence
  SiRNA target sequence
agaatcttgatattacttttagaa

SEQ ID NO: 189559 - DNA, 24 bp, Artificial sequence
  SiRNA target sequence
gaatcttgatattacttttagaag

SEQ ID NO: 189560 - DNA, 24 bp, Artificial sequence
  SiRNA target sequence
aatcttgatattacttttagaaga

SEQ ID NO: 189561 - DNA, 24 bp, Artificial sequence
  SiRNA target sequence
atcttgatattacttttagaagag

SEQ ID NO: 189562 - DNA, 24 bp, Artificial sequence
  SiRNA target sequence
tcttgatattacttttagaagaga

SEQ ID NO: 189563 - DNA, 24 bp, Artificial sequence
  SiRNA target sequence
cttgatattacttttagaagagac

SEQ ID NO: 189564 - DNA, 24 bp, Artificial sequence
  SiRNA target sequence
ttgatattacttttagaagagact

SEQ ID NO: 189565 - DNA, 24 bp, Artificial sequence
  SiRNA target sequence
tgatattacttttagaagagactc

SEQ ID NO: 189566 - DNA, 24 bp, Artificial sequence
  SiRNA target sequence
gatattacttttagaagagactct

SEQ ID NO: 189567 - DNA, 24 bp, Artificial sequence
  SiRNA target sequence
atattacttttagaagagactctt

SEQ ID NO: 189568 - DNA, 24 bp, Artificial sequence
  SiRNA target sequence
tattacttttagaagagactcttc

SEQ ID NO: 189569 - DNA, 24 bp, Artificial sequence
  SiRNA target sequence
attacttttagaagagactcttcc

SEQ ID NO: 189570 - DNA, 24 bp, Artificial sequence
  SiRNA target sequence
ttacttttagaagagactcttcca

SEQ ID NO: 189571 - DNA, 24 bp, Artificial sequence
  SiRNA target sequence
tacttttagaagagactcttccaa

SEQ ID NO: 189572 - DNA, 24 bp, Artificial sequence
  SiRNA target sequence
acttttagaagagactcttccaat

SEQ ID NO: 189573 - DNA, 24 bp, Artificial sequence
  SiRNA target sequence
cttttagaagagactcttccaatt

SEQ ID NO: 189574 - DNA, 24 bp, Artificial sequence
  SiRNA target sequence
ttttagaagagactcttccaattt

SEQ ID NO: 189575 - DNA, 24 bp, Artificial sequence
  SiRNA target sequence
tttagaagagactcttccaatttt

SEQ ID NO: 189576 - DNA, 24 bp, Artificial sequence
  SiRNA target sequence
ttagaagagactcttccaatttta

SEQ ID NO: 189577 - DNA, 24 bp, Artificial sequence
  SiRNA target sequence
tagaagagactcttccaattttag

SEQ ID NO: 189578 - DNA, 24 bp, Artificial sequence
  SiRNA target sequence
agaagagactcttccaattttaga

SEQ ID NO: 189579 - DNA, 24 bp, Artificial sequence
  SiRNA target sequence
gaagagactcttccaattttagac

SEQ ID NO: 189580 - DNA, 24 bp, Artificial sequence
  SiRNA target sequence
aagagactcttccaattttagacc

SEQ ID NO: 189581 - DNA, 24 bp, Artificial sequence
  SiRNA target sequence
agagactcttccaattttagacca

SEQ ID NO: 189582 - DNA, 24 bp, Artificial sequence
  SiRNA target sequence
gagactcttccaattttagaccaa

SEQ ID NO: 189583 - DNA, 24 bp, Artificial sequence
  SiRNA target sequence
agactcttccaattttagaccaag

SEQ ID NO: 189584 - DNA, 24 bp, Artificial sequence
  SiRNA target sequence
gactcttccaattttagaccaaga

SEQ ID NO: 189585 - DNA, 24 bp, Artificial sequence
  SiRNA target sequence
actcttccaattttagaccaagag

SEQ ID NO: 189586 - DNA, 24 bp, Artificial sequence
  SiRNA target sequence
ctcttccaattttagaccaagagt

SEQ ID NO: 189587 - DNA, 24 bp, Artificial sequence
  SiRNA target sequence
tcttccaattttagaccaagagtt

SEQ ID NO: 189588 - DNA, 24 bp, Artificial sequence
  SiRNA target sequence
cttccaattttagaccaagagtta

SEQ ID NO: 189589 - DNA, 24 bp, Artificial sequence
  SiRNA target sequence
ttccaattttagaccaagagttaa

SEQ ID NO: 189590 - DNA, 24 bp, Artificial sequence
  SiRNA target sequence
tccaattttagaccaagagttaat

SEQ ID NO: 189591 - DNA, 24 bp, Artificial sequence
  SiRNA target sequence
ccaattttagaccaagagttaata

SEQ ID NO: 189592 - DNA, 24 bp, Artificial sequence
  SiRNA target sequence
caattttagaccaagagttaataa

SEQ ID NO: 189593 - DNA, 24 bp, Artificial sequence
  SiRNA target sequence
aattttagaccaagagttaataag

SEQ ID NO: 189594 - DNA, 24 bp, Artificial sequence
  SiRNA target sequence
attttagaccaagagttaataagc

SEQ ID NO: 189595 - DNA, 24 bp, Artificial sequence
  SiRNA target sequence
ttttagaccaagagttaataagcc

SEQ ID NO: 189596 - DNA, 24 bp, Artificial sequence
  SiRNA target sequence
tttagaccaagagttaataagccg

SEQ ID NO: 189597 - DNA, 24 bp, Artificial sequence
  SiRNA target sequence
ttagaccaagagttaataagccga

SEQ ID NO: 189598 - DNA, 24 bp, Artificial sequence
  SiRNA target sequence
tagaccaagagttaataagccgaa

SEQ ID NO: 189599 - DNA, 24 bp, Artificial sequence
  SiRNA target sequence
agaccaagagttaataagccgaat

SEQ ID NO: 189600 - DNA, 24 bp, Artificial sequence
  SiRNA target sequence
gaccaagagttaataagccgaatt

SEQ ID NO: 189601 - DNA, 24 bp, Artificial sequence
  SiRNA target sequence
accaagagttaataagccgaattc

SEQ ID NO: 189602 - DNA, 24 bp, Artificial sequence
  SiRNA target sequence
ccaagagttaataagccgaattcc

SEQ ID NO: 189603 - DNA, 24 bp, Artificial sequence
  SiRNA target sequence
caagagttaataagccgaattccg

SEQ ID NO: 189604 - DNA, 24 bp, Artificial sequence
  SiRNA target sequence
aagagttaataagccgaattccgc

SEQ ID NO: 189605 - DNA, 24 bp, Artificial sequence
  SiRNA target sequence
agagttaataagccgaattccgca

SEQ ID NO: 189606 - DNA, 24 bp, Artificial sequence
  SiRNA target sequence
gagttaataagccgaattccgcaa

SEQ ID NO: 189607 - DNA, 24 bp, Artificial sequence
  SiRNA target sequence
agttaataagccgaattccgcaaa

SEQ ID NO: 189608 - DNA, 24 bp, Artificial sequence
  SiRNA target sequence
gttaataagccgaattccgcaaaa

SEQ ID NO: 189609 - DNA, 24 bp, Artificial sequence
  SiRNA target sequence
ttaataagccgaattccgcaaaag

SEQ ID NO: 189610 - DNA, 24 bp, Artificial sequence
  SiRNA target sequence
taataagccgaattccgcaaaaga

SEQ ID NO: 189611 - DNA, 24 bp, Artificial sequence
  SiRNA target sequence
aataagccgaattccgcaaaagac

SEQ ID NO: 189612 - DNA, 24 bp, Artificial sequence
  SiRNA target sequence
ataagccgaattccgcaaaagaca

SEQ ID NO: 189613 - DNA, 24 bp, Artificial sequence
  SiRNA target sequence
taagccgaattccgcaaaagacag

SEQ ID NO: 189614 - DNA, 24 bp, Artificial sequence
  SiRNA target sequence
aagccgaattccgcaaaagacaga

SEQ ID NO: 189615 - DNA, 24 bp, Artificial sequence
  SiRNA target sequence
agccgaattccgcaaaagacagaa

SEQ ID NO: 189616 - DNA, 24 bp, Artificial sequence
  SiRNA target sequence
gccgaattccgcaaaagacagaac

SEQ ID NO: 189617 - DNA, 24 bp, Artificial sequence
  SiRNA target sequence
ccgaattccgcaaaagacagaact

SEQ ID NO: 189618 - DNA, 24 bp, Artificial sequence
  SiRNA target sequence
cgaattccgcaaaagacagaactc

SEQ ID NO: 189619 - DNA, 24 bp, Artificial sequence
  SiRNA target sequence
gaattccgcaaaagacagaactca

SEQ ID NO: 189620 - DNA, 24 bp, Artificial sequence
  SiRNA target sequence
aattccgcaaaagacagaactcag

SEQ ID NO: 189621 - DNA, 24 bp, Artificial sequence
  SiRNA target sequence
attccgcaaaagacagaactcaga

SEQ ID NO: 189622 - DNA, 24 bp, Artificial sequence
  SiRNA target sequence
ttccgcaaaagacagaactcagaa

SEQ ID NO: 189623 - DNA, 24 bp, Artificial sequence
  SiRNA target sequence
tccgcaaaagacagaactcagaaa

SEQ ID NO: 189624 - DNA, 24 bp, Artificial sequence
  SiRNA target sequence
ccgcaaaagacagaactcagaaag

SEQ ID NO: 189625 - DNA, 24 bp, Artificial sequence
  SiRNA target sequence
cgcaaaagacagaactcagaaaga

SEQ ID NO: 189626 - DNA, 24 bp, Artificial sequence
  SiRNA target sequence
gcaaaagacagaactcagaaagaa

SEQ ID NO: 189627 - DNA, 24 bp, Artificial sequence
  SiRNA target sequence
caaaagacagaactcagaaagaag

SEQ ID NO: 189628 - DNA, 24 bp, Artificial sequence
  SiRNA target sequence
aaaagacagaactcagaaagaaga

SEQ ID NO: 189629 - DNA, 24 bp, Artificial sequence
  SiRNA target sequence
aaagacagaactcagaaagaagag

SEQ ID NO: 189630 - DNA, 24 bp, Artificial sequence
  SiRNA target sequence
aagacagaactcagaaagaagaga

SEQ ID NO: 189631 - DNA, 24 bp, Artificial sequence
  SiRNA target sequence
agacagaactcagaaagaagagaa

SEQ ID NO: 189632 - DNA, 24 bp, Artificial sequence
  SiRNA target sequence
gacagaactcagaaagaagagaat

SEQ ID NO: 189633 - DNA, 24 bp, Artificial sequence
  SiRNA target sequence
acagaactcagaaagaagagaata

SEQ ID NO: 189634 - DNA, 24 bp, Artificial sequence
  SiRNA target sequence
cagaactcagaaagaagagaataa

SEQ ID NO: 189635 - DNA, 24 bp, Artificial sequence
  SiRNA target sequence
agaactcagaaagaagagaataaa

SEQ ID NO: 189636 - DNA, 24 bp, Artificial sequence
  SiRNA target sequence
gaactcagaaagaagagaataaat

SEQ ID NO: 189637 - DNA, 24 bp, Artificial sequence
  SiRNA target sequence
aactcagaaagaagagaataaata

SEQ ID NO: 189638 - DNA, 24 bp, Artificial sequence
  SiRNA target sequence
actcagaaagaagagaataaatat

SEQ ID NO: 189639 - DNA, 24 bp, Artificial sequence
  SiRNA target sequence
ctcagaaagaagagaataaatatt

SEQ ID NO: 189640 - DNA, 24 bp, Artificial sequence
  SiRNA target sequence
tcagaaagaagagaataaatattt

SEQ ID NO: 189641 - DNA, 24 bp, Artificial sequence
  SiRNA target sequence
cagaaagaagagaataaatatttt

SEQ ID NO: 189642 - DNA, 24 bp, Artificial sequence
  SiRNA target sequence
agaaagaagagaataaatattttt

SEQ ID NO: 189643 - DNA, 24 bp, Artificial sequence
  SiRNA target sequence
gaaagaagagaataaatatttttt

SEQ ID NO: 189644 - DNA, 24 bp, Artificial sequence
  SiRNA target sequence
aaagaagagaataaatattttttt

SEQ ID NO: 189645 - DNA, 24 bp, Artificial sequence
  SiRNA target sequence
aagaagagaataaatatttttttt

SEQ ID NO: 189646 - DNA, 24 bp, Artificial sequence
  SiRNA target sequence
agaagagaataaatattttttttg

SEQ ID NO: 189647 - DNA, 24 bp, Artificial sequence
  SiRNA target sequence
gaagagaataaatattttttttga

SEQ ID NO: 189648 - DNA, 25 bp, Artificial sequence
  SiRNA target sequence
atggccaagaatgaatctaataaaa

SEQ ID NO: 189649 - DNA, 25 bp, Artificial sequence
  SiRNA target sequence
tggccaagaatgaatctaataaaat

SEQ ID NO: 189650 - DNA, 25 bp, Artificial sequence
  SiRNA target sequence
ggccaagaatgaatctaataaaata

SEQ ID NO: 189651 - DNA, 25 bp, Artificial sequence
  SiRNA target sequence
gccaagaatgaatctaataaaataa

SEQ ID NO: 189652 - DNA, 25 bp, Artificial sequence
  SiRNA target sequence
ccaagaatgaatctaataaaataac

SEQ ID NO: 189653 - DNA, 25 bp, Artificial sequence
  SiRNA target sequence
caagaatgaatctaataaaataacg

SEQ ID NO: 189654 - DNA, 25 bp, Artificial sequence
  SiRNA target sequence
aagaatgaatctaataaaataacga

SEQ ID NO: 189655 - DNA, 25 bp, Artificial sequence
  SiRNA target sequence
agaatgaatctaataaaataacgag

SEQ ID NO: 189656 - DNA, 25 bp, Artificial sequence
  SiRNA target sequence
gaatgaatctaataaaataacgaga

SEQ ID NO: 189657 - DNA, 25 bp, Artificial sequence
  SiRNA target sequence
aatgaatctaataaaataacgagac

SEQ ID NO: 189658 - DNA, 25 bp, Artificial sequence
  SiRNA target sequence
atgaatctaataaaataacgagact

SEQ ID NO: 189659 - DNA, 25 bp, Artificial sequence
  SiRNA target sequence
tgaatctaataaaataacgagactg

SEQ ID NO: 189660 - DNA, 25 bp, Artificial sequence
  SiRNA target sequence
gaatctaataaaataacgagactgg

SEQ ID NO: 189661 - DNA, 25 bp, Artificial sequence
  SiRNA target sequence
aatctaataaaataacgagactggc

SEQ ID NO: 189662 - DNA, 25 bp, Artificial sequence
  SiRNA target sequence
atctaataaaataacgagactggca

SEQ ID NO: 189663 - DNA, 25 bp, Artificial sequence
  SiRNA target sequence
tctaataaaataacgagactggcaa

SEQ ID NO: 189664 - DNA, 25 bp, Artificial sequence
  SiRNA target sequence
ctaataaaataacgagactggcaat

SEQ ID NO: 189665 - DNA, 25 bp, Artificial sequence
  SiRNA target sequence
taataaaataacgagactggcaatt

SEQ ID NO: 189666 - DNA, 25 bp, Artificial sequence
  SiRNA target sequence
aataaaataacgagactggcaattg

SEQ ID NO: 189667 - DNA, 25 bp, Artificial sequence
  SiRNA target sequence
ataaaataacgagactggcaattgt

SEQ ID NO: 189668 - DNA, 25 bp, Artificial sequence
  SiRNA target sequence
taaaataacgagactggcaattgtt

SEQ ID NO: 189669 - DNA, 25 bp, Artificial sequence
  SiRNA target sequence
aaaataacgagactggcaattgtta

SEQ ID NO: 189670 - DNA, 25 bp, Artificial sequence
  SiRNA target sequence
aaataacgagactggcaattgttaa

SEQ ID NO: 189671 - DNA, 25 bp, Artificial sequence
  SiRNA target sequence
aataacgagactggcaattgttaat

SEQ ID NO: 189672 - DNA, 25 bp, Artificial sequence
  SiRNA target sequence
ataacgagactggcaattgttaatt

SEQ ID NO: 189673 - DNA, 25 bp, Artificial sequence
  SiRNA target sequence
taacgagactggcaattgttaatta

SEQ ID NO: 189674 - DNA, 25 bp, Artificial sequence
  SiRNA target sequence
aacgagactggcaattgttaattat

SEQ ID NO: 189675 - DNA, 25 bp, Artificial sequence
  SiRNA target sequence
acgagactggcaattgttaattatg

SEQ ID NO: 189676 - DNA, 25 bp, Artificial sequence
  SiRNA target sequence
cgagactggcaattgttaattatga

SEQ ID NO: 189677 - DNA, 25 bp, Artificial sequence
  SiRNA target sequence
gagactggcaattgttaattatgaa

SEQ ID NO: 189678 - DNA, 25 bp, Artificial sequence
  SiRNA target sequence
agactggcaattgttaattatgaac

SEQ ID NO: 189679 - DNA, 25 bp, Artificial sequence
  SiRNA target sequence
gactggcaattgttaattatgaact

SEQ ID NO: 189680 - DNA, 25 bp, Artificial sequence
  SiRNA target sequence
actggcaattgttaattatgaacta

SEQ ID NO: 189681 - DNA, 25 bp, Artificial sequence
  SiRNA target sequence
ctggcaattgttaattatgaactat

SEQ ID NO: 189682 - DNA, 25 bp, Artificial sequence
  SiRNA target sequence
tggcaattgttaattatgaactatg

SEQ ID NO: 189683 - DNA, 25 bp, Artificial sequence
  SiRNA target sequence
ggcaattgttaattatgaactatgt

SEQ ID NO: 189684 - DNA, 25 bp, Artificial sequence
  SiRNA target sequence
gcaattgttaattatgaactatgta

SEQ ID NO: 189685 - DNA, 25 bp, Artificial sequence
  SiRNA target sequence
caattgttaattatgaactatgtaa

SEQ ID NO: 189686 - DNA, 25 bp, Artificial sequence
  SiRNA target sequence
aattgttaattatgaactatgtaaa

SEQ ID NO: 189687 - DNA, 25 bp, Artificial sequence
  SiRNA target sequence
attgttaattatgaactatgtaaac

SEQ ID NO: 189688 - DNA, 25 bp, Artificial sequence
  SiRNA target sequence
ttgttaattatgaactatgtaaacc

SEQ ID NO: 189689 - DNA, 25 bp, Artificial sequence
  SiRNA target sequence
tgttaattatgaactatgtaaaccg

SEQ ID NO: 189690 - DNA, 25 bp, Artificial sequence
  SiRNA target sequence
gttaattatgaactatgtaaaccga

SEQ ID NO: 189691 - DNA, 25 bp, Artificial sequence
  SiRNA target sequence
ttaattatgaactatgtaaaccgaa

SEQ ID NO: 189692 - DNA, 25 bp, Artificial sequence
  SiRNA target sequence
taattatgaactatgtaaaccgaag

SEQ ID NO: 189693 - DNA, 25 bp, Artificial sequence
  SiRNA target sequence
aattatgaactatgtaaaccgaagg

SEQ ID NO: 189694 - DNA, 25 bp, Artificial sequence
  SiRNA target sequence
attatgaactatgtaaaccgaagga

SEQ ID NO: 189695 - DNA, 25 bp, Artificial sequence
  SiRNA target sequence
ttatgaactatgtaaaccgaaggaa

SEQ ID NO: 189696 - DNA, 25 bp, Artificial sequence
  SiRNA target sequence
tatgaactatgtaaaccgaaggaat

SEQ ID NO: 189697 - DNA, 25 bp, Artificial sequence
  SiRNA target sequence
atgaactatgtaaaccgaaggaatg

SEQ ID NO: 189698 - DNA, 25 bp, Artificial sequence
  SiRNA target sequence
tgaactatgtaaaccgaaggaatgt

SEQ ID NO: 189699 - DNA, 25 bp, Artificial sequence
  SiRNA target sequence
gaactatgtaaaccgaaggaatgta

SEQ ID NO: 189700 - DNA, 25 bp, Artificial sequence
  SiRNA target sequence
aactatgtaaaccgaaggaatgtat

SEQ ID NO: 189701 - DNA, 25 bp, Artificial sequence
  SiRNA target sequence
actatgtaaaccgaaggaatgtatg

SEQ ID NO: 189702 - DNA, 25 bp, Artificial sequence
  SiRNA target sequence
ctatgtaaaccgaaggaatgtatgt

SEQ ID NO: 189703 - DNA, 25 bp, Artificial sequence
  SiRNA target sequence
tatgtaaaccgaaggaatgtatgtc

SEQ ID NO: 189704 - DNA, 25 bp, Artificial sequence
  SiRNA target sequence
atgtaaaccgaaggaatgtatgtca

SEQ ID NO: 189705 - DNA, 25 bp, Artificial sequence
  SiRNA target sequence
tgtaaaccgaaggaatgtatgtcag

SEQ ID NO: 189706 - DNA, 25 bp, Artificial sequence
  SiRNA target sequence
gtaaaccgaaggaatgtatgtcaga

SEQ ID NO: 189707 - DNA, 25 bp, Artificial sequence
  SiRNA target sequence
taaaccgaaggaatgtatgtcagaa

SEQ ID NO: 189708 - DNA, 25 bp, Artificial sequence
  SiRNA target sequence
aaaccgaaggaatgtatgtcagaat

SEQ ID NO: 189709 - DNA, 25 bp, Artificial sequence
  SiRNA target sequence
aaccgaaggaatgtatgtcagaatg

SEQ ID NO: 189710 - DNA, 25 bp, Artificial sequence
  SiRNA target sequence
accgaaggaatgtatgtcagaatgt

SEQ ID NO: 189711 - DNA, 25 bp, Artificial sequence
  SiRNA target sequence
ccgaaggaatgtatgtcagaatgta

SEQ ID NO: 189712 - DNA, 25 bp, Artificial sequence
  SiRNA target sequence
cgaaggaatgtatgtcagaatgtaa

SEQ ID NO: 189713 - DNA, 25 bp, Artificial sequence
  SiRNA target sequence
gaaggaatgtatgtcagaatgtaaa

SEQ ID NO: 189714 - DNA, 25 bp, Artificial sequence
  SiRNA target sequence
aaggaatgtatgtcagaatgtaaaa

SEQ ID NO: 189715 - DNA, 25 bp, Artificial sequence
  SiRNA target sequence
aggaatgtatgtcagaatgtaaaaa

SEQ ID NO: 189716 - DNA, 25 bp, Artificial sequence
  SiRNA target sequence
ggaatgtatgtcagaatgtaaaaag

SEQ ID NO: 189717 - DNA, 25 bp, Artificial sequence
  SiRNA target sequence
gaatgtatgtcagaatgtaaaaagg

SEQ ID NO: 189718 - DNA, 25 bp, Artificial sequence
  SiRNA target sequence
aatgtatgtcagaatgtaaaaaggc

SEQ ID NO: 189719 - DNA, 25 bp, Artificial sequence
  SiRNA target sequence
atgtatgtcagaatgtaaaaaggcg

SEQ ID NO: 189720 - DNA, 25 bp, Artificial sequence
  SiRNA target sequence
tgtatgtcagaatgtaaaaaggcgt

SEQ ID NO: 189721 - DNA, 25 bp, Artificial sequence
  SiRNA target sequence
gtatgtcagaatgtaaaaaggcgtg

SEQ ID NO: 189722 - DNA, 25 bp, Artificial sequence
  SiRNA target sequence
tatgtcagaatgtaaaaaggcgtgt

SEQ ID NO: 189723 - DNA, 25 bp, Artificial sequence
  SiRNA target sequence
atgtcagaatgtaaaaaggcgtgtc

SEQ ID NO: 189724 - DNA, 25 bp, Artificial sequence
  SiRNA target sequence
tgtcagaatgtaaaaaggcgtgtcc

SEQ ID NO: 189725 - DNA, 25 bp, Artificial sequence
  SiRNA target sequence
gtcagaatgtaaaaaggcgtgtcct

SEQ ID NO: 189726 - DNA, 25 bp, Artificial sequence
  SiRNA target sequence
tcagaatgtaaaaaggcgtgtcctg

SEQ ID NO: 189727 - DNA, 25 bp, Artificial sequence
  SiRNA target sequence
cagaatgtaaaaaggcgtgtcctgt

SEQ ID NO: 189728 - DNA, 25 bp, Artificial sequence
  SiRNA target sequence
agaatgtaaaaaggcgtgtcctgtt

SEQ ID NO: 189729 - DNA, 25 bp, Artificial sequence
  SiRNA target sequence
gaatgtaaaaaggcgtgtcctgtta

SEQ ID NO: 189730 - DNA, 25 bp, Artificial sequence
  SiRNA target sequence
aatgtaaaaaggcgtgtcctgttaa

SEQ ID NO: 189731 - DNA, 25 bp, Artificial sequence
  SiRNA target sequence
atgtaaaaaggcgtgtcctgttaat

SEQ ID NO: 189732 - DNA, 25 bp, Artificial sequence
  SiRNA target sequence
tgtaaaaaggcgtgtcctgttaata

SEQ ID NO: 189733 - DNA, 25 bp, Artificial sequence
  SiRNA target sequence
gtaaaaaggcgtgtcctgttaataa

SEQ ID NO: 189734 - DNA, 25 bp, Artificial sequence
  SiRNA target sequence
taaaaaggcgtgtcctgttaataaa

SEQ ID NO: 189735 - DNA, 25 bp, Artificial sequence
  SiRNA target sequence
aaaaaggcgtgtcctgttaataaaa

SEQ ID NO: 189736 - DNA, 25 bp, Artificial sequence
  SiRNA target sequence
aaaaggcgtgtcctgttaataaaac

SEQ ID NO: 189737 - DNA, 25 bp, Artificial sequence
  SiRNA target sequence
aaaggcgtgtcctgttaataaaaca

SEQ ID NO: 189738 - DNA, 25 bp, Artificial sequence
  SiRNA target sequence
aaggcgtgtcctgttaataaaacag

SEQ ID NO: 189739 - DNA, 25 bp, Artificial sequence
  SiRNA target sequence
aggcgtgtcctgttaataaaacagg

SEQ ID NO: 189740 - DNA, 25 bp, Artificial sequence
  SiRNA target sequence
ggcgtgtcctgttaataaaacagga

SEQ ID NO: 189741 - DNA, 25 bp, Artificial sequence
  SiRNA target sequence
gcgtgtcctgttaataaaacaggaa

SEQ ID NO: 189742 - DNA, 25 bp, Artificial sequence
  SiRNA target sequence
cgtgtcctgttaataaaacaggaaa

SEQ ID NO: 189743 - DNA, 25 bp, Artificial sequence
  SiRNA target sequence
gtgtcctgttaataaaacaggaaag

SEQ ID NO: 189744 - DNA, 25 bp, Artificial sequence
  SiRNA target sequence
tgtcctgttaataaaacaggaaagg

SEQ ID NO: 189745 - DNA, 25 bp, Artificial sequence
  SiRNA target sequence
gtcctgttaataaaacaggaaagga

SEQ ID NO: 189746 - DNA, 25 bp, Artificial sequence
  SiRNA target sequence
tcctgttaataaaacaggaaaggag

SEQ ID NO: 189747 - DNA, 25 bp, Artificial sequence
  SiRNA target sequence
cctgttaataaaacaggaaaggagt

SEQ ID NO: 189748 - DNA, 25 bp, Artificial sequence
  SiRNA target sequence
ctgttaataaaacaggaaaggagtg

SEQ ID NO: 189749 - DNA, 25 bp, Artificial sequence
  SiRNA target sequence
tgttaataaaacaggaaaggagtgt

SEQ ID NO: 189750 - DNA, 25 bp, Artificial sequence
  SiRNA target sequence
gttaataaaacaggaaaggagtgta

SEQ ID NO: 189751 - DNA, 25 bp, Artificial sequence
  SiRNA target sequence
ttaataaaacaggaaaggagtgtat

SEQ ID NO: 189752 - DNA, 25 bp, Artificial sequence
  SiRNA target sequence
taataaaacaggaaaggagtgtatt

SEQ ID NO: 189753 - DNA, 25 bp, Artificial sequence
  SiRNA target sequence
aataaaacaggaaaggagtgtatta

SEQ ID NO: 189754 - DNA, 25 bp, Artificial sequence
  SiRNA target sequence
ataaaacaggaaaggagtgtattac

SEQ ID NO: 189755 - DNA, 25 bp, Artificial sequence
  SiRNA target sequence
taaaacaggaaaggagtgtattaca

SEQ ID NO: 189756 - DNA, 25 bp, Artificial sequence
  SiRNA target sequence
aaaacaggaaaggagtgtattacaa

SEQ ID NO: 189757 - DNA, 25 bp, Artificial sequence
  SiRNA target sequence
aaacaggaaaggagtgtattacaat

SEQ ID NO: 189758 - DNA, 25 bp, Artificial sequence
  SiRNA target sequence
aacaggaaaggagtgtattacaatt

SEQ ID NO: 189759 - DNA, 25 bp, Artificial sequence
  SiRNA target sequence
acaggaaaggagtgtattacaattg

SEQ ID NO: 189760 - DNA, 25 bp, Artificial sequence
  SiRNA target sequence
caggaaaggagtgtattacaattga

SEQ ID NO: 189761 - DNA, 25 bp, Artificial sequence
  SiRNA target sequence
aggaaaggagtgtattacaattgat

SEQ ID NO: 189762 - DNA, 25 bp, Artificial sequence
  SiRNA target sequence
ggaaaggagtgtattacaattgata

SEQ ID NO: 189763 - DNA, 25 bp, Artificial sequence
  SiRNA target sequence
gaaaggagtgtattacaattgatac

SEQ ID NO: 189764 - DNA, 25 bp, Artificial sequence
  SiRNA target sequence
aaaggagtgtattacaattgatact

SEQ ID NO: 189765 - DNA, 25 bp, Artificial sequence
  SiRNA target sequence
aaggagtgtattacaattgatacta

SEQ ID NO: 189766 - DNA, 25 bp, Artificial sequence
  SiRNA target sequence
aggagtgtattacaattgatactaa

SEQ ID NO: 189767 - DNA, 25 bp, Artificial sequence
  SiRNA target sequence
ggagtgtattacaattgatactaaa

SEQ ID NO: 189768 - DNA, 25 bp, Artificial sequence
  SiRNA target sequence
gagtgtattacaattgatactaaat

SEQ ID NO: 189769 - DNA, 25 bp, Artificial sequence
  SiRNA target sequence
agtgtattacaattgatactaaatc

SEQ ID NO: 189770 - DNA, 25 bp, Artificial sequence
  SiRNA target sequence
gtgtattacaattgatactaaatca

SEQ ID NO: 189771 - DNA, 25 bp, Artificial sequence
  SiRNA target sequence
tgtattacaattgatactaaatcac

SEQ ID NO: 189772 - DNA, 25 bp, Artificial sequence
  SiRNA target sequence
gtattacaattgatactaaatcaca

SEQ ID NO: 189773 - DNA, 25 bp, Artificial sequence
  SiRNA target sequence
tattacaattgatactaaatcacat

SEQ ID NO: 189774 - DNA, 25 bp, Artificial sequence
  SiRNA target sequence
attacaattgatactaaatcacata

SEQ ID NO: 189775 - DNA, 25 bp, Artificial sequence
  SiRNA target sequence
ttacaattgatactaaatcacatat

SEQ ID NO: 189776 - DNA, 25 bp, Artificial sequence
  SiRNA target sequence
tacaattgatactaaatcacatatc

SEQ ID NO: 189777 - DNA, 25 bp, Artificial sequence
  SiRNA target sequence
acaattgatactaaatcacatatct

SEQ ID NO: 189778 - DNA, 25 bp, Artificial sequence
  SiRNA target sequence
caattgatactaaatcacatatctc

SEQ ID NO: 189779 - DNA, 25 bp, Artificial sequence
  SiRNA target sequence
aattgatactaaatcacatatctca

SEQ ID NO: 189780 - DNA, 25 bp, Artificial sequence
  SiRNA target sequence
attgatactaaatcacatatctcag

SEQ ID NO: 189781 - DNA, 25 bp, Artificial sequence
  SiRNA target sequence
ttgatactaaatcacatatctcaga

SEQ ID NO: 189782 - DNA, 25 bp, Artificial sequence
  SiRNA target sequence
tgatactaaatcacatatctcagaa

SEQ ID NO: 189783 - DNA, 25 bp, Artificial sequence
  SiRNA target sequence
gatactaaatcacatatctcagaaa

SEQ ID NO: 189784 - DNA, 25 bp, Artificial sequence
  SiRNA target sequence
atactaaatcacatatctcagaaat

SEQ ID NO: 189785 - DNA, 25 bp, Artificial sequence
  SiRNA target sequence
tactaaatcacatatctcagaaatt

SEQ ID NO: 189786 - DNA, 25 bp, Artificial sequence
  SiRNA target sequence
actaaatcacatatctcagaaattc

SEQ ID NO: 189787 - DNA, 25 bp, Artificial sequence
  SiRNA target sequence
ctaaatcacatatctcagaaattct

SEQ ID NO: 189788 - DNA, 25 bp, Artificial sequence
  SiRNA target sequence
taaatcacatatctcagaaattctg

SEQ ID NO: 189789 - DNA, 25 bp, Artificial sequence
  SiRNA target sequence
aaatcacatatctcagaaattctgt

SEQ ID NO: 189790 - DNA, 25 bp, Artificial sequence
  SiRNA target sequence
aatcacatatctcagaaattctgtg

SEQ ID NO: 189791 - DNA, 25 bp, Artificial sequence
  SiRNA target sequence
atcacatatctcagaaattctgtgt

SEQ ID NO: 189792 - DNA, 25 bp, Artificial sequence
  SiRNA target sequence
tcacatatctcagaaattctgtgta

SEQ ID NO: 189793 - DNA, 25 bp, Artificial sequence
  SiRNA target sequence
cacatatctcagaaattctgtgtat

SEQ ID NO: 189794 - DNA, 25 bp, Artificial sequence
  SiRNA target sequence
acatatctcagaaattctgtgtata

SEQ ID NO: 189795 - DNA, 25 bp, Artificial sequence
  SiRNA target sequence
catatctcagaaattctgtgtatag

SEQ ID NO: 189796 - DNA, 25 bp, Artificial sequence
  SiRNA target sequence
atatctcagaaattctgtgtatagg

SEQ ID NO: 189797 - DNA, 25 bp, Artificial sequence
  SiRNA target sequence
tatctcagaaattctgtgtatagga

SEQ ID NO: 189798 - DNA, 25 bp, Artificial sequence
  SiRNA target sequence
atctcagaaattctgtgtataggat

SEQ ID NO: 189799 - DNA, 25 bp, Artificial sequence
  SiRNA target sequence
tctcagaaattctgtgtataggatg

SEQ ID NO: 189800 - DNA, 25 bp, Artificial sequence
  SiRNA target sequence
ctcagaaattctgtgtataggatgt

SEQ ID NO: 189801 - DNA, 25 bp, Artificial sequence
  SiRNA target sequence
tcagaaattctgtgtataggatgtt

SEQ ID NO: 189802 - DNA, 25 bp, Artificial sequence
  SiRNA target sequence
cagaaattctgtgtataggatgttc

SEQ ID NO: 189803 - DNA, 25 bp, Artificial sequence
  SiRNA target sequence
agaaattctgtgtataggatgttct

SEQ ID NO: 189804 - DNA, 25 bp, Artificial sequence
  SiRNA target sequence
gaaattctgtgtataggatgttctg

SEQ ID NO: 189805 - DNA, 25 bp, Artificial sequence
  SiRNA target sequence
aaattctgtgtataggatgttctgc

SEQ ID NO: 189806 - DNA, 25 bp, Artificial sequence
  SiRNA target sequence
aattctgtgtataggatgttctgcg

SEQ ID NO: 189807 - DNA, 25 bp, Artificial sequence
  SiRNA target sequence
attctgtgtataggatgttctgcgt

SEQ ID NO: 189808 - DNA, 25 bp, Artificial sequence
  SiRNA target sequence
ttctgtgtataggatgttctgcgtg

SEQ ID NO: 189809 - DNA, 25 bp, Artificial sequence
  SiRNA target sequence
tctgtgtataggatgttctgcgtgt

SEQ ID NO: 189810 - DNA, 25 bp, Artificial sequence
  SiRNA target sequence
ctgtgtataggatgttctgcgtgtc

SEQ ID NO: 189811 - DNA, 25 bp, Artificial sequence
  SiRNA target sequence
tgtgtataggatgttctgcgtgtca

SEQ ID NO: 189812 - DNA, 25 bp, Artificial sequence
  SiRNA target sequence
gtgtataggatgttctgcgtgtcaa

SEQ ID NO: 189813 - DNA, 25 bp, Artificial sequence
  SiRNA target sequence
tgtataggatgttctgcgtgtcaaa

SEQ ID NO: 189814 - DNA, 25 bp, Artificial sequence
  SiRNA target sequence
gtataggatgttctgcgtgtcaaaa

SEQ ID NO: 189815 - DNA, 25 bp, Artificial sequence
  SiRNA target sequence
tataggatgttctgcgtgtcaaaag

SEQ ID NO: 189816 - DNA, 25 bp, Artificial sequence
  SiRNA target sequence
ataggatgttctgcgtgtcaaaaga

SEQ ID NO: 189817 - DNA, 25 bp, Artificial sequence
  SiRNA target sequence
taggatgttctgcgtgtcaaaagaa

SEQ ID NO: 189818 - DNA, 25 bp, Artificial sequence
  SiRNA target sequence
aggatgttctgcgtgtcaaaagaaa

SEQ ID NO: 189819 - DNA, 25 bp, Artificial sequence
  SiRNA target sequence
ggatgttctgcgtgtcaaaagaaat

SEQ ID NO: 189820 - DNA, 25 bp, Artificial sequence
  SiRNA target sequence
gatgttctgcgtgtcaaaagaaatg

SEQ ID NO: 189821 - DNA, 25 bp, Artificial sequence
  SiRNA target sequence
atgttctgcgtgtcaaaagaaatgt

SEQ ID NO: 189822 - DNA, 25 bp, Artificial sequence
  SiRNA target sequence
tgttctgcgtgtcaaaagaaatgtc

SEQ ID NO: 189823 - DNA, 25 bp, Artificial sequence
  SiRNA target sequence
gttctgcgtgtcaaaagaaatgtcc

SEQ ID NO: 189824 - DNA, 25 bp, Artificial sequence
  SiRNA target sequence
ttctgcgtgtcaaaagaaatgtcct

SEQ ID NO: 189825 - DNA, 25 bp, Artificial sequence
  SiRNA target sequence
tctgcgtgtcaaaagaaatgtcctt

SEQ ID NO: 189826 - DNA, 25 bp, Artificial sequence
  SiRNA target sequence
ctgcgtgtcaaaagaaatgtccttt

SEQ ID NO: 189827 - DNA, 25 bp, Artificial sequence
  SiRNA target sequence
tgcgtgtcaaaagaaatgtcctttt

SEQ ID NO: 189828 - DNA, 25 bp, Artificial sequence
  SiRNA target sequence
gcgtgtcaaaagaaatgtcctttta

SEQ ID NO: 189829 - DNA, 25 bp, Artificial sequence
  SiRNA target sequence
cgtgtcaaaagaaatgtccttttaa

SEQ ID NO: 189830 - DNA, 25 bp, Artificial sequence
  SiRNA target sequence
gtgtcaaaagaaatgtccttttaag

SEQ ID NO: 189831 - DNA, 25 bp, Artificial sequence
  SiRNA target sequence
tgtcaaaagaaatgtccttttaagg

SEQ ID NO: 189832 - DNA, 25 bp, Artificial sequence
  SiRNA target sequence
gtcaaaagaaatgtccttttaaggc

SEQ ID NO: 189833 - DNA, 25 bp, Artificial sequence
  SiRNA target sequence
tcaaaagaaatgtccttttaaggcg

SEQ ID NO: 189834 - DNA, 25 bp, Artificial sequence
  SiRNA target sequence
caaaagaaatgtccttttaaggcga

SEQ ID NO: 189835 - DNA, 25 bp, Artificial sequence
  SiRNA target sequence
aaaagaaatgtccttttaaggcgat

SEQ ID NO: 189836 - DNA, 25 bp, Artificial sequence
  SiRNA target sequence
aaagaaatgtccttttaaggcgatt

SEQ ID NO: 189837 - DNA, 25 bp, Artificial sequence
  SiRNA target sequence
aagaaatgtccttttaaggcgatta

SEQ ID NO: 189838 - DNA, 25 bp, Artificial sequence
  SiRNA target sequence
agaaatgtccttttaaggcgattac

SEQ ID NO: 189839 - DNA, 25 bp, Artificial sequence
  SiRNA target sequence
gaaatgtccttttaaggcgattaca

SEQ ID NO: 189840 - DNA, 25 bp, Artificial sequence
  SiRNA target sequence
aaatgtccttttaaggcgattacaa

SEQ ID NO: 189841 - DNA, 25 bp, Artificial sequence
  SiRNA target sequence
aatgtccttttaaggcgattacaat

SEQ ID NO: 189842 - DNA, 25 bp, Artificial sequence
  SiRNA target sequence
atgtccttttaaggcgattacaatt

SEQ ID NO: 189843 - DNA, 25 bp, Artificial sequence
  SiRNA target sequence
tgtccttttaaggcgattacaattg

SEQ ID NO: 189844 - DNA, 25 bp, Artificial sequence
  SiRNA target sequence
gtccttttaaggcgattacaattgt

SEQ ID NO: 189845 - DNA, 25 bp, Artificial sequence
  SiRNA target sequence
tccttttaaggcgattacaattgta

SEQ ID NO: 189846 - DNA, 25 bp, Artificial sequence
  SiRNA target sequence
ccttttaaggcgattacaattgtaa

SEQ ID NO: 189847 - DNA, 25 bp, Artificial sequence
  SiRNA target sequence
cttttaaggcgattacaattgtaaa

SEQ ID NO: 189848 - DNA, 25 bp, Artificial sequence
  SiRNA target sequence
ttttaaggcgattacaattgtaaat

SEQ ID NO: 189849 - DNA, 25 bp, Artificial sequence
  SiRNA target sequence
tttaaggcgattacaattgtaaatt

SEQ ID NO: 189850 - DNA, 25 bp, Artificial sequence
  SiRNA target sequence
ttaaggcgattacaattgtaaattt

SEQ ID NO: 189851 - DNA, 25 bp, Artificial sequence
  SiRNA target sequence
taaggcgattacaattgtaaattta

SEQ ID NO: 189852 - DNA, 25 bp, Artificial sequence
  SiRNA target sequence
aaggcgattacaattgtaaatttac

SEQ ID NO: 189853 - DNA, 25 bp, Artificial sequence
  SiRNA target sequence
aggcgattacaattgtaaatttacc

SEQ ID NO: 189854 - DNA, 25 bp, Artificial sequence
  SiRNA target sequence
ggcgattacaattgtaaatttacct

SEQ ID NO: 189855 - DNA, 25 bp, Artificial sequence
  SiRNA target sequence
gcgattacaattgtaaatttaccta

SEQ ID NO: 189856 - DNA, 25 bp, Artificial sequence
  SiRNA target sequence
cgattacaattgtaaatttacctac

SEQ ID NO: 189857 - DNA, 25 bp, Artificial sequence
  SiRNA target sequence
gattacaattgtaaatttacctaca

SEQ ID NO: 189858 - DNA, 25 bp, Artificial sequence
  SiRNA target sequence
attacaattgtaaatttacctacaa

SEQ ID NO: 189859 - DNA, 25 bp, Artificial sequence
  SiRNA target sequence
ttacaattgtaaatttacctacaaa

SEQ ID NO: 189860 - DNA, 25 bp, Artificial sequence
  SiRNA target sequence
tacaattgtaaatttacctacaaat

SEQ ID NO: 189861 - DNA, 25 bp, Artificial sequence
  SiRNA target sequence
acaattgtaaatttacctacaaatc

SEQ ID NO: 189862 - DNA, 25 bp, Artificial sequence
  SiRNA target sequence
caattgtaaatttacctacaaatct

SEQ ID NO: 189863 - DNA, 25 bp, Artificial sequence
  SiRNA target sequence
aattgtaaatttacctacaaatcta

SEQ ID NO: 189864 - DNA, 25 bp, Artificial sequence
  SiRNA target sequence
attgtaaatttacctacaaatctag

SEQ ID NO: 189865 - DNA, 25 bp, Artificial sequence
  SiRNA target sequence
ttgtaaatttacctacaaatctaga

SEQ ID NO: 189866 - DNA, 25 bp, Artificial sequence
  SiRNA target sequence
tgtaaatttacctacaaatctagat

SEQ ID NO: 189867 - DNA, 25 bp, Artificial sequence
  SiRNA target sequence
gtaaatttacctacaaatctagata

SEQ ID NO: 189868 - DNA, 25 bp, Artificial sequence
  SiRNA target sequence
taaatttacctacaaatctagataa

SEQ ID NO: 189869 - DNA, 25 bp, Artificial sequence
  SiRNA target sequence
aaatttacctacaaatctagataaa

SEQ ID NO: 189870 - DNA, 25 bp, Artificial sequence
  SiRNA target sequence
aatttacctacaaatctagataaag

SEQ ID NO: 189871 - DNA, 25 bp, Artificial sequence
  SiRNA target sequence
atttacctacaaatctagataaaga

SEQ ID NO: 189872 - DNA, 25 bp, Artificial sequence
  SiRNA target sequence
tttacctacaaatctagataaagac

SEQ ID NO: 189873 - DNA, 25 bp, Artificial sequence
  SiRNA target sequence
ttacctacaaatctagataaagaca

SEQ ID NO: 189874 - DNA, 25 bp, Artificial sequence
  SiRNA target sequence
tacctacaaatctagataaagacat

SEQ ID NO: 189875 - DNA, 25 bp, Artificial sequence
  SiRNA target sequence
acctacaaatctagataaagacatt

SEQ ID NO: 189876 - DNA, 25 bp, Artificial sequence
  SiRNA target sequence
cctacaaatctagataaagacattt

SEQ ID NO: 189877 - DNA, 25 bp, Artificial sequence
  SiRNA target sequence
ctacaaatctagataaagacatttc

SEQ ID NO: 189878 - DNA, 25 bp, Artificial sequence
  SiRNA target sequence
tacaaatctagataaagacatttca

SEQ ID NO: 189879 - DNA, 25 bp, Artificial sequence
  SiRNA target sequence
acaaatctagataaagacatttcac

SEQ ID NO: 189880 - DNA, 25 bp, Artificial sequence
  SiRNA target sequence
caaatctagataaagacatttcaca

SEQ ID NO: 189881 - DNA, 25 bp, Artificial sequence
  SiRNA target sequence
aaatctagataaagacatttcacat

SEQ ID NO: 189882 - DNA, 25 bp, Artificial sequence
  SiRNA target sequence
aatctagataaagacatttcacata

SEQ ID NO: 189883 - DNA, 25 bp, Artificial sequence
  SiRNA target sequence
atctagataaagacatttcacatag

SEQ ID NO: 189884 - DNA, 25 bp, Artificial sequence
  SiRNA target sequence
tctagataaagacatttcacataga

SEQ ID NO: 189885 - DNA, 25 bp, Artificial sequence
  SiRNA target sequence
ctagataaagacatttcacatagat

SEQ ID NO: 189886 - DNA, 25 bp, Artificial sequence
  SiRNA target sequence
tagataaagacatttcacatagata

SEQ ID NO: 189887 - DNA, 25 bp, Artificial sequence
  SiRNA target sequence
agataaagacatttcacatagatat

SEQ ID NO: 189888 - DNA, 25 bp, Artificial sequence
  SiRNA target sequence
gataaagacatttcacatagatatt

SEQ ID NO: 189889 - DNA, 25 bp, Artificial sequence
  SiRNA target sequence
ataaagacatttcacatagatattc

SEQ ID NO: 189890 - DNA, 25 bp, Artificial sequence
  SiRNA target sequence
taaagacatttcacatagatattcg

SEQ ID NO: 189891 - DNA, 25 bp, Artificial sequence
  SiRNA target sequence
aaagacatttcacatagatattcgg

SEQ ID NO: 189892 - DNA, 25 bp, Artificial sequence
  SiRNA target sequence
aagacatttcacatagatattcggc

SEQ ID NO: 189893 - DNA, 25 bp, Artificial sequence
  SiRNA target sequence
agacatttcacatagatattcggca

SEQ ID NO: 189894 - DNA, 25 bp, Artificial sequence
  SiRNA target sequence
gacatttcacatagatattcggcaa

SEQ ID NO: 189895 - DNA, 25 bp, Artificial sequence
  SiRNA target sequence
acatttcacatagatattcggcaaa

SEQ ID NO: 189896 - DNA, 25 bp, Artificial sequence
  SiRNA target sequence
catttcacatagatattcggcaaat

SEQ ID NO: 189897 - DNA, 25 bp, Artificial sequence
  SiRNA target sequence
atttcacatagatattcggcaaatg

SEQ ID NO: 189898 - DNA, 25 bp, Artificial sequence
  SiRNA target sequence
tttcacatagatattcggcaaatgg

SEQ ID NO: 189899 - DNA, 25 bp, Artificial sequence
  SiRNA target sequence
ttcacatagatattcggcaaatggt

SEQ ID NO: 189900 - DNA, 25 bp, Artificial sequence
  SiRNA target sequence
tcacatagatattcggcaaatggtt

SEQ ID NO: 189901 - DNA, 25 bp, Artificial sequence
  SiRNA target sequence
cacatagatattcggcaaatggttt

SEQ ID NO: 189902 - DNA, 25 bp, Artificial sequence
  SiRNA target sequence
acatagatattcggcaaatggtttt

SEQ ID NO: 189903 - DNA, 25 bp, Artificial sequence
  SiRNA target sequence
catagatattcggcaaatggtttta

SEQ ID NO: 189904 - DNA, 25 bp, Artificial sequence
  SiRNA target sequence
atagatattcggcaaatggttttaa

SEQ ID NO: 189905 - DNA, 25 bp, Artificial sequence
  SiRNA target sequence
tagatattcggcaaatggttttaaa

SEQ ID NO: 189906 - DNA, 25 bp, Artificial sequence
  SiRNA target sequence
agatattcggcaaatggttttaaac

SEQ ID NO: 189907 - DNA, 25 bp, Artificial sequence
  SiRNA target sequence
gatattcggcaaatggttttaaact

SEQ ID NO: 189908 - DNA, 25 bp, Artificial sequence
  SiRNA target sequence
atattcggcaaatggttttaaactt

SEQ ID NO: 189909 - DNA, 25 bp, Artificial sequence
  SiRNA target sequence
tattcggcaaatggttttaaacttc

SEQ ID NO: 189910 - DNA, 25 bp, Artificial sequence
  SiRNA target sequence
attcggcaaatggttttaaacttca

SEQ ID NO: 189911 - DNA, 25 bp, Artificial sequence
  SiRNA target sequence
ttcggcaaatggttttaaacttcac

SEQ ID NO: 189912 - DNA, 25 bp, Artificial sequence
  SiRNA target sequence
tcggcaaatggttttaaacttcaca

SEQ ID NO: 189913 - DNA, 25 bp, Artificial sequence
  SiRNA target sequence
cggcaaatggttttaaacttcacag

SEQ ID NO: 189914 - DNA, 25 bp, Artificial sequence
  SiRNA target sequence
ggcaaatggttttaaacttcacaga

SEQ ID NO: 189915 - DNA, 25 bp, Artificial sequence
  SiRNA target sequence
gcaaatggttttaaacttcacagat

SEQ ID NO: 189916 - DNA, 25 bp, Artificial sequence
  SiRNA target sequence
caaatggttttaaacttcacagatt

SEQ ID NO: 189917 - DNA, 25 bp, Artificial sequence
  SiRNA target sequence
aaatggttttaaacttcacagatta

SEQ ID NO: 189918 - DNA, 25 bp, Artificial sequence
  SiRNA target sequence
aatggttttaaacttcacagattac

SEQ ID NO: 189919 - DNA, 25 bp, Artificial sequence
  SiRNA target sequence
atggttttaaacttcacagattacc

SEQ ID NO: 189920 - DNA, 25 bp, Artificial sequence
  SiRNA target sequence
tggttttaaacttcacagattacca

SEQ ID NO: 189921 - DNA, 25 bp, Artificial sequence
  SiRNA target sequence
ggttttaaacttcacagattaccaa

SEQ ID NO: 189922 - DNA, 25 bp, Artificial sequence
  SiRNA target sequence
gttttaaacttcacagattaccaat

SEQ ID NO: 189923 - DNA, 25 bp, Artificial sequence
  SiRNA target sequence
ttttaaacttcacagattaccaatc

SEQ ID NO: 189924 - DNA, 25 bp, Artificial sequence
  SiRNA target sequence
tttaaacttcacagattaccaatcc

SEQ ID NO: 189925 - DNA, 25 bp, Artificial sequence
  SiRNA target sequence
ttaaacttcacagattaccaatccc

SEQ ID NO: 189926 - DNA, 25 bp, Artificial sequence
  SiRNA target sequence
taaacttcacagattaccaatccct

SEQ ID NO: 189927 - DNA, 25 bp, Artificial sequence
  SiRNA target sequence
aaacttcacagattaccaatcccta

SEQ ID NO: 189928 - DNA, 25 bp, Artificial sequence
  SiRNA target sequence
aacttcacagattaccaatccctaa

SEQ ID NO: 189929 - DNA, 25 bp, Artificial sequence
  SiRNA target sequence
acttcacagattaccaatccctaaa

SEQ ID NO: 189930 - DNA, 25 bp, Artificial sequence
  SiRNA target sequence
cttcacagattaccaatccctaaat

SEQ ID NO: 189931 - DNA, 25 bp, Artificial sequence
  SiRNA target sequence
ttcacagattaccaatccctaaata

SEQ ID NO: 189932 - DNA, 25 bp, Artificial sequence
  SiRNA target sequence
tcacagattaccaatccctaaatat

SEQ ID NO: 189933 - DNA, 25 bp, Artificial sequence
  SiRNA target sequence
cacagattaccaatccctaaatatg

SEQ ID NO: 189934 - DNA, 25 bp, Artificial sequence
  SiRNA target sequence
acagattaccaatccctaaatatgg

SEQ ID NO: 189935 - DNA, 25 bp, Artificial sequence
  SiRNA target sequence
cagattaccaatccctaaatatggt

SEQ ID NO: 189936 - DNA, 25 bp, Artificial sequence
  SiRNA target sequence
agattaccaatccctaaatatggta

SEQ ID NO: 189937 - DNA, 25 bp, Artificial sequence
  SiRNA target sequence
gattaccaatccctaaatatggtaa

SEQ ID NO: 189938 - DNA, 25 bp, Artificial sequence
  SiRNA target sequence
attaccaatccctaaatatggtaag

SEQ ID NO: 189939 - DNA, 25 bp, Artificial sequence
  SiRNA target sequence
ttaccaatccctaaatatggtaagg

SEQ ID NO: 189940 - DNA, 25 bp, Artificial sequence
  SiRNA target sequence
taccaatccctaaatatggtaaggt

SEQ ID NO: 189941 - DNA, 25 bp, Artificial sequence
  SiRNA target sequence
accaatccctaaatatggtaaggtt

SEQ ID NO: 189942 - DNA, 25 bp, Artificial sequence
  SiRNA target sequence
ccaatccctaaatatggtaaggttt

SEQ ID NO: 189943 - DNA, 25 bp, Artificial sequence
  SiRNA target sequence
caatccctaaatatggtaaggtttt

SEQ ID NO: 189944 - DNA, 25 bp, Artificial sequence
  SiRNA target sequence
aatccctaaatatggtaaggtttta

SEQ ID NO: 189945 - DNA, 25 bp, Artificial sequence
  SiRNA target sequence
atccctaaatatggtaaggttttag

SEQ ID NO: 189946 - DNA, 25 bp, Artificial sequence
  SiRNA target sequence
tccctaaatatggtaaggttttagg

SEQ ID NO: 189947 - DNA, 25 bp, Artificial sequence
  SiRNA target sequence
ccctaaatatggtaaggttttaggg

SEQ ID NO: 189948 - DNA, 25 bp, Artificial sequence
  SiRNA target sequence
cctaaatatggtaaggttttagggc

SEQ ID NO: 189949 - DNA, 25 bp, Artificial sequence
  SiRNA target sequence
ctaaatatggtaaggttttagggct

SEQ ID NO: 189950 - DNA, 25 bp, Artificial sequence
  SiRNA target sequence
taaatatggtaaggttttagggcta

SEQ ID NO: 189951 - DNA, 25 bp, Artificial sequence
  SiRNA target sequence
aaatatggtaaggttttagggctag

SEQ ID NO: 189952 - DNA, 25 bp, Artificial sequence
  SiRNA target sequence
aatatggtaaggttttagggctagt

SEQ ID NO: 189953 - DNA, 25 bp, Artificial sequence
  SiRNA target sequence
atatggtaaggttttagggctagta

SEQ ID NO: 189954 - DNA, 25 bp, Artificial sequence
  SiRNA target sequence
tatggtaaggttttagggctagtag

SEQ ID NO: 189955 - DNA, 25 bp, Artificial sequence
  SiRNA target sequence
atggtaaggttttagggctagtagg

SEQ ID NO: 189956 - DNA, 25 bp, Artificial sequence
  SiRNA target sequence
tggtaaggttttagggctagtaggc

SEQ ID NO: 189957 - DNA, 25 bp, Artificial sequence
  SiRNA target sequence
ggtaaggttttagggctagtaggca

SEQ ID NO: 189958 - DNA, 25 bp, Artificial sequence
  SiRNA target sequence
gtaaggttttagggctagtaggcac

SEQ ID NO: 189959 - DNA, 25 bp, Artificial sequence
  SiRNA target sequence
taaggttttagggctagtaggcact

SEQ ID NO: 189960 - DNA, 25 bp, Artificial sequence
  SiRNA target sequence
aaggttttagggctagtaggcacta

SEQ ID NO: 189961 - DNA, 25 bp, Artificial sequence
  SiRNA target sequence
aggttttagggctagtaggcactaa

SEQ ID NO: 189962 - DNA, 25 bp, Artificial sequence
  SiRNA target sequence
ggttttagggctagtaggcactaat

SEQ ID NO: 189963 - DNA, 25 bp, Artificial sequence
  SiRNA target sequence
gttttagggctagtaggcactaatg

SEQ ID NO: 189964 - DNA, 25 bp, Artificial sequence
  SiRNA target sequence
ttttagggctagtaggcactaatgg

SEQ ID NO: 189965 - DNA, 25 bp, Artificial sequence
  SiRNA target sequence
tttagggctagtaggcactaatggt

SEQ ID NO: 189966 - DNA, 25 bp, Artificial sequence
  SiRNA target sequence
ttagggctagtaggcactaatggta

SEQ ID NO: 189967 - DNA, 25 bp, Artificial sequence
  SiRNA target sequence
tagggctagtaggcactaatggtat

SEQ ID NO: 189968 - DNA, 25 bp, Artificial sequence
  SiRNA target sequence
agggctagtaggcactaatggtata

SEQ ID NO: 189969 - DNA, 25 bp, Artificial sequence
  SiRNA target sequence
gggctagtaggcactaatggtatag

SEQ ID NO: 189970 - DNA, 25 bp, Artificial sequence
  SiRNA target sequence
ggctagtaggcactaatggtatagg

SEQ ID NO: 189971 - DNA, 25 bp, Artificial sequence
  SiRNA target sequence
gctagtaggcactaatggtatagga

SEQ ID NO: 189972 - DNA, 25 bp, Artificial sequence
  SiRNA target sequence
ctagtaggcactaatggtataggaa

SEQ ID NO: 189973 - DNA, 25 bp, Artificial sequence
  SiRNA target sequence
tagtaggcactaatggtataggaaa

SEQ ID NO: 189974 - DNA, 25 bp, Artificial sequence
  SiRNA target sequence
agtaggcactaatggtataggaaaa

SEQ ID NO: 189975 - DNA, 25 bp, Artificial sequence
  SiRNA target sequence
gtaggcactaatggtataggaaaaa

SEQ ID NO: 189976 - DNA, 25 bp, Artificial sequence
  SiRNA target sequence
taggcactaatggtataggaaaaag

SEQ ID NO: 189977 - DNA, 25 bp, Artificial sequence
  SiRNA target sequence
aggcactaatggtataggaaaaagt

SEQ ID NO: 189978 - DNA, 25 bp, Artificial sequence
  SiRNA target sequence
ggcactaatggtataggaaaaagta

SEQ ID NO: 189979 - DNA, 25 bp, Artificial sequence
  SiRNA target sequence
gcactaatggtataggaaaaagtac

SEQ ID NO: 189980 - DNA, 25 bp, Artificial sequence
  SiRNA target sequence
cactaatggtataggaaaaagtact

SEQ ID NO: 189981 - DNA, 25 bp, Artificial sequence
  SiRNA target sequence
actaatggtataggaaaaagtactg

SEQ ID NO: 189982 - DNA, 25 bp, Artificial sequence
  SiRNA target sequence
ctaatggtataggaaaaagtactgc

SEQ ID NO: 189983 - DNA, 25 bp, Artificial sequence
  SiRNA target sequence
taatggtataggaaaaagtactgca

SEQ ID NO: 189984 - DNA, 25 bp, Artificial sequence
  SiRNA target sequence
aatggtataggaaaaagtactgcac

SEQ ID NO: 189985 - DNA, 25 bp, Artificial sequence
  SiRNA target sequence
atggtataggaaaaagtactgcact

SEQ ID NO: 189986 - DNA, 25 bp, Artificial sequence
  SiRNA target sequence
tggtataggaaaaagtactgcactt

SEQ ID NO: 189987 - DNA, 25 bp, Artificial sequence
  SiRNA target sequence
ggtataggaaaaagtactgcactta

SEQ ID NO: 189988 - DNA, 25 bp, Artificial sequence
  SiRNA target sequence
gtataggaaaaagtactgcacttaa

SEQ ID NO: 189989 - DNA, 25 bp, Artificial sequence
  SiRNA target sequence
tataggaaaaagtactgcacttaaa

SEQ ID NO: 189990 - DNA, 25 bp, Artificial sequence
  SiRNA target sequence
ataggaaaaagtactgcacttaaaa

SEQ ID NO: 189991 - DNA, 25 bp, Artificial sequence
  SiRNA target sequence
taggaaaaagtactgcacttaaaat

SEQ ID NO: 189992 - DNA, 25 bp, Artificial sequence
  SiRNA target sequence
aggaaaaagtactgcacttaaaata

SEQ ID NO: 189993 - DNA, 25 bp, Artificial sequence
  SiRNA target sequence
ggaaaaagtactgcacttaaaatat

SEQ ID NO: 189994 - DNA, 25 bp, Artificial sequence
  SiRNA target sequence
gaaaaagtactgcacttaaaatatt

SEQ ID NO: 189995 - DNA, 25 bp, Artificial sequence
  SiRNA target sequence
aaaaagtactgcacttaaaatatta

SEQ ID NO: 189996 - DNA, 25 bp, Artificial sequence
  SiRNA target sequence
aaaagtactgcacttaaaatattat

SEQ ID NO: 189997 - DNA, 25 bp, Artificial sequence
  SiRNA target sequence
aaagtactgcacttaaaatattatc

SEQ ID NO: 189998 - DNA, 25 bp, Artificial sequence
  SiRNA target sequence
aagtactgcacttaaaatattatcg

SEQ ID NO: 189999 - DNA, 25 bp, Artificial sequence
  SiRNA target sequence
agtactgcacttaaaatattatcgg

SEQ ID NO: 190000 - DNA, 25 bp, Artificial sequence
  SiRNA target sequence
gtactgcacttaaaatattatcggg

SEQ ID NO: 190001 - DNA, 25 bp, Artificial sequence
  SiRNA target sequence
tactgcacttaaaatattatcgggc

SEQ ID NO: 190002 - DNA, 25 bp, Artificial sequence
  SiRNA target sequence
actgcacttaaaatattatcgggca

SEQ ID NO: 190003 - DNA, 25 bp, Artificial sequence
  SiRNA target sequence
ctgcacttaaaatattatcgggcaa

SEQ ID NO: 190004 - DNA, 25 bp, Artificial sequence
  SiRNA target sequence
tgcacttaaaatattatcgggcaat

SEQ ID NO: 190005 - DNA, 25 bp, Artificial sequence
  SiRNA target sequence
gcacttaaaatattatcgggcaatc

SEQ ID NO: 190006 - DNA, 25 bp, Artificial sequence
  SiRNA target sequence
cacttaaaatattatcgggcaatct

SEQ ID NO: 190007 - DNA, 25 bp, Artificial sequence
  SiRNA target sequence
acttaaaatattatcgggcaatctt

SEQ ID NO: 190008 - DNA, 25 bp, Artificial sequence
  SiRNA target sequence
cttaaaatattatcgggcaatctta

SEQ ID NO: 190009 - DNA, 25 bp, Artificial sequence
  SiRNA target sequence
ttaaaatattatcgggcaatcttaa

SEQ ID NO: 190010 - DNA, 25 bp, Artificial sequence
  SiRNA target sequence
taaaatattatcgggcaatcttaaa

SEQ ID NO: 190011 - DNA, 25 bp, Artificial sequence
  SiRNA target sequence
aaaatattatcgggcaatcttaaac

SEQ ID NO: 190012 - DNA, 25 bp, Artificial sequence
  SiRNA target sequence
aaatattatcgggcaatcttaaacc

SEQ ID NO: 190013 - DNA, 25 bp, Artificial sequence
  SiRNA target sequence
aatattatcgggcaatcttaaacca

SEQ ID NO: 190014 - DNA, 25 bp, Artificial sequence
  SiRNA target sequence
atattatcgggcaatcttaaaccaa

SEQ ID NO: 190015 - DNA, 25 bp, Artificial sequence
  SiRNA target sequence
tattatcgggcaatcttaaaccaaa

SEQ ID NO: 190016 - DNA, 25 bp, Artificial sequence
  SiRNA target sequence
attatcgggcaatcttaaaccaaac

SEQ ID NO: 190017 - DNA, 25 bp, Artificial sequence
  SiRNA target sequence
ttatcgggcaatcttaaaccaaact

SEQ ID NO: 190018 - DNA, 25 bp, Artificial sequence
  SiRNA target sequence
tatcgggcaatcttaaaccaaactt

SEQ ID NO: 190019 - DNA, 25 bp, Artificial sequence
  SiRNA target sequence
atcgggcaatcttaaaccaaactta

SEQ ID NO: 190020 - DNA, 25 bp, Artificial sequence
  SiRNA target sequence
tcgggcaatcttaaaccaaacttag

SEQ ID NO: 190021 - DNA, 25 bp, Artificial sequence
  SiRNA target sequence
cgggcaatcttaaaccaaacttagg

SEQ ID NO: 190022 - DNA, 25 bp, Artificial sequence
  SiRNA target sequence
gggcaatcttaaaccaaacttagga

SEQ ID NO: 190023 - DNA, 25 bp, Artificial sequence
  SiRNA target sequence
ggcaatcttaaaccaaacttaggaa

SEQ ID NO: 190024 - DNA, 25 bp, Artificial sequence
  SiRNA target sequence
gcaatcttaaaccaaacttaggaaa

SEQ ID NO: 190025 - DNA, 25 bp, Artificial sequence
  SiRNA target sequence
caatcttaaaccaaacttaggaaag

SEQ ID NO: 190026 - DNA, 25 bp, Artificial sequence
  SiRNA target sequence
aatcttaaaccaaacttaggaaagt

SEQ ID NO: 190027 - DNA, 25 bp, Artificial sequence
  SiRNA target sequence
atcttaaaccaaacttaggaaagtt

SEQ ID NO: 190028 - DNA, 25 bp, Artificial sequence
  SiRNA target sequence
tcttaaaccaaacttaggaaagttc

SEQ ID NO: 190029 - DNA, 25 bp, Artificial sequence
  SiRNA target sequence
cttaaaccaaacttaggaaagttcg

SEQ ID NO: 190030 - DNA, 25 bp, Artificial sequence
  SiRNA target sequence
ttaaaccaaacttaggaaagttcga

SEQ ID NO: 190031 - DNA, 25 bp, Artificial sequence
  SiRNA target sequence
taaaccaaacttaggaaagttcgac

SEQ ID NO: 190032 - DNA, 25 bp, Artificial sequence
  SiRNA target sequence
aaaccaaacttaggaaagttcgacg

SEQ ID NO: 190033 - DNA, 25 bp, Artificial sequence
  SiRNA target sequence
aaccaaacttaggaaagttcgacgt

SEQ ID NO: 190034 - DNA, 25 bp, Artificial sequence
  SiRNA target sequence
accaaacttaggaaagttcgacgtt

SEQ ID NO: 190035 - DNA, 25 bp, Artificial sequence
  SiRNA target sequence
ccaaacttaggaaagttcgacgtta

SEQ ID NO: 190036 - DNA, 25 bp, Artificial sequence
  SiRNA target sequence
caaacttaggaaagttcgacgttac

SEQ ID NO: 190037 - DNA, 25 bp, Artificial sequence
  SiRNA target sequence
aaacttaggaaagttcgacgttacg

SEQ ID NO: 190038 - DNA, 25 bp, Artificial sequence
  SiRNA target sequence
aacttaggaaagttcgacgttacgc

SEQ ID NO: 190039 - DNA, 25 bp, Artificial sequence
  SiRNA target sequence
acttaggaaagttcgacgttacgcc

SEQ ID NO: 190040 - DNA, 25 bp, Artificial sequence
  SiRNA target sequence
cttaggaaagttcgacgttacgccc

SEQ ID NO: 190041 - DNA, 25 bp, Artificial sequence
  SiRNA target sequence
ttaggaaagttcgacgttacgcccg

SEQ ID NO: 190042 - DNA, 25 bp, Artificial sequence
  SiRNA target sequence
taggaaagttcgacgttacgcccga

SEQ ID NO: 190043 - DNA, 25 bp, Artificial sequence
  SiRNA target sequence
aggaaagttcgacgttacgcccgac

SEQ ID NO: 190044 - DNA, 25 bp, Artificial sequence
  SiRNA target sequence
ggaaagttcgacgttacgcccgact

SEQ ID NO: 190045 - DNA, 25 bp, Artificial sequence
  SiRNA target sequence
gaaagttcgacgttacgcccgactg

SEQ ID NO: 190046 - DNA, 25 bp, Artificial sequence
  SiRNA target sequence
aaagttcgacgttacgcccgactgg

SEQ ID NO: 190047 - DNA, 25 bp, Artificial sequence
  SiRNA target sequence
aagttcgacgttacgcccgactggg

SEQ ID NO: 190048 - DNA, 25 bp, Artificial sequence
  SiRNA target sequence
agttcgacgttacgcccgactgggc

SEQ ID NO: 190049 - DNA, 25 bp, Artificial sequence
  SiRNA target sequence
gttcgacgttacgcccgactgggca

SEQ ID NO: 190050 - DNA, 25 bp, Artificial sequence
  SiRNA target sequence
ttcgacgttacgcccgactgggcag

SEQ ID NO: 190051 - DNA, 25 bp, Artificial sequence
  SiRNA target sequence
tcgacgttacgcccgactgggcagc

SEQ ID NO: 190052 - DNA, 25 bp, Artificial sequence
  SiRNA target sequence
cgacgttacgcccgactgggcagca

SEQ ID NO: 190053 - DNA, 25 bp, Artificial sequence
  SiRNA target sequence
gacgttacgcccgactgggcagcaa

SEQ ID NO: 190054 - DNA, 25 bp, Artificial sequence
  SiRNA target sequence
acgttacgcccgactgggcagcaat

SEQ ID NO: 190055 - DNA, 25 bp, Artificial sequence
  SiRNA target sequence
cgttacgcccgactgggcagcaatt

SEQ ID NO: 190056 - DNA, 25 bp, Artificial sequence
  SiRNA target sequence
gttacgcccgactgggcagcaattc

SEQ ID NO: 190057 - DNA, 25 bp, Artificial sequence
  SiRNA target sequence
ttacgcccgactgggcagcaattct

SEQ ID NO: 190058 - DNA, 25 bp, Artificial sequence
  SiRNA target sequence
tacgcccgactgggcagcaattcta

SEQ ID NO: 190059 - DNA, 25 bp, Artificial sequence
  SiRNA target sequence
acgcccgactgggcagcaattctaa

SEQ ID NO: 190060 - DNA, 25 bp, Artificial sequence
  SiRNA target sequence
cgcccgactgggcagcaattctaaa

SEQ ID NO: 190061 - DNA, 25 bp, Artificial sequence
  SiRNA target sequence
gcccgactgggcagcaattctaaat

SEQ ID NO: 190062 - DNA, 25 bp, Artificial sequence
  SiRNA target sequence
cccgactgggcagcaattctaaata

SEQ ID NO: 190063 - DNA, 25 bp, Artificial sequence
  SiRNA target sequence
ccgactgggcagcaattctaaataa

SEQ ID NO: 190064 - DNA, 25 bp, Artificial sequence
  SiRNA target sequence
cgactgggcagcaattctaaataat

SEQ ID NO: 190065 - DNA, 25 bp, Artificial sequence
  SiRNA target sequence
gactgggcagcaattctaaataatt

SEQ ID NO: 190066 - DNA, 25 bp, Artificial sequence
  SiRNA target sequence
actgggcagcaattctaaataatta

SEQ ID NO: 190067 - DNA, 25 bp, Artificial sequence
  SiRNA target sequence
ctgggcagcaattctaaataattat

SEQ ID NO: 190068 - DNA, 25 bp, Artificial sequence
  SiRNA target sequence
tgggcagcaattctaaataattata

SEQ ID NO: 190069 - DNA, 25 bp, Artificial sequence
  SiRNA target sequence
gggcagcaattctaaataattataa

SEQ ID NO: 190070 - DNA, 25 bp, Artificial sequence
  SiRNA target sequence
ggcagcaattctaaataattataaa

SEQ ID NO: 190071 - DNA, 25 bp, Artificial sequence
  SiRNA target sequence
gcagcaattctaaataattataaag

SEQ ID NO: 190072 - DNA, 25 bp, Artificial sequence
  SiRNA target sequence
cagcaattctaaataattataaagg

SEQ ID NO: 190073 - DNA, 25 bp, Artificial sequence
  SiRNA target sequence
agcaattctaaataattataaagga

SEQ ID NO: 190074 - DNA, 25 bp, Artificial sequence
  SiRNA target sequence
gcaattctaaataattataaaggat

SEQ ID NO: 190075 - DNA, 25 bp, Artificial sequence
  SiRNA target sequence
caattctaaataattataaaggatc

SEQ ID NO: 190076 - DNA, 25 bp, Artificial sequence
  SiRNA target sequence
aattctaaataattataaaggatct

SEQ ID NO: 190077 - DNA, 25 bp, Artificial sequence
  SiRNA target sequence
attctaaataattataaaggatctg

SEQ ID NO: 190078 - DNA, 25 bp, Artificial sequence
  SiRNA target sequence
ttctaaataattataaaggatctga

SEQ ID NO: 190079 - DNA, 25 bp, Artificial sequence
  SiRNA target sequence
tctaaataattataaaggatctgaa

SEQ ID NO: 190080 - DNA, 25 bp, Artificial sequence
  SiRNA target sequence
ctaaataattataaaggatctgaac

SEQ ID NO: 190081 - DNA, 25 bp, Artificial sequence
  SiRNA target sequence
taaataattataaaggatctgaact

SEQ ID NO: 190082 - DNA, 25 bp, Artificial sequence
  SiRNA target sequence
aaataattataaaggatctgaactt

SEQ ID NO: 190083 - DNA, 25 bp, Artificial sequence
  SiRNA target sequence
aataattataaaggatctgaacttc

SEQ ID NO: 190084 - DNA, 25 bp, Artificial sequence
  SiRNA target sequence
ataattataaaggatctgaacttca

SEQ ID NO: 190085 - DNA, 25 bp, Artificial sequence
  SiRNA target sequence
taattataaaggatctgaacttcat

SEQ ID NO: 190086 - DNA, 25 bp, Artificial sequence
  SiRNA target sequence
aattataaaggatctgaacttcatg

SEQ ID NO: 190087 - DNA, 25 bp, Artificial sequence
  SiRNA target sequence
attataaaggatctgaacttcatgg

SEQ ID NO: 190088 - DNA, 25 bp, Artificial sequence
  SiRNA target sequence
ttataaaggatctgaacttcatgga

SEQ ID NO: 190089 - DNA, 25 bp, Artificial sequence
  SiRNA target sequence
tataaaggatctgaacttcatggat

SEQ ID NO: 190090 - DNA, 25 bp, Artificial sequence
  SiRNA target sequence
ataaaggatctgaacttcatggatt

SEQ ID NO: 190091 - DNA, 25 bp, Artificial sequence
  SiRNA target sequence
taaaggatctgaacttcatggattt

SEQ ID NO: 190092 - DNA, 25 bp, Artificial sequence
  SiRNA target sequence
aaaggatctgaacttcatggatttt

SEQ ID NO: 190093 - DNA, 25 bp, Artificial sequence
  SiRNA target sequence
aaggatctgaacttcatggattttt

SEQ ID NO: 190094 - DNA, 25 bp, Artificial sequence
  SiRNA target sequence
aggatctgaacttcatggatttttt

SEQ ID NO: 190095 - DNA, 25 bp, Artificial sequence
  SiRNA target sequence
ggatctgaacttcatggatttttta

SEQ ID NO: 190096 - DNA, 25 bp, Artificial sequence
  SiRNA target sequence
gatctgaacttcatggattttttac

SEQ ID NO: 190097 - DNA, 25 bp, Artificial sequence
  SiRNA target sequence
atctgaacttcatggattttttact

SEQ ID NO: 190098 - DNA, 25 bp, Artificial sequence
  SiRNA target sequence
tctgaacttcatggattttttacta

SEQ ID NO: 190099 - DNA, 25 bp, Artificial sequence
  SiRNA target sequence
ctgaacttcatggattttttactaa

SEQ ID NO: 190100 - DNA, 25 bp, Artificial sequence
  SiRNA target sequence
tgaacttcatggattttttactaaa

SEQ ID NO: 190101 - DNA, 25 bp, Artificial sequence
  SiRNA target sequence
gaacttcatggattttttactaaaa

SEQ ID NO: 190102 - DNA, 25 bp, Artificial sequence
  SiRNA target sequence
aacttcatggattttttactaaaat

SEQ ID NO: 190103 - DNA, 25 bp, Artificial sequence
  SiRNA target sequence
acttcatggattttttactaaaatt

SEQ ID NO: 190104 - DNA, 25 bp, Artificial sequence
  SiRNA target sequence
cttcatggattttttactaaaattt

SEQ ID NO: 190105 - DNA, 25 bp, Artificial sequence
  SiRNA target sequence
ttcatggattttttactaaaatttt

SEQ ID NO: 190106 - DNA, 25 bp, Artificial sequence
  SiRNA target sequence
tcatggattttttactaaaatttta

SEQ ID NO: 190107 - DNA, 25 bp, Artificial sequence
  SiRNA target sequence
catggattttttactaaaattttag

SEQ ID NO: 190108 - DNA, 25 bp, Artificial sequence
  SiRNA target sequence
atggattttttactaaaattttaga

SEQ ID NO: 190109 - DNA, 25 bp, Artificial sequence
  SiRNA target sequence
tggattttttactaaaattttagaa

SEQ ID NO: 190110 - DNA, 25 bp, Artificial sequence
  SiRNA target sequence
ggattttttactaaaattttagaag

SEQ ID NO: 190111 - DNA, 25 bp, Artificial sequence
  SiRNA target sequence
gattttttactaaaattttagaagg

SEQ ID NO: 190112 - DNA, 25 bp, Artificial sequence
  SiRNA target sequence
attttttactaaaattttagaaggg

SEQ ID NO: 190113 - DNA, 25 bp, Artificial sequence
  SiRNA target sequence
ttttttactaaaattttagaagggt

SEQ ID NO: 190114 - DNA, 25 bp, Artificial sequence
  SiRNA target sequence
tttttactaaaattttagaagggtc

SEQ ID NO: 190115 - DNA, 25 bp, Artificial sequence
  SiRNA target sequence
ttttactaaaattttagaagggtct

SEQ ID NO: 190116 - DNA, 25 bp, Artificial sequence
  SiRNA target sequence
tttactaaaattttagaagggtcta

SEQ ID NO: 190117 - DNA, 25 bp, Artificial sequence
  SiRNA target sequence
ttactaaaattttagaagggtctat

SEQ ID NO: 190118 - DNA, 25 bp, Artificial sequence
  SiRNA target sequence
tactaaaattttagaagggtctatt

SEQ ID NO: 190119 - DNA, 25 bp, Artificial sequence
  SiRNA target sequence
actaaaattttagaagggtctatta

SEQ ID NO: 190120 - DNA, 25 bp, Artificial sequence
  SiRNA target sequence
ctaaaattttagaagggtctattaa

SEQ ID NO: 190121 - DNA, 25 bp, Artificial sequence
  SiRNA target sequence
taaaattttagaagggtctattaaa

SEQ ID NO: 190122 - DNA, 25 bp, Artificial sequence
  SiRNA target sequence
aaaattttagaagggtctattaaag

SEQ ID NO: 190123 - DNA, 25 bp, Artificial sequence
  SiRNA target sequence
aaattttagaagggtctattaaagc

SEQ ID NO: 190124 - DNA, 25 bp, Artificial sequence
  SiRNA target sequence
aattttagaagggtctattaaagct

SEQ ID NO: 190125 - DNA, 25 bp, Artificial sequence
  SiRNA target sequence
attttagaagggtctattaaagcta

SEQ ID NO: 190126 - DNA, 25 bp, Artificial sequence
  SiRNA target sequence
ttttagaagggtctattaaagctat

SEQ ID NO: 190127 - DNA, 25 bp, Artificial sequence
  SiRNA target sequence
tttagaagggtctattaaagctatt

SEQ ID NO: 190128 - DNA, 25 bp, Artificial sequence
  SiRNA target sequence
ttagaagggtctattaaagctattt

SEQ ID NO: 190129 - DNA, 25 bp, Artificial sequence
  SiRNA target sequence
tagaagggtctattaaagctatttc

SEQ ID NO: 190130 - DNA, 25 bp, Artificial sequence
  SiRNA target sequence
agaagggtctattaaagctatttct

SEQ ID NO: 190131 - DNA, 25 bp, Artificial sequence
  SiRNA target sequence
gaagggtctattaaagctatttcta

SEQ ID NO: 190132 - DNA, 25 bp, Artificial sequence
  SiRNA target sequence
aagggtctattaaagctatttctaa

SEQ ID NO: 190133 - DNA, 25 bp, Artificial sequence
  SiRNA target sequence
agggtctattaaagctatttctaag

SEQ ID NO: 190134 - DNA, 25 bp, Artificial sequence
  SiRNA target sequence
gggtctattaaagctatttctaaga

SEQ ID NO: 190135 - DNA, 25 bp, Artificial sequence
  SiRNA target sequence
ggtctattaaagctatttctaagat

SEQ ID NO: 190136 - DNA, 25 bp, Artificial sequence
  SiRNA target sequence
gtctattaaagctatttctaagata

SEQ ID NO: 190137 - DNA, 25 bp, Artificial sequence
  SiRNA target sequence
tctattaaagctatttctaagatac

SEQ ID NO: 190138 - DNA, 25 bp, Artificial sequence
  SiRNA target sequence
ctattaaagctatttctaagataca

SEQ ID NO: 190139 - DNA, 25 bp, Artificial sequence
  SiRNA target sequence
tattaaagctatttctaagatacag

SEQ ID NO: 190140 - DNA, 25 bp, Artificial sequence
  SiRNA target sequence
attaaagctatttctaagatacagt

SEQ ID NO: 190141 - DNA, 25 bp, Artificial sequence
  SiRNA target sequence
ttaaagctatttctaagatacagta

SEQ ID NO: 190142 - DNA, 25 bp, Artificial sequence
  SiRNA target sequence
taaagctatttctaagatacagtat

SEQ ID NO: 190143 - DNA, 25 bp, Artificial sequence
  SiRNA target sequence
aaagctatttctaagatacagtata

SEQ ID NO: 190144 - DNA, 25 bp, Artificial sequence
  SiRNA target sequence
aagctatttctaagatacagtatat

SEQ ID NO: 190145 - DNA, 25 bp, Artificial sequence
  SiRNA target sequence
agctatttctaagatacagtatata

SEQ ID NO: 190146 - DNA, 25 bp, Artificial sequence
  SiRNA target sequence
gctatttctaagatacagtatatag

SEQ ID NO: 190147 - DNA, 25 bp, Artificial sequence
  SiRNA target sequence
ctatttctaagatacagtatataga

SEQ ID NO: 190148 - DNA, 25 bp, Artificial sequence
  SiRNA target sequence
tatttctaagatacagtatatagat

SEQ ID NO: 190149 - DNA, 25 bp, Artificial sequence
  SiRNA target sequence
atttctaagatacagtatatagata

SEQ ID NO: 190150 - DNA, 25 bp, Artificial sequence
  SiRNA target sequence
tttctaagatacagtatatagataa

SEQ ID NO: 190151 - DNA, 25 bp, Artificial sequence
  SiRNA target sequence
ttctaagatacagtatatagataaa

SEQ ID NO: 190152 - DNA, 25 bp, Artificial sequence
  SiRNA target sequence
tctaagatacagtatatagataaaa

SEQ ID NO: 190153 - DNA, 25 bp, Artificial sequence
  SiRNA target sequence
ctaagatacagtatatagataaaat

SEQ ID NO: 190154 - DNA, 25 bp, Artificial sequence
  SiRNA target sequence
taagatacagtatatagataaaatg

SEQ ID NO: 190155 - DNA, 25 bp, Artificial sequence
  SiRNA target sequence
aagatacagtatatagataaaatgc

SEQ ID NO: 190156 - DNA, 25 bp, Artificial sequence
  SiRNA target sequence
agatacagtatatagataaaatgcc

SEQ ID NO: 190157 - DNA, 25 bp, Artificial sequence
  SiRNA target sequence
gatacagtatatagataaaatgcct

SEQ ID NO: 190158 - DNA, 25 bp, Artificial sequence
  SiRNA target sequence
atacagtatatagataaaatgccta

SEQ ID NO: 190159 - DNA, 25 bp, Artificial sequence
  SiRNA target sequence
tacagtatatagataaaatgcctaa

SEQ ID NO: 190160 - DNA, 25 bp, Artificial sequence
  SiRNA target sequence
acagtatatagataaaatgcctaaa

SEQ ID NO: 190161 - DNA, 25 bp, Artificial sequence
  SiRNA target sequence
cagtatatagataaaatgcctaaat

SEQ ID NO: 190162 - DNA, 25 bp, Artificial sequence
  SiRNA target sequence
agtatatagataaaatgcctaaatt

SEQ ID NO: 190163 - DNA, 25 bp, Artificial sequence
  SiRNA target sequence
gtatatagataaaatgcctaaattt

SEQ ID NO: 190164 - DNA, 25 bp, Artificial sequence
  SiRNA target sequence
tatatagataaaatgcctaaatttt

SEQ ID NO: 190165 - DNA, 25 bp, Artificial sequence
  SiRNA target sequence
atatagataaaatgcctaaattttt

SEQ ID NO: 190166 - DNA, 25 bp, Artificial sequence
  SiRNA target sequence
tatagataaaatgcctaaattttta

SEQ ID NO: 190167 - DNA, 25 bp, Artificial sequence
  SiRNA target sequence
atagataaaatgcctaaatttttaa

SEQ ID NO: 190168 - DNA, 25 bp, Artificial sequence
  SiRNA target sequence
tagataaaatgcctaaatttttaaa

SEQ ID NO: 190169 - DNA, 25 bp, Artificial sequence
  SiRNA target sequence
agataaaatgcctaaatttttaaaa

SEQ ID NO: 190170 - DNA, 25 bp, Artificial sequence
  SiRNA target sequence
gataaaatgcctaaatttttaaaag

SEQ ID NO: 190171 - DNA, 25 bp, Artificial sequence
  SiRNA target sequence
ataaaatgcctaaatttttaaaagg

SEQ ID NO: 190172 - DNA, 25 bp, Artificial sequence
  SiRNA target sequence
taaaatgcctaaatttttaaaagga

SEQ ID NO: 190173 - DNA, 25 bp, Artificial sequence
  SiRNA target sequence
aaaatgcctaaatttttaaaaggac

SEQ ID NO: 190174 - DNA, 25 bp, Artificial sequence
  SiRNA target sequence
aaatgcctaaatttttaaaaggacg

SEQ ID NO: 190175 - DNA, 25 bp, Artificial sequence
  SiRNA target sequence
aatgcctaaatttttaaaaggacgc

SEQ ID NO: 190176 - DNA, 25 bp, Artificial sequence
  SiRNA target sequence
atgcctaaatttttaaaaggacgct

SEQ ID NO: 190177 - DNA, 25 bp, Artificial sequence
  SiRNA target sequence
tgcctaaatttttaaaaggacgcta

SEQ ID NO: 190178 - DNA, 25 bp, Artificial sequence
  SiRNA target sequence
gcctaaatttttaaaaggacgctat

SEQ ID NO: 190179 - DNA, 25 bp, Artificial sequence
  SiRNA target sequence
cctaaatttttaaaaggacgctata

SEQ ID NO: 190180 - DNA, 25 bp, Artificial sequence
  SiRNA target sequence
ctaaatttttaaaaggacgctataa

SEQ ID NO: 190181 - DNA, 25 bp, Artificial sequence
  SiRNA target sequence
taaatttttaaaaggacgctataag

SEQ ID NO: 190182 - DNA, 25 bp, Artificial sequence
  SiRNA target sequence
aaatttttaaaaggacgctataagt

SEQ ID NO: 190183 - DNA, 25 bp, Artificial sequence
  SiRNA target sequence
aatttttaaaaggacgctataagtc

SEQ ID NO: 190184 - DNA, 25 bp, Artificial sequence
  SiRNA target sequence
atttttaaaaggacgctataagtca

SEQ ID NO: 190185 - DNA, 25 bp, Artificial sequence
  SiRNA target sequence
tttttaaaaggacgctataagtcag

SEQ ID NO: 190186 - DNA, 25 bp, Artificial sequence
  SiRNA target sequence
ttttaaaaggacgctataagtcaga

SEQ ID NO: 190187 - DNA, 25 bp, Artificial sequence
  SiRNA target sequence
tttaaaaggacgctataagtcagaa

SEQ ID NO: 190188 - DNA, 25 bp, Artificial sequence
  SiRNA target sequence
ttaaaaggacgctataagtcagaaa

SEQ ID NO: 190189 - DNA, 25 bp, Artificial sequence
  SiRNA target sequence
taaaaggacgctataagtcagaaat

SEQ ID NO: 190190 - DNA, 25 bp, Artificial sequence
  SiRNA target sequence
aaaaggacgctataagtcagaaatc

SEQ ID NO: 190191 - DNA, 25 bp, Artificial sequence
  SiRNA target sequence
aaaggacgctataagtcagaaatcg

SEQ ID NO: 190192 - DNA, 25 bp, Artificial sequence
  SiRNA target sequence
aaggacgctataagtcagaaatcgc

SEQ ID NO: 190193 - DNA, 25 bp, Artificial sequence
  SiRNA target sequence
aggacgctataagtcagaaatcgcc

SEQ ID NO: 190194 - DNA, 25 bp, Artificial sequence
  SiRNA target sequence
ggacgctataagtcagaaatcgcct

SEQ ID NO: 190195 - DNA, 25 bp, Artificial sequence
  SiRNA target sequence
gacgctataagtcagaaatcgcctc

SEQ ID NO: 190196 - DNA, 25 bp, Artificial sequence
  SiRNA target sequence
acgctataagtcagaaatcgcctcc

SEQ ID NO: 190197 - DNA, 25 bp, Artificial sequence
  SiRNA target sequence
cgctataagtcagaaatcgcctccg

SEQ ID NO: 190198 - DNA, 25 bp, Artificial sequence
  SiRNA target sequence
gctataagtcagaaatcgcctccgg

SEQ ID NO: 190199 - DNA, 25 bp, Artificial sequence
  SiRNA target sequence
ctataagtcagaaatcgcctccgga

SEQ ID NO: 190200 - DNA, 25 bp, Artificial sequence
  SiRNA target sequence
tataagtcagaaatcgcctccggaa

SEQ ID NO: 190201 - DNA, 25 bp, Artificial sequence
  SiRNA target sequence
ataagtcagaaatcgcctccggaaa

SEQ ID NO: 190202 - DNA, 25 bp, Artificial sequence
  SiRNA target sequence
taagtcagaaatcgcctccggaaaa

SEQ ID NO: 190203 - DNA, 25 bp, Artificial sequence
  SiRNA target sequence
aagtcagaaatcgcctccggaaaaa

SEQ ID NO: 190204 - DNA, 25 bp, Artificial sequence
  SiRNA target sequence
agtcagaaatcgcctccggaaaaat

SEQ ID NO: 190205 - DNA, 25 bp, Artificial sequence
  SiRNA target sequence
gtcagaaatcgcctccggaaaaatg

SEQ ID NO: 190206 - DNA, 25 bp, Artificial sequence
  SiRNA target sequence
tcagaaatcgcctccggaaaaatgt

SEQ ID NO: 190207 - DNA, 25 bp, Artificial sequence
  SiRNA target sequence
cagaaatcgcctccggaaaaatgtt

SEQ ID NO: 190208 - DNA, 25 bp, Artificial sequence
  SiRNA target sequence
agaaatcgcctccggaaaaatgttg

SEQ ID NO: 190209 - DNA, 25 bp, Artificial sequence
  SiRNA target sequence
gaaatcgcctccggaaaaatgttgt

SEQ ID NO: 190210 - DNA, 25 bp, Artificial sequence
  SiRNA target sequence
aaatcgcctccggaaaaatgttgtt

SEQ ID NO: 190211 - DNA, 25 bp, Artificial sequence
  SiRNA target sequence
aatcgcctccggaaaaatgttgttt

SEQ ID NO: 190212 - DNA, 25 bp, Artificial sequence
  SiRNA target sequence
atcgcctccggaaaaatgttgttta

SEQ ID NO: 190213 - DNA, 25 bp, Artificial sequence
  SiRNA target sequence
tcgcctccggaaaaatgttgtttac

SEQ ID NO: 190214 - DNA, 25 bp, Artificial sequence
  SiRNA target sequence
cgcctccggaaaaatgttgtttact

SEQ ID NO: 190215 - DNA, 25 bp, Artificial sequence
  SiRNA target sequence
gcctccggaaaaatgttgtttactg

SEQ ID NO: 190216 - DNA, 25 bp, Artificial sequence
  SiRNA target sequence
cctccggaaaaatgttgtttactgt

SEQ ID NO: 190217 - DNA, 25 bp, Artificial sequence
  SiRNA target sequence
ctccggaaaaatgttgtttactgtt

SEQ ID NO: 190218 - DNA, 25 bp, Artificial sequence
  SiRNA target sequence
tccggaaaaatgttgtttactgtta

SEQ ID NO: 190219 - DNA, 25 bp, Artificial sequence
  SiRNA target sequence
ccggaaaaatgttgtttactgttaa

SEQ ID NO: 190220 - DNA, 25 bp, Artificial sequence
  SiRNA target sequence
cggaaaaatgttgtttactgttaat

SEQ ID NO: 190221 - DNA, 25 bp, Artificial sequence
  SiRNA target sequence
ggaaaaatgttgtttactgttaatg

SEQ ID NO: 190222 - DNA, 25 bp, Artificial sequence
  SiRNA target sequence
gaaaaatgttgtttactgttaatga

SEQ ID NO: 190223 - DNA, 25 bp, Artificial sequence
  SiRNA target sequence
aaaaatgttgtttactgttaatgat

SEQ ID NO: 190224 - DNA, 25 bp, Artificial sequence
  SiRNA target sequence
aaaatgttgtttactgttaatgata

SEQ ID NO: 190225 - DNA, 25 bp, Artificial sequence
  SiRNA target sequence
aaatgttgtttactgttaatgatat

SEQ ID NO: 190226 - DNA, 25 bp, Artificial sequence
  SiRNA target sequence
aatgttgtttactgttaatgatata

SEQ ID NO: 190227 - DNA, 25 bp, Artificial sequence
  SiRNA target sequence
atgttgtttactgttaatgatatat

SEQ ID NO: 190228 - DNA, 25 bp, Artificial sequence
  SiRNA target sequence
tgttgtttactgttaatgatatatt

SEQ ID NO: 190229 - DNA, 25 bp, Artificial sequence
  SiRNA target sequence
gttgtttactgttaatgatatatta

SEQ ID NO: 190230 - DNA, 25 bp, Artificial sequence
  SiRNA target sequence
ttgtttactgttaatgatatattaa

SEQ ID NO: 190231 - DNA, 25 bp, Artificial sequence
  SiRNA target sequence
tgtttactgttaatgatatattaaa

SEQ ID NO: 190232 - DNA, 25 bp, Artificial sequence
  SiRNA target sequence
gtttactgttaatgatatattaaaa

SEQ ID NO: 190233 - DNA, 25 bp, Artificial sequence
  SiRNA target sequence
tttactgttaatgatatattaaaaa

SEQ ID NO: 190234 - DNA, 25 bp, Artificial sequence
  SiRNA target sequence
ttactgttaatgatatattaaaaaa

SEQ ID NO: 190235 - DNA, 25 bp, Artificial sequence
  SiRNA target sequence
tactgttaatgatatattaaaaaaa

SEQ ID NO: 190236 - DNA, 25 bp, Artificial sequence
  SiRNA target sequence
actgttaatgatatattaaaaaaag

SEQ ID NO: 190237 - DNA, 25 bp, Artificial sequence
  SiRNA target sequence
ctgttaatgatatattaaaaaaagt

SEQ ID NO: 190238 - DNA, 25 bp, Artificial sequence
  SiRNA target sequence
tgttaatgatatattaaaaaaagtt

SEQ ID NO: 190239 - DNA, 25 bp, Artificial sequence
  SiRNA target sequence
gttaatgatatattaaaaaaagttg

SEQ ID NO: 190240 - DNA, 25 bp, Artificial sequence
  SiRNA target sequence
ttaatgatatattaaaaaaagttga

SEQ ID NO: 190241 - DNA, 25 bp, Artificial sequence
  SiRNA target sequence
taatgatatattaaaaaaagttgat

SEQ ID NO: 190242 - DNA, 25 bp, Artificial sequence
  SiRNA target sequence
aatgatatattaaaaaaagttgatg

SEQ ID NO: 190243 - DNA, 25 bp, Artificial sequence
  SiRNA target sequence
atgatatattaaaaaaagttgatga

SEQ ID NO: 190244 - DNA, 25 bp, Artificial sequence
  SiRNA target sequence
tgatatattaaaaaaagttgatgaa

SEQ ID NO: 190245 - DNA, 25 bp, Artificial sequence
  SiRNA target sequence
gatatattaaaaaaagttgatgaaa

SEQ ID NO: 190246 - DNA, 25 bp, Artificial sequence
  SiRNA target sequence
atatattaaaaaaagttgatgaaaa

SEQ ID NO: 190247 - DNA, 25 bp, Artificial sequence
  SiRNA target sequence
tatattaaaaaaagttgatgaaaaa

SEQ ID NO: 190248 - DNA, 25 bp, Artificial sequence
  SiRNA target sequence
atattaaaaaaagttgatgaaaaaa

SEQ ID NO: 190249 - DNA, 25 bp, Artificial sequence
  SiRNA target sequence
tattaaaaaaagttgatgaaaaaaa

SEQ ID NO: 190250 - DNA, 25 bp, Artificial sequence
  SiRNA target sequence
attaaaaaaagttgatgaaaaaaat

SEQ ID NO: 190251 - DNA, 25 bp, Artificial sequence
  SiRNA target sequence
ttaaaaaaagttgatgaaaaaaata

SEQ ID NO: 190252 - DNA, 25 bp, Artificial sequence
  SiRNA target sequence
taaaaaaagttgatgaaaaaaataa

SEQ ID NO: 190253 - DNA, 25 bp, Artificial sequence
  SiRNA target sequence
aaaaaaagttgatgaaaaaaataaa

SEQ ID NO: 190254 - DNA, 25 bp, Artificial sequence
  SiRNA target sequence
aaaaaagttgatgaaaaaaataaat

SEQ ID NO: 190255 - DNA, 25 bp, Artificial sequence
  SiRNA target sequence
aaaaagttgatgaaaaaaataaatt

SEQ ID NO: 190256 - DNA, 25 bp, Artificial sequence
  SiRNA target sequence
aaaagttgatgaaaaaaataaattt

SEQ ID NO: 190257 - DNA, 25 bp, Artificial sequence
  SiRNA target sequence
aaagttgatgaaaaaaataaatttg

SEQ ID NO: 190258 - DNA, 25 bp, Artificial sequence
  SiRNA target sequence
aagttgatgaaaaaaataaatttga

SEQ ID NO: 190259 - DNA, 25 bp, Artificial sequence
  SiRNA target sequence
agttgatgaaaaaaataaatttgac

SEQ ID NO: 190260 - DNA, 25 bp, Artificial sequence
  SiRNA target sequence
gttgatgaaaaaaataaatttgact

SEQ ID NO: 190261 - DNA, 25 bp, Artificial sequence
  SiRNA target sequence
ttgatgaaaaaaataaatttgacta

SEQ ID NO: 190262 - DNA, 25 bp, Artificial sequence
  SiRNA target sequence
tgatgaaaaaaataaatttgactat

SEQ ID NO: 190263 - DNA, 25 bp, Artificial sequence
  SiRNA target sequence
gatgaaaaaaataaatttgactatt

SEQ ID NO: 190264 - DNA, 25 bp, Artificial sequence
  SiRNA target sequence
atgaaaaaaataaatttgactatta

SEQ ID NO: 190265 - DNA, 25 bp, Artificial sequence
  SiRNA target sequence
tgaaaaaaataaatttgactattac

SEQ ID NO: 190266 - DNA, 25 bp, Artificial sequence
  SiRNA target sequence
gaaaaaaataaatttgactattacg

SEQ ID NO: 190267 - DNA, 25 bp, Artificial sequence
  SiRNA target sequence
aaaaaaataaatttgactattacgt

SEQ ID NO: 190268 - DNA, 25 bp, Artificial sequence
  SiRNA target sequence
aaaaaataaatttgactattacgta

SEQ ID NO: 190269 - DNA, 25 bp, Artificial sequence
  SiRNA target sequence
aaaaataaatttgactattacgtag

SEQ ID NO: 190270 - DNA, 25 bp, Artificial sequence
  SiRNA target sequence
aaaataaatttgactattacgtaga

SEQ ID NO: 190271 - DNA, 25 bp, Artificial sequence
  SiRNA target sequence
aaataaatttgactattacgtagat

SEQ ID NO: 190272 - DNA, 25 bp, Artificial sequence
  SiRNA target sequence
aataaatttgactattacgtagata

SEQ ID NO: 190273 - DNA, 25 bp, Artificial sequence
  SiRNA target sequence
ataaatttgactattacgtagataa

SEQ ID NO: 190274 - DNA, 25 bp, Artificial sequence
  SiRNA target sequence
taaatttgactattacgtagataaa

SEQ ID NO: 190275 - DNA, 25 bp, Artificial sequence
  SiRNA target sequence
aaatttgactattacgtagataaaa

SEQ ID NO: 190276 - DNA, 25 bp, Artificial sequence
  SiRNA target sequence
aatttgactattacgtagataaaat

SEQ ID NO: 190277 - DNA, 25 bp, Artificial sequence
  SiRNA target sequence
atttgactattacgtagataaaatg

SEQ ID NO: 190278 - DNA, 25 bp, Artificial sequence
  SiRNA target sequence
tttgactattacgtagataaaatgg

SEQ ID NO: 190279 - DNA, 25 bp, Artificial sequence
  SiRNA target sequence
ttgactattacgtagataaaatggc

SEQ ID NO: 190280 - DNA, 25 bp, Artificial sequence
  SiRNA target sequence
tgactattacgtagataaaatggca

SEQ ID NO: 190281 - DNA, 25 bp, Artificial sequence
  SiRNA target sequence
gactattacgtagataaaatggcac

SEQ ID NO: 190282 - DNA, 25 bp, Artificial sequence
  SiRNA target sequence
actattacgtagataaaatggcact

SEQ ID NO: 190283 - DNA, 25 bp, Artificial sequence
  SiRNA target sequence
ctattacgtagataaaatggcactt

SEQ ID NO: 190284 - DNA, 25 bp, Artificial sequence
  SiRNA target sequence
tattacgtagataaaatggcactta

SEQ ID NO: 190285 - DNA, 25 bp, Artificial sequence
  SiRNA target sequence
attacgtagataaaatggcacttaa

SEQ ID NO: 190286 - DNA, 25 bp, Artificial sequence
  SiRNA target sequence
ttacgtagataaaatggcacttaaa

SEQ ID NO: 190287 - DNA, 25 bp, Artificial sequence
  SiRNA target sequence
tacgtagataaaatggcacttaaaa

SEQ ID NO: 190288 - DNA, 25 bp, Artificial sequence
  SiRNA target sequence
acgtagataaaatggcacttaaaaa

SEQ ID NO: 190289 - DNA, 25 bp, Artificial sequence
  SiRNA target sequence
cgtagataaaatggcacttaaaaat

SEQ ID NO: 190290 - DNA, 25 bp, Artificial sequence
  SiRNA target sequence
gtagataaaatggcacttaaaaatg

SEQ ID NO: 190291 - DNA, 25 bp, Artificial sequence
  SiRNA target sequence
tagataaaatggcacttaaaaatgt

SEQ ID NO: 190292 - DNA, 25 bp, Artificial sequence
  SiRNA target sequence
agataaaatggcacttaaaaatgta

SEQ ID NO: 190293 - DNA, 25 bp, Artificial sequence
  SiRNA target sequence
gataaaatggcacttaaaaatgtat

SEQ ID NO: 190294 - DNA, 25 bp, Artificial sequence
  SiRNA target sequence
ataaaatggcacttaaaaatgtatt

SEQ ID NO: 190295 - DNA, 25 bp, Artificial sequence
  SiRNA target sequence
taaaatggcacttaaaaatgtatta

SEQ ID NO: 190296 - DNA, 25 bp, Artificial sequence
  SiRNA target sequence
aaaatggcacttaaaaatgtattaa

SEQ ID NO: 190297 - DNA, 25 bp, Artificial sequence
  SiRNA target sequence
aaatggcacttaaaaatgtattaac

SEQ ID NO: 190298 - DNA, 25 bp, Artificial sequence
  SiRNA target sequence
aatggcacttaaaaatgtattaaca

SEQ ID NO: 190299 - DNA, 25 bp, Artificial sequence
  SiRNA target sequence
atggcacttaaaaatgtattaacaa

SEQ ID NO: 190300 - DNA, 25 bp, Artificial sequence
  SiRNA target sequence
tggcacttaaaaatgtattaacaag

SEQ ID NO: 190301 - DNA, 25 bp, Artificial sequence
  SiRNA target sequence
ggcacttaaaaatgtattaacaaga

SEQ ID NO: 190302 - DNA, 25 bp, Artificial sequence
  SiRNA target sequence
gcacttaaaaatgtattaacaagag

SEQ ID NO: 190303 - DNA, 25 bp, Artificial sequence
  SiRNA target sequence
cacttaaaaatgtattaacaagaga

SEQ ID NO: 190304 - DNA, 25 bp, Artificial sequence
  SiRNA target sequence
acttaaaaatgtattaacaagagaa

SEQ ID NO: 190305 - DNA, 25 bp, Artificial sequence
  SiRNA target sequence
cttaaaaatgtattaacaagagaat

SEQ ID NO: 190306 - DNA, 25 bp, Artificial sequence
  SiRNA target sequence
ttaaaaatgtattaacaagagaatt

SEQ ID NO: 190307 - DNA, 25 bp, Artificial sequence
  SiRNA target sequence
taaaaatgtattaacaagagaatta

SEQ ID NO: 190308 - DNA, 25 bp, Artificial sequence
  SiRNA target sequence
aaaaatgtattaacaagagaattag

SEQ ID NO: 190309 - DNA, 25 bp, Artificial sequence
  SiRNA target sequence
aaaatgtattaacaagagaattaga

SEQ ID NO: 190310 - DNA, 25 bp, Artificial sequence
  SiRNA target sequence
aaatgtattaacaagagaattagag

SEQ ID NO: 190311 - DNA, 25 bp, Artificial sequence
  SiRNA target sequence
aatgtattaacaagagaattagagc

SEQ ID NO: 190312 - DNA, 25 bp, Artificial sequence
  SiRNA target sequence
atgtattaacaagagaattagagca

SEQ ID NO: 190313 - DNA, 25 bp, Artificial sequence
  SiRNA target sequence
tgtattaacaagagaattagagcaa

SEQ ID NO: 190314 - DNA, 25 bp, Artificial sequence
  SiRNA target sequence
gtattaacaagagaattagagcaat

SEQ ID NO: 190315 - DNA, 25 bp, Artificial sequence
  SiRNA target sequence
tattaacaagagaattagagcaatt

SEQ ID NO: 190316 - DNA, 25 bp, Artificial sequence
  SiRNA target sequence
attaacaagagaattagagcaatta

SEQ ID NO: 190317 - DNA, 25 bp, Artificial sequence
  SiRNA target sequence
ttaacaagagaattagagcaattaa

SEQ ID NO: 190318 - DNA, 25 bp, Artificial sequence
  SiRNA target sequence
taacaagagaattagagcaattaag

SEQ ID NO: 190319 - DNA, 25 bp, Artificial sequence
  SiRNA target sequence
aacaagagaattagagcaattaagt

SEQ ID NO: 190320 - DNA, 25 bp, Artificial sequence
  SiRNA target sequence
acaagagaattagagcaattaagtg

SEQ ID NO: 190321 - DNA, 25 bp, Artificial sequence
  SiRNA target sequence
caagagaattagagcaattaagtgg

SEQ ID NO: 190322 - DNA, 25 bp, Artificial sequence
  SiRNA target sequence
aagagaattagagcaattaagtggt

SEQ ID NO: 190323 - DNA, 25 bp, Artificial sequence
  SiRNA target sequence
agagaattagagcaattaagtggtg

SEQ ID NO: 190324 - DNA, 25 bp, Artificial sequence
  SiRNA target sequence
gagaattagagcaattaagtggtgg

SEQ ID NO: 190325 - DNA, 25 bp, Artificial sequence
  SiRNA target sequence
agaattagagcaattaagtggtggt

SEQ ID NO: 190326 - DNA, 25 bp, Artificial sequence
  SiRNA target sequence
gaattagagcaattaagtggtggtg

SEQ ID NO: 190327 - DNA, 25 bp, Artificial sequence
  SiRNA target sequence
aattagagcaattaagtggtggtga

SEQ ID NO: 190328 - DNA, 25 bp, Artificial sequence
  SiRNA target sequence
attagagcaattaagtggtggtgaa

SEQ ID NO: 190329 - DNA, 25 bp, Artificial sequence
  SiRNA target sequence
ttagagcaattaagtggtggtgaac

SEQ ID NO: 190330 - DNA, 25 bp, Artificial sequence
  SiRNA target sequence
tagagcaattaagtggtggtgaact

SEQ ID NO: 190331 - DNA, 25 bp, Artificial sequence
  SiRNA target sequence
agagcaattaagtggtggtgaactt

SEQ ID NO: 190332 - DNA, 25 bp, Artificial sequence
  SiRNA target sequence
gagcaattaagtggtggtgaacttc

SEQ ID NO: 190333 - DNA, 25 bp, Artificial sequence
  SiRNA target sequence
agcaattaagtggtggtgaacttca

SEQ ID NO: 190334 - DNA, 25 bp, Artificial sequence
  SiRNA target sequence
gcaattaagtggtggtgaacttcaa

SEQ ID NO: 190335 - DNA, 25 bp, Artificial sequence
  SiRNA target sequence
caattaagtggtggtgaacttcaaa

SEQ ID NO: 190336 - DNA, 25 bp, Artificial sequence
  SiRNA target sequence
aattaagtggtggtgaacttcaaag

SEQ ID NO: 190337 - DNA, 25 bp, Artificial sequence
  SiRNA target sequence
attaagtggtggtgaacttcaaaga

SEQ ID NO: 190338 - DNA, 25 bp, Artificial sequence
  SiRNA target sequence
ttaagtggtggtgaacttcaaagat

SEQ ID NO: 190339 - DNA, 25 bp, Artificial sequence
  SiRNA target sequence
taagtggtggtgaacttcaaagatt

SEQ ID NO: 190340 - DNA, 25 bp, Artificial sequence
  SiRNA target sequence
aagtggtggtgaacttcaaagattt

SEQ ID NO: 190341 - DNA, 25 bp, Artificial sequence
  SiRNA target sequence
agtggtggtgaacttcaaagatttt

SEQ ID NO: 190342 - DNA, 25 bp, Artificial sequence
  SiRNA target sequence
gtggtggtgaacttcaaagattttg

SEQ ID NO: 190343 - DNA, 25 bp, Artificial sequence
  SiRNA target sequence
tggtggtgaacttcaaagattttgt

SEQ ID NO: 190344 - DNA, 25 bp, Artificial sequence
  SiRNA target sequence
ggtggtgaacttcaaagattttgta

SEQ ID NO: 190345 - DNA, 25 bp, Artificial sequence
  SiRNA target sequence
gtggtgaacttcaaagattttgtat

SEQ ID NO: 190346 - DNA, 25 bp, Artificial sequence
  SiRNA target sequence
tggtgaacttcaaagattttgtatt

SEQ ID NO: 190347 - DNA, 25 bp, Artificial sequence
  SiRNA target sequence
ggtgaacttcaaagattttgtattg

SEQ ID NO: 190348 - DNA, 25 bp, Artificial sequence
  SiRNA target sequence
gtgaacttcaaagattttgtattgc

SEQ ID NO: 190349 - DNA, 25 bp, Artificial sequence
  SiRNA target sequence
tgaacttcaaagattttgtattgca

SEQ ID NO: 190350 - DNA, 25 bp, Artificial sequence
  SiRNA target sequence
gaacttcaaagattttgtattgcat

SEQ ID NO: 190351 - DNA, 25 bp, Artificial sequence
  SiRNA target sequence
aacttcaaagattttgtattgcata

SEQ ID NO: 190352 - DNA, 25 bp, Artificial sequence
  SiRNA target sequence
acttcaaagattttgtattgcatac

SEQ ID NO: 190353 - DNA, 25 bp, Artificial sequence
  SiRNA target sequence
cttcaaagattttgtattgcataca

SEQ ID NO: 190354 - DNA, 25 bp, Artificial sequence
  SiRNA target sequence
ttcaaagattttgtattgcatacac

SEQ ID NO: 190355 - DNA, 25 bp, Artificial sequence
  SiRNA target sequence
tcaaagattttgtattgcatacaca

SEQ ID NO: 190356 - DNA, 25 bp, Artificial sequence
  SiRNA target sequence
caaagattttgtattgcatacacat

SEQ ID NO: 190357 - DNA, 25 bp, Artificial sequence
  SiRNA target sequence
aaagattttgtattgcatacacatg

SEQ ID NO: 190358 - DNA, 25 bp, Artificial sequence
  SiRNA target sequence
aagattttgtattgcatacacatgt

SEQ ID NO: 190359 - DNA, 25 bp, Artificial sequence
  SiRNA target sequence
agattttgtattgcatacacatgtt

SEQ ID NO: 190360 - DNA, 25 bp, Artificial sequence
  SiRNA target sequence
gattttgtattgcatacacatgttt

SEQ ID NO: 190361 - DNA, 25 bp, Artificial sequence
  SiRNA target sequence
attttgtattgcatacacatgttta

SEQ ID NO: 190362 - DNA, 25 bp, Artificial sequence
  SiRNA target sequence
ttttgtattgcatacacatgtttac

SEQ ID NO: 190363 - DNA, 25 bp, Artificial sequence
  SiRNA target sequence
tttgtattgcatacacatgtttaca

SEQ ID NO: 190364 - DNA, 25 bp, Artificial sequence
  SiRNA target sequence
ttgtattgcatacacatgtttacaa

SEQ ID NO: 190365 - DNA, 25 bp, Artificial sequence
  SiRNA target sequence
tgtattgcatacacatgtttacaag

SEQ ID NO: 190366 - DNA, 25 bp, Artificial sequence
  SiRNA target sequence
gtattgcatacacatgtttacaaga

SEQ ID NO: 190367 - DNA, 25 bp, Artificial sequence
  SiRNA target sequence
tattgcatacacatgtttacaagaa

SEQ ID NO: 190368 - DNA, 25 bp, Artificial sequence
  SiRNA target sequence
attgcatacacatgtttacaagaag

SEQ ID NO: 190369 - DNA, 25 bp, Artificial sequence
  SiRNA target sequence
ttgcatacacatgtttacaagaagg

SEQ ID NO: 190370 - DNA, 25 bp, Artificial sequence
  SiRNA target sequence
tgcatacacatgtttacaagaagga

SEQ ID NO: 190371 - DNA, 25 bp, Artificial sequence
  SiRNA target sequence
gcatacacatgtttacaagaaggaa

SEQ ID NO: 190372 - DNA, 25 bp, Artificial sequence
  SiRNA target sequence
catacacatgtttacaagaaggaaa

SEQ ID NO: 190373 - DNA, 25 bp, Artificial sequence
  SiRNA target sequence
atacacatgtttacaagaaggaaat

SEQ ID NO: 190374 - DNA, 25 bp, Artificial sequence
  SiRNA target sequence
tacacatgtttacaagaaggaaatg

SEQ ID NO: 190375 - DNA, 25 bp, Artificial sequence
  SiRNA target sequence
acacatgtttacaagaaggaaatgt

SEQ ID NO: 190376 - DNA, 25 bp, Artificial sequence
  SiRNA target sequence
cacatgtttacaagaaggaaatgtt

SEQ ID NO: 190377 - DNA, 25 bp, Artificial sequence
  SiRNA target sequence
acatgtttacaagaaggaaatgttt

SEQ ID NO: 190378 - DNA, 25 bp, Artificial sequence
  SiRNA target sequence
catgtttacaagaaggaaatgttta

SEQ ID NO: 190379 - DNA, 25 bp, Artificial sequence
  SiRNA target sequence
atgtttacaagaaggaaatgtttat

SEQ ID NO: 190380 - DNA, 25 bp, Artificial sequence
  SiRNA target sequence
tgtttacaagaaggaaatgtttata

SEQ ID NO: 190381 - DNA, 25 bp, Artificial sequence
  SiRNA target sequence
gtttacaagaaggaaatgtttatat

SEQ ID NO: 190382 - DNA, 25 bp, Artificial sequence
  SiRNA target sequence
tttacaagaaggaaatgtttatatt

SEQ ID NO: 190383 - DNA, 25 bp, Artificial sequence
  SiRNA target sequence
ttacaagaaggaaatgtttatattt

SEQ ID NO: 190384 - DNA, 25 bp, Artificial sequence
  SiRNA target sequence
tacaagaaggaaatgtttatatttt

SEQ ID NO: 190385 - DNA, 25 bp, Artificial sequence
  SiRNA target sequence
acaagaaggaaatgtttatattttt

SEQ ID NO: 190386 - DNA, 25 bp, Artificial sequence
  SiRNA target sequence
caagaaggaaatgtttatatttttg

SEQ ID NO: 190387 - DNA, 25 bp, Artificial sequence
  SiRNA target sequence
aagaaggaaatgtttatatttttga

SEQ ID NO: 190388 - DNA, 25 bp, Artificial sequence
  SiRNA target sequence
agaaggaaatgtttatatttttgat

SEQ ID NO: 190389 - DNA, 25 bp, Artificial sequence
  SiRNA target sequence
gaaggaaatgtttatatttttgatg

SEQ ID NO: 190390 - DNA, 25 bp, Artificial sequence
  SiRNA target sequence
aaggaaatgtttatatttttgatga

SEQ ID NO: 190391 - DNA, 25 bp, Artificial sequence
  SiRNA target sequence
aggaaatgtttatatttttgatgaa

SEQ ID NO: 190392 - DNA, 25 bp, Artificial sequence
  SiRNA target sequence
ggaaatgtttatatttttgatgaac

SEQ ID NO: 190393 - DNA, 25 bp, Artificial sequence
  SiRNA target sequence
gaaatgtttatatttttgatgaacc

SEQ ID NO: 190394 - DNA, 25 bp, Artificial sequence
  SiRNA target sequence
aaatgtttatatttttgatgaaccc

SEQ ID NO: 190395 - DNA, 25 bp, Artificial sequence
  SiRNA target sequence
aatgtttatatttttgatgaaccca

SEQ ID NO: 190396 - DNA, 25 bp, Artificial sequence
  SiRNA target sequence
atgtttatatttttgatgaacccac

SEQ ID NO: 190397 - DNA, 25 bp, Artificial sequence
  SiRNA target sequence
tgtttatatttttgatgaacccact

SEQ ID NO: 190398 - DNA, 25 bp, Artificial sequence
  SiRNA target sequence
gtttatatttttgatgaacccacta

SEQ ID NO: 190399 - DNA, 25 bp, Artificial sequence
  SiRNA target sequence
tttatatttttgatgaacccactag

SEQ ID NO: 190400 - DNA, 25 bp, Artificial sequence
  SiRNA target sequence
ttatatttttgatgaacccactagt

SEQ ID NO: 190401 - DNA, 25 bp, Artificial sequence
  SiRNA target sequence
tatatttttgatgaacccactagtt

SEQ ID NO: 190402 - DNA, 25 bp, Artificial sequence
  SiRNA target sequence
atatttttgatgaacccactagttt

SEQ ID NO: 190403 - DNA, 25 bp, Artificial sequence
  SiRNA target sequence
tatttttgatgaacccactagtttt

SEQ ID NO: 190404 - DNA, 25 bp, Artificial sequence
  SiRNA target sequence
atttttgatgaacccactagttttt

SEQ ID NO: 190405 - DNA, 25 bp, Artificial sequence
  SiRNA target sequence
tttttgatgaacccactagtttttt

SEQ ID NO: 190406 - DNA, 25 bp, Artificial sequence
  SiRNA target sequence
ttttgatgaacccactagttttttg

SEQ ID NO: 190407 - DNA, 25 bp, Artificial sequence
  SiRNA target sequence
tttgatgaacccactagttttttgg

SEQ ID NO: 190408 - DNA, 25 bp, Artificial sequence
  SiRNA target sequence
ttgatgaacccactagttttttgga

SEQ ID NO: 190409 - DNA, 25 bp, Artificial sequence
  SiRNA target sequence
tgatgaacccactagttttttggat

SEQ ID NO: 190410 - DNA, 25 bp, Artificial sequence
  SiRNA target sequence
gatgaacccactagttttttggatg

SEQ ID NO: 190411 - DNA, 25 bp, Artificial sequence
  SiRNA target sequence
atgaacccactagttttttggatgt

SEQ ID NO: 190412 - DNA, 25 bp, Artificial sequence
  SiRNA target sequence
tgaacccactagttttttggatgtt

SEQ ID NO: 190413 - DNA, 25 bp, Artificial sequence
  SiRNA target sequence
gaacccactagttttttggatgtta

SEQ ID NO: 190414 - DNA, 25 bp, Artificial sequence
  SiRNA target sequence
aacccactagttttttggatgttaa

SEQ ID NO: 190415 - DNA, 25 bp, Artificial sequence
  SiRNA target sequence
acccactagttttttggatgttaag

SEQ ID NO: 190416 - DNA, 25 bp, Artificial sequence
  SiRNA target sequence
cccactagttttttggatgttaagc

SEQ ID NO: 190417 - DNA, 25 bp, Artificial sequence
  SiRNA target sequence
ccactagttttttggatgttaagca

SEQ ID NO: 190418 - DNA, 25 bp, Artificial sequence
  SiRNA target sequence
cactagttttttggatgttaagcag

SEQ ID NO: 190419 - DNA, 25 bp, Artificial sequence
  SiRNA target sequence
actagttttttggatgttaagcagc

SEQ ID NO: 190420 - DNA, 25 bp, Artificial sequence
  SiRNA target sequence
ctagttttttggatgttaagcagcg

SEQ ID NO: 190421 - DNA, 25 bp, Artificial sequence
  SiRNA target sequence
tagttttttggatgttaagcagcga

SEQ ID NO: 190422 - DNA, 25 bp, Artificial sequence
  SiRNA target sequence
agttttttggatgttaagcagcgac

SEQ ID NO: 190423 - DNA, 25 bp, Artificial sequence
  SiRNA target sequence
gttttttggatgttaagcagcgact

SEQ ID NO: 190424 - DNA, 25 bp, Artificial sequence
  SiRNA target sequence
ttttttggatgttaagcagcgacta

SEQ ID NO: 190425 - DNA, 25 bp, Artificial sequence
  SiRNA target sequence
tttttggatgttaagcagcgactag

SEQ ID NO: 190426 - DNA, 25 bp, Artificial sequence
  SiRNA target sequence
ttttggatgttaagcagcgactagc

SEQ ID NO: 190427 - DNA, 25 bp, Artificial sequence
  SiRNA target sequence
tttggatgttaagcagcgactagca

SEQ ID NO: 190428 - DNA, 25 bp, Artificial sequence
  SiRNA target sequence
ttggatgttaagcagcgactagcag

SEQ ID NO: 190429 - DNA, 25 bp, Artificial sequence
  SiRNA target sequence
tggatgttaagcagcgactagcagc

SEQ ID NO: 190430 - DNA, 25 bp, Artificial sequence
  SiRNA target sequence
ggatgttaagcagcgactagcagct

SEQ ID NO: 190431 - DNA, 25 bp, Artificial sequence
  SiRNA target sequence
gatgttaagcagcgactagcagctg

SEQ ID NO: 190432 - DNA, 25 bp, Artificial sequence
  SiRNA target sequence
atgttaagcagcgactagcagctgc

SEQ ID NO: 190433 - DNA, 25 bp, Artificial sequence
  SiRNA target sequence
tgttaagcagcgactagcagctgct

SEQ ID NO: 190434 - DNA, 25 bp, Artificial sequence
  SiRNA target sequence
gttaagcagcgactagcagctgcta

SEQ ID NO: 190435 - DNA, 25 bp, Artificial sequence
  SiRNA target sequence
ttaagcagcgactagcagctgctaa

SEQ ID NO: 190436 - DNA, 25 bp, Artificial sequence
  SiRNA target sequence
taagcagcgactagcagctgctaag

SEQ ID NO: 190437 - DNA, 25 bp, Artificial sequence
  SiRNA target sequence
aagcagcgactagcagctgctaagg

SEQ ID NO: 190438 - DNA, 25 bp, Artificial sequence
  SiRNA target sequence
agcagcgactagcagctgctaagga

SEQ ID NO: 190439 - DNA, 25 bp, Artificial sequence
  SiRNA target sequence
gcagcgactagcagctgctaaggaa

SEQ ID NO: 190440 - DNA, 25 bp, Artificial sequence
  SiRNA target sequence
cagcgactagcagctgctaaggaaa

SEQ ID NO: 190441 - DNA, 25 bp, Artificial sequence
  SiRNA target sequence
agcgactagcagctgctaaggaaat

SEQ ID NO: 190442 - DNA, 25 bp, Artificial sequence
  SiRNA target sequence
gcgactagcagctgctaaggaaata

SEQ ID NO: 190443 - DNA, 25 bp, Artificial sequence
  SiRNA target sequence
cgactagcagctgctaaggaaataa

SEQ ID NO: 190444 - DNA, 25 bp, Artificial sequence
  SiRNA target sequence
gactagcagctgctaaggaaataag

SEQ ID NO: 190445 - DNA, 25 bp, Artificial sequence
  SiRNA target sequence
actagcagctgctaaggaaataaga

SEQ ID NO: 190446 - DNA, 25 bp, Artificial sequence
  SiRNA target sequence
ctagcagctgctaaggaaataagaa

SEQ ID NO: 190447 - DNA, 25 bp, Artificial sequence
  SiRNA target sequence
tagcagctgctaaggaaataagaaa

SEQ ID NO: 190448 - DNA, 25 bp, Artificial sequence
  SiRNA target sequence
agcagctgctaaggaaataagaaat

SEQ ID NO: 190449 - DNA, 25 bp, Artificial sequence
  SiRNA target sequence
gcagctgctaaggaaataagaaatt

SEQ ID NO: 190450 - DNA, 25 bp, Artificial sequence
  SiRNA target sequence
cagctgctaaggaaataagaaattt

SEQ ID NO: 190451 - DNA, 25 bp, Artificial sequence
  SiRNA target sequence
agctgctaaggaaataagaaatttg

SEQ ID NO: 190452 - DNA, 25 bp, Artificial sequence
  SiRNA target sequence
gctgctaaggaaataagaaatttgt

SEQ ID NO: 190453 - DNA, 25 bp, Artificial sequence
  SiRNA target sequence
ctgctaaggaaataagaaatttgtg

SEQ ID NO: 190454 - DNA, 25 bp, Artificial sequence
  SiRNA target sequence
tgctaaggaaataagaaatttgtgt

SEQ ID NO: 190455 - DNA, 25 bp, Artificial sequence
  SiRNA target sequence
gctaaggaaataagaaatttgtgtg

SEQ ID NO: 190456 - DNA, 25 bp, Artificial sequence
  SiRNA target sequence
ctaaggaaataagaaatttgtgtga

SEQ ID NO: 190457 - DNA, 25 bp, Artificial sequence
  SiRNA target sequence
taaggaaataagaaatttgtgtgaa

SEQ ID NO: 190458 - DNA, 25 bp, Artificial sequence
  SiRNA target sequence
aaggaaataagaaatttgtgtgaag

SEQ ID NO: 190459 - DNA, 25 bp, Artificial sequence
  SiRNA target sequence
aggaaataagaaatttgtgtgaaga

SEQ ID NO: 190460 - DNA, 25 bp, Artificial sequence
  SiRNA target sequence
ggaaataagaaatttgtgtgaagaa

SEQ ID NO: 190461 - DNA, 25 bp, Artificial sequence
  SiRNA target sequence
gaaataagaaatttgtgtgaagaaa

SEQ ID NO: 190462 - DNA, 25 bp, Artificial sequence
  SiRNA target sequence
aaataagaaatttgtgtgaagaaaa

SEQ ID NO: 190463 - DNA, 25 bp, Artificial sequence
  SiRNA target sequence
aataagaaatttgtgtgaagaaaat

SEQ ID NO: 190464 - DNA, 25 bp, Artificial sequence
  SiRNA target sequence
ataagaaatttgtgtgaagaaaata

SEQ ID NO: 190465 - DNA, 25 bp, Artificial sequence
  SiRNA target sequence
taagaaatttgtgtgaagaaaataa

SEQ ID NO: 190466 - DNA, 25 bp, Artificial sequence
  SiRNA target sequence
aagaaatttgtgtgaagaaaataaa

SEQ ID NO: 190467 - DNA, 25 bp, Artificial sequence
  SiRNA target sequence
agaaatttgtgtgaagaaaataaat

SEQ ID NO: 190468 - DNA, 25 bp, Artificial sequence
  SiRNA target sequence
gaaatttgtgtgaagaaaataaata

SEQ ID NO: 190469 - DNA, 25 bp, Artificial sequence
  SiRNA target sequence
aaatttgtgtgaagaaaataaatat

SEQ ID NO: 190470 - DNA, 25 bp, Artificial sequence
  SiRNA target sequence
aatttgtgtgaagaaaataaatatg

SEQ ID NO: 190471 - DNA, 25 bp, Artificial sequence
  SiRNA target sequence
atttgtgtgaagaaaataaatatgt

SEQ ID NO: 190472 - DNA, 25 bp, Artificial sequence
  SiRNA target sequence
tttgtgtgaagaaaataaatatgtt

SEQ ID NO: 190473 - DNA, 25 bp, Artificial sequence
  SiRNA target sequence
ttgtgtgaagaaaataaatatgttg

SEQ ID NO: 190474 - DNA, 25 bp, Artificial sequence
  SiRNA target sequence
tgtgtgaagaaaataaatatgttgt

SEQ ID NO: 190475 - DNA, 25 bp, Artificial sequence
  SiRNA target sequence
gtgtgaagaaaataaatatgttgta

SEQ ID NO: 190476 - DNA, 25 bp, Artificial sequence
  SiRNA target sequence
tgtgaagaaaataaatatgttgtag

SEQ ID NO: 190477 - DNA, 25 bp, Artificial sequence
  SiRNA target sequence
gtgaagaaaataaatatgttgtagt

SEQ ID NO: 190478 - DNA, 25 bp, Artificial sequence
  SiRNA target sequence
tgaagaaaataaatatgttgtagtt

SEQ ID NO: 190479 - DNA, 25 bp, Artificial sequence
  SiRNA target sequence
gaagaaaataaatatgttgtagttg

SEQ ID NO: 190480 - DNA, 25 bp, Artificial sequence
  SiRNA target sequence
aagaaaataaatatgttgtagttgt

SEQ ID NO: 190481 - DNA, 25 bp, Artificial sequence
  SiRNA target sequence
agaaaataaatatgttgtagttgtc

SEQ ID NO: 190482 - DNA, 25 bp, Artificial sequence
  SiRNA target sequence
gaaaataaatatgttgtagttgtcg

SEQ ID NO: 190483 - DNA, 25 bp, Artificial sequence
  SiRNA target sequence
aaaataaatatgttgtagttgtcga

SEQ ID NO: 190484 - DNA, 25 bp, Artificial sequence
  SiRNA target sequence
aaataaatatgttgtagttgtcgaa

SEQ ID NO: 190485 - DNA, 25 bp, Artificial sequence
  SiRNA target sequence
aataaatatgttgtagttgtcgaac

SEQ ID NO: 190486 - DNA, 25 bp, Artificial sequence
  SiRNA target sequence
ataaatatgttgtagttgtcgaaca

SEQ ID NO: 190487 - DNA, 25 bp, Artificial sequence
  SiRNA target sequence
taaatatgttgtagttgtcgaacac

SEQ ID NO: 190488 - DNA, 25 bp, Artificial sequence
  SiRNA target sequence
aaatatgttgtagttgtcgaacacg

SEQ ID NO: 190489 - DNA, 25 bp, Artificial sequence
  SiRNA target sequence
aatatgttgtagttgtcgaacacga

SEQ ID NO: 190490 - DNA, 25 bp, Artificial sequence
  SiRNA target sequence
atatgttgtagttgtcgaacacgat

SEQ ID NO: 190491 - DNA, 25 bp, Artificial sequence
  SiRNA target sequence
tatgttgtagttgtcgaacacgatt

SEQ ID NO: 190492 - DNA, 25 bp, Artificial sequence
  SiRNA target sequence
atgttgtagttgtcgaacacgattt

SEQ ID NO: 190493 - DNA, 25 bp, Artificial sequence
  SiRNA target sequence
tgttgtagttgtcgaacacgattta

SEQ ID NO: 190494 - DNA, 25 bp, Artificial sequence
  SiRNA target sequence
gttgtagttgtcgaacacgatttag

SEQ ID NO: 190495 - DNA, 25 bp, Artificial sequence
  SiRNA target sequence
ttgtagttgtcgaacacgatttagc

SEQ ID NO: 190496 - DNA, 25 bp, Artificial sequence
  SiRNA target sequence
tgtagttgtcgaacacgatttagcc

SEQ ID NO: 190497 - DNA, 25 bp, Artificial sequence
  SiRNA target sequence
gtagttgtcgaacacgatttagcca

SEQ ID NO: 190498 - DNA, 25 bp, Artificial sequence
  SiRNA target sequence
tagttgtcgaacacgatttagccat

SEQ ID NO: 190499 - DNA, 25 bp, Artificial sequence
  SiRNA target sequence
agttgtcgaacacgatttagccatt

SEQ ID NO: 190500 - DNA, 25 bp, Artificial sequence
  SiRNA target sequence
gttgtcgaacacgatttagccattt

SEQ ID NO: 190501 - DNA, 25 bp, Artificial sequence
  SiRNA target sequence
ttgtcgaacacgatttagccatttt

SEQ ID NO: 190502 - DNA, 25 bp, Artificial sequence
  SiRNA target sequence
tgtcgaacacgatttagccatttta

SEQ ID NO: 190503 - DNA, 25 bp, Artificial sequence
  SiRNA target sequence
gtcgaacacgatttagccattttag

SEQ ID NO: 190504 - DNA, 25 bp, Artificial sequence
  SiRNA target sequence
tcgaacacgatttagccattttaga

SEQ ID NO: 190505 - DNA, 25 bp, Artificial sequence
  SiRNA target sequence
cgaacacgatttagccattttagat

SEQ ID NO: 190506 - DNA, 25 bp, Artificial sequence
  SiRNA target sequence
gaacacgatttagccattttagatt

SEQ ID NO: 190507 - DNA, 25 bp, Artificial sequence
  SiRNA target sequence
aacacgatttagccattttagattt

SEQ ID NO: 190508 - DNA, 25 bp, Artificial sequence
  SiRNA target sequence
acacgatttagccattttagatttg

SEQ ID NO: 190509 - DNA, 25 bp, Artificial sequence
  SiRNA target sequence
cacgatttagccattttagatttga

SEQ ID NO: 190510 - DNA, 25 bp, Artificial sequence
  SiRNA target sequence
acgatttagccattttagatttgat

SEQ ID NO: 190511 - DNA, 25 bp, Artificial sequence
  SiRNA target sequence
cgatttagccattttagatttgatg

SEQ ID NO: 190512 - DNA, 25 bp, Artificial sequence
  SiRNA target sequence
gatttagccattttagatttgatgt

SEQ ID NO: 190513 - DNA, 25 bp, Artificial sequence
  SiRNA target sequence
atttagccattttagatttgatgtg

SEQ ID NO: 190514 - DNA, 25 bp, Artificial sequence
  SiRNA target sequence
tttagccattttagatttgatgtgt

SEQ ID NO: 190515 - DNA, 25 bp, Artificial sequence
  SiRNA target sequence
ttagccattttagatttgatgtgtg

SEQ ID NO: 190516 - DNA, 25 bp, Artificial sequence
  SiRNA target sequence
tagccattttagatttgatgtgtga

SEQ ID NO: 190517 - DNA, 25 bp, Artificial sequence
  SiRNA target sequence
agccattttagatttgatgtgtgat

SEQ ID NO: 190518 - DNA, 25 bp, Artificial sequence
  SiRNA target sequence
gccattttagatttgatgtgtgatt

SEQ ID NO: 190519 - DNA, 25 bp, Artificial sequence
  SiRNA target sequence
ccattttagatttgatgtgtgattt

SEQ ID NO: 190520 - DNA, 25 bp, Artificial sequence
  SiRNA target sequence
cattttagatttgatgtgtgatttt

SEQ ID NO: 190521 - DNA, 25 bp, Artificial sequence
  SiRNA target sequence
attttagatttgatgtgtgattttg

SEQ ID NO: 190522 - DNA, 25 bp, Artificial sequence
  SiRNA target sequence
ttttagatttgatgtgtgattttgg

SEQ ID NO: 190523 - DNA, 25 bp, Artificial sequence
  SiRNA target sequence
tttagatttgatgtgtgattttgga

SEQ ID NO: 190524 - DNA, 25 bp, Artificial sequence
  SiRNA target sequence
ttagatttgatgtgtgattttggat

SEQ ID NO: 190525 - DNA, 25 bp, Artificial sequence
  SiRNA target sequence
tagatttgatgtgtgattttggatg

SEQ ID NO: 190526 - DNA, 25 bp, Artificial sequence
  SiRNA target sequence
agatttgatgtgtgattttggatgt

SEQ ID NO: 190527 - DNA, 25 bp, Artificial sequence
  SiRNA target sequence
gatttgatgtgtgattttggatgtg

SEQ ID NO: 190528 - DNA, 25 bp, Artificial sequence
  SiRNA target sequence
atttgatgtgtgattttggatgtgt

SEQ ID NO: 190529 - DNA, 25 bp, Artificial sequence
  SiRNA target sequence
tttgatgtgtgattttggatgtgtt

SEQ ID NO: 190530 - DNA, 25 bp, Artificial sequence
  SiRNA target sequence
ttgatgtgtgattttggatgtgttc

SEQ ID NO: 190531 - DNA, 25 bp, Artificial sequence
  SiRNA target sequence
tgatgtgtgattttggatgtgttct

SEQ ID NO: 190532 - DNA, 25 bp, Artificial sequence
  SiRNA target sequence
gatgtgtgattttggatgtgttcta

SEQ ID NO: 190533 - DNA, 25 bp, Artificial sequence
  SiRNA target sequence
atgtgtgattttggatgtgttctat

SEQ ID NO: 190534 - DNA, 25 bp, Artificial sequence
  SiRNA target sequence
tgtgtgattttggatgtgttctata

SEQ ID NO: 190535 - DNA, 25 bp, Artificial sequence
  SiRNA target sequence
gtgtgattttggatgtgttctatac

SEQ ID NO: 190536 - DNA, 25 bp, Artificial sequence
  SiRNA target sequence
tgtgattttggatgtgttctatacg

SEQ ID NO: 190537 - DNA, 25 bp, Artificial sequence
  SiRNA target sequence
gtgattttggatgtgttctatacgg

SEQ ID NO: 190538 - DNA, 25 bp, Artificial sequence
  SiRNA target sequence
tgattttggatgtgttctatacgga

SEQ ID NO: 190539 - DNA, 25 bp, Artificial sequence
  SiRNA target sequence
gattttggatgtgttctatacggac

SEQ ID NO: 190540 - DNA, 25 bp, Artificial sequence
  SiRNA target sequence
attttggatgtgttctatacggaca

SEQ ID NO: 190541 - DNA, 25 bp, Artificial sequence
  SiRNA target sequence
ttttggatgtgttctatacggacaa

SEQ ID NO: 190542 - DNA, 25 bp, Artificial sequence
  SiRNA target sequence
tttggatgtgttctatacggacaat

SEQ ID NO: 190543 - DNA, 25 bp, Artificial sequence
  SiRNA target sequence
ttggatgtgttctatacggacaatc

SEQ ID NO: 190544 - DNA, 25 bp, Artificial sequence
  SiRNA target sequence
tggatgtgttctatacggacaatct

SEQ ID NO: 190545 - DNA, 25 bp, Artificial sequence
  SiRNA target sequence
ggatgtgttctatacggacaatctg

SEQ ID NO: 190546 - DNA, 25 bp, Artificial sequence
  SiRNA target sequence
gatgtgttctatacggacaatctgg

SEQ ID NO: 190547 - DNA, 25 bp, Artificial sequence
  SiRNA target sequence
atgtgttctatacggacaatctggg

SEQ ID NO: 190548 - DNA, 25 bp, Artificial sequence
  SiRNA target sequence
tgtgttctatacggacaatctgggg

SEQ ID NO: 190549 - DNA, 25 bp, Artificial sequence
  SiRNA target sequence
gtgttctatacggacaatctggggc

SEQ ID NO: 190550 - DNA, 25 bp, Artificial sequence
  SiRNA target sequence
tgttctatacggacaatctggggca

SEQ ID NO: 190551 - DNA, 25 bp, Artificial sequence
  SiRNA target sequence
gttctatacggacaatctggggcat

SEQ ID NO: 190552 - DNA, 25 bp, Artificial sequence
  SiRNA target sequence
ttctatacggacaatctggggcata

SEQ ID NO: 190553 - DNA, 25 bp, Artificial sequence
  SiRNA target sequence
tctatacggacaatctggggcatac

SEQ ID NO: 190554 - DNA, 25 bp, Artificial sequence
  SiRNA target sequence
ctatacggacaatctggggcatacg

SEQ ID NO: 190555 - DNA, 25 bp, Artificial sequence
  SiRNA target sequence
tatacggacaatctggggcatacgg

SEQ ID NO: 190556 - DNA, 25 bp, Artificial sequence
  SiRNA target sequence
atacggacaatctggggcatacggt

SEQ ID NO: 190557 - DNA, 25 bp, Artificial sequence
  SiRNA target sequence
tacggacaatctggggcatacggtg

SEQ ID NO: 190558 - DNA, 25 bp, Artificial sequence
  SiRNA target sequence
acggacaatctggggcatacggtgt

SEQ ID NO: 190559 - DNA, 25 bp, Artificial sequence
  SiRNA target sequence
cggacaatctggggcatacggtgta

SEQ ID NO: 190560 - DNA, 25 bp, Artificial sequence
  SiRNA target sequence
ggacaatctggggcatacggtgtaa

SEQ ID NO: 190561 - DNA, 25 bp, Artificial sequence
  SiRNA target sequence
gacaatctggggcatacggtgtaat

SEQ ID NO: 190562 - DNA, 25 bp, Artificial sequence
  SiRNA target sequence
acaatctggggcatacggtgtaata

SEQ ID NO: 190563 - DNA, 25 bp, Artificial sequence
  SiRNA target sequence
caatctggggcatacggtgtaataa

SEQ ID NO: 190564 - DNA, 25 bp, Artificial sequence
  SiRNA target sequence
aatctggggcatacggtgtaataag

SEQ ID NO: 190565 - DNA, 25 bp, Artificial sequence
  SiRNA target sequence
atctggggcatacggtgtaataagc

SEQ ID NO: 190566 - DNA, 25 bp, Artificial sequence
  SiRNA target sequence
tctggggcatacggtgtaataagcg

SEQ ID NO: 190567 - DNA, 25 bp, Artificial sequence
  SiRNA target sequence
ctggggcatacggtgtaataagcgc

SEQ ID NO: 190568 - DNA, 25 bp, Artificial sequence
  SiRNA target sequence
tggggcatacggtgtaataagcgca

SEQ ID NO: 190569 - DNA, 25 bp, Artificial sequence
  SiRNA target sequence
ggggcatacggtgtaataagcgcac

SEQ ID NO: 190570 - DNA, 25 bp, Artificial sequence
  SiRNA target sequence
gggcatacggtgtaataagcgcacc

SEQ ID NO: 190571 - DNA, 25 bp, Artificial sequence
  SiRNA target sequence
ggcatacggtgtaataagcgcacca

SEQ ID NO: 190572 - DNA, 25 bp, Artificial sequence
  SiRNA target sequence
gcatacggtgtaataagcgcaccat

SEQ ID NO: 190573 - DNA, 25 bp, Artificial sequence
  SiRNA target sequence
catacggtgtaataagcgcaccata

SEQ ID NO: 190574 - DNA, 25 bp, Artificial sequence
  SiRNA target sequence
atacggtgtaataagcgcaccatac

SEQ ID NO: 190575 - DNA, 25 bp, Artificial sequence
  SiRNA target sequence
tacggtgtaataagcgcaccatacg

SEQ ID NO: 190576 - DNA, 25 bp, Artificial sequence
  SiRNA target sequence
acggtgtaataagcgcaccatacgt

SEQ ID NO: 190577 - DNA, 25 bp, Artificial sequence
  SiRNA target sequence
cggtgtaataagcgcaccatacgtt

SEQ ID NO: 190578 - DNA, 25 bp, Artificial sequence
  SiRNA target sequence
ggtgtaataagcgcaccatacgtta

SEQ ID NO: 190579 - DNA, 25 bp, Artificial sequence
  SiRNA target sequence
gtgtaataagcgcaccatacgttat

SEQ ID NO: 190580 - DNA, 25 bp, Artificial sequence
  SiRNA target sequence
tgtaataagcgcaccatacgttatt

SEQ ID NO: 190581 - DNA, 25 bp, Artificial sequence
  SiRNA target sequence
gtaataagcgcaccatacgttatta

SEQ ID NO: 190582 - DNA, 25 bp, Artificial sequence
  SiRNA target sequence
taataagcgcaccatacgttattaa

SEQ ID NO: 190583 - DNA, 25 bp, Artificial sequence
  SiRNA target sequence
aataagcgcaccatacgttattaaa

SEQ ID NO: 190584 - DNA, 25 bp, Artificial sequence
  SiRNA target sequence
ataagcgcaccatacgttattaaat

SEQ ID NO: 190585 - DNA, 25 bp, Artificial sequence
  SiRNA target sequence
taagcgcaccatacgttattaaatc

SEQ ID NO: 190586 - DNA, 25 bp, Artificial sequence
  SiRNA target sequence
aagcgcaccatacgttattaaatca

SEQ ID NO: 190587 - DNA, 25 bp, Artificial sequence
  SiRNA target sequence
agcgcaccatacgttattaaatcag

SEQ ID NO: 190588 - DNA, 25 bp, Artificial sequence
  SiRNA target sequence
gcgcaccatacgttattaaatcagc

SEQ ID NO: 190589 - DNA, 25 bp, Artificial sequence
  SiRNA target sequence
cgcaccatacgttattaaatcagca

SEQ ID NO: 190590 - DNA, 25 bp, Artificial sequence
  SiRNA target sequence
gcaccatacgttattaaatcagcaa

SEQ ID NO: 190591 - DNA, 25 bp, Artificial sequence
  SiRNA target sequence
caccatacgttattaaatcagcaat

SEQ ID NO: 190592 - DNA, 25 bp, Artificial sequence
  SiRNA target sequence
accatacgttattaaatcagcaata

SEQ ID NO: 190593 - DNA, 25 bp, Artificial sequence
  SiRNA target sequence
ccatacgttattaaatcagcaataa

SEQ ID NO: 190594 - DNA, 25 bp, Artificial sequence
  SiRNA target sequence
catacgttattaaatcagcaataaa

SEQ ID NO: 190595 - DNA, 25 bp, Artificial sequence
  SiRNA target sequence
atacgttattaaatcagcaataaat

SEQ ID NO: 190596 - DNA, 25 bp, Artificial sequence
  SiRNA target sequence
tacgttattaaatcagcaataaata

SEQ ID NO: 190597 - DNA, 25 bp, Artificial sequence
  SiRNA target sequence
acgttattaaatcagcaataaatat

SEQ ID NO: 190598 - DNA, 25 bp, Artificial sequence
  SiRNA target sequence
cgttattaaatcagcaataaatata

SEQ ID NO: 190599 - DNA, 25 bp, Artificial sequence
  SiRNA target sequence
gttattaaatcagcaataaatatat

SEQ ID NO: 190600 - DNA, 25 bp, Artificial sequence
  SiRNA target sequence
ttattaaatcagcaataaatatatt

SEQ ID NO: 190601 - DNA, 25 bp, Artificial sequence
  SiRNA target sequence
tattaaatcagcaataaatatattt

SEQ ID NO: 190602 - DNA, 25 bp, Artificial sequence
  SiRNA target sequence
attaaatcagcaataaatatatttc

SEQ ID NO: 190603 - DNA, 25 bp, Artificial sequence
  SiRNA target sequence
ttaaatcagcaataaatatatttct

SEQ ID NO: 190604 - DNA, 25 bp, Artificial sequence
  SiRNA target sequence
taaatcagcaataaatatatttctt

SEQ ID NO: 190605 - DNA, 25 bp, Artificial sequence
  SiRNA target sequence
aaatcagcaataaatatatttcttg

SEQ ID NO: 190606 - DNA, 25 bp, Artificial sequence
  SiRNA target sequence
aatcagcaataaatatatttcttga

SEQ ID NO: 190607 - DNA, 25 bp, Artificial sequence
  SiRNA target sequence
atcagcaataaatatatttcttgat

SEQ ID NO: 190608 - DNA, 25 bp, Artificial sequence
  SiRNA target sequence
tcagcaataaatatatttcttgatg

SEQ ID NO: 190609 - DNA, 25 bp, Artificial sequence
  SiRNA target sequence
cagcaataaatatatttcttgatgg

SEQ ID NO: 190610 - DNA, 25 bp, Artificial sequence
  SiRNA target sequence
agcaataaatatatttcttgatgga

SEQ ID NO: 190611 - DNA, 25 bp, Artificial sequence
  SiRNA target sequence
gcaataaatatatttcttgatggat

SEQ ID NO: 190612 - DNA, 25 bp, Artificial sequence
  SiRNA target sequence
caataaatatatttcttgatggatt

SEQ ID NO: 190613 - DNA, 25 bp, Artificial sequence
  SiRNA target sequence
aataaatatatttcttgatggattt

SEQ ID NO: 190614 - DNA, 25 bp, Artificial sequence
  SiRNA target sequence
ataaatatatttcttgatggatttt

SEQ ID NO: 190615 - DNA, 25 bp, Artificial sequence
  SiRNA target sequence
taaatatatttcttgatggattttt

SEQ ID NO: 190616 - DNA, 25 bp, Artificial sequence
  SiRNA target sequence
aaatatatttcttgatggatttttg

SEQ ID NO: 190617 - DNA, 25 bp, Artificial sequence
  SiRNA target sequence
aatatatttcttgatggatttttgc

SEQ ID NO: 190618 - DNA, 25 bp, Artificial sequence
  SiRNA target sequence
atatatttcttgatggatttttgcc

SEQ ID NO: 190619 - DNA, 25 bp, Artificial sequence
  SiRNA target sequence
tatatttcttgatggatttttgcct

SEQ ID NO: 190620 - DNA, 25 bp, Artificial sequence
  SiRNA target sequence
atatttcttgatggatttttgccta

SEQ ID NO: 190621 - DNA, 25 bp, Artificial sequence
  SiRNA target sequence
tatttcttgatggatttttgcctac

SEQ ID NO: 190622 - DNA, 25 bp, Artificial sequence
  SiRNA target sequence
atttcttgatggatttttgcctaca

SEQ ID NO: 190623 - DNA, 25 bp, Artificial sequence
  SiRNA target sequence
tttcttgatggatttttgcctacag

SEQ ID NO: 190624 - DNA, 25 bp, Artificial sequence
  SiRNA target sequence
ttcttgatggatttttgcctacaga

SEQ ID NO: 190625 - DNA, 25 bp, Artificial sequence
  SiRNA target sequence
tcttgatggatttttgcctacagaa

SEQ ID NO: 190626 - DNA, 25 bp, Artificial sequence
  SiRNA target sequence
cttgatggatttttgcctacagaaa

SEQ ID NO: 190627 - DNA, 25 bp, Artificial sequence
  SiRNA target sequence
ttgatggatttttgcctacagaaaa

SEQ ID NO: 190628 - DNA, 25 bp, Artificial sequence
  SiRNA target sequence
tgatggatttttgcctacagaaaac

SEQ ID NO: 190629 - DNA, 25 bp, Artificial sequence
  SiRNA target sequence
gatggatttttgcctacagaaaaca

SEQ ID NO: 190630 - DNA, 25 bp, Artificial sequence
  SiRNA target sequence
atggatttttgcctacagaaaacat

SEQ ID NO: 190631 - DNA, 25 bp, Artificial sequence
  SiRNA target sequence
tggatttttgcctacagaaaacatg

SEQ ID NO: 190632 - DNA, 25 bp, Artificial sequence
  SiRNA target sequence
ggatttttgcctacagaaaacatga

SEQ ID NO: 190633 - DNA, 25 bp, Artificial sequence
  SiRNA target sequence
gatttttgcctacagaaaacatgaa

SEQ ID NO: 190634 - DNA, 25 bp, Artificial sequence
  SiRNA target sequence
atttttgcctacagaaaacatgaaa

SEQ ID NO: 190635 - DNA, 25 bp, Artificial sequence
  SiRNA target sequence
tttttgcctacagaaaacatgaaat

SEQ ID NO: 190636 - DNA, 25 bp, Artificial sequence
  SiRNA target sequence
ttttgcctacagaaaacatgaaatt

SEQ ID NO: 190637 - DNA, 25 bp, Artificial sequence
  SiRNA target sequence
tttgcctacagaaaacatgaaattt

SEQ ID NO: 190638 - DNA, 25 bp, Artificial sequence
  SiRNA target sequence
ttgcctacagaaaacatgaaattta

SEQ ID NO: 190639 - DNA, 25 bp, Artificial sequence
  SiRNA target sequence
tgcctacagaaaacatgaaatttag

SEQ ID NO: 190640 - DNA, 25 bp, Artificial sequence
  SiRNA target sequence
gcctacagaaaacatgaaatttaga

SEQ ID NO: 190641 - DNA, 25 bp, Artificial sequence
  SiRNA target sequence
cctacagaaaacatgaaatttagaa

SEQ ID NO: 190642 - DNA, 25 bp, Artificial sequence
  SiRNA target sequence
ctacagaaaacatgaaatttagaaa

SEQ ID NO: 190643 - DNA, 25 bp, Artificial sequence
  SiRNA target sequence
tacagaaaacatgaaatttagaaat

SEQ ID NO: 190644 - DNA, 25 bp, Artificial sequence
  SiRNA target sequence
acagaaaacatgaaatttagaaatt

SEQ ID NO: 190645 - DNA, 25 bp, Artificial sequence
  SiRNA target sequence
cagaaaacatgaaatttagaaattc

SEQ ID NO: 190646 - DNA, 25 bp, Artificial sequence
  SiRNA target sequence
agaaaacatgaaatttagaaattca

SEQ ID NO: 190647 - DNA, 25 bp, Artificial sequence
  SiRNA target sequence
gaaaacatgaaatttagaaattcag

SEQ ID NO: 190648 - DNA, 25 bp, Artificial sequence
  SiRNA target sequence
aaaacatgaaatttagaaattcaga

SEQ ID NO: 190649 - DNA, 25 bp, Artificial sequence
  SiRNA target sequence
aaacatgaaatttagaaattcagag

SEQ ID NO: 190650 - DNA, 25 bp, Artificial sequence
  SiRNA target sequence
aacatgaaatttagaaattcagagt

SEQ ID NO: 190651 - DNA, 25 bp, Artificial sequence
  SiRNA target sequence
acatgaaatttagaaattcagagtt

SEQ ID NO: 190652 - DNA, 25 bp, Artificial sequence
  SiRNA target sequence
catgaaatttagaaattcagagtta

SEQ ID NO: 190653 - DNA, 25 bp, Artificial sequence
  SiRNA target sequence
atgaaatttagaaattcagagttaa

SEQ ID NO: 190654 - DNA, 25 bp, Artificial sequence
  SiRNA target sequence
tgaaatttagaaattcagagttaaa

SEQ ID NO: 190655 - DNA, 25 bp, Artificial sequence
  SiRNA target sequence
gaaatttagaaattcagagttaaag

SEQ ID NO: 190656 - DNA, 25 bp, Artificial sequence
  SiRNA target sequence
aaatttagaaattcagagttaaagt

SEQ ID NO: 190657 - DNA, 25 bp, Artificial sequence
  SiRNA target sequence
aatttagaaattcagagttaaagtt

SEQ ID NO: 190658 - DNA, 25 bp, Artificial sequence
  SiRNA target sequence
atttagaaattcagagttaaagttt

SEQ ID NO: 190659 - DNA, 25 bp, Artificial sequence
  SiRNA target sequence
tttagaaattcagagttaaagttta

SEQ ID NO: 190660 - DNA, 25 bp, Artificial sequence
  SiRNA target sequence
ttagaaattcagagttaaagtttaa

SEQ ID NO: 190661 - DNA, 25 bp, Artificial sequence
  SiRNA target sequence
tagaaattcagagttaaagtttaat

SEQ ID NO: 190662 - DNA, 25 bp, Artificial sequence
  SiRNA target sequence
agaaattcagagttaaagtttaata

SEQ ID NO: 190663 - DNA, 25 bp, Artificial sequence
  SiRNA target sequence
gaaattcagagttaaagtttaatat

SEQ ID NO: 190664 - DNA, 25 bp, Artificial sequence
  SiRNA target sequence
aaattcagagttaaagtttaatatt

SEQ ID NO: 190665 - DNA, 25 bp, Artificial sequence
  SiRNA target sequence
aattcagagttaaagtttaatattt

SEQ ID NO: 190666 - DNA, 25 bp, Artificial sequence
  SiRNA target sequence
attcagagttaaagtttaatatttc

SEQ ID NO: 190667 - DNA, 25 bp, Artificial sequence
  SiRNA target sequence
ttcagagttaaagtttaatatttcg

SEQ ID NO: 190668 - DNA, 25 bp, Artificial sequence
  SiRNA target sequence
tcagagttaaagtttaatatttcgg

SEQ ID NO: 190669 - DNA, 25 bp, Artificial sequence
  SiRNA target sequence
cagagttaaagtttaatatttcgga

SEQ ID NO: 190670 - DNA, 25 bp, Artificial sequence
  SiRNA target sequence
agagttaaagtttaatatttcggaa

SEQ ID NO: 190671 - DNA, 25 bp, Artificial sequence
  SiRNA target sequence
gagttaaagtttaatatttcggaaa

SEQ ID NO: 190672 - DNA, 25 bp, Artificial sequence
  SiRNA target sequence
agttaaagtttaatatttcggaaac

SEQ ID NO: 190673 - DNA, 25 bp, Artificial sequence
  SiRNA target sequence
gttaaagtttaatatttcggaaaca

SEQ ID NO: 190674 - DNA, 25 bp, Artificial sequence
  SiRNA target sequence
ttaaagtttaatatttcggaaacac

SEQ ID NO: 190675 - DNA, 25 bp, Artificial sequence
  SiRNA target sequence
taaagtttaatatttcggaaacact

SEQ ID NO: 190676 - DNA, 25 bp, Artificial sequence
  SiRNA target sequence
aaagtttaatatttcggaaacactt

SEQ ID NO: 190677 - DNA, 25 bp, Artificial sequence
  SiRNA target sequence
aagtttaatatttcggaaacacttg

SEQ ID NO: 190678 - DNA, 25 bp, Artificial sequence
  SiRNA target sequence
agtttaatatttcggaaacacttga

SEQ ID NO: 190679 - DNA, 25 bp, Artificial sequence
  SiRNA target sequence
gtttaatatttcggaaacacttgat

SEQ ID NO: 190680 - DNA, 25 bp, Artificial sequence
  SiRNA target sequence
tttaatatttcggaaacacttgata

SEQ ID NO: 190681 - DNA, 25 bp, Artificial sequence
  SiRNA target sequence
ttaatatttcggaaacacttgatag

SEQ ID NO: 190682 - DNA, 25 bp, Artificial sequence
  SiRNA target sequence
taatatttcggaaacacttgatagt

SEQ ID NO: 190683 - DNA, 25 bp, Artificial sequence
  SiRNA target sequence
aatatttcggaaacacttgatagta

SEQ ID NO: 190684 - DNA, 25 bp, Artificial sequence
  SiRNA target sequence
atatttcggaaacacttgatagtat

SEQ ID NO: 190685 - DNA, 25 bp, Artificial sequence
  SiRNA target sequence
tatttcggaaacacttgatagtatt

SEQ ID NO: 190686 - DNA, 25 bp, Artificial sequence
  SiRNA target sequence
atttcggaaacacttgatagtatta

SEQ ID NO: 190687 - DNA, 25 bp, Artificial sequence
  SiRNA target sequence
tttcggaaacacttgatagtattat

SEQ ID NO: 190688 - DNA, 25 bp, Artificial sequence
  SiRNA target sequence
ttcggaaacacttgatagtattata

SEQ ID NO: 190689 - DNA, 25 bp, Artificial sequence
  SiRNA target sequence
tcggaaacacttgatagtattatat

SEQ ID NO: 190690 - DNA, 25 bp, Artificial sequence
  SiRNA target sequence
cggaaacacttgatagtattatatc

SEQ ID NO: 190691 - DNA, 25 bp, Artificial sequence
  SiRNA target sequence
ggaaacacttgatagtattatatct

SEQ ID NO: 190692 - DNA, 25 bp, Artificial sequence
  SiRNA target sequence
gaaacacttgatagtattatatcta

SEQ ID NO: 190693 - DNA, 25 bp, Artificial sequence
  SiRNA target sequence
aaacacttgatagtattatatctac

SEQ ID NO: 190694 - DNA, 25 bp, Artificial sequence
  SiRNA target sequence
aacacttgatagtattatatctacc

SEQ ID NO: 190695 - DNA, 25 bp, Artificial sequence
  SiRNA target sequence
acacttgatagtattatatctacca

SEQ ID NO: 190696 - DNA, 25 bp, Artificial sequence
  SiRNA target sequence
cacttgatagtattatatctaccag

SEQ ID NO: 190697 - DNA, 25 bp, Artificial sequence
  SiRNA target sequence
acttgatagtattatatctaccaga

SEQ ID NO: 190698 - DNA, 25 bp, Artificial sequence
  SiRNA target sequence
cttgatagtattatatctaccagag

SEQ ID NO: 190699 - DNA, 25 bp, Artificial sequence
  SiRNA target sequence
ttgatagtattatatctaccagaga

SEQ ID NO: 190700 - DNA, 25 bp, Artificial sequence
  SiRNA target sequence
tgatagtattatatctaccagagac

SEQ ID NO: 190701 - DNA, 25 bp, Artificial sequence
  SiRNA target sequence
gatagtattatatctaccagagacc

SEQ ID NO: 190702 - DNA, 25 bp, Artificial sequence
  SiRNA target sequence
atagtattatatctaccagagacca

SEQ ID NO: 190703 - DNA, 25 bp, Artificial sequence
  SiRNA target sequence
tagtattatatctaccagagaccag

SEQ ID NO: 190704 - DNA, 25 bp, Artificial sequence
  SiRNA target sequence
agtattatatctaccagagaccagt

SEQ ID NO: 190705 - DNA, 25 bp, Artificial sequence
  SiRNA target sequence
gtattatatctaccagagaccagta

SEQ ID NO: 190706 - DNA, 25 bp, Artificial sequence
  SiRNA target sequence
tattatatctaccagagaccagtat

SEQ ID NO: 190707 - DNA, 25 bp, Artificial sequence
  SiRNA target sequence
attatatctaccagagaccagtatc

SEQ ID NO: 190708 - DNA, 25 bp, Artificial sequence
  SiRNA target sequence
ttatatctaccagagaccagtatca

SEQ ID NO: 190709 - DNA, 25 bp, Artificial sequence
  SiRNA target sequence
tatatctaccagagaccagtatcat

SEQ ID NO: 190710 - DNA, 25 bp, Artificial sequence
  SiRNA target sequence
atatctaccagagaccagtatcatt

SEQ ID NO: 190711 - DNA, 25 bp, Artificial sequence
  SiRNA target sequence
tatctaccagagaccagtatcatta

SEQ ID NO: 190712 - DNA, 25 bp, Artificial sequence
  SiRNA target sequence
atctaccagagaccagtatcattat

SEQ ID NO: 190713 - DNA, 25 bp, Artificial sequence
  SiRNA target sequence
tctaccagagaccagtatcattatc

SEQ ID NO: 190714 - DNA, 25 bp, Artificial sequence
  SiRNA target sequence
ctaccagagaccagtatcattatcc

SEQ ID NO: 190715 - DNA, 25 bp, Artificial sequence
  SiRNA target sequence
taccagagaccagtatcattatccc

SEQ ID NO: 190716 - DNA, 25 bp, Artificial sequence
  SiRNA target sequence
accagagaccagtatcattatccca

SEQ ID NO: 190717 - DNA, 25 bp, Artificial sequence
  SiRNA target sequence
ccagagaccagtatcattatcccaa

SEQ ID NO: 190718 - DNA, 25 bp, Artificial sequence
  SiRNA target sequence
cagagaccagtatcattatcccaat

SEQ ID NO: 190719 - DNA, 25 bp, Artificial sequence
  SiRNA target sequence
agagaccagtatcattatcccaatt

SEQ ID NO: 190720 - DNA, 25 bp, Artificial sequence
  SiRNA target sequence
gagaccagtatcattatcccaattt

SEQ ID NO: 190721 - DNA, 25 bp, Artificial sequence
  SiRNA target sequence
agaccagtatcattatcccaatttg

SEQ ID NO: 190722 - DNA, 25 bp, Artificial sequence
  SiRNA target sequence
gaccagtatcattatcccaatttga

SEQ ID NO: 190723 - DNA, 25 bp, Artificial sequence
  SiRNA target sequence
accagtatcattatcccaatttgat

SEQ ID NO: 190724 - DNA, 25 bp, Artificial sequence
  SiRNA target sequence
ccagtatcattatcccaatttgata

SEQ ID NO: 190725 - DNA, 25 bp, Artificial sequence
  SiRNA target sequence
cagtatcattatcccaatttgataa

SEQ ID NO: 190726 - DNA, 25 bp, Artificial sequence
  SiRNA target sequence
agtatcattatcccaatttgataaa

SEQ ID NO: 190727 - DNA, 25 bp, Artificial sequence
  SiRNA target sequence
gtatcattatcccaatttgataaaa

SEQ ID NO: 190728 - DNA, 25 bp, Artificial sequence
  SiRNA target sequence
tatcattatcccaatttgataaaaa

SEQ ID NO: 190729 - DNA, 25 bp, Artificial sequence
  SiRNA target sequence
atcattatcccaatttgataaaaac

SEQ ID NO: 190730 - DNA, 25 bp, Artificial sequence
  SiRNA target sequence
tcattatcccaatttgataaaaaca

SEQ ID NO: 190731 - DNA, 25 bp, Artificial sequence
  SiRNA target sequence
cattatcccaatttgataaaaacat

SEQ ID NO: 190732 - DNA, 25 bp, Artificial sequence
  SiRNA target sequence
attatcccaatttgataaaaacata

SEQ ID NO: 190733 - DNA, 25 bp, Artificial sequence
  SiRNA target sequence
ttatcccaatttgataaaaacatat

SEQ ID NO: 190734 - DNA, 25 bp, Artificial sequence
  SiRNA target sequence
tatcccaatttgataaaaacatatc

SEQ ID NO: 190735 - DNA, 25 bp, Artificial sequence
  SiRNA target sequence
atcccaatttgataaaaacatatcc

SEQ ID NO: 190736 - DNA, 25 bp, Artificial sequence
  SiRNA target sequence
tcccaatttgataaaaacatatcca

SEQ ID NO: 190737 - DNA, 25 bp, Artificial sequence
  SiRNA target sequence
cccaatttgataaaaacatatccaa

SEQ ID NO: 190738 - DNA, 25 bp, Artificial sequence
  SiRNA target sequence
ccaatttgataaaaacatatccaaa

SEQ ID NO: 190739 - DNA, 25 bp, Artificial sequence
  SiRNA target sequence
caatttgataaaaacatatccaaat

SEQ ID NO: 190740 - DNA, 25 bp, Artificial sequence
  SiRNA target sequence
aatttgataaaaacatatccaaatt

SEQ ID NO: 190741 - DNA, 25 bp, Artificial sequence
  SiRNA target sequence
atttgataaaaacatatccaaattt

SEQ ID NO: 190742 - DNA, 25 bp, Artificial sequence
  SiRNA target sequence
tttgataaaaacatatccaaatttt

SEQ ID NO: 190743 - DNA, 25 bp, Artificial sequence
  SiRNA target sequence
ttgataaaaacatatccaaatttta

SEQ ID NO: 190744 - DNA, 25 bp, Artificial sequence
  SiRNA target sequence
tgataaaaacatatccaaattttac

SEQ ID NO: 190745 - DNA, 25 bp, Artificial sequence
  SiRNA target sequence
gataaaaacatatccaaattttacg

SEQ ID NO: 190746 - DNA, 25 bp, Artificial sequence
  SiRNA target sequence
ataaaaacatatccaaattttacgc

SEQ ID NO: 190747 - DNA, 25 bp, Artificial sequence
  SiRNA target sequence
taaaaacatatccaaattttacgct

SEQ ID NO: 190748 - DNA, 25 bp, Artificial sequence
  SiRNA target sequence
aaaaacatatccaaattttacgctt

SEQ ID NO: 190749 - DNA, 25 bp, Artificial sequence
  SiRNA target sequence
aaaacatatccaaattttacgctta

SEQ ID NO: 190750 - DNA, 25 bp, Artificial sequence
  SiRNA target sequence
aaacatatccaaattttacgcttaa

SEQ ID NO: 190751 - DNA, 25 bp, Artificial sequence
  SiRNA target sequence
aacatatccaaattttacgcttaaa

SEQ ID NO: 190752 - DNA, 25 bp, Artificial sequence
  SiRNA target sequence
acatatccaaattttacgcttaaag

SEQ ID NO: 190753 - DNA, 25 bp, Artificial sequence
  SiRNA target sequence
catatccaaattttacgcttaaagt

SEQ ID NO: 190754 - DNA, 25 bp, Artificial sequence
  SiRNA target sequence
atatccaaattttacgcttaaagtt

SEQ ID NO: 190755 - DNA, 25 bp, Artificial sequence
  SiRNA target sequence
tatccaaattttacgcttaaagttg

SEQ ID NO: 190756 - DNA, 25 bp, Artificial sequence
  SiRNA target sequence
atccaaattttacgcttaaagttga

SEQ ID NO: 190757 - DNA, 25 bp, Artificial sequence
  SiRNA target sequence
tccaaattttacgcttaaagttgaa

SEQ ID NO: 190758 - DNA, 25 bp, Artificial sequence
  SiRNA target sequence
ccaaattttacgcttaaagttgaag

SEQ ID NO: 190759 - DNA, 25 bp, Artificial sequence
  SiRNA target sequence
caaattttacgcttaaagttgaagg

SEQ ID NO: 190760 - DNA, 25 bp, Artificial sequence
  SiRNA target sequence
aaattttacgcttaaagttgaaggc

SEQ ID NO: 190761 - DNA, 25 bp, Artificial sequence
  SiRNA target sequence
aattttacgcttaaagttgaaggcg

SEQ ID NO: 190762 - DNA, 25 bp, Artificial sequence
  SiRNA target sequence
attttacgcttaaagttgaaggcgg

SEQ ID NO: 190763 - DNA, 25 bp, Artificial sequence
  SiRNA target sequence
ttttacgcttaaagttgaaggcggt

SEQ ID NO: 190764 - DNA, 25 bp, Artificial sequence
  SiRNA target sequence
tttacgcttaaagttgaaggcggta

SEQ ID NO: 190765 - DNA, 25 bp, Artificial sequence
  SiRNA target sequence
ttacgcttaaagttgaaggcggtaa

SEQ ID NO: 190766 - DNA, 25 bp, Artificial sequence
  SiRNA target sequence
tacgcttaaagttgaaggcggtaac

SEQ ID NO: 190767 - DNA, 25 bp, Artificial sequence
  SiRNA target sequence
acgcttaaagttgaaggcggtaact

SEQ ID NO: 190768 - DNA, 25 bp, Artificial sequence
  SiRNA target sequence
cgcttaaagttgaaggcggtaactt

SEQ ID NO: 190769 - DNA, 25 bp, Artificial sequence
  SiRNA target sequence
gcttaaagttgaaggcggtaacttt

SEQ ID NO: 190770 - DNA, 25 bp, Artificial sequence
  SiRNA target sequence
cttaaagttgaaggcggtaactttt

SEQ ID NO: 190771 - DNA, 25 bp, Artificial sequence
  SiRNA target sequence
ttaaagttgaaggcggtaacttttc

SEQ ID NO: 190772 - DNA, 25 bp, Artificial sequence
  SiRNA target sequence
taaagttgaaggcggtaacttttca

SEQ ID NO: 190773 - DNA, 25 bp, Artificial sequence
  SiRNA target sequence
aaagttgaaggcggtaacttttcag

SEQ ID NO: 190774 - DNA, 25 bp, Artificial sequence
  SiRNA target sequence
aagttgaaggcggtaacttttcaga

SEQ ID NO: 190775 - DNA, 25 bp, Artificial sequence
  SiRNA target sequence
agttgaaggcggtaacttttcagat

SEQ ID NO: 190776 - DNA, 25 bp, Artificial sequence
  SiRNA target sequence
gttgaaggcggtaacttttcagatt

SEQ ID NO: 190777 - DNA, 25 bp, Artificial sequence
  SiRNA target sequence
ttgaaggcggtaacttttcagattc

SEQ ID NO: 190778 - DNA, 25 bp, Artificial sequence
  SiRNA target sequence
tgaaggcggtaacttttcagattct

SEQ ID NO: 190779 - DNA, 25 bp, Artificial sequence
  SiRNA target sequence
gaaggcggtaacttttcagattctg

SEQ ID NO: 190780 - DNA, 25 bp, Artificial sequence
  SiRNA target sequence
aaggcggtaacttttcagattctga

SEQ ID NO: 190781 - DNA, 25 bp, Artificial sequence
  SiRNA target sequence
aggcggtaacttttcagattctgaa

SEQ ID NO: 190782 - DNA, 25 bp, Artificial sequence
  SiRNA target sequence
ggcggtaacttttcagattctgaaa

SEQ ID NO: 190783 - DNA, 25 bp, Artificial sequence
  SiRNA target sequence
gcggtaacttttcagattctgaaat

SEQ ID NO: 190784 - DNA, 25 bp, Artificial sequence
  SiRNA target sequence
cggtaacttttcagattctgaaatt

SEQ ID NO: 190785 - DNA, 25 bp, Artificial sequence
  SiRNA target sequence
ggtaacttttcagattctgaaattg

SEQ ID NO: 190786 - DNA, 25 bp, Artificial sequence
  SiRNA target sequence
gtaacttttcagattctgaaattgt

SEQ ID NO: 190787 - DNA, 25 bp, Artificial sequence
  SiRNA target sequence
taacttttcagattctgaaattgtt

SEQ ID NO: 190788 - DNA, 25 bp, Artificial sequence
  SiRNA target sequence
aacttttcagattctgaaattgttg

SEQ ID NO: 190789 - DNA, 25 bp, Artificial sequence
  SiRNA target sequence
acttttcagattctgaaattgttgt

SEQ ID NO: 190790 - DNA, 25 bp, Artificial sequence
  SiRNA target sequence
cttttcagattctgaaattgttgta

SEQ ID NO: 190791 - DNA, 25 bp, Artificial sequence
  SiRNA target sequence
ttttcagattctgaaattgttgtat

SEQ ID NO: 190792 - DNA, 25 bp, Artificial sequence
  SiRNA target sequence
tttcagattctgaaattgttgtatt

SEQ ID NO: 190793 - DNA, 25 bp, Artificial sequence
  SiRNA target sequence
ttcagattctgaaattgttgtattt

SEQ ID NO: 190794 - DNA, 25 bp, Artificial sequence
  SiRNA target sequence
tcagattctgaaattgttgtatttc

SEQ ID NO: 190795 - DNA, 25 bp, Artificial sequence
  SiRNA target sequence
cagattctgaaattgttgtatttct

SEQ ID NO: 190796 - DNA, 25 bp, Artificial sequence
  SiRNA target sequence
agattctgaaattgttgtatttctt

SEQ ID NO: 190797 - DNA, 25 bp, Artificial sequence
  SiRNA target sequence
gattctgaaattgttgtatttcttg

SEQ ID NO: 190798 - DNA, 25 bp, Artificial sequence
  SiRNA target sequence
attctgaaattgttgtatttcttgg

SEQ ID NO: 190799 - DNA, 25 bp, Artificial sequence
  SiRNA target sequence
ttctgaaattgttgtatttcttggt

SEQ ID NO: 190800 - DNA, 25 bp, Artificial sequence
  SiRNA target sequence
tctgaaattgttgtatttcttggtg

SEQ ID NO: 190801 - DNA, 25 bp, Artificial sequence
  SiRNA target sequence
ctgaaattgttgtatttcttggtga

SEQ ID NO: 190802 - DNA, 25 bp, Artificial sequence
  SiRNA target sequence
tgaaattgttgtatttcttggtgaa

SEQ ID NO: 190803 - DNA, 25 bp, Artificial sequence
  SiRNA target sequence
gaaattgttgtatttcttggtgaaa

SEQ ID NO: 190804 - DNA, 25 bp, Artificial sequence
  SiRNA target sequence
aaattgttgtatttcttggtgaaaa

SEQ ID NO: 190805 - DNA, 25 bp, Artificial sequence
  SiRNA target sequence
aattgttgtatttcttggtgaaaat

SEQ ID NO: 190806 - DNA, 25 bp, Artificial sequence
  SiRNA target sequence
attgttgtatttcttggtgaaaatg

SEQ ID NO: 190807 - DNA, 25 bp, Artificial sequence
  SiRNA target sequence
ttgttgtatttcttggtgaaaatgg

SEQ ID NO: 190808 - DNA, 25 bp, Artificial sequence
  SiRNA target sequence
tgttgtatttcttggtgaaaatgga

SEQ ID NO: 190809 - DNA, 25 bp, Artificial sequence
  SiRNA target sequence
gttgtatttcttggtgaaaatggaa

SEQ ID NO: 190810 - DNA, 25 bp, Artificial sequence
  SiRNA target sequence
ttgtatttcttggtgaaaatggaat

SEQ ID NO: 190811 - DNA, 25 bp, Artificial sequence
  SiRNA target sequence
tgtatttcttggtgaaaatggaatg

SEQ ID NO: 190812 - DNA, 25 bp, Artificial sequence
  SiRNA target sequence
gtatttcttggtgaaaatggaatgg

SEQ ID NO: 190813 - DNA, 25 bp, Artificial sequence
  SiRNA target sequence
tatttcttggtgaaaatggaatggg

SEQ ID NO: 190814 - DNA, 25 bp, Artificial sequence
  SiRNA target sequence
atttcttggtgaaaatggaatgggc

SEQ ID NO: 190815 - DNA, 25 bp, Artificial sequence
  SiRNA target sequence
tttcttggtgaaaatggaatgggca

SEQ ID NO: 190816 - DNA, 25 bp, Artificial sequence
  SiRNA target sequence
ttcttggtgaaaatggaatgggcaa

SEQ ID NO: 190817 - DNA, 25 bp, Artificial sequence
  SiRNA target sequence
tcttggtgaaaatggaatgggcaaa

SEQ ID NO: 190818 - DNA, 25 bp, Artificial sequence
  SiRNA target sequence
cttggtgaaaatggaatgggcaaaa

SEQ ID NO: 190819 - DNA, 25 bp, Artificial sequence
  SiRNA target sequence
ttggtgaaaatggaatgggcaaaac

SEQ ID NO: 190820 - DNA, 25 bp, Artificial sequence
  SiRNA target sequence
tggtgaaaatggaatgggcaaaact

SEQ ID NO: 190821 - DNA, 25 bp, Artificial sequence
  SiRNA target sequence
ggtgaaaatggaatgggcaaaacta

SEQ ID NO: 190822 - DNA, 25 bp, Artificial sequence
  SiRNA target sequence
gtgaaaatggaatgggcaaaactac

SEQ ID NO: 190823 - DNA, 25 bp, Artificial sequence
  SiRNA target sequence
tgaaaatggaatgggcaaaactact

SEQ ID NO: 190824 - DNA, 25 bp, Artificial sequence
  SiRNA target sequence
gaaaatggaatgggcaaaactactt

SEQ ID NO: 190825 - DNA, 25 bp, Artificial sequence
  SiRNA target sequence
aaaatggaatgggcaaaactacttt

SEQ ID NO: 190826 - DNA, 25 bp, Artificial sequence
  SiRNA target sequence
aaatggaatgggcaaaactacttta

SEQ ID NO: 190827 - DNA, 25 bp, Artificial sequence
  SiRNA target sequence
aatggaatgggcaaaactactttag

SEQ ID NO: 190828 - DNA, 25 bp, Artificial sequence
  SiRNA target sequence
atggaatgggcaaaactactttagt

SEQ ID NO: 190829 - DNA, 25 bp, Artificial sequence
  SiRNA target sequence
tggaatgggcaaaactactttagta

SEQ ID NO: 190830 - DNA, 25 bp, Artificial sequence
  SiRNA target sequence
ggaatgggcaaaactactttagtag

SEQ ID NO: 190831 - DNA, 25 bp, Artificial sequence
  SiRNA target sequence
gaatgggcaaaactactttagtagg

SEQ ID NO: 190832 - DNA, 25 bp, Artificial sequence
  SiRNA target sequence
aatgggcaaaactactttagtaggt

SEQ ID NO: 190833 - DNA, 25 bp, Artificial sequence
  SiRNA target sequence
atgggcaaaactactttagtaggtt

SEQ ID NO: 190834 - DNA, 25 bp, Artificial sequence
  SiRNA target sequence
tgggcaaaactactttagtaggttt

SEQ ID NO: 190835 - DNA, 25 bp, Artificial sequence
  SiRNA target sequence
gggcaaaactactttagtaggtttg

SEQ ID NO: 190836 - DNA, 25 bp, Artificial sequence
  SiRNA target sequence
ggcaaaactactttagtaggtttga

SEQ ID NO: 190837 - DNA, 25 bp, Artificial sequence
  SiRNA target sequence
gcaaaactactttagtaggtttgat

SEQ ID NO: 190838 - DNA, 25 bp, Artificial sequence
  SiRNA target sequence
caaaactactttagtaggtttgatt

SEQ ID NO: 190839 - DNA, 25 bp, Artificial sequence
  SiRNA target sequence
aaaactactttagtaggtttgattt

SEQ ID NO: 190840 - DNA, 25 bp, Artificial sequence
  SiRNA target sequence
aaactactttagtaggtttgatttc

SEQ ID NO: 190841 - DNA, 25 bp, Artificial sequence
  SiRNA target sequence
aactactttagtaggtttgatttcg

SEQ ID NO: 190842 - DNA, 25 bp, Artificial sequence
  SiRNA target sequence
actactttagtaggtttgatttcgg

SEQ ID NO: 190843 - DNA, 25 bp, Artificial sequence
  SiRNA target sequence
ctactttagtaggtttgatttcggg

SEQ ID NO: 190844 - DNA, 25 bp, Artificial sequence
  SiRNA target sequence
tactttagtaggtttgatttcgggg

SEQ ID NO: 190845 - DNA, 25 bp, Artificial sequence
  SiRNA target sequence
actttagtaggtttgatttcggggt

SEQ ID NO: 190846 - DNA, 25 bp, Artificial sequence
  SiRNA target sequence
ctttagtaggtttgatttcggggtt

SEQ ID NO: 190847 - DNA, 25 bp, Artificial sequence
  SiRNA target sequence
tttagtaggtttgatttcggggtta

SEQ ID NO: 190848 - DNA, 25 bp, Artificial sequence
  SiRNA target sequence
ttagtaggtttgatttcggggttaa

SEQ ID NO: 190849 - DNA, 25 bp, Artificial sequence
  SiRNA target sequence
tagtaggtttgatttcggggttaat

SEQ ID NO: 190850 - DNA, 25 bp, Artificial sequence
  SiRNA target sequence
agtaggtttgatttcggggttaatt

SEQ ID NO: 190851 - DNA, 25 bp, Artificial sequence
  SiRNA target sequence
gtaggtttgatttcggggttaatta

SEQ ID NO: 190852 - DNA, 25 bp, Artificial sequence
  SiRNA target sequence
taggtttgatttcggggttaattaa

SEQ ID NO: 190853 - DNA, 25 bp, Artificial sequence
  SiRNA target sequence
aggtttgatttcggggttaattaaa

SEQ ID NO: 190854 - DNA, 25 bp, Artificial sequence
  SiRNA target sequence
ggtttgatttcggggttaattaaag

SEQ ID NO: 190855 - DNA, 25 bp, Artificial sequence
  SiRNA target sequence
gtttgatttcggggttaattaaaga

SEQ ID NO: 190856 - DNA, 25 bp, Artificial sequence
  SiRNA target sequence
tttgatttcggggttaattaaagat

SEQ ID NO: 190857 - DNA, 25 bp, Artificial sequence
  SiRNA target sequence
ttgatttcggggttaattaaagatg

SEQ ID NO: 190858 - DNA, 25 bp, Artificial sequence
  SiRNA target sequence
tgatttcggggttaattaaagatga

SEQ ID NO: 190859 - DNA, 25 bp, Artificial sequence
  SiRNA target sequence
gatttcggggttaattaaagatgat

SEQ ID NO: 190860 - DNA, 25 bp, Artificial sequence
  SiRNA target sequence
atttcggggttaattaaagatgata

SEQ ID NO: 190861 - DNA, 25 bp, Artificial sequence
  SiRNA target sequence
tttcggggttaattaaagatgataa

SEQ ID NO: 190862 - DNA, 25 bp, Artificial sequence
  SiRNA target sequence
ttcggggttaattaaagatgataac

SEQ ID NO: 190863 - DNA, 25 bp, Artificial sequence
  SiRNA target sequence
tcggggttaattaaagatgataacg

SEQ ID NO: 190864 - DNA, 25 bp, Artificial sequence
  SiRNA target sequence
cggggttaattaaagatgataacgg

SEQ ID NO: 190865 - DNA, 25 bp, Artificial sequence
  SiRNA target sequence
ggggttaattaaagatgataacggg

SEQ ID NO: 190866 - DNA, 25 bp, Artificial sequence
  SiRNA target sequence
gggttaattaaagatgataacgggg

SEQ ID NO: 190867 - DNA, 25 bp, Artificial sequence
  SiRNA target sequence
ggttaattaaagatgataacgggga

SEQ ID NO: 190868 - DNA, 25 bp, Artificial sequence
  SiRNA target sequence
gttaattaaagatgataacggggaa

SEQ ID NO: 190869 - DNA, 25 bp, Artificial sequence
  SiRNA target sequence
ttaattaaagatgataacggggaag

SEQ ID NO: 190870 - DNA, 25 bp, Artificial sequence
  SiRNA target sequence
taattaaagatgataacggggaaga

SEQ ID NO: 190871 - DNA, 25 bp, Artificial sequence
  SiRNA target sequence
aattaaagatgataacggggaagag

SEQ ID NO: 190872 - DNA, 25 bp, Artificial sequence
  SiRNA target sequence
attaaagatgataacggggaagagt

SEQ ID NO: 190873 - DNA, 25 bp, Artificial sequence
  SiRNA target sequence
ttaaagatgataacggggaagagtt

SEQ ID NO: 190874 - DNA, 25 bp, Artificial sequence
  SiRNA target sequence
taaagatgataacggggaagagttc

SEQ ID NO: 190875 - DNA, 25 bp, Artificial sequence
  SiRNA target sequence
aaagatgataacggggaagagttcg

SEQ ID NO: 190876 - DNA, 25 bp, Artificial sequence
  SiRNA target sequence
aagatgataacggggaagagttcgg

SEQ ID NO: 190877 - DNA, 25 bp, Artificial sequence
  SiRNA target sequence
agatgataacggggaagagttcggt

SEQ ID NO: 190878 - DNA, 25 bp, Artificial sequence
  SiRNA target sequence
gatgataacggggaagagttcggtt

SEQ ID NO: 190879 - DNA, 25 bp, Artificial sequence
  SiRNA target sequence
atgataacggggaagagttcggttt

SEQ ID NO: 190880 - DNA, 25 bp, Artificial sequence
  SiRNA target sequence
tgataacggggaagagttcggtttg

SEQ ID NO: 190881 - DNA, 25 bp, Artificial sequence
  SiRNA target sequence
gataacggggaagagttcggtttgt

SEQ ID NO: 190882 - DNA, 25 bp, Artificial sequence
  SiRNA target sequence
ataacggggaagagttcggtttgtt

SEQ ID NO: 190883 - DNA, 25 bp, Artificial sequence
  SiRNA target sequence
taacggggaagagttcggtttgttg

SEQ ID NO: 190884 - DNA, 25 bp, Artificial sequence
  SiRNA target sequence
aacggggaagagttcggtttgttgt

SEQ ID NO: 190885 - DNA, 25 bp, Artificial sequence
  SiRNA target sequence
acggggaagagttcggtttgttgtc

SEQ ID NO: 190886 - DNA, 25 bp, Artificial sequence
  SiRNA target sequence
cggggaagagttcggtttgttgtca

SEQ ID NO: 190887 - DNA, 25 bp, Artificial sequence
  SiRNA target sequence
ggggaagagttcggtttgttgtcat

SEQ ID NO: 190888 - DNA, 25 bp, Artificial sequence
  SiRNA target sequence
gggaagagttcggtttgttgtcata

SEQ ID NO: 190889 - DNA, 25 bp, Artificial sequence
  SiRNA target sequence
ggaagagttcggtttgttgtcatat

SEQ ID NO: 190890 - DNA, 25 bp, Artificial sequence
  SiRNA target sequence
gaagagttcggtttgttgtcatata

SEQ ID NO: 190891 - DNA, 25 bp, Artificial sequence
  SiRNA target sequence
aagagttcggtttgttgtcatatag

SEQ ID NO: 190892 - DNA, 25 bp, Artificial sequence
  SiRNA target sequence
agagttcggtttgttgtcatatagt

SEQ ID NO: 190893 - DNA, 25 bp, Artificial sequence
  SiRNA target sequence
gagttcggtttgttgtcatatagtc

SEQ ID NO: 190894 - DNA, 25 bp, Artificial sequence
  SiRNA target sequence
agttcggtttgttgtcatatagtct

SEQ ID NO: 190895 - DNA, 25 bp, Artificial sequence
  SiRNA target sequence
gttcggtttgttgtcatatagtctt

SEQ ID NO: 190896 - DNA, 25 bp, Artificial sequence
  SiRNA target sequence
ttcggtttgttgtcatatagtctta

SEQ ID NO: 190897 - DNA, 25 bp, Artificial sequence
  SiRNA target sequence
tcggtttgttgtcatatagtcttaa

SEQ ID NO: 190898 - DNA, 25 bp, Artificial sequence
  SiRNA target sequence
cggtttgttgtcatatagtcttaaa

SEQ ID NO: 190899 - DNA, 25 bp, Artificial sequence
  SiRNA target sequence
ggtttgttgtcatatagtcttaaac

SEQ ID NO: 190900 - DNA, 25 bp, Artificial sequence
  SiRNA target sequence
gtttgttgtcatatagtcttaaacc

SEQ ID NO: 190901 - DNA, 25 bp, Artificial sequence
  SiRNA target sequence
tttgttgtcatatagtcttaaaccg

SEQ ID NO: 190902 - DNA, 25 bp, Artificial sequence
  SiRNA target sequence
ttgttgtcatatagtcttaaaccgc

SEQ ID NO: 190903 - DNA, 25 bp, Artificial sequence
  SiRNA target sequence
tgttgtcatatagtcttaaaccgca

SEQ ID NO: 190904 - DNA, 25 bp, Artificial sequence
  SiRNA target sequence
gttgtcatatagtcttaaaccgcaa

SEQ ID NO: 190905 - DNA, 25 bp, Artificial sequence
  SiRNA target sequence
ttgtcatatagtcttaaaccgcaaa

SEQ ID NO: 190906 - DNA, 25 bp, Artificial sequence
  SiRNA target sequence
tgtcatatagtcttaaaccgcaaaa

SEQ ID NO: 190907 - DNA, 25 bp, Artificial sequence
  SiRNA target sequence
gtcatatagtcttaaaccgcaaaaa

SEQ ID NO: 190908 - DNA, 25 bp, Artificial sequence
  SiRNA target sequence
tcatatagtcttaaaccgcaaaaaa

SEQ ID NO: 190909 - DNA, 25 bp, Artificial sequence
  SiRNA target sequence
catatagtcttaaaccgcaaaaaat

SEQ ID NO: 190910 - DNA, 25 bp, Artificial sequence
  SiRNA target sequence
atatagtcttaaaccgcaaaaaatc

SEQ ID NO: 190911 - DNA, 25 bp, Artificial sequence
  SiRNA target sequence
tatagtcttaaaccgcaaaaaatca

SEQ ID NO: 190912 - DNA, 25 bp, Artificial sequence
  SiRNA target sequence
atagtcttaaaccgcaaaaaatcat

SEQ ID NO: 190913 - DNA, 25 bp, Artificial sequence
  SiRNA target sequence
tagtcttaaaccgcaaaaaatcata

SEQ ID NO: 190914 - DNA, 25 bp, Artificial sequence
  SiRNA target sequence
agtcttaaaccgcaaaaaatcatac

SEQ ID NO: 190915 - DNA, 25 bp, Artificial sequence
  SiRNA target sequence
gtcttaaaccgcaaaaaatcatacc

SEQ ID NO: 190916 - DNA, 25 bp, Artificial sequence
  SiRNA target sequence
tcttaaaccgcaaaaaatcataccg

SEQ ID NO: 190917 - DNA, 25 bp, Artificial sequence
  SiRNA target sequence
cttaaaccgcaaaaaatcataccga

SEQ ID NO: 190918 - DNA, 25 bp, Artificial sequence
  SiRNA target sequence
ttaaaccgcaaaaaatcataccgaa

SEQ ID NO: 190919 - DNA, 25 bp, Artificial sequence
  SiRNA target sequence
taaaccgcaaaaaatcataccgaaa

SEQ ID NO: 190920 - DNA, 25 bp, Artificial sequence
  SiRNA target sequence
aaaccgcaaaaaatcataccgaaat

SEQ ID NO: 190921 - DNA, 25 bp, Artificial sequence
  SiRNA target sequence
aaccgcaaaaaatcataccgaaata

SEQ ID NO: 190922 - DNA, 25 bp, Artificial sequence
  SiRNA target sequence
accgcaaaaaatcataccgaaatac

SEQ ID NO: 190923 - DNA, 25 bp, Artificial sequence
  SiRNA target sequence
ccgcaaaaaatcataccgaaataca

SEQ ID NO: 190924 - DNA, 25 bp, Artificial sequence
  SiRNA target sequence
cgcaaaaaatcataccgaaatacaa

SEQ ID NO: 190925 - DNA, 25 bp, Artificial sequence
  SiRNA target sequence
gcaaaaaatcataccgaaatacaaa

SEQ ID NO: 190926 - DNA, 25 bp, Artificial sequence
  SiRNA target sequence
caaaaaatcataccgaaatacaaag

SEQ ID NO: 190927 - DNA, 25 bp, Artificial sequence
  SiRNA target sequence
aaaaaatcataccgaaatacaaagg

SEQ ID NO: 190928 - DNA, 25 bp, Artificial sequence
  SiRNA target sequence
aaaaatcataccgaaatacaaagga

SEQ ID NO: 190929 - DNA, 25 bp, Artificial sequence
  SiRNA target sequence
aaaatcataccgaaatacaaaggaa

SEQ ID NO: 190930 - DNA, 25 bp, Artificial sequence
  SiRNA target sequence
aaatcataccgaaatacaaaggaac

SEQ ID NO: 190931 - DNA, 25 bp, Artificial sequence
  SiRNA target sequence
aatcataccgaaatacaaaggaaca

SEQ ID NO: 190932 - DNA, 25 bp, Artificial sequence
  SiRNA target sequence
atcataccgaaatacaaaggaacag

SEQ ID NO: 190933 - DNA, 25 bp, Artificial sequence
  SiRNA target sequence
tcataccgaaatacaaaggaacagt

SEQ ID NO: 190934 - DNA, 25 bp, Artificial sequence
  SiRNA target sequence
cataccgaaatacaaaggaacagtt

SEQ ID NO: 190935 - DNA, 25 bp, Artificial sequence
  SiRNA target sequence
ataccgaaatacaaaggaacagtta

SEQ ID NO: 190936 - DNA, 25 bp, Artificial sequence
  SiRNA target sequence
taccgaaatacaaaggaacagttag

SEQ ID NO: 190937 - DNA, 25 bp, Artificial sequence
  SiRNA target sequence
accgaaatacaaaggaacagttaga

SEQ ID NO: 190938 - DNA, 25 bp, Artificial sequence
  SiRNA target sequence
ccgaaatacaaaggaacagttagag

SEQ ID NO: 190939 - DNA, 25 bp, Artificial sequence
  SiRNA target sequence
cgaaatacaaaggaacagttagaga

SEQ ID NO: 190940 - DNA, 25 bp, Artificial sequence
  SiRNA target sequence
gaaatacaaaggaacagttagagat

SEQ ID NO: 190941 - DNA, 25 bp, Artificial sequence
  SiRNA target sequence
aaatacaaaggaacagttagagatc

SEQ ID NO: 190942 - DNA, 25 bp, Artificial sequence
  SiRNA target sequence
aatacaaaggaacagttagagatct

SEQ ID NO: 190943 - DNA, 25 bp, Artificial sequence
  SiRNA target sequence
atacaaaggaacagttagagatctt

SEQ ID NO: 190944 - DNA, 25 bp, Artificial sequence
  SiRNA target sequence
tacaaaggaacagttagagatcttt

SEQ ID NO: 190945 - DNA, 25 bp, Artificial sequence
  SiRNA target sequence
acaaaggaacagttagagatctttt

SEQ ID NO: 190946 - DNA, 25 bp, Artificial sequence
  SiRNA target sequence
caaaggaacagttagagatcttttt

SEQ ID NO: 190947 - DNA, 25 bp, Artificial sequence
  SiRNA target sequence
aaaggaacagttagagatcttttta

SEQ ID NO: 190948 - DNA, 25 bp, Artificial sequence
  SiRNA target sequence
aaggaacagttagagatctttttat

SEQ ID NO: 190949 - DNA, 25 bp, Artificial sequence
  SiRNA target sequence
aggaacagttagagatctttttatg

SEQ ID NO: 190950 - DNA, 25 bp, Artificial sequence
  SiRNA target sequence
ggaacagttagagatctttttatgt

SEQ ID NO: 190951 - DNA, 25 bp, Artificial sequence
  SiRNA target sequence
gaacagttagagatctttttatgtc

SEQ ID NO: 190952 - DNA, 25 bp, Artificial sequence
  SiRNA target sequence
aacagttagagatctttttatgtca

SEQ ID NO: 190953 - DNA, 25 bp, Artificial sequence
  SiRNA target sequence
acagttagagatctttttatgtcaa

SEQ ID NO: 190954 - DNA, 25 bp, Artificial sequence
  SiRNA target sequence
cagttagagatctttttatgtcaaa

SEQ ID NO: 190955 - DNA, 25 bp, Artificial sequence
  SiRNA target sequence
agttagagatctttttatgtcaaaa

SEQ ID NO: 190956 - DNA, 25 bp, Artificial sequence
  SiRNA target sequence
gttagagatctttttatgtcaaaaa

SEQ ID NO: 190957 - DNA, 25 bp, Artificial sequence
  SiRNA target sequence
ttagagatctttttatgtcaaaaat

SEQ ID NO: 190958 - DNA, 25 bp, Artificial sequence
  SiRNA target sequence
tagagatctttttatgtcaaaaatt

SEQ ID NO: 190959 - DNA, 25 bp, Artificial sequence
  SiRNA target sequence
agagatctttttatgtcaaaaattc

SEQ ID NO: 190960 - DNA, 25 bp, Artificial sequence
  SiRNA target sequence
gagatctttttatgtcaaaaattcg

SEQ ID NO: 190961 - DNA, 25 bp, Artificial sequence
  SiRNA target sequence
agatctttttatgtcaaaaattcgt

SEQ ID NO: 190962 - DNA, 25 bp, Artificial sequence
  SiRNA target sequence
gatctttttatgtcaaaaattcgtt

SEQ ID NO: 190963 - DNA, 25 bp, Artificial sequence
  SiRNA target sequence
atctttttatgtcaaaaattcgttc

SEQ ID NO: 190964 - DNA, 25 bp, Artificial sequence
  SiRNA target sequence
tctttttatgtcaaaaattcgttct

SEQ ID NO: 190965 - DNA, 25 bp, Artificial sequence
  SiRNA target sequence
ctttttatgtcaaaaattcgttctt

SEQ ID NO: 190966 - DNA, 25 bp, Artificial sequence
  SiRNA target sequence
tttttatgtcaaaaattcgttcttc

SEQ ID NO: 190967 - DNA, 25 bp, Artificial sequence
  SiRNA target sequence
ttttatgtcaaaaattcgttcttcc

SEQ ID NO: 190968 - DNA, 25 bp, Artificial sequence
  SiRNA target sequence
tttatgtcaaaaattcgttcttcct

SEQ ID NO: 190969 - DNA, 25 bp, Artificial sequence
  SiRNA target sequence
ttatgtcaaaaattcgttcttcctt

SEQ ID NO: 190970 - DNA, 25 bp, Artificial sequence
  SiRNA target sequence
tatgtcaaaaattcgttcttccttt

SEQ ID NO: 190971 - DNA, 25 bp, Artificial sequence
  SiRNA target sequence
atgtcaaaaattcgttcttcctttt

SEQ ID NO: 190972 - DNA, 25 bp, Artificial sequence
  SiRNA target sequence
tgtcaaaaattcgttcttccttttt

SEQ ID NO: 190973 - DNA, 25 bp, Artificial sequence
  SiRNA target sequence
gtcaaaaattcgttcttccttttta

SEQ ID NO: 190974 - DNA, 25 bp, Artificial sequence
  SiRNA target sequence
tcaaaaattcgttcttcctttttag

SEQ ID NO: 190975 - DNA, 25 bp, Artificial sequence
  SiRNA target sequence
caaaaattcgttcttcctttttaga

SEQ ID NO: 190976 - DNA, 25 bp, Artificial sequence
  SiRNA target sequence
aaaaattcgttcttcctttttagac

SEQ ID NO: 190977 - DNA, 25 bp, Artificial sequence
  SiRNA target sequence
aaaattcgttcttcctttttagacg

SEQ ID NO: 190978 - DNA, 25 bp, Artificial sequence
  SiRNA target sequence
aaattcgttcttcctttttagacgc

SEQ ID NO: 190979 - DNA, 25 bp, Artificial sequence
  SiRNA target sequence
aattcgttcttcctttttagacgct

SEQ ID NO: 190980 - DNA, 25 bp, Artificial sequence
  SiRNA target sequence
attcgttcttcctttttagacgcta

SEQ ID NO: 190981 - DNA, 25 bp, Artificial sequence
  SiRNA target sequence
ttcgttcttcctttttagacgctaa

SEQ ID NO: 190982 - DNA, 25 bp, Artificial sequence
  SiRNA target sequence
tcgttcttcctttttagacgctaat

SEQ ID NO: 190983 - DNA, 25 bp, Artificial sequence
  SiRNA target sequence
cgttcttcctttttagacgctaatt

SEQ ID NO: 190984 - DNA, 25 bp, Artificial sequence
  SiRNA target sequence
gttcttcctttttagacgctaattt

SEQ ID NO: 190985 - DNA, 25 bp, Artificial sequence
  SiRNA target sequence
ttcttcctttttagacgctaatttt

SEQ ID NO: 190986 - DNA, 25 bp, Artificial sequence
  SiRNA target sequence
tcttcctttttagacgctaattttg

SEQ ID NO: 190987 - DNA, 25 bp, Artificial sequence
  SiRNA target sequence
cttcctttttagacgctaattttgt

SEQ ID NO: 190988 - DNA, 25 bp, Artificial sequence
  SiRNA target sequence
ttcctttttagacgctaattttgtt

SEQ ID NO: 190989 - DNA, 25 bp, Artificial sequence
  SiRNA target sequence
tcctttttagacgctaattttgtta

SEQ ID NO: 190990 - DNA, 25 bp, Artificial sequence
  SiRNA target sequence
cctttttagacgctaattttgttaa

SEQ ID NO: 190991 - DNA, 25 bp, Artificial sequence
  SiRNA target sequence
ctttttagacgctaattttgttaat

SEQ ID NO: 190992 - DNA, 25 bp, Artificial sequence
  SiRNA target sequence
tttttagacgctaattttgttaatg

SEQ ID NO: 190993 - DNA, 25 bp, Artificial sequence
  SiRNA target sequence
ttttagacgctaattttgttaatga

SEQ ID NO: 190994 - DNA, 25 bp, Artificial sequence
  SiRNA target sequence
tttagacgctaattttgttaatgaa

SEQ ID NO: 190995 - DNA, 25 bp, Artificial sequence
  SiRNA target sequence
ttagacgctaattttgttaatgaag

SEQ ID NO: 190996 - DNA, 25 bp, Artificial sequence
  SiRNA target sequence
tagacgctaattttgttaatgaagc

SEQ ID NO: 190997 - DNA, 25 bp, Artificial sequence
  SiRNA target sequence
agacgctaattttgttaatgaagct

SEQ ID NO: 190998 - DNA, 25 bp, Artificial sequence
  SiRNA target sequence
gacgctaattttgttaatgaagcta

SEQ ID NO: 190999 - DNA, 25 bp, Artificial sequence
  SiRNA target sequence
acgctaattttgttaatgaagctat

SEQ ID NO: 191000 - DNA, 25 bp, Artificial sequence
  SiRNA target sequence
cgctaattttgttaatgaagctatt

SEQ ID NO: 191001 - DNA, 25 bp, Artificial sequence
  SiRNA target sequence
gctaattttgttaatgaagctatta

SEQ ID NO: 191002 - DNA, 25 bp, Artificial sequence
  SiRNA target sequence
ctaattttgttaatgaagctattaa

SEQ ID NO: 191003 - DNA, 25 bp, Artificial sequence
  SiRNA target sequence
taattttgttaatgaagctattaaa

SEQ ID NO: 191004 - DNA, 25 bp, Artificial sequence
  SiRNA target sequence
aattttgttaatgaagctattaaac

SEQ ID NO: 191005 - DNA, 25 bp, Artificial sequence
  SiRNA target sequence
attttgttaatgaagctattaaacc

SEQ ID NO: 191006 - DNA, 25 bp, Artificial sequence
  SiRNA target sequence
ttttgttaatgaagctattaaacct

SEQ ID NO: 191007 - DNA, 25 bp, Artificial sequence
  SiRNA target sequence
tttgttaatgaagctattaaacctt

SEQ ID NO: 191008 - DNA, 25 bp, Artificial sequence
  SiRNA target sequence
ttgttaatgaagctattaaaccttt

SEQ ID NO: 191009 - DNA, 25 bp, Artificial sequence
  SiRNA target sequence
tgttaatgaagctattaaaccttta

SEQ ID NO: 191010 - DNA, 25 bp, Artificial sequence
  SiRNA target sequence
gttaatgaagctattaaacctttag

SEQ ID NO: 191011 - DNA, 25 bp, Artificial sequence
  SiRNA target sequence
ttaatgaagctattaaacctttaga

SEQ ID NO: 191012 - DNA, 25 bp, Artificial sequence
  SiRNA target sequence
taatgaagctattaaacctttagat

SEQ ID NO: 191013 - DNA, 25 bp, Artificial sequence
  SiRNA target sequence
aatgaagctattaaacctttagata

SEQ ID NO: 191014 - DNA, 25 bp, Artificial sequence
  SiRNA target sequence
atgaagctattaaacctttagatat

SEQ ID NO: 191015 - DNA, 25 bp, Artificial sequence
  SiRNA target sequence
tgaagctattaaacctttagatatt

SEQ ID NO: 191016 - DNA, 25 bp, Artificial sequence
  SiRNA target sequence
gaagctattaaacctttagatattc

SEQ ID NO: 191017 - DNA, 25 bp, Artificial sequence
  SiRNA target sequence
aagctattaaacctttagatattca

SEQ ID NO: 191018 - DNA, 25 bp, Artificial sequence
  SiRNA target sequence
agctattaaacctttagatattcat

SEQ ID NO: 191019 - DNA, 25 bp, Artificial sequence
  SiRNA target sequence
gctattaaacctttagatattcatc

SEQ ID NO: 191020 - DNA, 25 bp, Artificial sequence
  SiRNA target sequence
ctattaaacctttagatattcatca

SEQ ID NO: 191021 - DNA, 25 bp, Artificial sequence
  SiRNA target sequence
tattaaacctttagatattcatcat

SEQ ID NO: 191022 - DNA, 25 bp, Artificial sequence
  SiRNA target sequence
attaaacctttagatattcatcatt

SEQ ID NO: 191023 - DNA, 25 bp, Artificial sequence
  SiRNA target sequence
ttaaacctttagatattcatcattt

SEQ ID NO: 191024 - DNA, 25 bp, Artificial sequence
  SiRNA target sequence
taaacctttagatattcatcattta

SEQ ID NO: 191025 - DNA, 25 bp, Artificial sequence
  SiRNA target sequence
aaacctttagatattcatcatttat

SEQ ID NO: 191026 - DNA, 25 bp, Artificial sequence
  SiRNA target sequence
aacctttagatattcatcatttata

SEQ ID NO: 191027 - DNA, 25 bp, Artificial sequence
  SiRNA target sequence
acctttagatattcatcatttatac

SEQ ID NO: 191028 - DNA, 25 bp, Artificial sequence
  SiRNA target sequence
cctttagatattcatcatttatacg

SEQ ID NO: 191029 - DNA, 25 bp, Artificial sequence
  SiRNA target sequence
ctttagatattcatcatttatacga

SEQ ID NO: 191030 - DNA, 25 bp, Artificial sequence
  SiRNA target sequence
tttagatattcatcatttatacgac

SEQ ID NO: 191031 - DNA, 25 bp, Artificial sequence
  SiRNA target sequence
ttagatattcatcatttatacgacc

SEQ ID NO: 191032 - DNA, 25 bp, Artificial sequence
  SiRNA target sequence
tagatattcatcatttatacgacca

SEQ ID NO: 191033 - DNA, 25 bp, Artificial sequence
  SiRNA target sequence
agatattcatcatttatacgaccaa

SEQ ID NO: 191034 - DNA, 25 bp, Artificial sequence
  SiRNA target sequence
gatattcatcatttatacgaccaac

SEQ ID NO: 191035 - DNA, 25 bp, Artificial sequence
  SiRNA target sequence
atattcatcatttatacgaccaact

SEQ ID NO: 191036 - DNA, 25 bp, Artificial sequence
  SiRNA target sequence
tattcatcatttatacgaccaactt

SEQ ID NO: 191037 - DNA, 25 bp, Artificial sequence
  SiRNA target sequence
attcatcatttatacgaccaacttg

SEQ ID NO: 191038 - DNA, 25 bp, Artificial sequence
  SiRNA target sequence
ttcatcatttatacgaccaacttgt

SEQ ID NO: 191039 - DNA, 25 bp, Artificial sequence
  SiRNA target sequence
tcatcatttatacgaccaacttgta

SEQ ID NO: 191040 - DNA, 25 bp, Artificial sequence
  SiRNA target sequence
catcatttatacgaccaacttgtag

SEQ ID NO: 191041 - DNA, 25 bp, Artificial sequence
  SiRNA target sequence
atcatttatacgaccaacttgtaga

SEQ ID NO: 191042 - DNA, 25 bp, Artificial sequence
  SiRNA target sequence
tcatttatacgaccaacttgtagaa

SEQ ID NO: 191043 - DNA, 25 bp, Artificial sequence
  SiRNA target sequence
catttatacgaccaacttgtagaaa

SEQ ID NO: 191044 - DNA, 25 bp, Artificial sequence
  SiRNA target sequence
atttatacgaccaacttgtagaaaa

SEQ ID NO: 191045 - DNA, 25 bp, Artificial sequence
  SiRNA target sequence
tttatacgaccaacttgtagaaaac

SEQ ID NO: 191046 - DNA, 25 bp, Artificial sequence
  SiRNA target sequence
ttatacgaccaacttgtagaaaact

SEQ ID NO: 191047 - DNA, 25 bp, Artificial sequence
  SiRNA target sequence
tatacgaccaacttgtagaaaactt

SEQ ID NO: 191048 - DNA, 25 bp, Artificial sequence
  SiRNA target sequence
atacgaccaacttgtagaaaacttg

SEQ ID NO: 191049 - DNA, 25 bp, Artificial sequence
  SiRNA target sequence
tacgaccaacttgtagaaaacttga

SEQ ID NO: 191050 - DNA, 25 bp, Artificial sequence
  SiRNA target sequence
acgaccaacttgtagaaaacttgag

SEQ ID NO: 191051 - DNA, 25 bp, Artificial sequence
  SiRNA target sequence
cgaccaacttgtagaaaacttgagt

SEQ ID NO: 191052 - DNA, 25 bp, Artificial sequence
  SiRNA target sequence
gaccaacttgtagaaaacttgagtg

SEQ ID NO: 191053 - DNA, 25 bp, Artificial sequence
  SiRNA target sequence
accaacttgtagaaaacttgagtgg

SEQ ID NO: 191054 - DNA, 25 bp, Artificial sequence
  SiRNA target sequence
ccaacttgtagaaaacttgagtggt

SEQ ID NO: 191055 - DNA, 25 bp, Artificial sequence
  SiRNA target sequence
caacttgtagaaaacttgagtggtg

SEQ ID NO: 191056 - DNA, 25 bp, Artificial sequence
  SiRNA target sequence
aacttgtagaaaacttgagtggtgg

SEQ ID NO: 191057 - DNA, 25 bp, Artificial sequence
  SiRNA target sequence
acttgtagaaaacttgagtggtgga

SEQ ID NO: 191058 - DNA, 25 bp, Artificial sequence
  SiRNA target sequence
cttgtagaaaacttgagtggtggag

SEQ ID NO: 191059 - DNA, 25 bp, Artificial sequence
  SiRNA target sequence
ttgtagaaaacttgagtggtggaga

SEQ ID NO: 191060 - DNA, 25 bp, Artificial sequence
  SiRNA target sequence
tgtagaaaacttgagtggtggagaa

SEQ ID NO: 191061 - DNA, 25 bp, Artificial sequence
  SiRNA target sequence
gtagaaaacttgagtggtggagaat

SEQ ID NO: 191062 - DNA, 25 bp, Artificial sequence
  SiRNA target sequence
tagaaaacttgagtggtggagaatt

SEQ ID NO: 191063 - DNA, 25 bp, Artificial sequence
  SiRNA target sequence
agaaaacttgagtggtggagaatta

SEQ ID NO: 191064 - DNA, 25 bp, Artificial sequence
  SiRNA target sequence
gaaaacttgagtggtggagaattac

SEQ ID NO: 191065 - DNA, 25 bp, Artificial sequence
  SiRNA target sequence
aaaacttgagtggtggagaattaca

SEQ ID NO: 191066 - DNA, 25 bp, Artificial sequence
  SiRNA target sequence
aaacttgagtggtggagaattacaa

SEQ ID NO: 191067 - DNA, 25 bp, Artificial sequence
  SiRNA target sequence
aacttgagtggtggagaattacaaa

SEQ ID NO: 191068 - DNA, 25 bp, Artificial sequence
  SiRNA target sequence
acttgagtggtggagaattacaaag

SEQ ID NO: 191069 - DNA, 25 bp, Artificial sequence
  SiRNA target sequence
cttgagtggtggagaattacaaaga

SEQ ID NO: 191070 - DNA, 25 bp, Artificial sequence
  SiRNA target sequence
ttgagtggtggagaattacaaagaa

SEQ ID NO: 191071 - DNA, 25 bp, Artificial sequence
  SiRNA target sequence
tgagtggtggagaattacaaagaat

SEQ ID NO: 191072 - DNA, 25 bp, Artificial sequence
  SiRNA target sequence
gagtggtggagaattacaaagaatt

SEQ ID NO: 191073 - DNA, 25 bp, Artificial sequence
  SiRNA target sequence
agtggtggagaattacaaagaattg

SEQ ID NO: 191074 - DNA, 25 bp, Artificial sequence
  SiRNA target sequence
gtggtggagaattacaaagaattgc

SEQ ID NO: 191075 - DNA, 25 bp, Artificial sequence
  SiRNA target sequence
tggtggagaattacaaagaattgca

SEQ ID NO: 191076 - DNA, 25 bp, Artificial sequence
  SiRNA target sequence
ggtggagaattacaaagaattgcaa

SEQ ID NO: 191077 - DNA, 25 bp, Artificial sequence
  SiRNA target sequence
gtggagaattacaaagaattgcaat

SEQ ID NO: 191078 - DNA, 25 bp, Artificial sequence
  SiRNA target sequence
tggagaattacaaagaattgcaata

SEQ ID NO: 191079 - DNA, 25 bp, Artificial sequence
  SiRNA target sequence
ggagaattacaaagaattgcaataa

SEQ ID NO: 191080 - DNA, 25 bp, Artificial sequence
  SiRNA target sequence
gagaattacaaagaattgcaataat

SEQ ID NO: 191081 - DNA, 25 bp, Artificial sequence
  SiRNA target sequence
agaattacaaagaattgcaataata

SEQ ID NO: 191082 - DNA, 25 bp, Artificial sequence
  SiRNA target sequence
gaattacaaagaattgcaataataa

SEQ ID NO: 191083 - DNA, 25 bp, Artificial sequence
  SiRNA target sequence
aattacaaagaattgcaataataat

SEQ ID NO: 191084 - DNA, 25 bp, Artificial sequence
  SiRNA target sequence
attacaaagaattgcaataataata

SEQ ID NO: 191085 - DNA, 25 bp, Artificial sequence
  SiRNA target sequence
ttacaaagaattgcaataataatat

SEQ ID NO: 191086 - DNA, 25 bp, Artificial sequence
  SiRNA target sequence
tacaaagaattgcaataataatatg

SEQ ID NO: 191087 - DNA, 25 bp, Artificial sequence
  SiRNA target sequence
acaaagaattgcaataataatatgt

SEQ ID NO: 191088 - DNA, 25 bp, Artificial sequence
  SiRNA target sequence
caaagaattgcaataataatatgtt

SEQ ID NO: 191089 - DNA, 25 bp, Artificial sequence
  SiRNA target sequence
aaagaattgcaataataatatgttt

SEQ ID NO: 191090 - DNA, 25 bp, Artificial sequence
  SiRNA target sequence
aagaattgcaataataatatgttta

SEQ ID NO: 191091 - DNA, 25 bp, Artificial sequence
  SiRNA target sequence
agaattgcaataataatatgtttag

SEQ ID NO: 191092 - DNA, 25 bp, Artificial sequence
  SiRNA target sequence
gaattgcaataataatatgtttagg

SEQ ID NO: 191093 - DNA, 25 bp, Artificial sequence
  SiRNA target sequence
aattgcaataataatatgtttagga

SEQ ID NO: 191094 - DNA, 25 bp, Artificial sequence
  SiRNA target sequence
attgcaataataatatgtttaggaa

SEQ ID NO: 191095 - DNA, 25 bp, Artificial sequence
  SiRNA target sequence
ttgcaataataatatgtttaggaaa

SEQ ID NO: 191096 - DNA, 25 bp, Artificial sequence
  SiRNA target sequence
tgcaataataatatgtttaggaaaa

SEQ ID NO: 191097 - DNA, 25 bp, Artificial sequence
  SiRNA target sequence
gcaataataatatgtttaggaaaag

SEQ ID NO: 191098 - DNA, 25 bp, Artificial sequence
  SiRNA target sequence
caataataatatgtttaggaaaaga

SEQ ID NO: 191099 - DNA, 25 bp, Artificial sequence
  SiRNA target sequence
aataataatatgtttaggaaaagat

SEQ ID NO: 191100 - DNA, 25 bp, Artificial sequence
  SiRNA target sequence
ataataatatgtttaggaaaagatg

SEQ ID NO: 191101 - DNA, 25 bp, Artificial sequence
  SiRNA target sequence
taataatatgtttaggaaaagatgc

SEQ ID NO: 191102 - DNA, 25 bp, Artificial sequence
  SiRNA target sequence
aataatatgtttaggaaaagatgct

SEQ ID NO: 191103 - DNA, 25 bp, Artificial sequence
  SiRNA target sequence
ataatatgtttaggaaaagatgcta

SEQ ID NO: 191104 - DNA, 25 bp, Artificial sequence
  SiRNA target sequence
taatatgtttaggaaaagatgctaa

SEQ ID NO: 191105 - DNA, 25 bp, Artificial sequence
  SiRNA target sequence
aatatgtttaggaaaagatgctaac

SEQ ID NO: 191106 - DNA, 25 bp, Artificial sequence
  SiRNA target sequence
atatgtttaggaaaagatgctaacc

SEQ ID NO: 191107 - DNA, 25 bp, Artificial sequence
  SiRNA target sequence
tatgtttaggaaaagatgctaacct

SEQ ID NO: 191108 - DNA, 25 bp, Artificial sequence
  SiRNA target sequence
atgtttaggaaaagatgctaacctt

SEQ ID NO: 191109 - DNA, 25 bp, Artificial sequence
  SiRNA target sequence
tgtttaggaaaagatgctaaccttt

SEQ ID NO: 191110 - DNA, 25 bp, Artificial sequence
  SiRNA target sequence
gtttaggaaaagatgctaaccttta

SEQ ID NO: 191111 - DNA, 25 bp, Artificial sequence
  SiRNA target sequence
tttaggaaaagatgctaacctttat

SEQ ID NO: 191112 - DNA, 25 bp, Artificial sequence
  SiRNA target sequence
ttaggaaaagatgctaacctttatt

SEQ ID NO: 191113 - DNA, 25 bp, Artificial sequence
  SiRNA target sequence
taggaaaagatgctaacctttattt

SEQ ID NO: 191114 - DNA, 25 bp, Artificial sequence
  SiRNA target sequence
aggaaaagatgctaacctttattta

SEQ ID NO: 191115 - DNA, 25 bp, Artificial sequence
  SiRNA target sequence
ggaaaagatgctaacctttatttat

SEQ ID NO: 191116 - DNA, 25 bp, Artificial sequence
  SiRNA target sequence
gaaaagatgctaacctttatttatt

SEQ ID NO: 191117 - DNA, 25 bp, Artificial sequence
  SiRNA target sequence
aaaagatgctaacctttatttatta

SEQ ID NO: 191118 - DNA, 25 bp, Artificial sequence
  SiRNA target sequence
aaagatgctaacctttatttattag

SEQ ID NO: 191119 - DNA, 25 bp, Artificial sequence
  SiRNA target sequence
aagatgctaacctttatttattaga

SEQ ID NO: 191120 - DNA, 25 bp, Artificial sequence
  SiRNA target sequence
agatgctaacctttatttattagat

SEQ ID NO: 191121 - DNA, 25 bp, Artificial sequence
  SiRNA target sequence
gatgctaacctttatttattagatg

SEQ ID NO: 191122 - DNA, 25 bp, Artificial sequence
  SiRNA target sequence
atgctaacctttatttattagatga

SEQ ID NO: 191123 - DNA, 25 bp, Artificial sequence
  SiRNA target sequence
tgctaacctttatttattagatgaa

SEQ ID NO: 191124 - DNA, 25 bp, Artificial sequence
  SiRNA target sequence
gctaacctttatttattagatgaac

SEQ ID NO: 191125 - DNA, 25 bp, Artificial sequence
  SiRNA target sequence
ctaacctttatttattagatgaacc

SEQ ID NO: 191126 - DNA, 25 bp, Artificial sequence
  SiRNA target sequence
taacctttatttattagatgaacct

SEQ ID NO: 191127 - DNA, 25 bp, Artificial sequence
  SiRNA target sequence
aacctttatttattagatgaacctt

SEQ ID NO: 191128 - DNA, 25 bp, Artificial sequence
  SiRNA target sequence
acctttatttattagatgaaccttc

SEQ ID NO: 191129 - DNA, 25 bp, Artificial sequence
  SiRNA target sequence
cctttatttattagatgaaccttct

SEQ ID NO: 191130 - DNA, 25 bp, Artificial sequence
  SiRNA target sequence
ctttatttattagatgaaccttctg

SEQ ID NO: 191131 - DNA, 25 bp, Artificial sequence
  SiRNA target sequence
tttatttattagatgaaccttctgc

SEQ ID NO: 191132 - DNA, 25 bp, Artificial sequence
  SiRNA target sequence
ttatttattagatgaaccttctgcg

SEQ ID NO: 191133 - DNA, 25 bp, Artificial sequence
  SiRNA target sequence
tatttattagatgaaccttctgcgt

SEQ ID NO: 191134 - DNA, 25 bp, Artificial sequence
  SiRNA target sequence
atttattagatgaaccttctgcgta

SEQ ID NO: 191135 - DNA, 25 bp, Artificial sequence
  SiRNA target sequence
tttattagatgaaccttctgcgtat

SEQ ID NO: 191136 - DNA, 25 bp, Artificial sequence
  SiRNA target sequence
ttattagatgaaccttctgcgtatc

SEQ ID NO: 191137 - DNA, 25 bp, Artificial sequence
  SiRNA target sequence
tattagatgaaccttctgcgtatct

SEQ ID NO: 191138 - DNA, 25 bp, Artificial sequence
  SiRNA target sequence
attagatgaaccttctgcgtatcta

SEQ ID NO: 191139 - DNA, 25 bp, Artificial sequence
  SiRNA target sequence
ttagatgaaccttctgcgtatctag

SEQ ID NO: 191140 - DNA, 25 bp, Artificial sequence
  SiRNA target sequence
tagatgaaccttctgcgtatctaga

SEQ ID NO: 191141 - DNA, 25 bp, Artificial sequence
  SiRNA target sequence
agatgaaccttctgcgtatctagat

SEQ ID NO: 191142 - DNA, 25 bp, Artificial sequence
  SiRNA target sequence
gatgaaccttctgcgtatctagatt

SEQ ID NO: 191143 - DNA, 25 bp, Artificial sequence
  SiRNA target sequence
atgaaccttctgcgtatctagattc

SEQ ID NO: 191144 - DNA, 25 bp, Artificial sequence
  SiRNA target sequence
tgaaccttctgcgtatctagattca

SEQ ID NO: 191145 - DNA, 25 bp, Artificial sequence
  SiRNA target sequence
gaaccttctgcgtatctagattcag

SEQ ID NO: 191146 - DNA, 25 bp, Artificial sequence
  SiRNA target sequence
aaccttctgcgtatctagattcaga

SEQ ID NO: 191147 - DNA, 25 bp, Artificial sequence
  SiRNA target sequence
accttctgcgtatctagattcagat

SEQ ID NO: 191148 - DNA, 25 bp, Artificial sequence
  SiRNA target sequence
ccttctgcgtatctagattcagatc

SEQ ID NO: 191149 - DNA, 25 bp, Artificial sequence
  SiRNA target sequence
cttctgcgtatctagattcagatca

SEQ ID NO: 191150 - DNA, 25 bp, Artificial sequence
  SiRNA target sequence
ttctgcgtatctagattcagatcag

SEQ ID NO: 191151 - DNA, 25 bp, Artificial sequence
  SiRNA target sequence
tctgcgtatctagattcagatcaga

SEQ ID NO: 191152 - DNA, 25 bp, Artificial sequence
  SiRNA target sequence
ctgcgtatctagattcagatcagag

SEQ ID NO: 191153 - DNA, 25 bp, Artificial sequence
  SiRNA target sequence
tgcgtatctagattcagatcagaga

SEQ ID NO: 191154 - DNA, 25 bp, Artificial sequence
  SiRNA target sequence
gcgtatctagattcagatcagagaa

SEQ ID NO: 191155 - DNA, 25 bp, Artificial sequence
  SiRNA target sequence
cgtatctagattcagatcagagaat

SEQ ID NO: 191156 - DNA, 25 bp, Artificial sequence
  SiRNA target sequence
gtatctagattcagatcagagaata

SEQ ID NO: 191157 - DNA, 25 bp, Artificial sequence
  SiRNA target sequence
tatctagattcagatcagagaatag

SEQ ID NO: 191158 - DNA, 25 bp, Artificial sequence
  SiRNA target sequence
atctagattcagatcagagaatagc

SEQ ID NO: 191159 - DNA, 25 bp, Artificial sequence
  SiRNA target sequence
tctagattcagatcagagaatagcg

SEQ ID NO: 191160 - DNA, 25 bp, Artificial sequence
  SiRNA target sequence
ctagattcagatcagagaatagcga

SEQ ID NO: 191161 - DNA, 25 bp, Artificial sequence
  SiRNA target sequence
tagattcagatcagagaatagcgat

SEQ ID NO: 191162 - DNA, 25 bp, Artificial sequence
  SiRNA target sequence
agattcagatcagagaatagcgatt

SEQ ID NO: 191163 - DNA, 25 bp, Artificial sequence
  SiRNA target sequence
gattcagatcagagaatagcgattt

SEQ ID NO: 191164 - DNA, 25 bp, Artificial sequence
  SiRNA target sequence
attcagatcagagaatagcgatttc

SEQ ID NO: 191165 - DNA, 25 bp, Artificial sequence
  SiRNA target sequence
ttcagatcagagaatagcgatttca

SEQ ID NO: 191166 - DNA, 25 bp, Artificial sequence
  SiRNA target sequence
tcagatcagagaatagcgatttcaa

SEQ ID NO: 191167 - DNA, 25 bp, Artificial sequence
  SiRNA target sequence
cagatcagagaatagcgatttcaaa

SEQ ID NO: 191168 - DNA, 25 bp, Artificial sequence
  SiRNA target sequence
agatcagagaatagcgatttcaaaa

SEQ ID NO: 191169 - DNA, 25 bp, Artificial sequence
  SiRNA target sequence
gatcagagaatagcgatttcaaaag

SEQ ID NO: 191170 - DNA, 25 bp, Artificial sequence
  SiRNA target sequence
atcagagaatagcgatttcaaaagt

SEQ ID NO: 191171 - DNA, 25 bp, Artificial sequence
  SiRNA target sequence
tcagagaatagcgatttcaaaagtt

SEQ ID NO: 191172 - DNA, 25 bp, Artificial sequence
  SiRNA target sequence
cagagaatagcgatttcaaaagtta

SEQ ID NO: 191173 - DNA, 25 bp, Artificial sequence
  SiRNA target sequence
agagaatagcgatttcaaaagttat

SEQ ID NO: 191174 - DNA, 25 bp, Artificial sequence
  SiRNA target sequence
gagaatagcgatttcaaaagttata

SEQ ID NO: 191175 - DNA, 25 bp, Artificial sequence
  SiRNA target sequence
agaatagcgatttcaaaagttataa

SEQ ID NO: 191176 - DNA, 25 bp, Artificial sequence
  SiRNA target sequence
gaatagcgatttcaaaagttataaa

SEQ ID NO: 191177 - DNA, 25 bp, Artificial sequence
  SiRNA target sequence
aatagcgatttcaaaagttataaaa

SEQ ID NO: 191178 - DNA, 25 bp, Artificial sequence
  SiRNA target sequence
atagcgatttcaaaagttataaaaa

SEQ ID NO: 191179 - DNA, 25 bp, Artificial sequence
  SiRNA target sequence
tagcgatttcaaaagttataaaaag

SEQ ID NO: 191180 - DNA, 25 bp, Artificial sequence
  SiRNA target sequence
agcgatttcaaaagttataaaaagg

SEQ ID NO: 191181 - DNA, 25 bp, Artificial sequence
  SiRNA target sequence
gcgatttcaaaagttataaaaaggt

SEQ ID NO: 191182 - DNA, 25 bp, Artificial sequence
  SiRNA target sequence
cgatttcaaaagttataaaaaggtt

SEQ ID NO: 191183 - DNA, 25 bp, Artificial sequence
  SiRNA target sequence
gatttcaaaagttataaaaaggttt

SEQ ID NO: 191184 - DNA, 25 bp, Artificial sequence
  SiRNA target sequence
atttcaaaagttataaaaaggttta

SEQ ID NO: 191185 - DNA, 25 bp, Artificial sequence
  SiRNA target sequence
tttcaaaagttataaaaaggtttat

SEQ ID NO: 191186 - DNA, 25 bp, Artificial sequence
  SiRNA target sequence
ttcaaaagttataaaaaggtttatt

SEQ ID NO: 191187 - DNA, 25 bp, Artificial sequence
  SiRNA target sequence
tcaaaagttataaaaaggtttattt

SEQ ID NO: 191188 - DNA, 25 bp, Artificial sequence
  SiRNA target sequence
caaaagttataaaaaggtttattta

SEQ ID NO: 191189 - DNA, 25 bp, Artificial sequence
  SiRNA target sequence
aaaagttataaaaaggtttatttat

SEQ ID NO: 191190 - DNA, 25 bp, Artificial sequence
  SiRNA target sequence
aaagttataaaaaggtttatttatg

SEQ ID NO: 191191 - DNA, 25 bp, Artificial sequence
  SiRNA target sequence
aagttataaaaaggtttatttatgg

SEQ ID NO: 191192 - DNA, 25 bp, Artificial sequence
  SiRNA target sequence
agttataaaaaggtttatttatggg

SEQ ID NO: 191193 - DNA, 25 bp, Artificial sequence
  SiRNA target sequence
gttataaaaaggtttatttatggga

SEQ ID NO: 191194 - DNA, 25 bp, Artificial sequence
  SiRNA target sequence
ttataaaaaggtttatttatgggaa

SEQ ID NO: 191195 - DNA, 25 bp, Artificial sequence
  SiRNA target sequence
tataaaaaggtttatttatgggaag

SEQ ID NO: 191196 - DNA, 25 bp, Artificial sequence
  SiRNA target sequence
ataaaaaggtttatttatgggaaga

SEQ ID NO: 191197 - DNA, 25 bp, Artificial sequence
  SiRNA target sequence
taaaaaggtttatttatgggaagaa

SEQ ID NO: 191198 - DNA, 25 bp, Artificial sequence
  SiRNA target sequence
aaaaaggtttatttatgggaagaag

SEQ ID NO: 191199 - DNA, 25 bp, Artificial sequence
  SiRNA target sequence
aaaaggtttatttatgggaagaagc

SEQ ID NO: 191200 - DNA, 25 bp, Artificial sequence
  SiRNA target sequence
aaaggtttatttatgggaagaagcg

SEQ ID NO: 191201 - DNA, 25 bp, Artificial sequence
  SiRNA target sequence
aaggtttatttatgggaagaagcga

SEQ ID NO: 191202 - DNA, 25 bp, Artificial sequence
  SiRNA target sequence
aggtttatttatgggaagaagcgaa

SEQ ID NO: 191203 - DNA, 25 bp, Artificial sequence
  SiRNA target sequence
ggtttatttatgggaagaagcgaac

SEQ ID NO: 191204 - DNA, 25 bp, Artificial sequence
  SiRNA target sequence
gtttatttatgggaagaagcgaaca

SEQ ID NO: 191205 - DNA, 25 bp, Artificial sequence
  SiRNA target sequence
tttatttatgggaagaagcgaacag

SEQ ID NO: 191206 - DNA, 25 bp, Artificial sequence
  SiRNA target sequence
ttatttatgggaagaagcgaacagc

SEQ ID NO: 191207 - DNA, 25 bp, Artificial sequence
  SiRNA target sequence
tatttatgggaagaagcgaacagcc

SEQ ID NO: 191208 - DNA, 25 bp, Artificial sequence
  SiRNA target sequence
atttatgggaagaagcgaacagcct

SEQ ID NO: 191209 - DNA, 25 bp, Artificial sequence
  SiRNA target sequence
tttatgggaagaagcgaacagcctt

SEQ ID NO: 191210 - DNA, 25 bp, Artificial sequence
  SiRNA target sequence
ttatgggaagaagcgaacagccttt

SEQ ID NO: 191211 - DNA, 25 bp, Artificial sequence
  SiRNA target sequence
tatgggaagaagcgaacagcctttg

SEQ ID NO: 191212 - DNA, 25 bp, Artificial sequence
  SiRNA target sequence
atgggaagaagcgaacagcctttgt

SEQ ID NO: 191213 - DNA, 25 bp, Artificial sequence
  SiRNA target sequence
tgggaagaagcgaacagcctttgtg

SEQ ID NO: 191214 - DNA, 25 bp, Artificial sequence
  SiRNA target sequence
gggaagaagcgaacagcctttgtgg

SEQ ID NO: 191215 - DNA, 25 bp, Artificial sequence
  SiRNA target sequence
ggaagaagcgaacagcctttgtggt

SEQ ID NO: 191216 - DNA, 25 bp, Artificial sequence
  SiRNA target sequence
gaagaagcgaacagcctttgtggtt

SEQ ID NO: 191217 - DNA, 25 bp, Artificial sequence
  SiRNA target sequence
aagaagcgaacagcctttgtggttg

SEQ ID NO: 191218 - DNA, 25 bp, Artificial sequence
  SiRNA target sequence
agaagcgaacagcctttgtggttga

SEQ ID NO: 191219 - DNA, 25 bp, Artificial sequence
  SiRNA target sequence
gaagcgaacagcctttgtggttgaa

SEQ ID NO: 191220 - DNA, 25 bp, Artificial sequence
  SiRNA target sequence
aagcgaacagcctttgtggttgaac

SEQ ID NO: 191221 - DNA, 25 bp, Artificial sequence
  SiRNA target sequence
agcgaacagcctttgtggttgaaca

SEQ ID NO: 191222 - DNA, 25 bp, Artificial sequence
  SiRNA target sequence
gcgaacagcctttgtggttgaacat

SEQ ID NO: 191223 - DNA, 25 bp, Artificial sequence
  SiRNA target sequence
cgaacagcctttgtggttgaacatg

SEQ ID NO: 191224 - DNA, 25 bp, Artificial sequence
  SiRNA target sequence
gaacagcctttgtggttgaacatga

SEQ ID NO: 191225 - DNA, 25 bp, Artificial sequence
  SiRNA target sequence
aacagcctttgtggttgaacatgat

SEQ ID NO: 191226 - DNA, 25 bp, Artificial sequence
  SiRNA target sequence
acagcctttgtggttgaacatgatt

SEQ ID NO: 191227 - DNA, 25 bp, Artificial sequence
  SiRNA target sequence
cagcctttgtggttgaacatgattt

SEQ ID NO: 191228 - DNA, 25 bp, Artificial sequence
  SiRNA target sequence
agcctttgtggttgaacatgattta

SEQ ID NO: 191229 - DNA, 25 bp, Artificial sequence
  SiRNA target sequence
gcctttgtggttgaacatgatttaa

SEQ ID NO: 191230 - DNA, 25 bp, Artificial sequence
  SiRNA target sequence
cctttgtggttgaacatgatttaat

SEQ ID NO: 191231 - DNA, 25 bp, Artificial sequence
  SiRNA target sequence
ctttgtggttgaacatgatttaatt

SEQ ID NO: 191232 - DNA, 25 bp, Artificial sequence
  SiRNA target sequence
tttgtggttgaacatgatttaattg

SEQ ID NO: 191233 - DNA, 25 bp, Artificial sequence
  SiRNA target sequence
ttgtggttgaacatgatttaattgt

SEQ ID NO: 191234 - DNA, 25 bp, Artificial sequence
  SiRNA target sequence
tgtggttgaacatgatttaattgta

SEQ ID NO: 191235 - DNA, 25 bp, Artificial sequence
  SiRNA target sequence
gtggttgaacatgatttaattgtag

SEQ ID NO: 191236 - DNA, 25 bp, Artificial sequence
  SiRNA target sequence
tggttgaacatgatttaattgtagg

SEQ ID NO: 191237 - DNA, 25 bp, Artificial sequence
  SiRNA target sequence
ggttgaacatgatttaattgtaggt

SEQ ID NO: 191238 - DNA, 25 bp, Artificial sequence
  SiRNA target sequence
gttgaacatgatttaattgtaggta

SEQ ID NO: 191239 - DNA, 25 bp, Artificial sequence
  SiRNA target sequence
ttgaacatgatttaattgtaggtac

SEQ ID NO: 191240 - DNA, 25 bp, Artificial sequence
  SiRNA target sequence
tgaacatgatttaattgtaggtaca

SEQ ID NO: 191241 - DNA, 25 bp, Artificial sequence
  SiRNA target sequence
gaacatgatttaattgtaggtacat

SEQ ID NO: 191242 - DNA, 25 bp, Artificial sequence
  SiRNA target sequence
aacatgatttaattgtaggtacata

SEQ ID NO: 191243 - DNA, 25 bp, Artificial sequence
  SiRNA target sequence
acatgatttaattgtaggtacatat

SEQ ID NO: 191244 - DNA, 25 bp, Artificial sequence
  SiRNA target sequence
catgatttaattgtaggtacatatt

SEQ ID NO: 191245 - DNA, 25 bp, Artificial sequence
  SiRNA target sequence
atgatttaattgtaggtacatattt

SEQ ID NO: 191246 - DNA, 25 bp, Artificial sequence
  SiRNA target sequence
tgatttaattgtaggtacatatttg

SEQ ID NO: 191247 - DNA, 25 bp, Artificial sequence
  SiRNA target sequence
gatttaattgtaggtacatatttgg

SEQ ID NO: 191248 - DNA, 25 bp, Artificial sequence
  SiRNA target sequence
atttaattgtaggtacatatttggc

SEQ ID NO: 191249 - DNA, 25 bp, Artificial sequence
  SiRNA target sequence
tttaattgtaggtacatatttggct

SEQ ID NO: 191250 - DNA, 25 bp, Artificial sequence
  SiRNA target sequence
ttaattgtaggtacatatttggctg

SEQ ID NO: 191251 - DNA, 25 bp, Artificial sequence
  SiRNA target sequence
taattgtaggtacatatttggctga

SEQ ID NO: 191252 - DNA, 25 bp, Artificial sequence
  SiRNA target sequence
aattgtaggtacatatttggctgat

SEQ ID NO: 191253 - DNA, 25 bp, Artificial sequence
  SiRNA target sequence
attgtaggtacatatttggctgata

SEQ ID NO: 191254 - DNA, 25 bp, Artificial sequence
  SiRNA target sequence
ttgtaggtacatatttggctgataa

SEQ ID NO: 191255 - DNA, 25 bp, Artificial sequence
  SiRNA target sequence
tgtaggtacatatttggctgataaa

SEQ ID NO: 191256 - DNA, 25 bp, Artificial sequence
  SiRNA target sequence
gtaggtacatatttggctgataaag

SEQ ID NO: 191257 - DNA, 25 bp, Artificial sequence
  SiRNA target sequence
taggtacatatttggctgataaagt

SEQ ID NO: 191258 - DNA, 25 bp, Artificial sequence
  SiRNA target sequence
aggtacatatttggctgataaagtt

SEQ ID NO: 191259 - DNA, 25 bp, Artificial sequence
  SiRNA target sequence
ggtacatatttggctgataaagttg

SEQ ID NO: 191260 - DNA, 25 bp, Artificial sequence
  SiRNA target sequence
gtacatatttggctgataaagttgt

SEQ ID NO: 191261 - DNA, 25 bp, Artificial sequence
  SiRNA target sequence
tacatatttggctgataaagttgtt

SEQ ID NO: 191262 - DNA, 25 bp, Artificial sequence
  SiRNA target sequence
acatatttggctgataaagttgttg

SEQ ID NO: 191263 - DNA, 25 bp, Artificial sequence
  SiRNA target sequence
catatttggctgataaagttgttgt

SEQ ID NO: 191264 - DNA, 25 bp, Artificial sequence
  SiRNA target sequence
atatttggctgataaagttgttgtt

SEQ ID NO: 191265 - DNA, 25 bp, Artificial sequence
  SiRNA target sequence
tatttggctgataaagttgttgttt

SEQ ID NO: 191266 - DNA, 25 bp, Artificial sequence
  SiRNA target sequence
atttggctgataaagttgttgtttt

SEQ ID NO: 191267 - DNA, 25 bp, Artificial sequence
  SiRNA target sequence
tttggctgataaagttgttgttttt

SEQ ID NO: 191268 - DNA, 25 bp, Artificial sequence
  SiRNA target sequence
ttggctgataaagttgttgtttttg

SEQ ID NO: 191269 - DNA, 25 bp, Artificial sequence
  SiRNA target sequence
tggctgataaagttgttgtttttga

SEQ ID NO: 191270 - DNA, 25 bp, Artificial sequence
  SiRNA target sequence
ggctgataaagttgttgtttttgag

SEQ ID NO: 191271 - DNA, 25 bp, Artificial sequence
  SiRNA target sequence
gctgataaagttgttgtttttgagg

SEQ ID NO: 191272 - DNA, 25 bp, Artificial sequence
  SiRNA target sequence
ctgataaagttgttgtttttgaggg

SEQ ID NO: 191273 - DNA, 25 bp, Artificial sequence
  SiRNA target sequence
tgataaagttgttgtttttgaggga

SEQ ID NO: 191274 - DNA, 25 bp, Artificial sequence
  SiRNA target sequence
gataaagttgttgtttttgagggaa

SEQ ID NO: 191275 - DNA, 25 bp, Artificial sequence
  SiRNA target sequence
ataaagttgttgtttttgagggaag

SEQ ID NO: 191276 - DNA, 25 bp, Artificial sequence
  SiRNA target sequence
taaagttgttgtttttgagggaagc

SEQ ID NO: 191277 - DNA, 25 bp, Artificial sequence
  SiRNA target sequence
aaagttgttgtttttgagggaagcc

SEQ ID NO: 191278 - DNA, 25 bp, Artificial sequence
  SiRNA target sequence
aagttgttgtttttgagggaagccc

SEQ ID NO: 191279 - DNA, 25 bp, Artificial sequence
  SiRNA target sequence
agttgttgtttttgagggaagccct

SEQ ID NO: 191280 - DNA, 25 bp, Artificial sequence
  SiRNA target sequence
gttgttgtttttgagggaagcccta

SEQ ID NO: 191281 - DNA, 25 bp, Artificial sequence
  SiRNA target sequence
ttgttgtttttgagggaagccctag

SEQ ID NO: 191282 - DNA, 25 bp, Artificial sequence
  SiRNA target sequence
tgttgtttttgagggaagccctagt

SEQ ID NO: 191283 - DNA, 25 bp, Artificial sequence
  SiRNA target sequence
gttgtttttgagggaagccctagtg

SEQ ID NO: 191284 - DNA, 25 bp, Artificial sequence
  SiRNA target sequence
ttgtttttgagggaagccctagtgt

SEQ ID NO: 191285 - DNA, 25 bp, Artificial sequence
  SiRNA target sequence
tgtttttgagggaagccctagtgtt

SEQ ID NO: 191286 - DNA, 25 bp, Artificial sequence
  SiRNA target sequence
gtttttgagggaagccctagtgttc

SEQ ID NO: 191287 - DNA, 25 bp, Artificial sequence
  SiRNA target sequence
tttttgagggaagccctagtgttca

SEQ ID NO: 191288 - DNA, 25 bp, Artificial sequence
  SiRNA target sequence
ttttgagggaagccctagtgttcat

SEQ ID NO: 191289 - DNA, 25 bp, Artificial sequence
  SiRNA target sequence
tttgagggaagccctagtgttcata

SEQ ID NO: 191290 - DNA, 25 bp, Artificial sequence
  SiRNA target sequence
ttgagggaagccctagtgttcatag

SEQ ID NO: 191291 - DNA, 25 bp, Artificial sequence
  SiRNA target sequence
tgagggaagccctagtgttcatagc

SEQ ID NO: 191292 - DNA, 25 bp, Artificial sequence
  SiRNA target sequence
gagggaagccctagtgttcatagca

SEQ ID NO: 191293 - DNA, 25 bp, Artificial sequence
  SiRNA target sequence
agggaagccctagtgttcatagcac

SEQ ID NO: 191294 - DNA, 25 bp, Artificial sequence
  SiRNA target sequence
gggaagccctagtgttcatagcact

SEQ ID NO: 191295 - DNA, 25 bp, Artificial sequence
  SiRNA target sequence
ggaagccctagtgttcatagcactg

SEQ ID NO: 191296 - DNA, 25 bp, Artificial sequence
  SiRNA target sequence
gaagccctagtgttcatagcactgc

SEQ ID NO: 191297 - DNA, 25 bp, Artificial sequence
  SiRNA target sequence
aagccctagtgttcatagcactgct

SEQ ID NO: 191298 - DNA, 25 bp, Artificial sequence
  SiRNA target sequence
agccctagtgttcatagcactgctc

SEQ ID NO: 191299 - DNA, 25 bp, Artificial sequence
  SiRNA target sequence
gccctagtgttcatagcactgctca

SEQ ID NO: 191300 - DNA, 25 bp, Artificial sequence
  SiRNA target sequence
ccctagtgttcatagcactgctcat

SEQ ID NO: 191301 - DNA, 25 bp, Artificial sequence
  SiRNA target sequence
cctagtgttcatagcactgctcata

SEQ ID NO: 191302 - DNA, 25 bp, Artificial sequence
  SiRNA target sequence
ctagtgttcatagcactgctcataa

SEQ ID NO: 191303 - DNA, 25 bp, Artificial sequence
  SiRNA target sequence
tagtgttcatagcactgctcataaa

SEQ ID NO: 191304 - DNA, 25 bp, Artificial sequence
  SiRNA target sequence
agtgttcatagcactgctcataaac

SEQ ID NO: 191305 - DNA, 25 bp, Artificial sequence
  SiRNA target sequence
gtgttcatagcactgctcataaacc

SEQ ID NO: 191306 - DNA, 25 bp, Artificial sequence
  SiRNA target sequence
tgttcatagcactgctcataaaccg

SEQ ID NO: 191307 - DNA, 25 bp, Artificial sequence
  SiRNA target sequence
gttcatagcactgctcataaaccga

SEQ ID NO: 191308 - DNA, 25 bp, Artificial sequence
  SiRNA target sequence
ttcatagcactgctcataaaccgat

SEQ ID NO: 191309 - DNA, 25 bp, Artificial sequence
  SiRNA target sequence
tcatagcactgctcataaaccgatg

SEQ ID NO: 191310 - DNA, 25 bp, Artificial sequence
  SiRNA target sequence
catagcactgctcataaaccgatgg

SEQ ID NO: 191311 - DNA, 25 bp, Artificial sequence
  SiRNA target sequence
atagcactgctcataaaccgatgga

SEQ ID NO: 191312 - DNA, 25 bp, Artificial sequence
  SiRNA target sequence
tagcactgctcataaaccgatggat

SEQ ID NO: 191313 - DNA, 25 bp, Artificial sequence
  SiRNA target sequence
agcactgctcataaaccgatggatt

SEQ ID NO: 191314 - DNA, 25 bp, Artificial sequence
  SiRNA target sequence
gcactgctcataaaccgatggattt

SEQ ID NO: 191315 - DNA, 25 bp, Artificial sequence
  SiRNA target sequence
cactgctcataaaccgatggatttg

SEQ ID NO: 191316 - DNA, 25 bp, Artificial sequence
  SiRNA target sequence
actgctcataaaccgatggatttgc

SEQ ID NO: 191317 - DNA, 25 bp, Artificial sequence
  SiRNA target sequence
ctgctcataaaccgatggatttgca

SEQ ID NO: 191318 - DNA, 25 bp, Artificial sequence
  SiRNA target sequence
tgctcataaaccgatggatttgcat

SEQ ID NO: 191319 - DNA, 25 bp, Artificial sequence
  SiRNA target sequence
gctcataaaccgatggatttgcata

SEQ ID NO: 191320 - DNA, 25 bp, Artificial sequence
  SiRNA target sequence
ctcataaaccgatggatttgcatag

SEQ ID NO: 191321 - DNA, 25 bp, Artificial sequence
  SiRNA target sequence
tcataaaccgatggatttgcatagt

SEQ ID NO: 191322 - DNA, 25 bp, Artificial sequence
  SiRNA target sequence
cataaaccgatggatttgcatagtg

SEQ ID NO: 191323 - DNA, 25 bp, Artificial sequence
  SiRNA target sequence
ataaaccgatggatttgcatagtgg

SEQ ID NO: 191324 - DNA, 25 bp, Artificial sequence
  SiRNA target sequence
taaaccgatggatttgcatagtgga

SEQ ID NO: 191325 - DNA, 25 bp, Artificial sequence
  SiRNA target sequence
aaaccgatggatttgcatagtggaa

SEQ ID NO: 191326 - DNA, 25 bp, Artificial sequence
  SiRNA target sequence
aaccgatggatttgcatagtggaat

SEQ ID NO: 191327 - DNA, 25 bp, Artificial sequence
  SiRNA target sequence
accgatggatttgcatagtggaatg

SEQ ID NO: 191328 - DNA, 25 bp, Artificial sequence
  SiRNA target sequence
ccgatggatttgcatagtggaatga

SEQ ID NO: 191329 - DNA, 25 bp, Artificial sequence
  SiRNA target sequence
cgatggatttgcatagtggaatgaa

SEQ ID NO: 191330 - DNA, 25 bp, Artificial sequence
  SiRNA target sequence
gatggatttgcatagtggaatgaat

SEQ ID NO: 191331 - DNA, 25 bp, Artificial sequence
  SiRNA target sequence
atggatttgcatagtggaatgaata

SEQ ID NO: 191332 - DNA, 25 bp, Artificial sequence
  SiRNA target sequence
tggatttgcatagtggaatgaatat

SEQ ID NO: 191333 - DNA, 25 bp, Artificial sequence
  SiRNA target sequence
ggatttgcatagtggaatgaatatt

SEQ ID NO: 191334 - DNA, 25 bp, Artificial sequence
  SiRNA target sequence
gatttgcatagtggaatgaatattt

SEQ ID NO: 191335 - DNA, 25 bp, Artificial sequence
  SiRNA target sequence
atttgcatagtggaatgaatatttt

SEQ ID NO: 191336 - DNA, 25 bp, Artificial sequence
  SiRNA target sequence
tttgcatagtggaatgaatattttt

SEQ ID NO: 191337 - DNA, 25 bp, Artificial sequence
  SiRNA target sequence
ttgcatagtggaatgaatatttttt

SEQ ID NO: 191338 - DNA, 25 bp, Artificial sequence
  SiRNA target sequence
tgcatagtggaatgaatattttttt

SEQ ID NO: 191339 - DNA, 25 bp, Artificial sequence
  SiRNA target sequence
gcatagtggaatgaatattttttta

SEQ ID NO: 191340 - DNA, 25 bp, Artificial sequence
  SiRNA target sequence
catagtggaatgaatatttttttaa

SEQ ID NO: 191341 - DNA, 25 bp, Artificial sequence
  SiRNA target sequence
atagtggaatgaatatttttttaaa

SEQ ID NO: 191342 - DNA, 25 bp, Artificial sequence
  SiRNA target sequence
tagtggaatgaatatttttttaaag

SEQ ID NO: 191343 - DNA, 25 bp, Artificial sequence
  SiRNA target sequence
agtggaatgaatatttttttaaaga

SEQ ID NO: 191344 - DNA, 25 bp, Artificial sequence
  SiRNA target sequence
gtggaatgaatatttttttaaagaa

SEQ ID NO: 191345 - DNA, 25 bp, Artificial sequence
  SiRNA target sequence
tggaatgaatatttttttaaagaat

SEQ ID NO: 191346 - DNA, 25 bp, Artificial sequence
  SiRNA target sequence
ggaatgaatatttttttaaagaatc

SEQ ID NO: 191347 - DNA, 25 bp, Artificial sequence
  SiRNA target sequence
gaatgaatatttttttaaagaatct

SEQ ID NO: 191348 - DNA, 25 bp, Artificial sequence
  SiRNA target sequence
aatgaatatttttttaaagaatctt

SEQ ID NO: 191349 - DNA, 25 bp, Artificial sequence
  SiRNA target sequence
atgaatatttttttaaagaatcttg

SEQ ID NO: 191350 - DNA, 25 bp, Artificial sequence
  SiRNA target sequence
tgaatatttttttaaagaatcttga

SEQ ID NO: 191351 - DNA, 25 bp, Artificial sequence
  SiRNA target sequence
gaatatttttttaaagaatcttgat

SEQ ID NO: 191352 - DNA, 25 bp, Artificial sequence
  SiRNA target sequence
aatatttttttaaagaatcttgata

SEQ ID NO: 191353 - DNA, 25 bp, Artificial sequence
  SiRNA target sequence
atatttttttaaagaatcttgatat

SEQ ID NO: 191354 - DNA, 25 bp, Artificial sequence
  SiRNA target sequence
tatttttttaaagaatcttgatatt

SEQ ID NO: 191355 - DNA, 25 bp, Artificial sequence
  SiRNA target sequence
atttttttaaagaatcttgatatta

SEQ ID NO: 191356 - DNA, 25 bp, Artificial sequence
  SiRNA target sequence
tttttttaaagaatcttgatattac

SEQ ID NO: 191357 - DNA, 25 bp, Artificial sequence
  SiRNA target sequence
ttttttaaagaatcttgatattact

SEQ ID NO: 191358 - DNA, 25 bp, Artificial sequence
  SiRNA target sequence
tttttaaagaatcttgatattactt

SEQ ID NO: 191359 - DNA, 25 bp, Artificial sequence
  SiRNA target sequence
ttttaaagaatcttgatattacttt

SEQ ID NO: 191360 - DNA, 25 bp, Artificial sequence
  SiRNA target sequence
tttaaagaatcttgatattactttt

SEQ ID NO: 191361 - DNA, 25 bp, Artificial sequence
  SiRNA target sequence
ttaaagaatcttgatattactttta

SEQ ID NO: 191362 - DNA, 25 bp, Artificial sequence
  SiRNA target sequence
taaagaatcttgatattacttttag

SEQ ID NO: 191363 - DNA, 25 bp, Artificial sequence
  SiRNA target sequence
aaagaatcttgatattacttttaga

SEQ ID NO: 191364 - DNA, 25 bp, Artificial sequence
  SiRNA target sequence
aagaatcttgatattacttttagaa

SEQ ID NO: 191365 - DNA, 25 bp, Artificial sequence
  SiRNA target sequence
agaatcttgatattacttttagaag

SEQ ID NO: 191366 - DNA, 25 bp, Artificial sequence
  SiRNA target sequence
gaatcttgatattacttttagaaga

SEQ ID NO: 191367 - DNA, 25 bp, Artificial sequence
  SiRNA target sequence
aatcttgatattacttttagaagag

SEQ ID NO: 191368 - DNA, 25 bp, Artificial sequence
  SiRNA target sequence
atcttgatattacttttagaagaga

SEQ ID NO: 191369 - DNA, 25 bp, Artificial sequence
  SiRNA target sequence
tcttgatattacttttagaagagac

SEQ ID NO: 191370 - DNA, 25 bp, Artificial sequence
  SiRNA target sequence
cttgatattacttttagaagagact

SEQ ID NO: 191371 - DNA, 25 bp, Artificial sequence
  SiRNA target sequence
ttgatattacttttagaagagactc

SEQ ID NO: 191372 - DNA, 25 bp, Artificial sequence
  SiRNA target sequence
tgatattacttttagaagagactct

SEQ ID NO: 191373 - DNA, 25 bp, Artificial sequence
  SiRNA target sequence
gatattacttttagaagagactctt

SEQ ID NO: 191374 - DNA, 25 bp, Artificial sequence
  SiRNA target sequence
atattacttttagaagagactcttc

SEQ ID NO: 191375 - DNA, 25 bp, Artificial sequence
  SiRNA target sequence
tattacttttagaagagactcttcc

SEQ ID NO: 191376 - DNA, 25 bp, Artificial sequence
  SiRNA target sequence
attacttttagaagagactcttcca

SEQ ID NO: 191377 - DNA, 25 bp, Artificial sequence
  SiRNA target sequence
ttacttttagaagagactcttccaa

SEQ ID NO: 191378 - DNA, 25 bp, Artificial sequence
  SiRNA target sequence
tacttttagaagagactcttccaat

SEQ ID NO: 191379 - DNA, 25 bp, Artificial sequence
  SiRNA target sequence
acttttagaagagactcttccaatt

SEQ ID NO: 191380 - DNA, 25 bp, Artificial sequence
  SiRNA target sequence
cttttagaagagactcttccaattt

SEQ ID NO: 191381 - DNA, 25 bp, Artificial sequence
  SiRNA target sequence
ttttagaagagactcttccaatttt

SEQ ID NO: 191382 - DNA, 25 bp, Artificial sequence
  SiRNA target sequence
tttagaagagactcttccaatttta

SEQ ID NO: 191383 - DNA, 25 bp, Artificial sequence
  SiRNA target sequence
ttagaagagactcttccaattttag

SEQ ID NO: 191384 - DNA, 25 bp, Artificial sequence
  SiRNA target sequence
tagaagagactcttccaattttaga

SEQ ID NO: 191385 - DNA, 25 bp, Artificial sequence
  SiRNA target sequence
agaagagactcttccaattttagac

SEQ ID NO: 191386 - DNA, 25 bp, Artificial sequence
  SiRNA target sequence
gaagagactcttccaattttagacc

SEQ ID NO: 191387 - DNA, 25 bp, Artificial sequence
  SiRNA target sequence
aagagactcttccaattttagacca

SEQ ID NO: 191388 - DNA, 25 bp, Artificial sequence
  SiRNA target sequence
agagactcttccaattttagaccaa

SEQ ID NO: 191389 - DNA, 25 bp, Artificial sequence
  SiRNA target sequence
gagactcttccaattttagaccaag

SEQ ID NO: 191390 - DNA, 25 bp, Artificial sequence
  SiRNA target sequence
agactcttccaattttagaccaaga

SEQ ID NO: 191391 - DNA, 25 bp, Artificial sequence
  SiRNA target sequence
gactcttccaattttagaccaagag

SEQ ID NO: 191392 - DNA, 25 bp, Artificial sequence
  SiRNA target sequence
actcttccaattttagaccaagagt

SEQ ID NO: 191393 - DNA, 25 bp, Artificial sequence
  SiRNA target sequence
ctcttccaattttagaccaagagtt

SEQ ID NO: 191394 - DNA, 25 bp, Artificial sequence
  SiRNA target sequence
tcttccaattttagaccaagagtta

SEQ ID NO: 191395 - DNA, 25 bp, Artificial sequence
  SiRNA target sequence
cttccaattttagaccaagagttaa

SEQ ID NO: 191396 - DNA, 25 bp, Artificial sequence
  SiRNA target sequence
ttccaattttagaccaagagttaat

SEQ ID NO: 191397 - DNA, 25 bp, Artificial sequence
  SiRNA target sequence
tccaattttagaccaagagttaata

SEQ ID NO: 191398 - DNA, 25 bp, Artificial sequence
  SiRNA target sequence
ccaattttagaccaagagttaataa

SEQ ID NO: 191399 - DNA, 25 bp, Artificial sequence
  SiRNA target sequence
caattttagaccaagagttaataag

SEQ ID NO: 191400 - DNA, 25 bp, Artificial sequence
  SiRNA target sequence
aattttagaccaagagttaataagc

SEQ ID NO: 191401 - DNA, 25 bp, Artificial sequence
  SiRNA target sequence
attttagaccaagagttaataagcc

SEQ ID NO: 191402 - DNA, 25 bp, Artificial sequence
  SiRNA target sequence
ttttagaccaagagttaataagccg

SEQ ID NO: 191403 - DNA, 25 bp, Artificial sequence
  SiRNA target sequence
tttagaccaagagttaataagccga

SEQ ID NO: 191404 - DNA, 25 bp, Artificial sequence
  SiRNA target sequence
ttagaccaagagttaataagccgaa

SEQ ID NO: 191405 - DNA, 25 bp, Artificial sequence
  SiRNA target sequence
tagaccaagagttaataagccgaat

SEQ ID NO: 191406 - DNA, 25 bp, Artificial sequence
  SiRNA target sequence
agaccaagagttaataagccgaatt

SEQ ID NO: 191407 - DNA, 25 bp, Artificial sequence
  SiRNA target sequence
gaccaagagttaataagccgaattc

SEQ ID NO: 191408 - DNA, 25 bp, Artificial sequence
  SiRNA target sequence
accaagagttaataagccgaattcc

SEQ ID NO: 191409 - DNA, 25 bp, Artificial sequence
  SiRNA target sequence
ccaagagttaataagccgaattccg

SEQ ID NO: 191410 - DNA, 25 bp, Artificial sequence
  SiRNA target sequence
caagagttaataagccgaattccgc

SEQ ID NO: 191411 - DNA, 25 bp, Artificial sequence
  SiRNA target sequence
aagagttaataagccgaattccgca

SEQ ID NO: 191412 - DNA, 25 bp, Artificial sequence
  SiRNA target sequence
agagttaataagccgaattccgcaa

SEQ ID NO: 191413 - DNA, 25 bp, Artificial sequence
  SiRNA target sequence
gagttaataagccgaattccgcaaa

SEQ ID NO: 191414 - DNA, 25 bp, Artificial sequence
  SiRNA target sequence
agttaataagccgaattccgcaaaa

SEQ ID NO: 191415 - DNA, 25 bp, Artificial sequence
  SiRNA target sequence
gttaataagccgaattccgcaaaag

SEQ ID NO: 191416 - DNA, 25 bp, Artificial sequence
  SiRNA target sequence
ttaataagccgaattccgcaaaaga

SEQ ID NO: 191417 - DNA, 25 bp, Artificial sequence
  SiRNA target sequence
taataagccgaattccgcaaaagac

SEQ ID NO: 191418 - DNA, 25 bp, Artificial sequence
  SiRNA target sequence
aataagccgaattccgcaaaagaca

SEQ ID NO: 191419 - DNA, 25 bp, Artificial sequence
  SiRNA target sequence
ataagccgaattccgcaaaagacag

SEQ ID NO: 191420 - DNA, 25 bp, Artificial sequence
  SiRNA target sequence
taagccgaattccgcaaaagacaga

SEQ ID NO: 191421 - DNA, 25 bp, Artificial sequence
  SiRNA target sequence
aagccgaattccgcaaaagacagaa

SEQ ID NO: 191422 - DNA, 25 bp, Artificial sequence
  SiRNA target sequence
agccgaattccgcaaaagacagaac

SEQ ID NO: 191423 - DNA, 25 bp, Artificial sequence
  SiRNA target sequence
gccgaattccgcaaaagacagaact

SEQ ID NO: 191424 - DNA, 25 bp, Artificial sequence
  SiRNA target sequence
ccgaattccgcaaaagacagaactc

SEQ ID NO: 191425 - DNA, 25 bp, Artificial sequence
  SiRNA target sequence
cgaattccgcaaaagacagaactca

SEQ ID NO: 191426 - DNA, 25 bp, Artificial sequence
  SiRNA target sequence
gaattccgcaaaagacagaactcag

SEQ ID NO: 191427 - DNA, 25 bp, Artificial sequence
  SiRNA target sequence
aattccgcaaaagacagaactcaga

SEQ ID NO: 191428 - DNA, 25 bp, Artificial sequence
  SiRNA target sequence
attccgcaaaagacagaactcagaa

SEQ ID NO: 191429 - DNA, 25 bp, Artificial sequence
  SiRNA target sequence
ttccgcaaaagacagaactcagaaa

SEQ ID NO: 191430 - DNA, 25 bp, Artificial sequence
  SiRNA target sequence
tccgcaaaagacagaactcagaaag

SEQ ID NO: 191431 - DNA, 25 bp, Artificial sequence
  SiRNA target sequence
ccgcaaaagacagaactcagaaaga

SEQ ID NO: 191432 - DNA, 25 bp, Artificial sequence
  SiRNA target sequence
cgcaaaagacagaactcagaaagaa

SEQ ID NO: 191433 - DNA, 25 bp, Artificial sequence
  SiRNA target sequence
gcaaaagacagaactcagaaagaag

SEQ ID NO: 191434 - DNA, 25 bp, Artificial sequence
  SiRNA target sequence
caaaagacagaactcagaaagaaga

SEQ ID NO: 191435 - DNA, 25 bp, Artificial sequence
  SiRNA target sequence
aaaagacagaactcagaaagaagag

SEQ ID NO: 191436 - DNA, 25 bp, Artificial sequence
  SiRNA target sequence
aaagacagaactcagaaagaagaga

SEQ ID NO: 191437 - DNA, 25 bp, Artificial sequence
  SiRNA target sequence
aagacagaactcagaaagaagagaa

SEQ ID NO: 191438 - DNA, 25 bp, Artificial sequence
  SiRNA target sequence
agacagaactcagaaagaagagaat

SEQ ID NO: 191439 - DNA, 25 bp, Artificial sequence
  SiRNA target sequence
gacagaactcagaaagaagagaata

SEQ ID NO: 191440 - DNA, 25 bp, Artificial sequence
  SiRNA target sequence
acagaactcagaaagaagagaataa

SEQ ID NO: 191441 - DNA, 25 bp, Artificial sequence
  SiRNA target sequence
cagaactcagaaagaagagaataaa

SEQ ID NO: 191442 - DNA, 25 bp, Artificial sequence
  SiRNA target sequence
agaactcagaaagaagagaataaat

SEQ ID NO: 191443 - DNA, 25 bp, Artificial sequence
  SiRNA target sequence
gaactcagaaagaagagaataaata

SEQ ID NO: 191444 - DNA, 25 bp, Artificial sequence
  SiRNA target sequence
aactcagaaagaagagaataaatat

SEQ ID NO: 191445 - DNA, 25 bp, Artificial sequence
  SiRNA target sequence
actcagaaagaagagaataaatatt

SEQ ID NO: 191446 - DNA, 25 bp, Artificial sequence
  SiRNA target sequence
ctcagaaagaagagaataaatattt

SEQ ID NO: 191447 - DNA, 25 bp, Artificial sequence
  SiRNA target sequence
tcagaaagaagagaataaatatttt

SEQ ID NO: 191448 - DNA, 25 bp, Artificial sequence
  SiRNA target sequence
cagaaagaagagaataaatattttt

SEQ ID NO: 191449 - DNA, 25 bp, Artificial sequence
  SiRNA target sequence
agaaagaagagaataaatatttttt

SEQ ID NO: 191450 - DNA, 25 bp, Artificial sequence
  SiRNA target sequence
gaaagaagagaataaatattttttt

SEQ ID NO: 191451 - DNA, 25 bp, Artificial sequence
  SiRNA target sequence
aaagaagagaataaatatttttttt

SEQ ID NO: 191452 - DNA, 25 bp, Artificial sequence
  SiRNA target sequence
aagaagagaataaatattttttttg

SEQ ID NO: 191453 - DNA, 25 bp, Artificial sequence
  SiRNA target sequence
agaagagaataaatattttttttga

SEQ ID NO: 191454 - DNA, 26 bp, Artificial sequence
  SiRNA target sequence
atggccaagaatgaatctaataaaat

SEQ ID NO: 191455 - DNA, 26 bp, Artificial sequence
  SiRNA target sequence
tggccaagaatgaatctaataaaata

SEQ ID NO: 191456 - DNA, 26 bp, Artificial sequence
  SiRNA target sequence
ggccaagaatgaatctaataaaataa

SEQ ID NO: 191457 - DNA, 26 bp, Artificial sequence
  SiRNA target sequence
gccaagaatgaatctaataaaataac

SEQ ID NO: 191458 - DNA, 26 bp, Artificial sequence
  SiRNA target sequence
ccaagaatgaatctaataaaataacg

SEQ ID NO: 191459 - DNA, 26 bp, Artificial sequence
  SiRNA target sequence
caagaatgaatctaataaaataacga

SEQ ID NO: 191460 - DNA, 26 bp, Artificial sequence
  SiRNA target sequence
aagaatgaatctaataaaataacgag

SEQ ID NO: 191461 - DNA, 26 bp, Artificial sequence
  SiRNA target sequence
agaatgaatctaataaaataacgaga

SEQ ID NO: 191462 - DNA, 26 bp, Artificial sequence
  SiRNA target sequence
gaatgaatctaataaaataacgagac

SEQ ID NO: 191463 - DNA, 26 bp, Artificial sequence
  SiRNA target sequence
aatgaatctaataaaataacgagact

SEQ ID NO: 191464 - DNA, 26 bp, Artificial sequence
  SiRNA target sequence
atgaatctaataaaataacgagactg

SEQ ID NO: 191465 - DNA, 26 bp, Artificial sequence
  SiRNA target sequence
tgaatctaataaaataacgagactgg

SEQ ID NO: 191466 - DNA, 26 bp, Artificial sequence
  SiRNA target sequence
gaatctaataaaataacgagactggc

SEQ ID NO: 191467 - DNA, 26 bp, Artificial sequence
  SiRNA target sequence
aatctaataaaataacgagactggca

SEQ ID NO: 191468 - DNA, 26 bp, Artificial sequence
  SiRNA target sequence
atctaataaaataacgagactggcaa

SEQ ID NO: 191469 - DNA, 26 bp, Artificial sequence
  SiRNA target sequence
tctaataaaataacgagactggcaat

SEQ ID NO: 191470 - DNA, 26 bp, Artificial sequence
  SiRNA target sequence
ctaataaaataacgagactggcaatt

SEQ ID NO: 191471 - DNA, 26 bp, Artificial sequence
  SiRNA target sequence
taataaaataacgagactggcaattg

SEQ ID NO: 191472 - DNA, 26 bp, Artificial sequence
  SiRNA target sequence
aataaaataacgagactggcaattgt

SEQ ID NO: 191473 - DNA, 26 bp, Artificial sequence
  SiRNA target sequence
ataaaataacgagactggcaattgtt

SEQ ID NO: 191474 - DNA, 26 bp, Artificial sequence
  SiRNA target sequence
taaaataacgagactggcaattgtta

SEQ ID NO: 191475 - DNA, 26 bp, Artificial sequence
  SiRNA target sequence
aaaataacgagactggcaattgttaa

SEQ ID NO: 191476 - DNA, 26 bp, Artificial sequence
  SiRNA target sequence
aaataacgagactggcaattgttaat

SEQ ID NO: 191477 - DNA, 26 bp, Artificial sequence
  SiRNA target sequence
aataacgagactggcaattgttaatt

SEQ ID NO: 191478 - DNA, 26 bp, Artificial sequence
  SiRNA target sequence
ataacgagactggcaattgttaatta

SEQ ID NO: 191479 - DNA, 26 bp, Artificial sequence
  SiRNA target sequence
taacgagactggcaattgttaattat

SEQ ID NO: 191480 - DNA, 26 bp, Artificial sequence
  SiRNA target sequence
aacgagactggcaattgttaattatg

SEQ ID NO: 191481 - DNA, 26 bp, Artificial sequence
  SiRNA target sequence
acgagactggcaattgttaattatga

SEQ ID NO: 191482 - DNA, 26 bp, Artificial sequence
  SiRNA target sequence
cgagactggcaattgttaattatgaa

SEQ ID NO: 191483 - DNA, 26 bp, Artificial sequence
  SiRNA target sequence
gagactggcaattgttaattatgaac

SEQ ID NO: 191484 - DNA, 26 bp, Artificial sequence
  SiRNA target sequence
agactggcaattgttaattatgaact

SEQ ID NO: 191485 - DNA, 26 bp, Artificial sequence
  SiRNA target sequence
gactggcaattgttaattatgaacta

SEQ ID NO: 191486 - DNA, 26 bp, Artificial sequence
  SiRNA target sequence
actggcaattgttaattatgaactat

SEQ ID NO: 191487 - DNA, 26 bp, Artificial sequence
  SiRNA target sequence
ctggcaattgttaattatgaactatg

SEQ ID NO: 191488 - DNA, 26 bp, Artificial sequence
  SiRNA target sequence
tggcaattgttaattatgaactatgt

SEQ ID NO: 191489 - DNA, 26 bp, Artificial sequence
  SiRNA target sequence
ggcaattgttaattatgaactatgta

SEQ ID NO: 191490 - DNA, 26 bp, Artificial sequence
  SiRNA target sequence
gcaattgttaattatgaactatgtaa

SEQ ID NO: 191491 - DNA, 26 bp, Artificial sequence
  SiRNA target sequence
caattgttaattatgaactatgtaaa

SEQ ID NO: 191492 - DNA, 26 bp, Artificial sequence
  SiRNA target sequence
aattgttaattatgaactatgtaaac

SEQ ID NO: 191493 - DNA, 26 bp, Artificial sequence
  SiRNA target sequence
attgttaattatgaactatgtaaacc

SEQ ID NO: 191494 - DNA, 26 bp, Artificial sequence
  SiRNA target sequence
ttgttaattatgaactatgtaaaccg

SEQ ID NO: 191495 - DNA, 26 bp, Artificial sequence
  SiRNA target sequence
tgttaattatgaactatgtaaaccga

SEQ ID NO: 191496 - DNA, 26 bp, Artificial sequence
  SiRNA target sequence
gttaattatgaactatgtaaaccgaa

SEQ ID NO: 191497 - DNA, 26 bp, Artificial sequence
  SiRNA target sequence
ttaattatgaactatgtaaaccgaag

SEQ ID NO: 191498 - DNA, 26 bp, Artificial sequence
  SiRNA target sequence
taattatgaactatgtaaaccgaagg

SEQ ID NO: 191499 - DNA, 26 bp, Artificial sequence
  SiRNA target sequence
aattatgaactatgtaaaccgaagga

SEQ ID NO: 191500 - DNA, 26 bp, Artificial sequence
  SiRNA target sequence
attatgaactatgtaaaccgaaggaa

SEQ ID NO: 191501 - DNA, 26 bp, Artificial sequence
  SiRNA target sequence
ttatgaactatgtaaaccgaaggaat

SEQ ID NO: 191502 - DNA, 26 bp, Artificial sequence
  SiRNA target sequence
tatgaactatgtaaaccgaaggaatg

SEQ ID NO: 191503 - DNA, 26 bp, Artificial sequence
  SiRNA target sequence
atgaactatgtaaaccgaaggaatgt

SEQ ID NO: 191504 - DNA, 26 bp, Artificial sequence
  SiRNA target sequence
tgaactatgtaaaccgaaggaatgta

SEQ ID NO: 191505 - DNA, 26 bp, Artificial sequence
  SiRNA target sequence
gaactatgtaaaccgaaggaatgtat

SEQ ID NO: 191506 - DNA, 26 bp, Artificial sequence
  SiRNA target sequence
aactatgtaaaccgaaggaatgtatg

SEQ ID NO: 191507 - DNA, 26 bp, Artificial sequence
  SiRNA target sequence
actatgtaaaccgaaggaatgtatgt

SEQ ID NO: 191508 - DNA, 26 bp, Artificial sequence
  SiRNA target sequence
ctatgtaaaccgaaggaatgtatgtc

SEQ ID NO: 191509 - DNA, 26 bp, Artificial sequence
  SiRNA target sequence
tatgtaaaccgaaggaatgtatgtca

SEQ ID NO: 191510 - DNA, 26 bp, Artificial sequence
  SiRNA target sequence
atgtaaaccgaaggaatgtatgtcag

SEQ ID NO: 191511 - DNA, 26 bp, Artificial sequence
  SiRNA target sequence
tgtaaaccgaaggaatgtatgtcaga

SEQ ID NO: 191512 - DNA, 26 bp, Artificial sequence
  SiRNA target sequence
gtaaaccgaaggaatgtatgtcagaa

SEQ ID NO: 191513 - DNA, 26 bp, Artificial sequence
  SiRNA target sequence
taaaccgaaggaatgtatgtcagaat

SEQ ID NO: 191514 - DNA, 26 bp, Artificial sequence
  SiRNA target sequence
aaaccgaaggaatgtatgtcagaatg

SEQ ID NO: 191515 - DNA, 26 bp, Artificial sequence
  SiRNA target sequence
aaccgaaggaatgtatgtcagaatgt

SEQ ID NO: 191516 - DNA, 26 bp, Artificial sequence
  SiRNA target sequence
accgaaggaatgtatgtcagaatgta

SEQ ID NO: 191517 - DNA, 26 bp, Artificial sequence
  SiRNA target sequence
ccgaaggaatgtatgtcagaatgtaa

SEQ ID NO: 191518 - DNA, 26 bp, Artificial sequence
  SiRNA target sequence
cgaaggaatgtatgtcagaatgtaaa

SEQ ID NO: 191519 - DNA, 26 bp, Artificial sequence
  SiRNA target sequence
gaaggaatgtatgtcagaatgtaaaa

SEQ ID NO: 191520 - DNA, 26 bp, Artificial sequence
  SiRNA target sequence
aaggaatgtatgtcagaatgtaaaaa

SEQ ID NO: 191521 - DNA, 26 bp, Artificial sequence
  SiRNA target sequence
aggaatgtatgtcagaatgtaaaaag

SEQ ID NO: 191522 - DNA, 26 bp, Artificial sequence
  SiRNA target sequence
ggaatgtatgtcagaatgtaaaaagg

SEQ ID NO: 191523 - DNA, 26 bp, Artificial sequence
  SiRNA target sequence
gaatgtatgtcagaatgtaaaaaggc

SEQ ID NO: 191524 - DNA, 26 bp, Artificial sequence
  SiRNA target sequence
aatgtatgtcagaatgtaaaaaggcg

SEQ ID NO: 191525 - DNA, 26 bp, Artificial sequence
  SiRNA target sequence
atgtatgtcagaatgtaaaaaggcgt

SEQ ID NO: 191526 - DNA, 26 bp, Artificial sequence
  SiRNA target sequence
tgtatgtcagaatgtaaaaaggcgtg

SEQ ID NO: 191527 - DNA, 26 bp, Artificial sequence
  SiRNA target sequence
gtatgtcagaatgtaaaaaggcgtgt

SEQ ID NO: 191528 - DNA, 26 bp, Artificial sequence
  SiRNA target sequence
tatgtcagaatgtaaaaaggcgtgtc

SEQ ID NO: 191529 - DNA, 26 bp, Artificial sequence
  SiRNA target sequence
atgtcagaatgtaaaaaggcgtgtcc

SEQ ID NO: 191530 - DNA, 26 bp, Artificial sequence
  SiRNA target sequence
tgtcagaatgtaaaaaggcgtgtcct

SEQ ID NO: 191531 - DNA, 26 bp, Artificial sequence
  SiRNA target sequence
gtcagaatgtaaaaaggcgtgtcctg

SEQ ID NO: 191532 - DNA, 26 bp, Artificial sequence
  SiRNA target sequence
tcagaatgtaaaaaggcgtgtcctgt

SEQ ID NO: 191533 - DNA, 26 bp, Artificial sequence
  SiRNA target sequence
cagaatgtaaaaaggcgtgtcctgtt

SEQ ID NO: 191534 - DNA, 26 bp, Artificial sequence
  SiRNA target sequence
agaatgtaaaaaggcgtgtcctgtta

SEQ ID NO: 191535 - DNA, 26 bp, Artificial sequence
  SiRNA target sequence
gaatgtaaaaaggcgtgtcctgttaa

SEQ ID NO: 191536 - DNA, 26 bp, Artificial sequence
  SiRNA target sequence
aatgtaaaaaggcgtgtcctgttaat

SEQ ID NO: 191537 - DNA, 26 bp, Artificial sequence
  SiRNA target sequence
atgtaaaaaggcgtgtcctgttaata

SEQ ID NO: 191538 - DNA, 26 bp, Artificial sequence
  SiRNA target sequence
tgtaaaaaggcgtgtcctgttaataa

SEQ ID NO: 191539 - DNA, 26 bp, Artificial sequence
  SiRNA target sequence
gtaaaaaggcgtgtcctgttaataaa

SEQ ID NO: 191540 - DNA, 26 bp, Artificial sequence
  SiRNA target sequence
taaaaaggcgtgtcctgttaataaaa

SEQ ID NO: 191541 - DNA, 26 bp, Artificial sequence
  SiRNA target sequence
aaaaaggcgtgtcctgttaataaaac

SEQ ID NO: 191542 - DNA, 26 bp, Artificial sequence
  SiRNA target sequence
aaaaggcgtgtcctgttaataaaaca

SEQ ID NO: 191543 - DNA, 26 bp, Artificial sequence
  SiRNA target sequence
aaaggcgtgtcctgttaataaaacag

SEQ ID NO: 191544 - DNA, 26 bp, Artificial sequence
  SiRNA target sequence
aaggcgtgtcctgttaataaaacagg

SEQ ID NO: 191545 - DNA, 26 bp, Artificial sequence
  SiRNA target sequence
aggcgtgtcctgttaataaaacagga

SEQ ID NO: 191546 - DNA, 26 bp, Artificial sequence
  SiRNA target sequence
ggcgtgtcctgttaataaaacaggaa

SEQ ID NO: 191547 - DNA, 26 bp, Artificial sequence
  SiRNA target sequence
gcgtgtcctgttaataaaacaggaaa

SEQ ID NO: 191548 - DNA, 26 bp, Artificial sequence
  SiRNA target sequence
cgtgtcctgttaataaaacaggaaag

SEQ ID NO: 191549 - DNA, 26 bp, Artificial sequence
  SiRNA target sequence
gtgtcctgttaataaaacaggaaagg

SEQ ID NO: 191550 - DNA, 26 bp, Artificial sequence
  SiRNA target sequence
tgtcctgttaataaaacaggaaagga

SEQ ID NO: 191551 - DNA, 26 bp, Artificial sequence
  SiRNA target sequence
gtcctgttaataaaacaggaaaggag

SEQ ID NO: 191552 - DNA, 26 bp, Artificial sequence
  SiRNA target sequence
tcctgttaataaaacaggaaaggagt

SEQ ID NO: 191553 - DNA, 26 bp, Artificial sequence
  SiRNA target sequence
cctgttaataaaacaggaaaggagtg

SEQ ID NO: 191554 - DNA, 26 bp, Artificial sequence
  SiRNA target sequence
ctgttaataaaacaggaaaggagtgt

SEQ ID NO: 191555 - DNA, 26 bp, Artificial sequence
  SiRNA target sequence
tgttaataaaacaggaaaggagtgta

SEQ ID NO: 191556 - DNA, 26 bp, Artificial sequence
  SiRNA target sequence
gttaataaaacaggaaaggagtgtat

SEQ ID NO: 191557 - DNA, 26 bp, Artificial sequence
  SiRNA target sequence
ttaataaaacaggaaaggagtgtatt

SEQ ID NO: 191558 - DNA, 26 bp, Artificial sequence
  SiRNA target sequence
taataaaacaggaaaggagtgtatta

SEQ ID NO: 191559 - DNA, 26 bp, Artificial sequence
  SiRNA target sequence
aataaaacaggaaaggagtgtattac

SEQ ID NO: 191560 - DNA, 26 bp, Artificial sequence
  SiRNA target sequence
ataaaacaggaaaggagtgtattaca

SEQ ID NO: 191561 - DNA, 26 bp, Artificial sequence
  SiRNA target sequence
taaaacaggaaaggagtgtattacaa

SEQ ID NO: 191562 - DNA, 26 bp, Artificial sequence
  SiRNA target sequence
aaaacaggaaaggagtgtattacaat

SEQ ID NO: 191563 - DNA, 26 bp, Artificial sequence
  SiRNA target sequence
aaacaggaaaggagtgtattacaatt

SEQ ID NO: 191564 - DNA, 26 bp, Artificial sequence
  SiRNA target sequence
aacaggaaaggagtgtattacaattg

SEQ ID NO: 191565 - DNA, 26 bp, Artificial sequence
  SiRNA target sequence
acaggaaaggagtgtattacaattga

SEQ ID NO: 191566 - DNA, 26 bp, Artificial sequence
  SiRNA target sequence
caggaaaggagtgtattacaattgat

SEQ ID NO: 191567 - DNA, 26 bp, Artificial sequence
  SiRNA target sequence
aggaaaggagtgtattacaattgata

SEQ ID NO: 191568 - DNA, 26 bp, Artificial sequence
  SiRNA target sequence
ggaaaggagtgtattacaattgatac

SEQ ID NO: 191569 - DNA, 26 bp, Artificial sequence
  SiRNA target sequence
gaaaggagtgtattacaattgatact

SEQ ID NO: 191570 - DNA, 26 bp, Artificial sequence
  SiRNA target sequence
aaaggagtgtattacaattgatacta

SEQ ID NO: 191571 - DNA, 26 bp, Artificial sequence
  SiRNA target sequence
aaggagtgtattacaattgatactaa

SEQ ID NO: 191572 - DNA, 26 bp, Artificial sequence
  SiRNA target sequence
aggagtgtattacaattgatactaaa

SEQ ID NO: 191573 - DNA, 26 bp, Artificial sequence
  SiRNA target sequence
ggagtgtattacaattgatactaaat

SEQ ID NO: 191574 - DNA, 26 bp, Artificial sequence
  SiRNA target sequence
gagtgtattacaattgatactaaatc

SEQ ID NO: 191575 - DNA, 26 bp, Artificial sequence
  SiRNA target sequence
agtgtattacaattgatactaaatca

SEQ ID NO: 191576 - DNA, 26 bp, Artificial sequence
  SiRNA target sequence
gtgtattacaattgatactaaatcac

SEQ ID NO: 191577 - DNA, 26 bp, Artificial sequence
  SiRNA target sequence
tgtattacaattgatactaaatcaca

SEQ ID NO: 191578 - DNA, 26 bp, Artificial sequence
  SiRNA target sequence
gtattacaattgatactaaatcacat

SEQ ID NO: 191579 - DNA, 26 bp, Artificial sequence
  SiRNA target sequence
tattacaattgatactaaatcacata

SEQ ID NO: 191580 - DNA, 26 bp, Artificial sequence
  SiRNA target sequence
attacaattgatactaaatcacatat

SEQ ID NO: 191581 - DNA, 26 bp, Artificial sequence
  SiRNA target sequence
ttacaattgatactaaatcacatatc

SEQ ID NO: 191582 - DNA, 26 bp, Artificial sequence
  SiRNA target sequence
tacaattgatactaaatcacatatct

SEQ ID NO: 191583 - DNA, 26 bp, Artificial sequence
  SiRNA target sequence
acaattgatactaaatcacatatctc

SEQ ID NO: 191584 - DNA, 26 bp, Artificial sequence
  SiRNA target sequence
caattgatactaaatcacatatctca

SEQ ID NO: 191585 - DNA, 26 bp, Artificial sequence
  SiRNA target sequence
aattgatactaaatcacatatctcag

SEQ ID NO: 191586 - DNA, 26 bp, Artificial sequence
  SiRNA target sequence
attgatactaaatcacatatctcaga

SEQ ID NO: 191587 - DNA, 26 bp, Artificial sequence
  SiRNA target sequence
ttgatactaaatcacatatctcagaa

SEQ ID NO: 191588 - DNA, 26 bp, Artificial sequence
  SiRNA target sequence
tgatactaaatcacatatctcagaaa

SEQ ID NO: 191589 - DNA, 26 bp, Artificial sequence
  SiRNA target sequence
gatactaaatcacatatctcagaaat

SEQ ID NO: 191590 - DNA, 26 bp, Artificial sequence
  SiRNA target sequence
atactaaatcacatatctcagaaatt

SEQ ID NO: 191591 - DNA, 26 bp, Artificial sequence
  SiRNA target sequence
tactaaatcacatatctcagaaattc

SEQ ID NO: 191592 - DNA, 26 bp, Artificial sequence
  SiRNA target sequence
actaaatcacatatctcagaaattct

SEQ ID NO: 191593 - DNA, 26 bp, Artificial sequence
  SiRNA target sequence
ctaaatcacatatctcagaaattctg

SEQ ID NO: 191594 - DNA, 26 bp, Artificial sequence
  SiRNA target sequence
taaatcacatatctcagaaattctgt

SEQ ID NO: 191595 - DNA, 26 bp, Artificial sequence
  SiRNA target sequence
aaatcacatatctcagaaattctgtg

SEQ ID NO: 191596 - DNA, 26 bp, Artificial sequence
  SiRNA target sequence
aatcacatatctcagaaattctgtgt

SEQ ID NO: 191597 - DNA, 26 bp, Artificial sequence
  SiRNA target sequence
atcacatatctcagaaattctgtgta

SEQ ID NO: 191598 - DNA, 26 bp, Artificial sequence
  SiRNA target sequence
tcacatatctcagaaattctgtgtat

SEQ ID NO: 191599 - DNA, 26 bp, Artificial sequence
  SiRNA target sequence
cacatatctcagaaattctgtgtata

SEQ ID NO: 191600 - DNA, 26 bp, Artificial sequence
  SiRNA target sequence
acatatctcagaaattctgtgtatag

SEQ ID NO: 191601 - DNA, 26 bp, Artificial sequence
  SiRNA target sequence
catatctcagaaattctgtgtatagg

SEQ ID NO: 191602 - DNA, 26 bp, Artificial sequence
  SiRNA target sequence
atatctcagaaattctgtgtatagga

SEQ ID NO: 191603 - DNA, 26 bp, Artificial sequence
  SiRNA target sequence
tatctcagaaattctgtgtataggat

SEQ ID NO: 191604 - DNA, 26 bp, Artificial sequence
  SiRNA target sequence
atctcagaaattctgtgtataggatg

SEQ ID NO: 191605 - DNA, 26 bp, Artificial sequence
  SiRNA target sequence
tctcagaaattctgtgtataggatgt

SEQ ID NO: 191606 - DNA, 26 bp, Artificial sequence
  SiRNA target sequence
ctcagaaattctgtgtataggatgtt

SEQ ID NO: 191607 - DNA, 26 bp, Artificial sequence
  SiRNA target sequence
tcagaaattctgtgtataggatgttc

SEQ ID NO: 191608 - DNA, 26 bp, Artificial sequence
  SiRNA target sequence
cagaaattctgtgtataggatgttct

SEQ ID NO: 191609 - DNA, 26 bp, Artificial sequence
  SiRNA target sequence
agaaattctgtgtataggatgttctg

SEQ ID NO: 191610 - DNA, 26 bp, Artificial sequence
  SiRNA target sequence
gaaattctgtgtataggatgttctgc

SEQ ID NO: 191611 - DNA, 26 bp, Artificial sequence
  SiRNA target sequence
aaattctgtgtataggatgttctgcg

SEQ ID NO: 191612 - DNA, 26 bp, Artificial sequence
  SiRNA target sequence
aattctgtgtataggatgttctgcgt

SEQ ID NO: 191613 - DNA, 26 bp, Artificial sequence
  SiRNA target sequence
attctgtgtataggatgttctgcgtg

SEQ ID NO: 191614 - DNA, 26 bp, Artificial sequence
  SiRNA target sequence
ttctgtgtataggatgttctgcgtgt

SEQ ID NO: 191615 - DNA, 26 bp, Artificial sequence
  SiRNA target sequence
tctgtgtataggatgttctgcgtgtc

SEQ ID NO: 191616 - DNA, 26 bp, Artificial sequence
  SiRNA target sequence
ctgtgtataggatgttctgcgtgtca

SEQ ID NO: 191617 - DNA, 26 bp, Artificial sequence
  SiRNA target sequence
tgtgtataggatgttctgcgtgtcaa

SEQ ID NO: 191618 - DNA, 26 bp, Artificial sequence
  SiRNA target sequence
gtgtataggatgttctgcgtgtcaaa

SEQ ID NO: 191619 - DNA, 26 bp, Artificial sequence
  SiRNA target sequence
tgtataggatgttctgcgtgtcaaaa

SEQ ID NO: 191620 - DNA, 26 bp, Artificial sequence
  SiRNA target sequence
gtataggatgttctgcgtgtcaaaag

SEQ ID NO: 191621 - DNA, 26 bp, Artificial sequence
  SiRNA target sequence
tataggatgttctgcgtgtcaaaaga

SEQ ID NO: 191622 - DNA, 26 bp, Artificial sequence
  SiRNA target sequence
ataggatgttctgcgtgtcaaaagaa

SEQ ID NO: 191623 - DNA, 26 bp, Artificial sequence
  SiRNA target sequence
taggatgttctgcgtgtcaaaagaaa

SEQ ID NO: 191624 - DNA, 26 bp, Artificial sequence
  SiRNA target sequence
aggatgttctgcgtgtcaaaagaaat

SEQ ID NO: 191625 - DNA, 26 bp, Artificial sequence
  SiRNA target sequence
ggatgttctgcgtgtcaaaagaaatg

SEQ ID NO: 191626 - DNA, 26 bp, Artificial sequence
  SiRNA target sequence
gatgttctgcgtgtcaaaagaaatgt

SEQ ID NO: 191627 - DNA, 26 bp, Artificial sequence
  SiRNA target sequence
atgttctgcgtgtcaaaagaaatgtc

SEQ ID NO: 191628 - DNA, 26 bp, Artificial sequence
  SiRNA target sequence
tgttctgcgtgtcaaaagaaatgtcc

SEQ ID NO: 191629 - DNA, 26 bp, Artificial sequence
  SiRNA target sequence
gttctgcgtgtcaaaagaaatgtcct

SEQ ID NO: 191630 - DNA, 26 bp, Artificial sequence
  SiRNA target sequence
ttctgcgtgtcaaaagaaatgtcctt

SEQ ID NO: 191631 - DNA, 26 bp, Artificial sequence
  SiRNA target sequence
tctgcgtgtcaaaagaaatgtccttt

SEQ ID NO: 191632 - DNA, 26 bp, Artificial sequence
  SiRNA target sequence
ctgcgtgtcaaaagaaatgtcctttt

SEQ ID NO: 191633 - DNA, 26 bp, Artificial sequence
  SiRNA target sequence
tgcgtgtcaaaagaaatgtcctttta

SEQ ID NO: 191634 - DNA, 26 bp, Artificial sequence
  SiRNA target sequence
gcgtgtcaaaagaaatgtccttttaa

SEQ ID NO: 191635 - DNA, 26 bp, Artificial sequence
  SiRNA target sequence
cgtgtcaaaagaaatgtccttttaag

SEQ ID NO: 191636 - DNA, 26 bp, Artificial sequence
  SiRNA target sequence
gtgtcaaaagaaatgtccttttaagg

SEQ ID NO: 191637 - DNA, 26 bp, Artificial sequence
  SiRNA target sequence
tgtcaaaagaaatgtccttttaaggc

SEQ ID NO: 191638 - DNA, 26 bp, Artificial sequence
  SiRNA target sequence
gtcaaaagaaatgtccttttaaggcg

SEQ ID NO: 191639 - DNA, 26 bp, Artificial sequence
  SiRNA target sequence
tcaaaagaaatgtccttttaaggcga

SEQ ID NO: 191640 - DNA, 26 bp, Artificial sequence
  SiRNA target sequence
caaaagaaatgtccttttaaggcgat

SEQ ID NO: 191641 - DNA, 26 bp, Artificial sequence
  SiRNA target sequence
aaaagaaatgtccttttaaggcgatt

SEQ ID NO: 191642 - DNA, 26 bp, Artificial sequence
  SiRNA target sequence
aaagaaatgtccttttaaggcgatta

SEQ ID NO: 191643 - DNA, 26 bp, Artificial sequence
  SiRNA target sequence
aagaaatgtccttttaaggcgattac

SEQ ID NO: 191644 - DNA, 26 bp, Artificial sequence
  SiRNA target sequence
agaaatgtccttttaaggcgattaca

SEQ ID NO: 191645 - DNA, 26 bp, Artificial sequence
  SiRNA target sequence
gaaatgtccttttaaggcgattacaa

SEQ ID NO: 191646 - DNA, 26 bp, Artificial sequence
  SiRNA target sequence
aaatgtccttttaaggcgattacaat

SEQ ID NO: 191647 - DNA, 26 bp, Artificial sequence
  SiRNA target sequence
aatgtccttttaaggcgattacaatt

SEQ ID NO: 191648 - DNA, 26 bp, Artificial sequence
  SiRNA target sequence
atgtccttttaaggcgattacaattg

SEQ ID NO: 191649 - DNA, 26 bp, Artificial sequence
  SiRNA target sequence
tgtccttttaaggcgattacaattgt

SEQ ID NO: 191650 - DNA, 26 bp, Artificial sequence
  SiRNA target sequence
gtccttttaaggcgattacaattgta

SEQ ID NO: 191651 - DNA, 26 bp, Artificial sequence
  SiRNA target sequence
tccttttaaggcgattacaattgtaa

SEQ ID NO: 191652 - DNA, 26 bp, Artificial sequence
  SiRNA target sequence
ccttttaaggcgattacaattgtaaa

SEQ ID NO: 191653 - DNA, 26 bp, Artificial sequence
  SiRNA target sequence
cttttaaggcgattacaattgtaaat

SEQ ID NO: 191654 - DNA, 26 bp, Artificial sequence
  SiRNA target sequence
ttttaaggcgattacaattgtaaatt

SEQ ID NO: 191655 - DNA, 26 bp, Artificial sequence
  SiRNA target sequence
tttaaggcgattacaattgtaaattt

SEQ ID NO: 191656 - DNA, 26 bp, Artificial sequence
  SiRNA target sequence
ttaaggcgattacaattgtaaattta

SEQ ID NO: 191657 - DNA, 26 bp, Artificial sequence
  SiRNA target sequence
taaggcgattacaattgtaaatttac

SEQ ID NO: 191658 - DNA, 26 bp, Artificial sequence
  SiRNA target sequence
aaggcgattacaattgtaaatttacc

SEQ ID NO: 191659 - DNA, 26 bp, Artificial sequence
  SiRNA target sequence
aggcgattacaattgtaaatttacct

SEQ ID NO: 191660 - DNA, 26 bp, Artificial sequence
  SiRNA target sequence
ggcgattacaattgtaaatttaccta

SEQ ID NO: 191661 - DNA, 26 bp, Artificial sequence
  SiRNA target sequence
gcgattacaattgtaaatttacctac

SEQ ID NO: 191662 - DNA, 26 bp, Artificial sequence
  SiRNA target sequence
cgattacaattgtaaatttacctaca

SEQ ID NO: 191663 - DNA, 26 bp, Artificial sequence
  SiRNA target sequence
gattacaattgtaaatttacctacaa

SEQ ID NO: 191664 - DNA, 26 bp, Artificial sequence
  SiRNA target sequence
attacaattgtaaatttacctacaaa

SEQ ID NO: 191665 - DNA, 26 bp, Artificial sequence
  SiRNA target sequence
ttacaattgtaaatttacctacaaat

SEQ ID NO: 191666 - DNA, 26 bp, Artificial sequence
  SiRNA target sequence
tacaattgtaaatttacctacaaatc

SEQ ID NO: 191667 - DNA, 26 bp, Artificial sequence
  SiRNA target sequence
acaattgtaaatttacctacaaatct

SEQ ID NO: 191668 - DNA, 26 bp, Artificial sequence
  SiRNA target sequence
caattgtaaatttacctacaaatcta

SEQ ID NO: 191669 - DNA, 26 bp, Artificial sequence
  SiRNA target sequence
aattgtaaatttacctacaaatctag

SEQ ID NO: 191670 - DNA, 26 bp, Artificial sequence
  SiRNA target sequence
attgtaaatttacctacaaatctaga

SEQ ID NO: 191671 - DNA, 26 bp, Artificial sequence
  SiRNA target sequence
ttgtaaatttacctacaaatctagat

SEQ ID NO: 191672 - DNA, 26 bp, Artificial sequence
  SiRNA target sequence
tgtaaatttacctacaaatctagata

SEQ ID NO: 191673 - DNA, 26 bp, Artificial sequence
  SiRNA target sequence
gtaaatttacctacaaatctagataa

SEQ ID NO: 191674 - DNA, 26 bp, Artificial sequence
  SiRNA target sequence
taaatttacctacaaatctagataaa

SEQ ID NO: 191675 - DNA, 26 bp, Artificial sequence
  SiRNA target sequence
aaatttacctacaaatctagataaag

SEQ ID NO: 191676 - DNA, 26 bp, Artificial sequence
  SiRNA target sequence
aatttacctacaaatctagataaaga

SEQ ID NO: 191677 - DNA, 26 bp, Artificial sequence
  SiRNA target sequence
atttacctacaaatctagataaagac

SEQ ID NO: 191678 - DNA, 26 bp, Artificial sequence
  SiRNA target sequence
tttacctacaaatctagataaagaca

SEQ ID NO: 191679 - DNA, 26 bp, Artificial sequence
  SiRNA target sequence
ttacctacaaatctagataaagacat

SEQ ID NO: 191680 - DNA, 26 bp, Artificial sequence
  SiRNA target sequence
tacctacaaatctagataaagacatt

SEQ ID NO: 191681 - DNA, 26 bp, Artificial sequence
  SiRNA target sequence
acctacaaatctagataaagacattt

SEQ ID NO: 191682 - DNA, 26 bp, Artificial sequence
  SiRNA target sequence
cctacaaatctagataaagacatttc

SEQ ID NO: 191683 - DNA, 26 bp, Artificial sequence
  SiRNA target sequence
ctacaaatctagataaagacatttca

SEQ ID NO: 191684 - DNA, 26 bp, Artificial sequence
  SiRNA target sequence
tacaaatctagataaagacatttcac

SEQ ID NO: 191685 - DNA, 26 bp, Artificial sequence
  SiRNA target sequence
acaaatctagataaagacatttcaca

SEQ ID NO: 191686 - DNA, 26 bp, Artificial sequence
  SiRNA target sequence
caaatctagataaagacatttcacat

SEQ ID NO: 191687 - DNA, 26 bp, Artificial sequence
  SiRNA target sequence
aaatctagataaagacatttcacata

SEQ ID NO: 191688 - DNA, 26 bp, Artificial sequence
  SiRNA target sequence
aatctagataaagacatttcacatag

SEQ ID NO: 191689 - DNA, 26 bp, Artificial sequence
  SiRNA target sequence
atctagataaagacatttcacataga

SEQ ID NO: 191690 - DNA, 26 bp, Artificial sequence
  SiRNA target sequence
tctagataaagacatttcacatagat

SEQ ID NO: 191691 - DNA, 26 bp, Artificial sequence
  SiRNA target sequence
ctagataaagacatttcacatagata

SEQ ID NO: 191692 - DNA, 26 bp, Artificial sequence
  SiRNA target sequence
tagataaagacatttcacatagatat

SEQ ID NO: 191693 - DNA, 26 bp, Artificial sequence
  SiRNA target sequence
agataaagacatttcacatagatatt

SEQ ID NO: 191694 - DNA, 26 bp, Artificial sequence
  SiRNA target sequence
gataaagacatttcacatagatattc

SEQ ID NO: 191695 - DNA, 26 bp, Artificial sequence
  SiRNA target sequence
ataaagacatttcacatagatattcg

SEQ ID NO: 191696 - DNA, 26 bp, Artificial sequence
  SiRNA target sequence
taaagacatttcacatagatattcgg

SEQ ID NO: 191697 - DNA, 26 bp, Artificial sequence
  SiRNA target sequence
aaagacatttcacatagatattcggc

SEQ ID NO: 191698 - DNA, 26 bp, Artificial sequence
  SiRNA target sequence
aagacatttcacatagatattcggca

SEQ ID NO: 191699 - DNA, 26 bp, Artificial sequence
  SiRNA target sequence
agacatttcacatagatattcggcaa

SEQ ID NO: 191700 - DNA, 26 bp, Artificial sequence
  SiRNA target sequence
gacatttcacatagatattcggcaaa

SEQ ID NO: 191701 - DNA, 26 bp, Artificial sequence
  SiRNA target sequence
acatttcacatagatattcggcaaat

SEQ ID NO: 191702 - DNA, 26 bp, Artificial sequence
  SiRNA target sequence
catttcacatagatattcggcaaatg

SEQ ID NO: 191703 - DNA, 26 bp, Artificial sequence
  SiRNA target sequence
atttcacatagatattcggcaaatgg

SEQ ID NO: 191704 - DNA, 26 bp, Artificial sequence
  SiRNA target sequence
tttcacatagatattcggcaaatggt

SEQ ID NO: 191705 - DNA, 26 bp, Artificial sequence
  SiRNA target sequence
ttcacatagatattcggcaaatggtt

SEQ ID NO: 191706 - DNA, 26 bp, Artificial sequence
  SiRNA target sequence
tcacatagatattcggcaaatggttt

SEQ ID NO: 191707 - DNA, 26 bp, Artificial sequence
  SiRNA target sequence
cacatagatattcggcaaatggtttt

SEQ ID NO: 191708 - DNA, 26 bp, Artificial sequence
  SiRNA target sequence
acatagatattcggcaaatggtttta

SEQ ID NO: 191709 - DNA, 26 bp, Artificial sequence
  SiRNA target sequence
catagatattcggcaaatggttttaa

SEQ ID NO: 191710 - DNA, 26 bp, Artificial sequence
  SiRNA target sequence
atagatattcggcaaatggttttaaa

SEQ ID NO: 191711 - DNA, 26 bp, Artificial sequence
  SiRNA target sequence
tagatattcggcaaatggttttaaac

SEQ ID NO: 191712 - DNA, 26 bp, Artificial sequence
  SiRNA target sequence
agatattcggcaaatggttttaaact

SEQ ID NO: 191713 - DNA, 26 bp, Artificial sequence
  SiRNA target sequence
gatattcggcaaatggttttaaactt

SEQ ID NO: 191714 - DNA, 26 bp, Artificial sequence
  SiRNA target sequence
atattcggcaaatggttttaaacttc

SEQ ID NO: 191715 - DNA, 26 bp, Artificial sequence
  SiRNA target sequence
tattcggcaaatggttttaaacttca

SEQ ID NO: 191716 - DNA, 26 bp, Artificial sequence
  SiRNA target sequence
attcggcaaatggttttaaacttcac

SEQ ID NO: 191717 - DNA, 26 bp, Artificial sequence
  SiRNA target sequence
ttcggcaaatggttttaaacttcaca

SEQ ID NO: 191718 - DNA, 26 bp, Artificial sequence
  SiRNA target sequence
tcggcaaatggttttaaacttcacag

SEQ ID NO: 191719 - DNA, 26 bp, Artificial sequence
  SiRNA target sequence
cggcaaatggttttaaacttcacaga

SEQ ID NO: 191720 - DNA, 26 bp, Artificial sequence
  SiRNA target sequence
ggcaaatggttttaaacttcacagat

SEQ ID NO: 191721 - DNA, 26 bp, Artificial sequence
  SiRNA target sequence
gcaaatggttttaaacttcacagatt

SEQ ID NO: 191722 - DNA, 26 bp, Artificial sequence
  SiRNA target sequence
caaatggttttaaacttcacagatta

SEQ ID NO: 191723 - DNA, 26 bp, Artificial sequence
  SiRNA target sequence
aaatggttttaaacttcacagattac

SEQ ID NO: 191724 - DNA, 26 bp, Artificial sequence
  SiRNA target sequence
aatggttttaaacttcacagattacc

SEQ ID NO: 191725 - DNA, 26 bp, Artificial sequence
  SiRNA target sequence
atggttttaaacttcacagattacca

SEQ ID NO: 191726 - DNA, 26 bp, Artificial sequence
  SiRNA target sequence
tggttttaaacttcacagattaccaa

SEQ ID NO: 191727 - DNA, 26 bp, Artificial sequence
  SiRNA target sequence
ggttttaaacttcacagattaccaat

SEQ ID NO: 191728 - DNA, 26 bp, Artificial sequence
  SiRNA target sequence
gttttaaacttcacagattaccaatc

SEQ ID NO: 191729 - DNA, 26 bp, Artificial sequence
  SiRNA target sequence
ttttaaacttcacagattaccaatcc

SEQ ID NO: 191730 - DNA, 26 bp, Artificial sequence
  SiRNA target sequence
tttaaacttcacagattaccaatccc

SEQ ID NO: 191731 - DNA, 26 bp, Artificial sequence
  SiRNA target sequence
ttaaacttcacagattaccaatccct

SEQ ID NO: 191732 - DNA, 26 bp, Artificial sequence
  SiRNA target sequence
taaacttcacagattaccaatcccta

SEQ ID NO: 191733 - DNA, 26 bp, Artificial sequence
  SiRNA target sequence
aaacttcacagattaccaatccctaa

SEQ ID NO: 191734 - DNA, 26 bp, Artificial sequence
  SiRNA target sequence
aacttcacagattaccaatccctaaa

SEQ ID NO: 191735 - DNA, 26 bp, Artificial sequence
  SiRNA target sequence
acttcacagattaccaatccctaaat

SEQ ID NO: 191736 - DNA, 26 bp, Artificial sequence
  SiRNA target sequence
cttcacagattaccaatccctaaata

SEQ ID NO: 191737 - DNA, 26 bp, Artificial sequence
  SiRNA target sequence
ttcacagattaccaatccctaaatat

SEQ ID NO: 191738 - DNA, 26 bp, Artificial sequence
  SiRNA target sequence
tcacagattaccaatccctaaatatg

SEQ ID NO: 191739 - DNA, 26 bp, Artificial sequence
  SiRNA target sequence
cacagattaccaatccctaaatatgg

SEQ ID NO: 191740 - DNA, 26 bp, Artificial sequence
  SiRNA target sequence
acagattaccaatccctaaatatggt

SEQ ID NO: 191741 - DNA, 26 bp, Artificial sequence
  SiRNA target sequence
cagattaccaatccctaaatatggta

SEQ ID NO: 191742 - DNA, 26 bp, Artificial sequence
  SiRNA target sequence
agattaccaatccctaaatatggtaa

SEQ ID NO: 191743 - DNA, 26 bp, Artificial sequence
  SiRNA target sequence
gattaccaatccctaaatatggtaag

SEQ ID NO: 191744 - DNA, 26 bp, Artificial sequence
  SiRNA target sequence
attaccaatccctaaatatggtaagg

SEQ ID NO: 191745 - DNA, 26 bp, Artificial sequence
  SiRNA target sequence
ttaccaatccctaaatatggtaaggt

SEQ ID NO: 191746 - DNA, 26 bp, Artificial sequence
  SiRNA target sequence
taccaatccctaaatatggtaaggtt

SEQ ID NO: 191747 - DNA, 26 bp, Artificial sequence
  SiRNA target sequence
accaatccctaaatatggtaaggttt

SEQ ID NO: 191748 - DNA, 26 bp, Artificial sequence
  SiRNA target sequence
ccaatccctaaatatggtaaggtttt

SEQ ID NO: 191749 - DNA, 26 bp, Artificial sequence
  SiRNA target sequence
caatccctaaatatggtaaggtttta

SEQ ID NO: 191750 - DNA, 26 bp, Artificial sequence
  SiRNA target sequence
aatccctaaatatggtaaggttttag

SEQ ID NO: 191751 - DNA, 26 bp, Artificial sequence
  SiRNA target sequence
atccctaaatatggtaaggttttagg

SEQ ID NO: 191752 - DNA, 26 bp, Artificial sequence
  SiRNA target sequence
tccctaaatatggtaaggttttaggg

SEQ ID NO: 191753 - DNA, 26 bp, Artificial sequence
  SiRNA target sequence
ccctaaatatggtaaggttttagggc

SEQ ID NO: 191754 - DNA, 26 bp, Artificial sequence
  SiRNA target sequence
cctaaatatggtaaggttttagggct

SEQ ID NO: 191755 - DNA, 26 bp, Artificial sequence
  SiRNA target sequence
ctaaatatggtaaggttttagggcta

SEQ ID NO: 191756 - DNA, 26 bp, Artificial sequence
  SiRNA target sequence
taaatatggtaaggttttagggctag

SEQ ID NO: 191757 - DNA, 26 bp, Artificial sequence
  SiRNA target sequence
aaatatggtaaggttttagggctagt

SEQ ID NO: 191758 - DNA, 26 bp, Artificial sequence
  SiRNA target sequence
aatatggtaaggttttagggctagta

SEQ ID NO: 191759 - DNA, 26 bp, Artificial sequence
  SiRNA target sequence
atatggtaaggttttagggctagtag

SEQ ID NO: 191760 - DNA, 26 bp, Artificial sequence
  SiRNA target sequence
tatggtaaggttttagggctagtagg

SEQ ID NO: 191761 - DNA, 26 bp, Artificial sequence
  SiRNA target sequence
atggtaaggttttagggctagtaggc

SEQ ID NO: 191762 - DNA, 26 bp, Artificial sequence
  SiRNA target sequence
tggtaaggttttagggctagtaggca

SEQ ID NO: 191763 - DNA, 26 bp, Artificial sequence
  SiRNA target sequence
ggtaaggttttagggctagtaggcac

SEQ ID NO: 191764 - DNA, 26 bp, Artificial sequence
  SiRNA target sequence
gtaaggttttagggctagtaggcact

SEQ ID NO: 191765 - DNA, 26 bp, Artificial sequence
  SiRNA target sequence
taaggttttagggctagtaggcacta

SEQ ID NO: 191766 - DNA, 26 bp, Artificial sequence
  SiRNA target sequence
aaggttttagggctagtaggcactaa

SEQ ID NO: 191767 - DNA, 26 bp, Artificial sequence
  SiRNA target sequence
aggttttagggctagtaggcactaat

SEQ ID NO: 191768 - DNA, 26 bp, Artificial sequence
  SiRNA target sequence
ggttttagggctagtaggcactaatg

SEQ ID NO: 191769 - DNA, 26 bp, Artificial sequence
  SiRNA target sequence
gttttagggctagtaggcactaatgg

SEQ ID NO: 191770 - DNA, 26 bp, Artificial sequence
  SiRNA target sequence
ttttagggctagtaggcactaatggt

SEQ ID NO: 191771 - DNA, 26 bp, Artificial sequence
  SiRNA target sequence
tttagggctagtaggcactaatggta

SEQ ID NO: 191772 - DNA, 26 bp, Artificial sequence
  SiRNA target sequence
ttagggctagtaggcactaatggtat

SEQ ID NO: 191773 - DNA, 26 bp, Artificial sequence
  SiRNA target sequence
tagggctagtaggcactaatggtata

SEQ ID NO: 191774 - DNA, 26 bp, Artificial sequence
  SiRNA target sequence
agggctagtaggcactaatggtatag

SEQ ID NO: 191775 - DNA, 26 bp, Artificial sequence
  SiRNA target sequence
gggctagtaggcactaatggtatagg

SEQ ID NO: 191776 - DNA, 26 bp, Artificial sequence
  SiRNA target sequence
ggctagtaggcactaatggtatagga

SEQ ID NO: 191777 - DNA, 26 bp, Artificial sequence
  SiRNA target sequence
gctagtaggcactaatggtataggaa

SEQ ID NO: 191778 - DNA, 26 bp, Artificial sequence
  SiRNA target sequence
ctagtaggcactaatggtataggaaa

SEQ ID NO: 191779 - DNA, 26 bp, Artificial sequence
  SiRNA target sequence
tagtaggcactaatggtataggaaaa

SEQ ID NO: 191780 - DNA, 26 bp, Artificial sequence
  SiRNA target sequence
agtaggcactaatggtataggaaaaa

SEQ ID NO: 191781 - DNA, 26 bp, Artificial sequence
  SiRNA target sequence
gtaggcactaatggtataggaaaaag

SEQ ID NO: 191782 - DNA, 26 bp, Artificial sequence
  SiRNA target sequence
taggcactaatggtataggaaaaagt

SEQ ID NO: 191783 - DNA, 26 bp, Artificial sequence
  SiRNA target sequence
aggcactaatggtataggaaaaagta

SEQ ID NO: 191784 - DNA, 26 bp, Artificial sequence
  SiRNA target sequence
ggcactaatggtataggaaaaagtac

SEQ ID NO: 191785 - DNA, 26 bp, Artificial sequence
  SiRNA target sequence
gcactaatggtataggaaaaagtact

SEQ ID NO: 191786 - DNA, 26 bp, Artificial sequence
  SiRNA target sequence
cactaatggtataggaaaaagtactg

SEQ ID NO: 191787 - DNA, 26 bp, Artificial sequence
  SiRNA target sequence
actaatggtataggaaaaagtactgc

SEQ ID NO: 191788 - DNA, 26 bp, Artificial sequence
  SiRNA target sequence
ctaatggtataggaaaaagtactgca

SEQ ID NO: 191789 - DNA, 26 bp, Artificial sequence
  SiRNA target sequence
taatggtataggaaaaagtactgcac

SEQ ID NO: 191790 - DNA, 26 bp, Artificial sequence
  SiRNA target sequence
aatggtataggaaaaagtactgcact

SEQ ID NO: 191791 - DNA, 26 bp, Artificial sequence
  SiRNA target sequence
atggtataggaaaaagtactgcactt

SEQ ID NO: 191792 - DNA, 26 bp, Artificial sequence
  SiRNA target sequence
tggtataggaaaaagtactgcactta

SEQ ID NO: 191793 - DNA, 26 bp, Artificial sequence
  SiRNA target sequence
ggtataggaaaaagtactgcacttaa

SEQ ID NO: 191794 - DNA, 26 bp, Artificial sequence
  SiRNA target sequence
gtataggaaaaagtactgcacttaaa

SEQ ID NO: 191795 - DNA, 26 bp, Artificial sequence
  SiRNA target sequence
tataggaaaaagtactgcacttaaaa

SEQ ID NO: 191796 - DNA, 26 bp, Artificial sequence
  SiRNA target sequence
ataggaaaaagtactgcacttaaaat

SEQ ID NO: 191797 - DNA, 26 bp, Artificial sequence
  SiRNA target sequence
taggaaaaagtactgcacttaaaata

SEQ ID NO: 191798 - DNA, 26 bp, Artificial sequence
  SiRNA target sequence
aggaaaaagtactgcacttaaaatat

SEQ ID NO: 191799 - DNA, 26 bp, Artificial sequence
  SiRNA target sequence
ggaaaaagtactgcacttaaaatatt

SEQ ID NO: 191800 - DNA, 26 bp, Artificial sequence
  SiRNA target sequence
gaaaaagtactgcacttaaaatatta

SEQ ID NO: 191801 - DNA, 26 bp, Artificial sequence
  SiRNA target sequence
aaaaagtactgcacttaaaatattat

SEQ ID NO: 191802 - DNA, 26 bp, Artificial sequence
  SiRNA target sequence
aaaagtactgcacttaaaatattatc

SEQ ID NO: 191803 - DNA, 26 bp, Artificial sequence
  SiRNA target sequence
aaagtactgcacttaaaatattatcg

SEQ ID NO: 191804 - DNA, 26 bp, Artificial sequence
  SiRNA target sequence
aagtactgcacttaaaatattatcgg

SEQ ID NO: 191805 - DNA, 26 bp, Artificial sequence
  SiRNA target sequence
agtactgcacttaaaatattatcggg

SEQ ID NO: 191806 - DNA, 26 bp, Artificial sequence
  SiRNA target sequence
gtactgcacttaaaatattatcgggc

SEQ ID NO: 191807 - DNA, 26 bp, Artificial sequence
  SiRNA target sequence
tactgcacttaaaatattatcgggca

SEQ ID NO: 191808 - DNA, 26 bp, Artificial sequence
  SiRNA target sequence
actgcacttaaaatattatcgggcaa

SEQ ID NO: 191809 - DNA, 26 bp, Artificial sequence
  SiRNA target sequence
ctgcacttaaaatattatcgggcaat

SEQ ID NO: 191810 - DNA, 26 bp, Artificial sequence
  SiRNA target sequence
tgcacttaaaatattatcgggcaatc

SEQ ID NO: 191811 - DNA, 26 bp, Artificial sequence
  SiRNA target sequence
gcacttaaaatattatcgggcaatct

SEQ ID NO: 191812 - DNA, 26 bp, Artificial sequence
  SiRNA target sequence
cacttaaaatattatcgggcaatctt

SEQ ID NO: 191813 - DNA, 26 bp, Artificial sequence
  SiRNA target sequence
acttaaaatattatcgggcaatctta

SEQ ID NO: 191814 - DNA, 26 bp, Artificial sequence
  SiRNA target sequence
cttaaaatattatcgggcaatcttaa

SEQ ID NO: 191815 - DNA, 26 bp, Artificial sequence
  SiRNA target sequence
ttaaaatattatcgggcaatcttaaa

SEQ ID NO: 191816 - DNA, 26 bp, Artificial sequence
  SiRNA target sequence
taaaatattatcgggcaatcttaaac

SEQ ID NO: 191817 - DNA, 26 bp, Artificial sequence
  SiRNA target sequence
aaaatattatcgggcaatcttaaacc

SEQ ID NO: 191818 - DNA, 26 bp, Artificial sequence
  SiRNA target sequence
aaatattatcgggcaatcttaaacca

SEQ ID NO: 191819 - DNA, 26 bp, Artificial sequence
  SiRNA target sequence
aatattatcgggcaatcttaaaccaa

SEQ ID NO: 191820 - DNA, 26 bp, Artificial sequence
  SiRNA target sequence
atattatcgggcaatcttaaaccaaa

SEQ ID NO: 191821 - DNA, 26 bp, Artificial sequence
  SiRNA target sequence
tattatcgggcaatcttaaaccaaac

SEQ ID NO: 191822 - DNA, 26 bp, Artificial sequence
  SiRNA target sequence
attatcgggcaatcttaaaccaaact

SEQ ID NO: 191823 - DNA, 26 bp, Artificial sequence
  SiRNA target sequence
ttatcgggcaatcttaaaccaaactt

SEQ ID NO: 191824 - DNA, 26 bp, Artificial sequence
  SiRNA target sequence
tatcgggcaatcttaaaccaaactta

SEQ ID NO: 191825 - DNA, 26 bp, Artificial sequence
  SiRNA target sequence
atcgggcaatcttaaaccaaacttag

SEQ ID NO: 191826 - DNA, 26 bp, Artificial sequence
  SiRNA target sequence
tcgggcaatcttaaaccaaacttagg

SEQ ID NO: 191827 - DNA, 26 bp, Artificial sequence
  SiRNA target sequence
cgggcaatcttaaaccaaacttagga

SEQ ID NO: 191828 - DNA, 26 bp, Artificial sequence
  SiRNA target sequence
gggcaatcttaaaccaaacttaggaa

SEQ ID NO: 191829 - DNA, 26 bp, Artificial sequence
  SiRNA target sequence
ggcaatcttaaaccaaacttaggaaa

SEQ ID NO: 191830 - DNA, 26 bp, Artificial sequence
  SiRNA target sequence
gcaatcttaaaccaaacttaggaaag

SEQ ID NO: 191831 - DNA, 26 bp, Artificial sequence
  SiRNA target sequence
caatcttaaaccaaacttaggaaagt

SEQ ID NO: 191832 - DNA, 26 bp, Artificial sequence
  SiRNA target sequence
aatcttaaaccaaacttaggaaagtt

SEQ ID NO: 191833 - DNA, 26 bp, Artificial sequence
  SiRNA target sequence
atcttaaaccaaacttaggaaagttc

SEQ ID NO: 191834 - DNA, 26 bp, Artificial sequence
  SiRNA target sequence
tcttaaaccaaacttaggaaagttcg

SEQ ID NO: 191835 - DNA, 26 bp, Artificial sequence
  SiRNA target sequence
cttaaaccaaacttaggaaagttcga

SEQ ID NO: 191836 - DNA, 26 bp, Artificial sequence
  SiRNA target sequence
ttaaaccaaacttaggaaagttcgac

SEQ ID NO: 191837 - DNA, 26 bp, Artificial sequence
  SiRNA target sequence
taaaccaaacttaggaaagttcgacg

SEQ ID NO: 191838 - DNA, 26 bp, Artificial sequence
  SiRNA target sequence
aaaccaaacttaggaaagttcgacgt

SEQ ID NO: 191839 - DNA, 26 bp, Artificial sequence
  SiRNA target sequence
aaccaaacttaggaaagttcgacgtt

SEQ ID NO: 191840 - DNA, 26 bp, Artificial sequence
  SiRNA target sequence
accaaacttaggaaagttcgacgtta

SEQ ID NO: 191841 - DNA, 26 bp, Artificial sequence
  SiRNA target sequence
ccaaacttaggaaagttcgacgttac

SEQ ID NO: 191842 - DNA, 26 bp, Artificial sequence
  SiRNA target sequence
caaacttaggaaagttcgacgttacg

SEQ ID NO: 191843 - DNA, 26 bp, Artificial sequence
  SiRNA target sequence
aaacttaggaaagttcgacgttacgc

SEQ ID NO: 191844 - DNA, 26 bp, Artificial sequence
  SiRNA target sequence
aacttaggaaagttcgacgttacgcc

SEQ ID NO: 191845 - DNA, 26 bp, Artificial sequence
  SiRNA target sequence
acttaggaaagttcgacgttacgccc

SEQ ID NO: 191846 - DNA, 26 bp, Artificial sequence
  SiRNA target sequence
cttaggaaagttcgacgttacgcccg

SEQ ID NO: 191847 - DNA, 26 bp, Artificial sequence
  SiRNA target sequence
ttaggaaagttcgacgttacgcccga

SEQ ID NO: 191848 - DNA, 26 bp, Artificial sequence
  SiRNA target sequence
taggaaagttcgacgttacgcccgac

SEQ ID NO: 191849 - DNA, 26 bp, Artificial sequence
  SiRNA target sequence
aggaaagttcgacgttacgcccgact

SEQ ID NO: 191850 - DNA, 26 bp, Artificial sequence
  SiRNA target sequence
ggaaagttcgacgttacgcccgactg

SEQ ID NO: 191851 - DNA, 26 bp, Artificial sequence
  SiRNA target sequence
gaaagttcgacgttacgcccgactgg

SEQ ID NO: 191852 - DNA, 26 bp, Artificial sequence
  SiRNA target sequence
aaagttcgacgttacgcccgactggg

SEQ ID NO: 191853 - DNA, 26 bp, Artificial sequence
  SiRNA target sequence
aagttcgacgttacgcccgactgggc

SEQ ID NO: 191854 - DNA, 26 bp, Artificial sequence
  SiRNA target sequence
agttcgacgttacgcccgactgggca

SEQ ID NO: 191855 - DNA, 26 bp, Artificial sequence
  SiRNA target sequence
gttcgacgttacgcccgactgggcag

SEQ ID NO: 191856 - DNA, 26 bp, Artificial sequence
  SiRNA target sequence
ttcgacgttacgcccgactgggcagc

SEQ ID NO: 191857 - DNA, 26 bp, Artificial sequence
  SiRNA target sequence
tcgacgttacgcccgactgggcagca

SEQ ID NO: 191858 - DNA, 26 bp, Artificial sequence
  SiRNA target sequence
cgacgttacgcccgactgggcagcaa

SEQ ID NO: 191859 - DNA, 26 bp, Artificial sequence
  SiRNA target sequence
gacgttacgcccgactgggcagcaat

SEQ ID NO: 191860 - DNA, 26 bp, Artificial sequence
  SiRNA target sequence
acgttacgcccgactgggcagcaatt

SEQ ID NO: 191861 - DNA, 26 bp, Artificial sequence
  SiRNA target sequence
cgttacgcccgactgggcagcaattc

SEQ ID NO: 191862 - DNA, 26 bp, Artificial sequence
  SiRNA target sequence
gttacgcccgactgggcagcaattct

SEQ ID NO: 191863 - DNA, 26 bp, Artificial sequence
  SiRNA target sequence
ttacgcccgactgggcagcaattcta

SEQ ID NO: 191864 - DNA, 26 bp, Artificial sequence
  SiRNA target sequence
tacgcccgactgggcagcaattctaa

SEQ ID NO: 191865 - DNA, 26 bp, Artificial sequence
  SiRNA target sequence
acgcccgactgggcagcaattctaaa

SEQ ID NO: 191866 - DNA, 26 bp, Artificial sequence
  SiRNA target sequence
cgcccgactgggcagcaattctaaat

SEQ ID NO: 191867 - DNA, 26 bp, Artificial sequence
  SiRNA target sequence
gcccgactgggcagcaattctaaata

SEQ ID NO: 191868 - DNA, 26 bp, Artificial sequence
  SiRNA target sequence
cccgactgggcagcaattctaaataa

SEQ ID NO: 191869 - DNA, 26 bp, Artificial sequence
  SiRNA target sequence
ccgactgggcagcaattctaaataat

SEQ ID NO: 191870 - DNA, 26 bp, Artificial sequence
  SiRNA target sequence
cgactgggcagcaattctaaataatt

SEQ ID NO: 191871 - DNA, 26 bp, Artificial sequence
  SiRNA target sequence
gactgggcagcaattctaaataatta

SEQ ID NO: 191872 - DNA, 26 bp, Artificial sequence
  SiRNA target sequence
actgggcagcaattctaaataattat

SEQ ID NO: 191873 - DNA, 26 bp, Artificial sequence
  SiRNA target sequence
ctgggcagcaattctaaataattata

SEQ ID NO: 191874 - DNA, 26 bp, Artificial sequence
  SiRNA target sequence
tgggcagcaattctaaataattataa

SEQ ID NO: 191875 - DNA, 26 bp, Artificial sequence
  SiRNA target sequence
gggcagcaattctaaataattataaa

SEQ ID NO: 191876 - DNA, 26 bp, Artificial sequence
  SiRNA target sequence
ggcagcaattctaaataattataaag

SEQ ID NO: 191877 - DNA, 26 bp, Artificial sequence
  SiRNA target sequence
gcagcaattctaaataattataaagg

SEQ ID NO: 191878 - DNA, 26 bp, Artificial sequence
  SiRNA target sequence
cagcaattctaaataattataaagga

SEQ ID NO: 191879 - DNA, 26 bp, Artificial sequence
  SiRNA target sequence
agcaattctaaataattataaaggat

SEQ ID NO: 191880 - DNA, 26 bp, Artificial sequence
  SiRNA target sequence
gcaattctaaataattataaaggatc

SEQ ID NO: 191881 - DNA, 26 bp, Artificial sequence
  SiRNA target sequence
caattctaaataattataaaggatct

SEQ ID NO: 191882 - DNA, 26 bp, Artificial sequence
  SiRNA target sequence
aattctaaataattataaaggatctg

SEQ ID NO: 191883 - DNA, 26 bp, Artificial sequence
  SiRNA target sequence
attctaaataattataaaggatctga

SEQ ID NO: 191884 - DNA, 26 bp, Artificial sequence
  SiRNA target sequence
ttctaaataattataaaggatctgaa

SEQ ID NO: 191885 - DNA, 26 bp, Artificial sequence
  SiRNA target sequence
tctaaataattataaaggatctgaac

SEQ ID NO: 191886 - DNA, 26 bp, Artificial sequence
  SiRNA target sequence
ctaaataattataaaggatctgaact

SEQ ID NO: 191887 - DNA, 26 bp, Artificial sequence
  SiRNA target sequence
taaataattataaaggatctgaactt

SEQ ID NO: 191888 - DNA, 26 bp, Artificial sequence
  SiRNA target sequence
aaataattataaaggatctgaacttc

SEQ ID NO: 191889 - DNA, 26 bp, Artificial sequence
  SiRNA target sequence
aataattataaaggatctgaacttca

SEQ ID NO: 191890 - DNA, 26 bp, Artificial sequence
  SiRNA target sequence
ataattataaaggatctgaacttcat

SEQ ID NO: 191891 - DNA, 26 bp, Artificial sequence
  SiRNA target sequence
taattataaaggatctgaacttcatg

SEQ ID NO: 191892 - DNA, 26 bp, Artificial sequence
  SiRNA target sequence
aattataaaggatctgaacttcatgg

SEQ ID NO: 191893 - DNA, 26 bp, Artificial sequence
  SiRNA target sequence
attataaaggatctgaacttcatgga

SEQ ID NO: 191894 - DNA, 26 bp, Artificial sequence
  SiRNA target sequence
ttataaaggatctgaacttcatggat

SEQ ID NO: 191895 - DNA, 26 bp, Artificial sequence
  SiRNA target sequence
tataaaggatctgaacttcatggatt

SEQ ID NO: 191896 - DNA, 26 bp, Artificial sequence
  SiRNA target sequence
ataaaggatctgaacttcatggattt

SEQ ID NO: 191897 - DNA, 26 bp, Artificial sequence
  SiRNA target sequence
taaaggatctgaacttcatggatttt

SEQ ID NO: 191898 - DNA, 26 bp, Artificial sequence
  SiRNA target sequence
aaaggatctgaacttcatggattttt

SEQ ID NO: 191899 - DNA, 26 bp, Artificial sequence
  SiRNA target sequence
aaggatctgaacttcatggatttttt

SEQ ID NO: 191900 - DNA, 26 bp, Artificial sequence
  SiRNA target sequence
aggatctgaacttcatggatttttta

SEQ ID NO: 191901 - DNA, 26 bp, Artificial sequence
  SiRNA target sequence
ggatctgaacttcatggattttttac

SEQ ID NO: 191902 - DNA, 26 bp, Artificial sequence
  SiRNA target sequence
gatctgaacttcatggattttttact

SEQ ID NO: 191903 - DNA, 26 bp, Artificial sequence
  SiRNA target sequence
atctgaacttcatggattttttacta

SEQ ID NO: 191904 - DNA, 26 bp, Artificial sequence
  SiRNA target sequence
tctgaacttcatggattttttactaa

SEQ ID NO: 191905 - DNA, 26 bp, Artificial sequence
  SiRNA target sequence
ctgaacttcatggattttttactaaa

SEQ ID NO: 191906 - DNA, 26 bp, Artificial sequence
  SiRNA target sequence
tgaacttcatggattttttactaaaa

SEQ ID NO: 191907 - DNA, 26 bp, Artificial sequence
  SiRNA target sequence
gaacttcatggattttttactaaaat

SEQ ID NO: 191908 - DNA, 26 bp, Artificial sequence
  SiRNA target sequence
aacttcatggattttttactaaaatt

SEQ ID NO: 191909 - DNA, 26 bp, Artificial sequence
  SiRNA target sequence
acttcatggattttttactaaaattt

SEQ ID NO: 191910 - DNA, 26 bp, Artificial sequence
  SiRNA target sequence
cttcatggattttttactaaaatttt

SEQ ID NO: 191911 - DNA, 26 bp, Artificial sequence
  SiRNA target sequence
ttcatggattttttactaaaatttta

SEQ ID NO: 191912 - DNA, 26 bp, Artificial sequence
  SiRNA target sequence
tcatggattttttactaaaattttag

SEQ ID NO: 191913 - DNA, 26 bp, Artificial sequence
  SiRNA target sequence
catggattttttactaaaattttaga

SEQ ID NO: 191914 - DNA, 26 bp, Artificial sequence
  SiRNA target sequence
atggattttttactaaaattttagaa

SEQ ID NO: 191915 - DNA, 26 bp, Artificial sequence
  SiRNA target sequence
tggattttttactaaaattttagaag

SEQ ID NO: 191916 - DNA, 26 bp, Artificial sequence
  SiRNA target sequence
ggattttttactaaaattttagaagg

SEQ ID NO: 191917 - DNA, 26 bp, Artificial sequence
  SiRNA target sequence
gattttttactaaaattttagaaggg

SEQ ID NO: 191918 - DNA, 26 bp, Artificial sequence
  SiRNA target sequence
attttttactaaaattttagaagggt

SEQ ID NO: 191919 - DNA, 26 bp, Artificial sequence
  SiRNA target sequence
ttttttactaaaattttagaagggtc

SEQ ID NO: 191920 - DNA, 26 bp, Artificial sequence
  SiRNA target sequence
tttttactaaaattttagaagggtct

SEQ ID NO: 191921 - DNA, 26 bp, Artificial sequence
  SiRNA target sequence
ttttactaaaattttagaagggtcta

SEQ ID NO: 191922 - DNA, 26 bp, Artificial sequence
  SiRNA target sequence
tttactaaaattttagaagggtctat

SEQ ID NO: 191923 - DNA, 26 bp, Artificial sequence
  SiRNA target sequence
ttactaaaattttagaagggtctatt

SEQ ID NO: 191924 - DNA, 26 bp, Artificial sequence
  SiRNA target sequence
tactaaaattttagaagggtctatta

SEQ ID NO: 191925 - DNA, 26 bp, Artificial sequence
  SiRNA target sequence
actaaaattttagaagggtctattaa

SEQ ID NO: 191926 - DNA, 26 bp, Artificial sequence
  SiRNA target sequence
ctaaaattttagaagggtctattaaa

SEQ ID NO: 191927 - DNA, 26 bp, Artificial sequence
  SiRNA target sequence
taaaattttagaagggtctattaaag

SEQ ID NO: 191928 - DNA, 26 bp, Artificial sequence
  SiRNA target sequence
aaaattttagaagggtctattaaagc

SEQ ID NO: 191929 - DNA, 26 bp, Artificial sequence
  SiRNA target sequence
aaattttagaagggtctattaaagct

SEQ ID NO: 191930 - DNA, 26 bp, Artificial sequence
  SiRNA target sequence
aattttagaagggtctattaaagcta

SEQ ID NO: 191931 - DNA, 26 bp, Artificial sequence
  SiRNA target sequence
attttagaagggtctattaaagctat

SEQ ID NO: 191932 - DNA, 26 bp, Artificial sequence
  SiRNA target sequence
ttttagaagggtctattaaagctatt

SEQ ID NO: 191933 - DNA, 26 bp, Artificial sequence
  SiRNA target sequence
tttagaagggtctattaaagctattt

SEQ ID NO: 191934 - DNA, 26 bp, Artificial sequence
  SiRNA target sequence
ttagaagggtctattaaagctatttc

SEQ ID NO: 191935 - DNA, 26 bp, Artificial sequence
  SiRNA target sequence
tagaagggtctattaaagctatttct

SEQ ID NO: 191936 - DNA, 26 bp, Artificial sequence
  SiRNA target sequence
agaagggtctattaaagctatttcta

SEQ ID NO: 191937 - DNA, 26 bp, Artificial sequence
  SiRNA target sequence
gaagggtctattaaagctatttctaa

SEQ ID NO: 191938 - DNA, 26 bp, Artificial sequence
  SiRNA target sequence
aagggtctattaaagctatttctaag

SEQ ID NO: 191939 - DNA, 26 bp, Artificial sequence
  SiRNA target sequence
agggtctattaaagctatttctaaga

SEQ ID NO: 191940 - DNA, 26 bp, Artificial sequence
  SiRNA target sequence
gggtctattaaagctatttctaagat

SEQ ID NO: 191941 - DNA, 26 bp, Artificial sequence
  SiRNA target sequence
ggtctattaaagctatttctaagata

SEQ ID NO: 191942 - DNA, 26 bp, Artificial sequence
  SiRNA target sequence
gtctattaaagctatttctaagatac

SEQ ID NO: 191943 - DNA, 26 bp, Artificial sequence
  SiRNA target sequence
tctattaaagctatttctaagataca

SEQ ID NO: 191944 - DNA, 26 bp, Artificial sequence
  SiRNA target sequence
ctattaaagctatttctaagatacag

SEQ ID NO: 191945 - DNA, 26 bp, Artificial sequence
  SiRNA target sequence
tattaaagctatttctaagatacagt

SEQ ID NO: 191946 - DNA, 26 bp, Artificial sequence
  SiRNA target sequence
attaaagctatttctaagatacagta

SEQ ID NO: 191947 - DNA, 26 bp, Artificial sequence
  SiRNA target sequence
ttaaagctatttctaagatacagtat

SEQ ID NO: 191948 - DNA, 26 bp, Artificial sequence
  SiRNA target sequence
taaagctatttctaagatacagtata

SEQ ID NO: 191949 - DNA, 26 bp, Artificial sequence
  SiRNA target sequence
aaagctatttctaagatacagtatat

SEQ ID NO: 191950 - DNA, 26 bp, Artificial sequence
  SiRNA target sequence
aagctatttctaagatacagtatata

SEQ ID NO: 191951 - DNA, 26 bp, Artificial sequence
  SiRNA target sequence
agctatttctaagatacagtatatag

SEQ ID NO: 191952 - DNA, 26 bp, Artificial sequence
  SiRNA target sequence
gctatttctaagatacagtatataga

SEQ ID NO: 191953 - DNA, 26 bp, Artificial sequence
  SiRNA target sequence
ctatttctaagatacagtatatagat

SEQ ID NO: 191954 - DNA, 26 bp, Artificial sequence
  SiRNA target sequence
tatttctaagatacagtatatagata

SEQ ID NO: 191955 - DNA, 26 bp, Artificial sequence
  SiRNA target sequence
atttctaagatacagtatatagataa

SEQ ID NO: 191956 - DNA, 26 bp, Artificial sequence
  SiRNA target sequence
tttctaagatacagtatatagataaa

SEQ ID NO: 191957 - DNA, 26 bp, Artificial sequence
  SiRNA target sequence
ttctaagatacagtatatagataaaa

SEQ ID NO: 191958 - DNA, 26 bp, Artificial sequence
  SiRNA target sequence
tctaagatacagtatatagataaaat

SEQ ID NO: 191959 - DNA, 26 bp, Artificial sequence
  SiRNA target sequence
ctaagatacagtatatagataaaatg

SEQ ID NO: 191960 - DNA, 26 bp, Artificial sequence
  SiRNA target sequence
taagatacagtatatagataaaatgc

SEQ ID NO: 191961 - DNA, 26 bp, Artificial sequence
  SiRNA target sequence
aagatacagtatatagataaaatgcc

SEQ ID NO: 191962 - DNA, 26 bp, Artificial sequence
  SiRNA target sequence
agatacagtatatagataaaatgcct

SEQ ID NO: 191963 - DNA, 26 bp, Artificial sequence
  SiRNA target sequence
gatacagtatatagataaaatgccta

SEQ ID NO: 191964 - DNA, 26 bp, Artificial sequence
  SiRNA target sequence
atacagtatatagataaaatgcctaa

SEQ ID NO: 191965 - DNA, 26 bp, Artificial sequence
  SiRNA target sequence
tacagtatatagataaaatgcctaaa

SEQ ID NO: 191966 - DNA, 26 bp, Artificial sequence
  SiRNA target sequence
acagtatatagataaaatgcctaaat

SEQ ID NO: 191967 - DNA, 26 bp, Artificial sequence
  SiRNA target sequence
cagtatatagataaaatgcctaaatt

SEQ ID NO: 191968 - DNA, 26 bp, Artificial sequence
  SiRNA target sequence
agtatatagataaaatgcctaaattt

SEQ ID NO: 191969 - DNA, 26 bp, Artificial sequence
  SiRNA target sequence
gtatatagataaaatgcctaaatttt

SEQ ID NO: 191970 - DNA, 26 bp, Artificial sequence
  SiRNA target sequence
tatatagataaaatgcctaaattttt

SEQ ID NO: 191971 - DNA, 26 bp, Artificial sequence
  SiRNA target sequence
atatagataaaatgcctaaattttta

SEQ ID NO: 191972 - DNA, 26 bp, Artificial sequence
  SiRNA target sequence
tatagataaaatgcctaaatttttaa

SEQ ID NO: 191973 - DNA, 26 bp, Artificial sequence
  SiRNA target sequence
atagataaaatgcctaaatttttaaa

SEQ ID NO: 191974 - DNA, 26 bp, Artificial sequence
  SiRNA target sequence
tagataaaatgcctaaatttttaaaa

SEQ ID NO: 191975 - DNA, 26 bp, Artificial sequence
  SiRNA target sequence
agataaaatgcctaaatttttaaaag

SEQ ID NO: 191976 - DNA, 26 bp, Artificial sequence
  SiRNA target sequence
gataaaatgcctaaatttttaaaagg

SEQ ID NO: 191977 - DNA, 26 bp, Artificial sequence
  SiRNA target sequence
ataaaatgcctaaatttttaaaagga

SEQ ID NO: 191978 - DNA, 26 bp, Artificial sequence
  SiRNA target sequence
taaaatgcctaaatttttaaaaggac

SEQ ID NO: 191979 - DNA, 26 bp, Artificial sequence
  SiRNA target sequence
aaaatgcctaaatttttaaaaggacg

SEQ ID NO: 191980 - DNA, 26 bp, Artificial sequence
  SiRNA target sequence
aaatgcctaaatttttaaaaggacgc

SEQ ID NO: 191981 - DNA, 26 bp, Artificial sequence
  SiRNA target sequence
aatgcctaaatttttaaaaggacgct

SEQ ID NO: 191982 - DNA, 26 bp, Artificial sequence
  SiRNA target sequence
atgcctaaatttttaaaaggacgcta

SEQ ID NO: 191983 - DNA, 26 bp, Artificial sequence
  SiRNA target sequence
tgcctaaatttttaaaaggacgctat

SEQ ID NO: 191984 - DNA, 26 bp, Artificial sequence
  SiRNA target sequence
gcctaaatttttaaaaggacgctata

SEQ ID NO: 191985 - DNA, 26 bp, Artificial sequence
  SiRNA target sequence
cctaaatttttaaaaggacgctataa

SEQ ID NO: 191986 - DNA, 26 bp, Artificial sequence
  SiRNA target sequence
ctaaatttttaaaaggacgctataag

SEQ ID NO: 191987 - DNA, 26 bp, Artificial sequence
  SiRNA target sequence
taaatttttaaaaggacgctataagt

SEQ ID NO: 191988 - DNA, 26 bp, Artificial sequence
  SiRNA target sequence
aaatttttaaaaggacgctataagtc

SEQ ID NO: 191989 - DNA, 26 bp, Artificial sequence
  SiRNA target sequence
aatttttaaaaggacgctataagtca

SEQ ID NO: 191990 - DNA, 26 bp, Artificial sequence
  SiRNA target sequence
atttttaaaaggacgctataagtcag

SEQ ID NO: 191991 - DNA, 26 bp, Artificial sequence
  SiRNA target sequence
tttttaaaaggacgctataagtcaga

SEQ ID NO: 191992 - DNA, 26 bp, Artificial sequence
  SiRNA target sequence
ttttaaaaggacgctataagtcagaa

SEQ ID NO: 191993 - DNA, 26 bp, Artificial sequence
  SiRNA target sequence
tttaaaaggacgctataagtcagaaa

SEQ ID NO: 191994 - DNA, 26 bp, Artificial sequence
  SiRNA target sequence
ttaaaaggacgctataagtcagaaat

SEQ ID NO: 191995 - DNA, 26 bp, Artificial sequence
  SiRNA target sequence
taaaaggacgctataagtcagaaatc

SEQ ID NO: 191996 - DNA, 26 bp, Artificial sequence
  SiRNA target sequence
aaaaggacgctataagtcagaaatcg

SEQ ID NO: 191997 - DNA, 26 bp, Artificial sequence
  SiRNA target sequence
aaaggacgctataagtcagaaatcgc

SEQ ID NO: 191998 - DNA, 26 bp, Artificial sequence
  SiRNA target sequence
aaggacgctataagtcagaaatcgcc

SEQ ID NO: 191999 - DNA, 26 bp, Artificial sequence
  SiRNA target sequence
aggacgctataagtcagaaatcgcct

SEQ ID NO: 192000 - DNA, 26 bp, Artificial sequence
  SiRNA target sequence
ggacgctataagtcagaaatcgcctc

SEQ ID NO: 192001 - DNA, 26 bp, Artificial sequence
  SiRNA target sequence
gacgctataagtcagaaatcgcctcc

SEQ ID NO: 192002 - DNA, 26 bp, Artificial sequence
  SiRNA target sequence
acgctataagtcagaaatcgcctccg

SEQ ID NO: 192003 - DNA, 26 bp, Artificial sequence
  SiRNA target sequence
cgctataagtcagaaatcgcctccgg

SEQ ID NO: 192004 - DNA, 26 bp, Artificial sequence
  SiRNA target sequence
gctataagtcagaaatcgcctccgga

SEQ ID NO: 192005 - DNA, 26 bp, Artificial sequence
  SiRNA target sequence
ctataagtcagaaatcgcctccggaa

SEQ ID NO: 192006 - DNA, 26 bp, Artificial sequence
  SiRNA target sequence
tataagtcagaaatcgcctccggaaa

SEQ ID NO: 192007 - DNA, 26 bp, Artificial sequence
  SiRNA target sequence
ataagtcagaaatcgcctccggaaaa

SEQ ID NO: 192008 - DNA, 26 bp, Artificial sequence
  SiRNA target sequence
taagtcagaaatcgcctccggaaaaa

SEQ ID NO: 192009 - DNA, 26 bp, Artificial sequence
  SiRNA target sequence
aagtcagaaatcgcctccggaaaaat

SEQ ID NO: 192010 - DNA, 26 bp, Artificial sequence
  SiRNA target sequence
agtcagaaatcgcctccggaaaaatg

SEQ ID NO: 192011 - DNA, 26 bp, Artificial sequence
  SiRNA target sequence
gtcagaaatcgcctccggaaaaatgt

SEQ ID NO: 192012 - DNA, 26 bp, Artificial sequence
  SiRNA target sequence
tcagaaatcgcctccggaaaaatgtt

SEQ ID NO: 192013 - DNA, 26 bp, Artificial sequence
  SiRNA target sequence
cagaaatcgcctccggaaaaatgttg

SEQ ID NO: 192014 - DNA, 26 bp, Artificial sequence
  SiRNA target sequence
agaaatcgcctccggaaaaatgttgt

SEQ ID NO: 192015 - DNA, 26 bp, Artificial sequence
  SiRNA target sequence
gaaatcgcctccggaaaaatgttgtt

SEQ ID NO: 192016 - DNA, 26 bp, Artificial sequence
  SiRNA target sequence
aaatcgcctccggaaaaatgttgttt

SEQ ID NO: 192017 - DNA, 26 bp, Artificial sequence
  SiRNA target sequence
aatcgcctccggaaaaatgttgttta

SEQ ID NO: 192018 - DNA, 26 bp, Artificial sequence
  SiRNA target sequence
atcgcctccggaaaaatgttgtttac

SEQ ID NO: 192019 - DNA, 26 bp, Artificial sequence
  SiRNA target sequence
tcgcctccggaaaaatgttgtttact

SEQ ID NO: 192020 - DNA, 26 bp, Artificial sequence
  SiRNA target sequence
cgcctccggaaaaatgttgtttactg

SEQ ID NO: 192021 - DNA, 26 bp, Artificial sequence
  SiRNA target sequence
gcctccggaaaaatgttgtttactgt

SEQ ID NO: 192022 - DNA, 26 bp, Artificial sequence
  SiRNA target sequence
cctccggaaaaatgttgtttactgtt

SEQ ID NO: 192023 - DNA, 26 bp, Artificial sequence
  SiRNA target sequence
ctccggaaaaatgttgtttactgtta

SEQ ID NO: 192024 - DNA, 26 bp, Artificial sequence
  SiRNA target sequence
tccggaaaaatgttgtttactgttaa

SEQ ID NO: 192025 - DNA, 26 bp, Artificial sequence
  SiRNA target sequence
ccggaaaaatgttgtttactgttaat

SEQ ID NO: 192026 - DNA, 26 bp, Artificial sequence
  SiRNA target sequence
cggaaaaatgttgtttactgttaatg

SEQ ID NO: 192027 - DNA, 26 bp, Artificial sequence
  SiRNA target sequence
ggaaaaatgttgtttactgttaatga

SEQ ID NO: 192028 - DNA, 26 bp, Artificial sequence
  SiRNA target sequence
gaaaaatgttgtttactgttaatgat

SEQ ID NO: 192029 - DNA, 26 bp, Artificial sequence
  SiRNA target sequence
aaaaatgttgtttactgttaatgata

SEQ ID NO: 192030 - DNA, 26 bp, Artificial sequence
  SiRNA target sequence
aaaatgttgtttactgttaatgatat

SEQ ID NO: 192031 - DNA, 26 bp, Artificial sequence
  SiRNA target sequence
aaatgttgtttactgttaatgatata

SEQ ID NO: 192032 - DNA, 26 bp, Artificial sequence
  SiRNA target sequence
aatgttgtttactgttaatgatatat

SEQ ID NO: 192033 - DNA, 26 bp, Artificial sequence
  SiRNA target sequence
atgttgtttactgttaatgatatatt

SEQ ID NO: 192034 - DNA, 26 bp, Artificial sequence
  SiRNA target sequence
tgttgtttactgttaatgatatatta

SEQ ID NO: 192035 - DNA, 26 bp, Artificial sequence
  SiRNA target sequence
gttgtttactgttaatgatatattaa

SEQ ID NO: 192036 - DNA, 26 bp, Artificial sequence
  SiRNA target sequence
ttgtttactgttaatgatatattaaa

SEQ ID NO: 192037 - DNA, 26 bp, Artificial sequence
  SiRNA target sequence
tgtttactgttaatgatatattaaaa

SEQ ID NO: 192038 - DNA, 26 bp, Artificial sequence
  SiRNA target sequence
gtttactgttaatgatatattaaaaa

SEQ ID NO: 192039 - DNA, 26 bp, Artificial sequence
  SiRNA target sequence
tttactgttaatgatatattaaaaaa

SEQ ID NO: 192040 - DNA, 26 bp, Artificial sequence
  SiRNA target sequence
ttactgttaatgatatattaaaaaaa

SEQ ID NO: 192041 - DNA, 26 bp, Artificial sequence
  SiRNA target sequence
tactgttaatgatatattaaaaaaag

SEQ ID NO: 192042 - DNA, 26 bp, Artificial sequence
  SiRNA target sequence
actgttaatgatatattaaaaaaagt

SEQ ID NO: 192043 - DNA, 26 bp, Artificial sequence
  SiRNA target sequence
ctgttaatgatatattaaaaaaagtt

SEQ ID NO: 192044 - DNA, 26 bp, Artificial sequence
  SiRNA target sequence
tgttaatgatatattaaaaaaagttg

SEQ ID NO: 192045 - DNA, 26 bp, Artificial sequence
  SiRNA target sequence
gttaatgatatattaaaaaaagttga

SEQ ID NO: 192046 - DNA, 26 bp, Artificial sequence
  SiRNA target sequence
ttaatgatatattaaaaaaagttgat

SEQ ID NO: 192047 - DNA, 26 bp, Artificial sequence
  SiRNA target sequence
taatgatatattaaaaaaagttgatg

SEQ ID NO: 192048 - DNA, 26 bp, Artificial sequence
  SiRNA target sequence
aatgatatattaaaaaaagttgatga

SEQ ID NO: 192049 - DNA, 26 bp, Artificial sequence
  SiRNA target sequence
atgatatattaaaaaaagttgatgaa

SEQ ID NO: 192050 - DNA, 26 bp, Artificial sequence
  SiRNA target sequence
tgatatattaaaaaaagttgatgaaa

SEQ ID NO: 192051 - DNA, 26 bp, Artificial sequence
  SiRNA target sequence
gatatattaaaaaaagttgatgaaaa

SEQ ID NO: 192052 - DNA, 26 bp, Artificial sequence
  SiRNA target sequence
atatattaaaaaaagttgatgaaaaa

SEQ ID NO: 192053 - DNA, 26 bp, Artificial sequence
  SiRNA target sequence
tatattaaaaaaagttgatgaaaaaa

SEQ ID NO: 192054 - DNA, 26 bp, Artificial sequence
  SiRNA target sequence
atattaaaaaaagttgatgaaaaaaa

SEQ ID NO: 192055 - DNA, 26 bp, Artificial sequence
  SiRNA target sequence
tattaaaaaaagttgatgaaaaaaat

SEQ ID NO: 192056 - DNA, 26 bp, Artificial sequence
  SiRNA target sequence
attaaaaaaagttgatgaaaaaaata

SEQ ID NO: 192057 - DNA, 26 bp, Artificial sequence
  SiRNA target sequence
ttaaaaaaagttgatgaaaaaaataa

SEQ ID NO: 192058 - DNA, 26 bp, Artificial sequence
  SiRNA target sequence
taaaaaaagttgatgaaaaaaataaa

SEQ ID NO: 192059 - DNA, 26 bp, Artificial sequence
  SiRNA target sequence
aaaaaaagttgatgaaaaaaataaat

SEQ ID NO: 192060 - DNA, 26 bp, Artificial sequence
  SiRNA target sequence
aaaaaagttgatgaaaaaaataaatt

SEQ ID NO: 192061 - DNA, 26 bp, Artificial sequence
  SiRNA target sequence
aaaaagttgatgaaaaaaataaattt

SEQ ID NO: 192062 - DNA, 26 bp, Artificial sequence
  SiRNA target sequence
aaaagttgatgaaaaaaataaatttg

SEQ ID NO: 192063 - DNA, 26 bp, Artificial sequence
  SiRNA target sequence
aaagttgatgaaaaaaataaatttga

SEQ ID NO: 192064 - DNA, 26 bp, Artificial sequence
  SiRNA target sequence
aagttgatgaaaaaaataaatttgac

SEQ ID NO: 192065 - DNA, 26 bp, Artificial sequence
  SiRNA target sequence
agttgatgaaaaaaataaatttgact

SEQ ID NO: 192066 - DNA, 26 bp, Artificial sequence
  SiRNA target sequence
gttgatgaaaaaaataaatttgacta

SEQ ID NO: 192067 - DNA, 26 bp, Artificial sequence
  SiRNA target sequence
ttgatgaaaaaaataaatttgactat

SEQ ID NO: 192068 - DNA, 26 bp, Artificial sequence
  SiRNA target sequence
tgatgaaaaaaataaatttgactatt

SEQ ID NO: 192069 - DNA, 26 bp, Artificial sequence
  SiRNA target sequence
gatgaaaaaaataaatttgactatta

SEQ ID NO: 192070 - DNA, 26 bp, Artificial sequence
  SiRNA target sequence
atgaaaaaaataaatttgactattac

SEQ ID NO: 192071 - DNA, 26 bp, Artificial sequence
  SiRNA target sequence
tgaaaaaaataaatttgactattacg

SEQ ID NO: 192072 - DNA, 26 bp, Artificial sequence
  SiRNA target sequence
gaaaaaaataaatttgactattacgt

SEQ ID NO: 192073 - DNA, 26 bp, Artificial sequence
  SiRNA target sequence
aaaaaaataaatttgactattacgta

SEQ ID NO: 192074 - DNA, 26 bp, Artificial sequence
  SiRNA target sequence
aaaaaataaatttgactattacgtag

SEQ ID NO: 192075 - DNA, 26 bp, Artificial sequence
  SiRNA target sequence
aaaaataaatttgactattacgtaga

SEQ ID NO: 192076 - DNA, 26 bp, Artificial sequence
  SiRNA target sequence
aaaataaatttgactattacgtagat

SEQ ID NO: 192077 - DNA, 26 bp, Artificial sequence
  SiRNA target sequence
aaataaatttgactattacgtagata

SEQ ID NO: 192078 - DNA, 26 bp, Artificial sequence
  SiRNA target sequence
aataaatttgactattacgtagataa

SEQ ID NO: 192079 - DNA, 26 bp, Artificial sequence
  SiRNA target sequence
ataaatttgactattacgtagataaa

SEQ ID NO: 192080 - DNA, 26 bp, Artificial sequence
  SiRNA target sequence
taaatttgactattacgtagataaaa

SEQ ID NO: 192081 - DNA, 26 bp, Artificial sequence
  SiRNA target sequence
aaatttgactattacgtagataaaat

SEQ ID NO: 192082 - DNA, 26 bp, Artificial sequence
  SiRNA target sequence
aatttgactattacgtagataaaatg

SEQ ID NO: 192083 - DNA, 26 bp, Artificial sequence
  SiRNA target sequence
atttgactattacgtagataaaatgg

SEQ ID NO: 192084 - DNA, 26 bp, Artificial sequence
  SiRNA target sequence
tttgactattacgtagataaaatggc

SEQ ID NO: 192085 - DNA, 26 bp, Artificial sequence
  SiRNA target sequence
ttgactattacgtagataaaatggca

SEQ ID NO: 192086 - DNA, 26 bp, Artificial sequence
  SiRNA target sequence
tgactattacgtagataaaatggcac

SEQ ID NO: 192087 - DNA, 26 bp, Artificial sequence
  SiRNA target sequence
gactattacgtagataaaatggcact

SEQ ID NO: 192088 - DNA, 26 bp, Artificial sequence
  SiRNA target sequence
actattacgtagataaaatggcactt

SEQ ID NO: 192089 - DNA, 26 bp, Artificial sequence
  SiRNA target sequence
ctattacgtagataaaatggcactta

SEQ ID NO: 192090 - DNA, 26 bp, Artificial sequence
  SiRNA target sequence
tattacgtagataaaatggcacttaa

SEQ ID NO: 192091 - DNA, 26 bp, Artificial sequence
  SiRNA target sequence
attacgtagataaaatggcacttaaa

SEQ ID NO: 192092 - DNA, 26 bp, Artificial sequence
  SiRNA target sequence
ttacgtagataaaatggcacttaaaa

SEQ ID NO: 192093 - DNA, 26 bp, Artificial sequence
  SiRNA target sequence
tacgtagataaaatggcacttaaaaa

SEQ ID NO: 192094 - DNA, 26 bp, Artificial sequence
  SiRNA target sequence
acgtagataaaatggcacttaaaaat

SEQ ID NO: 192095 - DNA, 26 bp, Artificial sequence
  SiRNA target sequence
cgtagataaaatggcacttaaaaatg

SEQ ID NO: 192096 - DNA, 26 bp, Artificial sequence
  SiRNA target sequence
gtagataaaatggcacttaaaaatgt

SEQ ID NO: 192097 - DNA, 26 bp, Artificial sequence
  SiRNA target sequence
tagataaaatggcacttaaaaatgta

SEQ ID NO: 192098 - DNA, 26 bp, Artificial sequence
  SiRNA target sequence
agataaaatggcacttaaaaatgtat

SEQ ID NO: 192099 - DNA, 26 bp, Artificial sequence
  SiRNA target sequence
gataaaatggcacttaaaaatgtatt

SEQ ID NO: 192100 - DNA, 26 bp, Artificial sequence
  SiRNA target sequence
ataaaatggcacttaaaaatgtatta

SEQ ID NO: 192101 - DNA, 26 bp, Artificial sequence
  SiRNA target sequence
taaaatggcacttaaaaatgtattaa

SEQ ID NO: 192102 - DNA, 26 bp, Artificial sequence
  SiRNA target sequence
aaaatggcacttaaaaatgtattaac

SEQ ID NO: 192103 - DNA, 26 bp, Artificial sequence
  SiRNA target sequence
aaatggcacttaaaaatgtattaaca

SEQ ID NO: 192104 - DNA, 26 bp, Artificial sequence
  SiRNA target sequence
aatggcacttaaaaatgtattaacaa

SEQ ID NO: 192105 - DNA, 26 bp, Artificial sequence
  SiRNA target sequence
atggcacttaaaaatgtattaacaag

SEQ ID NO: 192106 - DNA, 26 bp, Artificial sequence
  SiRNA target sequence
tggcacttaaaaatgtattaacaaga

SEQ ID NO: 192107 - DNA, 26 bp, Artificial sequence
  SiRNA target sequence
ggcacttaaaaatgtattaacaagag

SEQ ID NO: 192108 - DNA, 26 bp, Artificial sequence
  SiRNA target sequence
gcacttaaaaatgtattaacaagaga

SEQ ID NO: 192109 - DNA, 26 bp, Artificial sequence
  SiRNA target sequence
cacttaaaaatgtattaacaagagaa

SEQ ID NO: 192110 - DNA, 26 bp, Artificial sequence
  SiRNA target sequence
acttaaaaatgtattaacaagagaat

SEQ ID NO: 192111 - DNA, 26 bp, Artificial sequence
  SiRNA target sequence
cttaaaaatgtattaacaagagaatt

SEQ ID NO: 192112 - DNA, 26 bp, Artificial sequence
  SiRNA target sequence
ttaaaaatgtattaacaagagaatta

SEQ ID NO: 192113 - DNA, 26 bp, Artificial sequence
  SiRNA target sequence
taaaaatgtattaacaagagaattag

SEQ ID NO: 192114 - DNA, 26 bp, Artificial sequence
  SiRNA target sequence
aaaaatgtattaacaagagaattaga

SEQ ID NO: 192115 - DNA, 26 bp, Artificial sequence
  SiRNA target sequence
aaaatgtattaacaagagaattagag

SEQ ID NO: 192116 - DNA, 26 bp, Artificial sequence
  SiRNA target sequence
aaatgtattaacaagagaattagagc

SEQ ID NO: 192117 - DNA, 26 bp, Artificial sequence
  SiRNA target sequence
aatgtattaacaagagaattagagca

SEQ ID NO: 192118 - DNA, 26 bp, Artificial sequence
  SiRNA target sequence
atgtattaacaagagaattagagcaa

SEQ ID NO: 192119 - DNA, 26 bp, Artificial sequence
  SiRNA target sequence
tgtattaacaagagaattagagcaat

SEQ ID NO: 192120 - DNA, 26 bp, Artificial sequence
  SiRNA target sequence
gtattaacaagagaattagagcaatt

SEQ ID NO: 192121 - DNA, 26 bp, Artificial sequence
  SiRNA target sequence
tattaacaagagaattagagcaatta

SEQ ID NO: 192122 - DNA, 26 bp, Artificial sequence
  SiRNA target sequence
attaacaagagaattagagcaattaa

SEQ ID NO: 192123 - DNA, 26 bp, Artificial sequence
  SiRNA target sequence
ttaacaagagaattagagcaattaag

SEQ ID NO: 192124 - DNA, 26 bp, Artificial sequence
  SiRNA target sequence
taacaagagaattagagcaattaagt

SEQ ID NO: 192125 - DNA, 26 bp, Artificial sequence
  SiRNA target sequence
aacaagagaattagagcaattaagtg

SEQ ID NO: 192126 - DNA, 26 bp, Artificial sequence
  SiRNA target sequence
acaagagaattagagcaattaagtgg

SEQ ID NO: 192127 - DNA, 26 bp, Artificial sequence
  SiRNA target sequence
caagagaattagagcaattaagtggt

SEQ ID NO: 192128 - DNA, 26 bp, Artificial sequence
  SiRNA target sequence
aagagaattagagcaattaagtggtg

SEQ ID NO: 192129 - DNA, 26 bp, Artificial sequence
  SiRNA target sequence
agagaattagagcaattaagtggtgg

SEQ ID NO: 192130 - DNA, 26 bp, Artificial sequence
  SiRNA target sequence
gagaattagagcaattaagtggtggt

SEQ ID NO: 192131 - DNA, 26 bp, Artificial sequence
  SiRNA target sequence
agaattagagcaattaagtggtggtg

SEQ ID NO: 192132 - DNA, 26 bp, Artificial sequence
  SiRNA target sequence
gaattagagcaattaagtggtggtga

SEQ ID NO: 192133 - DNA, 26 bp, Artificial sequence
  SiRNA target sequence
aattagagcaattaagtggtggtgaa

SEQ ID NO: 192134 - DNA, 26 bp, Artificial sequence
  SiRNA target sequence
attagagcaattaagtggtggtgaac

SEQ ID NO: 192135 - DNA, 26 bp, Artificial sequence
  SiRNA target sequence
ttagagcaattaagtggtggtgaact

SEQ ID NO: 192136 - DNA, 26 bp, Artificial sequence
  SiRNA target sequence
tagagcaattaagtggtggtgaactt

SEQ ID NO: 192137 - DNA, 26 bp, Artificial sequence
  SiRNA target sequence
agagcaattaagtggtggtgaacttc

SEQ ID NO: 192138 - DNA, 26 bp, Artificial sequence
  SiRNA target sequence
gagcaattaagtggtggtgaacttca

SEQ ID NO: 192139 - DNA, 26 bp, Artificial sequence
  SiRNA target sequence
agcaattaagtggtggtgaacttcaa

SEQ ID NO: 192140 - DNA, 26 bp, Artificial sequence
  SiRNA target sequence
gcaattaagtggtggtgaacttcaaa

SEQ ID NO: 192141 - DNA, 26 bp, Artificial sequence
  SiRNA target sequence
caattaagtggtggtgaacttcaaag

SEQ ID NO: 192142 - DNA, 26 bp, Artificial sequence
  SiRNA target sequence
aattaagtggtggtgaacttcaaaga

SEQ ID NO: 192143 - DNA, 26 bp, Artificial sequence
  SiRNA target sequence
attaagtggtggtgaacttcaaagat

SEQ ID NO: 192144 - DNA, 26 bp, Artificial sequence
  SiRNA target sequence
ttaagtggtggtgaacttcaaagatt

SEQ ID NO: 192145 - DNA, 26 bp, Artificial sequence
  SiRNA target sequence
taagtggtggtgaacttcaaagattt

SEQ ID NO: 192146 - DNA, 26 bp, Artificial sequence
  SiRNA target sequence
aagtggtggtgaacttcaaagatttt

SEQ ID NO: 192147 - DNA, 26 bp, Artificial sequence
  SiRNA target sequence
agtggtggtgaacttcaaagattttg

SEQ ID NO: 192148 - DNA, 26 bp, Artificial sequence
  SiRNA target sequence
gtggtggtgaacttcaaagattttgt

SEQ ID NO: 192149 - DNA, 26 bp, Artificial sequence
  SiRNA target sequence
tggtggtgaacttcaaagattttgta

SEQ ID NO: 192150 - DNA, 26 bp, Artificial sequence
  SiRNA target sequence
ggtggtgaacttcaaagattttgtat

SEQ ID NO: 192151 - DNA, 26 bp, Artificial sequence
  SiRNA target sequence
gtggtgaacttcaaagattttgtatt

SEQ ID NO: 192152 - DNA, 26 bp, Artificial sequence
  SiRNA target sequence
tggtgaacttcaaagattttgtattg

SEQ ID NO: 192153 - DNA, 26 bp, Artificial sequence
  SiRNA target sequence
ggtgaacttcaaagattttgtattgc

SEQ ID NO: 192154 - DNA, 26 bp, Artificial sequence
  SiRNA target sequence
gtgaacttcaaagattttgtattgca

SEQ ID NO: 192155 - DNA, 26 bp, Artificial sequence
  SiRNA target sequence
tgaacttcaaagattttgtattgcat

SEQ ID NO: 192156 - DNA, 26 bp, Artificial sequence
  SiRNA target sequence
gaacttcaaagattttgtattgcata

SEQ ID NO: 192157 - DNA, 26 bp, Artificial sequence
  SiRNA target sequence
aacttcaaagattttgtattgcatac

SEQ ID NO: 192158 - DNA, 26 bp, Artificial sequence
  SiRNA target sequence
acttcaaagattttgtattgcataca

SEQ ID NO: 192159 - DNA, 26 bp, Artificial sequence
  SiRNA target sequence
cttcaaagattttgtattgcatacac

SEQ ID NO: 192160 - DNA, 26 bp, Artificial sequence
  SiRNA target sequence
ttcaaagattttgtattgcatacaca

SEQ ID NO: 192161 - DNA, 26 bp, Artificial sequence
  SiRNA target sequence
tcaaagattttgtattgcatacacat

SEQ ID NO: 192162 - DNA, 26 bp, Artificial sequence
  SiRNA target sequence
caaagattttgtattgcatacacatg

SEQ ID NO: 192163 - DNA, 26 bp, Artificial sequence
  SiRNA target sequence
aaagattttgtattgcatacacatgt

SEQ ID NO: 192164 - DNA, 26 bp, Artificial sequence
  SiRNA target sequence
aagattttgtattgcatacacatgtt

SEQ ID NO: 192165 - DNA, 26 bp, Artificial sequence
  SiRNA target sequence
agattttgtattgcatacacatgttt

SEQ ID NO: 192166 - DNA, 26 bp, Artificial sequence
  SiRNA target sequence
gattttgtattgcatacacatgttta

SEQ ID NO: 192167 - DNA, 26 bp, Artificial sequence
  SiRNA target sequence
attttgtattgcatacacatgtttac

SEQ ID NO: 192168 - DNA, 26 bp, Artificial sequence
  SiRNA target sequence
ttttgtattgcatacacatgtttaca

SEQ ID NO: 192169 - DNA, 26 bp, Artificial sequence
  SiRNA target sequence
tttgtattgcatacacatgtttacaa

SEQ ID NO: 192170 - DNA, 26 bp, Artificial sequence
  SiRNA target sequence
ttgtattgcatacacatgtttacaag

SEQ ID NO: 192171 - DNA, 26 bp, Artificial sequence
  SiRNA target sequence
tgtattgcatacacatgtttacaaga

SEQ ID NO: 192172 - DNA, 26 bp, Artificial sequence
  SiRNA target sequence
gtattgcatacacatgtttacaagaa

SEQ ID NO: 192173 - DNA, 26 bp, Artificial sequence
  SiRNA target sequence
tattgcatacacatgtttacaagaag

SEQ ID NO: 192174 - DNA, 26 bp, Artificial sequence
  SiRNA target sequence
attgcatacacatgtttacaagaagg

SEQ ID NO: 192175 - DNA, 26 bp, Artificial sequence
  SiRNA target sequence
ttgcatacacatgtttacaagaagga

SEQ ID NO: 192176 - DNA, 26 bp, Artificial sequence
  SiRNA target sequence
tgcatacacatgtttacaagaaggaa

SEQ ID NO: 192177 - DNA, 26 bp, Artificial sequence
  SiRNA target sequence
gcatacacatgtttacaagaaggaaa

SEQ ID NO: 192178 - DNA, 26 bp, Artificial sequence
  SiRNA target sequence
catacacatgtttacaagaaggaaat

SEQ ID NO: 192179 - DNA, 26 bp, Artificial sequence
  SiRNA target sequence
atacacatgtttacaagaaggaaatg

SEQ ID NO: 192180 - DNA, 26 bp, Artificial sequence
  SiRNA target sequence
tacacatgtttacaagaaggaaatgt

SEQ ID NO: 192181 - DNA, 26 bp, Artificial sequence
  SiRNA target sequence
acacatgtttacaagaaggaaatgtt

SEQ ID NO: 192182 - DNA, 26 bp, Artificial sequence
  SiRNA target sequence
cacatgtttacaagaaggaaatgttt

SEQ ID NO: 192183 - DNA, 26 bp, Artificial sequence
  SiRNA target sequence
acatgtttacaagaaggaaatgttta

SEQ ID NO: 192184 - DNA, 26 bp, Artificial sequence
  SiRNA target sequence
catgtttacaagaaggaaatgtttat

SEQ ID NO: 192185 - DNA, 26 bp, Artificial sequence
  SiRNA target sequence
atgtttacaagaaggaaatgtttata

SEQ ID NO: 192186 - DNA, 26 bp, Artificial sequence
  SiRNA target sequence
tgtttacaagaaggaaatgtttatat

SEQ ID NO: 192187 - DNA, 26 bp, Artificial sequence
  SiRNA target sequence
gtttacaagaaggaaatgtttatatt

SEQ ID NO: 192188 - DNA, 26 bp, Artificial sequence
  SiRNA target sequence
tttacaagaaggaaatgtttatattt

SEQ ID NO: 192189 - DNA, 26 bp, Artificial sequence
  SiRNA target sequence
ttacaagaaggaaatgtttatatttt

SEQ ID NO: 192190 - DNA, 26 bp, Artificial sequence
  SiRNA target sequence
tacaagaaggaaatgtttatattttt

SEQ ID NO: 192191 - DNA, 26 bp, Artificial sequence
  SiRNA target sequence
acaagaaggaaatgtttatatttttg

SEQ ID NO: 192192 - DNA, 26 bp, Artificial sequence
  SiRNA target sequence
caagaaggaaatgtttatatttttga

SEQ ID NO: 192193 - DNA, 26 bp, Artificial sequence
  SiRNA target sequence
aagaaggaaatgtttatatttttgat

SEQ ID NO: 192194 - DNA, 26 bp, Artificial sequence
  SiRNA target sequence
agaaggaaatgtttatatttttgatg

SEQ ID NO: 192195 - DNA, 26 bp, Artificial sequence
  SiRNA target sequence
gaaggaaatgtttatatttttgatga

SEQ ID NO: 192196 - DNA, 26 bp, Artificial sequence
  SiRNA target sequence
aaggaaatgtttatatttttgatgaa

SEQ ID NO: 192197 - DNA, 26 bp, Artificial sequence
  SiRNA target sequence
aggaaatgtttatatttttgatgaac

SEQ ID NO: 192198 - DNA, 26 bp, Artificial sequence
  SiRNA target sequence
ggaaatgtttatatttttgatgaacc

SEQ ID NO: 192199 - DNA, 26 bp, Artificial sequence
  SiRNA target sequence
gaaatgtttatatttttgatgaaccc

SEQ ID NO: 192200 - DNA, 26 bp, Artificial sequence
  SiRNA target sequence
aaatgtttatatttttgatgaaccca

SEQ ID NO: 192201 - DNA, 26 bp, Artificial sequence
  SiRNA target sequence
aatgtttatatttttgatgaacccac

SEQ ID NO: 192202 - DNA, 26 bp, Artificial sequence
  SiRNA target sequence
atgtttatatttttgatgaacccact

SEQ ID NO: 192203 - DNA, 26 bp, Artificial sequence
  SiRNA target sequence
tgtttatatttttgatgaacccacta

SEQ ID NO: 192204 - DNA, 26 bp, Artificial sequence
  SiRNA target sequence
gtttatatttttgatgaacccactag

SEQ ID NO: 192205 - DNA, 26 bp, Artificial sequence
  SiRNA target sequence
tttatatttttgatgaacccactagt

SEQ ID NO: 192206 - DNA, 26 bp, Artificial sequence
  SiRNA target sequence
ttatatttttgatgaacccactagtt

SEQ ID NO: 192207 - DNA, 26 bp, Artificial sequence
  SiRNA target sequence
tatatttttgatgaacccactagttt

SEQ ID NO: 192208 - DNA, 26 bp, Artificial sequence
  SiRNA target sequence
atatttttgatgaacccactagtttt

SEQ ID NO: 192209 - DNA, 26 bp, Artificial sequence
  SiRNA target sequence
tatttttgatgaacccactagttttt

SEQ ID NO: 192210 - DNA, 26 bp, Artificial sequence
  SiRNA target sequence
atttttgatgaacccactagtttttt

SEQ ID NO: 192211 - DNA, 26 bp, Artificial sequence
  SiRNA target sequence
tttttgatgaacccactagttttttg

SEQ ID NO: 192212 - DNA, 26 bp, Artificial sequence
  SiRNA target sequence
ttttgatgaacccactagttttttgg

SEQ ID NO: 192213 - DNA, 26 bp, Artificial sequence
  SiRNA target sequence
tttgatgaacccactagttttttgga

SEQ ID NO: 192214 - DNA, 26 bp, Artificial sequence
  SiRNA target sequence
ttgatgaacccactagttttttggat

SEQ ID NO: 192215 - DNA, 26 bp, Artificial sequence
  SiRNA target sequence
tgatgaacccactagttttttggatg

SEQ ID NO: 192216 - DNA, 26 bp, Artificial sequence
  SiRNA target sequence
gatgaacccactagttttttggatgt

SEQ ID NO: 192217 - DNA, 26 bp, Artificial sequence
  SiRNA target sequence
atgaacccactagttttttggatgtt

SEQ ID NO: 192218 - DNA, 26 bp, Artificial sequence
  SiRNA target sequence
tgaacccactagttttttggatgtta

SEQ ID NO: 192219 - DNA, 26 bp, Artificial sequence
  SiRNA target sequence
gaacccactagttttttggatgttaa

SEQ ID NO: 192220 - DNA, 26 bp, Artificial sequence
  SiRNA target sequence
aacccactagttttttggatgttaag

SEQ ID NO: 192221 - DNA, 26 bp, Artificial sequence
  SiRNA target sequence
acccactagttttttggatgttaagc

SEQ ID NO: 192222 - DNA, 26 bp, Artificial sequence
  SiRNA target sequence
cccactagttttttggatgttaagca

SEQ ID NO: 192223 - DNA, 26 bp, Artificial sequence
  SiRNA target sequence
ccactagttttttggatgttaagcag

SEQ ID NO: 192224 - DNA, 26 bp, Artificial sequence
  SiRNA target sequence
cactagttttttggatgttaagcagc

SEQ ID NO: 192225 - DNA, 26 bp, Artificial sequence
  SiRNA target sequence
actagttttttggatgttaagcagcg

SEQ ID NO: 192226 - DNA, 26 bp, Artificial sequence
  SiRNA target sequence
ctagttttttggatgttaagcagcga

SEQ ID NO: 192227 - DNA, 26 bp, Artificial sequence
  SiRNA target sequence
tagttttttggatgttaagcagcgac

SEQ ID NO: 192228 - DNA, 26 bp, Artificial sequence
  SiRNA target sequence
agttttttggatgttaagcagcgact

SEQ ID NO: 192229 - DNA, 26 bp, Artificial sequence
  SiRNA target sequence
gttttttggatgttaagcagcgacta

SEQ ID NO: 192230 - DNA, 26 bp, Artificial sequence
  SiRNA target sequence
ttttttggatgttaagcagcgactag

SEQ ID NO: 192231 - DNA, 26 bp, Artificial sequence
  SiRNA target sequence
tttttggatgttaagcagcgactagc

SEQ ID NO: 192232 - DNA, 26 bp, Artificial sequence
  SiRNA target sequence
ttttggatgttaagcagcgactagca

SEQ ID NO: 192233 - DNA, 26 bp, Artificial sequence
  SiRNA target sequence
tttggatgttaagcagcgactagcag

SEQ ID NO: 192234 - DNA, 26 bp, Artificial sequence
  SiRNA target sequence
ttggatgttaagcagcgactagcagc

SEQ ID NO: 192235 - DNA, 26 bp, Artificial sequence
  SiRNA target sequence
tggatgttaagcagcgactagcagct

SEQ ID NO: 192236 - DNA, 26 bp, Artificial sequence
  SiRNA target sequence
ggatgttaagcagcgactagcagctg

SEQ ID NO: 192237 - DNA, 26 bp, Artificial sequence
  SiRNA target sequence
gatgttaagcagcgactagcagctgc

SEQ ID NO: 192238 - DNA, 26 bp, Artificial sequence
  SiRNA target sequence
atgttaagcagcgactagcagctgct

SEQ ID NO: 192239 - DNA, 26 bp, Artificial sequence
  SiRNA target sequence
tgttaagcagcgactagcagctgcta

SEQ ID NO: 192240 - DNA, 26 bp, Artificial sequence
  SiRNA target sequence
gttaagcagcgactagcagctgctaa

SEQ ID NO: 192241 - DNA, 26 bp, Artificial sequence
  SiRNA target sequence
ttaagcagcgactagcagctgctaag

SEQ ID NO: 192242 - DNA, 26 bp, Artificial sequence
  SiRNA target sequence
taagcagcgactagcagctgctaagg

SEQ ID NO: 192243 - DNA, 26 bp, Artificial sequence
  SiRNA target sequence
aagcagcgactagcagctgctaagga

SEQ ID NO: 192244 - DNA, 26 bp, Artificial sequence
  SiRNA target sequence
agcagcgactagcagctgctaaggaa

SEQ ID NO: 192245 - DNA, 26 bp, Artificial sequence
  SiRNA target sequence
gcagcgactagcagctgctaaggaaa

SEQ ID NO: 192246 - DNA, 26 bp, Artificial sequence
  SiRNA target sequence
cagcgactagcagctgctaaggaaat

SEQ ID NO: 192247 - DNA, 26 bp, Artificial sequence
  SiRNA target sequence
agcgactagcagctgctaaggaaata

SEQ ID NO: 192248 - DNA, 26 bp, Artificial sequence
  SiRNA target sequence
gcgactagcagctgctaaggaaataa

SEQ ID NO: 192249 - DNA, 26 bp, Artificial sequence
  SiRNA target sequence
cgactagcagctgctaaggaaataag

SEQ ID NO: 192250 - DNA, 26 bp, Artificial sequence
  SiRNA target sequence
gactagcagctgctaaggaaataaga

SEQ ID NO: 192251 - DNA, 26 bp, Artificial sequence
  SiRNA target sequence
actagcagctgctaaggaaataagaa

SEQ ID NO: 192252 - DNA, 26 bp, Artificial sequence
  SiRNA target sequence
ctagcagctgctaaggaaataagaaa

SEQ ID NO: 192253 - DNA, 26 bp, Artificial sequence
  SiRNA target sequence
tagcagctgctaaggaaataagaaat

SEQ ID NO: 192254 - DNA, 26 bp, Artificial sequence
  SiRNA target sequence
agcagctgctaaggaaataagaaatt

SEQ ID NO: 192255 - DNA, 26 bp, Artificial sequence
  SiRNA target sequence
gcagctgctaaggaaataagaaattt

SEQ ID NO: 192256 - DNA, 26 bp, Artificial sequence
  SiRNA target sequence
cagctgctaaggaaataagaaatttg

SEQ ID NO: 192257 - DNA, 26 bp, Artificial sequence
  SiRNA target sequence
agctgctaaggaaataagaaatttgt

SEQ ID NO: 192258 - DNA, 26 bp, Artificial sequence
  SiRNA target sequence
gctgctaaggaaataagaaatttgtg

SEQ ID NO: 192259 - DNA, 26 bp, Artificial sequence
  SiRNA target sequence
ctgctaaggaaataagaaatttgtgt

SEQ ID NO: 192260 - DNA, 26 bp, Artificial sequence
  SiRNA target sequence
tgctaaggaaataagaaatttgtgtg

SEQ ID NO: 192261 - DNA, 26 bp, Artificial sequence
  SiRNA target sequence
gctaaggaaataagaaatttgtgtga

SEQ ID NO: 192262 - DNA, 26 bp, Artificial sequence
  SiRNA target sequence
ctaaggaaataagaaatttgtgtgaa

SEQ ID NO: 192263 - DNA, 26 bp, Artificial sequence
  SiRNA target sequence
taaggaaataagaaatttgtgtgaag

SEQ ID NO: 192264 - DNA, 26 bp, Artificial sequence
  SiRNA target sequence
aaggaaataagaaatttgtgtgaaga

SEQ ID NO: 192265 - DNA, 26 bp, Artificial sequence
  SiRNA target sequence
aggaaataagaaatttgtgtgaagaa

SEQ ID NO: 192266 - DNA, 26 bp, Artificial sequence
  SiRNA target sequence
ggaaataagaaatttgtgtgaagaaa

SEQ ID NO: 192267 - DNA, 26 bp, Artificial sequence
  SiRNA target sequence
gaaataagaaatttgtgtgaagaaaa

SEQ ID NO: 192268 - DNA, 26 bp, Artificial sequence
  SiRNA target sequence
aaataagaaatttgtgtgaagaaaat

SEQ ID NO: 192269 - DNA, 26 bp, Artificial sequence
  SiRNA target sequence
aataagaaatttgtgtgaagaaaata

SEQ ID NO: 192270 - DNA, 26 bp, Artificial sequence
  SiRNA target sequence
ataagaaatttgtgtgaagaaaataa

SEQ ID NO: 192271 - DNA, 26 bp, Artificial sequence
  SiRNA target sequence
taagaaatttgtgtgaagaaaataaa

SEQ ID NO: 192272 - DNA, 26 bp, Artificial sequence
  SiRNA target sequence
aagaaatttgtgtgaagaaaataaat

SEQ ID NO: 192273 - DNA, 26 bp, Artificial sequence
  SiRNA target sequence
agaaatttgtgtgaagaaaataaata

SEQ ID NO: 192274 - DNA, 26 bp, Artificial sequence
  SiRNA target sequence
gaaatttgtgtgaagaaaataaatat

SEQ ID NO: 192275 - DNA, 26 bp, Artificial sequence
  SiRNA target sequence
aaatttgtgtgaagaaaataaatatg

SEQ ID NO: 192276 - DNA, 26 bp, Artificial sequence
  SiRNA target sequence
aatttgtgtgaagaaaataaatatgt

SEQ ID NO: 192277 - DNA, 26 bp, Artificial sequence
  SiRNA target sequence
atttgtgtgaagaaaataaatatgtt

SEQ ID NO: 192278 - DNA, 26 bp, Artificial sequence
  SiRNA target sequence
tttgtgtgaagaaaataaatatgttg

SEQ ID NO: 192279 - DNA, 26 bp, Artificial sequence
  SiRNA target sequence
ttgtgtgaagaaaataaatatgttgt

SEQ ID NO: 192280 - DNA, 26 bp, Artificial sequence
  SiRNA target sequence
tgtgtgaagaaaataaatatgttgta

SEQ ID NO: 192281 - DNA, 26 bp, Artificial sequence
  SiRNA target sequence
gtgtgaagaaaataaatatgttgtag

SEQ ID NO: 192282 - DNA, 26 bp, Artificial sequence
  SiRNA target sequence
tgtgaagaaaataaatatgttgtagt

SEQ ID NO: 192283 - DNA, 26 bp, Artificial sequence
  SiRNA target sequence
gtgaagaaaataaatatgttgtagtt

SEQ ID NO: 192284 - DNA, 26 bp, Artificial sequence
  SiRNA target sequence
tgaagaaaataaatatgttgtagttg

SEQ ID NO: 192285 - DNA, 26 bp, Artificial sequence
  SiRNA target sequence
gaagaaaataaatatgttgtagttgt

SEQ ID NO: 192286 - DNA, 26 bp, Artificial sequence
  SiRNA target sequence
aagaaaataaatatgttgtagttgtc

SEQ ID NO: 192287 - DNA, 26 bp, Artificial sequence
  SiRNA target sequence
agaaaataaatatgttgtagttgtcg

SEQ ID NO: 192288 - DNA, 26 bp, Artificial sequence
  SiRNA target sequence
gaaaataaatatgttgtagttgtcga

SEQ ID NO: 192289 - DNA, 26 bp, Artificial sequence
  SiRNA target sequence
aaaataaatatgttgtagttgtcgaa

SEQ ID NO: 192290 - DNA, 26 bp, Artificial sequence
  SiRNA target sequence
aaataaatatgttgtagttgtcgaac

SEQ ID NO: 192291 - DNA, 26 bp, Artificial sequence
  SiRNA target sequence
aataaatatgttgtagttgtcgaaca

SEQ ID NO: 192292 - DNA, 26 bp, Artificial sequence
  SiRNA target sequence
ataaatatgttgtagttgtcgaacac

SEQ ID NO: 192293 - DNA, 26 bp, Artificial sequence
  SiRNA target sequence
taaatatgttgtagttgtcgaacacg

SEQ ID NO: 192294 - DNA, 26 bp, Artificial sequence
  SiRNA target sequence
aaatatgttgtagttgtcgaacacga

SEQ ID NO: 192295 - DNA, 26 bp, Artificial sequence
  SiRNA target sequence
aatatgttgtagttgtcgaacacgat

SEQ ID NO: 192296 - DNA, 26 bp, Artificial sequence
  SiRNA target sequence
atatgttgtagttgtcgaacacgatt

SEQ ID NO: 192297 - DNA, 26 bp, Artificial sequence
  SiRNA target sequence
tatgttgtagttgtcgaacacgattt

SEQ ID NO: 192298 - DNA, 26 bp, Artificial sequence
  SiRNA target sequence
atgttgtagttgtcgaacacgattta

SEQ ID NO: 192299 - DNA, 26 bp, Artificial sequence
  SiRNA target sequence
tgttgtagttgtcgaacacgatttag

SEQ ID NO: 192300 - DNA, 26 bp, Artificial sequence
  SiRNA target sequence
gttgtagttgtcgaacacgatttagc

SEQ ID NO: 192301 - DNA, 26 bp, Artificial sequence
  SiRNA target sequence
ttgtagttgtcgaacacgatttagcc

SEQ ID NO: 192302 - DNA, 26 bp, Artificial sequence
  SiRNA target sequence
tgtagttgtcgaacacgatttagcca

SEQ ID NO: 192303 - DNA, 26 bp, Artificial sequence
  SiRNA target sequence
gtagttgtcgaacacgatttagccat

SEQ ID NO: 192304 - DNA, 26 bp, Artificial sequence
  SiRNA target sequence
tagttgtcgaacacgatttagccatt

SEQ ID NO: 192305 - DNA, 26 bp, Artificial sequence
  SiRNA target sequence
agttgtcgaacacgatttagccattt

SEQ ID NO: 192306 - DNA, 26 bp, Artificial sequence
  SiRNA target sequence
gttgtcgaacacgatttagccatttt

SEQ ID NO: 192307 - DNA, 26 bp, Artificial sequence
  SiRNA target sequence
ttgtcgaacacgatttagccatttta

SEQ ID NO: 192308 - DNA, 26 bp, Artificial sequence
  SiRNA target sequence
tgtcgaacacgatttagccattttag

SEQ ID NO: 192309 - DNA, 26 bp, Artificial sequence
  SiRNA target sequence
gtcgaacacgatttagccattttaga

SEQ ID NO: 192310 - DNA, 26 bp, Artificial sequence
  SiRNA target sequence
tcgaacacgatttagccattttagat

SEQ ID NO: 192311 - DNA, 26 bp, Artificial sequence
  SiRNA target sequence
cgaacacgatttagccattttagatt

SEQ ID NO: 192312 - DNA, 26 bp, Artificial sequence
  SiRNA target sequence
gaacacgatttagccattttagattt

SEQ ID NO: 192313 - DNA, 26 bp, Artificial sequence
  SiRNA target sequence
aacacgatttagccattttagatttg

SEQ ID NO: 192314 - DNA, 26 bp, Artificial sequence
  SiRNA target sequence
acacgatttagccattttagatttga

SEQ ID NO: 192315 - DNA, 26 bp, Artificial sequence
  SiRNA target sequence
cacgatttagccattttagatttgat

SEQ ID NO: 192316 - DNA, 26 bp, Artificial sequence
  SiRNA target sequence
acgatttagccattttagatttgatg

SEQ ID NO: 192317 - DNA, 26 bp, Artificial sequence
  SiRNA target sequence
cgatttagccattttagatttgatgt

SEQ ID NO: 192318 - DNA, 26 bp, Artificial sequence
  SiRNA target sequence
gatttagccattttagatttgatgtg

SEQ ID NO: 192319 - DNA, 26 bp, Artificial sequence
  SiRNA target sequence
atttagccattttagatttgatgtgt

SEQ ID NO: 192320 - DNA, 26 bp, Artificial sequence
  SiRNA target sequence
tttagccattttagatttgatgtgtg

SEQ ID NO: 192321 - DNA, 26 bp, Artificial sequence
  SiRNA target sequence
ttagccattttagatttgatgtgtga

SEQ ID NO: 192322 - DNA, 26 bp, Artificial sequence
  SiRNA target sequence
tagccattttagatttgatgtgtgat

SEQ ID NO: 192323 - DNA, 26 bp, Artificial sequence
  SiRNA target sequence
agccattttagatttgatgtgtgatt

SEQ ID NO: 192324 - DNA, 26 bp, Artificial sequence
  SiRNA target sequence
gccattttagatttgatgtgtgattt

SEQ ID NO: 192325 - DNA, 26 bp, Artificial sequence
  SiRNA target sequence
ccattttagatttgatgtgtgatttt

SEQ ID NO: 192326 - DNA, 26 bp, Artificial sequence
  SiRNA target sequence
cattttagatttgatgtgtgattttg

SEQ ID NO: 192327 - DNA, 26 bp, Artificial sequence
  SiRNA target sequence
attttagatttgatgtgtgattttgg

SEQ ID NO: 192328 - DNA, 26 bp, Artificial sequence
  SiRNA target sequence
ttttagatttgatgtgtgattttgga

SEQ ID NO: 192329 - DNA, 26 bp, Artificial sequence
  SiRNA target sequence
tttagatttgatgtgtgattttggat

SEQ ID NO: 192330 - DNA, 26 bp, Artificial sequence
  SiRNA target sequence
ttagatttgatgtgtgattttggatg

SEQ ID NO: 192331 - DNA, 26 bp, Artificial sequence
  SiRNA target sequence
tagatttgatgtgtgattttggatgt

SEQ ID NO: 192332 - DNA, 26 bp, Artificial sequence
  SiRNA target sequence
agatttgatgtgtgattttggatgtg

SEQ ID NO: 192333 - DNA, 26 bp, Artificial sequence
  SiRNA target sequence
gatttgatgtgtgattttggatgtgt

SEQ ID NO: 192334 - DNA, 26 bp, Artificial sequence
  SiRNA target sequence
atttgatgtgtgattttggatgtgtt

SEQ ID NO: 192335 - DNA, 26 bp, Artificial sequence
  SiRNA target sequence
tttgatgtgtgattttggatgtgttc

SEQ ID NO: 192336 - DNA, 26 bp, Artificial sequence
  SiRNA target sequence
ttgatgtgtgattttggatgtgttct

SEQ ID NO: 192337 - DNA, 26 bp, Artificial sequence
  SiRNA target sequence
tgatgtgtgattttggatgtgttcta

SEQ ID NO: 192338 - DNA, 26 bp, Artificial sequence
  SiRNA target sequence
gatgtgtgattttggatgtgttctat

SEQ ID NO: 192339 - DNA, 26 bp, Artificial sequence
  SiRNA target sequence
atgtgtgattttggatgtgttctata

SEQ ID NO: 192340 - DNA, 26 bp, Artificial sequence
  SiRNA target sequence
tgtgtgattttggatgtgttctatac

SEQ ID NO: 192341 - DNA, 26 bp, Artificial sequence
  SiRNA target sequence
gtgtgattttggatgtgttctatacg

SEQ ID NO: 192342 - DNA, 26 bp, Artificial sequence
  SiRNA target sequence
tgtgattttggatgtgttctatacgg

SEQ ID NO: 192343 - DNA, 26 bp, Artificial sequence
  SiRNA target sequence
gtgattttggatgtgttctatacgga

SEQ ID NO: 192344 - DNA, 26 bp, Artificial sequence
  SiRNA target sequence
tgattttggatgtgttctatacggac

SEQ ID NO: 192345 - DNA, 26 bp, Artificial sequence
  SiRNA target sequence
gattttggatgtgttctatacggaca

SEQ ID NO: 192346 - DNA, 26 bp, Artificial sequence
  SiRNA target sequence
attttggatgtgttctatacggacaa

SEQ ID NO: 192347 - DNA, 26 bp, Artificial sequence
  SiRNA target sequence
ttttggatgtgttctatacggacaat

SEQ ID NO: 192348 - DNA, 26 bp, Artificial sequence
  SiRNA target sequence
tttggatgtgttctatacggacaatc

SEQ ID NO: 192349 - DNA, 26 bp, Artificial sequence
  SiRNA target sequence
ttggatgtgttctatacggacaatct

SEQ ID NO: 192350 - DNA, 26 bp, Artificial sequence
  SiRNA target sequence
tggatgtgttctatacggacaatctg

SEQ ID NO: 192351 - DNA, 26 bp, Artificial sequence
  SiRNA target sequence
ggatgtgttctatacggacaatctgg

SEQ ID NO: 192352 - DNA, 26 bp, Artificial sequence
  SiRNA target sequence
gatgtgttctatacggacaatctggg

SEQ ID NO: 192353 - DNA, 26 bp, Artificial sequence
  SiRNA target sequence
atgtgttctatacggacaatctgggg

SEQ ID NO: 192354 - DNA, 26 bp, Artificial sequence
  SiRNA target sequence
tgtgttctatacggacaatctggggc

SEQ ID NO: 192355 - DNA, 26 bp, Artificial sequence
  SiRNA target sequence
gtgttctatacggacaatctggggca

SEQ ID NO: 192356 - DNA, 26 bp, Artificial sequence
  SiRNA target sequence
tgttctatacggacaatctggggcat

SEQ ID NO: 192357 - DNA, 26 bp, Artificial sequence
  SiRNA target sequence
gttctatacggacaatctggggcata

SEQ ID NO: 192358 - DNA, 26 bp, Artificial sequence
  SiRNA target sequence
ttctatacggacaatctggggcatac

SEQ ID NO: 192359 - DNA, 26 bp, Artificial sequence
  SiRNA target sequence
tctatacggacaatctggggcatacg

SEQ ID NO: 192360 - DNA, 26 bp, Artificial sequence
  SiRNA target sequence
ctatacggacaatctggggcatacgg

SEQ ID NO: 192361 - DNA, 26 bp, Artificial sequence
  SiRNA target sequence
tatacggacaatctggggcatacggt

SEQ ID NO: 192362 - DNA, 26 bp, Artificial sequence
  SiRNA target sequence
atacggacaatctggggcatacggtg

SEQ ID NO: 192363 - DNA, 26 bp, Artificial sequence
  SiRNA target sequence
tacggacaatctggggcatacggtgt

SEQ ID NO: 192364 - DNA, 26 bp, Artificial sequence
  SiRNA target sequence
acggacaatctggggcatacggtgta

SEQ ID NO: 192365 - DNA, 26 bp, Artificial sequence
  SiRNA target sequence
cggacaatctggggcatacggtgtaa

SEQ ID NO: 192366 - DNA, 26 bp, Artificial sequence
  SiRNA target sequence
ggacaatctggggcatacggtgtaat

SEQ ID NO: 192367 - DNA, 26 bp, Artificial sequence
  SiRNA target sequence
gacaatctggggcatacggtgtaata

SEQ ID NO: 192368 - DNA, 26 bp, Artificial sequence
  SiRNA target sequence
acaatctggggcatacggtgtaataa

SEQ ID NO: 192369 - DNA, 26 bp, Artificial sequence
  SiRNA target sequence
caatctggggcatacggtgtaataag

SEQ ID NO: 192370 - DNA, 26 bp, Artificial sequence
  SiRNA target sequence
aatctggggcatacggtgtaataagc

SEQ ID NO: 192371 - DNA, 26 bp, Artificial sequence
  SiRNA target sequence
atctggggcatacggtgtaataagcg

SEQ ID NO: 192372 - DNA, 26 bp, Artificial sequence
  SiRNA target sequence
tctggggcatacggtgtaataagcgc

SEQ ID NO: 192373 - DNA, 26 bp, Artificial sequence
  SiRNA target sequence
ctggggcatacggtgtaataagcgca

SEQ ID NO: 192374 - DNA, 26 bp, Artificial sequence
  SiRNA target sequence
tggggcatacggtgtaataagcgcac

SEQ ID NO: 192375 - DNA, 26 bp, Artificial sequence
  SiRNA target sequence
ggggcatacggtgtaataagcgcacc

SEQ ID NO: 192376 - DNA, 26 bp, Artificial sequence
  SiRNA target sequence
gggcatacggtgtaataagcgcacca

SEQ ID NO: 192377 - DNA, 26 bp, Artificial sequence
  SiRNA target sequence
ggcatacggtgtaataagcgcaccat

SEQ ID NO: 192378 - DNA, 26 bp, Artificial sequence
  SiRNA target sequence
gcatacggtgtaataagcgcaccata

SEQ ID NO: 192379 - DNA, 26 bp, Artificial sequence
  SiRNA target sequence
catacggtgtaataagcgcaccatac

SEQ ID NO: 192380 - DNA, 26 bp, Artificial sequence
  SiRNA target sequence
atacggtgtaataagcgcaccatacg

SEQ ID NO: 192381 - DNA, 26 bp, Artificial sequence
  SiRNA target sequence
tacggtgtaataagcgcaccatacgt

SEQ ID NO: 192382 - DNA, 26 bp, Artificial sequence
  SiRNA target sequence
acggtgtaataagcgcaccatacgtt

SEQ ID NO: 192383 - DNA, 26 bp, Artificial sequence
  SiRNA target sequence
cggtgtaataagcgcaccatacgtta

SEQ ID NO: 192384 - DNA, 26 bp, Artificial sequence
  SiRNA target sequence
ggtgtaataagcgcaccatacgttat

SEQ ID NO: 192385 - DNA, 26 bp, Artificial sequence
  SiRNA target sequence
gtgtaataagcgcaccatacgttatt

SEQ ID NO: 192386 - DNA, 26 bp, Artificial sequence
  SiRNA target sequence
tgtaataagcgcaccatacgttatta

SEQ ID NO: 192387 - DNA, 26 bp, Artificial sequence
  SiRNA target sequence
gtaataagcgcaccatacgttattaa

SEQ ID NO: 192388 - DNA, 26 bp, Artificial sequence
  SiRNA target sequence
taataagcgcaccatacgttattaaa

SEQ ID NO: 192389 - DNA, 26 bp, Artificial sequence
  SiRNA target sequence
aataagcgcaccatacgttattaaat

SEQ ID NO: 192390 - DNA, 26 bp, Artificial sequence
  SiRNA target sequence
ataagcgcaccatacgttattaaatc

SEQ ID NO: 192391 - DNA, 26 bp, Artificial sequence
  SiRNA target sequence
taagcgcaccatacgttattaaatca

SEQ ID NO: 192392 - DNA, 26 bp, Artificial sequence
  SiRNA target sequence
aagcgcaccatacgttattaaatcag

SEQ ID NO: 192393 - DNA, 26 bp, Artificial sequence
  SiRNA target sequence
agcgcaccatacgttattaaatcagc

SEQ ID NO: 192394 - DNA, 26 bp, Artificial sequence
  SiRNA target sequence
gcgcaccatacgttattaaatcagca

SEQ ID NO: 192395 - DNA, 26 bp, Artificial sequence
  SiRNA target sequence
cgcaccatacgttattaaatcagcaa

SEQ ID NO: 192396 - DNA, 26 bp, Artificial sequence
  SiRNA target sequence
gcaccatacgttattaaatcagcaat

SEQ ID NO: 192397 - DNA, 26 bp, Artificial sequence
  SiRNA target sequence
caccatacgttattaaatcagcaata

SEQ ID NO: 192398 - DNA, 26 bp, Artificial sequence
  SiRNA target sequence
accatacgttattaaatcagcaataa

SEQ ID NO: 192399 - DNA, 26 bp, Artificial sequence
  SiRNA target sequence
ccatacgttattaaatcagcaataaa

SEQ ID NO: 192400 - DNA, 26 bp, Artificial sequence
  SiRNA target sequence
catacgttattaaatcagcaataaat

SEQ ID NO: 192401 - DNA, 26 bp, Artificial sequence
  SiRNA target sequence
atacgttattaaatcagcaataaata

SEQ ID NO: 192402 - DNA, 26 bp, Artificial sequence
  SiRNA target sequence
tacgttattaaatcagcaataaatat

SEQ ID NO: 192403 - DNA, 26 bp, Artificial sequence
  SiRNA target sequence
acgttattaaatcagcaataaatata

SEQ ID NO: 192404 - DNA, 26 bp, Artificial sequence
  SiRNA target sequence
cgttattaaatcagcaataaatatat

SEQ ID NO: 192405 - DNA, 26 bp, Artificial sequence
  SiRNA target sequence
gttattaaatcagcaataaatatatt

SEQ ID NO: 192406 - DNA, 26 bp, Artificial sequence
  SiRNA target sequence
ttattaaatcagcaataaatatattt

SEQ ID NO: 192407 - DNA, 26 bp, Artificial sequence
  SiRNA target sequence
tattaaatcagcaataaatatatttc

SEQ ID NO: 192408 - DNA, 26 bp, Artificial sequence
  SiRNA target sequence
attaaatcagcaataaatatatttct

SEQ ID NO: 192409 - DNA, 26 bp, Artificial sequence
  SiRNA target sequence
ttaaatcagcaataaatatatttctt

SEQ ID NO: 192410 - DNA, 26 bp, Artificial sequence
  SiRNA target sequence
taaatcagcaataaatatatttcttg

SEQ ID NO: 192411 - DNA, 26 bp, Artificial sequence
  SiRNA target sequence
aaatcagcaataaatatatttcttga

SEQ ID NO: 192412 - DNA, 26 bp, Artificial sequence
  SiRNA target sequence
aatcagcaataaatatatttcttgat

SEQ ID NO: 192413 - DNA, 26 bp, Artificial sequence
  SiRNA target sequence
atcagcaataaatatatttcttgatg

SEQ ID NO: 192414 - DNA, 26 bp, Artificial sequence
  SiRNA target sequence
tcagcaataaatatatttcttgatgg

SEQ ID NO: 192415 - DNA, 26 bp, Artificial sequence
  SiRNA target sequence
cagcaataaatatatttcttgatgga

SEQ ID NO: 192416 - DNA, 26 bp, Artificial sequence
  SiRNA target sequence
agcaataaatatatttcttgatggat

SEQ ID NO: 192417 - DNA, 26 bp, Artificial sequence
  SiRNA target sequence
gcaataaatatatttcttgatggatt

SEQ ID NO: 192418 - DNA, 26 bp, Artificial sequence
  SiRNA target sequence
caataaatatatttcttgatggattt

SEQ ID NO: 192419 - DNA, 26 bp, Artificial sequence
  SiRNA target sequence
aataaatatatttcttgatggatttt

SEQ ID NO: 192420 - DNA, 26 bp, Artificial sequence
  SiRNA target sequence
ataaatatatttcttgatggattttt

SEQ ID NO: 192421 - DNA, 26 bp, Artificial sequence
  SiRNA target sequence
taaatatatttcttgatggatttttg

SEQ ID NO: 192422 - DNA, 26 bp, Artificial sequence
  SiRNA target sequence
aaatatatttcttgatggatttttgc

SEQ ID NO: 192423 - DNA, 26 bp, Artificial sequence
  SiRNA target sequence
aatatatttcttgatggatttttgcc

SEQ ID NO: 192424 - DNA, 26 bp, Artificial sequence
  SiRNA target sequence
atatatttcttgatggatttttgcct

SEQ ID NO: 192425 - DNA, 26 bp, Artificial sequence
  SiRNA target sequence
tatatttcttgatggatttttgccta

SEQ ID NO: 192426 - DNA, 26 bp, Artificial sequence
  SiRNA target sequence
atatttcttgatggatttttgcctac

SEQ ID NO: 192427 - DNA, 26 bp, Artificial sequence
  SiRNA target sequence
tatttcttgatggatttttgcctaca

SEQ ID NO: 192428 - DNA, 26 bp, Artificial sequence
  SiRNA target sequence
atttcttgatggatttttgcctacag

SEQ ID NO: 192429 - DNA, 26 bp, Artificial sequence
  SiRNA target sequence
tttcttgatggatttttgcctacaga

SEQ ID NO: 192430 - DNA, 26 bp, Artificial sequence
  SiRNA target sequence
ttcttgatggatttttgcctacagaa

SEQ ID NO: 192431 - DNA, 26 bp, Artificial sequence
  SiRNA target sequence
tcttgatggatttttgcctacagaaa

SEQ ID NO: 192432 - DNA, 26 bp, Artificial sequence
  SiRNA target sequence
cttgatggatttttgcctacagaaaa

SEQ ID NO: 192433 - DNA, 26 bp, Artificial sequence
  SiRNA target sequence
ttgatggatttttgcctacagaaaac

SEQ ID NO: 192434 - DNA, 26 bp, Artificial sequence
  SiRNA target sequence
tgatggatttttgcctacagaaaaca

SEQ ID NO: 192435 - DNA, 26 bp, Artificial sequence
  SiRNA target sequence
gatggatttttgcctacagaaaacat

SEQ ID NO: 192436 - DNA, 26 bp, Artificial sequence
  SiRNA target sequence
atggatttttgcctacagaaaacatg

SEQ ID NO: 192437 - DNA, 26 bp, Artificial sequence
  SiRNA target sequence
tggatttttgcctacagaaaacatga

SEQ ID NO: 192438 - DNA, 26 bp, Artificial sequence
  SiRNA target sequence
ggatttttgcctacagaaaacatgaa

SEQ ID NO: 192439 - DNA, 26 bp, Artificial sequence
  SiRNA target sequence
gatttttgcctacagaaaacatgaaa

SEQ ID NO: 192440 - DNA, 26 bp, Artificial sequence
  SiRNA target sequence
atttttgcctacagaaaacatgaaat

SEQ ID NO: 192441 - DNA, 26 bp, Artificial sequence
  SiRNA target sequence
tttttgcctacagaaaacatgaaatt

SEQ ID NO: 192442 - DNA, 26 bp, Artificial sequence
  SiRNA target sequence
ttttgcctacagaaaacatgaaattt

SEQ ID NO: 192443 - DNA, 26 bp, Artificial sequence
  SiRNA target sequence
tttgcctacagaaaacatgaaattta

SEQ ID NO: 192444 - DNA, 26 bp, Artificial sequence
  SiRNA target sequence
ttgcctacagaaaacatgaaatttag

SEQ ID NO: 192445 - DNA, 26 bp, Artificial sequence
  SiRNA target sequence
tgcctacagaaaacatgaaatttaga

SEQ ID NO: 192446 - DNA, 26 bp, Artificial sequence
  SiRNA target sequence
gcctacagaaaacatgaaatttagaa

SEQ ID NO: 192447 - DNA, 26 bp, Artificial sequence
  SiRNA target sequence
cctacagaaaacatgaaatttagaaa

SEQ ID NO: 192448 - DNA, 26 bp, Artificial sequence
  SiRNA target sequence
ctacagaaaacatgaaatttagaaat

SEQ ID NO: 192449 - DNA, 26 bp, Artificial sequence
  SiRNA target sequence
tacagaaaacatgaaatttagaaatt

SEQ ID NO: 192450 - DNA, 26 bp, Artificial sequence
  SiRNA target sequence
acagaaaacatgaaatttagaaattc

SEQ ID NO: 192451 - DNA, 26 bp, Artificial sequence
  SiRNA target sequence
cagaaaacatgaaatttagaaattca

SEQ ID NO: 192452 - DNA, 26 bp, Artificial sequence
  SiRNA target sequence
agaaaacatgaaatttagaaattcag

SEQ ID NO: 192453 - DNA, 26 bp, Artificial sequence
  SiRNA target sequence
gaaaacatgaaatttagaaattcaga

SEQ ID NO: 192454 - DNA, 26 bp, Artificial sequence
  SiRNA target sequence
aaaacatgaaatttagaaattcagag

SEQ ID NO: 192455 - DNA, 26 bp, Artificial sequence
  SiRNA target sequence
aaacatgaaatttagaaattcagagt

SEQ ID NO: 192456 - DNA, 26 bp, Artificial sequence
  SiRNA target sequence
aacatgaaatttagaaattcagagtt

SEQ ID NO: 192457 - DNA, 26 bp, Artificial sequence
  SiRNA target sequence
acatgaaatttagaaattcagagtta

SEQ ID NO: 192458 - DNA, 26 bp, Artificial sequence
  SiRNA target sequence
catgaaatttagaaattcagagttaa

SEQ ID NO: 192459 - DNA, 26 bp, Artificial sequence
  SiRNA target sequence
atgaaatttagaaattcagagttaaa

SEQ ID NO: 192460 - DNA, 26 bp, Artificial sequence
  SiRNA target sequence
tgaaatttagaaattcagagttaaag

SEQ ID NO: 192461 - DNA, 26 bp, Artificial sequence
  SiRNA target sequence
gaaatttagaaattcagagttaaagt

SEQ ID NO: 192462 - DNA, 26 bp, Artificial sequence
  SiRNA target sequence
aaatttagaaattcagagttaaagtt

SEQ ID NO: 192463 - DNA, 26 bp, Artificial sequence
  SiRNA target sequence
aatttagaaattcagagttaaagttt

SEQ ID NO: 192464 - DNA, 26 bp, Artificial sequence
  SiRNA target sequence
atttagaaattcagagttaaagttta

SEQ ID NO: 192465 - DNA, 26 bp, Artificial sequence
  SiRNA target sequence
tttagaaattcagagttaaagtttaa

SEQ ID NO: 192466 - DNA, 26 bp, Artificial sequence
  SiRNA target sequence
ttagaaattcagagttaaagtttaat

SEQ ID NO: 192467 - DNA, 26 bp, Artificial sequence
  SiRNA target sequence
tagaaattcagagttaaagtttaata

SEQ ID NO: 192468 - DNA, 26 bp, Artificial sequence
  SiRNA target sequence
agaaattcagagttaaagtttaatat

SEQ ID NO: 192469 - DNA, 26 bp, Artificial sequence
  SiRNA target sequence
gaaattcagagttaaagtttaatatt

SEQ ID NO: 192470 - DNA, 26 bp, Artificial sequence
  SiRNA target sequence
aaattcagagttaaagtttaatattt

SEQ ID NO: 192471 - DNA, 26 bp, Artificial sequence
  SiRNA target sequence
aattcagagttaaagtttaatatttc

SEQ ID NO: 192472 - DNA, 26 bp, Artificial sequence
  SiRNA target sequence
attcagagttaaagtttaatatttcg

SEQ ID NO: 192473 - DNA, 26 bp, Artificial sequence
  SiRNA target sequence
ttcagagttaaagtttaatatttcgg

SEQ ID NO: 192474 - DNA, 26 bp, Artificial sequence
  SiRNA target sequence
tcagagttaaagtttaatatttcgga

SEQ ID NO: 192475 - DNA, 26 bp, Artificial sequence
  SiRNA target sequence
cagagttaaagtttaatatttcggaa

SEQ ID NO: 192476 - DNA, 26 bp, Artificial sequence
  SiRNA target sequence
agagttaaagtttaatatttcggaaa

SEQ ID NO: 192477 - DNA, 26 bp, Artificial sequence
  SiRNA target sequence
gagttaaagtttaatatttcggaaac

SEQ ID NO: 192478 - DNA, 26 bp, Artificial sequence
  SiRNA target sequence
agttaaagtttaatatttcggaaaca

SEQ ID NO: 192479 - DNA, 26 bp, Artificial sequence
  SiRNA target sequence
gttaaagtttaatatttcggaaacac

SEQ ID NO: 192480 - DNA, 26 bp, Artificial sequence
  SiRNA target sequence
ttaaagtttaatatttcggaaacact

SEQ ID NO: 192481 - DNA, 26 bp, Artificial sequence
  SiRNA target sequence
taaagtttaatatttcggaaacactt

SEQ ID NO: 192482 - DNA, 26 bp, Artificial sequence
  SiRNA target sequence
aaagtttaatatttcggaaacacttg

SEQ ID NO: 192483 - DNA, 26 bp, Artificial sequence
  SiRNA target sequence
aagtttaatatttcggaaacacttga

SEQ ID NO: 192484 - DNA, 26 bp, Artificial sequence
  SiRNA target sequence
agtttaatatttcggaaacacttgat

SEQ ID NO: 192485 - DNA, 26 bp, Artificial sequence
  SiRNA target sequence
gtttaatatttcggaaacacttgata

SEQ ID NO: 192486 - DNA, 26 bp, Artificial sequence
  SiRNA target sequence
tttaatatttcggaaacacttgatag

SEQ ID NO: 192487 - DNA, 26 bp, Artificial sequence
  SiRNA target sequence
ttaatatttcggaaacacttgatagt

SEQ ID NO: 192488 - DNA, 26 bp, Artificial sequence
  SiRNA target sequence
taatatttcggaaacacttgatagta

SEQ ID NO: 192489 - DNA, 26 bp, Artificial sequence
  SiRNA target sequence
aatatttcggaaacacttgatagtat

SEQ ID NO: 192490 - DNA, 26 bp, Artificial sequence
  SiRNA target sequence
atatttcggaaacacttgatagtatt

SEQ ID NO: 192491 - DNA, 26 bp, Artificial sequence
  SiRNA target sequence
tatttcggaaacacttgatagtatta

SEQ ID NO: 192492 - DNA, 26 bp, Artificial sequence
  SiRNA target sequence
atttcggaaacacttgatagtattat

SEQ ID NO: 192493 - DNA, 26 bp, Artificial sequence
  SiRNA target sequence
tttcggaaacacttgatagtattata

SEQ ID NO: 192494 - DNA, 26 bp, Artificial sequence
  SiRNA target sequence
ttcggaaacacttgatagtattatat

SEQ ID NO: 192495 - DNA, 26 bp, Artificial sequence
  SiRNA target sequence
tcggaaacacttgatagtattatatc

SEQ ID NO: 192496 - DNA, 26 bp, Artificial sequence
  SiRNA target sequence
cggaaacacttgatagtattatatct

SEQ ID NO: 192497 - DNA, 26 bp, Artificial sequence
  SiRNA target sequence
ggaaacacttgatagtattatatcta

SEQ ID NO: 192498 - DNA, 26 bp, Artificial sequence
  SiRNA target sequence
gaaacacttgatagtattatatctac

SEQ ID NO: 192499 - DNA, 26 bp, Artificial sequence
  SiRNA target sequence
aaacacttgatagtattatatctacc

SEQ ID NO: 192500 - DNA, 26 bp, Artificial sequence
  SiRNA target sequence
aacacttgatagtattatatctacca

SEQ ID NO: 192501 - DNA, 26 bp, Artificial sequence
  SiRNA target sequence
acacttgatagtattatatctaccag

SEQ ID NO: 192502 - DNA, 26 bp, Artificial sequence
  SiRNA target sequence
cacttgatagtattatatctaccaga

SEQ ID NO: 192503 - DNA, 26 bp, Artificial sequence
  SiRNA target sequence
acttgatagtattatatctaccagag

SEQ ID NO: 192504 - DNA, 26 bp, Artificial sequence
  SiRNA target sequence
cttgatagtattatatctaccagaga

SEQ ID NO: 192505 - DNA, 26 bp, Artificial sequence
  SiRNA target sequence
ttgatagtattatatctaccagagac

SEQ ID NO: 192506 - DNA, 26 bp, Artificial sequence
  SiRNA target sequence
tgatagtattatatctaccagagacc

SEQ ID NO: 192507 - DNA, 26 bp, Artificial sequence
  SiRNA target sequence
gatagtattatatctaccagagacca

SEQ ID NO: 192508 - DNA, 26 bp, Artificial sequence
  SiRNA target sequence
atagtattatatctaccagagaccag

SEQ ID NO: 192509 - DNA, 26 bp, Artificial sequence
  SiRNA target sequence
tagtattatatctaccagagaccagt

SEQ ID NO: 192510 - DNA, 26 bp, Artificial sequence
  SiRNA target sequence
agtattatatctaccagagaccagta

SEQ ID NO: 192511 - DNA, 26 bp, Artificial sequence
  SiRNA target sequence
gtattatatctaccagagaccagtat

SEQ ID NO: 192512 - DNA, 26 bp, Artificial sequence
  SiRNA target sequence
tattatatctaccagagaccagtatc

SEQ ID NO: 192513 - DNA, 26 bp, Artificial sequence
  SiRNA target sequence
attatatctaccagagaccagtatca

SEQ ID NO: 192514 - DNA, 26 bp, Artificial sequence
  SiRNA target sequence
ttatatctaccagagaccagtatcat

SEQ ID NO: 192515 - DNA, 26 bp, Artificial sequence
  SiRNA target sequence
tatatctaccagagaccagtatcatt

SEQ ID NO: 192516 - DNA, 26 bp, Artificial sequence
  SiRNA target sequence
atatctaccagagaccagtatcatta

SEQ ID NO: 192517 - DNA, 26 bp, Artificial sequence
  SiRNA target sequence
tatctaccagagaccagtatcattat

SEQ ID NO: 192518 - DNA, 26 bp, Artificial sequence
  SiRNA target sequence
atctaccagagaccagtatcattatc

SEQ ID NO: 192519 - DNA, 26 bp, Artificial sequence
  SiRNA target sequence
tctaccagagaccagtatcattatcc

SEQ ID NO: 192520 - DNA, 26 bp, Artificial sequence
  SiRNA target sequence
ctaccagagaccagtatcattatccc

SEQ ID NO: 192521 - DNA, 26 bp, Artificial sequence
  SiRNA target sequence
taccagagaccagtatcattatccca

SEQ ID NO: 192522 - DNA, 26 bp, Artificial sequence
  SiRNA target sequence
accagagaccagtatcattatcccaa

SEQ ID NO: 192523 - DNA, 26 bp, Artificial sequence
  SiRNA target sequence
ccagagaccagtatcattatcccaat

SEQ ID NO: 192524 - DNA, 26 bp, Artificial sequence
  SiRNA target sequence
cagagaccagtatcattatcccaatt

SEQ ID NO: 192525 - DNA, 26 bp, Artificial sequence
  SiRNA target sequence
agagaccagtatcattatcccaattt

SEQ ID NO: 192526 - DNA, 26 bp, Artificial sequence
  SiRNA target sequence
gagaccagtatcattatcccaatttg

SEQ ID NO: 192527 - DNA, 26 bp, Artificial sequence
  SiRNA target sequence
agaccagtatcattatcccaatttga

SEQ ID NO: 192528 - DNA, 26 bp, Artificial sequence
  SiRNA target sequence
gaccagtatcattatcccaatttgat

SEQ ID NO: 192529 - DNA, 26 bp, Artificial sequence
  SiRNA target sequence
accagtatcattatcccaatttgata

SEQ ID NO: 192530 - DNA, 26 bp, Artificial sequence
  SiRNA target sequence
ccagtatcattatcccaatttgataa

SEQ ID NO: 192531 - DNA, 26 bp, Artificial sequence
  SiRNA target sequence
cagtatcattatcccaatttgataaa

SEQ ID NO: 192532 - DNA, 26 bp, Artificial sequence
  SiRNA target sequence
agtatcattatcccaatttgataaaa

SEQ ID NO: 192533 - DNA, 26 bp, Artificial sequence
  SiRNA target sequence
gtatcattatcccaatttgataaaaa

SEQ ID NO: 192534 - DNA, 26 bp, Artificial sequence
  SiRNA target sequence
tatcattatcccaatttgataaaaac

SEQ ID NO: 192535 - DNA, 26 bp, Artificial sequence
  SiRNA target sequence
atcattatcccaatttgataaaaaca

SEQ ID NO: 192536 - DNA, 26 bp, Artificial sequence
  SiRNA target sequence
tcattatcccaatttgataaaaacat

SEQ ID NO: 192537 - DNA, 26 bp, Artificial sequence
  SiRNA target sequence
cattatcccaatttgataaaaacata

SEQ ID NO: 192538 - DNA, 26 bp, Artificial sequence
  SiRNA target sequence
attatcccaatttgataaaaacatat

SEQ ID NO: 192539 - DNA, 26 bp, Artificial sequence
  SiRNA target sequence
ttatcccaatttgataaaaacatatc

SEQ ID NO: 192540 - DNA, 26 bp, Artificial sequence
  SiRNA target sequence
tatcccaatttgataaaaacatatcc

SEQ ID NO: 192541 - DNA, 26 bp, Artificial sequence
  SiRNA target sequence
atcccaatttgataaaaacatatcca

SEQ ID NO: 192542 - DNA, 26 bp, Artificial sequence
  SiRNA target sequence
tcccaatttgataaaaacatatccaa

SEQ ID NO: 192543 - DNA, 26 bp, Artificial sequence
  SiRNA target sequence
cccaatttgataaaaacatatccaaa

SEQ ID NO: 192544 - DNA, 26 bp, Artificial sequence
  SiRNA target sequence
ccaatttgataaaaacatatccaaat

SEQ ID NO: 192545 - DNA, 26 bp, Artificial sequence
  SiRNA target sequence
caatttgataaaaacatatccaaatt

SEQ ID NO: 192546 - DNA, 26 bp, Artificial sequence
  SiRNA target sequence
aatttgataaaaacatatccaaattt

SEQ ID NO: 192547 - DNA, 26 bp, Artificial sequence
  SiRNA target sequence
atttgataaaaacatatccaaatttt

SEQ ID NO: 192548 - DNA, 26 bp, Artificial sequence
  SiRNA target sequence
tttgataaaaacatatccaaatttta

SEQ ID NO: 192549 - DNA, 26 bp, Artificial sequence
  SiRNA target sequence
ttgataaaaacatatccaaattttac

SEQ ID NO: 192550 - DNA, 26 bp, Artificial sequence
  SiRNA target sequence
tgataaaaacatatccaaattttacg

SEQ ID NO: 192551 - DNA, 26 bp, Artificial sequence
  SiRNA target sequence
gataaaaacatatccaaattttacgc

SEQ ID NO: 192552 - DNA, 26 bp, Artificial sequence
  SiRNA target sequence
ataaaaacatatccaaattttacgct

SEQ ID NO: 192553 - DNA, 26 bp, Artificial sequence
  SiRNA target sequence
taaaaacatatccaaattttacgctt

SEQ ID NO: 192554 - DNA, 26 bp, Artificial sequence
  SiRNA target sequence
aaaaacatatccaaattttacgctta

SEQ ID NO: 192555 - DNA, 26 bp, Artificial sequence
  SiRNA target sequence
aaaacatatccaaattttacgcttaa

SEQ ID NO: 192556 - DNA, 26 bp, Artificial sequence
  SiRNA target sequence
aaacatatccaaattttacgcttaaa

SEQ ID NO: 192557 - DNA, 26 bp, Artificial sequence
  SiRNA target sequence
aacatatccaaattttacgcttaaag

SEQ ID NO: 192558 - DNA, 26 bp, Artificial sequence
  SiRNA target sequence
acatatccaaattttacgcttaaagt

SEQ ID NO: 192559 - DNA, 26 bp, Artificial sequence
  SiRNA target sequence
catatccaaattttacgcttaaagtt

SEQ ID NO: 192560 - DNA, 26 bp, Artificial sequence
  SiRNA target sequence
atatccaaattttacgcttaaagttg

SEQ ID NO: 192561 - DNA, 26 bp, Artificial sequence
  SiRNA target sequence
tatccaaattttacgcttaaagttga

SEQ ID NO: 192562 - DNA, 26 bp, Artificial sequence
  SiRNA target sequence
atccaaattttacgcttaaagttgaa

SEQ ID NO: 192563 - DNA, 26 bp, Artificial sequence
  SiRNA target sequence
tccaaattttacgcttaaagttgaag

SEQ ID NO: 192564 - DNA, 26 bp, Artificial sequence
  SiRNA target sequence
ccaaattttacgcttaaagttgaagg

SEQ ID NO: 192565 - DNA, 26 bp, Artificial sequence
  SiRNA target sequence
caaattttacgcttaaagttgaaggc

SEQ ID NO: 192566 - DNA, 26 bp, Artificial sequence
  SiRNA target sequence
aaattttacgcttaaagttgaaggcg

SEQ ID NO: 192567 - DNA, 26 bp, Artificial sequence
  SiRNA target sequence
aattttacgcttaaagttgaaggcgg

SEQ ID NO: 192568 - DNA, 26 bp, Artificial sequence
  SiRNA target sequence
attttacgcttaaagttgaaggcggt

SEQ ID NO: 192569 - DNA, 26 bp, Artificial sequence
  SiRNA target sequence
ttttacgcttaaagttgaaggcggta

SEQ ID NO: 192570 - DNA, 26 bp, Artificial sequence
  SiRNA target sequence
tttacgcttaaagttgaaggcggtaa

SEQ ID NO: 192571 - DNA, 26 bp, Artificial sequence
  SiRNA target sequence
ttacgcttaaagttgaaggcggtaac

SEQ ID NO: 192572 - DNA, 26 bp, Artificial sequence
  SiRNA target sequence
tacgcttaaagttgaaggcggtaact

SEQ ID NO: 192573 - DNA, 26 bp, Artificial sequence
  SiRNA target sequence
acgcttaaagttgaaggcggtaactt

SEQ ID NO: 192574 - DNA, 26 bp, Artificial sequence
  SiRNA target sequence
cgcttaaagttgaaggcggtaacttt

SEQ ID NO: 192575 - DNA, 26 bp, Artificial sequence
  SiRNA target sequence
gcttaaagttgaaggcggtaactttt

SEQ ID NO: 192576 - DNA, 26 bp, Artificial sequence
  SiRNA target sequence
cttaaagttgaaggcggtaacttttc

SEQ ID NO: 192577 - DNA, 26 bp, Artificial sequence
  SiRNA target sequence
ttaaagttgaaggcggtaacttttca

SEQ ID NO: 192578 - DNA, 26 bp, Artificial sequence
  SiRNA target sequence
taaagttgaaggcggtaacttttcag

SEQ ID NO: 192579 - DNA, 26 bp, Artificial sequence
  SiRNA target sequence
aaagttgaaggcggtaacttttcaga

SEQ ID NO: 192580 - DNA, 26 bp, Artificial sequence
  SiRNA target sequence
aagttgaaggcggtaacttttcagat

SEQ ID NO: 192581 - DNA, 26 bp, Artificial sequence
  SiRNA target sequence
agttgaaggcggtaacttttcagatt

SEQ ID NO: 192582 - DNA, 26 bp, Artificial sequence
  SiRNA target sequence
gttgaaggcggtaacttttcagattc

SEQ ID NO: 192583 - DNA, 26 bp, Artificial sequence
  SiRNA target sequence
ttgaaggcggtaacttttcagattct

SEQ ID NO: 192584 - DNA, 26 bp, Artificial sequence
  SiRNA target sequence
tgaaggcggtaacttttcagattctg

SEQ ID NO: 192585 - DNA, 26 bp, Artificial sequence
  SiRNA target sequence
gaaggcggtaacttttcagattctga

SEQ ID NO: 192586 - DNA, 26 bp, Artificial sequence
  SiRNA target sequence
aaggcggtaacttttcagattctgaa

SEQ ID NO: 192587 - DNA, 26 bp, Artificial sequence
  SiRNA target sequence
aggcggtaacttttcagattctgaaa

SEQ ID NO: 192588 - DNA, 26 bp, Artificial sequence
  SiRNA target sequence
ggcggtaacttttcagattctgaaat

SEQ ID NO: 192589 - DNA, 26 bp, Artificial sequence
  SiRNA target sequence
gcggtaacttttcagattctgaaatt

SEQ ID NO: 192590 - DNA, 26 bp, Artificial sequence
  SiRNA target sequence
cggtaacttttcagattctgaaattg

SEQ ID NO: 192591 - DNA, 26 bp, Artificial sequence
  SiRNA target sequence
ggtaacttttcagattctgaaattgt

SEQ ID NO: 192592 - DNA, 26 bp, Artificial sequence
  SiRNA target sequence
gtaacttttcagattctgaaattgtt

SEQ ID NO: 192593 - DNA, 26 bp, Artificial sequence
  SiRNA target sequence
taacttttcagattctgaaattgttg

SEQ ID NO: 192594 - DNA, 26 bp, Artificial sequence
  SiRNA target sequence
aacttttcagattctgaaattgttgt

SEQ ID NO: 192595 - DNA, 26 bp, Artificial sequence
  SiRNA target sequence
acttttcagattctgaaattgttgta

SEQ ID NO: 192596 - DNA, 26 bp, Artificial sequence
  SiRNA target sequence
cttttcagattctgaaattgttgtat

SEQ ID NO: 192597 - DNA, 26 bp, Artificial sequence
  SiRNA target sequence
ttttcagattctgaaattgttgtatt

SEQ ID NO: 192598 - DNA, 26 bp, Artificial sequence
  SiRNA target sequence
tttcagattctgaaattgttgtattt

SEQ ID NO: 192599 - DNA, 26 bp, Artificial sequence
  SiRNA target sequence
ttcagattctgaaattgttgtatttc

SEQ ID NO: 192600 - DNA, 26 bp, Artificial sequence
  SiRNA target sequence
tcagattctgaaattgttgtatttct

SEQ ID NO: 192601 - DNA, 26 bp, Artificial sequence
  SiRNA target sequence
cagattctgaaattgttgtatttctt

SEQ ID NO: 192602 - DNA, 26 bp, Artificial sequence
  SiRNA target sequence
agattctgaaattgttgtatttcttg

SEQ ID NO: 192603 - DNA, 26 bp, Artificial sequence
  SiRNA target sequence
gattctgaaattgttgtatttcttgg

SEQ ID NO: 192604 - DNA, 26 bp, Artificial sequence
  SiRNA target sequence
attctgaaattgttgtatttcttggt

SEQ ID NO: 192605 - DNA, 26 bp, Artificial sequence
  SiRNA target sequence
ttctgaaattgttgtatttcttggtg

SEQ ID NO: 192606 - DNA, 26 bp, Artificial sequence
  SiRNA target sequence
tctgaaattgttgtatttcttggtga

SEQ ID NO: 192607 - DNA, 26 bp, Artificial sequence
  SiRNA target sequence
ctgaaattgttgtatttcttggtgaa

SEQ ID NO: 192608 - DNA, 26 bp, Artificial sequence
  SiRNA target sequence
tgaaattgttgtatttcttggtgaaa

SEQ ID NO: 192609 - DNA, 26 bp, Artificial sequence
  SiRNA target sequence
gaaattgttgtatttcttggtgaaaa

SEQ ID NO: 192610 - DNA, 26 bp, Artificial sequence
  SiRNA target sequence
aaattgttgtatttcttggtgaaaat

SEQ ID NO: 192611 - DNA, 26 bp, Artificial sequence
  SiRNA target sequence
aattgttgtatttcttggtgaaaatg

SEQ ID NO: 192612 - DNA, 26 bp, Artificial sequence
  SiRNA target sequence
attgttgtatttcttggtgaaaatgg

SEQ ID NO: 192613 - DNA, 26 bp, Artificial sequence
  SiRNA target sequence
ttgttgtatttcttggtgaaaatgga

SEQ ID NO: 192614 - DNA, 26 bp, Artificial sequence
  SiRNA target sequence
tgttgtatttcttggtgaaaatggaa

SEQ ID NO: 192615 - DNA, 26 bp, Artificial sequence
  SiRNA target sequence
gttgtatttcttggtgaaaatggaat

SEQ ID NO: 192616 - DNA, 26 bp, Artificial sequence
  SiRNA target sequence
ttgtatttcttggtgaaaatggaatg

SEQ ID NO: 192617 - DNA, 26 bp, Artificial sequence
  SiRNA target sequence
tgtatttcttggtgaaaatggaatgg

SEQ ID NO: 192618 - DNA, 26 bp, Artificial sequence
  SiRNA target sequence
gtatttcttggtgaaaatggaatggg

SEQ ID NO: 192619 - DNA, 26 bp, Artificial sequence
  SiRNA target sequence
tatttcttggtgaaaatggaatgggc

SEQ ID NO: 192620 - DNA, 26 bp, Artificial sequence
  SiRNA target sequence
atttcttggtgaaaatggaatgggca

SEQ ID NO: 192621 - DNA, 26 bp, Artificial sequence
  SiRNA target sequence
tttcttggtgaaaatggaatgggcaa

SEQ ID NO: 192622 - DNA, 26 bp, Artificial sequence
  SiRNA target sequence
ttcttggtgaaaatggaatgggcaaa

SEQ ID NO: 192623 - DNA, 26 bp, Artificial sequence
  SiRNA target sequence
tcttggtgaaaatggaatgggcaaaa

SEQ ID NO: 192624 - DNA, 26 bp, Artificial sequence
  SiRNA target sequence
cttggtgaaaatggaatgggcaaaac

SEQ ID NO: 192625 - DNA, 26 bp, Artificial sequence
  SiRNA target sequence
ttggtgaaaatggaatgggcaaaact

SEQ ID NO: 192626 - DNA, 26 bp, Artificial sequence
  SiRNA target sequence
tggtgaaaatggaatgggcaaaacta

SEQ ID NO: 192627 - DNA, 26 bp, Artificial sequence
  SiRNA target sequence
ggtgaaaatggaatgggcaaaactac

SEQ ID NO: 192628 - DNA, 26 bp, Artificial sequence
  SiRNA target sequence
gtgaaaatggaatgggcaaaactact

SEQ ID NO: 192629 - DNA, 26 bp, Artificial sequence
  SiRNA target sequence
tgaaaatggaatgggcaaaactactt

SEQ ID NO: 192630 - DNA, 26 bp, Artificial sequence
  SiRNA target sequence
gaaaatggaatgggcaaaactacttt

SEQ ID NO: 192631 - DNA, 26 bp, Artificial sequence
  SiRNA target sequence
aaaatggaatgggcaaaactacttta

SEQ ID NO: 192632 - DNA, 26 bp, Artificial sequence
  SiRNA target sequence
aaatggaatgggcaaaactactttag

SEQ ID NO: 192633 - DNA, 26 bp, Artificial sequence
  SiRNA target sequence
aatggaatgggcaaaactactttagt

SEQ ID NO: 192634 - DNA, 26 bp, Artificial sequence
  SiRNA target sequence
atggaatgggcaaaactactttagta

SEQ ID NO: 192635 - DNA, 26 bp, Artificial sequence
  SiRNA target sequence
tggaatgggcaaaactactttagtag

SEQ ID NO: 192636 - DNA, 26 bp, Artificial sequence
  SiRNA target sequence
ggaatgggcaaaactactttagtagg

SEQ ID NO: 192637 - DNA, 26 bp, Artificial sequence
  SiRNA target sequence
gaatgggcaaaactactttagtaggt

SEQ ID NO: 192638 - DNA, 26 bp, Artificial sequence
  SiRNA target sequence
aatgggcaaaactactttagtaggtt

SEQ ID NO: 192639 - DNA, 26 bp, Artificial sequence
  SiRNA target sequence
atgggcaaaactactttagtaggttt

SEQ ID NO: 192640 - DNA, 26 bp, Artificial sequence
  SiRNA target sequence
tgggcaaaactactttagtaggtttg

SEQ ID NO: 192641 - DNA, 26 bp, Artificial sequence
  SiRNA target sequence
gggcaaaactactttagtaggtttga

SEQ ID NO: 192642 - DNA, 26 bp, Artificial sequence
  SiRNA target sequence
ggcaaaactactttagtaggtttgat

SEQ ID NO: 192643 - DNA, 26 bp, Artificial sequence
  SiRNA target sequence
gcaaaactactttagtaggtttgatt

SEQ ID NO: 192644 - DNA, 26 bp, Artificial sequence
  SiRNA target sequence
caaaactactttagtaggtttgattt

SEQ ID NO: 192645 - DNA, 26 bp, Artificial sequence
  SiRNA target sequence
aaaactactttagtaggtttgatttc

SEQ ID NO: 192646 - DNA, 26 bp, Artificial sequence
  SiRNA target sequence
aaactactttagtaggtttgatttcg

SEQ ID NO: 192647 - DNA, 26 bp, Artificial sequence
  SiRNA target sequence
aactactttagtaggtttgatttcgg

SEQ ID NO: 192648 - DNA, 26 bp, Artificial sequence
  SiRNA target sequence
actactttagtaggtttgatttcggg

SEQ ID NO: 192649 - DNA, 26 bp, Artificial sequence
  SiRNA target sequence
ctactttagtaggtttgatttcgggg

SEQ ID NO: 192650 - DNA, 26 bp, Artificial sequence
  SiRNA target sequence
tactttagtaggtttgatttcggggt

SEQ ID NO: 192651 - DNA, 26 bp, Artificial sequence
  SiRNA target sequence
actttagtaggtttgatttcggggtt

SEQ ID NO: 192652 - DNA, 26 bp, Artificial sequence
  SiRNA target sequence
ctttagtaggtttgatttcggggtta

SEQ ID NO: 192653 - DNA, 26 bp, Artificial sequence
  SiRNA target sequence
tttagtaggtttgatttcggggttaa

SEQ ID NO: 192654 - DNA, 26 bp, Artificial sequence
  SiRNA target sequence
ttagtaggtttgatttcggggttaat

SEQ ID NO: 192655 - DNA, 26 bp, Artificial sequence
  SiRNA target sequence
tagtaggtttgatttcggggttaatt

SEQ ID NO: 192656 - DNA, 26 bp, Artificial sequence
  SiRNA target sequence
agtaggtttgatttcggggttaatta

SEQ ID NO: 192657 - DNA, 26 bp, Artificial sequence
  SiRNA target sequence
gtaggtttgatttcggggttaattaa

SEQ ID NO: 192658 - DNA, 26 bp, Artificial sequence
  SiRNA target sequence
taggtttgatttcggggttaattaaa

SEQ ID NO: 192659 - DNA, 26 bp, Artificial sequence
  SiRNA target sequence
aggtttgatttcggggttaattaaag

SEQ ID NO: 192660 - DNA, 26 bp, Artificial sequence
  SiRNA target sequence
ggtttgatttcggggttaattaaaga

SEQ ID NO: 192661 - DNA, 26 bp, Artificial sequence
  SiRNA target sequence
gtttgatttcggggttaattaaagat

SEQ ID NO: 192662 - DNA, 26 bp, Artificial sequence
  SiRNA target sequence
tttgatttcggggttaattaaagatg

SEQ ID NO: 192663 - DNA, 26 bp, Artificial sequence
  SiRNA target sequence
ttgatttcggggttaattaaagatga

SEQ ID NO: 192664 - DNA, 26 bp, Artificial sequence
  SiRNA target sequence
tgatttcggggttaattaaagatgat

SEQ ID NO: 192665 - DNA, 26 bp, Artificial sequence
  SiRNA target sequence
gatttcggggttaattaaagatgata

SEQ ID NO: 192666 - DNA, 26 bp, Artificial sequence
  SiRNA target sequence
atttcggggttaattaaagatgataa

SEQ ID NO: 192667 - DNA, 26 bp, Artificial sequence
  SiRNA target sequence
tttcggggttaattaaagatgataac

SEQ ID NO: 192668 - DNA, 26 bp, Artificial sequence
  SiRNA target sequence
ttcggggttaattaaagatgataacg

SEQ ID NO: 192669 - DNA, 26 bp, Artificial sequence
  SiRNA target sequence
tcggggttaattaaagatgataacgg

SEQ ID NO: 192670 - DNA, 26 bp, Artificial sequence
  SiRNA target sequence
cggggttaattaaagatgataacggg

SEQ ID NO: 192671 - DNA, 26 bp, Artificial sequence
  SiRNA target sequence
ggggttaattaaagatgataacgggg

SEQ ID NO: 192672 - DNA, 26 bp, Artificial sequence
  SiRNA target sequence
gggttaattaaagatgataacgggga

SEQ ID NO: 192673 - DNA, 26 bp, Artificial sequence
  SiRNA target sequence
ggttaattaaagatgataacggggaa

SEQ ID NO: 192674 - DNA, 26 bp, Artificial sequence
  SiRNA target sequence
gttaattaaagatgataacggggaag

SEQ ID NO: 192675 - DNA, 26 bp, Artificial sequence
  SiRNA target sequence
ttaattaaagatgataacggggaaga

SEQ ID NO: 192676 - DNA, 26 bp, Artificial sequence
  SiRNA target sequence
taattaaagatgataacggggaagag

SEQ ID NO: 192677 - DNA, 26 bp, Artificial sequence
  SiRNA target sequence
aattaaagatgataacggggaagagt

SEQ ID NO: 192678 - DNA, 26 bp, Artificial sequence
  SiRNA target sequence
attaaagatgataacggggaagagtt

SEQ ID NO: 192679 - DNA, 26 bp, Artificial sequence
  SiRNA target sequence
ttaaagatgataacggggaagagttc

SEQ ID NO: 192680 - DNA, 26 bp, Artificial sequence
  SiRNA target sequence
taaagatgataacggggaagagttcg

SEQ ID NO: 192681 - DNA, 26 bp, Artificial sequence
  SiRNA target sequence
aaagatgataacggggaagagttcgg

SEQ ID NO: 192682 - DNA, 26 bp, Artificial sequence
  SiRNA target sequence
aagatgataacggggaagagttcggt

SEQ ID NO: 192683 - DNA, 26 bp, Artificial sequence
  SiRNA target sequence
agatgataacggggaagagttcggtt

SEQ ID NO: 192684 - DNA, 26 bp, Artificial sequence
  SiRNA target sequence
gatgataacggggaagagttcggttt

SEQ ID NO: 192685 - DNA, 26 bp, Artificial sequence
  SiRNA target sequence
atgataacggggaagagttcggtttg

SEQ ID NO: 192686 - DNA, 26 bp, Artificial sequence
  SiRNA target sequence
tgataacggggaagagttcggtttgt

SEQ ID NO: 192687 - DNA, 26 bp, Artificial sequence
  SiRNA target sequence
gataacggggaagagttcggtttgtt

SEQ ID NO: 192688 - DNA, 26 bp, Artificial sequence
  SiRNA target sequence
ataacggggaagagttcggtttgttg

SEQ ID NO: 192689 - DNA, 26 bp, Artificial sequence
  SiRNA target sequence
taacggggaagagttcggtttgttgt

SEQ ID NO: 192690 - DNA, 26 bp, Artificial sequence
  SiRNA target sequence
aacggggaagagttcggtttgttgtc

SEQ ID NO: 192691 - DNA, 26 bp, Artificial sequence
  SiRNA target sequence
acggggaagagttcggtttgttgtca

SEQ ID NO: 192692 - DNA, 26 bp, Artificial sequence
  SiRNA target sequence
cggggaagagttcggtttgttgtcat

SEQ ID NO: 192693 - DNA, 26 bp, Artificial sequence
  SiRNA target sequence
ggggaagagttcggtttgttgtcata

SEQ ID NO: 192694 - DNA, 26 bp, Artificial sequence
  SiRNA target sequence
gggaagagttcggtttgttgtcatat

SEQ ID NO: 192695 - DNA, 26 bp, Artificial sequence
  SiRNA target sequence
ggaagagttcggtttgttgtcatata

SEQ ID NO: 192696 - DNA, 26 bp, Artificial sequence
  SiRNA target sequence
gaagagttcggtttgttgtcatatag

SEQ ID NO: 192697 - DNA, 26 bp, Artificial sequence
  SiRNA target sequence
aagagttcggtttgttgtcatatagt

SEQ ID NO: 192698 - DNA, 26 bp, Artificial sequence
  SiRNA target sequence
agagttcggtttgttgtcatatagtc

SEQ ID NO: 192699 - DNA, 26 bp, Artificial sequence
  SiRNA target sequence
gagttcggtttgttgtcatatagtct

SEQ ID NO: 192700 - DNA, 26 bp, Artificial sequence
  SiRNA target sequence
agttcggtttgttgtcatatagtctt

SEQ ID NO: 192701 - DNA, 26 bp, Artificial sequence
  SiRNA target sequence
gttcggtttgttgtcatatagtctta

SEQ ID NO: 192702 - DNA, 26 bp, Artificial sequence
  SiRNA target sequence
ttcggtttgttgtcatatagtcttaa

SEQ ID NO: 192703 - DNA, 26 bp, Artificial sequence
  SiRNA target sequence
tcggtttgttgtcatatagtcttaaa

SEQ ID NO: 192704 - DNA, 26 bp, Artificial sequence
  SiRNA target sequence
cggtttgttgtcatatagtcttaaac

SEQ ID NO: 192705 - DNA, 26 bp, Artificial sequence
  SiRNA target sequence
ggtttgttgtcatatagtcttaaacc

SEQ ID NO: 192706 - DNA, 26 bp, Artificial sequence
  SiRNA target sequence
gtttgttgtcatatagtcttaaaccg

SEQ ID NO: 192707 - DNA, 26 bp, Artificial sequence
  SiRNA target sequence
tttgttgtcatatagtcttaaaccgc

SEQ ID NO: 192708 - DNA, 26 bp, Artificial sequence
  SiRNA target sequence
ttgttgtcatatagtcttaaaccgca

SEQ ID NO: 192709 - DNA, 26 bp, Artificial sequence
  SiRNA target sequence
tgttgtcatatagtcttaaaccgcaa

SEQ ID NO: 192710 - DNA, 26 bp, Artificial sequence
  SiRNA target sequence
gttgtcatatagtcttaaaccgcaaa

SEQ ID NO: 192711 - DNA, 26 bp, Artificial sequence
  SiRNA target sequence
ttgtcatatagtcttaaaccgcaaaa

SEQ ID NO: 192712 - DNA, 26 bp, Artificial sequence
  SiRNA target sequence
tgtcatatagtcttaaaccgcaaaaa

SEQ ID NO: 192713 - DNA, 26 bp, Artificial sequence
  SiRNA target sequence
gtcatatagtcttaaaccgcaaaaaa

SEQ ID NO: 192714 - DNA, 26 bp, Artificial sequence
  SiRNA target sequence
tcatatagtcttaaaccgcaaaaaat

SEQ ID NO: 192715 - DNA, 26 bp, Artificial sequence
  SiRNA target sequence
catatagtcttaaaccgcaaaaaatc

SEQ ID NO: 192716 - DNA, 26 bp, Artificial sequence
  SiRNA target sequence
atatagtcttaaaccgcaaaaaatca

SEQ ID NO: 192717 - DNA, 26 bp, Artificial sequence
  SiRNA target sequence
tatagtcttaaaccgcaaaaaatcat

SEQ ID NO: 192718 - DNA, 26 bp, Artificial sequence
  SiRNA target sequence
atagtcttaaaccgcaaaaaatcata

SEQ ID NO: 192719 - DNA, 26 bp, Artificial sequence
  SiRNA target sequence
tagtcttaaaccgcaaaaaatcatac

SEQ ID NO: 192720 - DNA, 26 bp, Artificial sequence
  SiRNA target sequence
agtcttaaaccgcaaaaaatcatacc

SEQ ID NO: 192721 - DNA, 26 bp, Artificial sequence
  SiRNA target sequence
gtcttaaaccgcaaaaaatcataccg

SEQ ID NO: 192722 - DNA, 26 bp, Artificial sequence
  SiRNA target sequence
tcttaaaccgcaaaaaatcataccga

SEQ ID NO: 192723 - DNA, 26 bp, Artificial sequence
  SiRNA target sequence
cttaaaccgcaaaaaatcataccgaa

SEQ ID NO: 192724 - DNA, 26 bp, Artificial sequence
  SiRNA target sequence
ttaaaccgcaaaaaatcataccgaaa

SEQ ID NO: 192725 - DNA, 26 bp, Artificial sequence
  SiRNA target sequence
taaaccgcaaaaaatcataccgaaat

SEQ ID NO: 192726 - DNA, 26 bp, Artificial sequence
  SiRNA target sequence
aaaccgcaaaaaatcataccgaaata

SEQ ID NO: 192727 - DNA, 26 bp, Artificial sequence
  SiRNA target sequence
aaccgcaaaaaatcataccgaaatac

SEQ ID NO: 192728 - DNA, 26 bp, Artificial sequence
  SiRNA target sequence
accgcaaaaaatcataccgaaataca

SEQ ID NO: 192729 - DNA, 26 bp, Artificial sequence
  SiRNA target sequence
ccgcaaaaaatcataccgaaatacaa

SEQ ID NO: 192730 - DNA, 26 bp, Artificial sequence
  SiRNA target sequence
cgcaaaaaatcataccgaaatacaaa

SEQ ID NO: 192731 - DNA, 26 bp, Artificial sequence
  SiRNA target sequence
gcaaaaaatcataccgaaatacaaag

SEQ ID NO: 192732 - DNA, 26 bp, Artificial sequence
  SiRNA target sequence
caaaaaatcataccgaaatacaaagg

SEQ ID NO: 192733 - DNA, 26 bp, Artificial sequence
  SiRNA target sequence
aaaaaatcataccgaaatacaaagga

SEQ ID NO: 192734 - DNA, 26 bp, Artificial sequence
  SiRNA target sequence
aaaaatcataccgaaatacaaaggaa

SEQ ID NO: 192735 - DNA, 26 bp, Artificial sequence
  SiRNA target sequence
aaaatcataccgaaatacaaaggaac

SEQ ID NO: 192736 - DNA, 26 bp, Artificial sequence
  SiRNA target sequence
aaatcataccgaaatacaaaggaaca

SEQ ID NO: 192737 - DNA, 26 bp, Artificial sequence
  SiRNA target sequence
aatcataccgaaatacaaaggaacag

SEQ ID NO: 192738 - DNA, 26 bp, Artificial sequence
  SiRNA target sequence
atcataccgaaatacaaaggaacagt

SEQ ID NO: 192739 - DNA, 26 bp, Artificial sequence
  SiRNA target sequence
tcataccgaaatacaaaggaacagtt

SEQ ID NO: 192740 - DNA, 26 bp, Artificial sequence
  SiRNA target sequence
cataccgaaatacaaaggaacagtta

SEQ ID NO: 192741 - DNA, 26 bp, Artificial sequence
  SiRNA target sequence
ataccgaaatacaaaggaacagttag

SEQ ID NO: 192742 - DNA, 26 bp, Artificial sequence
  SiRNA target sequence
taccgaaatacaaaggaacagttaga

SEQ ID NO: 192743 - DNA, 26 bp, Artificial sequence
  SiRNA target sequence
accgaaatacaaaggaacagttagag

SEQ ID NO: 192744 - DNA, 26 bp, Artificial sequence
  SiRNA target sequence
ccgaaatacaaaggaacagttagaga

SEQ ID NO: 192745 - DNA, 26 bp, Artificial sequence
  SiRNA target sequence
cgaaatacaaaggaacagttagagat

SEQ ID NO: 192746 - DNA, 26 bp, Artificial sequence
  SiRNA target sequence
gaaatacaaaggaacagttagagatc

SEQ ID NO: 192747 - DNA, 26 bp, Artificial sequence
  SiRNA target sequence
aaatacaaaggaacagttagagatct

SEQ ID NO: 192748 - DNA, 26 bp, Artificial sequence
  SiRNA target sequence
aatacaaaggaacagttagagatctt

SEQ ID NO: 192749 - DNA, 26 bp, Artificial sequence
  SiRNA target sequence
atacaaaggaacagttagagatcttt

SEQ ID NO: 192750 - DNA, 26 bp, Artificial sequence
  SiRNA target sequence
tacaaaggaacagttagagatctttt

SEQ ID NO: 192751 - DNA, 26 bp, Artificial sequence
  SiRNA target sequence
acaaaggaacagttagagatcttttt

SEQ ID NO: 192752 - DNA, 26 bp, Artificial sequence
  SiRNA target sequence
caaaggaacagttagagatcttttta

SEQ ID NO: 192753 - DNA, 26 bp, Artificial sequence
  SiRNA target sequence
aaaggaacagttagagatctttttat

SEQ ID NO: 192754 - DNA, 26 bp, Artificial sequence
  SiRNA target sequence
aaggaacagttagagatctttttatg

SEQ ID NO: 192755 - DNA, 26 bp, Artificial sequence
  SiRNA target sequence
aggaacagttagagatctttttatgt

SEQ ID NO: 192756 - DNA, 26 bp, Artificial sequence
  SiRNA target sequence
ggaacagttagagatctttttatgtc

SEQ ID NO: 192757 - DNA, 26 bp, Artificial sequence
  SiRNA target sequence
gaacagttagagatctttttatgtca

SEQ ID NO: 192758 - DNA, 26 bp, Artificial sequence
  SiRNA target sequence
aacagttagagatctttttatgtcaa

SEQ ID NO: 192759 - DNA, 26 bp, Artificial sequence
  SiRNA target sequence
acagttagagatctttttatgtcaaa

SEQ ID NO: 192760 - DNA, 26 bp, Artificial sequence
  SiRNA target sequence
cagttagagatctttttatgtcaaaa

SEQ ID NO: 192761 - DNA, 26 bp, Artificial sequence
  SiRNA target sequence
agttagagatctttttatgtcaaaaa

SEQ ID NO: 192762 - DNA, 26 bp, Artificial sequence
  SiRNA target sequence
gttagagatctttttatgtcaaaaat

SEQ ID NO: 192763 - DNA, 26 bp, Artificial sequence
  SiRNA target sequence
ttagagatctttttatgtcaaaaatt

SEQ ID NO: 192764 - DNA, 26 bp, Artificial sequence
  SiRNA target sequence
tagagatctttttatgtcaaaaattc

SEQ ID NO: 192765 - DNA, 26 bp, Artificial sequence
  SiRNA target sequence
agagatctttttatgtcaaaaattcg

SEQ ID NO: 192766 - DNA, 26 bp, Artificial sequence
  SiRNA target sequence
gagatctttttatgtcaaaaattcgt

SEQ ID NO: 192767 - DNA, 26 bp, Artificial sequence
  SiRNA target sequence
agatctttttatgtcaaaaattcgtt

SEQ ID NO: 192768 - DNA, 26 bp, Artificial sequence
  SiRNA target sequence
gatctttttatgtcaaaaattcgttc

SEQ ID NO: 192769 - DNA, 26 bp, Artificial sequence
  SiRNA target sequence
atctttttatgtcaaaaattcgttct

SEQ ID NO: 192770 - DNA, 26 bp, Artificial sequence
  SiRNA target sequence
tctttttatgtcaaaaattcgttctt

SEQ ID NO: 192771 - DNA, 26 bp, Artificial sequence
  SiRNA target sequence
ctttttatgtcaaaaattcgttcttc

SEQ ID NO: 192772 - DNA, 26 bp, Artificial sequence
  SiRNA target sequence
tttttatgtcaaaaattcgttcttcc

SEQ ID NO: 192773 - DNA, 26 bp, Artificial sequence
  SiRNA target sequence
ttttatgtcaaaaattcgttcttcct

SEQ ID NO: 192774 - DNA, 26 bp, Artificial sequence
  SiRNA target sequence
tttatgtcaaaaattcgttcttcctt

SEQ ID NO: 192775 - DNA, 26 bp, Artificial sequence
  SiRNA target sequence
ttatgtcaaaaattcgttcttccttt

SEQ ID NO: 192776 - DNA, 26 bp, Artificial sequence
  SiRNA target sequence
tatgtcaaaaattcgttcttcctttt

SEQ ID NO: 192777 - DNA, 26 bp, Artificial sequence
  SiRNA target sequence
atgtcaaaaattcgttcttccttttt

SEQ ID NO: 192778 - DNA, 26 bp, Artificial sequence
  SiRNA target sequence
tgtcaaaaattcgttcttccttttta

SEQ ID NO: 192779 - DNA, 26 bp, Artificial sequence
  SiRNA target sequence
gtcaaaaattcgttcttcctttttag

SEQ ID NO: 192780 - DNA, 26 bp, Artificial sequence
  SiRNA target sequence
tcaaaaattcgttcttcctttttaga

SEQ ID NO: 192781 - DNA, 26 bp, Artificial sequence
  SiRNA target sequence
caaaaattcgttcttcctttttagac

SEQ ID NO: 192782 - DNA, 26 bp, Artificial sequence
  SiRNA target sequence
aaaaattcgttcttcctttttagacg

SEQ ID NO: 192783 - DNA, 26 bp, Artificial sequence
  SiRNA target sequence
aaaattcgttcttcctttttagacgc

SEQ ID NO: 192784 - DNA, 26 bp, Artificial sequence
  SiRNA target sequence
aaattcgttcttcctttttagacgct

SEQ ID NO: 192785 - DNA, 26 bp, Artificial sequence
  SiRNA target sequence
aattcgttcttcctttttagacgcta

SEQ ID NO: 192786 - DNA, 26 bp, Artificial sequence
  SiRNA target sequence
attcgttcttcctttttagacgctaa

SEQ ID NO: 192787 - DNA, 26 bp, Artificial sequence
  SiRNA target sequence
ttcgttcttcctttttagacgctaat

SEQ ID NO: 192788 - DNA, 26 bp, Artificial sequence
  SiRNA target sequence
tcgttcttcctttttagacgctaatt

SEQ ID NO: 192789 - DNA, 26 bp, Artificial sequence
  SiRNA target sequence
cgttcttcctttttagacgctaattt

SEQ ID NO: 192790 - DNA, 26 bp, Artificial sequence
  SiRNA target sequence
gttcttcctttttagacgctaatttt

SEQ ID NO: 192791 - DNA, 26 bp, Artificial sequence
  SiRNA target sequence
ttcttcctttttagacgctaattttg

SEQ ID NO: 192792 - DNA, 26 bp, Artificial sequence
  SiRNA target sequence
tcttcctttttagacgctaattttgt

SEQ ID NO: 192793 - DNA, 26 bp, Artificial sequence
  SiRNA target sequence
cttcctttttagacgctaattttgtt

SEQ ID NO: 192794 - DNA, 26 bp, Artificial sequence
  SiRNA target sequence
ttcctttttagacgctaattttgtta

SEQ ID NO: 192795 - DNA, 26 bp, Artificial sequence
  SiRNA target sequence
tcctttttagacgctaattttgttaa

SEQ ID NO: 192796 - DNA, 26 bp, Artificial sequence
  SiRNA target sequence
cctttttagacgctaattttgttaat

SEQ ID NO: 192797 - DNA, 26 bp, Artificial sequence
  SiRNA target sequence
ctttttagacgctaattttgttaatg

SEQ ID NO: 192798 - DNA, 26 bp, Artificial sequence
  SiRNA target sequence
tttttagacgctaattttgttaatga

SEQ ID NO: 192799 - DNA, 26 bp, Artificial sequence
  SiRNA target sequence
ttttagacgctaattttgttaatgaa

SEQ ID NO: 192800 - DNA, 26 bp, Artificial sequence
  SiRNA target sequence
tttagacgctaattttgttaatgaag

SEQ ID NO: 192801 - DNA, 26 bp, Artificial sequence
  SiRNA target sequence
ttagacgctaattttgttaatgaagc

SEQ ID NO: 192802 - DNA, 26 bp, Artificial sequence
  SiRNA target sequence
tagacgctaattttgttaatgaagct

SEQ ID NO: 192803 - DNA, 26 bp, Artificial sequence
  SiRNA target sequence
agacgctaattttgttaatgaagcta

SEQ ID NO: 192804 - DNA, 26 bp, Artificial sequence
  SiRNA target sequence
gacgctaattttgttaatgaagctat

SEQ ID NO: 192805 - DNA, 26 bp, Artificial sequence
  SiRNA target sequence
acgctaattttgttaatgaagctatt

SEQ ID NO: 192806 - DNA, 26 bp, Artificial sequence
  SiRNA target sequence
cgctaattttgttaatgaagctatta

SEQ ID NO: 192807 - DNA, 26 bp, Artificial sequence
  SiRNA target sequence
gctaattttgttaatgaagctattaa

SEQ ID NO: 192808 - DNA, 26 bp, Artificial sequence
  SiRNA target sequence
ctaattttgttaatgaagctattaaa

SEQ ID NO: 192809 - DNA, 26 bp, Artificial sequence
  SiRNA target sequence
taattttgttaatgaagctattaaac

SEQ ID NO: 192810 - DNA, 26 bp, Artificial sequence
  SiRNA target sequence
aattttgttaatgaagctattaaacc

SEQ ID NO: 192811 - DNA, 26 bp, Artificial sequence
  SiRNA target sequence
attttgttaatgaagctattaaacct

SEQ ID NO: 192812 - DNA, 26 bp, Artificial sequence
  SiRNA target sequence
ttttgttaatgaagctattaaacctt

SEQ ID NO: 192813 - DNA, 26 bp, Artificial sequence
  SiRNA target sequence
tttgttaatgaagctattaaaccttt

SEQ ID NO: 192814 - DNA, 26 bp, Artificial sequence
  SiRNA target sequence
ttgttaatgaagctattaaaccttta

SEQ ID NO: 192815 - DNA, 26 bp, Artificial sequence
  SiRNA target sequence
tgttaatgaagctattaaacctttag

SEQ ID NO: 192816 - DNA, 26 bp, Artificial sequence
  SiRNA target sequence
gttaatgaagctattaaacctttaga

SEQ ID NO: 192817 - DNA, 26 bp, Artificial sequence
  SiRNA target sequence
ttaatgaagctattaaacctttagat

SEQ ID NO: 192818 - DNA, 26 bp, Artificial sequence
  SiRNA target sequence
taatgaagctattaaacctttagata

SEQ ID NO: 192819 - DNA, 26 bp, Artificial sequence
  SiRNA target sequence
aatgaagctattaaacctttagatat

SEQ ID NO: 192820 - DNA, 26 bp, Artificial sequence
  SiRNA target sequence
atgaagctattaaacctttagatatt

SEQ ID NO: 192821 - DNA, 26 bp, Artificial sequence
  SiRNA target sequence
tgaagctattaaacctttagatattc

SEQ ID NO: 192822 - DNA, 26 bp, Artificial sequence
  SiRNA target sequence
gaagctattaaacctttagatattca

SEQ ID NO: 192823 - DNA, 26 bp, Artificial sequence
  SiRNA target sequence
aagctattaaacctttagatattcat

SEQ ID NO: 192824 - DNA, 26 bp, Artificial sequence
  SiRNA target sequence
agctattaaacctttagatattcatc

SEQ ID NO: 192825 - DNA, 26 bp, Artificial sequence
  SiRNA target sequence
gctattaaacctttagatattcatca

SEQ ID NO: 192826 - DNA, 26 bp, Artificial sequence
  SiRNA target sequence
ctattaaacctttagatattcatcat

SEQ ID NO: 192827 - DNA, 26 bp, Artificial sequence
  SiRNA target sequence
tattaaacctttagatattcatcatt

SEQ ID NO: 192828 - DNA, 26 bp, Artificial sequence
  SiRNA target sequence
attaaacctttagatattcatcattt

SEQ ID NO: 192829 - DNA, 26 bp, Artificial sequence
  SiRNA target sequence
ttaaacctttagatattcatcattta

SEQ ID NO: 192830 - DNA, 26 bp, Artificial sequence
  SiRNA target sequence
taaacctttagatattcatcatttat

SEQ ID NO: 192831 - DNA, 26 bp, Artificial sequence
  SiRNA target sequence
aaacctttagatattcatcatttata

SEQ ID NO: 192832 - DNA, 26 bp, Artificial sequence
  SiRNA target sequence
aacctttagatattcatcatttatac

SEQ ID NO: 192833 - DNA, 26 bp, Artificial sequence
  SiRNA target sequence
acctttagatattcatcatttatacg

SEQ ID NO: 192834 - DNA, 26 bp, Artificial sequence
  SiRNA target sequence
cctttagatattcatcatttatacga

SEQ ID NO: 192835 - DNA, 26 bp, Artificial sequence
  SiRNA target sequence
ctttagatattcatcatttatacgac

SEQ ID NO: 192836 - DNA, 26 bp, Artificial sequence
  SiRNA target sequence
tttagatattcatcatttatacgacc

SEQ ID NO: 192837 - DNA, 26 bp, Artificial sequence
  SiRNA target sequence
ttagatattcatcatttatacgacca

SEQ ID NO: 192838 - DNA, 26 bp, Artificial sequence
  SiRNA target sequence
tagatattcatcatttatacgaccaa

SEQ ID NO: 192839 - DNA, 26 bp, Artificial sequence
  SiRNA target sequence
agatattcatcatttatacgaccaac

SEQ ID NO: 192840 - DNA, 26 bp, Artificial sequence
  SiRNA target sequence
gatattcatcatttatacgaccaact

SEQ ID NO: 192841 - DNA, 26 bp, Artificial sequence
  SiRNA target sequence
atattcatcatttatacgaccaactt

SEQ ID NO: 192842 - DNA, 26 bp, Artificial sequence
  SiRNA target sequence
tattcatcatttatacgaccaacttg

SEQ ID NO: 192843 - DNA, 26 bp, Artificial sequence
  SiRNA target sequence
attcatcatttatacgaccaacttgt

SEQ ID NO: 192844 - DNA, 26 bp, Artificial sequence
  SiRNA target sequence
ttcatcatttatacgaccaacttgta

SEQ ID NO: 192845 - DNA, 26 bp, Artificial sequence
  SiRNA target sequence
tcatcatttatacgaccaacttgtag

SEQ ID NO: 192846 - DNA, 26 bp, Artificial sequence
  SiRNA target sequence
catcatttatacgaccaacttgtaga

SEQ ID NO: 192847 - DNA, 26 bp, Artificial sequence
  SiRNA target sequence
atcatttatacgaccaacttgtagaa

SEQ ID NO: 192848 - DNA, 26 bp, Artificial sequence
  SiRNA target sequence
tcatttatacgaccaacttgtagaaa

SEQ ID NO: 192849 - DNA, 26 bp, Artificial sequence
  SiRNA target sequence
catttatacgaccaacttgtagaaaa

SEQ ID NO: 192850 - DNA, 26 bp, Artificial sequence
  SiRNA target sequence
atttatacgaccaacttgtagaaaac

SEQ ID NO: 192851 - DNA, 26 bp, Artificial sequence
  SiRNA target sequence
tttatacgaccaacttgtagaaaact

SEQ ID NO: 192852 - DNA, 26 bp, Artificial sequence
  SiRNA target sequence
ttatacgaccaacttgtagaaaactt

SEQ ID NO: 192853 - DNA, 26 bp, Artificial sequence
  SiRNA target sequence
tatacgaccaacttgtagaaaacttg

SEQ ID NO: 192854 - DNA, 26 bp, Artificial sequence
  SiRNA target sequence
atacgaccaacttgtagaaaacttga

SEQ ID NO: 192855 - DNA, 26 bp, Artificial sequence
  SiRNA target sequence
tacgaccaacttgtagaaaacttgag

SEQ ID NO: 192856 - DNA, 26 bp, Artificial sequence
  SiRNA target sequence
acgaccaacttgtagaaaacttgagt

SEQ ID NO: 192857 - DNA, 26 bp, Artificial sequence
  SiRNA target sequence
cgaccaacttgtagaaaacttgagtg

SEQ ID NO: 192858 - DNA, 26 bp, Artificial sequence
  SiRNA target sequence
gaccaacttgtagaaaacttgagtgg

SEQ ID NO: 192859 - DNA, 26 bp, Artificial sequence
  SiRNA target sequence
accaacttgtagaaaacttgagtggt

SEQ ID NO: 192860 - DNA, 26 bp, Artificial sequence
  SiRNA target sequence
ccaacttgtagaaaacttgagtggtg

SEQ ID NO: 192861 - DNA, 26 bp, Artificial sequence
  SiRNA target sequence
caacttgtagaaaacttgagtggtgg

SEQ ID NO: 192862 - DNA, 26 bp, Artificial sequence
  SiRNA target sequence
aacttgtagaaaacttgagtggtgga

SEQ ID NO: 192863 - DNA, 26 bp, Artificial sequence
  SiRNA target sequence
acttgtagaaaacttgagtggtggag

SEQ ID NO: 192864 - DNA, 26 bp, Artificial sequence
  SiRNA target sequence
cttgtagaaaacttgagtggtggaga

SEQ ID NO: 192865 - DNA, 26 bp, Artificial sequence
  SiRNA target sequence
ttgtagaaaacttgagtggtggagaa

SEQ ID NO: 192866 - DNA, 26 bp, Artificial sequence
  SiRNA target sequence
tgtagaaaacttgagtggtggagaat

SEQ ID NO: 192867 - DNA, 26 bp, Artificial sequence
  SiRNA target sequence
gtagaaaacttgagtggtggagaatt

SEQ ID NO: 192868 - DNA, 26 bp, Artificial sequence
  SiRNA target sequence
tagaaaacttgagtggtggagaatta

SEQ ID NO: 192869 - DNA, 26 bp, Artificial sequence
  SiRNA target sequence
agaaaacttgagtggtggagaattac

SEQ ID NO: 192870 - DNA, 26 bp, Artificial sequence
  SiRNA target sequence
gaaaacttgagtggtggagaattaca

SEQ ID NO: 192871 - DNA, 26 bp, Artificial sequence
  SiRNA target sequence
aaaacttgagtggtggagaattacaa

SEQ ID NO: 192872 - DNA, 26 bp, Artificial sequence
  SiRNA target sequence
aaacttgagtggtggagaattacaaa

SEQ ID NO: 192873 - DNA, 26 bp, Artificial sequence
  SiRNA target sequence
aacttgagtggtggagaattacaaag

SEQ ID NO: 192874 - DNA, 26 bp, Artificial sequence
  SiRNA target sequence
acttgagtggtggagaattacaaaga

SEQ ID NO: 192875 - DNA, 26 bp, Artificial sequence
  SiRNA target sequence
cttgagtggtggagaattacaaagaa

SEQ ID NO: 192876 - DNA, 26 bp, Artificial sequence
  SiRNA target sequence
ttgagtggtggagaattacaaagaat

SEQ ID NO: 192877 - DNA, 26 bp, Artificial sequence
  SiRNA target sequence
tgagtggtggagaattacaaagaatt

SEQ ID NO: 192878 - DNA, 26 bp, Artificial sequence
  SiRNA target sequence
gagtggtggagaattacaaagaattg

SEQ ID NO: 192879 - DNA, 26 bp, Artificial sequence
  SiRNA target sequence
agtggtggagaattacaaagaattgc

SEQ ID NO: 192880 - DNA, 26 bp, Artificial sequence
  SiRNA target sequence
gtggtggagaattacaaagaattgca

SEQ ID NO: 192881 - DNA, 26 bp, Artificial sequence
  SiRNA target sequence
tggtggagaattacaaagaattgcaa

SEQ ID NO: 192882 - DNA, 26 bp, Artificial sequence
  SiRNA target sequence
ggtggagaattacaaagaattgcaat

SEQ ID NO: 192883 - DNA, 26 bp, Artificial sequence
  SiRNA target sequence
gtggagaattacaaagaattgcaata

SEQ ID NO: 192884 - DNA, 26 bp, Artificial sequence
  SiRNA target sequence
tggagaattacaaagaattgcaataa

SEQ ID NO: 192885 - DNA, 26 bp, Artificial sequence
  SiRNA target sequence
ggagaattacaaagaattgcaataat

SEQ ID NO: 192886 - DNA, 26 bp, Artificial sequence
  SiRNA target sequence
gagaattacaaagaattgcaataata

SEQ ID NO: 192887 - DNA, 26 bp, Artificial sequence
  SiRNA target sequence
agaattacaaagaattgcaataataa

SEQ ID NO: 192888 - DNA, 26 bp, Artificial sequence
  SiRNA target sequence
gaattacaaagaattgcaataataat

SEQ ID NO: 192889 - DNA, 26 bp, Artificial sequence
  SiRNA target sequence
aattacaaagaattgcaataataata

SEQ ID NO: 192890 - DNA, 26 bp, Artificial sequence
  SiRNA target sequence
attacaaagaattgcaataataatat

SEQ ID NO: 192891 - DNA, 26 bp, Artificial sequence
  SiRNA target sequence
ttacaaagaattgcaataataatatg

SEQ ID NO: 192892 - DNA, 26 bp, Artificial sequence
  SiRNA target sequence
tacaaagaattgcaataataatatgt

SEQ ID NO: 192893 - DNA, 26 bp, Artificial sequence
  SiRNA target sequence
acaaagaattgcaataataatatgtt

SEQ ID NO: 192894 - DNA, 26 bp, Artificial sequence
  SiRNA target sequence
caaagaattgcaataataatatgttt

SEQ ID NO: 192895 - DNA, 26 bp, Artificial sequence
  SiRNA target sequence
aaagaattgcaataataatatgttta

SEQ ID NO: 192896 - DNA, 26 bp, Artificial sequence
  SiRNA target sequence
aagaattgcaataataatatgtttag

SEQ ID NO: 192897 - DNA, 26 bp, Artificial sequence
  SiRNA target sequence
agaattgcaataataatatgtttagg

SEQ ID NO: 192898 - DNA, 26 bp, Artificial sequence
  SiRNA target sequence
gaattgcaataataatatgtttagga

SEQ ID NO: 192899 - DNA, 26 bp, Artificial sequence
  SiRNA target sequence
aattgcaataataatatgtttaggaa

SEQ ID NO: 192900 - DNA, 26 bp, Artificial sequence
  SiRNA target sequence
attgcaataataatatgtttaggaaa

SEQ ID NO: 192901 - DNA, 26 bp, Artificial sequence
  SiRNA target sequence
ttgcaataataatatgtttaggaaaa

SEQ ID NO: 192902 - DNA, 26 bp, Artificial sequence
  SiRNA target sequence
tgcaataataatatgtttaggaaaag

SEQ ID NO: 192903 - DNA, 26 bp, Artificial sequence
  SiRNA target sequence
gcaataataatatgtttaggaaaaga

SEQ ID NO: 192904 - DNA, 26 bp, Artificial sequence
  SiRNA target sequence
caataataatatgtttaggaaaagat

SEQ ID NO: 192905 - DNA, 26 bp, Artificial sequence
  SiRNA target sequence
aataataatatgtttaggaaaagatg

SEQ ID NO: 192906 - DNA, 26 bp, Artificial sequence
  SiRNA target sequence
ataataatatgtttaggaaaagatgc

SEQ ID NO: 192907 - DNA, 26 bp, Artificial sequence
  SiRNA target sequence
taataatatgtttaggaaaagatgct

SEQ ID NO: 192908 - DNA, 26 bp, Artificial sequence
  SiRNA target sequence
aataatatgtttaggaaaagatgcta

SEQ ID NO: 192909 - DNA, 26 bp, Artificial sequence
  SiRNA target sequence
ataatatgtttaggaaaagatgctaa

SEQ ID NO: 192910 - DNA, 26 bp, Artificial sequence
  SiRNA target sequence
taatatgtttaggaaaagatgctaac

SEQ ID NO: 192911 - DNA, 26 bp, Artificial sequence
  SiRNA target sequence
aatatgtttaggaaaagatgctaacc

SEQ ID NO: 192912 - DNA, 26 bp, Artificial sequence
  SiRNA target sequence
atatgtttaggaaaagatgctaacct

SEQ ID NO: 192913 - DNA, 26 bp, Artificial sequence
  SiRNA target sequence
tatgtttaggaaaagatgctaacctt

SEQ ID NO: 192914 - DNA, 26 bp, Artificial sequence
  SiRNA target sequence
atgtttaggaaaagatgctaaccttt

SEQ ID NO: 192915 - DNA, 26 bp, Artificial sequence
  SiRNA target sequence
tgtttaggaaaagatgctaaccttta

SEQ ID NO: 192916 - DNA, 26 bp, Artificial sequence
  SiRNA target sequence
gtttaggaaaagatgctaacctttat

SEQ ID NO: 192917 - DNA, 26 bp, Artificial sequence
  SiRNA target sequence
tttaggaaaagatgctaacctttatt

SEQ ID NO: 192918 - DNA, 26 bp, Artificial sequence
  SiRNA target sequence
ttaggaaaagatgctaacctttattt

SEQ ID NO: 192919 - DNA, 26 bp, Artificial sequence
  SiRNA target sequence
taggaaaagatgctaacctttattta

SEQ ID NO: 192920 - DNA, 26 bp, Artificial sequence
  SiRNA target sequence
aggaaaagatgctaacctttatttat

SEQ ID NO: 192921 - DNA, 26 bp, Artificial sequence
  SiRNA target sequence
ggaaaagatgctaacctttatttatt

SEQ ID NO: 192922 - DNA, 26 bp, Artificial sequence
  SiRNA target sequence
gaaaagatgctaacctttatttatta

SEQ ID NO: 192923 - DNA, 26 bp, Artificial sequence
  SiRNA target sequence
aaaagatgctaacctttatttattag

SEQ ID NO: 192924 - DNA, 26 bp, Artificial sequence
  SiRNA target sequence
aaagatgctaacctttatttattaga

SEQ ID NO: 192925 - DNA, 26 bp, Artificial sequence
  SiRNA target sequence
aagatgctaacctttatttattagat

SEQ ID NO: 192926 - DNA, 26 bp, Artificial sequence
  SiRNA target sequence
agatgctaacctttatttattagatg

SEQ ID NO: 192927 - DNA, 26 bp, Artificial sequence
  SiRNA target sequence
gatgctaacctttatttattagatga

SEQ ID NO: 192928 - DNA, 26 bp, Artificial sequence
  SiRNA target sequence
atgctaacctttatttattagatgaa

SEQ ID NO: 192929 - DNA, 26 bp, Artificial sequence
  SiRNA target sequence
tgctaacctttatttattagatgaac

SEQ ID NO: 192930 - DNA, 26 bp, Artificial sequence
  SiRNA target sequence
gctaacctttatttattagatgaacc

SEQ ID NO: 192931 - DNA, 26 bp, Artificial sequence
  SiRNA target sequence
ctaacctttatttattagatgaacct

SEQ ID NO: 192932 - DNA, 26 bp, Artificial sequence
  SiRNA target sequence
taacctttatttattagatgaacctt

SEQ ID NO: 192933 - DNA, 26 bp, Artificial sequence
  SiRNA target sequence
aacctttatttattagatgaaccttc

SEQ ID NO: 192934 - DNA, 26 bp, Artificial sequence
  SiRNA target sequence
acctttatttattagatgaaccttct

SEQ ID NO: 192935 - DNA, 26 bp, Artificial sequence
  SiRNA target sequence
cctttatttattagatgaaccttctg

SEQ ID NO: 192936 - DNA, 26 bp, Artificial sequence
  SiRNA target sequence
ctttatttattagatgaaccttctgc

SEQ ID NO: 192937 - DNA, 26 bp, Artificial sequence
  SiRNA target sequence
tttatttattagatgaaccttctgcg

SEQ ID NO: 192938 - DNA, 26 bp, Artificial sequence
  SiRNA target sequence
ttatttattagatgaaccttctgcgt

SEQ ID NO: 192939 - DNA, 26 bp, Artificial sequence
  SiRNA target sequence
tatttattagatgaaccttctgcgta

SEQ ID NO: 192940 - DNA, 26 bp, Artificial sequence
  SiRNA target sequence
atttattagatgaaccttctgcgtat

SEQ ID NO: 192941 - DNA, 26 bp, Artificial sequence
  SiRNA target sequence
tttattagatgaaccttctgcgtatc

SEQ ID NO: 192942 - DNA, 26 bp, Artificial sequence
  SiRNA target sequence
ttattagatgaaccttctgcgtatct

SEQ ID NO: 192943 - DNA, 26 bp, Artificial sequence
  SiRNA target sequence
tattagatgaaccttctgcgtatcta

SEQ ID NO: 192944 - DNA, 26 bp, Artificial sequence
  SiRNA target sequence
attagatgaaccttctgcgtatctag

SEQ ID NO: 192945 - DNA, 26 bp, Artificial sequence
  SiRNA target sequence
ttagatgaaccttctgcgtatctaga

SEQ ID NO: 192946 - DNA, 26 bp, Artificial sequence
  SiRNA target sequence
tagatgaaccttctgcgtatctagat

SEQ ID NO: 192947 - DNA, 26 bp, Artificial sequence
  SiRNA target sequence
agatgaaccttctgcgtatctagatt

SEQ ID NO: 192948 - DNA, 26 bp, Artificial sequence
  SiRNA target sequence
gatgaaccttctgcgtatctagattc

SEQ ID NO: 192949 - DNA, 26 bp, Artificial sequence
  SiRNA target sequence
atgaaccttctgcgtatctagattca

SEQ ID NO: 192950 - DNA, 26 bp, Artificial sequence
  SiRNA target sequence
tgaaccttctgcgtatctagattcag

SEQ ID NO: 192951 - DNA, 26 bp, Artificial sequence
  SiRNA target sequence
gaaccttctgcgtatctagattcaga

SEQ ID NO: 192952 - DNA, 26 bp, Artificial sequence
  SiRNA target sequence
aaccttctgcgtatctagattcagat

SEQ ID NO: 192953 - DNA, 26 bp, Artificial sequence
  SiRNA target sequence
accttctgcgtatctagattcagatc

SEQ ID NO: 192954 - DNA, 26 bp, Artificial sequence
  SiRNA target sequence
ccttctgcgtatctagattcagatca

SEQ ID NO: 192955 - DNA, 26 bp, Artificial sequence
  SiRNA target sequence
cttctgcgtatctagattcagatcag

SEQ ID NO: 192956 - DNA, 26 bp, Artificial sequence
  SiRNA target sequence
ttctgcgtatctagattcagatcaga

SEQ ID NO: 192957 - DNA, 26 bp, Artificial sequence
  SiRNA target sequence
tctgcgtatctagattcagatcagag

SEQ ID NO: 192958 - DNA, 26 bp, Artificial sequence
  SiRNA target sequence
ctgcgtatctagattcagatcagaga

SEQ ID NO: 192959 - DNA, 26 bp, Artificial sequence
  SiRNA target sequence
tgcgtatctagattcagatcagagaa

SEQ ID NO: 192960 - DNA, 26 bp, Artificial sequence
  SiRNA target sequence
gcgtatctagattcagatcagagaat

SEQ ID NO: 192961 - DNA, 26 bp, Artificial sequence
  SiRNA target sequence
cgtatctagattcagatcagagaata

SEQ ID NO: 192962 - DNA, 26 bp, Artificial sequence
  SiRNA target sequence
gtatctagattcagatcagagaatag

SEQ ID NO: 192963 - DNA, 26 bp, Artificial sequence
  SiRNA target sequence
tatctagattcagatcagagaatagc

SEQ ID NO: 192964 - DNA, 26 bp, Artificial sequence
  SiRNA target sequence
atctagattcagatcagagaatagcg

SEQ ID NO: 192965 - DNA, 26 bp, Artificial sequence
  SiRNA target sequence
tctagattcagatcagagaatagcga

SEQ ID NO: 192966 - DNA, 26 bp, Artificial sequence
  SiRNA target sequence
ctagattcagatcagagaatagcgat

SEQ ID NO: 192967 - DNA, 26 bp, Artificial sequence
  SiRNA target sequence
tagattcagatcagagaatagcgatt

SEQ ID NO: 192968 - DNA, 26 bp, Artificial sequence
  SiRNA target sequence
agattcagatcagagaatagcgattt

SEQ ID NO: 192969 - DNA, 26 bp, Artificial sequence
  SiRNA target sequence
gattcagatcagagaatagcgatttc

SEQ ID NO: 192970 - DNA, 26 bp, Artificial sequence
  SiRNA target sequence
attcagatcagagaatagcgatttca

SEQ ID NO: 192971 - DNA, 26 bp, Artificial sequence
  SiRNA target sequence
ttcagatcagagaatagcgatttcaa

SEQ ID NO: 192972 - DNA, 26 bp, Artificial sequence
  SiRNA target sequence
tcagatcagagaatagcgatttcaaa

SEQ ID NO: 192973 - DNA, 26 bp, Artificial sequence
  SiRNA target sequence
cagatcagagaatagcgatttcaaaa

SEQ ID NO: 192974 - DNA, 26 bp, Artificial sequence
  SiRNA target sequence
agatcagagaatagcgatttcaaaag

SEQ ID NO: 192975 - DNA, 26 bp, Artificial sequence
  SiRNA target sequence
gatcagagaatagcgatttcaaaagt

SEQ ID NO: 192976 - DNA, 26 bp, Artificial sequence
  SiRNA target sequence
atcagagaatagcgatttcaaaagtt

SEQ ID NO: 192977 - DNA, 26 bp, Artificial sequence
  SiRNA target sequence
tcagagaatagcgatttcaaaagtta

SEQ ID NO: 192978 - DNA, 26 bp, Artificial sequence
  SiRNA target sequence
cagagaatagcgatttcaaaagttat

SEQ ID NO: 192979 - DNA, 26 bp, Artificial sequence
  SiRNA target sequence
agagaatagcgatttcaaaagttata

SEQ ID NO: 192980 - DNA, 26 bp, Artificial sequence
  SiRNA target sequence
gagaatagcgatttcaaaagttataa

SEQ ID NO: 192981 - DNA, 26 bp, Artificial sequence
  SiRNA target sequence
agaatagcgatttcaaaagttataaa

SEQ ID NO: 192982 - DNA, 26 bp, Artificial sequence
  SiRNA target sequence
gaatagcgatttcaaaagttataaaa

SEQ ID NO: 192983 - DNA, 26 bp, Artificial sequence
  SiRNA target sequence
aatagcgatttcaaaagttataaaaa

SEQ ID NO: 192984 - DNA, 26 bp, Artificial sequence
  SiRNA target sequence
atagcgatttcaaaagttataaaaag

SEQ ID NO: 192985 - DNA, 26 bp, Artificial sequence
  SiRNA target sequence
tagcgatttcaaaagttataaaaagg

SEQ ID NO: 192986 - DNA, 26 bp, Artificial sequence
  SiRNA target sequence
agcgatttcaaaagttataaaaaggt

SEQ ID NO: 192987 - DNA, 26 bp, Artificial sequence
  SiRNA target sequence
gcgatttcaaaagttataaaaaggtt

SEQ ID NO: 192988 - DNA, 26 bp, Artificial sequence
  SiRNA target sequence
cgatttcaaaagttataaaaaggttt

SEQ ID NO: 192989 - DNA, 26 bp, Artificial sequence
  SiRNA target sequence
gatttcaaaagttataaaaaggttta

SEQ ID NO: 192990 - DNA, 26 bp, Artificial sequence
  SiRNA target sequence
atttcaaaagttataaaaaggtttat

SEQ ID NO: 192991 - DNA, 26 bp, Artificial sequence
  SiRNA target sequence
tttcaaaagttataaaaaggtttatt

SEQ ID NO: 192992 - DNA, 26 bp, Artificial sequence
  SiRNA target sequence
ttcaaaagttataaaaaggtttattt

SEQ ID NO: 192993 - DNA, 26 bp, Artificial sequence
  SiRNA target sequence
tcaaaagttataaaaaggtttattta

SEQ ID NO: 192994 - DNA, 26 bp, Artificial sequence
  SiRNA target sequence
caaaagttataaaaaggtttatttat

SEQ ID NO: 192995 - DNA, 26 bp, Artificial sequence
  SiRNA target sequence
aaaagttataaaaaggtttatttatg

SEQ ID NO: 192996 - DNA, 26 bp, Artificial sequence
  SiRNA target sequence
aaagttataaaaaggtttatttatgg

SEQ ID NO: 192997 - DNA, 26 bp, Artificial sequence
  SiRNA target sequence
aagttataaaaaggtttatttatggg

SEQ ID NO: 192998 - DNA, 26 bp, Artificial sequence
  SiRNA target sequence
agttataaaaaggtttatttatggga

SEQ ID NO: 192999 - DNA, 26 bp, Artificial sequence
  SiRNA target sequence
gttataaaaaggtttatttatgggaa

SEQ ID NO: 193000 - DNA, 26 bp, Artificial sequence
  SiRNA target sequence
ttataaaaaggtttatttatgggaag

SEQ ID NO: 193001 - DNA, 26 bp, Artificial sequence
  SiRNA target sequence
tataaaaaggtttatttatgggaaga

SEQ ID NO: 193002 - DNA, 26 bp, Artificial sequence
  SiRNA target sequence
ataaaaaggtttatttatgggaagaa

SEQ ID NO: 193003 - DNA, 26 bp, Artificial sequence
  SiRNA target sequence
taaaaaggtttatttatgggaagaag

SEQ ID NO: 193004 - DNA, 26 bp, Artificial sequence
  SiRNA target sequence
aaaaaggtttatttatgggaagaagc

SEQ ID NO: 193005 - DNA, 26 bp, Artificial sequence
  SiRNA target sequence
aaaaggtttatttatgggaagaagcg

SEQ ID NO: 193006 - DNA, 26 bp, Artificial sequence
  SiRNA target sequence
aaaggtttatttatgggaagaagcga

SEQ ID NO: 193007 - DNA, 26 bp, Artificial sequence
  SiRNA target sequence
aaggtttatttatgggaagaagcgaa

SEQ ID NO: 193008 - DNA, 26 bp, Artificial sequence
  SiRNA target sequence
aggtttatttatgggaagaagcgaac

SEQ ID NO: 193009 - DNA, 26 bp, Artificial sequence
  SiRNA target sequence
ggtttatttatgggaagaagcgaaca

SEQ ID NO: 193010 - DNA, 26 bp, Artificial sequence
  SiRNA target sequence
gtttatttatgggaagaagcgaacag

SEQ ID NO: 193011 - DNA, 26 bp, Artificial sequence
  SiRNA target sequence
tttatttatgggaagaagcgaacagc

SEQ ID NO: 193012 - DNA, 26 bp, Artificial sequence
  SiRNA target sequence
ttatttatgggaagaagcgaacagcc

SEQ ID NO: 193013 - DNA, 26 bp, Artificial sequence
  SiRNA target sequence
tatttatgggaagaagcgaacagcct

SEQ ID NO: 193014 - DNA, 26 bp, Artificial sequence
  SiRNA target sequence
atttatgggaagaagcgaacagcctt

SEQ ID NO: 193015 - DNA, 26 bp, Artificial sequence
  SiRNA target sequence
tttatgggaagaagcgaacagccttt

SEQ ID NO: 193016 - DNA, 26 bp, Artificial sequence
  SiRNA target sequence
ttatgggaagaagcgaacagcctttg

SEQ ID NO: 193017 - DNA, 26 bp, Artificial sequence
  SiRNA target sequence
tatgggaagaagcgaacagcctttgt

SEQ ID NO: 193018 - DNA, 26 bp, Artificial sequence
  SiRNA target sequence
atgggaagaagcgaacagcctttgtg

SEQ ID NO: 193019 - DNA, 26 bp, Artificial sequence
  SiRNA target sequence
tgggaagaagcgaacagcctttgtgg

SEQ ID NO: 193020 - DNA, 26 bp, Artificial sequence
  SiRNA target sequence
gggaagaagcgaacagcctttgtggt

SEQ ID NO: 193021 - DNA, 26 bp, Artificial sequence
  SiRNA target sequence
ggaagaagcgaacagcctttgtggtt

SEQ ID NO: 193022 - DNA, 26 bp, Artificial sequence
  SiRNA target sequence
gaagaagcgaacagcctttgtggttg

SEQ ID NO: 193023 - DNA, 26 bp, Artificial sequence
  SiRNA target sequence
aagaagcgaacagcctttgtggttga

SEQ ID NO: 193024 - DNA, 26 bp, Artificial sequence
  SiRNA target sequence
agaagcgaacagcctttgtggttgaa

SEQ ID NO: 193025 - DNA, 26 bp, Artificial sequence
  SiRNA target sequence
gaagcgaacagcctttgtggttgaac

SEQ ID NO: 193026 - DNA, 26 bp, Artificial sequence
  SiRNA target sequence
aagcgaacagcctttgtggttgaaca

SEQ ID NO: 193027 - DNA, 26 bp, Artificial sequence
  SiRNA target sequence
agcgaacagcctttgtggttgaacat

SEQ ID NO: 193028 - DNA, 26 bp, Artificial sequence
  SiRNA target sequence
gcgaacagcctttgtggttgaacatg

SEQ ID NO: 193029 - DNA, 26 bp, Artificial sequence
  SiRNA target sequence
cgaacagcctttgtggttgaacatga

SEQ ID NO: 193030 - DNA, 26 bp, Artificial sequence
  SiRNA target sequence
gaacagcctttgtggttgaacatgat

SEQ ID NO: 193031 - DNA, 26 bp, Artificial sequence
  SiRNA target sequence
aacagcctttgtggttgaacatgatt

SEQ ID NO: 193032 - DNA, 26 bp, Artificial sequence
  SiRNA target sequence
acagcctttgtggttgaacatgattt

SEQ ID NO: 193033 - DNA, 26 bp, Artificial sequence
  SiRNA target sequence
cagcctttgtggttgaacatgattta

SEQ ID NO: 193034 - DNA, 26 bp, Artificial sequence
  SiRNA target sequence
agcctttgtggttgaacatgatttaa

SEQ ID NO: 193035 - DNA, 26 bp, Artificial sequence
  SiRNA target sequence
gcctttgtggttgaacatgatttaat

SEQ ID NO: 193036 - DNA, 26 bp, Artificial sequence
  SiRNA target sequence
cctttgtggttgaacatgatttaatt

SEQ ID NO: 193037 - DNA, 26 bp, Artificial sequence
  SiRNA target sequence
ctttgtggttgaacatgatttaattg

SEQ ID NO: 193038 - DNA, 26 bp, Artificial sequence
  SiRNA target sequence
tttgtggttgaacatgatttaattgt

SEQ ID NO: 193039 - DNA, 26 bp, Artificial sequence
  SiRNA target sequence
ttgtggttgaacatgatttaattgta

SEQ ID NO: 193040 - DNA, 26 bp, Artificial sequence
  SiRNA target sequence
tgtggttgaacatgatttaattgtag

SEQ ID NO: 193041 - DNA, 26 bp, Artificial sequence
  SiRNA target sequence
gtggttgaacatgatttaattgtagg

SEQ ID NO: 193042 - DNA, 26 bp, Artificial sequence
  SiRNA target sequence
tggttgaacatgatttaattgtaggt

SEQ ID NO: 193043 - DNA, 26 bp, Artificial sequence
  SiRNA target sequence
ggttgaacatgatttaattgtaggta

SEQ ID NO: 193044 - DNA, 26 bp, Artificial sequence
  SiRNA target sequence
gttgaacatgatttaattgtaggtac

SEQ ID NO: 193045 - DNA, 26 bp, Artificial sequence
  SiRNA target sequence
ttgaacatgatttaattgtaggtaca

SEQ ID NO: 193046 - DNA, 26 bp, Artificial sequence
  SiRNA target sequence
tgaacatgatttaattgtaggtacat

SEQ ID NO: 193047 - DNA, 26 bp, Artificial sequence
  SiRNA target sequence
gaacatgatttaattgtaggtacata

SEQ ID NO: 193048 - DNA, 26 bp, Artificial sequence
  SiRNA target sequence
aacatgatttaattgtaggtacatat

SEQ ID NO: 193049 - DNA, 26 bp, Artificial sequence
  SiRNA target sequence
acatgatttaattgtaggtacatatt

SEQ ID NO: 193050 - DNA, 26 bp, Artificial sequence
  SiRNA target sequence
catgatttaattgtaggtacatattt

SEQ ID NO: 193051 - DNA, 26 bp, Artificial sequence
  SiRNA target sequence
atgatttaattgtaggtacatatttg

SEQ ID NO: 193052 - DNA, 26 bp, Artificial sequence
  SiRNA target sequence
tgatttaattgtaggtacatatttgg

SEQ ID NO: 193053 - DNA, 26 bp, Artificial sequence
  SiRNA target sequence
gatttaattgtaggtacatatttggc

SEQ ID NO: 193054 - DNA, 26 bp, Artificial sequence
  SiRNA target sequence
atttaattgtaggtacatatttggct

SEQ ID NO: 193055 - DNA, 26 bp, Artificial sequence
  SiRNA target sequence
tttaattgtaggtacatatttggctg

SEQ ID NO: 193056 - DNA, 26 bp, Artificial sequence
  SiRNA target sequence
ttaattgtaggtacatatttggctga

SEQ ID NO: 193057 - DNA, 26 bp, Artificial sequence
  SiRNA target sequence
taattgtaggtacatatttggctgat

SEQ ID NO: 193058 - DNA, 26 bp, Artificial sequence
  SiRNA target sequence
aattgtaggtacatatttggctgata

SEQ ID NO: 193059 - DNA, 26 bp, Artificial sequence
  SiRNA target sequence
attgtaggtacatatttggctgataa

SEQ ID NO: 193060 - DNA, 26 bp, Artificial sequence
  SiRNA target sequence
ttgtaggtacatatttggctgataaa

SEQ ID NO: 193061 - DNA, 26 bp, Artificial sequence
  SiRNA target sequence
tgtaggtacatatttggctgataaag

SEQ ID NO: 193062 - DNA, 26 bp, Artificial sequence
  SiRNA target sequence
gtaggtacatatttggctgataaagt

SEQ ID NO: 193063 - DNA, 26 bp, Artificial sequence
  SiRNA target sequence
taggtacatatttggctgataaagtt

SEQ ID NO: 193064 - DNA, 26 bp, Artificial sequence
  SiRNA target sequence
aggtacatatttggctgataaagttg

SEQ ID NO: 193065 - DNA, 26 bp, Artificial sequence
  SiRNA target sequence
ggtacatatttggctgataaagttgt

SEQ ID NO: 193066 - DNA, 26 bp, Artificial sequence
  SiRNA target sequence
gtacatatttggctgataaagttgtt

SEQ ID NO: 193067 - DNA, 26 bp, Artificial sequence
  SiRNA target sequence
tacatatttggctgataaagttgttg

SEQ ID NO: 193068 - DNA, 26 bp, Artificial sequence
  SiRNA target sequence
acatatttggctgataaagttgttgt

SEQ ID NO: 193069 - DNA, 26 bp, Artificial sequence
  SiRNA target sequence
catatttggctgataaagttgttgtt

SEQ ID NO: 193070 - DNA, 26 bp, Artificial sequence
  SiRNA target sequence
atatttggctgataaagttgttgttt

SEQ ID NO: 193071 - DNA, 26 bp, Artificial sequence
  SiRNA target sequence
tatttggctgataaagttgttgtttt

SEQ ID NO: 193072 - DNA, 26 bp, Artificial sequence
  SiRNA target sequence
atttggctgataaagttgttgttttt

SEQ ID NO: 193073 - DNA, 26 bp, Artificial sequence
  SiRNA target sequence
tttggctgataaagttgttgtttttg

SEQ ID NO: 193074 - DNA, 26 bp, Artificial sequence
  SiRNA target sequence
ttggctgataaagttgttgtttttga

SEQ ID NO: 193075 - DNA, 26 bp, Artificial sequence
  SiRNA target sequence
tggctgataaagttgttgtttttgag

SEQ ID NO: 193076 - DNA, 26 bp, Artificial sequence
  SiRNA target sequence
ggctgataaagttgttgtttttgagg

SEQ ID NO: 193077 - DNA, 26 bp, Artificial sequence
  SiRNA target sequence
gctgataaagttgttgtttttgaggg

SEQ ID NO: 193078 - DNA, 26 bp, Artificial sequence
  SiRNA target sequence
ctgataaagttgttgtttttgaggga

SEQ ID NO: 193079 - DNA, 26 bp, Artificial sequence
  SiRNA target sequence
tgataaagttgttgtttttgagggaa

SEQ ID NO: 193080 - DNA, 26 bp, Artificial sequence
  SiRNA target sequence
gataaagttgttgtttttgagggaag

SEQ ID NO: 193081 - DNA, 26 bp, Artificial sequence
  SiRNA target sequence
ataaagttgttgtttttgagggaagc

SEQ ID NO: 193082 - DNA, 26 bp, Artificial sequence
  SiRNA target sequence
taaagttgttgtttttgagggaagcc

SEQ ID NO: 193083 - DNA, 26 bp, Artificial sequence
  SiRNA target sequence
aaagttgttgtttttgagggaagccc

SEQ ID NO: 193084 - DNA, 26 bp, Artificial sequence
  SiRNA target sequence
aagttgttgtttttgagggaagccct

SEQ ID NO: 193085 - DNA, 26 bp, Artificial sequence
  SiRNA target sequence
agttgttgtttttgagggaagcccta

SEQ ID NO: 193086 - DNA, 26 bp, Artificial sequence
  SiRNA target sequence
gttgttgtttttgagggaagccctag

SEQ ID NO: 193087 - DNA, 26 bp, Artificial sequence
  SiRNA target sequence
ttgttgtttttgagggaagccctagt

SEQ ID NO: 193088 - DNA, 26 bp, Artificial sequence
  SiRNA target sequence
tgttgtttttgagggaagccctagtg

SEQ ID NO: 193089 - DNA, 26 bp, Artificial sequence
  SiRNA target sequence
gttgtttttgagggaagccctagtgt

SEQ ID NO: 193090 - DNA, 26 bp, Artificial sequence
  SiRNA target sequence
ttgtttttgagggaagccctagtgtt

SEQ ID NO: 193091 - DNA, 26 bp, Artificial sequence
  SiRNA target sequence
tgtttttgagggaagccctagtgttc

SEQ ID NO: 193092 - DNA, 26 bp, Artificial sequence
  SiRNA target sequence
gtttttgagggaagccctagtgttca

SEQ ID NO: 193093 - DNA, 26 bp, Artificial sequence
  SiRNA target sequence
tttttgagggaagccctagtgttcat

SEQ ID NO: 193094 - DNA, 26 bp, Artificial sequence
  SiRNA target sequence
ttttgagggaagccctagtgttcata

SEQ ID NO: 193095 - DNA, 26 bp, Artificial sequence
  SiRNA target sequence
tttgagggaagccctagtgttcatag

SEQ ID NO: 193096 - DNA, 26 bp, Artificial sequence
  SiRNA target sequence
ttgagggaagccctagtgttcatagc

SEQ ID NO: 193097 - DNA, 26 bp, Artificial sequence
  SiRNA target sequence
tgagggaagccctagtgttcatagca

SEQ ID NO: 193098 - DNA, 26 bp, Artificial sequence
  SiRNA target sequence
gagggaagccctagtgttcatagcac

SEQ ID NO: 193099 - DNA, 26 bp, Artificial sequence
  SiRNA target sequence
agggaagccctagtgttcatagcact

SEQ ID NO: 193100 - DNA, 26 bp, Artificial sequence
  SiRNA target sequence
gggaagccctagtgttcatagcactg

SEQ ID NO: 193101 - DNA, 26 bp, Artificial sequence
  SiRNA target sequence
ggaagccctagtgttcatagcactgc

SEQ ID NO: 193102 - DNA, 26 bp, Artificial sequence
  SiRNA target sequence
gaagccctagtgttcatagcactgct

SEQ ID NO: 193103 - DNA, 26 bp, Artificial sequence
  SiRNA target sequence
aagccctagtgttcatagcactgctc

SEQ ID NO: 193104 - DNA, 26 bp, Artificial sequence
  SiRNA target sequence
agccctagtgttcatagcactgctca

SEQ ID NO: 193105 - DNA, 26 bp, Artificial sequence
  SiRNA target sequence
gccctagtgttcatagcactgctcat

SEQ ID NO: 193106 - DNA, 26 bp, Artificial sequence
  SiRNA target sequence
ccctagtgttcatagcactgctcata

SEQ ID NO: 193107 - DNA, 26 bp, Artificial sequence
  SiRNA target sequence
cctagtgttcatagcactgctcataa

SEQ ID NO: 193108 - DNA, 26 bp, Artificial sequence
  SiRNA target sequence
ctagtgttcatagcactgctcataaa

SEQ ID NO: 193109 - DNA, 26 bp, Artificial sequence
  SiRNA target sequence
tagtgttcatagcactgctcataaac

SEQ ID NO: 193110 - DNA, 26 bp, Artificial sequence
  SiRNA target sequence
agtgttcatagcactgctcataaacc

SEQ ID NO: 193111 - DNA, 26 bp, Artificial sequence
  SiRNA target sequence
gtgttcatagcactgctcataaaccg

SEQ ID NO: 193112 - DNA, 26 bp, Artificial sequence
  SiRNA target sequence
tgttcatagcactgctcataaaccga

SEQ ID NO: 193113 - DNA, 26 bp, Artificial sequence
  SiRNA target sequence
gttcatagcactgctcataaaccgat

SEQ ID NO: 193114 - DNA, 26 bp, Artificial sequence
  SiRNA target sequence
ttcatagcactgctcataaaccgatg

SEQ ID NO: 193115 - DNA, 26 bp, Artificial sequence
  SiRNA target sequence
tcatagcactgctcataaaccgatgg

SEQ ID NO: 193116 - DNA, 26 bp, Artificial sequence
  SiRNA target sequence
catagcactgctcataaaccgatgga

SEQ ID NO: 193117 - DNA, 26 bp, Artificial sequence
  SiRNA target sequence
atagcactgctcataaaccgatggat

SEQ ID NO: 193118 - DNA, 26 bp, Artificial sequence
  SiRNA target sequence
tagcactgctcataaaccgatggatt

SEQ ID NO: 193119 - DNA, 26 bp, Artificial sequence
  SiRNA target sequence
agcactgctcataaaccgatggattt

SEQ ID NO: 193120 - DNA, 26 bp, Artificial sequence
  SiRNA target sequence
gcactgctcataaaccgatggatttg

SEQ ID NO: 193121 - DNA, 26 bp, Artificial sequence
  SiRNA target sequence
cactgctcataaaccgatggatttgc

SEQ ID NO: 193122 - DNA, 26 bp, Artificial sequence
  SiRNA target sequence
actgctcataaaccgatggatttgca

SEQ ID NO: 193123 - DNA, 26 bp, Artificial sequence
  SiRNA target sequence
ctgctcataaaccgatggatttgcat

SEQ ID NO: 193124 - DNA, 26 bp, Artificial sequence
  SiRNA target sequence
tgctcataaaccgatggatttgcata

SEQ ID NO: 193125 - DNA, 26 bp, Artificial sequence
  SiRNA target sequence
gctcataaaccgatggatttgcatag

SEQ ID NO: 193126 - DNA, 26 bp, Artificial sequence
  SiRNA target sequence
ctcataaaccgatggatttgcatagt

SEQ ID NO: 193127 - DNA, 26 bp, Artificial sequence
  SiRNA target sequence
tcataaaccgatggatttgcatagtg

SEQ ID NO: 193128 - DNA, 26 bp, Artificial sequence
  SiRNA target sequence
cataaaccgatggatttgcatagtgg

SEQ ID NO: 193129 - DNA, 26 bp, Artificial sequence
  SiRNA target sequence
ataaaccgatggatttgcatagtgga

SEQ ID NO: 193130 - DNA, 26 bp, Artificial sequence
  SiRNA target sequence
taaaccgatggatttgcatagtggaa

SEQ ID NO: 193131 - DNA, 26 bp, Artificial sequence
  SiRNA target sequence
aaaccgatggatttgcatagtggaat

SEQ ID NO: 193132 - DNA, 26 bp, Artificial sequence
  SiRNA target sequence
aaccgatggatttgcatagtggaatg

SEQ ID NO: 193133 - DNA, 26 bp, Artificial sequence
  SiRNA target sequence
accgatggatttgcatagtggaatga

SEQ ID NO: 193134 - DNA, 26 bp, Artificial sequence
  SiRNA target sequence
ccgatggatttgcatagtggaatgaa

SEQ ID NO: 193135 - DNA, 26 bp, Artificial sequence
  SiRNA target sequence
cgatggatttgcatagtggaatgaat

SEQ ID NO: 193136 - DNA, 26 bp, Artificial sequence
  SiRNA target sequence
gatggatttgcatagtggaatgaata

SEQ ID NO: 193137 - DNA, 26 bp, Artificial sequence
  SiRNA target sequence
atggatttgcatagtggaatgaatat

SEQ ID NO: 193138 - DNA, 26 bp, Artificial sequence
  SiRNA target sequence
tggatttgcatagtggaatgaatatt

SEQ ID NO: 193139 - DNA, 26 bp, Artificial sequence
  SiRNA target sequence
ggatttgcatagtggaatgaatattt

SEQ ID NO: 193140 - DNA, 26 bp, Artificial sequence
  SiRNA target sequence
gatttgcatagtggaatgaatatttt

SEQ ID NO: 193141 - DNA, 26 bp, Artificial sequence
  SiRNA target sequence
atttgcatagtggaatgaatattttt

SEQ ID NO: 193142 - DNA, 26 bp, Artificial sequence
  SiRNA target sequence
tttgcatagtggaatgaatatttttt

SEQ ID NO: 193143 - DNA, 26 bp, Artificial sequence
  SiRNA target sequence
ttgcatagtggaatgaatattttttt

SEQ ID NO: 193144 - DNA, 26 bp, Artificial sequence
  SiRNA target sequence
tgcatagtggaatgaatattttttta

SEQ ID NO: 193145 - DNA, 26 bp, Artificial sequence
  SiRNA target sequence
gcatagtggaatgaatatttttttaa

SEQ ID NO: 193146 - DNA, 26 bp, Artificial sequence
  SiRNA target sequence
catagtggaatgaatatttttttaaa

SEQ ID NO: 193147 - DNA, 26 bp, Artificial sequence
  SiRNA target sequence
atagtggaatgaatatttttttaaag

SEQ ID NO: 193148 - DNA, 26 bp, Artificial sequence
  SiRNA target sequence
tagtggaatgaatatttttttaaaga

SEQ ID NO: 193149 - DNA, 26 bp, Artificial sequence
  SiRNA target sequence
agtggaatgaatatttttttaaagaa

SEQ ID NO: 193150 - DNA, 26 bp, Artificial sequence
  SiRNA target sequence
gtggaatgaatatttttttaaagaat

SEQ ID NO: 193151 - DNA, 26 bp, Artificial sequence
  SiRNA target sequence
tggaatgaatatttttttaaagaatc

SEQ ID NO: 193152 - DNA, 26 bp, Artificial sequence
  SiRNA target sequence
ggaatgaatatttttttaaagaatct

SEQ ID NO: 193153 - DNA, 26 bp, Artificial sequence
  SiRNA target sequence
gaatgaatatttttttaaagaatctt

SEQ ID NO: 193154 - DNA, 26 bp, Artificial sequence
  SiRNA target sequence
aatgaatatttttttaaagaatcttg

SEQ ID NO: 193155 - DNA, 26 bp, Artificial sequence
  SiRNA target sequence
atgaatatttttttaaagaatcttga

SEQ ID NO: 193156 - DNA, 26 bp, Artificial sequence
  SiRNA target sequence
tgaatatttttttaaagaatcttgat

SEQ ID NO: 193157 - DNA, 26 bp, Artificial sequence
  SiRNA target sequence
gaatatttttttaaagaatcttgata

SEQ ID NO: 193158 - DNA, 26 bp, Artificial sequence
  SiRNA target sequence
aatatttttttaaagaatcttgatat

SEQ ID NO: 193159 - DNA, 26 bp, Artificial sequence
  SiRNA target sequence
atatttttttaaagaatcttgatatt

SEQ ID NO: 193160 - DNA, 26 bp, Artificial sequence
  SiRNA target sequence
tatttttttaaagaatcttgatatta

SEQ ID NO: 193161 - DNA, 26 bp, Artificial sequence
  SiRNA target sequence
atttttttaaagaatcttgatattac

SEQ ID NO: 193162 - DNA, 26 bp, Artificial sequence
  SiRNA target sequence
tttttttaaagaatcttgatattact

SEQ ID NO: 193163 - DNA, 26 bp, Artificial sequence
  SiRNA target sequence
ttttttaaagaatcttgatattactt

SEQ ID NO: 193164 - DNA, 26 bp, Artificial sequence
  SiRNA target sequence
tttttaaagaatcttgatattacttt

SEQ ID NO: 193165 - DNA, 26 bp, Artificial sequence
  SiRNA target sequence
ttttaaagaatcttgatattactttt

SEQ ID NO: 193166 - DNA, 26 bp, Artificial sequence
  SiRNA target sequence
tttaaagaatcttgatattactttta

SEQ ID NO: 193167 - DNA, 26 bp, Artificial sequence
  SiRNA target sequence
ttaaagaatcttgatattacttttag

SEQ ID NO: 193168 - DNA, 26 bp, Artificial sequence
  SiRNA target sequence
taaagaatcttgatattacttttaga

SEQ ID NO: 193169 - DNA, 26 bp, Artificial sequence
  SiRNA target sequence
aaagaatcttgatattacttttagaa

SEQ ID NO: 193170 - DNA, 26 bp, Artificial sequence
  SiRNA target sequence
aagaatcttgatattacttttagaag

SEQ ID NO: 193171 - DNA, 26 bp, Artificial sequence
  SiRNA target sequence
agaatcttgatattacttttagaaga

SEQ ID NO: 193172 - DNA, 26 bp, Artificial sequence
  SiRNA target sequence
gaatcttgatattacttttagaagag

SEQ ID NO: 193173 - DNA, 26 bp, Artificial sequence
  SiRNA target sequence
aatcttgatattacttttagaagaga

SEQ ID NO: 193174 - DNA, 26 bp, Artificial sequence
  SiRNA target sequence
atcttgatattacttttagaagagac

SEQ ID NO: 193175 - DNA, 26 bp, Artificial sequence
  SiRNA target sequence
tcttgatattacttttagaagagact

SEQ ID NO: 193176 - DNA, 26 bp, Artificial sequence
  SiRNA target sequence
cttgatattacttttagaagagactc

SEQ ID NO: 193177 - DNA, 26 bp, Artificial sequence
  SiRNA target sequence
ttgatattacttttagaagagactct

SEQ ID NO: 193178 - DNA, 26 bp, Artificial sequence
  SiRNA target sequence
tgatattacttttagaagagactctt

SEQ ID NO: 193179 - DNA, 26 bp, Artificial sequence
  SiRNA target sequence
gatattacttttagaagagactcttc

SEQ ID NO: 193180 - DNA, 26 bp, Artificial sequence
  SiRNA target sequence
atattacttttagaagagactcttcc

SEQ ID NO: 193181 - DNA, 26 bp, Artificial sequence
  SiRNA target sequence
tattacttttagaagagactcttcca

SEQ ID NO: 193182 - DNA, 26 bp, Artificial sequence
  SiRNA target sequence
attacttttagaagagactcttccaa

SEQ ID NO: 193183 - DNA, 26 bp, Artificial sequence
  SiRNA target sequence
ttacttttagaagagactcttccaat

SEQ ID NO: 193184 - DNA, 26 bp, Artificial sequence
  SiRNA target sequence
tacttttagaagagactcttccaatt

SEQ ID NO: 193185 - DNA, 26 bp, Artificial sequence
  SiRNA target sequence
acttttagaagagactcttccaattt

SEQ ID NO: 193186 - DNA, 26 bp, Artificial sequence
  SiRNA target sequence
cttttagaagagactcttccaatttt

SEQ ID NO: 193187 - DNA, 26 bp, Artificial sequence
  SiRNA target sequence
ttttagaagagactcttccaatttta

SEQ ID NO: 193188 - DNA, 26 bp, Artificial sequence
  SiRNA target sequence
tttagaagagactcttccaattttag

SEQ ID NO: 193189 - DNA, 26 bp, Artificial sequence
  SiRNA target sequence
ttagaagagactcttccaattttaga

SEQ ID NO: 193190 - DNA, 26 bp, Artificial sequence
  SiRNA target sequence
tagaagagactcttccaattttagac

SEQ ID NO: 193191 - DNA, 26 bp, Artificial sequence
  SiRNA target sequence
agaagagactcttccaattttagacc

SEQ ID NO: 193192 - DNA, 26 bp, Artificial sequence
  SiRNA target sequence
gaagagactcttccaattttagacca

SEQ ID NO: 193193 - DNA, 26 bp, Artificial sequence
  SiRNA target sequence
aagagactcttccaattttagaccaa

SEQ ID NO: 193194 - DNA, 26 bp, Artificial sequence
  SiRNA target sequence
agagactcttccaattttagaccaag

SEQ ID NO: 193195 - DNA, 26 bp, Artificial sequence
  SiRNA target sequence
gagactcttccaattttagaccaaga

SEQ ID NO: 193196 - DNA, 26 bp, Artificial sequence
  SiRNA target sequence
agactcttccaattttagaccaagag

SEQ ID NO: 193197 - DNA, 26 bp, Artificial sequence
  SiRNA target sequence
gactcttccaattttagaccaagagt

SEQ ID NO: 193198 - DNA, 26 bp, Artificial sequence
  SiRNA target sequence
actcttccaattttagaccaagagtt

SEQ ID NO: 193199 - DNA, 26 bp, Artificial sequence
  SiRNA target sequence
ctcttccaattttagaccaagagtta

SEQ ID NO: 193200 - DNA, 26 bp, Artificial sequence
  SiRNA target sequence
tcttccaattttagaccaagagttaa

SEQ ID NO: 193201 - DNA, 26 bp, Artificial sequence
  SiRNA target sequence
cttccaattttagaccaagagttaat

SEQ ID NO: 193202 - DNA, 26 bp, Artificial sequence
  SiRNA target sequence
ttccaattttagaccaagagttaata

SEQ ID NO: 193203 - DNA, 26 bp, Artificial sequence
  SiRNA target sequence
tccaattttagaccaagagttaataa

SEQ ID NO: 193204 - DNA, 26 bp, Artificial sequence
  SiRNA target sequence
ccaattttagaccaagagttaataag

SEQ ID NO: 193205 - DNA, 26 bp, Artificial sequence
  SiRNA target sequence
caattttagaccaagagttaataagc

SEQ ID NO: 193206 - DNA, 26 bp, Artificial sequence
  SiRNA target sequence
aattttagaccaagagttaataagcc

SEQ ID NO: 193207 - DNA, 26 bp, Artificial sequence
  SiRNA target sequence
attttagaccaagagttaataagccg

SEQ ID NO: 193208 - DNA, 26 bp, Artificial sequence
  SiRNA target sequence
ttttagaccaagagttaataagccga

SEQ ID NO: 193209 - DNA, 26 bp, Artificial sequence
  SiRNA target sequence
tttagaccaagagttaataagccgaa

SEQ ID NO: 193210 - DNA, 26 bp, Artificial sequence
  SiRNA target sequence
ttagaccaagagttaataagccgaat

SEQ ID NO: 193211 - DNA, 26 bp, Artificial sequence
  SiRNA target sequence
tagaccaagagttaataagccgaatt

SEQ ID NO: 193212 - DNA, 26 bp, Artificial sequence
  SiRNA target sequence
agaccaagagttaataagccgaattc

SEQ ID NO: 193213 - DNA, 26 bp, Artificial sequence
  SiRNA target sequence
gaccaagagttaataagccgaattcc

SEQ ID NO: 193214 - DNA, 26 bp, Artificial sequence
  SiRNA target sequence
accaagagttaataagccgaattccg

SEQ ID NO: 193215 - DNA, 26 bp, Artificial sequence
  SiRNA target sequence
ccaagagttaataagccgaattccgc

SEQ ID NO: 193216 - DNA, 26 bp, Artificial sequence
  SiRNA target sequence
caagagttaataagccgaattccgca

SEQ ID NO: 193217 - DNA, 26 bp, Artificial sequence
  SiRNA target sequence
aagagttaataagccgaattccgcaa

SEQ ID NO: 193218 - DNA, 26 bp, Artificial sequence
  SiRNA target sequence
agagttaataagccgaattccgcaaa

SEQ ID NO: 193219 - DNA, 26 bp, Artificial sequence
  SiRNA target sequence
gagttaataagccgaattccgcaaaa

SEQ ID NO: 193220 - DNA, 26 bp, Artificial sequence
  SiRNA target sequence
agttaataagccgaattccgcaaaag

SEQ ID NO: 193221 - DNA, 26 bp, Artificial sequence
  SiRNA target sequence
gttaataagccgaattccgcaaaaga

SEQ ID NO: 193222 - DNA, 26 bp, Artificial sequence
  SiRNA target sequence
ttaataagccgaattccgcaaaagac

SEQ ID NO: 193223 - DNA, 26 bp, Artificial sequence
  SiRNA target sequence
taataagccgaattccgcaaaagaca

SEQ ID NO: 193224 - DNA, 26 bp, Artificial sequence
  SiRNA target sequence
aataagccgaattccgcaaaagacag

SEQ ID NO: 193225 - DNA, 26 bp, Artificial sequence
  SiRNA target sequence
ataagccgaattccgcaaaagacaga

SEQ ID NO: 193226 - DNA, 26 bp, Artificial sequence
  SiRNA target sequence
taagccgaattccgcaaaagacagaa

SEQ ID NO: 193227 - DNA, 26 bp, Artificial sequence
  SiRNA target sequence
aagccgaattccgcaaaagacagaac

SEQ ID NO: 193228 - DNA, 26 bp, Artificial sequence
  SiRNA target sequence
agccgaattccgcaaaagacagaact

SEQ ID NO: 193229 - DNA, 26 bp, Artificial sequence
  SiRNA target sequence
gccgaattccgcaaaagacagaactc

SEQ ID NO: 193230 - DNA, 26 bp, Artificial sequence
  SiRNA target sequence
ccgaattccgcaaaagacagaactca

SEQ ID NO: 193231 - DNA, 26 bp, Artificial sequence
  SiRNA target sequence
cgaattccgcaaaagacagaactcag

SEQ ID NO: 193232 - DNA, 26 bp, Artificial sequence
  SiRNA target sequence
gaattccgcaaaagacagaactcaga

SEQ ID NO: 193233 - DNA, 26 bp, Artificial sequence
  SiRNA target sequence
aattccgcaaaagacagaactcagaa

SEQ ID NO: 193234 - DNA, 26 bp, Artificial sequence
  SiRNA target sequence
attccgcaaaagacagaactcagaaa

SEQ ID NO: 193235 - DNA, 26 bp, Artificial sequence
  SiRNA target sequence
ttccgcaaaagacagaactcagaaag

SEQ ID NO: 193236 - DNA, 26 bp, Artificial sequence
  SiRNA target sequence
tccgcaaaagacagaactcagaaaga

SEQ ID NO: 193237 - DNA, 26 bp, Artificial sequence
  SiRNA target sequence
ccgcaaaagacagaactcagaaagaa

SEQ ID NO: 193238 - DNA, 26 bp, Artificial sequence
  SiRNA target sequence
cgcaaaagacagaactcagaaagaag

SEQ ID NO: 193239 - DNA, 26 bp, Artificial sequence
  SiRNA target sequence
gcaaaagacagaactcagaaagaaga

SEQ ID NO: 193240 - DNA, 26 bp, Artificial sequence
  SiRNA target sequence
caaaagacagaactcagaaagaagag

SEQ ID NO: 193241 - DNA, 26 bp, Artificial sequence
  SiRNA target sequence
aaaagacagaactcagaaagaagaga

SEQ ID NO: 193242 - DNA, 26 bp, Artificial sequence
  SiRNA target sequence
aaagacagaactcagaaagaagagaa

SEQ ID NO: 193243 - DNA, 26 bp, Artificial sequence
  SiRNA target sequence
aagacagaactcagaaagaagagaat

SEQ ID NO: 193244 - DNA, 26 bp, Artificial sequence
  SiRNA target sequence
agacagaactcagaaagaagagaata

SEQ ID NO: 193245 - DNA, 26 bp, Artificial sequence
  SiRNA target sequence
gacagaactcagaaagaagagaataa

SEQ ID NO: 193246 - DNA, 26 bp, Artificial sequence
  SiRNA target sequence
acagaactcagaaagaagagaataaa

SEQ ID NO: 193247 - DNA, 26 bp, Artificial sequence
  SiRNA target sequence
cagaactcagaaagaagagaataaat

SEQ ID NO: 193248 - DNA, 26 bp, Artificial sequence
  SiRNA target sequence
agaactcagaaagaagagaataaata

SEQ ID NO: 193249 - DNA, 26 bp, Artificial sequence
  SiRNA target sequence
gaactcagaaagaagagaataaatat

SEQ ID NO: 193250 - DNA, 26 bp, Artificial sequence
  SiRNA target sequence
aactcagaaagaagagaataaatatt

SEQ ID NO: 193251 - DNA, 26 bp, Artificial sequence
  SiRNA target sequence
actcagaaagaagagaataaatattt

SEQ ID NO: 193252 - DNA, 26 bp, Artificial sequence
  SiRNA target sequence
ctcagaaagaagagaataaatatttt

SEQ ID NO: 193253 - DNA, 26 bp, Artificial sequence
  SiRNA target sequence
tcagaaagaagagaataaatattttt

SEQ ID NO: 193254 - DNA, 26 bp, Artificial sequence
  SiRNA target sequence
cagaaagaagagaataaatatttttt

SEQ ID NO: 193255 - DNA, 26 bp, Artificial sequence
  SiRNA target sequence
agaaagaagagaataaatattttttt

SEQ ID NO: 193256 - DNA, 26 bp, Artificial sequence
  SiRNA target sequence
gaaagaagagaataaatatttttttt

SEQ ID NO: 193257 - DNA, 26 bp, Artificial sequence
  SiRNA target sequence
aaagaagagaataaatattttttttg

SEQ ID NO: 193258 - DNA, 26 bp, Artificial sequence
  SiRNA target sequence
aagaagagaataaatattttttttga

SEQ ID NO: 193259 - DNA, 27 bp, Artificial sequence
  SiRNA target sequence
atggccaagaatgaatctaataaaata

SEQ ID NO: 193260 - DNA, 27 bp, Artificial sequence
  SiRNA target sequence
tggccaagaatgaatctaataaaataa

SEQ ID NO: 193261 - DNA, 27 bp, Artificial sequence
  SiRNA target sequence
ggccaagaatgaatctaataaaataac

SEQ ID NO: 193262 - DNA, 27 bp, Artificial sequence
  SiRNA target sequence
gccaagaatgaatctaataaaataacg

SEQ ID NO: 193263 - DNA, 27 bp, Artificial sequence
  SiRNA target sequence
ccaagaatgaatctaataaaataacga

SEQ ID NO: 193264 - DNA, 27 bp, Artificial sequence
  SiRNA target sequence
caagaatgaatctaataaaataacgag

SEQ ID NO: 193265 - DNA, 27 bp, Artificial sequence
  SiRNA target sequence
aagaatgaatctaataaaataacgaga

SEQ ID NO: 193266 - DNA, 27 bp, Artificial sequence
  SiRNA target sequence
agaatgaatctaataaaataacgagac

SEQ ID NO: 193267 - DNA, 27 bp, Artificial sequence
  SiRNA target sequence
gaatgaatctaataaaataacgagact

SEQ ID NO: 193268 - DNA, 27 bp, Artificial sequence
  SiRNA target sequence
aatgaatctaataaaataacgagactg

SEQ ID NO: 193269 - DNA, 27 bp, Artificial sequence
  SiRNA target sequence
atgaatctaataaaataacgagactgg

SEQ ID NO: 193270 - DNA, 27 bp, Artificial sequence
  SiRNA target sequence
tgaatctaataaaataacgagactggc

SEQ ID NO: 193271 - DNA, 27 bp, Artificial sequence
  SiRNA target sequence
gaatctaataaaataacgagactggca

SEQ ID NO: 193272 - DNA, 27 bp, Artificial sequence
  SiRNA target sequence
aatctaataaaataacgagactggcaa

SEQ ID NO: 193273 - DNA, 27 bp, Artificial sequence
  SiRNA target sequence
atctaataaaataacgagactggcaat

SEQ ID NO: 193274 - DNA, 27 bp, Artificial sequence
  SiRNA target sequence
tctaataaaataacgagactggcaatt

SEQ ID NO: 193275 - DNA, 27 bp, Artificial sequence
  SiRNA target sequence
ctaataaaataacgagactggcaattg

SEQ ID NO: 193276 - DNA, 27 bp, Artificial sequence
  SiRNA target sequence
taataaaataacgagactggcaattgt

SEQ ID NO: 193277 - DNA, 27 bp, Artificial sequence
  SiRNA target sequence
aataaaataacgagactggcaattgtt

SEQ ID NO: 193278 - DNA, 27 bp, Artificial sequence
  SiRNA target sequence
ataaaataacgagactggcaattgtta

SEQ ID NO: 193279 - DNA, 27 bp, Artificial sequence
  SiRNA target sequence
taaaataacgagactggcaattgttaa

SEQ ID NO: 193280 - DNA, 27 bp, Artificial sequence
  SiRNA target sequence
aaaataacgagactggcaattgttaat

SEQ ID NO: 193281 - DNA, 27 bp, Artificial sequence
  SiRNA target sequence
aaataacgagactggcaattgttaatt

SEQ ID NO: 193282 - DNA, 27 bp, Artificial sequence
  SiRNA target sequence
aataacgagactggcaattgttaatta

SEQ ID NO: 193283 - DNA, 27 bp, Artificial sequence
  SiRNA target sequence
ataacgagactggcaattgttaattat

SEQ ID NO: 193284 - DNA, 27 bp, Artificial sequence
  SiRNA target sequence
taacgagactggcaattgttaattatg

SEQ ID NO: 193285 - DNA, 27 bp, Artificial sequence
  SiRNA target sequence
aacgagactggcaattgttaattatga

SEQ ID NO: 193286 - DNA, 27 bp, Artificial sequence
  SiRNA target sequence
acgagactggcaattgttaattatgaa

SEQ ID NO: 193287 - DNA, 27 bp, Artificial sequence
  SiRNA target sequence
cgagactggcaattgttaattatgaac

SEQ ID NO: 193288 - DNA, 27 bp, Artificial sequence
  SiRNA target sequence
gagactggcaattgttaattatgaact

SEQ ID NO: 193289 - DNA, 27 bp, Artificial sequence
  SiRNA target sequence
agactggcaattgttaattatgaacta

SEQ ID NO: 193290 - DNA, 27 bp, Artificial sequence
  SiRNA target sequence
gactggcaattgttaattatgaactat

SEQ ID NO: 193291 - DNA, 27 bp, Artificial sequence
  SiRNA target sequence
actggcaattgttaattatgaactatg

SEQ ID NO: 193292 - DNA, 27 bp, Artificial sequence
  SiRNA target sequence
ctggcaattgttaattatgaactatgt

SEQ ID NO: 193293 - DNA, 27 bp, Artificial sequence
  SiRNA target sequence
tggcaattgttaattatgaactatgta

SEQ ID NO: 193294 - DNA, 27 bp, Artificial sequence
  SiRNA target sequence
ggcaattgttaattatgaactatgtaa

SEQ ID NO: 193295 - DNA, 27 bp, Artificial sequence
  SiRNA target sequence
gcaattgttaattatgaactatgtaaa

SEQ ID NO: 193296 - DNA, 27 bp, Artificial sequence
  SiRNA target sequence
caattgttaattatgaactatgtaaac

SEQ ID NO: 193297 - DNA, 27 bp, Artificial sequence
  SiRNA target sequence
aattgttaattatgaactatgtaaacc

SEQ ID NO: 193298 - DNA, 27 bp, Artificial sequence
  SiRNA target sequence
attgttaattatgaactatgtaaaccg

SEQ ID NO: 193299 - DNA, 27 bp, Artificial sequence
  SiRNA target sequence
ttgttaattatgaactatgtaaaccga

SEQ ID NO: 193300 - DNA, 27 bp, Artificial sequence
  SiRNA target sequence
tgttaattatgaactatgtaaaccgaa

SEQ ID NO: 193301 - DNA, 27 bp, Artificial sequence
  SiRNA target sequence
gttaattatgaactatgtaaaccgaag

SEQ ID NO: 193302 - DNA, 27 bp, Artificial sequence
  SiRNA target sequence
ttaattatgaactatgtaaaccgaagg

SEQ ID NO: 193303 - DNA, 27 bp, Artificial sequence
  SiRNA target sequence
taattatgaactatgtaaaccgaagga

SEQ ID NO: 193304 - DNA, 27 bp, Artificial sequence
  SiRNA target sequence
aattatgaactatgtaaaccgaaggaa

SEQ ID NO: 193305 - DNA, 27 bp, Artificial sequence
  SiRNA target sequence
attatgaactatgtaaaccgaaggaat

SEQ ID NO: 193306 - DNA, 27 bp, Artificial sequence
  SiRNA target sequence
ttatgaactatgtaaaccgaaggaatg

SEQ ID NO: 193307 - DNA, 27 bp, Artificial sequence
  SiRNA target sequence
tatgaactatgtaaaccgaaggaatgt

SEQ ID NO: 193308 - DNA, 27 bp, Artificial sequence
  SiRNA target sequence
atgaactatgtaaaccgaaggaatgta

SEQ ID NO: 193309 - DNA, 27 bp, Artificial sequence
  SiRNA target sequence
tgaactatgtaaaccgaaggaatgtat

SEQ ID NO: 193310 - DNA, 27 bp, Artificial sequence
  SiRNA target sequence
gaactatgtaaaccgaaggaatgtatg

SEQ ID NO: 193311 - DNA, 27 bp, Artificial sequence
  SiRNA target sequence
aactatgtaaaccgaaggaatgtatgt

SEQ ID NO: 193312 - DNA, 27 bp, Artificial sequence
  SiRNA target sequence
actatgtaaaccgaaggaatgtatgtc

SEQ ID NO: 193313 - DNA, 27 bp, Artificial sequence
  SiRNA target sequence
ctatgtaaaccgaaggaatgtatgtca

SEQ ID NO: 193314 - DNA, 27 bp, Artificial sequence
  SiRNA target sequence
tatgtaaaccgaaggaatgtatgtcag

SEQ ID NO: 193315 - DNA, 27 bp, Artificial sequence
  SiRNA target sequence
atgtaaaccgaaggaatgtatgtcaga

SEQ ID NO: 193316 - DNA, 27 bp, Artificial sequence
  SiRNA target sequence
tgtaaaccgaaggaatgtatgtcagaa

SEQ ID NO: 193317 - DNA, 27 bp, Artificial sequence
  SiRNA target sequence
gtaaaccgaaggaatgtatgtcagaat

SEQ ID NO: 193318 - DNA, 27 bp, Artificial sequence
  SiRNA target sequence
taaaccgaaggaatgtatgtcagaatg

SEQ ID NO: 193319 - DNA, 27 bp, Artificial sequence
  SiRNA target sequence
aaaccgaaggaatgtatgtcagaatgt

SEQ ID NO: 193320 - DNA, 27 bp, Artificial sequence
  SiRNA target sequence
aaccgaaggaatgtatgtcagaatgta

SEQ ID NO: 193321 - DNA, 27 bp, Artificial sequence
  SiRNA target sequence
accgaaggaatgtatgtcagaatgtaa

SEQ ID NO: 193322 - DNA, 27 bp, Artificial sequence
  SiRNA target sequence
ccgaaggaatgtatgtcagaatgtaaa

SEQ ID NO: 193323 - DNA, 27 bp, Artificial sequence
  SiRNA target sequence
cgaaggaatgtatgtcagaatgtaaaa

SEQ ID NO: 193324 - DNA, 27 bp, Artificial sequence
  SiRNA target sequence
gaaggaatgtatgtcagaatgtaaaaa

SEQ ID NO: 193325 - DNA, 27 bp, Artificial sequence
  SiRNA target sequence
aaggaatgtatgtcagaatgtaaaaag

SEQ ID NO: 193326 - DNA, 27 bp, Artificial sequence
  SiRNA target sequence
aggaatgtatgtcagaatgtaaaaagg

SEQ ID NO: 193327 - DNA, 27 bp, Artificial sequence
  SiRNA target sequence
ggaatgtatgtcagaatgtaaaaaggc

SEQ ID NO: 193328 - DNA, 27 bp, Artificial sequence
  SiRNA target sequence
gaatgtatgtcagaatgtaaaaaggcg

SEQ ID NO: 193329 - DNA, 27 bp, Artificial sequence
  SiRNA target sequence
aatgtatgtcagaatgtaaaaaggcgt

SEQ ID NO: 193330 - DNA, 27 bp, Artificial sequence
  SiRNA target sequence
atgtatgtcagaatgtaaaaaggcgtg

SEQ ID NO: 193331 - DNA, 27 bp, Artificial sequence
  SiRNA target sequence
tgtatgtcagaatgtaaaaaggcgtgt

SEQ ID NO: 193332 - DNA, 27 bp, Artificial sequence
  SiRNA target sequence
gtatgtcagaatgtaaaaaggcgtgtc

SEQ ID NO: 193333 - DNA, 27 bp, Artificial sequence
  SiRNA target sequence
tatgtcagaatgtaaaaaggcgtgtcc

SEQ ID NO: 193334 - DNA, 27 bp, Artificial sequence
  SiRNA target sequence
atgtcagaatgtaaaaaggcgtgtcct

SEQ ID NO: 193335 - DNA, 27 bp, Artificial sequence
  SiRNA target sequence
tgtcagaatgtaaaaaggcgtgtcctg

SEQ ID NO: 193336 - DNA, 27 bp, Artificial sequence
  SiRNA target sequence
gtcagaatgtaaaaaggcgtgtcctgt

SEQ ID NO: 193337 - DNA, 27 bp, Artificial sequence
  SiRNA target sequence
tcagaatgtaaaaaggcgtgtcctgtt

SEQ ID NO: 193338 - DNA, 27 bp, Artificial sequence
  SiRNA target sequence
cagaatgtaaaaaggcgtgtcctgtta

SEQ ID NO: 193339 - DNA, 27 bp, Artificial sequence
  SiRNA target sequence
agaatgtaaaaaggcgtgtcctgttaa

SEQ ID NO: 193340 - DNA, 27 bp, Artificial sequence
  SiRNA target sequence
gaatgtaaaaaggcgtgtcctgttaat

SEQ ID NO: 193341 - DNA, 27 bp, Artificial sequence
  SiRNA target sequence
aatgtaaaaaggcgtgtcctgttaata

SEQ ID NO: 193342 - DNA, 27 bp, Artificial sequence
  SiRNA target sequence
atgtaaaaaggcgtgtcctgttaataa

SEQ ID NO: 193343 - DNA, 27 bp, Artificial sequence
  SiRNA target sequence
tgtaaaaaggcgtgtcctgttaataaa

SEQ ID NO: 193344 - DNA, 27 bp, Artificial sequence
  SiRNA target sequence
gtaaaaaggcgtgtcctgttaataaaa

SEQ ID NO: 193345 - DNA, 27 bp, Artificial sequence
  SiRNA target sequence
taaaaaggcgtgtcctgttaataaaac

SEQ ID NO: 193346 - DNA, 27 bp, Artificial sequence
  SiRNA target sequence
aaaaaggcgtgtcctgttaataaaaca

SEQ ID NO: 193347 - DNA, 27 bp, Artificial sequence
  SiRNA target sequence
aaaaggcgtgtcctgttaataaaacag

SEQ ID NO: 193348 - DNA, 27 bp, Artificial sequence
  SiRNA target sequence
aaaggcgtgtcctgttaataaaacagg

SEQ ID NO: 193349 - DNA, 27 bp, Artificial sequence
  SiRNA target sequence
aaggcgtgtcctgttaataaaacagga

SEQ ID NO: 193350 - DNA, 27 bp, Artificial sequence
  SiRNA target sequence
aggcgtgtcctgttaataaaacaggaa

SEQ ID NO: 193351 - DNA, 27 bp, Artificial sequence
  SiRNA target sequence
ggcgtgtcctgttaataaaacaggaaa

SEQ ID NO: 193352 - DNA, 27 bp, Artificial sequence
  SiRNA target sequence
gcgtgtcctgttaataaaacaggaaag

SEQ ID NO: 193353 - DNA, 27 bp, Artificial sequence
  SiRNA target sequence
cgtgtcctgttaataaaacaggaaagg

SEQ ID NO: 193354 - DNA, 27 bp, Artificial sequence
  SiRNA target sequence
gtgtcctgttaataaaacaggaaagga

SEQ ID NO: 193355 - DNA, 27 bp, Artificial sequence
  SiRNA target sequence
tgtcctgttaataaaacaggaaaggag

SEQ ID NO: 193356 - DNA, 27 bp, Artificial sequence
  SiRNA target sequence
gtcctgttaataaaacaggaaaggagt

SEQ ID NO: 193357 - DNA, 27 bp, Artificial sequence
  SiRNA target sequence
tcctgttaataaaacaggaaaggagtg

SEQ ID NO: 193358 - DNA, 27 bp, Artificial sequence
  SiRNA target sequence
cctgttaataaaacaggaaaggagtgt

SEQ ID NO: 193359 - DNA, 27 bp, Artificial sequence
  SiRNA target sequence
ctgttaataaaacaggaaaggagtgta

SEQ ID NO: 193360 - DNA, 27 bp, Artificial sequence
  SiRNA target sequence
tgttaataaaacaggaaaggagtgtat

SEQ ID NO: 193361 - DNA, 27 bp, Artificial sequence
  SiRNA target sequence
gttaataaaacaggaaaggagtgtatt

SEQ ID NO: 193362 - DNA, 27 bp, Artificial sequence
  SiRNA target sequence
ttaataaaacaggaaaggagtgtatta

SEQ ID NO: 193363 - DNA, 27 bp, Artificial sequence
  SiRNA target sequence
taataaaacaggaaaggagtgtattac

SEQ ID NO: 193364 - DNA, 27 bp, Artificial sequence
  SiRNA target sequence
aataaaacaggaaaggagtgtattaca

SEQ ID NO: 193365 - DNA, 27 bp, Artificial sequence
  SiRNA target sequence
ataaaacaggaaaggagtgtattacaa

SEQ ID NO: 193366 - DNA, 27 bp, Artificial sequence
  SiRNA target sequence
taaaacaggaaaggagtgtattacaat

SEQ ID NO: 193367 - DNA, 27 bp, Artificial sequence
  SiRNA target sequence
aaaacaggaaaggagtgtattacaatt

SEQ ID NO: 193368 - DNA, 27 bp, Artificial sequence
  SiRNA target sequence
aaacaggaaaggagtgtattacaattg

SEQ ID NO: 193369 - DNA, 27 bp, Artificial sequence
  SiRNA target sequence
aacaggaaaggagtgtattacaattga

SEQ ID NO: 193370 - DNA, 27 bp, Artificial sequence
  SiRNA target sequence
acaggaaaggagtgtattacaattgat

SEQ ID NO: 193371 - DNA, 27 bp, Artificial sequence
  SiRNA target sequence
caggaaaggagtgtattacaattgata

SEQ ID NO: 193372 - DNA, 27 bp, Artificial sequence
  SiRNA target sequence
aggaaaggagtgtattacaattgatac

SEQ ID NO: 193373 - DNA, 27 bp, Artificial sequence
  SiRNA target sequence
ggaaaggagtgtattacaattgatact

SEQ ID NO: 193374 - DNA, 27 bp, Artificial sequence
  SiRNA target sequence
gaaaggagtgtattacaattgatacta

SEQ ID NO: 193375 - DNA, 27 bp, Artificial sequence
  SiRNA target sequence
aaaggagtgtattacaattgatactaa

SEQ ID NO: 193376 - DNA, 27 bp, Artificial sequence
  SiRNA target sequence
aaggagtgtattacaattgatactaaa

SEQ ID NO: 193377 - DNA, 27 bp, Artificial sequence
  SiRNA target sequence
aggagtgtattacaattgatactaaat

SEQ ID NO: 193378 - DNA, 27 bp, Artificial sequence
  SiRNA target sequence
ggagtgtattacaattgatactaaatc

SEQ ID NO: 193379 - DNA, 27 bp, Artificial sequence
  SiRNA target sequence
gagtgtattacaattgatactaaatca

SEQ ID NO: 193380 - DNA, 27 bp, Artificial sequence
  SiRNA target sequence
agtgtattacaattgatactaaatcac

SEQ ID NO: 193381 - DNA, 27 bp, Artificial sequence
  SiRNA target sequence
gtgtattacaattgatactaaatcaca

SEQ ID NO: 193382 - DNA, 27 bp, Artificial sequence
  SiRNA target sequence
tgtattacaattgatactaaatcacat

SEQ ID NO: 193383 - DNA, 27 bp, Artificial sequence
  SiRNA target sequence
gtattacaattgatactaaatcacata

SEQ ID NO: 193384 - DNA, 27 bp, Artificial sequence
  SiRNA target sequence
tattacaattgatactaaatcacatat

SEQ ID NO: 193385 - DNA, 27 bp, Artificial sequence
  SiRNA target sequence
attacaattgatactaaatcacatatc

SEQ ID NO: 193386 - DNA, 27 bp, Artificial sequence
  SiRNA target sequence
ttacaattgatactaaatcacatatct

SEQ ID NO: 193387 - DNA, 27 bp, Artificial sequence
  SiRNA target sequence
tacaattgatactaaatcacatatctc

SEQ ID NO: 193388 - DNA, 27 bp, Artificial sequence
  SiRNA target sequence
acaattgatactaaatcacatatctca

SEQ ID NO: 193389 - DNA, 27 bp, Artificial sequence
  SiRNA target sequence
caattgatactaaatcacatatctcag

SEQ ID NO: 193390 - DNA, 27 bp, Artificial sequence
  SiRNA target sequence
aattgatactaaatcacatatctcaga

SEQ ID NO: 193391 - DNA, 27 bp, Artificial sequence
  SiRNA target sequence
attgatactaaatcacatatctcagaa

SEQ ID NO: 193392 - DNA, 27 bp, Artificial sequence
  SiRNA target sequence
ttgatactaaatcacatatctcagaaa

SEQ ID NO: 193393 - DNA, 27 bp, Artificial sequence
  SiRNA target sequence
tgatactaaatcacatatctcagaaat

SEQ ID NO: 193394 - DNA, 27 bp, Artificial sequence
  SiRNA target sequence
gatactaaatcacatatctcagaaatt

SEQ ID NO: 193395 - DNA, 27 bp, Artificial sequence
  SiRNA target sequence
atactaaatcacatatctcagaaattc

SEQ ID NO: 193396 - DNA, 27 bp, Artificial sequence
  SiRNA target sequence
tactaaatcacatatctcagaaattct

SEQ ID NO: 193397 - DNA, 27 bp, Artificial sequence
  SiRNA target sequence
actaaatcacatatctcagaaattctg

SEQ ID NO: 193398 - DNA, 27 bp, Artificial sequence
  SiRNA target sequence
ctaaatcacatatctcagaaattctgt

SEQ ID NO: 193399 - DNA, 27 bp, Artificial sequence
  SiRNA target sequence
taaatcacatatctcagaaattctgtg

SEQ ID NO: 193400 - DNA, 27 bp, Artificial sequence
  SiRNA target sequence
aaatcacatatctcagaaattctgtgt

SEQ ID NO: 193401 - DNA, 27 bp, Artificial sequence
  SiRNA target sequence
aatcacatatctcagaaattctgtgta

SEQ ID NO: 193402 - DNA, 27 bp, Artificial sequence
  SiRNA target sequence
atcacatatctcagaaattctgtgtat

SEQ ID NO: 193403 - DNA, 27 bp, Artificial sequence
  SiRNA target sequence
tcacatatctcagaaattctgtgtata

SEQ ID NO: 193404 - DNA, 27 bp, Artificial sequence
  SiRNA target sequence
cacatatctcagaaattctgtgtatag

SEQ ID NO: 193405 - DNA, 27 bp, Artificial sequence
  SiRNA target sequence
acatatctcagaaattctgtgtatagg

SEQ ID NO: 193406 - DNA, 27 bp, Artificial sequence
  SiRNA target sequence
catatctcagaaattctgtgtatagga

SEQ ID NO: 193407 - DNA, 27 bp, Artificial sequence
  SiRNA target sequence
atatctcagaaattctgtgtataggat

SEQ ID NO: 193408 - DNA, 27 bp, Artificial sequence
  SiRNA target sequence
tatctcagaaattctgtgtataggatg

SEQ ID NO: 193409 - DNA, 27 bp, Artificial sequence
  SiRNA target sequence
atctcagaaattctgtgtataggatgt

SEQ ID NO: 193410 - DNA, 27 bp, Artificial sequence
  SiRNA target sequence
tctcagaaattctgtgtataggatgtt

SEQ ID NO: 193411 - DNA, 27 bp, Artificial sequence
  SiRNA target sequence
ctcagaaattctgtgtataggatgttc

SEQ ID NO: 193412 - DNA, 27 bp, Artificial sequence
  SiRNA target sequence
tcagaaattctgtgtataggatgttct

SEQ ID NO: 193413 - DNA, 27 bp, Artificial sequence
  SiRNA target sequence
cagaaattctgtgtataggatgttctg

SEQ ID NO: 193414 - DNA, 27 bp, Artificial sequence
  SiRNA target sequence
agaaattctgtgtataggatgttctgc

SEQ ID NO: 193415 - DNA, 27 bp, Artificial sequence
  SiRNA target sequence
gaaattctgtgtataggatgttctgcg

SEQ ID NO: 193416 - DNA, 27 bp, Artificial sequence
  SiRNA target sequence
aaattctgtgtataggatgttctgcgt

SEQ ID NO: 193417 - DNA, 27 bp, Artificial sequence
  SiRNA target sequence
aattctgtgtataggatgttctgcgtg

SEQ ID NO: 193418 - DNA, 27 bp, Artificial sequence
  SiRNA target sequence
attctgtgtataggatgttctgcgtgt

SEQ ID NO: 193419 - DNA, 27 bp, Artificial sequence
  SiRNA target sequence
ttctgtgtataggatgttctgcgtgtc

SEQ ID NO: 193420 - DNA, 27 bp, Artificial sequence
  SiRNA target sequence
tctgtgtataggatgttctgcgtgtca

SEQ ID NO: 193421 - DNA, 27 bp, Artificial sequence
  SiRNA target sequence
ctgtgtataggatgttctgcgtgtcaa

SEQ ID NO: 193422 - DNA, 27 bp, Artificial sequence
  SiRNA target sequence
tgtgtataggatgttctgcgtgtcaaa

SEQ ID NO: 193423 - DNA, 27 bp, Artificial sequence
  SiRNA target sequence
gtgtataggatgttctgcgtgtcaaaa

SEQ ID NO: 193424 - DNA, 27 bp, Artificial sequence
  SiRNA target sequence
tgtataggatgttctgcgtgtcaaaag

SEQ ID NO: 193425 - DNA, 27 bp, Artificial sequence
  SiRNA target sequence
gtataggatgttctgcgtgtcaaaaga

SEQ ID NO: 193426 - DNA, 27 bp, Artificial sequence
  SiRNA target sequence
tataggatgttctgcgtgtcaaaagaa

SEQ ID NO: 193427 - DNA, 27 bp, Artificial sequence
  SiRNA target sequence
ataggatgttctgcgtgtcaaaagaaa

SEQ ID NO: 193428 - DNA, 27 bp, Artificial sequence
  SiRNA target sequence
taggatgttctgcgtgtcaaaagaaat

SEQ ID NO: 193429 - DNA, 27 bp, Artificial sequence
  SiRNA target sequence
aggatgttctgcgtgtcaaaagaaatg

SEQ ID NO: 193430 - DNA, 27 bp, Artificial sequence
  SiRNA target sequence
ggatgttctgcgtgtcaaaagaaatgt

SEQ ID NO: 193431 - DNA, 27 bp, Artificial sequence
  SiRNA target sequence
gatgttctgcgtgtcaaaagaaatgtc

SEQ ID NO: 193432 - DNA, 27 bp, Artificial sequence
  SiRNA target sequence
atgttctgcgtgtcaaaagaaatgtcc

SEQ ID NO: 193433 - DNA, 27 bp, Artificial sequence
  SiRNA target sequence
tgttctgcgtgtcaaaagaaatgtcct

SEQ ID NO: 193434 - DNA, 27 bp, Artificial sequence
  SiRNA target sequence
gttctgcgtgtcaaaagaaatgtcctt

SEQ ID NO: 193435 - DNA, 27 bp, Artificial sequence
  SiRNA target sequence
ttctgcgtgtcaaaagaaatgtccttt

SEQ ID NO: 193436 - DNA, 27 bp, Artificial sequence
  SiRNA target sequence
tctgcgtgtcaaaagaaatgtcctttt

SEQ ID NO: 193437 - DNA, 27 bp, Artificial sequence
  SiRNA target sequence
ctgcgtgtcaaaagaaatgtcctttta

SEQ ID NO: 193438 - DNA, 27 bp, Artificial sequence
  SiRNA target sequence
tgcgtgtcaaaagaaatgtccttttaa

SEQ ID NO: 193439 - DNA, 27 bp, Artificial sequence
  SiRNA target sequence
gcgtgtcaaaagaaatgtccttttaag

SEQ ID NO: 193440 - DNA, 27 bp, Artificial sequence
  SiRNA target sequence
cgtgtcaaaagaaatgtccttttaagg

SEQ ID NO: 193441 - DNA, 27 bp, Artificial sequence
  SiRNA target sequence
gtgtcaaaagaaatgtccttttaaggc

SEQ ID NO: 193442 - DNA, 27 bp, Artificial sequence
  SiRNA target sequence
tgtcaaaagaaatgtccttttaaggcg

SEQ ID NO: 193443 - DNA, 27 bp, Artificial sequence
  SiRNA target sequence
gtcaaaagaaatgtccttttaaggcga

SEQ ID NO: 193444 - DNA, 27 bp, Artificial sequence
  SiRNA target sequence
tcaaaagaaatgtccttttaaggcgat

SEQ ID NO: 193445 - DNA, 27 bp, Artificial sequence
  SiRNA target sequence
caaaagaaatgtccttttaaggcgatt

SEQ ID NO: 193446 - DNA, 27 bp, Artificial sequence
  SiRNA target sequence
aaaagaaatgtccttttaaggcgatta

SEQ ID NO: 193447 - DNA, 27 bp, Artificial sequence
  SiRNA target sequence
aaagaaatgtccttttaaggcgattac

SEQ ID NO: 193448 - DNA, 27 bp, Artificial sequence
  SiRNA target sequence
aagaaatgtccttttaaggcgattaca

SEQ ID NO: 193449 - DNA, 27 bp, Artificial sequence
  SiRNA target sequence
agaaatgtccttttaaggcgattacaa

SEQ ID NO: 193450 - DNA, 27 bp, Artificial sequence
  SiRNA target sequence
gaaatgtccttttaaggcgattacaat

SEQ ID NO: 193451 - DNA, 27 bp, Artificial sequence
  SiRNA target sequence
aaatgtccttttaaggcgattacaatt

SEQ ID NO: 193452 - DNA, 27 bp, Artificial sequence
  SiRNA target sequence
aatgtccttttaaggcgattacaattg

SEQ ID NO: 193453 - DNA, 27 bp, Artificial sequence
  SiRNA target sequence
atgtccttttaaggcgattacaattgt

SEQ ID NO: 193454 - DNA, 27 bp, Artificial sequence
  SiRNA target sequence
tgtccttttaaggcgattacaattgta

SEQ ID NO: 193455 - DNA, 27 bp, Artificial sequence
  SiRNA target sequence
gtccttttaaggcgattacaattgtaa

SEQ ID NO: 193456 - DNA, 27 bp, Artificial sequence
  SiRNA target sequence
tccttttaaggcgattacaattgtaaa

SEQ ID NO: 193457 - DNA, 27 bp, Artificial sequence
  SiRNA target sequence
ccttttaaggcgattacaattgtaaat

SEQ ID NO: 193458 - DNA, 27 bp, Artificial sequence
  SiRNA target sequence
cttttaaggcgattacaattgtaaatt

SEQ ID NO: 193459 - DNA, 27 bp, Artificial sequence
  SiRNA target sequence
ttttaaggcgattacaattgtaaattt

SEQ ID NO: 193460 - DNA, 27 bp, Artificial sequence
  SiRNA target sequence
tttaaggcgattacaattgtaaattta

SEQ ID NO: 193461 - DNA, 27 bp, Artificial sequence
  SiRNA target sequence
ttaaggcgattacaattgtaaatttac

SEQ ID NO: 193462 - DNA, 27 bp, Artificial sequence
  SiRNA target sequence
taaggcgattacaattgtaaatttacc

SEQ ID NO: 193463 - DNA, 27 bp, Artificial sequence
  SiRNA target sequence
aaggcgattacaattgtaaatttacct

SEQ ID NO: 193464 - DNA, 27 bp, Artificial sequence
  SiRNA target sequence
aggcgattacaattgtaaatttaccta

SEQ ID NO: 193465 - DNA, 27 bp, Artificial sequence
  SiRNA target sequence
ggcgattacaattgtaaatttacctac

SEQ ID NO: 193466 - DNA, 27 bp, Artificial sequence
  SiRNA target sequence
gcgattacaattgtaaatttacctaca

SEQ ID NO: 193467 - DNA, 27 bp, Artificial sequence
  SiRNA target sequence
cgattacaattgtaaatttacctacaa

SEQ ID NO: 193468 - DNA, 27 bp, Artificial sequence
  SiRNA target sequence
gattacaattgtaaatttacctacaaa

SEQ ID NO: 193469 - DNA, 27 bp, Artificial sequence
  SiRNA target sequence
attacaattgtaaatttacctacaaat

SEQ ID NO: 193470 - DNA, 27 bp, Artificial sequence
  SiRNA target sequence
ttacaattgtaaatttacctacaaatc

SEQ ID NO: 193471 - DNA, 27 bp, Artificial sequence
  SiRNA target sequence
tacaattgtaaatttacctacaaatct

SEQ ID NO: 193472 - DNA, 27 bp, Artificial sequence
  SiRNA target sequence
acaattgtaaatttacctacaaatcta

SEQ ID NO: 193473 - DNA, 27 bp, Artificial sequence
  SiRNA target sequence
caattgtaaatttacctacaaatctag

SEQ ID NO: 193474 - DNA, 27 bp, Artificial sequence
  SiRNA target sequence
aattgtaaatttacctacaaatctaga

SEQ ID NO: 193475 - DNA, 27 bp, Artificial sequence
  SiRNA target sequence
attgtaaatttacctacaaatctagat

SEQ ID NO: 193476 - DNA, 27 bp, Artificial sequence
  SiRNA target sequence
ttgtaaatttacctacaaatctagata

SEQ ID NO: 193477 - DNA, 27 bp, Artificial sequence
  SiRNA target sequence
tgtaaatttacctacaaatctagataa

SEQ ID NO: 193478 - DNA, 27 bp, Artificial sequence
  SiRNA target sequence
gtaaatttacctacaaatctagataaa

SEQ ID NO: 193479 - DNA, 27 bp, Artificial sequence
  SiRNA target sequence
taaatttacctacaaatctagataaag

SEQ ID NO: 193480 - DNA, 27 bp, Artificial sequence
  SiRNA target sequence
aaatttacctacaaatctagataaaga

SEQ ID NO: 193481 - DNA, 27 bp, Artificial sequence
  SiRNA target sequence
aatttacctacaaatctagataaagac

SEQ ID NO: 193482 - DNA, 27 bp, Artificial sequence
  SiRNA target sequence
atttacctacaaatctagataaagaca

SEQ ID NO: 193483 - DNA, 27 bp, Artificial sequence
  SiRNA target sequence
tttacctacaaatctagataaagacat

SEQ ID NO: 193484 - DNA, 27 bp, Artificial sequence
  SiRNA target sequence
ttacctacaaatctagataaagacatt

SEQ ID NO: 193485 - DNA, 27 bp, Artificial sequence
  SiRNA target sequence
tacctacaaatctagataaagacattt

SEQ ID NO: 193486 - DNA, 27 bp, Artificial sequence
  SiRNA target sequence
acctacaaatctagataaagacatttc

SEQ ID NO: 193487 - DNA, 27 bp, Artificial sequence
  SiRNA target sequence
cctacaaatctagataaagacatttca

SEQ ID NO: 193488 - DNA, 27 bp, Artificial sequence
  SiRNA target sequence
ctacaaatctagataaagacatttcac

SEQ ID NO: 193489 - DNA, 27 bp, Artificial sequence
  SiRNA target sequence
tacaaatctagataaagacatttcaca

SEQ ID NO: 193490 - DNA, 27 bp, Artificial sequence
  SiRNA target sequence
acaaatctagataaagacatttcacat

SEQ ID NO: 193491 - DNA, 27 bp, Artificial sequence
  SiRNA target sequence
caaatctagataaagacatttcacata

SEQ ID NO: 193492 - DNA, 27 bp, Artificial sequence
  SiRNA target sequence
aaatctagataaagacatttcacatag

SEQ ID NO: 193493 - DNA, 27 bp, Artificial sequence
  SiRNA target sequence
aatctagataaagacatttcacataga

SEQ ID NO: 193494 - DNA, 27 bp, Artificial sequence
  SiRNA target sequence
atctagataaagacatttcacatagat

SEQ ID NO: 193495 - DNA, 27 bp, Artificial sequence
  SiRNA target sequence
tctagataaagacatttcacatagata

SEQ ID NO: 193496 - DNA, 27 bp, Artificial sequence
  SiRNA target sequence
ctagataaagacatttcacatagatat

SEQ ID NO: 193497 - DNA, 27 bp, Artificial sequence
  SiRNA target sequence
tagataaagacatttcacatagatatt

SEQ ID NO: 193498 - DNA, 27 bp, Artificial sequence
  SiRNA target sequence
agataaagacatttcacatagatattc

SEQ ID NO: 193499 - DNA, 27 bp, Artificial sequence
  SiRNA target sequence
gataaagacatttcacatagatattcg

SEQ ID NO: 193500 - DNA, 27 bp, Artificial sequence
  SiRNA target sequence
ataaagacatttcacatagatattcgg

SEQ ID NO: 193501 - DNA, 27 bp, Artificial sequence
  SiRNA target sequence
taaagacatttcacatagatattcggc

SEQ ID NO: 193502 - DNA, 27 bp, Artificial sequence
  SiRNA target sequence
aaagacatttcacatagatattcggca

SEQ ID NO: 193503 - DNA, 27 bp, Artificial sequence
  SiRNA target sequence
aagacatttcacatagatattcggcaa

SEQ ID NO: 193504 - DNA, 27 bp, Artificial sequence
  SiRNA target sequence
agacatttcacatagatattcggcaaa

SEQ ID NO: 193505 - DNA, 27 bp, Artificial sequence
  SiRNA target sequence
gacatttcacatagatattcggcaaat

SEQ ID NO: 193506 - DNA, 27 bp, Artificial sequence
  SiRNA target sequence
acatttcacatagatattcggcaaatg

SEQ ID NO: 193507 - DNA, 27 bp, Artificial sequence
  SiRNA target sequence
catttcacatagatattcggcaaatgg

SEQ ID NO: 193508 - DNA, 27 bp, Artificial sequence
  SiRNA target sequence
atttcacatagatattcggcaaatggt

SEQ ID NO: 193509 - DNA, 27 bp, Artificial sequence
  SiRNA target sequence
tttcacatagatattcggcaaatggtt

SEQ ID NO: 193510 - DNA, 27 bp, Artificial sequence
  SiRNA target sequence
ttcacatagatattcggcaaatggttt

SEQ ID NO: 193511 - DNA, 27 bp, Artificial sequence
  SiRNA target sequence
tcacatagatattcggcaaatggtttt

SEQ ID NO: 193512 - DNA, 27 bp, Artificial sequence
  SiRNA target sequence
cacatagatattcggcaaatggtttta

SEQ ID NO: 193513 - DNA, 27 bp, Artificial sequence
  SiRNA target sequence
acatagatattcggcaaatggttttaa

SEQ ID NO: 193514 - DNA, 27 bp, Artificial sequence
  SiRNA target sequence
catagatattcggcaaatggttttaaa

SEQ ID NO: 193515 - DNA, 27 bp, Artificial sequence
  SiRNA target sequence
atagatattcggcaaatggttttaaac

SEQ ID NO: 193516 - DNA, 27 bp, Artificial sequence
  SiRNA target sequence
tagatattcggcaaatggttttaaact

SEQ ID NO: 193517 - DNA, 27 bp, Artificial sequence
  SiRNA target sequence
agatattcggcaaatggttttaaactt

SEQ ID NO: 193518 - DNA, 27 bp, Artificial sequence
  SiRNA target sequence
gatattcggcaaatggttttaaacttc

SEQ ID NO: 193519 - DNA, 27 bp, Artificial sequence
  SiRNA target sequence
atattcggcaaatggttttaaacttca

SEQ ID NO: 193520 - DNA, 27 bp, Artificial sequence
  SiRNA target sequence
tattcggcaaatggttttaaacttcac

SEQ ID NO: 193521 - DNA, 27 bp, Artificial sequence
  SiRNA target sequence
attcggcaaatggttttaaacttcaca

SEQ ID NO: 193522 - DNA, 27 bp, Artificial sequence
  SiRNA target sequence
ttcggcaaatggttttaaacttcacag

SEQ ID NO: 193523 - DNA, 27 bp, Artificial sequence
  SiRNA target sequence
tcggcaaatggttttaaacttcacaga

SEQ ID NO: 193524 - DNA, 27 bp, Artificial sequence
  SiRNA target sequence
cggcaaatggttttaaacttcacagat

SEQ ID NO: 193525 - DNA, 27 bp, Artificial sequence
  SiRNA target sequence
ggcaaatggttttaaacttcacagatt

SEQ ID NO: 193526 - DNA, 27 bp, Artificial sequence
  SiRNA target sequence
gcaaatggttttaaacttcacagatta

SEQ ID NO: 193527 - DNA, 27 bp, Artificial sequence
  SiRNA target sequence
caaatggttttaaacttcacagattac

SEQ ID NO: 193528 - DNA, 27 bp, Artificial sequence
  SiRNA target sequence
aaatggttttaaacttcacagattacc

SEQ ID NO: 193529 - DNA, 27 bp, Artificial sequence
  SiRNA target sequence
aatggttttaaacttcacagattacca

SEQ ID NO: 193530 - DNA, 27 bp, Artificial sequence
  SiRNA target sequence
atggttttaaacttcacagattaccaa

SEQ ID NO: 193531 - DNA, 27 bp, Artificial sequence
  SiRNA target sequence
tggttttaaacttcacagattaccaat

SEQ ID NO: 193532 - DNA, 27 bp, Artificial sequence
  SiRNA target sequence
ggttttaaacttcacagattaccaatc

SEQ ID NO: 193533 - DNA, 27 bp, Artificial sequence
  SiRNA target sequence
gttttaaacttcacagattaccaatcc

SEQ ID NO: 193534 - DNA, 27 bp, Artificial sequence
  SiRNA target sequence
ttttaaacttcacagattaccaatccc

SEQ ID NO: 193535 - DNA, 27 bp, Artificial sequence
  SiRNA target sequence
tttaaacttcacagattaccaatccct

SEQ ID NO: 193536 - DNA, 27 bp, Artificial sequence
  SiRNA target sequence
ttaaacttcacagattaccaatcccta

SEQ ID NO: 193537 - DNA, 27 bp, Artificial sequence
  SiRNA target sequence
taaacttcacagattaccaatccctaa

SEQ ID NO: 193538 - DNA, 27 bp, Artificial sequence
  SiRNA target sequence
aaacttcacagattaccaatccctaaa

SEQ ID NO: 193539 - DNA, 27 bp, Artificial sequence
  SiRNA target sequence
aacttcacagattaccaatccctaaat

SEQ ID NO: 193540 - DNA, 27 bp, Artificial sequence
  SiRNA target sequence
acttcacagattaccaatccctaaata

SEQ ID NO: 193541 - DNA, 27 bp, Artificial sequence
  SiRNA target sequence
cttcacagattaccaatccctaaatat

SEQ ID NO: 193542 - DNA, 27 bp, Artificial sequence
  SiRNA target sequence
ttcacagattaccaatccctaaatatg

SEQ ID NO: 193543 - DNA, 27 bp, Artificial sequence
  SiRNA target sequence
tcacagattaccaatccctaaatatgg

SEQ ID NO: 193544 - DNA, 27 bp, Artificial sequence
  SiRNA target sequence
cacagattaccaatccctaaatatggt

SEQ ID NO: 193545 - DNA, 27 bp, Artificial sequence
  SiRNA target sequence
acagattaccaatccctaaatatggta

SEQ ID NO: 193546 - DNA, 27 bp, Artificial sequence
  SiRNA target sequence
cagattaccaatccctaaatatggtaa

SEQ ID NO: 193547 - DNA, 27 bp, Artificial sequence
  SiRNA target sequence
agattaccaatccctaaatatggtaag

SEQ ID NO: 193548 - DNA, 27 bp, Artificial sequence
  SiRNA target sequence
gattaccaatccctaaatatggtaagg

SEQ ID NO: 193549 - DNA, 27 bp, Artificial sequence
  SiRNA target sequence
attaccaatccctaaatatggtaaggt

SEQ ID NO: 193550 - DNA, 27 bp, Artificial sequence
  SiRNA target sequence
ttaccaatccctaaatatggtaaggtt

SEQ ID NO: 193551 - DNA, 27 bp, Artificial sequence
  SiRNA target sequence
taccaatccctaaatatggtaaggttt

SEQ ID NO: 193552 - DNA, 27 bp, Artificial sequence
  SiRNA target sequence
accaatccctaaatatggtaaggtttt

SEQ ID NO: 193553 - DNA, 27 bp, Artificial sequence
  SiRNA target sequence
ccaatccctaaatatggtaaggtttta

SEQ ID NO: 193554 - DNA, 27 bp, Artificial sequence
  SiRNA target sequence
caatccctaaatatggtaaggttttag

SEQ ID NO: 193555 - DNA, 27 bp, Artificial sequence
  SiRNA target sequence
aatccctaaatatggtaaggttttagg

SEQ ID NO: 193556 - DNA, 27 bp, Artificial sequence
  SiRNA target sequence
atccctaaatatggtaaggttttaggg

SEQ ID NO: 193557 - DNA, 27 bp, Artificial sequence
  SiRNA target sequence
tccctaaatatggtaaggttttagggc

SEQ ID NO: 193558 - DNA, 27 bp, Artificial sequence
  SiRNA target sequence
ccctaaatatggtaaggttttagggct

SEQ ID NO: 193559 - DNA, 27 bp, Artificial sequence
  SiRNA target sequence
cctaaatatggtaaggttttagggcta

SEQ ID NO: 193560 - DNA, 27 bp, Artificial sequence
  SiRNA target sequence
ctaaatatggtaaggttttagggctag

SEQ ID NO: 193561 - DNA, 27 bp, Artificial sequence
  SiRNA target sequence
taaatatggtaaggttttagggctagt

SEQ ID NO: 193562 - DNA, 27 bp, Artificial sequence
  SiRNA target sequence
aaatatggtaaggttttagggctagta

SEQ ID NO: 193563 - DNA, 27 bp, Artificial sequence
  SiRNA target sequence
aatatggtaaggttttagggctagtag

SEQ ID NO: 193564 - DNA, 27 bp, Artificial sequence
  SiRNA target sequence
atatggtaaggttttagggctagtagg

SEQ ID NO: 193565 - DNA, 27 bp, Artificial sequence
  SiRNA target sequence
tatggtaaggttttagggctagtaggc

SEQ ID NO: 193566 - DNA, 27 bp, Artificial sequence
  SiRNA target sequence
atggtaaggttttagggctagtaggca

SEQ ID NO: 193567 - DNA, 27 bp, Artificial sequence
  SiRNA target sequence
tggtaaggttttagggctagtaggcac

SEQ ID NO: 193568 - DNA, 27 bp, Artificial sequence
  SiRNA target sequence
ggtaaggttttagggctagtaggcact

SEQ ID NO: 193569 - DNA, 27 bp, Artificial sequence
  SiRNA target sequence
gtaaggttttagggctagtaggcacta

SEQ ID NO: 193570 - DNA, 27 bp, Artificial sequence
  SiRNA target sequence
taaggttttagggctagtaggcactaa

SEQ ID NO: 193571 - DNA, 27 bp, Artificial sequence
  SiRNA target sequence
aaggttttagggctagtaggcactaat

SEQ ID NO: 193572 - DNA, 27 bp, Artificial sequence
  SiRNA target sequence
aggttttagggctagtaggcactaatg

SEQ ID NO: 193573 - DNA, 27 bp, Artificial sequence
  SiRNA target sequence
ggttttagggctagtaggcactaatgg

SEQ ID NO: 193574 - DNA, 27 bp, Artificial sequence
  SiRNA target sequence
gttttagggctagtaggcactaatggt

SEQ ID NO: 193575 - DNA, 27 bp, Artificial sequence
  SiRNA target sequence
ttttagggctagtaggcactaatggta

SEQ ID NO: 193576 - DNA, 27 bp, Artificial sequence
  SiRNA target sequence
tttagggctagtaggcactaatggtat

SEQ ID NO: 193577 - DNA, 27 bp, Artificial sequence
  SiRNA target sequence
ttagggctagtaggcactaatggtata

SEQ ID NO: 193578 - DNA, 27 bp, Artificial sequence
  SiRNA target sequence
tagggctagtaggcactaatggtatag

SEQ ID NO: 193579 - DNA, 27 bp, Artificial sequence
  SiRNA target sequence
agggctagtaggcactaatggtatagg

SEQ ID NO: 193580 - DNA, 27 bp, Artificial sequence
  SiRNA target sequence
gggctagtaggcactaatggtatagga

SEQ ID NO: 193581 - DNA, 27 bp, Artificial sequence
  SiRNA target sequence
ggctagtaggcactaatggtataggaa

SEQ ID NO: 193582 - DNA, 27 bp, Artificial sequence
  SiRNA target sequence
gctagtaggcactaatggtataggaaa

SEQ ID NO: 193583 - DNA, 27 bp, Artificial sequence
  SiRNA target sequence
ctagtaggcactaatggtataggaaaa

SEQ ID NO: 193584 - DNA, 27 bp, Artificial sequence
  SiRNA target sequence
tagtaggcactaatggtataggaaaaa

SEQ ID NO: 193585 - DNA, 27 bp, Artificial sequence
  SiRNA target sequence
agtaggcactaatggtataggaaaaag

SEQ ID NO: 193586 - DNA, 27 bp, Artificial sequence
  SiRNA target sequence
gtaggcactaatggtataggaaaaagt

SEQ ID NO: 193587 - DNA, 27 bp, Artificial sequence
  SiRNA target sequence
taggcactaatggtataggaaaaagta

SEQ ID NO: 193588 - DNA, 27 bp, Artificial sequence
  SiRNA target sequence
aggcactaatggtataggaaaaagtac

SEQ ID NO: 193589 - DNA, 27 bp, Artificial sequence
  SiRNA target sequence
ggcactaatggtataggaaaaagtact

SEQ ID NO: 193590 - DNA, 27 bp, Artificial sequence
  SiRNA target sequence
gcactaatggtataggaaaaagtactg

SEQ ID NO: 193591 - DNA, 27 bp, Artificial sequence
  SiRNA target sequence
cactaatggtataggaaaaagtactgc

SEQ ID NO: 193592 - DNA, 27 bp, Artificial sequence
  SiRNA target sequence
actaatggtataggaaaaagtactgca

SEQ ID NO: 193593 - DNA, 27 bp, Artificial sequence
  SiRNA target sequence
ctaatggtataggaaaaagtactgcac

SEQ ID NO: 193594 - DNA, 27 bp, Artificial sequence
  SiRNA target sequence
taatggtataggaaaaagtactgcact

SEQ ID NO: 193595 - DNA, 27 bp, Artificial sequence
  SiRNA target sequence
aatggtataggaaaaagtactgcactt

SEQ ID NO: 193596 - DNA, 27 bp, Artificial sequence
  SiRNA target sequence
atggtataggaaaaagtactgcactta

SEQ ID NO: 193597 - DNA, 27 bp, Artificial sequence
  SiRNA target sequence
tggtataggaaaaagtactgcacttaa

SEQ ID NO: 193598 - DNA, 27 bp, Artificial sequence
  SiRNA target sequence
ggtataggaaaaagtactgcacttaaa

SEQ ID NO: 193599 - DNA, 27 bp, Artificial sequence
  SiRNA target sequence
gtataggaaaaagtactgcacttaaaa

SEQ ID NO: 193600 - DNA, 27 bp, Artificial sequence
  SiRNA target sequence
tataggaaaaagtactgcacttaaaat

SEQ ID NO: 193601 - DNA, 27 bp, Artificial sequence
  SiRNA target sequence
ataggaaaaagtactgcacttaaaata

SEQ ID NO: 193602 - DNA, 27 bp, Artificial sequence
  SiRNA target sequence
taggaaaaagtactgcacttaaaatat

SEQ ID NO: 193603 - DNA, 27 bp, Artificial sequence
  SiRNA target sequence
aggaaaaagtactgcacttaaaatatt

SEQ ID NO: 193604 - DNA, 27 bp, Artificial sequence
  SiRNA target sequence
ggaaaaagtactgcacttaaaatatta

SEQ ID NO: 193605 - DNA, 27 bp, Artificial sequence
  SiRNA target sequence
gaaaaagtactgcacttaaaatattat

SEQ ID NO: 193606 - DNA, 27 bp, Artificial sequence
  SiRNA target sequence
aaaaagtactgcacttaaaatattatc

SEQ ID NO: 193607 - DNA, 27 bp, Artificial sequence
  SiRNA target sequence
aaaagtactgcacttaaaatattatcg

SEQ ID NO: 193608 - DNA, 27 bp, Artificial sequence
  SiRNA target sequence
aaagtactgcacttaaaatattatcgg

SEQ ID NO: 193609 - DNA, 27 bp, Artificial sequence
  SiRNA target sequence
aagtactgcacttaaaatattatcggg

SEQ ID NO: 193610 - DNA, 27 bp, Artificial sequence
  SiRNA target sequence
agtactgcacttaaaatattatcgggc

SEQ ID NO: 193611 - DNA, 27 bp, Artificial sequence
  SiRNA target sequence
gtactgcacttaaaatattatcgggca

SEQ ID NO: 193612 - DNA, 27 bp, Artificial sequence
  SiRNA target sequence
tactgcacttaaaatattatcgggcaa

SEQ ID NO: 193613 - DNA, 27 bp, Artificial sequence
  SiRNA target sequence
actgcacttaaaatattatcgggcaat

SEQ ID NO: 193614 - DNA, 27 bp, Artificial sequence
  SiRNA target sequence
ctgcacttaaaatattatcgggcaatc

SEQ ID NO: 193615 - DNA, 27 bp, Artificial sequence
  SiRNA target sequence
tgcacttaaaatattatcgggcaatct

SEQ ID NO: 193616 - DNA, 27 bp, Artificial sequence
  SiRNA target sequence
gcacttaaaatattatcgggcaatctt

SEQ ID NO: 193617 - DNA, 27 bp, Artificial sequence
  SiRNA target sequence
cacttaaaatattatcgggcaatctta

SEQ ID NO: 193618 - DNA, 27 bp, Artificial sequence
  SiRNA target sequence
acttaaaatattatcgggcaatcttaa

SEQ ID NO: 193619 - DNA, 27 bp, Artificial sequence
  SiRNA target sequence
cttaaaatattatcgggcaatcttaaa

SEQ ID NO: 193620 - DNA, 27 bp, Artificial sequence
  SiRNA target sequence
ttaaaatattatcgggcaatcttaaac

SEQ ID NO: 193621 - DNA, 27 bp, Artificial sequence
  SiRNA target sequence
taaaatattatcgggcaatcttaaacc

SEQ ID NO: 193622 - DNA, 27 bp, Artificial sequence
  SiRNA target sequence
aaaatattatcgggcaatcttaaacca

SEQ ID NO: 193623 - DNA, 27 bp, Artificial sequence
  SiRNA target sequence
aaatattatcgggcaatcttaaaccaa

SEQ ID NO: 193624 - DNA, 27 bp, Artificial sequence
  SiRNA target sequence
aatattatcgggcaatcttaaaccaaa

SEQ ID NO: 193625 - DNA, 27 bp, Artificial sequence
  SiRNA target sequence
atattatcgggcaatcttaaaccaaac

SEQ ID NO: 193626 - DNA, 27 bp, Artificial sequence
  SiRNA target sequence
tattatcgggcaatcttaaaccaaact

SEQ ID NO: 193627 - DNA, 27 bp, Artificial sequence
  SiRNA target sequence
attatcgggcaatcttaaaccaaactt

SEQ ID NO: 193628 - DNA, 27 bp, Artificial sequence
  SiRNA target sequence
ttatcgggcaatcttaaaccaaactta

SEQ ID NO: 193629 - DNA, 27 bp, Artificial sequence
  SiRNA target sequence
tatcgggcaatcttaaaccaaacttag

SEQ ID NO: 193630 - DNA, 27 bp, Artificial sequence
  SiRNA target sequence
atcgggcaatcttaaaccaaacttagg

SEQ ID NO: 193631 - DNA, 27 bp, Artificial sequence
  SiRNA target sequence
tcgggcaatcttaaaccaaacttagga

SEQ ID NO: 193632 - DNA, 27 bp, Artificial sequence
  SiRNA target sequence
cgggcaatcttaaaccaaacttaggaa

SEQ ID NO: 193633 - DNA, 27 bp, Artificial sequence
  SiRNA target sequence
gggcaatcttaaaccaaacttaggaaa

SEQ ID NO: 193634 - DNA, 27 bp, Artificial sequence
  SiRNA target sequence
ggcaatcttaaaccaaacttaggaaag

SEQ ID NO: 193635 - DNA, 27 bp, Artificial sequence
  SiRNA target sequence
gcaatcttaaaccaaacttaggaaagt

SEQ ID NO: 193636 - DNA, 27 bp, Artificial sequence
  SiRNA target sequence
caatcttaaaccaaacttaggaaagtt

SEQ ID NO: 193637 - DNA, 27 bp, Artificial sequence
  SiRNA target sequence
aatcttaaaccaaacttaggaaagttc

SEQ ID NO: 193638 - DNA, 27 bp, Artificial sequence
  SiRNA target sequence
atcttaaaccaaacttaggaaagttcg

SEQ ID NO: 193639 - DNA, 27 bp, Artificial sequence
  SiRNA target sequence
tcttaaaccaaacttaggaaagttcga

SEQ ID NO: 193640 - DNA, 27 bp, Artificial sequence
  SiRNA target sequence
cttaaaccaaacttaggaaagttcgac

SEQ ID NO: 193641 - DNA, 27 bp, Artificial sequence
  SiRNA target sequence
ttaaaccaaacttaggaaagttcgacg

SEQ ID NO: 193642 - DNA, 27 bp, Artificial sequence
  SiRNA target sequence
taaaccaaacttaggaaagttcgacgt

SEQ ID NO: 193643 - DNA, 27 bp, Artificial sequence
  SiRNA target sequence
aaaccaaacttaggaaagttcgacgtt

SEQ ID NO: 193644 - DNA, 27 bp, Artificial sequence
  SiRNA target sequence
aaccaaacttaggaaagttcgacgtta

SEQ ID NO: 193645 - DNA, 27 bp, Artificial sequence
  SiRNA target sequence
accaaacttaggaaagttcgacgttac

SEQ ID NO: 193646 - DNA, 27 bp, Artificial sequence
  SiRNA target sequence
ccaaacttaggaaagttcgacgttacg

SEQ ID NO: 193647 - DNA, 27 bp, Artificial sequence
  SiRNA target sequence
caaacttaggaaagttcgacgttacgc

SEQ ID NO: 193648 - DNA, 27 bp, Artificial sequence
  SiRNA target sequence
aaacttaggaaagttcgacgttacgcc

SEQ ID NO: 193649 - DNA, 27 bp, Artificial sequence
  SiRNA target sequence
aacttaggaaagttcgacgttacgccc

SEQ ID NO: 193650 - DNA, 27 bp, Artificial sequence
  SiRNA target sequence
acttaggaaagttcgacgttacgcccg

SEQ ID NO: 193651 - DNA, 27 bp, Artificial sequence
  SiRNA target sequence
cttaggaaagttcgacgttacgcccga

SEQ ID NO: 193652 - DNA, 27 bp, Artificial sequence
  SiRNA target sequence
ttaggaaagttcgacgttacgcccgac

SEQ ID NO: 193653 - DNA, 27 bp, Artificial sequence
  SiRNA target sequence
taggaaagttcgacgttacgcccgact

SEQ ID NO: 193654 - DNA, 27 bp, Artificial sequence
  SiRNA target sequence
aggaaagttcgacgttacgcccgactg

SEQ ID NO: 193655 - DNA, 27 bp, Artificial sequence
  SiRNA target sequence
ggaaagttcgacgttacgcccgactgg

SEQ ID NO: 193656 - DNA, 27 bp, Artificial sequence
  SiRNA target sequence
gaaagttcgacgttacgcccgactggg

SEQ ID NO: 193657 - DNA, 27 bp, Artificial sequence
  SiRNA target sequence
aaagttcgacgttacgcccgactgggc

SEQ ID NO: 193658 - DNA, 27 bp, Artificial sequence
  SiRNA target sequence
aagttcgacgttacgcccgactgggca

SEQ ID NO: 193659 - DNA, 27 bp, Artificial sequence
  SiRNA target sequence
agttcgacgttacgcccgactgggcag

SEQ ID NO: 193660 - DNA, 27 bp, Artificial sequence
  SiRNA target sequence
gttcgacgttacgcccgactgggcagc

SEQ ID NO: 193661 - DNA, 27 bp, Artificial sequence
  SiRNA target sequence
ttcgacgttacgcccgactgggcagca

SEQ ID NO: 193662 - DNA, 27 bp, Artificial sequence
  SiRNA target sequence
tcgacgttacgcccgactgggcagcaa

SEQ ID NO: 193663 - DNA, 27 bp, Artificial sequence
  SiRNA target sequence
cgacgttacgcccgactgggcagcaat

SEQ ID NO: 193664 - DNA, 27 bp, Artificial sequence
  SiRNA target sequence
gacgttacgcccgactgggcagcaatt

SEQ ID NO: 193665 - DNA, 27 bp, Artificial sequence
  SiRNA target sequence
acgttacgcccgactgggcagcaattc

SEQ ID NO: 193666 - DNA, 27 bp, Artificial sequence
  SiRNA target sequence
cgttacgcccgactgggcagcaattct

SEQ ID NO: 193667 - DNA, 27 bp, Artificial sequence
  SiRNA target sequence
gttacgcccgactgggcagcaattcta

SEQ ID NO: 193668 - DNA, 27 bp, Artificial sequence
  SiRNA target sequence
ttacgcccgactgggcagcaattctaa

SEQ ID NO: 193669 - DNA, 27 bp, Artificial sequence
  SiRNA target sequence
tacgcccgactgggcagcaattctaaa

SEQ ID NO: 193670 - DNA, 27 bp, Artificial sequence
  SiRNA target sequence
acgcccgactgggcagcaattctaaat

SEQ ID NO: 193671 - DNA, 27 bp, Artificial sequence
  SiRNA target sequence
cgcccgactgggcagcaattctaaata

SEQ ID NO: 193672 - DNA, 27 bp, Artificial sequence
  SiRNA target sequence
gcccgactgggcagcaattctaaataa

SEQ ID NO: 193673 - DNA, 27 bp, Artificial sequence
  SiRNA target sequence
cccgactgggcagcaattctaaataat

SEQ ID NO: 193674 - DNA, 27 bp, Artificial sequence
  SiRNA target sequence
ccgactgggcagcaattctaaataatt

SEQ ID NO: 193675 - DNA, 27 bp, Artificial sequence
  SiRNA target sequence
cgactgggcagcaattctaaataatta

SEQ ID NO: 193676 - DNA, 27 bp, Artificial sequence
  SiRNA target sequence
gactgggcagcaattctaaataattat

SEQ ID NO: 193677 - DNA, 27 bp, Artificial sequence
  SiRNA target sequence
actgggcagcaattctaaataattata

SEQ ID NO: 193678 - DNA, 27 bp, Artificial sequence
  SiRNA target sequence
ctgggcagcaattctaaataattataa

SEQ ID NO: 193679 - DNA, 27 bp, Artificial sequence
  SiRNA target sequence
tgggcagcaattctaaataattataaa

SEQ ID NO: 193680 - DNA, 27 bp, Artificial sequence
  SiRNA target sequence
gggcagcaattctaaataattataaag

SEQ ID NO: 193681 - DNA, 27 bp, Artificial sequence
  SiRNA target sequence
ggcagcaattctaaataattataaagg

SEQ ID NO: 193682 - DNA, 27 bp, Artificial sequence
  SiRNA target sequence
gcagcaattctaaataattataaagga

SEQ ID NO: 193683 - DNA, 27 bp, Artificial sequence
  SiRNA target sequence
cagcaattctaaataattataaaggat

SEQ ID NO: 193684 - DNA, 27 bp, Artificial sequence
  SiRNA target sequence
agcaattctaaataattataaaggatc

SEQ ID NO: 193685 - DNA, 27 bp, Artificial sequence
  SiRNA target sequence
gcaattctaaataattataaaggatct

SEQ ID NO: 193686 - DNA, 27 bp, Artificial sequence
  SiRNA target sequence
caattctaaataattataaaggatctg

SEQ ID NO: 193687 - DNA, 27 bp, Artificial sequence
  SiRNA target sequence
aattctaaataattataaaggatctga

SEQ ID NO: 193688 - DNA, 27 bp, Artificial sequence
  SiRNA target sequence
attctaaataattataaaggatctgaa

SEQ ID NO: 193689 - DNA, 27 bp, Artificial sequence
  SiRNA target sequence
ttctaaataattataaaggatctgaac

SEQ ID NO: 193690 - DNA, 27 bp, Artificial sequence
  SiRNA target sequence
tctaaataattataaaggatctgaact

SEQ ID NO: 193691 - DNA, 27 bp, Artificial sequence
  SiRNA target sequence
ctaaataattataaaggatctgaactt

SEQ ID NO: 193692 - DNA, 27 bp, Artificial sequence
  SiRNA target sequence
taaataattataaaggatctgaacttc

SEQ ID NO: 193693 - DNA, 27 bp, Artificial sequence
  SiRNA target sequence
aaataattataaaggatctgaacttca

SEQ ID NO: 193694 - DNA, 27 bp, Artificial sequence
  SiRNA target sequence
aataattataaaggatctgaacttcat

SEQ ID NO: 193695 - DNA, 27 bp, Artificial sequence
  SiRNA target sequence
ataattataaaggatctgaacttcatg

SEQ ID NO: 193696 - DNA, 27 bp, Artificial sequence
  SiRNA target sequence
taattataaaggatctgaacttcatgg

SEQ ID NO: 193697 - DNA, 27 bp, Artificial sequence
  SiRNA target sequence
aattataaaggatctgaacttcatgga

SEQ ID NO: 193698 - DNA, 27 bp, Artificial sequence
  SiRNA target sequence
attataaaggatctgaacttcatggat

SEQ ID NO: 193699 - DNA, 27 bp, Artificial sequence
  SiRNA target sequence
ttataaaggatctgaacttcatggatt

SEQ ID NO: 193700 - DNA, 27 bp, Artificial sequence
  SiRNA target sequence
tataaaggatctgaacttcatggattt

SEQ ID NO: 193701 - DNA, 27 bp, Artificial sequence
  SiRNA target sequence
ataaaggatctgaacttcatggatttt

SEQ ID NO: 193702 - DNA, 27 bp, Artificial sequence
  SiRNA target sequence
taaaggatctgaacttcatggattttt

SEQ ID NO: 193703 - DNA, 27 bp, Artificial sequence
  SiRNA target sequence
aaaggatctgaacttcatggatttttt

SEQ ID NO: 193704 - DNA, 27 bp, Artificial sequence
  SiRNA target sequence
aaggatctgaacttcatggatttttta

SEQ ID NO: 193705 - DNA, 27 bp, Artificial sequence
  SiRNA target sequence
aggatctgaacttcatggattttttac

SEQ ID NO: 193706 - DNA, 27 bp, Artificial sequence
  SiRNA target sequence
ggatctgaacttcatggattttttact

SEQ ID NO: 193707 - DNA, 27 bp, Artificial sequence
  SiRNA target sequence
gatctgaacttcatggattttttacta

SEQ ID NO: 193708 - DNA, 27 bp, Artificial sequence
  SiRNA target sequence
atctgaacttcatggattttttactaa

SEQ ID NO: 193709 - DNA, 27 bp, Artificial sequence
  SiRNA target sequence
tctgaacttcatggattttttactaaa

SEQ ID NO: 193710 - DNA, 27 bp, Artificial sequence
  SiRNA target sequence
ctgaacttcatggattttttactaaaa

SEQ ID NO: 193711 - DNA, 27 bp, Artificial sequence
  SiRNA target sequence
tgaacttcatggattttttactaaaat

SEQ ID NO: 193712 - DNA, 27 bp, Artificial sequence
  SiRNA target sequence
gaacttcatggattttttactaaaatt

SEQ ID NO: 193713 - DNA, 27 bp, Artificial sequence
  SiRNA target sequence
aacttcatggattttttactaaaattt

SEQ ID NO: 193714 - DNA, 27 bp, Artificial sequence
  SiRNA target sequence
acttcatggattttttactaaaatttt

SEQ ID NO: 193715 - DNA, 27 bp, Artificial sequence
  SiRNA target sequence
cttcatggattttttactaaaatttta

SEQ ID NO: 193716 - DNA, 27 bp, Artificial sequence
  SiRNA target sequence
ttcatggattttttactaaaattttag

SEQ ID NO: 193717 - DNA, 27 bp, Artificial sequence
  SiRNA target sequence
tcatggattttttactaaaattttaga

SEQ ID NO: 193718 - DNA, 27 bp, Artificial sequence
  SiRNA target sequence
catggattttttactaaaattttagaa

SEQ ID NO: 193719 - DNA, 27 bp, Artificial sequence
  SiRNA target sequence
atggattttttactaaaattttagaag

SEQ ID NO: 193720 - DNA, 27 bp, Artificial sequence
  SiRNA target sequence
tggattttttactaaaattttagaagg

SEQ ID NO: 193721 - DNA, 27 bp, Artificial sequence
  SiRNA target sequence
ggattttttactaaaattttagaaggg

SEQ ID NO: 193722 - DNA, 27 bp, Artificial sequence
  SiRNA target sequence
gattttttactaaaattttagaagggt

SEQ ID NO: 193723 - DNA, 27 bp, Artificial sequence
  SiRNA target sequence
attttttactaaaattttagaagggtc

SEQ ID NO: 193724 - DNA, 27 bp, Artificial sequence
  SiRNA target sequence
ttttttactaaaattttagaagggtct

SEQ ID NO: 193725 - DNA, 27 bp, Artificial sequence
  SiRNA target sequence
tttttactaaaattttagaagggtcta

SEQ ID NO: 193726 - DNA, 27 bp, Artificial sequence
  SiRNA target sequence
ttttactaaaattttagaagggtctat

SEQ ID NO: 193727 - DNA, 27 bp, Artificial sequence
  SiRNA target sequence
tttactaaaattttagaagggtctatt

SEQ ID NO: 193728 - DNA, 27 bp, Artificial sequence
  SiRNA target sequence
ttactaaaattttagaagggtctatta

SEQ ID NO: 193729 - DNA, 27 bp, Artificial sequence
  SiRNA target sequence
tactaaaattttagaagggtctattaa

SEQ ID NO: 193730 - DNA, 27 bp, Artificial sequence
  SiRNA target sequence
actaaaattttagaagggtctattaaa

SEQ ID NO: 193731 - DNA, 27 bp, Artificial sequence
  SiRNA target sequence
ctaaaattttagaagggtctattaaag

SEQ ID NO: 193732 - DNA, 27 bp, Artificial sequence
  SiRNA target sequence
taaaattttagaagggtctattaaagc

SEQ ID NO: 193733 - DNA, 27 bp, Artificial sequence
  SiRNA target sequence
aaaattttagaagggtctattaaagct

SEQ ID NO: 193734 - DNA, 27 bp, Artificial sequence
  SiRNA target sequence
aaattttagaagggtctattaaagcta

SEQ ID NO: 193735 - DNA, 27 bp, Artificial sequence
  SiRNA target sequence
aattttagaagggtctattaaagctat

SEQ ID NO: 193736 - DNA, 27 bp, Artificial sequence
  SiRNA target sequence
attttagaagggtctattaaagctatt

SEQ ID NO: 193737 - DNA, 27 bp, Artificial sequence
  SiRNA target sequence
ttttagaagggtctattaaagctattt

SEQ ID NO: 193738 - DNA, 27 bp, Artificial sequence
  SiRNA target sequence
tttagaagggtctattaaagctatttc

SEQ ID NO: 193739 - DNA, 27 bp, Artificial sequence
  SiRNA target sequence
ttagaagggtctattaaagctatttct

SEQ ID NO: 193740 - DNA, 27 bp, Artificial sequence
  SiRNA target sequence
tagaagggtctattaaagctatttcta

SEQ ID NO: 193741 - DNA, 27 bp, Artificial sequence
  SiRNA target sequence
agaagggtctattaaagctatttctaa

SEQ ID NO: 193742 - DNA, 27 bp, Artificial sequence
  SiRNA target sequence
gaagggtctattaaagctatttctaag

SEQ ID NO: 193743 - DNA, 27 bp, Artificial sequence
  SiRNA target sequence
aagggtctattaaagctatttctaaga

SEQ ID NO: 193744 - DNA, 27 bp, Artificial sequence
  SiRNA target sequence
agggtctattaaagctatttctaagat

SEQ ID NO: 193745 - DNA, 27 bp, Artificial sequence
  SiRNA target sequence
gggtctattaaagctatttctaagata

SEQ ID NO: 193746 - DNA, 27 bp, Artificial sequence
  SiRNA target sequence
ggtctattaaagctatttctaagatac

SEQ ID NO: 193747 - DNA, 27 bp, Artificial sequence
  SiRNA target sequence
gtctattaaagctatttctaagataca

SEQ ID NO: 193748 - DNA, 27 bp, Artificial sequence
  SiRNA target sequence
tctattaaagctatttctaagatacag

SEQ ID NO: 193749 - DNA, 27 bp, Artificial sequence
  SiRNA target sequence
ctattaaagctatttctaagatacagt

SEQ ID NO: 193750 - DNA, 27 bp, Artificial sequence
  SiRNA target sequence
tattaaagctatttctaagatacagta

SEQ ID NO: 193751 - DNA, 27 bp, Artificial sequence
  SiRNA target sequence
attaaagctatttctaagatacagtat

SEQ ID NO: 193752 - DNA, 27 bp, Artificial sequence
  SiRNA target sequence
ttaaagctatttctaagatacagtata

SEQ ID NO: 193753 - DNA, 27 bp, Artificial sequence
  SiRNA target sequence
taaagctatttctaagatacagtatat

SEQ ID NO: 193754 - DNA, 27 bp, Artificial sequence
  SiRNA target sequence
aaagctatttctaagatacagtatata

SEQ ID NO: 193755 - DNA, 27 bp, Artificial sequence
  SiRNA target sequence
aagctatttctaagatacagtatatag

SEQ ID NO: 193756 - DNA, 27 bp, Artificial sequence
  SiRNA target sequence
agctatttctaagatacagtatataga

SEQ ID NO: 193757 - DNA, 27 bp, Artificial sequence
  SiRNA target sequence
gctatttctaagatacagtatatagat

SEQ ID NO: 193758 - DNA, 27 bp, Artificial sequence
  SiRNA target sequence
ctatttctaagatacagtatatagata

SEQ ID NO: 193759 - DNA, 27 bp, Artificial sequence
  SiRNA target sequence
tatttctaagatacagtatatagataa

SEQ ID NO: 193760 - DNA, 27 bp, Artificial sequence
  SiRNA target sequence
atttctaagatacagtatatagataaa

SEQ ID NO: 193761 - DNA, 27 bp, Artificial sequence
  SiRNA target sequence
tttctaagatacagtatatagataaaa

SEQ ID NO: 193762 - DNA, 27 bp, Artificial sequence
  SiRNA target sequence
ttctaagatacagtatatagataaaat

SEQ ID NO: 193763 - DNA, 27 bp, Artificial sequence
  SiRNA target sequence
tctaagatacagtatatagataaaatg

SEQ ID NO: 193764 - DNA, 27 bp, Artificial sequence
  SiRNA target sequence
ctaagatacagtatatagataaaatgc

SEQ ID NO: 193765 - DNA, 27 bp, Artificial sequence
  SiRNA target sequence
taagatacagtatatagataaaatgcc

SEQ ID NO: 193766 - DNA, 27 bp, Artificial sequence
  SiRNA target sequence
aagatacagtatatagataaaatgcct

SEQ ID NO: 193767 - DNA, 27 bp, Artificial sequence
  SiRNA target sequence
agatacagtatatagataaaatgccta

SEQ ID NO: 193768 - DNA, 27 bp, Artificial sequence
  SiRNA target sequence
gatacagtatatagataaaatgcctaa

SEQ ID NO: 193769 - DNA, 27 bp, Artificial sequence
  SiRNA target sequence
atacagtatatagataaaatgcctaaa

SEQ ID NO: 193770 - DNA, 27 bp, Artificial sequence
  SiRNA target sequence
tacagtatatagataaaatgcctaaat

SEQ ID NO: 193771 - DNA, 27 bp, Artificial sequence
  SiRNA target sequence
acagtatatagataaaatgcctaaatt

SEQ ID NO: 193772 - DNA, 27 bp, Artificial sequence
  SiRNA target sequence
cagtatatagataaaatgcctaaattt

SEQ ID NO: 193773 - DNA, 27 bp, Artificial sequence
  SiRNA target sequence
agtatatagataaaatgcctaaatttt

SEQ ID NO: 193774 - DNA, 27 bp, Artificial sequence
  SiRNA target sequence
gtatatagataaaatgcctaaattttt

SEQ ID NO: 193775 - DNA, 27 bp, Artificial sequence
  SiRNA target sequence
tatatagataaaatgcctaaattttta

SEQ ID NO: 193776 - DNA, 27 bp, Artificial sequence
  SiRNA target sequence
atatagataaaatgcctaaatttttaa

SEQ ID NO: 193777 - DNA, 27 bp, Artificial sequence
  SiRNA target sequence
tatagataaaatgcctaaatttttaaa

SEQ ID NO: 193778 - DNA, 27 bp, Artificial sequence
  SiRNA target sequence
atagataaaatgcctaaatttttaaaa

SEQ ID NO: 193779 - DNA, 27 bp, Artificial sequence
  SiRNA target sequence
tagataaaatgcctaaatttttaaaag

SEQ ID NO: 193780 - DNA, 27 bp, Artificial sequence
  SiRNA target sequence
agataaaatgcctaaatttttaaaagg

SEQ ID NO: 193781 - DNA, 27 bp, Artificial sequence
  SiRNA target sequence
gataaaatgcctaaatttttaaaagga

SEQ ID NO: 193782 - DNA, 27 bp, Artificial sequence
  SiRNA target sequence
ataaaatgcctaaatttttaaaaggac

SEQ ID NO: 193783 - DNA, 27 bp, Artificial sequence
  SiRNA target sequence
taaaatgcctaaatttttaaaaggacg

SEQ ID NO: 193784 - DNA, 27 bp, Artificial sequence
  SiRNA target sequence
aaaatgcctaaatttttaaaaggacgc

SEQ ID NO: 193785 - DNA, 27 bp, Artificial sequence
  SiRNA target sequence
aaatgcctaaatttttaaaaggacgct

SEQ ID NO: 193786 - DNA, 27 bp, Artificial sequence
  SiRNA target sequence
aatgcctaaatttttaaaaggacgcta

SEQ ID NO: 193787 - DNA, 27 bp, Artificial sequence
  SiRNA target sequence
atgcctaaatttttaaaaggacgctat

SEQ ID NO: 193788 - DNA, 27 bp, Artificial sequence
  SiRNA target sequence
tgcctaaatttttaaaaggacgctata

SEQ ID NO: 193789 - DNA, 27 bp, Artificial sequence
  SiRNA target sequence
gcctaaatttttaaaaggacgctataa

SEQ ID NO: 193790 - DNA, 27 bp, Artificial sequence
  SiRNA target sequence
cctaaatttttaaaaggacgctataag

SEQ ID NO: 193791 - DNA, 27 bp, Artificial sequence
  SiRNA target sequence
ctaaatttttaaaaggacgctataagt

SEQ ID NO: 193792 - DNA, 27 bp, Artificial sequence
  SiRNA target sequence
taaatttttaaaaggacgctataagtc

SEQ ID NO: 193793 - DNA, 27 bp, Artificial sequence
  SiRNA target sequence
aaatttttaaaaggacgctataagtca

SEQ ID NO: 193794 - DNA, 27 bp, Artificial sequence
  SiRNA target sequence
aatttttaaaaggacgctataagtcag

SEQ ID NO: 193795 - DNA, 27 bp, Artificial sequence
  SiRNA target sequence
atttttaaaaggacgctataagtcaga

SEQ ID NO: 193796 - DNA, 27 bp, Artificial sequence
  SiRNA target sequence
tttttaaaaggacgctataagtcagaa

SEQ ID NO: 193797 - DNA, 27 bp, Artificial sequence
  SiRNA target sequence
ttttaaaaggacgctataagtcagaaa

SEQ ID NO: 193798 - DNA, 27 bp, Artificial sequence
  SiRNA target sequence
tttaaaaggacgctataagtcagaaat

SEQ ID NO: 193799 - DNA, 27 bp, Artificial sequence
  SiRNA target sequence
ttaaaaggacgctataagtcagaaatc

SEQ ID NO: 193800 - DNA, 27 bp, Artificial sequence
  SiRNA target sequence
taaaaggacgctataagtcagaaatcg

SEQ ID NO: 193801 - DNA, 27 bp, Artificial sequence
  SiRNA target sequence
aaaaggacgctataagtcagaaatcgc

SEQ ID NO: 193802 - DNA, 27 bp, Artificial sequence
  SiRNA target sequence
aaaggacgctataagtcagaaatcgcc

SEQ ID NO: 193803 - DNA, 27 bp, Artificial sequence
  SiRNA target sequence
aaggacgctataagtcagaaatcgcct

SEQ ID NO: 193804 - DNA, 27 bp, Artificial sequence
  SiRNA target sequence
aggacgctataagtcagaaatcgcctc

SEQ ID NO: 193805 - DNA, 27 bp, Artificial sequence
  SiRNA target sequence
ggacgctataagtcagaaatcgcctcc

SEQ ID NO: 193806 - DNA, 27 bp, Artificial sequence
  SiRNA target sequence
gacgctataagtcagaaatcgcctccg

SEQ ID NO: 193807 - DNA, 27 bp, Artificial sequence
  SiRNA target sequence
acgctataagtcagaaatcgcctccgg

SEQ ID NO: 193808 - DNA, 27 bp, Artificial sequence
  SiRNA target sequence
cgctataagtcagaaatcgcctccgga

SEQ ID NO: 193809 - DNA, 27 bp, Artificial sequence
  SiRNA target sequence
gctataagtcagaaatcgcctccggaa

SEQ ID NO: 193810 - DNA, 27 bp, Artificial sequence
  SiRNA target sequence
ctataagtcagaaatcgcctccggaaa

SEQ ID NO: 193811 - DNA, 27 bp, Artificial sequence
  SiRNA target sequence
tataagtcagaaatcgcctccggaaaa

SEQ ID NO: 193812 - DNA, 27 bp, Artificial sequence
  SiRNA target sequence
ataagtcagaaatcgcctccggaaaaa

SEQ ID NO: 193813 - DNA, 27 bp, Artificial sequence
  SiRNA target sequence
taagtcagaaatcgcctccggaaaaat

SEQ ID NO: 193814 - DNA, 27 bp, Artificial sequence
  SiRNA target sequence
aagtcagaaatcgcctccggaaaaatg

SEQ ID NO: 193815 - DNA, 27 bp, Artificial sequence
  SiRNA target sequence
agtcagaaatcgcctccggaaaaatgt

SEQ ID NO: 193816 - DNA, 27 bp, Artificial sequence
  SiRNA target sequence
gtcagaaatcgcctccggaaaaatgtt

SEQ ID NO: 193817 - DNA, 27 bp, Artificial sequence
  SiRNA target sequence
tcagaaatcgcctccggaaaaatgttg

SEQ ID NO: 193818 - DNA, 27 bp, Artificial sequence
  SiRNA target sequence
cagaaatcgcctccggaaaaatgttgt

SEQ ID NO: 193819 - DNA, 27 bp, Artificial sequence
  SiRNA target sequence
agaaatcgcctccggaaaaatgttgtt

SEQ ID NO: 193820 - DNA, 27 bp, Artificial sequence
  SiRNA target sequence
gaaatcgcctccggaaaaatgttgttt

SEQ ID NO: 193821 - DNA, 27 bp, Artificial sequence
  SiRNA target sequence
aaatcgcctccggaaaaatgttgttta

SEQ ID NO: 193822 - DNA, 27 bp, Artificial sequence
  SiRNA target sequence
aatcgcctccggaaaaatgttgtttac

SEQ ID NO: 193823 - DNA, 27 bp, Artificial sequence
  SiRNA target sequence
atcgcctccggaaaaatgttgtttact

SEQ ID NO: 193824 - DNA, 27 bp, Artificial sequence
  SiRNA target sequence
tcgcctccggaaaaatgttgtttactg

SEQ ID NO: 193825 - DNA, 27 bp, Artificial sequence
  SiRNA target sequence
cgcctccggaaaaatgttgtttactgt

SEQ ID NO: 193826 - DNA, 27 bp, Artificial sequence
  SiRNA target sequence
gcctccggaaaaatgttgtttactgtt

SEQ ID NO: 193827 - DNA, 27 bp, Artificial sequence
  SiRNA target sequence
cctccggaaaaatgttgtttactgtta

SEQ ID NO: 193828 - DNA, 27 bp, Artificial sequence
  SiRNA target sequence
ctccggaaaaatgttgtttactgttaa

SEQ ID NO: 193829 - DNA, 27 bp, Artificial sequence
  SiRNA target sequence
tccggaaaaatgttgtttactgttaat

SEQ ID NO: 193830 - DNA, 27 bp, Artificial sequence
  SiRNA target sequence
ccggaaaaatgttgtttactgttaatg

SEQ ID NO: 193831 - DNA, 27 bp, Artificial sequence
  SiRNA target sequence
cggaaaaatgttgtttactgttaatga

SEQ ID NO: 193832 - DNA, 27 bp, Artificial sequence
  SiRNA target sequence
ggaaaaatgttgtttactgttaatgat

SEQ ID NO: 193833 - DNA, 27 bp, Artificial sequence
  SiRNA target sequence
gaaaaatgttgtttactgttaatgata

SEQ ID NO: 193834 - DNA, 27 bp, Artificial sequence
  SiRNA target sequence
aaaaatgttgtttactgttaatgatat

SEQ ID NO: 193835 - DNA, 27 bp, Artificial sequence
  SiRNA target sequence
aaaatgttgtttactgttaatgatata

SEQ ID NO: 193836 - DNA, 27 bp, Artificial sequence
  SiRNA target sequence
aaatgttgtttactgttaatgatatat

SEQ ID NO: 193837 - DNA, 27 bp, Artificial sequence
  SiRNA target sequence
aatgttgtttactgttaatgatatatt

SEQ ID NO: 193838 - DNA, 27 bp, Artificial sequence
  SiRNA target sequence
atgttgtttactgttaatgatatatta

SEQ ID NO: 193839 - DNA, 27 bp, Artificial sequence
  SiRNA target sequence
tgttgtttactgttaatgatatattaa

SEQ ID NO: 193840 - DNA, 27 bp, Artificial sequence
  SiRNA target sequence
gttgtttactgttaatgatatattaaa

SEQ ID NO: 193841 - DNA, 27 bp, Artificial sequence
  SiRNA target sequence
ttgtttactgttaatgatatattaaaa

SEQ ID NO: 193842 - DNA, 27 bp, Artificial sequence
  SiRNA target sequence
tgtttactgttaatgatatattaaaaa

SEQ ID NO: 193843 - DNA, 27 bp, Artificial sequence
  SiRNA target sequence
gtttactgttaatgatatattaaaaaa

SEQ ID NO: 193844 - DNA, 27 bp, Artificial sequence
  SiRNA target sequence
tttactgttaatgatatattaaaaaaa

SEQ ID NO: 193845 - DNA, 27 bp, Artificial sequence
  SiRNA target sequence
ttactgttaatgatatattaaaaaaag

SEQ ID NO: 193846 - DNA, 27 bp, Artificial sequence
  SiRNA target sequence
tactgttaatgatatattaaaaaaagt

SEQ ID NO: 193847 - DNA, 27 bp, Artificial sequence
  SiRNA target sequence
actgttaatgatatattaaaaaaagtt

SEQ ID NO: 193848 - DNA, 27 bp, Artificial sequence
  SiRNA target sequence
ctgttaatgatatattaaaaaaagttg

SEQ ID NO: 193849 - DNA, 27 bp, Artificial sequence
  SiRNA target sequence
tgttaatgatatattaaaaaaagttga

SEQ ID NO: 193850 - DNA, 27 bp, Artificial sequence
  SiRNA target sequence
gttaatgatatattaaaaaaagttgat

SEQ ID NO: 193851 - DNA, 27 bp, Artificial sequence
  SiRNA target sequence
ttaatgatatattaaaaaaagttgatg

SEQ ID NO: 193852 - DNA, 27 bp, Artificial sequence
  SiRNA target sequence
taatgatatattaaaaaaagttgatga

SEQ ID NO: 193853 - DNA, 27 bp, Artificial sequence
  SiRNA target sequence
aatgatatattaaaaaaagttgatgaa

SEQ ID NO: 193854 - DNA, 27 bp, Artificial sequence
  SiRNA target sequence
atgatatattaaaaaaagttgatgaaa

SEQ ID NO: 193855 - DNA, 27 bp, Artificial sequence
  SiRNA target sequence
tgatatattaaaaaaagttgatgaaaa

SEQ ID NO: 193856 - DNA, 27 bp, Artificial sequence
  SiRNA target sequence
gatatattaaaaaaagttgatgaaaaa

SEQ ID NO: 193857 - DNA, 27 bp, Artificial sequence
  SiRNA target sequence
atatattaaaaaaagttgatgaaaaaa

SEQ ID NO: 193858 - DNA, 27 bp, Artificial sequence
  SiRNA target sequence
tatattaaaaaaagttgatgaaaaaaa

SEQ ID NO: 193859 - DNA, 27 bp, Artificial sequence
  SiRNA target sequence
atattaaaaaaagttgatgaaaaaaat

SEQ ID NO: 193860 - DNA, 27 bp, Artificial sequence
  SiRNA target sequence
tattaaaaaaagttgatgaaaaaaata

SEQ ID NO: 193861 - DNA, 27 bp, Artificial sequence
  SiRNA target sequence
attaaaaaaagttgatgaaaaaaataa

SEQ ID NO: 193862 - DNA, 27 bp, Artificial sequence
  SiRNA target sequence
ttaaaaaaagttgatgaaaaaaataaa

SEQ ID NO: 193863 - DNA, 27 bp, Artificial sequence
  SiRNA target sequence
taaaaaaagttgatgaaaaaaataaat

SEQ ID NO: 193864 - DNA, 27 bp, Artificial sequence
  SiRNA target sequence
aaaaaaagttgatgaaaaaaataaatt

SEQ ID NO: 193865 - DNA, 27 bp, Artificial sequence
  SiRNA target sequence
aaaaaagttgatgaaaaaaataaattt

SEQ ID NO: 193866 - DNA, 27 bp, Artificial sequence
  SiRNA target sequence
aaaaagttgatgaaaaaaataaatttg

SEQ ID NO: 193867 - DNA, 27 bp, Artificial sequence
  SiRNA target sequence
aaaagttgatgaaaaaaataaatttga

SEQ ID NO: 193868 - DNA, 27 bp, Artificial sequence
  SiRNA target sequence
aaagttgatgaaaaaaataaatttgac

SEQ ID NO: 193869 - DNA, 27 bp, Artificial sequence
  SiRNA target sequence
aagttgatgaaaaaaataaatttgact

SEQ ID NO: 193870 - DNA, 27 bp, Artificial sequence
  SiRNA target sequence
agttgatgaaaaaaataaatttgacta

SEQ ID NO: 193871 - DNA, 27 bp, Artificial sequence
  SiRNA target sequence
gttgatgaaaaaaataaatttgactat

SEQ ID NO: 193872 - DNA, 27 bp, Artificial sequence
  SiRNA target sequence
ttgatgaaaaaaataaatttgactatt

SEQ ID NO: 193873 - DNA, 27 bp, Artificial sequence
  SiRNA target sequence
tgatgaaaaaaataaatttgactatta

SEQ ID NO: 193874 - DNA, 27 bp, Artificial sequence
  SiRNA target sequence
gatgaaaaaaataaatttgactattac

SEQ ID NO: 193875 - DNA, 27 bp, Artificial sequence
  SiRNA target sequence
atgaaaaaaataaatttgactattacg

SEQ ID NO: 193876 - DNA, 27 bp, Artificial sequence
  SiRNA target sequence
tgaaaaaaataaatttgactattacgt

SEQ ID NO: 193877 - DNA, 27 bp, Artificial sequence
  SiRNA target sequence
gaaaaaaataaatttgactattacgta

SEQ ID NO: 193878 - DNA, 27 bp, Artificial sequence
  SiRNA target sequence
aaaaaaataaatttgactattacgtag

SEQ ID NO: 193879 - DNA, 27 bp, Artificial sequence
  SiRNA target sequence
aaaaaataaatttgactattacgtaga

SEQ ID NO: 193880 - DNA, 27 bp, Artificial sequence
  SiRNA target sequence
aaaaataaatttgactattacgtagat

SEQ ID NO: 193881 - DNA, 27 bp, Artificial sequence
  SiRNA target sequence
aaaataaatttgactattacgtagata

SEQ ID NO: 193882 - DNA, 27 bp, Artificial sequence
  SiRNA target sequence
aaataaatttgactattacgtagataa

SEQ ID NO: 193883 - DNA, 27 bp, Artificial sequence
  SiRNA target sequence
aataaatttgactattacgtagataaa

SEQ ID NO: 193884 - DNA, 27 bp, Artificial sequence
  SiRNA target sequence
ataaatttgactattacgtagataaaa

SEQ ID NO: 193885 - DNA, 27 bp, Artificial sequence
  SiRNA target sequence
taaatttgactattacgtagataaaat

SEQ ID NO: 193886 - DNA, 27 bp, Artificial sequence
  SiRNA target sequence
aaatttgactattacgtagataaaatg

SEQ ID NO: 193887 - DNA, 27 bp, Artificial sequence
  SiRNA target sequence
aatttgactattacgtagataaaatgg

SEQ ID NO: 193888 - DNA, 27 bp, Artificial sequence
  SiRNA target sequence
atttgactattacgtagataaaatggc

SEQ ID NO: 193889 - DNA, 27 bp, Artificial sequence
  SiRNA target sequence
tttgactattacgtagataaaatggca

SEQ ID NO: 193890 - DNA, 27 bp, Artificial sequence
  SiRNA target sequence
ttgactattacgtagataaaatggcac

SEQ ID NO: 193891 - DNA, 27 bp, Artificial sequence
  SiRNA target sequence
tgactattacgtagataaaatggcact

SEQ ID NO: 193892 - DNA, 27 bp, Artificial sequence
  SiRNA target sequence
gactattacgtagataaaatggcactt

SEQ ID NO: 193893 - DNA, 27 bp, Artificial sequence
  SiRNA target sequence
actattacgtagataaaatggcactta

SEQ ID NO: 193894 - DNA, 27 bp, Artificial sequence
  SiRNA target sequence
ctattacgtagataaaatggcacttaa

SEQ ID NO: 193895 - DNA, 27 bp, Artificial sequence
  SiRNA target sequence
tattacgtagataaaatggcacttaaa

SEQ ID NO: 193896 - DNA, 27 bp, Artificial sequence
  SiRNA target sequence
attacgtagataaaatggcacttaaaa

SEQ ID NO: 193897 - DNA, 27 bp, Artificial sequence
  SiRNA target sequence
ttacgtagataaaatggcacttaaaaa

SEQ ID NO: 193898 - DNA, 27 bp, Artificial sequence
  SiRNA target sequence
tacgtagataaaatggcacttaaaaat

SEQ ID NO: 193899 - DNA, 27 bp, Artificial sequence
  SiRNA target sequence
acgtagataaaatggcacttaaaaatg

SEQ ID NO: 193900 - DNA, 27 bp, Artificial sequence
  SiRNA target sequence
cgtagataaaatggcacttaaaaatgt

SEQ ID NO: 193901 - DNA, 27 bp, Artificial sequence
  SiRNA target sequence
gtagataaaatggcacttaaaaatgta

SEQ ID NO: 193902 - DNA, 27 bp, Artificial sequence
  SiRNA target sequence
tagataaaatggcacttaaaaatgtat

SEQ ID NO: 193903 - DNA, 27 bp, Artificial sequence
  SiRNA target sequence
agataaaatggcacttaaaaatgtatt

SEQ ID NO: 193904 - DNA, 27 bp, Artificial sequence
  SiRNA target sequence
gataaaatggcacttaaaaatgtatta

SEQ ID NO: 193905 - DNA, 27 bp, Artificial sequence
  SiRNA target sequence
ataaaatggcacttaaaaatgtattaa

SEQ ID NO: 193906 - DNA, 27 bp, Artificial sequence
  SiRNA target sequence
taaaatggcacttaaaaatgtattaac

SEQ ID NO: 193907 - DNA, 27 bp, Artificial sequence
  SiRNA target sequence
aaaatggcacttaaaaatgtattaaca

SEQ ID NO: 193908 - DNA, 27 bp, Artificial sequence
  SiRNA target sequence
aaatggcacttaaaaatgtattaacaa

SEQ ID NO: 193909 - DNA, 27 bp, Artificial sequence
  SiRNA target sequence
aatggcacttaaaaatgtattaacaag

SEQ ID NO: 193910 - DNA, 27 bp, Artificial sequence
  SiRNA target sequence
atggcacttaaaaatgtattaacaaga

SEQ ID NO: 193911 - DNA, 27 bp, Artificial sequence
  SiRNA target sequence
tggcacttaaaaatgtattaacaagag

SEQ ID NO: 193912 - DNA, 27 bp, Artificial sequence
  SiRNA target sequence
ggcacttaaaaatgtattaacaagaga

SEQ ID NO: 193913 - DNA, 27 bp, Artificial sequence
  SiRNA target sequence
gcacttaaaaatgtattaacaagagaa

SEQ ID NO: 193914 - DNA, 27 bp, Artificial sequence
  SiRNA target sequence
cacttaaaaatgtattaacaagagaat

SEQ ID NO: 193915 - DNA, 27 bp, Artificial sequence
  SiRNA target sequence
acttaaaaatgtattaacaagagaatt

SEQ ID NO: 193916 - DNA, 27 bp, Artificial sequence
  SiRNA target sequence
cttaaaaatgtattaacaagagaatta

SEQ ID NO: 193917 - DNA, 27 bp, Artificial sequence
  SiRNA target sequence
ttaaaaatgtattaacaagagaattag

SEQ ID NO: 193918 - DNA, 27 bp, Artificial sequence
  SiRNA target sequence
taaaaatgtattaacaagagaattaga

SEQ ID NO: 193919 - DNA, 27 bp, Artificial sequence
  SiRNA target sequence
aaaaatgtattaacaagagaattagag

SEQ ID NO: 193920 - DNA, 27 bp, Artificial sequence
  SiRNA target sequence
aaaatgtattaacaagagaattagagc

SEQ ID NO: 193921 - DNA, 27 bp, Artificial sequence
  SiRNA target sequence
aaatgtattaacaagagaattagagca

SEQ ID NO: 193922 - DNA, 27 bp, Artificial sequence
  SiRNA target sequence
aatgtattaacaagagaattagagcaa

SEQ ID NO: 193923 - DNA, 27 bp, Artificial sequence
  SiRNA target sequence
atgtattaacaagagaattagagcaat

SEQ ID NO: 193924 - DNA, 27 bp, Artificial sequence
  SiRNA target sequence
tgtattaacaagagaattagagcaatt

SEQ ID NO: 193925 - DNA, 27 bp, Artificial sequence
  SiRNA target sequence
gtattaacaagagaattagagcaatta

SEQ ID NO: 193926 - DNA, 27 bp, Artificial sequence
  SiRNA target sequence
tattaacaagagaattagagcaattaa

SEQ ID NO: 193927 - DNA, 27 bp, Artificial sequence
  SiRNA target sequence
attaacaagagaattagagcaattaag

SEQ ID NO: 193928 - DNA, 27 bp, Artificial sequence
  SiRNA target sequence
ttaacaagagaattagagcaattaagt

SEQ ID NO: 193929 - DNA, 27 bp, Artificial sequence
  SiRNA target sequence
taacaagagaattagagcaattaagtg

SEQ ID NO: 193930 - DNA, 27 bp, Artificial sequence
  SiRNA target sequence
aacaagagaattagagcaattaagtgg

SEQ ID NO: 193931 - DNA, 27 bp, Artificial sequence
  SiRNA target sequence
acaagagaattagagcaattaagtggt

SEQ ID NO: 193932 - DNA, 27 bp, Artificial sequence
  SiRNA target sequence
caagagaattagagcaattaagtggtg

SEQ ID NO: 193933 - DNA, 27 bp, Artificial sequence
  SiRNA target sequence
aagagaattagagcaattaagtggtgg

SEQ ID NO: 193934 - DNA, 27 bp, Artificial sequence
  SiRNA target sequence
agagaattagagcaattaagtggtggt

SEQ ID NO: 193935 - DNA, 27 bp, Artificial sequence
  SiRNA target sequence
gagaattagagcaattaagtggtggtg

SEQ ID NO: 193936 - DNA, 27 bp, Artificial sequence
  SiRNA target sequence
agaattagagcaattaagtggtggtga

SEQ ID NO: 193937 - DNA, 27 bp, Artificial sequence
  SiRNA target sequence
gaattagagcaattaagtggtggtgaa

SEQ ID NO: 193938 - DNA, 27 bp, Artificial sequence
  SiRNA target sequence
aattagagcaattaagtggtggtgaac

SEQ ID NO: 193939 - DNA, 27 bp, Artificial sequence
  SiRNA target sequence
attagagcaattaagtggtggtgaact

SEQ ID NO: 193940 - DNA, 27 bp, Artificial sequence
  SiRNA target sequence
ttagagcaattaagtggtggtgaactt

SEQ ID NO: 193941 - DNA, 27 bp, Artificial sequence
  SiRNA target sequence
tagagcaattaagtggtggtgaacttc

SEQ ID NO: 193942 - DNA, 27 bp, Artificial sequence
  SiRNA target sequence
agagcaattaagtggtggtgaacttca

SEQ ID NO: 193943 - DNA, 27 bp, Artificial sequence
  SiRNA target sequence
gagcaattaagtggtggtgaacttcaa

SEQ ID NO: 193944 - DNA, 27 bp, Artificial sequence
  SiRNA target sequence
agcaattaagtggtggtgaacttcaaa

SEQ ID NO: 193945 - DNA, 27 bp, Artificial sequence
  SiRNA target sequence
gcaattaagtggtggtgaacttcaaag

SEQ ID NO: 193946 - DNA, 27 bp, Artificial sequence
  SiRNA target sequence
caattaagtggtggtgaacttcaaaga

SEQ ID NO: 193947 - DNA, 27 bp, Artificial sequence
  SiRNA target sequence
aattaagtggtggtgaacttcaaagat

SEQ ID NO: 193948 - DNA, 27 bp, Artificial sequence
  SiRNA target sequence
attaagtggtggtgaacttcaaagatt

SEQ ID NO: 193949 - DNA, 27 bp, Artificial sequence
  SiRNA target sequence
ttaagtggtggtgaacttcaaagattt

SEQ ID NO: 193950 - DNA, 27 bp, Artificial sequence
  SiRNA target sequence
taagtggtggtgaacttcaaagatttt

SEQ ID NO: 193951 - DNA, 27 bp, Artificial sequence
  SiRNA target sequence
aagtggtggtgaacttcaaagattttg

SEQ ID NO: 193952 - DNA, 27 bp, Artificial sequence
  SiRNA target sequence
agtggtggtgaacttcaaagattttgt

SEQ ID NO: 193953 - DNA, 27 bp, Artificial sequence
  SiRNA target sequence
gtggtggtgaacttcaaagattttgta

SEQ ID NO: 193954 - DNA, 27 bp, Artificial sequence
  SiRNA target sequence
tggtggtgaacttcaaagattttgtat

SEQ ID NO: 193955 - DNA, 27 bp, Artificial sequence
  SiRNA target sequence
ggtggtgaacttcaaagattttgtatt

SEQ ID NO: 193956 - DNA, 27 bp, Artificial sequence
  SiRNA target sequence
gtggtgaacttcaaagattttgtattg

SEQ ID NO: 193957 - DNA, 27 bp, Artificial sequence
  SiRNA target sequence
tggtgaacttcaaagattttgtattgc

SEQ ID NO: 193958 - DNA, 27 bp, Artificial sequence
  SiRNA target sequence
ggtgaacttcaaagattttgtattgca

SEQ ID NO: 193959 - DNA, 27 bp, Artificial sequence
  SiRNA target sequence
gtgaacttcaaagattttgtattgcat

SEQ ID NO: 193960 - DNA, 27 bp, Artificial sequence
  SiRNA target sequence
tgaacttcaaagattttgtattgcata

SEQ ID NO: 193961 - DNA, 27 bp, Artificial sequence
  SiRNA target sequence
gaacttcaaagattttgtattgcatac

SEQ ID NO: 193962 - DNA, 27 bp, Artificial sequence
  SiRNA target sequence
aacttcaaagattttgtattgcataca

SEQ ID NO: 193963 - DNA, 27 bp, Artificial sequence
  SiRNA target sequence
acttcaaagattttgtattgcatacac

SEQ ID NO: 193964 - DNA, 27 bp, Artificial sequence
  SiRNA target sequence
cttcaaagattttgtattgcatacaca

SEQ ID NO: 193965 - DNA, 27 bp, Artificial sequence
  SiRNA target sequence
ttcaaagattttgtattgcatacacat

SEQ ID NO: 193966 - DNA, 27 bp, Artificial sequence
  SiRNA target sequence
tcaaagattttgtattgcatacacatg

SEQ ID NO: 193967 - DNA, 27 bp, Artificial sequence
  SiRNA target sequence
caaagattttgtattgcatacacatgt

SEQ ID NO: 193968 - DNA, 27 bp, Artificial sequence
  SiRNA target sequence
aaagattttgtattgcatacacatgtt

SEQ ID NO: 193969 - DNA, 27 bp, Artificial sequence
  SiRNA target sequence
aagattttgtattgcatacacatgttt

SEQ ID NO: 193970 - DNA, 27 bp, Artificial sequence
  SiRNA target sequence
agattttgtattgcatacacatgttta

SEQ ID NO: 193971 - DNA, 27 bp, Artificial sequence
  SiRNA target sequence
gattttgtattgcatacacatgtttac

SEQ ID NO: 193972 - DNA, 27 bp, Artificial sequence
  SiRNA target sequence
attttgtattgcatacacatgtttaca

SEQ ID NO: 193973 - DNA, 27 bp, Artificial sequence
  SiRNA target sequence
ttttgtattgcatacacatgtttacaa

SEQ ID NO: 193974 - DNA, 27 bp, Artificial sequence
  SiRNA target sequence
tttgtattgcatacacatgtttacaag

SEQ ID NO: 193975 - DNA, 27 bp, Artificial sequence
  SiRNA target sequence
ttgtattgcatacacatgtttacaaga

SEQ ID NO: 193976 - DNA, 27 bp, Artificial sequence
  SiRNA target sequence
tgtattgcatacacatgtttacaagaa

SEQ ID NO: 193977 - DNA, 27 bp, Artificial sequence
  SiRNA target sequence
gtattgcatacacatgtttacaagaag

SEQ ID NO: 193978 - DNA, 27 bp, Artificial sequence
  SiRNA target sequence
tattgcatacacatgtttacaagaagg

SEQ ID NO: 193979 - DNA, 27 bp, Artificial sequence
  SiRNA target sequence
attgcatacacatgtttacaagaagga

SEQ ID NO: 193980 - DNA, 27 bp, Artificial sequence
  SiRNA target sequence
ttgcatacacatgtttacaagaaggaa

SEQ ID NO: 193981 - DNA, 27 bp, Artificial sequence
  SiRNA target sequence
tgcatacacatgtttacaagaaggaaa

SEQ ID NO: 193982 - DNA, 27 bp, Artificial sequence
  SiRNA target sequence
gcatacacatgtttacaagaaggaaat

SEQ ID NO: 193983 - DNA, 27 bp, Artificial sequence
  SiRNA target sequence
catacacatgtttacaagaaggaaatg

SEQ ID NO: 193984 - DNA, 27 bp, Artificial sequence
  SiRNA target sequence
atacacatgtttacaagaaggaaatgt

SEQ ID NO: 193985 - DNA, 27 bp, Artificial sequence
  SiRNA target sequence
tacacatgtttacaagaaggaaatgtt

SEQ ID NO: 193986 - DNA, 27 bp, Artificial sequence
  SiRNA target sequence
acacatgtttacaagaaggaaatgttt

SEQ ID NO: 193987 - DNA, 27 bp, Artificial sequence
  SiRNA target sequence
cacatgtttacaagaaggaaatgttta

SEQ ID NO: 193988 - DNA, 27 bp, Artificial sequence
  SiRNA target sequence
acatgtttacaagaaggaaatgtttat

SEQ ID NO: 193989 - DNA, 27 bp, Artificial sequence
  SiRNA target sequence
catgtttacaagaaggaaatgtttata

SEQ ID NO: 193990 - DNA, 27 bp, Artificial sequence
  SiRNA target sequence
atgtttacaagaaggaaatgtttatat

SEQ ID NO: 193991 - DNA, 27 bp, Artificial sequence
  SiRNA target sequence
tgtttacaagaaggaaatgtttatatt

SEQ ID NO: 193992 - DNA, 27 bp, Artificial sequence
  SiRNA target sequence
gtttacaagaaggaaatgtttatattt

SEQ ID NO: 193993 - DNA, 27 bp, Artificial sequence
  SiRNA target sequence
tttacaagaaggaaatgtttatatttt

SEQ ID NO: 193994 - DNA, 27 bp, Artificial sequence
  SiRNA target sequence
ttacaagaaggaaatgtttatattttt

SEQ ID NO: 193995 - DNA, 27 bp, Artificial sequence
  SiRNA target sequence
tacaagaaggaaatgtttatatttttg

SEQ ID NO: 193996 - DNA, 27 bp, Artificial sequence
  SiRNA target sequence
acaagaaggaaatgtttatatttttga

SEQ ID NO: 193997 - DNA, 27 bp, Artificial sequence
  SiRNA target sequence
caagaaggaaatgtttatatttttgat

SEQ ID NO: 193998 - DNA, 27 bp, Artificial sequence
  SiRNA target sequence
aagaaggaaatgtttatatttttgatg

SEQ ID NO: 193999 - DNA, 27 bp, Artificial sequence
  SiRNA target sequence
agaaggaaatgtttatatttttgatga

SEQ ID NO: 194000 - DNA, 27 bp, Artificial sequence
  SiRNA target sequence
gaaggaaatgtttatatttttgatgaa

SEQ ID NO: 194001 - DNA, 27 bp, Artificial sequence
  SiRNA target sequence
aaggaaatgtttatatttttgatgaac

SEQ ID NO: 194002 - DNA, 27 bp, Artificial sequence
  SiRNA target sequence
aggaaatgtttatatttttgatgaacc

SEQ ID NO: 194003 - DNA, 27 bp, Artificial sequence
  SiRNA target sequence
ggaaatgtttatatttttgatgaaccc

SEQ ID NO: 194004 - DNA, 27 bp, Artificial sequence
  SiRNA target sequence
gaaatgtttatatttttgatgaaccca

SEQ ID NO: 194005 - DNA, 27 bp, Artificial sequence
  SiRNA target sequence
aaatgtttatatttttgatgaacccac

SEQ ID NO: 194006 - DNA, 27 bp, Artificial sequence
  SiRNA target sequence
aatgtttatatttttgatgaacccact

SEQ ID NO: 194007 - DNA, 27 bp, Artificial sequence
  SiRNA target sequence
atgtttatatttttgatgaacccacta

SEQ ID NO: 194008 - DNA, 27 bp, Artificial sequence
  SiRNA target sequence
tgtttatatttttgatgaacccactag

SEQ ID NO: 194009 - DNA, 27 bp, Artificial sequence
  SiRNA target sequence
gtttatatttttgatgaacccactagt

SEQ ID NO: 194010 - DNA, 27 bp, Artificial sequence
  SiRNA target sequence
tttatatttttgatgaacccactagtt

SEQ ID NO: 194011 - DNA, 27 bp, Artificial sequence
  SiRNA target sequence
ttatatttttgatgaacccactagttt

SEQ ID NO: 194012 - DNA, 27 bp, Artificial sequence
  SiRNA target sequence
tatatttttgatgaacccactagtttt

SEQ ID NO: 194013 - DNA, 27 bp, Artificial sequence
  SiRNA target sequence
atatttttgatgaacccactagttttt

SEQ ID NO: 194014 - DNA, 27 bp, Artificial sequence
  SiRNA target sequence
tatttttgatgaacccactagtttttt

SEQ ID NO: 194015 - DNA, 27 bp, Artificial sequence
  SiRNA target sequence
atttttgatgaacccactagttttttg

SEQ ID NO: 194016 - DNA, 27 bp, Artificial sequence
  SiRNA target sequence
tttttgatgaacccactagttttttgg

SEQ ID NO: 194017 - DNA, 27 bp, Artificial sequence
  SiRNA target sequence
ttttgatgaacccactagttttttgga

SEQ ID NO: 194018 - DNA, 27 bp, Artificial sequence
  SiRNA target sequence
tttgatgaacccactagttttttggat

SEQ ID NO: 194019 - DNA, 27 bp, Artificial sequence
  SiRNA target sequence
ttgatgaacccactagttttttggatg

SEQ ID NO: 194020 - DNA, 27 bp, Artificial sequence
  SiRNA target sequence
tgatgaacccactagttttttggatgt

SEQ ID NO: 194021 - DNA, 27 bp, Artificial sequence
  SiRNA target sequence
gatgaacccactagttttttggatgtt

SEQ ID NO: 194022 - DNA, 27 bp, Artificial sequence
  SiRNA target sequence
atgaacccactagttttttggatgtta

SEQ ID NO: 194023 - DNA, 27 bp, Artificial sequence
  SiRNA target sequence
tgaacccactagttttttggatgttaa

SEQ ID NO: 194024 - DNA, 27 bp, Artificial sequence
  SiRNA target sequence
gaacccactagttttttggatgttaag

SEQ ID NO: 194025 - DNA, 27 bp, Artificial sequence
  SiRNA target sequence
aacccactagttttttggatgttaagc

SEQ ID NO: 194026 - DNA, 27 bp, Artificial sequence
  SiRNA target sequence
acccactagttttttggatgttaagca

SEQ ID NO: 194027 - DNA, 27 bp, Artificial sequence
  SiRNA target sequence
cccactagttttttggatgttaagcag

SEQ ID NO: 194028 - DNA, 27 bp, Artificial sequence
  SiRNA target sequence
ccactagttttttggatgttaagcagc

SEQ ID NO: 194029 - DNA, 27 bp, Artificial sequence
  SiRNA target sequence
cactagttttttggatgttaagcagcg

SEQ ID NO: 194030 - DNA, 27 bp, Artificial sequence
  SiRNA target sequence
actagttttttggatgttaagcagcga

SEQ ID NO: 194031 - DNA, 27 bp, Artificial sequence
  SiRNA target sequence
ctagttttttggatgttaagcagcgac

SEQ ID NO: 194032 - DNA, 27 bp, Artificial sequence
  SiRNA target sequence
tagttttttggatgttaagcagcgact

SEQ ID NO: 194033 - DNA, 27 bp, Artificial sequence
  SiRNA target sequence
agttttttggatgttaagcagcgacta

SEQ ID NO: 194034 - DNA, 27 bp, Artificial sequence
  SiRNA target sequence
gttttttggatgttaagcagcgactag

SEQ ID NO: 194035 - DNA, 27 bp, Artificial sequence
  SiRNA target sequence
ttttttggatgttaagcagcgactagc

SEQ ID NO: 194036 - DNA, 27 bp, Artificial sequence
  SiRNA target sequence
tttttggatgttaagcagcgactagca

SEQ ID NO: 194037 - DNA, 27 bp, Artificial sequence
  SiRNA target sequence
ttttggatgttaagcagcgactagcag

SEQ ID NO: 194038 - DNA, 27 bp, Artificial sequence
  SiRNA target sequence
tttggatgttaagcagcgactagcagc

SEQ ID NO: 194039 - DNA, 27 bp, Artificial sequence
  SiRNA target sequence
ttggatgttaagcagcgactagcagct

SEQ ID NO: 194040 - DNA, 27 bp, Artificial sequence
  SiRNA target sequence
tggatgttaagcagcgactagcagctg

SEQ ID NO: 194041 - DNA, 27 bp, Artificial sequence
  SiRNA target sequence
ggatgttaagcagcgactagcagctgc

SEQ ID NO: 194042 - DNA, 27 bp, Artificial sequence
  SiRNA target sequence
gatgttaagcagcgactagcagctgct

SEQ ID NO: 194043 - DNA, 27 bp, Artificial sequence
  SiRNA target sequence
atgttaagcagcgactagcagctgcta

SEQ ID NO: 194044 - DNA, 27 bp, Artificial sequence
  SiRNA target sequence
tgttaagcagcgactagcagctgctaa

SEQ ID NO: 194045 - DNA, 27 bp, Artificial sequence
  SiRNA target sequence
gttaagcagcgactagcagctgctaag

SEQ ID NO: 194046 - DNA, 27 bp, Artificial sequence
  SiRNA target sequence
ttaagcagcgactagcagctgctaagg

SEQ ID NO: 194047 - DNA, 27 bp, Artificial sequence
  SiRNA target sequence
taagcagcgactagcagctgctaagga

SEQ ID NO: 194048 - DNA, 27 bp, Artificial sequence
  SiRNA target sequence
aagcagcgactagcagctgctaaggaa

SEQ ID NO: 194049 - DNA, 27 bp, Artificial sequence
  SiRNA target sequence
agcagcgactagcagctgctaaggaaa

SEQ ID NO: 194050 - DNA, 27 bp, Artificial sequence
  SiRNA target sequence
gcagcgactagcagctgctaaggaaat

SEQ ID NO: 194051 - DNA, 27 bp, Artificial sequence
  SiRNA target sequence
cagcgactagcagctgctaaggaaata

SEQ ID NO: 194052 - DNA, 27 bp, Artificial sequence
  SiRNA target sequence
agcgactagcagctgctaaggaaataa

SEQ ID NO: 194053 - DNA, 27 bp, Artificial sequence
  SiRNA target sequence
gcgactagcagctgctaaggaaataag

SEQ ID NO: 194054 - DNA, 27 bp, Artificial sequence
  SiRNA target sequence
cgactagcagctgctaaggaaataaga

SEQ ID NO: 194055 - DNA, 27 bp, Artificial sequence
  SiRNA target sequence
gactagcagctgctaaggaaataagaa

SEQ ID NO: 194056 - DNA, 27 bp, Artificial sequence
  SiRNA target sequence
actagcagctgctaaggaaataagaaa

SEQ ID NO: 194057 - DNA, 27 bp, Artificial sequence
  SiRNA target sequence
ctagcagctgctaaggaaataagaaat

SEQ ID NO: 194058 - DNA, 27 bp, Artificial sequence
  SiRNA target sequence
tagcagctgctaaggaaataagaaatt

SEQ ID NO: 194059 - DNA, 27 bp, Artificial sequence
  SiRNA target sequence
agcagctgctaaggaaataagaaattt

SEQ ID NO: 194060 - DNA, 27 bp, Artificial sequence
  SiRNA target sequence
gcagctgctaaggaaataagaaatttg

SEQ ID NO: 194061 - DNA, 27 bp, Artificial sequence
  SiRNA target sequence
cagctgctaaggaaataagaaatttgt

SEQ ID NO: 194062 - DNA, 27 bp, Artificial sequence
  SiRNA target sequence
agctgctaaggaaataagaaatttgtg

SEQ ID NO: 194063 - DNA, 27 bp, Artificial sequence
  SiRNA target sequence
gctgctaaggaaataagaaatttgtgt

SEQ ID NO: 194064 - DNA, 27 bp, Artificial sequence
  SiRNA target sequence
ctgctaaggaaataagaaatttgtgtg

SEQ ID NO: 194065 - DNA, 27 bp, Artificial sequence
  SiRNA target sequence
tgctaaggaaataagaaatttgtgtga

SEQ ID NO: 194066 - DNA, 27 bp, Artificial sequence
  SiRNA target sequence
gctaaggaaataagaaatttgtgtgaa

SEQ ID NO: 194067 - DNA, 27 bp, Artificial sequence
  SiRNA target sequence
ctaaggaaataagaaatttgtgtgaag

SEQ ID NO: 194068 - DNA, 27 bp, Artificial sequence
  SiRNA target sequence
taaggaaataagaaatttgtgtgaaga

SEQ ID NO: 194069 - DNA, 27 bp, Artificial sequence
  SiRNA target sequence
aaggaaataagaaatttgtgtgaagaa

SEQ ID NO: 194070 - DNA, 27 bp, Artificial sequence
  SiRNA target sequence
aggaaataagaaatttgtgtgaagaaa

SEQ ID NO: 194071 - DNA, 27 bp, Artificial sequence
  SiRNA target sequence
ggaaataagaaatttgtgtgaagaaaa

SEQ ID NO: 194072 - DNA, 27 bp, Artificial sequence
  SiRNA target sequence
gaaataagaaatttgtgtgaagaaaat

SEQ ID NO: 194073 - DNA, 27 bp, Artificial sequence
  SiRNA target sequence
aaataagaaatttgtgtgaagaaaata

SEQ ID NO: 194074 - DNA, 27 bp, Artificial sequence
  SiRNA target sequence
aataagaaatttgtgtgaagaaaataa

SEQ ID NO: 194075 - DNA, 27 bp, Artificial sequence
  SiRNA target sequence
ataagaaatttgtgtgaagaaaataaa

SEQ ID NO: 194076 - DNA, 27 bp, Artificial sequence
  SiRNA target sequence
taagaaatttgtgtgaagaaaataaat

SEQ ID NO: 194077 - DNA, 27 bp, Artificial sequence
  SiRNA target sequence
aagaaatttgtgtgaagaaaataaata

SEQ ID NO: 194078 - DNA, 27 bp, Artificial sequence
  SiRNA target sequence
agaaatttgtgtgaagaaaataaatat

SEQ ID NO: 194079 - DNA, 27 bp, Artificial sequence
  SiRNA target sequence
gaaatttgtgtgaagaaaataaatatg

SEQ ID NO: 194080 - DNA, 27 bp, Artificial sequence
  SiRNA target sequence
aaatttgtgtgaagaaaataaatatgt

SEQ ID NO: 194081 - DNA, 27 bp, Artificial sequence
  SiRNA target sequence
aatttgtgtgaagaaaataaatatgtt

SEQ ID NO: 194082 - DNA, 27 bp, Artificial sequence
  SiRNA target sequence
atttgtgtgaagaaaataaatatgttg

SEQ ID NO: 194083 - DNA, 27 bp, Artificial sequence
  SiRNA target sequence
tttgtgtgaagaaaataaatatgttgt

SEQ ID NO: 194084 - DNA, 27 bp, Artificial sequence
  SiRNA target sequence
ttgtgtgaagaaaataaatatgttgta

SEQ ID NO: 194085 - DNA, 27 bp, Artificial sequence
  SiRNA target sequence
tgtgtgaagaaaataaatatgttgtag

SEQ ID NO: 194086 - DNA, 27 bp, Artificial sequence
  SiRNA target sequence
gtgtgaagaaaataaatatgttgtagt

SEQ ID NO: 194087 - DNA, 27 bp, Artificial sequence
  SiRNA target sequence
tgtgaagaaaataaatatgttgtagtt

SEQ ID NO: 194088 - DNA, 27 bp, Artificial sequence
  SiRNA target sequence
gtgaagaaaataaatatgttgtagttg

SEQ ID NO: 194089 - DNA, 27 bp, Artificial sequence
  SiRNA target sequence
tgaagaaaataaatatgttgtagttgt

SEQ ID NO: 194090 - DNA, 27 bp, Artificial sequence
  SiRNA target sequence
gaagaaaataaatatgttgtagttgtc

SEQ ID NO: 194091 - DNA, 27 bp, Artificial sequence
  SiRNA target sequence
aagaaaataaatatgttgtagttgtcg

SEQ ID NO: 194092 - DNA, 27 bp, Artificial sequence
  SiRNA target sequence
agaaaataaatatgttgtagttgtcga

SEQ ID NO: 194093 - DNA, 27 bp, Artificial sequence
  SiRNA target sequence
gaaaataaatatgttgtagttgtcgaa

SEQ ID NO: 194094 - DNA, 27 bp, Artificial sequence
  SiRNA target sequence
aaaataaatatgttgtagttgtcgaac

SEQ ID NO: 194095 - DNA, 27 bp, Artificial sequence
  SiRNA target sequence
aaataaatatgttgtagttgtcgaaca

SEQ ID NO: 194096 - DNA, 27 bp, Artificial sequence
  SiRNA target sequence
aataaatatgttgtagttgtcgaacac

SEQ ID NO: 194097 - DNA, 27 bp, Artificial sequence
  SiRNA target sequence
ataaatatgttgtagttgtcgaacacg

SEQ ID NO: 194098 - DNA, 27 bp, Artificial sequence
  SiRNA target sequence
taaatatgttgtagttgtcgaacacga

SEQ ID NO: 194099 - DNA, 27 bp, Artificial sequence
  SiRNA target sequence
aaatatgttgtagttgtcgaacacgat

SEQ ID NO: 194100 - DNA, 27 bp, Artificial sequence
  SiRNA target sequence
aatatgttgtagttgtcgaacacgatt

SEQ ID NO: 194101 - DNA, 27 bp, Artificial sequence
  SiRNA target sequence
atatgttgtagttgtcgaacacgattt

SEQ ID NO: 194102 - DNA, 27 bp, Artificial sequence
  SiRNA target sequence
tatgttgtagttgtcgaacacgattta

SEQ ID NO: 194103 - DNA, 27 bp, Artificial sequence
  SiRNA target sequence
atgttgtagttgtcgaacacgatttag

SEQ ID NO: 194104 - DNA, 27 bp, Artificial sequence
  SiRNA target sequence
tgttgtagttgtcgaacacgatttagc

SEQ ID NO: 194105 - DNA, 27 bp, Artificial sequence
  SiRNA target sequence
gttgtagttgtcgaacacgatttagcc

SEQ ID NO: 194106 - DNA, 27 bp, Artificial sequence
  SiRNA target sequence
ttgtagttgtcgaacacgatttagcca

SEQ ID NO: 194107 - DNA, 27 bp, Artificial sequence
  SiRNA target sequence
tgtagttgtcgaacacgatttagccat

SEQ ID NO: 194108 - DNA, 27 bp, Artificial sequence
  SiRNA target sequence
gtagttgtcgaacacgatttagccatt

SEQ ID NO: 194109 - DNA, 27 bp, Artificial sequence
  SiRNA target sequence
tagttgtcgaacacgatttagccattt

SEQ ID NO: 194110 - DNA, 27 bp, Artificial sequence
  SiRNA target sequence
agttgtcgaacacgatttagccatttt

SEQ ID NO: 194111 - DNA, 27 bp, Artificial sequence
  SiRNA target sequence
gttgtcgaacacgatttagccatttta

SEQ ID NO: 194112 - DNA, 27 bp, Artificial sequence
  SiRNA target sequence
ttgtcgaacacgatttagccattttag

SEQ ID NO: 194113 - DNA, 27 bp, Artificial sequence
  SiRNA target sequence
tgtcgaacacgatttagccattttaga

SEQ ID NO: 194114 - DNA, 27 bp, Artificial sequence
  SiRNA target sequence
gtcgaacacgatttagccattttagat

SEQ ID NO: 194115 - DNA, 27 bp, Artificial sequence
  SiRNA target sequence
tcgaacacgatttagccattttagatt

SEQ ID NO: 194116 - DNA, 27 bp, Artificial sequence
  SiRNA target sequence
cgaacacgatttagccattttagattt

SEQ ID NO: 194117 - DNA, 27 bp, Artificial sequence
  SiRNA target sequence
gaacacgatttagccattttagatttg

SEQ ID NO: 194118 - DNA, 27 bp, Artificial sequence
  SiRNA target sequence
aacacgatttagccattttagatttga

SEQ ID NO: 194119 - DNA, 27 bp, Artificial sequence
  SiRNA target sequence
acacgatttagccattttagatttgat

SEQ ID NO: 194120 - DNA, 27 bp, Artificial sequence
  SiRNA target sequence
cacgatttagccattttagatttgatg

SEQ ID NO: 194121 - DNA, 27 bp, Artificial sequence
  SiRNA target sequence
acgatttagccattttagatttgatgt

SEQ ID NO: 194122 - DNA, 27 bp, Artificial sequence
  SiRNA target sequence
cgatttagccattttagatttgatgtg

SEQ ID NO: 194123 - DNA, 27 bp, Artificial sequence
  SiRNA target sequence
gatttagccattttagatttgatgtgt

SEQ ID NO: 194124 - DNA, 27 bp, Artificial sequence
  SiRNA target sequence
atttagccattttagatttgatgtgtg

SEQ ID NO: 194125 - DNA, 27 bp, Artificial sequence
  SiRNA target sequence
tttagccattttagatttgatgtgtga

SEQ ID NO: 194126 - DNA, 27 bp, Artificial sequence
  SiRNA target sequence
ttagccattttagatttgatgtgtgat

SEQ ID NO: 194127 - DNA, 27 bp, Artificial sequence
  SiRNA target sequence
tagccattttagatttgatgtgtgatt

SEQ ID NO: 194128 - DNA, 27 bp, Artificial sequence
  SiRNA target sequence
agccattttagatttgatgtgtgattt

SEQ ID NO: 194129 - DNA, 27 bp, Artificial sequence
  SiRNA target sequence
gccattttagatttgatgtgtgatttt

SEQ ID NO: 194130 - DNA, 27 bp, Artificial sequence
  SiRNA target sequence
ccattttagatttgatgtgtgattttg

SEQ ID NO: 194131 - DNA, 27 bp, Artificial sequence
  SiRNA target sequence
cattttagatttgatgtgtgattttgg

SEQ ID NO: 194132 - DNA, 27 bp, Artificial sequence
  SiRNA target sequence
attttagatttgatgtgtgattttgga

SEQ ID NO: 194133 - DNA, 27 bp, Artificial sequence
  SiRNA target sequence
ttttagatttgatgtgtgattttggat

SEQ ID NO: 194134 - DNA, 27 bp, Artificial sequence
  SiRNA target sequence
tttagatttgatgtgtgattttggatg

SEQ ID NO: 194135 - DNA, 27 bp, Artificial sequence
  SiRNA target sequence
ttagatttgatgtgtgattttggatgt

SEQ ID NO: 194136 - DNA, 27 bp, Artificial sequence
  SiRNA target sequence
tagatttgatgtgtgattttggatgtg

SEQ ID NO: 194137 - DNA, 27 bp, Artificial sequence
  SiRNA target sequence
agatttgatgtgtgattttggatgtgt

SEQ ID NO: 194138 - DNA, 27 bp, Artificial sequence
  SiRNA target sequence
gatttgatgtgtgattttggatgtgtt

SEQ ID NO: 194139 - DNA, 27 bp, Artificial sequence
  SiRNA target sequence
atttgatgtgtgattttggatgtgttc

SEQ ID NO: 194140 - DNA, 27 bp, Artificial sequence
  SiRNA target sequence
tttgatgtgtgattttggatgtgttct

SEQ ID NO: 194141 - DNA, 27 bp, Artificial sequence
  SiRNA target sequence
ttgatgtgtgattttggatgtgttcta

SEQ ID NO: 194142 - DNA, 27 bp, Artificial sequence
  SiRNA target sequence
tgatgtgtgattttggatgtgttctat

SEQ ID NO: 194143 - DNA, 27 bp, Artificial sequence
  SiRNA target sequence
gatgtgtgattttggatgtgttctata

SEQ ID NO: 194144 - DNA, 27 bp, Artificial sequence
  SiRNA target sequence
atgtgtgattttggatgtgttctatac

SEQ ID NO: 194145 - DNA, 27 bp, Artificial sequence
  SiRNA target sequence
tgtgtgattttggatgtgttctatacg

SEQ ID NO: 194146 - DNA, 27 bp, Artificial sequence
  SiRNA target sequence
gtgtgattttggatgtgttctatacgg

SEQ ID NO: 194147 - DNA, 27 bp, Artificial sequence
  SiRNA target sequence
tgtgattttggatgtgttctatacgga

SEQ ID NO: 194148 - DNA, 27 bp, Artificial sequence
  SiRNA target sequence
gtgattttggatgtgttctatacggac

SEQ ID NO: 194149 - DNA, 27 bp, Artificial sequence
  SiRNA target sequence
tgattttggatgtgttctatacggaca

SEQ ID NO: 194150 - DNA, 27 bp, Artificial sequence
  SiRNA target sequence
gattttggatgtgttctatacggacaa

SEQ ID NO: 194151 - DNA, 27 bp, Artificial sequence
  SiRNA target sequence
attttggatgtgttctatacggacaat

SEQ ID NO: 194152 - DNA, 27 bp, Artificial sequence
  SiRNA target sequence
ttttggatgtgttctatacggacaatc

SEQ ID NO: 194153 - DNA, 27 bp, Artificial sequence
  SiRNA target sequence
tttggatgtgttctatacggacaatct

SEQ ID NO: 194154 - DNA, 27 bp, Artificial sequence
  SiRNA target sequence
ttggatgtgttctatacggacaatctg

SEQ ID NO: 194155 - DNA, 27 bp, Artificial sequence
  SiRNA target sequence
tggatgtgttctatacggacaatctgg

SEQ ID NO: 194156 - DNA, 27 bp, Artificial sequence
  SiRNA target sequence
ggatgtgttctatacggacaatctggg

SEQ ID NO: 194157 - DNA, 27 bp, Artificial sequence
  SiRNA target sequence
gatgtgttctatacggacaatctgggg

SEQ ID NO: 194158 - DNA, 27 bp, Artificial sequence
  SiRNA target sequence
atgtgttctatacggacaatctggggc

SEQ ID NO: 194159 - DNA, 27 bp, Artificial sequence
  SiRNA target sequence
tgtgttctatacggacaatctggggca

SEQ ID NO: 194160 - DNA, 27 bp, Artificial sequence
  SiRNA target sequence
gtgttctatacggacaatctggggcat

SEQ ID NO: 194161 - DNA, 27 bp, Artificial sequence
  SiRNA target sequence
tgttctatacggacaatctggggcata

SEQ ID NO: 194162 - DNA, 27 bp, Artificial sequence
  SiRNA target sequence
gttctatacggacaatctggggcatac

SEQ ID NO: 194163 - DNA, 27 bp, Artificial sequence
  SiRNA target sequence
ttctatacggacaatctggggcatacg

SEQ ID NO: 194164 - DNA, 27 bp, Artificial sequence
  SiRNA target sequence
tctatacggacaatctggggcatacgg

SEQ ID NO: 194165 - DNA, 27 bp, Artificial sequence
  SiRNA target sequence
ctatacggacaatctggggcatacggt

SEQ ID NO: 194166 - DNA, 27 bp, Artificial sequence
  SiRNA target sequence
tatacggacaatctggggcatacggtg

SEQ ID NO: 194167 - DNA, 27 bp, Artificial sequence
  SiRNA target sequence
atacggacaatctggggcatacggtgt

SEQ ID NO: 194168 - DNA, 27 bp, Artificial sequence
  SiRNA target sequence
tacggacaatctggggcatacggtgta

SEQ ID NO: 194169 - DNA, 27 bp, Artificial sequence
  SiRNA target sequence
acggacaatctggggcatacggtgtaa

SEQ ID NO: 194170 - DNA, 27 bp, Artificial sequence
  SiRNA target sequence
cggacaatctggggcatacggtgtaat

SEQ ID NO: 194171 - DNA, 27 bp, Artificial sequence
  SiRNA target sequence
ggacaatctggggcatacggtgtaata

SEQ ID NO: 194172 - DNA, 27 bp, Artificial sequence
  SiRNA target sequence
gacaatctggggcatacggtgtaataa

SEQ ID NO: 194173 - DNA, 27 bp, Artificial sequence
  SiRNA target sequence
acaatctggggcatacggtgtaataag

SEQ ID NO: 194174 - DNA, 27 bp, Artificial sequence
  SiRNA target sequence
caatctggggcatacggtgtaataagc

SEQ ID NO: 194175 - DNA, 27 bp, Artificial sequence
  SiRNA target sequence
aatctggggcatacggtgtaataagcg

SEQ ID NO: 194176 - DNA, 27 bp, Artificial sequence
  SiRNA target sequence
atctggggcatacggtgtaataagcgc

SEQ ID NO: 194177 - DNA, 27 bp, Artificial sequence
  SiRNA target sequence
tctggggcatacggtgtaataagcgca

SEQ ID NO: 194178 - DNA, 27 bp, Artificial sequence
  SiRNA target sequence
ctggggcatacggtgtaataagcgcac

SEQ ID NO: 194179 - DNA, 27 bp, Artificial sequence
  SiRNA target sequence
tggggcatacggtgtaataagcgcacc

SEQ ID NO: 194180 - DNA, 27 bp, Artificial sequence
  SiRNA target sequence
ggggcatacggtgtaataagcgcacca

SEQ ID NO: 194181 - DNA, 27 bp, Artificial sequence
  SiRNA target sequence
gggcatacggtgtaataagcgcaccat

SEQ ID NO: 194182 - DNA, 27 bp, Artificial sequence
  SiRNA target sequence
ggcatacggtgtaataagcgcaccata

SEQ ID NO: 194183 - DNA, 27 bp, Artificial sequence
  SiRNA target sequence
gcatacggtgtaataagcgcaccatac

SEQ ID NO: 194184 - DNA, 27 bp, Artificial sequence
  SiRNA target sequence
catacggtgtaataagcgcaccatacg

SEQ ID NO: 194185 - DNA, 27 bp, Artificial sequence
  SiRNA target sequence
atacggtgtaataagcgcaccatacgt

SEQ ID NO: 194186 - DNA, 27 bp, Artificial sequence
  SiRNA target sequence
tacggtgtaataagcgcaccatacgtt

SEQ ID NO: 194187 - DNA, 27 bp, Artificial sequence
  SiRNA target sequence
acggtgtaataagcgcaccatacgtta

SEQ ID NO: 194188 - DNA, 27 bp, Artificial sequence
  SiRNA target sequence
cggtgtaataagcgcaccatacgttat

SEQ ID NO: 194189 - DNA, 27 bp, Artificial sequence
  SiRNA target sequence
ggtgtaataagcgcaccatacgttatt

SEQ ID NO: 194190 - DNA, 27 bp, Artificial sequence
  SiRNA target sequence
gtgtaataagcgcaccatacgttatta

SEQ ID NO: 194191 - DNA, 27 bp, Artificial sequence
  SiRNA target sequence
tgtaataagcgcaccatacgttattaa

SEQ ID NO: 194192 - DNA, 27 bp, Artificial sequence
  SiRNA target sequence
gtaataagcgcaccatacgttattaaa

SEQ ID NO: 194193 - DNA, 27 bp, Artificial sequence
  SiRNA target sequence
taataagcgcaccatacgttattaaat

SEQ ID NO: 194194 - DNA, 27 bp, Artificial sequence
  SiRNA target sequence
aataagcgcaccatacgttattaaatc

SEQ ID NO: 194195 - DNA, 27 bp, Artificial sequence
  SiRNA target sequence
ataagcgcaccatacgttattaaatca

SEQ ID NO: 194196 - DNA, 27 bp, Artificial sequence
  SiRNA target sequence
taagcgcaccatacgttattaaatcag

SEQ ID NO: 194197 - DNA, 27 bp, Artificial sequence
  SiRNA target sequence
aagcgcaccatacgttattaaatcagc

SEQ ID NO: 194198 - DNA, 27 bp, Artificial sequence
  SiRNA target sequence
agcgcaccatacgttattaaatcagca

SEQ ID NO: 194199 - DNA, 27 bp, Artificial sequence
  SiRNA target sequence
gcgcaccatacgttattaaatcagcaa

SEQ ID NO: 194200 - DNA, 27 bp, Artificial sequence
  SiRNA target sequence
cgcaccatacgttattaaatcagcaat

SEQ ID NO: 194201 - DNA, 27 bp, Artificial sequence
  SiRNA target sequence
gcaccatacgttattaaatcagcaata

SEQ ID NO: 194202 - DNA, 27 bp, Artificial sequence
  SiRNA target sequence
caccatacgttattaaatcagcaataa

SEQ ID NO: 194203 - DNA, 27 bp, Artificial sequence
  SiRNA target sequence
accatacgttattaaatcagcaataaa

SEQ ID NO: 194204 - DNA, 27 bp, Artificial sequence
  SiRNA target sequence
ccatacgttattaaatcagcaataaat

SEQ ID NO: 194205 - DNA, 27 bp, Artificial sequence
  SiRNA target sequence
catacgttattaaatcagcaataaata

SEQ ID NO: 194206 - DNA, 27 bp, Artificial sequence
  SiRNA target sequence
atacgttattaaatcagcaataaatat

SEQ ID NO: 194207 - DNA, 27 bp, Artificial sequence
  SiRNA target sequence
tacgttattaaatcagcaataaatata

SEQ ID NO: 194208 - DNA, 27 bp, Artificial sequence
  SiRNA target sequence
acgttattaaatcagcaataaatatat

SEQ ID NO: 194209 - DNA, 27 bp, Artificial sequence
  SiRNA target sequence
cgttattaaatcagcaataaatatatt

SEQ ID NO: 194210 - DNA, 27 bp, Artificial sequence
  SiRNA target sequence
gttattaaatcagcaataaatatattt

SEQ ID NO: 194211 - DNA, 27 bp, Artificial sequence
  SiRNA target sequence
ttattaaatcagcaataaatatatttc

SEQ ID NO: 194212 - DNA, 27 bp, Artificial sequence
  SiRNA target sequence
tattaaatcagcaataaatatatttct

SEQ ID NO: 194213 - DNA, 27 bp, Artificial sequence
  SiRNA target sequence
attaaatcagcaataaatatatttctt

SEQ ID NO: 194214 - DNA, 27 bp, Artificial sequence
  SiRNA target sequence
ttaaatcagcaataaatatatttcttg

SEQ ID NO: 194215 - DNA, 27 bp, Artificial sequence
  SiRNA target sequence
taaatcagcaataaatatatttcttga

SEQ ID NO: 194216 - DNA, 27 bp, Artificial sequence
  SiRNA target sequence
aaatcagcaataaatatatttcttgat

SEQ ID NO: 194217 - DNA, 27 bp, Artificial sequence
  SiRNA target sequence
aatcagcaataaatatatttcttgatg

SEQ ID NO: 194218 - DNA, 27 bp, Artificial sequence
  SiRNA target sequence
atcagcaataaatatatttcttgatgg

SEQ ID NO: 194219 - DNA, 27 bp, Artificial sequence
  SiRNA target sequence
tcagcaataaatatatttcttgatgga

SEQ ID NO: 194220 - DNA, 27 bp, Artificial sequence
  SiRNA target sequence
cagcaataaatatatttcttgatggat

SEQ ID NO: 194221 - DNA, 27 bp, Artificial sequence
  SiRNA target sequence
agcaataaatatatttcttgatggatt

SEQ ID NO: 194222 - DNA, 27 bp, Artificial sequence
  SiRNA target sequence
gcaataaatatatttcttgatggattt

SEQ ID NO: 194223 - DNA, 27 bp, Artificial sequence
  SiRNA target sequence
caataaatatatttcttgatggatttt

SEQ ID NO: 194224 - DNA, 27 bp, Artificial sequence
  SiRNA target sequence
aataaatatatttcttgatggattttt

SEQ ID NO: 194225 - DNA, 27 bp, Artificial sequence
  SiRNA target sequence
ataaatatatttcttgatggatttttg

SEQ ID NO: 194226 - DNA, 27 bp, Artificial sequence
  SiRNA target sequence
taaatatatttcttgatggatttttgc

SEQ ID NO: 194227 - DNA, 27 bp, Artificial sequence
  SiRNA target sequence
aaatatatttcttgatggatttttgcc

SEQ ID NO: 194228 - DNA, 27 bp, Artificial sequence
  SiRNA target sequence
aatatatttcttgatggatttttgcct

SEQ ID NO: 194229 - DNA, 27 bp, Artificial sequence
  SiRNA target sequence
atatatttcttgatggatttttgccta

SEQ ID NO: 194230 - DNA, 27 bp, Artificial sequence
  SiRNA target sequence
tatatttcttgatggatttttgcctac

SEQ ID NO: 194231 - DNA, 27 bp, Artificial sequence
  SiRNA target sequence
atatttcttgatggatttttgcctaca

SEQ ID NO: 194232 - DNA, 27 bp, Artificial sequence
  SiRNA target sequence
tatttcttgatggatttttgcctacag

SEQ ID NO: 194233 - DNA, 27 bp, Artificial sequence
  SiRNA target sequence
atttcttgatggatttttgcctacaga

SEQ ID NO: 194234 - DNA, 27 bp, Artificial sequence
  SiRNA target sequence
tttcttgatggatttttgcctacagaa

SEQ ID NO: 194235 - DNA, 27 bp, Artificial sequence
  SiRNA target sequence
ttcttgatggatttttgcctacagaaa

SEQ ID NO: 194236 - DNA, 27 bp, Artificial sequence
  SiRNA target sequence
tcttgatggatttttgcctacagaaaa

SEQ ID NO: 194237 - DNA, 27 bp, Artificial sequence
  SiRNA target sequence
cttgatggatttttgcctacagaaaac

SEQ ID NO: 194238 - DNA, 27 bp, Artificial sequence
  SiRNA target sequence
ttgatggatttttgcctacagaaaaca

SEQ ID NO: 194239 - DNA, 27 bp, Artificial sequence
  SiRNA target sequence
tgatggatttttgcctacagaaaacat

SEQ ID NO: 194240 - DNA, 27 bp, Artificial sequence
  SiRNA target sequence
gatggatttttgcctacagaaaacatg

SEQ ID NO: 194241 - DNA, 27 bp, Artificial sequence
  SiRNA target sequence
atggatttttgcctacagaaaacatga

SEQ ID NO: 194242 - DNA, 27 bp, Artificial sequence
  SiRNA target sequence
tggatttttgcctacagaaaacatgaa

SEQ ID NO: 194243 - DNA, 27 bp, Artificial sequence
  SiRNA target sequence
ggatttttgcctacagaaaacatgaaa

SEQ ID NO: 194244 - DNA, 27 bp, Artificial sequence
  SiRNA target sequence
gatttttgcctacagaaaacatgaaat

SEQ ID NO: 194245 - DNA, 27 bp, Artificial sequence
  SiRNA target sequence
atttttgcctacagaaaacatgaaatt

SEQ ID NO: 194246 - DNA, 27 bp, Artificial sequence
  SiRNA target sequence
tttttgcctacagaaaacatgaaattt

SEQ ID NO: 194247 - DNA, 27 bp, Artificial sequence
  SiRNA target sequence
ttttgcctacagaaaacatgaaattta

SEQ ID NO: 194248 - DNA, 27 bp, Artificial sequence
  SiRNA target sequence
tttgcctacagaaaacatgaaatttag

SEQ ID NO: 194249 - DNA, 27 bp, Artificial sequence
  SiRNA target sequence
ttgcctacagaaaacatgaaatttaga

SEQ ID NO: 194250 - DNA, 27 bp, Artificial sequence
  SiRNA target sequence
tgcctacagaaaacatgaaatttagaa

SEQ ID NO: 194251 - DNA, 27 bp, Artificial sequence
  SiRNA target sequence
gcctacagaaaacatgaaatttagaaa

SEQ ID NO: 194252 - DNA, 27 bp, Artificial sequence
  SiRNA target sequence
cctacagaaaacatgaaatttagaaat

SEQ ID NO: 194253 - DNA, 27 bp, Artificial sequence
  SiRNA target sequence
ctacagaaaacatgaaatttagaaatt

SEQ ID NO: 194254 - DNA, 27 bp, Artificial sequence
  SiRNA target sequence
tacagaaaacatgaaatttagaaattc

SEQ ID NO: 194255 - DNA, 27 bp, Artificial sequence
  SiRNA target sequence
acagaaaacatgaaatttagaaattca

SEQ ID NO: 194256 - DNA, 27 bp, Artificial sequence
  SiRNA target sequence
cagaaaacatgaaatttagaaattcag

SEQ ID NO: 194257 - DNA, 27 bp, Artificial sequence
  SiRNA target sequence
agaaaacatgaaatttagaaattcaga

SEQ ID NO: 194258 - DNA, 27 bp, Artificial sequence
  SiRNA target sequence
gaaaacatgaaatttagaaattcagag

SEQ ID NO: 194259 - DNA, 27 bp, Artificial sequence
  SiRNA target sequence
aaaacatgaaatttagaaattcagagt

SEQ ID NO: 194260 - DNA, 27 bp, Artificial sequence
  SiRNA target sequence
aaacatgaaatttagaaattcagagtt

SEQ ID NO: 194261 - DNA, 27 bp, Artificial sequence
  SiRNA target sequence
aacatgaaatttagaaattcagagtta

SEQ ID NO: 194262 - DNA, 27 bp, Artificial sequence
  SiRNA target sequence
acatgaaatttagaaattcagagttaa

SEQ ID NO: 194263 - DNA, 27 bp, Artificial sequence
  SiRNA target sequence
catgaaatttagaaattcagagttaaa

SEQ ID NO: 194264 - DNA, 27 bp, Artificial sequence
  SiRNA target sequence
atgaaatttagaaattcagagttaaag

SEQ ID NO: 194265 - DNA, 27 bp, Artificial sequence
  SiRNA target sequence
tgaaatttagaaattcagagttaaagt

SEQ ID NO: 194266 - DNA, 27 bp, Artificial sequence
  SiRNA target sequence
gaaatttagaaattcagagttaaagtt

SEQ ID NO: 194267 - DNA, 27 bp, Artificial sequence
  SiRNA target sequence
aaatttagaaattcagagttaaagttt

SEQ ID NO: 194268 - DNA, 27 bp, Artificial sequence
  SiRNA target sequence
aatttagaaattcagagttaaagttta

SEQ ID NO: 194269 - DNA, 27 bp, Artificial sequence
  SiRNA target sequence
atttagaaattcagagttaaagtttaa

SEQ ID NO: 194270 - DNA, 27 bp, Artificial sequence
  SiRNA target sequence
tttagaaattcagagttaaagtttaat

SEQ ID NO: 194271 - DNA, 27 bp, Artificial sequence
  SiRNA target sequence
ttagaaattcagagttaaagtttaata

SEQ ID NO: 194272 - DNA, 27 bp, Artificial sequence
  SiRNA target sequence
tagaaattcagagttaaagtttaatat

SEQ ID NO: 194273 - DNA, 27 bp, Artificial sequence
  SiRNA target sequence
agaaattcagagttaaagtttaatatt

SEQ ID NO: 194274 - DNA, 27 bp, Artificial sequence
  SiRNA target sequence
gaaattcagagttaaagtttaatattt

SEQ ID NO: 194275 - DNA, 27 bp, Artificial sequence
  SiRNA target sequence
aaattcagagttaaagtttaatatttc

SEQ ID NO: 194276 - DNA, 27 bp, Artificial sequence
  SiRNA target sequence
aattcagagttaaagtttaatatttcg

SEQ ID NO: 194277 - DNA, 27 bp, Artificial sequence
  SiRNA target sequence
attcagagttaaagtttaatatttcgg

SEQ ID NO: 194278 - DNA, 27 bp, Artificial sequence
  SiRNA target sequence
ttcagagttaaagtttaatatttcgga

SEQ ID NO: 194279 - DNA, 27 bp, Artificial sequence
  SiRNA target sequence
tcagagttaaagtttaatatttcggaa

SEQ ID NO: 194280 - DNA, 27 bp, Artificial sequence
  SiRNA target sequence
cagagttaaagtttaatatttcggaaa

SEQ ID NO: 194281 - DNA, 27 bp, Artificial sequence
  SiRNA target sequence
agagttaaagtttaatatttcggaaac

SEQ ID NO: 194282 - DNA, 27 bp, Artificial sequence
  SiRNA target sequence
gagttaaagtttaatatttcggaaaca

SEQ ID NO: 194283 - DNA, 27 bp, Artificial sequence
  SiRNA target sequence
agttaaagtttaatatttcggaaacac

SEQ ID NO: 194284 - DNA, 27 bp, Artificial sequence
  SiRNA target sequence
gttaaagtttaatatttcggaaacact

SEQ ID NO: 194285 - DNA, 27 bp, Artificial sequence
  SiRNA target sequence
ttaaagtttaatatttcggaaacactt

SEQ ID NO: 194286 - DNA, 27 bp, Artificial sequence
  SiRNA target sequence
taaagtttaatatttcggaaacacttg

SEQ ID NO: 194287 - DNA, 27 bp, Artificial sequence
  SiRNA target sequence
aaagtttaatatttcggaaacacttga

SEQ ID NO: 194288 - DNA, 27 bp, Artificial sequence
  SiRNA target sequence
aagtttaatatttcggaaacacttgat

SEQ ID NO: 194289 - DNA, 27 bp, Artificial sequence
  SiRNA target sequence
agtttaatatttcggaaacacttgata

SEQ ID NO: 194290 - DNA, 27 bp, Artificial sequence
  SiRNA target sequence
gtttaatatttcggaaacacttgatag

SEQ ID NO: 194291 - DNA, 27 bp, Artificial sequence
  SiRNA target sequence
tttaatatttcggaaacacttgatagt

SEQ ID NO: 194292 - DNA, 27 bp, Artificial sequence
  SiRNA target sequence
ttaatatttcggaaacacttgatagta

SEQ ID NO: 194293 - DNA, 27 bp, Artificial sequence
  SiRNA target sequence
taatatttcggaaacacttgatagtat

SEQ ID NO: 194294 - DNA, 27 bp, Artificial sequence
  SiRNA target sequence
aatatttcggaaacacttgatagtatt

SEQ ID NO: 194295 - DNA, 27 bp, Artificial sequence
  SiRNA target sequence
atatttcggaaacacttgatagtatta

SEQ ID NO: 194296 - DNA, 27 bp, Artificial sequence
  SiRNA target sequence
tatttcggaaacacttgatagtattat

SEQ ID NO: 194297 - DNA, 27 bp, Artificial sequence
  SiRNA target sequence
atttcggaaacacttgatagtattata

SEQ ID NO: 194298 - DNA, 27 bp, Artificial sequence
  SiRNA target sequence
tttcggaaacacttgatagtattatat

SEQ ID NO: 194299 - DNA, 27 bp, Artificial sequence
  SiRNA target sequence
ttcggaaacacttgatagtattatatc

SEQ ID NO: 194300 - DNA, 27 bp, Artificial sequence
  SiRNA target sequence
tcggaaacacttgatagtattatatct

SEQ ID NO: 194301 - DNA, 27 bp, Artificial sequence
  SiRNA target sequence
cggaaacacttgatagtattatatcta

SEQ ID NO: 194302 - DNA, 27 bp, Artificial sequence
  SiRNA target sequence
ggaaacacttgatagtattatatctac

SEQ ID NO: 194303 - DNA, 27 bp, Artificial sequence
  SiRNA target sequence
gaaacacttgatagtattatatctacc

SEQ ID NO: 194304 - DNA, 27 bp, Artificial sequence
  SiRNA target sequence
aaacacttgatagtattatatctacca

SEQ ID NO: 194305 - DNA, 27 bp, Artificial sequence
  SiRNA target sequence
aacacttgatagtattatatctaccag

SEQ ID NO: 194306 - DNA, 27 bp, Artificial sequence
  SiRNA target sequence
acacttgatagtattatatctaccaga

SEQ ID NO: 194307 - DNA, 27 bp, Artificial sequence
  SiRNA target sequence
cacttgatagtattatatctaccagag

SEQ ID NO: 194308 - DNA, 27 bp, Artificial sequence
  SiRNA target sequence
acttgatagtattatatctaccagaga

SEQ ID NO: 194309 - DNA, 27 bp, Artificial sequence
  SiRNA target sequence
cttgatagtattatatctaccagagac

SEQ ID NO: 194310 - DNA, 27 bp, Artificial sequence
  SiRNA target sequence
ttgatagtattatatctaccagagacc

SEQ ID NO: 194311 - DNA, 27 bp, Artificial sequence
  SiRNA target sequence
tgatagtattatatctaccagagacca

SEQ ID NO: 194312 - DNA, 27 bp, Artificial sequence
  SiRNA target sequence
gatagtattatatctaccagagaccag

SEQ ID NO: 194313 - DNA, 27 bp, Artificial sequence
  SiRNA target sequence
atagtattatatctaccagagaccagt

SEQ ID NO: 194314 - DNA, 27 bp, Artificial sequence
  SiRNA target sequence
tagtattatatctaccagagaccagta

SEQ ID NO: 194315 - DNA, 27 bp, Artificial sequence
  SiRNA target sequence
agtattatatctaccagagaccagtat

SEQ ID NO: 194316 - DNA, 27 bp, Artificial sequence
  SiRNA target sequence
gtattatatctaccagagaccagtatc

SEQ ID NO: 194317 - DNA, 27 bp, Artificial sequence
  SiRNA target sequence
tattatatctaccagagaccagtatca

SEQ ID NO: 194318 - DNA, 27 bp, Artificial sequence
  SiRNA target sequence
attatatctaccagagaccagtatcat

SEQ ID NO: 194319 - DNA, 27 bp, Artificial sequence
  SiRNA target sequence
ttatatctaccagagaccagtatcatt

SEQ ID NO: 194320 - DNA, 27 bp, Artificial sequence
  SiRNA target sequence
tatatctaccagagaccagtatcatta

SEQ ID NO: 194321 - DNA, 27 bp, Artificial sequence
  SiRNA target sequence
atatctaccagagaccagtatcattat

SEQ ID NO: 194322 - DNA, 27 bp, Artificial sequence
  SiRNA target sequence
tatctaccagagaccagtatcattatc

SEQ ID NO: 194323 - DNA, 27 bp, Artificial sequence
  SiRNA target sequence
atctaccagagaccagtatcattatcc

SEQ ID NO: 194324 - DNA, 27 bp, Artificial sequence
  SiRNA target sequence
tctaccagagaccagtatcattatccc

SEQ ID NO: 194325 - DNA, 27 bp, Artificial sequence
  SiRNA target sequence
ctaccagagaccagtatcattatccca

SEQ ID NO: 194326 - DNA, 27 bp, Artificial sequence
  SiRNA target sequence
taccagagaccagtatcattatcccaa

SEQ ID NO: 194327 - DNA, 27 bp, Artificial sequence
  SiRNA target sequence
accagagaccagtatcattatcccaat

SEQ ID NO: 194328 - DNA, 27 bp, Artificial sequence
  SiRNA target sequence
ccagagaccagtatcattatcccaatt

SEQ ID NO: 194329 - DNA, 27 bp, Artificial sequence
  SiRNA target sequence
cagagaccagtatcattatcccaattt

SEQ ID NO: 194330 - DNA, 27 bp, Artificial sequence
  SiRNA target sequence
agagaccagtatcattatcccaatttg

SEQ ID NO: 194331 - DNA, 27 bp, Artificial sequence
  SiRNA target sequence
gagaccagtatcattatcccaatttga

SEQ ID NO: 194332 - DNA, 27 bp, Artificial sequence
  SiRNA target sequence
agaccagtatcattatcccaatttgat

SEQ ID NO: 194333 - DNA, 27 bp, Artificial sequence
  SiRNA target sequence
gaccagtatcattatcccaatttgata

SEQ ID NO: 194334 - DNA, 27 bp, Artificial sequence
  SiRNA target sequence
accagtatcattatcccaatttgataa

SEQ ID NO: 194335 - DNA, 27 bp, Artificial sequence
  SiRNA target sequence
ccagtatcattatcccaatttgataaa

SEQ ID NO: 194336 - DNA, 27 bp, Artificial sequence
  SiRNA target sequence
cagtatcattatcccaatttgataaaa

SEQ ID NO: 194337 - DNA, 27 bp, Artificial sequence
  SiRNA target sequence
agtatcattatcccaatttgataaaaa

SEQ ID NO: 194338 - DNA, 27 bp, Artificial sequence
  SiRNA target sequence
gtatcattatcccaatttgataaaaac

SEQ ID NO: 194339 - DNA, 27 bp, Artificial sequence
  SiRNA target sequence
tatcattatcccaatttgataaaaaca

SEQ ID NO: 194340 - DNA, 27 bp, Artificial sequence
  SiRNA target sequence
atcattatcccaatttgataaaaacat

SEQ ID NO: 194341 - DNA, 27 bp, Artificial sequence
  SiRNA target sequence
tcattatcccaatttgataaaaacata

SEQ ID NO: 194342 - DNA, 27 bp, Artificial sequence
  SiRNA target sequence
cattatcccaatttgataaaaacatat

SEQ ID NO: 194343 - DNA, 27 bp, Artificial sequence
  SiRNA target sequence
attatcccaatttgataaaaacatatc

SEQ ID NO: 194344 - DNA, 27 bp, Artificial sequence
  SiRNA target sequence
ttatcccaatttgataaaaacatatcc

SEQ ID NO: 194345 - DNA, 27 bp, Artificial sequence
  SiRNA target sequence
tatcccaatttgataaaaacatatcca

SEQ ID NO: 194346 - DNA, 27 bp, Artificial sequence
  SiRNA target sequence
atcccaatttgataaaaacatatccaa

SEQ ID NO: 194347 - DNA, 27 bp, Artificial sequence
  SiRNA target sequence
tcccaatttgataaaaacatatccaaa

SEQ ID NO: 194348 - DNA, 27 bp, Artificial sequence
  SiRNA target sequence
cccaatttgataaaaacatatccaaat

SEQ ID NO: 194349 - DNA, 27 bp, Artificial sequence
  SiRNA target sequence
ccaatttgataaaaacatatccaaatt

SEQ ID NO: 194350 - DNA, 27 bp, Artificial sequence
  SiRNA target sequence
caatttgataaaaacatatccaaattt

SEQ ID NO: 194351 - DNA, 27 bp, Artificial sequence
  SiRNA target sequence
aatttgataaaaacatatccaaatttt

SEQ ID NO: 194352 - DNA, 27 bp, Artificial sequence
  SiRNA target sequence
atttgataaaaacatatccaaatttta

SEQ ID NO: 194353 - DNA, 27 bp, Artificial sequence
  SiRNA target sequence
tttgataaaaacatatccaaattttac

SEQ ID NO: 194354 - DNA, 27 bp, Artificial sequence
  SiRNA target sequence
ttgataaaaacatatccaaattttacg

SEQ ID NO: 194355 - DNA, 27 bp, Artificial sequence
  SiRNA target sequence
tgataaaaacatatccaaattttacgc

SEQ ID NO: 194356 - DNA, 27 bp, Artificial sequence
  SiRNA target sequence
gataaaaacatatccaaattttacgct

SEQ ID NO: 194357 - DNA, 27 bp, Artificial sequence
  SiRNA target sequence
ataaaaacatatccaaattttacgctt

SEQ ID NO: 194358 - DNA, 27 bp, Artificial sequence
  SiRNA target sequence
taaaaacatatccaaattttacgctta

SEQ ID NO: 194359 - DNA, 27 bp, Artificial sequence
  SiRNA target sequence
aaaaacatatccaaattttacgcttaa

SEQ ID NO: 194360 - DNA, 27 bp, Artificial sequence
  SiRNA target sequence
aaaacatatccaaattttacgcttaaa

SEQ ID NO: 194361 - DNA, 27 bp, Artificial sequence
  SiRNA target sequence
aaacatatccaaattttacgcttaaag

SEQ ID NO: 194362 - DNA, 27 bp, Artificial sequence
  SiRNA target sequence
aacatatccaaattttacgcttaaagt

SEQ ID NO: 194363 - DNA, 27 bp, Artificial sequence
  SiRNA target sequence
acatatccaaattttacgcttaaagtt

SEQ ID NO: 194364 - DNA, 27 bp, Artificial sequence
  SiRNA target sequence
catatccaaattttacgcttaaagttg

SEQ ID NO: 194365 - DNA, 27 bp, Artificial sequence
  SiRNA target sequence
atatccaaattttacgcttaaagttga

SEQ ID NO: 194366 - DNA, 27 bp, Artificial sequence
  SiRNA target sequence
tatccaaattttacgcttaaagttgaa

SEQ ID NO: 194367 - DNA, 27 bp, Artificial sequence
  SiRNA target sequence
atccaaattttacgcttaaagttgaag

SEQ ID NO: 194368 - DNA, 27 bp, Artificial sequence
  SiRNA target sequence
tccaaattttacgcttaaagttgaagg

SEQ ID NO: 194369 - DNA, 27 bp, Artificial sequence
  SiRNA target sequence
ccaaattttacgcttaaagttgaaggc

SEQ ID NO: 194370 - DNA, 27 bp, Artificial sequence
  SiRNA target sequence
caaattttacgcttaaagttgaaggcg

SEQ ID NO: 194371 - DNA, 27 bp, Artificial sequence
  SiRNA target sequence
aaattttacgcttaaagttgaaggcgg

SEQ ID NO: 194372 - DNA, 27 bp, Artificial sequence
  SiRNA target sequence
aattttacgcttaaagttgaaggcggt

SEQ ID NO: 194373 - DNA, 27 bp, Artificial sequence
  SiRNA target sequence
attttacgcttaaagttgaaggcggta

SEQ ID NO: 194374 - DNA, 27 bp, Artificial sequence
  SiRNA target sequence
ttttacgcttaaagttgaaggcggtaa

SEQ ID NO: 194375 - DNA, 27 bp, Artificial sequence
  SiRNA target sequence
tttacgcttaaagttgaaggcggtaac

SEQ ID NO: 194376 - DNA, 27 bp, Artificial sequence
  SiRNA target sequence
ttacgcttaaagttgaaggcggtaact

SEQ ID NO: 194377 - DNA, 27 bp, Artificial sequence
  SiRNA target sequence
tacgcttaaagttgaaggcggtaactt

SEQ ID NO: 194378 - DNA, 27 bp, Artificial sequence
  SiRNA target sequence
acgcttaaagttgaaggcggtaacttt

SEQ ID NO: 194379 - DNA, 27 bp, Artificial sequence
  SiRNA target sequence
cgcttaaagttgaaggcggtaactttt

SEQ ID NO: 194380 - DNA, 27 bp, Artificial sequence
  SiRNA target sequence
gcttaaagttgaaggcggtaacttttc

SEQ ID NO: 194381 - DNA, 27 bp, Artificial sequence
  SiRNA target sequence
cttaaagttgaaggcggtaacttttca

SEQ ID NO: 194382 - DNA, 27 bp, Artificial sequence
  SiRNA target sequence
ttaaagttgaaggcggtaacttttcag

SEQ ID NO: 194383 - DNA, 27 bp, Artificial sequence
  SiRNA target sequence
taaagttgaaggcggtaacttttcaga

SEQ ID NO: 194384 - DNA, 27 bp, Artificial sequence
  SiRNA target sequence
aaagttgaaggcggtaacttttcagat

SEQ ID NO: 194385 - DNA, 27 bp, Artificial sequence
  SiRNA target sequence
aagttgaaggcggtaacttttcagatt

SEQ ID NO: 194386 - DNA, 27 bp, Artificial sequence
  SiRNA target sequence
agttgaaggcggtaacttttcagattc

SEQ ID NO: 194387 - DNA, 27 bp, Artificial sequence
  SiRNA target sequence
gttgaaggcggtaacttttcagattct

SEQ ID NO: 194388 - DNA, 27 bp, Artificial sequence
  SiRNA target sequence
ttgaaggcggtaacttttcagattctg

SEQ ID NO: 194389 - DNA, 27 bp, Artificial sequence
  SiRNA target sequence
tgaaggcggtaacttttcagattctga

SEQ ID NO: 194390 - DNA, 27 bp, Artificial sequence
  SiRNA target sequence
gaaggcggtaacttttcagattctgaa

SEQ ID NO: 194391 - DNA, 27 bp, Artificial sequence
  SiRNA target sequence
aaggcggtaacttttcagattctgaaa

SEQ ID NO: 194392 - DNA, 27 bp, Artificial sequence
  SiRNA target sequence
aggcggtaacttttcagattctgaaat

SEQ ID NO: 194393 - DNA, 27 bp, Artificial sequence
  SiRNA target sequence
ggcggtaacttttcagattctgaaatt

SEQ ID NO: 194394 - DNA, 27 bp, Artificial sequence
  SiRNA target sequence
gcggtaacttttcagattctgaaattg

SEQ ID NO: 194395 - DNA, 27 bp, Artificial sequence
  SiRNA target sequence
cggtaacttttcagattctgaaattgt

SEQ ID NO: 194396 - DNA, 27 bp, Artificial sequence
  SiRNA target sequence
ggtaacttttcagattctgaaattgtt

SEQ ID NO: 194397 - DNA, 27 bp, Artificial sequence
  SiRNA target sequence
gtaacttttcagattctgaaattgttg

SEQ ID NO: 194398 - DNA, 27 bp, Artificial sequence
  SiRNA target sequence
taacttttcagattctgaaattgttgt

SEQ ID NO: 194399 - DNA, 27 bp, Artificial sequence
  SiRNA target sequence
aacttttcagattctgaaattgttgta

SEQ ID NO: 194400 - DNA, 27 bp, Artificial sequence
  SiRNA target sequence
acttttcagattctgaaattgttgtat

SEQ ID NO: 194401 - DNA, 27 bp, Artificial sequence
  SiRNA target sequence
cttttcagattctgaaattgttgtatt

SEQ ID NO: 194402 - DNA, 27 bp, Artificial sequence
  SiRNA target sequence
ttttcagattctgaaattgttgtattt

SEQ ID NO: 194403 - DNA, 27 bp, Artificial sequence
  SiRNA target sequence
tttcagattctgaaattgttgtatttc

SEQ ID NO: 194404 - DNA, 27 bp, Artificial sequence
  SiRNA target sequence
ttcagattctgaaattgttgtatttct

SEQ ID NO: 194405 - DNA, 27 bp, Artificial sequence
  SiRNA target sequence
tcagattctgaaattgttgtatttctt

SEQ ID NO: 194406 - DNA, 27 bp, Artificial sequence
  SiRNA target sequence
cagattctgaaattgttgtatttcttg

SEQ ID NO: 194407 - DNA, 27 bp, Artificial sequence
  SiRNA target sequence
agattctgaaattgttgtatttcttgg

SEQ ID NO: 194408 - DNA, 27 bp, Artificial sequence
  SiRNA target sequence
gattctgaaattgttgtatttcttggt

SEQ ID NO: 194409 - DNA, 27 bp, Artificial sequence
  SiRNA target sequence
attctgaaattgttgtatttcttggtg

SEQ ID NO: 194410 - DNA, 27 bp, Artificial sequence
  SiRNA target sequence
ttctgaaattgttgtatttcttggtga

SEQ ID NO: 194411 - DNA, 27 bp, Artificial sequence
  SiRNA target sequence
tctgaaattgttgtatttcttggtgaa

SEQ ID NO: 194412 - DNA, 27 bp, Artificial sequence
  SiRNA target sequence
ctgaaattgttgtatttcttggtgaaa

SEQ ID NO: 194413 - DNA, 27 bp, Artificial sequence
  SiRNA target sequence
tgaaattgttgtatttcttggtgaaaa

SEQ ID NO: 194414 - DNA, 27 bp, Artificial sequence
  SiRNA target sequence
gaaattgttgtatttcttggtgaaaat

SEQ ID NO: 194415 - DNA, 27 bp, Artificial sequence
  SiRNA target sequence
aaattgttgtatttcttggtgaaaatg

SEQ ID NO: 194416 - DNA, 27 bp, Artificial sequence
  SiRNA target sequence
aattgttgtatttcttggtgaaaatgg

SEQ ID NO: 194417 - DNA, 27 bp, Artificial sequence
  SiRNA target sequence
attgttgtatttcttggtgaaaatgga

SEQ ID NO: 194418 - DNA, 27 bp, Artificial sequence
  SiRNA target sequence
ttgttgtatttcttggtgaaaatggaa

SEQ ID NO: 194419 - DNA, 27 bp, Artificial sequence
  SiRNA target sequence
tgttgtatttcttggtgaaaatggaat

SEQ ID NO: 194420 - DNA, 27 bp, Artificial sequence
  SiRNA target sequence
gttgtatttcttggtgaaaatggaatg

SEQ ID NO: 194421 - DNA, 27 bp, Artificial sequence
  SiRNA target sequence
ttgtatttcttggtgaaaatggaatgg

SEQ ID NO: 194422 - DNA, 27 bp, Artificial sequence
  SiRNA target sequence
tgtatttcttggtgaaaatggaatggg

SEQ ID NO: 194423 - DNA, 27 bp, Artificial sequence
  SiRNA target sequence
gtatttcttggtgaaaatggaatgggc

SEQ ID NO: 194424 - DNA, 27 bp, Artificial sequence
  SiRNA target sequence
tatttcttggtgaaaatggaatgggca

SEQ ID NO: 194425 - DNA, 27 bp, Artificial sequence
  SiRNA target sequence
atttcttggtgaaaatggaatgggcaa

SEQ ID NO: 194426 - DNA, 27 bp, Artificial sequence
  SiRNA target sequence
tttcttggtgaaaatggaatgggcaaa

SEQ ID NO: 194427 - DNA, 27 bp, Artificial sequence
  SiRNA target sequence
ttcttggtgaaaatggaatgggcaaaa

SEQ ID NO: 194428 - DNA, 27 bp, Artificial sequence
  SiRNA target sequence
tcttggtgaaaatggaatgggcaaaac

SEQ ID NO: 194429 - DNA, 27 bp, Artificial sequence
  SiRNA target sequence
cttggtgaaaatggaatgggcaaaact

SEQ ID NO: 194430 - DNA, 27 bp, Artificial sequence
  SiRNA target sequence
ttggtgaaaatggaatgggcaaaacta

SEQ ID NO: 194431 - DNA, 27 bp, Artificial sequence
  SiRNA target sequence
tggtgaaaatggaatgggcaaaactac

SEQ ID NO: 194432 - DNA, 27 bp, Artificial sequence
  SiRNA target sequence
ggtgaaaatggaatgggcaaaactact

SEQ ID NO: 194433 - DNA, 27 bp, Artificial sequence
  SiRNA target sequence
gtgaaaatggaatgggcaaaactactt

SEQ ID NO: 194434 - DNA, 27 bp, Artificial sequence
  SiRNA target sequence
tgaaaatggaatgggcaaaactacttt

SEQ ID NO: 194435 - DNA, 27 bp, Artificial sequence
  SiRNA target sequence
gaaaatggaatgggcaaaactacttta

SEQ ID NO: 194436 - DNA, 27 bp, Artificial sequence
  SiRNA target sequence
aaaatggaatgggcaaaactactttag

SEQ ID NO: 194437 - DNA, 27 bp, Artificial sequence
  SiRNA target sequence
aaatggaatgggcaaaactactttagt

SEQ ID NO: 194438 - DNA, 27 bp, Artificial sequence
  SiRNA target sequence
aatggaatgggcaaaactactttagta

SEQ ID NO: 194439 - DNA, 27 bp, Artificial sequence
  SiRNA target sequence
atggaatgggcaaaactactttagtag

SEQ ID NO: 194440 - DNA, 27 bp, Artificial sequence
  SiRNA target sequence
tggaatgggcaaaactactttagtagg

SEQ ID NO: 194441 - DNA, 27 bp, Artificial sequence
  SiRNA target sequence
ggaatgggcaaaactactttagtaggt

SEQ ID NO: 194442 - DNA, 27 bp, Artificial sequence
  SiRNA target sequence
gaatgggcaaaactactttagtaggtt

SEQ ID NO: 194443 - DNA, 27 bp, Artificial sequence
  SiRNA target sequence
aatgggcaaaactactttagtaggttt

SEQ ID NO: 194444 - DNA, 27 bp, Artificial sequence
  SiRNA target sequence
atgggcaaaactactttagtaggtttg

SEQ ID NO: 194445 - DNA, 27 bp, Artificial sequence
  SiRNA target sequence
tgggcaaaactactttagtaggtttga

SEQ ID NO: 194446 - DNA, 27 bp, Artificial sequence
  SiRNA target sequence
gggcaaaactactttagtaggtttgat

SEQ ID NO: 194447 - DNA, 27 bp, Artificial sequence
  SiRNA target sequence
ggcaaaactactttagtaggtttgatt

SEQ ID NO: 194448 - DNA, 27 bp, Artificial sequence
  SiRNA target sequence
gcaaaactactttagtaggtttgattt

SEQ ID NO: 194449 - DNA, 27 bp, Artificial sequence
  SiRNA target sequence
caaaactactttagtaggtttgatttc

SEQ ID NO: 194450 - DNA, 27 bp, Artificial sequence
  SiRNA target sequence
aaaactactttagtaggtttgatttcg

SEQ ID NO: 194451 - DNA, 27 bp, Artificial sequence
  SiRNA target sequence
aaactactttagtaggtttgatttcgg

SEQ ID NO: 194452 - DNA, 27 bp, Artificial sequence
  SiRNA target sequence
aactactttagtaggtttgatttcggg

SEQ ID NO: 194453 - DNA, 27 bp, Artificial sequence
  SiRNA target sequence
actactttagtaggtttgatttcgggg

SEQ ID NO: 194454 - DNA, 27 bp, Artificial sequence
  SiRNA target sequence
ctactttagtaggtttgatttcggggt

SEQ ID NO: 194455 - DNA, 27 bp, Artificial sequence
  SiRNA target sequence
tactttagtaggtttgatttcggggtt

SEQ ID NO: 194456 - DNA, 27 bp, Artificial sequence
  SiRNA target sequence
actttagtaggtttgatttcggggtta

SEQ ID NO: 194457 - DNA, 27 bp, Artificial sequence
  SiRNA target sequence
ctttagtaggtttgatttcggggttaa

SEQ ID NO: 194458 - DNA, 27 bp, Artificial sequence
  SiRNA target sequence
tttagtaggtttgatttcggggttaat

SEQ ID NO: 194459 - DNA, 27 bp, Artificial sequence
  SiRNA target sequence
ttagtaggtttgatttcggggttaatt

SEQ ID NO: 194460 - DNA, 27 bp, Artificial sequence
  SiRNA target sequence
tagtaggtttgatttcggggttaatta

SEQ ID NO: 194461 - DNA, 27 bp, Artificial sequence
  SiRNA target sequence
agtaggtttgatttcggggttaattaa

SEQ ID NO: 194462 - DNA, 27 bp, Artificial sequence
  SiRNA target sequence
gtaggtttgatttcggggttaattaaa

SEQ ID NO: 194463 - DNA, 27 bp, Artificial sequence
  SiRNA target sequence
taggtttgatttcggggttaattaaag

SEQ ID NO: 194464 - DNA, 27 bp, Artificial sequence
  SiRNA target sequence
aggtttgatttcggggttaattaaaga

SEQ ID NO: 194465 - DNA, 27 bp, Artificial sequence
  SiRNA target sequence
ggtttgatttcggggttaattaaagat

SEQ ID NO: 194466 - DNA, 27 bp, Artificial sequence
  SiRNA target sequence
gtttgatttcggggttaattaaagatg

SEQ ID NO: 194467 - DNA, 27 bp, Artificial sequence
  SiRNA target sequence
tttgatttcggggttaattaaagatga

SEQ ID NO: 194468 - DNA, 27 bp, Artificial sequence
  SiRNA target sequence
ttgatttcggggttaattaaagatgat

SEQ ID NO: 194469 - DNA, 27 bp, Artificial sequence
  SiRNA target sequence
tgatttcggggttaattaaagatgata

SEQ ID NO: 194470 - DNA, 27 bp, Artificial sequence
  SiRNA target sequence
gatttcggggttaattaaagatgataa

SEQ ID NO: 194471 - DNA, 27 bp, Artificial sequence
  SiRNA target sequence
atttcggggttaattaaagatgataac

SEQ ID NO: 194472 - DNA, 27 bp, Artificial sequence
  SiRNA target sequence
tttcggggttaattaaagatgataacg

SEQ ID NO: 194473 - DNA, 27 bp, Artificial sequence
  SiRNA target sequence
ttcggggttaattaaagatgataacgg

SEQ ID NO: 194474 - DNA, 27 bp, Artificial sequence
  SiRNA target sequence
tcggggttaattaaagatgataacggg

SEQ ID NO: 194475 - DNA, 27 bp, Artificial sequence
  SiRNA target sequence
cggggttaattaaagatgataacgggg

SEQ ID NO: 194476 - DNA, 27 bp, Artificial sequence
  SiRNA target sequence
ggggttaattaaagatgataacgggga

SEQ ID NO: 194477 - DNA, 27 bp, Artificial sequence
  SiRNA target sequence
gggttaattaaagatgataacggggaa

SEQ ID NO: 194478 - DNA, 27 bp, Artificial sequence
  SiRNA target sequence
ggttaattaaagatgataacggggaag

SEQ ID NO: 194479 - DNA, 27 bp, Artificial sequence
  SiRNA target sequence
gttaattaaagatgataacggggaaga

SEQ ID NO: 194480 - DNA, 27 bp, Artificial sequence
  SiRNA target sequence
ttaattaaagatgataacggggaagag

SEQ ID NO: 194481 - DNA, 27 bp, Artificial sequence
  SiRNA target sequence
taattaaagatgataacggggaagagt

SEQ ID NO: 194482 - DNA, 27 bp, Artificial sequence
  SiRNA target sequence
aattaaagatgataacggggaagagtt

SEQ ID NO: 194483 - DNA, 27 bp, Artificial sequence
  SiRNA target sequence
attaaagatgataacggggaagagttc

SEQ ID NO: 194484 - DNA, 27 bp, Artificial sequence
  SiRNA target sequence
ttaaagatgataacggggaagagttcg

SEQ ID NO: 194485 - DNA, 27 bp, Artificial sequence
  SiRNA target sequence
taaagatgataacggggaagagttcgg

SEQ ID NO: 194486 - DNA, 27 bp, Artificial sequence
  SiRNA target sequence
aaagatgataacggggaagagttcggt

SEQ ID NO: 194487 - DNA, 27 bp, Artificial sequence
  SiRNA target sequence
aagatgataacggggaagagttcggtt

SEQ ID NO: 194488 - DNA, 27 bp, Artificial sequence
  SiRNA target sequence
agatgataacggggaagagttcggttt

SEQ ID NO: 194489 - DNA, 27 bp, Artificial sequence
  SiRNA target sequence
gatgataacggggaagagttcggtttg

SEQ ID NO: 194490 - DNA, 27 bp, Artificial sequence
  SiRNA target sequence
atgataacggggaagagttcggtttgt

SEQ ID NO: 194491 - DNA, 27 bp, Artificial sequence
  SiRNA target sequence
tgataacggggaagagttcggtttgtt

SEQ ID NO: 194492 - DNA, 27 bp, Artificial sequence
  SiRNA target sequence
gataacggggaagagttcggtttgttg

SEQ ID NO: 194493 - DNA, 27 bp, Artificial sequence
  SiRNA target sequence
ataacggggaagagttcggtttgttgt

SEQ ID NO: 194494 - DNA, 27 bp, Artificial sequence
  SiRNA target sequence
taacggggaagagttcggtttgttgtc

SEQ ID NO: 194495 - DNA, 27 bp, Artificial sequence
  SiRNA target sequence
aacggggaagagttcggtttgttgtca

SEQ ID NO: 194496 - DNA, 27 bp, Artificial sequence
  SiRNA target sequence
acggggaagagttcggtttgttgtcat

SEQ ID NO: 194497 - DNA, 27 bp, Artificial sequence
  SiRNA target sequence
cggggaagagttcggtttgttgtcata

SEQ ID NO: 194498 - DNA, 27 bp, Artificial sequence
  SiRNA target sequence
ggggaagagttcggtttgttgtcatat

SEQ ID NO: 194499 - DNA, 27 bp, Artificial sequence
  SiRNA target sequence
gggaagagttcggtttgttgtcatata

SEQ ID NO: 194500 - DNA, 27 bp, Artificial sequence
  SiRNA target sequence
ggaagagttcggtttgttgtcatatag

SEQ ID NO: 194501 - DNA, 27 bp, Artificial sequence
  SiRNA target sequence
gaagagttcggtttgttgtcatatagt

SEQ ID NO: 194502 - DNA, 27 bp, Artificial sequence
  SiRNA target sequence
aagagttcggtttgttgtcatatagtc

SEQ ID NO: 194503 - DNA, 27 bp, Artificial sequence
  SiRNA target sequence
agagttcggtttgttgtcatatagtct

SEQ ID NO: 194504 - DNA, 27 bp, Artificial sequence
  SiRNA target sequence
gagttcggtttgttgtcatatagtctt

SEQ ID NO: 194505 - DNA, 27 bp, Artificial sequence
  SiRNA target sequence
agttcggtttgttgtcatatagtctta

SEQ ID NO: 194506 - DNA, 27 bp, Artificial sequence
  SiRNA target sequence
gttcggtttgttgtcatatagtcttaa

SEQ ID NO: 194507 - DNA, 27 bp, Artificial sequence
  SiRNA target sequence
ttcggtttgttgtcatatagtcttaaa

SEQ ID NO: 194508 - DNA, 27 bp, Artificial sequence
  SiRNA target sequence
tcggtttgttgtcatatagtcttaaac

SEQ ID NO: 194509 - DNA, 27 bp, Artificial sequence
  SiRNA target sequence
cggtttgttgtcatatagtcttaaacc

SEQ ID NO: 194510 - DNA, 27 bp, Artificial sequence
  SiRNA target sequence
ggtttgttgtcatatagtcttaaaccg

SEQ ID NO: 194511 - DNA, 27 bp, Artificial sequence
  SiRNA target sequence
gtttgttgtcatatagtcttaaaccgc

SEQ ID NO: 194512 - DNA, 27 bp, Artificial sequence
  SiRNA target sequence
tttgttgtcatatagtcttaaaccgca

SEQ ID NO: 194513 - DNA, 27 bp, Artificial sequence
  SiRNA target sequence
ttgttgtcatatagtcttaaaccgcaa

SEQ ID NO: 194514 - DNA, 27 bp, Artificial sequence
  SiRNA target sequence
tgttgtcatatagtcttaaaccgcaaa

SEQ ID NO: 194515 - DNA, 27 bp, Artificial sequence
  SiRNA target sequence
gttgtcatatagtcttaaaccgcaaaa

SEQ ID NO: 194516 - DNA, 27 bp, Artificial sequence
  SiRNA target sequence
ttgtcatatagtcttaaaccgcaaaaa

SEQ ID NO: 194517 - DNA, 27 bp, Artificial sequence
  SiRNA target sequence
tgtcatatagtcttaaaccgcaaaaaa

SEQ ID NO: 194518 - DNA, 27 bp, Artificial sequence
  SiRNA target sequence
gtcatatagtcttaaaccgcaaaaaat

SEQ ID NO: 194519 - DNA, 27 bp, Artificial sequence
  SiRNA target sequence
tcatatagtcttaaaccgcaaaaaatc

SEQ ID NO: 194520 - DNA, 27 bp, Artificial sequence
  SiRNA target sequence
catatagtcttaaaccgcaaaaaatca

SEQ ID NO: 194521 - DNA, 27 bp, Artificial sequence
  SiRNA target sequence
atatagtcttaaaccgcaaaaaatcat

SEQ ID NO: 194522 - DNA, 27 bp, Artificial sequence
  SiRNA target sequence
tatagtcttaaaccgcaaaaaatcata

SEQ ID NO: 194523 - DNA, 27 bp, Artificial sequence
  SiRNA target sequence
atagtcttaaaccgcaaaaaatcatac

SEQ ID NO: 194524 - DNA, 27 bp, Artificial sequence
  SiRNA target sequence
tagtcttaaaccgcaaaaaatcatacc

SEQ ID NO: 194525 - DNA, 27 bp, Artificial sequence
  SiRNA target sequence
agtcttaaaccgcaaaaaatcataccg

SEQ ID NO: 194526 - DNA, 27 bp, Artificial sequence
  SiRNA target sequence
gtcttaaaccgcaaaaaatcataccga

SEQ ID NO: 194527 - DNA, 27 bp, Artificial sequence
  SiRNA target sequence
tcttaaaccgcaaaaaatcataccgaa

SEQ ID NO: 194528 - DNA, 27 bp, Artificial sequence
  SiRNA target sequence
cttaaaccgcaaaaaatcataccgaaa

SEQ ID NO: 194529 - DNA, 27 bp, Artificial sequence
  SiRNA target sequence
ttaaaccgcaaaaaatcataccgaaat

SEQ ID NO: 194530 - DNA, 27 bp, Artificial sequence
  SiRNA target sequence
taaaccgcaaaaaatcataccgaaata

SEQ ID NO: 194531 - DNA, 27 bp, Artificial sequence
  SiRNA target sequence
aaaccgcaaaaaatcataccgaaatac

SEQ ID NO: 194532 - DNA, 27 bp, Artificial sequence
  SiRNA target sequence
aaccgcaaaaaatcataccgaaataca

SEQ ID NO: 194533 - DNA, 27 bp, Artificial sequence
  SiRNA target sequence
accgcaaaaaatcataccgaaatacaa

SEQ ID NO: 194534 - DNA, 27 bp, Artificial sequence
  SiRNA target sequence
ccgcaaaaaatcataccgaaatacaaa

SEQ ID NO: 194535 - DNA, 27 bp, Artificial sequence
  SiRNA target sequence
cgcaaaaaatcataccgaaatacaaag

SEQ ID NO: 194536 - DNA, 27 bp, Artificial sequence
  SiRNA target sequence
gcaaaaaatcataccgaaatacaaagg

SEQ ID NO: 194537 - DNA, 27 bp, Artificial sequence
  SiRNA target sequence
caaaaaatcataccgaaatacaaagga

SEQ ID NO: 194538 - DNA, 27 bp, Artificial sequence
  SiRNA target sequence
aaaaaatcataccgaaatacaaaggaa

SEQ ID NO: 194539 - DNA, 27 bp, Artificial sequence
  SiRNA target sequence
aaaaatcataccgaaatacaaaggaac

SEQ ID NO: 194540 - DNA, 27 bp, Artificial sequence
  SiRNA target sequence
aaaatcataccgaaatacaaaggaaca

SEQ ID NO: 194541 - DNA, 27 bp, Artificial sequence
  SiRNA target sequence
aaatcataccgaaatacaaaggaacag

SEQ ID NO: 194542 - DNA, 27 bp, Artificial sequence
  SiRNA target sequence
aatcataccgaaatacaaaggaacagt

SEQ ID NO: 194543 - DNA, 27 bp, Artificial sequence
  SiRNA target sequence
atcataccgaaatacaaaggaacagtt

SEQ ID NO: 194544 - DNA, 27 bp, Artificial sequence
  SiRNA target sequence
tcataccgaaatacaaaggaacagtta

SEQ ID NO: 194545 - DNA, 27 bp, Artificial sequence
  SiRNA target sequence
cataccgaaatacaaaggaacagttag

SEQ ID NO: 194546 - DNA, 27 bp, Artificial sequence
  SiRNA target sequence
ataccgaaatacaaaggaacagttaga

SEQ ID NO: 194547 - DNA, 27 bp, Artificial sequence
  SiRNA target sequence
taccgaaatacaaaggaacagttagag

SEQ ID NO: 194548 - DNA, 27 bp, Artificial sequence
  SiRNA target sequence
accgaaatacaaaggaacagttagaga

SEQ ID NO: 194549 - DNA, 27 bp, Artificial sequence
  SiRNA target sequence
ccgaaatacaaaggaacagttagagat

SEQ ID NO: 194550 - DNA, 27 bp, Artificial sequence
  SiRNA target sequence
cgaaatacaaaggaacagttagagatc

SEQ ID NO: 194551 - DNA, 27 bp, Artificial sequence
  SiRNA target sequence
gaaatacaaaggaacagttagagatct

SEQ ID NO: 194552 - DNA, 27 bp, Artificial sequence
  SiRNA target sequence
aaatacaaaggaacagttagagatctt

SEQ ID NO: 194553 - DNA, 27 bp, Artificial sequence
  SiRNA target sequence
aatacaaaggaacagttagagatcttt

SEQ ID NO: 194554 - DNA, 27 bp, Artificial sequence
  SiRNA target sequence
atacaaaggaacagttagagatctttt

SEQ ID NO: 194555 - DNA, 27 bp, Artificial sequence
  SiRNA target sequence
tacaaaggaacagttagagatcttttt

SEQ ID NO: 194556 - DNA, 27 bp, Artificial sequence
  SiRNA target sequence
acaaaggaacagttagagatcttttta

SEQ ID NO: 194557 - DNA, 27 bp, Artificial sequence
  SiRNA target sequence
caaaggaacagttagagatctttttat

SEQ ID NO: 194558 - DNA, 27 bp, Artificial sequence
  SiRNA target sequence
aaaggaacagttagagatctttttatg

SEQ ID NO: 194559 - DNA, 27 bp, Artificial sequence
  SiRNA target sequence
aaggaacagttagagatctttttatgt

SEQ ID NO: 194560 - DNA, 27 bp, Artificial sequence
  SiRNA target sequence
aggaacagttagagatctttttatgtc

SEQ ID NO: 194561 - DNA, 27 bp, Artificial sequence
  SiRNA target sequence
ggaacagttagagatctttttatgtca

SEQ ID NO: 194562 - DNA, 27 bp, Artificial sequence
  SiRNA target sequence
gaacagttagagatctttttatgtcaa

SEQ ID NO: 194563 - DNA, 27 bp, Artificial sequence
  SiRNA target sequence
aacagttagagatctttttatgtcaaa

SEQ ID NO: 194564 - DNA, 27 bp, Artificial sequence
  SiRNA target sequence
acagttagagatctttttatgtcaaaa

SEQ ID NO: 194565 - DNA, 27 bp, Artificial sequence
  SiRNA target sequence
cagttagagatctttttatgtcaaaaa

SEQ ID NO: 194566 - DNA, 27 bp, Artificial sequence
  SiRNA target sequence
agttagagatctttttatgtcaaaaat

SEQ ID NO: 194567 - DNA, 27 bp, Artificial sequence
  SiRNA target sequence
gttagagatctttttatgtcaaaaatt

SEQ ID NO: 194568 - DNA, 27 bp, Artificial sequence
  SiRNA target sequence
ttagagatctttttatgtcaaaaattc

SEQ ID NO: 194569 - DNA, 27 bp, Artificial sequence
  SiRNA target sequence
tagagatctttttatgtcaaaaattcg

SEQ ID NO: 194570 - DNA, 27 bp, Artificial sequence
  SiRNA target sequence
agagatctttttatgtcaaaaattcgt

SEQ ID NO: 194571 - DNA, 27 bp, Artificial sequence
  SiRNA target sequence
gagatctttttatgtcaaaaattcgtt

SEQ ID NO: 194572 - DNA, 27 bp, Artificial sequence
  SiRNA target sequence
agatctttttatgtcaaaaattcgttc

SEQ ID NO: 194573 - DNA, 27 bp, Artificial sequence
  SiRNA target sequence
gatctttttatgtcaaaaattcgttct

SEQ ID NO: 194574 - DNA, 27 bp, Artificial sequence
  SiRNA target sequence
atctttttatgtcaaaaattcgttctt

SEQ ID NO: 194575 - DNA, 27 bp, Artificial sequence
  SiRNA target sequence
tctttttatgtcaaaaattcgttcttc

SEQ ID NO: 194576 - DNA, 27 bp, Artificial sequence
  SiRNA target sequence
ctttttatgtcaaaaattcgttcttcc

SEQ ID NO: 194577 - DNA, 27 bp, Artificial sequence
  SiRNA target sequence
tttttatgtcaaaaattcgttcttcct

SEQ ID NO: 194578 - DNA, 27 bp, Artificial sequence
  SiRNA target sequence
ttttatgtcaaaaattcgttcttcctt

SEQ ID NO: 194579 - DNA, 27 bp, Artificial sequence
  SiRNA target sequence
tttatgtcaaaaattcgttcttccttt

SEQ ID NO: 194580 - DNA, 27 bp, Artificial sequence
  SiRNA target sequence
ttatgtcaaaaattcgttcttcctttt

SEQ ID NO: 194581 - DNA, 27 bp, Artificial sequence
  SiRNA target sequence
tatgtcaaaaattcgttcttccttttt

SEQ ID NO: 194582 - DNA, 27 bp, Artificial sequence
  SiRNA target sequence
atgtcaaaaattcgttcttccttttta

SEQ ID NO: 194583 - DNA, 27 bp, Artificial sequence
  SiRNA target sequence
tgtcaaaaattcgttcttcctttttag

SEQ ID NO: 194584 - DNA, 27 bp, Artificial sequence
  SiRNA target sequence
gtcaaaaattcgttcttcctttttaga

SEQ ID NO: 194585 - DNA, 27 bp, Artificial sequence
  SiRNA target sequence
tcaaaaattcgttcttcctttttagac

SEQ ID NO: 194586 - DNA, 27 bp, Artificial sequence
  SiRNA target sequence
caaaaattcgttcttcctttttagacg

SEQ ID NO: 194587 - DNA, 27 bp, Artificial sequence
  SiRNA target sequence
aaaaattcgttcttcctttttagacgc

SEQ ID NO: 194588 - DNA, 27 bp, Artificial sequence
  SiRNA target sequence
aaaattcgttcttcctttttagacgct

SEQ ID NO: 194589 - DNA, 27 bp, Artificial sequence
  SiRNA target sequence
aaattcgttcttcctttttagacgcta

SEQ ID NO: 194590 - DNA, 27 bp, Artificial sequence
  SiRNA target sequence
aattcgttcttcctttttagacgctaa

SEQ ID NO: 194591 - DNA, 27 bp, Artificial sequence
  SiRNA target sequence
attcgttcttcctttttagacgctaat

SEQ ID NO: 194592 - DNA, 27 bp, Artificial sequence
  SiRNA target sequence
ttcgttcttcctttttagacgctaatt

SEQ ID NO: 194593 - DNA, 27 bp, Artificial sequence
  SiRNA target sequence
tcgttcttcctttttagacgctaattt

SEQ ID NO: 194594 - DNA, 27 bp, Artificial sequence
  SiRNA target sequence
cgttcttcctttttagacgctaatttt

SEQ ID NO: 194595 - DNA, 27 bp, Artificial sequence
  SiRNA target sequence
gttcttcctttttagacgctaattttg

SEQ ID NO: 194596 - DNA, 27 bp, Artificial sequence
  SiRNA target sequence
ttcttcctttttagacgctaattttgt

SEQ ID NO: 194597 - DNA, 27 bp, Artificial sequence
  SiRNA target sequence
tcttcctttttagacgctaattttgtt

SEQ ID NO: 194598 - DNA, 27 bp, Artificial sequence
  SiRNA target sequence
cttcctttttagacgctaattttgtta

SEQ ID NO: 194599 - DNA, 27 bp, Artificial sequence
  SiRNA target sequence
ttcctttttagacgctaattttgttaa

SEQ ID NO: 194600 - DNA, 27 bp, Artificial sequence
  SiRNA target sequence
tcctttttagacgctaattttgttaat

SEQ ID NO: 194601 - DNA, 27 bp, Artificial sequence
  SiRNA target sequence
cctttttagacgctaattttgttaatg

SEQ ID NO: 194602 - DNA, 27 bp, Artificial sequence
  SiRNA target sequence
ctttttagacgctaattttgttaatga

SEQ ID NO: 194603 - DNA, 27 bp, Artificial sequence
  SiRNA target sequence
tttttagacgctaattttgttaatgaa

SEQ ID NO: 194604 - DNA, 27 bp, Artificial sequence
  SiRNA target sequence
ttttagacgctaattttgttaatgaag

SEQ ID NO: 194605 - DNA, 27 bp, Artificial sequence
  SiRNA target sequence
tttagacgctaattttgttaatgaagc

SEQ ID NO: 194606 - DNA, 27 bp, Artificial sequence
  SiRNA target sequence
ttagacgctaattttgttaatgaagct

SEQ ID NO: 194607 - DNA, 27 bp, Artificial sequence
  SiRNA target sequence
tagacgctaattttgttaatgaagcta

SEQ ID NO: 194608 - DNA, 27 bp, Artificial sequence
  SiRNA target sequence
agacgctaattttgttaatgaagctat

SEQ ID NO: 194609 - DNA, 27 bp, Artificial sequence
  SiRNA target sequence
gacgctaattttgttaatgaagctatt

SEQ ID NO: 194610 - DNA, 27 bp, Artificial sequence
  SiRNA target sequence
acgctaattttgttaatgaagctatta

SEQ ID NO: 194611 - DNA, 27 bp, Artificial sequence
  SiRNA target sequence
cgctaattttgttaatgaagctattaa

SEQ ID NO: 194612 - DNA, 27 bp, Artificial sequence
  SiRNA target sequence
gctaattttgttaatgaagctattaaa

SEQ ID NO: 194613 - DNA, 27 bp, Artificial sequence
  SiRNA target sequence
ctaattttgttaatgaagctattaaac

SEQ ID NO: 194614 - DNA, 27 bp, Artificial sequence
  SiRNA target sequence
taattttgttaatgaagctattaaacc

SEQ ID NO: 194615 - DNA, 27 bp, Artificial sequence
  SiRNA target sequence
aattttgttaatgaagctattaaacct

SEQ ID NO: 194616 - DNA, 27 bp, Artificial sequence
  SiRNA target sequence
attttgttaatgaagctattaaacctt

SEQ ID NO: 194617 - DNA, 27 bp, Artificial sequence
  SiRNA target sequence
ttttgttaatgaagctattaaaccttt

SEQ ID NO: 194618 - DNA, 27 bp, Artificial sequence
  SiRNA target sequence
tttgttaatgaagctattaaaccttta

SEQ ID NO: 194619 - DNA, 27 bp, Artificial sequence
  SiRNA target sequence
ttgttaatgaagctattaaacctttag

SEQ ID NO: 194620 - DNA, 27 bp, Artificial sequence
  SiRNA target sequence
tgttaatgaagctattaaacctttaga

SEQ ID NO: 194621 - DNA, 27 bp, Artificial sequence
  SiRNA target sequence
gttaatgaagctattaaacctttagat

SEQ ID NO: 194622 - DNA, 27 bp, Artificial sequence
  SiRNA target sequence
ttaatgaagctattaaacctttagata

SEQ ID NO: 194623 - DNA, 27 bp, Artificial sequence
  SiRNA target sequence
taatgaagctattaaacctttagatat

SEQ ID NO: 194624 - DNA, 27 bp, Artificial sequence
  SiRNA target sequence
aatgaagctattaaacctttagatatt

SEQ ID NO: 194625 - DNA, 27 bp, Artificial sequence
  SiRNA target sequence
atgaagctattaaacctttagatattc

SEQ ID NO: 194626 - DNA, 27 bp, Artificial sequence
  SiRNA target sequence
tgaagctattaaacctttagatattca

SEQ ID NO: 194627 - DNA, 27 bp, Artificial sequence
  SiRNA target sequence
gaagctattaaacctttagatattcat

SEQ ID NO: 194628 - DNA, 27 bp, Artificial sequence
  SiRNA target sequence
aagctattaaacctttagatattcatc

SEQ ID NO: 194629 - DNA, 27 bp, Artificial sequence
  SiRNA target sequence
agctattaaacctttagatattcatca

SEQ ID NO: 194630 - DNA, 27 bp, Artificial sequence
  SiRNA target sequence
gctattaaacctttagatattcatcat

SEQ ID NO: 194631 - DNA, 27 bp, Artificial sequence
  SiRNA target sequence
ctattaaacctttagatattcatcatt

SEQ ID NO: 194632 - DNA, 27 bp, Artificial sequence
  SiRNA target sequence
tattaaacctttagatattcatcattt

SEQ ID NO: 194633 - DNA, 27 bp, Artificial sequence
  SiRNA target sequence
attaaacctttagatattcatcattta

SEQ ID NO: 194634 - DNA, 27 bp, Artificial sequence
  SiRNA target sequence
ttaaacctttagatattcatcatttat

SEQ ID NO: 194635 - DNA, 27 bp, Artificial sequence
  SiRNA target sequence
taaacctttagatattcatcatttata

SEQ ID NO: 194636 - DNA, 27 bp, Artificial sequence
  SiRNA target sequence
aaacctttagatattcatcatttatac

SEQ ID NO: 194637 - DNA, 27 bp, Artificial sequence
  SiRNA target sequence
aacctttagatattcatcatttatacg

SEQ ID NO: 194638 - DNA, 27 bp, Artificial sequence
  SiRNA target sequence
acctttagatattcatcatttatacga

SEQ ID NO: 194639 - DNA, 27 bp, Artificial sequence
  SiRNA target sequence
cctttagatattcatcatttatacgac

SEQ ID NO: 194640 - DNA, 27 bp, Artificial sequence
  SiRNA target sequence
ctttagatattcatcatttatacgacc

SEQ ID NO: 194641 - DNA, 27 bp, Artificial sequence
  SiRNA target sequence
tttagatattcatcatttatacgacca

SEQ ID NO: 194642 - DNA, 27 bp, Artificial sequence
  SiRNA target sequence
ttagatattcatcatttatacgaccaa

SEQ ID NO: 194643 - DNA, 27 bp, Artificial sequence
  SiRNA target sequence
tagatattcatcatttatacgaccaac

SEQ ID NO: 194644 - DNA, 27 bp, Artificial sequence
  SiRNA target sequence
agatattcatcatttatacgaccaact

SEQ ID NO: 194645 - DNA, 27 bp, Artificial sequence
  SiRNA target sequence
gatattcatcatttatacgaccaactt

SEQ ID NO: 194646 - DNA, 27 bp, Artificial sequence
  SiRNA target sequence
atattcatcatttatacgaccaacttg

SEQ ID NO: 194647 - DNA, 27 bp, Artificial sequence
  SiRNA target sequence
tattcatcatttatacgaccaacttgt

SEQ ID NO: 194648 - DNA, 27 bp, Artificial sequence
  SiRNA target sequence
attcatcatttatacgaccaacttgta

SEQ ID NO: 194649 - DNA, 27 bp, Artificial sequence
  SiRNA target sequence
ttcatcatttatacgaccaacttgtag

SEQ ID NO: 194650 - DNA, 27 bp, Artificial sequence
  SiRNA target sequence
tcatcatttatacgaccaacttgtaga

SEQ ID NO: 194651 - DNA, 27 bp, Artificial sequence
  SiRNA target sequence
catcatttatacgaccaacttgtagaa

SEQ ID NO: 194652 - DNA, 27 bp, Artificial sequence
  SiRNA target sequence
atcatttatacgaccaacttgtagaaa

SEQ ID NO: 194653 - DNA, 27 bp, Artificial sequence
  SiRNA target sequence
tcatttatacgaccaacttgtagaaaa

SEQ ID NO: 194654 - DNA, 27 bp, Artificial sequence
  SiRNA target sequence
catttatacgaccaacttgtagaaaac

SEQ ID NO: 194655 - DNA, 27 bp, Artificial sequence
  SiRNA target sequence
atttatacgaccaacttgtagaaaact

SEQ ID NO: 194656 - DNA, 27 bp, Artificial sequence
  SiRNA target sequence
tttatacgaccaacttgtagaaaactt

SEQ ID NO: 194657 - DNA, 27 bp, Artificial sequence
  SiRNA target sequence
ttatacgaccaacttgtagaaaacttg

SEQ ID NO: 194658 - DNA, 27 bp, Artificial sequence
  SiRNA target sequence
tatacgaccaacttgtagaaaacttga

SEQ ID NO: 194659 - DNA, 27 bp, Artificial sequence
  SiRNA target sequence
atacgaccaacttgtagaaaacttgag

SEQ ID NO: 194660 - DNA, 27 bp, Artificial sequence
  SiRNA target sequence
tacgaccaacttgtagaaaacttgagt

SEQ ID NO: 194661 - DNA, 27 bp, Artificial sequence
  SiRNA target sequence
acgaccaacttgtagaaaacttgagtg

SEQ ID NO: 194662 - DNA, 27 bp, Artificial sequence
  SiRNA target sequence
cgaccaacttgtagaaaacttgagtgg

SEQ ID NO: 194663 - DNA, 27 bp, Artificial sequence
  SiRNA target sequence
gaccaacttgtagaaaacttgagtggt

SEQ ID NO: 194664 - DNA, 27 bp, Artificial sequence
  SiRNA target sequence
accaacttgtagaaaacttgagtggtg

SEQ ID NO: 194665 - DNA, 27 bp, Artificial sequence
  SiRNA target sequence
ccaacttgtagaaaacttgagtggtgg

SEQ ID NO: 194666 - DNA, 27 bp, Artificial sequence
  SiRNA target sequence
caacttgtagaaaacttgagtggtgga

SEQ ID NO: 194667 - DNA, 27 bp, Artificial sequence
  SiRNA target sequence
aacttgtagaaaacttgagtggtggag

SEQ ID NO: 194668 - DNA, 27 bp, Artificial sequence
  SiRNA target sequence
acttgtagaaaacttgagtggtggaga

SEQ ID NO: 194669 - DNA, 27 bp, Artificial sequence
  SiRNA target sequence
cttgtagaaaacttgagtggtggagaa

SEQ ID NO: 194670 - DNA, 27 bp, Artificial sequence
  SiRNA target sequence
ttgtagaaaacttgagtggtggagaat

SEQ ID NO: 194671 - DNA, 27 bp, Artificial sequence
  SiRNA target sequence
tgtagaaaacttgagtggtggagaatt

SEQ ID NO: 194672 - DNA, 27 bp, Artificial sequence
  SiRNA target sequence
gtagaaaacttgagtggtggagaatta

SEQ ID NO: 194673 - DNA, 27 bp, Artificial sequence
  SiRNA target sequence
tagaaaacttgagtggtggagaattac

SEQ ID NO: 194674 - DNA, 27 bp, Artificial sequence
  SiRNA target sequence
agaaaacttgagtggtggagaattaca

SEQ ID NO: 194675 - DNA, 27 bp, Artificial sequence
  SiRNA target sequence
gaaaacttgagtggtggagaattacaa

SEQ ID NO: 194676 - DNA, 27 bp, Artificial sequence
  SiRNA target sequence
aaaacttgagtggtggagaattacaaa

SEQ ID NO: 194677 - DNA, 27 bp, Artificial sequence
  SiRNA target sequence
aaacttgagtggtggagaattacaaag

SEQ ID NO: 194678 - DNA, 27 bp, Artificial sequence
  SiRNA target sequence
aacttgagtggtggagaattacaaaga

SEQ ID NO: 194679 - DNA, 27 bp, Artificial sequence
  SiRNA target sequence
acttgagtggtggagaattacaaagaa

SEQ ID NO: 194680 - DNA, 27 bp, Artificial sequence
  SiRNA target sequence
cttgagtggtggagaattacaaagaat

SEQ ID NO: 194681 - DNA, 27 bp, Artificial sequence
  SiRNA target sequence
ttgagtggtggagaattacaaagaatt

SEQ ID NO: 194682 - DNA, 27 bp, Artificial sequence
  SiRNA target sequence
tgagtggtggagaattacaaagaattg

SEQ ID NO: 194683 - DNA, 27 bp, Artificial sequence
  SiRNA target sequence
gagtggtggagaattacaaagaattgc

SEQ ID NO: 194684 - DNA, 27 bp, Artificial sequence
  SiRNA target sequence
agtggtggagaattacaaagaattgca

SEQ ID NO: 194685 - DNA, 27 bp, Artificial sequence
  SiRNA target sequence
gtggtggagaattacaaagaattgcaa

SEQ ID NO: 194686 - DNA, 27 bp, Artificial sequence
  SiRNA target sequence
tggtggagaattacaaagaattgcaat

SEQ ID NO: 194687 - DNA, 27 bp, Artificial sequence
  SiRNA target sequence
ggtggagaattacaaagaattgcaata

SEQ ID NO: 194688 - DNA, 27 bp, Artificial sequence
  SiRNA target sequence
gtggagaattacaaagaattgcaataa

SEQ ID NO: 194689 - DNA, 27 bp, Artificial sequence
  SiRNA target sequence
tggagaattacaaagaattgcaataat

SEQ ID NO: 194690 - DNA, 27 bp, Artificial sequence
  SiRNA target sequence
ggagaattacaaagaattgcaataata

SEQ ID NO: 194691 - DNA, 27 bp, Artificial sequence
  SiRNA target sequence
gagaattacaaagaattgcaataataa

SEQ ID NO: 194692 - DNA, 27 bp, Artificial sequence
  SiRNA target sequence
agaattacaaagaattgcaataataat

SEQ ID NO: 194693 - DNA, 27 bp, Artificial sequence
  SiRNA target sequence
gaattacaaagaattgcaataataata

SEQ ID NO: 194694 - DNA, 27 bp, Artificial sequence
  SiRNA target sequence
aattacaaagaattgcaataataatat

SEQ ID NO: 194695 - DNA, 27 bp, Artificial sequence
  SiRNA target sequence
attacaaagaattgcaataataatatg

SEQ ID NO: 194696 - DNA, 27 bp, Artificial sequence
  SiRNA target sequence
ttacaaagaattgcaataataatatgt

SEQ ID NO: 194697 - DNA, 27 bp, Artificial sequence
  SiRNA target sequence
tacaaagaattgcaataataatatgtt

SEQ ID NO: 194698 - DNA, 27 bp, Artificial sequence
  SiRNA target sequence
acaaagaattgcaataataatatgttt

SEQ ID NO: 194699 - DNA, 27 bp, Artificial sequence
  SiRNA target sequence
caaagaattgcaataataatatgttta

SEQ ID NO: 194700 - DNA, 27 bp, Artificial sequence
  SiRNA target sequence
aaagaattgcaataataatatgtttag

SEQ ID NO: 194701 - DNA, 27 bp, Artificial sequence
  SiRNA target sequence
aagaattgcaataataatatgtttagg

SEQ ID NO: 194702 - DNA, 27 bp, Artificial sequence
  SiRNA target sequence
agaattgcaataataatatgtttagga

SEQ ID NO: 194703 - DNA, 27 bp, Artificial sequence
  SiRNA target sequence
gaattgcaataataatatgtttaggaa

SEQ ID NO: 194704 - DNA, 27 bp, Artificial sequence
  SiRNA target sequence
aattgcaataataatatgtttaggaaa

SEQ ID NO: 194705 - DNA, 27 bp, Artificial sequence
  SiRNA target sequence
attgcaataataatatgtttaggaaaa

SEQ ID NO: 194706 - DNA, 27 bp, Artificial sequence
  SiRNA target sequence
ttgcaataataatatgtttaggaaaag

SEQ ID NO: 194707 - DNA, 27 bp, Artificial sequence
  SiRNA target sequence
tgcaataataatatgtttaggaaaaga

SEQ ID NO: 194708 - DNA, 27 bp, Artificial sequence
  SiRNA target sequence
gcaataataatatgtttaggaaaagat

SEQ ID NO: 194709 - DNA, 27 bp, Artificial sequence
  SiRNA target sequence
caataataatatgtttaggaaaagatg

SEQ ID NO: 194710 - DNA, 27 bp, Artificial sequence
  SiRNA target sequence
aataataatatgtttaggaaaagatgc

SEQ ID NO: 194711 - DNA, 27 bp, Artificial sequence
  SiRNA target sequence
ataataatatgtttaggaaaagatgct

SEQ ID NO: 194712 - DNA, 27 bp, Artificial sequence
  SiRNA target sequence
taataatatgtttaggaaaagatgcta

SEQ ID NO: 194713 - DNA, 27 bp, Artificial sequence
  SiRNA target sequence
aataatatgtttaggaaaagatgctaa

SEQ ID NO: 194714 - DNA, 27 bp, Artificial sequence
  SiRNA target sequence
ataatatgtttaggaaaagatgctaac

SEQ ID NO: 194715 - DNA, 27 bp, Artificial sequence
  SiRNA target sequence
taatatgtttaggaaaagatgctaacc

SEQ ID NO: 194716 - DNA, 27 bp, Artificial sequence
  SiRNA target sequence
aatatgtttaggaaaagatgctaacct

SEQ ID NO: 194717 - DNA, 27 bp, Artificial sequence
  SiRNA target sequence
atatgtttaggaaaagatgctaacctt

SEQ ID NO: 194718 - DNA, 27 bp, Artificial sequence
  SiRNA target sequence
tatgtttaggaaaagatgctaaccttt

SEQ ID NO: 194719 - DNA, 27 bp, Artificial sequence
  SiRNA target sequence
atgtttaggaaaagatgctaaccttta

SEQ ID NO: 194720 - DNA, 27 bp, Artificial sequence
  SiRNA target sequence
tgtttaggaaaagatgctaacctttat

SEQ ID NO: 194721 - DNA, 27 bp, Artificial sequence
  SiRNA target sequence
gtttaggaaaagatgctaacctttatt

SEQ ID NO: 194722 - DNA, 27 bp, Artificial sequence
  SiRNA target sequence
tttaggaaaagatgctaacctttattt

SEQ ID NO: 194723 - DNA, 27 bp, Artificial sequence
  SiRNA target sequence
ttaggaaaagatgctaacctttattta

SEQ ID NO: 194724 - DNA, 27 bp, Artificial sequence
  SiRNA target sequence
taggaaaagatgctaacctttatttat

SEQ ID NO: 194725 - DNA, 27 bp, Artificial sequence
  SiRNA target sequence
aggaaaagatgctaacctttatttatt

SEQ ID NO: 194726 - DNA, 27 bp, Artificial sequence
  SiRNA target sequence
ggaaaagatgctaacctttatttatta

SEQ ID NO: 194727 - DNA, 27 bp, Artificial sequence
  SiRNA target sequence
gaaaagatgctaacctttatttattag

SEQ ID NO: 194728 - DNA, 27 bp, Artificial sequence
  SiRNA target sequence
aaaagatgctaacctttatttattaga

SEQ ID NO: 194729 - DNA, 27 bp, Artificial sequence
  SiRNA target sequence
aaagatgctaacctttatttattagat

SEQ ID NO: 194730 - DNA, 27 bp, Artificial sequence
  SiRNA target sequence
aagatgctaacctttatttattagatg

SEQ ID NO: 194731 - DNA, 27 bp, Artificial sequence
  SiRNA target sequence
agatgctaacctttatttattagatga

SEQ ID NO: 194732 - DNA, 27 bp, Artificial sequence
  SiRNA target sequence
gatgctaacctttatttattagatgaa

SEQ ID NO: 194733 - DNA, 27 bp, Artificial sequence
  SiRNA target sequence
atgctaacctttatttattagatgaac

SEQ ID NO: 194734 - DNA, 27 bp, Artificial sequence
  SiRNA target sequence
tgctaacctttatttattagatgaacc

SEQ ID NO: 194735 - DNA, 27 bp, Artificial sequence
  SiRNA target sequence
gctaacctttatttattagatgaacct

SEQ ID NO: 194736 - DNA, 27 bp, Artificial sequence
  SiRNA target sequence
ctaacctttatttattagatgaacctt

SEQ ID NO: 194737 - DNA, 27 bp, Artificial sequence
  SiRNA target sequence
taacctttatttattagatgaaccttc

SEQ ID NO: 194738 - DNA, 27 bp, Artificial sequence
  SiRNA target sequence
aacctttatttattagatgaaccttct

SEQ ID NO: 194739 - DNA, 27 bp, Artificial sequence
  SiRNA target sequence
acctttatttattagatgaaccttctg

SEQ ID NO: 194740 - DNA, 27 bp, Artificial sequence
  SiRNA target sequence
cctttatttattagatgaaccttctgc

SEQ ID NO: 194741 - DNA, 27 bp, Artificial sequence
  SiRNA target sequence
ctttatttattagatgaaccttctgcg

SEQ ID NO: 194742 - DNA, 27 bp, Artificial sequence
  SiRNA target sequence
tttatttattagatgaaccttctgcgt

SEQ ID NO: 194743 - DNA, 27 bp, Artificial sequence
  SiRNA target sequence
ttatttattagatgaaccttctgcgta

SEQ ID NO: 194744 - DNA, 27 bp, Artificial sequence
  SiRNA target sequence
tatttattagatgaaccttctgcgtat

SEQ ID NO: 194745 - DNA, 27 bp, Artificial sequence
  SiRNA target sequence
atttattagatgaaccttctgcgtatc

SEQ ID NO: 194746 - DNA, 27 bp, Artificial sequence
  SiRNA target sequence
tttattagatgaaccttctgcgtatct

SEQ ID NO: 194747 - DNA, 27 bp, Artificial sequence
  SiRNA target sequence
ttattagatgaaccttctgcgtatcta

SEQ ID NO: 194748 - DNA, 27 bp, Artificial sequence
  SiRNA target sequence
tattagatgaaccttctgcgtatctag

SEQ ID NO: 194749 - DNA, 27 bp, Artificial sequence
  SiRNA target sequence
attagatgaaccttctgcgtatctaga

SEQ ID NO: 194750 - DNA, 27 bp, Artificial sequence
  SiRNA target sequence
ttagatgaaccttctgcgtatctagat

SEQ ID NO: 194751 - DNA, 27 bp, Artificial sequence
  SiRNA target sequence
tagatgaaccttctgcgtatctagatt

SEQ ID NO: 194752 - DNA, 27 bp, Artificial sequence
  SiRNA target sequence
agatgaaccttctgcgtatctagattc

SEQ ID NO: 194753 - DNA, 27 bp, Artificial sequence
  SiRNA target sequence
gatgaaccttctgcgtatctagattca

SEQ ID NO: 194754 - DNA, 27 bp, Artificial sequence
  SiRNA target sequence
atgaaccttctgcgtatctagattcag

SEQ ID NO: 194755 - DNA, 27 bp, Artificial sequence
  SiRNA target sequence
tgaaccttctgcgtatctagattcaga

SEQ ID NO: 194756 - DNA, 27 bp, Artificial sequence
  SiRNA target sequence
gaaccttctgcgtatctagattcagat

SEQ ID NO: 194757 - DNA, 27 bp, Artificial sequence
  SiRNA target sequence
aaccttctgcgtatctagattcagatc

SEQ ID NO: 194758 - DNA, 27 bp, Artificial sequence
  SiRNA target sequence
accttctgcgtatctagattcagatca

SEQ ID NO: 194759 - DNA, 27 bp, Artificial sequence
  SiRNA target sequence
ccttctgcgtatctagattcagatcag

SEQ ID NO: 194760 - DNA, 27 bp, Artificial sequence
  SiRNA target sequence
cttctgcgtatctagattcagatcaga

SEQ ID NO: 194761 - DNA, 27 bp, Artificial sequence
  SiRNA target sequence
ttctgcgtatctagattcagatcagag

SEQ ID NO: 194762 - DNA, 27 bp, Artificial sequence
  SiRNA target sequence
tctgcgtatctagattcagatcagaga

SEQ ID NO: 194763 - DNA, 27 bp, Artificial sequence
  SiRNA target sequence
ctgcgtatctagattcagatcagagaa

SEQ ID NO: 194764 - DNA, 27 bp, Artificial sequence
  SiRNA target sequence
tgcgtatctagattcagatcagagaat

SEQ ID NO: 194765 - DNA, 27 bp, Artificial sequence
  SiRNA target sequence
gcgtatctagattcagatcagagaata

SEQ ID NO: 194766 - DNA, 27 bp, Artificial sequence
  SiRNA target sequence
cgtatctagattcagatcagagaatag

SEQ ID NO: 194767 - DNA, 27 bp, Artificial sequence
  SiRNA target sequence
gtatctagattcagatcagagaatagc

SEQ ID NO: 194768 - DNA, 27 bp, Artificial sequence
  SiRNA target sequence
tatctagattcagatcagagaatagcg

SEQ ID NO: 194769 - DNA, 27 bp, Artificial sequence
  SiRNA target sequence
atctagattcagatcagagaatagcga

SEQ ID NO: 194770 - DNA, 27 bp, Artificial sequence
  SiRNA target sequence
tctagattcagatcagagaatagcgat

SEQ ID NO: 194771 - DNA, 27 bp, Artificial sequence
  SiRNA target sequence
ctagattcagatcagagaatagcgatt

SEQ ID NO: 194772 - DNA, 27 bp, Artificial sequence
  SiRNA target sequence
tagattcagatcagagaatagcgattt

SEQ ID NO: 194773 - DNA, 27 bp, Artificial sequence
  SiRNA target sequence
agattcagatcagagaatagcgatttc

SEQ ID NO: 194774 - DNA, 27 bp, Artificial sequence
  SiRNA target sequence
gattcagatcagagaatagcgatttca

SEQ ID NO: 194775 - DNA, 27 bp, Artificial sequence
  SiRNA target sequence
attcagatcagagaatagcgatttcaa

SEQ ID NO: 194776 - DNA, 27 bp, Artificial sequence
  SiRNA target sequence
ttcagatcagagaatagcgatttcaaa

SEQ ID NO: 194777 - DNA, 27 bp, Artificial sequence
  SiRNA target sequence
tcagatcagagaatagcgatttcaaaa

SEQ ID NO: 194778 - DNA, 27 bp, Artificial sequence
  SiRNA target sequence
cagatcagagaatagcgatttcaaaag

SEQ ID NO: 194779 - DNA, 27 bp, Artificial sequence
  SiRNA target sequence
agatcagagaatagcgatttcaaaagt

SEQ ID NO: 194780 - DNA, 27 bp, Artificial sequence
  SiRNA target sequence
gatcagagaatagcgatttcaaaagtt

SEQ ID NO: 194781 - DNA, 27 bp, Artificial sequence
  SiRNA target sequence
atcagagaatagcgatttcaaaagtta

SEQ ID NO: 194782 - DNA, 27 bp, Artificial sequence
  SiRNA target sequence
tcagagaatagcgatttcaaaagttat

SEQ ID NO: 194783 - DNA, 27 bp, Artificial sequence
  SiRNA target sequence
cagagaatagcgatttcaaaagttata

SEQ ID NO: 194784 - DNA, 27 bp, Artificial sequence
  SiRNA target sequence
agagaatagcgatttcaaaagttataa

SEQ ID NO: 194785 - DNA, 27 bp, Artificial sequence
  SiRNA target sequence
gagaatagcgatttcaaaagttataaa

SEQ ID NO: 194786 - DNA, 27 bp, Artificial sequence
  SiRNA target sequence
agaatagcgatttcaaaagttataaaa

SEQ ID NO: 194787 - DNA, 27 bp, Artificial sequence
  SiRNA target sequence
gaatagcgatttcaaaagttataaaaa

SEQ ID NO: 194788 - DNA, 27 bp, Artificial sequence
  SiRNA target sequence
aatagcgatttcaaaagttataaaaag

SEQ ID NO: 194789 - DNA, 27 bp, Artificial sequence
  SiRNA target sequence
atagcgatttcaaaagttataaaaagg

SEQ ID NO: 194790 - DNA, 27 bp, Artificial sequence
  SiRNA target sequence
tagcgatttcaaaagttataaaaaggt

SEQ ID NO: 194791 - DNA, 27 bp, Artificial sequence
  SiRNA target sequence
agcgatttcaaaagttataaaaaggtt

SEQ ID NO: 194792 - DNA, 27 bp, Artificial sequence
  SiRNA target sequence
gcgatttcaaaagttataaaaaggttt

SEQ ID NO: 194793 - DNA, 27 bp, Artificial sequence
  SiRNA target sequence
cgatttcaaaagttataaaaaggttta

SEQ ID NO: 194794 - DNA, 27 bp, Artificial sequence
  SiRNA target sequence
gatttcaaaagttataaaaaggtttat

SEQ ID NO: 194795 - DNA, 27 bp, Artificial sequence
  SiRNA target sequence
atttcaaaagttataaaaaggtttatt

SEQ ID NO: 194796 - DNA, 27 bp, Artificial sequence
  SiRNA target sequence
tttcaaaagttataaaaaggtttattt

SEQ ID NO: 194797 - DNA, 27 bp, Artificial sequence
  SiRNA target sequence
ttcaaaagttataaaaaggtttattta

SEQ ID NO: 194798 - DNA, 27 bp, Artificial sequence
  SiRNA target sequence
tcaaaagttataaaaaggtttatttat

SEQ ID NO: 194799 - DNA, 27 bp, Artificial sequence
  SiRNA target sequence
caaaagttataaaaaggtttatttatg

SEQ ID NO: 194800 - DNA, 27 bp, Artificial sequence
  SiRNA target sequence
aaaagttataaaaaggtttatttatgg

SEQ ID NO: 194801 - DNA, 27 bp, Artificial sequence
  SiRNA target sequence
aaagttataaaaaggtttatttatggg

SEQ ID NO: 194802 - DNA, 27 bp, Artificial sequence
  SiRNA target sequence
aagttataaaaaggtttatttatggga

SEQ ID NO: 194803 - DNA, 27 bp, Artificial sequence
  SiRNA target sequence
agttataaaaaggtttatttatgggaa

SEQ ID NO: 194804 - DNA, 27 bp, Artificial sequence
  SiRNA target sequence
gttataaaaaggtttatttatgggaag

SEQ ID NO: 194805 - DNA, 27 bp, Artificial sequence
  SiRNA target sequence
ttataaaaaggtttatttatgggaaga

SEQ ID NO: 194806 - DNA, 27 bp, Artificial sequence
  SiRNA target sequence
tataaaaaggtttatttatgggaagaa

SEQ ID NO: 194807 - DNA, 27 bp, Artificial sequence
  SiRNA target sequence
ataaaaaggtttatttatgggaagaag

SEQ ID NO: 194808 - DNA, 27 bp, Artificial sequence
  SiRNA target sequence
taaaaaggtttatttatgggaagaagc

SEQ ID NO: 194809 - DNA, 27 bp, Artificial sequence
  SiRNA target sequence
aaaaaggtttatttatgggaagaagcg

SEQ ID NO: 194810 - DNA, 27 bp, Artificial sequence
  SiRNA target sequence
aaaaggtttatttatgggaagaagcga

SEQ ID NO: 194811 - DNA, 27 bp, Artificial sequence
  SiRNA target sequence
aaaggtttatttatgggaagaagcgaa

SEQ ID NO: 194812 - DNA, 27 bp, Artificial sequence
  SiRNA target sequence
aaggtttatttatgggaagaagcgaac

SEQ ID NO: 194813 - DNA, 27 bp, Artificial sequence
  SiRNA target sequence
aggtttatttatgggaagaagcgaaca

SEQ ID NO: 194814 - DNA, 27 bp, Artificial sequence
  SiRNA target sequence
ggtttatttatgggaagaagcgaacag

SEQ ID NO: 194815 - DNA, 27 bp, Artificial sequence
  SiRNA target sequence
gtttatttatgggaagaagcgaacagc

SEQ ID NO: 194816 - DNA, 27 bp, Artificial sequence
  SiRNA target sequence
tttatttatgggaagaagcgaacagcc

SEQ ID NO: 194817 - DNA, 27 bp, Artificial sequence
  SiRNA target sequence
ttatttatgggaagaagcgaacagcct

SEQ ID NO: 194818 - DNA, 27 bp, Artificial sequence
  SiRNA target sequence
tatttatgggaagaagcgaacagcctt

SEQ ID NO: 194819 - DNA, 27 bp, Artificial sequence
  SiRNA target sequence
atttatgggaagaagcgaacagccttt

SEQ ID NO: 194820 - DNA, 27 bp, Artificial sequence
  SiRNA target sequence
tttatgggaagaagcgaacagcctttg

SEQ ID NO: 194821 - DNA, 27 bp, Artificial sequence
  SiRNA target sequence
ttatgggaagaagcgaacagcctttgt

SEQ ID NO: 194822 - DNA, 27 bp, Artificial sequence
  SiRNA target sequence
tatgggaagaagcgaacagcctttgtg

SEQ ID NO: 194823 - DNA, 27 bp, Artificial sequence
  SiRNA target sequence
atgggaagaagcgaacagcctttgtgg

SEQ ID NO: 194824 - DNA, 27 bp, Artificial sequence
  SiRNA target sequence
tgggaagaagcgaacagcctttgtggt

SEQ ID NO: 194825 - DNA, 27 bp, Artificial sequence
  SiRNA target sequence
gggaagaagcgaacagcctttgtggtt

SEQ ID NO: 194826 - DNA, 27 bp, Artificial sequence
  SiRNA target sequence
ggaagaagcgaacagcctttgtggttg

SEQ ID NO: 194827 - DNA, 27 bp, Artificial sequence
  SiRNA target sequence
gaagaagcgaacagcctttgtggttga

SEQ ID NO: 194828 - DNA, 27 bp, Artificial sequence
  SiRNA target sequence
aagaagcgaacagcctttgtggttgaa

SEQ ID NO: 194829 - DNA, 27 bp, Artificial sequence
  SiRNA target sequence
agaagcgaacagcctttgtggttgaac

SEQ ID NO: 194830 - DNA, 27 bp, Artificial sequence
  SiRNA target sequence
gaagcgaacagcctttgtggttgaaca

SEQ ID NO: 194831 - DNA, 27 bp, Artificial sequence
  SiRNA target sequence
aagcgaacagcctttgtggttgaacat

SEQ ID NO: 194832 - DNA, 27 bp, Artificial sequence
  SiRNA target sequence
agcgaacagcctttgtggttgaacatg

SEQ ID NO: 194833 - DNA, 27 bp, Artificial sequence
  SiRNA target sequence
gcgaacagcctttgtggttgaacatga

SEQ ID NO: 194834 - DNA, 27 bp, Artificial sequence
  SiRNA target sequence
cgaacagcctttgtggttgaacatgat

SEQ ID NO: 194835 - DNA, 27 bp, Artificial sequence
  SiRNA target sequence
gaacagcctttgtggttgaacatgatt

SEQ ID NO: 194836 - DNA, 27 bp, Artificial sequence
  SiRNA target sequence
aacagcctttgtggttgaacatgattt

SEQ ID NO: 194837 - DNA, 27 bp, Artificial sequence
  SiRNA target sequence
acagcctttgtggttgaacatgattta

SEQ ID NO: 194838 - DNA, 27 bp, Artificial sequence
  SiRNA target sequence
cagcctttgtggttgaacatgatttaa

SEQ ID NO: 194839 - DNA, 27 bp, Artificial sequence
  SiRNA target sequence
agcctttgtggttgaacatgatttaat

SEQ ID NO: 194840 - DNA, 27 bp, Artificial sequence
  SiRNA target sequence
gcctttgtggttgaacatgatttaatt

SEQ ID NO: 194841 - DNA, 27 bp, Artificial sequence
  SiRNA target sequence
cctttgtggttgaacatgatttaattg

SEQ ID NO: 194842 - DNA, 27 bp, Artificial sequence
  SiRNA target sequence
ctttgtggttgaacatgatttaattgt

SEQ ID NO: 194843 - DNA, 27 bp, Artificial sequence
  SiRNA target sequence
tttgtggttgaacatgatttaattgta

SEQ ID NO: 194844 - DNA, 27 bp, Artificial sequence
  SiRNA target sequence
ttgtggttgaacatgatttaattgtag

SEQ ID NO: 194845 - DNA, 27 bp, Artificial sequence
  SiRNA target sequence
tgtggttgaacatgatttaattgtagg

SEQ ID NO: 194846 - DNA, 27 bp, Artificial sequence
  SiRNA target sequence
gtggttgaacatgatttaattgtaggt

SEQ ID NO: 194847 - DNA, 27 bp, Artificial sequence
  SiRNA target sequence
tggttgaacatgatttaattgtaggta

SEQ ID NO: 194848 - DNA, 27 bp, Artificial sequence
  SiRNA target sequence
ggttgaacatgatttaattgtaggtac

SEQ ID NO: 194849 - DNA, 27 bp, Artificial sequence
  SiRNA target sequence
gttgaacatgatttaattgtaggtaca

SEQ ID NO: 194850 - DNA, 27 bp, Artificial sequence
  SiRNA target sequence
ttgaacatgatttaattgtaggtacat

SEQ ID NO: 194851 - DNA, 27 bp, Artificial sequence
  SiRNA target sequence
tgaacatgatttaattgtaggtacata

SEQ ID NO: 194852 - DNA, 27 bp, Artificial sequence
  SiRNA target sequence
gaacatgatttaattgtaggtacatat

SEQ ID NO: 194853 - DNA, 27 bp, Artificial sequence
  SiRNA target sequence
aacatgatttaattgtaggtacatatt

SEQ ID NO: 194854 - DNA, 27 bp, Artificial sequence
  SiRNA target sequence
acatgatttaattgtaggtacatattt

SEQ ID NO: 194855 - DNA, 27 bp, Artificial sequence
  SiRNA target sequence
catgatttaattgtaggtacatatttg

SEQ ID NO: 194856 - DNA, 27 bp, Artificial sequence
  SiRNA target sequence
atgatttaattgtaggtacatatttgg

SEQ ID NO: 194857 - DNA, 27 bp, Artificial sequence
  SiRNA target sequence
tgatttaattgtaggtacatatttggc

SEQ ID NO: 194858 - DNA, 27 bp, Artificial sequence
  SiRNA target sequence
gatttaattgtaggtacatatttggct

SEQ ID NO: 194859 - DNA, 27 bp, Artificial sequence
  SiRNA target sequence
atttaattgtaggtacatatttggctg

SEQ ID NO: 194860 - DNA, 27 bp, Artificial sequence
  SiRNA target sequence
tttaattgtaggtacatatttggctga

SEQ ID NO: 194861 - DNA, 27 bp, Artificial sequence
  SiRNA target sequence
ttaattgtaggtacatatttggctgat

SEQ ID NO: 194862 - DNA, 27 bp, Artificial sequence
  SiRNA target sequence
taattgtaggtacatatttggctgata

SEQ ID NO: 194863 - DNA, 27 bp, Artificial sequence
  SiRNA target sequence
aattgtaggtacatatttggctgataa

SEQ ID NO: 194864 - DNA, 27 bp, Artificial sequence
  SiRNA target sequence
attgtaggtacatatttggctgataaa

SEQ ID NO: 194865 - DNA, 27 bp, Artificial sequence
  SiRNA target sequence
ttgtaggtacatatttggctgataaag

SEQ ID NO: 194866 - DNA, 27 bp, Artificial sequence
  SiRNA target sequence
tgtaggtacatatttggctgataaagt

SEQ ID NO: 194867 - DNA, 27 bp, Artificial sequence
  SiRNA target sequence
gtaggtacatatttggctgataaagtt

SEQ ID NO: 194868 - DNA, 27 bp, Artificial sequence
  SiRNA target sequence
taggtacatatttggctgataaagttg

SEQ ID NO: 194869 - DNA, 27 bp, Artificial sequence
  SiRNA target sequence
aggtacatatttggctgataaagttgt

SEQ ID NO: 194870 - DNA, 27 bp, Artificial sequence
  SiRNA target sequence
ggtacatatttggctgataaagttgtt

SEQ ID NO: 194871 - DNA, 27 bp, Artificial sequence
  SiRNA target sequence
gtacatatttggctgataaagttgttg

SEQ ID NO: 194872 - DNA, 27 bp, Artificial sequence
  SiRNA target sequence
tacatatttggctgataaagttgttgt

SEQ ID NO: 194873 - DNA, 27 bp, Artificial sequence
  SiRNA target sequence
acatatttggctgataaagttgttgtt

SEQ ID NO: 194874 - DNA, 27 bp, Artificial sequence
  SiRNA target sequence
catatttggctgataaagttgttgttt

SEQ ID NO: 194875 - DNA, 27 bp, Artificial sequence
  SiRNA target sequence
atatttggctgataaagttgttgtttt

SEQ ID NO: 194876 - DNA, 27 bp, Artificial sequence
  SiRNA target sequence
tatttggctgataaagttgttgttttt

SEQ ID NO: 194877 - DNA, 27 bp, Artificial sequence
  SiRNA target sequence
atttggctgataaagttgttgtttttg

SEQ ID NO: 194878 - DNA, 27 bp, Artificial sequence
  SiRNA target sequence
tttggctgataaagttgttgtttttga

SEQ ID NO: 194879 - DNA, 27 bp, Artificial sequence
  SiRNA target sequence
ttggctgataaagttgttgtttttgag

SEQ ID NO: 194880 - DNA, 27 bp, Artificial sequence
  SiRNA target sequence
tggctgataaagttgttgtttttgagg

SEQ ID NO: 194881 - DNA, 27 bp, Artificial sequence
  SiRNA target sequence
ggctgataaagttgttgtttttgaggg

SEQ ID NO: 194882 - DNA, 27 bp, Artificial sequence
  SiRNA target sequence
gctgataaagttgttgtttttgaggga

SEQ ID NO: 194883 - DNA, 27 bp, Artificial sequence
  SiRNA target sequence
ctgataaagttgttgtttttgagggaa

SEQ ID NO: 194884 - DNA, 27 bp, Artificial sequence
  SiRNA target sequence
tgataaagttgttgtttttgagggaag

SEQ ID NO: 194885 - DNA, 27 bp, Artificial sequence
  SiRNA target sequence
gataaagttgttgtttttgagggaagc

SEQ ID NO: 194886 - DNA, 27 bp, Artificial sequence
  SiRNA target sequence
ataaagttgttgtttttgagggaagcc

SEQ ID NO: 194887 - DNA, 27 bp, Artificial sequence
  SiRNA target sequence
taaagttgttgtttttgagggaagccc

SEQ ID NO: 194888 - DNA, 27 bp, Artificial sequence
  SiRNA target sequence
aaagttgttgtttttgagggaagccct

SEQ ID NO: 194889 - DNA, 27 bp, Artificial sequence
  SiRNA target sequence
aagttgttgtttttgagggaagcccta

SEQ ID NO: 194890 - DNA, 27 bp, Artificial sequence
  SiRNA target sequence
agttgttgtttttgagggaagccctag

SEQ ID NO: 194891 - DNA, 27 bp, Artificial sequence
  SiRNA target sequence
gttgttgtttttgagggaagccctagt

SEQ ID NO: 194892 - DNA, 27 bp, Artificial sequence
  SiRNA target sequence
ttgttgtttttgagggaagccctagtg

SEQ ID NO: 194893 - DNA, 27 bp, Artificial sequence
  SiRNA target sequence
tgttgtttttgagggaagccctagtgt

SEQ ID NO: 194894 - DNA, 27 bp, Artificial sequence
  SiRNA target sequence
gttgtttttgagggaagccctagtgtt

SEQ ID NO: 194895 - DNA, 27 bp, Artificial sequence
  SiRNA target sequence
ttgtttttgagggaagccctagtgttc

SEQ ID NO: 194896 - DNA, 27 bp, Artificial sequence
  SiRNA target sequence
tgtttttgagggaagccctagtgttca

SEQ ID NO: 194897 - DNA, 27 bp, Artificial sequence
  SiRNA target sequence
gtttttgagggaagccctagtgttcat

SEQ ID NO: 194898 - DNA, 27 bp, Artificial sequence
  SiRNA target sequence
tttttgagggaagccctagtgttcata

SEQ ID NO: 194899 - DNA, 27 bp, Artificial sequence
  SiRNA target sequence
ttttgagggaagccctagtgttcatag

SEQ ID NO: 194900 - DNA, 27 bp, Artificial sequence
  SiRNA target sequence
tttgagggaagccctagtgttcatagc

SEQ ID NO: 194901 - DNA, 27 bp, Artificial sequence
  SiRNA target sequence
ttgagggaagccctagtgttcatagca

SEQ ID NO: 194902 - DNA, 27 bp, Artificial sequence
  SiRNA target sequence
tgagggaagccctagtgttcatagcac

SEQ ID NO: 194903 - DNA, 27 bp, Artificial sequence
  SiRNA target sequence
gagggaagccctagtgttcatagcact

SEQ ID NO: 194904 - DNA, 27 bp, Artificial sequence
  SiRNA target sequence
agggaagccctagtgttcatagcactg

SEQ ID NO: 194905 - DNA, 27 bp, Artificial sequence
  SiRNA target sequence
gggaagccctagtgttcatagcactgc

SEQ ID NO: 194906 - DNA, 27 bp, Artificial sequence
  SiRNA target sequence
ggaagccctagtgttcatagcactgct

SEQ ID NO: 194907 - DNA, 27 bp, Artificial sequence
  SiRNA target sequence
gaagccctagtgttcatagcactgctc

SEQ ID NO: 194908 - DNA, 27 bp, Artificial sequence
  SiRNA target sequence
aagccctagtgttcatagcactgctca

SEQ ID NO: 194909 - DNA, 27 bp, Artificial sequence
  SiRNA target sequence
agccctagtgttcatagcactgctcat

SEQ ID NO: 194910 - DNA, 27 bp, Artificial sequence
  SiRNA target sequence
gccctagtgttcatagcactgctcata

SEQ ID NO: 194911 - DNA, 27 bp, Artificial sequence
  SiRNA target sequence
ccctagtgttcatagcactgctcataa

SEQ ID NO: 194912 - DNA, 27 bp, Artificial sequence
  SiRNA target sequence
cctagtgttcatagcactgctcataaa

SEQ ID NO: 194913 - DNA, 27 bp, Artificial sequence
  SiRNA target sequence
ctagtgttcatagcactgctcataaac

SEQ ID NO: 194914 - DNA, 27 bp, Artificial sequence
  SiRNA target sequence
tagtgttcatagcactgctcataaacc

SEQ ID NO: 194915 - DNA, 27 bp, Artificial sequence
  SiRNA target sequence
agtgttcatagcactgctcataaaccg

SEQ ID NO: 194916 - DNA, 27 bp, Artificial sequence
  SiRNA target sequence
gtgttcatagcactgctcataaaccga

SEQ ID NO: 194917 - DNA, 27 bp, Artificial sequence
  SiRNA target sequence
tgttcatagcactgctcataaaccgat

SEQ ID NO: 194918 - DNA, 27 bp, Artificial sequence
  SiRNA target sequence
gttcatagcactgctcataaaccgatg

SEQ ID NO: 194919 - DNA, 27 bp, Artificial sequence
  SiRNA target sequence
ttcatagcactgctcataaaccgatgg

SEQ ID NO: 194920 - DNA, 27 bp, Artificial sequence
  SiRNA target sequence
tcatagcactgctcataaaccgatgga

SEQ ID NO: 194921 - DNA, 27 bp, Artificial sequence
  SiRNA target sequence
catagcactgctcataaaccgatggat

SEQ ID NO: 194922 - DNA, 27 bp, Artificial sequence
  SiRNA target sequence
atagcactgctcataaaccgatggatt

SEQ ID NO: 194923 - DNA, 27 bp, Artificial sequence
  SiRNA target sequence
tagcactgctcataaaccgatggattt

SEQ ID NO: 194924 - DNA, 27 bp, Artificial sequence
  SiRNA target sequence
agcactgctcataaaccgatggatttg

SEQ ID NO: 194925 - DNA, 27 bp, Artificial sequence
  SiRNA target sequence
gcactgctcataaaccgatggatttgc

SEQ ID NO: 194926 - DNA, 27 bp, Artificial sequence
  SiRNA target sequence
cactgctcataaaccgatggatttgca

SEQ ID NO: 194927 - DNA, 27 bp, Artificial sequence
  SiRNA target sequence
actgctcataaaccgatggatttgcat

SEQ ID NO: 194928 - DNA, 27 bp, Artificial sequence
  SiRNA target sequence
ctgctcataaaccgatggatttgcata

SEQ ID NO: 194929 - DNA, 27 bp, Artificial sequence
  SiRNA target sequence
tgctcataaaccgatggatttgcatag

SEQ ID NO: 194930 - DNA, 27 bp, Artificial sequence
  SiRNA target sequence
gctcataaaccgatggatttgcatagt

SEQ ID NO: 194931 - DNA, 27 bp, Artificial sequence
  SiRNA target sequence
ctcataaaccgatggatttgcatagtg

SEQ ID NO: 194932 - DNA, 27 bp, Artificial sequence
  SiRNA target sequence
tcataaaccgatggatttgcatagtgg

SEQ ID NO: 194933 - DNA, 27 bp, Artificial sequence
  SiRNA target sequence
cataaaccgatggatttgcatagtgga

SEQ ID NO: 194934 - DNA, 27 bp, Artificial sequence
  SiRNA target sequence
ataaaccgatggatttgcatagtggaa

SEQ ID NO: 194935 - DNA, 27 bp, Artificial sequence
  SiRNA target sequence
taaaccgatggatttgcatagtggaat

SEQ ID NO: 194936 - DNA, 27 bp, Artificial sequence
  SiRNA target sequence
aaaccgatggatttgcatagtggaatg

SEQ ID NO: 194937 - DNA, 27 bp, Artificial sequence
  SiRNA target sequence
aaccgatggatttgcatagtggaatga

SEQ ID NO: 194938 - DNA, 27 bp, Artificial sequence
  SiRNA target sequence
accgatggatttgcatagtggaatgaa

SEQ ID NO: 194939 - DNA, 27 bp, Artificial sequence
  SiRNA target sequence
ccgatggatttgcatagtggaatgaat

SEQ ID NO: 194940 - DNA, 27 bp, Artificial sequence
  SiRNA target sequence
cgatggatttgcatagtggaatgaata

SEQ ID NO: 194941 - DNA, 27 bp, Artificial sequence
  SiRNA target sequence
gatggatttgcatagtggaatgaatat

SEQ ID NO: 194942 - DNA, 27 bp, Artificial sequence
  SiRNA target sequence
atggatttgcatagtggaatgaatatt

SEQ ID NO: 194943 - DNA, 27 bp, Artificial sequence
  SiRNA target sequence
tggatttgcatagtggaatgaatattt

SEQ ID NO: 194944 - DNA, 27 bp, Artificial sequence
  SiRNA target sequence
ggatttgcatagtggaatgaatatttt

SEQ ID NO: 194945 - DNA, 27 bp, Artificial sequence
  SiRNA target sequence
gatttgcatagtggaatgaatattttt

SEQ ID NO: 194946 - DNA, 27 bp, Artificial sequence
  SiRNA target sequence
atttgcatagtggaatgaatatttttt

SEQ ID NO: 194947 - DNA, 27 bp, Artificial sequence
  SiRNA target sequence
tttgcatagtggaatgaatattttttt

SEQ ID NO: 194948 - DNA, 27 bp, Artificial sequence
  SiRNA target sequence
ttgcatagtggaatgaatattttttta

SEQ ID NO: 194949 - DNA, 27 bp, Artificial sequence
  SiRNA target sequence
tgcatagtggaatgaatatttttttaa

SEQ ID NO: 194950 - DNA, 27 bp, Artificial sequence
  SiRNA target sequence
gcatagtggaatgaatatttttttaaa

SEQ ID NO: 194951 - DNA, 27 bp, Artificial sequence
  SiRNA target sequence
catagtggaatgaatatttttttaaag

SEQ ID NO: 194952 - DNA, 27 bp, Artificial sequence
  SiRNA target sequence
atagtggaatgaatatttttttaaaga

SEQ ID NO: 194953 - DNA, 27 bp, Artificial sequence
  SiRNA target sequence
tagtggaatgaatatttttttaaagaa

SEQ ID NO: 194954 - DNA, 27 bp, Artificial sequence
  SiRNA target sequence
agtggaatgaatatttttttaaagaat

SEQ ID NO: 194955 - DNA, 27 bp, Artificial sequence
  SiRNA target sequence
gtggaatgaatatttttttaaagaatc

SEQ ID NO: 194956 - DNA, 27 bp, Artificial sequence
  SiRNA target sequence
tggaatgaatatttttttaaagaatct

SEQ ID NO: 194957 - DNA, 27 bp, Artificial sequence
  SiRNA target sequence
ggaatgaatatttttttaaagaatctt

SEQ ID NO: 194958 - DNA, 27 bp, Artificial sequence
  SiRNA target sequence
gaatgaatatttttttaaagaatcttg

SEQ ID NO: 194959 - DNA, 27 bp, Artificial sequence
  SiRNA target sequence
aatgaatatttttttaaagaatcttga

SEQ ID NO: 194960 - DNA, 27 bp, Artificial sequence
  SiRNA target sequence
atgaatatttttttaaagaatcttgat

SEQ ID NO: 194961 - DNA, 27 bp, Artificial sequence
  SiRNA target sequence
tgaatatttttttaaagaatcttgata

SEQ ID NO: 194962 - DNA, 27 bp, Artificial sequence
  SiRNA target sequence
gaatatttttttaaagaatcttgatat

SEQ ID NO: 194963 - DNA, 27 bp, Artificial sequence
  SiRNA target sequence
aatatttttttaaagaatcttgatatt

SEQ ID NO: 194964 - DNA, 27 bp, Artificial sequence
  SiRNA target sequence
atatttttttaaagaatcttgatatta

SEQ ID NO: 194965 - DNA, 27 bp, Artificial sequence
  SiRNA target sequence
tatttttttaaagaatcttgatattac

SEQ ID NO: 194966 - DNA, 27 bp, Artificial sequence
  SiRNA target sequence
atttttttaaagaatcttgatattact

SEQ ID NO: 194967 - DNA, 27 bp, Artificial sequence
  SiRNA target sequence
tttttttaaagaatcttgatattactt

SEQ ID NO: 194968 - DNA, 27 bp, Artificial sequence
  SiRNA target sequence
ttttttaaagaatcttgatattacttt

SEQ ID NO: 194969 - DNA, 27 bp, Artificial sequence
  SiRNA target sequence
tttttaaagaatcttgatattactttt

SEQ ID NO: 194970 - DNA, 27 bp, Artificial sequence
  SiRNA target sequence
ttttaaagaatcttgatattactttta

SEQ ID NO: 194971 - DNA, 27 bp, Artificial sequence
  SiRNA target sequence
tttaaagaatcttgatattacttttag

SEQ ID NO: 194972 - DNA, 27 bp, Artificial sequence
  SiRNA target sequence
ttaaagaatcttgatattacttttaga

SEQ ID NO: 194973 - DNA, 27 bp, Artificial sequence
  SiRNA target sequence
taaagaatcttgatattacttttagaa

SEQ ID NO: 194974 - DNA, 27 bp, Artificial sequence
  SiRNA target sequence
aaagaatcttgatattacttttagaag

SEQ ID NO: 194975 - DNA, 27 bp, Artificial sequence
  SiRNA target sequence
aagaatcttgatattacttttagaaga

SEQ ID NO: 194976 - DNA, 27 bp, Artificial sequence
  SiRNA target sequence
agaatcttgatattacttttagaagag

SEQ ID NO: 194977 - DNA, 27 bp, Artificial sequence
  SiRNA target sequence
gaatcttgatattacttttagaagaga

SEQ ID NO: 194978 - DNA, 27 bp, Artificial sequence
  SiRNA target sequence
aatcttgatattacttttagaagagac

SEQ ID NO: 194979 - DNA, 27 bp, Artificial sequence
  SiRNA target sequence
atcttgatattacttttagaagagact

SEQ ID NO: 194980 - DNA, 27 bp, Artificial sequence
  SiRNA target sequence
tcttgatattacttttagaagagactc

SEQ ID NO: 194981 - DNA, 27 bp, Artificial sequence
  SiRNA target sequence
cttgatattacttttagaagagactct

SEQ ID NO: 194982 - DNA, 27 bp, Artificial sequence
  SiRNA target sequence
ttgatattacttttagaagagactctt

SEQ ID NO: 194983 - DNA, 27 bp, Artificial sequence
  SiRNA target sequence
tgatattacttttagaagagactcttc

SEQ ID NO: 194984 - DNA, 27 bp, Artificial sequence
  SiRNA target sequence
gatattacttttagaagagactcttcc

SEQ ID NO: 194985 - DNA, 27 bp, Artificial sequence
  SiRNA target sequence
atattacttttagaagagactcttcca

SEQ ID NO: 194986 - DNA, 27 bp, Artificial sequence
  SiRNA target sequence
tattacttttagaagagactcttccaa

SEQ ID NO: 194987 - DNA, 27 bp, Artificial sequence
  SiRNA target sequence
attacttttagaagagactcttccaat

SEQ ID NO: 194988 - DNA, 27 bp, Artificial sequence
  SiRNA target sequence
ttacttttagaagagactcttccaatt

SEQ ID NO: 194989 - DNA, 27 bp, Artificial sequence
  SiRNA target sequence
tacttttagaagagactcttccaattt

SEQ ID NO: 194990 - DNA, 27 bp, Artificial sequence
  SiRNA target sequence
acttttagaagagactcttccaatttt

SEQ ID NO: 194991 - DNA, 27 bp, Artificial sequence
  SiRNA target sequence
cttttagaagagactcttccaatttta

SEQ ID NO: 194992 - DNA, 27 bp, Artificial sequence
  SiRNA target sequence
ttttagaagagactcttccaattttag

SEQ ID NO: 194993 - DNA, 27 bp, Artificial sequence
  SiRNA target sequence
tttagaagagactcttccaattttaga

SEQ ID NO: 194994 - DNA, 27 bp, Artificial sequence
  SiRNA target sequence
ttagaagagactcttccaattttagac

SEQ ID NO: 194995 - DNA, 27 bp, Artificial sequence
  SiRNA target sequence
tagaagagactcttccaattttagacc

SEQ ID NO: 194996 - DNA, 27 bp, Artificial sequence
  SiRNA target sequence
agaagagactcttccaattttagacca

SEQ ID NO: 194997 - DNA, 27 bp, Artificial sequence
  SiRNA target sequence
gaagagactcttccaattttagaccaa

SEQ ID NO: 194998 - DNA, 27 bp, Artificial sequence
  SiRNA target sequence
aagagactcttccaattttagaccaag

SEQ ID NO: 194999 - DNA, 27 bp, Artificial sequence
  SiRNA target sequence
agagactcttccaattttagaccaaga

SEQ ID NO: 195000 - DNA, 27 bp, Artificial sequence
  SiRNA target sequence
gagactcttccaattttagaccaagag

SEQ ID NO: 195001 - DNA, 27 bp, Artificial sequence
  SiRNA target sequence
agactcttccaattttagaccaagagt

SEQ ID NO: 195002 - DNA, 27 bp, Artificial sequence
  SiRNA target sequence
gactcttccaattttagaccaagagtt

SEQ ID NO: 195003 - DNA, 27 bp, Artificial sequence
  SiRNA target sequence
actcttccaattttagaccaagagtta

SEQ ID NO: 195004 - DNA, 27 bp, Artificial sequence
  SiRNA target sequence
ctcttccaattttagaccaagagttaa

SEQ ID NO: 195005 - DNA, 27 bp, Artificial sequence
  SiRNA target sequence
tcttccaattttagaccaagagttaat

SEQ ID NO: 195006 - DNA, 27 bp, Artificial sequence
  SiRNA target sequence
cttccaattttagaccaagagttaata

SEQ ID NO: 195007 - DNA, 27 bp, Artificial sequence
  SiRNA target sequence
ttccaattttagaccaagagttaataa

SEQ ID NO: 195008 - DNA, 27 bp, Artificial sequence
  SiRNA target sequence
tccaattttagaccaagagttaataag

SEQ ID NO: 195009 - DNA, 27 bp, Artificial sequence
  SiRNA target sequence
ccaattttagaccaagagttaataagc

SEQ ID NO: 195010 - DNA, 27 bp, Artificial sequence
  SiRNA target sequence
caattttagaccaagagttaataagcc

SEQ ID NO: 195011 - DNA, 27 bp, Artificial sequence
  SiRNA target sequence
aattttagaccaagagttaataagccg

SEQ ID NO: 195012 - DNA, 27 bp, Artificial sequence
  SiRNA target sequence
attttagaccaagagttaataagccga

SEQ ID NO: 195013 - DNA, 27 bp, Artificial sequence
  SiRNA target sequence
ttttagaccaagagttaataagccgaa

SEQ ID NO: 195014 - DNA, 27 bp, Artificial sequence
  SiRNA target sequence
tttagaccaagagttaataagccgaat

SEQ ID NO: 195015 - DNA, 27 bp, Artificial sequence
  SiRNA target sequence
ttagaccaagagttaataagccgaatt

SEQ ID NO: 195016 - DNA, 27 bp, Artificial sequence
  SiRNA target sequence
tagaccaagagttaataagccgaattc

SEQ ID NO: 195017 - DNA, 27 bp, Artificial sequence
  SiRNA target sequence
agaccaagagttaataagccgaattcc

SEQ ID NO: 195018 - DNA, 27 bp, Artificial sequence
  SiRNA target sequence
gaccaagagttaataagccgaattccg

SEQ ID NO: 195019 - DNA, 27 bp, Artificial sequence
  SiRNA target sequence
accaagagttaataagccgaattccgc

SEQ ID NO: 195020 - DNA, 27 bp, Artificial sequence
  SiRNA target sequence
ccaagagttaataagccgaattccgca

SEQ ID NO: 195021 - DNA, 27 bp, Artificial sequence
  SiRNA target sequence
caagagttaataagccgaattccgcaa

SEQ ID NO: 195022 - DNA, 27 bp, Artificial sequence
  SiRNA target sequence
aagagttaataagccgaattccgcaaa

SEQ ID NO: 195023 - DNA, 27 bp, Artificial sequence
  SiRNA target sequence
agagttaataagccgaattccgcaaaa

SEQ ID NO: 195024 - DNA, 27 bp, Artificial sequence
  SiRNA target sequence
gagttaataagccgaattccgcaaaag

SEQ ID NO: 195025 - DNA, 27 bp, Artificial sequence
  SiRNA target sequence
agttaataagccgaattccgcaaaaga

SEQ ID NO: 195026 - DNA, 27 bp, Artificial sequence
  SiRNA target sequence
gttaataagccgaattccgcaaaagac

SEQ ID NO: 195027 - DNA, 27 bp, Artificial sequence
  SiRNA target sequence
ttaataagccgaattccgcaaaagaca

SEQ ID NO: 195028 - DNA, 27 bp, Artificial sequence
  SiRNA target sequence
taataagccgaattccgcaaaagacag

SEQ ID NO: 195029 - DNA, 27 bp, Artificial sequence
  SiRNA target sequence
aataagccgaattccgcaaaagacaga

SEQ ID NO: 195030 - DNA, 27 bp, Artificial sequence
  SiRNA target sequence
ataagccgaattccgcaaaagacagaa

SEQ ID NO: 195031 - DNA, 27 bp, Artificial sequence
  SiRNA target sequence
taagccgaattccgcaaaagacagaac

SEQ ID NO: 195032 - DNA, 27 bp, Artificial sequence
  SiRNA target sequence
aagccgaattccgcaaaagacagaact

SEQ ID NO: 195033 - DNA, 27 bp, Artificial sequence
  SiRNA target sequence
agccgaattccgcaaaagacagaactc

SEQ ID NO: 195034 - DNA, 27 bp, Artificial sequence
  SiRNA target sequence
gccgaattccgcaaaagacagaactca

SEQ ID NO: 195035 - DNA, 27 bp, Artificial sequence
  SiRNA target sequence
ccgaattccgcaaaagacagaactcag

SEQ ID NO: 195036 - DNA, 27 bp, Artificial sequence
  SiRNA target sequence
cgaattccgcaaaagacagaactcaga

SEQ ID NO: 195037 - DNA, 27 bp, Artificial sequence
  SiRNA target sequence
gaattccgcaaaagacagaactcagaa

SEQ ID NO: 195038 - DNA, 27 bp, Artificial sequence
  SiRNA target sequence
aattccgcaaaagacagaactcagaaa

SEQ ID NO: 195039 - DNA, 27 bp, Artificial sequence
  SiRNA target sequence
attccgcaaaagacagaactcagaaag

SEQ ID NO: 195040 - DNA, 27 bp, Artificial sequence
  SiRNA target sequence
ttccgcaaaagacagaactcagaaaga

SEQ ID NO: 195041 - DNA, 27 bp, Artificial sequence
  SiRNA target sequence
tccgcaaaagacagaactcagaaagaa

SEQ ID NO: 195042 - DNA, 27 bp, Artificial sequence
  SiRNA target sequence
ccgcaaaagacagaactcagaaagaag

SEQ ID NO: 195043 - DNA, 27 bp, Artificial sequence
  SiRNA target sequence
cgcaaaagacagaactcagaaagaaga

SEQ ID NO: 195044 - DNA, 27 bp, Artificial sequence
  SiRNA target sequence
gcaaaagacagaactcagaaagaagag

SEQ ID NO: 195045 - DNA, 27 bp, Artificial sequence
  SiRNA target sequence
caaaagacagaactcagaaagaagaga

SEQ ID NO: 195046 - DNA, 27 bp, Artificial sequence
  SiRNA target sequence
aaaagacagaactcagaaagaagagaa

SEQ ID NO: 195047 - DNA, 27 bp, Artificial sequence
  SiRNA target sequence
aaagacagaactcagaaagaagagaat

SEQ ID NO: 195048 - DNA, 27 bp, Artificial sequence
  SiRNA target sequence
aagacagaactcagaaagaagagaata

SEQ ID NO: 195049 - DNA, 27 bp, Artificial sequence
  SiRNA target sequence
agacagaactcagaaagaagagaataa

SEQ ID NO: 195050 - DNA, 27 bp, Artificial sequence
  SiRNA target sequence
gacagaactcagaaagaagagaataaa

SEQ ID NO: 195051 - DNA, 27 bp, Artificial sequence
  SiRNA target sequence
acagaactcagaaagaagagaataaat

SEQ ID NO: 195052 - DNA, 27 bp, Artificial sequence
  SiRNA target sequence
cagaactcagaaagaagagaataaata

SEQ ID NO: 195053 - DNA, 27 bp, Artificial sequence
  SiRNA target sequence
agaactcagaaagaagagaataaatat

SEQ ID NO: 195054 - DNA, 27 bp, Artificial sequence
  SiRNA target sequence
gaactcagaaagaagagaataaatatt

SEQ ID NO: 195055 - DNA, 27 bp, Artificial sequence
  SiRNA target sequence
aactcagaaagaagagaataaatattt

SEQ ID NO: 195056 - DNA, 27 bp, Artificial sequence
  SiRNA target sequence
actcagaaagaagagaataaatatttt

SEQ ID NO: 195057 - DNA, 27 bp, Artificial sequence
  SiRNA target sequence
ctcagaaagaagagaataaatattttt

SEQ ID NO: 195058 - DNA, 27 bp, Artificial sequence
  SiRNA target sequence
tcagaaagaagagaataaatatttttt

SEQ ID NO: 195059 - DNA, 27 bp, Artificial sequence
  SiRNA target sequence
cagaaagaagagaataaatattttttt

SEQ ID NO: 195060 - DNA, 27 bp, Artificial sequence
  SiRNA target sequence
agaaagaagagaataaatatttttttt

SEQ ID NO: 195061 - DNA, 27 bp, Artificial sequence
  SiRNA target sequence
gaaagaagagaataaatattttttttg

SEQ ID NO: 195062 - DNA, 27 bp, Artificial sequence
  SiRNA target sequence
aaagaagagaataaatattttttttga

SEQ ID NO: 195063 - DNA, 19 bp, Artificial sequence
  SiRNA target sequence
ttattctgcgttttctttt

SEQ ID NO: 195064 - DNA, 19 bp, Artificial sequence
  SiRNA target sequence
tattctgcgttttcttttt

SEQ ID NO: 195065 - DNA, 19 bp, Artificial sequence
  SiRNA target sequence
attctgcgttttctttttt

SEQ ID NO: 195066 - DNA, 19 bp, Artificial sequence
  SiRNA target sequence
ttctgcgttttcttttttg

SEQ ID NO: 195067 - DNA, 19 bp, Artificial sequence
  SiRNA target sequence
tctgcgttttcttttttgt

SEQ ID NO: 195068 - DNA, 19 bp, Artificial sequence
  SiRNA target sequence
ctgcgttttcttttttgtc

SEQ ID NO: 195069 - DNA, 19 bp, Artificial sequence
  SiRNA target sequence
tgcgttttcttttttgtcg

SEQ ID NO: 195070 - DNA, 19 bp, Artificial sequence
  SiRNA target sequence
gcgttttcttttttgtcgt

SEQ ID NO: 195071 - DNA, 19 bp, Artificial sequence
  SiRNA target sequence
cgttttcttttttgtcgtc

SEQ ID NO: 195072 - DNA, 19 bp, Artificial sequence
  SiRNA target sequence
gttttcttttttgtcgtct

SEQ ID NO: 195073 - DNA, 19 bp, Artificial sequence
  SiRNA target sequence
ttttcttttttgtcgtctt

SEQ ID NO: 195074 - DNA, 19 bp, Artificial sequence
  SiRNA target sequence
tttcttttttgtcgtcttt

SEQ ID NO: 195075 - DNA, 19 bp, Artificial sequence
  SiRNA target sequence
ttcttttttgtcgtctttt

SEQ ID NO: 195076 - DNA, 19 bp, Artificial sequence
  SiRNA target sequence
tcttttttgtcgtctttta

SEQ ID NO: 195077 - DNA, 19 bp, Artificial sequence
  SiRNA target sequence
cttttttgtcgtcttttat

SEQ ID NO: 195078 - DNA, 19 bp, Artificial sequence
  SiRNA target sequence
ttttttgtcgtcttttatt

SEQ ID NO: 195079 - DNA, 19 bp, Artificial sequence
  SiRNA target sequence
tttttgtcgtcttttatta

SEQ ID NO: 195080 - DNA, 19 bp, Artificial sequence
  SiRNA target sequence
ttttgtcgtcttttattaa

SEQ ID NO: 195081 - DNA, 19 bp, Artificial sequence
  SiRNA target sequence
tttgtcgtcttttattaaa

SEQ ID NO: 195082 - DNA, 19 bp, Artificial sequence
  SiRNA target sequence
ttgtcgtcttttattaaat

SEQ ID NO: 195083 - DNA, 19 bp, Artificial sequence
  SiRNA target sequence
tgtcgtcttttattaaatc

SEQ ID NO: 195084 - DNA, 19 bp, Artificial sequence
  SiRNA target sequence
gtcgtcttttattaaatct

SEQ ID NO: 195085 - DNA, 19 bp, Artificial sequence
  SiRNA target sequence
tcgtcttttattaaatcta

SEQ ID NO: 195086 - DNA, 19 bp, Artificial sequence
  SiRNA target sequence
cgtcttttattaaatctat

SEQ ID NO: 195087 - DNA, 19 bp, Artificial sequence
  SiRNA target sequence
gtcttttattaaatctatg

SEQ ID NO: 195088 - DNA, 19 bp, Artificial sequence
  SiRNA target sequence
tcttttattaaatctatgt

SEQ ID NO: 195089 - DNA, 19 bp, Artificial sequence
  SiRNA target sequence
cttttattaaatctatgtc

SEQ ID NO: 195090 - DNA, 19 bp, Artificial sequence
  SiRNA target sequence
ttttattaaatctatgtct

SEQ ID NO: 195091 - DNA, 19 bp, Artificial sequence
  SiRNA target sequence
tttattaaatctatgtcta

SEQ ID NO: 195092 - DNA, 19 bp, Artificial sequence
  SiRNA target sequence
ttattaaatctatgtctac

SEQ ID NO: 195093 - DNA, 19 bp, Artificial sequence
  SiRNA target sequence
tattaaatctatgtctaca

SEQ ID NO: 195094 - DNA, 19 bp, Artificial sequence
  SiRNA target sequence
attaaatctatgtctacac

SEQ ID NO: 195095 - DNA, 19 bp, Artificial sequence
  SiRNA target sequence
ttaaatctatgtctacact

SEQ ID NO: 195096 - DNA, 19 bp, Artificial sequence
  SiRNA target sequence
taaatctatgtctacactt

SEQ ID NO: 195097 - DNA, 19 bp, Artificial sequence
  SiRNA target sequence
aaatctatgtctacacttg

SEQ ID NO: 195098 - DNA, 19 bp, Artificial sequence
  SiRNA target sequence
aatctatgtctacacttgt

SEQ ID NO: 195099 - DNA, 19 bp, Artificial sequence
  SiRNA target sequence
atctatgtctacacttgta

SEQ ID NO: 195100 - DNA, 19 bp, Artificial sequence
  SiRNA target sequence
tctatgtctacacttgtat

SEQ ID NO: 195101 - DNA, 19 bp, Artificial sequence
  SiRNA target sequence
ctatgtctacacttgtatt

SEQ ID NO: 195102 - DNA, 19 bp, Artificial sequence
  SiRNA target sequence
tatgtctacacttgtatta

SEQ ID NO: 195103 - DNA, 19 bp, Artificial sequence
  SiRNA target sequence
atgtctacacttgtattat

SEQ ID NO: 195104 - DNA, 19 bp, Artificial sequence
  SiRNA target sequence
tgtctacacttgtattatt

SEQ ID NO: 195105 - DNA, 19 bp, Artificial sequence
  SiRNA target sequence
gtctacacttgtattattt

SEQ ID NO: 195106 - DNA, 19 bp, Artificial sequence
  SiRNA target sequence
tctacacttgtattatttt

SEQ ID NO: 195107 - DNA, 19 bp, Artificial sequence
  SiRNA target sequence
ctacacttgtattattttt

SEQ ID NO: 195108 - DNA, 19 bp, Artificial sequence
  SiRNA target sequence
tacacttgtattattttta

SEQ ID NO: 195109 - DNA, 19 bp, Artificial sequence
  SiRNA target sequence
acacttgtattatttttaa

SEQ ID NO: 195110 - DNA, 19 bp, Artificial sequence
  SiRNA target sequence
cacttgtattatttttaat

SEQ ID NO: 195111 - DNA, 19 bp, Artificial sequence
  SiRNA target sequence
acttgtattatttttaatt

SEQ ID NO: 195112 - DNA, 19 bp, Artificial sequence
  SiRNA target sequence
cttgtattatttttaattg

SEQ ID NO: 195113 - DNA, 19 bp, Artificial sequence
  SiRNA target sequence
ttgtattatttttaattga

SEQ ID NO: 195114 - DNA, 19 bp, Artificial sequence
  SiRNA target sequence
tgtattatttttaattgaa

SEQ ID NO: 195115 - DNA, 19 bp, Artificial sequence
  SiRNA target sequence
gtattatttttaattgaaa

SEQ ID NO: 195116 - DNA, 19 bp, Artificial sequence
  SiRNA target sequence
tattatttttaattgaaac

SEQ ID NO: 195117 - DNA, 19 bp, Artificial sequence
  SiRNA target sequence
attatttttaattgaaacg

SEQ ID NO: 195118 - DNA, 19 bp, Artificial sequence
  SiRNA target sequence
ttatttttaattgaaacgt

SEQ ID NO: 195119 - DNA, 19 bp, Artificial sequence
  SiRNA target sequence
tatttttaattgaaacgtt

SEQ ID NO: 195120 - DNA, 19 bp, Artificial sequence
  SiRNA target sequence
atttttaattgaaacgtta

SEQ ID NO: 195121 - DNA, 19 bp, Artificial sequence
  SiRNA target sequence
tttttaattgaaacgttat

SEQ ID NO: 195122 - DNA, 19 bp, Artificial sequence
  SiRNA target sequence
ttttaattgaaacgttata

SEQ ID NO: 195123 - DNA, 19 bp, Artificial sequence
  SiRNA target sequence
tttaattgaaacgttatat

SEQ ID NO: 195124 - DNA, 19 bp, Artificial sequence
  SiRNA target sequence
ttaattgaaacgttatatg

SEQ ID NO: 195125 - DNA, 19 bp, Artificial sequence
  SiRNA target sequence
taattgaaacgttatatgc

SEQ ID NO: 195126 - DNA, 19 bp, Artificial sequence
  SiRNA target sequence
aattgaaacgttatatgca

SEQ ID NO: 195127 - DNA, 19 bp, Artificial sequence
  SiRNA target sequence
attgaaacgttatatgcac

SEQ ID NO: 195128 - DNA, 19 bp, Artificial sequence
  SiRNA target sequence
ttgaaacgttatatgcacc

SEQ ID NO: 195129 - DNA, 19 bp, Artificial sequence
  SiRNA target sequence
tgaaacgttatatgcaccc

SEQ ID NO: 195130 - DNA, 19 bp, Artificial sequence
  SiRNA target sequence
gaaacgttatatgcacccg

SEQ ID NO: 195131 - DNA, 19 bp, Artificial sequence
  SiRNA target sequence
aaacgttatatgcacccgc

SEQ ID NO: 195132 - DNA, 19 bp, Artificial sequence
  SiRNA target sequence
aacgttatatgcacccgct

SEQ ID NO: 195133 - DNA, 19 bp, Artificial sequence
  SiRNA target sequence
acgttatatgcacccgcta

SEQ ID NO: 195134 - DNA, 19 bp, Artificial sequence
  SiRNA target sequence
cgttatatgcacccgctaa

SEQ ID NO: 195135 - DNA, 19 bp, Artificial sequence
  SiRNA target sequence
gttatatgcacccgctaaa

SEQ ID NO: 195136 - DNA, 19 bp, Artificial sequence
  SiRNA target sequence
ttatatgcacccgctaaat

SEQ ID NO: 195137 - DNA, 19 bp, Artificial sequence
  SiRNA target sequence
tatatgcacccgctaaata

SEQ ID NO: 195138 - DNA, 19 bp, Artificial sequence
  SiRNA target sequence
atatgcacccgctaaatag

SEQ ID NO: 195139 - DNA, 19 bp, Artificial sequence
  SiRNA target sequence
tatgcacccgctaaataga

SEQ ID NO: 195140 - DNA, 19 bp, Artificial sequence
  SiRNA target sequence
atgcacccgctaaatagat

SEQ ID NO: 195141 - DNA, 19 bp, Artificial sequence
  SiRNA target sequence
tgcacccgctaaatagatt

SEQ ID NO: 195142 - DNA, 19 bp, Artificial sequence
  SiRNA target sequence
gcacccgctaaatagatta

SEQ ID NO: 195143 - DNA, 19 bp, Artificial sequence
  SiRNA target sequence
cacccgctaaatagattat

SEQ ID NO: 195144 - DNA, 19 bp, Artificial sequence
  SiRNA target sequence
acccgctaaatagattata

SEQ ID NO: 195145 - DNA, 19 bp, Artificial sequence
  SiRNA target sequence
cccgctaaatagattatag

SEQ ID NO: 195146 - DNA, 19 bp, Artificial sequence
  SiRNA target sequence
ccgctaaatagattatagc

SEQ ID NO: 195147 - DNA, 19 bp, Artificial sequence
  SiRNA target sequence
cgctaaatagattatagct

SEQ ID NO: 195148 - DNA, 19 bp, Artificial sequence
  SiRNA target sequence
gctaaatagattatagctc

SEQ ID NO: 195149 - DNA, 19 bp, Artificial sequence
  SiRNA target sequence
ctaaatagattatagctct

SEQ ID NO: 195150 - DNA, 19 bp, Artificial sequence
  SiRNA target sequence
taaatagattatagctcta

SEQ ID NO: 195151 - DNA, 19 bp, Artificial sequence
  SiRNA target sequence
aaatagattatagctctaa

SEQ ID NO: 195152 - DNA, 19 bp, Artificial sequence
  SiRNA target sequence
aatagattatagctctaat

SEQ ID NO: 195153 - DNA, 19 bp, Artificial sequence
  SiRNA target sequence
atagattatagctctaatc

SEQ ID NO: 195154 - DNA, 19 bp, Artificial sequence
  SiRNA target sequence
tagattatagctctaatcc

SEQ ID NO: 195155 - DNA, 19 bp, Artificial sequence
  SiRNA target sequence
agattatagctctaatcca

SEQ ID NO: 195156 - DNA, 19 bp, Artificial sequence
  SiRNA target sequence
gattatagctctaatccaa

SEQ ID NO: 195157 - DNA, 19 bp, Artificial sequence
  SiRNA target sequence
attatagctctaatccaaa

SEQ ID NO: 195158 - DNA, 19 bp, Artificial sequence
  SiRNA target sequence
ttatagctctaatccaaat

SEQ ID NO: 195159 - DNA, 19 bp, Artificial sequence
  SiRNA target sequence
tatagctctaatccaaata

SEQ ID NO: 195160 - DNA, 19 bp, Artificial sequence
  SiRNA target sequence
atagctctaatccaaatat

SEQ ID NO: 195161 - DNA, 19 bp, Artificial sequence
  SiRNA target sequence
tagctctaatccaaatata

SEQ ID NO: 195162 - DNA, 19 bp, Artificial sequence
  SiRNA target sequence
agctctaatccaaatataa

SEQ ID NO: 195163 - DNA, 19 bp, Artificial sequence
  SiRNA target sequence
gctctaatccaaatataaa

SEQ ID NO: 195164 - DNA, 19 bp, Artificial sequence
  SiRNA target sequence
ctctaatccaaatataaat

SEQ ID NO: 195165 - DNA, 19 bp, Artificial sequence
  SiRNA target sequence
tctaatccaaatataaatc

SEQ ID NO: 195166 - DNA, 19 bp, Artificial sequence
  SiRNA target sequence
ctaatccaaatataaatca

SEQ ID NO: 195167 - DNA, 19 bp, Artificial sequence
  SiRNA target sequence
taatccaaatataaatcaa

SEQ ID NO: 195168 - DNA, 19 bp, Artificial sequence
  SiRNA target sequence
aatccaaatataaatcaat

SEQ ID NO: 195169 - DNA, 19 bp, Artificial sequence
  SiRNA target sequence
atccaaatataaatcaata

SEQ ID NO: 195170 - DNA, 19 bp, Artificial sequence
  SiRNA target sequence
tccaaatataaatcaatat

SEQ ID NO: 195171 - DNA, 19 bp, Artificial sequence
  SiRNA target sequence
ccaaatataaatcaatatt

SEQ ID NO: 195172 - DNA, 19 bp, Artificial sequence
  SiRNA target sequence
caaatataaatcaatatta

SEQ ID NO: 195173 - DNA, 19 bp, Artificial sequence
  SiRNA target sequence
aaatataaatcaatattat

SEQ ID NO: 195174 - DNA, 19 bp, Artificial sequence
  SiRNA target sequence
aatataaatcaatattatt

SEQ ID NO: 195175 - DNA, 19 bp, Artificial sequence
  SiRNA target sequence
atataaatcaatattattg

SEQ ID NO: 195176 - DNA, 19 bp, Artificial sequence
  SiRNA target sequence
tataaatcaatattattgc

SEQ ID NO: 195177 - DNA, 19 bp, Artificial sequence
  SiRNA target sequence
ataaatcaatattattgca

SEQ ID NO: 195178 - DNA, 19 bp, Artificial sequence
  SiRNA target sequence
taaatcaatattattgcaa

SEQ ID NO: 195179 - DNA, 19 bp, Artificial sequence
  SiRNA target sequence
aaatcaatattattgcaat

SEQ ID NO: 195180 - DNA, 19 bp, Artificial sequence
  SiRNA target sequence
aatcaatattattgcaatc

SEQ ID NO: 195181 - DNA, 19 bp, Artificial sequence
  SiRNA target sequence
atcaatattattgcaatcg

SEQ ID NO: 195182 - DNA, 19 bp, Artificial sequence
  SiRNA target sequence
tcaatattattgcaatcgt

SEQ ID NO: 195183 - DNA, 19 bp, Artificial sequence
  SiRNA target sequence
caatattattgcaatcgtt

SEQ ID NO: 195184 - DNA, 19 bp, Artificial sequence
  SiRNA target sequence
aatattattgcaatcgtta

SEQ ID NO: 195185 - DNA, 19 bp, Artificial sequence
  SiRNA target sequence
atattattgcaatcgttaa

SEQ ID NO: 195186 - DNA, 19 bp, Artificial sequence
  SiRNA target sequence
tattattgcaatcgttaat

SEQ ID NO: 195187 - DNA, 19 bp, Artificial sequence
  SiRNA target sequence
attattgcaatcgttaatg

SEQ ID NO: 195188 - DNA, 19 bp, Artificial sequence
  SiRNA target sequence
ttattgcaatcgttaatgt

SEQ ID NO: 195189 - DNA, 19 bp, Artificial sequence
  SiRNA target sequence
tattgcaatcgttaatgtg

SEQ ID NO: 195190 - DNA, 19 bp, Artificial sequence
  SiRNA target sequence
attgcaatcgttaatgtga

SEQ ID NO: 195191 - DNA, 19 bp, Artificial sequence
  SiRNA target sequence
ttgcaatcgttaatgtgat

SEQ ID NO: 195192 - DNA, 19 bp, Artificial sequence
  SiRNA target sequence
tgcaatcgttaatgtgatt

SEQ ID NO: 195193 - DNA, 19 bp, Artificial sequence
  SiRNA target sequence
gcaatcgttaatgtgattg

SEQ ID NO: 195194 - DNA, 19 bp, Artificial sequence
  SiRNA target sequence
caatcgttaatgtgattgg

SEQ ID NO: 195195 - DNA, 19 bp, Artificial sequence
  SiRNA target sequence
aatcgttaatgtgattgga

SEQ ID NO: 195196 - DNA, 19 bp, Artificial sequence
  SiRNA target sequence
atcgttaatgtgattggac

SEQ ID NO: 195197 - DNA, 19 bp, Artificial sequence
  SiRNA target sequence
tcgttaatgtgattggact

SEQ ID NO: 195198 - DNA, 19 bp, Artificial sequence
  SiRNA target sequence
cgttaatgtgattggacta

SEQ ID NO: 195199 - DNA, 19 bp, Artificial sequence
  SiRNA target sequence
gttaatgtgattggactac

SEQ ID NO: 195200 - DNA, 19 bp, Artificial sequence
  SiRNA target sequence
ttaatgtgattggactacc

SEQ ID NO: 195201 - DNA, 19 bp, Artificial sequence
  SiRNA target sequence
taatgtgattggactaccc

SEQ ID NO: 195202 - DNA, 19 bp, Artificial sequence
  SiRNA target sequence
aatgtgattggactaccct

SEQ ID NO: 195203 - DNA, 19 bp, Artificial sequence
  SiRNA target sequence
atgtgattggactaccctt

SEQ ID NO: 195204 - DNA, 19 bp, Artificial sequence
  SiRNA target sequence
tgtgattggactacccttc

SEQ ID NO: 195205 - DNA, 19 bp, Artificial sequence
  SiRNA target sequence
gtgattggactacccttcc

SEQ ID NO: 195206 - DNA, 19 bp, Artificial sequence
  SiRNA target sequence
tgattggactacccttcct

SEQ ID NO: 195207 - DNA, 19 bp, Artificial sequence
  SiRNA target sequence
gattggactacccttcctt

SEQ ID NO: 195208 - DNA, 19 bp, Artificial sequence
  SiRNA target sequence
attggactacccttcctta

SEQ ID NO: 195209 - DNA, 19 bp, Artificial sequence
  SiRNA target sequence
ttggactacccttccttac

SEQ ID NO: 195210 - DNA, 19 bp, Artificial sequence
  SiRNA target sequence
tggactacccttccttaca

SEQ ID NO: 195211 - DNA, 19 bp, Artificial sequence
  SiRNA target sequence
ggactacccttccttacat

SEQ ID NO: 195212 - DNA, 19 bp, Artificial sequence
  SiRNA target sequence
gactacccttccttacatt

SEQ ID NO: 195213 - DNA, 19 bp, Artificial sequence
  SiRNA target sequence
actacccttccttacatta

SEQ ID NO: 195214 - DNA, 19 bp, Artificial sequence
  SiRNA target sequence
ctacccttccttacattat

SEQ ID NO: 195215 - DNA, 19 bp, Artificial sequence
  SiRNA target sequence
tacccttccttacattatc

SEQ ID NO: 195216 - DNA, 19 bp, Artificial sequence
  SiRNA target sequence
acccttccttacattatca

SEQ ID NO: 195217 - DNA, 19 bp, Artificial sequence
  SiRNA target sequence
cccttccttacattatcag

SEQ ID NO: 195218 - DNA, 19 bp, Artificial sequence
  SiRNA target sequence
ccttccttacattatcagt

SEQ ID NO: 195219 - DNA, 19 bp, Artificial sequence
  SiRNA target sequence
cttccttacattatcagta

SEQ ID NO: 195220 - DNA, 19 bp, Artificial sequence
  SiRNA target sequence
ttccttacattatcagtat

SEQ ID NO: 195221 - DNA, 19 bp, Artificial sequence
  SiRNA target sequence
tccttacattatcagtatc

SEQ ID NO: 195222 - DNA, 19 bp, Artificial sequence
  SiRNA target sequence
ccttacattatcagtatca

SEQ ID NO: 195223 - DNA, 19 bp, Artificial sequence
  SiRNA target sequence
cttacattatcagtatcaa

SEQ ID NO: 195224 - DNA, 19 bp, Artificial sequence
  SiRNA target sequence
ttacattatcagtatcaag

SEQ ID NO: 195225 - DNA, 19 bp, Artificial sequence
  SiRNA target sequence
tacattatcagtatcaagt

SEQ ID NO: 195226 - DNA, 19 bp, Artificial sequence
  SiRNA target sequence
acattatcagtatcaagtg

SEQ ID NO: 195227 - DNA, 19 bp, Artificial sequence
  SiRNA target sequence
cattatcagtatcaagtgc

SEQ ID NO: 195228 - DNA, 19 bp, Artificial sequence
  SiRNA target sequence
attatcagtatcaagtgct

SEQ ID NO: 195229 - DNA, 19 bp, Artificial sequence
  SiRNA target sequence
ttatcagtatcaagtgcta

SEQ ID NO: 195230 - DNA, 19 bp, Artificial sequence
  SiRNA target sequence
tatcagtatcaagtgctac

SEQ ID NO: 195231 - DNA, 19 bp, Artificial sequence
  SiRNA target sequence
atcagtatcaagtgctact

SEQ ID NO: 195232 - DNA, 19 bp, Artificial sequence
  SiRNA target sequence
tcagtatcaagtgctacta

SEQ ID NO: 195233 - DNA, 19 bp, Artificial sequence
  SiRNA target sequence
cagtatcaagtgctactaa

SEQ ID NO: 195234 - DNA, 19 bp, Artificial sequence
  SiRNA target sequence
agtatcaagtgctactaat

SEQ ID NO: 195235 - DNA, 19 bp, Artificial sequence
  SiRNA target sequence
gtatcaagtgctactaata

SEQ ID NO: 195236 - DNA, 19 bp, Artificial sequence
  SiRNA target sequence
tatcaagtgctactaatat

SEQ ID NO: 195237 - DNA, 19 bp, Artificial sequence
  SiRNA target sequence
atcaagtgctactaatatg

SEQ ID NO: 195238 - DNA, 19 bp, Artificial sequence
  SiRNA target sequence
tcaagtgctactaatatgg

SEQ ID NO: 195239 - DNA, 19 bp, Artificial sequence
  SiRNA target sequence
caagtgctactaatatggc

SEQ ID NO: 195240 - DNA, 19 bp, Artificial sequence
  SiRNA target sequence
aagtgctactaatatggct

SEQ ID NO: 195241 - DNA, 19 bp, Artificial sequence
  SiRNA target sequence
agtgctactaatatggcta

SEQ ID NO: 195242 - DNA, 19 bp, Artificial sequence
  SiRNA target sequence
gtgctactaatatggctag

SEQ ID NO: 195243 - DNA, 19 bp, Artificial sequence
  SiRNA target sequence
tgctactaatatggctagt

SEQ ID NO: 195244 - DNA, 19 bp, Artificial sequence
  SiRNA target sequence
gctactaatatggctagtc

SEQ ID NO: 195245 - DNA, 19 bp, Artificial sequence
  SiRNA target sequence
ctactaatatggctagtcc

SEQ ID NO: 195246 - DNA, 19 bp, Artificial sequence
  SiRNA target sequence
tactaatatggctagtcca

SEQ ID NO: 195247 - DNA, 19 bp, Artificial sequence
  SiRNA target sequence
actaatatggctagtccat

SEQ ID NO: 195248 - DNA, 19 bp, Artificial sequence
  SiRNA target sequence
ctaatatggctagtccata

SEQ ID NO: 195249 - DNA, 19 bp, Artificial sequence
  SiRNA target sequence
taatatggctagtccatat

SEQ ID NO: 195250 - DNA, 19 bp, Artificial sequence
  SiRNA target sequence
aatatggctagtccatata

SEQ ID NO: 195251 - DNA, 19 bp, Artificial sequence
  SiRNA target sequence
atatggctagtccatataa

SEQ ID NO: 195252 - DNA, 19 bp, Artificial sequence
  SiRNA target sequence
tatggctagtccatataat

SEQ ID NO: 195253 - DNA, 19 bp, Artificial sequence
  SiRNA target sequence
atggctagtccatataatg

SEQ ID NO: 195254 - DNA, 19 bp, Artificial sequence
  SiRNA target sequence
tggctagtccatataatga

SEQ ID NO: 195255 - DNA, 19 bp, Artificial sequence
  SiRNA target sequence
ggctagtccatataatgaa

SEQ ID NO: 195256 - DNA, 19 bp, Artificial sequence
  SiRNA target sequence
gctagtccatataatgaac

SEQ ID NO: 195257 - DNA, 19 bp, Artificial sequence
  SiRNA target sequence
ctagtccatataatgaacc

SEQ ID NO: 195258 - DNA, 19 bp, Artificial sequence
  SiRNA target sequence
tagtccatataatgaacca

SEQ ID NO: 195259 - DNA, 19 bp, Artificial sequence
  SiRNA target sequence
agtccatataatgaaccaa

SEQ ID NO: 195260 - DNA, 19 bp, Artificial sequence
  SiRNA target sequence
gtccatataatgaaccaat

SEQ ID NO: 195261 - DNA, 19 bp, Artificial sequence
  SiRNA target sequence
tccatataatgaaccaata

SEQ ID NO: 195262 - DNA, 19 bp, Artificial sequence
  SiRNA target sequence
ccatataatgaaccaatag

SEQ ID NO: 195263 - DNA, 19 bp, Artificial sequence
  SiRNA target sequence
catataatgaaccaataga

SEQ ID NO: 195264 - DNA, 19 bp, Artificial sequence
  SiRNA target sequence
atataatgaaccaatagat

SEQ ID NO: 195265 - DNA, 19 bp, Artificial sequence
  SiRNA target sequence
tataatgaaccaatagatt

SEQ ID NO: 195266 - DNA, 19 bp, Artificial sequence
  SiRNA target sequence
ataatgaaccaatagattt

SEQ ID NO: 195267 - DNA, 19 bp, Artificial sequence
  SiRNA target sequence
taatgaaccaatagatttt

SEQ ID NO: 195268 - DNA, 19 bp, Artificial sequence
  SiRNA target sequence
aatgaaccaatagattttc

SEQ ID NO: 195269 - DNA, 19 bp, Artificial sequence
  SiRNA target sequence
atgaaccaatagattttcc

SEQ ID NO: 195270 - DNA, 19 bp, Artificial sequence
  SiRNA target sequence
tgaaccaatagattttcct

SEQ ID NO: 195271 - DNA, 19 bp, Artificial sequence
  SiRNA target sequence
gaaccaatagattttccta

SEQ ID NO: 195272 - DNA, 19 bp, Artificial sequence
  SiRNA target sequence
aaccaatagattttcctaa

SEQ ID NO: 195273 - DNA, 19 bp, Artificial sequence
  SiRNA target sequence
accaatagattttcctaat

SEQ ID NO: 195274 - DNA, 19 bp, Artificial sequence
  SiRNA target sequence
ccaatagattttcctaatt

SEQ ID NO: 195275 - DNA, 19 bp, Artificial sequence
  SiRNA target sequence
caatagattttcctaattt

SEQ ID NO: 195276 - DNA, 19 bp, Artificial sequence
  SiRNA target sequence
aatagattttcctaattta

SEQ ID NO: 195277 - DNA, 19 bp, Artificial sequence
  SiRNA target sequence
atagattttcctaatttat

SEQ ID NO: 195278 - DNA, 19 bp, Artificial sequence
  SiRNA target sequence
tagattttcctaatttatt

SEQ ID NO: 195279 - DNA, 19 bp, Artificial sequence
  SiRNA target sequence
agattttcctaatttatta

SEQ ID NO: 195280 - DNA, 19 bp, Artificial sequence
  SiRNA target sequence
gattttcctaatttattaa

SEQ ID NO: 195281 - DNA, 19 bp, Artificial sequence
  SiRNA target sequence
attttcctaatttattaaa

SEQ ID NO: 195282 - DNA, 19 bp, Artificial sequence
  SiRNA target sequence
ttttcctaatttattaaaa

SEQ ID NO: 195283 - DNA, 19 bp, Artificial sequence
  SiRNA target sequence
tttcctaatttattaaaaa

SEQ ID NO: 195284 - DNA, 19 bp, Artificial sequence
  SiRNA target sequence
ttcctaatttattaaaaat

SEQ ID NO: 195285 - DNA, 19 bp, Artificial sequence
  SiRNA target sequence
tcctaatttattaaaaata

SEQ ID NO: 195286 - DNA, 19 bp, Artificial sequence
  SiRNA target sequence
cctaatttattaaaaatac

SEQ ID NO: 195287 - DNA, 19 bp, Artificial sequence
  SiRNA target sequence
ctaatttattaaaaatacc

SEQ ID NO: 195288 - DNA, 19 bp, Artificial sequence
  SiRNA target sequence
taatttattaaaaatacca

SEQ ID NO: 195289 - DNA, 19 bp, Artificial sequence
  SiRNA target sequence
aatttattaaaaataccat

SEQ ID NO: 195290 - DNA, 19 bp, Artificial sequence
  SiRNA target sequence
atttattaaaaataccatc

SEQ ID NO: 195291 - DNA, 19 bp, Artificial sequence
  SiRNA target sequence
tttattaaaaataccatca

SEQ ID NO: 195292 - DNA, 19 bp, Artificial sequence
  SiRNA target sequence
ttattaaaaataccatcat

SEQ ID NO: 195293 - DNA, 19 bp, Artificial sequence
  SiRNA target sequence
tattaaaaataccatcata

SEQ ID NO: 195294 - DNA, 19 bp, Artificial sequence
  SiRNA target sequence
attaaaaataccatcataa

SEQ ID NO: 195295 - DNA, 19 bp, Artificial sequence
  SiRNA target sequence
ttaaaaataccatcataaa

SEQ ID NO: 195296 - DNA, 19 bp, Artificial sequence
  SiRNA target sequence
taaaaataccatcataaac

SEQ ID NO: 195297 - DNA, 19 bp, Artificial sequence
  SiRNA target sequence
aaaaataccatcataaaca

SEQ ID NO: 195298 - DNA, 19 bp, Artificial sequence
  SiRNA target sequence
aaaataccatcataaacac

SEQ ID NO: 195299 - DNA, 19 bp, Artificial sequence
  SiRNA target sequence
aaataccatcataaacact

SEQ ID NO: 195300 - DNA, 19 bp, Artificial sequence
  SiRNA target sequence
aataccatcataaacactt

SEQ ID NO: 195301 - DNA, 19 bp, Artificial sequence
  SiRNA target sequence
ataccatcataaacacttt

SEQ ID NO: 195302 - DNA, 19 bp, Artificial sequence
  SiRNA target sequence
taccatcataaacactttt

SEQ ID NO: 195303 - DNA, 19 bp, Artificial sequence
  SiRNA target sequence
accatcataaacactttta

SEQ ID NO: 195304 - DNA, 19 bp, Artificial sequence
  SiRNA target sequence
ccatcataaacacttttaa

SEQ ID NO: 195305 - DNA, 19 bp, Artificial sequence
  SiRNA target sequence
catcataaacacttttaaa

SEQ ID NO: 195306 - DNA, 19 bp, Artificial sequence
  SiRNA target sequence
atcataaacacttttaaac

SEQ ID NO: 195307 - DNA, 19 bp, Artificial sequence
  SiRNA target sequence
tcataaacacttttaaacc

SEQ ID NO: 195308 - DNA, 19 bp, Artificial sequence
  SiRNA target sequence
cataaacacttttaaaccg

SEQ ID NO: 195309 - DNA, 19 bp, Artificial sequence
  SiRNA target sequence
ataaacacttttaaaccgt

SEQ ID NO: 195310 - DNA, 19 bp, Artificial sequence
  SiRNA target sequence
taaacacttttaaaccgtg

SEQ ID NO: 195311 - DNA, 19 bp, Artificial sequence
  SiRNA target sequence
aaacacttttaaaccgtgc

SEQ ID NO: 195312 - DNA, 19 bp, Artificial sequence
  SiRNA target sequence
aacacttttaaaccgtgcc

SEQ ID NO: 195313 - DNA, 19 bp, Artificial sequence
  SiRNA target sequence
acacttttaaaccgtgccc

SEQ ID NO: 195314 - DNA, 19 bp, Artificial sequence
  SiRNA target sequence
cacttttaaaccgtgccct

SEQ ID NO: 195315 - DNA, 19 bp, Artificial sequence
  SiRNA target sequence
acttttaaaccgtgccctg

SEQ ID NO: 195316 - DNA, 19 bp, Artificial sequence
  SiRNA target sequence
cttttaaaccgtgccctgt

SEQ ID NO: 195317 - DNA, 19 bp, Artificial sequence
  SiRNA target sequence
ttttaaaccgtgccctgtg

SEQ ID NO: 195318 - DNA, 19 bp, Artificial sequence
  SiRNA target sequence
tttaaaccgtgccctgtgt

SEQ ID NO: 195319 - DNA, 19 bp, Artificial sequence
  SiRNA target sequence
ttaaaccgtgccctgtgtg

SEQ ID NO: 195320 - DNA, 19 bp, Artificial sequence
  SiRNA target sequence
taaaccgtgccctgtgtgc

SEQ ID NO: 195321 - DNA, 19 bp, Artificial sequence
  SiRNA target sequence
aaaccgtgccctgtgtgca

SEQ ID NO: 195322 - DNA, 19 bp, Artificial sequence
  SiRNA target sequence
aaccgtgccctgtgtgcag

SEQ ID NO: 195323 - DNA, 19 bp, Artificial sequence
  SiRNA target sequence
accgtgccctgtgtgcagg

SEQ ID NO: 195324 - DNA, 19 bp, Artificial sequence
  SiRNA target sequence
ccgtgccctgtgtgcagga

SEQ ID NO: 195325 - DNA, 19 bp, Artificial sequence
  SiRNA target sequence
cgtgccctgtgtgcaggat

SEQ ID NO: 195326 - DNA, 19 bp, Artificial sequence
  SiRNA target sequence
gtgccctgtgtgcaggatc

SEQ ID NO: 195327 - DNA, 19 bp, Artificial sequence
  SiRNA target sequence
tgccctgtgtgcaggatcg

SEQ ID NO: 195328 - DNA, 19 bp, Artificial sequence
  SiRNA target sequence
gccctgtgtgcaggatcga

SEQ ID NO: 195329 - DNA, 19 bp, Artificial sequence
  SiRNA target sequence
ccctgtgtgcaggatcgat

SEQ ID NO: 195330 - DNA, 19 bp, Artificial sequence
  SiRNA target sequence
cctgtgtgcaggatcgatt

SEQ ID NO: 195331 - DNA, 19 bp, Artificial sequence
  SiRNA target sequence
ctgtgtgcaggatcgattc

SEQ ID NO: 195332 - DNA, 19 bp, Artificial sequence
  SiRNA target sequence
tgtgtgcaggatcgattct

SEQ ID NO: 195333 - DNA, 19 bp, Artificial sequence
  SiRNA target sequence
gtgtgcaggatcgattctc

SEQ ID NO: 195334 - DNA, 19 bp, Artificial sequence
  SiRNA target sequence
tgtgcaggatcgattctca

SEQ ID NO: 195335 - DNA, 19 bp, Artificial sequence
  SiRNA target sequence
gtgcaggatcgattctcat

SEQ ID NO: 195336 - DNA, 19 bp, Artificial sequence
  SiRNA target sequence
tgcaggatcgattctcata

SEQ ID NO: 195337 - DNA, 19 bp, Artificial sequence
  SiRNA target sequence
gcaggatcgattctcatac

SEQ ID NO: 195338 - DNA, 19 bp, Artificial sequence
  SiRNA target sequence
caggatcgattctcatacc

SEQ ID NO: 195339 - DNA, 19 bp, Artificial sequence
  SiRNA target sequence
aggatcgattctcataccc

SEQ ID NO: 195340 - DNA, 19 bp, Artificial sequence
  SiRNA target sequence
ggatcgattctcataccca

SEQ ID NO: 195341 - DNA, 19 bp, Artificial sequence
  SiRNA target sequence
gatcgattctcatacccat

SEQ ID NO: 195342 - DNA, 19 bp, Artificial sequence
  SiRNA target sequence
atcgattctcatacccatt

SEQ ID NO: 195343 - DNA, 19 bp, Artificial sequence
  SiRNA target sequence
tcgattctcatacccattt

SEQ ID NO: 195344 - DNA, 19 bp, Artificial sequence
  SiRNA target sequence
cgattctcatacccatttt

SEQ ID NO: 195345 - DNA, 19 bp, Artificial sequence
  SiRNA target sequence
gattctcatacccattttc

SEQ ID NO: 195346 - DNA, 19 bp, Artificial sequence
  SiRNA target sequence
attctcatacccattttct

SEQ ID NO: 195347 - DNA, 19 bp, Artificial sequence
  SiRNA target sequence
ttctcatacccattttctc

SEQ ID NO: 195348 - DNA, 19 bp, Artificial sequence
  SiRNA target sequence
tctcatacccattttctct

SEQ ID NO: 195349 - DNA, 19 bp, Artificial sequence
  SiRNA target sequence
ctcatacccattttctctt

SEQ ID NO: 195350 - DNA, 19 bp, Artificial sequence
  SiRNA target sequence
tcatacccattttctcttt

SEQ ID NO: 195351 - DNA, 19 bp, Artificial sequence
  SiRNA target sequence
catacccattttctcttta

SEQ ID NO: 195352 - DNA, 19 bp, Artificial sequence
  SiRNA target sequence
atacccattttctctttac

SEQ ID NO: 195353 - DNA, 19 bp, Artificial sequence
  SiRNA target sequence
tacccattttctctttaca

SEQ ID NO: 195354 - DNA, 19 bp, Artificial sequence
  SiRNA target sequence
acccattttctctttacaa

SEQ ID NO: 195355 - DNA, 19 bp, Artificial sequence
  SiRNA target sequence
cccattttctctttacaaa

SEQ ID NO: 195356 - DNA, 19 bp, Artificial sequence
  SiRNA target sequence
ccattttctctttacaaat

SEQ ID NO: 195357 - DNA, 19 bp, Artificial sequence
  SiRNA target sequence
cattttctctttacaaata

SEQ ID NO: 195358 - DNA, 19 bp, Artificial sequence
  SiRNA target sequence
attttctctttacaaatat

SEQ ID NO: 195359 - DNA, 19 bp, Artificial sequence
  SiRNA target sequence
ttttctctttacaaatatc

SEQ ID NO: 195360 - DNA, 19 bp, Artificial sequence
  SiRNA target sequence
tttctctttacaaatatca

SEQ ID NO: 195361 - DNA, 19 bp, Artificial sequence
  SiRNA target sequence
ttctctttacaaatatcaa

SEQ ID NO: 195362 - DNA, 19 bp, Artificial sequence
  SiRNA target sequence
tctctttacaaatatcaaa

SEQ ID NO: 195363 - DNA, 19 bp, Artificial sequence
  SiRNA target sequence
ctctttacaaatatcaaag

SEQ ID NO: 195364 - DNA, 19 bp, Artificial sequence
  SiRNA target sequence
tctttacaaatatcaaagg

SEQ ID NO: 195365 - DNA, 19 bp, Artificial sequence
  SiRNA target sequence
ctttacaaatatcaaaggc

SEQ ID NO: 195366 - DNA, 19 bp, Artificial sequence
  SiRNA target sequence
tttacaaatatcaaaggct

SEQ ID NO: 195367 - DNA, 19 bp, Artificial sequence
  SiRNA target sequence
ttacaaatatcaaaggctg

SEQ ID NO: 195368 - DNA, 19 bp, Artificial sequence
  SiRNA target sequence
tacaaatatcaaaggctga

SEQ ID NO: 195369 - DNA, 19 bp, Artificial sequence
  SiRNA target sequence
acaaatatcaaaggctgaa

SEQ ID NO: 195370 - DNA, 19 bp, Artificial sequence
  SiRNA target sequence
caaatatcaaaggctgaat

SEQ ID NO: 195371 - DNA, 19 bp, Artificial sequence
  SiRNA target sequence
aaatatcaaaggctgaata

SEQ ID NO: 195372 - DNA, 19 bp, Artificial sequence
  SiRNA target sequence
aatatcaaaggctgaatat

SEQ ID NO: 195373 - DNA, 19 bp, Artificial sequence
  SiRNA target sequence
atatcaaaggctgaatatt

SEQ ID NO: 195374 - DNA, 19 bp, Artificial sequence
  SiRNA target sequence
tatcaaaggctgaatattt

SEQ ID NO: 195375 - DNA, 19 bp, Artificial sequence
  SiRNA target sequence
atcaaaggctgaatatttt

SEQ ID NO: 195376 - DNA, 19 bp, Artificial sequence
  SiRNA target sequence
tcaaaggctgaatatttta

SEQ ID NO: 195377 - DNA, 19 bp, Artificial sequence
  SiRNA target sequence
caaaggctgaatattttaa

SEQ ID NO: 195378 - DNA, 19 bp, Artificial sequence
  SiRNA target sequence
aaaggctgaatattttaat

SEQ ID NO: 195379 - DNA, 19 bp, Artificial sequence
  SiRNA target sequence
aaggctgaatattttaata

SEQ ID NO: 195380 - DNA, 19 bp, Artificial sequence
  SiRNA target sequence
aggctgaatattttaatac

SEQ ID NO: 195381 - DNA, 19 bp, Artificial sequence
  SiRNA target sequence
ggctgaatattttaatact

SEQ ID NO: 195382 - DNA, 19 bp, Artificial sequence
  SiRNA target sequence
gctgaatattttaatactt

SEQ ID NO: 195383 - DNA, 19 bp, Artificial sequence
  SiRNA target sequence
ctgaatattttaatacttt

SEQ ID NO: 195384 - DNA, 19 bp, Artificial sequence
  SiRNA target sequence
tgaatattttaatactttt

SEQ ID NO: 195385 - DNA, 19 bp, Artificial sequence
  SiRNA target sequence
gaatattttaatactttta

SEQ ID NO: 195386 - DNA, 19 bp, Artificial sequence
  SiRNA target sequence
aatattttaatacttttat

SEQ ID NO: 195387 - DNA, 19 bp, Artificial sequence
  SiRNA target sequence
atattttaatacttttatg

SEQ ID NO: 195388 - DNA, 19 bp, Artificial sequence
  SiRNA target sequence
tattttaatacttttatga

SEQ ID NO: 195389 - DNA, 19 bp, Artificial sequence
  SiRNA target sequence
attttaatacttttatgaa

SEQ ID NO: 195390 - DNA, 19 bp, Artificial sequence
  SiRNA target sequence
ttttaatacttttatgaat

SEQ ID NO: 195391 - DNA, 19 bp, Artificial sequence
  SiRNA target sequence
tttaatacttttatgaatg

SEQ ID NO: 195392 - DNA, 19 bp, Artificial sequence
  SiRNA target sequence
ttaatacttttatgaatgc

SEQ ID NO: 195393 - DNA, 19 bp, Artificial sequence
  SiRNA target sequence
taatacttttatgaatgct

SEQ ID NO: 195394 - DNA, 19 bp, Artificial sequence
  SiRNA target sequence
aatacttttatgaatgcta

SEQ ID NO: 195395 - DNA, 19 bp, Artificial sequence
  SiRNA target sequence
atacttttatgaatgctaa

SEQ ID NO: 195396 - DNA, 19 bp, Artificial sequence
  SiRNA target sequence
tacttttatgaatgctaaa

SEQ ID NO: 195397 - DNA, 19 bp, Artificial sequence
  SiRNA target sequence
acttttatgaatgctaaaa

SEQ ID NO: 195398 - DNA, 19 bp, Artificial sequence
  SiRNA target sequence
cttttatgaatgctaaaaa

SEQ ID NO: 195399 - DNA, 19 bp, Artificial sequence
  SiRNA target sequence
ttttatgaatgctaaaaag

SEQ ID NO: 195400 - DNA, 19 bp, Artificial sequence
  SiRNA target sequence
tttatgaatgctaaaaaga

SEQ ID NO: 195401 - DNA, 19 bp, Artificial sequence
  SiRNA target sequence
ttatgaatgctaaaaagaa

SEQ ID NO: 195402 - DNA, 19 bp, Artificial sequence
  SiRNA target sequence
tatgaatgctaaaaagaac

SEQ ID NO: 195403 - DNA, 19 bp, Artificial sequence
  SiRNA target sequence
atgaatgctaaaaagaaca

SEQ ID NO: 195404 - DNA, 19 bp, Artificial sequence
  SiRNA target sequence
tgaatgctaaaaagaacat

SEQ ID NO: 195405 - DNA, 19 bp, Artificial sequence
  SiRNA target sequence
gaatgctaaaaagaacatt

SEQ ID NO: 195406 - DNA, 19 bp, Artificial sequence
  SiRNA target sequence
aatgctaaaaagaacattc

SEQ ID NO: 195407 - DNA, 19 bp, Artificial sequence
  SiRNA target sequence
atgctaaaaagaacattcc

SEQ ID NO: 195408 - DNA, 19 bp, Artificial sequence
  SiRNA target sequence
tgctaaaaagaacattcca

SEQ ID NO: 195409 - DNA, 19 bp, Artificial sequence
  SiRNA target sequence
gctaaaaagaacattccac

SEQ ID NO: 195410 - DNA, 19 bp, Artificial sequence
  SiRNA target sequence
ctaaaaagaacattccact

SEQ ID NO: 195411 - DNA, 19 bp, Artificial sequence
  SiRNA target sequence
taaaaagaacattccactg

SEQ ID NO: 195412 - DNA, 19 bp, Artificial sequence
  SiRNA target sequence
aaaaagaacattccactgt

SEQ ID NO: 195413 - DNA, 19 bp, Artificial sequence
  SiRNA target sequence
aaaagaacattccactgta

SEQ ID NO: 195414 - DNA, 19 bp, Artificial sequence
  SiRNA target sequence
aaagaacattccactgtaa

SEQ ID NO: 195415 - DNA, 19 bp, Artificial sequence
  SiRNA target sequence
aagaacattccactgtaat

SEQ ID NO: 195416 - DNA, 19 bp, Artificial sequence
  SiRNA target sequence
agaacattccactgtaatt

SEQ ID NO: 195417 - DNA, 19 bp, Artificial sequence
  SiRNA target sequence
gaacattccactgtaattt

SEQ ID NO: 195418 - DNA, 19 bp, Artificial sequence
  SiRNA target sequence
aacattccactgtaatttt

SEQ ID NO: 195419 - DNA, 19 bp, Artificial sequence
  SiRNA target sequence
acattccactgtaattttc

SEQ ID NO: 195420 - DNA, 19 bp, Artificial sequence
  SiRNA target sequence
cattccactgtaattttcg

SEQ ID NO: 195421 - DNA, 19 bp, Artificial sequence
  SiRNA target sequence
attccactgtaattttcga

SEQ ID NO: 195422 - DNA, 19 bp, Artificial sequence
  SiRNA target sequence
ttccactgtaattttcgat

SEQ ID NO: 195423 - DNA, 19 bp, Artificial sequence
  SiRNA target sequence
tccactgtaattttcgatc

SEQ ID NO: 195424 - DNA, 19 bp, Artificial sequence
  SiRNA target sequence
ccactgtaattttcgatcg

SEQ ID NO: 195425 - DNA, 19 bp, Artificial sequence
  SiRNA target sequence
cactgtaattttcgatcgt

SEQ ID NO: 195426 - DNA, 19 bp, Artificial sequence
  SiRNA target sequence
actgtaattttcgatcgta

SEQ ID NO: 195427 - DNA, 19 bp, Artificial sequence
  SiRNA target sequence
ctgtaattttcgatcgtat

SEQ ID NO: 195428 - DNA, 19 bp, Artificial sequence
  SiRNA target sequence
tgtaattttcgatcgtata

SEQ ID NO: 195429 - DNA, 19 bp, Artificial sequence
  SiRNA target sequence
gtaattttcgatcgtataa

SEQ ID NO: 195430 - DNA, 19 bp, Artificial sequence
  SiRNA target sequence
taattttcgatcgtataaa

SEQ ID NO: 195431 - DNA, 19 bp, Artificial sequence
  SiRNA target sequence
aattttcgatcgtataaat

SEQ ID NO: 195432 - DNA, 19 bp, Artificial sequence
  SiRNA target sequence
attttcgatcgtataaatg

SEQ ID NO: 195433 - DNA, 19 bp, Artificial sequence
  SiRNA target sequence
ttttcgatcgtataaatgt

SEQ ID NO: 195434 - DNA, 19 bp, Artificial sequence
  SiRNA target sequence
tttcgatcgtataaatgta

SEQ ID NO: 195435 - DNA, 19 bp, Artificial sequence
  SiRNA target sequence
ttcgatcgtataaatgtac

SEQ ID NO: 195436 - DNA, 19 bp, Artificial sequence
  SiRNA target sequence
tcgatcgtataaatgtacg

SEQ ID NO: 195437 - DNA, 19 bp, Artificial sequence
  SiRNA target sequence
cgatcgtataaatgtacga

SEQ ID NO: 195438 - DNA, 19 bp, Artificial sequence
  SiRNA target sequence
gatcgtataaatgtacgac

SEQ ID NO: 195439 - DNA, 19 bp, Artificial sequence
  SiRNA target sequence
atcgtataaatgtacgaca

SEQ ID NO: 195440 - DNA, 19 bp, Artificial sequence
  SiRNA target sequence
tcgtataaatgtacgacat

SEQ ID NO: 195441 - DNA, 19 bp, Artificial sequence
  SiRNA target sequence
cgtataaatgtacgacatt

SEQ ID NO: 195442 - DNA, 19 bp, Artificial sequence
  SiRNA target sequence
gtataaatgtacgacattt

SEQ ID NO: 195443 - DNA, 19 bp, Artificial sequence
  SiRNA target sequence
tataaatgtacgacatttt

SEQ ID NO: 195444 - DNA, 19 bp, Artificial sequence
  SiRNA target sequence
ataaatgtacgacattttt

SEQ ID NO: 195445 - DNA, 19 bp, Artificial sequence
  SiRNA target sequence
taaatgtacgacatttttt

SEQ ID NO: 195446 - DNA, 19 bp, Artificial sequence
  SiRNA target sequence
aaatgtacgacattttttt

SEQ ID NO: 195447 - DNA, 19 bp, Artificial sequence
  SiRNA target sequence
aatgtacgacattttttta

SEQ ID NO: 195448 - DNA, 19 bp, Artificial sequence
  SiRNA target sequence
atgtacgacatttttttaa

SEQ ID NO: 195449 - DNA, 19 bp, Artificial sequence
  SiRNA target sequence
tgtacgacatttttttaaa

SEQ ID NO: 195450 - DNA, 19 bp, Artificial sequence
  SiRNA target sequence
gtacgacatttttttaaaa

SEQ ID NO: 195451 - DNA, 19 bp, Artificial sequence
  SiRNA target sequence
tacgacatttttttaaaaa

SEQ ID NO: 195452 - DNA, 19 bp, Artificial sequence
  SiRNA target sequence
acgacatttttttaaaaaa

SEQ ID NO: 195453 - DNA, 19 bp, Artificial sequence
  SiRNA target sequence
cgacatttttttaaaaaat

SEQ ID NO: 195454 - DNA, 19 bp, Artificial sequence
  SiRNA target sequence
gacatttttttaaaaaata

SEQ ID NO: 195455 - DNA, 19 bp, Artificial sequence
  SiRNA target sequence
acatttttttaaaaaatac

SEQ ID NO: 195456 - DNA, 19 bp, Artificial sequence
  SiRNA target sequence
catttttttaaaaaataca

SEQ ID NO: 195457 - DNA, 19 bp, Artificial sequence
  SiRNA target sequence
atttttttaaaaaatacag

SEQ ID NO: 195458 - DNA, 19 bp, Artificial sequence
  SiRNA target sequence
tttttttaaaaaatacaga

SEQ ID NO: 195459 - DNA, 19 bp, Artificial sequence
  SiRNA target sequence
ttttttaaaaaatacagaa

SEQ ID NO: 195460 - DNA, 19 bp, Artificial sequence
  SiRNA target sequence
tttttaaaaaatacagaaa

SEQ ID NO: 195461 - DNA, 19 bp, Artificial sequence
  SiRNA target sequence
ttttaaaaaatacagaaat

SEQ ID NO: 195462 - DNA, 19 bp, Artificial sequence
  SiRNA target sequence
tttaaaaaatacagaaatc

SEQ ID NO: 195463 - DNA, 19 bp, Artificial sequence
  SiRNA target sequence
ttaaaaaatacagaaatcc

SEQ ID NO: 195464 - DNA, 19 bp, Artificial sequence
  SiRNA target sequence
taaaaaatacagaaatcca

SEQ ID NO: 195465 - DNA, 19 bp, Artificial sequence
  SiRNA target sequence
aaaaaatacagaaatccat

SEQ ID NO: 195466 - DNA, 19 bp, Artificial sequence
  SiRNA target sequence
aaaaatacagaaatccatg

SEQ ID NO: 195467 - DNA, 19 bp, Artificial sequence
  SiRNA target sequence
aaaatacagaaatccatga

SEQ ID NO: 195468 - DNA, 19 bp, Artificial sequence
  SiRNA target sequence
aaatacagaaatccatgaa

SEQ ID NO: 195469 - DNA, 19 bp, Artificial sequence
  SiRNA target sequence
aatacagaaatccatgaaa

SEQ ID NO: 195470 - DNA, 19 bp, Artificial sequence
  SiRNA target sequence
atacagaaatccatgaaaa

SEQ ID NO: 195471 - DNA, 19 bp, Artificial sequence
  SiRNA target sequence
tacagaaatccatgaaaaa

SEQ ID NO: 195472 - DNA, 19 bp, Artificial sequence
  SiRNA target sequence
acagaaatccatgaaaaag

SEQ ID NO: 195473 - DNA, 19 bp, Artificial sequence
  SiRNA target sequence
cagaaatccatgaaaaagc

SEQ ID NO: 195474 - DNA, 19 bp, Artificial sequence
  SiRNA target sequence
agaaatccatgaaaaagca

SEQ ID NO: 195475 - DNA, 19 bp, Artificial sequence
  SiRNA target sequence
gaaatccatgaaaaagcaa

SEQ ID NO: 195476 - DNA, 19 bp, Artificial sequence
  SiRNA target sequence
aaatccatgaaaaagcaag

SEQ ID NO: 195477 - DNA, 19 bp, Artificial sequence
  SiRNA target sequence
aatccatgaaaaagcaagt

SEQ ID NO: 195478 - DNA, 19 bp, Artificial sequence
  SiRNA target sequence
atccatgaaaaagcaagtc

SEQ ID NO: 195479 - DNA, 19 bp, Artificial sequence
  SiRNA target sequence
tccatgaaaaagcaagtcc

SEQ ID NO: 195480 - DNA, 19 bp, Artificial sequence
  SiRNA target sequence
ccatgaaaaagcaagtcct

SEQ ID NO: 195481 - DNA, 19 bp, Artificial sequence
  SiRNA target sequence
catgaaaaagcaagtcctt

SEQ ID NO: 195482 - DNA, 19 bp, Artificial sequence
  SiRNA target sequence
atgaaaaagcaagtccttc

SEQ ID NO: 195483 - DNA, 19 bp, Artificial sequence
  SiRNA target sequence
tgaaaaagcaagtccttca

SEQ ID NO: 195484 - DNA, 19 bp, Artificial sequence
  SiRNA target sequence
gaaaaagcaagtccttcaa

SEQ ID NO: 195485 - DNA, 19 bp, Artificial sequence
  SiRNA target sequence
aaaaagcaagtccttcaat

SEQ ID NO: 195486 - DNA, 19 bp, Artificial sequence
  SiRNA target sequence
aaaagcaagtccttcaatg

SEQ ID NO: 195487 - DNA, 19 bp, Artificial sequence
  SiRNA target sequence
aaagcaagtccttcaatgg

SEQ ID NO: 195488 - DNA, 19 bp, Artificial sequence
  SiRNA target sequence
aagcaagtccttcaatggc

SEQ ID NO: 195489 - DNA, 19 bp, Artificial sequence
  SiRNA target sequence
agcaagtccttcaatggca

SEQ ID NO: 195490 - DNA, 19 bp, Artificial sequence
  SiRNA target sequence
gcaagtccttcaatggcag

SEQ ID NO: 195491 - DNA, 19 bp, Artificial sequence
  SiRNA target sequence
caagtccttcaatggcaga

SEQ ID NO: 195492 - DNA, 19 bp, Artificial sequence
  SiRNA target sequence
aagtccttcaatggcagaa

SEQ ID NO: 195493 - DNA, 19 bp, Artificial sequence
  SiRNA target sequence
agtccttcaatggcagaat

SEQ ID NO: 195494 - DNA, 19 bp, Artificial sequence
  SiRNA target sequence
gtccttcaatggcagaatt

SEQ ID NO: 195495 - DNA, 19 bp, Artificial sequence
  SiRNA target sequence
tccttcaatggcagaattg

SEQ ID NO: 195496 - DNA, 19 bp, Artificial sequence
  SiRNA target sequence
ccttcaatggcagaattgt

SEQ ID NO: 195497 - DNA, 19 bp, Artificial sequence
  SiRNA target sequence
cttcaatggcagaattgta

SEQ ID NO: 195498 - DNA, 19 bp, Artificial sequence
  SiRNA target sequence
ttcaatggcagaattgtag

SEQ ID NO: 195499 - DNA, 19 bp, Artificial sequence
  SiRNA target sequence
tcaatggcagaattgtaga

SEQ ID NO: 195500 - DNA, 19 bp, Artificial sequence
  SiRNA target sequence
caatggcagaattgtagat

SEQ ID NO: 195501 - DNA, 19 bp, Artificial sequence
  SiRNA target sequence
aatggcagaattgtagatt

SEQ ID NO: 195502 - DNA, 19 bp, Artificial sequence
  SiRNA target sequence
atggcagaattgtagattg

SEQ ID NO: 195503 - DNA, 19 bp, Artificial sequence
  SiRNA target sequence
tggcagaattgtagattga

SEQ ID NO: 195504 - DNA, 19 bp, Artificial sequence
  SiRNA target sequence
ggcagaattgtagattgat

SEQ ID NO: 195505 - DNA, 19 bp, Artificial sequence
  SiRNA target sequence
gcagaattgtagattgatg

SEQ ID NO: 195506 - DNA, 19 bp, Artificial sequence
  SiRNA target sequence
cagaattgtagattgatgc

SEQ ID NO: 195507 - DNA, 19 bp, Artificial sequence
  SiRNA target sequence
agaattgtagattgatgct

SEQ ID NO: 195508 - DNA, 19 bp, Artificial sequence
  SiRNA target sequence
gaattgtagattgatgctc

SEQ ID NO: 195509 - DNA, 19 bp, Artificial sequence
  SiRNA target sequence
aattgtagattgatgctcc

SEQ ID NO: 195510 - DNA, 19 bp, Artificial sequence
  SiRNA target sequence
attgtagattgatgctccc

SEQ ID NO: 195511 - DNA, 19 bp, Artificial sequence
  SiRNA target sequence
ttgtagattgatgctccca

SEQ ID NO: 195512 - DNA, 19 bp, Artificial sequence
  SiRNA target sequence
tgtagattgatgctcccat

SEQ ID NO: 195513 - DNA, 19 bp, Artificial sequence
  SiRNA target sequence
gtagattgatgctcccata

SEQ ID NO: 195514 - DNA, 19 bp, Artificial sequence
  SiRNA target sequence
tagattgatgctcccataa

SEQ ID NO: 195515 - DNA, 19 bp, Artificial sequence
  SiRNA target sequence
agattgatgctcccataac

SEQ ID NO: 195516 - DNA, 19 bp, Artificial sequence
  SiRNA target sequence
gattgatgctcccataacg

SEQ ID NO: 195517 - DNA, 19 bp, Artificial sequence
  SiRNA target sequence
attgatgctcccataacga

SEQ ID NO: 195518 - DNA, 19 bp, Artificial sequence
  SiRNA target sequence
ttgatgctcccataacgat

SEQ ID NO: 195519 - DNA, 19 bp, Artificial sequence
  SiRNA target sequence
tgatgctcccataacgatt

SEQ ID NO: 195520 - DNA, 19 bp, Artificial sequence
  SiRNA target sequence
gatgctcccataacgatta

SEQ ID NO: 195521 - DNA, 19 bp, Artificial sequence
  SiRNA target sequence
atgctcccataacgattat

SEQ ID NO: 195522 - DNA, 19 bp, Artificial sequence
  SiRNA target sequence
tgctcccataacgattatt

SEQ ID NO: 195523 - DNA, 19 bp, Artificial sequence
  SiRNA target sequence
gctcccataacgattattg

SEQ ID NO: 195524 - DNA, 19 bp, Artificial sequence
  SiRNA target sequence
ctcccataacgattattga

SEQ ID NO: 195525 - DNA, 19 bp, Artificial sequence
  SiRNA target sequence
tcccataacgattattgac

SEQ ID NO: 195526 - DNA, 19 bp, Artificial sequence
  SiRNA target sequence
cccataacgattattgacc

SEQ ID NO: 195527 - DNA, 19 bp, Artificial sequence
  SiRNA target sequence
ccataacgattattgaccc

SEQ ID NO: 195528 - DNA, 19 bp, Artificial sequence
  SiRNA target sequence
cataacgattattgacccc

SEQ ID NO: 195529 - DNA, 19 bp, Artificial sequence
  SiRNA target sequence
ataacgattattgacccca

SEQ ID NO: 195530 - DNA, 19 bp, Artificial sequence
  SiRNA target sequence
taacgattattgaccccaa

SEQ ID NO: 195531 - DNA, 19 bp, Artificial sequence
  SiRNA target sequence
aacgattattgaccccaac

SEQ ID NO: 195532 - DNA, 19 bp, Artificial sequence
  SiRNA target sequence
acgattattgaccccaaca

SEQ ID NO: 195533 - DNA, 19 bp, Artificial sequence
  SiRNA target sequence
cgattattgaccccaacaa

SEQ ID NO: 195534 - DNA, 19 bp, Artificial sequence
  SiRNA target sequence
gattattgaccccaacaac

SEQ ID NO: 195535 - DNA, 19 bp, Artificial sequence
  SiRNA target sequence
attattgaccccaacaaca

SEQ ID NO: 195536 - DNA, 19 bp, Artificial sequence
  SiRNA target sequence
ttattgaccccaacaacaa

SEQ ID NO: 195537 - DNA, 19 bp, Artificial sequence
  SiRNA target sequence
tattgaccccaacaacaag

SEQ ID NO: 195538 - DNA, 19 bp, Artificial sequence
  SiRNA target sequence
attgaccccaacaacaaga

SEQ ID NO: 195539 - DNA, 19 bp, Artificial sequence
  SiRNA target sequence
ttgaccccaacaacaagaa

SEQ ID NO: 195540 - DNA, 19 bp, Artificial sequence
  SiRNA target sequence
tgaccccaacaacaagaat

SEQ ID NO: 195541 - DNA, 19 bp, Artificial sequence
  SiRNA target sequence
gaccccaacaacaagaata

SEQ ID NO: 195542 - DNA, 19 bp, Artificial sequence
  SiRNA target sequence
accccaacaacaagaataa

SEQ ID NO: 195543 - DNA, 19 bp, Artificial sequence
  SiRNA target sequence
ccccaacaacaagaataaa

SEQ ID NO: 195544 - DNA, 19 bp, Artificial sequence
  SiRNA target sequence
cccaacaacaagaataaag

SEQ ID NO: 195545 - DNA, 19 bp, Artificial sequence
  SiRNA target sequence
ccaacaacaagaataaagg

SEQ ID NO: 195546 - DNA, 19 bp, Artificial sequence
  SiRNA target sequence
caacaacaagaataaaggt

SEQ ID NO: 195547 - DNA, 19 bp, Artificial sequence
  SiRNA target sequence
aacaacaagaataaaggtg

SEQ ID NO: 195548 - DNA, 19 bp, Artificial sequence
  SiRNA target sequence
acaacaagaataaaggtgt

SEQ ID NO: 195549 - DNA, 19 bp, Artificial sequence
  SiRNA target sequence
caacaagaataaaggtgtt

SEQ ID NO: 195550 - DNA, 19 bp, Artificial sequence
  SiRNA target sequence
aacaagaataaaggtgtta

SEQ ID NO: 195551 - DNA, 19 bp, Artificial sequence
  SiRNA target sequence
acaagaataaaggtgttaa

SEQ ID NO: 195552 - DNA, 19 bp, Artificial sequence
  SiRNA target sequence
caagaataaaggtgttaag

SEQ ID NO: 195553 - DNA, 19 bp, Artificial sequence
  SiRNA target sequence
aagaataaaggtgttaaga

SEQ ID NO: 195554 - DNA, 19 bp, Artificial sequence
  SiRNA target sequence
agaataaaggtgttaagag

SEQ ID NO: 195555 - DNA, 19 bp, Artificial sequence
  SiRNA target sequence
gaataaaggtgttaagagt

SEQ ID NO: 195556 - DNA, 19 bp, Artificial sequence
  SiRNA target sequence
aataaaggtgttaagagtc

SEQ ID NO: 195557 - DNA, 19 bp, Artificial sequence
  SiRNA target sequence
ataaaggtgttaagagtcc

SEQ ID NO: 195558 - DNA, 19 bp, Artificial sequence
  SiRNA target sequence
taaaggtgttaagagtccc

SEQ ID NO: 195559 - DNA, 19 bp, Artificial sequence
  SiRNA target sequence
aaaggtgttaagagtccca

SEQ ID NO: 195560 - DNA, 19 bp, Artificial sequence
  SiRNA target sequence
aaggtgttaagagtcccat

SEQ ID NO: 195561 - DNA, 19 bp, Artificial sequence
  SiRNA target sequence
aggtgttaagagtcccata

SEQ ID NO: 195562 - DNA, 19 bp, Artificial sequence
  SiRNA target sequence
ggtgttaagagtcccatag

SEQ ID NO: 195563 - DNA, 19 bp, Artificial sequence
  SiRNA target sequence
gtgttaagagtcccatagt

SEQ ID NO: 195564 - DNA, 19 bp, Artificial sequence
  SiRNA target sequence
tgttaagagtcccatagta

SEQ ID NO: 195565 - DNA, 19 bp, Artificial sequence
  SiRNA target sequence
gttaagagtcccatagtaa

SEQ ID NO: 195566 - DNA, 19 bp, Artificial sequence
  SiRNA target sequence
ttaagagtcccatagtaat

SEQ ID NO: 195567 - DNA, 19 bp, Artificial sequence
  SiRNA target sequence
taagagtcccatagtaatc

SEQ ID NO: 195568 - DNA, 19 bp, Artificial sequence
  SiRNA target sequence
aagagtcccatagtaatcc

SEQ ID NO: 195569 - DNA, 19 bp, Artificial sequence
  SiRNA target sequence
agagtcccatagtaatcca

SEQ ID NO: 195570 - DNA, 19 bp, Artificial sequence
  SiRNA target sequence
gagtcccatagtaatccat

SEQ ID NO: 195571 - DNA, 19 bp, Artificial sequence
  SiRNA target sequence
agtcccatagtaatccatc

SEQ ID NO: 195572 - DNA, 19 bp, Artificial sequence
  SiRNA target sequence
gtcccatagtaatccatcc

SEQ ID NO: 195573 - DNA, 19 bp, Artificial sequence
  SiRNA target sequence
tcccatagtaatccatcca

SEQ ID NO: 195574 - DNA, 19 bp, Artificial sequence
  SiRNA target sequence
cccatagtaatccatccac

SEQ ID NO: 195575 - DNA, 19 bp, Artificial sequence
  SiRNA target sequence
ccatagtaatccatccact

SEQ ID NO: 195576 - DNA, 19 bp, Artificial sequence
  SiRNA target sequence
catagtaatccatccacta

SEQ ID NO: 195577 - DNA, 19 bp, Artificial sequence
  SiRNA target sequence
atagtaatccatccactac

SEQ ID NO: 195578 - DNA, 19 bp, Artificial sequence
  SiRNA target sequence
tagtaatccatccactact

SEQ ID NO: 195579 - DNA, 19 bp, Artificial sequence
  SiRNA target sequence
agtaatccatccactactt

SEQ ID NO: 195580 - DNA, 19 bp, Artificial sequence
  SiRNA target sequence
gtaatccatccactacttt

SEQ ID NO: 195581 - DNA, 19 bp, Artificial sequence
  SiRNA target sequence
taatccatccactactttc

SEQ ID NO: 195582 - DNA, 19 bp, Artificial sequence
  SiRNA target sequence
aatccatccactactttct

SEQ ID NO: 195583 - DNA, 19 bp, Artificial sequence
  SiRNA target sequence
atccatccactactttcta

SEQ ID NO: 195584 - DNA, 19 bp, Artificial sequence
  SiRNA target sequence
tccatccactactttctac

SEQ ID NO: 195585 - DNA, 19 bp, Artificial sequence
  SiRNA target sequence
ccatccactactttctact

SEQ ID NO: 195586 - DNA, 19 bp, Artificial sequence
  SiRNA target sequence
catccactactttctacta

SEQ ID NO: 195587 - DNA, 19 bp, Artificial sequence
  SiRNA target sequence
atccactactttctactaa

SEQ ID NO: 195588 - DNA, 19 bp, Artificial sequence
  SiRNA target sequence
tccactactttctactaaa

SEQ ID NO: 195589 - DNA, 19 bp, Artificial sequence
  SiRNA target sequence
ccactactttctactaaag

SEQ ID NO: 195590 - DNA, 19 bp, Artificial sequence
  SiRNA target sequence
cactactttctactaaagt

SEQ ID NO: 195591 - DNA, 19 bp, Artificial sequence
  SiRNA target sequence
actactttctactaaagta

SEQ ID NO: 195592 - DNA, 19 bp, Artificial sequence
  SiRNA target sequence
ctactttctactaaagtag

SEQ ID NO: 195593 - DNA, 19 bp, Artificial sequence
  SiRNA target sequence
tactttctactaaagtaga

SEQ ID NO: 195594 - DNA, 19 bp, Artificial sequence
  SiRNA target sequence
actttctactaaagtagaa

SEQ ID NO: 195595 - DNA, 19 bp, Artificial sequence
  SiRNA target sequence
ctttctactaaagtagaaa

SEQ ID NO: 195596 - DNA, 19 bp, Artificial sequence
  SiRNA target sequence
tttctactaaagtagaaaa

SEQ ID NO: 195597 - DNA, 19 bp, Artificial sequence
  SiRNA target sequence
ttctactaaagtagaaaat

SEQ ID NO: 195598 - DNA, 19 bp, Artificial sequence
  SiRNA target sequence
tctactaaagtagaaaatg

SEQ ID NO: 195599 - DNA, 19 bp, Artificial sequence
  SiRNA target sequence
ctactaaagtagaaaatgc

SEQ ID NO: 195600 - DNA, 19 bp, Artificial sequence
  SiRNA target sequence
tactaaagtagaaaatgct

SEQ ID NO: 195601 - DNA, 19 bp, Artificial sequence
  SiRNA target sequence
actaaagtagaaaatgctg

SEQ ID NO: 195602 - DNA, 19 bp, Artificial sequence
  SiRNA target sequence
ctaaagtagaaaatgctga

SEQ ID NO: 195603 - DNA, 19 bp, Artificial sequence
  SiRNA target sequence
taaagtagaaaatgctgac

SEQ ID NO: 195604 - DNA, 19 bp, Artificial sequence
  SiRNA target sequence
aaagtagaaaatgctgaca

SEQ ID NO: 195605 - DNA, 19 bp, Artificial sequence
  SiRNA target sequence
aagtagaaaatgctgacaa

SEQ ID NO: 195606 - DNA, 19 bp, Artificial sequence
  SiRNA target sequence
agtagaaaatgctgacaaa

SEQ ID NO: 195607 - DNA, 19 bp, Artificial sequence
  SiRNA target sequence
gtagaaaatgctgacaaat

SEQ ID NO: 195608 - DNA, 19 bp, Artificial sequence
  SiRNA target sequence
tagaaaatgctgacaaatt

SEQ ID NO: 195609 - DNA, 19 bp, Artificial sequence
  SiRNA target sequence
agaaaatgctgacaaatta

SEQ ID NO: 195610 - DNA, 19 bp, Artificial sequence
  SiRNA target sequence
gaaaatgctgacaaattaa

SEQ ID NO: 195611 - DNA, 19 bp, Artificial sequence
  SiRNA target sequence
aaaatgctgacaaattaag

SEQ ID NO: 195612 - DNA, 19 bp, Artificial sequence
  SiRNA target sequence
aaatgctgacaaattaagt

SEQ ID NO: 195613 - DNA, 19 bp, Artificial sequence
  SiRNA target sequence
aatgctgacaaattaagtg

SEQ ID NO: 195614 - DNA, 19 bp, Artificial sequence
  SiRNA target sequence
atgctgacaaattaagtgt

SEQ ID NO: 195615 - DNA, 19 bp, Artificial sequence
  SiRNA target sequence
tgctgacaaattaagtgtt

SEQ ID NO: 195616 - DNA, 19 bp, Artificial sequence
  SiRNA target sequence
gctgacaaattaagtgtta

SEQ ID NO: 195617 - DNA, 19 bp, Artificial sequence
  SiRNA target sequence
ctgacaaattaagtgttat

SEQ ID NO: 195618 - DNA, 19 bp, Artificial sequence
  SiRNA target sequence
tgacaaattaagtgttatt

SEQ ID NO: 195619 - DNA, 19 bp, Artificial sequence
  SiRNA target sequence
gacaaattaagtgttatta

SEQ ID NO: 195620 - DNA, 19 bp, Artificial sequence
  SiRNA target sequence
acaaattaagtgttattac

SEQ ID NO: 195621 - DNA, 19 bp, Artificial sequence
  SiRNA target sequence
caaattaagtgttattaca

SEQ ID NO: 195622 - DNA, 19 bp, Artificial sequence
  SiRNA target sequence
aaattaagtgttattacag

SEQ ID NO: 195623 - DNA, 19 bp, Artificial sequence
  SiRNA target sequence
aattaagtgttattacagt

SEQ ID NO: 195624 - DNA, 19 bp, Artificial sequence
  SiRNA target sequence
attaagtgttattacagta

SEQ ID NO: 195625 - DNA, 19 bp, Artificial sequence
  SiRNA target sequence
ttaagtgttattacagtaa

SEQ ID NO: 195626 - DNA, 19 bp, Artificial sequence
  SiRNA target sequence
taagtgttattacagtaac

SEQ ID NO: 195627 - DNA, 19 bp, Artificial sequence
  SiRNA target sequence
aagtgttattacagtaact

SEQ ID NO: 195628 - DNA, 19 bp, Artificial sequence
  SiRNA target sequence
agtgttattacagtaactg

SEQ ID NO: 195629 - DNA, 19 bp, Artificial sequence
  SiRNA target sequence
gtgttattacagtaactgc

SEQ ID NO: 195630 - DNA, 19 bp, Artificial sequence
  SiRNA target sequence
tgttattacagtaactgct

SEQ ID NO: 195631 - DNA, 19 bp, Artificial sequence
  SiRNA target sequence
gttattacagtaactgcta

SEQ ID NO: 195632 - DNA, 19 bp, Artificial sequence
  SiRNA target sequence
ttattacagtaactgctac

SEQ ID NO: 195633 - DNA, 19 bp, Artificial sequence
  SiRNA target sequence
tattacagtaactgctacc

SEQ ID NO: 195634 - DNA, 19 bp, Artificial sequence
  SiRNA target sequence
attacagtaactgctacca

SEQ ID NO: 195635 - DNA, 19 bp, Artificial sequence
  SiRNA target sequence
ttacagtaactgctaccaa

SEQ ID NO: 195636 - DNA, 19 bp, Artificial sequence
  SiRNA target sequence
tacagtaactgctaccaat

SEQ ID NO: 195637 - DNA, 19 bp, Artificial sequence
  SiRNA target sequence
acagtaactgctaccaata

SEQ ID NO: 195638 - DNA, 19 bp, Artificial sequence
  SiRNA target sequence
cagtaactgctaccaatat

SEQ ID NO: 195639 - DNA, 19 bp, Artificial sequence
  SiRNA target sequence
agtaactgctaccaatatt

SEQ ID NO: 195640 - DNA, 19 bp, Artificial sequence
  SiRNA target sequence
gtaactgctaccaatattt

SEQ ID NO: 195641 - DNA, 19 bp, Artificial sequence
  SiRNA target sequence
taactgctaccaatatttg

SEQ ID NO: 195642 - DNA, 19 bp, Artificial sequence
  SiRNA target sequence
aactgctaccaatatttga

SEQ ID NO: 195643 - DNA, 19 bp, Artificial sequence
  SiRNA target sequence
actgctaccaatatttgat

SEQ ID NO: 195644 - DNA, 19 bp, Artificial sequence
  SiRNA target sequence
ctgctaccaatatttgatc

SEQ ID NO: 195645 - DNA, 19 bp, Artificial sequence
  SiRNA target sequence
tgctaccaatatttgatct

SEQ ID NO: 195646 - DNA, 19 bp, Artificial sequence
  SiRNA target sequence
gctaccaatatttgatcta

SEQ ID NO: 195647 - DNA, 19 bp, Artificial sequence
  SiRNA target sequence
ctaccaatatttgatctat

SEQ ID NO: 195648 - DNA, 19 bp, Artificial sequence
  SiRNA target sequence
taccaatatttgatctatt

SEQ ID NO: 195649 - DNA, 19 bp, Artificial sequence
  SiRNA target sequence
accaatatttgatctattg

SEQ ID NO: 195650 - DNA, 19 bp, Artificial sequence
  SiRNA target sequence
ccaatatttgatctattgt

SEQ ID NO: 195651 - DNA, 19 bp, Artificial sequence
  SiRNA target sequence
caatatttgatctattgta

SEQ ID NO: 195652 - DNA, 19 bp, Artificial sequence
  SiRNA target sequence
aatatttgatctattgtat

SEQ ID NO: 195653 - DNA, 19 bp, Artificial sequence
  SiRNA target sequence
atatttgatctattgtatt

SEQ ID NO: 195654 - DNA, 19 bp, Artificial sequence
  SiRNA target sequence
tatttgatctattgtatta

SEQ ID NO: 195655 - DNA, 19 bp, Artificial sequence
  SiRNA target sequence
atttgatctattgtattaa

SEQ ID NO: 195656 - DNA, 19 bp, Artificial sequence
  SiRNA target sequence
tttgatctattgtattaaa

SEQ ID NO: 195657 - DNA, 19 bp, Artificial sequence
  SiRNA target sequence
ttgatctattgtattaaat

SEQ ID NO: 195658 - DNA, 19 bp, Artificial sequence
  SiRNA target sequence
tgatctattgtattaaatt

SEQ ID NO: 195659 - DNA, 19 bp, Artificial sequence
  SiRNA target sequence
gatctattgtattaaattt

SEQ ID NO: 195660 - DNA, 19 bp, Artificial sequence
  SiRNA target sequence
atctattgtattaaatttg

SEQ ID NO: 195661 - DNA, 19 bp, Artificial sequence
  SiRNA target sequence
tctattgtattaaatttgc

SEQ ID NO: 195662 - DNA, 19 bp, Artificial sequence
  SiRNA target sequence
ctattgtattaaatttgcc

SEQ ID NO: 195663 - DNA, 19 bp, Artificial sequence
  SiRNA target sequence
tattgtattaaatttgccg

SEQ ID NO: 195664 - DNA, 19 bp, Artificial sequence
  SiRNA target sequence
attgtattaaatttgccgg

SEQ ID NO: 195665 - DNA, 19 bp, Artificial sequence
  SiRNA target sequence
ttgtattaaatttgccgga

SEQ ID NO: 195666 - DNA, 19 bp, Artificial sequence
  SiRNA target sequence
tgtattaaatttgccggag

SEQ ID NO: 195667 - DNA, 19 bp, Artificial sequence
  SiRNA target sequence
gtattaaatttgccggagt

SEQ ID NO: 195668 - DNA, 19 bp, Artificial sequence
  SiRNA target sequence
tattaaatttgccggagta

SEQ ID NO: 195669 - DNA, 19 bp, Artificial sequence
  SiRNA target sequence
attaaatttgccggagtat

SEQ ID NO: 195670 - DNA, 19 bp, Artificial sequence
  SiRNA target sequence
ttaaatttgccggagtatt

SEQ ID NO: 195671 - DNA, 19 bp, Artificial sequence
  SiRNA target sequence
taaatttgccggagtattc

SEQ ID NO: 195672 - DNA, 19 bp, Artificial sequence
  SiRNA target sequence
aaatttgccggagtattct

SEQ ID NO: 195673 - DNA, 19 bp, Artificial sequence
  SiRNA target sequence
aatttgccggagtattctc

SEQ ID NO: 195674 - DNA, 19 bp, Artificial sequence
  SiRNA target sequence
atttgccggagtattctcc

SEQ ID NO: 195675 - DNA, 19 bp, Artificial sequence
  SiRNA target sequence
tttgccggagtattctcct

SEQ ID NO: 195676 - DNA, 19 bp, Artificial sequence
  SiRNA target sequence
ttgccggagtattctccta

SEQ ID NO: 195677 - DNA, 19 bp, Artificial sequence
  SiRNA target sequence
tgccggagtattctcctac

SEQ ID NO: 195678 - DNA, 19 bp, Artificial sequence
  SiRNA target sequence
gccggagtattctcctacc

SEQ ID NO: 195679 - DNA, 19 bp, Artificial sequence
  SiRNA target sequence
ccggagtattctcctacct

SEQ ID NO: 195680 - DNA, 19 bp, Artificial sequence
  SiRNA target sequence
cggagtattctcctacctc

SEQ ID NO: 195681 - DNA, 19 bp, Artificial sequence
  SiRNA target sequence
ggagtattctcctacctct

SEQ ID NO: 195682 - DNA, 19 bp, Artificial sequence
  SiRNA target sequence
gagtattctcctacctcta

SEQ ID NO: 195683 - DNA, 19 bp, Artificial sequence
  SiRNA target sequence
agtattctcctacctctaa

SEQ ID NO: 195684 - DNA, 19 bp, Artificial sequence
  SiRNA target sequence
gtattctcctacctctaat

SEQ ID NO: 195685 - DNA, 19 bp, Artificial sequence
  SiRNA target sequence
tattctcctacctctaatc

SEQ ID NO: 195686 - DNA, 19 bp, Artificial sequence
  SiRNA target sequence
attctcctacctctaatcc

SEQ ID NO: 195687 - DNA, 19 bp, Artificial sequence
  SiRNA target sequence
ttctcctacctctaatcct

SEQ ID NO: 195688 - DNA, 19 bp, Artificial sequence
  SiRNA target sequence
tctcctacctctaatccta

SEQ ID NO: 195689 - DNA, 19 bp, Artificial sequence
  SiRNA target sequence
ctcctacctctaatcctaa

SEQ ID NO: 195690 - DNA, 19 bp, Artificial sequence
  SiRNA target sequence
tcctacctctaatcctaaa

SEQ ID NO: 195691 - DNA, 19 bp, Artificial sequence
  SiRNA target sequence
cctacctctaatcctaaac

SEQ ID NO: 195692 - DNA, 19 bp, Artificial sequence
  SiRNA target sequence
ctacctctaatcctaaact

SEQ ID NO: 195693 - DNA, 19 bp, Artificial sequence
  SiRNA target sequence
tacctctaatcctaaactt

SEQ ID NO: 195694 - DNA, 19 bp, Artificial sequence
  SiRNA target sequence
acctctaatcctaaacttt

SEQ ID NO: 195695 - DNA, 19 bp, Artificial sequence
  SiRNA target sequence
cctctaatcctaaactttt

SEQ ID NO: 195696 - DNA, 19 bp, Artificial sequence
  SiRNA target sequence
ctctaatcctaaacttttt

SEQ ID NO: 195697 - DNA, 19 bp, Artificial sequence
  SiRNA target sequence
tctaatcctaaactttttg

SEQ ID NO: 195698 - DNA, 19 bp, Artificial sequence
  SiRNA target sequence
ctaatcctaaactttttga

SEQ ID NO: 195699 - DNA, 19 bp, Artificial sequence
  SiRNA target sequence
taatcctaaactttttgac

SEQ ID NO: 195700 - DNA, 19 bp, Artificial sequence
  SiRNA target sequence
aatcctaaactttttgacg

SEQ ID NO: 195701 - DNA, 19 bp, Artificial sequence
  SiRNA target sequence
atcctaaactttttgacgc

SEQ ID NO: 195702 - DNA, 19 bp, Artificial sequence
  SiRNA target sequence
tcctaaactttttgacgca

SEQ ID NO: 195703 - DNA, 19 bp, Artificial sequence
  SiRNA target sequence
cctaaactttttgacgcag

SEQ ID NO: 195704 - DNA, 19 bp, Artificial sequence
  SiRNA target sequence
ctaaactttttgacgcagc

SEQ ID NO: 195705 - DNA, 19 bp, Artificial sequence
  SiRNA target sequence
taaactttttgacgcagct

SEQ ID NO: 195706 - DNA, 19 bp, Artificial sequence
  SiRNA target sequence
aaactttttgacgcagctt

SEQ ID NO: 195707 - DNA, 19 bp, Artificial sequence
  SiRNA target sequence
aactttttgacgcagcttt

SEQ ID NO: 195708 - DNA, 19 bp, Artificial sequence
  SiRNA target sequence
actttttgacgcagcttta

SEQ ID NO: 195709 - DNA, 19 bp, Artificial sequence
  SiRNA target sequence
ctttttgacgcagctttaa

SEQ ID NO: 195710 - DNA, 19 bp, Artificial sequence
  SiRNA target sequence
tttttgacgcagctttaat

SEQ ID NO: 195711 - DNA, 19 bp, Artificial sequence
  SiRNA target sequence
ttttgacgcagctttaatt

SEQ ID NO: 195712 - DNA, 19 bp, Artificial sequence
  SiRNA target sequence
tttgacgcagctttaattc

SEQ ID NO: 195713 - DNA, 19 bp, Artificial sequence
  SiRNA target sequence
ttgacgcagctttaattcc

SEQ ID NO: 195714 - DNA, 19 bp, Artificial sequence
  SiRNA target sequence
tgacgcagctttaattcct

SEQ ID NO: 195715 - DNA, 19 bp, Artificial sequence
  SiRNA target sequence
gacgcagctttaattcctg

SEQ ID NO: 195716 - DNA, 19 bp, Artificial sequence
  SiRNA target sequence
acgcagctttaattcctgc

SEQ ID NO: 195717 - DNA, 19 bp, Artificial sequence
  SiRNA target sequence
cgcagctttaattcctgct

SEQ ID NO: 195718 - DNA, 19 bp, Artificial sequence
  SiRNA target sequence
gcagctttaattcctgctt

SEQ ID NO: 195719 - DNA, 19 bp, Artificial sequence
  SiRNA target sequence
cagctttaattcctgcttt

SEQ ID NO: 195720 - DNA, 19 bp, Artificial sequence
  SiRNA target sequence
agctttaattcctgcttta

SEQ ID NO: 195721 - DNA, 19 bp, Artificial sequence
  SiRNA target sequence
gctttaattcctgctttat

SEQ ID NO: 195722 - DNA, 19 bp, Artificial sequence
  SiRNA target sequence
ctttaattcctgctttata

SEQ ID NO: 195723 - DNA, 19 bp, Artificial sequence
  SiRNA target sequence
tttaattcctgctttatag

SEQ ID NO: 195724 - DNA, 19 bp, Artificial sequence
  SiRNA target sequence
ttaattcctgctttataga

SEQ ID NO: 195725 - DNA, 19 bp, Artificial sequence
  SiRNA target sequence
taattcctgctttatagac

SEQ ID NO: 195726 - DNA, 19 bp, Artificial sequence
  SiRNA target sequence
aattcctgctttatagaca

SEQ ID NO: 195727 - DNA, 19 bp, Artificial sequence
  SiRNA target sequence
attcctgctttatagacag

SEQ ID NO: 195728 - DNA, 19 bp, Artificial sequence
  SiRNA target sequence
ttcctgctttatagacaga

SEQ ID NO: 195729 - DNA, 19 bp, Artificial sequence
  SiRNA target sequence
tcctgctttatagacagat

SEQ ID NO: 195730 - DNA, 19 bp, Artificial sequence
  SiRNA target sequence
cctgctttatagacagatt

SEQ ID NO: 195731 - DNA, 19 bp, Artificial sequence
  SiRNA target sequence
ctgctttatagacagattc

SEQ ID NO: 195732 - DNA, 19 bp, Artificial sequence
  SiRNA target sequence
tgctttatagacagattca

SEQ ID NO: 195733 - DNA, 19 bp, Artificial sequence
  SiRNA target sequence
gctttatagacagattcaa

SEQ ID NO: 195734 - DNA, 19 bp, Artificial sequence
  SiRNA target sequence
ctttatagacagattcaat

SEQ ID NO: 195735 - DNA, 19 bp, Artificial sequence
  SiRNA target sequence
tttatagacagattcaatt

SEQ ID NO: 195736 - DNA, 19 bp, Artificial sequence
  SiRNA target sequence
ttatagacagattcaatta

SEQ ID NO: 195737 - DNA, 19 bp, Artificial sequence
  SiRNA target sequence
tatagacagattcaattaa

SEQ ID NO: 195738 - DNA, 19 bp, Artificial sequence
  SiRNA target sequence
atagacagattcaattaaa

SEQ ID NO: 195739 - DNA, 19 bp, Artificial sequence
  SiRNA target sequence
tagacagattcaattaaat

SEQ ID NO: 195740 - DNA, 19 bp, Artificial sequence
  SiRNA target sequence
agacagattcaattaaatt

SEQ ID NO: 195741 - DNA, 19 bp, Artificial sequence
  SiRNA target sequence
gacagattcaattaaatta

SEQ ID NO: 195742 - DNA, 19 bp, Artificial sequence
  SiRNA target sequence
acagattcaattaaattaa

SEQ ID NO: 195743 - DNA, 19 bp, Artificial sequence
  SiRNA target sequence
cagattcaattaaattaaa

SEQ ID NO: 195744 - DNA, 19 bp, Artificial sequence
  SiRNA target sequence
agattcaattaaattaaat

SEQ ID NO: 195745 - DNA, 19 bp, Artificial sequence
  SiRNA target sequence
gattcaattaaattaaatg

SEQ ID NO: 195746 - DNA, 19 bp, Artificial sequence
  SiRNA target sequence
attcaattaaattaaatgt

SEQ ID NO: 195747 - DNA, 19 bp, Artificial sequence
  SiRNA target sequence
ttcaattaaattaaatgtt

SEQ ID NO: 195748 - DNA, 19 bp, Artificial sequence
  SiRNA target sequence
tcaattaaattaaatgtta

SEQ ID NO: 195749 - DNA, 19 bp, Artificial sequence
  SiRNA target sequence
caattaaattaaatgttat

SEQ ID NO: 195750 - DNA, 19 bp, Artificial sequence
  SiRNA target sequence
aattaaattaaatgttata

SEQ ID NO: 195751 - DNA, 19 bp, Artificial sequence
  SiRNA target sequence
attaaattaaatgttatat

SEQ ID NO: 195752 - DNA, 19 bp, Artificial sequence
  SiRNA target sequence
ttaaattaaatgttatatt

SEQ ID NO: 195753 - DNA, 19 bp, Artificial sequence
  SiRNA target sequence
taaattaaatgttatattg

SEQ ID NO: 195754 - DNA, 19 bp, Artificial sequence
  SiRNA target sequence
aaattaaatgttatattgt

SEQ ID NO: 195755 - DNA, 19 bp, Artificial sequence
  SiRNA target sequence
aattaaatgttatattgta

SEQ ID NO: 195756 - DNA, 19 bp, Artificial sequence
  SiRNA target sequence
attaaatgttatattgtaa

SEQ ID NO: 195757 - DNA, 19 bp, Artificial sequence
  SiRNA target sequence
ttaaatgttatattgtaaa

SEQ ID NO: 195758 - DNA, 19 bp, Artificial sequence
  SiRNA target sequence
taaatgttatattgtaaaa

SEQ ID NO: 195759 - DNA, 19 bp, Artificial sequence
  SiRNA target sequence
aaatgttatattgtaaaaa

SEQ ID NO: 195760 - DNA, 19 bp, Artificial sequence
  SiRNA target sequence
aatgttatattgtaaaaaa

SEQ ID NO: 195761 - DNA, 19 bp, Artificial sequence
  SiRNA target sequence
atgttatattgtaaaaaaa

SEQ ID NO: 195762 - DNA, 19 bp, Artificial sequence
  SiRNA target sequence
tgttatattgtaaaaaaag

SEQ ID NO: 195763 - DNA, 19 bp, Artificial sequence
  SiRNA target sequence
gttatattgtaaaaaaaga

SEQ ID NO: 195764 - DNA, 19 bp, Artificial sequence
  SiRNA target sequence
ttatattgtaaaaaaagac

SEQ ID NO: 195765 - DNA, 19 bp, Artificial sequence
  SiRNA target sequence
tatattgtaaaaaaagact

SEQ ID NO: 195766 - DNA, 19 bp, Artificial sequence
  SiRNA target sequence
atattgtaaaaaaagacta

SEQ ID NO: 195767 - DNA, 19 bp, Artificial sequence
  SiRNA target sequence
tattgtaaaaaaagactat

SEQ ID NO: 195768 - DNA, 19 bp, Artificial sequence
  SiRNA target sequence
attgtaaaaaaagactatt

SEQ ID NO: 195769 - DNA, 19 bp, Artificial sequence
  SiRNA target sequence
ttgtaaaaaaagactatta

SEQ ID NO: 195770 - DNA, 19 bp, Artificial sequence
  SiRNA target sequence
tgtaaaaaaagactattat

SEQ ID NO: 195771 - DNA, 19 bp, Artificial sequence
  SiRNA target sequence
gtaaaaaaagactattata

SEQ ID NO: 195772 - DNA, 19 bp, Artificial sequence
  SiRNA target sequence
taaaaaaagactattatac

SEQ ID NO: 195773 - DNA, 19 bp, Artificial sequence
  SiRNA target sequence
aaaaaaagactattataca

SEQ ID NO: 195774 - DNA, 19 bp, Artificial sequence
  SiRNA target sequence
aaaaaagactattatacaa

SEQ ID NO: 195775 - DNA, 19 bp, Artificial sequence
  SiRNA target sequence
aaaaagactattatacaaa

SEQ ID NO: 195776 - DNA, 19 bp, Artificial sequence
  SiRNA target sequence
aaaagactattatacaaag

SEQ ID NO: 195777 - DNA, 19 bp, Artificial sequence
  SiRNA target sequence
aaagactattatacaaagt

SEQ ID NO: 195778 - DNA, 19 bp, Artificial sequence
  SiRNA target sequence
aagactattatacaaagtg

SEQ ID NO: 195779 - DNA, 19 bp, Artificial sequence
  SiRNA target sequence
agactattatacaaagtga

SEQ ID NO: 195780 - DNA, 19 bp, Artificial sequence
  SiRNA target sequence
gactattatacaaagtgac

SEQ ID NO: 195781 - DNA, 19 bp, Artificial sequence
  SiRNA target sequence
actattatacaaagtgaca

SEQ ID NO: 195782 - DNA, 19 bp, Artificial sequence
  SiRNA target sequence
ctattatacaaagtgacat

SEQ ID NO: 195783 - DNA, 19 bp, Artificial sequence
  SiRNA target sequence
tattatacaaagtgacatt

SEQ ID NO: 195784 - DNA, 19 bp, Artificial sequence
  SiRNA target sequence
attatacaaagtgacatta

SEQ ID NO: 195785 - DNA, 19 bp, Artificial sequence
  SiRNA target sequence
ttatacaaagtgacattaa

SEQ ID NO: 195786 - DNA, 19 bp, Artificial sequence
  SiRNA target sequence
tatacaaagtgacattaat

SEQ ID NO: 195787 - DNA, 19 bp, Artificial sequence
  SiRNA target sequence
atacaaagtgacattaata

SEQ ID NO: 195788 - DNA, 19 bp, Artificial sequence
  SiRNA target sequence
tacaaagtgacattaataa

SEQ ID NO: 195789 - DNA, 19 bp, Artificial sequence
  SiRNA target sequence
acaaagtgacattaataat

SEQ ID NO: 195790 - DNA, 19 bp, Artificial sequence
  SiRNA target sequence
caaagtgacattaataatt

SEQ ID NO: 195791 - DNA, 19 bp, Artificial sequence
  SiRNA target sequence
aaagtgacattaataattt

SEQ ID NO: 195792 - DNA, 19 bp, Artificial sequence
  SiRNA target sequence
aagtgacattaataatttt

SEQ ID NO: 195793 - DNA, 19 bp, Artificial sequence
  SiRNA target sequence
agtgacattaataattttg

SEQ ID NO: 195794 - DNA, 19 bp, Artificial sequence
  SiRNA target sequence
gtgacattaataattttga

SEQ ID NO: 195795 - DNA, 19 bp, Artificial sequence
  SiRNA target sequence
tgacattaataattttgat

SEQ ID NO: 195796 - DNA, 19 bp, Artificial sequence
  SiRNA target sequence
gacattaataattttgatt

SEQ ID NO: 195797 - DNA, 19 bp, Artificial sequence
  SiRNA target sequence
acattaataattttgattt

SEQ ID NO: 195798 - DNA, 19 bp, Artificial sequence
  SiRNA target sequence
cattaataattttgatttc

SEQ ID NO: 195799 - DNA, 19 bp, Artificial sequence
  SiRNA target sequence
attaataattttgatttca

SEQ ID NO: 195800 - DNA, 19 bp, Artificial sequence
  SiRNA target sequence
ttaataattttgatttcat

SEQ ID NO: 195801 - DNA, 19 bp, Artificial sequence
  SiRNA target sequence
taataattttgatttcatc

SEQ ID NO: 195802 - DNA, 19 bp, Artificial sequence
  SiRNA target sequence
aataattttgatttcatca

SEQ ID NO: 195803 - DNA, 19 bp, Artificial sequence
  SiRNA target sequence
ataattttgatttcatcat

SEQ ID NO: 195804 - DNA, 19 bp, Artificial sequence
  SiRNA target sequence
taattttgatttcatcatt

SEQ ID NO: 195805 - DNA, 19 bp, Artificial sequence
  SiRNA target sequence
aattttgatttcatcatta

SEQ ID NO: 195806 - DNA, 19 bp, Artificial sequence
  SiRNA target sequence
attttgatttcatcattat

SEQ ID NO: 195807 - DNA, 19 bp, Artificial sequence
  SiRNA target sequence
ttttgatttcatcattata

SEQ ID NO: 195808 - DNA, 19 bp, Artificial sequence
  SiRNA target sequence
tttgatttcatcattatac

SEQ ID NO: 195809 - DNA, 19 bp, Artificial sequence
  SiRNA target sequence
ttgatttcatcattatact

SEQ ID NO: 195810 - DNA, 19 bp, Artificial sequence
  SiRNA target sequence
tgatttcatcattatacta

SEQ ID NO: 195811 - DNA, 19 bp, Artificial sequence
  SiRNA target sequence
gatttcatcattatactaa

SEQ ID NO: 195812 - DNA, 19 bp, Artificial sequence
  SiRNA target sequence
atttcatcattatactaat

SEQ ID NO: 195813 - DNA, 19 bp, Artificial sequence
  SiRNA target sequence
tttcatcattatactaata

SEQ ID NO: 195814 - DNA, 19 bp, Artificial sequence
  SiRNA target sequence
ttcatcattatactaatac

SEQ ID NO: 195815 - DNA, 19 bp, Artificial sequence
  SiRNA target sequence
tcatcattatactaatacc

SEQ ID NO: 195816 - DNA, 19 bp, Artificial sequence
  SiRNA target sequence
catcattatactaatacct

SEQ ID NO: 195817 - DNA, 19 bp, Artificial sequence
  SiRNA target sequence
atcattatactaatacctt

SEQ ID NO: 195818 - DNA, 19 bp, Artificial sequence
  SiRNA target sequence
tcattatactaataccttc

SEQ ID NO: 195819 - DNA, 19 bp, Artificial sequence
  SiRNA target sequence
cattatactaataccttcg

SEQ ID NO: 195820 - DNA, 19 bp, Artificial sequence
  SiRNA target sequence
attatactaataccttcgg

SEQ ID NO: 195821 - DNA, 19 bp, Artificial sequence
  SiRNA target sequence
ttatactaataccttcgga

SEQ ID NO: 195822 - DNA, 19 bp, Artificial sequence
  SiRNA target sequence
tatactaataccttcggag

SEQ ID NO: 195823 - DNA, 19 bp, Artificial sequence
  SiRNA target sequence
atactaataccttcggaga

SEQ ID NO: 195824 - DNA, 19 bp, Artificial sequence
  SiRNA target sequence
tactaataccttcggagaa

SEQ ID NO: 195825 - DNA, 19 bp, Artificial sequence
  SiRNA target sequence
actaataccttcggagaaa

SEQ ID NO: 195826 - DNA, 19 bp, Artificial sequence
  SiRNA target sequence
ctaataccttcggagaaac

SEQ ID NO: 195827 - DNA, 19 bp, Artificial sequence
  SiRNA target sequence
taataccttcggagaaacc

SEQ ID NO: 195828 - DNA, 19 bp, Artificial sequence
  SiRNA target sequence
aataccttcggagaaacct

SEQ ID NO: 195829 - DNA, 19 bp, Artificial sequence
  SiRNA target sequence
ataccttcggagaaaccta

SEQ ID NO: 195830 - DNA, 19 bp, Artificial sequence
  SiRNA target sequence
taccttcggagaaacctac

SEQ ID NO: 195831 - DNA, 19 bp, Artificial sequence
  SiRNA target sequence
accttcggagaaacctaca

SEQ ID NO: 195832 - DNA, 19 bp, Artificial sequence
  SiRNA target sequence
ccttcggagaaacctacac

SEQ ID NO: 195833 - DNA, 19 bp, Artificial sequence
  SiRNA target sequence
cttcggagaaacctacact

SEQ ID NO: 195834 - DNA, 19 bp, Artificial sequence
  SiRNA target sequence
ttcggagaaacctacacta

SEQ ID NO: 195835 - DNA, 19 bp, Artificial sequence
  SiRNA target sequence
tcggagaaacctacactaa

SEQ ID NO: 195836 - DNA, 19 bp, Artificial sequence
  SiRNA target sequence
cggagaaacctacactaac

SEQ ID NO: 195837 - DNA, 19 bp, Artificial sequence
  SiRNA target sequence
ggagaaacctacactaact

SEQ ID NO: 195838 - DNA, 19 bp, Artificial sequence
  SiRNA target sequence
gagaaacctacactaactt

SEQ ID NO: 195839 - DNA, 19 bp, Artificial sequence
  SiRNA target sequence
agaaacctacactaacttt

SEQ ID NO: 195840 - DNA, 19 bp, Artificial sequence
  SiRNA target sequence
gaaacctacactaactttt

SEQ ID NO: 195841 - DNA, 19 bp, Artificial sequence
  SiRNA target sequence
aaacctacactaacttttt

SEQ ID NO: 195842 - DNA, 19 bp, Artificial sequence
  SiRNA target sequence
aacctacactaactttttg

SEQ ID NO: 195843 - DNA, 19 bp, Artificial sequence
  SiRNA target sequence
acctacactaactttttgt

SEQ ID NO: 195844 - DNA, 19 bp, Artificial sequence
  SiRNA target sequence
cctacactaactttttgtt

SEQ ID NO: 195845 - DNA, 19 bp, Artificial sequence
  SiRNA target sequence
ctacactaactttttgttt

SEQ ID NO: 195846 - DNA, 19 bp, Artificial sequence
  SiRNA target sequence
tacactaactttttgtttc

SEQ ID NO: 195847 - DNA, 19 bp, Artificial sequence
  SiRNA target sequence
acactaactttttgtttct

SEQ ID NO: 195848 - DNA, 19 bp, Artificial sequence
  SiRNA target sequence
cactaactttttgtttctt

SEQ ID NO: 195849 - DNA, 19 bp, Artificial sequence
  SiRNA target sequence
actaactttttgtttcttt

SEQ ID NO: 195850 - DNA, 19 bp, Artificial sequence
  SiRNA target sequence
ctaactttttgtttctttt

SEQ ID NO: 195851 - DNA, 19 bp, Artificial sequence
  SiRNA target sequence
taactttttgtttcttttt

SEQ ID NO: 195852 - DNA, 19 bp, Artificial sequence
  SiRNA target sequence
aactttttgtttctttttt

SEQ ID NO: 195853 - DNA, 19 bp, Artificial sequence
  SiRNA target sequence
actttttgtttctttttta

SEQ ID NO: 195854 - DNA, 19 bp, Artificial sequence
  SiRNA target sequence
ctttttgtttcttttttat

SEQ ID NO: 195855 - DNA, 19 bp, Artificial sequence
  SiRNA target sequence
tttttgtttcttttttatc

SEQ ID NO: 195856 - DNA, 19 bp, Artificial sequence
  SiRNA target sequence
ttttgtttcttttttatcg

SEQ ID NO: 195857 - DNA, 19 bp, Artificial sequence
  SiRNA target sequence
tttgtttcttttttatcgt

SEQ ID NO: 195858 - DNA, 19 bp, Artificial sequence
  SiRNA target sequence
ttgtttcttttttatcgta

SEQ ID NO: 195859 - DNA, 19 bp, Artificial sequence
  SiRNA target sequence
tgtttcttttttatcgtat

SEQ ID NO: 195860 - DNA, 19 bp, Artificial sequence
  SiRNA target sequence
gtttcttttttatcgtatt

SEQ ID NO: 195861 - DNA, 19 bp, Artificial sequence
  SiRNA target sequence
tttcttttttatcgtatta

SEQ ID NO: 195862 - DNA, 19 bp, Artificial sequence
  SiRNA target sequence
ttcttttttatcgtattag

SEQ ID NO: 195863 - DNA, 19 bp, Artificial sequence
  SiRNA target sequence
tcttttttatcgtattaga

SEQ ID NO: 195864 - DNA, 19 bp, Artificial sequence
  SiRNA target sequence
cttttttatcgtattagaa

SEQ ID NO: 195865 - DNA, 19 bp, Artificial sequence
  SiRNA target sequence
ttttttatcgtattagaag

SEQ ID NO: 195866 - DNA, 19 bp, Artificial sequence
  SiRNA target sequence
tttttatcgtattagaagg

SEQ ID NO: 195867 - DNA, 19 bp, Artificial sequence
  SiRNA target sequence
ttttatcgtattagaaggt

SEQ ID NO: 195868 - DNA, 19 bp, Artificial sequence
  SiRNA target sequence
tttatcgtattagaaggta

SEQ ID NO: 195869 - DNA, 19 bp, Artificial sequence
  SiRNA target sequence
ttatcgtattagaaggtat

SEQ ID NO: 195870 - DNA, 19 bp, Artificial sequence
  SiRNA target sequence
tatcgtattagaaggtata

SEQ ID NO: 195871 - DNA, 19 bp, Artificial sequence
  SiRNA target sequence
atcgtattagaaggtataa

SEQ ID NO: 195872 - DNA, 19 bp, Artificial sequence
  SiRNA target sequence
tcgtattagaaggtataaa

SEQ ID NO: 195873 - DNA, 19 bp, Artificial sequence
  SiRNA target sequence
cgtattagaaggtataaat

SEQ ID NO: 195874 - DNA, 19 bp, Artificial sequence
  SiRNA target sequence
gtattagaaggtataaata

SEQ ID NO: 195875 - DNA, 19 bp, Artificial sequence
  SiRNA target sequence
tattagaaggtataaatat

SEQ ID NO: 195876 - DNA, 19 bp, Artificial sequence
  SiRNA target sequence
attagaaggtataaatatt

SEQ ID NO: 195877 - DNA, 19 bp, Artificial sequence
  SiRNA target sequence
ttagaaggtataaatattg

SEQ ID NO: 195878 - DNA, 19 bp, Artificial sequence
  SiRNA target sequence
tagaaggtataaatattgg

SEQ ID NO: 195879 - DNA, 19 bp, Artificial sequence
  SiRNA target sequence
agaaggtataaatattggt

SEQ ID NO: 195880 - DNA, 19 bp, Artificial sequence
  SiRNA target sequence
gaaggtataaatattggta

SEQ ID NO: 195881 - DNA, 19 bp, Artificial sequence
  SiRNA target sequence
aaggtataaatattggtac

SEQ ID NO: 195882 - DNA, 19 bp, Artificial sequence
  SiRNA target sequence
aggtataaatattggtaca

SEQ ID NO: 195883 - DNA, 19 bp, Artificial sequence
  SiRNA target sequence
ggtataaatattggtacac

SEQ ID NO: 195884 - DNA, 19 bp, Artificial sequence
  SiRNA target sequence
gtataaatattggtacact

SEQ ID NO: 195885 - DNA, 19 bp, Artificial sequence
  SiRNA target sequence
tataaatattggtacactc

SEQ ID NO: 195886 - DNA, 19 bp, Artificial sequence
  SiRNA target sequence
ataaatattggtacactca

SEQ ID NO: 195887 - DNA, 19 bp, Artificial sequence
  SiRNA target sequence
taaatattggtacactcat

SEQ ID NO: 195888 - DNA, 19 bp, Artificial sequence
  SiRNA target sequence
aaatattggtacactcatt

SEQ ID NO: 195889 - DNA, 19 bp, Artificial sequence
  SiRNA target sequence
aatattggtacactcatta

SEQ ID NO: 195890 - DNA, 19 bp, Artificial sequence
  SiRNA target sequence
atattggtacactcattat

SEQ ID NO: 195891 - DNA, 19 bp, Artificial sequence
  SiRNA target sequence
tattggtacactcattatt

SEQ ID NO: 195892 - DNA, 19 bp, Artificial sequence
  SiRNA target sequence
attggtacactcattattt

SEQ ID NO: 195893 - DNA, 19 bp, Artificial sequence
  SiRNA target sequence
ttggtacactcattatttt

SEQ ID NO: 195894 - DNA, 19 bp, Artificial sequence
  SiRNA target sequence
tggtacactcattatttta

SEQ ID NO: 195895 - DNA, 19 bp, Artificial sequence
  SiRNA target sequence
ggtacactcattattttat

SEQ ID NO: 195896 - DNA, 19 bp, Artificial sequence
  SiRNA target sequence
gtacactcattattttatt

SEQ ID NO: 195897 - DNA, 19 bp, Artificial sequence
  SiRNA target sequence
tacactcattattttattc

SEQ ID NO: 195898 - DNA, 19 bp, Artificial sequence
  SiRNA target sequence
acactcattattttattct

SEQ ID NO: 195899 - DNA, 19 bp, Artificial sequence
  SiRNA target sequence
cactcattattttattctc

SEQ ID NO: 195900 - DNA, 19 bp, Artificial sequence
  SiRNA target sequence
actcattattttattctcg

SEQ ID NO: 195901 - DNA, 19 bp, Artificial sequence
  SiRNA target sequence
ctcattattttattctcga

SEQ ID NO: 195902 - DNA, 19 bp, Artificial sequence
  SiRNA target sequence
tcattattttattctcgaa

SEQ ID NO: 195903 - DNA, 19 bp, Artificial sequence
  SiRNA target sequence
cattattttattctcgaaa

SEQ ID NO: 195904 - DNA, 19 bp, Artificial sequence
  SiRNA target sequence
attattttattctcgaaat

SEQ ID NO: 195905 - DNA, 19 bp, Artificial sequence
  SiRNA target sequence
ttattttattctcgaaata

SEQ ID NO: 195906 - DNA, 19 bp, Artificial sequence
  SiRNA target sequence
tattttattctcgaaataa

SEQ ID NO: 195907 - DNA, 19 bp, Artificial sequence
  SiRNA target sequence
attttattctcgaaataat

SEQ ID NO: 195908 - DNA, 19 bp, Artificial sequence
  SiRNA target sequence
ttttattctcgaaataata

SEQ ID NO: 195909 - DNA, 19 bp, Artificial sequence
  SiRNA target sequence
tttattctcgaaataatat

SEQ ID NO: 195910 - DNA, 19 bp, Artificial sequence
  SiRNA target sequence
ttattctcgaaataatatt

SEQ ID NO: 195911 - DNA, 19 bp, Artificial sequence
  SiRNA target sequence
tattctcgaaataatattt

SEQ ID NO: 195912 - DNA, 19 bp, Artificial sequence
  SiRNA target sequence
attctcgaaataatatttc

SEQ ID NO: 195913 - DNA, 19 bp, Artificial sequence
  SiRNA target sequence
ttctcgaaataatatttca

SEQ ID NO: 195914 - DNA, 19 bp, Artificial sequence
  SiRNA target sequence
tctcgaaataatatttcat

SEQ ID NO: 195915 - DNA, 19 bp, Artificial sequence
  SiRNA target sequence
ctcgaaataatatttcatg

SEQ ID NO: 195916 - DNA, 19 bp, Artificial sequence
  SiRNA target sequence
tcgaaataatatttcatgt

SEQ ID NO: 195917 - DNA, 19 bp, Artificial sequence
  SiRNA target sequence
cgaaataatatttcatgta

SEQ ID NO: 195918 - DNA, 19 bp, Artificial sequence
  SiRNA target sequence
gaaataatatttcatgtac

SEQ ID NO: 195919 - DNA, 19 bp, Artificial sequence
  SiRNA target sequence
aaataatatttcatgtaca

SEQ ID NO: 195920 - DNA, 19 bp, Artificial sequence
  SiRNA target sequence
aataatatttcatgtacat

SEQ ID NO: 195921 - DNA, 19 bp, Artificial sequence
  SiRNA target sequence
ataatatttcatgtacatt

SEQ ID NO: 195922 - DNA, 19 bp, Artificial sequence
  SiRNA target sequence
taatatttcatgtacatta

SEQ ID NO: 195923 - DNA, 19 bp, Artificial sequence
  SiRNA target sequence
aatatttcatgtacattaa

SEQ ID NO: 195924 - DNA, 19 bp, Artificial sequence
  SiRNA target sequence
atatttcatgtacattaat

SEQ ID NO: 195925 - DNA, 19 bp, Artificial sequence
  SiRNA target sequence
tatttcatgtacattaata

SEQ ID NO: 195926 - DNA, 19 bp, Artificial sequence
  SiRNA target sequence
atttcatgtacattaatat

SEQ ID NO: 195927 - DNA, 19 bp, Artificial sequence
  SiRNA target sequence
tttcatgtacattaatatt

SEQ ID NO: 195928 - DNA, 19 bp, Artificial sequence
  SiRNA target sequence
ttcatgtacattaatatta

SEQ ID NO: 195929 - DNA, 19 bp, Artificial sequence
  SiRNA target sequence
tcatgtacattaatattag

SEQ ID NO: 195930 - DNA, 19 bp, Artificial sequence
  SiRNA target sequence
catgtacattaatattaga

SEQ ID NO: 195931 - DNA, 19 bp, Artificial sequence
  SiRNA target sequence
atgtacattaatattagac

SEQ ID NO: 195932 - DNA, 19 bp, Artificial sequence
  SiRNA target sequence
tgtacattaatattagaca

SEQ ID NO: 195933 - DNA, 19 bp, Artificial sequence
  SiRNA target sequence
gtacattaatattagacat

SEQ ID NO: 195934 - DNA, 19 bp, Artificial sequence
  SiRNA target sequence
tacattaatattagacata

SEQ ID NO: 195935 - DNA, 19 bp, Artificial sequence
  SiRNA target sequence
acattaatattagacatat

SEQ ID NO: 195936 - DNA, 19 bp, Artificial sequence
  SiRNA target sequence
cattaatattagacatata

SEQ ID NO: 195937 - DNA, 19 bp, Artificial sequence
  SiRNA target sequence
attaatattagacatatac

SEQ ID NO: 195938 - DNA, 19 bp, Artificial sequence
  SiRNA target sequence
ttaatattagacatatacc

SEQ ID NO: 195939 - DNA, 19 bp, Artificial sequence
  SiRNA target sequence
taatattagacatataccg

SEQ ID NO: 195940 - DNA, 19 bp, Artificial sequence
  SiRNA target sequence
aatattagacatataccgc

SEQ ID NO: 195941 - DNA, 19 bp, Artificial sequence
  SiRNA target sequence
atattagacatataccgcc

SEQ ID NO: 195942 - DNA, 19 bp, Artificial sequence
  SiRNA target sequence
tattagacatataccgccc

SEQ ID NO: 195943 - DNA, 19 bp, Artificial sequence
  SiRNA target sequence
attagacatataccgccca

SEQ ID NO: 195944 - DNA, 19 bp, Artificial sequence
  SiRNA target sequence
ttagacatataccgcccat

SEQ ID NO: 195945 - DNA, 19 bp, Artificial sequence
  SiRNA target sequence
tagacatataccgcccatg

SEQ ID NO: 195946 - DNA, 19 bp, Artificial sequence
  SiRNA target sequence
agacatataccgcccatgg

SEQ ID NO: 195947 - DNA, 19 bp, Artificial sequence
  SiRNA target sequence
gacatataccgcccatggc

SEQ ID NO: 195948 - DNA, 19 bp, Artificial sequence
  SiRNA target sequence
acatataccgcccatggca

SEQ ID NO: 195949 - DNA, 19 bp, Artificial sequence
  SiRNA target sequence
catataccgcccatggcaa

SEQ ID NO: 195950 - DNA, 19 bp, Artificial sequence
  SiRNA target sequence
atataccgcccatggcaat

SEQ ID NO: 195951 - DNA, 19 bp, Artificial sequence
  SiRNA target sequence
tataccgcccatggcaata

SEQ ID NO: 195952 - DNA, 19 bp, Artificial sequence
  SiRNA target sequence
ataccgcccatggcaataa

SEQ ID NO: 195953 - DNA, 19 bp, Artificial sequence
  SiRNA target sequence
taccgcccatggcaataaa

SEQ ID NO: 195954 - DNA, 19 bp, Artificial sequence
  SiRNA target sequence
accgcccatggcaataaaa

SEQ ID NO: 195955 - DNA, 19 bp, Artificial sequence
  SiRNA target sequence
ccgcccatggcaataaaaa

SEQ ID NO: 195956 - DNA, 19 bp, Artificial sequence
  SiRNA target sequence
cgcccatggcaataaaaac

SEQ ID NO: 195957 - DNA, 19 bp, Artificial sequence
  SiRNA target sequence
gcccatggcaataaaaacc

SEQ ID NO: 195958 - DNA, 19 bp, Artificial sequence
  SiRNA target sequence
cccatggcaataaaaaccg

SEQ ID NO: 195959 - DNA, 19 bp, Artificial sequence
  SiRNA target sequence
ccatggcaataaaaaccga

SEQ ID NO: 195960 - DNA, 19 bp, Artificial sequence
  SiRNA target sequence
catggcaataaaaaccgaa

SEQ ID NO: 195961 - DNA, 19 bp, Artificial sequence
  SiRNA target sequence
atggcaataaaaaccgaag

SEQ ID NO: 195962 - DNA, 19 bp, Artificial sequence
  SiRNA target sequence
tggcaataaaaaccgaaga

SEQ ID NO: 195963 - DNA, 19 bp, Artificial sequence
  SiRNA target sequence
ggcaataaaaaccgaagaa

SEQ ID NO: 195964 - DNA, 19 bp, Artificial sequence
  SiRNA target sequence
gcaataaaaaccgaagaat

SEQ ID NO: 195965 - DNA, 19 bp, Artificial sequence
  SiRNA target sequence
caataaaaaccgaagaata

SEQ ID NO: 195966 - DNA, 19 bp, Artificial sequence
  SiRNA target sequence
aataaaaaccgaagaatat

SEQ ID NO: 195967 - DNA, 19 bp, Artificial sequence
  SiRNA target sequence
ataaaaaccgaagaatata

SEQ ID NO: 195968 - DNA, 19 bp, Artificial sequence
  SiRNA target sequence
taaaaaccgaagaatataa

SEQ ID NO: 195969 - DNA, 19 bp, Artificial sequence
  SiRNA target sequence
aaaaaccgaagaatataat

SEQ ID NO: 195970 - DNA, 19 bp, Artificial sequence
  SiRNA target sequence
aaaaccgaagaatataata

SEQ ID NO: 195971 - DNA, 19 bp, Artificial sequence
  SiRNA target sequence
aaaccgaagaatataataa

SEQ ID NO: 195972 - DNA, 19 bp, Artificial sequence
  SiRNA target sequence
aaccgaagaatataataac

SEQ ID NO: 195973 - DNA, 19 bp, Artificial sequence
  SiRNA target sequence
accgaagaatataataact

SEQ ID NO: 195974 - DNA, 19 bp, Artificial sequence
  SiRNA target sequence
ccgaagaatataataactg

SEQ ID NO: 195975 - DNA, 19 bp, Artificial sequence
  SiRNA target sequence
cgaagaatataataactga

SEQ ID NO: 195976 - DNA, 19 bp, Artificial sequence
  SiRNA target sequence
gaagaatataataactgat

SEQ ID NO: 195977 - DNA, 19 bp, Artificial sequence
  SiRNA target sequence
aagaatataataactgatt

SEQ ID NO: 195978 - DNA, 19 bp, Artificial sequence
  SiRNA target sequence
agaatataataactgattt

SEQ ID NO: 195979 - DNA, 19 bp, Artificial sequence
  SiRNA target sequence
gaatataataactgatttt

SEQ ID NO: 195980 - DNA, 19 bp, Artificial sequence
  SiRNA target sequence
aatataataactgattttg

SEQ ID NO: 195981 - DNA, 19 bp, Artificial sequence
  SiRNA target sequence
atataataactgattttgc

SEQ ID NO: 195982 - DNA, 19 bp, Artificial sequence
  SiRNA target sequence
tataataactgattttgct

SEQ ID NO: 195983 - DNA, 19 bp, Artificial sequence
  SiRNA target sequence
ataataactgattttgctc

SEQ ID NO: 195984 - DNA, 19 bp, Artificial sequence
  SiRNA target sequence
taataactgattttgctca

SEQ ID NO: 195985 - DNA, 19 bp, Artificial sequence
  SiRNA target sequence
aataactgattttgctcat

SEQ ID NO: 195986 - DNA, 19 bp, Artificial sequence
  SiRNA target sequence
ataactgattttgctcata

SEQ ID NO: 195987 - DNA, 19 bp, Artificial sequence
  SiRNA target sequence
taactgattttgctcatag

SEQ ID NO: 195988 - DNA, 19 bp, Artificial sequence
  SiRNA target sequence
aactgattttgctcatagc

SEQ ID NO: 195989 - DNA, 19 bp, Artificial sequence
  SiRNA target sequence
actgattttgctcatagct

SEQ ID NO: 195990 - DNA, 19 bp, Artificial sequence
  SiRNA target sequence
ctgattttgctcatagcta

SEQ ID NO: 195991 - DNA, 19 bp, Artificial sequence
  SiRNA target sequence
tgattttgctcatagctaa

SEQ ID NO: 195992 - DNA, 19 bp, Artificial sequence
  SiRNA target sequence
gattttgctcatagctaaa

SEQ ID NO: 195993 - DNA, 19 bp, Artificial sequence
  SiRNA target sequence
attttgctcatagctaaat

SEQ ID NO: 195994 - DNA, 19 bp, Artificial sequence
  SiRNA target sequence
ttttgctcatagctaaatc

SEQ ID NO: 195995 - DNA, 19 bp, Artificial sequence
  SiRNA target sequence
tttgctcatagctaaatcc

SEQ ID NO: 195996 - DNA, 19 bp, Artificial sequence
  SiRNA target sequence
ttgctcatagctaaatcct

SEQ ID NO: 195997 - DNA, 19 bp, Artificial sequence
  SiRNA target sequence
tgctcatagctaaatcctt

SEQ ID NO: 195998 - DNA, 19 bp, Artificial sequence
  SiRNA target sequence
gctcatagctaaatccttt

SEQ ID NO: 195999 - DNA, 19 bp, Artificial sequence
  SiRNA target sequence
ctcatagctaaatcctttt

SEQ ID NO: 196000 - DNA, 19 bp, Artificial sequence
  SiRNA target sequence
tcatagctaaatccttttc

SEQ ID NO: 196001 - DNA, 19 bp, Artificial sequence
  SiRNA target sequence
catagctaaatccttttcg

SEQ ID NO: 196002 - DNA, 19 bp, Artificial sequence
  SiRNA target sequence
atagctaaatccttttcgc

SEQ ID NO: 196003 - DNA, 19 bp, Artificial sequence
  SiRNA target sequence
tagctaaatccttttcgca

SEQ ID NO: 196004 - DNA, 19 bp, Artificial sequence
  SiRNA target sequence
agctaaatccttttcgcaa

SEQ ID NO: 196005 - DNA, 19 bp, Artificial sequence
  SiRNA target sequence
gctaaatccttttcgcaat

SEQ ID NO: 196006 - DNA, 19 bp, Artificial sequence
  SiRNA target sequence
ctaaatccttttcgcaatt

SEQ ID NO: 196007 - DNA, 19 bp, Artificial sequence
  SiRNA target sequence
taaatccttttcgcaattc

SEQ ID NO: 196008 - DNA, 19 bp, Artificial sequence
  SiRNA target sequence
aaatccttttcgcaattct

SEQ ID NO: 196009 - DNA, 19 bp, Artificial sequence
  SiRNA target sequence
aatccttttcgcaattctc

SEQ ID NO: 196010 - DNA, 19 bp, Artificial sequence
  SiRNA target sequence
atccttttcgcaattctct

SEQ ID NO: 196011 - DNA, 19 bp, Artificial sequence
  SiRNA target sequence
tccttttcgcaattctctg

SEQ ID NO: 196012 - DNA, 19 bp, Artificial sequence
  SiRNA target sequence
ccttttcgcaattctctga

SEQ ID NO: 196013 - DNA, 19 bp, Artificial sequence
  SiRNA target sequence
cttttcgcaattctctgaa

SEQ ID NO: 196014 - DNA, 19 bp, Artificial sequence
  SiRNA target sequence
ttttcgcaattctctgaaa

SEQ ID NO: 196015 - DNA, 19 bp, Artificial sequence
  SiRNA target sequence
tttcgcaattctctgaaag

SEQ ID NO: 196016 - DNA, 19 bp, Artificial sequence
  SiRNA target sequence
ttcgcaattctctgaaaga

SEQ ID NO: 196017 - DNA, 19 bp, Artificial sequence
  SiRNA target sequence
tcgcaattctctgaaagaa

SEQ ID NO: 196018 - DNA, 19 bp, Artificial sequence
  SiRNA target sequence
cgcaattctctgaaagaac

SEQ ID NO: 196019 - DNA, 19 bp, Artificial sequence
  SiRNA target sequence
gcaattctctgaaagaact

SEQ ID NO: 196020 - DNA, 19 bp, Artificial sequence
  SiRNA target sequence
caattctctgaaagaacta

SEQ ID NO: 196021 - DNA, 19 bp, Artificial sequence
  SiRNA target sequence
aattctctgaaagaactac

SEQ ID NO: 196022 - DNA, 19 bp, Artificial sequence
  SiRNA target sequence
attctctgaaagaactact

SEQ ID NO: 196023 - DNA, 19 bp, Artificial sequence
  SiRNA target sequence
ttctctgaaagaactactg

SEQ ID NO: 196024 - DNA, 19 bp, Artificial sequence
  SiRNA target sequence
tctctgaaagaactactgg

SEQ ID NO: 196025 - DNA, 19 bp, Artificial sequence
  SiRNA target sequence
ctctgaaagaactactggc

SEQ ID NO: 196026 - DNA, 19 bp, Artificial sequence
  SiRNA target sequence
tctgaaagaactactggct

SEQ ID NO: 196027 - DNA, 19 bp, Artificial sequence
  SiRNA target sequence
ctgaaagaactactggcta

SEQ ID NO: 196028 - DNA, 19 bp, Artificial sequence
  SiRNA target sequence
tgaaagaactactggctaa

SEQ ID NO: 196029 - DNA, 19 bp, Artificial sequence
  SiRNA target sequence
gaaagaactactggctaat

SEQ ID NO: 196030 - DNA, 19 bp, Artificial sequence
  SiRNA target sequence
aaagaactactggctaatc

SEQ ID NO: 196031 - DNA, 19 bp, Artificial sequence
  SiRNA target sequence
aagaactactggctaatcc

SEQ ID NO: 196032 - DNA, 19 bp, Artificial sequence
  SiRNA target sequence
agaactactggctaatcca

SEQ ID NO: 196033 - DNA, 19 bp, Artificial sequence
  SiRNA target sequence
gaactactggctaatccag

SEQ ID NO: 196034 - DNA, 19 bp, Artificial sequence
  SiRNA target sequence
aactactggctaatccaga

SEQ ID NO: 196035 - DNA, 19 bp, Artificial sequence
  SiRNA target sequence
actactggctaatccagat

SEQ ID NO: 196036 - DNA, 19 bp, Artificial sequence
  SiRNA target sequence
ctactggctaatccagata

SEQ ID NO: 196037 - DNA, 19 bp, Artificial sequence
  SiRNA target sequence
tactggctaatccagatac

SEQ ID NO: 196038 - DNA, 19 bp, Artificial sequence
  SiRNA target sequence
actggctaatccagatact

SEQ ID NO: 196039 - DNA, 19 bp, Artificial sequence
  SiRNA target sequence
ctggctaatccagatacta

SEQ ID NO: 196040 - DNA, 19 bp, Artificial sequence
  SiRNA target sequence
tggctaatccagatactag

SEQ ID NO: 196041 - DNA, 19 bp, Artificial sequence
  SiRNA target sequence
ggctaatccagatactagt

SEQ ID NO: 196042 - DNA, 19 bp, Artificial sequence
  SiRNA target sequence
gctaatccagatactagta

SEQ ID NO: 196043 - DNA, 19 bp, Artificial sequence
  SiRNA target sequence
ctaatccagatactagtaa

SEQ ID NO: 196044 - DNA, 19 bp, Artificial sequence
  SiRNA target sequence
taatccagatactagtaaa

SEQ ID NO: 196045 - DNA, 19 bp, Artificial sequence
  SiRNA target sequence
aatccagatactagtaaag

SEQ ID NO: 196046 - DNA, 19 bp, Artificial sequence
  SiRNA target sequence
atccagatactagtaaagc

SEQ ID NO: 196047 - DNA, 19 bp, Artificial sequence
  SiRNA target sequence
tccagatactagtaaagct

SEQ ID NO: 196048 - DNA, 19 bp, Artificial sequence
  SiRNA target sequence
ccagatactagtaaagcta

SEQ ID NO: 196049 - DNA, 19 bp, Artificial sequence
  SiRNA target sequence
cagatactagtaaagctaa

SEQ ID NO: 196050 - DNA, 19 bp, Artificial sequence
  SiRNA target sequence
agatactagtaaagctaaa

SEQ ID NO: 196051 - DNA, 19 bp, Artificial sequence
  SiRNA target sequence
gatactagtaaagctaaat

SEQ ID NO: 196052 - DNA, 19 bp, Artificial sequence
  SiRNA target sequence
atactagtaaagctaaatt

SEQ ID NO: 196053 - DNA, 19 bp, Artificial sequence
  SiRNA target sequence
tactagtaaagctaaattt

SEQ ID NO: 196054 - DNA, 19 bp, Artificial sequence
  SiRNA target sequence
actagtaaagctaaatttg

SEQ ID NO: 196055 - DNA, 19 bp, Artificial sequence
  SiRNA target sequence
ctagtaaagctaaatttgc

SEQ ID NO: 196056 - DNA, 19 bp, Artificial sequence
  SiRNA target sequence
tagtaaagctaaatttgct

SEQ ID NO: 196057 - DNA, 19 bp, Artificial sequence
  SiRNA target sequence
agtaaagctaaatttgcta

SEQ ID NO: 196058 - DNA, 19 bp, Artificial sequence
  SiRNA target sequence
gtaaagctaaatttgctat

SEQ ID NO: 196059 - DNA, 19 bp, Artificial sequence
  SiRNA target sequence
taaagctaaatttgctatt

SEQ ID NO: 196060 - DNA, 19 bp, Artificial sequence
  SiRNA target sequence
aaagctaaatttgctatta

SEQ ID NO: 196061 - DNA, 19 bp, Artificial sequence
  SiRNA target sequence
aagctaaatttgctattat

SEQ ID NO: 196062 - DNA, 19 bp, Artificial sequence
  SiRNA target sequence
agctaaatttgctattatg

SEQ ID NO: 196063 - DNA, 19 bp, Artificial sequence
  SiRNA target sequence
gctaaatttgctattatgt

SEQ ID NO: 196064 - DNA, 19 bp, Artificial sequence
  SiRNA target sequence
ctaaatttgctattatgta

SEQ ID NO: 196065 - DNA, 19 bp, Artificial sequence
  SiRNA target sequence
taaatttgctattatgtaa

SEQ ID NO: 196066 - DNA, 19 bp, Artificial sequence
  SiRNA target sequence
aaatttgctattatgtaaa

SEQ ID NO: 196067 - DNA, 19 bp, Artificial sequence
  SiRNA target sequence
aatttgctattatgtaaaa

SEQ ID NO: 196068 - DNA, 19 bp, Artificial sequence
  SiRNA target sequence
atttgctattatgtaaaaa

SEQ ID NO: 196069 - DNA, 19 bp, Artificial sequence
  SiRNA target sequence
tttgctattatgtaaaaag

SEQ ID NO: 196070 - DNA, 19 bp, Artificial sequence
  SiRNA target sequence
ttgctattatgtaaaaagg

SEQ ID NO: 196071 - DNA, 19 bp, Artificial sequence
  SiRNA target sequence
tgctattatgtaaaaaggt

SEQ ID NO: 196072 - DNA, 19 bp, Artificial sequence
  SiRNA target sequence
gctattatgtaaaaaggtg

SEQ ID NO: 196073 - DNA, 19 bp, Artificial sequence
  SiRNA target sequence
ctattatgtaaaaaggtgg

SEQ ID NO: 196074 - DNA, 19 bp, Artificial sequence
  SiRNA target sequence
tattatgtaaaaaggtggt

SEQ ID NO: 196075 - DNA, 19 bp, Artificial sequence
  SiRNA target sequence
attatgtaaaaaggtggta

SEQ ID NO: 196076 - DNA, 19 bp, Artificial sequence
  SiRNA target sequence
ttatgtaaaaaggtggtaa

SEQ ID NO: 196077 - DNA, 19 bp, Artificial sequence
  SiRNA target sequence
tatgtaaaaaggtggtaaa

SEQ ID NO: 196078 - DNA, 19 bp, Artificial sequence
  SiRNA target sequence
atgtaaaaaggtggtaaaa

SEQ ID NO: 196079 - DNA, 19 bp, Artificial sequence
  SiRNA target sequence
tgtaaaaaggtggtaaaaa

SEQ ID NO: 196080 - DNA, 19 bp, Artificial sequence
  SiRNA target sequence
gtaaaaaggtggtaaaaat

SEQ ID NO: 196081 - DNA, 19 bp, Artificial sequence
  SiRNA target sequence
taaaaaggtggtaaaaatc

SEQ ID NO: 196082 - DNA, 19 bp, Artificial sequence
  SiRNA target sequence
aaaaaggtggtaaaaatct

SEQ ID NO: 196083 - DNA, 19 bp, Artificial sequence
  SiRNA target sequence
aaaaggtggtaaaaatctt

SEQ ID NO: 196084 - DNA, 19 bp, Artificial sequence
  SiRNA target sequence
aaaggtggtaaaaatcttg

SEQ ID NO: 196085 - DNA, 19 bp, Artificial sequence
  SiRNA target sequence
aaggtggtaaaaatcttgt

SEQ ID NO: 196086 - DNA, 19 bp, Artificial sequence
  SiRNA target sequence
aggtggtaaaaatcttgta

SEQ ID NO: 196087 - DNA, 19 bp, Artificial sequence
  SiRNA target sequence
ggtggtaaaaatcttgtaa

SEQ ID NO: 196088 - DNA, 19 bp, Artificial sequence
  SiRNA target sequence
gtggtaaaaatcttgtaaa

SEQ ID NO: 196089 - DNA, 19 bp, Artificial sequence
  SiRNA target sequence
tggtaaaaatcttgtaaac

SEQ ID NO: 196090 - DNA, 19 bp, Artificial sequence
  SiRNA target sequence
ggtaaaaatcttgtaaact

SEQ ID NO: 196091 - DNA, 19 bp, Artificial sequence
  SiRNA target sequence
gtaaaaatcttgtaaactg

SEQ ID NO: 196092 - DNA, 19 bp, Artificial sequence
  SiRNA target sequence
taaaaatcttgtaaactgt

SEQ ID NO: 196093 - DNA, 19 bp, Artificial sequence
  SiRNA target sequence
aaaaatcttgtaaactgtc

SEQ ID NO: 196094 - DNA, 19 bp, Artificial sequence
  SiRNA target sequence
aaaatcttgtaaactgtct

SEQ ID NO: 196095 - DNA, 19 bp, Artificial sequence
  SiRNA target sequence
aaatcttgtaaactgtctg

SEQ ID NO: 196096 - DNA, 19 bp, Artificial sequence
  SiRNA target sequence
aatcttgtaaactgtctga

SEQ ID NO: 196097 - DNA, 19 bp, Artificial sequence
  SiRNA target sequence
atcttgtaaactgtctgat

SEQ ID NO: 196098 - DNA, 19 bp, Artificial sequence
  SiRNA target sequence
tcttgtaaactgtctgata

SEQ ID NO: 196099 - DNA, 19 bp, Artificial sequence
  SiRNA target sequence
cttgtaaactgtctgatag

SEQ ID NO: 196100 - DNA, 19 bp, Artificial sequence
  SiRNA target sequence
ttgtaaactgtctgatagt

SEQ ID NO: 196101 - DNA, 19 bp, Artificial sequence
  SiRNA target sequence
tgtaaactgtctgatagta

SEQ ID NO: 196102 - DNA, 19 bp, Artificial sequence
  SiRNA target sequence
gtaaactgtctgatagtac

SEQ ID NO: 196103 - DNA, 19 bp, Artificial sequence
  SiRNA target sequence
taaactgtctgatagtaca

SEQ ID NO: 196104 - DNA, 19 bp, Artificial sequence
  SiRNA target sequence
aaactgtctgatagtacaa

SEQ ID NO: 196105 - DNA, 19 bp, Artificial sequence
  SiRNA target sequence
aactgtctgatagtacaac

SEQ ID NO: 196106 - DNA, 19 bp, Artificial sequence
  SiRNA target sequence
actgtctgatagtacaact

SEQ ID NO: 196107 - DNA, 19 bp, Artificial sequence
  SiRNA target sequence
ctgtctgatagtacaactt

SEQ ID NO: 196108 - DNA, 19 bp, Artificial sequence
  SiRNA target sequence
tgtctgatagtacaacttt

SEQ ID NO: 196109 - DNA, 19 bp, Artificial sequence
  SiRNA target sequence
gtctgatagtacaactttc

SEQ ID NO: 196110 - DNA, 19 bp, Artificial sequence
  SiRNA target sequence
tctgatagtacaactttca

SEQ ID NO: 196111 - DNA, 19 bp, Artificial sequence
  SiRNA target sequence
ctgatagtacaactttcat

SEQ ID NO: 196112 - DNA, 19 bp, Artificial sequence
  SiRNA target sequence
tgatagtacaactttcatt

SEQ ID NO: 196113 - DNA, 19 bp, Artificial sequence
  SiRNA target sequence
gatagtacaactttcattt

SEQ ID NO: 196114 - DNA, 19 bp, Artificial sequence
  SiRNA target sequence
atagtacaactttcattta

SEQ ID NO: 196115 - DNA, 19 bp, Artificial sequence
  SiRNA target sequence
tagtacaactttcatttaa

SEQ ID NO: 196116 - DNA, 19 bp, Artificial sequence
  SiRNA target sequence
agtacaactttcatttaaa

SEQ ID NO: 196117 - DNA, 19 bp, Artificial sequence
  SiRNA target sequence
gtacaactttcatttaaaa

SEQ ID NO: 196118 - DNA, 19 bp, Artificial sequence
  SiRNA target sequence
tacaactttcatttaaaaa

SEQ ID NO: 196119 - DNA, 19 bp, Artificial sequence
  SiRNA target sequence
acaactttcatttaaaaaa

SEQ ID NO: 196120 - DNA, 19 bp, Artificial sequence
  SiRNA target sequence
caactttcatttaaaaaac

SEQ ID NO: 196121 - DNA, 19 bp, Artificial sequence
  SiRNA target sequence
aactttcatttaaaaaact

SEQ ID NO: 196122 - DNA, 19 bp, Artificial sequence
  SiRNA target sequence
actttcatttaaaaaactc

SEQ ID NO: 196123 - DNA, 19 bp, Artificial sequence
  SiRNA target sequence
ctttcatttaaaaaactca

SEQ ID NO: 196124 - DNA, 19 bp, Artificial sequence
  SiRNA target sequence
tttcatttaaaaaactcat

SEQ ID NO: 196125 - DNA, 19 bp, Artificial sequence
  SiRNA target sequence
ttcatttaaaaaactcatg

SEQ ID NO: 196126 - DNA, 19 bp, Artificial sequence
  SiRNA target sequence
tcatttaaaaaactcatgt

SEQ ID NO: 196127 - DNA, 19 bp, Artificial sequence
  SiRNA target sequence
catttaaaaaactcatgta

SEQ ID NO: 196128 - DNA, 19 bp, Artificial sequence
  SiRNA target sequence
atttaaaaaactcatgtat

SEQ ID NO: 196129 - DNA, 19 bp, Artificial sequence
  SiRNA target sequence
tttaaaaaactcatgtata

SEQ ID NO: 196130 - DNA, 19 bp, Artificial sequence
  SiRNA target sequence
ttaaaaaactcatgtataa

SEQ ID NO: 196131 - DNA, 19 bp, Artificial sequence
  SiRNA target sequence
taaaaaactcatgtataaa
